United States Patent Application Publication US 2007/0048756 A1 - sequence listing, part 13

SEQ ID NO: 435636 - DNA, 33 bp, Homo sapien
aagaggaacacacaaattgcatagggcatggta

SEQ ID NO: 435637 - DNA, 33 bp, Homo sapien
gagaaacacggcttcacatgtgcacggcatctc

SEQ ID NO: 435638 - DNA, 33 bp, Homo sapien
gagaaacacggcttcatatgtgcacggcatctc

SEQ ID NO: 435639 - DNA, 33 bp, Homo sapien
gacagtgctttccttcccataggtgctcccatt

SEQ ID NO: 435640 - DNA, 33 bp, Homo sapien
gacagtgctttccttctcataggtgctcccatt

SEQ ID NO: 435641 - DNA, 33 bp, Homo sapien
aggtcagctggaccagccacaatcaagacagtc

SEQ ID NO: 435642 - DNA, 33 bp, Homo sapien
aggtcagctggaccagtcacaatcaagacagtc

SEQ ID NO: 435643 - DNA, 33 bp, Homo sapien
aaggaaaaaagccctcacaggtacgtggctgtg

SEQ ID NO: 435644 - DNA, 33 bp, Homo sapien
aaggaaaaaagccctcgcaggtacgtggctgtg

SEQ ID NO: 435645 - DNA, 33 bp, Homo sapien
ttatctggacaatgaccactcccatattggaat

SEQ ID NO: 435646 - DNA, 33 bp, Homo sapien
ttatctggacaatgactactcccatattggaat

SEQ ID NO: 435647 - DNA, 33 bp, Homo sapien
cagagactccgtgaatcattatcatccatcctt

SEQ ID NO: 435648 - DNA, 33 bp, Homo sapien
cagagactccgtgaattattatcatccatcctt

SEQ ID NO: 435649 - DNA, 33 bp, Homo sapien
agaagggaaacagtaacgtggagtccacgagct

SEQ ID NO: 435650 - DNA, 33 bp, Homo sapien
agaagggaaacagtaatgtggagtccacgagct

SEQ ID NO: 435651 - DNA, 33 bp, Homo sapien
aaagctgggaatcctccagacatcgcgatatcc

SEQ ID NO: 435652 - DNA, 33 bp, Homo sapien
aaagctgggaatcctctagacatcgcgatatcc

SEQ ID NO: 435653 - DNA, 33 bp, Homo sapien
acgatacctttgtgtacgtacttgaaaccttca

SEQ ID NO: 435654 - DNA, 33 bp, Homo sapien
acgatacctttgtgtatgtacttgaaaccttca

SEQ ID NO: 435655 - DNA, 33 bp, Homo sapien
caaatctagccctaaaaagacagctgacatggg

SEQ ID NO: 435656 - DNA, 33 bp, Homo sapien
caaatctagccctaaagagacagctgacatggg

SEQ ID NO: 435657 - DNA, 33 bp, Homo sapien
gagtctctgcaagaggaatctcagacctgtgat

SEQ ID NO: 435658 - DNA, 33 bp, Homo sapien
gagtctctgcaagaggtatctcagacctgtgat

SEQ ID NO: 435659 - DNA, 33 bp, Homo sapien
attttgttaaatgaaggataaactccattcagg

SEQ ID NO: 435660 - DNA, 33 bp, Homo sapien
attttgttaaatgaagtataaactccattcagg

SEQ ID NO: 435661 - DNA, 33 bp, Homo sapien
acaggtggggtttaacagtgggcatagtagaaa

SEQ ID NO: 435662 - DNA, 33 bp, Homo sapien
acaggtggggtttaacggtgggcatagtagaaa

SEQ ID NO: 435663 - DNA, 33 bp, Homo sapien
agtttctgggatagccaaacatgcagaggttcc

SEQ ID NO: 435664 - DNA, 33 bp, Homo sapien
agtttctgggatagccgaacatgcagaggttcc

SEQ ID NO: 435665 - DNA, 33 bp, Homo sapien
gagtggggagaagttacgcaagatcccagaagt

SEQ ID NO: 435666 - DNA, 33 bp, Homo sapien
gagtggggagaagttatgcaagatcccagaagt

SEQ ID NO: 435667 - DNA, 33 bp, Homo sapien
ggaggctctctccagacgacaatgctttgagca

SEQ ID NO: 435668 - DNA, 33 bp, Homo sapien
ggaggctctctccagatgacaatgctttgagca

SEQ ID NO: 435669 - DNA, 33 bp, Homo sapien
ccttcccggttctaggccccaaaagtaagttgt

SEQ ID NO: 435670 - DNA, 33 bp, Homo sapien
ccttcccggttctaggtcccaaaagtaagttgt

SEQ ID NO: 435671 - DNA, 33 bp, Homo sapien
aagaaacattctacccaaaatgagtgcctgctc

SEQ ID NO: 435672 - DNA, 33 bp, Homo sapien
aagaaacattctacccgaaatgagtgcctgctc

SEQ ID NO: 435673 - DNA, 33 bp, Homo sapien
tgttgtaagcattaaaggagtcaaaagggtaca

SEQ ID NO: 435674 - DNA, 33 bp, Homo sapien
tgttgtaagcattaaatgagtcaaaagggtaca

SEQ ID NO: 435675 - DNA, 33 bp, Homo sapien
tggccacatcgctcccacttcagcaatatgaag

SEQ ID NO: 435676 - DNA, 33 bp, Homo sapien
tggccacatcgctcccgcttcagcaatatgaag

SEQ ID NO: 435677 - DNA, 33 bp, Homo sapien
gctttccccatcactaaacttgactggttggag

SEQ ID NO: 435678 - DNA, 33 bp, Homo sapien
gctttccccatcactagacttgactggttggag

SEQ ID NO: 435679 - DNA, 33 bp, Homo sapien
atgctctgctgctcaacggagtctcctgggctc

SEQ ID NO: 435680 - DNA, 33 bp, Homo sapien
atgctctgctgctcaatggagtctcctgggctc

SEQ ID NO: 435681 - DNA, 33 bp, Homo sapien
agtgcaaatctctaaagtcctcaatagacccag

SEQ ID NO: 435682 - DNA, 33 bp, Homo sapien
agtgcaaatctctaaattcctcaatagacccag

SEQ ID NO: 435683 - DNA, 33 bp, Homo sapien
tgtacctgggttccaacagttgtcacttggtct

SEQ ID NO: 435684 - DNA, 33 bp, Homo sapien
tgtacctgggttccaagagttgtcacttggtct

SEQ ID NO: 435685 - DNA, 33 bp, Homo sapien
ggaagactgggaaaggaaagtaaggatgtccat

SEQ ID NO: 435686 - DNA, 33 bp, Homo sapien
ggaagactgggaaagggaagtaaggatgtccat

SEQ ID NO: 435687 - DNA, 33 bp, Homo sapien
ttagaaggggtgaagcagatcaagtgctataga

SEQ ID NO: 435688 - DNA, 33 bp, Homo sapien
ttagaaggggtgaagcggatcaagtgctataga

SEQ ID NO: 435689 - DNA, 33 bp, Homo sapien
tgataatacagtgtaacaatcagtgtggcgtga

SEQ ID NO: 435690 - DNA, 33 bp, Homo sapien
tgataatacagtgtaataatcagtgtggcgtga

SEQ ID NO: 435691 - DNA, 33 bp, Homo sapien
tcaagatcactgtttccaagtgagtgatgatga

SEQ ID NO: 435692 - DNA, 33 bp, Homo sapien
tcaagatcactgtttctaagtgagtgatgatga

SEQ ID NO: 435693 - DNA, 33 bp, Homo sapien
aggccagtgctggccaataaaatataagggagc

SEQ ID NO: 435694 - DNA, 33 bp, Homo sapien
aggccagtgctggccactaaaatataagggagc

SEQ ID NO: 435695 - DNA, 33 bp, Homo sapien
aagcatcagaaatacgaaaaataaaaagcatga

SEQ ID NO: 435696 - DNA, 33 bp, Homo sapien
aagcatcagaaatacggaaaataaaaagcatga

SEQ ID NO: 435697 - DNA, 33 bp, Homo sapien
gagataagtaagaccactataccaatgtgttag

SEQ ID NO: 435698 - DNA, 33 bp, Homo sapien
gagataagtaagaccagtataccaatgtgttag

SEQ ID NO: 435699 - DNA, 33 bp, Homo sapien
ttaaaattcatagaaccgtattcctcgaaaaag

SEQ ID NO: 435700 - DNA, 33 bp, Homo sapien
ttaaaattcatagaactgtattcctcgaaaaag

SEQ ID NO: 435701 - DNA, 33 bp, Homo sapien
agaaaattgcaaaatcaaaattaattaaacttc

SEQ ID NO: 435702 - DNA, 33 bp, Homo sapien
agaaaattgcaaaatcgaaattaattaaacttc

SEQ ID NO: 435703 - DNA, 33 bp, Homo sapien
ttattcattcattgaaaaaatatgcactaaata

SEQ ID NO: 435704 - DNA, 33 bp, Homo sapien
ttattcattcattgaacaaatatgcactaaata

SEQ ID NO: 435705 - DNA, 33 bp, Homo sapien
gttcttctctttcaaaatatttccacatccatt

SEQ ID NO: 435706 - DNA, 33 bp, Homo sapien
gttcttctctttcaaagtatttccacatccatt

SEQ ID NO: 435707 - DNA, 33 bp, Homo sapien
tcgatacaaatgtgaaaggattagctgccactt

SEQ ID NO: 435708 - DNA, 33 bp, Homo sapien
tcgatacaaatgtgaatggattagctgccactt

SEQ ID NO: 435709 - DNA, 33 bp, Homo sapien
aggtccatggctgacaactcatacaaaattgca

SEQ ID NO: 435710 - DNA, 33 bp, Homo sapien
aggtccatggctgacacctcatacaaaattgca

SEQ ID NO: 435711 - DNA, 33 bp, Homo sapien
agtgttgctgtcctaaaggtgatgttaccaacc

SEQ ID NO: 435712 - DNA, 33 bp, Homo sapien
agtgttgctgtcctaacggtgatgttaccaacc

SEQ ID NO: 435713 - DNA, 33 bp, Homo sapien
tgaagttttagttctcaatcctaacatttggtt

SEQ ID NO: 435714 - DNA, 33 bp, Homo sapien
tgaagttttagttctctatcctaacatttggtt

SEQ ID NO: 435715 - DNA, 33 bp, Homo sapien
attgttgaagacagaaattcccagagaagatgc

SEQ ID NO: 435716 - DNA, 33 bp, Homo sapien
attgttgaagacagaagttcccagagaagatgc

SEQ ID NO: 435717 - DNA, 33 bp, Homo sapien
gtgtctgcctcttaaaaccacttctcaggcagc

SEQ ID NO: 435718 - DNA, 33 bp, Homo sapien
gtgtctgcctcttaaagccacttctcaggcagc

SEQ ID NO: 435719 - DNA, 33 bp, Homo sapien
aaactccgcatgcagaagttaagcaaccgattc

SEQ ID NO: 435720 - DNA, 33 bp, Homo sapien
aaactccgcatgcagaggttaagcaaccgattc

SEQ ID NO: 435721 - DNA, 33 bp, Homo sapien
caataaataatcagccagcttagacttttaaat

SEQ ID NO: 435722 - DNA, 33 bp, Homo sapien
caataaataatcagccggcttagacttttaaat

SEQ ID NO: 435723 - DNA, 33 bp, Homo sapien
atgtttgcaagctgacccttcaataagaccgtg

SEQ ID NO: 435724 - DNA, 33 bp, Homo sapien
atgtttgcaagctgactcttcaataagaccgtg

SEQ ID NO: 435725 - DNA, 33 bp, Homo sapien
ctagaaatatagagaaaaacatcaggactcctt

SEQ ID NO: 435726 - DNA, 33 bp, Homo sapien
ctagaaatatagagaacaacatcaggactcctt

SEQ ID NO: 435727 - DNA, 33 bp, Homo sapien
agcaagtattccaggcactagggcacctagggg

SEQ ID NO: 435728 - DNA, 33 bp, Homo sapien
agcaagtattccaggcgctagggcacctagggg

SEQ ID NO: 435729 - DNA, 33 bp, Homo sapien
tttctagctggaaaaccggactcaagaaaggga

SEQ ID NO: 435730 - DNA, 33 bp, Homo sapien
tttctagctggaaaactggactcaagaaaggga

SEQ ID NO: 435731 - DNA, 33 bp, Homo sapien
tcatgataaagttaaaacatcatcccataagaa

SEQ ID NO: 435732 - DNA, 33 bp, Homo sapien
tcatgataaagttaaagcatcatcccataagaa

SEQ ID NO: 435733 - DNA, 33 bp, Homo sapien
tattttagaagaatacacatcattggaaacagg

SEQ ID NO: 435734 - DNA, 33 bp, Homo sapien
tattttagaagaatacgcatcattggaaacagg

SEQ ID NO: 435735 - DNA, 33 bp, Homo sapien
tagtaataatgatacccatattaaacggcgctt

SEQ ID NO: 435736 - DNA, 33 bp, Homo sapien
tagtaataatgataccgatattaaacggcgctt

SEQ ID NO: 435737 - DNA, 33 bp, Homo sapien
caatccaggaatccacaaatagtcctttctcct

SEQ ID NO: 435738 - DNA, 33 bp, Homo sapien
caatccaggaatccacgaatagtcctttctcct

SEQ ID NO: 435739 - DNA, 33 bp, Homo sapien
gttggttcctcaccaaaagggagtcagccttcc

SEQ ID NO: 435740 - DNA, 33 bp, Homo sapien
gttggttcctcaccaagagggagtcagccttcc

SEQ ID NO: 435741 - DNA, 33 bp, Homo sapien
gggtgttgcttaatctgaactcatttcaacctc

SEQ ID NO: 435742 - DNA, 33 bp, Homo sapien
gggtgttgcttaatcttaactcatttcaacctc

SEQ ID NO: 435743 - DNA, 33 bp, Homo sapien
cataggcactttcttaccaatgctttgattcaa

SEQ ID NO: 435744 - DNA, 33 bp, Homo sapien
cataggcactttcttagcaatgctttgattcaa

SEQ ID NO: 435745 - DNA, 33 bp, Homo sapien
gggacacagtgggactcacagaaggagggcagt

SEQ ID NO: 435746 - DNA, 33 bp, Homo sapien
gggacacagtgggacttacagaaggagggcagt

SEQ ID NO: 435747 - DNA, 33 bp, Homo sapien
ccaatttgggtaattgcattttccctatgcaaa

SEQ ID NO: 435748 - DNA, 33 bp, Homo sapien
ccaatttgggtaattgtattttccctatgcaaa

SEQ ID NO: 435749 - DNA, 33 bp, Homo sapien
tatatttccttgccacaccttgaagttgccctg

SEQ ID NO: 435750 - DNA, 33 bp, Homo sapien
tatatttccttgccacgccttgaagttgccctg

SEQ ID NO: 435751 - DNA, 33 bp, Homo sapien; identical to SEQ ID NO: 435749

SEQ ID NO: 435752 - DNA, 33 bp, Homo sapien; identical to SEQ ID NO: 435750

SEQ ID NO: 435753 - DNA, 33 bp, Homo sapien
tctgtctcccttctccaactttaagcaccttgt

SEQ ID NO: 435754 - DNA, 33 bp, Homo sapien
tctgtctcccttctccgactttaagcaccttgt

SEQ ID NO: 435755 - DNA, 33 bp, Homo sapien
atgccatagtgattaacgaataagtaatgtagg

SEQ ID NO: 435756 - DNA, 33 bp, Homo sapien
atgccatagtgattaatgaataagtaatgtagg

SEQ ID NO: 435757 - DNA, 33 bp, Homo sapien
gaagggtttgctttgacgtttcaatgatatatg

SEQ ID NO: 435758 - DNA, 33 bp, Homo sapien
gaagggtttgctttgatgtttcaatgatatatg

SEQ ID NO: 435759 - DNA, 33 bp, Homo sapien
aatggtggtgcttaaacgggacttctctgtgtc

SEQ ID NO: 435760 - DNA, 33 bp, Homo sapien
aatggtggtgcttaaatgggacttctctgtgtc

SEQ ID NO: 435761 - DNA, 33 bp, Homo sapien
acacatccagctccaaaaccccattttagagtc

SEQ ID NO: 435762 - DNA, 33 bp, Homo sapien
acacatccagctccaagaccccattttagagtc

SEQ ID NO: 435763 - DNA, 33 bp, Homo sapien
tctgtcaagtgagggaagatagactcaaaaggc

SEQ ID NO: 435764 - DNA, 33 bp, Homo sapien
tctgtcaagtgagggaggatagactcaaaaggc

SEQ ID NO: 435765 - DNA, 33 bp, Homo sapien
ctttccctactacaaacatcaagcaggcccagt

SEQ ID NO: 435766 - DNA, 33 bp, Homo sapien
ctttccctactacaaatatcaagcaggcccagt

SEQ ID NO: 435767 - DNA, 33 bp, Homo sapien
atcatgtacacgcgacactccagtggacatggg

SEQ ID NO: 435768 - DNA, 33 bp, Homo sapien
atcatgtacacgcgacgctccagtggacatggg

SEQ ID NO: 435769 - DNA, 33 bp, Homo sapien
gagtgaccatgtattaaccagggaagcccaggc

SEQ ID NO: 435770 - DNA, 33 bp, Homo sapien
gagtgaccatgtattagccagggaagcccaggc

SEQ ID NO: 435771 - DNA, 33 bp, Homo sapien
ctgctgcttgggaccacagaatacagcaggact

SEQ ID NO: 435772 - DNA, 33 bp, Homo sapien
ctgctgcttgggaccagagaatacagcaggact

SEQ ID NO: 435773 - DNA, 33 bp, Homo sapien
tttgcttgagaggaaaagagaccatgagatcaa

SEQ ID NO: 435774 - DNA, 33 bp, Homo sapien
tttgcttgagaggaaaggagaccatgagatcaa

SEQ ID NO: 435775 - DNA, 33 bp, Homo sapien
ggtagggtaattgggaactgttcaagatgggat

SEQ ID NO: 435776 - DNA, 33 bp, Homo sapien
ggtagggtaattgggagctgttcaagatgggat

SEQ ID NO: 435777 - DNA, 33 bp, Homo sapien
tctgagtgaagtaagcaacttattttcaggatt

SEQ ID NO: 435778 - DNA, 33 bp, Homo sapien
tctgagtgaagtaagccacttattttcaggatt

SEQ ID NO: 435779 - DNA, 33 bp, Homo sapien
ttctagatctaattgccagttcttggtccttat

SEQ ID NO: 435780 - DNA, 33 bp, Homo sapien
ttctagatctaattgcgagttcttggtccttat

SEQ ID NO: 435781 - DNA, 33 bp, Homo sapien
tctcatatctcagagcaattacaccctttaacc

SEQ ID NO: 435782 - DNA, 33 bp, Homo sapien
tctcatatctcagagcgattacaccctttaacc

SEQ ID NO: 435783 - DNA, 33 bp, Homo sapien
agtgtgaatctcattccatgaactgtgagggga

SEQ ID NO: 435784 - DNA, 33 bp, Homo sapien
agtgtgaatctcattcgatgaactgtgagggga

SEQ ID NO: 435785 - DNA, 33 bp, Homo sapien
agttcactctgtttccagcattgtgagataaaa

SEQ ID NO: 435786 - DNA, 33 bp, Homo sapien
agttcactctgtttcctgcattgtgagataaaa

SEQ ID NO: 435787 - DNA, 33 bp, Homo sapien
aggatttcagaatgccaaatgattattgatatc

SEQ ID NO: 435788 - DNA, 33 bp, Homo sapien
aggatttcagaatgccgaatgattattgatatc

SEQ ID NO: 435789 - DNA, 33 bp, Homo sapien
aaggagctttgaataccctcaaagatggaatac

SEQ ID NO: 435790 - DNA, 33 bp, Homo sapien
aaggagctttgaatactctcaaagatggaatac

SEQ ID NO: 435791 - DNA, 33 bp, Homo sapien
gacaaaaggcagccacaaatgaaagttgaagtc

SEQ ID NO: 435792 - DNA, 33 bp, Homo sapien
gacaaaaggcagccacgaatgaaagttgaagtc

SEQ ID NO: 435793 - DNA, 33 bp, Homo sapien
cttcctttgccttaaacatctggtttggtgcct

SEQ ID NO: 435794 - DNA, 33 bp, Homo sapien
cttcctttgccttaaagatctggtttggtgcct

SEQ ID NO: 435795 - DNA, 33 bp, Homo sapien
tgagagctattggtgacacctgagtatggatgt

SEQ ID NO: 435796 - DNA, 33 bp, Homo sapien
tgagagctattggtgatacctgagtatggatgt

SEQ ID NO: 435797 - DNA, 33 bp, Homo sapien
aatggacaatgaaccaagagcagataaattgtg

SEQ ID NO: 435798 - DNA, 33 bp, Homo sapien
aatggacaatgaaccacgagcagataaattgtg

SEQ ID NO: 435799 - DNA, 33 bp, Homo sapien
accacctctctacatccgacctttctgactttg

SEQ ID NO: 435800 - DNA, 33 bp, Homo sapien
accacctctctacatctgacctttctgactttg

SEQ ID NO: 435801 - DNA, 33 bp, Homo sapien
tcaatcagaaagaaaagaaaatagctccgtgtc

SEQ ID NO: 435802 - DNA, 33 bp, Homo sapien
tcaatcagaaagaaaataaaatagctccgtgtc

SEQ ID NO: 435803 - DNA, 33 bp, Homo sapien
ttccacctcgacaatccccgacagagagcagga

SEQ ID NO: 435804 - DNA, 33 bp, Homo sapien
ttccacctcgacaatctccgacagagagcagga

SEQ ID NO: 435805 - DNA, 33 bp, Homo sapien
tccccttcctcagtaacgccagagatcctgtct

SEQ ID NO: 435806 - DNA, 33 bp, Homo sapien
tccccttcctcagtaatgccagagatcctgtct

SEQ ID NO: 435807 - DNA, 33 bp, Homo sapien
gtgaaggtaaagaggcccaatcaacctcaacca

SEQ ID NO: 435808 - DNA, 33 bp, Homo sapien
gtgaaggtaaagaggctcaatcaacctcaacca

SEQ ID NO: 435809 - DNA, 33 bp, Homo sapien
ggtgagaactgagtgggccaacttgtgagacct

SEQ ID NO: 435810 - DNA, 33 bp, Homo sapien
ggtgagaactgagtggtccaacttgtgagacct

SEQ ID NO: 435811 - DNA, 33 bp, Homo sapien
caactgcaaacactgcaatagcagaacaaccct

SEQ ID NO: 435812 - DNA, 33 bp, Homo sapien
caactgcaaacactgcgatagcagaacaaccct

SEQ ID NO: 435813 - DNA, 33 bp, Homo sapien
acatcagctctcctcaaacatttggccattctt

SEQ ID NO: 435814 - DNA, 33 bp, Homo sapien
acatcagctctcctcacacatttggccattctt

SEQ ID NO: 435815 - DNA, 33 bp, Homo sapien
gtctctactgagtcccaccccaggctgctttgg

SEQ ID NO: 435816 - DNA, 33 bp, Homo sapien
gtctctactgagtcccgccccaggctgctttgg

SEQ ID NO: 435817 - DNA, 33 bp, Homo sapien
tggcagggcttagatgaatagagctgggaaaag

SEQ ID NO: 435818 - DNA, 33 bp, Homo sapien
tggcagggcttagatggatagagctgggaaaag

SEQ ID NO: 435819 - DNA, 33 bp, Homo sapien
atgagaagctagtaccaacaatactttaaaaat

SEQ ID NO: 435820 - DNA, 33 bp, Homo sapien
atgagaagctagtacccacaatactttaaaaat

SEQ ID NO: 435821 - DNA, 33 bp, Homo sapien
tagtatcctggtcagaaatagaattgttgggaa

SEQ ID NO: 435822 - DNA, 33 bp, Homo sapien
tagtatcctggtcagagatagaattgttgggaa

SEQ ID NO: 435823 - DNA, 33 bp, Homo sapien
aatatgcaatagaagccacggaaggtttgacca

SEQ ID NO: 435824 - DNA, 33 bp, Homo sapien
aatatgcaatagaagctacggaaggtttgacca

SEQ ID NO: 435825 - DNA, 33 bp, Homo sapien
tgagagtcctgctttccagttccttccaccctc

SEQ ID NO: 435826 - DNA, 33 bp, Homo sapien
tgagagtcctgctttctagttccttccaccctc

SEQ ID NO: 435827 - DNA, 33 bp, Homo sapien
agaatgcctcggcacagccgctcactatggtca

SEQ ID NO: 435828 - DNA, 33 bp, Homo sapien
agaatgcctcggcacatccgctcactatggtca

SEQ ID NO: 435829 - DNA, 33 bp, Homo sapien
atgaatgctgttgataggaacattaatgtacag

SEQ ID NO: 435830 - DNA, 33 bp, Homo sapien
atgaatgctgttgatatgaacattaatgtacag

SEQ ID NO: 435831 - DNA, 33 bp, Homo sapien
taactgattcagtcaaagatcacaaggatcacc

SEQ ID NO: 435832 - DNA, 33 bp, Homo sapien
taactgattcagtcaaggatcacaaggatcacc

SEQ ID NO: 435833 - DNA, 33 bp, Homo sapien
ttctgacctattgccaacttcattacacacaac

SEQ ID NO: 435834 - DNA, 33 bp, Homo sapien
ttctgacctattgccagcttcattacacacaac

SEQ ID NO: 435835 - DNA, 33 bp, Homo sapien
tggtctaataactctgcagtgcctttccacact

SEQ ID NO: 435836 - DNA, 33 bp, Homo sapien
tggtctaataactctgtagtgcctttccacact

SEQ ID NO: 435837 - DNA, 33 bp, Homo sapien
ttaaaaaaccctttaaatctctttgtgtatctt

SEQ ID NO: 435838 - DNA, 33 bp, Homo sapien
ttaaaaaaccctttaagtctctttgtgtatctt

SEQ ID NO: 435839 - DNA, 33 bp, Homo sapien
ccaactttgttctaaactggagccctgcatcag

SEQ ID NO: 435840 - DNA, 33 bp, Homo sapien
ccaactttgttctaaattggagccctgcatcag

SEQ ID NO: 435841 - DNA, 33 bp, Homo sapien
tagtaggaatgttaaacggttcaacactttgga

SEQ ID NO: 435842 - DNA, 33 bp, Homo sapien
tagtaggaatgttaaatggttcaacactttgga

SEQ ID NO: 435843 - DNA, 33 bp, Homo sapien
taagtcgttagtgtggaaattactgttattcag

SEQ ID NO: 435844 - DNA, 33 bp, Homo sapien
taagtcgttagtgtgggaattactgttattcag

SEQ ID NO: 435845 - DNA, 33 bp, Homo sapien
gtcagtctttaaattacaggtagtctgatgatt

SEQ ID NO: 435846 - DNA, 33 bp, Homo sapien
gtcagtctttaaattataggtagtctgatgatt

SEQ ID NO: 435847 - DNA, 33 bp, Homo sapien
aaactcatgaaagaggaaatcttaaagcagctg

SEQ ID NO: 435848 - DNA, 33 bp, Homo sapien
aaactcatgaaagagggaatcttaaagcagctg

SEQ ID NO: 435849 - DNA, 33 bp, Homo sapien
gacaaatgaggtaatgaaaacacaaagtaacac

SEQ ID NO: 435850 - DNA, 33 bp, Homo sapien
gacaaatgaggtaatggaaacacaaagtaacac

SEQ ID NO: 435851 - DNA, 33 bp, Homo sapien
tgcataaagttactaactactctgatgtttaaa

SEQ ID NO: 435852 - DNA, 33 bp, Homo sapien
tgcataaagttactaattactctgatgtttaaa

SEQ ID NO: 435853 - DNA, 33 bp, Homo sapien
cataactaataggaggcaaaatctacagttaca

SEQ ID NO: 435854 - DNA, 33 bp, Homo sapien
cataactaataggagggaaaatctacagttaca

SEQ ID NO: 435855 - DNA, 33 bp, Homo sapien
attctctcaaatgagcaagaaaaaaggtatctg

SEQ ID NO: 435856 - DNA, 33 bp, Homo sapien
attctctcaaatgagcgagaaaaaaggtatctg

SEQ ID NO: 435857 - DNA, 33 bp, Homo sapien
tgtaatccctaccaaaattccagcagagttaag

SEQ ID NO: 435858 - DNA, 33 bp, Homo sapien
tgtaatccctaccaaacttccagcagagttaag

SEQ ID NO: 435859 - DNA, 33 bp, Homo sapien
atgtgtgattacctctcaagatagaaaacattc

SEQ ID NO: 435860 - DNA, 33 bp, Homo sapien
atgtgtgattacctcttaagatagaaaacattc

SEQ ID NO: 435861 - DNA, 33 bp, Homo sapien
cagttccctaattctacgcaaacctcactttcc

SEQ ID NO: 435862 - DNA, 33 bp, Homo sapien
cagttccctaattctatgcaaacctcactttcc

SEQ ID NO: 435863 - DNA, 33 bp, Homo sapien
atgatatcaagtactccgactatgcaaatgagt

SEQ ID NO: 435864 - DNA, 33 bp, Homo sapien
atgatatcaagtactctgactatgcaaatgagt

SEQ ID NO: 435865 - DNA, 33 bp, Homo sapien
agattttttatggagaaaatatgcaacttatca

SEQ ID NO: 435866 - DNA, 33 bp, Homo sapien
agattttttatggagacaatatgcaacttatca

SEQ ID NO: 435867 - DNA, 33 bp, Homo sapien
ctctggctagccgtcagatttggaaagcattca

SEQ ID NO: 435868 - DNA, 33 bp, Homo sapien
ctctggctagccgtcatatttggaaagcattca

SEQ ID NO: 435869 - DNA, 33 bp, Homo sapien
attggaatcatgaccccaaatataactggaact

SEQ ID NO: 435870 - DNA, 33 bp, Homo sapien
attggaatcatgacccgaaatataactggaact

SEQ ID NO: 435871 - DNA, 33 bp, Homo sapien
acacttgagtctctagaaacaattggaatcatg

SEQ ID NO: 435872 - DNA, 33 bp, Homo sapien
acacttgagtctctaggaacaattggaatcatg

SEQ ID NO: 435873 - DNA, 33 bp, Homo sapien
aagatctttattttgtgaagcctctgtagtagg

SEQ ID NO: 435874 - DNA, 33 bp, Homo sapien
aagatctttattttgttaagcctctgtagtagg

SEQ ID NO: 435875 - DNA, 33 bp, Homo sapien
ggtaaaggagatttaccgagctggagagaggag

SEQ ID NO: 435876 - DNA, 33 bp, Homo sapien
ggtaaaggagatttacggagctggagagaggag

SEQ ID NO: 435877 - DNA, 33 bp, Homo sapien
agaggaccaccgtgagaagatccctctaagaat

SEQ ID NO: 435878 - DNA, 33 bp, Homo sapien
agaggaccaccgtgagcagatccctctaagaat

SEQ ID NO: 435879 - DNA, 33 bp, Homo sapien
gactggaagtagataacggggttgtgaagagtc

SEQ ID NO: 435880 - DNA, 33 bp, Homo sapien
gactggaagtagataatggggttgtgaagagtc

SEQ ID NO: 435881 - DNA, 33 bp, Homo sapien
gcgagaggagctacaaaaagctctcatttcctt

SEQ ID NO: 435882 - DNA, 33 bp, Homo sapien
gcgagaggagctacaagaagctctcatttcctt

SEQ ID NO: 435883 - DNA, 33 bp, Homo sapien
caggcctgagctgcacaaaggagtgtagaatgg

SEQ ID NO: 435884 - DNA, 33 bp, Homo sapien
caggcctgagctgcacgaaggagtgtagaatgg

SEQ ID NO: 435885 - DNA, 33 bp, Homo sapien
gccctgaaaggagtcaccaaatgtgaacgtgat

SEQ ID NO: 435886 - DNA, 33 bp, Homo sapien
gccctgaaaggagtcatcaaatgtgaacgtgat

SEQ ID NO: 435887 - DNA, 33 bp, Homo sapien
gcccccaatttgccaaccagctggccccctctg

SEQ ID NO: 435888 - DNA, 33 bp, Homo sapien
gcccccaatttgccaatcagctggccccctctg

SEQ ID NO: 435889 - DNA, 33 bp, Homo sapien
gtctcaaacttaaggacgcattcgaaccataat

SEQ ID NO: 435890 - DNA, 33 bp, Homo sapien
gtctcaaacttaaggatgcattcgaaccataat

SEQ ID NO: 435891 - DNA, 33 bp, Homo sapien
tgtgactgtgaaaatgcaagtgtcgggtgcctg

SEQ ID NO: 435892 - DNA, 33 bp, Homo sapien
tgtgactgtgaaaatggaagtgtcgggtgcctg

SEQ ID NO: 435893 - DNA, 33 bp, Homo sapien
ctgaagttttttccagaactggcttatcatgag

SEQ ID NO: 435894 - DNA, 33 bp, Homo sapien
ctgaagttttttccagcactggcttatcatgag

SEQ ID NO: 435895 - DNA, 33 bp, Homo sapien
gaatgagactggatatcaaatcagggactatgc

SEQ ID NO: 435896 - DNA, 33 bp, Homo sapien
gaatgagactggatatgaaatcagggactatgc

SEQ ID NO: 435897 - DNA, 33 bp, Homo sapien
tgtgaagagtagaaagaattttgttgggcagag

SEQ ID NO: 435898 - DNA, 33 bp, Homo sapien
tgtgaagagtagaaagcattttgttgggcagag

SEQ ID NO: 435899 - DNA, 33 bp, Homo sapien
atttgacagatgaggaaactaaagtgaaggtga

SEQ ID NO: 435900 - DNA, 33 bp, Homo sapien
atttgacagatgaggagactaaagtgaaggtga

SEQ ID NO: 435901 - DNA, 33 bp, Homo sapien
ttgaccctgcagttgcaccctagcaaactgaaa

SEQ ID NO: 435902 - DNA, 33 bp, Homo sapien
ttgaccctgcagttgccccctagcaaactgaaa

SEQ ID NO: 435903 - DNA, 33 bp, Homo sapien
tcagaggcagtttagacaccagctttaaaaaga

SEQ ID NO: 435904 - DNA, 33 bp, Homo sapien
tcagaggcagtttagagaccagctttaaaaaga

SEQ ID NO: 435905 - DNA, 33 bp, Homo sapien
tggtctctgcacactcacctctcactcagcact

SEQ ID NO: 435906 - DNA, 33 bp, Homo sapien
tggtctctgcacactcgcctctcactcagcact

SEQ ID NO: 435907 - DNA, 33 bp, Homo sapien
aagtgcagaaaaaggcacttctcttcaagctct

SEQ ID NO: 435908 - DNA, 33 bp, Homo sapien
aagtgcagaaaaaggcccttctcttcaagctct

SEQ ID NO: 435909 - DNA, 33 bp, Homo sapien
tcccctggactgtgagaagacagaggacaggct

SEQ ID NO: 435910 - DNA, 33 bp, Homo sapien
tcccctggactgtgagcagacagaggacaggct

SEQ ID NO: 435911 - DNA, 33 bp, Homo sapien
tctttactcaaaattacaaatgaccagacgttt

SEQ ID NO: 435912 - DNA, 33 bp, Homo sapien
tctttactcaaaattataaatgaccagacgttt

SEQ ID NO: 435913 - DNA, 33 bp, Homo sapien
ctacatcataccccacaaagtggaatggcagaa

SEQ ID NO: 435914 - DNA, 33 bp, Homo sapien
ctacatcataccccacgaagtggaatggcagaa

SEQ ID NO: 435915 - DNA, 33 bp, Homo sapien
gttcatccagatcaacgcagctgaactcaaggg

SEQ ID NO: 435916 - DNA, 33 bp, Homo sapien
gttcatccagatcaactcagctgaactcaaggg

SEQ ID NO: 435917 - DNA, 33 bp, Homo sapien
cagtcctctgcttctccctttgttggtgctgat

SEQ ID NO: 435918 - DNA, 33 bp, Homo sapien
cagtcctctgcttctctctttgttggtgctgat

SEQ ID NO: 435919 - DNA, 33 bp, Homo sapien
tcatgctgagcattcaaggtctcagcctctgtc

SEQ ID NO: 435920 - DNA, 33 bp, Homo sapien
tcatgctgagcattcatggtctcagcctctgtc

SEQ ID NO: 435921 - DNA, 33 bp, Homo sapien
ttgccactttgtaaacaggtaaatgaagccaat

SEQ ID NO: 435922 - DNA, 33 bp, Homo sapien
ttgccactttgtaaaccggtaaatgaagccaat

SEQ ID NO: 435923 - DNA, 33 bp, Homo sapien
agtgagtgcctataaaatgctttattaattgca

SEQ ID NO: 435924 - DNA, 33 bp, Homo sapien
agtgagtgcctataaagtgctttattaattgca

SEQ ID NO: 435925 - DNA, 33 bp, Homo sapien
ataaaaaggagcatacaatgattggcaaaatct

SEQ ID NO: 435926 - DNA, 33 bp, Homo sapien
ataaaaaggagcataccatgattggcaaaatct

SEQ ID NO: 435927 - DNA, 33 bp, Homo sapien
gaaacatactgatccccgcctctgtggttctgc

SEQ ID NO: 435928 - DNA, 33 bp, Homo sapien
gaaacatactgatccctgcctctgtggttctgc

SEQ ID NO: 435929 - DNA, 33 bp, Homo sapien
gtgaacaatattatcaggaaggtgttgcaacaa

SEQ ID NO: 435930 - DNA, 33 bp, Homo sapien
gtgaacaatattatcatgaaggtgttgcaacaa

SEQ ID NO: 435931 - DNA, 33 bp, Homo sapien
taggaagtttacaaacaaatgagaaaaatgagt

SEQ ID NO: 435932 - DNA, 33 bp, Homo sapien
taggaagtttacaaacgaatgagaaaaatgagt

SEQ ID NO: 435933 - DNA, 33 bp, Homo sapien
taatgatgggactcagacataaggaaaaagcaa

SEQ ID NO: 435934 - DNA, 33 bp, Homo sapien
taatgatgggactcaggcataaggaaaaagcaa

SEQ ID NO: 435935 - DNA, 33 bp, Homo sapien
atatttcagctccacaatgaaatcattttatcc

SEQ ID NO: 435936 - DNA, 33 bp, Homo sapien
atatttcagctccacagtgaaatcattttatcc

SEQ ID NO: 435937 - DNA, 33 bp, Homo sapien
ctaataatacggcacacgatctatgtcggcttt

SEQ ID NO: 435938 - DNA, 33 bp, Homo sapien
ctaataatacggcacatgatctatgtcggcttt

SEQ ID NO: 435939 - DNA, 33 bp, Homo sapien
tggaacaaaagggaaaatgacagaagagagcaa

SEQ ID NO: 435940 - DNA, 33 bp, Homo sapien
tggaacaaaagggaaagtgacagaagagagcaa

SEQ ID NO: 435941 - DNA, 33 bp, Homo sapien
ttgcttcagcactctaccaaaggccaacctccc

SEQ ID NO: 435942 - DNA, 33 bp, Homo sapien
ttgcttcagcactctagcaaaggccaacctccc

SEQ ID NO: 435943 - DNA, 33 bp, Homo sapien
acagagaggctatatacgtttgggtatgttaat

SEQ ID NO: 435944 - DNA, 33 bp, Homo sapien
acagagaggctatatatgtttgggtatgttaat

SEQ ID NO: 435945 - DNA, 33 bp, Homo sapien
cagatggtccttgtctcactggccttgcagtgg

SEQ ID NO: 435946 - DNA, 33 bp, Homo sapien
cagatggtccttgtcttactggccttgcagtgg

SEQ ID NO: 435947 - DNA, 33 bp, Homo sapien
gatgaatgaattagtgaaggcatgatttgtagt

SEQ ID NO: 435948 - DNA, 33 bp, Homo sapien
gatgaatgaattagtgtaggcatgatttgtagt

SEQ ID NO: 435949 - DNA, 33 bp, Homo sapien
gcaggcacctttatccaactgttgctgctctta

SEQ ID NO: 435950 - DNA, 33 bp, Homo sapien
gcaggcacctttatccgactgttgctgctctta

SEQ ID NO: 435951 - DNA, 33 bp, Homo sapien
catcatgggcacagtgcattttccaggctcctt

SEQ ID NO: 435952 - DNA, 33 bp, Homo sapien
catcatgggcacagtggattttccaggctcctt

SEQ ID NO: 435953 - DNA, 33 bp, Homo sapien
tttggggatttcaaagccgaataagaagtagct

SEQ ID NO: 435954 - DNA, 33 bp, Homo sapien
tttggggatttcaaagtcgaataagaagtagct

SEQ ID NO: 435955 - DNA, 33 bp, Homo sapien
aacagggcttgctccaacttccaaattggctcc

SEQ ID NO: 435956 - DNA, 33 bp, Homo sapien
aacagggcttgctccagcttccaaattggctcc

SEQ ID NO: 435957 - DNA, 33 bp, Homo sapien
gttaacagcaggtaaaactgagatataagaata

SEQ ID NO: 435958 - DNA, 33 bp, Homo sapien
gttaacagcaggtaaatctgagatataagaata

SEQ ID NO: 435959 - DNA, 33 bp, Homo sapien
tgtgtcatcactgtaaagtgttgcaatgtgagt

SEQ ID NO: 435960 - DNA, 33 bp, Homo sapien
tgtgtcatcactgtaatgtgttgcaatgtgagt

SEQ ID NO: 435961 - DNA, 33 bp, Homo sapien
cttgagtattccttaacgatctaatgagagcaa

SEQ ID NO: 435962 - DNA, 33 bp, Homo sapien
cttgagtattccttaatgatctaatgagagcaa

SEQ ID NO: 435963 - DNA, 33 bp, Homo sapien
gctcccaggaggccataatgcttggtggttcag

SEQ ID NO: 435964 - DNA, 33 bp, Homo sapien
gctcccaggaggccatgatgcttggtggttcag

SEQ ID NO: 435965 - DNA, 33 bp, Homo sapien
gtttgctttatctccaatactaaaatcaaccac

SEQ ID NO: 435966 - DNA, 33 bp, Homo sapien
gtttgctttatctccactactaaaatcaaccac

SEQ ID NO: 435967 - DNA, 33 bp, Homo sapien
cctgatcctctctgcacatgtcatctgctccag

SEQ ID NO: 435968 - DNA, 33 bp, Homo sapien
cctgatcctctctgcatatgtcatctgctccag

SEQ ID NO: 435969 - DNA, 33 bp, Homo sapien
ccacctggcccccacaaccaatgtgtttcaggg

SEQ ID NO: 435970 - DNA, 33 bp, Homo sapien
ccacctggcccccacagccaatgtgtttcaggg

SEQ ID NO: 435971 - DNA, 33 bp, Homo sapien
aggatgatcttcaggaacagtttgatctggtcc

SEQ ID NO: 435972 - DNA, 33 bp, Homo sapien
aggatgatcttcaggagcagtttgatctggtcc

SEQ ID NO: 435973 - DNA, 33 bp, Homo sapien
gcagctctttctaatccgaggcgcgcatccctc

SEQ ID NO: 435974 - DNA, 33 bp, Homo sapien
gcagctctttctaatctgaggcgcgcatccctc

SEQ ID NO: 435975 - DNA, 33 bp, Homo sapien
ccctttgtggctgcaccaagctcccttccaccc

SEQ ID NO: 435976 - DNA, 33 bp, Homo sapien
ccctttgtggctgcacgaagctcccttccaccc

SEQ ID NO: 435977 - DNA, 33 bp, Homo sapien
aggtggcaccactggactcatgtggccagggac

SEQ ID NO: 435978 - DNA, 33 bp, Homo sapien
aggtggcaccactggattcatgtggccagggac

SEQ ID NO: 435979 - DNA, 33 bp, Homo sapien
agcacctgtcccgccactctttaaatgattcct

SEQ ID NO: 435980 - DNA, 33 bp, Homo sapien
agcacctgtcccgccattctttaaatgattcct

SEQ ID NO: 435981 - DNA, 33 bp, Homo sapien
cctaaagacaagaccacgcctcttgaggaccaa

SEQ ID NO: 435982 - DNA, 33 bp, Homo sapien
cctaaagacaagaccatgcctcttgaggaccaa

SEQ ID NO: 435983 - DNA, 33 bp, Homo sapien
gcctacctgagatcacaaacatatattctccag

SEQ ID NO: 435984 - DNA, 33 bp, Homo sapien
gcctacctgagatcacgaacatatattctccag

SEQ ID NO: 435985 - DNA, 33 bp, Homo sapien
gctacggcagcctgagcaaacgaaaacaccatt

SEQ ID NO: 435986 - DNA, 33 bp, Homo sapien
gctacggcagcctgaggaaacgaaaacaccatt

SEQ ID NO: 435987 - DNA, 33 bp, Homo sapien
gctgcctaggcagtaacagcctacacttggaag

SEQ ID NO: 435988 - DNA, 33 bp, Homo sapien
gctgcctaggcagtaagagcctacacttggaag

SEQ ID NO: 435989 - DNA, 33 bp, Homo sapien; identical to SEQ ID NO: 435987

SEQ ID NO: 435990 - DNA, 33 bp, Homo sapien; identical to SEQ ID NO: 435988

SEQ ID NO: 435991 - DNA, 33 bp, Homo sapien
ccaggcctgagggtcaaatggaacgatagatgg

SEQ ID NO: 435992 - DNA, 33 bp, Homo sapien
ccaggcctgagggtcagatggaacgatagatgg

SEQ ID NO: 435993 - DNA, 33 bp, Homo sapien
tgaagtcagttctcatcagatgttagtgttgtc

SEQ ID NO: 435994 - DNA, 33 bp, Homo sapien
tgaagtcagttctcattagatgttagtgttgtc

SEQ ID NO: 435995 - DNA, 33 bp, Homo sapien
cagagtatatagaacccagtttaatgatttcat

SEQ ID NO: 435996 - DNA, 33 bp, Homo sapien
cagagtatatagaaccgagtttaatgatttcat

SEQ ID NO: 435997 - DNA, 33 bp, Homo sapien
ctaacagtatgatgctcaaactcaatcttgtgg

SEQ ID NO: 435998 - DNA, 33 bp, Homo sapien
ctaacagtatgatgcttaaactcaatcttgtgg

SEQ ID NO: 435999 - DNA, 33 bp, Homo sapien
aggggtaagtggtacactaaagagcataacttc

SEQ ID NO: 436000 - DNA, 33 bp, Homo sapien
aggggtaagtggtacattaaagagcataacttc

SEQ ID NO: 436001 - DNA, 33 bp, Homo sapien
ttgatgttaaagtctaaagtgagagtgtgtttg

SEQ ID NO: 436002 - DNA, 33 bp, Homo sapien
ttgatgttaaagtctagagtgagagtgtgtttg

SEQ ID NO: 436003 - DNA, 33 bp, Homo sapien
gggaagggaggcggaaaaacaagacagtgccag

SEQ ID NO: 436004 - DNA, 33 bp, Homo sapien
gggaagggaggcggaagaacaagacagtgccag

SEQ ID NO: 436005 - DNA, 33 bp, Homo sapien
tggaacaaattgaggaataatcagctctgttgg

SEQ ID NO: 436006 - DNA, 33 bp, Homo sapien
tggaacaaattgaggagtaatcagctctgttgg

SEQ ID NO: 436007 - DNA, 33 bp, Homo sapien
aggtcaattccaccacaaggacaacagttagtg

SEQ ID NO: 436008 - DNA, 33 bp, Homo sapien
aggtcaattccaccacgaggacaacagttagtg

SEQ ID NO: 436009 - DNA, 33 bp, Homo sapien
aagacaccagtgaaggccatgttcgccataaga

SEQ ID NO: 436010 - DNA, 33 bp, Homo sapien
aagacaccagtgaaggtcatgttcgccataaga

SEQ ID NO: 436011 - DNA, 33 bp, Homo sapien
gagtttcaaagtccaacggcacgcttttcataa

SEQ ID NO: 436012 - DNA, 33 bp, Homo sapien
gagtttcaaagtccaatggcacgcttttcataa

SEQ ID NO: 436013 - DNA, 33 bp, Homo sapien
taggcagatgaaagcaccatgctcaaagtgaaa

SEQ ID NO: 436014 - DNA, 33 bp, Homo sapien
taggcagatgaaagcagcatgctcaaagtgaaa

SEQ ID NO: 436015 - DNA, 33 bp, Homo sapien
atgttaacctctcaaactacaagaatacctgag

SEQ ID NO: 436016 - DNA, 33 bp, Homo sapien
atgttaacctctcaaattacaagaatacctgag

SEQ ID NO: 436017 - DNA, 33 bp, Homo sapien
tgacaccgatcataaaactcatatggaagtata

SEQ ID NO: 436018 - DNA, 33 bp, Homo sapien
tgacaccgatcataaagctcatatggaagtata

SEQ ID NO: 436019 - DNA, 33 bp, Homo sapien
aaaagcactatgtccaacctaacctgtcttaga

SEQ ID NO: 436020 - DNA, 33 bp, Homo sapien
aaaagcactatgtccaccctaacctgtcttaga

SEQ ID NO: 436021 - DNA, 33 bp, Homo sapien
cacaatttaatgacagaaaaagatgaaagctgg

SEQ ID NO: 436022 - DNA, 33 bp, Homo sapien
cacaatttaatgacaggaaaagatgaaagctgg

SEQ ID NO: 436023 - DNA, 33 bp, Homo sapien
aggcacagacacaagcgcccagtcctgtcctac

SEQ ID NO: 436024 - DNA, 33 bp, Homo sapien
aggcacagacacaagctcccagtcctgtcctac

SEQ ID NO: 436025 - DNA, 33 bp, Homo sapien
tgtgtggaaagagtcacagctcccagacccaag

SEQ ID NO: 436026 - DNA, 33 bp, Homo sapien
tgtgtggaaagagtcatagctcccagacccaag

SEQ ID NO: 436027 - DNA, 33 bp, Homo sapien
agcagagggtgctgaccgtcaaatttcttgcta

SEQ ID NO: 436028 - DNA, 33 bp, Homo sapien
agcagagggtgctgactgtcaaatttcttgcta

SEQ ID NO: 436029 - DNA, 33 bp, Homo sapien
tagccttgtctgtacacacctaatcttgtgtgt

SEQ ID NO: 436030 - DNA, 33 bp, Homo sapien
tagccttgtctgtacatacctaatcttgtgtgt

SEQ ID NO: 436031 - DNA, 33 bp, Homo sapien
ccaaattgtcatgttacgcatgtctactatccc

SEQ ID NO: 436032 - DNA, 33 bp, Homo sapien
ccaaattgtcatgttatgcatgtctactatccc

SEQ ID NO: 436033 - DNA, 33 bp, Homo sapien
acccttttaagagagagaaactgagtcttataa

SEQ ID NO: 436034 - DNA, 33 bp, Homo sapien
acccttttaagagagataaactgagtcttataa

SEQ ID NO: 436035 - DNA, 33 bp, Homo sapien
gggtaaattggcaaacaaacgctggatgaggct

SEQ ID NO: 436036 - DNA, 33 bp, Homo sapien
gggtaaattggcaaaccaacgctggatgaggct

SEQ ID NO: 436037 - DNA, 33 bp, Homo sapien
agaagctaattgagacccctaagtatcagagct

SEQ ID NO: 436038 - DNA, 33 bp, Homo sapien
agaagctaattgagacgcctaagtatcagagct

SEQ ID NO: 436039 - DNA, 33 bp, Homo sapien
atagcccagcccttcaatcgccacacatgccct

SEQ ID NO: 436040 - DNA, 33 bp, Homo sapien
atagcccagcccttcagtcgccacacatgccct

SEQ ID NO: 436041 - DNA, 33 bp, Homo sapien
cagatcctggctcagcacatagtactctttccc

SEQ ID NO: 436042 - DNA, 33 bp, Homo sapien
cagatcctggctcagctcatagtactctttccc

SEQ ID NO: 436043 - DNA, 33 bp, Homo sapien
tctgcaggataaatggaaattctctggtcctgg

SEQ ID NO: 436044 - DNA, 33 bp, Homo sapien
tctgcaggataaatgggaattctctggtcctgg

SEQ ID NO: 436045 - DNA, 33 bp, Homo sapien
ttgctaaagatcacacagtaagtaaatgaaaca

SEQ ID NO: 436046 - DNA, 33 bp, Homo sapien
ttgctaaagatcacaccgtaagtaaatgaaaca

SEQ ID NO: 436047 - DNA, 33 bp, Homo sapien
tgtggggaattgattacactctctaggtgcagg

SEQ ID NO: 436048 - DNA, 33 bp, Homo sapien
tgtggggaattgattagactctctaggtgcagg

SEQ ID NO: 436049 - DNA, 33 bp, Homo sapien
gggtggggatgttacacactgttaggagttgat

SEQ ID NO: 436050 - DNA, 33 bp, Homo sapien
gggtggggatgttacatactgttaggagttgat

SEQ ID NO: 436051 - DNA, 33 bp, Homo sapien
aagaaatgtcagagaaaagcaatgataaatttt

SEQ ID NO: 436052 - DNA, 33 bp, Homo sapien
aagaaatgtcagagaagagcaatgataaatttt

SEQ ID NO: 436053 - DNA, 33 bp, Homo sapien
ctatagtgcatccacacactggaagggtatgca

SEQ ID NO: 436054 - DNA, 33 bp, Homo sapien
ctatagtgcatccacagactggaagggtatgca

SEQ ID NO: 436055 - DNA, 33 bp, Homo sapien
acaggaagcctttgacagcagtgactgattaag

SEQ ID NO: 436056 - DNA, 33 bp, Homo sapien
acaggaagcctttgacggcagtgactgattaag

SEQ ID NO: 436057 - DNA, 33 bp, Homo sapien
gccagagccaggcctacggaacccaaagagtgc

SEQ ID NO: 436058 - DNA, 33 bp, Homo sapien
gccagagccaggcctatggaacccaaagagtgc

SEQ ID NO: 436059 - DNA, 33 bp, Homo sapien
ctatggaagcaaccagaacaactgcagctctga

SEQ ID NO: 436060 - DNA, 33 bp, Homo sapien
ctatggaagcaaccagtacaactgcagctctga

SEQ ID NO: 436061 - DNA, 33 bp, Homo sapien
tgcttgcaaatgcaaaatagttattctcgcagg

SEQ ID NO: 436062 - DNA, 33 bp, Homo sapien
tgcttgcaaatgcaaagtagttattctcgcagg

SEQ ID NO: 436063 - DNA, 33 bp, Homo sapien
agagcaatagcatggaagagaaaatgcgtaacc

SEQ ID NO: 436064 - DNA, 33 bp, Homo sapien
agagcaatagcatggaggagaaaatgcgtaacc

SEQ ID NO: 436065 - DNA, 33 bp, Homo sapien
ccaggctaccccaccacgctcattgcagacctt

SEQ ID NO: 436066 - DNA, 33 bp, Homo sapien
ccaggctaccccaccatgctcattgcagacctt

SEQ ID NO: 436067 - DNA, 33 bp, Homo sapien
ctagggcctaaacatcagaggcatccagggcat

SEQ ID NO: 436068 - DNA, 33 bp, Homo sapien
ctagggcctaaacatcggaggcatccagggcat

SEQ ID NO: 436069 - DNA, 33 bp, Homo sapien
gaagtgactgaggctcaaagacatggaactcca

SEQ ID NO: 436070 - DNA, 33 bp, Homo sapien
gaagtgactgaggctcgaagacatggaactcca

SEQ ID NO: 436071 - DNA, 33 bp, Homo sapien
aatgaccactctcacactggttcctgtctaggc

SEQ ID NO: 436072 - DNA, 33 bp, Homo sapien
aatgaccactctcacattggttcctgtctaggc

SEQ ID NO: 436073 - DNA, 33 bp, Homo sapien
gcaaggaaattagtccactgcgtgccatgtatg

SEQ ID NO: 436074 - DNA, 33 bp, Homo sapien
gcaaggaaattagtccgctgcgtgccatgtatg

SEQ ID NO: 436075 - DNA, 33 bp, Homo sapien
gaggaagcctacactcaatacccaaaacctaca

SEQ ID NO: 436076 - DNA, 33 bp, Homo sapien
gaggaagcctacactcgatacccaaaacctaca

SEQ ID NO: 436077 - DNA, 33 bp, Homo sapien
aaaatgcctatgcccacccaacttacagaaagg

SEQ ID NO: 436078 - DNA, 33 bp, Homo sapien
aaaatgcctatgcccatccaacttacagaaagg

SEQ ID NO: 436079 - DNA, 33 bp, Homo sapien
accctcaggatattccaccagtatgaactctct

SEQ ID NO: 436080 - DNA, 33 bp, Homo sapien
accctcaggatattccgccagtatgaactctct

SEQ ID NO: 436081 - DNA, 33 bp, Homo sapien
aaagctctctgaactaccatcacaatacttctg

SEQ ID NO: 436082 - DNA, 33 bp, Homo sapien
aaagctctctgaactatcatcacaatacttctg

SEQ ID NO: 436083 - DNA, 33 bp, Homo sapien
cttattactacttcaacctctggatctctacca

SEQ ID NO: 436084 - DNA, 33 bp, Homo sapien
cttattactacttcaatctctggatctctacca

SEQ ID NO: 436085 - DNA, 33 bp, Homo sapien
aaatattgagtagttacgttgttgtgactgtgt

SEQ ID NO: 436086 - DNA, 33 bp, Homo sapien
aaatattgagtagttatgttgttgtgactgtgt

SEQ ID NO: 436087 - DNA, 33 bp, Homo sapien
tgcatttgggtatgtcaaccatgatgtgaggtt

SEQ ID NO: 436088 - DNA, 33 bp, Homo sapien
tgcatttgggtatgtcgaccatgatgtgaggtt

SEQ ID NO: 436089 - DNA, 33 bp, Homo sapien
atattactcaaattgcactttctatcttcccaa

SEQ ID NO: 436090 - DNA, 33 bp, Homo sapien
atattactcaaattgcgctttctatcttcccaa

SEQ ID NO: 436091 - DNA, 33 bp, Homo sapien
ggaatgtgttccttaaggtcaggaattatgtcc

SEQ ID NO: 436092 - DNA, 33 bp, Homo sapien
ggaatgtgttccttaatgtcaggaattatgtcc

SEQ ID NO: 436093 - DNA, 33 bp, Homo sapien
accccaacagcactaactggcttattcacagca

SEQ ID NO: 436094 - DNA, 33 bp, Homo sapien
accccaacagcactaattggcttattcacagca

SEQ ID NO: 436095 - DNA, 33 bp, Homo sapien
agatggagaaaattcactctaaatctatgagga

SEQ ID NO: 436096 - DNA, 33 bp, Homo sapien
agatggagaaaattcagtctaaatctatgagga

SEQ ID NO: 436097 - DNA, 33 bp, Homo sapien
tattaatactcaccaaaattttcttccaatgta

SEQ ID NO: 436098 - DNA, 33 bp, Homo sapien
tattaatactcaccaatattttcttccaatgta

SEQ ID NO: 436099 - DNA, 33 bp, Homo sapien
ttccaggtcccctttcacttcctgtgctgttgc

SEQ ID NO: 436100 - DNA, 33 bp, Homo sapien
ttccaggtcccctttcgcttcctgtgctgttgc

SEQ ID NO: 436101 - DNA, 33 bp, Homo sapien
ggggcagggggtagtcaaagtaaccaagggcag

SEQ ID NO: 436102 - DNA, 33 bp, Homo sapien
ggggcagggggtagtcgaagtaaccaagggcag

SEQ ID NO: 436103 - DNA, 33 bp, Homo sapien
tactgattggtgcacacactgtaagcttgataa

SEQ ID NO: 436104 - DNA, 33 bp, Homo sapien
tactgattggtgcacatactgtaagcttgataa

SEQ ID NO: 436105 - DNA, 33 bp, Homo sapien
aaaagaaaaatgatcaaaaaacaggtacagtcc

SEQ ID NO: 436106 - DNA, 33 bp, Homo sapien
aaaagaaaaatgatcacaaaacaggtacagtcc

SEQ ID NO: 436107 - DNA, 33 bp, Homo sapien
gtatggatataccacaatgtacttatctattct

SEQ ID NO: 436108 - DNA, 33 bp, Homo sapien
gtatggatataccacagtgtacttatctattct

SEQ ID NO: 436109 - DNA, 33 bp, Homo sapien
ggctgtgtgtgtgacaccatcatttggcaaaca

SEQ ID NO: 436110 - DNA, 33 bp, Homo sapien
ggctgtgtgtgtgacatcatcatttggcaaaca

SEQ ID NO: 436111 - DNA, 33 bp, Homo sapien
gataagtgggttggtacctgagaaaatgcccag

SEQ ID NO: 436112 - DNA, 33 bp, Homo sapien
gataagtgggttggtatctgagaaaatgcccag

SEQ ID NO: 436113 - DNA, 33 bp, Homo sapien
gtgattggattatagaggccgacttcccccttg

SEQ ID NO: 436114 - DNA, 33 bp, Homo sapien
gtgattggattatagatgccgacttcccccttg

SEQ ID NO: 436115 - DNA, 33 bp, Homo sapien
ctggagagtgagcaacaggtctaagtccccttt

SEQ ID NO: 436116 - DNA, 33 bp, Homo sapien
ctggagagtgagcaacgggtctaagtccccttt

SEQ ID NO: 436117 - DNA, 33 bp, Homo sapien
tctccccaactgctcacgctggattggaattgc

SEQ ID NO: 436118 - DNA, 33 bp, Homo sapien
tctccccaactgctcatgctggattggaattgc

SEQ ID NO: 436119 - DNA, 33 bp, Homo sapien
cacacatacacacacaaaacgttcttttagcta

SEQ ID NO: 436120 - DNA, 33 bp, Homo sapien
cacacatacacacacacaacgttcttttagcta

SEQ ID NO: 436121 - DNA, 33 bp, Homo sapien
ccaggcaggtaattcaacatggaaaaggccaaa

SEQ ID NO: 436122 - DNA, 33 bp, Homo sapien
ccaggcaggtaattcagcatggaaaaggccaaa

SEQ ID NO: 436123 - DNA, 33 bp, Homo sapien
attatcaggatggaatcatgagttgaatgtccc

SEQ ID NO: 436124 - DNA, 33 bp, Homo sapien
attatcaggatggaattatgagttgaatgtccc

SEQ ID NO: 436125 - DNA, 33 bp, Homo sapien
gcagtctggtttccatcatgagttggtgttatc

SEQ ID NO: 436126 - DNA, 33 bp, Homo sapien
gcagtctggtttccattatgagttggtgttatc

SEQ ID NO: 436127 - DNA, 33 bp, Homo sapien
gctttctcctctcttacgctgccaaaatgtgtc

SEQ ID NO: 436128 - DNA, 33 bp, Homo sapien
gctttctcctctcttatgctgccaaaatgtgtc

SEQ ID NO: 436129 - DNA, 33 bp, Homo sapien
ggagagcagaaagtcaatccggaagacccagtc

SEQ ID NO: 436130 - DNA, 33 bp, Homo sapien
ggagagcagaaagtcagtccggaagacccagtc

SEQ ID NO: 436131 - DNA, 33 bp, Homo sapien
gtcaggaggaccaaataatacactctatcaatg

SEQ ID NO: 436132 - DNA, 33 bp, Homo sapien
gtcaggaggaccaaatgatacactctatcaatg

SEQ ID NO: 436133 - DNA, 33 bp, Homo sapien
tcagaggctcatcagaaatcttgtcttctccat

SEQ ID NO: 436134 - DNA, 33 bp, Homo sapien
tcagaggctcatcagagatcttgtcttctccat

SEQ ID NO: 436135 - DNA, 33 bp, Homo sapien
gctttcacttggttcaatattgtgtggatttat

SEQ ID NO: 436136 - DNA, 33 bp, Homo sapien
gctttcacttggttcagtattgtgtggatttat

SEQ ID NO: 436137 - DNA, 33 bp, Homo sapien
gtggtagtatcttttgaattcaagaacacttct

SEQ ID NO: 436138 - DNA, 33 bp, Homo sapien
gtggtagtatcttttggattcaagaacacttct

SEQ ID NO: 436139 - DNA, 33 bp, Homo sapien
gaggtctgctaatggacacaagattgcaactag

SEQ ID NO: 436140 - DNA, 33 bp, Homo sapien
gaggtctgctaatggatacaagattgcaactag

SEQ ID NO: 436141 - DNA, 33 bp, Homo sapien
gagtgcaccatctttaacatctggtacagtcaa

SEQ ID NO: 436142 - DNA, 33 bp, Homo sapien
gagtgcaccatctttagcatctggtacagtcaa

SEQ ID NO: 436143 - DNA, 33 bp, Homo sapien
tagacaattctcttacaaactttgcgggtttct

SEQ ID NO: 436144 - DNA, 33 bp, Homo sapien
tagacaattctcttaccaactttgcgggtttct

SEQ ID NO: 436145 - DNA, 33 bp, Homo sapien
ccagaattgtttgaggccaccacggaagtctga

SEQ ID NO: 436146 - DNA, 33 bp, Homo sapien
ccagaattgtttgaggtcaccacggaagtctga

SEQ ID NO: 436147 - DNA, 33 bp, Homo sapien
ccatctcccagccaacagcatcatctgccatgt

SEQ ID NO: 436148 - DNA, 33 bp, Homo sapien
ccatctcccagccaacggcatcatctgccatgt

SEQ ID NO: 436149 - DNA, 33 bp, Homo sapien
tgagtcctggaccagagatccagataatgggtg

SEQ ID NO: 436150 - DNA, 33 bp, Homo sapien
tgagtcctggaccagatatccagataatgggtg

SEQ ID NO: 436151 - DNA, 33 bp, Homo sapien
acatgtggttgtcttgaaaaggaaaactcttgt

SEQ ID NO: 436152 - DNA, 33 bp, Homo sapien
acatgtggttgtcttggaaaggaaaactcttgt

SEQ ID NO: 436153 - DNA, 33 bp, Homo sapien
aagtggtgaaatggcacggcttctctctctgtt

SEQ ID NO: 436154 - DNA, 33 bp, Homo sapien
aagtggtgaaatggcatggcttctctctctgtt

SEQ ID NO: 436155 - DNA, 33 bp, Homo sapien
accaccaaaattgcacacatatacatttgtggt

SEQ ID NO: 436156 - DNA, 33 bp, Homo sapien
accaccaaaattgcacgcatatacatttgtggt

SEQ ID NO: 436157 - DNA, 33 bp, Homo sapien
tcagtgttctgtcagaaaggagctgagcctgag

SEQ ID NO: 436158 - DNA, 33 bp, Homo sapien
tcagtgttctgtcagagaggagctgagcctgag

SEQ ID NO: 436159 - DNA, 33 bp, Homo sapien
agtggtacttaacaacaatagtggcattgaaca

SEQ ID NO: 436160 - DNA, 33 bp, Homo sapien
agtggtacttaacaacgatagtggcattgaaca

SEQ ID NO: 436161 - DNA, 33 bp, Homo sapien
tagctgcaggatctcacggtcttactacgtcct

SEQ ID NO: 436162 - DNA, 33 bp, Homo sapien
tagctgcaggatctcatggtcttactacgtcct

SEQ ID NO: 436163 - DNA, 33 bp, Homo sapien
cagcattaatccattacggggtggagccatcat

SEQ ID NO: 436164 - DNA, 33 bp, Homo sapien
cagcattaatccattatggggtggagccatcat

SEQ ID NO: 436165 - DNA, 33 bp, Homo sapien
gcacaagccagtgttgcatctcacagtctgggt

SEQ ID NO: 436166 - DNA, 33 bp, Homo sapien
gcacaagccagtgttggatctcacagtctgggt

SEQ ID NO: 436167 - DNA, 33 bp, Homo sapien
agaagcaagaaaattaagtagccaaaaggatga

SEQ ID NO: 436168 - DNA, 33 bp, Homo sapien
agaagcaagaaaattatgtagccaaaaggatga

SEQ ID NO: 436169 - DNA, 33 bp, Homo sapien
gaaggtcagggattccaagaaagcacccagttt

SEQ ID NO: 436170 - DNA, 33 bp, Homo sapien
gaaggtcagggattccgagaaagcacccagttt

SEQ ID NO: 436171 - DNA, 33 bp, Homo sapien
atcagcagggacaacagaactcattctgcagaa

SEQ ID NO: 436172 - DNA, 33 bp, Homo sapien
atcagcagggacaacataactcattctgcagaa

SEQ ID NO: 436173 - DNA, 33 bp, Homo sapien
ggaggacacagtgacaacctgagcagagtggag

SEQ ID NO: 436174 - DNA, 33 bp, Homo sapien
ggaggacacagtgacaccctgagcagagtggag

SEQ ID NO: 436175 - DNA, 33 bp, Homo sapien
cgtaagttctcgtccagggcactgtgcagtgcc

SEQ ID NO: 436176 - DNA, 33 bp, Homo sapien
cgtaagttctcgtccatggcactgtgcagtgcc

SEQ ID NO: 436177 - DNA, 33 bp, Homo sapien
taattcccggaatgcaaactgtaaccagggcag

SEQ ID NO: 436178 - DNA, 33 bp, Homo sapien
taattcccggaatgcagactgtaaccagggcag

SEQ ID NO: 436179 - DNA, 33 bp, Homo sapien
gtcaacagttcattcacaatatagacacacttc

SEQ ID NO: 436180 - DNA, 33 bp, Homo sapien
gtcaacagttcattcagaatatagacacacttc

SEQ ID NO: 436181 - DNA, 33 bp, Homo sapien
agtccatttttatatcactatgaagaaatacct

SEQ ID NO: 436182 - DNA, 33 bp, Homo sapien
agtccatttttatatcgctatgaagaaatacct

SEQ ID NO: 436183 - DNA, 33 bp, Homo sapien
taccatgtgattaaagcactacgtttgcagagc

SEQ ID NO: 436184 - DNA, 33 bp, Homo sapien
taccatgtgattaaagtactacgtttgcagagc

SEQ ID NO: 436185 - DNA, 33 bp, Homo sapien
ttaaacccctgaaggcaaaagaaaatcgaaaat

SEQ ID NO: 436186 - DNA, 33 bp, Homo sapien
ttaaacccctgaaggcgaaagaaaatcgaaaat

SEQ ID NO: 436187 - DNA, 33 bp, Homo sapien
tctgttaattacaaaccgagatcggcgccctct

SEQ ID NO: 436188 - DNA, 33 bp, Homo sapien
tctgttaattacaaactgagatcggcgccctct

SEQ ID NO: 436189 - DNA, 33 bp, Homo sapien
tgtagggagagttatacgagtctgagaaaacat

SEQ ID NO: 436190 - DNA, 33 bp, Homo sapien
tgtagggagagttatatgagtctgagaaaacat

SEQ ID NO: 436191 - DNA, 33 bp, Homo sapien
cccaattacttgatcacgttccagagagaagta

SEQ ID NO: 436192 - DNA, 33 bp, Homo sapien
cccaattacttgatcatgttccagagagaagta

SEQ ID NO: 436193 - DNA, 33 bp, Homo sapien
ttgggtatgcacagcccagtttctgctgagtga

SEQ ID NO: 436194 - DNA, 33 bp, Homo sapien
ttgggtatgcacagccgagtttctgctgagtga

SEQ ID NO: 436195 - DNA, 33 bp, Homo sapien
tggcccaccttcttgcactgtaaccatcagcta

SEQ ID NO: 436196 - DNA, 33 bp, Homo sapien
tggcccaccttcttgcgctgtaaccatcagcta

SEQ ID NO: 436197 - DNA, 33 bp, Homo sapien
tgaataatggataaagaagacgtgcaagatttt

SEQ ID NO: 436198 - DNA, 33 bp, Homo sapien
tgaataatggataaaggagacgtgcaagatttt

SEQ ID NO: 436199 - DNA, 33 bp, Homo sapien
tttttgctttcagacaaaaactcactctgtcac

SEQ ID NO: 436200 - DNA, 33 bp, Homo sapien
tttttgctttcagacagaaactcactctgtcac

SEQ ID NO: 436201 - DNA, 33 bp, Homo sapien
ttagcagaaattgcagcattcatacccatagcc

SEQ ID NO: 436202 - DNA, 33 bp, Homo sapien
ttagcagaaattgcagtattcatacccatagcc

SEQ ID NO: 436203 - DNA, 33 bp, Homo sapien
tgtgcacacatcttccgctgctttcccagctca

SEQ ID NO: 436204 - DNA, 33 bp, Homo sapien
tgtgcacacatcttcctctgctttcccagctca

SEQ ID NO: 436205 - DNA, 33 bp, Homo sapien
gtgagttcatgctcgcccagagttgcatactgc

SEQ ID NO: 436206 - DNA, 33 bp, Homo sapien
gtgagttcatgctcgctcagagttgcatactgc

SEQ ID NO: 436207 - DNA, 33 bp, Homo sapien
tgcctttcctgacataggtatgacttgaagaaa

SEQ ID NO: 436208 - DNA, 33 bp, Homo sapien
tgcctttcctgacatatgtatgacttgaagaaa

SEQ ID NO: 436209 - DNA, 33 bp, Homo sapien
tgggcagccactaaacagaacacagcagatgtg

SEQ ID NO: 436210 - DNA, 33 bp, Homo sapien
tgggcagccactaaacggaacacagcagatgtg

SEQ ID NO: 436211 - DNA, 33 bp, Homo sapien
attctattatattttaacacctagcagaaaaag

SEQ ID NO: 436212 - DNA, 33 bp, Homo sapien
attctattatattttaccacctagcagaaaaag

SEQ ID NO: 436213 - DNA, 33 bp, Homo sapien
aatctgccaggagaccaaagctgaacatgatta

SEQ ID NO: 436214 - DNA, 33 bp, Homo sapien
aatctgccaggagaccgaagctgaacatgatta

SEQ ID NO: 436215 - DNA, 33 bp, Homo sapien
gcagacaccctcacaccgactcatgctgttgcc

SEQ ID NO: 436216 - DNA, 33 bp, Homo sapien
gcagacaccctcacactgactcatgctgttgcc

SEQ ID NO: 436217 - DNA, 33 bp, Homo sapien
cagatggcattttctgaaagacagacatacacg

SEQ ID NO: 436218 - DNA, 33 bp, Homo sapien
cagatggcattttctggaagacagacatacacg

SEQ ID NO: 436219 - DNA, 33 bp, Homo sapien
aaggcactttgaggataaggacagatggcattt

SEQ ID NO: 436220 - DNA, 33 bp, Homo sapien
aaggcactttgaggatgaggacagatggcattt

SEQ ID NO: 436221 - DNA, 33 bp, Homo sapien
aactgcgtatagggcacaagaggtctctttgta

SEQ ID NO: 436222 - DNA, 33 bp, Homo sapien
aactgcgtatagggcagaagaggtctctttgta

SEQ ID NO: 436223 - DNA, 33 bp, Homo sapien
aaagagagagcaactacgtagagaaggtcatgg

SEQ ID NO: 436224 - DNA, 33 bp, Homo sapien
aaagagagagcaactatgtagagaaggtcatgg

SEQ ID NO: 436225 - DNA, 33 bp, Homo sapien
tcacacagtttattgacgcaaaaagaaaacgca

SEQ ID NO: 436226 - DNA, 33 bp, Homo sapien
tcacacagtttattgaggcaaaaagaaaacgca

SEQ ID NO: 436227 - DNA, 33 bp, Homo sapien
tcattgataacatgaacactggtccctctctct

SEQ ID NO: 436228 - DNA, 33 bp, Homo sapien
tcattgataacatgaagactggtccctctctct

SEQ ID NO: 436229 - DNA, 33 bp, Homo sapien
ccctattcctggtgaccccatctggctgtgttt

SEQ ID NO: 436230 - DNA, 33 bp, Homo sapien
ccctattcctggtgactccatctggctgtgttt

SEQ ID NO: 436231 - DNA, 33 bp, Homo sapien
caaaaaacccttgctcaactcaactgggaatcc

SEQ ID NO: 436232 - DNA, 33 bp, Homo sapien
caaaaaacccttgctcgactcaactgggaatcc

SEQ ID NO: 436233 - DNA, 33 bp, Homo sapien
gattttaaaatcccaacgcctgggtcaagctcc

SEQ ID NO: 436234 - DNA, 33 bp, Homo sapien
gattttaaaatcccaatgcctgggtcaagctcc

SEQ ID NO: 436235 - DNA, 33 bp, Homo sapien
aaccactgcctcagaccaaaaggagaaaaagtg

SEQ ID NO: 436236 - DNA, 33 bp, Homo sapien
aaccactgcctcagactaaaaggagaaaaagtg

SEQ ID NO: 436237 - DNA, 33 bp, Homo sapien
ctcagagtggcaagaacataaagaaaaaggaga

SEQ ID NO: 436238 - DNA, 33 bp, Homo sapien
ctcagagtggcaagaagataaagaaaaaggaga

SEQ ID NO: 436239 - DNA, 33 bp, Homo sapien
actctgaggtatcctaagaggagctagtagaac

SEQ ID NO: 436240 - DNA, 33 bp, Homo sapien
actctgaggtatcctaggaggagctagtagaac

SEQ ID NO: 436241 - DNA, 33 bp, Homo sapien
gaattggtctatgctgaacaactggtaactcca

SEQ ID NO: 436242 - DNA, 33 bp, Homo sapien
gaattggtctatgctggacaactggtaactcca

SEQ ID NO: 436243 - DNA, 33 bp, Homo sapien
aggattaaatgagttcagaaacatgtaaagaac

SEQ ID NO: 436244 - DNA, 33 bp, Homo sapien
aggattaaatgagttccgaaacatgtaaagaac

SEQ ID NO: 436245 - DNA, 33 bp, Homo sapien
gcagcacacacgatgcaataaactgtactctgg

SEQ ID NO: 436246 - DNA, 33 bp, Homo sapien
gcagcacacacgatgcgataaactgtactctgg

SEQ ID NO: 436247 - DNA, 33 bp, Homo sapien
cccagttccagctgcactctcaggggtttttgt

SEQ ID NO: 436248 - DNA, 33 bp, Homo sapien
cccagttccagctgcattctcaggggtttttgt

SEQ ID NO: 436249 - DNA, 33 bp, Homo sapien
tggggtcaaaaggggcagcatgagagtagagga

SEQ ID NO: 436250 - DNA, 33 bp, Homo sapien
tggggtcaaaaggggccgcatgagagtagagga

SEQ ID NO: 436251 - DNA, 33 bp, Homo sapien
tggctgacagtttgacgacactctcaagggtga

SEQ ID NO: 436252 - DNA, 33 bp, Homo sapien
tggctgacagtttgactacactctcaagggtga

SEQ ID NO: 436253 - DNA, 33 bp, Homo sapien
atctagtgaaactcaccggtagctttgaatggg

SEQ ID NO: 436254 - DNA, 33 bp, Homo sapien
atctagtgaaactcactggtagctttgaatggg

SEQ ID NO: 436255 - DNA, 33 bp, Homo sapien
tgcaaggatttcaatacgcttccaattaaagcc

SEQ ID NO: 436256 - DNA, 33 bp, Homo sapien
tgcaaggatttcaatatgcttccaattaaagcc

SEQ ID NO: 436257 - DNA, 33 bp, Homo sapien
aatcttccaacaccccaaagagaatgaagtttc

SEQ ID NO: 436258 - DNA, 33 bp, Homo sapien
aatcttccaacaccccgaagagaatgaagtttc

SEQ ID NO: 436259 - DNA, 33 bp, Homo sapien
ctgcagggttaatgcacatggaggcagtgactc

SEQ ID NO: 436260 - DNA, 33 bp, Homo sapien
ctgcagggttaatgcagatggaggcagtgactc

SEQ ID NO: 436261 - DNA, 33 bp, Homo sapien
agagccagtgcgccaactcttcactgcatctgt

SEQ ID NO: 436262 - DNA, 33 bp, Homo sapien
agagccagtgcgccaattcttcactgcatctgt

SEQ ID NO: 436263 - DNA, 33 bp, Homo sapien
gcagtttgagcagatgcagttctagggagttca

SEQ ID NO: 436264 - DNA, 33 bp, Homo sapien
gcagtttgagcagatgtagttctagggagttca

SEQ ID NO: 436265 - DNA, 33 bp, Homo sapien
ctaagaaatgacattgaaaaaggtgagatcaaa

SEQ ID NO: 436266 - DNA, 33 bp, Homo sapien
ctaagaaatgacattgcaaaaggtgagatcaaa

SEQ ID NO: 436267 - DNA, 33 bp, Homo sapien
gcacaactccctcctacgattccagagcagagg

SEQ ID NO: 436268 - DNA, 33 bp, Homo sapien
gcacaactccctcctatgattccagagcagagg

SEQ ID NO: 436269 - DNA, 33 bp, Homo sapien
ggagtcttcctttgcaatcctaaaatctgatca

SEQ ID NO: 436270 - DNA, 33 bp, Homo sapien
ggagtcttcctttgcagtcctaaaatctgatca

SEQ ID NO: 436271 - DNA, 33 bp, Homo sapien
acttccgggagagcaacttccaggtcaatcaac

SEQ ID NO: 436272 - DNA, 33 bp, Homo sapien
acttccgggagagcaatttccaggtcaatcaac

SEQ ID NO: 436273 - DNA, 33 bp, Homo sapien
ccattctgcaggtgggaatactgagccacgggg

SEQ ID NO: 436274 - DNA, 33 bp, Homo sapien
ccattctgcaggtgggcatactgagccacgggg

SEQ ID NO: 436275 - DNA, 33 bp, Homo sapien
caccattgctgagccactaaacccaaattcaga

SEQ ID NO: 436276 - DNA, 33 bp, Homo sapien
caccattgctgagccattaaacccaaattcaga

SEQ ID NO: 436277 - DNA, 33 bp, Homo sapien
ggaggcacaggcaccaacaatttctctgcagct

SEQ ID NO: 436278 - DNA, 33 bp, Homo sapien
ggaggcacaggcaccagcaatttctctgcagct

SEQ ID NO: 436279 - DNA, 33 bp, Homo sapien
aaaataactcacattgaaagaacaaagagaatg

SEQ ID NO: 436280 - DNA, 33 bp, Homo sapien
aaaataactcacattgtaagaacaaagagaatg

SEQ ID NO: 436281 - DNA, 33 bp, Homo sapien
aattcacaaaaagtcacaggcacgaggcaccct

SEQ ID NO: 436282 - DNA, 33 bp, Homo sapien
aattcacaaaaagtcataggcacgaggcaccct

SEQ ID NO: 436283 - DNA, 33 bp, Homo sapien
attttacaacctttgcagaattcatgcttatct

SEQ ID NO: 436284 - DNA, 33 bp, Homo sapien
attttacaacctttgcggaattcatgcttatct

SEQ ID NO: 436285 - DNA, 33 bp, Homo sapien
tgtaccagcaaagatgcatacgcagacctgctt

SEQ ID NO: 436286 - DNA, 33 bp, Homo sapien
tgtaccagcaaagatggatacgcagacctgctt

SEQ ID NO: 436287 - DNA, 33 bp, Homo sapien
ggggtgtctcctcaacagtggtgttccaccctg

SEQ ID NO: 436288 - DNA, 33 bp, Homo sapien
ggggtgtctcctcaacggtggtgttccaccctg

SEQ ID NO: 436289 - DNA, 33 bp, Homo sapien
gcaggccttgtcagagactctagatgtgcagag

SEQ ID NO: 436290 - DNA, 33 bp, Homo sapien
gcaggccttgtcagaggctctagatgtgcagag

SEQ ID NO: 436291 - DNA, 33 bp, Homo sapien
cccactagagtgcacacggagcaatgtaaagat

SEQ ID NO: 436292 - DNA, 33 bp, Homo sapien
cccactagagtgcacatggagcaatgtaaagat

SEQ ID NO: 436293 - DNA, 33 bp, Homo sapien
ctgcatgatggggtgacgttagagttgttagga

SEQ ID NO: 436294 - DNA, 33 bp, Homo sapien
ctgcatgatggggtgatgttagagttgttagga

SEQ ID NO: 436295 - DNA, 33 bp, Homo sapien
acagtcgtaatccttacagtgcctgggattttc

SEQ ID NO: 436296 - DNA, 33 bp, Homo sapien
acagtcgtaatccttagagtgcctgggattttc

SEQ ID NO: 436297 - DNA, 33 bp, Homo sapien
tgaggagcaggccaaccgcaaaataaaaggaca

SEQ ID NO: 436298 - DNA, 33 bp, Homo sapien
tgaggagcaggccaactgcaaaataaaaggaca

SEQ ID NO: 436299 - DNA, 33 bp, Homo sapien
tccaataagccaagaaacatcactgtatggcaa

SEQ ID NO: 436300 - DNA, 33 bp, Homo sapien
tccaataagccaagaagcatcactgtatggcaa

SEQ ID NO: 436301 - DNA, 33 bp, Homo sapien
ttcctgccttcaggaaacccttctagcaaaaag

SEQ ID NO: 436302 - DNA, 33 bp, Homo sapien
ttcctgccttcaggaagcccttctagcaaaaag

SEQ ID NO: 436303 - DNA, 33 bp, Homo sapien
ctcccacctcttgtcaataatgctacatactga

SEQ ID NO: 436304 - DNA, 33 bp, Homo sapien
ctcccacctcttgtcagtaatgctacatactga

SEQ ID NO: 436305 - DNA, 33 bp, Homo sapien
atcagctggggagctgccaaaaattaccagtgt

SEQ ID NO: 436306 - DNA, 33 bp, Homo sapien
atcagctggggagctgtcaaaaattaccagtgt

SEQ ID NO: 436307 - DNA, 33 bp, Homo sapien
agaacttgaatgaaaaattaagccccttctctg

SEQ ID NO: 436308 - DNA, 33 bp, Homo sapien
agaacttgaatgaaaacttaagccccttctctg

SEQ ID NO: 436309 - DNA, 33 bp, Homo sapien
tcacgttgccttgtagcagtgttcagtaacggt

SEQ ID NO: 436310 - DNA, 33 bp, Homo sapien
tcacgttgccttgtagtagtgttcagtaacggt

SEQ ID NO: 436311 - DNA, 33 bp, Homo sapien
aacttaaactttcacccattgattagcgactcc

SEQ ID NO: 436312 - DNA, 33 bp, Homo sapien
aacttaaactttcacctattgattagcgactcc

SEQ ID NO: 436313 - DNA, 33 bp, Homo sapien
ccagtcacagaagaacaaatactgcataattcc

SEQ ID NO: 436314 - DNA, 33 bp, Homo sapien
ccagtcacagaagaacgaatactgcataattcc

SEQ ID NO: 436315 - DNA, 33 bp, Homo sapien
gttatattgttactggccatgttgctccatagg

SEQ ID NO: 436316 - DNA, 33 bp, Homo sapien
gttatattgttactgggcatgttgctccatagg

SEQ ID NO: 436317 - DNA, 33 bp, Homo sapien
ggataagagaatccacagatagggacacagtgc

SEQ ID NO: 436318 - DNA, 33 bp, Homo sapien
ggataagagaatccacggatagggacacagtgc

SEQ ID NO: 436319 - DNA, 33 bp, Homo sapien
tagggtgaaggtcagactagattgggcatattc

SEQ ID NO: 436320 - DNA, 33 bp, Homo sapien
tagggtgaaggtcagattagattgggcatattc

SEQ ID NO: 436321 - DNA, 33 bp, Homo sapien
gtcccaggcagtaccacgaacatgggatttgaa

SEQ ID NO: 436322 - DNA, 33 bp, Homo sapien
gtcccaggcagtaccatgaacatgggatttgaa

SEQ ID NO: 436323 - DNA, 33 bp, Homo sapien
tgtcagtcaactgaaacgtctcttggaagagaa

SEQ ID NO: 436324 - DNA, 33 bp, Homo sapien
tgtcagtcaactgaaatgtctcttggaagagaa

SEQ ID NO: 436325 - DNA, 33 bp, Homo sapien
acatacgttatttcaactgactctccaaacaat

SEQ ID NO: 436326 - DNA, 33 bp, Homo sapien
acatacgttatttcaattgactctccaaacaat

SEQ ID NO: 436327 - DNA, 33 bp, Homo sapien
tgctacacactaagaccagcccctggcatgcca

SEQ ID NO: 436328 - DNA, 33 bp, Homo sapien
tgctacacactaagactagcccctggcatgcca

SEQ ID NO: 436329 - DNA, 33 bp, Homo sapien
agtcatcaagaaaaggcccaattatgtctaggt

SEQ ID NO: 436330 - DNA, 33 bp, Homo sapien
agtcatcaagaaaagggccaattatgtctaggt

SEQ ID NO: 436331 - DNA, 33 bp, Homo sapien
ttcctgtctcctgtcacgttgcatccatccacc

SEQ ID NO: 436332 - DNA, 33 bp, Homo sapien
ttcctgtctcctgtcatgttgcatccatccacc

SEQ ID NO: 436333 - DNA, 33 bp, Homo sapien
gtcaggccacagttaactcctaacccacaactc

SEQ ID NO: 436334 - DNA, 33 bp, Homo sapien
gtcaggccacagttaagtcctaacccacaactc

SEQ ID NO: 436335 - DNA, 33 bp, Homo sapien
agcatcacctagtcacagggatccaggtcaggc

SEQ ID NO: 436336 - DNA, 33 bp, Homo sapien
agcatcacctagtcacggggatccaggtcaggc

SEQ ID NO: 436337 - DNA, 33 bp, Homo sapien
actgtcccgcttaggaaatgttggacgcagaga

SEQ ID NO: 436338 - DNA, 33 bp, Homo sapien
actgtcccgcttaggagatgttggacgcagaga

SEQ ID NO: 436339 - DNA, 33 bp, Homo sapien
catagtgtcatccagaaagtgaagcccaatgag

SEQ ID NO: 436340 - DNA, 33 bp, Homo sapien
catagtgtcatccagatagtgaagcccaatgag

SEQ ID NO: 436341 - DNA, 33 bp, Homo sapien
cccagagagggtttcaagcactcggtgtcagca

SEQ ID NO: 436342 - DNA, 33 bp, Homo sapien
cccagagagggtttcaggcactcggtgtcagca

SEQ ID NO: 436343 - DNA, 33 bp, Homo sapien
ggccacccggcgcaaccgactttctgctctctg

SEQ ID NO: 436344 - DNA, 33 bp, Homo sapien
ggccacccggcgcaactgactttctgctctctg

SEQ ID NO: 436345 - DNA, 33 bp, Homo sapien
ctcgtgcccctagaaccgttaaggcatgagaga

SEQ ID NO: 436346 - DNA, 33 bp, Homo sapien
ctcgtgcccctagaactgttaaggcatgagaga

SEQ ID NO: 436347 - DNA, 33 bp, Homo sapien
tgcgcggaacactcacacggaagggctggccgc

SEQ ID NO: 436348 - DNA, 33 bp, Homo sapien
tgcgcggaacactcacgcggaagggctggccgc

SEQ ID NO: 436349 - DNA, 33 bp, Homo sapien
ccggaagctctctgcacgatctttcacttaccc

SEQ ID NO: 436350 - DNA, 33 bp, Homo sapien
ccggaagctctctgcatgatctttcacttaccc

SEQ ID NO: 436351 - DNA, 33 bp, Homo sapien
ccggaggatttccaggaacagaggctgggatcg

SEQ ID NO: 436352 - DNA, 33 bp, Homo sapien
ccggaggatttccaggtacagaggctgggatcg

SEQ ID NO: 436353 - DNA, 33 bp, Homo sapien
agggtctgggaatagacaagcagggatgtagga

SEQ ID NO: 436354 - DNA, 33 bp, Homo sapien
agggtctgggaatagagaagcagggatgtagga

SEQ ID NO: 436355 - DNA, 33 bp, Homo sapien
ggagagtgctgcacacacgttggtctcatctct

SEQ ID NO: 436356 - DNA, 33 bp, Homo sapien
ggagagtgctgcacacgcgttggtctcatctct

SEQ ID NO: 436357 - DNA, 33 bp, Homo sapien
aagcacggagtcagccagaaggaccaagtccct

SEQ ID NO: 436358 - DNA, 33 bp, Homo sapien
aagcacggagtcagccggaaggaccaagtccct

SEQ ID NO: 436359 - DNA, 33 bp, Homo sapien
tctgcaaggaattatgacacagtaacaacaata

SEQ ID NO: 436360 - DNA, 33 bp, Homo sapien
tctgcaaggaattatggcacagtaacaacaata

SEQ ID NO: 436361 - DNA, 33 bp, Homo sapien
aggaggccaacaaacacgcagtttcagactatt

SEQ ID NO: 436362 - DNA, 33 bp, Homo sapien
aggaggccaacaaacatgcagtttcagactatt

SEQ ID NO: 436363 - DNA, 33 bp, Homo sapien
tcttttggcttgtgcaagaaaaaaatctttacc

SEQ ID NO: 436364 - DNA, 33 bp, Homo sapien
tcttttggcttgtgcaggaaaaaaatctttacc

SEQ ID NO: 436365 - DNA, 33 bp, Homo sapien
atgttgatgttttccaatacttttttggtctcc

SEQ ID NO: 436366 - DNA, 33 bp, Homo sapien
atgttgatgttttccagtacttttttggtctcc

SEQ ID NO: 436367 - DNA, 33 bp, Homo sapien
atgaatccctaaatgtcacacatcaagtcgaca

SEQ ID NO: 436368 - DNA, 33 bp, Homo sapien
atgaatccctaaatgtgacacatcaagtcgaca

SEQ ID NO: 436369 - DNA, 33 bp, Homo sapien
tatgagagtggatcacagggagatcaggacaag

SEQ ID NO: 436370 - DNA, 33 bp, Homo sapien
tatgagagtggatcacggggagatcaggacaag

SEQ ID NO: 436371 - DNA, 33 bp, Homo sapien
ggactgagagctcactcaagtatttcacaagat

SEQ ID NO: 436372 - DNA, 33 bp, Homo sapien
ggactgagagctcactgaagtatttcacaagat

SEQ ID NO: 436373 - DNA, 33 bp, Homo sapien
aatgataagattcatagaggggatcgcgagtca

SEQ ID NO: 436374 - DNA, 33 bp, Homo sapien
aatgataagattcatataggggatcgcgagtca

SEQ ID NO: 436375 - DNA, 33 bp, Homo sapien
gacctaattatttctaccaacggccttaacgag

SEQ ID NO: 436376 - DNA, 33 bp, Homo sapien
gacctaattatttctatcaacggccttaacgag

SEQ ID NO: 436377 - DNA, 33 bp, Homo sapien
ttctcccattatatacacgggtctcatggtgcg

SEQ ID NO: 436378 - DNA, 33 bp, Homo sapien
ttctcccattatatacgcgggtctcatggtgcg

SEQ ID NO: 436379 - DNA, 33 bp, Homo sapien
ggacggctgtgactccagaaggtcaggagggag

SEQ ID NO: 436380 - DNA, 33 bp, Homo sapien
ggacggctgtgactccggaaggtcaggagggag

SEQ ID NO: 436381 - DNA, 33 bp, Homo sapien
tagcccaatgtggctccgaaggggttaggtgct

SEQ ID NO: 436382 - DNA, 33 bp, Homo sapien
tagcccaatgtggctctgaaggggttaggtgct

SEQ ID NO: 436383 - DNA, 33 bp, Homo sapien
cgggaccctgactccacgatgttaggaagcccc

SEQ ID NO: 436384 - DNA, 33 bp, Homo sapien
cgggaccctgactccatgatgttaggaagcccc

SEQ ID NO: 436385 - DNA, 33 bp, Homo sapien
tccctggctcaccctgcaattgggcagctatct

SEQ ID NO: 436386 - DNA, 33 bp, Homo sapien
tccctggctcaccctggaattgggcagctatct

SEQ ID NO: 436387 - DNA, 33 bp, Homo sapien
gtaggacaccaaactcaataacatacttttcaa

SEQ ID NO: 436388 - DNA, 33 bp, Homo sapien
gtaggacaccaaactcgataacatacttttcaa

SEQ ID NO: 436389 - DNA, 33 bp, Homo sapien
ttacacgaagtaaaaacgtgtaatgatgcaaca

SEQ ID NO: 436390 - DNA, 33 bp, Homo sapien
ttacacgaagtaaaaatgtgtaatgatgcaaca

SEQ ID NO: 436391 - DNA, 33 bp, Homo sapien
gtccatgtctcagctacgatatttctcatcata

SEQ ID NO: 436392 - DNA, 33 bp, Homo sapien
gtccatgtctcagctaggatatttctcatcata

SEQ ID NO: 436393 - DNA, 33 bp, Homo sapien
tgttatataaatagacaccaagctctagcacta

SEQ ID NO: 436394 - DNA, 33 bp, Homo sapien
tgttatataaatagacgccaagctctagcacta

SEQ ID NO: 436395 - DNA, 33 bp, Homo sapien
gactcaagggggcttccagttctagccaatgat

SEQ ID NO: 436396 - DNA, 33 bp, Homo sapien
gactcaagggggcttctagttctagccaatgat

SEQ ID NO: 436397 - DNA, 33 bp, Homo sapien
tgggcagaatgctaaacgaaagcacagcagcat

SEQ ID NO: 436398 - DNA, 33 bp, Homo sapien
tgggcagaatgctaaatgaaagcacagcagcat

SEQ ID NO: 436399 - DNA, 33 bp, Homo sapien
tcacaccaaaagatgaacaagcaaccagcggct

SEQ ID NO: 436400 - DNA, 33 bp, Homo sapien
tcacaccaaaagatgagcaagcaaccagcggct

SEQ ID NO: 436401 - DNA, 33 bp, Homo sapien
actggccagcagcgggaagccgttgttccatta

SEQ ID NO: 436402 - DNA, 33 bp, Homo sapien
actggccagcagcggggagccgttgttccatta

SEQ ID NO: 436403 - DNA, 33 bp, Homo sapien
gagggaaaattcaagacgtctggattttagagg

SEQ ID NO: 436404 - DNA, 33 bp, Homo sapien
gagggaaaattcaagatgtctggattttagagg

SEQ ID NO: 436405 - DNA, 33 bp, Homo sapien
tggaaaataacaaacccacttcctgacactttc

SEQ ID NO: 436406 - DNA, 33 bp, Homo sapien
tggaaaataacaaacctacttcctgacactttc

SEQ ID NO: 436407 - DNA, 33 bp, Homo sapien
actttacgctgcgtgtaaaatgaatggtgtaga

SEQ ID NO: 436408 - DNA, 33 bp, Homo sapien
actttacgctgcgtgtcaaatgaatggtgtaga

SEQ ID NO: 436409 - DNA, 33 bp, Homo sapien
ggcccacaggcacgtaccgaaaagcccacttgt

SEQ ID NO: 436410 - DNA, 33 bp, Homo sapien
ggcccacaggcacgtagcgaaaagcccacttgt

SEQ ID NO: 436411 - DNA, 33 bp, Homo sapien
tttatgtgtcaaaaccaaaggaaacaaatctat

SEQ ID NO: 436412 - DNA, 33 bp, Homo sapien
tttatgtgtcaaaaccgaaggaaacaaatctat

SEQ ID NO: 436413 - DNA, 33 bp, Homo sapien
tgccggagacatgataaagtaggaagaaatacc

SEQ ID NO: 436414 - DNA, 33 bp, Homo sapien
tgccggagacatgatagagtaggaagaaatacc

SEQ ID NO: 436415 - DNA, 33 bp, Homo sapien
agcgcactgcgcgtgaaccgaagcagggcgagg

SEQ ID NO: 436416 - DNA, 33 bp, Homo sapien
agcgcactgcgcgtgagccgaagcagggcgagg

SEQ ID NO: 436417 - DNA, 33 bp, Homo sapien
caatactgaggaaatacggttagttttcaaaag

SEQ ID NO: 436418 - DNA, 33 bp, Homo sapien
caatactgaggaaatatggttagttttcaaaag

SEQ ID NO: 436419 - DNA, 33 bp, Homo sapien
gggcgcagtcaggtgaaaaaggacgtgcctaaa

SEQ ID NO: 436420 - DNA, 33 bp, Homo sapien
gggcgcagtcaggtgagaaaggacgtgcctaaa

SEQ ID NO: 436421 - DNA, 33 bp, Homo sapien
cagcttttaacagtgacgattatttcctcctta

SEQ ID NO: 436422 - DNA, 33 bp, Homo sapien
cagcttttaacagtgatgattatttcctcctta

SEQ ID NO: 436423 - DNA, 33 bp, Homo sapien
gttaactaaatatacaactccttaatgaagaca

SEQ ID NO: 436424 - DNA, 33 bp, Homo sapien
gttaactaaatatacagctccttaatgaagaca

SEQ ID NO: 436425 - DNA, 33 bp, Homo sapien
tattactgtatatagaatcaatgcacaggttat

SEQ ID NO: 436426 - DNA, 33 bp, Homo sapien
tattactgtatatagagtcaatgcacaggttat

SEQ ID NO: 436427 - DNA, 33 bp, Homo sapien
agaacttgaggaaaagaactaggtaggagtcca

SEQ ID NO: 436428 - DNA, 33 bp, Homo sapien
agaacttgaggaaaaggactaggtaggagtcca

SEQ ID NO: 436429 - DNA, 33 bp, Homo sapien
tcaactataacaaatacgtcactctggcacagg

SEQ ID NO: 436430 - DNA, 33 bp, Homo sapien
tcaactataacaaatatgtcactctggcacagg

SEQ ID NO: 436431 - DNA, 33 bp, Homo sapien
tgaggcggcaacagagaaagaggatcaaaagac

SEQ ID NO: 436432 - DNA, 33 bp, Homo sapien
tgaggcggcaacagaggaagaggatcaaaagac

SEQ ID NO: 436433 - DNA, 33 bp, Homo sapien
aggtggggtcttcgggaaggcattaggattagg

SEQ ID NO: 436434 - DNA, 33 bp, Homo sapien
aggtggggtcttcgggtaggcattaggattagg

SEQ ID NO: 436435 - DNA, 33 bp, Homo sapien
agagaaatctgtcatgaaactacatctgaacac

SEQ ID NO: 436436 - DNA, 33 bp, Homo sapien
agagaaatctgtcatgtaactacatctgaacac

SEQ ID NO: 436437 - DNA, 33 bp, Homo sapien
tacgcaagtagaaaatcatctagagtgttatac

SEQ ID NO: 436438 - DNA, 33 bp, Homo sapien
tacgcaagtagaaaattatctagagtgttatac

SEQ ID NO: 436439 - DNA, 33 bp, Homo sapien
taagtatgttctctgaaaaactaaagagactgg

SEQ ID NO: 436440 - DNA, 33 bp, Homo sapien
taagtatgttctctgagaaactaaagagactgg

SEQ ID NO: 436441 - DNA, 33 bp, Homo sapien
tctgagtacataagccaatcagagaccttcata

SEQ ID NO: 436442 - DNA, 33 bp, Homo sapien
tctgagtacataagcccatcagagaccttcata

SEQ ID NO: 436443 - DNA, 33 bp, Homo sapien
tggctcacgtgtccaacgtaaatacatactgaa

SEQ ID NO: 436444 - DNA, 33 bp, Homo sapien
tggctcacgtgtccaatgtaaatacatactgaa

SEQ ID NO: 436445 - DNA, 33 bp, Homo sapien
gggttgcaatacaggaacggaacccagagcttg

SEQ ID NO: 436446 - DNA, 33 bp, Homo sapien
gggttgcaatacaggagcggaacccagagcttg

SEQ ID NO: 436447 - DNA, 33 bp, Homo sapien
atatggtagaaaataccggtcactgtatagtca

SEQ ID NO: 436448 - DNA, 33 bp, Homo sapien
atatggtagaaaatactggtcactgtatagtca

SEQ ID NO: 436449 - DNA, 33 bp, Homo sapien
ttcctgcattccacaaatgttccctctgggttc

SEQ ID NO: 436450 - DNA, 33 bp, Homo sapien
ttcctgcattccacaagtgttccctctgggttc

SEQ ID NO: 436451 - DNA, 33 bp, Homo sapien
atagaatcatacactacgtagatttttgtgact

SEQ ID NO: 436452 - DNA, 33 bp, Homo sapien
atagaatcatacactatgtagatttttgtgact

SEQ ID NO: 436453 - DNA, 33 bp, Homo sapien
ctcctgtaagcaataactgatttcctttatgac

SEQ ID NO: 436454 - DNA, 33 bp, Homo sapien
ctcctgtaagcaataattgatttcctttatgac

SEQ ID NO: 436455 - DNA, 33 bp, Homo sapien
ctgctaagtacccgcccaccaagttcatgttac

SEQ ID NO: 436456 - DNA, 33 bp, Homo sapien
ctgctaagtacccgcctaccaagttcatgttac

SEQ ID NO: 436457 - DNA, 33 bp, Homo sapien
aacaatggtgacataaactatggttaaactata

SEQ ID NO: 436458 - DNA, 33 bp, Homo sapien
aacaatggtgacataagctatggttaaactata

SEQ ID NO: 436459 - DNA, 33 bp, Homo sapien
tctataaaaggctaacagtcaatagacacgtaa

SEQ ID NO: 436460 - DNA, 33 bp, Homo sapien
tctataaaaggctaacggtcaatagacacgtaa

SEQ ID NO: 436461 - DNA, 33 bp, Homo sapien
tccaattatatggttaccactgagatgttttca

SEQ ID NO: 436462 - DNA, 33 bp, Homo sapien
tccaattatatggttatcactgagatgttttca

SEQ ID NO: 436463 - DNA, 33 bp, Homo sapien
tttatttttttaaacgcagagtccagaatcagg

SEQ ID NO: 436464 - DNA, 33 bp, Homo sapien
tttatttttttaaacgtagagtccagaatcagg

SEQ ID NO: 436465 - DNA, 33 bp, Homo sapien
gaagattatgttaataaaaggtcaggtatgtgc

SEQ ID NO: 436466 - DNA, 33 bp, Homo sapien
gaagattatgttaatacaaggtcaggtatgtgc

SEQ ID NO: 436467 - DNA, 33 bp, Homo sapien
aaacaatgccttttcacgttgatgatcacttta

SEQ ID NO: 436468 - DNA, 33 bp, Homo sapien
aaacaatgccttttcatgttgatgatcacttta

SEQ ID NO: 436469 - DNA, 33 bp, Homo sapien
acatgcatgtttaatccactatgcttgagaata

SEQ ID NO: 436470 - DNA, 33 bp, Homo sapien
acatgcatgtttaatctactatgcttgagaata

SEQ ID NO: 436471 - DNA, 33 bp, Homo sapien
ctctttcaaaacaggaataacgctgggcgcagt

SEQ ID NO: 436472 - DNA, 33 bp, Homo sapien
ctctttcaaaacaggactaacgctgggcgcagt

SEQ ID NO: 436473 - DNA, 33 bp, Homo sapien
aaaatattggatttataagacgccaaatgtgaa

SEQ ID NO: 436474 - DNA, 33 bp, Homo sapien
aaaatattggatttatgagacgccaaatgtgaa

SEQ ID NO: 436475 - DNA, 33 bp, Homo sapien
ttaaaaatccagtgaccgggtactgtggcttat

SEQ ID NO: 436476 - DNA, 33 bp, Homo sapien
ttaaaaatccagtgactgggtactgtggcttat

SEQ ID NO: 436477 - DNA, 33 bp, Homo sapien
attataagcctttaagaacaagagacatcatat

SEQ ID NO: 436478 - DNA, 33 bp, Homo sapien
attataagcctttaaggacaagagacatcatat

SEQ ID NO: 436479 - DNA, 33 bp, Homo sapien
gtacaatattggtggacggtttgtcataaatag

SEQ ID NO: 436480 - DNA, 33 bp, Homo sapien
gtacaatattggtggagggtttgtcataaatag

SEQ ID NO: 436481 - DNA, 33 bp, Homo sapien; identical to SEQ ID NO: 436479

SEQ ID NO: 436482 - DNA, 33 bp, Homo sapien; identical to SEQ ID NO: 436480

SEQ ID NO: 436483 - DNA, 33 bp, Homo sapien
agcagaagcataagagaccagaaagtacctttt

SEQ ID NO: 436484 - DNA, 33 bp, Homo sapien
agcagaagcataagaggccagaaagtacctttt

SEQ ID NO: 436485 - DNA, 33 bp, Homo sapien
tccaactttcctattgcaatctcctcctctcct

SEQ ID NO: 436486 - DNA, 33 bp, Homo sapien
tccaactttcctattgtaatctcctcctctcct

SEQ ID NO: 436487 - DNA, 33 bp, Homo sapien
agcaatattccaagcaaaagtcaaaaagattgc

SEQ ID NO: 436488 - DNA, 33 bp, Homo sapien
agcaatattccaagcagaagtcaaaaagattgc

SEQ ID NO: 436489 - DNA, 33 bp, Homo sapien
aggatttaatgacaaacgtatgataagctttgg

SEQ ID NO: 436490 - DNA, 33 bp, Homo sapien
aggatttaatgacaaatgtatgataagctttgg

SEQ ID NO: 436491 - DNA, 33 bp, Homo sapien
gcaaaatattccaaaacacactgtggtaggtag

SEQ ID NO: 436492 - DNA, 33 bp, Homo sapien
gcaaaatattccaaaatacactgtggtaggtag

SEQ ID NO: 436493 - DNA, 33 bp, Homo sapien
tttatcctgaattagccaagtgggcctgattta

SEQ ID NO: 436494 - DNA, 33 bp, Homo sapien
tttatcctgaattagctaagtgggcctgattta

SEQ ID NO: 436495 - DNA, 33 bp, Homo sapien
actggctttatagacccaagaagcaaaatattt

SEQ ID NO: 436496 - DNA, 33 bp, Homo sapien
actggctttatagacctaagaagcaaaatattt

SEQ ID NO: 436497 - DNA, 33 bp, Homo sapien
cctgactgcccttccccggacaggttctgtttg

SEQ ID NO: 436498 - DNA, 33 bp, Homo sapien
cctgactgcccttccctggacaggttctgtttg

SEQ ID NO: 436499 - DNA, 33 bp, Homo sapien
atttcctctttgattacgactgaactagactta

SEQ ID NO: 436500 - DNA, 33 bp, Homo sapien
atttcctctttgattatgactgaactagactta

SEQ ID NO: 436501 - DNA, 33 bp, Homo sapien
ctttgaaatgaattacaagcaagagctataaac

SEQ ID NO: 436502 - DNA, 33 bp, Homo sapien
ctttgaaatgaattacgagcaagagctataaac

SEQ ID NO: 436503 - DNA, 33 bp, Homo sapien
ttatcatcaagacttcaaattgggttcttcctt

SEQ ID NO: 436504 - DNA, 33 bp, Homo sapien
ttatcatcaagacttcgaattgggttcttcctt

SEQ ID NO: 436505 - DNA, 33 bp, Homo sapien
aacattaattaaacaaccacccaagttgcacag

SEQ ID NO: 436506 - DNA, 33 bp, Homo sapien
aacattaattaaacaatcacccaagttgcacag

SEQ ID NO: 436507 - DNA, 33 bp, Homo sapien
ggcctcaccaatccaggcaaccctttggaagaa

SEQ ID NO: 436508 - DNA, 33 bp, Homo sapien
ggcctcaccaatccagtcaaccctttggaagaa

SEQ ID NO: 436509 - DNA, 33 bp, Homo sapien
ttcttaaaacatattccacactcccttcgcttt

SEQ ID NO: 436510 - DNA, 33 bp, Homo sapien
ttcttaaaacatattctacactcccttcgcttt

SEQ ID NO: 436511 - DNA, 33 bp, Homo sapien
acgtctcatcctttcacctttttaattggccat

SEQ ID NO: 436512 - DNA, 33 bp, Homo sapien
acgtctcatcctttcatctttttaattggccat

SEQ ID NO: 436513 - DNA, 33 bp, Homo sapien
acacaggttataatacaattgattggatgacat

SEQ ID NO: 436514 - DNA, 33 bp, Homo sapien
acacaggttataatacgattgattggatgacat

SEQ ID NO: 436515 - DNA, 33 bp, Homo sapien
ctgaaccaggtcacgaaaatcctacgaaaagct

SEQ ID NO: 436516 - DNA, 33 bp, Homo sapien
ctgaaccaggtcacgacaatcctacgaaaagct

SEQ ID NO: 436517 - DNA, 33 bp, Homo sapien
catctaatggctttaggagctattaagttcaga

SEQ ID NO: 436518 - DNA, 33 bp, Homo sapien
catctaatggctttagtagctattaagttcaga

SEQ ID NO: 436519 - DNA, 33 bp, Homo sapien
actttccctctttcaaaaatttggttatctttc

SEQ ID NO: 436520 - DNA, 33 bp, Homo sapien
actttccctctttcaataatttggttatctttc

SEQ ID NO: 436521 - DNA, 33 bp, Homo sapien
tcacgcagctgaaccaccatttattgccagggc

SEQ ID NO: 436522 - DNA, 33 bp, Homo sapien
tcacgcagctgaaccatcatttattgccagggc

SEQ ID NO: 436523 - DNA, 33 bp, Homo sapien
ttttaagacccaggtgcaagtgattcttttgcc

SEQ ID NO: 436524 - DNA, 33 bp, Homo sapien
ttttaagacccaggtgtaagtgattcttttgcc

SEQ ID NO: 436525 - DNA, 33 bp, Homo sapien
aagtgacagataagagaagagcagtcaccgtgg

SEQ ID NO: 436526 - DNA, 33 bp, Homo sapien
aagtgacagataagaggagagcagtcaccgtgg

SEQ ID NO: 436527 - DNA, 33 bp, Homo sapien
agaggctagggacatcagaattagaacatcaga

SEQ ID NO: 436528 - DNA, 33 bp, Homo sapien
agaggctagggacatcggaattagaacatcaga

SEQ ID NO: 436529 - DNA, 33 bp, Homo sapien
gaagcctccagctgaacccagtccagttcccac

SEQ ID NO: 436530 - DNA, 33 bp, Homo sapien
gaagcctccagctgaagccagtccagttcccac

SEQ ID NO: 436531 - DNA, 33 bp, Homo sapien
cttttggtgaaggaaacgagatcttatgctaga

SEQ ID NO: 436532 - DNA, 33 bp, Homo sapien
cttttggtgaaggaaatgagatcttatgctaga

SEQ ID NO: 436533 - DNA, 33 bp, Homo sapien
agtgagtaaagcaagcggagatgtaaagacaca

SEQ ID NO: 436534 - DNA, 33 bp, Homo sapien
agtgagtaaagcaagctgagatgtaaagacaca

SEQ ID NO: 436535 - DNA, 33 bp, Homo sapien
tggtggaagcttggcactccctttctaaacttt

SEQ ID NO: 436536 - DNA, 33 bp, Homo sapien
tggtggaagcttggcattccctttctaaacttt

SEQ ID NO: 436537 - DNA, 33 bp, Homo sapien
cacacaatcatagcccactttgggcagctcaag

SEQ ID NO: 436538 - DNA, 33 bp, Homo sapien
cacacaatcatagcccgctttgggcagctcaag

SEQ ID NO: 436539 - DNA, 33 bp, Homo sapien
ctagcttctaagataacggcagaaaacaagcca

SEQ ID NO: 436540 - DNA, 33 bp, Homo sapien
ctagcttctaagataagggcagaaaacaagcca

SEQ ID NO: 436541 - DNA, 33 bp, Homo sapien
tacaaaagagggcaccaacacctctcttcacct

SEQ ID NO: 436542 - DNA, 33 bp, Homo sapien
tacaaaagagggcaccgacacctctcttcacct

SEQ ID NO: 436543 - DNA, 33 bp, Homo sapien
aacgttatggtattcaaacatttttattcacct

SEQ ID NO: 436544 - DNA, 33 bp, Homo sapien
aacgttatggtattcagacatttttattcacct

SEQ ID NO: 436545 - DNA, 33 bp, Homo sapien
tcacttagcagagtccactaggtcatgtaatgc

SEQ ID NO: 436546 - DNA, 33 bp, Homo sapien
tcacttagcagagtccgctaggtcatgtaatgc

SEQ ID NO: 436547 - DNA, 33 bp, Homo sapien
agccttaatgaagtacactaatgatgacagaca

SEQ ID NO: 436548 - DNA, 33 bp, Homo sapien
agccttaatgaagtactctaatgatgacagaca

SEQ ID NO: 436549 - DNA, 33 bp, Homo sapien
catatttatctgtgcacgagcttttagcttatc

SEQ ID NO: 436550 - DNA, 33 bp, Homo sapien
catatttatctgtgcatgagcttttagcttatc

SEQ ID NO: 436551 - DNA, 33 bp, Homo sapien
gcacctgctggaatgcacttatcagaatcctaa

SEQ ID NO: 436552 - DNA, 33 bp, Homo sapien
gcacctgctggaatgcgcttatcagaatcctaa

SEQ ID NO: 436553 - DNA, 33 bp, Homo sapien
tgctttagctctttgcacatatttaagactttt

SEQ ID NO: 436554 - DNA, 33 bp, Homo sapien
tgctttagctctttgcgcatatttaagactttt

SEQ ID NO: 436555 - DNA, 33 bp, Homo sapien
aaggcctcagatgcaaaagttttcactgacctt

SEQ ID NO: 436556 - DNA, 33 bp, Homo sapien
aaggcctcagatgcaacagttttcactgacctt

SEQ ID NO: 436557 - DNA, 33 bp, Homo sapien
atgtgggatacagagaagaagtcagttacctta

SEQ ID NO: 436558 - DNA, 33 bp, Homo sapien
atgtgggatacagagaggaagtcagttacctta

SEQ ID NO: 436559 - DNA, 33 bp, Homo sapien
tccaggaaacctgctgcatgggccgctcgagct

SEQ ID NO: 436560 - DNA, 33 bp, Homo sapien
tccaggaaacctgctgtatgggccgctcgagct

SEQ ID NO: 436561 - DNA, 33 bp, Homo sapien
tatatcctgaaatggaagagaccttttctgata

SEQ ID NO: 436562 - DNA, 33 bp, Homo sapien
tatatcctgaaatggatgagaccttttctgata

SEQ ID NO: 436563 - DNA, 33 bp, Homo sapien
gcactattcgcaacggaaaagacatgaagtcaa

SEQ ID NO: 436564 - DNA, 33 bp, Homo sapien
gcactattcgcaacggcaaagacatgaagtcaa

SEQ ID NO: 436565 - DNA, 33 bp, Homo sapien
tgaacaaattgcaccacatactccctcttctca

SEQ ID NO: 436566 - DNA, 33 bp, Homo sapien
tgaacaaattgcaccatatactccctcttctca

SEQ ID NO: 436567 - DNA, 33 bp, Homo sapien
gacaatgacctgcttgcagagagtttgcttgct

SEQ ID NO: 436568 - DNA, 33 bp, Homo sapien
gacaatgacctgcttgtagagagtttgcttgct

SEQ ID NO: 436569 - DNA, 33 bp, Homo sapien
aactggagtacccaagaaataccatagttcttc

SEQ ID NO: 436570 - DNA, 33 bp, Homo sapien
aactggagtacccaagcaataccatagttcttc

SEQ ID NO: 436571 - DNA, 33 bp, Homo sapien
gtgcagagctaagtgcacggtaagggagtgtca

SEQ ID NO: 436572 - DNA, 33 bp, Homo sapien
gtgcagagctaagtgcgcggtaagggagtgtca

SEQ ID NO: 436573 - DNA, 33 bp, Homo sapien
ggagccagcaggtgaacggagctaaggatcatg

SEQ ID NO: 436574 - DNA, 33 bp, Homo sapien
ggagccagcaggtgaatggagctaaggatcatg

SEQ ID NO: 436575 - DNA, 33 bp, Homo sapien
gcaaagccagggaacacggagttttgaaacgag

SEQ ID NO: 436576 - DNA, 33 bp, Homo sapien
gcaaagccagggaacatggagttttgaaacgag

SEQ ID NO: 436577 - DNA, 33 bp, Homo sapien
aaaatcttcaaaaaaaaatagagcagctaagac

SEQ ID NO: 436578 - DNA, 33 bp, Homo sapien
aaaatcttcaaaaaaatatagagcagctaagac

SEQ ID NO: 436579 - DNA, 33 bp, Homo sapien
gcatgaagcatctttacccaatgtgacaccatt

SEQ ID NO: 436580 - DNA, 33 bp, Homo sapien
gcatgaagcatctttagccaatgtgacaccatt

SEQ ID NO: 436581 - DNA, 33 bp, Homo sapien
aatttaggattcattaataaccattcccagggt

SEQ ID NO: 436582 - DNA, 33 bp, Homo sapien
aatttaggattcattagtaaccattcccagggt

SEQ ID NO: 436583 - DNA, 33 bp, Homo sapien
taaaaactaactcaaaaggaatcaaaagacatt

SEQ ID NO: 436584 - DNA, 33 bp, Homo sapien
taaaaactaactcaaacggaatcaaaagacatt

SEQ ID NO: 436585 - DNA, 33 bp, Homo sapien
gctgcttgccattgtaactgacttctcctttca

SEQ ID NO: 436586 - DNA, 33 bp, Homo sapien
gctgcttgccattgtatctgacttctcctttca

SEQ ID NO: 436587 - DNA, 33 bp, Homo sapien
tctctcaaataaataaatggtatctatctgtat

SEQ ID NO: 436588 - DNA, 33 bp, Homo sapien
tctctcaaataaataagtggtatctatctgtat

SEQ ID NO: 436589 - DNA, 33 bp, Homo sapien
tggggttgaacaagagacaatcatttatttaaa

SEQ ID NO: 436590 - DNA, 33 bp, Homo sapien
tggggttgaacaagaggcaatcatttatttaaa

SEQ ID NO: 436591 - DNA, 33 bp, Homo sapien
tcctcttccaaacagaatctgaagcttcattta

SEQ ID NO: 436592 - DNA, 33 bp, Homo sapien
tcctcttccaaacagattctgaagcttcattta

SEQ ID NO: 436593 - DNA, 33 bp, Homo sapien
tttgttagttgtcaagactgaataaagacaggt

SEQ ID NO: 436594 - DNA, 33 bp, Homo sapien
tttgttagttgtcaagcctgaataaagacaggt

SEQ ID NO: 436595 - DNA, 33 bp, Homo sapien
ctgacattgtgattcacggcaccgcttttgctt

SEQ ID NO: 436596 - DNA, 33 bp, Homo sapien
ctgacattgtgattcatggcaccgcttttgctt

SEQ ID NO: 436597 - DNA, 33 bp, Homo sapien
ttctgtatatgatgaaccatcttctaacatcaa

SEQ ID NO: 436598 - DNA, 33 bp, Homo sapien
ttctgtatatgatgaagcatcttctaacatcaa

SEQ ID NO: 436599 - DNA, 33 bp, Homo sapien
gagttaaagtcatcagcaatgtggacatgccat

SEQ ID NO: 436600 - DNA, 33 bp, Homo sapien
gagttaaagtcatcagtaatgtggacatgccat

SEQ ID NO: 436601 - DNA, 33 bp, Homo sapien
ccttgaagtcaagtggccaagttacctcattag

SEQ ID NO: 436602 - DNA, 33 bp, Homo sapien
ccttgaagtcaagtggtcaagttacctcattag

SEQ ID NO: 436603 - DNA, 33 bp, Homo sapien
agcccaactgtgaacaatgtaatcagtgttatg

SEQ ID NO: 436604 - DNA, 33 bp, Homo sapien
agcccaactgtgaacagtgtaatcagtgttatg

SEQ ID NO: 436605 - DNA, 33 bp, Homo sapien
ctctggagagaaagcaaaaccaactgttataat

SEQ ID NO: 436606 - DNA, 33 bp, Homo sapien
ctctggagagaaagcacaaccaactgttataat

SEQ ID NO: 436607 - DNA, 33 bp, Homo sapien
agtttgctagggtttcaataacagagaaccaca

SEQ ID NO: 436608 - DNA, 33 bp, Homo sapien
agtttgctagggtttcgataacagagaaccaca

SEQ ID NO: 436609 - DNA, 33 bp, Homo sapien
tgacttgaaaatggccaagctctcctgtttcct

SEQ ID NO: 436610 - DNA, 33 bp, Homo sapien
tgacttgaaaatggccgagctctcctgtttcct

SEQ ID NO: 436611 - DNA, 33 bp, Homo sapien
tgacttgagttttggacggtgatagtcccagtc

SEQ ID NO: 436612 - DNA, 33 bp, Homo sapien
tgacttgagttttggatggtgatagtcccagtc

SEQ ID NO: 436613 - DNA, 33 bp, Homo sapien
ttgctctcaagatcaaattcgaacctgcatatc

SEQ ID NO: 436614 - DNA, 33 bp, Homo sapien
ttgctctcaagatcaagttcgaacctgcatatc

SEQ ID NO: 436615 - DNA, 33 bp, Homo sapien
ggatttcctaattttgcatagcacgtgtacttt

SEQ ID NO: 436616 - DNA, 33 bp, Homo sapien
ggatttcctaattttgtatagcacgtgtacttt

SEQ ID NO: 436617 - DNA, 33 bp, Homo sapien
aattccaactaacctacagcgacaaaaaccaga

SEQ ID NO: 436618 - DNA, 33 bp, Homo sapien
aattccaactaacctatagcgacaaaaaccaga

SEQ ID NO: 436619 - DNA, 33 bp, Homo sapien
aaaagccacacacctacaattgcaggcactttc

SEQ ID NO: 436620 - DNA, 33 bp, Homo sapien
aaaagccacacacctataattgcaggcactttc

SEQ ID NO: 436621 - DNA, 33 bp, Homo sapien
cttctttatcttgttaggcttcaaggtccagga

SEQ ID NO: 436622 - DNA, 33 bp, Homo sapien
cttctttatcttgttatgcttcaaggtccagga

SEQ ID NO: 436623 - DNA, 33 bp, Homo sapien
tattcaacagacactagaatgatccatgggtac

SEQ ID NO: 436624 - DNA, 33 bp, Homo sapien
tattcaacagacactataatgatccatgggtac

SEQ ID NO: 436625 - DNA, 33 bp, Homo sapien
ctgaaacatttttaaccgaaccattgtaagtca

SEQ ID NO: 436626 - DNA, 33 bp, Homo sapien
ctgaaacatttttaactgaaccattgtaagtca

SEQ ID NO: 436627 - DNA, 33 bp, Homo sapien
cacttcacacagcttcacagacttcgatctcct

SEQ ID NO: 436628 - DNA, 33 bp, Homo sapien
cacttcacacagcttcccagacttcgatctcct

SEQ ID NO: 436629 - DNA, 33 bp, Homo sapien
taaaattgagaaaataagaggctctgcagggcc

SEQ ID NO: 436630 - DNA, 33 bp, Homo sapien
taaaattgagaaaataggaggctctgcagggcc

SEQ ID NO: 436631 - DNA, 33 bp, Homo sapien
tcatgatgaatgaaaccgagaggaccaacttgg

SEQ ID NO: 436632 - DNA, 33 bp, Homo sapien
tcatgatgaatgaaactgagaggaccaacttgg

SEQ ID NO: 436633 - DNA, 33 bp, Homo sapien
gagtacatccctcttccagcactttccgcctat

SEQ ID NO: 436634 - DNA, 33 bp, Homo sapien
gagtacatccctcttctagcactttccgcctat

SEQ ID NO: 436635 - DNA, 33 bp, Homo sapien
atatgtgcacttttgacatttctttccactttt

SEQ ID NO: 436636 - DNA, 33 bp, Homo sapien
atatgtgcacttttgatatttctttccactttt

SEQ ID NO: 436637 - DNA, 33 bp, Homo sapien
attaatttaggcagaactgacatctttgtaaca

SEQ ID NO: 436638 - DNA, 33 bp, Homo sapien
attaatttaggcagaattgacatctttgtaaca

SEQ ID NO: 436639 - DNA, 33 bp, Homo sapien
attatacctcaataaaaaagactgctggagaaa

SEQ ID NO: 436640 - DNA, 33 bp, Homo sapien
attatacctcaataaacaagactgctggagaaa

SEQ ID NO: 436641 - DNA, 33 bp, Homo sapien
ctcatttttaggcaaaagcccatgaaggttttc

SEQ ID NO: 436642 - DNA, 33 bp, Homo sapien
ctcatttttaggcaaaggcccatgaaggttttc

SEQ ID NO: 436643 - DNA, 33 bp, Homo sapien
aagcaatgggattccacgtgaacagcaaaggag

SEQ ID NO: 436644 - DNA, 33 bp, Homo sapien
aagcaatgggattccatgtgaacagcaaaggag

SEQ ID NO: 436645 - DNA, 33 bp, Homo sapien
acctgaagacatcccgaaagagtggggagaggc

SEQ ID NO: 436646 - DNA, 33 bp, Homo sapien
acctgaagacatcccggaagagtggggagaggc

SEQ ID NO: 436647 - DNA, 33 bp, Homo sapien
agttaggaaataaagcaaaatgcatcagaggtt

SEQ ID NO: 436648 - DNA, 33 bp, Homo sapien
agttaggaaataaagccaaatgcatcagaggtt

SEQ ID NO: 436649 - DNA, 33 bp, Homo sapien
cgggagtttgctacagcagtctggaggtagaga

SEQ ID NO: 436650 - DNA, 33 bp, Homo sapien
cgggagtttgctacaggagtctggaggtagaga

SEQ ID NO: 436651 - DNA, 33 bp, Homo sapien
aaccaattaggtgcctcacttagaaaaataaaa

SEQ ID NO: 436652 - DNA, 33 bp, Homo sapien
aaccaattaggtgccttacttagaaaaataaaa

SEQ ID NO: 436653 - DNA, 33 bp, Homo sapien
ttccaaattttttccagctagcattttaccaat

SEQ ID NO: 436654 - DNA, 33 bp, Homo sapien
ttccaaattttttccatctagcattttaccaat

SEQ ID NO: 436655 - DNA, 33 bp, Homo sapien
taatgttgtgtaaccacagtcaattggttttca

SEQ ID NO: 436656 - DNA, 33 bp, Homo sapien
taatgttgtgtaaccatagtcaattggttttca

SEQ ID NO: 436657 - DNA, 33 bp, Homo sapien
gacaatggacacagaaatcactaggccttgcat

SEQ ID NO: 436658 - DNA, 33 bp, Homo sapien
gacaatggacacagaagtcactaggccttgcat

SEQ ID NO: 436659 - DNA, 33 bp, Homo sapien
ttttgttaattagaacacaaatgttgaatgtgg

SEQ ID NO: 436660 - DNA, 33 bp, Homo sapien
ttttgttaattagaacgcaaatgttgaatgtgg

SEQ ID NO: 436661 - DNA, 33 bp, Homo sapien
tgaaagttgagccaaagatatagaagctgcaaa

SEQ ID NO: 436662 - DNA, 33 bp, Homo sapien
tgaaagttgagccaaatatatagaagctgcaaa

SEQ ID NO: 436663 - DNA, 33 bp, Homo sapien
aatttatgagcagttacagttctccctctaatg

SEQ ID NO: 436664 - DNA, 33 bp, Homo sapien
aatttatgagcagttatagttctccctctaatg

SEQ ID NO: 436665 - DNA, 33 bp, Homo sapien
ttttctgaatcactgcaacatgactatcattcc

SEQ ID NO: 436666 - DNA, 33 bp, Homo sapien
ttttctgaatcactgcgacatgactatcattcc

SEQ ID NO: 436667 - DNA, 33 bp, Homo sapien
caatatttgcttttagaaaaatgcttgaaagaa

SEQ ID NO: 436668 - DNA, 33 bp, Homo sapien
caatatttgcttttaggaaaatgcttgaaagaa

SEQ ID NO: 436669 - DNA, 33 bp, Homo sapien
tattaattctgataaccagtgatagaatctgta

SEQ ID NO: 436670 - DNA, 33 bp, Homo sapien
tattaattctgataacgagtgatagaatctgta

SEQ ID NO: 436671 - DNA, 33 bp, Homo sapien
caacacaagggatgctaaagagcataacagcaa

SEQ ID NO: 436672 - DNA, 33 bp, Homo sapien
caacacaagggatgctgaagagcataacagcaa

SEQ ID NO: 436673 - DNA, 33 bp, Homo sapien
cgttgcccttagacttaaagccccagatgctgt

SEQ ID NO: 436674 - DNA, 33 bp, Homo sapien
cgttgcccttagacttgaagccccagatgctgt

SEQ ID NO: 436675 - DNA, 33 bp, Homo sapien
aacaatctctggcccaacagttcaggaacaaat

SEQ ID NO: 436676 - DNA, 33 bp, Homo sapien
aacaatctctggcccatcagttcaggaacaaat

SEQ ID NO: 436677 - DNA, 33 bp, Homo sapien
caaatgtgaggctttcaaaggagtggtagcttt

SEQ ID NO: 436678 - DNA, 33 bp, Homo sapien
caaatgtgaggctttcgaaggagtggtagcttt

SEQ ID NO: 436679 - DNA, 33 bp, Homo sapien
catgatgtgaagtgtgacaaaggcgaaatgctg

SEQ ID NO: 436680 - DNA, 33 bp, Homo sapien
catgatgtgaagtgtgtcaaaggcgaaatgctg

SEQ ID NO: 436681 - DNA, 33 bp, Homo sapien
cattcacaggctcattaaagtgaggaatgctga

SEQ ID NO: 436682 - DNA, 33 bp, Homo sapien
cattcacaggctcattgaagtgaggaatgctga

SEQ ID NO: 436683 - DNA, 33 bp, Homo sapien
agtgtcctgttttgccgctgggccctggataat

SEQ ID NO: 436684 - DNA, 33 bp, Homo sapien
agtgtcctgttttgcctctgggccctggataat

SEQ ID NO: 436685 - DNA, 33 bp, Homo sapien
attaataaagcacagacctatgaatcaagagtc

SEQ ID NO: 436686 - DNA, 33 bp, Homo sapien
attaataaagcacagagctatgaatcaagagtc

SEQ ID NO: 436687 - DNA, 33 bp, Homo sapien
gagcctgccatcagtacgtgtgctggtcctgat

SEQ ID NO: 436688 - DNA, 33 bp, Homo sapien
gagcctgccatcagtatgtgtgctggtcctgat

SEQ ID NO: 436689 - DNA, 33 bp, Homo sapien
aagactgaggattgggaatatttaaatgaagat

SEQ ID NO: 436690 - DNA, 33 bp, Homo sapien
aagactgaggattggggatatttaaatgaagat

SEQ ID NO: 436691 - DNA, 33 bp, Homo sapien
gaaaaatagggagcaacgggttctctgggcaaa

SEQ ID NO: 436692 - DNA, 33 bp, Homo sapien
gaaaaatagggagcaaggggttctctgggcaaa

SEQ ID NO: 436693 - DNA, 33 bp, Homo sapien
atatgaagtatgttccaaagttgagttcctata

SEQ ID NO: 436694 - DNA, 33 bp, Homo sapien
atatgaagtatgttccgaagttgagttcctata

SEQ ID NO: 436695 - DNA, 33 bp, Homo sapien
tgggtgatcttctggcagccaaggccatcctca

SEQ ID NO: 436696 - DNA, 33 bp, Homo sapien
tgggtgatcttctggctgccaaggccatcctca

SEQ ID NO: 436697 - DNA, 33 bp, Homo sapien
atctagactttcttcccactcacttcccacatc

SEQ ID NO: 436698 - DNA, 33 bp, Homo sapien
atctagactttcttcctactcacttcccacatc

SEQ ID NO: 436699 - DNA, 33 bp, Homo sapien
atctgccagtcacttacaggactacaaataact

SEQ ID NO: 436700 - DNA, 33 bp, Homo sapien
atctgccagtcacttagaggactacaaataact

SEQ ID NO: 436701 - DNA, 33 bp, Homo sapien
ctcactaggattcagccgagcaaataattcctc

SEQ ID NO: 436702 - DNA, 33 bp, Homo sapien
ctcactaggattcagctgagcaaataattcctc

SEQ ID NO: 436703 - DNA, 33 bp, Homo sapien
accccttctcattggcaatttaagtcaaatagc

SEQ ID NO: 436704 - DNA, 33 bp, Homo sapien
accccttctcattggccatttaagtcaaatagc

SEQ ID NO: 436705 - DNA, 33 bp, Homo sapien
tgggcttcccacttacaaacgtgactgccagcc

SEQ ID NO: 436706 - DNA, 33 bp, Homo sapien
tgggcttcccacttacgaacgtgactgccagcc

SEQ ID NO: 436707 - DNA, 33 bp, Homo sapien
caagaacaaatggataaaaacacaggcactttc

SEQ ID NO: 436708 - DNA, 33 bp, Homo sapien
caagaacaaatggatagaaacacaggcactttc

SEQ ID NO: 436709 - DNA, 33 bp, Homo sapien
ctgactgaaacctccaagggcctagacttaaaa

SEQ ID NO: 436710 - DNA, 33 bp, Homo sapien
ctgactgaaacctccaggggcctagacttaaaa

SEQ ID NO: 436711 - DNA, 33 bp, Homo sapien
agcgactctcacttaaaggtgcctcagctactc

SEQ ID NO: 436712 - DNA, 33 bp, Homo sapien
agcgactctcacttaatggtgcctcagctactc

SEQ ID NO: 436713 - DNA, 33 bp, Homo sapien
ctgtgtcatactagggaccagaactaggcttgg

SEQ ID NO: 436714 - DNA, 33 bp, Homo sapien
ctgtgtcatactaggggccagaactaggcttgg

SEQ ID NO: 436715 - DNA, 33 bp, Homo sapien
atgaatgctgtagcacaatccccttggtgaact

SEQ ID NO: 436716 - DNA, 33 bp, Homo sapien
atgaatgctgtagcaccatccccttggtgaact

SEQ ID NO: 436717 - DNA, 33 bp, Homo sapien
tgctggtcagatggcacgttccatttcagaggg

SEQ ID NO: 436718 - DNA, 33 bp, Homo sapien
tgctggtcagatggcatgttccatttcagaggg

SEQ ID NO: 436719 - DNA, 33 bp, Homo sapien
tattgactgtgtgtagaatgctcaaaggatggc

SEQ ID NO: 436720 - DNA, 33 bp, Homo sapien
tattgactgtgtgtaggatgctcaaaggatggc

SEQ ID NO: 436721 - DNA, 33 bp, Homo sapien
acaattttggaggtagacccatgttcctgatct

SEQ ID NO: 436722 - DNA, 33 bp, Homo sapien
acaattttggaggtaggcccatgttcctgatct

SEQ ID NO: 436723 - DNA, 33 bp, Homo sapien
ggacaatgccaatcagaaaaggttcctctgcca

SEQ ID NO: 436724 - DNA, 33 bp, Homo sapien
ggacaatgccaatcaggaaaggttcctctgcca

SEQ ID NO: 436725 - DNA, 33 bp, Homo sapien
ggcccccaggcactgaacattcggactagtggg

SEQ ID NO: 436726 - DNA, 33 bp, Homo sapien
ggcccccaggcactgagcattcggactagtggg

SEQ ID NO: 436727 - DNA, 33 bp, Homo sapien
gtgtcaatttcaataaatgctgagtaatcagac

SEQ ID NO: 436728 - DNA, 33 bp, Homo sapien
gtgtcaatttcaataagtgctgagtaatcagac

SEQ ID NO: 436729 - DNA, 33 bp, Homo sapien
aatgctacaacttgggaacttcagcactctaaa

SEQ ID NO: 436730 - DNA, 33 bp, Homo sapien
aatgctacaacttggggacttcagcactctaaa

SEQ ID NO: 436731 - DNA, 33 bp, Homo sapien
tagtgaccctgggagaaaaaacattccctgcat

SEQ ID NO: 436732 - DNA, 33 bp, Homo sapien
tagtgaccctgggagagaaaacattccctgcat

SEQ ID NO: 436733 - DNA, 33 bp, Homo sapien
ttctggtttttattcacgtagaaaggtcaccat

SEQ ID NO: 436734 - DNA, 33 bp, Homo sapien
ttctggtttttattcatgtagaaaggtcaccat

SEQ ID NO: 436735 - DNA, 33 bp, Homo sapien
caaaccacaagtgtggaattccatgatttgtag

SEQ ID NO: 436736 - DNA, 33 bp, Homo sapien
caaaccacaagtgtggtattccatgatttgtag

SEQ ID NO: 436737 - DNA, 33 bp, Homo sapien
cagcgattagattgcaactctttgtgctggcaa

SEQ ID NO: 436738 - DNA, 33 bp, Homo sapien
cagcgattagattgcagctctttgtgctggcaa

SEQ ID NO: 436739 - DNA, 33 bp, Homo sapien
tccaacaagctctaccaagagacctcctgccta

SEQ ID NO: 436740 - DNA, 33 bp, Homo sapien
tccaacaagctctacctagagacctcctgccta

SEQ ID NO: 436741 - DNA, 33 bp, Homo sapien
ccaagtttctatgcaaacagtaacaggaagaaa

SEQ ID NO: 436742 - DNA, 33 bp, Homo sapien
ccaagtttctatgcaagcagtaacaggaagaaa

SEQ ID NO: 436743 - DNA, 33 bp, Homo sapien
catgcccacgttgagacgtttcagatgctctgc

SEQ ID NO: 436744 - DNA, 33 bp, Homo sapien
catgcccacgttgagatgtttcagatgctctgc

SEQ ID NO: 436745 - DNA, 33 bp, Homo sapien
cttagtttctcgatacaaagtcccaggtcactc

SEQ ID NO: 436746 - DNA, 33 bp, Homo sapien
cttagtttctcgatacgaagtcccaggtcactc

SEQ ID NO: 436747 - DNA, 33 bp, Homo sapien
taatgctaaagatttccctggggtcttctattt

SEQ ID NO: 436748 - DNA, 33 bp, Homo sapien
taatgctaaagatttctctggggtcttctattt

SEQ ID NO: 436749 - DNA, 33 bp, Homo sapien
aaaaacctcaatcaaccggagtccagctaacta

SEQ ID NO: 436750 - DNA, 33 bp, Homo sapien
aaaaacctcaatcaactggagtccagctaacta

SEQ ID NO: 436751 - DNA, 33 bp, Homo sapien
tctcaatatccagagacagcctgttggtcctgg

SEQ ID NO: 436752 - DNA, 33 bp, Homo sapien
tctcaatatccagagagagcctgttggtcctgg

SEQ ID NO: 436753 - DNA, 33 bp, Homo sapien
gtactagggatggacaaaatttctaaagggaca

SEQ ID NO: 436754 - DNA, 33 bp, Homo sapien
gtactagggatggacacaatttctaaagggaca

SEQ ID NO: 436755 - DNA, 33 bp, Homo sapien
gacacaggaaaacccaatccatcctatcactgc

SEQ ID NO: 436756 - DNA, 33 bp, Homo sapien
gacacaggaaaacccactccatcctatcactgc

SEQ ID NO: 436757 - DNA, 33 bp, Homo sapien
gtgcgtctgttttaaactcaaccatgattaaat

SEQ ID NO: 436758 - DNA, 33 bp, Homo sapien
gtgcgtctgttttaaattcaaccatgattaaat

SEQ ID NO: 436759 - DNA, 33 bp, Homo sapien
gactgcctgccaggaaacaacatgatgtctggt

SEQ ID NO: 436760 - DNA, 33 bp, Homo sapien
gactgcctgccaggaagcaacatgatgtctggt

SEQ ID NO: 436761 - DNA, 33 bp, Homo sapien
ttcctggcaggcagtcgctacacccttcaaagt

SEQ ID NO: 436762 - DNA, 33 bp, Homo sapien
ttcctggcaggcagtctctacacccttcaaagt

SEQ ID NO: 436763 - DNA, 33 bp, Homo sapien
aacaacagactacacaagatgttgcttcaaggg

SEQ ID NO: 436764 - DNA, 33 bp, Homo sapien
aacaacagactacacaggatgttgcttcaaggg

SEQ ID NO: 436765 - DNA, 33 bp, Homo sapien
caatttttcaggctaacgtgagagtctcatttc

SEQ ID NO: 436766 - DNA, 33 bp, Homo sapien
caatttttcaggctaatgtgagagtctcatttc

SEQ ID NO: 436767 - DNA, 33 bp, Homo sapien
ttcgaatcgtctccaacaccccgcaggctctga

SEQ ID NO: 436768 - DNA, 33 bp, Homo sapien
ttcgaatcgtctccaataccccgcaggctctga

SEQ ID NO: 436769 - DNA, 33 bp, Homo sapien
tgaccaggtcctccacaaagcgttcccaggtta

SEQ ID NO: 436770 - DNA, 33 bp, Homo sapien
tgaccaggtcctccacgaagcgttcccaggtta

SEQ ID NO: 436771 - DNA, 33 bp, Homo sapien
cagcaaagaattctctaactcaatatgtcagtg

SEQ ID NO: 436772 - DNA, 33 bp, Homo sapien
cagcaaagaattctctgactcaatatgtcagtg

SEQ ID NO: 436773 - DNA, 33 bp, Homo sapien
tattcatgagagtataaaaatttatgtgattac

SEQ ID NO: 436774 - DNA, 33 bp, Homo sapien
tattcatgagagtatataaatttatgtgattac

SEQ ID NO: 436775 - DNA, 33 bp, Homo sapien
gctttattacatgaccagagtgtagaaggcagt

SEQ ID NO: 436776 - DNA, 33 bp, Homo sapien
gctttattacatgacccgagtgtagaaggcagt

SEQ ID NO: 436777 - DNA, 33 bp, Homo sapien
tcccatctttccttccccatgatttctgtttcg

SEQ ID NO: 436778 - DNA, 33 bp, Homo sapien
tcccatctttccttcctcatgatttctgtttcg

SEQ ID NO: 436779 - DNA, 33 bp, Homo sapien
gccatgagtacatctcacagcaagtgttaaatt

SEQ ID NO: 436780 - DNA, 33 bp, Homo sapien
gccatgagtacatctcgcagcaagtgttaaatt

SEQ ID NO: 436781 - DNA, 33 bp, Homo sapien
gcattgtaaccttgtacgtatgtgcaggtgggc

SEQ ID NO: 436782 - DNA, 33 bp, Homo sapien
gcattgtaaccttgtatgtatgtgcaggtgggc

SEQ ID NO: 436783 - DNA, 33 bp, Homo sapien
gacacgtgttgattccagcatgattgtccatgt

SEQ ID NO: 436784 - DNA, 33 bp, Homo sapien
gacacgtgttgattcccgcatgattgtccatgt

SEQ ID NO: 436785 - DNA, 33 bp, Homo sapien
tgcttgtcaagtccaacggctagaagtggtgtg

SEQ ID NO: 436786 - DNA, 33 bp, Homo sapien
tgcttgtcaagtccaatggctagaagtggtgtg

SEQ ID NO: 436787 - DNA, 33 bp, Homo sapien
atggcaatgcaaaggacggaagtgcaggaaaaa

SEQ ID NO: 436788 - DNA, 33 bp, Homo sapien
atggcaatgcaaaggatggaagtgcaggaaaaa

SEQ ID NO: 436789 - DNA, 33 bp, Homo sapien
ggatcactacagtcaccgaaagcgtgagggcat

SEQ ID NO: 436790 - DNA, 33 bp, Homo sapien
ggatcactacagtcactgaaagcgtgagggcat

SEQ ID NO: 436791 - DNA, 33 bp, Homo sapien
ttcttataaacacaaacgagtaggtgtgatttc

SEQ ID NO: 436792 - DNA, 33 bp, Homo sapien
ttcttataaacacaaatgagtaggtgtgatttc

SEQ ID NO: 436793 - DNA, 33 bp, Homo sapien
gttttgtcaactaaaaagttatcctacatagta

SEQ ID NO: 436794 - DNA, 33 bp, Homo sapien
gttttgtcaactaaaaggttatcctacatagta

SEQ ID NO: 436795 - DNA, 33 bp, Homo sapien
ggaaagacaaccaagacacaatggtaactgaaa

SEQ ID NO: 436796 - DNA, 33 bp, Homo sapien
ggaaagacaaccaagatacaatggtaactgaaa

SEQ ID NO: 436797 - DNA, 33 bp, Homo sapien
ttatagggccagaaaactctgttgtctcagtag

SEQ ID NO: 436798 - DNA, 33 bp, Homo sapien
ttatagggccagaaaattctgttgtctcagtag

SEQ ID NO: 436799 - DNA, 33 bp, Homo sapien
tgatattcacttttacccacggccaatttgtcc

SEQ ID NO: 436800 - DNA, 33 bp, Homo sapien
tgatattcacttttactcacggccaatttgtcc

SEQ ID NO: 436801 - DNA, 33 bp, Homo sapien
tttgctatgcactagcccggtgtttcttaaatt

SEQ ID NO: 436802 - DNA, 33 bp, Homo sapien
tttgctatgcactagctcggtgtttcttaaatt

SEQ ID NO: 436803 - DNA, 33 bp, Homo sapien
gttatgccttgtggtaagcttggtatcccctag

SEQ ID NO: 436804 - DNA, 33 bp, Homo sapien
gttatgccttgtggtacgcttggtatcccctag

SEQ ID NO: 436805 - DNA, 33 bp, Homo sapien
tgcaggaccacctgaaagtacttccctgcaact

SEQ ID NO: 436806 - DNA, 33 bp, Homo sapien
tgcaggaccacctgaaggtacttccctgcaact

SEQ ID NO: 436807 - DNA, 33 bp, Homo sapien
ctgttgatctcacttccctcttctttggaattc

SEQ ID NO: 436808 - DNA, 33 bp, Homo sapien
ctgttgatctcacttctctcttctttggaattc

SEQ ID NO: 436809 - DNA, 33 bp, Homo sapien
tgaaaggagagactgaaccttgtcagaaaatta

SEQ ID NO: 436810 - DNA, 33 bp, Homo sapien
tgaaaggagagactgatccttgtcagaaaatta

SEQ ID NO: 436811 - DNA, 33 bp, Homo sapien
ctgggccactggcaccaaccttcctggtcactc

SEQ ID NO: 436812 - DNA, 33 bp, Homo sapien
ctgggccactggcaccgaccttcctggtcactc

SEQ ID NO: 436813 - DNA, 33 bp, Homo sapien
aactcactgaactgtacgcttcagtgaaagggt

SEQ ID NO: 436814 - DNA, 33 bp, Homo sapien
aactcactgaactgtatgcttcagtgaaagggt

SEQ ID NO: 436815 - DNA, 33 bp, Homo sapien
gccaagaagatgagttcaacaccacattaggga

SEQ ID NO: 436816 - DNA, 33 bp, Homo sapien
gccaagaagatgagttgaacaccacattaggga

SEQ ID NO: 436817 - DNA, 33 bp, Homo sapien
gatgtgggcttcatcccgagaatcggtatccaa

SEQ ID NO: 436818 - DNA, 33 bp, Homo sapien
gatgtgggcttcatcctgagaatcggtatccaa

SEQ ID NO: 436819 - DNA, 33 bp, Homo sapien
ctctatcactcacaagccatctgacgtggcatt

SEQ ID NO: 436820 - DNA, 33 bp, Homo sapien
ctctatcactcacaagtcatctgacgtggcatt

SEQ ID NO: 436821 - DNA, 33 bp, Homo sapien
ttctgtgtgctagaagacaacatgtttaaagtg

SEQ ID NO: 436822 - DNA, 33 bp, Homo sapien
ttctgtgtgctagaaggcaacatgtttaaagtg

SEQ ID NO: 436823 - DNA, 33 bp, Homo sapien
tgtaaggtaaaactgacgatgcaaattagttca

SEQ ID NO: 436824 - DNA, 33 bp, Homo sapien
tgtaaggtaaaactgatgatgcaaattagttca

SEQ ID NO: 436825 - DNA, 33 bp, Homo sapien
ccgtattcccattcaaccacaggaagccccata

SEQ ID NO: 436826 - DNA, 33 bp, Homo sapien
ccgtattcccattcaatcacaggaagccccata

SEQ ID NO: 436827 - DNA, 33 bp, Homo sapien
acaaagctgctctgacccaggtctcccccgatg

SEQ ID NO: 436828 - DNA, 33 bp, Homo sapien
acaaagctgctctgactcaggtctcccccgatg

SEQ ID NO: 436829 - DNA, 33 bp, Homo sapien
ggagaggatcgccatacagtggatgttttcctg

SEQ ID NO: 436830 - DNA, 33 bp, Homo sapien
ggagaggatcgccatatagtggatgttttcctg

SEQ ID NO: 436831 - DNA, 33 bp, Homo sapien
aatgtgttcgttactccgaatggattgcatggt

SEQ ID NO: 436832 - DNA, 33 bp, Homo sapien
aatgtgttcgttactctgaatggattgcatggt

SEQ ID NO: 436833 - DNA, 33 bp, Homo sapien
tgaagactcagattacaggaaggtttgtcctgc

SEQ ID NO: 436834 - DNA, 33 bp, Homo sapien
tgaagactcagattacgggaaggtttgtcctgc

SEQ ID NO: 436835 - DNA, 33 bp, Homo sapien
tcaattgaataagcatcagcttgtgagcagcat

SEQ ID NO: 436836 - DNA, 33 bp, Homo sapien
tcaattgaataagcattagcttgtgagcagcat

SEQ ID NO: 436837 - DNA, 33 bp, Homo sapien
gctgttaagtgagacacacatgtgaaagtactg

SEQ ID NO: 436838 - DNA, 33 bp, Homo sapien
gctgttaagtgagacatacatgtgaaagtactg

SEQ ID NO: 436839 - DNA, 33 bp, Homo sapien
ggatgtgatgaagaaacttgcccagaggatgca

SEQ ID NO: 436840 - DNA, 33 bp, Homo sapien
ggatgtgatgaagaaatttgcccagaggatgca

SEQ ID NO: 436841 - DNA, 33 bp, Homo sapien
ctgaggactttgagaagactcgacaagccttca

SEQ ID NO: 436842 - DNA, 33 bp, Homo sapien
ctgaggactttgagaatactcgacaagccttca

SEQ ID NO: 436843 - DNA, 33 bp, Homo sapien
ggtccagagagtgatacgacggagttgatggca

SEQ ID NO: 436844 - DNA, 33 bp, Homo sapien
ggtccagagagtgatatgacggagttgatggca

SEQ ID NO: 436845 - DNA, 33 bp, Homo sapien
ttaactcatagtttagaattgaggcaaagagaa

SEQ ID NO: 436846 - DNA, 33 bp, Homo sapien
ttaactcatagtttaggattgaggcaaagagaa

SEQ ID NO: 436847 - DNA, 33 bp, Homo sapien
gggcagtgacctctaacatcgttccctctgcca

SEQ ID NO: 436848 - DNA, 33 bp, Homo sapien
gggcagtgacctctaagatcgttccctctgcca

SEQ ID NO: 436849 - DNA, 33 bp, Homo sapien
actcacaacgccgataaaagtcctcctccagct

SEQ ID NO: 436850 - DNA, 33 bp, Homo sapien
actcacaacgccgatagaagtcctcctccagct

SEQ ID NO: 436851 - DNA, 33 bp, Homo sapien
cagagctaacacataagaggcattcaacgtttg

SEQ ID NO: 436852 - DNA, 33 bp, Homo sapien
cagagctaacacataataggcattcaacgtttg

SEQ ID NO: 436853 - DNA, 33 bp, Homo sapien
ttaaggccccacaggacgatggcagactgccag

SEQ ID NO: 436854 - DNA, 33 bp, Homo sapien
ttaaggccccacaggatgatggcagactgccag

SEQ ID NO: 436855 - DNA, 33 bp, Homo sapien
gtagaaagcatttcccagaccttcaacataagc

SEQ ID NO: 436856 - DNA, 33 bp, Homo sapien
gtagaaagcatttcccggaccttcaacataagc

SEQ ID NO: 436857 - DNA, 33 bp, Homo sapien
gaaagccagacactgtaaacccatttttacaag

SEQ ID NO: 436858 - DNA, 33 bp, Homo sapien
gaaagccagacactgttaacccatttttacaag

SEQ ID NO: 436859 - DNA, 33 bp, Homo sapien
tctgttgaagctcctcagaaaacagttccctat

SEQ ID NO: 436860 - DNA, 33 bp, Homo sapien
tctgttgaagctcctcggaaaacagttccctat

SEQ ID NO: 436861 - DNA, 33 bp, Homo sapien
ctccagccagattaaactgctaaagcacagtcc

SEQ ID NO: 436862 - DNA, 33 bp, Homo sapien
ctccagccagattaaattgctaaagcacagtcc

SEQ ID NO: 436863 - DNA, 33 bp, Homo sapien
aactggggtctaatacaggcccagggattttgc

SEQ ID NO: 436864 - DNA, 33 bp, Homo sapien
aactggggtctaatactggcccagggattttgc

SEQ ID NO: 436865 - DNA, 33 bp, Homo sapien
caagtcacatttgagaagtgtggcatagatgac

SEQ ID NO: 436866 - DNA, 33 bp, Homo sapien
caagtcacatttgagaggtgtggcatagatgac

SEQ ID NO: 436867 - DNA, 33 bp, Homo sapien
ttctgtaccagatctaggttaacattccttttg

SEQ ID NO: 436868 - DNA, 33 bp, Homo sapien
ttctgtaccagatctatgttaacattccttttg

SEQ ID NO: 436869 - DNA, 33 bp, Homo sapien
aacggcattactacgaggtaaatagcaatgcca

SEQ ID NO: 436870 - DNA, 33 bp, Homo sapien
aacggcattactacgatgtaaatagcaatgcca

SEQ ID NO: 436871 - DNA, 33 bp, Homo sapien
gcagtctgaatttacactgacagaaagcaaatt

SEQ ID NO: 436872 - DNA, 33 bp, Homo sapien
gcagtctgaatttacattgacagaaagcaaatt

SEQ ID NO: 436873 - DNA, 33 bp, Homo sapien
ccatcaacatcagacaaaaagaccagatgacat

SEQ ID NO: 436874 - DNA, 33 bp, Homo sapien
ccatcaacatcagacagaaagaccagatgacat

SEQ ID NO: 436875 - DNA, 33 bp, Homo sapien
gcaggaggtcacagaacgagagacccaggtgag

SEQ ID NO: 436876 - DNA, 33 bp, Homo sapien
gcaggaggtcacagaatgagagacccaggtgag

SEQ ID NO: 436877 - DNA, 33 bp, Homo sapien
cagtcttgtcagaacaaagcagattctggtccc

SEQ ID NO: 436878 - DNA, 33 bp, Homo sapien
cagtcttgtcagaacagagcagattctggtccc

SEQ ID NO: 436879 - DNA, 33 bp, Homo sapien
aaaggcccagttattaaggagtggatggaatct

SEQ ID NO: 436880 - DNA, 33 bp, Homo sapien
aaaggcccagttattatggagtggatggaatct

SEQ ID NO: 436881 - DNA, 33 bp, Homo sapien
caacccctgtattcaactcctggtccatcaaag

SEQ ID NO: 436882 - DNA, 33 bp, Homo sapien
caacccctgtattcaagtcctggtccatcaaag

SEQ ID NO: 436883 - DNA, 33 bp, Homo sapien
aaccctccctgcacaccggaatccctgggagag

SEQ ID NO: 436884 - DNA, 33 bp, Homo sapien
aaccctccctgcacactggaatccctgggagag

SEQ ID NO: 436885 - DNA, 33 bp, Homo sapien
caagatagtgattccacatattggcagctggat

SEQ ID NO: 436886 - DNA, 33 bp, Homo sapien
caagatagtgattccatatattggcagctggat

SEQ ID NO: 436887 - DNA, 33 bp, Homo sapien
gaatgaatgagtgaaaaccagagtgaaaaaact

SEQ ID NO: 436888 - DNA, 33 bp, Homo sapien
gaatgaatgagtgaaagccagagtgaaaaaact

SEQ ID NO: 436889 - DNA, 33 bp, Homo sapien
ccatggctggctctgagctatcattatgagtga

SEQ ID NO: 436890 - DNA, 33 bp, Homo sapien
ccatggctggctctgatctatcattatgagtga

SEQ ID NO: 436891 - DNA, 33 bp, Homo sapien
acagtatctccaacccaaaccttttctccaagc

SEQ ID NO: 436892 - DNA, 33 bp, Homo sapien
acagtatctccaacccgaaccttttctccaagc

SEQ ID NO: 436893 - DNA, 33 bp, Homo sapien
caccttttagatgttaaaagaacgttgcagatc

SEQ ID NO: 436894 - DNA, 33 bp, Homo sapien
caccttttagatgttagaagaacgttgcagatc

SEQ ID NO: 436895 - DNA, 33 bp, Homo sapien
ttgaagacagagtaagaacaaaccaactcatgc

SEQ ID NO: 436896 - DNA, 33 bp, Homo sapien
ttgaagacagagtaaggacaaaccaactcatgc

SEQ ID NO: 436897 - DNA, 33 bp, Homo sapien
ctgcaatttgaatccacgaaggcctcaaggaaa

SEQ ID NO: 436898 - DNA, 33 bp, Homo sapien
ctgcaatttgaatccaggaaggcctcaaggaaa

SEQ ID NO: 436899 - DNA, 33 bp, Homo sapien
aagtgtggaatatgaactgatgaggcaagaaag

SEQ ID NO: 436900 - DNA, 33 bp, Homo sapien
aagtgtggaatatgaattgatgaggcaagaaag

SEQ ID NO: 436901 - DNA, 33 bp, Homo sapien
tcttagctgccaatctcaactgtttttctgcag

SEQ ID NO: 436902 - DNA, 33 bp, Homo sapien
tcttagctgccaatctgaactgtttttctgcag

SEQ ID NO: 436903 - DNA, 33 bp, Homo sapien
gggacagaagttggaaaggatatccatgaatag

SEQ ID NO: 436904 - DNA, 33 bp, Homo sapien
gggacagaagttggaagggatatccatgaatag

SEQ ID NO: 436905 - DNA, 33 bp, Homo sapien
acatcatcattcacccaaactgccacagaagtt

SEQ ID NO: 436906 - DNA, 33 bp, Homo sapien
acatcatcattcacccgaactgccacagaagtt

SEQ ID NO: 436907 - DNA, 33 bp, Homo sapien
gatattgttctgaaaacgttattacgccatgga

SEQ ID NO: 436908 - DNA, 33 bp, Homo sapien
gatattgttctgaaaatgttattacgccatgga

SEQ ID NO: 436909 - DNA, 33 bp, Homo sapien
atactctcagggcaggaaaactcatcgctgagg

SEQ ID NO: 436910 - DNA, 33 bp, Homo sapien
atactctcagggcagggaaactcatcgctgagg

SEQ ID NO: 436911 - DNA, 33 bp, Homo sapien
tctacagtaaattgtgaaagagactcacaataa

SEQ ID NO: 436912 - DNA, 33 bp, Homo sapien
tctacagtaaattgtggaagagactcacaataa

SEQ ID NO: 436913 - DNA, 33 bp, Homo sapien
tcacactatgtttaaccgcctgtgtctgtcatc

SEQ ID NO: 436914 - DNA, 33 bp, Homo sapien
tcacactatgtttaactgcctgtgtctgtcatc

SEQ ID NO: 436915 - DNA, 33 bp, Homo sapien
catcagtaaaaacctccaaataaacatgcagag

SEQ ID NO: 436916 - DNA, 33 bp, Homo sapien
catcagtaaaaacctctaaataaacatgcagag

SEQ ID NO: 436917 - DNA, 33 bp, Homo sapien
cttaaagggatttcaaataagaggctcaaagat

SEQ ID NO: 436918 - DNA, 33 bp, Homo sapien
cttaaagggatttcaagtaagaggctcaaagat

SEQ ID NO: 436919 - DNA, 33 bp, Homo sapien
ttcatcctaacttctacgatgtacccacttgcc

SEQ ID NO: 436920 - DNA, 33 bp, Homo sapien
ttcatcctaacttctatgatgtacccacttgcc

SEQ ID NO: 436921 - DNA, 33 bp, Homo sapien
tcactgggggccaaaagccacatactatgcatg

SEQ ID NO: 436922 - DNA, 33 bp, Homo sapien
tcactgggggccaaaatccacatactatgcatg

SEQ ID NO: 436923 - DNA, 33 bp, Homo sapien
tctgtagccactcttgcatttctagcttttcat

SEQ ID NO: 436924 - DNA, 33 bp, Homo sapien
tctgtagccactcttggatttctagcttttcat

SEQ ID NO: 436925 - DNA, 33 bp, Homo sapien
aatcctgtaccagcccaaagtttctcaaagtct

SEQ ID NO: 436926 - DNA, 33 bp, Homo sapien
aatcctgtaccagcccgaagtttctcaaagtct

SEQ ID NO: 436927 - DNA, 33 bp, Homo sapien
aatcttgtgcttgttcaaaatccctacctggtg

SEQ ID NO: 436928 - DNA, 33 bp, Homo sapien
aatcttgtgcttgttccaaatccctacctggtg

SEQ ID NO: 436929 - DNA, 33 bp, Homo sapien
agcaatttcaaacttacggaaaaggctatgaaa

SEQ ID NO: 436930 - DNA, 33 bp, Homo sapien
agcaatttcaaacttagggaaaaggctatgaaa

SEQ ID NO: 436931 - DNA, 33 bp, Homo sapien
aaaggagttatttcaaaagacaggataatgggc

SEQ ID NO: 436932 - DNA, 33 bp, Homo sapien
aaaggagttatttcaagagacaggataatgggc

SEQ ID NO: 436933 - DNA, 33 bp, Homo sapien
tcagctgagtccacacaatttcaacatgattgt

SEQ ID NO: 436934 - DNA, 33 bp, Homo sapien
tcagctgagtccacacgatttcaacatgattgt

SEQ ID NO: 436935 - DNA, 33 bp, Homo sapien
attaaatcacaaacacacaatcctgtcacccac

SEQ ID NO: 436936 - DNA, 33 bp, Homo sapien
attaaatcacaaacacgcaatcctgtcacccac

SEQ ID NO: 436937 - DNA, 33 bp, Homo sapien
aaaaaatatttgctcaatacctgtagtcagcat

SEQ ID NO: 436938 - DNA, 33 bp, Homo sapien
aaaaaatatttgctcagtacctgtagtcagcat

SEQ ID NO: 436939 - DNA, 33 bp, Homo sapien
aagtagaaggatgaacccttatttctggtcctc

SEQ ID NO: 436940 - DNA, 33 bp, Homo sapien
aagtagaaggatgaactcttatttctggtcctc

SEQ ID NO: 436941 - DNA, 33 bp, Homo sapien
aattgtggaatcagaaaggtgctgtcctctggc

SEQ ID NO: 436942 - DNA, 33 bp, Homo sapien
aattgtggaatcagaagggtgctgtcctctggc

SEQ ID NO: 436943 - DNA, 33 bp, Homo sapien
tccacacctttgtaaaacctgtctaaggcctgg

SEQ ID NO: 436944 - DNA, 33 bp, Homo sapien
tccacacctttgtaaagcctgtctaaggcctgg

SEQ ID NO: 436945 - DNA, 33 bp, Homo sapien
attgtctggtgttttacgtgtagcaggcttcca

SEQ ID NO: 436946 - DNA, 33 bp, Homo sapien
attgtctggtgttttatgtgtagcaggcttcca

SEQ ID NO: 436947 - DNA, 33 bp, Homo sapien
cagaacctctctgcaccgtcaagacccaattta

SEQ ID NO: 436948 - DNA, 33 bp, Homo sapien
cagaacctctctgcactgtcaagacccaattta

SEQ ID NO: 436949 - DNA, 33 bp, Homo sapien
ccataataggaatgccactaccccatgagttga

SEQ ID NO: 436950 - DNA, 33 bp, Homo sapien
ccataataggaatgccgctaccccatgagttga

SEQ ID NO: 436951 - DNA, 33 bp, Homo sapien
agcagaagtcttcagaaaccaagcccaccctga

SEQ ID NO: 436952 - DNA, 33 bp, Homo sapien
agcagaagtcttcagacaccaagcccaccctga

SEQ ID NO: 436953 - DNA, 33 bp, Homo sapien
ttctctttctcaagggcactatgctgcacacct

SEQ ID NO: 436954 - DNA, 33 bp, Homo sapien
ttctctttctcaagggtactatgctgcacacct

SEQ ID NO: 436955 - DNA, 33 bp, Homo sapien
ttcactctcccatccaaaaacaggacttcagtg

SEQ ID NO: 436956 - DNA, 33 bp, Homo sapien
ttcactctcccatccagaaacaggacttcagtg

SEQ ID NO: 436957 - DNA, 33 bp, Homo sapien
tctgattcacagagaaaaacatctaaagagatc

SEQ ID NO: 436958 - DNA, 33 bp, Homo sapien
tctgattcacagagaagaacatctaaagagatc

SEQ ID NO: 436959 - DNA, 33 bp, Homo sapien
acatcctttgaacatcagagtacagactccagg

SEQ ID NO: 436960 - DNA, 33 bp, Homo sapien
acatcctttgaacatccgagtacagactccagg

SEQ ID NO: 436961 - DNA, 33 bp, Homo sapien
catcatcagatgctcaacagctttccacaatgt

SEQ ID NO: 436962 - DNA, 33 bp, Homo sapien
catcatcagatgctcagcagctttccacaatgt

SEQ ID NO: 436963 - DNA, 33 bp, Homo sapien
tgcaccttctcaactacgtctgtttattttcag

SEQ ID NO: 436964 - DNA, 33 bp, Homo sapien
tgcaccttctcaactaggtctgtttattttcag

SEQ ID NO: 436965 - DNA, 33 bp, Homo sapien
ttcttaggagtcaggacatcttccctgggttaa

SEQ ID NO: 436966 - DNA, 33 bp, Homo sapien
ttcttaggagtcaggagatcttccctgggttaa

SEQ ID NO: 436967 - DNA, 33 bp, Homo sapien
tctgcttccatgcttacggtggatattcttgct

SEQ ID NO: 436968 - DNA, 33 bp, Homo sapien
tctgcttccatgcttatggtggatattcttgct

SEQ ID NO: 436969 - DNA, 33 bp, Homo sapien
taaggacttcagaaaaagacagtcctccagccg

SEQ ID NO: 436970 - DNA, 33 bp, Homo sapien
taaggacttcagaaaaggacagtcctccagccg

SEQ ID NO: 436971 - DNA, 33 bp, Homo sapien
ggaactggcataaatgcaacaagaattctgaac

SEQ ID NO: 436972 - DNA, 33 bp, Homo sapien
ggaactggcataaatggaacaagaattctgaac

SEQ ID NO: 436973 - DNA, 33 bp, Homo sapien
gaagaaagaacgtacaagaaattcagcactcaa

SEQ ID NO: 436974 - DNA, 33 bp, Homo sapien
gaagaaagaacgtacaggaaattcagcactcaa

SEQ ID NO: 436975 - DNA, 33 bp, Homo sapien
catctcattaacgacaaatccaagatgtgccag

SEQ ID NO: 436976 - DNA, 33 bp, Homo sapien
catctcattaacgacagatccaagatgtgccag

SEQ ID NO: 436977 - DNA, 33 bp, Homo sapien
ttcctacctcccaccactaaataaccacaacat

SEQ ID NO: 436978 - DNA, 33 bp, Homo sapien
ttcctacctcccaccattaaataaccacaacat

SEQ ID NO: 436979 - DNA, 33 bp, Homo sapien
agttcttctaatccaacggttcatttgtcgtat

SEQ ID NO: 436980 - DNA, 33 bp, Homo sapien
agttcttctaatccaatggttcatttgtcgtat

SEQ ID NO: 436981 - DNA, 33 bp, Homo sapien
caccttttttggataactgatgatgcacggtaa

SEQ ID NO: 436982 - DNA, 33 bp, Homo sapien
caccttttttggataattgatgatgcacggtaa

SEQ ID NO: 436983 - DNA, 33 bp, Homo sapien
accaagatcagagaaggatcgagtccatgtgca

SEQ ID NO: 436984 - DNA, 33 bp, Homo sapien
accaagatcagagaagtatcgagtccatgtgca

SEQ ID NO: 436985 - DNA, 33 bp, Homo sapien
ggataacctaattgcccgatttaatcattatac

SEQ ID NO: 436986 - DNA, 33 bp, Homo sapien
ggataacctaattgcctgatttaatcattatac

SEQ ID NO: 436987 - DNA, 33 bp, Homo sapien
ttcctttaaagctataataagagaccagaaagc

SEQ ID NO: 436988 - DNA, 33 bp, Homo sapien
ttcctttaaagctatagtaagagaccagaaagc

SEQ ID NO: 436989 - DNA, 33 bp, Homo sapien
gtgttcttgcccaaaagtcacaacctccatgta

SEQ ID NO: 436990 - DNA, 33 bp, Homo sapien
gtgttcttgcccaaaattcacaacctccatgta

SEQ ID NO: 436991 - DNA, 33 bp, Homo sapien
cccaggaaaggctgaaaagaagcatggaggttg

SEQ ID NO: 436992 - DNA, 33 bp, Homo sapien
cccaggaaaggctgaagagaagcatggaggttg

SEQ ID NO: 436993 - DNA, 33 bp, Homo sapien
gatctgttcccttcaactggcagtttatatgtt

SEQ ID NO: 436994 - DNA, 33 bp, Homo sapien
gatctgttcccttcaagtggcagtttatatgtt

SEQ ID NO: 436995 - DNA, 33 bp, Homo sapien
ggctttaaattttccaatcccaaaaatgtataa

SEQ ID NO: 436996 - DNA, 33 bp, Homo sapien
ggctttaaattttccattcccaaaaatgtataa

SEQ ID NO: 436997 - DNA, 33 bp, Homo sapien
ctgcatctagacaggaggccgtaaggacaaggg

SEQ ID NO: 436998 - DNA, 33 bp, Homo sapien
ctgcatctagacaggatgccgtaaggacaaggg

SEQ ID NO: 436999 - DNA, 33 bp, Homo sapien
tccagggctcagttacaggaggacaaacctgac

SEQ ID NO: 437000 - DNA, 33 bp, Homo sapien
tccagggctcagttacgggaggacaaacctgac

SEQ ID NO: 437001 - DNA, 33 bp, Homo sapien
agactgaccactctgcaagaaaaaaatggtacc

SEQ ID NO: 437002 - DNA, 33 bp, Homo sapien
agactgaccactctgcgagaaaaaaatggtacc

SEQ ID NO: 437003 - DNA, 33 bp, Homo sapien
ggggcatacctgggtcaagaattattatcataa

SEQ ID NO: 437004 - DNA, 33 bp, Homo sapien
ggggcatacctgggtcgagaattattatcataa

SEQ ID NO: 437005 - DNA, 33 bp, Homo sapien; identical to SEQ ID NO: 437003

SEQ ID NO: 437006 - DNA, 33 bp, Homo sapien; identical to SEQ ID NO: 437004

SEQ ID NO: 437007 - DNA, 33 bp, Homo sapien
attccatgtctacgtaactaaccaagagaaatg

SEQ ID NO: 437008 - DNA, 33 bp, Homo sapien
attccatgtctacgtatctaaccaagagaaatg

SEQ ID NO: 437009 - DNA, 33 bp, Homo sapien
gatagttgtcagcaaacggagctagtcataagt

SEQ ID NO: 437010 - DNA, 33 bp, Homo sapien
gatagttgtcagcaaatggagctagtcataagt

SEQ ID NO: 437011 - DNA, 33 bp, Homo sapien
gaagtttagcagggaaaagatgtgatatttatt

SEQ ID NO: 437012 - DNA, 33 bp, Homo sapien
gaagtttagcagggaagagatgtgatatttatt

SEQ ID NO: 437013 - DNA, 33 bp, Homo sapien
cctgcagtttttcttacaccatctcagtctctt

SEQ ID NO: 437014 - DNA, 33 bp, Homo sapien
cctgcagtttttcttataccatctcagtctctt

SEQ ID NO: 437015 - DNA, 33 bp, Homo sapien
agagtgcaggttagaacgcattggtatggtcct

SEQ ID NO: 437016 - DNA, 33 bp, Homo sapien
agagtgcaggttagaatgcattggtatggtcct

SEQ ID NO: 437017 - DNA, 33 bp, Homo sapien
gactcttatgaataaagctacgatgaatagaca

SEQ ID NO: 437018 - DNA, 33 bp, Homo sapien
gactcttatgaataaatctacgatgaatagaca

SEQ ID NO: 437019 - DNA, 33 bp, Homo sapien
aattcatctaactagcaaaaactcagtcataca

SEQ ID NO: 437020 - DNA, 33 bp, Homo sapien
aattcatctaactagcgaaaactcagtcataca

SEQ ID NO: 437021 - DNA, 33 bp, Homo sapien
taatgtaccaactttgaattctgtttgtgtgtt

SEQ ID NO: 437022 - DNA, 33 bp, Homo sapien
taatgtaccaactttggattctgtttgtgtgtt

SEQ ID NO: 437023 - DNA, 33 bp, Homo sapien
agaaaactaacatgtaagcagagttattgcttg

SEQ ID NO: 437024 - DNA, 33 bp, Homo sapien
agaaaactaacatgtaggcagagttattgcttg

SEQ ID NO: 437025 - DNA, 33 bp, Homo sapien
ctagactcattaagccaagaacaatgtctgtta

SEQ ID NO: 437026 - DNA, 33 bp, Homo sapien
ctagactcattaagcctagaacaatgtctgtta

SEQ ID NO: 437027 - DNA, 33 bp, Homo sapien
ggcaaaaaaccttacagaacacatacggcctcc

SEQ ID NO: 437028 - DNA, 33 bp, Homo sapien
ggcaaaaaaccttacataacacatacggcctcc

SEQ ID NO: 437029 - DNA, 33 bp, Homo sapien
cataccctctgtctccgcattagggatactctc

SEQ ID NO: 437030 - DNA, 33 bp, Homo sapien
cataccctctgtctcctcattagggatactctc

SEQ ID NO: 437031 - DNA, 33 bp, Homo sapien
tcctgtctgctcaccaagccatggtcatcaaag

SEQ ID NO: 437032 - DNA, 33 bp, Homo sapien
tcctgtctgctcaccaggccatggtcatcaaag

SEQ ID NO: 437033 - DNA, 33 bp, Homo sapien
aatcttttaccgcatgacactatttggagagtt

SEQ ID NO: 437034 - DNA, 33 bp, Homo sapien
aatcttttaccgcatggcactatttggagagtt

SEQ ID NO: 437035 - DNA, 33 bp, Homo sapien
catactatgttatttacaggagtgagcaacgca

SEQ ID NO: 437036 - DNA, 33 bp, Homo sapien
catactatgttatttataggagtgagcaacgca

SEQ ID NO: 437037 - DNA, 33 bp, Homo sapien
atgtataggactgaaaagtacagcagatctagt

SEQ ID NO: 437038 - DNA, 33 bp, Homo sapien
atgtataggactgaaaggtacagcagatctagt

SEQ ID NO: 437039 - DNA, 33 bp, Homo sapien
atggctcttggtgggacgacagttggacttgat

SEQ ID NO: 437040 - DNA, 33 bp, Homo sapien
atggctcttggtgggaggacagttggacttgat

SEQ ID NO: 437041 - DNA, 33 bp, Homo sapien
taccagcctttctatccctgtatctgtgcccag

SEQ ID NO: 437042 - DNA, 33 bp, Homo sapien
taccagcctttctatcgctgtatctgtgcccag

SEQ ID NO: 437043 - DNA, 33 bp, Homo sapien
ctgtgggaccaaaagacagtctcctgggcacag

SEQ ID NO: 437044 - DNA, 33 bp, Homo sapien
ctgtgggaccaaaagatagtctcctgggcacag

SEQ ID NO: 437045 - DNA, 33 bp, Homo sapien
tttttatattttctaacgcgtatgtagtgttat

SEQ ID NO: 437046 - DNA, 33 bp, Homo sapien
tttttatattttctaatgcgtatgtagtgttat

SEQ ID NO: 437047 - DNA, 33 bp, Homo sapien
ggagccaaataaggaccgtaaggtagattccca

SEQ ID NO: 437048 - DNA, 33 bp, Homo sapien
ggagccaaataaggactgtaaggtagattccca

SEQ ID NO: 437049 - DNA, 33 bp, Homo sapien
gccagttgttaagtacagccatgattaaaaggt

SEQ ID NO: 437050 - DNA, 33 bp, Homo sapien
gccagttgttaagtaccgccatgattaaaaggt

SEQ ID NO: 437051 - DNA, 33 bp, Homo sapien
actttagctaaggaggaaagttagcatgacaag

SEQ ID NO: 437052 - DNA, 33 bp, Homo sapien
actttagctaaggagggaagttagcatgacaag

SEQ ID NO: 437053 - DNA, 33 bp, Homo sapien
cttgtgtagcaagaaccgctggtctggaaagga

SEQ ID NO: 437054 - DNA, 33 bp, Homo sapien
cttgtgtagcaagaactgctggtctggaaagga

SEQ ID NO: 437055 - DNA, 33 bp, Homo sapien
gaaaactgcaaatgggaaaaatcaatatcttcc

SEQ ID NO: 437056 - DNA, 33 bp, Homo sapien
gaaaactgcaaatgggcaaaatcaatatcttcc

SEQ ID NO: 437057 - DNA, 33 bp, Homo sapien
tcctctttagatgcaaagactgtaggacctgaa

SEQ ID NO: 437058 - DNA, 33 bp, Homo sapien
tcctctttagatgcaaggactgtaggacctgaa

SEQ ID NO: 437059 - DNA, 33 bp, Homo sapien
ctttttcttattgttaccctctgtattgatttg

SEQ ID NO: 437060 - DNA, 33 bp, Homo sapien
ctttttcttattgttatcctctgtattgatttg

SEQ ID NO: 437061 - DNA, 33 bp, Homo sapien
tatacttctctatctcagaaactggacaactgc

SEQ ID NO: 437062 - DNA, 33 bp, Homo sapien
tatacttctctatctcggaaactggacaactgc

SEQ ID NO: 437063 - DNA, 33 bp, Homo sapien
attcataaggtgtgcccgcatgacccaataacc

SEQ ID NO: 437064 - DNA, 33 bp, Homo sapien
attcataaggtgtgcctgcatgacccaataacc

SEQ ID NO: 437065 - DNA, 33 bp, Homo sapien
tttccccatttatagccaatttgctttttgcct

SEQ ID NO: 437066 - DNA, 33 bp, Homo sapien
tttccccatttatagcgaatttgctttttgcct

SEQ ID NO: 437067 - DNA, 33 bp, Homo sapien
tttcttaattctcacaagcagtcatagcagctg

SEQ ID NO: 437068 - DNA, 33 bp, Homo sapien
tttcttaattctcacaggcagtcatagcagctg

SEQ ID NO: 437069 - DNA, 33 bp, Homo sapien
cagttactttcactcaagtccgtatgaagagac

SEQ ID NO: 437070 - DNA, 33 bp, Homo sapien
cagttactttcactcatgtccgtatgaagagac

SEQ ID NO: 437071 - DNA, 33 bp, Homo sapien
attcagagtggaataaccaaaatgcattttgta

SEQ ID NO: 437072 - DNA, 33 bp, Homo sapien
attcagagtggaataatcaaaatgcattttgta

SEQ ID NO: 437073 - DNA, 33 bp, Homo sapien
atgcgaactcttagaacagatagctgtacctta

SEQ ID NO: 437074 - DNA, 33 bp, Homo sapien
atgcgaactcttagaatagatagctgtacctta

SEQ ID NO: 437075 - DNA, 33 bp, Homo sapien
tagaaaacaaagtgtacagaaaagcagtagcta

SEQ ID NO: 437076 - DNA, 33 bp, Homo sapien
tagaaaacaaagtgtatagaaaagcagtagcta

SEQ ID NO: 437077 - DNA, 33 bp, Homo sapien
gaattgaactttactaaaaaggagagtttgcta

SEQ ID NO: 437078 - DNA, 33 bp, Homo sapien
gaattgaactttactagaaaggagagtttgcta

SEQ ID NO: 437079 - DNA, 33 bp, Homo sapien
atccctgagagttgaggctaggccatagtcagc

SEQ ID NO: 437080 - DNA, 33 bp, Homo sapien
atccctgagagttgagtctaggccatagtcagc

SEQ ID NO: 437081 - DNA, 33 bp, Homo sapien
tcaggtgcttcctcaacacatggtcaagacaaa

SEQ ID NO: 437082 - DNA, 33 bp, Homo sapien
tcaggtgcttcctcaatacatggtcaagacaaa

SEQ ID NO: 437083 - DNA, 33 bp, Homo sapien
tagaattttctagaacgagctacatttctcgtg

SEQ ID NO: 437084 - DNA, 33 bp, Homo sapien
tagaattttctagaactagctacatttctcgtg

SEQ ID NO: 437085 - DNA, 33 bp, Homo sapien
ctgacaagaagtttcacgtgttactgaatattt

SEQ ID NO: 437086 - DNA, 33 bp, Homo sapien
ctgacaagaagtttcatgtgttactgaatattt

SEQ ID NO: 437087 - DNA, 33 bp, Homo sapien
ctataccctgttggtaggttcaaaagttcacaa

SEQ ID NO: 437088 - DNA, 33 bp, Homo sapien
ctataccctgttggtatgttcaaaagttcacaa

SEQ ID NO: 437089 - DNA, 33 bp, Homo sapien
gcgtgagactcattaactacaccatgagaacag

SEQ ID NO: 437090 - DNA, 33 bp, Homo sapien
gcgtgagactcattaattacaccatgagaacag

SEQ ID NO: 437091 - DNA, 33 bp, Homo sapien
ctcctactccatactacagaggttcagtccaca

SEQ ID NO: 437092 - DNA, 33 bp, Homo sapien
ctcctactccatactatagaggttcagtccaca

SEQ ID NO: 437093 - DNA, 33 bp, Homo sapien
tgactgggtttagccaataggaagtgctagtgg

SEQ ID NO: 437094 - DNA, 33 bp, Homo sapien
tgactgggtttagccagtaggaagtgctagtgg

SEQ ID NO: 437095 - DNA, 33 bp, Homo sapien
taatgaatacactactaaactttgcatcaccag

SEQ ID NO: 437096 - DNA, 33 bp, Homo sapien
taatgaatacactactcaactttgcatcaccag

SEQ ID NO: 437097 - DNA, 33 bp, Homo sapien
tcaactagatgatagagctaaagccttaattag

SEQ ID NO: 437098 - DNA, 33 bp, Homo sapien
tcaactagatgatagatctaaagccttaattag

SEQ ID NO: 437099 - DNA, 33 bp, Homo sapien
atgcaccagagttggaataggtcactccactac

SEQ ID NO: 437100 - DNA, 33 bp, Homo sapien
atgcaccagagttggattaggtcactccactac

SEQ ID NO: 437101 - DNA, 33 bp, Homo sapien
ttgaagcaatagtgccagagaatttcccaaaat

SEQ ID NO: 437102 - DNA, 33 bp, Homo sapien
ttgaagcaatagtgccggagaatttcccaaaat

SEQ ID NO: 437103 - DNA, 33 bp, Homo sapien
tgtgacaggttcataactcaggctttcatgtga

SEQ ID NO: 437104 - DNA, 33 bp, Homo sapien
tgtgacaggttcataattcaggctttcatgtga

SEQ ID NO: 437105 - DNA, 33 bp, Homo sapien
ttctaagctcaacctaaatgccagaggtcaatt

SEQ ID NO: 437106 - DNA, 33 bp, Homo sapien
ttctaagctcaacctagatgccagaggtcaatt

SEQ ID NO: 437107 - DNA, 33 bp, Homo sapien
aatctgaatttgattacgcctctagatcaaaca

SEQ ID NO: 437108 - DNA, 33 bp, Homo sapien
aatctgaatttgattatgcctctagatcaaaca

SEQ ID NO: 437109 - DNA, 33 bp, Homo sapien
acgtctcagaagaagacatttatgtgaccaaca

SEQ ID NO: 437110 - DNA, 33 bp, Homo sapien
acgtctcagaagaagatatttatgtgaccaaca

SEQ ID NO: 437111 - DNA, 33 bp, Homo sapien
ctgtccagtctcctagcccactgctttccttcc

SEQ ID NO: 437112 - DNA, 33 bp, Homo sapien
ctgtccagtctcctagtccactgctttccttcc

SEQ ID NO: 437113 - DNA, 33 bp, Homo sapien
ggtcaaaaatcctacactggcctcctgatctga

SEQ ID NO: 437114 - DNA, 33 bp, Homo sapien
ggtcaaaaatcctacattggcctcctgatctga

SEQ ID NO: 437115 - DNA, 33 bp, Homo sapien
agatggcctcggtataactctttgtcctaacat

SEQ ID NO: 437116 - DNA, 33 bp, Homo sapien
agatggcctcggtatagctctttgtcctaacat

SEQ ID NO: 437117 - DNA, 33 bp, Homo sapien
ctcacctgctgagatccactaacaaggcagtct

SEQ ID NO: 437118 - DNA, 33 bp, Homo sapien
ctcacctgctgagatctactaacaaggcagtct

SEQ ID NO: 437119 - DNA, 33 bp, Homo sapien
acactgggaacattacagacaccctccaggaag

SEQ ID NO: 437120 - DNA, 33 bp, Homo sapien
acactgggaacattacggacaccctccaggaag

SEQ ID NO: 437121 - DNA, 33 bp, Homo sapien
gactaatcactgaaaaacaacaaactcagctaa

SEQ ID NO: 437122 - DNA, 33 bp, Homo sapien
gactaatcactgaaaagcaacaaactcagctaa

SEQ ID NO: 437123 - DNA, 33 bp, Homo sapien
tgactcctgcttgaaacgctgggcctgtcctga

SEQ ID NO: 437124 - DNA, 33 bp, Homo sapien
tgactcctgcttgaaatgctgggcctgtcctga

SEQ ID NO: 437125 - DNA, 33 bp, Homo sapien
tttatttgaaatgagaacatactacaaaaaata

SEQ ID NO: 437126 - DNA, 33 bp, Homo sapien
tttatttgaaatgagaccatactacaaaaaata

SEQ ID NO: 437127 - DNA, 33 bp, Homo sapien
atctttatggtcagaaacaaactataatgagca

SEQ ID NO: 437128 - DNA, 33 bp, Homo sapien
atctttatggtcagaagcaaactataatgagca

SEQ ID NO: 437129 - DNA, 33 bp, Homo sapien
cacaggccagtgaggcaaacagacaagtaaaca

SEQ ID NO: 437130 - DNA, 33 bp, Homo sapien
cacaggccagtgaggcgaacagacaagtaaaca

SEQ ID NO: 437131 - DNA, 33 bp, Homo sapien
agccgtgttctccactcagggtctcacaaggta

SEQ ID NO: 437132 - DNA, 33 bp, Homo sapien
agccgtgttctccacttagggtctcacaaggta

SEQ ID NO: 437133 - DNA, 33 bp, Homo sapien
tgtgaatggaacataaagcaaggacagaaatgg

SEQ ID NO: 437134 - DNA, 33 bp, Homo sapien
tgtgaatggaacataaggcaaggacagaaatgg

SEQ ID NO: 437135 - DNA, 33 bp, Homo sapien
ttttgccttgtctccacgactgtatgtagctct

SEQ ID NO: 437136 - DNA, 33 bp, Homo sapien
ttttgccttgtctccatgactgtatgtagctct

SEQ ID NO: 437137 - DNA, 33 bp, Homo sapien
agatttcaaaattcccagaagcactgtctccat

SEQ ID NO: 437138 - DNA, 33 bp, Homo sapien
agatttcaaaattcccggaagcactgtctccat

SEQ ID NO: 437139 - DNA, 33 bp, Homo sapien
catattcttcgaggcaatcgtgggaactccatc

SEQ ID NO: 437140 - DNA, 33 bp, Homo sapien
catattcttcgaggcactcgtgggaactccatc

SEQ ID NO: 437141 - DNA, 33 bp, Homo sapien
ctaagataccatcaacagtaagatgtctcagaa

SEQ ID NO: 437142 - DNA, 33 bp, Homo sapien
ctaagataccatcaactgtaagatgtctcagaa

SEQ ID NO: 437143 - DNA, 33 bp, Homo sapien
gtaaaagtaccactcaatagcatcccaggctgc

SEQ ID NO: 437144 - DNA, 33 bp, Homo sapien
gtaaaagtaccactcagtagcatcccaggctgc

SEQ ID NO: 437145 - DNA, 33 bp, Homo sapien
tgtttttaaaaatgtacgctgcccagaattaag

SEQ ID NO: 437146 - DNA, 33 bp, Homo sapien
tgtttttaaaaatgtatgctgcccagaattaag

SEQ ID NO: 437147 - DNA, 33 bp, Homo sapien
caggaactaagtgatgaaatcttttccaattgt

SEQ ID NO: 437148 - DNA, 33 bp, Homo sapien
caggaactaagtgatggaatcttttccaattgt

SEQ ID NO: 437149 - DNA, 33 bp, Homo sapien
cattgtgattccagccaaatttaggaatttcac

SEQ ID NO: 437150 - DNA, 33 bp, Homo sapien
cattgtgattccagcctaatttaggaatttcac

SEQ ID NO: 437151 - DNA, 33 bp, Homo sapien
ccttggcataacaaccagcaaatacgtgtcagc

SEQ ID NO: 437152 - DNA, 33 bp, Homo sapien
ccttggcataacaaccggcaaatacgtgtcagc

SEQ ID NO: 437153 - DNA, 33 bp, Homo sapien
atatggaggaagtgagacccaaaagtgaaatca

SEQ ID NO: 437154 - DNA, 33 bp, Homo sapien
atatggaggaagtgaggcccaaaagtgaaatca

SEQ ID NO: 437155 - DNA, 33 bp, Homo sapien
tggagtttgtgcatcaaaaaaaccaggtaagcg

SEQ ID NO: 437156 - DNA, 33 bp, Homo sapien
tggagtttgtgcatcataaaaaccaggtaagcg

SEQ ID NO: 437157 - DNA, 33 bp, Homo sapien
tagccggtggacttgacagaattatagactgat

SEQ ID NO: 437158 - DNA, 33 bp, Homo sapien
tagccggtggacttgatagaattatagactgat

SEQ ID NO: 437159 - DNA, 33 bp, Homo sapien
gtgttctatggttcacagagaatataattatca

SEQ ID NO: 437160 - DNA, 33 bp, Homo sapien
gtgttctatggttcacggagaatataattatca

SEQ ID NO: 437161 - DNA, 33 bp, Homo sapien
ctgtcagtgaggaaaactgcacctttgtcactt

SEQ ID NO: 437162 - DNA, 33 bp, Homo sapien
ctgtcagtgaggaaaattgcacctttgtcactt

SEQ ID NO: 437163 - DNA, 33 bp, Homo sapien
tatacttgcatttggacggtactttagagatca

SEQ ID NO: 437164 - DNA, 33 bp, Homo sapien
tatacttgcatttggatggtactttagagatca

SEQ ID NO: 437165 - DNA, 33 bp, Homo sapien
tgctgtcaaataggtgacaactgtgagcccgca

SEQ ID NO: 437166 - DNA, 33 bp, Homo sapien
tgctgtcaaataggtggcaactgtgagcccgca

SEQ ID NO: 437167 - DNA, 33 bp, Homo sapien
ttctaatcttgcactaaggtacacgtgggtcaa

SEQ ID NO: 437168 - DNA, 33 bp, Homo sapien
ttctaatcttgcactatggtacacgtgggtcaa

SEQ ID NO: 437169 - DNA, 33 bp, Homo sapien
agtcacggatgcaaacaaaaagcttaacattca

SEQ ID NO: 437170 - DNA, 33 bp, Homo sapien
agtcacggatgcaaaccaaaagcttaacattca

SEQ ID NO: 437171 - DNA, 33 bp, Homo sapien
tgcttaggaagaaatacgtaagggcttccaggt

SEQ ID NO: 437172 - DNA, 33 bp, Homo sapien
tgcttaggaagaaatatgtaagggcttccaggt

SEQ ID NO: 437173 - DNA, 33 bp, Homo sapien
aagagaaagttgtccaagtagaaggggcatcaa

SEQ ID NO: 437174 - DNA, 33 bp, Homo sapien
aagagaaagttgtccaggtagaaggggcatcaa

SEQ ID NO: 437175 - DNA, 33 bp, Homo sapien
ggagtcaggtgagagtcaagatctgccccaggt

SEQ ID NO: 437176 - DNA, 33 bp, Homo sapien
ggagtcaggtgagagtgaagatctgccccaggt

SEQ ID NO: 437177 - DNA, 33 bp, Homo sapien
tcaactcttccctgctcaaaatgttgaaagagc

SEQ ID NO: 437178 - DNA, 33 bp, Homo sapien
tcaactcttccctgcttaaaatgttgaaagagc

SEQ ID NO: 437179 - DNA, 33 bp, Homo sapien
cttgggagaggactgacgttttttctccttgtc

SEQ ID NO: 437180 - DNA, 33 bp, Homo sapien
cttgggagaggactgatgttttttctccttgtc

SEQ ID NO: 437181 - DNA, 33 bp, Homo sapien
tcccctgccatcgtacagtaatgggcactgata

SEQ ID NO: 437182 - DNA, 33 bp, Homo sapien
tcccctgccatcgtacggtaatgggcactgata

SEQ ID NO: 437183 - DNA, 33 bp, Homo sapien
aactactcattaattcaaactgattacatctat

SEQ ID NO: 437184 - DNA, 33 bp, Homo sapien
aactactcattaattcgaactgattacatctat

SEQ ID NO: 437185 - DNA, 33 bp, Homo sapien
aaaaatacacagcaaaatacgaatgggattaaa

SEQ ID NO: 437186 - DNA, 33 bp, Homo sapien
aaaaatacacagcaaactacgaatgggattaaa

SEQ ID NO: 437187 - DNA, 33 bp, Homo sapien
gagaagaagcaggttccagatggggctccaggt

SEQ ID NO: 437188 - DNA, 33 bp, Homo sapien
gagaagaagcaggttcgagatggggctccaggt

SEQ ID NO: 437189 - DNA, 33 bp, Homo sapien
ggctcaggagtcaagacagcctttccagatgac

SEQ ID NO: 437190 - DNA, 33 bp, Homo sapien
ggctcaggagtcaagatagcctttccagatgac

SEQ ID NO: 437191 - DNA, 33 bp, Homo sapien
aaagaccattagaagcagctcagattccattca

SEQ ID NO: 437192 - DNA, 33 bp, Homo sapien
aaagaccattagaagcggctcagattccattca

SEQ ID NO: 437193 - DNA, 33 bp, Homo sapien
accactggtctaggagaaaggacatagtgatgg

SEQ ID NO: 437194 - DNA, 33 bp, Homo sapien
accactggtctaggaggaaggacatagtgatgg

SEQ ID NO: 437195 - DNA, 33 bp, Homo sapien
tagctcagtgagtggaagcatattacagctctc

SEQ ID NO: 437196 - DNA, 33 bp, Homo sapien
tagctcagtgagtggaggcatattacagctctc

SEQ ID NO: 437197 - DNA, 33 bp, Homo sapien
actagttctctctaccacctatgacagaagaat

SEQ ID NO: 437198 - DNA, 33 bp, Homo sapien
actagttctctctaccgcctatgacagaagaat

SEQ ID NO: 437199 - DNA, 33 bp, Homo sapien
ttataatgctaaattacgctaagtttctgcctg

SEQ ID NO: 437200 - DNA, 33 bp, Homo sapien
ttataatgctaaattatgctaagtttctgcctg

SEQ ID NO: 437201 - DNA, 33 bp, Homo sapien
accttatacaagttaaagaggaacctttctcaa

SEQ ID NO: 437202 - DNA, 33 bp, Homo sapien
accttatacaagttaatgaggaacctttctcaa

SEQ ID NO: 437203 - DNA, 33 bp, Homo sapien
tagtcaataccatgtacaaagctgcttcatttt

SEQ ID NO: 437204 - DNA, 33 bp, Homo sapien
tagtcaataccatgtataaagctgcttcatttt

SEQ ID NO: 437205 - DNA, 33 bp, Homo sapien
agcttgttgcagagacagatccagagatattac

SEQ ID NO: 437206 - DNA, 33 bp, Homo sapien
agcttgttgcagagacggatccagagatattac

SEQ ID NO: 437207 - DNA, 33 bp, Homo sapien
atgctcacctgtctctaaaatcatgactctgtc

SEQ ID NO: 437208 - DNA, 33 bp, Homo sapien
atgctcacctgtctctgaaatcatgactctgtc

SEQ ID NO: 437209 - DNA, 33 bp, Homo sapien
gcttcattcactaaccaacactactggtcttct

SEQ ID NO: 437210 - DNA, 33 bp, Homo sapien
gcttcattcactaaccgacactactggtcttct

SEQ ID NO: 437211 - DNA, 33 bp, Homo sapien
tttaatgtgtgaaaaggcagggacaagacagat

SEQ ID NO: 437212 - DNA, 33 bp, Homo sapien
tttaatgtgtgaaaagtcagggacaagacagat

SEQ ID NO: 437213 - DNA, 33 bp, Homo sapien
atgcctcagtacttctcaaaccatgtcattgtt

SEQ ID NO: 437214 - DNA, 33 bp, Homo sapien
atgcctcagtacttcttaaaccatgtcattgtt

SEQ ID NO: 437215 - DNA, 33 bp, Homo sapien
ttgtttttctaaaagactaagcaagcttatacc

SEQ ID NO: 437216 - DNA, 33 bp, Homo sapien
ttgtttttctaaaagagtaagcaagcttatacc

SEQ ID NO: 437217 - DNA, 33 bp, Homo sapien
cagagggctcccaggaagattcaggtactgctc

SEQ ID NO: 437218 - DNA, 33 bp, Homo sapien
cagagggctcccaggaggattcaggtactgctc

SEQ ID NO: 437219 - DNA, 33 bp, Homo sapien
tttagggtctctcttaaggcaattaaacttatg

SEQ ID NO: 437220 - DNA, 33 bp, Homo sapien
tttagggtctctcttagggcaattaaacttatg

SEQ ID NO: 437221 - DNA, 33 bp, Homo sapien
gggattgtgacatcgccaacatcagagacagac

SEQ ID NO: 437222 - DNA, 33 bp, Homo sapien
gggattgtgacatcgctaacatcagagacagac

SEQ ID NO: 437223 - DNA, 33 bp, Homo sapien
ccgacacagcacgagcgagtgggcacctgaaca

SEQ ID NO: 437224 - DNA, 33 bp, Homo sapien
ccgacacagcacgagctagtgggcacctgaaca

SEQ ID NO: 437225 - DNA, 33 bp, Homo sapien
tggaagctgcagccccaaatattagttgtttaa

SEQ ID NO: 437226 - DNA, 33 bp, Homo sapien
tggaagctgcagccccgaatattagttgtttaa

SEQ ID NO: 437227 - DNA, 33 bp, Homo sapien
atcagagatgatgggacagctcagtaggttaag

SEQ ID NO: 437228 - DNA, 33 bp, Homo sapien
atcagagatgatgggagagctcagtaggttaag

SEQ ID NO: 437229 - DNA, 33 bp, Homo sapien
tatcctcaggaatccaagctctctggccaagtt

SEQ ID NO: 437230 - DNA, 33 bp, Homo sapien
tatcctcaggaatccaggctctctggccaagtt

SEQ ID NO: 437231 - DNA, 33 bp, Homo sapien
aattacttggtgagataaaaagtcacagagagc

SEQ ID NO: 437232 - DNA, 33 bp, Homo sapien
aattacttggtgagatgaaaagtcacagagagc

SEQ ID NO: 437233 - DNA, 33 bp, Homo sapien
tcccaatgctgtataaacttcagacctcaccaa

SEQ ID NO: 437234 - DNA, 33 bp, Homo sapien
tcccaatgctgtataagcttcagacctcaccaa

SEQ ID NO: 437235 - DNA, 33 bp, Homo sapien
tggctgttagctgagacaattgtgatagacaaa

SEQ ID NO: 437236 - DNA, 33 bp, Homo sapien
tggctgttagctgagagaattgtgatagacaaa

SEQ ID NO: 437237 - DNA, 33 bp, Homo sapien
gtgcctggtcctacaacagtgatgggcatcatt

SEQ ID NO: 437238 - DNA, 33 bp, Homo sapien
gtgcctggtcctacaagagtgatgggcatcatt

SEQ ID NO: 437239 - DNA, 33 bp, Homo sapien
gtacctgtctgtggaaatgaaccaaagttgcaa

SEQ ID NO: 437240 - DNA, 33 bp, Homo sapien
gtacctgtctgtggaactgaaccaaagttgcaa

SEQ ID NO: 437241 - DNA, 33 bp, Homo sapien
ttttttttatatataccgctgtgctaaaaacac

SEQ ID NO: 437242 - DNA, 33 bp, Homo sapien
ttttttttatatatactgctgtgctaaaaacac

SEQ ID NO: 437243 - DNA, 33 bp, Homo sapien
tgtggcataagagagacggaaaggacacaaggt

SEQ ID NO: 437244 - DNA, 33 bp, Homo sapien
tgtggcataagagagatggaaaggacacaaggt

SEQ ID NO: 437245 - DNA, 33 bp, Homo sapien
tcagtgcctcctgtcaatatctcctcatggatg

SEQ ID NO: 437246 - DNA, 33 bp, Homo sapien
tcagtgcctcctgtcagtatctcctcatggatg

SEQ ID NO: 437247 - DNA, 33 bp, Homo sapien
ttgggtcgttcacctcgaacctactgtgacttt

SEQ ID NO: 437248 - DNA, 33 bp, Homo sapien
ttgggtcgttcacctctaacctactgtgacttt

SEQ ID NO: 437249 - DNA, 33 bp, Homo sapien
ataccaaactctcagaacccactcagtgaacac

SEQ ID NO: 437250 - DNA, 33 bp, Homo sapien
ataccaaactctcagagcccactcagtgaacac

SEQ ID NO: 437251 - DNA, 33 bp, Homo sapien
tgtggttagttgctaacagagacaattattaac

SEQ ID NO: 437252 - DNA, 33 bp, Homo sapien
tgtggttagttgctaatagagacaattattaac

SEQ ID NO: 437253 - DNA, 33 bp, Homo sapien
tcattgttgacaggaaaggactcttctactgct

SEQ ID NO: 437254 - DNA, 33 bp, Homo sapien
tcattgttgacaggaagggactcttctactgct

SEQ ID NO: 437255 - DNA, 33 bp, Homo sapien
ccttgaggtcatgccaaagaaacttggacttat

SEQ ID NO: 437256 - DNA, 33 bp, Homo sapien
ccttgaggtcatgccagagaaacttggacttat

SEQ ID NO: 437257 - DNA, 33 bp, Homo sapien
ccccaatatagttagtaaagaaaaactctgaga

SEQ ID NO: 437258 - DNA, 33 bp, Homo sapien
ccccaatatagttagtgaagaaaaactctgaga

SEQ ID NO: 437259 - DNA, 33 bp, Homo sapien
ttccctgttagcactcacattgaggatttgagc

SEQ ID NO: 437260 - DNA, 33 bp, Homo sapien
ttccctgttagcactctcattgaggatttgagc

SEQ ID NO: 437261 - DNA, 33 bp, Homo sapien
taggccagattaggtagcttttggagagctggg

SEQ ID NO: 437262 - DNA, 33 bp, Homo sapien
taggccagattaggtatcttttggagagctggg

SEQ ID NO: 437263 - DNA, 33 bp, Homo sapien
aatgcatggaactctcacaagagcagccaaggt

SEQ ID NO: 437264 - DNA, 33 bp, Homo sapien
aatgcatggaactctcgcaagagcagccaaggt

SEQ ID NO: 437265 - DNA, 33 bp, Homo sapien
agctccttccagtcaacggatattttctatgct

SEQ ID NO: 437266 - DNA, 33 bp, Homo sapien
agctccttccagtcaatggatattttctatgct

SEQ ID NO: 437267 - DNA, 33 bp, Homo sapien
cagatcgcctgtaaagacttctaatgaaggaaa

SEQ ID NO: 437268 - DNA, 33 bp, Homo sapien
cagatcgcctgtaaagccttctaatgaaggaaa

SEQ ID NO: 437269 - DNA, 33 bp, Homo sapien
cgaggtcacattgtcaaaaagaatacagctcac

SEQ ID NO: 437270 - DNA, 33 bp, Homo sapien
cgaggtcacattgtcagaaagaatacagctcac

SEQ ID NO: 437271 - DNA, 33 bp, Homo sapien
acactgctgggtgggcaaataagaattcatcca

SEQ ID NO: 437272 - DNA, 33 bp, Homo sapien
acactgctgggtgggcgaataagaattcatcca

SEQ ID NO: 437273 - DNA, 33 bp, Homo sapien
cagagcttcacttcccaattgtcttttctgcca

SEQ ID NO: 437274 - DNA, 33 bp, Homo sapien
cagagcttcacttcccgattgtcttttctgcca

SEQ ID NO: 437275 - DNA, 33 bp, Homo sapien
gagttgaaacaaaaagccttttctgcttaatcc

SEQ ID NO: 437276 - DNA, 33 bp, Homo sapien
gagttgaaacaaaaagtcttttctgcttaatcc

SEQ ID NO: 437277 - DNA, 33 bp, Homo sapien
tcattcttgccataccaattttagaaaattttc

SEQ ID NO: 437278 - DNA, 33 bp, Homo sapien
tcattcttgccataccgattttagaaaattttc

SEQ ID NO: 437279 - DNA, 33 bp, Homo sapien
tacagggtcaagattcaaacatcagttatgatt

SEQ ID NO: 437280 - DNA, 33 bp, Homo sapien
tacagggtcaagattcgaacatcagttatgatt

SEQ ID NO: 437281 - DNA, 33 bp, Homo sapien
tgttctcagcataggaactttttgattttcccc

SEQ ID NO: 437282 - DNA, 33 bp, Homo sapien
tgttctcagcataggacctttttgattttcccc

SEQ ID NO: 437283 - DNA, 33 bp, Homo sapien
gagagcagcagatttaccgcagtatgcacacag

SEQ ID NO: 437284 - DNA, 33 bp, Homo sapien
gagagcagcagatttatcgcagtatgcacacag

SEQ ID NO: 437285 - DNA, 33 bp, Homo sapien
tgacagaggaggaaatcaaaccttttctggtgg

SEQ ID NO: 437286 - DNA, 33 bp, Homo sapien
tgacagaggaggaaatgaaaccttttctggtgg

SEQ ID NO: 437287 - DNA, 33 bp, Homo sapien
tgtcagccggtagcaccatgagtacggggatat

SEQ ID NO: 437288 - DNA, 33 bp, Homo sapien
tgtcagccggtagcacgatgagtacggggatat

SEQ ID NO: 437289 - DNA, 33 bp, Homo sapien
tggtcctaactgtctcaccttgacccccaatgg

SEQ ID NO: 437290 - DNA, 33 bp, Homo sapien
tggtcctaactgtctcgccttgacccccaatgg

SEQ ID NO: 437291 - DNA, 33 bp, Homo sapien
gacctgcttcctgttaaatcctactgttgacac

SEQ ID NO: 437292 - DNA, 33 bp, Homo sapien
gacctgcttcctgttacatcctactgttgacac

SEQ ID NO: 437293 - DNA, 33 bp, Homo sapien
tcattaaaacataacaatagaagcatgcatgct

SEQ ID NO: 437294 - DNA, 33 bp, Homo sapien
tcattaaaacataacagtagaagcatgcatgct

SEQ ID NO: 437295 - DNA, 33 bp, Homo sapien
gtttagcacatacgtacggtctctttgacacct

SEQ ID NO: 437296 - DNA, 33 bp, Homo sapien
gtttagcacatacgtagggtctctttgacacct

SEQ ID NO: 437297 - DNA, 33 bp, Homo sapien
gaacttctagcaaccaagatttcaaaagggtag

SEQ ID NO: 437298 - DNA, 33 bp, Homo sapien
gaacttctagcaaccaggatttcaaaagggtag

SEQ ID NO: 437299 - DNA, 33 bp, Homo sapien
ttcatgaatcatctttcgctcaaataaattctg

SEQ ID NO: 437300 - DNA, 33 bp, Homo sapien
ttcatgaatcatcttttgctcaaataaattctg

SEQ ID NO: 437301 - DNA, 33 bp, Homo sapien
agggtcaggctttcaccgtcagaatcggtggca

SEQ ID NO: 437302 - DNA, 33 bp, Homo sapien
agggtcaggctttcactgtcagaatcggtggca

SEQ ID NO: 437303 - DNA, 33 bp, Homo sapien
cccagctgacagaaaaactgaaaatttgcttga

SEQ ID NO: 437304 - DNA, 33 bp, Homo sapien
cccagctgacagaaaacctgaaaatttgcttga

SEQ ID NO: 437305 - DNA, 33 bp, Homo sapien
acaggaaaaccgcaaaaaaatgctagggctaga

SEQ ID NO: 437306 - DNA, 33 bp, Homo sapien
acaggaaaaccgcaaagaaatgctagggctaga

SEQ ID NO: 437307 - DNA, 33 bp, Homo sapien
gaaatgggaaatgctgaattttttaagacagtc

SEQ ID NO: 437308 - DNA, 33 bp, Homo sapien
gaaatgggaaatgctgcattttttaagacagtc

SEQ ID NO: 437309 - DNA, 33 bp, Homo sapien
actagaaaaacaatataaaaaggcctggcacag

SEQ ID NO: 437310 - DNA, 33 bp, Homo sapien
actagaaaaacaatattaaaaggcctggcacag

SEQ ID NO: 437311 - DNA, 33 bp, Homo sapien
aatacaggttccttgagaagtagtgtgtatttg

SEQ ID NO: 437312 - DNA, 33 bp, Homo sapien
aatacaggttccttgataagtagtgtgtatttg

SEQ ID NO: 437313 - DNA, 33 bp, Homo sapien
gtatccaggccacacccggagcgttttgttcaa

SEQ ID NO: 437314 - DNA, 33 bp, Homo sapien
gtatccaggccacacctggagcgttttgttcaa

SEQ ID NO: 437315 - DNA, 33 bp, Homo sapien
ctggatactgaattcacgggtggtaccagagtt

SEQ ID NO: 437316 - DNA, 33 bp, Homo sapien
ctggatactgaattcaggggtggtaccagagtt

SEQ ID NO: 437317 - DNA, 33 bp, Homo sapien
tttcttgtaatttttacgagtgatgtgactcct

SEQ ID NO: 437318 - DNA, 33 bp, Homo sapien
tttcttgtaatttttatgagtgatgtgactcct

SEQ ID NO: 437319 - DNA, 33 bp, Homo sapien
actgtttactgagttacctggggaaagttacct

SEQ ID NO: 437320 - DNA, 33 bp, Homo sapien
actgtttactgagttatctggggaaagttacct

SEQ ID NO: 437321 - DNA, 33 bp, Homo sapien
attaattcttgtttagcatgatcttgaaagcaa

SEQ ID NO: 437322 - DNA, 33 bp, Homo sapien
attaattcttgtttaggatgatcttgaaagcaa

SEQ ID NO: 437323 - DNA, 33 bp, Homo sapien
aataaatcttggcaagaaaaggtatcaatagca

SEQ ID NO: 437324 - DNA, 33 bp, Homo sapien
aataaatcttggcaagtaaaggtatcaatagca

SEQ ID NO: 437325 - DNA, 33 bp, Homo sapien
aaataagcactgaatcgatatacacttggaatg

SEQ ID NO: 437326 - DNA, 33 bp, Homo sapien
aaataagcactgaatctatatacacttggaatg

SEQ ID NO: 437327 - DNA, 33 bp, Homo sapien
caatgctgtcttataaatgtggcaatagcaatg

SEQ ID NO: 437328 - DNA, 33 bp, Homo sapien
caatgctgtcttataagtgtggcaatagcaatg

SEQ ID NO: 437329 - DNA, 33 bp, Homo sapien
ggactttattagatgacgtaagtaaatcagaaa

SEQ ID NO: 437330 - DNA, 33 bp, Homo sapien
ggactttattagatgatgtaagtaaatcagaaa

SEQ ID NO: 437331 - DNA, 33 bp, Homo sapien
aaatgagtacatttccaacaaaacccagccgtc

SEQ ID NO: 437332 - DNA, 33 bp, Homo sapien
aaatgagtacatttccgacaaaacccagccgtc

SEQ ID NO: 437333 - DNA, 33 bp, Homo sapien
ctcatccatagcaccaatgagatagctgaatct

SEQ ID NO: 437334 - DNA, 33 bp, Homo sapien
ctcatccatagcaccactgagatagctgaatct

SEQ ID NO: 437335 - DNA, 33 bp, Homo sapien
gggtgcaggaaaagtaaagcatttctcagtgtt

SEQ ID NO: 437336 - DNA, 33 bp, Homo sapien
gggtgcaggaaaagtagagcatttctcagtgtt

SEQ ID NO: 437337 - DNA, 33 bp, Homo sapien
cacagtgtgtttaaaaagatcctctctgagatc

SEQ ID NO: 437338 - DNA, 33 bp, Homo sapien
cacagtgtgtttaaaacgatcctctctgagatc

SEQ ID NO: 437339 - DNA, 33 bp, Homo sapien
actgttagattgcttaaaaatccttccaacact

SEQ ID NO: 437340 - DNA, 33 bp, Homo sapien
actgttagattgcttacaaatccttccaacact

SEQ ID NO: 437341 - DNA, 33 bp, Homo sapien
atattgacactttaaaatgaaatgtctatgcgg

SEQ ID NO: 437342 - DNA, 33 bp, Homo sapien
atattgacactttaaactgaaatgtctatgcgg

SEQ ID NO: 437343 - DNA, 33 bp, Homo sapien
tcacatttggctactaaccgggaaagcagccct

SEQ ID NO: 437344 - DNA, 33 bp, Homo sapien
tcacatttggctactacccgggaaagcagccct

SEQ ID NO: 437345 - DNA, 33 bp, Homo sapien
ctgtaaatatggtgtacatcttggctttgctca

SEQ ID NO: 437346 - DNA, 33 bp, Homo sapien
ctgtaaatatggtgtatatcttggctttgctca

SEQ ID NO: 437347 - DNA, 33 bp, Homo sapien
atatttacagagctcacggtcagattaacccat

SEQ ID NO: 437348 - DNA, 33 bp, Homo sapien
atatttacagagctcatggtcagattaacccat

SEQ ID NO: 437349 - DNA, 33 bp, Homo sapien
acttctaagattctcacattacatttcctattt

SEQ ID NO: 437350 - DNA, 33 bp, Homo sapien
acttctaagattctcagattacatttcctattt

SEQ ID NO: 437351 - DNA, 33 bp, Homo sapien
ttgcagggaaagttgaaaatagtttatcaaaag

SEQ ID NO: 437352 - DNA, 33 bp, Homo sapien
ttgcagggaaagttgacaatagtttatcaaaag

SEQ ID NO: 437353 - DNA, 33 bp, Homo sapien
tgctatatcaaaaacccctgcagtctatttttt

SEQ ID NO: 437354 - DNA, 33 bp, Homo sapien
tgctatatcaaaaacctctgcagtctatttttt

SEQ ID NO: 437355 - DNA, 33 bp, Homo sapien
tgcagtttggaagacactggtgatacatgaagt

SEQ ID NO: 437356 - DNA, 33 bp, Homo sapien
tgcagtttggaagacattggtgatacatgaagt

SEQ ID NO: 437357 - DNA, 33 bp, Homo sapien
tggtgatggtattagaccaagacaggagaattg

SEQ ID NO: 437358 - DNA, 33 bp, Homo sapien
tggtgatggtattagatcaagacaggagaattg

SEQ ID NO: 437359 - DNA, 33 bp, Homo sapien
tactgatgtaatgtaacgagtggtacagatgtt

SEQ ID NO: 437360 - DNA, 33 bp, Homo sapien
tactgatgtaatgtaatgagtggtacagatgtt

SEQ ID NO: 437361 - DNA, 33 bp, Homo sapien
tccttcttagatgcggaacaagaaaacacaact

SEQ ID NO: 437362 - DNA, 33 bp, Homo sapien
tccttcttagatgcgggacaagaaaacacaact

SEQ ID NO: 437363 - DNA, 33 bp, Homo sapien
tcagttagacttacacacaaatcacggtcacta

SEQ ID NO: 437364 - DNA, 33 bp, Homo sapien
tcagttagacttacacgcaaatcacggtcacta

SEQ ID NO: 437365 - DNA, 33 bp, Homo sapien
aaaaacatattctacagcaattattctgaaagt

SEQ ID NO: 437366 - DNA, 33 bp, Homo sapien
aaaaacatattctacatcaattattctgaaagt

SEQ ID NO: 437367 - DNA, 33 bp, Homo sapien
taatgcattaaataacagtggctctaataacta

SEQ ID NO: 437368 - DNA, 33 bp, Homo sapien
taatgcattaaataaccgtggctctaataacta

SEQ ID NO: 437369 - DNA, 33 bp, Homo sapien
gcctgttaatcaggaacgctcccagttaatttc

SEQ ID NO: 437370 - DNA, 33 bp, Homo sapien
gcctgttaatcaggaatgctcccagttaatttc

SEQ ID NO: 437371 - DNA, 33 bp, Homo sapien
gaaagcacatcagaagcctagtaagtttaaagt

SEQ ID NO: 437372 - DNA, 33 bp, Homo sapien
gaaagcacatcagaaggctagtaagtttaaagt

SEQ ID NO: 437373 - DNA, 33 bp, Homo sapien
aggtaacctggagggaataaagcaaaaattgac

SEQ ID NO: 437374 - DNA, 33 bp, Homo sapien
aggtaacctggagggagtaaagcaaaaattgac

SEQ ID NO: 437375 - DNA, 33 bp, Homo sapien
aaaaataaagcccagaaacagaaatggacatgt

SEQ ID NO: 437376 - DNA, 33 bp, Homo sapien
aaaaataaagcccagagacagaaatggacatgt

SEQ ID NO: 437377 - DNA, 33 bp, Homo sapien
ggcacttgtccaccgaaccaaacatagatgaag

SEQ ID NO: 437378 - DNA, 33 bp, Homo sapien
ggcacttgtccaccgatccaaacatagatgaag

SEQ ID NO: 437379 - DNA, 33 bp, Homo sapien
atgtatcctcttgcaagcttcttgtaaaaaaaa

SEQ ID NO: 437380 - DNA, 33 bp, Homo sapien
atgtatcctcttgcaatcttcttgtaaaaaaaa

SEQ ID NO: 437381 - DNA, 33 bp, Homo sapien
aaagggagacttgggaaaagtggcaaagggaga

SEQ ID NO: 437382 - DNA, 33 bp, Homo sapien
aaagggagacttgggagaagtggcaaagggaga

SEQ ID NO: 437383 - DNA, 33 bp, Homo sapien
taaactaatgtcatcaacacaggcttgcttcac

SEQ ID NO: 437384 - DNA, 33 bp, Homo sapien
taaactaatgtcatcatcacaggcttgcttcac

SEQ ID NO: 437385 - DNA, 33 bp, Homo sapien
ttcttgagttacctgacattttgagggaagtct

SEQ ID NO: 437386 - DNA, 33 bp, Homo sapien
ttcttgagttacctgagattttgagggaagtct

SEQ ID NO: 437387 - DNA, 33 bp, Homo sapien
aataagctagtggaggaaaaataatatacatat

SEQ ID NO: 437388 - DNA, 33 bp, Homo sapien
aataagctagtggagggaaaataatatacatat

SEQ ID NO: 437389 - DNA, 33 bp, Homo sapien
actattatcattaaaacctggccacgtttaagc

SEQ ID NO: 437390 - DNA, 33 bp, Homo sapien
actattatcattaaaatctggccacgtttaagc

SEQ ID NO: 437391 - DNA, 33 bp, Homo sapien
agaccaatataaacaccgatgaatgaaggggaa

SEQ ID NO: 437392 - DNA, 33 bp, Homo sapien
agaccaatataaacactgatgaatgaaggggaa

SEQ ID NO: 437393 - DNA, 33 bp, Homo sapien
aatccaagaggtacaacatcagaaaatataaat

SEQ ID NO: 437394 - DNA, 33 bp, Homo sapien
aatccaagaggtacaatatcagaaaatataaat

SEQ ID NO: 437395 - DNA, 33 bp, Homo sapien
tttagaacagtcaagaaaacactgaaaaagcat

SEQ ID NO: 437396 - DNA, 33 bp, Homo sapien
tttagaacagtcaagacaacactgaaaaagcat

SEQ ID NO: 437397 - DNA, 33 bp, Homo sapien
cctgcctctggggaaaagcagagacatgaacct

SEQ ID NO: 437398 - DNA, 33 bp, Homo sapien
cctgcctctggggaaacgcagagacatgaacct

SEQ ID NO: 437399 - DNA, 33 bp, Homo sapien
tgccactgcagacacaacacactctctactcct

SEQ ID NO: 437400 - DNA, 33 bp, Homo sapien
tgccactgcagacacagcacactctctactcct

SEQ ID NO: 437401 - DNA, 33 bp, Homo sapien
ttataagatgtcgctcccctcctctaattctca

SEQ ID NO: 437402 - DNA, 33 bp, Homo sapien
ttataagatgtcgctctcctcctctaattctca

SEQ ID NO: 437403 - DNA, 33 bp, Homo sapien
atgacatcttcggtctaagaatttttgccatcg

SEQ ID NO: 437404 - DNA, 33 bp, Homo sapien
atgacatcttcggtctgagaatttttgccatcg

SEQ ID NO: 437405 - DNA, 33 bp, Homo sapien
aaaagaaatgagccatcaagtgaagcttatgaa

SEQ ID NO: 437406 - DNA, 33 bp, Homo sapien
aaaagaaatgagccattaagtgaagcttatgaa

SEQ ID NO: 437407 - DNA, 33 bp, Homo sapien
gacatggaaatcatgacctcaataaattctgca

SEQ ID NO: 437408 - DNA, 33 bp, Homo sapien
gacatggaaatcatgagctcaataaattctgca

SEQ ID NO: 437409 - DNA, 33 bp, Homo sapien
atcaactttatgcctacattccaacaacaaact

SEQ ID NO: 437410 - DNA, 33 bp, Homo sapien
atcaactttatgcctatattccaacaacaaact

SEQ ID NO: 437411 - DNA, 33 bp, Homo sapien
tgctcagcttcaccaactgtctactgtcaaagg

SEQ ID NO: 437412 - DNA, 33 bp, Homo sapien
tgctcagcttcaccaagtgtctactgtcaaagg

SEQ ID NO: 437413 - DNA, 33 bp, Homo sapien
ccacttcattatgagacggtagatagaggctaa

SEQ ID NO: 437414 - DNA, 33 bp, Homo sapien
ccacttcattatgagatggtagatagaggctaa

SEQ ID NO: 437415 - DNA, 33 bp, Homo sapien
atgaaattaaagtgaaagtagtcagtgtgattg

SEQ ID NO: 437416 - DNA, 33 bp, Homo sapien
atgaaattaaagtgaaggtagtcagtgtgattg

SEQ ID NO: 437417 - DNA, 33 bp, Homo sapien
ctaggtcttggcacaacgtatcagtcaggattg

SEQ ID NO: 437418 - DNA, 33 bp, Homo sapien
ctaggtcttggcacaatgtatcagtcaggattg

SEQ ID NO: 437419 - DNA, 33 bp, Homo sapien
tatctctttcacataaatgtctgtctcaactca

SEQ ID NO: 437420 - DNA, 33 bp, Homo sapien
tatctctttcacataagtgtctgtctcaactca

SEQ ID NO: 437421 - DNA, 33 bp, Homo sapien
actataactgatgctccattgttgaaaatttta

SEQ ID NO: 437422 - DNA, 33 bp, Homo sapien
actataactgatgctctattgttgaaaatttta

SEQ ID NO: 437423 - DNA, 33 bp, Homo sapien
gccagtgttcttgttcaacctgaaagtaatggc

SEQ ID NO: 437424 - DNA, 33 bp, Homo sapien
gccagtgttcttgttcgacctgaaagtaatggc

SEQ ID NO: 437425 - DNA, 33 bp, Homo sapien
atgaacatttagaggactacgttgagtgaaaaa

SEQ ID NO: 437426 - DNA, 33 bp, Homo sapien
atgaacatttagaggattacgttgagtgaaaaa

SEQ ID NO: 437427 - DNA, 33 bp, Homo sapien
atgctttcactggcaactcactaaggtcacatc

SEQ ID NO: 437428 - DNA, 33 bp, Homo sapien
atgctttcactggcaattcactaaggtcacatc

SEQ ID NO: 437429 - DNA, 33 bp, Homo sapien
ttgggcatcctcttaacgagttagcaattaaat

SEQ ID NO: 437430 - DNA, 33 bp, Homo sapien
ttgggcatcctcttaatgagttagcaattaaat

SEQ ID NO: 437431 - DNA, 33 bp, Homo sapien
cctgtgcactgagagaagagggtctgttctgtt

SEQ ID NO: 437432 - DNA, 33 bp, Homo sapien
cctgtgcactgagagaggagggtctgttctgtt

SEQ ID NO: 437433 - DNA, 33 bp, Homo sapien
tctgaagcttatcactcagcacagttatggctg

SEQ ID NO: 437434 - DNA, 33 bp, Homo sapien
tctgaagcttatcacttagcacagttatggctg

SEQ ID NO: 437435 - DNA, 33 bp, Homo sapien
aacaacaggcaaatgagaatcctgcaggcagag

SEQ ID NO: 437436 - DNA, 33 bp, Homo sapien
aacaacaggcaaatgataatcctgcaggcagag

SEQ ID NO: 437437 - DNA, 33 bp, Homo sapien
ttctctaggaatggagaatgggaacacataaat

SEQ ID NO: 437438 - DNA, 33 bp, Homo sapien
ttctctaggaatggaggatgggaacacataaat

SEQ ID NO: 437439 - DNA, 33 bp, Homo sapien
gggctctgcactccggaaacatctatcttggtg

SEQ ID NO: 437440 - DNA, 33 bp, Homo sapien
gggctctgcactccgggaacatctatcttggtg

SEQ ID NO: 437441 - DNA, 33 bp, Homo sapien
gggtgcagcgcctcaaagccgggaagtgagcag

SEQ ID NO: 437442 - DNA, 33 bp, Homo sapien
gggtgcagcgcctcaatgccgggaagtgagcag

SEQ ID NO: 437443 - DNA, 33 bp, Homo sapien
gagaacgggcatattgcaagatcaggagattta

SEQ ID NO: 437444 - DNA, 33 bp, Homo sapien
gagaacgggcatattggaagatcaggagattta

SEQ ID NO: 437445 - DNA, 33 bp, Homo sapien
agtcccatagctcctcagaatctgcagtgtctg

SEQ ID NO: 437446 - DNA, 33 bp, Homo sapien
agtcccatagctcctcggaatctgcagtgtctg

SEQ ID NO: 437447 - DNA, 33 bp, Homo sapien
ctctgtccttactgagcccctacctgcagtggc

SEQ ID NO: 437448 - DNA, 33 bp, Homo sapien
ctctgtccttactgaggccctacctgcagtggc

SEQ ID NO: 437449 - DNA, 33 bp, Homo sapien
aattcagtccataacaacgataaaatcgcattg

SEQ ID NO: 437450 - DNA, 33 bp, Homo sapien
aattcagtccataacaccgataaaatcgcattg

SEQ ID NO: 437451 - DNA, 33 bp, Homo sapien
aatgtcagtcaagatcaaagtctagttctagat

SEQ ID NO: 437452 - DNA, 33 bp, Homo sapien
aatgtcagtcaagatcgaagtctagttctagat

SEQ ID NO: 437453 - DNA, 33 bp, Homo sapien
acaagttcctagatgacgatcatgctgatggtc

SEQ ID NO: 437454 - DNA, 33 bp, Homo sapien
acaagttcctagatgatgatcatgctgatggtc

SEQ ID NO: 437455 - DNA, 33 bp, Homo sapien
ttttcttgagatttgaagtcaaaagctagctag

SEQ ID NO: 437456 - DNA, 33 bp, Homo sapien
ttttcttgagatttgaggtcaaaagctagctag

SEQ ID NO: 437457 - DNA, 33 bp, Homo sapien
gttactatgtctgtcacaaccaggaaagaacag

SEQ ID NO: 437458 - DNA, 33 bp, Homo sapien
gttactatgtctgtcataaccaggaaagaacag

SEQ ID NO: 437459 - DNA, 33 bp, Homo sapien
tccagatacttgacagcagggtccaatacagag

SEQ ID NO: 437460 - DNA, 33 bp, Homo sapien
tccagatacttgacaggagggtccaatacagag

SEQ ID NO: 437461 - DNA, 33 bp, Homo sapien
cacagaaaaaaggtgactatcagcccagaagtc

SEQ ID NO: 437462 - DNA, 33 bp, Homo sapien
cacagaaaaaaggtgattatcagcccagaagtc

SEQ ID NO: 437463 - DNA, 33 bp, Homo sapien
aatgcctagcacttcacatctgactcaagtaga

SEQ ID NO: 437464 - DNA, 33 bp, Homo sapien
aatgcctagcacttcatatctgactcaagtaga

SEQ ID NO: 437465 - DNA, 33 bp, Homo sapien
tttctgatcttgaaaacgtcatgaaacagatat

SEQ ID NO: 437466 - DNA, 33 bp, Homo sapien
tttctgatcttgaaaatgtcatgaaacagatat

SEQ ID NO: 437467 - DNA, 33 bp, Homo sapien
aaattccctataaagaggctagtgctacttcca

SEQ ID NO: 437468 - DNA, 33 bp, Homo sapien
aaattccctataaagatgctagtgctacttcca

SEQ ID NO: 437469 - DNA, 33 bp, Homo sapien
aaaccgaagcctaaaactgtccagttataaact

SEQ ID NO: 437470 - DNA, 33 bp, Homo sapien
aaaccgaagcctaaaattgtccagttataaact

SEQ ID NO: 437471 - DNA, 33 bp, Homo sapien
caacctgaaaatgatccagggaaccaagtattt

SEQ ID NO: 437472 - DNA, 33 bp, Homo sapien
caacctgaaaatgatctagggaaccaagtattt

SEQ ID NO: 437473 - DNA, 33 bp, Homo sapien
gggtcataccaattctcaaatccatccatcttt

SEQ ID NO: 437474 - DNA, 33 bp, Homo sapien
gggtcataccaattcttaaatccatccatcttt

SEQ ID NO: 437475 - DNA, 33 bp, Homo sapien
gacacaaagaggagcagagtgacaagaaacagt

SEQ ID NO: 437476 - DNA, 33 bp, Homo sapien
gacacaaagaggagcatagtgacaagaaacagt

SEQ ID NO: 437477 - DNA, 33 bp, Homo sapien
tccaaacaattgaccaaaaatcatctttgtgta

SEQ ID NO: 437478 - DNA, 33 bp, Homo sapien
tccaaacaattgaccataaatcatctttgtgta

SEQ ID NO: 437479 - DNA, 33 bp, Homo sapien
gagaggatgcacatgaacttgatgtaagacctt

SEQ ID NO: 437480 - DNA, 33 bp, Homo sapien
gagaggatgcacatgagcttgatgtaagacctt

SEQ ID NO: 437481 - DNA, 33 bp, Homo sapien
aatcaaaagagtatcaagaacattatttatttg

SEQ ID NO: 437482 - DNA, 33 bp, Homo sapien
aatcaaaagagtatcaggaacattatttatttg

SEQ ID NO: 437483 - DNA, 33 bp, Homo sapien
ggctcagagccctagcaaaccgcttctaaagac

SEQ ID NO: 437484 - DNA, 33 bp, Homo sapien
ggctcagagccctagcgaaccgcttctaaagac

SEQ ID NO: 437485 - DNA, 33 bp, Homo sapien
tctcatcaaaattgtactaaagccatgaaaaaa

SEQ ID NO: 437486 - DNA, 33 bp, Homo sapien
tctcatcaaaattgtagtaaagccatgaaaaaa

SEQ ID NO: 437487 - DNA, 33 bp, Homo sapien
ttgactcacacgattaaaaggcgaagtcccatg

SEQ ID NO: 437488 - DNA, 33 bp, Homo sapien
ttgactcacacgattacaaggcgaagtcccatg

SEQ ID NO: 437489 - DNA, 33 bp, Homo sapien
caccacagacgcacccaagaacaattcttcccc

SEQ ID NO: 437490 - DNA, 33 bp, Homo sapien
caccacagacgcacccgagaacaattcttcccc

SEQ ID NO: 437491 - DNA, 33 bp, Homo sapien
agttcttacagagcgaaaaaaagggggaactct

SEQ ID NO: 437492 - DNA, 33 bp, Homo sapien
agttcttacagagcgacaaaaagggggaactct

SEQ ID NO: 437493 - DNA, 33 bp, Homo sapien
gtgagtttatactacacgtaggtgtcagcacac

SEQ ID NO: 437494 - DNA, 33 bp, Homo sapien
gtgagtttatactacatgtaggtgtcagcacac

SEQ ID NO: 437495 - DNA, 33 bp, Homo sapien
cttttttgtttataaagtgcgtagacagcatct

SEQ ID NO: 437496 - DNA, 33 bp, Homo sapien
cttttttgtttataaattgcgtagacagcatct

SEQ ID NO: 437497 - DNA, 33 bp, Homo sapien
ggttatttttccaaaaatcagtgccaatcaggg

SEQ ID NO: 437498 - DNA, 33 bp, Homo sapien
ggttatttttccaaaagtcagtgccaatcaggg

SEQ ID NO: 437499 - DNA, 33 bp, Homo sapien
acgagagttaaaactacggaaaagctcaagtct

SEQ ID NO: 437500 - DNA, 33 bp, Homo sapien
acgagagttaaaactatggaaaagctcaagtct

SEQ ID NO: 437501 - DNA, 33 bp, Homo sapien
gaacctcaggaaccaacgaactctgtttctaag

SEQ ID NO: 437502 - DNA, 33 bp, Homo sapien
gaacctcaggaaccaatgaactctgtttctaag

SEQ ID NO: 437503 - DNA, 33 bp, Homo sapien
aactgaaagagctaacgaattcatatctgaagt

SEQ ID NO: 437504 - DNA, 33 bp, Homo sapien
aactgaaagagctaactaattcatatctgaagt

SEQ ID NO: 437505 - DNA, 33 bp, Homo sapien
tatgtattatcaaataactttgctggaagagta

SEQ ID NO: 437506 - DNA, 33 bp, Homo sapien
tatgtattatcaaatatctttgctggaagagta

SEQ ID NO: 437507 - DNA, 33 bp, Homo sapien
gcagtgaattgagaaccagttttaaggaaaact

SEQ ID NO: 437508 - DNA, 33 bp, Homo sapien
gcagtgaattgagaactagttttaaggaaaact

SEQ ID NO: 437509 - DNA, 33 bp, Homo sapien
acattttccagaaatcccttgaactcattgcaa

SEQ ID NO: 437510 - DNA, 33 bp, Homo sapien
acattttccagaaatctcttgaactcattgcaa

SEQ ID NO: 437511 - DNA, 33 bp, Homo sapien
gacctcggctctaataagtgaccccatagtcca

SEQ ID NO: 437512 - DNA, 33 bp, Homo sapien
gacctcggctctaataggtgaccccatagtcca

SEQ ID NO: 437513 - DNA, 33 bp, Homo sapien
aaagtatgaaaaaaataagactctagcacataa

SEQ ID NO: 437514 - DNA, 33 bp, Homo sapien
aaagtatgaaaaaaatgagactctagcacataa

SEQ ID NO: 437515 - DNA, 33 bp, Homo sapien
acaatgaatagtacgacgattatagagtccttg

SEQ ID NO: 437516 - DNA, 33 bp, Homo sapien
acaatgaatagtacgatgattatagagtccttg

SEQ ID NO: 437517 - DNA, 33 bp, Homo sapien
taccagcttggtaacagtggggtagagcacaaa

SEQ ID NO: 437518 - DNA, 33 bp, Homo sapien
taccagcttggtaacattggggtagagcacaaa

SEQ ID NO: 437519 - DNA, 33 bp, Homo sapien
cagcagaataaagcaccaggtagcttcccaaga

SEQ ID NO: 437520 - DNA, 33 bp, Homo sapien
cagcagaataaagcacgaggtagcttcccaaga

SEQ ID NO: 437521 - DNA, 33 bp, Homo sapien
tccagttttccatgcagccattggtaataaaaa

SEQ ID NO: 437522 - DNA, 33 bp, Homo sapien
tccagttttccatgcatccattggtaataaaaa

SEQ ID NO: 437523 - DNA, 33 bp, Homo sapien
aattaaatgtgggatccgaaggtaaaacttcag

SEQ ID NO: 437524 - DNA, 33 bp, Homo sapien
aattaaatgtgggatctgaaggtaaaacttcag

SEQ ID NO: 437525 - DNA, 33 bp, Homo sapien
ttcatccctatttcacagagttgctgtaagaat

SEQ ID NO: 437526 - DNA, 33 bp, Homo sapien
ttcatccctatttcacggagttgctgtaagaat

SEQ ID NO: 437527 - DNA, 33 bp, Homo sapien
cgtaaattctctctgccgatgccatgtaggaag

SEQ ID NO: 437528 - DNA, 33 bp, Homo sapien
cgtaaattctctctgctgatgccatgtaggaag

SEQ ID NO: 437529 - DNA, 33 bp, Homo sapien
aaaaacagccttcagaaagagctgctctgggca

SEQ ID NO: 437530 - DNA, 33 bp, Homo sapien
aaaaacagccttcagagagagctgctctgggca

SEQ ID NO: 437531 - DNA, 33 bp, Homo sapien
tacacttgaagaatggaccaaggttagaaacaa

SEQ ID NO: 437532 - DNA, 33 bp, Homo sapien
tacacttgaagaatgggccaaggttagaaacaa

SEQ ID NO: 437533 - DNA, 33 bp, Homo sapien
aatagtagtacctaagaaaaagaatacacttga

SEQ ID NO: 437534 - DNA, 33 bp, Homo sapien
aatagtagtacctaaggaaaagaatacacttga

SEQ ID NO: 437535 - DNA, 33 bp, Homo sapien
gaagaaaagagttgtccatacttgtgactggtt

SEQ ID NO: 437536 - DNA, 33 bp, Homo sapien
gaagaaaagagttgtctatacttgtgactggtt

SEQ ID NO: 437537 - DNA, 33 bp, Homo sapien
gtacttccaccttctgaaactgttctcaacatc

SEQ ID NO: 437538 - DNA, 33 bp, Homo sapien
gtacttccaccttctggaactgttctcaacatc

SEQ ID NO: 437539 - DNA, 33 bp, Homo sapien
agaaggtggaagtacaaggcagatagtgggcta

SEQ ID NO: 437540 - DNA, 33 bp, Homo sapien
agaaggtggaagtacagggcagatagtgggcta

SEQ ID NO: 437541 - DNA, 33 bp, Homo sapien
aactctgagaaggtcacagacaacatcggtgag

SEQ ID NO: 437542 - DNA, 33 bp, Homo sapien
aactctgagaaggtcagagacaacatcggtgag

SEQ ID NO: 437543 - DNA, 33 bp, Homo sapien
tttgaataagatttaactgtgcgtatataccac

SEQ ID NO: 437544 - DNA, 33 bp, Homo sapien
tttgaataagatttaattgtgcgtatataccac

SEQ ID NO: 437545 - DNA, 33 bp, Homo sapien
acatggccctaaaaaacttgtatatgtgtgctc

SEQ ID NO: 437546 - DNA, 33 bp, Homo sapien
acatggccctaaaaaatttgtatatgtgtgctc

SEQ ID NO: 437547 - DNA, 33 bp, Homo sapien
atataactattttcacccctgctgtccaccatt

SEQ ID NO: 437548 - DNA, 33 bp, Homo sapien
atataactattttcactcctgctgtccaccatt

SEQ ID NO: 437549 - DNA, 33 bp, Homo sapien
ataattaatggtttctcaactggacatatgtaa

SEQ ID NO: 437550 - DNA, 33 bp, Homo sapien
ataattaatggtttcttaactggacatatgtaa

SEQ ID NO: 437551 - DNA, 33 bp, Homo sapien
gaagacaagtgtacaaacccttttcatgtcaag

SEQ ID NO: 437552 - DNA, 33 bp, Homo sapien
gaagacaagtgtacaagcccttttcatgtcaag

SEQ ID NO: 437553 - DNA, 33 bp, Homo sapien
atacatagatatttcccgccaaatgtgattaca

SEQ ID NO: 437554 - DNA, 33 bp, Homo sapien
atacatagatatttcctgccaaatgtgattaca

SEQ ID NO: 437555 - DNA, 33 bp, Homo sapien
atgtagtaaatatttccagatttgtggtcatac

SEQ ID NO: 437556 - DNA, 33 bp, Homo sapien
atgtagtaaatatttctagatttgtggtcatac

SEQ ID NO: 437557 - DNA, 33 bp, Homo sapien
agctaagtctggactcacctagacgatctcatc

SEQ ID NO: 437558 - DNA, 33 bp, Homo sapien
agctaagtctggactcgcctagacgatctcatc

SEQ ID NO: 437559 - DNA, 33 bp, Homo sapien
catcaagccaaagaaacgggaaatagcacagag

SEQ ID NO: 437560 - DNA, 33 bp, Homo sapien
catcaagccaaagaaaggggaaatagcacagag

SEQ ID NO: 437561 - DNA, 33 bp, Homo sapien
ctgatggaatcaagaacgtaatgaagcaataaa

SEQ ID NO: 437562 - DNA, 33 bp, Homo sapien
ctgatggaatcaagaatgtaatgaagcaataaa

SEQ ID NO: 437563 - DNA, 33 bp, Homo sapien
catcagtgacatatcaccaaattttgtgggcat

SEQ ID NO: 437564 - DNA, 33 bp, Homo sapien
catcagtgacatatcatcaaattttgtgggcat

SEQ ID NO: 437565 - DNA, 33 bp, Homo sapien
atgggtcaagaagcgaataggctgtgaacacga

SEQ ID NO: 437566 - DNA, 33 bp, Homo sapien
atgggtcaagaagcgagtaggctgtgaacacga

SEQ ID NO: 437567 - DNA, 33 bp, Homo sapien
tattctcagctaaagactctgcagatcatatca

SEQ ID NO: 437568 - DNA, 33 bp, Homo sapien
tattctcagctaaagattctgcagatcatatca

SEQ ID NO: 437569 - DNA, 33 bp, Homo sapien
tcatgccccatcaccaatatagcaattcctggg

SEQ ID NO: 437570 - DNA, 33 bp, Homo sapien
tcatgccccatcaccactatagcaattcctggg

SEQ ID NO: 437571 - DNA, 33 bp, Homo sapien
tcttggcaaggtcacccatgacatctaaattgc

SEQ ID NO: 437572 - DNA, 33 bp, Homo sapien
tcttggcaaggtcacctatgacatctaaattgc

SEQ ID NO: 437573 - DNA, 33 bp, Homo sapien
tattaactagaagaaacgccaattagagtgcca

SEQ ID NO: 437574 - DNA, 33 bp, Homo sapien
tattaactagaagaaaggccaattagagtgcca

SEQ ID NO: 437575 - DNA, 33 bp, Homo sapien
actagctcttagactacggttggttgctagcaa

SEQ ID NO: 437576 - DNA, 33 bp, Homo sapien
actagctcttagactagggttggttgctagcaa

SEQ ID NO: 437577 - DNA, 33 bp, Homo sapien
tagttagactggaaagaagcaatagtgacttaa

SEQ ID NO: 437578 - DNA, 33 bp, Homo sapien
tagttagactggaaaggagcaatagtgacttaa

SEQ ID NO: 437579 - DNA, 33 bp, Homo sapien
ttcccctcaggtgttccacaatgactctacacc

SEQ ID NO: 437580 - DNA, 33 bp, Homo sapien
ttcccctcaggtgttctacaatgactctacacc

SEQ ID NO: 437581 - DNA, 33 bp, Homo sapien
atatctacttgtgggacgcccatgacattatta

SEQ ID NO: 437582 - DNA, 33 bp, Homo sapien
atatctacttgtgggatgcccatgacattatta

SEQ ID NO: 437583 - DNA, 33 bp, Homo sapien
acaagagaattttgcaatcacccttagcacttt

SEQ ID NO: 437584 - DNA, 33 bp, Homo sapien
acaagagaattttgcagtcacccttagcacttt

SEQ ID NO: 437585 - DNA, 33 bp, Homo sapien
agggttattccagacagaggcagcagtgtgaag

SEQ ID NO: 437586 - DNA, 33 bp, Homo sapien
agggttattccagacataggcagcagtgtgaag

SEQ ID NO: 437587 - DNA, 33 bp, Homo sapien
catgctttctccttcccagaattcttgaccact

SEQ ID NO: 437588 - DNA, 33 bp, Homo sapien
catgctttctccttcctagaattcttgaccact

SEQ ID NO: 437589 - DNA, 33 bp, Homo sapien
tcatctaattccaagaactcaagattccaagga

SEQ ID NO: 437590 - DNA, 33 bp, Homo sapien
tcatctaattccaagagctcaagattccaagga

SEQ ID NO: 437591 - DNA, 33 bp, Homo sapien
tctagcattaaagcaacgggcaaaaacttttgt

SEQ ID NO: 437592 - DNA, 33 bp, Homo sapien
tctagcattaaagcaatgggcaaaaacttttgt

SEQ ID NO: 437593 - DNA, 33 bp, Homo sapien
gtgctatgcattcaaagacaaataagatgccaa

SEQ ID NO: 437594 - DNA, 33 bp, Homo sapien
gtgctatgcattcaaatacaaataagatgccaa

SEQ ID NO: 437595 - DNA, 33 bp, Homo sapien
tcagaccacactaagtcacctgcgctctcacca

SEQ ID NO: 437596 - DNA, 33 bp, Homo sapien
tcagaccacactaagttacctgcgctctcacca

SEQ ID NO: 437597 - DNA, 33 bp, Homo sapien
agccttttcactttacactgttttgtgttgttt

SEQ ID NO: 437598 - DNA, 33 bp, Homo sapien
agccttttcactttacgctgttttgtgttgttt

SEQ ID NO: 437599 - DNA, 33 bp, Homo sapien
tgtccctgtgtttctccaacatatcttcaccat

SEQ ID NO: 437600 - DNA, 33 bp, Homo sapien
tgtccctgtgtttctctaacatatcttcaccat

SEQ ID NO: 437601 - DNA, 33 bp, Homo sapien
ccctgaaattgacttacggatgttgggagaaag

SEQ ID NO: 437602 - DNA, 33 bp, Homo sapien
ccctgaaattgacttatggatgttgggagaaag

SEQ ID NO: 437603 - DNA, 33 bp, Homo sapien
gaactggatctcaaaacgagcggaattctattc

SEQ ID NO: 437604 - DNA, 33 bp, Homo sapien
gaactggatctcaaaatgagcggaattctattc

SEQ ID NO: 437605 - DNA, 33 bp, Homo sapien
ttccttcttgctgcagacagaacccagagcaga

SEQ ID NO: 437606 - DNA, 33 bp, Homo sapien
ttccttcttgctgcaggcagaacccagagcaga

SEQ ID NO: 437607 - DNA, 33 bp, Homo sapien
aagatttttccagatacgtacacttaactccac

SEQ ID NO: 437608 - DNA, 33 bp, Homo sapien
aagatttttccagataggtacacttaactccac

SEQ ID NO: 437609 - DNA, 33 bp, Homo sapien
aaaactttcagcatcccatatagtaaaattctc

SEQ ID NO: 437610 - DNA, 33 bp, Homo sapien
aaaactttcagcatccgatatagtaaaattctc

SEQ ID NO: 437611 - DNA, 33 bp, Homo sapien
agatggatttacagctaaagaaaaagaagttgt

SEQ ID NO: 437612 - DNA, 33 bp, Homo sapien
agatggatttacagctgaagaaaaagaagttgt

SEQ ID NO: 437613 - DNA, 33 bp, Homo sapien
ggatagcaccatctaacctgttgtctgttgatg

SEQ ID NO: 437614 - DNA, 33 bp, Homo sapien
ggatagcaccatctaatctgttgtctgttgatg

SEQ ID NO: 437615 - DNA, 33 bp, Homo sapien
tcaggagatggtcgcaaagattttccaatacct

SEQ ID NO: 437616 - DNA, 33 bp, Homo sapien
tcaggagatggtcgcagagattttccaatacct

SEQ ID NO: 437617 - DNA, 33 bp, Homo sapien
cagagtaagacaataaaaaaattagcctctttc

SEQ ID NO: 437618 - DNA, 33 bp, Homo sapien
cagagtaagacaataacaaaattagcctctttc

SEQ ID NO: 437619 - DNA, 33 bp, Homo sapien
cataatgtaatacatacaccatgaggtaactac

SEQ ID NO: 437620 - DNA, 33 bp, Homo sapien
cataatgtaatacatataccatgaggtaactac

SEQ ID NO: 437621 - DNA, 33 bp, Homo sapien
gagagttttaacagtaagagaaatgaatgtgaa

SEQ ID NO: 437622 - DNA, 33 bp, Homo sapien
gagagttttaacagtaggagaaatgaatgtgaa

SEQ ID NO: 437623 - DNA, 33 bp, Homo sapien
tgagttattgtcatatcatactcggtaagcata

SEQ ID NO: 437624 - DNA, 33 bp, Homo sapien
tgagttattgtcatatgatactcggtaagcata

SEQ ID NO: 437625 - DNA, 33 bp, Homo sapien
ctgctgctgaacttacaatccttcctactttga

SEQ ID NO: 437626 - DNA, 33 bp, Homo sapien
ctgctgctgaacttacgatccttcctactttga

SEQ ID NO: 437627 - DNA, 33 bp, Homo sapien
tctactggagcaaaaacaaaccaactgattggc

SEQ ID NO: 437628 - DNA, 33 bp, Homo sapien
tctactggagcaaaaagaaaccaactgattggc

SEQ ID NO: 437629 - DNA, 33 bp, Homo sapien
ctatgggaatacaaagaatcgggctagttcatt

SEQ ID NO: 437630 - DNA, 33 bp, Homo sapien
ctatgggaatacaaagcatcgggctagttcatt

SEQ ID NO: 437631 - DNA, 33 bp, Homo sapien
agatgccaaatcagtgcagcttttcagcagcat

SEQ ID NO: 437632 - DNA, 33 bp, Homo sapien
agatgccaaatcagtgtagcttttcagcagcat

SEQ ID NO: 437633 - DNA, 33 bp, Homo sapien
tagtaactcgaatgaactctggtgttagctcat

SEQ ID NO: 437634 - DNA, 33 bp, Homo sapien
tagtaactcgaatgaattctggtgttagctcat

SEQ ID NO: 437635 - DNA, 33 bp, Homo sapien
gtgagggcatcagtacacatgcttctgtcctgg

SEQ ID NO: 437636 - DNA, 33 bp, Homo sapien
gtgagggcatcagtacccatgcttctgtcctgg

SEQ ID NO: 437637 - DNA, 33 bp, Homo sapien
gtgctcttgatcaggaacttggatgccagaaaa

SEQ ID NO: 437638 - DNA, 33 bp, Homo sapien
gtgctcttgatcaggagcttggatgccagaaaa

SEQ ID NO: 437639 - DNA, 33 bp, Homo sapien
agaggagaacagacttcaagcttcattagactt

SEQ ID NO: 437640 - DNA, 33 bp, Homo sapien
agaggagaacagactttaagcttcattagactt

SEQ ID NO: 437641 - DNA, 33 bp, Homo sapien
ttcaggtatggtaaggacaacagattagaggat

SEQ ID NO: 437642 - DNA, 33 bp, Homo sapien
ttcaggtatggtaaggccaacagattagaggat

SEQ ID NO: 437643 - DNA, 33 bp, Homo sapien
tgttgcatggtctgacgacagaatttgctttaa

SEQ ID NO: 437644 - DNA, 33 bp, Homo sapien
tgttgcatggtctgactacagaatttgctttaa

SEQ ID NO: 437645 - DNA, 33 bp, Homo sapien
atgggaaataagtggactaaaccaaacattcag

SEQ ID NO: 437646 - DNA, 33 bp, Homo sapien
atgggaaataagtggattaaaccaaacattcag

SEQ ID NO: 437647 - DNA, 33 bp, Homo sapien
gagatgcggaaagagacgagaaaagaacttcaa

SEQ ID NO: 437648 - DNA, 33 bp, Homo sapien
gagatgcggaaagagatgagaaaagaacttcaa

SEQ ID NO: 437649 - DNA, 33 bp, Homo sapien
ggtttgtgttgttttgaaaatctcgccatgcta

SEQ ID NO: 437650 - DNA, 33 bp, Homo sapien
ggtttgtgttgttttggaaatctcgccatgcta

SEQ ID NO: 437651 - DNA, 33 bp, Homo sapien
gttgtacctacccaacaagcattcctctcttct

SEQ ID NO: 437652 - DNA, 33 bp, Homo sapien
gttgtacctacccaacgagcattcctctcttct

SEQ ID NO: 437653 - DNA, 33 bp, Homo sapien
tggattaacttgaaaaactcccttctcatgcct

SEQ ID NO: 437654 - DNA, 33 bp, Homo sapien
tggattaacttgaaaatctcccttctcatgcct

SEQ ID NO: 437655 - DNA, 33 bp, Homo sapien
ttatgatgattaatggacaaggagcatgaattt

SEQ ID NO: 437656 - DNA, 33 bp, Homo sapien
ttatgatgattaatgggcaaggagcatgaattt

SEQ ID NO: 437657 - DNA, 33 bp, Homo sapien
actgccttcctagtacagatagaaatgtcaaca

SEQ ID NO: 437658 - DNA, 33 bp, Homo sapien
actgccttcctagtacggatagaaatgtcaaca

SEQ ID NO: 437659 - DNA, 33 bp, Homo sapien
tgcctttcaagcttccagattagttattaaaaa

SEQ ID NO: 437660 - DNA, 33 bp, Homo sapien
tgcctttcaagcttccggattagttattaaaaa

SEQ ID NO: 437661 - DNA, 33 bp, Homo sapien
tactgacatttaactccgacatggagccaaagg

SEQ ID NO: 437662 - DNA, 33 bp, Homo sapien
tactgacatttaactctgacatggagccaaagg

SEQ ID NO: 437663 - DNA, 33 bp, Homo sapien
agcctggtaaaacatacagattcagcaattaac

SEQ ID NO: 437664 - DNA, 33 bp, Homo sapien
agcctggtaaaacatagagattcagcaattaac

SEQ ID NO: 437665 - DNA, 33 bp, Homo sapien
ggtatggcaagatgcaaattaaacccaagggca

SEQ ID NO: 437666 - DNA, 33 bp, Homo sapien
ggtatggcaagatgcagattaaacccaagggca

SEQ ID NO: 437667 - DNA, 33 bp, Homo sapien
cagtctaggaactaaccaagagcttttcattaa

SEQ ID NO: 437668 - DNA, 33 bp, Homo sapien
cagtctaggaactaacgaagagcttttcattaa

SEQ ID NO: 437669 - DNA, 33 bp, Homo sapien
gggtagtcaagtaaacaatgggtttccactcct

SEQ ID NO: 437670 - DNA, 33 bp, Homo sapien
gggtagtcaagtaaacgatgggtttccactcct

SEQ ID NO: 437671 - DNA, 33 bp, Homo sapien
agttctctaagcacttaaaatgcccaggatgga

SEQ ID NO: 437672 - DNA, 33 bp, Homo sapien
agttctctaagcacttgaaatgcccaggatgga

SEQ ID NO: 437673 - DNA, 33 bp, Homo sapien
gaagcagctctcttcccgaatccaagttctctc

SEQ ID NO: 437674 - DNA, 33 bp, Homo sapien
gaagcagctctcttcctgaatccaagttctctc

SEQ ID NO: 437675 - DNA, 33 bp, Homo sapien
aaaatatcaatgcccaacaaaattttaaaagtt

SEQ ID NO: 437676 - DNA, 33 bp, Homo sapien
aaaatatcaatgcccagcaaaattttaaaagtt

SEQ ID NO: 437677 - DNA, 33 bp, Homo sapien
tgtgaaaagagaagagccatttcattttaactt

SEQ ID NO: 437678 - DNA, 33 bp, Homo sapien
tgtgaaaagagaagagtcatttcattttaactt

SEQ ID NO: 437679 - DNA, 33 bp, Homo sapien
aaaataatcaggttcacggcacatctctcttca

SEQ ID NO: 437680 - DNA, 33 bp, Homo sapien
aaaataatcaggttcatggcacatctctcttca

SEQ ID NO: 437681 - DNA, 33 bp, Homo sapien
tccctgctgaggagctaaagttaattttctatc

SEQ ID NO: 437682 - DNA, 33 bp, Homo sapien
tccctgctgaggagctgaagttaattttctatc

SEQ ID NO: 437683 - DNA, 33 bp, Homo sapien
actgtttgaccaagaaagactgtgattaatgcc

SEQ ID NO: 437684 - DNA, 33 bp, Homo sapien
actgtttgaccaagaaggactgtgattaatgcc

SEQ ID NO: 437685 - DNA, 33 bp, Homo sapien
acctataaatgttttcaacactgaaagggcatt

SEQ ID NO: 437686 - DNA, 33 bp, Homo sapien
acctataaatgttttctacactgaaagggcatt

SEQ ID NO: 437687 - DNA, 33 bp, Homo sapien
cagtaatgaaaactgaggggacaatgtggtgca

SEQ ID NO: 437688 - DNA, 33 bp, Homo sapien
cagtaatgaaaactgatgggacaatgtggtgca

SEQ ID NO: 437689 - DNA, 33 bp, Homo sapien
ctcattctccctctcaaatttattcacagtctc

SEQ ID NO: 437690 - DNA, 33 bp, Homo sapien
ctcattctccctctcagatttattcacagtctc

SEQ ID NO: 437691 - DNA, 33 bp, Homo sapien
tgaaatatgtgcatccaatgacaaatgaaatgg

SEQ ID NO: 437692 - DNA, 33 bp, Homo sapien
tgaaatatgtgcatccgatgacaaatgaaatgg

SEQ ID NO: 437693 - DNA, 33 bp, Homo sapien
cacacatgtccttgtacaggcagaatcaatgtt

SEQ ID NO: 437694 - DNA, 33 bp, Homo sapien
cacacatgtccttgtataggcagaatcaatgtt

SEQ ID NO: 437695 - DNA, 33 bp, Homo sapien
aacagctacctatttgcaccacttttcagataa

SEQ ID NO: 437696 - DNA, 33 bp, Homo sapien
aacagctacctatttgtaccacttttcagataa

SEQ ID NO: 437697 - DNA, 33 bp, Homo sapien
ggaaaggctccatgtaaaattccccctctttga

SEQ ID NO: 437698 - DNA, 33 bp, Homo sapien
ggaaaggctccatgtataattccccctctttga

SEQ ID NO: 437699 - DNA, 33 bp, Homo sapien
ttggagacttatccatgaattcccacaacagag

SEQ ID NO: 437700 - DNA, 33 bp, Homo sapien
ttggagacttatccattaattcccacaacagag

SEQ ID NO: 437701 - DNA, 33 bp, Homo sapien
gtgtaggtacaaatcactgattaaagtgcagaa

SEQ ID NO: 437702 - DNA, 33 bp, Homo sapien
gtgtaggtacaaatcagtgattaaagtgcagaa

SEQ ID NO: 437703 - DNA, 33 bp, Homo sapien; identical to SEQ ID NO: 437701

SEQ ID NO: 437704 - DNA, 33 bp, Homo sapien; identical to SEQ ID NO: 437702

SEQ ID NO: 437705 - DNA, 33 bp, Homo sapien
tctatttgttcttcccaagctatgcccagttga

SEQ ID NO: 437706 - DNA, 33 bp, Homo sapien
tctatttgttcttccccagctatgcccagttga

SEQ ID NO: 437707 - DNA, 33 bp, Homo sapien
ctggtgagcattatcacatttacacacacatcc

SEQ ID NO: 437708 - DNA, 33 bp, Homo sapien
ctggtgagcattatcagatttacacacacatcc

SEQ ID NO: 437709 - DNA, 33 bp, Homo sapien
gttaaagacacttctacaatgtaagatcaaaca

SEQ ID NO: 437710 - DNA, 33 bp, Homo sapien
gttaaagacacttctataatgtaagatcaaaca

SEQ ID NO: 437711 - DNA, 33 bp, Homo sapien
atgtggttgtagccaacgtcacttgtattgttt

SEQ ID NO: 437712 - DNA, 33 bp, Homo sapien
atgtggttgtagccaatgtcacttgtattgttt

SEQ ID NO: 437713 - DNA, 33 bp, Homo sapien
cttccaggattagacaactaggaaattgtgaac

SEQ ID NO: 437714 - DNA, 33 bp, Homo sapien
cttccaggattagacagctaggaaattgtgaac

SEQ ID NO: 437715 - DNA, 33 bp, Homo sapien
agagcctgctcattagcccctttcacagctggc

SEQ ID NO: 437716 - DNA, 33 bp, Homo sapien
agagcctgctcattaggccctttcacagctggc

SEQ ID NO: 437717 - DNA, 33 bp, Homo sapien
aagtccagggaagaaacgtatgttggctgctat

SEQ ID NO: 437718 - DNA, 33 bp, Homo sapien
aagtccagggaagaaaggtatgttggctgctat

SEQ ID NO: 437719 - DNA, 33 bp, Homo sapien
cctttgttgaagtaaccataccccagggcaatg

SEQ ID NO: 437720 - DNA, 33 bp, Homo sapien
cctttgttgaagtaacgataccccagggcaatg

SEQ ID NO: 437721 - DNA, 33 bp, Homo sapien
aattttgatacccaccaaagaggagacacatac

SEQ ID NO: 437722 - DNA, 33 bp, Homo sapien
aattttgatacccaccgaagaggagacacatac

SEQ ID NO: 437723 - DNA, 33 bp, Homo sapien
agaccgtgacctttgtaaatgcagacaaatgag

SEQ ID NO: 437724 - DNA, 33 bp, Homo sapien
agaccgtgacctttgttaatgcagacaaatgag

SEQ ID NO: 437725 - DNA, 33 bp, Homo sapien
ggataaaaactctcgaacttgacatttagctta

SEQ ID NO: 437726 - DNA, 33 bp, Homo sapien
ggataaaaactctcgagcttgacatttagctta

SEQ ID NO: 437727 - DNA, 33 bp, Homo sapien
agatgaggcctttagaagctaattaagtttcaa

SEQ ID NO: 437728 - DNA, 33 bp, Homo sapien
agatgaggcctttagacgctaattaagtttcaa

SEQ ID NO: 437729 - DNA, 33 bp, Homo sapien
gtggcttaaggaatagacactgtttctcatagc

SEQ ID NO: 437730 - DNA, 33 bp, Homo sapien
gtggcttaaggaataggcactgtttctcatagc

SEQ ID NO: 437731 - DNA, 33 bp, Homo sapien
gacacttgggagccaacaatgacacaactgtcc

SEQ ID NO: 437732 - DNA, 33 bp, Homo sapien
gacacttgggagccaagaatgacacaactgtcc

SEQ ID NO: 437733 - DNA, 33 bp, Homo sapien
ggggtatttgtgagggaatatggagaaggaagc

SEQ ID NO: 437734 - DNA, 33 bp, Homo sapien
ggggtatttgtgaggggatatggagaaggaagc

SEQ ID NO: 437735 - DNA, 33 bp, Homo sapien
ggagcaaagatggcgaactctggaactgactgg

SEQ ID NO: 437736 - DNA, 33 bp, Homo sapien
ggagcaaagatggcgagctctggaactgactgg

SEQ ID NO: 437737 - DNA, 33 bp, Homo sapien
agatgaggacaactcacaagacgtgtggtaatt

SEQ ID NO: 437738 - DNA, 33 bp, Homo sapien
agatgaggacaactcataagacgtgtggtaatt

SEQ ID NO: 437739 - DNA, 33 bp, Homo sapien
ctggctacgtgggatgaagtaagaatagagtgg

SEQ ID NO: 437740 - DNA, 33 bp, Homo sapien
ctggctacgtgggatggagtaagaatagagtgg

SEQ ID NO: 437741 - DNA, 33 bp, Homo sapien
gcctggaatagagcaacaacagcgagaatagag

SEQ ID NO: 437742 - DNA, 33 bp, Homo sapien
gcctggaatagagcaataacagcgagaatagag

SEQ ID NO: 437743 - DNA, 33 bp, Homo sapien
atttgcttattggttacagtaatgaactgatgc

SEQ ID NO: 437744 - DNA, 33 bp, Homo sapien
atttgcttattggttatagtaatgaactgatgc

SEQ ID NO: 437745 - DNA, 33 bp, Homo sapien
ggagagtgctgttaagaccacaaaagccaacag

SEQ ID NO: 437746 - DNA, 33 bp, Homo sapien
ggagagtgctgttaaggccacaaaagccaacag

SEQ ID NO: 437747 - DNA, 33 bp, Homo sapien
ataaacagcaccttcacgaaaaggagaatagtc

SEQ ID NO: 437748 - DNA, 33 bp, Homo sapien
ataaacagcaccttcatgaaaaggagaatagtc

SEQ ID NO: 437749 - DNA, 33 bp, Homo sapien
gtcttgcgcttctggacgaatgcagctcatgat

SEQ ID NO: 437750 - DNA, 33 bp, Homo sapien
gtcttgcgcttctggatgaatgcagctcatgat

SEQ ID NO: 437751 - DNA, 33 bp, Homo sapien
atccagggatgcaagaaatggcaatagattggg

SEQ ID NO: 437752 - DNA, 33 bp, Homo sapien
atccagggatgcaagagatggcaatagattggg

SEQ ID NO: 437753 - DNA, 33 bp, Homo sapien
atgttccttcctgagacctttgcgtagctcact

SEQ ID NO: 437754 - DNA, 33 bp, Homo sapien
atgttccttcctgagatctttgcgtagctcact

SEQ ID NO: 437755 - DNA, 33 bp, Homo sapien
taaacaagagtaacgaaatcattcatacccaga

SEQ ID NO: 437756 - DNA, 33 bp, Homo sapien
taaacaagagtaacgacatcattcatacccaga

SEQ ID NO: 437757 - DNA, 33 bp, Homo sapien
ttttctagtttaaaaacctgcatactgggaaaa

SEQ ID NO: 437758 - DNA, 33 bp, Homo sapien
ttttctagtttaaaaatctgcatactgggaaaa

SEQ ID NO: 437759 - DNA, 33 bp, Homo sapien
atcatccattttgaagaccattactactaccat

SEQ ID NO: 437760 - DNA, 33 bp, Homo sapien
atcatccattttgaaggccattactactaccat

SEQ ID NO: 437761 - DNA, 33 bp, Homo sapien
ttaaggataataaacacgtacttgtctagagag

SEQ ID NO: 437762 - DNA, 33 bp, Homo sapien
ttaaggataataaacaggtacttgtctagagag

SEQ ID NO: 437763 - DNA, 33 bp, Homo sapien
ttgctaaatacagccaatgatgcatttcccctg

SEQ ID NO: 437764 - DNA, 33 bp, Homo sapien
ttgctaaatacagccactgatgcatttcccctg

SEQ ID NO: 437765 - DNA, 33 bp, Homo sapien
gaaacaggtattggaacaaactgaatttagacc

SEQ ID NO: 437766 - DNA, 33 bp, Homo sapien
gaaacaggtattggaataaactgaatttagacc

SEQ ID NO: 437767 - DNA, 33 bp, Homo sapien
tcttaaaaacatagtgaaacattcaaacatatt

SEQ ID NO: 437768 - DNA, 33 bp, Homo sapien
tcttaaaaacatagtggaacattcaaacatatt

SEQ ID NO: 437769 - DNA, 33 bp, Homo sapien
agctttggatggtgaaagataaaagtggcaggg

SEQ ID NO: 437770 - DNA, 33 bp, Homo sapien
agctttggatggtgaaggataaaagtggcaggg

SEQ ID NO: 437771 - DNA, 33 bp, Homo sapien
gataggctgcataagcaccaaataggaacattt

SEQ ID NO: 437772 - DNA, 33 bp, Homo sapien
gataggctgcataagcgccaaataggaacattt

SEQ ID NO: 437773 - DNA, 33 bp, Homo sapien
ggtgtgggaggtaaaaccagatgatctctaagg

SEQ ID NO: 437774 - DNA, 33 bp, Homo sapien
ggtgtgggaggtaaaagcagatgatctctaagg

SEQ ID NO: 437775 - DNA, 33 bp, Homo sapien
tgccccacaagttatacgcagattggaaaaagt

SEQ ID NO: 437776 - DNA, 33 bp, Homo sapien
tgccccacaagttatatgcagattggaaaaagt

SEQ ID NO: 437777 - DNA, 33 bp, Homo sapien
tcactactttgctcaaacctaattctgtaccct

SEQ ID NO: 437778 - DNA, 33 bp, Homo sapien
tcactactttgctcaagcctaattctgtaccct

SEQ ID NO: 437779 - DNA, 33 bp, Homo sapien
gaataatagccttgcaatataataagatcagaa

SEQ ID NO: 437780 - DNA, 33 bp, Homo sapien
gaataatagccttgcagtataataagatcagaa

SEQ ID NO: 437781 - DNA, 33 bp, Homo sapien
atcatgaaattgaaaacctgagaagactgataa

SEQ ID NO: 437782 - DNA, 33 bp, Homo sapien
atcatgaaattgaaaatctgagaagactgataa

SEQ ID NO: 437783 - DNA, 33 bp, Homo sapien
ggcttcctctgcaaaaagacatcccatcctgga

SEQ ID NO: 437784 - DNA, 33 bp, Homo sapien
ggcttcctctgcaaaaggacatcccatcctgga

SEQ ID NO: 437785 - DNA, 33 bp, Homo sapien
ttggtgactgagtggaccttactgtactgttct

SEQ ID NO: 437786 - DNA, 33 bp, Homo sapien
ttggtgactgagtggatcttactgtactgttct

SEQ ID NO: 437787 - DNA, 33 bp, Homo sapien
acatccatcacattccactaagcgatttcccca

SEQ ID NO: 437788 - DNA, 33 bp, Homo sapien
acatccatcacattccgctaagcgatttcccca

SEQ ID NO: 437789 - DNA, 33 bp, Homo sapien
aatgccagagcactaaaaaaaacttgagagcat

SEQ ID NO: 437790 - DNA, 33 bp, Homo sapien
aatgccagagcactaagaaaaacttgagagcat

SEQ ID NO: 437791 - DNA, 33 bp, Homo sapien
ttgagcatcttagcatcaatttctttgtactta

SEQ ID NO: 437792 - DNA, 33 bp, Homo sapien
ttgagcatcttagcatgaatttctttgtactta

SEQ ID NO: 437793 - DNA, 33 bp, Homo sapien
acccaaaggtcttgtcaatgttactgttgggta

SEQ ID NO: 437794 - DNA, 33 bp, Homo sapien
acccaaaggtcttgtcgatgttactgttgggta

SEQ ID NO: 437795 - DNA, 33 bp, Homo sapien
ggaagactgtataagaaacatagtatagtgtct

SEQ ID NO: 437796 - DNA, 33 bp, Homo sapien
ggaagactgtataagagacatagtatagtgtct

SEQ ID NO: 437797 - DNA, 33 bp, Homo sapien
cagcagccaaactctgcatttcaacctagggtt

SEQ ID NO: 437798 - DNA, 33 bp, Homo sapien
cagcagccaaactctgtatttcaacctagggtt

SEQ ID NO: 437799 - DNA, 33 bp, Homo sapien
caatgtgagaacagataatacaagtacacattt

SEQ ID NO: 437800 - DNA, 33 bp, Homo sapien
caatgtgagaacagatgatacaagtacacattt

SEQ ID NO: 437801 - DNA, 33 bp, Homo sapien
gcttcatcctttctaaaaacttctggatattca

SEQ ID NO: 437802 - DNA, 33 bp, Homo sapien
gcttcatcctttctaacaacttctggatattca

SEQ ID NO: 437803 - DNA, 33 bp, Homo sapien
gaaactatttacaaacacttcccagacactata

SEQ ID NO: 437804 - DNA, 33 bp, Homo sapien
gaaactatttacaaactcttcccagacactata

SEQ ID NO: 437805 - DNA, 33 bp, Homo sapien
ttttcccaaaacaaaactcaatggcttcctctt

SEQ ID NO: 437806 - DNA, 33 bp, Homo sapien
ttttcccaaaacaaaattcaatggcttcctctt

SEQ ID NO: 437807 - DNA, 33 bp, Homo sapien
taccacattatttcagcatggaagagatgacaa

SEQ ID NO: 437808 - DNA, 33 bp, Homo sapien
taccacattatttcagtatggaagagatgacaa

SEQ ID NO: 437809 - DNA, 33 bp, Homo sapien
aatggaacacaggtcaagagttttatggtgaaa

SEQ ID NO: 437810 - DNA, 33 bp, Homo sapien
aatggaacacaggtcaggagttttatggtgaaa

SEQ ID NO: 437811 - DNA, 33 bp, Homo sapien
attctatagttcatcactgacataccttaaggc

SEQ ID NO: 437812 - DNA, 33 bp, Homo sapien
attctatagttcatcattgacataccttaaggc

SEQ ID NO: 437813 - DNA, 33 bp, Homo sapien
gggatatgagacggaaacaggagaagatggggc

SEQ ID NO: 437814 - DNA, 33 bp, Homo sapien
gggatatgagacggaagcaggagaagatggggc

SEQ ID NO: 437815 - DNA, 33 bp, Homo sapien
gtacatatcccacagaacttataaagcaatcac

SEQ ID NO: 437816 - DNA, 33 bp, Homo sapien
gtacatatcccacagaccttataaagcaatcac

SEQ ID NO: 437817 - DNA, 33 bp, Homo sapien
gtggtaatgttctgccactgtagaaagtagttt

SEQ ID NO: 437818 - DNA, 33 bp, Homo sapien
gtggtaatgttctgccgctgtagaaagtagttt

SEQ ID NO: 437819 - DNA, 33 bp, Homo sapien
tggccaacatccttccaataaacaacttatcca

SEQ ID NO: 437820 - DNA, 33 bp, Homo sapien
tggccaacatccttcctataaacaacttatcca

SEQ ID NO: 437821 - DNA, 33 bp, Homo sapien
tatacatctagctaatcattaattccagtcact

SEQ ID NO: 437822 - DNA, 33 bp, Homo sapien
tatacatctagctaattattaattccagtcact

SEQ ID NO: 437823 - DNA, 33 bp, Homo sapien
gtcactaccatgcctaagcattgtcagcatttt

SEQ ID NO: 437824 - DNA, 33 bp, Homo sapien
gtcactaccatgcctacgcattgtcagcatttt

SEQ ID NO: 437825 - DNA, 33 bp, Homo sapien
ctctcccatgcctatacgcaatggctagtacag

SEQ ID NO: 437826 - DNA, 33 bp, Homo sapien
ctctcccatgcctatatgcaatggctagtacag

SEQ ID NO: 437827 - DNA, 33 bp, Homo sapien
agtcatttgtgtctggaaataagtgtcctggcc

SEQ ID NO: 437828 - DNA, 33 bp, Homo sapien
agtcatttgtgtctgggaataagtgtcctggcc

SEQ ID NO: 437829 - DNA, 33 bp, Homo sapien
ctacccttcattcttaagaggttcacactgtct

SEQ ID NO: 437830 - DNA, 33 bp, Homo sapien
ctacccttcattcttaggaggttcacactgtct

SEQ ID NO: 437831 - DNA, 33 bp, Homo sapien
ggtgtaattacgataaattaatgacataaggca

SEQ ID NO: 437832 - DNA, 33 bp, Homo sapien
ggtgtaattacgataagttaatgacataaggca

SEQ ID NO: 437833 - DNA, 33 bp, Homo sapien
aaagacaggatttaaccgcagtctggtaattct

SEQ ID NO: 437834 - DNA, 33 bp, Homo sapien
aaagacaggatttaactgcagtctggtaattct

SEQ ID NO: 437835 - DNA, 33 bp, Homo sapien
actggctgtcccatggcaaacttttctgctttg

SEQ ID NO: 437836 - DNA, 33 bp, Homo sapien
actggctgtcccatggtaaacttttctgctttg

SEQ ID NO: 437837 - DNA, 33 bp, Homo sapien
gatttccaagtgatcaatgaaaagcaagcagtg

SEQ ID NO: 437838 - DNA, 33 bp, Homo sapien
gatttccaagtgatcagtgaaaagcaagcagtg

SEQ ID NO: 437839 - DNA, 33 bp, Homo sapien
aacataaaaagatgaccatccaaattgccagac

SEQ ID NO: 437840 - DNA, 33 bp, Homo sapien
aacataaaaagatgacgatccaaattgccagac

SEQ ID NO: 437841 - DNA, 33 bp, Homo sapien
tatgttggctttaggcaacactgtggctccata

SEQ ID NO: 437842 - DNA, 33 bp, Homo sapien
tatgttggctttaggctacactgtggctccata

SEQ ID NO: 437843 - DNA, 33 bp, Homo sapien
agctagacttctctaaagcttctgaggaatttt

SEQ ID NO: 437844 - DNA, 33 bp, Homo sapien
agctagacttctctaaggcttctgaggaatttt

SEQ ID NO: 437845 - DNA, 33 bp, Homo sapien
gatgttatagtcattaaaaggtcctcgcatctc

SEQ ID NO: 437846 - DNA, 33 bp, Homo sapien
gatgttatagtcattagaaggtcctcgcatctc

SEQ ID NO: 437847 - DNA, 33 bp, Homo sapien
tgggaccaaaatagcacccatcatctctctatc

SEQ ID NO: 437848 - DNA, 33 bp, Homo sapien
tgggaccaaaatagcatccatcatctctctatc

SEQ ID NO: 437849 - DNA, 33 bp, Homo sapien
atttgaagggacgtaaacattcagcccctaata

SEQ ID NO: 437850 - DNA, 33 bp, Homo sapien
atttgaagggacgtaagcattcagcccctaata

SEQ ID NO: 437851 - DNA, 33 bp, Homo sapien
ggtcaatactctggaaatgaaatcagcttggct

SEQ ID NO: 437852 - DNA, 33 bp, Homo sapien
ggtcaatactctggaagtgaaatcagcttggct

SEQ ID NO: 437853 - DNA, 33 bp, Homo sapien
gaagttgcacagagaaactgagggactcaaaag

SEQ ID NO: 437854 - DNA, 33 bp, Homo sapien
gaagttgcacagagaacctgagggactcaaaag

SEQ ID NO: 437855 - DNA, 33 bp, Homo sapien
aatgtaaaaagaatgcagcagagggtaacagcc

SEQ ID NO: 437856 - DNA, 33 bp, Homo sapien
aatgtaaaaagaatgcggcagagggtaacagcc

SEQ ID NO: 437857 - DNA, 33 bp, Homo sapien
tgccccacttccaatcaagaaagatatgtaact

SEQ ID NO: 437858 - DNA, 33 bp, Homo sapien
tgccccacttccaatcgagaaagatatgtaact

SEQ ID NO: 437859 - DNA, 33 bp, Homo sapien
ccatgccctgaatacacgatgcaccttctttcc

SEQ ID NO: 437860 - DNA, 33 bp, Homo sapien
ccatgccctgaatacatgatgcaccttctttcc

SEQ ID NO: 437861 - DNA, 33 bp, Homo sapien
caaaagctatctgcccaatgtaaaatccacata

SEQ ID NO: 437862 - DNA, 33 bp, Homo sapien
caaaagctatctgcccgatgtaaaatccacata

SEQ ID NO: 437863 - DNA, 33 bp, Homo sapien
attgagagtgtaacaaatatatcttatgagtgg

SEQ ID NO: 437864 - DNA, 33 bp, Homo sapien
attgagagtgtaacaagtatatcttatgagtgg

SEQ ID NO: 437865 - DNA, 33 bp, Homo sapien
gcattctcaggtcatcaaggggcagtttgaaac

SEQ ID NO: 437866 - DNA, 33 bp, Homo sapien
gcattctcaggtcatcgaggggcagtttgaaac

SEQ ID NO: 437867 - DNA, 33 bp, Homo sapien
ctcctataattttctggagtcttcttgataatt

SEQ ID NO: 437868 - DNA, 33 bp, Homo sapien
ctcctataattttctgtagtcttcttgataatt

SEQ ID NO: 437869 - DNA, 33 bp, Homo sapien
ccgaaatgctatggaaaagattcctgcattgtc

SEQ ID NO: 437870 - DNA, 33 bp, Homo sapien
ccgaaatgctatggaagagattcctgcattgtc

SEQ ID NO: 437871 - DNA, 33 bp, Homo sapien
ttcacataggtcgttgaatggggtcaaatgaca

SEQ ID NO: 437872 - DNA, 33 bp, Homo sapien
ttcacataggtcgttgtatggggtcaaatgaca

SEQ ID NO: 437873 - DNA, 33 bp, Homo sapien
tttgaatattaacaacaatggctgcatcttaaa

SEQ ID NO: 437874 - DNA, 33 bp, Homo sapien
tttgaatattaacaacgatggctgcatcttaaa

SEQ ID NO: 437875 - DNA, 33 bp, Homo sapien
aagatttagaaattaaacaactcatttctaaat

SEQ ID NO: 437876 - DNA, 33 bp, Homo sapien
aagatttagaaattaagcaactcatttctaaat

SEQ ID NO: 437877 - DNA, 33 bp, Homo sapien
tactatgttgcccccaatgattaaacatcttcc

SEQ ID NO: 437878 - DNA, 33 bp, Homo sapien
tactatgttgcccccagtgattaaacatcttcc

SEQ ID NO: 437879 - DNA, 33 bp, Homo sapien
gaagcagaggaagccacagaaatctcagaccta

SEQ ID NO: 437880 - DNA, 33 bp, Homo sapien
gaagcagaggaagccagagaaatctcagaccta

SEQ ID NO: 437881 - DNA, 33 bp, Homo sapien
ctggaattcaaaatcacgactagcaaaaatccc

SEQ ID NO: 437882 - DNA, 33 bp, Homo sapien
ctggaattcaaaatcatgactagcaaaaatccc

SEQ ID NO: 437883 - DNA, 33 bp, Homo sapien
gatgacagccagcccaatggcaatgcagacaca

SEQ ID NO: 437884 - DNA, 33 bp, Homo sapien
gatgacagccagcccagtggcaatgcagacaca

SEQ ID NO: 437885 - DNA, 33 bp, Homo sapien
cctaaaagcaaacatacgaagtctggtagagtc

SEQ ID NO: 437886 - DNA, 33 bp, Homo sapien
cctaaaagcaaacatatgaagtctggtagagtc

SEQ ID NO: 437887 - DNA, 33 bp, Homo sapien
acagtaatgtgtacagcccagcaacctttaatg

SEQ ID NO: 437888 - DNA, 33 bp, Homo sapien
acagtaatgtgtacagtccagcaacctttaatg

SEQ ID NO: 437889 - DNA, 33 bp, Homo sapien
ggcatgaaccaaggaacatagcaacttctaaaa

SEQ ID NO: 437890 - DNA, 33 bp, Homo sapien
ggcatgaaccaaggaatatagcaacttctaaaa

SEQ ID NO: 437891 - DNA, 33 bp, Homo sapien
ctccattaggtttcaaagcctttaattaatcct

SEQ ID NO: 437892 - DNA, 33 bp, Homo sapien
ctccattaggtttcaaggcctttaattaatcct

SEQ ID NO: 437893 - DNA, 33 bp, Homo sapien
aggattcagaaaaaaaatatagcccaatctgtt

SEQ ID NO: 437894 - DNA, 33 bp, Homo sapien
aggattcagaaaaaaattatagcccaatctgtt

SEQ ID NO: 437895 - DNA, 33 bp, Homo sapien
aaagatcaacagctatgaatggaagaggataaa

SEQ ID NO: 437896 - DNA, 33 bp, Homo sapien
aaagatcaacagctattaatggaagaggataaa

SEQ ID NO: 437897 - DNA, 33 bp, Homo sapien
ctttgatttacaaagacgcataatttcggaagg

SEQ ID NO: 437898 - DNA, 33 bp, Homo sapien
ctttgatttacaaagatgcataatttcggaagg

SEQ ID NO: 437899 - DNA, 33 bp, Homo sapien
attagcttatgttaatgaagatgaccttagcac

SEQ ID NO: 437900 - DNA, 33 bp, Homo sapien
attagcttatgttaattaagatgaccttagcac

SEQ ID NO: 437901 - DNA, 33 bp, Homo sapien
tgaactgcaggactcaagtgattgtccctcttc

SEQ ID NO: 437902 - DNA, 33 bp, Homo sapien
tgaactgcaggactcaggtgattgtccctcttc

SEQ ID NO: 437903 - DNA, 33 bp, Homo sapien
gcaataaacatgacaaagtaacaaagctaataa

SEQ ID NO: 437904 - DNA, 33 bp, Homo sapien
gcaataaacatgacaaggtaacaaagctaataa

SEQ ID NO: 437905 - DNA, 33 bp, Homo sapien
aaggacatttacaacaaatttctgattttattt

SEQ ID NO: 437906 - DNA, 33 bp, Homo sapien
aaggacatttacaacagatttctgattttattt

SEQ ID NO: 437907 - DNA, 33 bp, Homo sapien
aaggatggttaatatccctatgaattaagccag

SEQ ID NO: 437908 - DNA, 33 bp, Homo sapien
aaggatggttaatatctctatgaattaagccag

SEQ ID NO: 437909 - DNA, 33 bp, Homo sapien
ggttaatccacccagaaaaggccaccgtaacag

SEQ ID NO: 437910 - DNA, 33 bp, Homo sapien
ggttaatccacccagagaaggccaccgtaacag

SEQ ID NO: 437911 - DNA, 33 bp, Homo sapien
gaactcttaaaagccaatgaagtctgacaatgt

SEQ ID NO: 437912 - DNA, 33 bp, Homo sapien
gaactcttaaaagccagtgaagtctgacaatgt

SEQ ID NO: 437913 - DNA, 33 bp, Homo sapien
ggaacacaatgaaaccaatttctcataaaagca

SEQ ID NO: 437914 - DNA, 33 bp, Homo sapien
ggaacacaatgaaaccgatttctcataaaagca

SEQ ID NO: 437915 - DNA, 33 bp, Homo sapien
tgagaagcagttctggaaaaactaaagtctcaa

SEQ ID NO: 437916 - DNA, 33 bp, Homo sapien
tgagaagcagttctggcaaaactaaagtctcaa

SEQ ID NO: 437917 - DNA, 33 bp, Homo sapien
ctgcttttggaaaaatcagtaacttcgtctaat

SEQ ID NO: 437918 - DNA, 33 bp, Homo sapien
ctgcttttggaaaaatgagtaacttcgtctaat

SEQ ID NO: 437919 - DNA, 33 bp, Homo sapien
cctggtccaaaaggagcatcatgagttatgggt

SEQ ID NO: 437920 - DNA, 33 bp, Homo sapien
cctggtccaaaaggagtatcatgagttatgggt

SEQ ID NO: 437921 - DNA, 33 bp, Homo sapien
attatttattgcctcaccttgtgttactccttt

SEQ ID NO: 437922 - DNA, 33 bp, Homo sapien
attatttattgcctcatcttgtgttactccttt

SEQ ID NO: 437923 - DNA, 33 bp, Homo sapien
tttcaacttccaaaaaatttcttcctgcttctt

SEQ ID NO: 437924 - DNA, 33 bp, Homo sapien
tttcaacttccaaaaattttcttcctgcttctt

SEQ ID NO: 437925 - DNA, 33 bp, Homo sapien
cttgtactgtcaccaccagataacaacaaacgg

SEQ ID NO: 437926 - DNA, 33 bp, Homo sapien
cttgtactgtcaccactagataacaacaaacgg

SEQ ID NO: 437927 - DNA, 33 bp, Homo sapien
gccacacatgtgacatcatctaaaaacataatt

SEQ ID NO: 437928 - DNA, 33 bp, Homo sapien
gccacacatgtgacattatctaaaaacataatt

SEQ ID NO: 437929 - DNA, 33 bp, Homo sapien
aaatccagaacccttaagcatgagagaaggatt

SEQ ID NO: 437930 - DNA, 33 bp, Homo sapien
aaatccagaacccttacgcatgagagaaggatt

SEQ ID NO: 437931 - DNA, 33 bp, Homo sapien
ttttaaaattattttccaggccattcttatatg

SEQ ID NO: 437932 - DNA, 33 bp, Homo sapien
ttttaaaattattttcgaggccattcttatatg

SEQ ID NO: 437933 - DNA, 33 bp, Homo sapien
aaatggagataaaaaacgtctgcattgattact

SEQ ID NO: 437934 - DNA, 33 bp, Homo sapien
aaatggagataaaaaatgtctgcattgattact

SEQ ID NO: 437935 - DNA, 33 bp, Homo sapien
tagccaattaatttgaaccttgtaaaccactga

SEQ ID NO: 437936 - DNA, 33 bp, Homo sapien
tagccaattaatttgatccttgtaaaccactga

SEQ ID NO: 437937 - DNA, 33 bp, Homo sapien
tatgatgttgggtaaactctaaatgtcaggtta

SEQ ID NO: 437938 - DNA, 33 bp, Homo sapien
tatgatgttgggtaaattctaaatgtcaggtta

SEQ ID NO: 437939 - DNA, 33 bp, Homo sapien
gactggcataagcccaatgattttcttgttgat

SEQ ID NO: 437940 - DNA, 33 bp, Homo sapien
gactggcataagcccagtgattttcttgttgat

SEQ ID NO: 437941 - DNA, 33 bp, Homo sapien
agagtaaaggaaaataagacaggagcttgcctg

SEQ ID NO: 437942 - DNA, 33 bp, Homo sapien
agagtaaaggaaaataggacaggagcttgcctg

SEQ ID NO: 437943 - DNA, 33 bp, Homo sapien
ctgcaccatttagttaaacgacagtgtgtgcac

SEQ ID NO: 437944 - DNA, 33 bp, Homo sapien
ctgcaccatttagttagacgacagtgtgtgcac

SEQ ID NO: 437945 - DNA, 33 bp, Homo sapien
catttcccctataccaaggttttccatgccctc

SEQ ID NO: 437946 - DNA, 33 bp, Homo sapien
catttcccctataccacggttttccatgccctc

SEQ ID NO: 437947 - DNA, 33 bp, Homo sapien
ttcctttgagtgaaaccaatattttgatgaata

SEQ ID NO: 437948 - DNA, 33 bp, Homo sapien
ttcctttgagtgaaacgaatattttgatgaata

SEQ ID NO: 437949 - DNA, 33 bp, Homo sapien
atgagaatagagttgcccttctggatttcaaga

SEQ ID NO: 437950 - DNA, 33 bp, Homo sapien
atgagaatagagttgctcttctggatttcaaga

SEQ ID NO: 437951 - DNA, 33 bp, Homo sapien
tggcactggtgtctcacgtacaggcactcatgg

SEQ ID NO: 437952 - DNA, 33 bp, Homo sapien
tggcactggtgtctcatgtacaggcactcatgg

SEQ ID NO: 437953 - DNA, 33 bp, Homo sapien
tttttcttttttgtcacgtggatgtatagtttt

SEQ ID NO: 437954 - DNA, 33 bp, Homo sapien
tttttcttttttgtcatgtggatgtatagtttt

SEQ ID NO: 437955 - DNA, 33 bp, Homo sapien
attaaaaaaaatcagaaaggagaggcacaatct

SEQ ID NO: 437956 - DNA, 33 bp, Homo sapien
attaaaaaaaatcagagaggagaggcacaatct

SEQ ID NO: 437957 - DNA, 33 bp, Homo sapien
aggttcctggcatttcacctccttgccagtagc

SEQ ID NO: 437958 - DNA, 33 bp, Homo sapien
aggttcctggcatttcgcctccttgccagtagc

SEQ ID NO: 437959 - DNA, 33 bp, Homo sapien
gcttttgggctgcaaccatgatctgtgccaacc

SEQ ID NO: 437960 - DNA, 33 bp, Homo sapien
gcttttgggctgcaactatgatctgtgccaacc

SEQ ID NO: 437961 - DNA, 33 bp, Homo sapien
ccaccggatgccagtaccacaaaaatgtctccg

SEQ ID NO: 437962 - DNA, 33 bp, Homo sapien
ccaccggatgccagtagcacaaaaatgtctccg

SEQ ID NO: 437963 - DNA, 33 bp, Homo sapien
agtttgatagataagaccctttgaaggtatttt

SEQ ID NO: 437964 - DNA, 33 bp, Homo sapien
agtttgatagataagagcctttgaaggtatttt

SEQ ID NO: 437965 - DNA, 33 bp, Homo sapien
cctgggagctacataaagatgatgagaaccacg

SEQ ID NO: 437966 - DNA, 33 bp, Homo sapien
cctgggagctacataacgatgatgagaaccacg

SEQ ID NO: 437967 - DNA, 33 bp, Homo sapien
tagactgaatttcacacggaatagaagagaaac

SEQ ID NO: 437968 - DNA, 33 bp, Homo sapien
tagactgaatttcacatggaatagaagagaaac

SEQ ID NO: 437969 - DNA, 33 bp, Homo sapien
catttacagggcaataaagaaagaagaggtaat

SEQ ID NO: 437970 - DNA, 33 bp, Homo sapien
catttacagggcaatacagaaagaagaggtaat

SEQ ID NO: 437971 - DNA, 33 bp, Homo sapien
ttaatggtgctgacaaatataatagttattcct

SEQ ID NO: 437972 - DNA, 33 bp, Homo sapien
ttaatggtgctgacaattataatagttattcct

SEQ ID NO: 437973 - DNA, 33 bp, Homo sapien
tgtccctttgagtccaatctggcagtgtttctg

SEQ ID NO: 437974 - DNA, 33 bp, Homo sapien
tgtccctttgagtccagtctggcagtgtttctg

SEQ ID NO: 437975 - DNA, 33 bp, Homo sapien
tggtccatgttgctcacatctggatttttcttc

SEQ ID NO: 437976 - DNA, 33 bp, Homo sapien
tggtccatgttgctcagatctggatttttcttc

SEQ ID NO: 437977 - DNA, 33 bp, Homo sapien
agctctaattacataacggcacttgcaatttcc

SEQ ID NO: 437978 - DNA, 33 bp, Homo sapien
agctctaattacataagggcacttgcaatttcc

SEQ ID NO: 437979 - DNA, 33 bp, Homo sapien
aagaataatgtcacaaacctgctgaaattactt

SEQ ID NO: 437980 - DNA, 33 bp, Homo sapien
aagaataatgtcacaatcctgctgaaattactt

SEQ ID NO: 437981 - DNA, 33 bp, Homo sapien
agttctagagctcacaatctttaagagagacag

SEQ ID NO: 437982 - DNA, 33 bp, Homo sapien
agttctagagctcacagtctttaagagagacag

SEQ ID NO: 437983 - DNA, 33 bp, Homo sapien
gtcctgcaatgataaacgtgcataatactttac

SEQ ID NO: 437984 - DNA, 33 bp, Homo sapien
gtcctgcaatgataaaggtgcataatactttac

SEQ ID NO: 437985 - DNA, 33 bp, Homo sapien
gtgttgaaactaataactagagttgatctagtc

SEQ ID NO: 437986 - DNA, 33 bp, Homo sapien
gtgttgaaactaataattagagttgatctagtc

SEQ ID NO: 437987 - DNA, 33 bp, Homo sapien
gagtttcatctatgtggattcatattgctgtat

SEQ ID NO: 437988 - DNA, 33 bp, Homo sapien
gagtttcatctatgtgtattcatattgctgtat

SEQ ID NO: 437989 - DNA, 33 bp, Homo sapien
tcaaaatccatcaacaatagattagataaacta

SEQ ID NO: 437990 - DNA, 33 bp, Homo sapien
tcaaaatccatcaacagtagattagataaacta

SEQ ID NO: 437991 - DNA, 33 bp, Homo sapien
caggggcagatgaaaggcctctttgcttcatgc

SEQ ID NO: 437992 - DNA, 33 bp, Homo sapien
caggggcagatgaaagtcctctttgcttcatgc

SEQ ID NO: 437993 - DNA, 33 bp, Homo sapien
tgttcaggaagttgtcacctaatactttaccat

SEQ ID NO: 437994 - DNA, 33 bp, Homo sapien
tgttcaggaagttgtcgcctaatactttaccat

SEQ ID NO: 437995 - DNA, 33 bp, Homo sapien
gtgcacaaagcacatacgtttgtttgaaaccca

SEQ ID NO: 437996 - DNA, 33 bp, Homo sapien
gtgcacaaagcacatatgtttgtttgaaaccca

SEQ ID NO: 437997 - DNA, 33 bp, Homo sapien
aaagatgcaggaacaacggattgaggactctgg

SEQ ID NO: 437998 - DNA, 33 bp, Homo sapien
aaagatgcaggaacaatggattgaggactctgg

SEQ ID NO: 437999 - DNA, 33 bp, Homo sapien
ctatttgtaaagactacctcgggataaatgtag

SEQ ID NO: 438000 - DNA, 33 bp, Homo sapien
ctatttgtaaagactatctcgggataaatgtag

SEQ ID NO: 438001 - DNA, 33 bp, Homo sapien
caggaagtgtgtcatacgctgccaagtttgatc

SEQ ID NO: 438002 - DNA, 33 bp, Homo sapien
caggaagtgtgtcataggctgccaagtttgatc

SEQ ID NO: 438003 - DNA, 33 bp, Homo sapien
tgacacaaaatcaagacgagagccactcctcca

SEQ ID NO: 438004 - DNA, 33 bp, Homo sapien
tgacacaaaatcaagatgagagccactcctcca

SEQ ID NO: 438005 - DNA, 33 bp, Homo sapien
tccaagtgtgcagtccaggaatcaaggcatttg

SEQ ID NO: 438006 - DNA, 33 bp, Homo sapien
tccaagtgtgcagtcctggaatcaaggcatttg

SEQ ID NO: 438007 - DNA, 33 bp, Homo sapien
ctgctggttttcattccatagtttcccctcctt

SEQ ID NO: 438008 - DNA, 33 bp, Homo sapien
ctgctggttttcattctatagtttcccctcctt

SEQ ID NO: 438009 - DNA, 33 bp, Homo sapien
ctctgatttggagcacaccagttaaagctgctc

SEQ ID NO: 438010 - DNA, 33 bp, Homo sapien
ctctgatttggagcacgccagttaaagctgctc

SEQ ID NO: 438011 - DNA, 33 bp, Homo sapien
aacctttcacaaaagccctactcatttactacc

SEQ ID NO: 438012 - DNA, 33 bp, Homo sapien
aacctttcacaaaagctctactcatttactacc

SEQ ID NO: 438013 - DNA, 33 bp, Homo sapien
aacactgtcagagaacacatttttgaatcaggt

SEQ ID NO: 438014 - DNA, 33 bp, Homo sapien
aacactgtcagagaacgcatttttgaatcaggt

SEQ ID NO: 438015 - DNA, 33 bp, Homo sapien
gagaggtgcagttagacgagagaaacagaacat

SEQ ID NO: 438016 - DNA, 33 bp, Homo sapien
gagaggtgcagttagaggagagaaacagaacat

SEQ ID NO: 438017 - DNA, 33 bp, Homo sapien
ccattattaagttttacggacaatgcacagcca

SEQ ID NO: 438018 - DNA, 33 bp, Homo sapien
ccattattaagttttagggacaatgcacagcca

SEQ ID NO: 438019 - DNA, 33 bp, Homo sapien
aaagcaggaaaacaacacttaattcagagagta

SEQ ID NO: 438020 - DNA, 33 bp, Homo sapien
aaagcaggaaaacaacgcttaattcagagagta

SEQ ID NO: 438021 - DNA, 33 bp, Homo sapien
taatagaacaccagtaaagtcgtgctagtgctc

SEQ ID NO: 438022 - DNA, 33 bp, Homo sapien
taatagaacaccagtagagtcgtgctagtgctc

SEQ ID NO: 438023 - DNA, 33 bp, Homo sapien
actgcttgtgtcttccaatttataaaatcctcc

SEQ ID NO: 438024 - DNA, 33 bp, Homo sapien
actgcttgtgtcttccgatttataaaatcctcc

SEQ ID NO: 438025 - DNA, 33 bp, Homo sapien
actttgatctaaaagcagaaacactattttcac

SEQ ID NO: 438026 - DNA, 33 bp, Homo sapien
actttgatctaaaagcggaaacactattttcac

SEQ ID NO: 438027 - DNA, 33 bp, Homo sapien
ttaatgggagaagatacgtgaatttagtagaag

SEQ ID NO: 438028 - DNA, 33 bp, Homo sapien
ttaatgggagaagatatgtgaatttagtagaag

SEQ ID NO: 438029 - DNA, 33 bp, Homo sapien
ttcttttaaccttgcacatatcttaaatgtgtg

SEQ ID NO: 438030 - DNA, 33 bp, Homo sapien
ttcttttaaccttgcatatatcttaaatgtgtg

SEQ ID NO: 438031 - DNA, 33 bp, Homo sapien
acatctgatgcctatcacccgttgtttctatac

SEQ ID NO: 438032 - DNA, 33 bp, Homo sapien
acatctgatgcctatctcccgttgtttctatac

SEQ ID NO: 438033 - DNA, 33 bp, Homo sapien
cttcacagatagtctacatgaaaatacagattc

SEQ ID NO: 438034 - DNA, 33 bp, Homo sapien
cttcacagatagtctatatgaaaatacagattc

SEQ ID NO: 438035 - DNA, 33 bp, Homo sapien
aaacaagattatactccctgaagtgtaaagtcc

SEQ ID NO: 438036 - DNA, 33 bp, Homo sapien
aaacaagattatactcgctgaagtgtaaagtcc

SEQ ID NO: 438037 - DNA, 33 bp, Homo sapien
tgcatgtagttgtggtcaatatagctttataaa

SEQ ID NO: 438038 - DNA, 33 bp, Homo sapien
tgcatgtagttgtggttaatatagctttataaa

SEQ ID NO: 438039 - DNA, 33 bp, Homo sapien
aaactccaagtgctaaaacactcaatgttcgct

SEQ ID NO: 438040 - DNA, 33 bp, Homo sapien
aaactccaagtgctaatacactcaatgttcgct

SEQ ID NO: 438041 - DNA, 33 bp, Homo sapien
tagattctaatttccagtcaggattaaaaatta

SEQ ID NO: 438042 - DNA, 33 bp, Homo sapien
tagattctaatttccattcaggattaaaaatta

SEQ ID NO: 438043 - DNA, 33 bp, Homo sapien
gttgtgaatagaaatacgtttgaaagtagcata

SEQ ID NO: 438044 - DNA, 33 bp, Homo sapien
gttgtgaatagaaatatgtttgaaagtagcata

SEQ ID NO: 438045 - DNA, 33 bp, Homo sapien
aagaaaacaggtgcaacggtgaaagttttgatg

SEQ ID NO: 438046 - DNA, 33 bp, Homo sapien
aagaaaacaggtgcaatggtgaaagttttgatg

SEQ ID NO: 438047 - DNA, 33 bp, Homo sapien
aaatgctttttgtccaccatcaaaactttcacc

SEQ ID NO: 438048 - DNA, 33 bp, Homo sapien
aaatgctttttgtccatcatcaaaactttcacc

SEQ ID NO: 438049 - DNA, 33 bp, Homo sapien
attagtaagcattaacactcctggtgatttaca

SEQ ID NO: 438050 - DNA, 33 bp, Homo sapien
attagtaagcattaaccctcctggtgatttaca

SEQ ID NO: 438051 - DNA, 33 bp, Homo sapien
taacccattctcttcaataaaagcatagtcagc

SEQ ID NO: 438052 - DNA, 33 bp, Homo sapien
taacccattctcttcagtaaaagcatagtcagc

SEQ ID NO: 438053 - DNA, 33 bp, Homo sapien
tcttcacccaggaccaataactaagagctgaag

SEQ ID NO: 438054 - DNA, 33 bp, Homo sapien
tcttcacccaggaccagtaactaagagctgaag

SEQ ID NO: 438055 - DNA, 33 bp, Homo sapien
tgaataagtccttaaaccctgaatcacttttaa

SEQ ID NO: 438056 - DNA, 33 bp, Homo sapien
tgaataagtccttaaatcctgaatcacttttaa

SEQ ID NO: 438057 - DNA, 33 bp, Homo sapien
ccttcctttagaagtcccttattcaaatgtgag

SEQ ID NO: 438058 - DNA, 33 bp, Homo sapien
ccttcctttagaagtctcttattcaaatgtgag

SEQ ID NO: 438059 - DNA, 33 bp, Homo sapien
agagggaatgagagagaaaattctagtcaaaaa

SEQ ID NO: 438060 - DNA, 33 bp, Homo sapien
agagggaatgagagagcaaattctagtcaaaaa

SEQ ID NO: 438061 - DNA, 33 bp, Homo sapien
tctgcaatttgagcaacggctctggtttaggta

SEQ ID NO: 438062 - DNA, 33 bp, Homo sapien
tctgcaatttgagcaatggctctggtttaggta

SEQ ID NO: 438063 - DNA, 33 bp, Homo sapien
tagtttggtaacaatacggctaatgatgacaat

SEQ ID NO: 438064 - DNA, 33 bp, Homo sapien
tagtttggtaacaatatggctaatgatgacaat

SEQ ID NO: 438065 - DNA, 33 bp, Homo sapien
tgctaatcaataattgaaatggctttacaccac

SEQ ID NO: 438066 - DNA, 33 bp, Homo sapien
tgctaatcaataattggaatggctttacaccac

SEQ ID NO: 438067 - DNA, 33 bp, Homo sapien
aagcatttactgaataaactggaaaggtatgaa

SEQ ID NO: 438068 - DNA, 33 bp, Homo sapien
aagcatttactgaatacactggaaaggtatgaa

SEQ ID NO: 438069 - DNA, 33 bp, Homo sapien
tgaacaaaatggatgaagttctatcttcctgag

SEQ ID NO: 438070 - DNA, 33 bp, Homo sapien
tgaacaaaatggatgaggttctatcttcctgag

SEQ ID NO: 438071 - DNA, 33 bp, Homo sapien
aaacatcagtgcttagaatataaagtatgtggt

SEQ ID NO: 438072 - DNA, 33 bp, Homo sapien
aaacatcagtgcttaggatataaagtatgtggt

SEQ ID NO: 438073 - DNA, 33 bp, Homo sapien
aattcagtcctagaccactagcctggatccttt

SEQ ID NO: 438074 - DNA, 33 bp, Homo sapien
aattcagtcctagaccgctagcctggatccttt

SEQ ID NO: 438075 - DNA, 33 bp, Homo sapien
ctaatgattctctttaaccctttcgtatgttgg

SEQ ID NO: 438076 - DNA, 33 bp, Homo sapien
ctaatgattctctttacccctttcgtatgttgg

SEQ ID NO: 438077 - DNA, 33 bp, Homo sapien
ataaaagctgttgatgccagtacacagccagac

SEQ ID NO: 438078 - DNA, 33 bp, Homo sapien
ataaaagctgttgatgtcagtacacagccagac

SEQ ID NO: 438079 - DNA, 33 bp, Homo sapien
tctttctttttcttccaaaacctatgcagatgt

SEQ ID NO: 438080 - DNA, 33 bp, Homo sapien
tctttctttttcttcccaaacctatgcagatgt

SEQ ID NO: 438081 - DNA, 33 bp, Homo sapien
tggtatcctgattacacggatagtgcagttaaa

SEQ ID NO: 438082 - DNA, 33 bp, Homo sapien
tggtatcctgattacatggatagtgcagttaaa

SEQ ID NO: 438083 - DNA, 33 bp, Homo sapien
ggagtaaaggatattgcatcatgcctatagaaa

SEQ ID NO: 438084 - DNA, 33 bp, Homo sapien
ggagtaaaggatattgtatcatgcctatagaaa

SEQ ID NO: 438085 - DNA, 33 bp, Homo sapien
aatggcaaatgtataacatgacaaatatatgac

SEQ ID NO: 438086 - DNA, 33 bp, Homo sapien
aatggcaaatgtataatatgacaaatatatgac

SEQ ID NO: 438087 - DNA, 33 bp, Homo sapien
aaacctcagtaaaataagtaagagtataaaagt

SEQ ID NO: 438088 - DNA, 33 bp, Homo sapien
aaacctcagtaaaatatgtaagagtataaaagt

SEQ ID NO: 438089 - DNA, 33 bp, Homo sapien
ccacatacaaatagacggaagctcacagatatt

SEQ ID NO: 438090 - DNA, 33 bp, Homo sapien
ccacatacaaatagactgaagctcacagatatt

SEQ ID NO: 438091 - DNA, 33 bp, Homo sapien
cttactttacctgaaaaaagctaatgatcttag

SEQ ID NO: 438092 - DNA, 33 bp, Homo sapien
cttactttacctgaaagaagctaatgatcttag

SEQ ID NO: 438093 - DNA, 33 bp, Homo sapien
tcatcttagccttgtgcactttcctctaccatt

SEQ ID NO: 438094 - DNA, 33 bp, Homo sapien
tcatcttagccttgtgtactttcctctaccatt

SEQ ID NO: 438095 - DNA, 33 bp, Homo sapien
tcagagaccactagttcaaagaataaagccatg

SEQ ID NO: 438096 - DNA, 33 bp, Homo sapien
tcagagaccactagtttaaagaataaagccatg

SEQ ID NO: 438097 - DNA, 33 bp, Homo sapien
atatttatatccaggaagatttcagctaactat

SEQ ID NO: 438098 - DNA, 33 bp, Homo sapien
atatttatatccaggaggatttcagctaactat

SEQ ID NO: 438099 - DNA, 33 bp, Homo sapien
gatagacaaaacctaccaaataataaggcagga

SEQ ID NO: 438100 - DNA, 33 bp, Homo sapien
gatagacaaaacctactaaataataaggcagga

SEQ ID NO: 438101 - DNA, 33 bp, Homo sapien
caaagtacactggagagctatagttaaaacaga

SEQ ID NO: 438102 - DNA, 33 bp, Homo sapien
caaagtacactggagatctatagttaaaacaga

SEQ ID NO: 438103 - DNA, 33 bp, Homo sapien
actgaatttatgctgacgtgactataatcttca

SEQ ID NO: 438104 - DNA, 33 bp, Homo sapien
actgaatttatgctgatgtgactataatcttca

SEQ ID NO: 438105 - DNA, 33 bp, Homo sapien
cgttcatcaaatagaaaacatacagatatcgaa

SEQ ID NO: 438106 - DNA, 33 bp, Homo sapien
cgttcatcaaatagaacacatacagatatcgaa

SEQ ID NO: 438107 - DNA, 33 bp, Homo sapien
cctcagtgacgctctaacatagcttgttatagt

SEQ ID NO: 438108 - DNA, 33 bp, Homo sapien
cctcagtgacgctctaccatagcttgttatagt

SEQ ID NO: 438109 - DNA, 33 bp, Homo sapien
taaataactttttcaaatggtacagctggtgta

SEQ ID NO: 438110 - DNA, 33 bp, Homo sapien
taaataactttttcaagtggtacagctggtgta

SEQ ID NO: 438111 - DNA, 33 bp, Homo sapien
attaaccctgataacaataacagctaacattta

SEQ ID NO: 438112 - DNA, 33 bp, Homo sapien
attaaccctgataacagtaacagctaacattta

SEQ ID NO: 438113 - DNA, 33 bp, Homo sapien
agagtgtgttgctggaaagtaatactgacttca

SEQ ID NO: 438114 - DNA, 33 bp, Homo sapien
agagtgtgttgctggagagtaatactgacttca

SEQ ID NO: 438115 - DNA, 33 bp, Homo sapien
ggaattgggaaaacaaaattcacgagactgaag

SEQ ID NO: 438116 - DNA, 33 bp, Homo sapien
ggaattgggaaaacaagattcacgagactgaag

SEQ ID NO: 438117 - DNA, 33 bp, Homo sapien
ggatacatttgacaacaatatgacgtaccataa

SEQ ID NO: 438118 - DNA, 33 bp, Homo sapien
ggatacatttgacaactatatgacgtaccataa

SEQ ID NO: 438119 - DNA, 33 bp, Homo sapien
gctgccttgtgtgaaaatgatcaaaatggcagg

SEQ ID NO: 438120 - DNA, 33 bp, Homo sapien
gctgccttgtgtgaaattgatcaaaatggcagg

SEQ ID NO: 438121 - DNA, 33 bp, Homo sapien
gataagtctgtgtaataacaagatagatcataa

SEQ ID NO: 438122 - DNA, 33 bp, Homo sapien
gataagtctgtgtaatgacaagatagatcataa

SEQ ID NO: 438123 - DNA, 33 bp, Homo sapien
agcactgacttcaatacgtccatcaattttcca

SEQ ID NO: 438124 - DNA, 33 bp, Homo sapien
agcactgacttcaatatgtccatcaattttcca

SEQ ID NO: 438125 - DNA, 33 bp, Homo sapien
actgggtgcaggataagcaaacccatagccgta

SEQ ID NO: 438126 - DNA, 33 bp, Homo sapien
actgggtgcaggataatcaaacccatagccgta

SEQ ID NO: 438127 - DNA, 33 bp, Homo sapien
aaattatttgagaaagccttataaggaggaaag

SEQ ID NO: 438128 - DNA, 33 bp, Homo sapien
aaattatttgagaaaggcttataaggaggaaag

SEQ ID NO: 438129 - DNA, 33 bp, Homo sapien
tttttttcggtagtaacggaatctcactatctt

SEQ ID NO: 438130 - DNA, 33 bp, Homo sapien
tttttttcggtagtaatggaatctcactatctt

SEQ ID NO: 438131 - DNA, 33 bp, Homo sapien
tagagatcatttaacccgataattctcaaagcg

SEQ ID NO: 438132 - DNA, 33 bp, Homo sapien
tagagatcatttaacctgataattctcaaagcg

SEQ ID NO: 438133 - DNA, 33 bp, Homo sapien
cattatactaaataccaaggttaagagaataaa

SEQ ID NO: 438134 - DNA, 33 bp, Homo sapien
cattatactaaataccgaggttaagagaataaa

SEQ ID NO: 438135 - DNA, 33 bp, Homo sapien
atgatgggaggtaaacagtggccaggaataagc

SEQ ID NO: 438136 - DNA, 33 bp, Homo sapien
atgatgggaggtaaacggtggccaggaataagc

SEQ ID NO: 438137 - DNA, 33 bp, Homo sapien
ggttcctaaaggccagaatttatgtaatggata

SEQ ID NO: 438138 - DNA, 33 bp, Homo sapien
ggttcctaaaggccagtatttatgtaatggata

SEQ ID NO: 438139 - DNA, 33 bp, Homo sapien
taagtcaaagcaattcgattaaaatccaatgag

SEQ ID NO: 438140 - DNA, 33 bp, Homo sapien
taagtcaaagcaattctattaaaatccaatgag

SEQ ID NO: 438141 - DNA, 33 bp, Homo sapien
attttacaagccacaaatgttattcaagctatt

SEQ ID NO: 438142 - DNA, 33 bp, Homo sapien
attttacaagccacaagtgttattcaagctatt

SEQ ID NO: 438143 - DNA, 33 bp, Homo sapien
ataacaggagattagacgtttacaaaggcaggt

SEQ ID NO: 438144 - DNA, 33 bp, Homo sapien
ataacaggagattagatgtttacaaaggcaggt

SEQ ID NO: 438145 - DNA, 33 bp, Homo sapien
caagagcttagtgcatgagagaagtgataaagt

SEQ ID NO: 438146 - DNA, 33 bp, Homo sapien
caagagcttagtgcattagagaagtgataaagt

SEQ ID NO: 438147 - DNA, 33 bp, Homo sapien
tgtataataggatcaccgatttctaccttgcaa

SEQ ID NO: 438148 - DNA, 33 bp, Homo sapien
tgtataataggatcactgatttctaccttgcaa

SEQ ID NO: 438149 - DNA, 33 bp, Homo sapien
aaaaaatccaatgccaaaacctatctctgtttt

SEQ ID NO: 438150 - DNA, 33 bp, Homo sapien
aaaaaatccaatgccacaacctatctctgtttt

SEQ ID NO: 438151 - DNA, 33 bp, Homo sapien
agaatttcccttctaacgtgagtcaggtctgtg

SEQ ID NO: 438152 - DNA, 33 bp, Homo sapien
agaatttcccttctaatgtgagtcaggtctgtg

SEQ ID NO: 438153 - DNA, 33 bp, Homo sapien
atagtacacaactccaaacttgctaatttttga

SEQ ID NO: 438154 - DNA, 33 bp, Homo sapien
atagtacacaactccagacttgctaatttttga

SEQ ID NO: 438155 - DNA, 33 bp, Homo sapien
gactaaagccttaagcgaacagttcataacggg

SEQ ID NO: 438156 - DNA, 33 bp, Homo sapien
gactaaagccttaagctaacagttcataacggg

SEQ ID NO: 438157 - DNA, 33 bp, Homo sapien
ctatctctgcatctccccctttcaacttttgcc

SEQ ID NO: 438158 - DNA, 33 bp, Homo sapien
ctatctctgcatctcctcctttcaacttttgcc

SEQ ID NO: 438159 - DNA, 33 bp, Homo sapien
ggtgagaagatcagcaaatttcaaagcataaat

SEQ ID NO: 438160 - DNA, 33 bp, Homo sapien
ggtgagaagatcagcagatttcaaagcataaat

SEQ ID NO: 438161 - DNA, 33 bp, Homo sapien
tcctagtttctgctagcaattatcaatccttgt

SEQ ID NO: 438162 - DNA, 33 bp, Homo sapien
tcctagtttctgctaggaattatcaatccttgt

SEQ ID NO: 438163 - DNA, 33 bp, Homo sapien
aattcagagctcaaagacacgatcttcgaatta

SEQ ID NO: 438164 - DNA, 33 bp, Homo sapien
aattcagagctcaaagtcacgatcttcgaatta

SEQ ID NO: 438165 - DNA, 33 bp, Homo sapien
gttttgtctgatataaaaatagctcgcttttgg

SEQ ID NO: 438166 - DNA, 33 bp, Homo sapien
gttttgtctgatataagaatagctcgcttttgg

SEQ ID NO: 438167 - DNA, 33 bp, Homo sapien
aggcatgagacgttgcacctagccctaataaga

SEQ ID NO: 438168 - DNA, 33 bp, Homo sapien
aggcatgagacgttgcgcctagccctaataaga

SEQ ID NO: 438169 - DNA, 33 bp, Homo sapien
ctccttccatcttcacccctttcctctgatatg

SEQ ID NO: 438170 - DNA, 33 bp, Homo sapien
ctccttccatcttcactcctttcctctgatatg

SEQ ID NO: 438171 - DNA, 33 bp, Homo sapien
atattttcagtgatgcaacattattgagtatag

SEQ ID NO: 438172 - DNA, 33 bp, Homo sapien
atattttcagtgatgcgacattattgagtatag

SEQ ID NO: 438173 - DNA, 33 bp, Homo sapien
accacttagccttatgaaacttcctggcagttt

SEQ ID NO: 438174 - DNA, 33 bp, Homo sapien
accacttagccttatggaacttcctggcagttt

SEQ ID NO: 438175 - DNA, 33 bp, Homo sapien
tcagataaaattgtacagaattccaccactgga

SEQ ID NO: 438176 - DNA, 33 bp, Homo sapien
tcagataaaattgtacggaattccaccactgga

SEQ ID NO: 438177 - DNA, 33 bp, Homo sapien
actgcagagagtgtacaatcaccacacaaaggg

SEQ ID NO: 438178 - DNA, 33 bp, Homo sapien
actgcagagagtgtacgatcaccacacaaaggg

SEQ ID NO: 438179 - DNA, 33 bp, Homo sapien
cattagtagtttaagcagattagccacctgtac

SEQ ID NO: 438180 - DNA, 33 bp, Homo sapien
cattagtagtttaagcggattagccacctgtac

SEQ ID NO: 438181 - DNA, 33 bp, Homo sapien
aacttgctttttaaaaaaattctgcttgctaac

SEQ ID NO: 438182 - DNA, 33 bp, Homo sapien
aacttgctttttaaaataattctgcttgctaac

SEQ ID NO: 438183 - DNA, 33 bp, Homo sapien
ggtagaacaatggggaacaagaattgccagtgg

SEQ ID NO: 438184 - DNA, 33 bp, Homo sapien
ggtagaacaatggggagcaagaattgccagtgg

SEQ ID NO: 438185 - DNA, 33 bp, Homo sapien
cctgtaaatcttgcaccctgtcatcccttccaa

SEQ ID NO: 438186 - DNA, 33 bp, Homo sapien
cctgtaaatcttgcacgctgtcatcccttccaa

SEQ ID NO: 438187 - DNA, 33 bp, Homo sapien
atccatgccatggacaatgggtctgatcaaagg

SEQ ID NO: 438188 - DNA, 33 bp, Homo sapien
atccatgccatggacattgggtctgatcaaagg

SEQ ID NO: 438189 - DNA, 33 bp, Homo sapien
tataatccaccatggccaatggaatttaccatg

SEQ ID NO: 438190 - DNA, 33 bp, Homo sapien
tataatccaccatggctaatggaatttaccatg

SEQ ID NO: 438191 - DNA, 33 bp, Homo sapien
ctgagcagagcagtcaaatgtacacatagaaag

SEQ ID NO: 438192 - DNA, 33 bp, Homo sapien
ctgagcagagcagtcagatgtacacatagaaag

SEQ ID NO: 438193 - DNA, 33 bp, Homo sapien
actgggaaggaactgcaatattgggaaaaagaa

SEQ ID NO: 438194 - DNA, 33 bp, Homo sapien
actgggaaggaactgctatattgggaaaaagaa

SEQ ID NO: 438195 - DNA, 33 bp, Homo sapien
aaaagagaaatgttaccgatataaaagatgttg

SEQ ID NO: 438196 - DNA, 33 bp, Homo sapien
aaaagagaaatgttacggatataaaagatgttg

SEQ ID NO: 438197 - DNA, 33 bp, Homo sapien
ttacaagtgaccaagaaccaaaatattatacta

SEQ ID NO: 438198 - DNA, 33 bp, Homo sapien
ttacaagtgaccaagatccaaaatattatacta

SEQ ID NO: 438199 - DNA, 33 bp, Homo sapien
atgaaggggaatttacaaggagaattgactcac

SEQ ID NO: 438200 - DNA, 33 bp, Homo sapien
atgaaggggaatttaccaggagaattgactcac

SEQ ID NO: 438201 - DNA, 33 bp, Homo sapien
ttcagctccactacaagcttataagaccactgt

SEQ ID NO: 438202 - DNA, 33 bp, Homo sapien
ttcagctccactacaatcttataagaccactgt

SEQ ID NO: 438203 - DNA, 33 bp, Homo sapien
aggattaattccacaaaggtctgacaggtccag

SEQ ID NO: 438204 - DNA, 33 bp, Homo sapien
aggattaattccacaacggtctgacaggtccag

SEQ ID NO: 438205 - DNA, 33 bp, Homo sapien
aaagttaataggtgtgaactcatagacttttat

SEQ ID NO: 438206 - DNA, 33 bp, Homo sapien
aaagttaataggtgtggactcatagacttttat

SEQ ID NO: 438207 - DNA, 33 bp, Homo sapien
ctaagtgtgggctacaacactgggaatcaattc

SEQ ID NO: 438208 - DNA, 33 bp, Homo sapien
ctaagtgtgggctacaccactgggaatcaattc

SEQ ID NO: 438209 - DNA, 33 bp, Homo sapien
tataaaatatgatcacaaccatgtggataataa

SEQ ID NO: 438210 - DNA, 33 bp, Homo sapien
tataaaatatgatcactaccatgtggataataa

SEQ ID NO: 438211 - DNA, 33 bp, Homo sapien
ggcagccaagtagacaagctttggagatgccat

SEQ ID NO: 438212 - DNA, 33 bp, Homo sapien
ggcagccaagtagacacgctttggagatgccat

SEQ ID NO: 438213 - DNA, 33 bp, Homo sapien
ttaacagaatccctaagcatatgttaacttcac

SEQ ID NO: 438214 - DNA, 33 bp, Homo sapien
ttaacagaatccctaatcatatgttaacttcac

SEQ ID NO: 438215 - DNA, 33 bp, Homo sapien
tgaatgagctgtaacaaaaaggagccgaaacac

SEQ ID NO: 438216 - DNA, 33 bp, Homo sapien
tgaatgagctgtaacacaaaggagccgaaacac

SEQ ID NO: 438217 - DNA, 33 bp, Homo sapien
aaatcaccacctaaaaggagaacttatatccct

SEQ ID NO: 438218 - DNA, 33 bp, Homo sapien
aaatcaccacctaaaatgagaacttatatccct

SEQ ID NO: 438219 - DNA, 33 bp, Homo sapien
catgttagcacttcagaaagaaaatgtgagtgc

SEQ ID NO: 438220 - DNA, 33 bp, Homo sapien
catgttagcacttcaggaagaaaatgtgagtgc

SEQ ID NO: 438221 - DNA, 33 bp, Homo sapien
agtttataatgagtaaacttttcacactttttc

SEQ ID NO: 438222 - DNA, 33 bp, Homo sapien
agtttataatgagtaaccttttcacactttttc

SEQ ID NO: 438223 - DNA, 33 bp, Homo sapien
agtgggcacagtattacagtgtctgaatgtcct

SEQ ID NO: 438224 - DNA, 33 bp, Homo sapien
agtgggcacagtattatagtgtctgaatgtcct

SEQ ID NO: 438225 - DNA, 33 bp, Homo sapien
cagcatcttcttaaaaactgagtagactggaga

SEQ ID NO: 438226 - DNA, 33 bp, Homo sapien
cagcatcttcttaaaagctgagtagactggaga

SEQ ID NO: 438227 - DNA, 33 bp, Homo sapien
tgaagagaggttagtcaataggtacaaatatgc

SEQ ID NO: 438228 - DNA, 33 bp, Homo sapien
tgaagagaggttagtcgataggtacaaatatgc

SEQ ID NO: 438229 - DNA, 33 bp, Homo sapien
tatctctttgatgtaccgattccctctccattg

SEQ ID NO: 438230 - DNA, 33 bp, Homo sapien
tatctctttgatgtactgattccctctccattg

SEQ ID NO: 438231 - DNA, 33 bp, Homo sapien
ggtcaccccaacctagaatgtaaatggactttc

SEQ ID NO: 438232 - DNA, 33 bp, Homo sapien
ggtcaccccaacctagtatgtaaatggactttc

SEQ ID NO: 438233 - DNA, 33 bp, Homo sapien
aagattttatgtggaaagtacctactacaccac

SEQ ID NO: 438234 - DNA, 33 bp, Homo sapien
aagattttatgtggaatgtacctactacaccac

SEQ ID NO: 438235 - DNA, 33 bp, Homo sapien
tttttgtagacattacacataacacatatatag

SEQ ID NO: 438236 - DNA, 33 bp, Homo sapien
tttttgtagacattacgcataacacatatatag

SEQ ID NO: 438237 - DNA, 33 bp, Homo sapien
ttgtgttaacgtatcaacttgttttcataagta

SEQ ID NO: 438238 - DNA, 33 bp, Homo sapien
ttgtgttaacgtatcaccttgttttcataagta

SEQ ID NO: 438239 - DNA, 33 bp, Homo sapien
aagttttatttaatgaagaacaacagattttgg

SEQ ID NO: 438240 - DNA, 33 bp, Homo sapien
aagttttatttaatgaggaacaacagattttgg

SEQ ID NO: 438241 - DNA, 33 bp, Homo sapien
tgttttaaggattcaacgatacaatgtagatga

SEQ ID NO: 438242 - DNA, 33 bp, Homo sapien
tgttttaaggattcaatgatacaatgtagatga

SEQ ID NO: 438243 - DNA, 33 bp, Homo sapien
tgcatcaataagctcaataagcataaaactatg

SEQ ID NO: 438244 - DNA, 33 bp, Homo sapien
tgcatcaataagctcagtaagcataaaactatg

SEQ ID NO: 438245 - DNA, 33 bp, Homo sapien
ttagatcaatggtcacaaaacgttttatttagg

SEQ ID NO: 438246 - DNA, 33 bp, Homo sapien
ttagatcaatggtcaccaaacgttttatttagg

SEQ ID NO: 438247 - DNA, 33 bp, Homo sapien
gaatttctggtcggccccttgttggatgcatca

SEQ ID NO: 438248 - DNA, 33 bp, Homo sapien
gaatttctggtcggccgcttgttggatgcatca

SEQ ID NO: 438249 - DNA, 33 bp, Homo sapien
gagacactagcaattaaaagttaggaattcagg

SEQ ID NO: 438250 - DNA, 33 bp, Homo sapien
gagacactagcaattagaagttaggaattcagg

SEQ ID NO: 438251 - DNA, 33 bp, Homo sapien
ctcagataaaagttgcactgtgctcacattttt

SEQ ID NO: 438252 - DNA, 33 bp, Homo sapien
ctcagataaaagttgcgctgtgctcacattttt

SEQ ID NO: 438253 - DNA, 33 bp, Homo sapien
caaaggattgaagtgaaaatggcatttggaaga

SEQ ID NO: 438254 - DNA, 33 bp, Homo sapien
caaaggattgaagtgagaatggcatttggaaga

SEQ ID NO: 438255 - DNA, 33 bp, Homo sapien
tcagaggttcctaaccccaattgataagcagag

SEQ ID NO: 438256 - DNA, 33 bp, Homo sapien
tcagaggttcctaaccgcaattgataagcagag

SEQ ID NO: 438257 - DNA, 33 bp, Homo sapien
ttctactactatttgcagacaatggcaggcact

SEQ ID NO: 438258 - DNA, 33 bp, Homo sapien
ttctactactatttgccgacaatggcaggcact

SEQ ID NO: 438259 - DNA, 33 bp, Homo sapien
cccagctctagtatgaccttgtataaacggttc

SEQ ID NO: 438260 - DNA, 33 bp, Homo sapien
cccagctctagtatgatcttgtataaacggttc

SEQ ID NO: 438261 - DNA, 33 bp, Homo sapien
aacaaagactatcaaactatttttaggcaagaa

SEQ ID NO: 438262 - DNA, 33 bp, Homo sapien
aacaaagactatcaaagtatttttaggcaagaa

SEQ ID NO: 438263 - DNA, 33 bp, Homo sapien
taccttggcaatgacaacttttggtttggatgc

SEQ ID NO: 438264 - DNA, 33 bp, Homo sapien
taccttggcaatgacatcttttggtttggatgc

SEQ ID NO: 438265 - DNA, 33 bp, Homo sapien
tttgcttttattccaagttaatcatggaaagtt

SEQ ID NO: 438266 - DNA, 33 bp, Homo sapien
tttgcttttattccaatttaatcatggaaagtt

SEQ ID NO: 438267 - DNA, 33 bp, Homo sapien
gcacatcactgaagtccctttaatctccaagat

SEQ ID NO: 438268 - DNA, 33 bp, Homo sapien
gcacatcactgaagtctctttaatctccaagat

SEQ ID NO: 438269 - DNA, 33 bp, Homo sapien
aggctcccacctctagaactttgtacctgctgg

SEQ ID NO: 438270 - DNA, 33 bp, Homo sapien
aggctcccacctctaggactttgtacctgctgg

SEQ ID NO: 438271 - DNA, 33 bp, Homo sapien
attgttctagactgaagttatttaattgtaact

SEQ ID NO: 438272 - DNA, 33 bp, Homo sapien
attgttctagactgaatttatttaattgtaact

SEQ ID NO: 438273 - DNA, 33 bp, Homo sapien
atcaaacagaatttgacgacagattagatgtgg

SEQ ID NO: 438274 - DNA, 33 bp, Homo sapien
atcaaacagaatttgatgacagattagatgtgg

SEQ ID NO: 438275 - DNA, 33 bp, Homo sapien
ataaactggttgttgccataaatcctgaaagaa

SEQ ID NO: 438276 - DNA, 33 bp, Homo sapien
ataaactggttgttgctataaatcctgaaagaa

SEQ ID NO: 438277 - DNA, 33 bp, Homo sapien
ctttagagtttaggccacattgtagagctgaaa

SEQ ID NO: 438278 - DNA, 33 bp, Homo sapien
ctttagagtttaggccgcattgtagagctgaaa

SEQ ID NO: 438279 - DNA, 33 bp, Homo sapien
acatcaatctcctaccccaatgttcctgattct

SEQ ID NO: 438280 - DNA, 33 bp, Homo sapien
acatcaatctcctacctcaatgttcctgattct

SEQ ID NO: 438281 - DNA, 33 bp, Homo sapien
atgtaccaacttgtcaatcaggtagaaagaatc

SEQ ID NO: 438282 - DNA, 33 bp, Homo sapien
atgtaccaacttgtcagtcaggtagaaagaatc

SEQ ID NO: 438283 - DNA, 33 bp, Homo sapien
tatgcaaaaaaagatacaagttcttgctataca

SEQ ID NO: 438284 - DNA, 33 bp, Homo sapien
tatgcaaaaaaagatagaagttcttgctataca

SEQ ID NO: 438285 - DNA, 33 bp, Homo sapien
ataaaataatgtatacaatgatgagtcactgag

SEQ ID NO: 438286 - DNA, 33 bp, Homo sapien
ataaaataatgtataccatgatgagtcactgag

SEQ ID NO: 438287 - DNA, 33 bp, Homo sapien
ttgctcctccatcataaggcatagaatagagcc

SEQ ID NO: 438288 - DNA, 33 bp, Homo sapien
ttgctcctccatcatagggcatagaatagagcc

SEQ ID NO: 438289 - DNA, 33 bp, Homo sapien
gtcatacgttcacttacagcaaatagtaaatca

SEQ ID NO: 438290 - DNA, 33 bp, Homo sapien
gtcatacgttcacttagagcaaatagtaaatca

SEQ ID NO: 438291 - DNA, 33 bp, Homo sapien
gcaaaatacttatgaagcagaaaagctaaaaga

SEQ ID NO: 438292 - DNA, 33 bp, Homo sapien
gcaaaatacttatgaatcagaaaagctaaaaga

SEQ ID NO: 438293 - DNA, 33 bp, Homo sapien
ggttagtatgggagataacttgttagtaactgt

SEQ ID NO: 438294 - DNA, 33 bp, Homo sapien
ggttagtatgggagatgacttgttagtaactgt

SEQ ID NO: 438295 - DNA, 33 bp, Homo sapien
ctaaatcctgttatcactctgcaacttttagga

SEQ ID NO: 438296 - DNA, 33 bp, Homo sapien
ctaaatcctgttatcagtctgcaacttttagga

SEQ ID NO: 438297 - DNA, 33 bp, Homo sapien
atgatttcataaaaccacctaaaacagctcact

SEQ ID NO: 438298 - DNA, 33 bp, Homo sapien
atgatttcataaaaccgcctaaaacagctcact

SEQ ID NO: 438299 - DNA, 33 bp, Homo sapien
tttttgtctctctctaaagattttgaatatagc

SEQ ID NO: 438300 - DNA, 33 bp, Homo sapien
tttttgtctctctctacagattttgaatatagc

SEQ ID NO: 438301 - DNA, 33 bp, Homo sapien
acacttttgatgtccccacagatttagcagctt

SEQ ID NO: 438302 - DNA, 33 bp, Homo sapien
acacttttgatgtccctacagatttagcagctt

SEQ ID NO: 438303 - DNA, 33 bp, Homo sapien
attgtaaatcagtagacgttttgaatgggattt

SEQ ID NO: 438304 - DNA, 33 bp, Homo sapien
attgtaaatcagtagatgttttgaatgggattt

SEQ ID NO: 438305 - DNA, 33 bp, Homo sapien
gactgtctgcattatacagtcttgtgtctattc

SEQ ID NO: 438306 - DNA, 33 bp, Homo sapien
gactgtctgcattatatagtcttgtgtctattc

SEQ ID NO: 438307 - DNA, 33 bp, Homo sapien
tgagtgatatccttcaacagcttgtacctaacc

SEQ ID NO: 438308 - DNA, 33 bp, Homo sapien
tgagtgatatccttcagcagcttgtacctaacc

SEQ ID NO: 438309 - DNA, 33 bp, Homo sapien
acacagttaagagcgcagagaccgaagccaaca

SEQ ID NO: 438310 - DNA, 33 bp, Homo sapien
acacagttaagagcgcggagaccgaagccaaca

SEQ ID NO: 438311 - DNA, 33 bp, Homo sapien
cctcttttatatatcacgtgtcttctatcacca

SEQ ID NO: 438312 - DNA, 33 bp, Homo sapien
cctcttttatatatcaggtgtcttctatcacca

SEQ ID NO: 438313 - DNA, 33 bp, Homo sapien
atttgttttaaacacaataacactactctccca

SEQ ID NO: 438314 - DNA, 33 bp, Homo sapien
atttgttttaaacacagtaacactactctccca

SEQ ID NO: 438315 - DNA, 33 bp, Homo sapien
aggacattgaattgcacaattataaatctgctt

SEQ ID NO: 438316 - DNA, 33 bp, Homo sapien
aggacattgaattgcagaattataaatctgctt

SEQ ID NO: 438317 - DNA, 33 bp, Homo sapien
agtgtcctctttgttacacagatcattattcca

SEQ ID NO: 438318 - DNA, 33 bp, Homo sapien
agtgtcctctttgttatacagatcattattcca

SEQ ID NO: 438319 - DNA, 33 bp, Homo sapien
atgtggtattacttgcgacattttataagataa

SEQ ID NO: 438320 - DNA, 33 bp, Homo sapien
atgtggtattacttgctacattttataagataa

SEQ ID NO: 438321 - DNA, 33 bp, Homo sapien
ttattaccagagaaataatcttgacatgaaaat

SEQ ID NO: 438322 - DNA, 33 bp, Homo sapien
ttattaccagagaaattatcttgacatgaaaat

SEQ ID NO: 438323 - DNA, 33 bp, Homo sapien
tccccaagtttttaaaggttcagcttggaatcc

SEQ ID NO: 438324 - DNA, 33 bp, Homo sapien
tccccaagtttttaaatgttcagcttggaatcc

SEQ ID NO: 438325 - DNA, 33 bp, Homo sapien
atcactaattttagaacgatagacatgactaga

SEQ ID NO: 438326 - DNA, 33 bp, Homo sapien
atcactaattttagaatgatagacatgactaga

SEQ ID NO: 438327 - DNA, 33 bp, Homo sapien
ttcccaagagtctcataaggccaaaatatggtc

SEQ ID NO: 438328 - DNA, 33 bp, Homo sapien
ttcccaagagtctcatgaggccaaaatatggtc

SEQ ID NO: 438329 - DNA, 33 bp, Homo sapien
tcttgttgtttgataaagaaccaaagcatttgg

SEQ ID NO: 438330 - DNA, 33 bp, Homo sapien
tcttgttgtttgataatgaaccaaagcatttgg

SEQ ID NO: 438331 - DNA, 33 bp, Homo sapien
cttacagccagatggaagttttcatttttttat

SEQ ID NO: 438332 - DNA, 33 bp, Homo sapien
cttacagccagatggaggttttcatttttttat

SEQ ID NO: 438333 - DNA, 33 bp, Homo sapien
gaaaccaagatctcagaaacttaaaataccaaa

SEQ ID NO: 438334 - DNA, 33 bp, Homo sapien
gaaaccaagatctcaggaacttaaaataccaaa

SEQ ID NO: 438335 - DNA, 33 bp, Homo sapien
aggggatattgtagaacggtattgtatagtgta

SEQ ID NO: 438336 - DNA, 33 bp, Homo sapien
aggggatattgtagaatggtattgtatagtgta

SEQ ID NO: 438337 - DNA, 33 bp, Homo sapien
gcaaagtgtgtccttaggtacttgatgtttagt

SEQ ID NO: 438338 - DNA, 33 bp, Homo sapien
gcaaagtgtgtccttatgtacttgatgtttagt

SEQ ID NO: 438339 - DNA, 33 bp, Homo sapien
atttactgagttcaaaacatgtgagacatttat

SEQ ID NO: 438340 - DNA, 33 bp, Homo sapien
atttactgagttcaaaccatgtgagacatttat

SEQ ID NO: 438341 - DNA, 33 bp, Homo sapien
ataatcagaaaaataaatgtggaggtataaaag

SEQ ID NO: 438342 - DNA, 33 bp, Homo sapien
ataatcagaaaaataattgtggaggtataaaag

SEQ ID NO: 438343 - DNA, 33 bp, Homo sapien
aattagaactggagaacatagacatgtgcacag

SEQ ID NO: 438344 - DNA, 33 bp, Homo sapien
aattagaactggagaagatagacatgtgcacag

SEQ ID NO: 438345 - DNA, 33 bp, Homo sapien
agatatgagcaaataaatgacaaagatacttaa

SEQ ID NO: 438346 - DNA, 33 bp, Homo sapien
agatatgagcaaataagtgacaaagatacttaa

SEQ ID NO: 438347 - DNA, 33 bp, Homo sapien
tattataaattttacaagcaattaactttagac

SEQ ID NO: 438348 - DNA, 33 bp, Homo sapien
tattataaattttacaggcaattaactttagac

SEQ ID NO: 438349 - DNA, 33 bp, Homo sapien
atttacttacttcaaacatcaatccatcaataa

SEQ ID NO: 438350 - DNA, 33 bp, Homo sapien
atttacttacttcaaagatcaatccatcaataa

SEQ ID NO: 438351 - DNA, 33 bp, Homo sapien
ttctaatatgggaaatcactagaatcatgagaa

SEQ ID NO: 438352 - DNA, 33 bp, Homo sapien
ttctaatatgggaaattactagaatcatgagaa

SEQ ID NO: 438353 - DNA, 33 bp, Homo sapien
tagagccgaacaatcaacaacacgaattagaac

SEQ ID NO: 438354 - DNA, 33 bp, Homo sapien
tagagccgaacaatcatcaacacgaattagaac

SEQ ID NO: 438355 - DNA, 33 bp, Homo sapien
gccagctggtcagatcagaaaggtttcagttct

SEQ ID NO: 438356 - DNA, 33 bp, Homo sapien
gccagctggtcagatcggaaaggtttcagttct

SEQ ID NO: 438357 - DNA, 33 bp, Homo sapien
ataaacttgagctagaagaaatctaaaattgca

SEQ ID NO: 438358 - DNA, 33 bp, Homo sapien
ataaacttgagctagaggaaatctaaaattgca

SEQ ID NO: 438359 - DNA, 33 bp, Homo sapien
ccaaactggctttaaggaagatacattcttcac

SEQ ID NO: 438360 - DNA, 33 bp, Homo sapien
ccaaactggctttaagtaagatacattcttcac

SEQ ID NO: 438361 - DNA, 33 bp, Homo sapien
taaattgaagcaatccaatcaaaagtatagtta

SEQ ID NO: 438362 - DNA, 33 bp, Homo sapien
taaattgaagcaatccgatcaaaagtatagtta

SEQ ID NO: 438363 - DNA, 33 bp, Homo sapien
ttcagaaaaccacacagatttcagaggttagaa

SEQ ID NO: 438364 - DNA, 33 bp, Homo sapien
ttcagaaaaccacacatatttcagaggttagaa

SEQ ID NO: 438365 - DNA, 33 bp, Homo sapien
aacatgaaggaaaagtcaaaaggatccatagaa

SEQ ID NO: 438366 - DNA, 33 bp, Homo sapien
aacatgaaggaaaagtgaaaaggatccatagaa

SEQ ID NO: 438367 - DNA, 33 bp, Homo sapien
tacagaagaggaacaactacattaaaacatgaa

SEQ ID NO: 438368 - DNA, 33 bp, Homo sapien
tacagaagaggaacaagtacattaaaacatgaa

SEQ ID NO: 438369 - DNA, 33 bp, Homo sapien
aaactaatcaaggaacaagtaactctggacatg

SEQ ID NO: 438370 - DNA, 33 bp, Homo sapien
aaactaatcaaggaacgagtaactctggacatg

SEQ ID NO: 438371 - DNA, 33 bp, Homo sapien
gtcaacgagtgcaaaaacattcaagggcataag

SEQ ID NO: 438372 - DNA, 33 bp, Homo sapien
gtcaacgagtgcaaaagcattcaagggcataag

SEQ ID NO: 438373 - DNA, 33 bp, Homo sapien
attttatccttctacccgattgctccagccagg

SEQ ID NO: 438374 - DNA, 33 bp, Homo sapien
attttatccttctaccggattgctccagccagg

SEQ ID NO: 438375 - DNA, 33 bp, Homo sapien
aatattctataggtgcaattggtatgaacttta

SEQ ID NO: 438376 - DNA, 33 bp, Homo sapien
aatattctataggtgccattggtatgaacttta

SEQ ID NO: 438377 - DNA, 33 bp, Homo sapien
atccatgtgttatgtacccaattgacttacaca

SEQ ID NO: 438378 - DNA, 33 bp, Homo sapien
atccatgtgttatgtatccaattgacttacaca

SEQ ID NO: 438379 - DNA, 33 bp, Homo sapien
aaaaacaagtcattcactcaatttaattcagca

SEQ ID NO: 438380 - DNA, 33 bp, Homo sapien
aaaaacaagtcattcattcaatttaattcagca

SEQ ID NO: 438381 - DNA, 33 bp, Homo sapien
tttatctagaggaaacagtgtatacatttcaca

SEQ ID NO: 438382 - DNA, 33 bp, Homo sapien
tttatctagaggaaaccgtgtatacatttcaca

SEQ ID NO: 438383 - DNA, 33 bp, Homo sapien
atattactgagtcaaaggtcttcctgtaactgc

SEQ ID NO: 438384 - DNA, 33 bp, Homo sapien
atattactgagtcaaatgtcttcctgtaactgc

SEQ ID NO: 438385 - DNA, 33 bp, Homo sapien
catgtattctctaagacagccgttttctgtttt

SEQ ID NO: 438386 - DNA, 33 bp, Homo sapien
catgtattctctaagatagccgttttctgtttt

SEQ ID NO: 438387 - DNA, 33 bp, Homo sapien
taatgatctcaaaggccaagatgagaaatcagc

SEQ ID NO: 438388 - DNA, 33 bp, Homo sapien
taatgatctcaaaggctaagatgagaaatcagc

SEQ ID NO: 438389 - DNA, 33 bp, Homo sapien
cacacacaatctaggcaattttaatgctagcaa

SEQ ID NO: 438390 - DNA, 33 bp, Homo sapien
cacacacaatctaggcgattttaatgctagcaa

SEQ ID NO: 438391 - DNA, 33 bp, Homo sapien
tcactgttgccagcacaggctgattggcattca

SEQ ID NO: 438392 - DNA, 33 bp, Homo sapien
tcactgttgccagcacgggctgattggcattca

SEQ ID NO: 438393 - DNA, 33 bp, Homo sapien
acttgtagctttatgaccttctagttataatgc

SEQ ID NO: 438394 - DNA, 33 bp, Homo sapien
acttgtagctttatgatcttctagttataatgc

SEQ ID NO: 438395 - DNA, 33 bp, Homo sapien
agcattttctactctgaatgtctccagtgattg

SEQ ID NO: 438396 - DNA, 33 bp, Homo sapien
agcattttctactctggatgtctccagtgattg

SEQ ID NO: 438397 - DNA, 33 bp, Homo sapien
attcaactgcaaattcaaactctacttttcatc

SEQ ID NO: 438398 - DNA, 33 bp, Homo sapien
attcaactgcaaattccaactctacttttcatc

SEQ ID NO: 438399 - DNA, 33 bp, Homo sapien
caaaatctagaggccaacacaactaaccattca

SEQ ID NO: 438400 - DNA, 33 bp, Homo sapien
caaaatctagaggccagcacaactaaccattca

SEQ ID NO: 438401 - DNA, 33 bp, Homo sapien
ccatttcttcataaatcaacaacaactgactca

SEQ ID NO: 438402 - DNA, 33 bp, Homo sapien
ccatttcttcataaattaacaacaactgactca

SEQ ID NO: 438403 - DNA, 33 bp, Homo sapien
tggtctggatagtaacaacacccattacataaa

SEQ ID NO: 438404 - DNA, 33 bp, Homo sapien
tggtctggatagtaacgacacccattacataaa

SEQ ID NO: 438405 - DNA, 33 bp, Homo sapien
ctgagtgttcacaatcgaccttgggccacctgg

SEQ ID NO: 438406 - DNA, 33 bp, Homo sapien
ctgagtgttcacaatctaccttgggccacctgg

SEQ ID NO: 438407 - DNA, 33 bp, Homo sapien
aatgttaaagttgtgacgttagcaagtcagaga

SEQ ID NO: 438408 - DNA, 33 bp, Homo sapien
aatgttaaagttgtgatgttagcaagtcagaga

SEQ ID NO: 438409 - DNA, 33 bp, Homo sapien
tatcccatttttagaacgtgctttctgtgcctg

SEQ ID NO: 438410 - DNA, 33 bp, Homo sapien
tatcccatttttagaaggtgctttctgtgcctg

SEQ ID NO: 438411 - DNA, 33 bp, Homo sapien
atgggaagacaacaataagaaatgtgcacttgg

SEQ ID NO: 438412 - DNA, 33 bp, Homo sapien
atgggaagacaacaatgagaaatgtgcacttgg

SEQ ID NO: 438413 - DNA, 33 bp, Homo sapien
aattcacatatcctcacgcaacctctccttgta

SEQ ID NO: 438414 - DNA, 33 bp, Homo sapien
aattcacatatcctcatgcaacctctccttgta

SEQ ID NO: 438415 - DNA, 33 bp, Homo sapien
ctattgtgtcgtcaggcatgtctctacatggtg

SEQ ID NO: 438416 - DNA, 33 bp, Homo sapien
ctattgtgtcgtcagggatgtctctacatggtg

SEQ ID NO: 438417 - DNA, 33 bp, Homo sapien
ttctgtgaaggcctagacaattgcagggggctc

SEQ ID NO: 438418 - DNA, 33 bp, Homo sapien
ttctgtgaaggcctaggcaattgcagggggctc

SEQ ID NO: 438419 - DNA, 33 bp, Homo sapien
taaatacccctatccactactctgagggatgaa

SEQ ID NO: 438420 - DNA, 33 bp, Homo sapien
taaatacccctatccagtactctgagggatgaa

SEQ ID NO: 438421 - DNA, 33 bp, Homo sapien
ttaaaatattcatttcacagttaaaatatgttt

SEQ ID NO: 438422 - DNA, 33 bp, Homo sapien
ttaaaatattcatttctcagttaaaatatgttt

SEQ ID NO: 438423 - DNA, 33 bp, Homo sapien
tgtctgctcagggaagaaaaggggagagaaatt

SEQ ID NO: 438424 - DNA, 33 bp, Homo sapien
tgtctgctcagggaaggaaaggggagagaaatt

SEQ ID NO: 438425 - DNA, 33 bp, Homo sapien
gtggagatggagcagcagagagaactttgtaga

SEQ ID NO: 438426 - DNA, 33 bp, Homo sapien
gtggagatggagcagcggagagaactttgtaga

SEQ ID NO: 438427 - DNA, 33 bp, Homo sapien
aaatggggatggaacaaggaatagaatccaatt

SEQ ID NO: 438428 - DNA, 33 bp, Homo sapien
aaatggggatggaacatggaatagaatccaatt

SEQ ID NO: 438429 - DNA, 33 bp, Homo sapien
tacatctagtgtattacgtatcactttgtatta

SEQ ID NO: 438430 - DNA, 33 bp, Homo sapien
tacatctagtgtattatgtatcactttgtatta

SEQ ID NO: 438431 - DNA, 33 bp, Homo sapien
ccaaacagagtcagaaatgtgagtcaggagaag

SEQ ID NO: 438432 - DNA, 33 bp, Homo sapien
ccaaacagagtcagaagtgtgagtcaggagaag

SEQ ID NO: 438433 - DNA, 33 bp, Homo sapien
gttcaaagaccttcacaatgtggcccaaagctt

SEQ ID NO: 438434 - DNA, 33 bp, Homo sapien
gttcaaagaccttcacgatgtggcccaaagctt

SEQ ID NO: 438435 - DNA, 33 bp, Homo sapien
cagaggttgaaccataaagttgtcttggaggtg

SEQ ID NO: 438436 - DNA, 33 bp, Homo sapien
cagaggttgaaccatagagttgtcttggaggtg

SEQ ID NO: 438437 - DNA, 33 bp, Homo sapien
acaaatactaaataaactggatgaaataactgt

SEQ ID NO: 438438 - DNA, 33 bp, Homo sapien
acaaatactaaataaattggatgaaataactgt

SEQ ID NO: 438439 - DNA, 33 bp, Homo sapien
ataaagcaattgagacccaaatgttgggctggg

SEQ ID NO: 438440 - DNA, 33 bp, Homo sapien
ataaagcaattgagactcaaatgttgggctggg

SEQ ID NO: 438441 - DNA, 33 bp, Homo sapien
ttattccatatactggaaagaaaatgggtaatt

SEQ ID NO: 438442 - DNA, 33 bp, Homo sapien
ttattccatatactggtaagaaaatgggtaatt

SEQ ID NO: 438443 - DNA, 33 bp, Homo sapien
ttaaaacatagcaatgacaacacaattttatat

SEQ ID NO: 438444 - DNA, 33 bp, Homo sapien
ttaaaacatagcaatgccaacacaattttatat

SEQ ID NO: 438445 - DNA, 33 bp, Homo sapien
cctgaaaagcagctgactatcaatcaatagaaa

SEQ ID NO: 438446 - DNA, 33 bp, Homo sapien
cctgaaaagcagctgagtatcaatcaatagaaa

SEQ ID NO: 438447 - DNA, 33 bp, Homo sapien
tgaattatatctggcaaaaaggaaatgctcaat

SEQ ID NO: 438448 - DNA, 33 bp, Homo sapien
tgaattatatctggcacaaaggaaatgctcaat

SEQ ID NO: 438449 - DNA, 33 bp, Homo sapien
ttattgctctattaaaactacaaacatcagata

SEQ ID NO: 438450 - DNA, 33 bp, Homo sapien
ttattgctctattaaatctacaaacatcagata

SEQ ID NO: 438451 - DNA, 33 bp, Homo sapien
tccatactctacaaacaataaattgatgtttaa

SEQ ID NO: 438452 - DNA, 33 bp, Homo sapien
tccatactctacaaaccataaattgatgtttaa

SEQ ID NO: 438453 - DNA, 33 bp, Homo sapien
tatttccccgccaataataattaagctacgtag

SEQ ID NO: 438454 - DNA, 33 bp, Homo sapien
tatttccccgccaatagtaattaagctacgtag

SEQ ID NO: 438455 - DNA, 33 bp, Homo sapien
gggttagactacataaagtgccttaggcctgtg

SEQ ID NO: 438456 - DNA, 33 bp, Homo sapien
gggttagactacataatgtgccttaggcctgtg

SEQ ID NO: 438457 - DNA, 33 bp, Homo sapien
ataagtaaagtactcactgaatgtgttccttct

SEQ ID NO: 438458 - DNA, 33 bp, Homo sapien
ataagtaaagtactcattgaatgtgttccttct

SEQ ID NO: 438459 - DNA, 33 bp, Homo sapien
tgtacccaaaatggaagaattcaccaagaaata

SEQ ID NO: 438460 - DNA, 33 bp, Homo sapien
tgtacccaaaatggaataattcaccaagaaata

SEQ ID NO: 438461 - DNA, 33 bp, Homo sapien
aatatgatatagaataagttttcaaagtgtgtt

SEQ ID NO: 438462 - DNA, 33 bp, Homo sapien
aatatgatatagaatacgttttcaaagtgtgtt

SEQ ID NO: 438463 - DNA, 33 bp, Homo sapien
acacatctagataatgaaactaagaacaaaatt

SEQ ID NO: 438464 - DNA, 33 bp, Homo sapien
acacatctagataatggaactaagaacaaaatt

SEQ ID NO: 438465 - DNA, 33 bp, Homo sapien
catacaacatacaggaaagaaatgaacgttgac

SEQ ID NO: 438466 - DNA, 33 bp, Homo sapien
catacaacatacaggagagaaatgaacgttgac

SEQ ID NO: 438467 - DNA, 33 bp, Homo sapien
gatggataacagaaaaatagtaaggccagtggg

SEQ ID NO: 438468 - DNA, 33 bp, Homo sapien
gatggataacagaaaagtagtaaggccagtggg

SEQ ID NO: 438469 - DNA, 33 bp, Homo sapien
gcattcaagtggcttaagttctcagtgggaatt

SEQ ID NO: 438470 - DNA, 33 bp, Homo sapien
gcattcaagtggcttaggttctcagtgggaatt

SEQ ID NO: 438471 - DNA, 33 bp, Homo sapien
tcacattatttccatgaaagcctgtctgctgtc

SEQ ID NO: 438472 - DNA, 33 bp, Homo sapien
tcacattatttccatggaagcctgtctgctgtc

SEQ ID NO: 438473 - DNA, 33 bp, Homo sapien
tagtgatagctcatgtcacaaaaggccaggatg

SEQ ID NO: 438474 - DNA, 33 bp, Homo sapien
tagtgatagctcatgttacaaaaggccaggatg

SEQ ID NO: 438475 - DNA, 33 bp, Homo sapien
caaggaaggaaatgtcacttgagctatcaagga

SEQ ID NO: 438476 - DNA, 33 bp, Homo sapien
caaggaaggaaatgtcgcttgagctatcaagga

SEQ ID NO: 438477 - DNA, 33 bp, Homo sapien
tcctttcacatgaaaaatgtcagcatagaaatt

SEQ ID NO: 438478 - DNA, 33 bp, Homo sapien
tcctttcacatgaaaagtgtcagcatagaaatt

SEQ ID NO: 438479 - DNA, 33 bp, Homo sapien
aatgagtcagctattacgtccacgtctgaaagt

SEQ ID NO: 438480 - DNA, 33 bp, Homo sapien
aatgagtcagctattatgtccacgtctgaaagt

SEQ ID NO: 438481 - DNA, 33 bp, Homo sapien
aatcctaaccaagcaccaggtcagtgacctcat

SEQ ID NO: 438482 - DNA, 33 bp, Homo sapien
aatcctaaccaagcacgaggtcagtgacctcat

SEQ ID NO: 438483 - DNA, 33 bp, Homo sapien
gactagtggttacctacggctgaagtgtgagga

SEQ ID NO: 438484 - DNA, 33 bp, Homo sapien
gactagtggttacctatggctgaagtgtgagga

SEQ ID NO: 438485 - DNA, 33 bp, Homo sapien
taaagactgagagagaacaaaacagaagtaagg

SEQ ID NO: 438486 - DNA, 33 bp, Homo sapien
taaagactgagagagagcaaaacagaagtaagg

SEQ ID NO: 438487 - DNA, 33 bp, Homo sapien
ataatagcaatacaaccgcatttaattcacaac

SEQ ID NO: 438488 - DNA, 33 bp, Homo sapien
ataatagcaatacaactgcatttaattcacaac

SEQ ID NO: 438489 - DNA, 33 bp, Homo sapien
agagggtttaagttacaaatgtacttgtgtgtg

SEQ ID NO: 438490 - DNA, 33 bp, Homo sapien
agagggtttaagttacgaatgtacttgtgtgtg

SEQ ID NO: 438491 - DNA, 33 bp, Homo sapien
ctttgaactgtgataaacactatgatgaaaagt

SEQ ID NO: 438492 - DNA, 33 bp, Homo sapien
ctttgaactgtgataagcactatgatgaaaagt

SEQ ID NO: 438493 - DNA, 33 bp, Homo sapien
tttcaaattctcagtacattgccagtcttgtta

SEQ ID NO: 438494 - DNA, 33 bp, Homo sapien
tttcaaattctcagtatattgccagtcttgtta

SEQ ID NO: 438495 - DNA, 33 bp, Homo sapien
attatatctgcacaaaagccattagattacaag

SEQ ID NO: 438496 - DNA, 33 bp, Homo sapien
attatatctgcacaaacgccattagattacaag

SEQ ID NO: 438497 - DNA, 33 bp, Homo sapien
atcaattagatgcagaacgattacatatctaat

SEQ ID NO: 438498 - DNA, 33 bp, Homo sapien
atcaattagatgcagagcgattacatatctaat

SEQ ID NO: 438499 - DNA, 33 bp, Homo sapien
tgcatccatgttcatacagtccgtgaatacctt

SEQ ID NO: 438500 - DNA, 33 bp, Homo sapien
tgcatccatgttcatatagtccgtgaatacctt

SEQ ID NO: 438501 - DNA, 33 bp, Homo sapien
ctgtgtctctgtgaacagtcatagattggggac

SEQ ID NO: 438502 - DNA, 33 bp, Homo sapien
ctgtgtctctgtgaacggtcatagattggggac

SEQ ID NO: 438503 - DNA, 33 bp, Homo sapien
aagaccacgtacagtaccaatgccaagaatatg

SEQ ID NO: 438504 - DNA, 33 bp, Homo sapien
aagaccacgtacagtagcaatgccaagaatatg

SEQ ID NO: 438505 - DNA, 33 bp, Homo sapien
ttgcaagactacaccacgtgaacactgacctgt

SEQ ID NO: 438506 - DNA, 33 bp, Homo sapien
ttgcaagactacaccatgtgaacactgacctgt

SEQ ID NO: 438507 - DNA, 33 bp, Homo sapien
aatgggttcgctgcaaattcatttcatttaaga

SEQ ID NO: 438508 - DNA, 33 bp, Homo sapien
aatgggttcgctgcaagttcatttcatttaaga

SEQ ID NO: 438509 - DNA, 33 bp, Homo sapien
atgtccaacacaatacagagaaaatacaatgaa

SEQ ID NO: 438510 - DNA, 33 bp, Homo sapien
atgtccaacacaatacggagaaaatacaatgaa

SEQ ID NO: 438511 - DNA, 33 bp, Homo sapien
ttttctcttgctcagcaaagctgcagaatccca

SEQ ID NO: 438512 - DNA, 33 bp, Homo sapien
ttttctcttgctcagcgaagctgcagaatccca

SEQ ID NO: 438513 - DNA, 33 bp, Homo sapien
tgctacatgagcaaaaatttgttaaattgatga

SEQ ID NO: 438514 - DNA, 33 bp, Homo sapien
tgctacatgagcaaaagtttgttaaattgatga

SEQ ID NO: 438515 - DNA, 33 bp, Homo sapien
tgacttgccttgcctacagtaacctggtctgta

SEQ ID NO: 438516 - DNA, 33 bp, Homo sapien
tgacttgccttgcctatagtaacctggtctgta

SEQ ID NO: 438517 - DNA, 33 bp, Homo sapien
acaaaaacagaaaaaaaagagtgagtcacttac

SEQ ID NO: 438518 - DNA, 33 bp, Homo sapien
acaaaaacagaaaaaagagagtgagtcacttac

SEQ ID NO: 438519 - DNA, 33 bp, Homo sapien
aggccaatcacaaaatcacaaaaactgtgtaaa

SEQ ID NO: 438520 - DNA, 33 bp, Homo sapien
aggccaatcacaaaatgacaaaaactgtgtaaa

SEQ ID NO: 438521 - DNA, 33 bp, Homo sapien
gtgccgatagcatagaatattactgaaaagtca

SEQ ID NO: 438522 - DNA, 33 bp, Homo sapien
gtgccgatagcatagactattactgaaaagtca

SEQ ID NO: 438523 - DNA, 33 bp, Homo sapien
gtggaaggccgtggaactgggattagacacacc

SEQ ID NO: 438524 - DNA, 33 bp, Homo sapien
gtggaaggccgtggaattgggattagacacacc

SEQ ID NO: 438525 - DNA, 33 bp, Homo sapien
ttaaatggtattcatacacgtacccacacacat

SEQ ID NO: 438526 - DNA, 33 bp, Homo sapien
ttaaatggtattcatatacgtacccacacacat

SEQ ID NO: 438527 - DNA, 33 bp, Homo sapien
gcccaaatggtttacactctctttgaaatgcaa

SEQ ID NO: 438528 - DNA, 33 bp, Homo sapien
gcccaaatggtttacattctctttgaaatgcaa

SEQ ID NO: 438529 - DNA, 33 bp, Homo sapien
tatttgagaaagatgcaatttgtataatgcatt

SEQ ID NO: 438530 - DNA, 33 bp, Homo sapien
tatttgagaaagatgccatttgtataatgcatt

SEQ ID NO: 438531 - DNA, 33 bp, Homo sapien
ggctgagggaatgaatcaagaaacctgtagaca

SEQ ID NO: 438532 - DNA, 33 bp, Homo sapien
ggctgagggaatgaatgaagaaacctgtagaca

SEQ ID NO: 438533 - DNA, 33 bp, Homo sapien
aatctctgtgatcaacaaatgtgcatttatttt

SEQ ID NO: 438534 - DNA, 33 bp, Homo sapien
aatctctgtgatcaacgaatgtgcatttatttt

SEQ ID NO: 438535 - DNA, 33 bp, Homo sapien
gaatgcaaaggtgtcaatctagaacacaaagac

SEQ ID NO: 438536 - DNA, 33 bp, Homo sapien
gaatgcaaaggtgtcagtctagaacacaaagac

SEQ ID NO: 438537 - DNA, 33 bp, Homo sapien
ttccaccctgaatgcacaatgttcacagcttct

SEQ ID NO: 438538 - DNA, 33 bp, Homo sapien
ttccaccctgaatgcagaatgttcacagcttct

SEQ ID NO: 438539 - DNA, 33 bp, Homo sapien
gcttatgttgtagcttgaaatctcttatgatga

SEQ ID NO: 438540 - DNA, 33 bp, Homo sapien
gcttatgttgtagctttaaatctcttatgatga

SEQ ID NO: 438541 - DNA, 33 bp, Homo sapien
gaaagctttggaccagaatagaaaaaagttcta

SEQ ID NO: 438542 - DNA, 33 bp, Homo sapien
gaaagctttggaccagtatagaaaaaagttcta

SEQ ID NO: 438543 - DNA, 33 bp, Homo sapien
tgttgacaacttcagaggacttacaagtaatag

SEQ ID NO: 438544 - DNA, 33 bp, Homo sapien
tgttgacaacttcagatgacttacaagtaatag

SEQ ID NO: 438545 - DNA, 33 bp, Homo sapien
atgaaaattgagatccagagtttaagtgacttg

SEQ ID NO: 438546 - DNA, 33 bp, Homo sapien
atgaaaattgagatccggagtttaagtgacttg

SEQ ID NO: 438547 - DNA, 33 bp, Homo sapien
ctaacgcaataataaaatgttgcctaaatttat

SEQ ID NO: 438548 - DNA, 33 bp, Homo sapien
ctaacgcaataataaagtgttgcctaaatttat

SEQ ID NO: 438549 - DNA, 33 bp, Homo sapien
gacagatcctttgaaaagagaagaacacagttt

SEQ ID NO: 438550 - DNA, 33 bp, Homo sapien
gacagatcctttgaaaggagaagaacacagttt

SEQ ID NO: 438551 - DNA, 33 bp, Homo sapien
cccagaggcctcatgacggaagaggaagagctg

SEQ ID NO: 438552 - DNA, 33 bp, Homo sapien
cccagaggcctcatgagggaagaggaagagctg

SEQ ID NO: 438553 - DNA, 33 bp, Homo sapien
tgcctgctagaaattaggtaaagtgttgcatcc

SEQ ID NO: 438554 - DNA, 33 bp, Homo sapien
tgcctgctagaaattatgtaaagtgttgcatcc

SEQ ID NO: 438555 - DNA, 33 bp, Homo sapien
gtttcatgcctcttcaatctgatttccttatac

SEQ ID NO: 438556 - DNA, 33 bp, Homo sapien
gtttcatgcctcttcattctgatttccttatac

SEQ ID NO: 438557 - DNA, 33 bp, Homo sapien
tgaccactcttttccaccttcactgttttgccc

SEQ ID NO: 438558 - DNA, 33 bp, Homo sapien
tgaccactcttttccatcttcactgttttgccc

SEQ ID NO: 438559 - DNA, 33 bp, Homo sapien
ttggtcattttgagtccccaatacccagaacag

SEQ ID NO: 438560 - DNA, 33 bp, Homo sapien
ttggtcattttgagtcgccaatacccagaacag

SEQ ID NO: 438561 - DNA, 33 bp, Homo sapien
gcaatgccccactcccagaacaaattactatat

SEQ ID NO: 438562 - DNA, 33 bp, Homo sapien
gcaatgccccactcccggaacaaattactatat

SEQ ID NO: 438563 - DNA, 33 bp, Homo sapien
gctgtcctaccaggagacctgcttctacacaaa

SEQ ID NO: 438564 - DNA, 33 bp, Homo sapien
gctgtcctaccaggaggcctgcttctacacaaa

SEQ ID NO: 438565 - DNA, 33 bp, Homo sapien
gcatccaatctgttcaaaatccaaactacctca

SEQ ID NO: 438566 - DNA, 33 bp, Homo sapien
gcatccaatctgttcagaatccaaactacctca

SEQ ID NO: 438567 - DNA, 33 bp, Homo sapien
aataacctaaaatcaaagccaatctcctggata

SEQ ID NO: 438568 - DNA, 33 bp, Homo sapien
aataacctaaaatcaatgccaatctcctggata

SEQ ID NO: 438569 - DNA, 33 bp, Homo sapien
caagggacagattgacgggcgctgtgtaatagc

SEQ ID NO: 438570 - DNA, 33 bp, Homo sapien
caagggacagattgactggcgctgtgtaatagc

SEQ ID NO: 438571 - DNA, 33 bp, Homo sapien
agaatatagctgtttacgtcaatatctgtttag

SEQ ID NO: 438572 - DNA, 33 bp, Homo sapien
agaatatagctgtttatgtcaatatctgtttag

SEQ ID NO: 438573 - DNA, 33 bp, Homo sapien
cagtgacaaaggcccaggactattctagcagct

SEQ ID NO: 438574 - DNA, 33 bp, Homo sapien
cagtgacaaaggcccatgactattctagcagct

SEQ ID NO: 438575 - DNA, 33 bp, Homo sapien
atatatcgtgcaaaccaaaatatatatacacca

SEQ ID NO: 438576 - DNA, 33 bp, Homo sapien
atatatcgtgcaaaccgaaatatatatacacca

SEQ ID NO: 438577 - DNA, 33 bp, Homo sapien
ctgatatttcctctaacgcttctgaactataaa

SEQ ID NO: 438578 - DNA, 33 bp, Homo sapien
ctgatatttcctctaaggcttctgaactataaa

SEQ ID NO: 438579 - DNA, 33 bp, Homo sapien
gtgtgccaaaattaccagattcctcaggtgtca

SEQ ID NO: 438580 - DNA, 33 bp, Homo sapien
gtgtgccaaaattaccggattcctcaggtgtca

SEQ ID NO: 438581 - DNA, 33 bp, Homo sapien
tttctgaatgcagtccaacactttatttctgtc

SEQ ID NO: 438582 - DNA, 33 bp, Homo sapien
tttctgaatgcagtccgacactttatttctgtc

SEQ ID NO: 438583 - DNA, 33 bp, Homo sapien
tgttagtaatgttgtccgaattcatatccttag

SEQ ID NO: 438584 - DNA, 33 bp, Homo sapien
tgttagtaatgttgtctgaattcatatccttag

SEQ ID NO: 438585 - DNA, 33 bp, Homo sapien
agtcccagaagctacaatggatgagtcacttat

SEQ ID NO: 438586 - DNA, 33 bp, Homo sapien
agtcccagaagctacagtggatgagtcacttat

SEQ ID NO: 438587 - DNA, 33 bp, Homo sapien
tcctagataccaaatgcatggatttttaactag

SEQ ID NO: 438588 - DNA, 33 bp, Homo sapien
tcctagataccaaatgtatggatttttaactag

SEQ ID NO: 438589 - DNA, 33 bp, Homo sapien
gtgagtaagtcttacacgagctaatggttttat

SEQ ID NO: 438590 - DNA, 33 bp, Homo sapien
gtgagtaagtcttacatgagctaatggttttat

SEQ ID NO: 438591 - DNA, 33 bp, Homo sapien; identical to SEQ ID NO: 438589

SEQ ID NO: 438592 - DNA, 33 bp, Homo sapien; identical to SEQ ID NO: 438590

SEQ ID NO: 438593 - DNA, 33 bp, Homo sapien
ttcattcaataatttacctttggcttcacgatt

SEQ ID NO: 438594 - DNA, 33 bp, Homo sapien
ttcattcaataatttatctttggcttcacgatt

SEQ ID NO: 438595 - DNA, 33 bp, Homo sapien
agatactatcaaataactggatattgccttttc

SEQ ID NO: 438596 - DNA, 33 bp, Homo sapien
agatactatcaaataattggatattgccttttc

SEQ ID NO: 438597 - DNA, 33 bp, Homo sapien
tttttcctttcatgggaacaaattagcctcaag

SEQ ID NO: 438598 - DNA, 33 bp, Homo sapien
tttttcctttcatggggacaaattagcctcaag

SEQ ID NO: 438599 - DNA, 33 bp, Homo sapien
ggataggggcccacaaccttccttctagttctg

SEQ ID NO: 438600 - DNA, 33 bp, Homo sapien
ggataggggcccacaagcttccttctagttctg

SEQ ID NO: 438601 - DNA, 33 bp, Homo sapien
aaaaacccaatgtttcactgatatacaccgtgc

SEQ ID NO: 438602 - DNA, 33 bp, Homo sapien
aaaaacccaatgtttcgctgatatacaccgtgc

SEQ ID NO: 438603 - DNA, 33 bp, Homo sapien
gaaaacacaaattaaactgagagtctatttaac

SEQ ID NO: 438604 - DNA, 33 bp, Homo sapien
gaaaacacaaattaaagtgagagtctatttaac

SEQ ID NO: 438605 - DNA, 33 bp, Homo sapien
aggtaaaataaccagtaaatcaaaacctgactg

SEQ ID NO: 438606 - DNA, 33 bp, Homo sapien
aggtaaaataaccagtgaatcaaaacctgactg

SEQ ID NO: 438607 - DNA, 33 bp, Homo sapien
tagtagagacggtaaacgtacagcagcctaaac

SEQ ID NO: 438608 - DNA, 33 bp, Homo sapien
tagtagagacggtaaatgtacagcagcctaaac

SEQ ID NO: 438609 - DNA, 33 bp, Homo sapien
gatgtaccctattttacgagtaagtgcattcct

SEQ ID NO: 438610 - DNA, 33 bp, Homo sapien
gatgtaccctattttatgagtaagtgcattcct

SEQ ID NO: 438611 - DNA, 33 bp, Homo sapien
tattttggtgatcagtcaaaactcagctctgac

SEQ ID NO: 438612 - DNA, 33 bp, Homo sapien
tattttggtgatcagtgaaaactcagctctgac

SEQ ID NO: 438613 - DNA, 33 bp, Homo sapien
gtgaaaagcaatgagcaccaacttgattgaaag

SEQ ID NO: 438614 - DNA, 33 bp, Homo sapien
gtgaaaagcaatgagcgccaacttgattgaaag

SEQ ID NO: 438615 - DNA, 33 bp, Homo sapien
tcattacagcagccagaaagctattgagatggg

SEQ ID NO: 438616 - DNA, 33 bp, Homo sapien
tcattacagcagccaggaagctattgagatggg

SEQ ID NO: 438617 - DNA, 33 bp, Homo sapien
cagtttgcagacattcccgggacacccagtgga

SEQ ID NO: 438618 - DNA, 33 bp, Homo sapien
cagtttgcagacattctcgggacacccagtgga

SEQ ID NO: 438619 - DNA, 33 bp, Homo sapien
agattcttctaatccaactgaaggtgctacaga

SEQ ID NO: 438620 - DNA, 33 bp, Homo sapien
agattcttctaatccagctgaaggtgctacaga

SEQ ID NO: 438621 - DNA, 33 bp, Homo sapien
caacacaaggaatataagacagggattttcttt

SEQ ID NO: 438622 - DNA, 33 bp, Homo sapien
caacacaaggaatatatgacagggattttcttt

SEQ ID NO: 438623 - DNA, 33 bp, Homo sapien
actctttctggtggtacataaaaaggcacttag

SEQ ID NO: 438624 - DNA, 33 bp, Homo sapien
actctttctggtggtatataaaaaggcacttag

SEQ ID NO: 438625 - DNA, 33 bp, Homo sapien
ttagagaacagggaaacattgcaaccccagtgt

SEQ ID NO: 438626 - DNA, 33 bp, Homo sapien
ttagagaacagggaaagattgcaaccccagtgt

SEQ ID NO: 438627 - DNA, 33 bp, Homo sapien
aaagctagaaaacaaactgcctcaccaatgacg

SEQ ID NO: 438628 - DNA, 33 bp, Homo sapien
aaagctagaaaacaaagtgcctcaccaatgacg

SEQ ID NO: 438629 - DNA, 33 bp, Homo sapien
tagattgactgtctataaaatacttcagaggga

SEQ ID NO: 438630 - DNA, 33 bp, Homo sapien
tagattgactgtctatgaaatacttcagaggga

SEQ ID NO: 438631 - DNA, 33 bp, Homo sapien
cctttgtcacttctccacattgtatacttattc

SEQ ID NO: 438632 - DNA, 33 bp, Homo sapien
cctttgtcacttctccgcattgtatacttattc

SEQ ID NO: 438633 - DNA, 33 bp, Homo sapien
ataacctttgattccaggctaaacattgacttt

SEQ ID NO: 438634 - DNA, 33 bp, Homo sapien
ataacctttgattccatgctaaacattgacttt

SEQ ID NO: 438635 - DNA, 33 bp, Homo sapien
ctgcattggtgagggagatcttttctcagtcta

SEQ ID NO: 438636 - DNA, 33 bp, Homo sapien
ctgcattggtgagggatatcttttctcagtcta

SEQ ID NO: 438637 - DNA, 33 bp, Homo sapien
gcgctaaatatctctcactaattgaagaattcc

SEQ ID NO: 438638 - DNA, 33 bp, Homo sapien
gcgctaaatatctctctctaattgaagaattcc

SEQ ID NO: 438639 - DNA, 33 bp, Homo sapien
cacatactctaatgcaagaaagtaaatgttagg

SEQ ID NO: 438640 - DNA, 33 bp, Homo sapien
cacatactctaatgcaggaaagtaaatgttagg

SEQ ID NO: 438641 - DNA, 33 bp, Homo sapien
tcagaaactgttcaaagctcctatttatagcat

SEQ ID NO: 438642 - DNA, 33 bp, Homo sapien
tcagaaactgttcaaatctcctatttatagcat

SEQ ID NO: 438643 - DNA, 33 bp, Homo sapien
tcaccttgcagtcaaaacttcttgttttattgt

SEQ ID NO: 438644 - DNA, 33 bp, Homo sapien
tcaccttgcagtcaaatcttcttgttttattgt

SEQ ID NO: 438645 - DNA, 33 bp, Homo sapien
atctgtagtttgtctcaaagcacaccttgagac

SEQ ID NO: 438646 - DNA, 33 bp, Homo sapien
atctgtagtttgtctcgaagcacaccttgagac

SEQ ID NO: 438647 - DNA, 33 bp, Homo sapien
gaagcctttgtttacacagaacttgactctctt

SEQ ID NO: 438648 - DNA, 33 bp, Homo sapien
gaagcctttgtttacatagaacttgactctctt

SEQ ID NO: 438649 - DNA, 33 bp, Homo sapien
acccttgactcacaaaagatgggacaaattatc

SEQ ID NO: 438650 - DNA, 33 bp, Homo sapien
acccttgactcacaaaggatgggacaaattatc

SEQ ID NO: 438651 - DNA, 33 bp, Homo sapien
gagccaggcatttccaatcagattagaattaga

SEQ ID NO: 438652 - DNA, 33 bp, Homo sapien
gagccaggcatttccattcagattagaattaga

SEQ ID NO: 438653 - DNA, 33 bp, Homo sapien
cccttaagaacctgaactctctgaggaggatag

SEQ ID NO: 438654 - DNA, 33 bp, Homo sapien
cccttaagaacctgaattctctgaggaggatag

SEQ ID NO: 438655 - DNA, 33 bp, Homo sapien
ttttatatttcaccaaactgtcctttaaatata

SEQ ID NO: 438656 - DNA, 33 bp, Homo sapien
ttttatatttcaccaagctgtcctttaaatata

SEQ ID NO: 438657 - DNA, 33 bp, Homo sapien
agacgagagaggaatcaaaggaagaaagcaatt

SEQ ID NO: 438658 - DNA, 33 bp, Homo sapien
agacgagagaggaatcgaaggaagaaagcaatt

SEQ ID NO: 438659 - DNA, 33 bp, Homo sapien
tcaatcccaactgtcacgtgtctgtaacatggt

SEQ ID NO: 438660 - DNA, 33 bp, Homo sapien
tcaatcccaactgtcatgtgtctgtaacatggt

SEQ ID NO: 438661 - DNA, 33 bp, Homo sapien
ttttatgcctagaaaaattctcatatttgaaga

SEQ ID NO: 438662 - DNA, 33 bp, Homo sapien
ttttatgcctagaaaagttctcatatttgaaga

SEQ ID NO: 438663 - DNA, 33 bp, Homo sapien
attacaaaacaagataaaagtcaaaaattattc

SEQ ID NO: 438664 - DNA, 33 bp, Homo sapien
attacaaaacaagatagaagtcaaaaattattc

SEQ ID NO: 438665 - DNA, 33 bp, Homo sapien
tgctttagctcactacaattttgcagtttcttg

SEQ ID NO: 438666 - DNA, 33 bp, Homo sapien
tgctttagctcactacgattttgcagtttcttg

SEQ ID NO: 438667 - DNA, 33 bp, Homo sapien
tattgagttttatgaagagcctgttcaaattct

SEQ ID NO: 438668 - DNA, 33 bp, Homo sapien
tattgagttttatgaatagcctgttcaaattct

SEQ ID NO: 438669 - DNA, 33 bp, Homo sapien
attatgatctgctgaaactctcctaaaaggaag

SEQ ID NO: 438670 - DNA, 33 bp, Homo sapien
attatgatctgctgaatctctcctaaaaggaag

SEQ ID NO: 438671 - DNA, 33 bp, Homo sapien
taataaatccagatgaactttaagttgcttata

SEQ ID NO: 438672 - DNA, 33 bp, Homo sapien
taataaatccagatgacctttaagttgcttata

SEQ ID NO: 438673 - DNA, 33 bp, Homo sapien
tgtttattgtgcaacacggtttcaagaaatatt

SEQ ID NO: 438674 - DNA, 33 bp, Homo sapien
tgtttattgtgcaacatggtttcaagaaatatt

SEQ ID NO: 438675 - DNA, 33 bp, Homo sapien
ggatcaaaagggaatagattggtacttgataga

SEQ ID NO: 438676 - DNA, 33 bp, Homo sapien
ggatcaaaagggaatatattggtacttgataga

SEQ ID NO: 438677 - DNA, 33 bp, Homo sapien
atcatagctaatgaggcagagatccacatgaag

SEQ ID NO: 438678 - DNA, 33 bp, Homo sapien
atcatagctaatgaggtagagatccacatgaag

SEQ ID NO: 438679 - DNA, 33 bp, Homo sapien
aaggtgaagttccaaacaggcaggattgctaat

SEQ ID NO: 438680 - DNA, 33 bp, Homo sapien
aaggtgaagttccaaagaggcaggattgctaat

SEQ ID NO: 438681 - DNA, 33 bp, Homo sapien
gattgaggttgcatcacgctatatattaacaca

SEQ ID NO: 438682 - DNA, 33 bp, Homo sapien
gattgaggttgcatcaggctatatattaacaca

SEQ ID NO: 438683 - DNA, 33 bp, Homo sapien
agattcactgtgttaacgtgcttataatgttgg

SEQ ID NO: 438684 - DNA, 33 bp, Homo sapien
agattcactgtgttaatgtgcttataatgttgg

SEQ ID NO: 438685 - DNA, 33 bp, Homo sapien
gtactcagtaagacaactgctatcacaaaaaaa

SEQ ID NO: 438686 - DNA, 33 bp, Homo sapien
gtactcagtaagacaattgctatcacaaaaaaa

SEQ ID NO: 438687 - DNA, 33 bp, Homo sapien
taatttctttggagaaagcttcagcaatatctt

SEQ ID NO: 438688 - DNA, 33 bp, Homo sapien
taatttctttggagaaggcttcagcaatatctt

SEQ ID NO: 438689 - DNA, 33 bp, Homo sapien
ggctcaactattctaacgcaataacaggatagt

SEQ ID NO: 438690 - DNA, 33 bp, Homo sapien
ggctcaactattctaatgcaataacaggatagt

SEQ ID NO: 438691 - DNA, 33 bp, Homo sapien
tgcatgcctaatatccacctactgtctcctgcc

SEQ ID NO: 438692 - DNA, 33 bp, Homo sapien
tgcatgcctaatatccgcctactgtctcctgcc

SEQ ID NO: 438693 - DNA, 33 bp, Homo sapien
gttacaattaatagaaatgaagtccaattttgt

SEQ ID NO: 438694 - DNA, 33 bp, Homo sapien
gttacaattaatagaagtgaagtccaattttgt

SEQ ID NO: 438695 - DNA, 33 bp, Homo sapien
attcagcttactctacacagagctgactctaga

SEQ ID NO: 438696 - DNA, 33 bp, Homo sapien
attcagcttactctacgcagagctgactctaga

SEQ ID NO: 438697 - DNA, 33 bp, Homo sapien
atctgtagtggaagaaagaatgtggagaaattc

SEQ ID NO: 438698 - DNA, 33 bp, Homo sapien
atctgtagtggaagaaggaatgtggagaaattc

SEQ ID NO: 438699 - DNA, 33 bp, Homo sapien
ataaatccctcaagaaaccaaatgcttatttag

SEQ ID NO: 438700 - DNA, 33 bp, Homo sapien
ataaatccctcaagaagccaaatgcttatttag

SEQ ID NO: 438701 - DNA, 33 bp, Homo sapien
atgggagacagattgcaaaggatcttaattatc

SEQ ID NO: 438702 - DNA, 33 bp, Homo sapien
atgggagacagattgcgaaggatcttaattatc

SEQ ID NO: 438703 - DNA, 33 bp, Homo sapien
atgaatctgaatagataatacttgcctgatgac

SEQ ID NO: 438704 - DNA, 33 bp, Homo sapien
atgaatctgaatagatgatacttgcctgatgac

SEQ ID NO: 438705 - DNA, 33 bp, Homo sapien
ttaaccctttgctccccgattcaaacatgtata

SEQ ID NO: 438706 - DNA, 33 bp, Homo sapien
ttaaccctttgctccctgattcaaacatgtata

SEQ ID NO: 438707 - DNA, 33 bp, Homo sapien
acatgcatgttattcaaaagttcagaggtaaat

SEQ ID NO: 438708 - DNA, 33 bp, Homo sapien
acatgcatgttattcagaagttcagaggtaaat

SEQ ID NO: 438709 - DNA, 33 bp, Homo sapien
tttaaaacatttctgaacttttctcaccgtact

SEQ ID NO: 438710 - DNA, 33 bp, Homo sapien
tttaaaacatttctgagcttttctcaccgtact

SEQ ID NO: 438711 - DNA, 33 bp, Homo sapien
tacaaaattacttaataagcacctagtgtgtgc

SEQ ID NO: 438712 - DNA, 33 bp, Homo sapien
tacaaaattacttaatgagcacctagtgtgtgc

SEQ ID NO: 438713 - DNA, 33 bp, Homo sapien
acaaaattttagtgaaatagaagagcctggaaa

SEQ ID NO: 438714 - DNA, 33 bp, Homo sapien
acaaaattttagtgaactagaagagcctggaaa

SEQ ID NO: 438715 - DNA, 33 bp, Homo sapien
tgtggatttaagagaacatcaactgaaagaaaa

SEQ ID NO: 438716 - DNA, 33 bp, Homo sapien
tgtggatttaagagaatatcaactgaaagaaaa

SEQ ID NO: 438717 - DNA, 33 bp, Homo sapien
aaacagagagccaactcaagagtgaactcccat

SEQ ID NO: 438718 - DNA, 33 bp, Homo sapien
aaacagagagccaactgaagagtgaactcccat

SEQ ID NO: 438719 - DNA, 33 bp, Homo sapien
agataaaaatgtttaaccagttaagtgccttaa

SEQ ID NO: 438720 - DNA, 33 bp, Homo sapien
agataaaaatgtttaatcagttaagtgccttaa

SEQ ID NO: 438721 - DNA, 33 bp, Homo sapien
ttgaatattggctgtgaaacactgtgaacacaa

SEQ ID NO: 438722 - DNA, 33 bp, Homo sapien
ttgaatattggctgtgcaacactgtgaacacaa

SEQ ID NO: 438723 - DNA, 33 bp, Homo sapien
ttctttcttaatagtacgctatgttggaagata

SEQ ID NO: 438724 - DNA, 33 bp, Homo sapien
ttctttcttaatagtatgctatgttggaagata

SEQ ID NO: 438725 - DNA, 33 bp, Homo sapien
gaaaattcctatttcacatctgttgtcacagca

SEQ ID NO: 438726 - DNA, 33 bp, Homo sapien
gaaaattcctatttcatatctgttgtcacagca

SEQ ID NO: 438727 - DNA, 33 bp, Homo sapien
cttacactaaataacacaacagtaatgtcacaa

SEQ ID NO: 438728 - DNA, 33 bp, Homo sapien
cttacactaaataacataacagtaatgtcacaa

SEQ ID NO: 438729 - DNA, 33 bp, Homo sapien
gtttagactaggacaccaggcacctaagattga

SEQ ID NO: 438730 - DNA, 33 bp, Homo sapien
gtttagactaggacacgaggcacctaagattga

SEQ ID NO: 438731 - DNA, 33 bp, Homo sapien
acaattgttgctaaccaaggcctggttgacaag

SEQ ID NO: 438732 - DNA, 33 bp, Homo sapien
acaattgttgctaacctaggcctggttgacaag

SEQ ID NO: 438733 - DNA, 33 bp, Homo sapien
atcacacattgtcacacattcatcatattcaca

SEQ ID NO: 438734 - DNA, 33 bp, Homo sapien
atcacacattgtcacagattcatcatattcaca

SEQ ID NO: 438735 - DNA, 33 bp, Homo sapien
cttctctgtacatatcacagttttcactattcc

SEQ ID NO: 438736 - DNA, 33 bp, Homo sapien
cttctctgtacatatcccagttttcactattcc

SEQ ID NO: 438737 - DNA, 33 bp, Homo sapien
cacttggatgtctacacggtatctcaatattac

SEQ ID NO: 438738 - DNA, 33 bp, Homo sapien
cacttggatgtctacatggtatctcaatattac

SEQ ID NO: 438739 - DNA, 33 bp, Homo sapien
ctgtcttcttttcagaacatcaaatatctcatt

SEQ ID NO: 438740 - DNA, 33 bp, Homo sapien
ctgtcttcttttcagagcatcaaatatctcatt

SEQ ID NO: 438741 - DNA, 33 bp, Homo sapien
tccttcagaattatacaaaaggctctgtcttct

SEQ ID NO: 438742 - DNA, 33 bp, Homo sapien
tccttcagaattataccaaaggctctgtcttct

SEQ ID NO: 438743 - DNA, 33 bp, Homo sapien
ttgtctcatatctaacactctgatttagcaatt

SEQ ID NO: 438744 - DNA, 33 bp, Homo sapien
ttgtctcatatctaacgctctgatttagcaatt

SEQ ID NO: 438745 - DNA, 33 bp, Homo sapien
tgtctgctgccaagaaatgacatctagaataca

SEQ ID NO: 438746 - DNA, 33 bp, Homo sapien
tgtctgctgccaagaactgacatctagaataca

SEQ ID NO: 438747 - DNA, 33 bp, Homo sapien
atatttttctggggtagagatgagagtgctggg

SEQ ID NO: 438748 - DNA, 33 bp, Homo sapien
atatttttctggggtatagatgagagtgctggg

SEQ ID NO: 438749 - DNA, 33 bp, Homo sapien
gtccggccctcatttcaaagaagatagctgcca

SEQ ID NO: 438750 - DNA, 33 bp, Homo sapien
gtccggccctcatttcgaagaagatagctgcca

SEQ ID NO: 438751 - DNA, 33 bp, Homo sapien
tgaatggaatgctagaaagccccaataaatctt

SEQ ID NO: 438752 - DNA, 33 bp, Homo sapien
tgaatggaatgctagagagccccaataaatctt

SEQ ID NO: 438753 - DNA, 33 bp, Homo sapien
atatatttgattagcacgtagagttttatccca

SEQ ID NO: 438754 - DNA, 33 bp, Homo sapien
atatatttgattagcatgtagagttttatccca

SEQ ID NO: 438755 - DNA, 33 bp, Homo sapien
gaaaaaatgatatcaaagttggtgaatagaaat

SEQ ID NO: 438756 - DNA, 33 bp, Homo sapien
gaaaaaatgatatcaaggttggtgaatagaaat

SEQ ID NO: 438757 - DNA, 33 bp, Homo sapien
actcaaattcatctaactacaagatgtggtctg

SEQ ID NO: 438758 - DNA, 33 bp, Homo sapien
actcaaattcatctaattacaagatgtggtctg

SEQ ID NO: 438759 - DNA, 33 bp, Homo sapien
ttcagaatagtgcatacagtgtgtatctggcta

SEQ ID NO: 438760 - DNA, 33 bp, Homo sapien
ttcagaatagtgcatatagtgtgtatctggcta

SEQ ID NO: 438761 - DNA, 33 bp, Homo sapien
agataacagacactcgaaaagggttttgtttgt

SEQ ID NO: 438762 - DNA, 33 bp, Homo sapien
agataacagacactcggaaagggttttgtttgt

SEQ ID NO: 438763 - DNA, 33 bp, Homo sapien
tgtgtcctgactaaaaaaagccccaggaaagat

SEQ ID NO: 438764 - DNA, 33 bp, Homo sapien
tgtgtcctgactaaaagaagccccaggaaagat

SEQ ID NO: 438765 - DNA, 33 bp, Homo sapien
tcctcaagtctgtaatcaatcaacctatcacag

SEQ ID NO: 438766 - DNA, 33 bp, Homo sapien
tcctcaagtctgtaattaatcaacctatcacag

SEQ ID NO: 438767 - DNA, 33 bp, Homo sapien
atcacaatgctagctcaagatggtgtttttttc

SEQ ID NO: 438768 - DNA, 33 bp, Homo sapien
atcacaatgctagctctagatggtgtttttttc

SEQ ID NO: 438769 - DNA, 33 bp, Homo sapien
ccaagcagtctcttagaaagctcattttcctgg

SEQ ID NO: 438770 - DNA, 33 bp, Homo sapien
ccaagcagtctcttaggaagctcattttcctgg

SEQ ID NO: 438771 - DNA, 33 bp, Homo sapien
ctgatttcatgatatactataaagctatcacaa

SEQ ID NO: 438772 - DNA, 33 bp, Homo sapien
ctgatttcatgatatagtataaagctatcacaa

SEQ ID NO: 438773 - DNA, 33 bp, Homo sapien
tgagctcagggatatgacaataaacttcaaaca

SEQ ID NO: 438774 - DNA, 33 bp, Homo sapien
tgagctcagggatatggcaataaacttcaaaca

SEQ ID NO: 438775 - DNA, 33 bp, Homo sapien
cttagcataatgtcccaaaggtttatccatgct

SEQ ID NO: 438776 - DNA, 33 bp, Homo sapien
cttagcataatgtcccgaaggtttatccatgct

SEQ ID NO: 438777 - DNA, 33 bp, Homo sapien
cttatgtgtctctggcaatactctttgttctga

SEQ ID NO: 438778 - DNA, 33 bp, Homo sapien
cttatgtgtctctggccatactctttgttctga

SEQ ID NO: 438779 - DNA, 33 bp, Homo sapien
ctaggtatacagaccaagagtggggtaagaata

SEQ ID NO: 438780 - DNA, 33 bp, Homo sapien
ctaggtatacagaccaggagtggggtaagaata

SEQ ID NO: 438781 - DNA, 33 bp, Homo sapien
ccatcacagattttcacaatccacctaaatcct

SEQ ID NO: 438782 - DNA, 33 bp, Homo sapien
ccatcacagattttcataatccacctaaatcct

SEQ ID NO: 438783 - DNA, 33 bp, Homo sapien
gttcttccagttcagacaagtaacactcagagt

SEQ ID NO: 438784 - DNA, 33 bp, Homo sapien
gttcttccagttcagagaagtaacactcagagt

SEQ ID NO: 438785 - DNA, 33 bp, Homo sapien
ggagcagcagtctatactacatagcctaagtgt

SEQ ID NO: 438786 - DNA, 33 bp, Homo sapien
ggagcagcagtctatattacatagcctaagtgt

SEQ ID NO: 438787 - DNA, 33 bp, Homo sapien
cctcaactcagctttccactatgcaacctcagg

SEQ ID NO: 438788 - DNA, 33 bp, Homo sapien
cctcaactcagctttctactatgcaacctcagg

SEQ ID NO: 438789 - DNA, 33 bp, Homo sapien
gaaacataacaccttgacaccaggatgtggctg

SEQ ID NO: 438790 - DNA, 33 bp, Homo sapien
gaaacataacaccttgtcaccaggatgtggctg

SEQ ID NO: 438791 - DNA, 33 bp, Homo sapien
atagtacctagcacaaagttttgttcagatact

SEQ ID NO: 438792 - DNA, 33 bp, Homo sapien
atagtacctagcacaaggttttgttcagatact

SEQ ID NO: 438793 - DNA, 33 bp, Homo sapien
tctgctattctattcagcatactgtttgagtat

SEQ ID NO: 438794 - DNA, 33 bp, Homo sapien
tctgctattctattcatcatactgtttgagtat

SEQ ID NO: 438795 - DNA, 33 bp, Homo sapien
cagccatttgcagtggaatttcctacctgagcc

SEQ ID NO: 438796 - DNA, 33 bp, Homo sapien
cagccatttgcagtgggatttcctacctgagcc

SEQ ID NO: 438797 - DNA, 33 bp, Homo sapien
aacacatagcaacagaaaaaaatgaaaattgga

SEQ ID NO: 438798 - DNA, 33 bp, Homo sapien
aacacatagcaacagagaaaaatgaaaattgga

SEQ ID NO: 438799 - DNA, 33 bp, Homo sapien
tttgttttgcactgcacagttgtttgggagaca

SEQ ID NO: 438800 - DNA, 33 bp, Homo sapien
tttgttttgcactgcatagttgtttgggagaca

SEQ ID NO: 438801 - DNA, 33 bp, Homo sapien
ctggaaagacagagtcactaacaactgaaaaat

SEQ ID NO: 438802 - DNA, 33 bp, Homo sapien
ctggaaagacagagtcgctaacaactgaaaaat

SEQ ID NO: 438803 - DNA, 33 bp, Homo sapien
ttaaaatatgggtgaacgatctcaatagttgta

SEQ ID NO: 438804 - DNA, 33 bp, Homo sapien
ttaaaatatgggtgaatgatctcaatagttgta

SEQ ID NO: 438805 - DNA, 33 bp, Homo sapien
taaggggaatttgttacgcatggtggggaaggg

SEQ ID NO: 438806 - DNA, 33 bp, Homo sapien
taaggggaatttgttatgcatggtggggaaggg

SEQ ID NO: 438807 - DNA, 33 bp, Homo sapien
gattactacagttgtgcaagaaatcactagaag

SEQ ID NO: 438808 - DNA, 33 bp, Homo sapien
gattactacagttgtggaagaaatcactagaag

SEQ ID NO: 438809 - DNA, 33 bp, Homo sapien
attttatgtgagattacgggctgcttgatactg

SEQ ID NO: 438810 - DNA, 33 bp, Homo sapien
attttatgtgagattatgggctgcttgatactg

SEQ ID NO: 438811 - DNA, 33 bp, Homo sapien
tatgttaacaattatgccaagaatataacagca

SEQ ID NO: 438812 - DNA, 33 bp, Homo sapien
tatgttaacaattatggcaagaatataacagca

SEQ ID NO: 438813 - DNA, 33 bp, Homo sapien
ccaatttaataacataactttcctagaaatctg

SEQ ID NO: 438814 - DNA, 33 bp, Homo sapien
ccaatttaataacatagctttcctagaaatctg

SEQ ID NO: 438815 - DNA, 33 bp, Homo sapien
ctcatatgtcaaatctaaaaaggccaaattcaa

SEQ ID NO: 438816 - DNA, 33 bp, Homo sapien
ctcatatgtcaaatcttaaaaggccaaattcaa

SEQ ID NO: 438817 - DNA, 33 bp, Homo sapien
gactttaatacagcccaactagtgtccttacaa

SEQ ID NO: 438818 - DNA, 33 bp, Homo sapien
gactttaatacagcccgactagtgtccttacaa

SEQ ID NO: 438819 - DNA, 33 bp, Homo sapien
atattatacctcattcaatctcccctttcctgg

SEQ ID NO: 438820 - DNA, 33 bp, Homo sapien
atattatacctcattctatctcccctttcctgg

SEQ ID NO: 438821 - DNA, 33 bp, Homo sapien
atcaccttgtgagaaagctgggtgttgcttttc

SEQ ID NO: 438822 - DNA, 33 bp, Homo sapien
atcaccttgtgagaaatctgggtgttgcttttc

SEQ ID NO: 438823 - DNA, 33 bp, Homo sapien
gttattcaagatcaggaagctaggaagtttcat

SEQ ID NO: 438824 - DNA, 33 bp, Homo sapien
gttattcaagatcaggtagctaggaagtttcat

SEQ ID NO: 438825 - DNA, 33 bp, Homo sapien
tttacgggtgaggaaactagccccagcatgagg

SEQ ID NO: 438826 - DNA, 33 bp, Homo sapien
tttacgggtgaggaaagtagccccagcatgagg

SEQ ID NO: 438827 - DNA, 33 bp, Homo sapien
ttgctaagtgctctacactatactattatacaa

SEQ ID NO: 438828 - DNA, 33 bp, Homo sapien
ttgctaagtgctctaccctatactattatacaa

SEQ ID NO: 438829 - DNA, 33 bp, Homo sapien
ttacaagttttgcagacggtatcaaggttcccg

SEQ ID NO: 438830 - DNA, 33 bp, Homo sapien
ttacaagttttgcagatggtatcaaggttcccg

SEQ ID NO: 438831 - DNA, 33 bp, Homo sapien
agcactaccattttagaaacacacgtgccttgc

SEQ ID NO: 438832 - DNA, 33 bp, Homo sapien
agcactaccattttaggaacacacgtgccttgc

SEQ ID NO: 438833 - DNA, 33 bp, Homo sapien
cacaatctccattccccatgctgttgcctcttg

SEQ ID NO: 438834 - DNA, 33 bp, Homo sapien
cacaatctccattccctatgctgttgcctcttg

SEQ ID NO: 438835 - DNA, 33 bp, Homo sapien
aaacattctctttgtagcatagtcatttcatca

SEQ ID NO: 438836 - DNA, 33 bp, Homo sapien
aaacattctctttgtatcatagtcatttcatca

SEQ ID NO: 438837 - DNA, 33 bp, Homo sapien
tgagcttattcagtgaagtggtacatattatgt

SEQ ID NO: 438838 - DNA, 33 bp, Homo sapien
tgagcttattcagtgacgtggtacatattatgt

SEQ ID NO: 438839 - DNA, 33 bp, Homo sapien
gcctttcattagctagcactgttggagacaaca

SEQ ID NO: 438840 - DNA, 33 bp, Homo sapien
gcctttcattagctagtactgttggagacaaca

SEQ ID NO: 438841 - DNA, 33 bp, Homo sapien
accaaggctcctcaccaatatcctggcgattca

SEQ ID NO: 438842 - DNA, 33 bp, Homo sapien
accaaggctcctcaccgatatcctggcgattca

SEQ ID NO: 438843 - DNA, 33 bp, Homo sapien
tcttatcgggtcatacaaattccttcgcctgaa

SEQ ID NO: 438844 - DNA, 33 bp, Homo sapien
tcttatcgggtcatactaattccttcgcctgaa

SEQ ID NO: 438845 - DNA, 33 bp, Homo sapien
ctaagtataaagacaacggtggaatggttcagg

SEQ ID NO: 438846 - DNA, 33 bp, Homo sapien
ctaagtataaagacaatggtggaatggttcagg

SEQ ID NO: 438847 - DNA, 33 bp, Homo sapien
gcttttcatatcatgcagagcaaaactctaaac

SEQ ID NO: 438848 - DNA, 33 bp, Homo sapien
gcttttcatatcatgctgagcaaaactctaaac

SEQ ID NO: 438849 - DNA, 33 bp, Homo sapien
cattgagggctgtcaagtgtataatattttgat

SEQ ID NO: 438850 - DNA, 33 bp, Homo sapien
cattgagggctgtcaattgtataatattttgat

SEQ ID NO: 438851 - DNA, 33 bp, Homo sapien
agcaatccatgtagacaaggtatatcctgcaga

SEQ ID NO: 438852 - DNA, 33 bp, Homo sapien
agcaatccatgtagactaggtatatcctgcaga

SEQ ID NO: 438853 - DNA, 33 bp, Homo sapien
taacaagtgaaaaaaaattgcctgaggatgtgt

SEQ ID NO: 438854 - DNA, 33 bp, Homo sapien
taacaagtgaaaaaaagttgcctgaggatgtgt

SEQ ID NO: 438855 - DNA, 33 bp, Homo sapien
ggaacctattaattaaaccttgtccacatgtat

SEQ ID NO: 438856 - DNA, 33 bp, Homo sapien
ggaacctattaattaacccttgtccacatgtat

SEQ ID NO: 438857 - DNA, 33 bp, Homo sapien
acttaactgaattcaaccaccttttaatgaatt

SEQ ID NO: 438858 - DNA, 33 bp, Homo sapien
acttaactgaattcaatcaccttttaatgaatt

SEQ ID NO: 438859 - DNA, 33 bp, Homo sapien
tctctgccttccctcaatctataagccctctat

SEQ ID NO: 438860 - DNA, 33 bp, Homo sapien
tctctgccttccctcagtctataagccctctat

SEQ ID NO: 438861 - DNA, 33 bp, Homo sapien
atgctatgatgtgaaaattatagaaatgtgatc

SEQ ID NO: 438862 - DNA, 33 bp, Homo sapien
atgctatgatgtgaaatttatagaaatgtgatc

SEQ ID NO: 438863 - DNA, 33 bp, Homo sapien
tctgtattcccattgccctgacttgtttcagac

SEQ ID NO: 438864 - DNA, 33 bp, Homo sapien
tctgtattcccattgcgctgacttgtttcagac

SEQ ID NO: 438865 - DNA, 33 bp, Homo sapien
tagctctggctgtaaagggaatcccaaaagaat

SEQ ID NO: 438866 - DNA, 33 bp, Homo sapien
tagctctggctgtaaatggaatcccaaaagaat

SEQ ID NO: 438867 - DNA, 33 bp, Homo sapien
gagtcacagacttatggagagtctgatttagga

SEQ ID NO: 438868 - DNA, 33 bp, Homo sapien
gagtcacagacttatgtagagtctgatttagga

SEQ ID NO: 438869 - DNA, 33 bp, Homo sapien
tatttcaaaaagatggaaatttcaagagtgtca

SEQ ID NO: 438870 - DNA, 33 bp, Homo sapien
tatttcaaaaagatgggaatttcaagagtgtca

SEQ ID NO: 438871 - DNA, 33 bp, Homo sapien
aatccccgtatgccaaagttgctaagatctgtg

SEQ ID NO: 438872 - DNA, 33 bp, Homo sapien
aatccccgtatgccaaggttgctaagatctgtg

SEQ ID NO: 438873 - DNA, 33 bp, Homo sapien
aaagtagtgatggtagaaatttgcatacgccaa

SEQ ID NO: 438874 - DNA, 33 bp, Homo sapien
aaagtagtgatggtagcaatttgcatacgccaa

SEQ ID NO: 438875 - DNA, 33 bp, Homo sapien
atcactacaagactgggagttcacagaatctct

SEQ ID NO: 438876 - DNA, 33 bp, Homo sapien
atcactacaagactggtagttcacagaatctct

SEQ ID NO: 438877 - DNA, 33 bp, Homo sapien
ctgtctcattgatttcaagggggcagaactgag

SEQ ID NO: 438878 - DNA, 33 bp, Homo sapien
ctgtctcattgatttcgagggggcagaactgag

SEQ ID NO: 438879 - DNA, 33 bp, Homo sapien
agccccagaaaggcaaaagtatgggacttcagt

SEQ ID NO: 438880 - DNA, 33 bp, Homo sapien
agccccagaaaggcaagagtatgggacttcagt

SEQ ID NO: 438881 - DNA, 33 bp, Homo sapien
tgaaaaacttctgcacagcactagatacaatca

SEQ ID NO: 438882 - DNA, 33 bp, Homo sapien
tgaaaaacttctgcaccgcactagatacaatca

SEQ ID NO: 438883 - DNA, 33 bp, Homo sapien
tatccacatgcagaacaaagaaatgagaccctc

SEQ ID NO: 438884 - DNA, 33 bp, Homo sapien
tatccacatgcagaacgaagaaatgagaccctc

SEQ ID NO: 438885 - DNA, 33 bp, Homo sapien
tggaattcctgatttacgctcaactttgatccc

SEQ ID NO: 438886 - DNA, 33 bp, Homo sapien
tggaattcctgatttatgctcaactttgatccc

SEQ ID NO: 438887 - DNA, 33 bp, Homo sapien
tttgtctttacagtgacgatggaagaatgtaca

SEQ ID NO: 438888 - DNA, 33 bp, Homo sapien
tttgtctttacagtgatgatggaagaatgtaca

SEQ ID NO: 438889 - DNA, 33 bp, Homo sapien
attttgcctgctttgccaccataattttaaaga

SEQ ID NO: 438890 - DNA, 33 bp, Homo sapien
attttgcctgctttgctaccataattttaaaga

SEQ ID NO: 438891 - DNA, 33 bp, Homo sapien
gcagcagcagaagaaaaggactttgtcatgtag

SEQ ID NO: 438892 - DNA, 33 bp, Homo sapien
gcagcagcagaagaaagggactttgtcatgtag

SEQ ID NO: 438893 - DNA, 33 bp, Homo sapien
gataagcgacactaacaatggtatgggagcaag

SEQ ID NO: 438894 - DNA, 33 bp, Homo sapien
gataagcgacactaacgatggtatgggagcaag

SEQ ID NO: 438895 - DNA, 33 bp, Homo sapien
gttcaagtgtttataacgcttcctcattttgtt

SEQ ID NO: 438896 - DNA, 33 bp, Homo sapien
gttcaagtgtttataatgcttcctcattttgtt

SEQ ID NO: 438897 - DNA, 33 bp, Homo sapien
aattctggattttatacgaagactctagatttt

SEQ ID NO: 438898 - DNA, 33 bp, Homo sapien
aattctggattttatatgaagactctagatttt

SEQ ID NO: 438899 - DNA, 33 bp, Homo sapien
catatacaactacgccagcaataatcagaaaaa

SEQ ID NO: 438900 - DNA, 33 bp, Homo sapien
catatacaactacgcccgcaataatcagaaaaa

SEQ ID NO: 438901 - DNA, 33 bp, Homo sapien
ggtatttattataaacaaaaaggctagacatcc

SEQ ID NO: 438902 - DNA, 33 bp, Homo sapien
ggtatttattataaaccaaaaggctagacatcc

SEQ ID NO: 438903 - DNA, 33 bp, Homo sapien
ccagcttcaggttgtacctttgcacttactagc

SEQ ID NO: 438904 - DNA, 33 bp, Homo sapien
ccagcttcaggttgtatctttgcacttactagc

SEQ ID NO: 438905 - DNA, 33 bp, Homo sapien
tgtaaaatggagataactgtacctgtttcatag

SEQ ID NO: 438906 - DNA, 33 bp, Homo sapien
tgtaaaatggagataattgtacctgtttcatag

SEQ ID NO: 438907 - DNA, 33 bp, Homo sapien
tctcagaattttggcacctattagtagtatttt

SEQ ID NO: 438908 - DNA, 33 bp, Homo sapien
tctcagaattttggcagctattagtagtatttt

SEQ ID NO: 438909 - DNA, 33 bp, Homo sapien
tctttgcaatctcttacaccgaggtctcaagtt

SEQ ID NO: 438910 - DNA, 33 bp, Homo sapien
tctttgcaatctcttataccgaggtctcaagtt

SEQ ID NO: 438911 - DNA, 33 bp, Homo sapien
gctcagaattacagccaagagcaatctctgaac

SEQ ID NO: 438912 - DNA, 33 bp, Homo sapien
gctcagaattacagccgagagcaatctctgaac

SEQ ID NO: 438913 - DNA, 33 bp, Homo sapien
agggagttctaatataagagtttcatgaagata

SEQ ID NO: 438914 - DNA, 33 bp, Homo sapien
agggagttctaatataggagtttcatgaagata

SEQ ID NO: 438915 - DNA, 33 bp, Homo sapien
cttttgctagataacaacttaccacaaatttag

SEQ ID NO: 438916 - DNA, 33 bp, Homo sapien
cttttgctagataacagcttaccacaaatttag

SEQ ID NO: 438917 - DNA, 33 bp, Homo sapien
ctttaaaaagtgatagaacacaagaagcacaca

SEQ ID NO: 438918 - DNA, 33 bp, Homo sapien
ctttaaaaagtgataggacacaagaagcacaca

SEQ ID NO: 438919 - DNA, 33 bp, Homo sapien
cctctctcattttccacgggtcctatagaaagt

SEQ ID NO: 438920 - DNA, 33 bp, Homo sapien
cctctctcattttccaggggtcctatagaaagt

SEQ ID NO: 438921 - DNA, 33 bp, Homo sapien
tgttccctcagtgaacacccaaaattcaaaata

SEQ ID NO: 438922 - DNA, 33 bp, Homo sapien
tgttccctcagtgaacccccaaaattcaaaata

SEQ ID NO: 438923 - DNA, 33 bp, Homo sapien
gcattttctgaacactcagtgattaggtcagtg

SEQ ID NO: 438924 - DNA, 33 bp, Homo sapien
gcattttctgaacacttagtgattaggtcagtg

SEQ ID NO: 438925 - DNA, 33 bp, Homo sapien
aaaatttatataagctaacgtgtctcattgttt

SEQ ID NO: 438926 - DNA, 33 bp, Homo sapien
aaaatttatataagctgacgtgtctcattgttt

SEQ ID NO: 438927 - DNA, 33 bp, Homo sapien
tagcaagtgctggaaacaaagaagagaagcagc

SEQ ID NO: 438928 - DNA, 33 bp, Homo sapien
tagcaagtgctggaaataaagaagagaagcagc

SEQ ID NO: 438929 - DNA, 33 bp, Homo sapien
cccatcacattaatcactcaggtctagggattt

SEQ ID NO: 438930 - DNA, 33 bp, Homo sapien
cccatcacattaatcattcaggtctagggattt

SEQ ID NO: 438931 - DNA, 33 bp, Homo sapien
tggaacagaaaatgaacgttagcagaaaaactg

SEQ ID NO: 438932 - DNA, 33 bp, Homo sapien
tggaacagaaaatgaatgttagcagaaaaactg

SEQ ID NO: 438933 - DNA, 33 bp, Homo sapien
catggcagcaggattacctggtttaatgctaaa

SEQ ID NO: 438934 - DNA, 33 bp, Homo sapien
catggcagcaggattatctggtttaatgctaaa

SEQ ID NO: 438935 - DNA, 33 bp, Homo sapien
gataataagcagcctgaatttctttttatttct

SEQ ID NO: 438936 - DNA, 33 bp, Homo sapien
gataataagcagcctgcatttctttttatttct

SEQ ID NO: 438937 - DNA, 33 bp, Homo sapien
gactacactattctcacattcaccacttattaa

SEQ ID NO: 438938 - DNA, 33 bp, Homo sapien
gactacactattctcagattcaccacttattaa

SEQ ID NO: 438939 - DNA, 33 bp, Homo sapien
tgactagtttttgctacgccaaggtgagtctag

SEQ ID NO: 438940 - DNA, 33 bp, Homo sapien
tgactagtttttgctatgccaaggtgagtctag

SEQ ID NO: 438941 - DNA, 33 bp, Homo sapien
tgactgattttaggtcacaggacaaatccctaa

SEQ ID NO: 438942 - DNA, 33 bp, Homo sapien
tgactgattttaggtcgcaggacaaatccctaa

SEQ ID NO: 438943 - DNA, 33 bp, Homo sapien
atacagaatcatgcacaaagctggtggatcact

SEQ ID NO: 438944 - DNA, 33 bp, Homo sapien
atacagaatcatgcacgaagctggtggatcact

SEQ ID NO: 438945 - DNA, 33 bp, Homo sapien
ttttttctgtaccacaacttgtataaaggcaat

SEQ ID NO: 438946 - DNA, 33 bp, Homo sapien
ttttttctgtaccacatcttgtataaaggcaat

SEQ ID NO: 438947 - DNA, 33 bp, Homo sapien
cattctacctactaaccaaaagtacatacattt

SEQ ID NO: 438948 - DNA, 33 bp, Homo sapien
cattctacctactaactaaaagtacatacattt

SEQ ID NO: 438949 - DNA, 33 bp, Homo sapien
aactcttacaacttaaaaatgacctacagaggt

SEQ ID NO: 438950 - DNA, 33 bp, Homo sapien
aactcttacaacttaagaatgacctacagaggt

SEQ ID NO: 438951 - DNA, 33 bp, Homo sapien
aagaaatgggacgaaaacagataatactcatct

SEQ ID NO: 438952 - DNA, 33 bp, Homo sapien
aagaaatgggacgaaaccagataatactcatct

SEQ ID NO: 438953 - DNA, 33 bp, Homo sapien
tttctcagacttagaaccaaccaaaaaccattt

SEQ ID NO: 438954 - DNA, 33 bp, Homo sapien
tttctcagacttagaatcaaccaaaaaccattt

SEQ ID NO: 438955 - DNA, 33 bp, Homo sapien
tttatgtgtggtatacagtaagggtcttcattc

SEQ ID NO: 438956 - DNA, 33 bp, Homo sapien
tttatgtgtggtatacggtaagggtcttcattc

SEQ ID NO: 438957 - DNA, 33 bp, Homo sapien
aattgactttgaggtgaacttagcaaagacttc

SEQ ID NO: 438958 - DNA, 33 bp, Homo sapien
aattgactttgaggtggacttagcaaagacttc

SEQ ID NO: 438959 - DNA, 33 bp, Homo sapien
tgttaactgcttttccccccaaatatgtatcac

SEQ ID NO: 438960 - DNA, 33 bp, Homo sapien
tgttaactgcttttcctcccaaatatgtatcac

SEQ ID NO: 438961 - DNA, 33 bp, Homo sapien
gaatatgtactttcaaatatgggtaaacattct

SEQ ID NO: 438962 - DNA, 33 bp, Homo sapien
gaatatgtactttcaactatgggtaaacattct

SEQ ID NO: 438963 - DNA, 33 bp, Homo sapien
gctgtgtaattttccaactctagtccatgccag

SEQ ID NO: 438964 - DNA, 33 bp, Homo sapien
gctgtgtaattttccatctctagtccatgccag

SEQ ID NO: 438965 - DNA, 33 bp, Homo sapien
ttatttccttactttaactttactgatgtggtt

SEQ ID NO: 438966 - DNA, 33 bp, Homo sapien
ttatttccttactttatctttactgatgtggtt

SEQ ID NO: 438967 - DNA, 33 bp, Homo sapien
tgtgggaaaaaattcaccatatagaatggcagc

SEQ ID NO: 438968 - DNA, 33 bp, Homo sapien
tgtgggaaaaaattcatcatatagaatggcagc

SEQ ID NO: 438969 - DNA, 33 bp, Homo sapien
actctcaattctctcaacttttttggcaacttc

SEQ ID NO: 438970 - DNA, 33 bp, Homo sapien
actctcaattctctcaccttttttggcaacttc

SEQ ID NO: 438971 - DNA, 33 bp, Homo sapien
ttttaaacaaaaatgacgactggtgacagaaaa

SEQ ID NO: 438972 - DNA, 33 bp, Homo sapien
ttttaaacaaaaatgatgactggtgacagaaaa

SEQ ID NO: 438973 - DNA, 33 bp, Homo sapien; identical to SEQ ID NO: 438971

SEQ ID NO: 438974 - DNA, 33 bp, Homo sapien; identical to SEQ ID NO: 438972

SEQ ID NO: 438975 - DNA, 33 bp, Homo sapien
gatggttacatagatactaaggatccttgccct

SEQ ID NO: 438976 - DNA, 33 bp, Homo sapien
gatggttacatagatattaaggatccttgccct

SEQ ID NO: 438977 - DNA, 33 bp, Homo sapien
ttggtataataaggacactccaaattcataaaa

SEQ ID NO: 438978 - DNA, 33 bp, Homo sapien
ttggtataataaggacgctccaaattcataaaa

SEQ ID NO: 438979 - DNA, 33 bp, Homo sapien
ctaatgtctagcaaagaattactcttagatata

SEQ ID NO: 438980 - DNA, 33 bp, Homo sapien
ctaatgtctagcaaagcattactcttagatata

SEQ ID NO: 438981 - DNA, 33 bp, Homo sapien
ttgtgtgtaaatgtaaactttcctttgagaatg

SEQ ID NO: 438982 - DNA, 33 bp, Homo sapien
ttgtgtgtaaatgtaagctttcctttgagaatg

SEQ ID NO: 438983 - DNA, 33 bp, Homo sapien
tcatactttagatttacgtaagtgattaagaaa

SEQ ID NO: 438984 - DNA, 33 bp, Homo sapien
tcatactttagatttaggtaagtgattaagaaa

SEQ ID NO: 438985 - DNA, 33 bp, Homo sapien
tgtcacttcttcctcaaaacaaccttataatgt

SEQ ID NO: 438986 - DNA, 33 bp, Homo sapien
tgtcacttcttcctcacaacaaccttataatgt

SEQ ID NO: 438987 - DNA, 33 bp, Homo sapien
tctggagagttaaagacggtgatcaataatttc

SEQ ID NO: 438988 - DNA, 33 bp, Homo sapien
tctggagagttaaagatggtgatcaataatttc

SEQ ID NO: 438989 - DNA, 33 bp, Homo sapien
gttacaaatgatgttcactaacacaacaggtag

SEQ ID NO: 438990 - DNA, 33 bp, Homo sapien
gttacaaatgatgttccctaacacaacaggtag

SEQ ID NO: 438991 - DNA, 33 bp, Homo sapien
gagtgagaaagagagagaatgtcagagaggagt

SEQ ID NO: 438992 - DNA, 33 bp, Homo sapien
gagtgagaaagagagataatgtcagagaggagt

SEQ ID NO: 438993 - DNA, 33 bp, Homo sapien
gcctttgtcccctataaggctgttgctgtcctt

SEQ ID NO: 438994 - DNA, 33 bp, Homo sapien
gcctttgtcccctatacggctgttgctgtcctt

SEQ ID NO: 438995 - DNA, 33 bp, Homo sapien
aactattaatatggtcaaactcaccagaagagg

SEQ ID NO: 438996 - DNA, 33 bp, Homo sapien
aactattaatatggtcgaactcaccagaagagg

SEQ ID NO: 438997 - DNA, 33 bp, Homo sapien
ctgcataggcacatagcatagatgaagcagtcc

SEQ ID NO: 438998 - DNA, 33 bp, Homo sapien
ctgcataggcacatagtatagatgaagcagtcc

SEQ ID NO: 438999 - DNA, 33 bp, Homo sapien
tgaacactggatactacggtgaagactgttagt

SEQ ID NO: 439000 - DNA, 33 bp, Homo sapien
tgaacactggatactatggtgaagactgttagt

SEQ ID NO: 439001 - DNA, 33 bp, Homo sapien
aaagaaagactaaaggaaagagcagggaaagaa

SEQ ID NO: 439002 - DNA, 33 bp, Homo sapien
aaagaaagactaaagggaagagcagggaaagaa

SEQ ID NO: 439003 - DNA, 33 bp, Homo sapien
tgctattggcttcgcacatgattgcaaatgtca

SEQ ID NO: 439004 - DNA, 33 bp, Homo sapien
tgctattggcttcgcatatgattgcaaatgtca

SEQ ID NO: 439005 - DNA, 33 bp, Homo sapien
acagagaaaactatgaaacttagatgacaaata

SEQ ID NO: 439006 - DNA, 33 bp, Homo sapien
acagagaaaactatgagacttagatgacaaata

SEQ ID NO: 439007 - DNA, 33 bp, Homo sapien
cacctctggttgatgtaaagttatgttgcttca

SEQ ID NO: 439008 - DNA, 33 bp, Homo sapien
cacctctggttgatgtgaagttatgttgcttca

SEQ ID NO: 439009 - DNA, 33 bp, Homo sapien
atcccactcactgggacgacagttatcttagag

SEQ ID NO: 439010 - DNA, 33 bp, Homo sapien
atcccactcactgggatgacagttatcttagag

SEQ ID NO: 439011 - DNA, 33 bp, Homo sapien
cttctgtctttccaaacgaatctatgaagttca

SEQ ID NO: 439012 - DNA, 33 bp, Homo sapien
cttctgtctttccaaatgaatctatgaagttca

SEQ ID NO: 439013 - DNA, 33 bp, Homo sapien
atataaattttatacactattgcctccagtgat

SEQ ID NO: 439014 - DNA, 33 bp, Homo sapien
atataaattttatacattattgcctccagtgat

SEQ ID NO: 439015 - DNA, 33 bp, Homo sapien
ctactaatacgatgtcaataactttctgtcttt

SEQ ID NO: 439016 - DNA, 33 bp, Homo sapien
ctactaatacgatgtcgataactttctgtcttt

SEQ ID NO: 439017 - DNA, 33 bp, Homo sapien
attttcccttcaaatcaattagccatgaattaa

SEQ ID NO: 439018 - DNA, 33 bp, Homo sapien
attttcccttcaaatcgattagccatgaattaa

SEQ ID NO: 439019 - DNA, 33 bp, Homo sapien
actttggagagctccactgatggatgaggggct

SEQ ID NO: 439020 - DNA, 33 bp, Homo sapien
actttggagagctccagtgatggatgaggggct

SEQ ID NO: 439021 - DNA, 33 bp, Homo sapien
gagcctagtgtggcagcattgagaaaggaaaga

SEQ ID NO: 439022 - DNA, 33 bp, Homo sapien
gagcctagtgtggcagtattgagaaaggaaaga

SEQ ID NO: 439023 - DNA, 33 bp, Homo sapien
ctagatgccaacaatacgcaaaaaattttttat

SEQ ID NO: 439024 - DNA, 33 bp, Homo sapien
ctagatgccaacaatatgcaaaaaattttttat

SEQ ID NO: 439025 - DNA, 33 bp, Homo sapien
ttcaaatatctaaagtaacaacactgagaaaat

SEQ ID NO: 439026 - DNA, 33 bp, Homo sapien
ttcaaatatctaaagtgacaacactgagaaaat

SEQ ID NO: 439027 - DNA, 33 bp, Homo sapien
ccacttgtctcactcacggaacactcccctgtg

SEQ ID NO: 439028 - DNA, 33 bp, Homo sapien
ccacttgtctcactcatggaacactcccctgtg

SEQ ID NO: 439029 - DNA, 33 bp, Homo sapien
agtcaatgatctttgaaattaatcatgggaatg

SEQ ID NO: 439030 - DNA, 33 bp, Homo sapien
agtcaatgatctttgagattaatcatgggaatg

SEQ ID NO: 439031 - DNA, 33 bp, Homo sapien
aaacttctagaagatgacataggagaaaatatt

SEQ ID NO: 439032 - DNA, 33 bp, Homo sapien
aaacttctagaagatgtcataggagaaaatatt

SEQ ID NO: 439033 - DNA, 33 bp, Homo sapien
agaatcaacctggagaacttttttactatttag

SEQ ID NO: 439034 - DNA, 33 bp, Homo sapien
agaatcaacctggagaccttttttactatttag

SEQ ID NO: 439035 - DNA, 33 bp, Homo sapien
ttccatcacccaagagccaggaccctaatacaa

SEQ ID NO: 439036 - DNA, 33 bp, Homo sapien
ttccatcacccaagagtcaggaccctaatacaa

SEQ ID NO: 439037 - DNA, 33 bp, Homo sapien
aggagaatactaaaaccggtttactatctgtcc

SEQ ID NO: 439038 - DNA, 33 bp, Homo sapien
aggagaatactaaaactggtttactatctgtcc

SEQ ID NO: 439039 - DNA, 33 bp, Homo sapien
taatgctttttggtcacaaacttcacaacaatc

SEQ ID NO: 439040 - DNA, 33 bp, Homo sapien
taatgctttttggtcataaacttcacaacaatc

SEQ ID NO: 439041 - DNA, 33 bp, Homo sapien
ccttgaattctagctacgcaataccttgtgaaa

SEQ ID NO: 439042 - DNA, 33 bp, Homo sapien
ccttgaattctagctatgcaataccttgtgaaa

SEQ ID NO: 439043 - DNA, 33 bp, Homo sapien
tagtgaacattgaacactctggaaaccagccag

SEQ ID NO: 439044 - DNA, 33 bp, Homo sapien
tagtgaacattgaacattctggaaaccagccag

SEQ ID NO: 439045 - DNA, 33 bp, Homo sapien
gatatgtttatatgcacgggttagtacactcac

SEQ ID NO: 439046 - DNA, 33 bp, Homo sapien
gatatgtttatatgcatgggttagtacactcac

SEQ ID NO: 439047 - DNA, 33 bp, Homo sapien
ctgaggacagtttataaaaagtggtcttagctg

SEQ ID NO: 439048 - DNA, 33 bp, Homo sapien
ctgaggacagtttatagaaagtggtcttagctg

SEQ ID NO: 439049 - DNA, 33 bp, Homo sapien
tgagttctttaaggaaactgagtcattagaagc

SEQ ID NO: 439050 - DNA, 33 bp, Homo sapien
tgagttctttaaggaacctgagtcattagaagc

SEQ ID NO: 439051 - DNA, 33 bp, Homo sapien
gagttgcaggcatccaagctgtaagtagtagca

SEQ ID NO: 439052 - DNA, 33 bp, Homo sapien
gagttgcaggcatccaggctgtaagtagtagca

SEQ ID NO: 439053 - DNA, 33 bp, Homo sapien
ggcctgccctataagaactcctaaacatggaaa

SEQ ID NO: 439054 - DNA, 33 bp, Homo sapien
ggcctgccctataagagctcctaaacatggaaa

SEQ ID NO: 439055 - DNA, 33 bp, Homo sapien
tcttgctatcatcccacagacatcattcctcta

SEQ ID NO: 439056 - DNA, 33 bp, Homo sapien
tcttgctatcatcccatagacatcattcctcta

SEQ ID NO: 439057 - DNA, 33 bp, Homo sapien
tcagagttctctcaaacacatgtcagccaacaa

SEQ ID NO: 439058 - DNA, 33 bp, Homo sapien
tcagagttctctcaaatacatgtcagccaacaa

SEQ ID NO: 439059 - DNA, 33 bp, Homo sapien
cctcatacagtgaagaccatatgggtatagccc

SEQ ID NO: 439060 - DNA, 33 bp, Homo sapien
cctcatacagtgaagatcatatgggtatagccc

SEQ ID NO: 439061 - DNA, 33 bp, Homo sapien
tgtcttttcaaaaatacaattaggaggcatata

SEQ ID NO: 439062 - DNA, 33 bp, Homo sapien
tgtcttttcaaaaatataattaggaggcatata

SEQ ID NO: 439063 - DNA, 33 bp, Homo sapien
ttctgtattatttgtcaaagagctgctatgaag

SEQ ID NO: 439064 - DNA, 33 bp, Homo sapien
ttctgtattatttgtcgaagagctgctatgaag

SEQ ID NO: 439065 - DNA, 33 bp, Homo sapien
tcatcattcatgcagacagaaagtccagtcatg

SEQ ID NO: 439066 - DNA, 33 bp, Homo sapien
tcatcattcatgcagagagaaagtccagtcatg

SEQ ID NO: 439067 - DNA, 33 bp, Homo sapien
actcagtgataacttcaccaccccatgttgtgg

SEQ ID NO: 439068 - DNA, 33 bp, Homo sapien
actcagtgataacttcgccaccccatgttgtgg

SEQ ID NO: 439069 - DNA, 33 bp, Homo sapien
gagaatagaaaataaaaagcatgcatatgaagg

SEQ ID NO: 439070 - DNA, 33 bp, Homo sapien
gagaatagaaaataaagagcatgcatatgaagg

SEQ ID NO: 439071 - DNA, 33 bp, Homo sapien
tgaatttgcccaacaacccactgaatgcttttc

SEQ ID NO: 439072 - DNA, 33 bp, Homo sapien
tgaatttgcccaacaatccactgaatgcttttc

SEQ ID NO: 439073 - DNA, 33 bp, Homo sapien
aattagcaattactcaagttgtgctcctataaa

SEQ ID NO: 439074 - DNA, 33 bp, Homo sapien
aattagcaattactcaggttgtgctcctataaa

SEQ ID NO: 439075 - DNA, 33 bp, Homo sapien
accacgaggacgtttggagtagaagctctagct

SEQ ID NO: 439076 - DNA, 33 bp, Homo sapien
accacgaggacgtttgtagtagaagctctagct

SEQ ID NO: 439077 - DNA, 33 bp, Homo sapien
tgctagctgtgacataagaagtcctaccatcca

SEQ ID NO: 439078 - DNA, 33 bp, Homo sapien
tgctagctgtgacatacgaagtcctaccatcca

SEQ ID NO: 439079 - DNA, 33 bp, Homo sapien
tatctggaaatattccactaacttatttggagg

SEQ ID NO: 439080 - DNA, 33 bp, Homo sapien
tatctggaaatattcccctaacttatttggagg

SEQ ID NO: 439081 - DNA, 33 bp, Homo sapien
tgagccacggttaagcaaccaaagctcagctct

SEQ ID NO: 439082 - DNA, 33 bp, Homo sapien
tgagccacggttaagcgaccaaagctcagctct

SEQ ID NO: 439083 - DNA, 33 bp, Homo sapien
atacactaaaaagtaaagtatcagcagactctg

SEQ ID NO: 439084 - DNA, 33 bp, Homo sapien
atacactaaaaagtaaggtatcagcagactctg

SEQ ID NO: 439085 - DNA, 33 bp, Homo sapien
tgacagaaagggatgacggcttcggtcatccct

SEQ ID NO: 439086 - DNA, 33 bp, Homo sapien
tgacagaaagggatgatggcttcggtcatccct

SEQ ID NO: 439087 - DNA, 33 bp, Homo sapien
atatttctgcgtaatacagactttttcctcctt

SEQ ID NO: 439088 - DNA, 33 bp, Homo sapien
atatttctgcgtaatatagactttttcctcctt

SEQ ID NO: 439089 - DNA, 33 bp, Homo sapien
tatcagaatagctaaaatgaaaaacagtgacaa

SEQ ID NO: 439090 - DNA, 33 bp, Homo sapien
tatcagaatagctaaagtgaaaaacagtgacaa

SEQ ID NO: 439091 - DNA, 33 bp, Homo sapien
tggcacctgggcacacgatgatctcgagtttta

SEQ ID NO: 439092 - DNA, 33 bp, Homo sapien
tggcacctgggcacactatgatctcgagtttta

SEQ ID NO: 439093 - DNA, 33 bp, Homo sapien
taattgatacagaaatgaggaccataatgtgca

SEQ ID NO: 439094 - DNA, 33 bp, Homo sapien
taattgatacagaaattaggaccataatgtgca

SEQ ID NO: 439095 - DNA, 33 bp, Homo sapien
gaatatgatgataaacggaccaatgaagcaaaa

SEQ ID NO: 439096 - DNA, 33 bp, Homo sapien
gaatatgatgataaactgaccaatgaagcaaaa

SEQ ID NO: 439097 - DNA, 33 bp, Homo sapien
ctgtgggctccatgaaagtagactgtccatagc

SEQ ID NO: 439098 - DNA, 33 bp, Homo sapien
ctgtgggctccatgaacgtagactgtccatagc

SEQ ID NO: 439099 - DNA, 33 bp, Homo sapien
catgcctgactcgctacctactgtaacagttat

SEQ ID NO: 439100 - DNA, 33 bp, Homo sapien
catgcctgactcgctatctactgtaacagttat

SEQ ID NO: 439101 - DNA, 33 bp, Homo sapien
tttaccagaacttaaccgcctaaatcactgtag

SEQ ID NO: 439102 - DNA, 33 bp, Homo sapien
tttaccagaacttaactgcctaaatcactgtag

SEQ ID NO: 439103 - DNA, 33 bp, Homo sapien
tccatgaacttgttaccagaccatgaacaaacc

SEQ ID NO: 439104 - DNA, 33 bp, Homo sapien
tccatgaacttgttactagaccatgaacaaacc

SEQ ID NO: 439105 - DNA, 33 bp, Homo sapien
taaaatgtttattcaacgtaaggattgcaagaa

SEQ ID NO: 439106 - DNA, 33 bp, Homo sapien
taaaatgtttattcaatgtaaggattgcaagaa

SEQ ID NO: 439107 - DNA, 33 bp, Homo sapien
tagaagaaatattaagcatccaaatctgctaat

SEQ ID NO: 439108 - DNA, 33 bp, Homo sapien
tagaagaaatattaaggatccaaatctgctaat

SEQ ID NO: 439109 - DNA, 33 bp, Homo sapien
tccttaccataacgccacaatttggatctaagg

SEQ ID NO: 439110 - DNA, 33 bp, Homo sapien
tccttaccataacgccgcaatttggatctaagg

SEQ ID NO: 439111 - DNA, 33 bp, Homo sapien
gttgtggccattctacagggcattcatcccacc

SEQ ID NO: 439112 - DNA, 33 bp, Homo sapien
gttgtggccattctaccgggcattcatcccacc

SEQ ID NO: 439113 - DNA, 33 bp, Homo sapien
agccactctgatgttacagcaatagcttttttc

SEQ ID NO: 439114 - DNA, 33 bp, Homo sapien
agccactctgatgttagagcaatagcttttttc

SEQ ID NO: 439115 - DNA, 33 bp, Homo sapien
aaggtatgataattgcaaagtttagaaggaaat

SEQ ID NO: 439116 - DNA, 33 bp, Homo sapien
aaggtatgataattgcgaagtttagaaggaaat

SEQ ID NO: 439117 - DNA, 33 bp, Homo sapien
aattgcataatagtaaaaaagatggtgtgaaat

SEQ ID NO: 439118 - DNA, 33 bp, Homo sapien
aattgcataatagtaacaaagatggtgtgaaat

SEQ ID NO: 439119 - DNA, 33 bp, Homo sapien
gttgtaaataaaattacatatcaacagctttct

SEQ ID NO: 439120 - DNA, 33 bp, Homo sapien
gttgtaaataaaattagatatcaacagctttct

SEQ ID NO: 439121 - DNA, 33 bp, Homo sapien
aaaaaagatgttcttacgtaatcatcagatggc

SEQ ID NO: 439122 - DNA, 33 bp, Homo sapien
aaaaaagatgttcttatgtaatcatcagatggc

SEQ ID NO: 439123 - DNA, 33 bp, Homo sapien
ttgctgtgtggaatcgcaggaacaatcaacatg

SEQ ID NO: 439124 - DNA, 33 bp, Homo sapien
ttgctgtgtggaatcgtaggaacaatcaacatg

SEQ ID NO: 439125 - DNA, 33 bp, Homo sapien
tctctgtcctctgctacaatgtgaatcctcatg

SEQ ID NO: 439126 - DNA, 33 bp, Homo sapien
tctctgtcctctgctagaatgtgaatcctcatg

SEQ ID NO: 439127 - DNA, 33 bp, Homo sapien
ctcaggaagtaaattacctgtactctcagctgc

SEQ ID NO: 439128 - DNA, 33 bp, Homo sapien
ctcaggaagtaaattatctgtactctcagctgc

SEQ ID NO: 439129 - DNA, 33 bp, Homo sapien
ttatatttttgccggaaacaattagtgaaagta

SEQ ID NO: 439130 - DNA, 33 bp, Homo sapien
ttatatttttgccggagacaattagtgaaagta

SEQ ID NO: 439131 - DNA, 33 bp, Homo sapien
tttctcagacatttcactaacagacattacatt

SEQ ID NO: 439132 - DNA, 33 bp, Homo sapien
tttctcagacatttcagtaacagacattacatt

SEQ ID NO: 439133 - DNA, 33 bp, Homo sapien
cattatgttgctgtcaataattaaaaaaaaaaa

SEQ ID NO: 439134 - DNA, 33 bp, Homo sapien
cattatgttgctgtcagtaattaaaaaaaaaaa

SEQ ID NO: 439135 - DNA, 33 bp, Homo sapien
tacaatgcatacatgcaaaactgacccaatagt

SEQ ID NO: 439136 - DNA, 33 bp, Homo sapien
tacaatgcatacatgcgaaactgacccaatagt

SEQ ID NO: 439137 - DNA, 33 bp, Homo sapien
taaaagcttaaatatcacattggaatgaggtgt

SEQ ID NO: 439138 - DNA, 33 bp, Homo sapien
taaaagcttaaatatcgcattggaatgaggtgt

SEQ ID NO: 439139 - DNA, 33 bp, Homo sapien
atgaggcactctgcacacttcccttacactcag

SEQ ID NO: 439140 - DNA, 33 bp, Homo sapien
atgaggcactctgcacgcttcccttacactcag

SEQ ID NO: 439141 - DNA, 33 bp, Homo sapien
ggtttgtctcaacttacgagtaatcaatgtatg

SEQ ID NO: 439142 - DNA, 33 bp, Homo sapien
ggtttgtctcaacttatgagtaatcaatgtatg

SEQ ID NO: 439143 - DNA, 33 bp, Homo sapien
tcttctagctcagacacagtggtgttcacagtt

SEQ ID NO: 439144 - DNA, 33 bp, Homo sapien
tcttctagctcagacatagtggtgttcacagtt

SEQ ID NO: 439145 - DNA, 33 bp, Homo sapien
aaaagaccaagtaatacggattcctacgttcag

SEQ ID NO: 439146 - DNA, 33 bp, Homo sapien
aaaagaccaagtaatatggattcctacgttcag

SEQ ID NO: 439147 - DNA, 33 bp, Homo sapien
gtctctctcaggggaaacatttatgagttggtg

SEQ ID NO: 439148 - DNA, 33 bp, Homo sapien
gtctctctcaggggaagcatttatgagttggtg

SEQ ID NO: 439149 - DNA, 33 bp, Homo sapien
tttggccaaagaaatacgtgcataagtgatgtg

SEQ ID NO: 439150 - DNA, 33 bp, Homo sapien
tttggccaaagaaatatgtgcataagtgatgtg

SEQ ID NO: 439151 - DNA, 33 bp, Homo sapien
caataaagaactgaatcatcaatcgtaaactaa

SEQ ID NO: 439152 - DNA, 33 bp, Homo sapien
caataaagaactgaatgatcaatcgtaaactaa

SEQ ID NO: 439153 - DNA, 33 bp, Homo sapien
aggtttgcctccaaacacttggttttgacttat

SEQ ID NO: 439154 - DNA, 33 bp, Homo sapien
aggtttgcctccaaactcttggttttgacttat

SEQ ID NO: 439155 - DNA, 33 bp, Homo sapien
tgcattagttgcaattaaagtaatcatctgatt

SEQ ID NO: 439156 - DNA, 33 bp, Homo sapien
tgcattagttgcaattgaagtaatcatctgatt

SEQ ID NO: 439157 - DNA, 33 bp, Homo sapien
gcttatggctctagtcccatgccaatatgccct

SEQ ID NO: 439158 - DNA, 33 bp, Homo sapien
gcttatggctctagtctcatgccaatatgccct

SEQ ID NO: 439159 - DNA, 33 bp, Homo sapien
gggtttagctgtcttccctgcacatatacacag

SEQ ID NO: 439160 - DNA, 33 bp, Homo sapien
gggtttagctgtcttctctgcacatatacacag

SEQ ID NO: 439161 - DNA, 33 bp, Homo sapien
cccaatatttttattaggtccagatctgaacaa

SEQ ID NO: 439162 - DNA, 33 bp, Homo sapien
cccaatatttttattatgtccagatctgaacaa

SEQ ID NO: 439163 - DNA, 33 bp, Homo sapien
tattgtatgatgccacaaagattttttagagtt

SEQ ID NO: 439164 - DNA, 33 bp, Homo sapien
tattgtatgatgccacgaagattttttagagtt

SEQ ID NO: 439165 - DNA, 33 bp, Homo sapien
aggagagattatggtaaaaagcaagccaattct

SEQ ID NO: 439166 - DNA, 33 bp, Homo sapien
aggagagattatggtataaagcaagccaattct

SEQ ID NO: 439167 - DNA, 33 bp, Homo sapien
ctgtctaattcaatcaatatggcactgaggtaa

SEQ ID NO: 439168 - DNA, 33 bp, Homo sapien
ctgtctaattcaatcagtatggcactgaggtaa

SEQ ID NO: 439169 - DNA, 33 bp, Homo sapien
cttcatggagtggccaagcaacatttctcttat

SEQ ID NO: 439170 - DNA, 33 bp, Homo sapien
cttcatggagtggccaggcaacatttctcttat

SEQ ID NO: 439171 - DNA, 33 bp, Homo sapien
gagaggccatagtcaactctgaaacagaaaagc

SEQ ID NO: 439172 - DNA, 33 bp, Homo sapien
gagaggccatagtcaattctgaaacagaaaagc

SEQ ID NO: 439173 - DNA, 33 bp, Homo sapien
tccacagggcttagacaaatattaaagttcata

SEQ ID NO: 439174 - DNA, 33 bp, Homo sapien
tccacagggcttagacgaatattaaagttcata

SEQ ID NO: 439175 - DNA, 33 bp, Homo sapien
tcgtatatctcactaacatctgttatccacagg

SEQ ID NO: 439176 - DNA, 33 bp, Homo sapien
tcgtatatctcactaagatctgttatccacagg

SEQ ID NO: 439177 - DNA, 33 bp, Homo sapien
aatggtgtcagacagggccaagataaacagtga

SEQ ID NO: 439178 - DNA, 33 bp, Homo sapien
aatggtgtcagacaggtccaagataaacagtga

SEQ ID NO: 439179 - DNA, 33 bp, Homo sapien
aattagaaatacttaacgaaggtgttgtctgag

SEQ ID NO: 439180 - DNA, 33 bp, Homo sapien
aattagaaatacttaatgaaggtgttgtctgag

SEQ ID NO: 439181 - DNA, 33 bp, Homo sapien
ttaaataaataggccaccatgtttgaaaagtct

SEQ ID NO: 439182 - DNA, 33 bp, Homo sapien
ttaaataaataggccatcatgtttgaaaagtct

SEQ ID NO: 439183 - DNA, 33 bp, Homo sapien
taaactaaatggccaaagtcaaagatatatgat

SEQ ID NO: 439184 - DNA, 33 bp, Homo sapien
taaactaaatggccaacgtcaaagatatatgat

SEQ ID NO: 439185 - DNA, 33 bp, Homo sapien
cacactggcaaaaaaacacattctgaagccagg

SEQ ID NO: 439186 - DNA, 33 bp, Homo sapien
cacactggcaaaaaaatacattctgaagccagg

SEQ ID NO: 439187 - DNA, 33 bp, Homo sapien
ctgactttgataaaaacgagtacagcaaacaca

SEQ ID NO: 439188 - DNA, 33 bp, Homo sapien
ctgactttgataaaaatgagtacagcaaacaca

SEQ ID NO: 439189 - DNA, 33 bp, Homo sapien
tgatggaaatgattcgcaggtctctttacctgg

SEQ ID NO: 439190 - DNA, 33 bp, Homo sapien
tgatggaaatgattcgtaggtctctttacctgg

SEQ ID NO: 439191 - DNA, 33 bp, Homo sapien
tatgcaataaacacttcaactataggccagttc

SEQ ID NO: 439192 - DNA, 33 bp, Homo sapien
tatgcaataaacactttaactataggccagttc

SEQ ID NO: 439193 - DNA, 33 bp, Homo sapien
ggaaacataaatgataaatgtgtgcaatgccaa

SEQ ID NO: 439194 - DNA, 33 bp, Homo sapien
ggaaacataaatgatagatgtgtgcaatgccaa

SEQ ID NO: 439195 - DNA, 33 bp, Homo sapien
ctgtggggtcaatttccagtgaaccttgaaaat

SEQ ID NO: 439196 - DNA, 33 bp, Homo sapien
ctgtggggtcaatttctagtgaaccttgaaaat

SEQ ID NO: 439197 - DNA, 33 bp, Homo sapien
ctggacagaatagagcaagatgtctgttactgc

SEQ ID NO: 439198 - DNA, 33 bp, Homo sapien
ctggacagaatagagccagatgtctgttactgc

SEQ ID NO: 439199 - DNA, 33 bp, Homo sapien
atgatgatgccctacaaacaaatcctactttgg

SEQ ID NO: 439200 - DNA, 33 bp, Homo sapien
atgatgatgccctacagacaaatcctactttgg

SEQ ID NO: 439201 - DNA, 33 bp, Homo sapien
tttgtgcattaccttacgagtgatgtctaatca

SEQ ID NO: 439202 - DNA, 33 bp, Homo sapien
tttgtgcattaccttatgagtgatgtctaatca

SEQ ID NO: 439203 - DNA, 33 bp, Homo sapien
accaacaagcacctaaagcagttgagtcccaaa

SEQ ID NO: 439204 - DNA, 33 bp, Homo sapien
accaacaagcacctaaggcagttgagtcccaaa

SEQ ID NO: 439205 - DNA, 33 bp, Homo sapien
acaggactgtaaatgacgaagtacaagacaaat

SEQ ID NO: 439206 - DNA, 33 bp, Homo sapien
acaggactgtaaatgatgaagtacaagacaaat

SEQ ID NO: 439207 - DNA, 33 bp, Homo sapien
gtctggagtcggcctcaaacaccatctttcacc

SEQ ID NO: 439208 - DNA, 33 bp, Homo sapien
gtctggagtcggcctcgaacaccatctttcacc

SEQ ID NO: 439209 - DNA, 33 bp, Homo sapien
gctattctttccccacaagtagcaatccatatt

SEQ ID NO: 439210 - DNA, 33 bp, Homo sapien
gctattctttccccaccagtagcaatccatatt

SEQ ID NO: 439211 - DNA, 33 bp, Homo sapien
tcatgagaaagtgaaccagaaggagtgattacg

SEQ ID NO: 439212 - DNA, 33 bp, Homo sapien
tcatgagaaagtgaactagaaggagtgattacg

SEQ ID NO: 439213 - DNA, 33 bp, Homo sapien
cttatttaactgacctaacaatcttgatgattt

SEQ ID NO: 439214 - DNA, 33 bp, Homo sapien
cttatttaactgacctgacaatcttgatgattt

SEQ ID NO: 439215 - DNA, 33 bp, Homo sapien
aagacagggtggaagaagacagagaccttacct

SEQ ID NO: 439216 - DNA, 33 bp, Homo sapien
aagacagggtggaagaggacagagaccttacct

SEQ ID NO: 439217 - DNA, 33 bp, Homo sapien
aaatattatctctgaacatgcagatactccttt

SEQ ID NO: 439218 - DNA, 33 bp, Homo sapien
aaatattatctctgaagatgcagatactccttt

SEQ ID NO: 439219 - DNA, 33 bp, Homo sapien
acaaggtattttctgaaattccacctgatggtt

SEQ ID NO: 439220 - DNA, 33 bp, Homo sapien
acaaggtattttctgatattccacctgatggtt

SEQ ID NO: 439221 - DNA, 33 bp, Homo sapien
gccctgataataactcgcaacagtgggctgtct

SEQ ID NO: 439222 - DNA, 33 bp, Homo sapien
gccctgataataactctcaacagtgggctgtct

SEQ ID NO: 439223 - DNA, 33 bp, Homo sapien
aaccacggcacatagcaaagtctaccattttct

SEQ ID NO: 439224 - DNA, 33 bp, Homo sapien
aaccacggcacatagcgaagtctaccattttct

SEQ ID NO: 439225 - DNA, 33 bp, Homo sapien
ttgttggagagttacacacagaaaacaccactg

SEQ ID NO: 439226 - DNA, 33 bp, Homo sapien
ttgttggagagttacatacagaaaacaccactg

SEQ ID NO: 439227 - DNA, 33 bp, Homo sapien
ggctatctttggaacacgatttgtctgtaaaca

SEQ ID NO: 439228 - DNA, 33 bp, Homo sapien
ggctatctttggaacatgatttgtctgtaaaca

SEQ ID NO: 439229 - DNA, 33 bp, Homo sapien
aggatgagttattcaaacctctggtgtaacaag

SEQ ID NO: 439230 - DNA, 33 bp, Homo sapien
aggatgagttattcaaccctctggtgtaacaag

SEQ ID NO: 439231 - DNA, 33 bp, Homo sapien
acaattatttccaaaggcatagttatttggtta

SEQ ID NO: 439232 - DNA, 33 bp, Homo sapien
acaattatttccaaagtcatagttatttggtta

SEQ ID NO: 439233 - DNA, 33 bp, Homo sapien
tgaagactgagcaatacggcggtcacttgtgcc

SEQ ID NO: 439234 - DNA, 33 bp, Homo sapien
tgaagactgagcaatatggcggtcacttgtgcc

SEQ ID NO: 439235 - DNA, 33 bp, Homo sapien
agtgtgcaagtgaaaacaagagttgcaggtctc

SEQ ID NO: 439236 - DNA, 33 bp, Homo sapien
agtgtgcaagtgaaaagaagagttgcaggtctc

SEQ ID NO: 439237 - DNA, 33 bp, Homo sapien
ctaagcatcttgatttcaaataaacacacctaa

SEQ ID NO: 439238 - DNA, 33 bp, Homo sapien
ctaagcatcttgattttaaataaacacacctaa

SEQ ID NO: 439239 - DNA, 33 bp, Homo sapien
ttttttacaatttgaaatggcaccaatttttat

SEQ ID NO: 439240 - DNA, 33 bp, Homo sapien
ttttttacaatttgaagtggcaccaatttttat

SEQ ID NO: 439241 - DNA, 33 bp, Homo sapien
tgctgttttggcattaaggaacaaaaatcttct

SEQ ID NO: 439242 - DNA, 33 bp, Homo sapien
tgctgttttggcattagggaacaaaaatcttct

SEQ ID NO: 439243 - DNA, 33 bp, Homo sapien
taagaaagattaatgcactgacccacctcctag

SEQ ID NO: 439244 - DNA, 33 bp, Homo sapien
taagaaagattaatgcgctgacccacctcctag

SEQ ID NO: 439245 - DNA, 33 bp, Homo sapien
cacattttacgctgacaaacccaatctaagatg

SEQ ID NO: 439246 - DNA, 33 bp, Homo sapien
cacattttacgctgaccaacccaatctaagatg

SEQ ID NO: 439247 - DNA, 33 bp, Homo sapien
aagaactttttcacaacgtaatcctaactaagg

SEQ ID NO: 439248 - DNA, 33 bp, Homo sapien
aagaactttttcacaatgtaatcctaactaagg

SEQ ID NO: 439249 - DNA, 33 bp, Homo sapien
acatgaatagtcctaaaagattgcttcagtggg

SEQ ID NO: 439250 - DNA, 33 bp, Homo sapien
acatgaatagtcctaagagattgcttcagtggg

SEQ ID NO: 439251 - DNA, 33 bp, Homo sapien
agctttatcagtagacccaccaatttgatagct

SEQ ID NO: 439252 - DNA, 33 bp, Homo sapien
agctttatcagtagactcaccaatttgatagct

SEQ ID NO: 439253 - DNA, 33 bp, Homo sapien
agaagaaagctgagtacagaatagaatttgagg

SEQ ID NO: 439254 - DNA, 33 bp, Homo sapien
agaagaaagctgagtatagaatagaatttgagg

SEQ ID NO: 439255 - DNA, 33 bp, Homo sapien
catcgaaaccttacaaaccatttcagattattt

SEQ ID NO: 439256 - DNA, 33 bp, Homo sapien
catcgaaaccttacaagccatttcagattattt

SEQ ID NO: 439257 - DNA, 33 bp, Homo sapien
tatggtactttgtttcaaaaatcttaagaaatg

SEQ ID NO: 439258 - DNA, 33 bp, Homo sapien
tatggtactttgtttcgaaaatcttaagaaatg

SEQ ID NO: 439259 - DNA, 33 bp, Homo sapien
aaaagaccatttagtaaaaaccactctaggtat

SEQ ID NO: 439260 - DNA, 33 bp, Homo sapien
aaaagaccatttagtagaaaccactctaggtat

SEQ ID NO: 439261 - DNA, 33 bp, Homo sapien
ggtatacaagcctataaattttaagatgtgtgt

SEQ ID NO: 439262 - DNA, 33 bp, Homo sapien
ggtatacaagcctatacattttaagatgtgtgt

SEQ ID NO: 439263 - DNA, 33 bp, Homo sapien
ctcagttactgagaaagccagataattgatatg

SEQ ID NO: 439264 - DNA, 33 bp, Homo sapien
ctcagttactgagaaatccagataattgatatg

SEQ ID NO: 439265 - DNA, 33 bp, Homo sapien
actgtccacaatcacaaaacaggtactactcaa

SEQ ID NO: 439266 - DNA, 33 bp, Homo sapien
actgtccacaatcacacaacaggtactactcaa

SEQ ID NO: 439267 - DNA, 33 bp, Homo sapien
aaggattgtatgaacaaataaaggatgacccta

SEQ ID NO: 439268 - DNA, 33 bp, Homo sapien
aaggattgtatgaacagataaaggatgacccta

SEQ ID NO: 439269 - DNA, 33 bp, Homo sapien
actgtaagaagaaaatcaagaagccattggttt

SEQ ID NO: 439270 - DNA, 33 bp, Homo sapien
actgtaagaagaaaattaagaagccattggttt

SEQ ID NO: 439271 - DNA, 33 bp, Homo sapien
gggcaggaaatatgggaaaatagagacaggatc

SEQ ID NO: 439272 - DNA, 33 bp, Homo sapien
gggcaggaaatatggggaaatagagacaggatc

SEQ ID NO: 439273 - DNA, 33 bp, Homo sapien
ccccagatcagaccaacattgaccagttttact

SEQ ID NO: 439274 - DNA, 33 bp, Homo sapien
ccccagatcagaccaatattgaccagttttact

SEQ ID NO: 439275 - DNA, 33 bp, Homo sapien
aatagagggtaattcaagcatgtttgttggtga

SEQ ID NO: 439276 - DNA, 33 bp, Homo sapien
aatagagggtaattcatgcatgtttgttggtga

SEQ ID NO: 439277 - DNA, 33 bp, Homo sapien
aaaggatagtgtgcataacccctcatttcctag

SEQ ID NO: 439278 - DNA, 33 bp, Homo sapien
aaaggatagtgtgcattacccctcatttcctag

SEQ ID NO: 439279 - DNA, 33 bp, Homo sapien
tctcagcaaggcggccccttcctctcagctgtc

SEQ ID NO: 439280 - DNA, 33 bp, Homo sapien
tctcagcaaggcggcctcttcctctcagctgtc

SEQ ID NO: 439281 - DNA, 33 bp, Homo sapien
tagttaacaggctttggactaactgattctttt

SEQ ID NO: 439282 - DNA, 33 bp, Homo sapien
tagttaacaggctttgtactaactgattctttt

SEQ ID NO: 439283 - DNA, 33 bp, Homo sapien
accctgtttttgtataagctatgaacagttaaa

SEQ ID NO: 439284 - DNA, 33 bp, Homo sapien
accctgtttttgtatatgctatgaacagttaaa

SEQ ID NO: 439285 - DNA, 33 bp, Homo sapien
aaaatagccatgtgagaaaaacaattttgtaga

SEQ ID NO: 439286 - DNA, 33 bp, Homo sapien
aaaatagccatgtgagtaaaacaattttgtaga

SEQ ID NO: 439287 - DNA, 33 bp, Homo sapien
tactctcttcatcaacaccagtaactgaaatca

SEQ ID NO: 439288 - DNA, 33 bp, Homo sapien
tactctcttcatcaacgccagtaactgaaatca

SEQ ID NO: 439289 - DNA, 33 bp, Homo sapien
tgcaggcaaactctcaacagacaatctcttttt

SEQ ID NO: 439290 - DNA, 33 bp, Homo sapien
tgcaggcaaactctcagcagacaatctcttttt

SEQ ID NO: 439291 - DNA, 33 bp, Homo sapien
cactgcacttgacagacgtctaatttttgtacc

SEQ ID NO: 439292 - DNA, 33 bp, Homo sapien
cactgcacttgacagatgtctaatttttgtacc

SEQ ID NO: 439293 - DNA, 33 bp, Homo sapien
ttagacttgtgtatgtaaaatggacgcggtgtc

SEQ ID NO: 439294 - DNA, 33 bp, Homo sapien
ttagacttgtgtatgtgaaatggacgcggtgtc

SEQ ID NO: 439295 - DNA, 33 bp, Homo sapien
agtgttctccgaagaaatattttccattgatgt

SEQ ID NO: 439296 - DNA, 33 bp, Homo sapien
agtgttctccgaagaagtattttccattgatgt

SEQ ID NO: 439297 - DNA, 33 bp, Homo sapien
agagagattttgcctcactcatcagtgtgactt

SEQ ID NO: 439298 - DNA, 33 bp, Homo sapien
agagagattttgcctcgctcatcagtgtgactt

SEQ ID NO: 439299 - DNA, 33 bp, Homo sapien
gccacaactgatgttacgtggattggagttgaa

SEQ ID NO: 439300 - DNA, 33 bp, Homo sapien
gccacaactgatgttatgtggattggagttgaa

SEQ ID NO: 439301 - DNA, 33 bp, Homo sapien
gtcatttcagtggcaaagagaagaacagacatc

SEQ ID NO: 439302 - DNA, 33 bp, Homo sapien
gtcatttcagtggcaaggagaagaacagacatc

SEQ ID NO: 439303 - DNA, 33 bp, Homo sapien
ccaggcagataggccaaaggtcaagtgcaggga

SEQ ID NO: 439304 - DNA, 33 bp, Homo sapien
ccaggcagataggccagaggtcaagtgcaggga

SEQ ID NO: 439305 - DNA, 33 bp, Homo sapien
aagccttgaaagtcgaacatctgcttcttggcc

SEQ ID NO: 439306 - DNA, 33 bp, Homo sapien
aagccttgaaagtcgagcatctgcttcttggcc

SEQ ID NO: 439307 - DNA, 33 bp, Homo sapien
gtgagcacatagtggaagtggccatctgcaaat

SEQ ID NO: 439308 - DNA, 33 bp, Homo sapien
gtgagcacatagtggaggtggccatctgcaaat

SEQ ID NO: 439309 - DNA, 33 bp, Homo sapien
tcaggaggctgatccaataggattagtgtcttt

SEQ ID NO: 439310 - DNA, 33 bp, Homo sapien
tcaggaggctgatccagtaggattagtgtcttt

SEQ ID NO: 439311 - DNA, 33 bp, Homo sapien
ggtccagaggacatgaaaaccttcaccactgtg

SEQ ID NO: 439312 - DNA, 33 bp, Homo sapien
ggtccagaggacatgataaccttcaccactgtg

SEQ ID NO: 439313 - DNA, 33 bp, Homo sapien
aacacatcttttccatcatctggattctgccta

SEQ ID NO: 439314 - DNA, 33 bp, Homo sapien
aacacatcttttccattatctggattctgccta

SEQ ID NO: 439315 - DNA, 33 bp, Homo sapien
gcttgggtgatgggaaagtgatgcaaatgagaa

SEQ ID NO: 439316 - DNA, 33 bp, Homo sapien
gcttgggtgatgggaaggtgatgcaaatgagaa

SEQ ID NO: 439317 - DNA, 33 bp, Homo sapien
cactgcagctgcttccagaaaagatgggatatt

SEQ ID NO: 439318 - DNA, 33 bp, Homo sapien
cactgcagctgcttccggaaaagatgggatatt

SEQ ID NO: 439319 - DNA, 33 bp, Homo sapien
ggaaaggaagacagtgccacagctatgagaaag

SEQ ID NO: 439320 - DNA, 33 bp, Homo sapien
ggaaaggaagacagtgtcacagctatgagaaag

SEQ ID NO: 439321 - DNA, 33 bp, Homo sapien
tcaatctactttgcaaaatttggaggctatttc

SEQ ID NO: 439322 - DNA, 33 bp, Homo sapien
tcaatctactttgcaagatttggaggctatttc

SEQ ID NO: 439323 - DNA, 33 bp, Homo sapien
gatatttggttttctcacagacattaaacccaa

SEQ ID NO: 439324 - DNA, 33 bp, Homo sapien
gatatttggttttctcgcagacattaaacccaa

SEQ ID NO: 439325 - DNA, 33 bp, Homo sapien
gctttgcagagtgtaaacccattgaataaaaaa

SEQ ID NO: 439326 - DNA, 33 bp, Homo sapien
gctttgcagagtgtaaccccattgaataaaaaa

SEQ ID NO: 439327 - DNA, 33 bp, Homo sapien
gcacgtaagtcaagaacacttgggtgaaggaga

SEQ ID NO: 439328 - DNA, 33 bp, Homo sapien
gcacgtaagtcaagaatacttgggtgaaggaga

SEQ ID NO: 439329 - DNA, 33 bp, Homo sapien
gccaagaatcagaaaaagacaacaaggaaggaa

SEQ ID NO: 439330 - DNA, 33 bp, Homo sapien
gccaagaatcagaaaacgacaacaaggaaggaa

SEQ ID NO: 439331 - DNA, 33 bp, Homo sapien
gtccctggagaaacacaattagcgggcgaagtt

SEQ ID NO: 439332 - DNA, 33 bp, Homo sapien
gtccctggagaaacacgattagcgggcgaagtt

SEQ ID NO: 439333 - DNA, 33 bp, Homo sapien
cttcaagcgaaaacatcaagcatttgtcaacta

SEQ ID NO: 439334 - DNA, 33 bp, Homo sapien
cttcaagcgaaaacatgaagcatttgtcaacta

SEQ ID NO: 439335 - DNA, 33 bp, Homo sapien
ggtaacacaagagtgacgattctcctttctggt

SEQ ID NO: 439336 - DNA, 33 bp, Homo sapien
ggtaacacaagagtgatgattctcctttctggt

SEQ ID NO: 439337 - DNA, 33 bp, Homo sapien
cctgcaaagtcatagacgtgtttatttttcctt

SEQ ID NO: 439338 - DNA, 33 bp, Homo sapien
cctgcaaagtcatagatgtgtttatttttcctt

SEQ ID NO: 439339 - DNA, 33 bp, Homo sapien
tctaaatagcctgttacagaatttcagcgaagc

SEQ ID NO: 439340 - DNA, 33 bp, Homo sapien
tctaaatagcctgttagagaatttcagcgaagc

SEQ ID NO: 439341 - DNA, 33 bp, Homo sapien
gcctattaccatttaccgaaagccttatgttga

SEQ ID NO: 439342 - DNA, 33 bp, Homo sapien
gcctattaccatttactgaaagccttatgttga

SEQ ID NO: 439343 - DNA, 33 bp, Homo sapien
gcattgcttcagagacaattttttccataaata

SEQ ID NO: 439344 - DNA, 33 bp, Homo sapien
gcattgcttcagagactattttttccataaata

SEQ ID NO: 439345 - DNA, 33 bp, Homo sapien
aattcacttaacatacaatgagcccatttcagg

SEQ ID NO: 439346 - DNA, 33 bp, Homo sapien
aattcacttaacatacgatgagcccatttcagg

SEQ ID NO: 439347 - DNA, 33 bp, Homo sapien
aacaatagtatctatacctgaaattctaactct

SEQ ID NO: 439348 - DNA, 33 bp, Homo sapien
aacaatagtatctatatctgaaattctaactct

SEQ ID NO: 439349 - DNA, 33 bp, Homo sapien
ccctgaaaagtgaaatcatttactgacataatt

SEQ ID NO: 439350 - DNA, 33 bp, Homo sapien
ccctgaaaagtgaaattatttactgacataatt

SEQ ID NO: 439351 - DNA, 33 bp, Homo sapien
aactacagtaccaaaactgtcaaatgaagaact

SEQ ID NO: 439352 - DNA, 33 bp, Homo sapien
aactacagtaccaaaattgtcaaatgaagaact

SEQ ID NO: 439353 - DNA, 33 bp, Homo sapien
tttttatttgtgtgacagatataacaaagggta

SEQ ID NO: 439354 - DNA, 33 bp, Homo sapien
tttttatttgtgtgactgatataacaaagggta

SEQ ID NO: 439355 - DNA, 33 bp, Homo sapien
cagacatacacggtaacgggaatgtcacagcta

SEQ ID NO: 439356 - DNA, 33 bp, Homo sapien
cagacatacacggtaatgggaatgtcacagcta

SEQ ID NO: 439357 - DNA, 33 bp, Homo sapien
aggcttatacaaataaagttttcacacctgggc

SEQ ID NO: 439358 - DNA, 33 bp, Homo sapien
aggcttatacaaataaggttttcacacctgggc

SEQ ID NO: 439359 - DNA, 33 bp, Homo sapien
tgggggaaaatgagcaaaggtgtgaagcagatc

SEQ ID NO: 439360 - DNA, 33 bp, Homo sapien
tgggggaaaatgagcacaggtgtgaagcagatc

SEQ ID NO: 439361 - DNA, 33 bp, Homo sapien
atagagagtttcccaaatgagagattctgatat

SEQ ID NO: 439362 - DNA, 33 bp, Homo sapien
atagagagtttcccaattgagagattctgatat

SEQ ID NO: 439363 - DNA, 33 bp, Homo sapien
ttatgtaaatataaacaaaattgtcatggctta

SEQ ID NO: 439364 - DNA, 33 bp, Homo sapien
ttatgtaaatataaaccaaattgtcatggctta

SEQ ID NO: 439365 - DNA, 33 bp, Homo sapien
tgttgagtatgtgcaaacctcttgtgtgctttc

SEQ ID NO: 439366 - DNA, 33 bp, Homo sapien
tgttgagtatgtgcaagcctcttgtgtgctttc

SEQ ID NO: 439367 - DNA, 33 bp, Homo sapien
aaccttggtgggcaaaactccttgcctgggaaa

SEQ ID NO: 439368 - DNA, 33 bp, Homo sapien
aaccttggtgggcaaacctccttgcctgggaaa

SEQ ID NO: 439369 - DNA, 33 bp, Homo sapien
tgatcatgcttatatacgtatggaaatgtatat

SEQ ID NO: 439370 - DNA, 33 bp, Homo sapien
tgatcatgcttatatatgtatggaaatgtatat

SEQ ID NO: 439371 - DNA, 33 bp, Homo sapien
tcactgtacctactcaaagagatgcttggagaa

SEQ ID NO: 439372 - DNA, 33 bp, Homo sapien
tcactgtacctactcatagagatgcttggagaa

SEQ ID NO: 439373 - DNA, 33 bp, Homo sapien
ctatcacatatgttagaacaaaaggagtgcttc

SEQ ID NO: 439374 - DNA, 33 bp, Homo sapien
ctatcacatatgttagtacaaaaggagtgcttc

SEQ ID NO: 439375 - DNA, 33 bp, Homo sapien
aagccagaagtattctcacctagtccagtacta

SEQ ID NO: 439376 - DNA, 33 bp, Homo sapien
aagccagaagtattcttacctagtccagtacta

SEQ ID NO: 439377 - DNA, 33 bp, Homo sapien
gttgcaaatcatcagaagggagaacaatgcaaa

SEQ ID NO: 439378 - DNA, 33 bp, Homo sapien
gttgcaaatcatcagaggggagaacaatgcaaa

SEQ ID NO: 439379 - DNA, 33 bp, Homo sapien
gtttcaatatatgaaaagtaaggaggtcattcc

SEQ ID NO: 439380 - DNA, 33 bp, Homo sapien
gtttcaatatatgaaaggtaaggaggtcattcc

SEQ ID NO: 439381 - DNA, 33 bp, Homo sapien
aactgtctcagccaaaaagaaggcactaacatg

SEQ ID NO: 439382 - DNA, 33 bp, Homo sapien
aactgtctcagccaaagagaaggcactaacatg

SEQ ID NO: 439383 - DNA, 33 bp, Homo sapien
gctgatccctgatagcacagcttcacagagcac

SEQ ID NO: 439384 - DNA, 33 bp, Homo sapien
gctgatccctgatagcgcagcttcacagagcac

SEQ ID NO: 439385 - DNA, 33 bp, Homo sapien
attttgtacggttttcacttacatcctttctat

SEQ ID NO: 439386 - DNA, 33 bp, Homo sapien
attttgtacggttttcccttacatcctttctat

SEQ ID NO: 439387 - DNA, 33 bp, Homo sapien
cattattattgtgagacgtgtgttgtttcagaa

SEQ ID NO: 439388 - DNA, 33 bp, Homo sapien
cattattattgtgagatgtgtgttgtttcagaa

SEQ ID NO: 439389 - DNA, 33 bp, Homo sapien
gattcaaataacaatacggcacaagagaaactg

SEQ ID NO: 439390 - DNA, 33 bp, Homo sapien
gattcaaataacaatatggcacaagagaaactg

SEQ ID NO: 439391 - DNA, 33 bp, Homo sapien
agagcaggcccgacgacggaagaggggaactca

SEQ ID NO: 439392 - DNA, 33 bp, Homo sapien
agagcaggcccgacgatggaagaggggaactca

SEQ ID NO: 439393 - DNA, 33 bp, Homo sapien
ttcagtagaagtatccaaactcatctgctccaa

SEQ ID NO: 439394 - DNA, 33 bp, Homo sapien
ttcagtagaagtatcccaactcatctgctccaa

SEQ ID NO: 439395 - DNA, 33 bp, Homo sapien
agagaagatgttaagactcatttccctaaacta

SEQ ID NO: 439396 - DNA, 33 bp, Homo sapien
agagaagatgttaagattcatttccctaaacta

SEQ ID NO: 439397 - DNA, 33 bp, Homo sapien
tatacaggctcattgaagcaatgttatccttaa

SEQ ID NO: 439398 - DNA, 33 bp, Homo sapien
tatacaggctcattgacgcaatgttatccttaa

SEQ ID NO: 439399 - DNA, 33 bp, Homo sapien
cttactcagctattcacagacacgtaatggttg

SEQ ID NO: 439400 - DNA, 33 bp, Homo sapien
cttactcagctattcagagacacgtaatggttg

SEQ ID NO: 439401 - DNA, 33 bp, Homo sapien
agcatttcctcaataactattccagtgcaccac

SEQ ID NO: 439402 - DNA, 33 bp, Homo sapien
agcatttcctcaataattattccagtgcaccac

SEQ ID NO: 439403 - DNA, 33 bp, Homo sapien
attagggtccgtctcacatctactcagtctgaa

SEQ ID NO: 439404 - DNA, 33 bp, Homo sapien
attagggtccgtctcatatctactcagtctgaa

SEQ ID NO: 439405 - DNA, 33 bp, Homo sapien
ttgttcatcagaattgaaagagaatgaaagttt

SEQ ID NO: 439406 - DNA, 33 bp, Homo sapien
ttgttcatcagaattgtaagagaatgaaagttt

SEQ ID NO: 439407 - DNA, 33 bp, Homo sapien
tttaagaaacgcccagaactttgctagcaggac

SEQ ID NO: 439408 - DNA, 33 bp, Homo sapien
tttaagaaacgcccaggactttgctagcaggac

SEQ ID NO: 439409 - DNA, 33 bp, Homo sapien
atgtccttccaagaataatcccttacaatgtct

SEQ ID NO: 439410 - DNA, 33 bp, Homo sapien
atgtccttccaagaattatcccttacaatgtct

SEQ ID NO: 439411 - DNA, 33 bp, Homo sapien
cactggggaaggagtacagtatacagtagtgag

SEQ ID NO: 439412 - DNA, 33 bp, Homo sapien
cactggggaaggagtagagtatacagtagtgag

SEQ ID NO: 439413 - DNA, 33 bp, Homo sapien
aggagtgaaatagtcacagtaggaaagtggagt

SEQ ID NO: 439414 - DNA, 33 bp, Homo sapien
aggagtgaaatagtcatagtaggaaagtggagt

SEQ ID NO: 439415 - DNA, 33 bp, Homo sapien
atacagtgaagaaattaaagttagaaatactct

SEQ ID NO: 439416 - DNA, 33 bp, Homo sapien
atacagtgaagaaattcaagttagaaatactct

SEQ ID NO: 439417 - DNA, 33 bp, Homo sapien
ccacttctagcaccaacggcttagtgttgtaag

SEQ ID NO: 439418 - DNA, 33 bp, Homo sapien
ccacttctagcaccaatggcttagtgttgtaag

SEQ ID NO: 439419 - DNA, 33 bp, Homo sapien
ccaaaatcctgaaccacgcatttcaacctagaa

SEQ ID NO: 439420 - DNA, 33 bp, Homo sapien
ccaaaatcctgaaccatgcatttcaacctagaa

SEQ ID NO: 439421 - DNA, 33 bp, Homo sapien
gatctatcgacttctgaatccttagaagtttga

SEQ ID NO: 439422 - DNA, 33 bp, Homo sapien
gatctatcgacttctgtatccttagaagtttga

SEQ ID NO: 439423 - DNA, 33 bp, Homo sapien
aacattttaatcaagactaagcttttaaaatac

SEQ ID NO: 439424 - DNA, 33 bp, Homo sapien
aacattttaatcaagagtaagcttttaaaatac

SEQ ID NO: 439425 - DNA, 33 bp, Homo sapien
ctctttgtgctgaagactattgaagagcattga

SEQ ID NO: 439426 - DNA, 33 bp, Homo sapien
ctctttgtgctgaagattattgaagagcattga

SEQ ID NO: 439427 - DNA, 33 bp, Homo sapien
tcaatgctccatattacgaatttacataggctt

SEQ ID NO: 439428 - DNA, 33 bp, Homo sapien
tcaatgctccatattatgaatttacataggctt

SEQ ID NO: 439429 - DNA, 33 bp, Homo sapien
cgtggaatgaagaagcaatgtcatgtaattgag

SEQ ID NO: 439430 - DNA, 33 bp, Homo sapien
cgtggaatgaagaagcgatgtcatgtaattgag

SEQ ID NO: 439431 - DNA, 33 bp, Homo sapien
aattccacattccttaacttacctctctgtgaa

SEQ ID NO: 439432 - DNA, 33 bp, Homo sapien
aattccacattccttagcttacctctctgtgaa

SEQ ID NO: 439433 - DNA, 33 bp, Homo sapien
tttaactcaatctaaaactactaaaccaatggt

SEQ ID NO: 439434 - DNA, 33 bp, Homo sapien
tttaactcaatctaaatctactaaaccaatggt

SEQ ID NO: 439435 - DNA, 33 bp, Homo sapien
ctagcatgaccaatacagtaactgtggatatat

SEQ ID NO: 439436 - DNA, 33 bp, Homo sapien
ctagcatgaccaatacggtaactgtggatatat

SEQ ID NO: 439437 - DNA, 33 bp, Homo sapien
ggaagtgcaataattacaccaatatcagacaaa

SEQ ID NO: 439438 - DNA, 33 bp, Homo sapien
ggaagtgcaataattataccaatatcagacaaa

SEQ ID NO: 439439 - DNA, 33 bp, Homo sapien
ttactccagtgaaacaaactcacactgaaaaaa

SEQ ID NO: 439440 - DNA, 33 bp, Homo sapien
ttactccagtgaaacacactcacactgaaaaaa

SEQ ID NO: 439441 - DNA, 33 bp, Homo sapien
taatccttgcatctcactaggttcttgttagga

SEQ ID NO: 439442 - DNA, 33 bp, Homo sapien
taatccttgcatctcattaggttcttgttagga

SEQ ID NO: 439443 - DNA, 33 bp, Homo sapien
tagttcaaagaatgaccagaggtagagccagtg

SEQ ID NO: 439444 - DNA, 33 bp, Homo sapien
tagttcaaagaatgactagaggtagagccagtg

SEQ ID NO: 439445 - DNA, 33 bp, Homo sapien
gtcaaaaaacgaagaaacaacgagactagcaat

SEQ ID NO: 439446 - DNA, 33 bp, Homo sapien
gtcaaaaaacgaagaagcaacgagactagcaat

SEQ ID NO: 439447 - DNA, 33 bp, Homo sapien
acagggacagtggaaccgtacacatggactcca

SEQ ID NO: 439448 - DNA, 33 bp, Homo sapien
acagggacagtggaacggtacacatggactcca

SEQ ID NO: 439449 - DNA, 33 bp, Homo sapien
tttttattccatgagaaaagtttacaatcactt

SEQ ID NO: 439450 - DNA, 33 bp, Homo sapien
tttttattccatgagagaagtttacaatcactt

SEQ ID NO: 439451 - DNA, 33 bp, Homo sapien
aacgtccctcagtaatcagtcaccctggctgag

SEQ ID NO: 439452 - DNA, 33 bp, Homo sapien
aacgtccctcagtaattagtcaccctggctgag

SEQ ID NO: 439453 - DNA, 33 bp, Homo sapien
ctccatttcataaccacaggctgcatctctgct

SEQ ID NO: 439454 - DNA, 33 bp, Homo sapien
ctccatttcataaccagaggctgcatctctgct

SEQ ID NO: 439455 - DNA, 33 bp, Homo sapien
tgccttgagtcctagcactaggtctgtcaaaga

SEQ ID NO: 439456 - DNA, 33 bp, Homo sapien
tgccttgagtcctagccctaggtctgtcaaaga

SEQ ID NO: 439457 - DNA, 33 bp, Homo sapien
aattttgaggtgatacaagcatttagtccaaag

SEQ ID NO: 439458 - DNA, 33 bp, Homo sapien
aattttgaggtgatactagcatttagtccaaag

SEQ ID NO: 439459 - DNA, 33 bp, Homo sapien
gccatatattctcaataaagccactgctgctgg

SEQ ID NO: 439460 - DNA, 33 bp, Homo sapien
gccatatattctcaatgaagccactgctgctgg

SEQ ID NO: 439461 - DNA, 33 bp, Homo sapien
gaaggacactcctagaatattgcctcaaggatt

SEQ ID NO: 439462 - DNA, 33 bp, Homo sapien
gaaggacactcctagactattgcctcaaggatt

SEQ ID NO: 439463 - DNA, 33 bp, Homo sapien
ggttcttccttcaacaatctatttccagtgttc

SEQ ID NO: 439464 - DNA, 33 bp, Homo sapien
ggttcttccttcaacagtctatttccagtgttc

SEQ ID NO: 439465 - DNA, 33 bp, Homo sapien
attttcgttcagtctgcagaacttcttttagtc

SEQ ID NO: 439466 - DNA, 33 bp, Homo sapien
attttcgttcagtctgtagaacttcttttagtc

SEQ ID NO: 439467 - DNA, 33 bp, Homo sapien
gtacaaatgttgctcacgttttgttagatttct

SEQ ID NO: 439468 - DNA, 33 bp, Homo sapien
gtacaaatgttgctcatgttttgttagatttct

SEQ ID NO: 439469 - DNA, 33 bp, Homo sapien
taaatagcaatttgcaaaaaaatgtaacactaa

SEQ ID NO: 439470 - DNA, 33 bp, Homo sapien
taaatagcaatttgcataaaaatgtaacactaa

SEQ ID NO: 439471 - DNA, 33 bp, Homo sapien
gaggtggtggtagttccaggtgcatggatgacc

SEQ ID NO: 439472 - DNA, 33 bp, Homo sapien
gaggtggtggtagttctaggtgcatggatgacc

SEQ ID NO: 439473 - DNA, 33 bp, Homo sapien
ctgtattgccatttacactcatatttcaatggc

SEQ ID NO: 439474 - DNA, 33 bp, Homo sapien
ctgtattgccatttacgctcatatttcaatggc

SEQ ID NO: 439475 - DNA, 33 bp, Homo sapien
ggttttcttctccataaccttaaacatagaggc

SEQ ID NO: 439476 - DNA, 33 bp, Homo sapien
ggttttcttctccatagccttaaacatagaggc

SEQ ID NO: 439477 - DNA, 33 bp, Homo sapien
ggcaaggaaaaaagcaagtgtaagccaagagct

SEQ ID NO: 439478 - DNA, 33 bp, Homo sapien
ggcaaggaaaaaagcaggtgtaagccaagagct

SEQ ID NO: 439479 - DNA, 33 bp, Homo sapien
tttgaaaacattaaaaccaggcaacagaccatg

SEQ ID NO: 439480 - DNA, 33 bp, Homo sapien
tttgaaaacattaaaatcaggcaacagaccatg

SEQ ID NO: 439481 - DNA, 33 bp, Homo sapien
catatatatacacataactattatcgcttcctt

SEQ ID NO: 439482 - DNA, 33 bp, Homo sapien
catatatatacacatacctattatcgcttcctt

SEQ ID NO: 439483 - DNA, 33 bp, Homo sapien
tgtttccaaaatgcacaagtgaacaaaatttag

SEQ ID NO: 439484 - DNA, 33 bp, Homo sapien
tgtttccaaaatgcacgagtgaacaaaatttag

SEQ ID NO: 439485 - DNA, 33 bp, Homo sapien
aaattctgtatgcttgcattttgtatctattac

SEQ ID NO: 439486 - DNA, 33 bp, Homo sapien
aaattctgtatgcttgtattttgtatctattac

SEQ ID NO: 439487 - DNA, 33 bp, Homo sapien
ggccagacatcaaacccctacttcggcctattg

SEQ ID NO: 439488 - DNA, 33 bp, Homo sapien
ggccagacatcaaacctctacttcggcctattg

SEQ ID NO: 439489 - DNA, 33 bp, Homo sapien
tcagtaatctttcccaataggaatccaattatt

SEQ ID NO: 439490 - DNA, 33 bp, Homo sapien
tcagtaatctttcccattaggaatccaattatt

SEQ ID NO: 439491 - DNA, 33 bp, Homo sapien
atgttctaagcaagaaagacaatctctctttgt

SEQ ID NO: 439492 - DNA, 33 bp, Homo sapien
atgttctaagcaagaaggacaatctctctttgt

SEQ ID NO: 439493 - DNA, 33 bp, Homo sapien
ttgctcctaacttacaagccatagaaatttgag

SEQ ID NO: 439494 - DNA, 33 bp, Homo sapien
ttgctcctaacttacatgccatagaaatttgag

SEQ ID NO: 439495 - DNA, 33 bp, Homo sapien
gagcacataagtaaagcaggagttaagcagtgt

SEQ ID NO: 439496 - DNA, 33 bp, Homo sapien
gagcacataagtaaagtaggagttaagcagtgt

SEQ ID NO: 439497 - DNA, 33 bp, Homo sapien
gctgggagaggaggtaaaaactatatgtaaatg

SEQ ID NO: 439498 - DNA, 33 bp, Homo sapien
gctgggagaggaggtagaaactatatgtaaatg

SEQ ID NO: 439499 - DNA, 33 bp, Homo sapien
ttcagtatcattgatgcaactaccttatgactc

SEQ ID NO: 439500 - DNA, 33 bp, Homo sapien
ttcagtatcattgatgtaactaccttatgactc

SEQ ID NO: 439501 - DNA, 33 bp, Homo sapien
acacattgatataccaagtgagtgataggccta

SEQ ID NO: 439502 - DNA, 33 bp, Homo sapien
acacattgatataccaggtgagtgataggccta

SEQ ID NO: 439503 - DNA, 33 bp, Homo sapien
cgggatagagtctggcgctggtagcagtctcat

SEQ ID NO: 439504 - DNA, 33 bp, Homo sapien
cgggatagagtctggctctggtagcagtctcat

SEQ ID NO: 439505 - DNA, 33 bp, Homo sapien
ctaagtaacagtgcacaaaatgagagagatgga

SEQ ID NO: 439506 - DNA, 33 bp, Homo sapien
ctaagtaacagtgcactaaatgagagagatgga

SEQ ID NO: 439507 - DNA, 33 bp, Homo sapien
cagagaggaaaagaaacgaagccttactcaatc

SEQ ID NO: 439508 - DNA, 33 bp, Homo sapien
cagagaggaaaagaaatgaagccttactcaatc

SEQ ID NO: 439509 - DNA, 33 bp, Homo sapien
gcgctttcaatagacaggactcagtttcttaag

SEQ ID NO: 439510 - DNA, 33 bp, Homo sapien
gcgctttcaatagacatgactcagtttcttaag

SEQ ID NO: 439511 - DNA, 33 bp, Homo sapien
cagaaaacatgcatggaaagtggcaactgaaga

SEQ ID NO: 439512 - DNA, 33 bp, Homo sapien
cagaaaacatgcatgggaagtggcaactgaaga

SEQ ID NO: 439513 - DNA, 33 bp, Homo sapien
gtatctctaaaaatctaaatgtcttagtagctt

SEQ ID NO: 439514 - DNA, 33 bp, Homo sapien
gtatctctaaaaatcttaatgtcttagtagctt

SEQ ID NO: 439515 - DNA, 33 bp, Homo sapien
gggtatacttggcaataacagagactgtgtgga

SEQ ID NO: 439516 - DNA, 33 bp, Homo sapien
gggtatacttggcaatgacagagactgtgtgga

SEQ ID NO: 439517 - DNA, 33 bp, Homo sapien
cctctgctctgtcctacggctcatcattcctca

SEQ ID NO: 439518 - DNA, 33 bp, Homo sapien
cctctgctctgtcctagggctcatcattcctca

SEQ ID NO: 439519 - DNA, 33 bp, Homo sapien
agtgcctagattctaacacataatatgctcttc

SEQ ID NO: 439520 - DNA, 33 bp, Homo sapien
agtgcctagattctaatacataatatgctcttc

SEQ ID NO: 439521 - DNA, 33 bp, Homo sapien
cacttggatcacagaagacttggcagagaatgg

SEQ ID NO: 439522 - DNA, 33 bp, Homo sapien
cacttggatcacagaatacttggcagagaatgg

SEQ ID NO: 439523 - DNA, 33 bp, Homo sapien
ttttcaaccctaccaaatcactacttctagaaa

SEQ ID NO: 439524 - DNA, 33 bp, Homo sapien
ttttcaaccctaccaactcactacttctagaaa

SEQ ID NO: 439525 - DNA, 33 bp, Homo sapien
acctataggtaggctaaatggtgaggcaaagct

SEQ ID NO: 439526 - DNA, 33 bp, Homo sapien
acctataggtaggctagatggtgaggcaaagct

SEQ ID NO: 439527 - DNA, 33 bp, Homo sapien
tttggtttaaatatgaaagctcctgctataagc

SEQ ID NO: 439528 - DNA, 33 bp, Homo sapien
tttggtttaaatatgacagctcctgctataagc

SEQ ID NO: 439529 - DNA, 33 bp, Homo sapien
caaagtcaacaagaaacgtgttctctgtcttct

SEQ ID NO: 439530 - DNA, 33 bp, Homo sapien
caaagtcaacaagaaatgtgttctctgtcttct

SEQ ID NO: 439531 - DNA, 33 bp, Homo sapien
agccagacattgggaaaaagcagttgaacatta

SEQ ID NO: 439532 - DNA, 33 bp, Homo sapien
agccagacattgggaagaagcagttgaacatta

SEQ ID NO: 439533 - DNA, 33 bp, Homo sapien
tctgcctctctcttccaaactcaagcttcctct

SEQ ID NO: 439534 - DNA, 33 bp, Homo sapien
tctgcctctctcttccgaactcaagcttcctct

SEQ ID NO: 439535 - DNA, 33 bp, Homo sapien
gcaatatcatgtataacatcatggcttgtctca

SEQ ID NO: 439536 - DNA, 33 bp, Homo sapien
gcaatatcatgtataatatcatggcttgtctca

SEQ ID NO: 439537 - DNA, 33 bp, Homo sapien
ttaattcttcttacagaccaagtagcacgttta

SEQ ID NO: 439538 - DNA, 33 bp, Homo sapien
ttaattcttcttacaggccaagtagcacgttta

SEQ ID NO: 439539 - DNA, 33 bp, Homo sapien
gtcagatatcagggtggcaacatggtcggcttc

SEQ ID NO: 439540 - DNA, 33 bp, Homo sapien
gtcagatatcagggtgtcaacatggtcggcttc

SEQ ID NO: 439541 - DNA, 33 bp, Homo sapien
cagtgaagacatggaaaaatttaagctggaagt

SEQ ID NO: 439542 - DNA, 33 bp, Homo sapien
cagtgaagacatggaacaatttaagctggaagt

SEQ ID NO: 439543 - DNA, 33 bp, Homo sapien
cacacaaagattctcacaaaagaagttccatgt

SEQ ID NO: 439544 - DNA, 33 bp, Homo sapien
cacacaaagattctcataaaagaagttccatgt

SEQ ID NO: 439545 - DNA, 33 bp, Homo sapien
tgcatcgatgtactaaacacttcaataatcatc

SEQ ID NO: 439546 - DNA, 33 bp, Homo sapien
tgcatcgatgtactaagcacttcaataatcatc

SEQ ID NO: 439547 - DNA, 33 bp, Homo sapien
ttatccttgaaatcaactctccatttcttcaac

SEQ ID NO: 439548 - DNA, 33 bp, Homo sapien
ttatccttgaaatcaagtctccatttcttcaac

SEQ ID NO: 439549 - DNA, 33 bp, Homo sapien
gtggttttgctgcttaagagaaaaataacaaca

SEQ ID NO: 439550 - DNA, 33 bp, Homo sapien
gtggttttgctgcttaggagaaaaataacaaca

SEQ ID NO: 439551 - DNA, 33 bp, Homo sapien
ctccttttctcaagcaacctatgtttatttacc

SEQ ID NO: 439552 - DNA, 33 bp, Homo sapien
ctccttttctcaagcaccctatgtttatttacc

SEQ ID NO: 439553 - DNA, 33 bp, Homo sapien
agaagaggacatagctaacatgtgcacaaaatt

SEQ ID NO: 439554 - DNA, 33 bp, Homo sapien
agaagaggacatagctgacatgtgcacaaaatt

SEQ ID NO: 439555 - DNA, 33 bp, Homo sapien
cacagttatgcttttacctcaaaaatatgaatc

SEQ ID NO: 439556 - DNA, 33 bp, Homo sapien
cacagttatgcttttagctcaaaaatatgaatc

SEQ ID NO: 439557 - DNA, 33 bp, Homo sapien
ggttcaccactatcaaaagtcaaagtcagccgg

SEQ ID NO: 439558 - DNA, 33 bp, Homo sapien
ggttcaccactatcaacagtcaaagtcagccgg

SEQ ID NO: 439559 - DNA, 33 bp, Homo sapien
ctcaccagaatttccacgtcatttaacaactcg

SEQ ID NO: 439560 - DNA, 33 bp, Homo sapien
ctcaccagaatttccatgtcatttaacaactcg

SEQ ID NO: 439561 - DNA, 33 bp, Homo sapien
gagagacttctgtttacgatgaagttggtctgt

SEQ ID NO: 439562 - DNA, 33 bp, Homo sapien
gagagacttctgtttatgatgaagttggtctgt

SEQ ID NO: 439563 - DNA, 33 bp, Homo sapien
tcagcaccttagctaccattataatgataatgg

SEQ ID NO: 439564 - DNA, 33 bp, Homo sapien
tcagcaccttagctactattataatgataatgg

SEQ ID NO: 439565 - DNA, 33 bp, Homo sapien
gctagtcaaaaaaggagcaagtcagcctttaca

SEQ ID NO: 439566 - DNA, 33 bp, Homo sapien
gctagtcaaaaaaggatcaagtcagcctttaca

SEQ ID NO: 439567 - DNA, 33 bp, Homo sapien
tctcatggtctattacagcttaggtgtccagag

SEQ ID NO: 439568 - DNA, 33 bp, Homo sapien
tctcatggtctattacggcttaggtgtccagag

SEQ ID NO: 439569 - DNA, 33 bp, Homo sapien
gggccatttttgaaaacaaagtttggaagactc

SEQ ID NO: 439570 - DNA, 33 bp, Homo sapien
gggccatttttgaaaataaagtttggaagactc

SEQ ID NO: 439571 - DNA, 33 bp, Homo sapien
tattttcttatagtcaaataggccaatgttttc

SEQ ID NO: 439572 - DNA, 33 bp, Homo sapien
tattttcttatagtcagataggccaatgttttc

SEQ ID NO: 439573 - DNA, 33 bp, Homo sapien
catatttacttactaaggctgagagaatattta

SEQ ID NO: 439574 - DNA, 33 bp, Homo sapien
catatttacttactaatgctgagagaatattta

SEQ ID NO: 439575 - DNA, 33 bp, Homo sapien
attgtgctaaagggaaatgcacccaaccaaaat

SEQ ID NO: 439576 - DNA, 33 bp, Homo sapien
attgtgctaaagggaagtgcacccaaccaaaat

SEQ ID NO: 439577 - DNA, 33 bp, Homo sapien
agcagaatcactcttcacttgattgtccagtgt

SEQ ID NO: 439578 - DNA, 33 bp, Homo sapien
agcagaatcactcttcgcttgattgtccagtgt

SEQ ID NO: 439579 - DNA, 33 bp, Homo sapien
agaaatgatcagactcactttgcaaaaggacat

SEQ ID NO: 439580 - DNA, 33 bp, Homo sapien
agaaatgatcagactcgctttgcaaaaggacat

SEQ ID NO: 439581 - DNA, 33 bp, Homo sapien
aggcctacagacattcactaccatacctcctct

SEQ ID NO: 439582 - DNA, 33 bp, Homo sapien
aggcctacagacattcgctaccatacctcctct

SEQ ID NO: 439583 - DNA, 33 bp, Homo sapien
tttactggcatgtgaaatctaatgtctgggaaa

SEQ ID NO: 439584 - DNA, 33 bp, Homo sapien
tttactggcatgtgaagtctaatgtctgggaaa

SEQ ID NO: 439585 - DNA, 33 bp, Homo sapien
gttatacccaggcctacattttcagaagggatt

SEQ ID NO: 439586 - DNA, 33 bp, Homo sapien
gttatacccaggcctatattttcagaagggatt

SEQ ID NO: 439587 - DNA, 33 bp, Homo sapien
tccacatccagccttaccttcctggccttgctt

SEQ ID NO: 439588 - DNA, 33 bp, Homo sapien
tccacatccagccttatcttcctggccttgctt

SEQ ID NO: 439589 - DNA, 33 bp, Homo sapien
attattgggcacctacaaacacttattgaccat

SEQ ID NO: 439590 - DNA, 33 bp, Homo sapien
attattgggcacctacgaacacttattgaccat

SEQ ID NO: 439591 - DNA, 33 bp, Homo sapien
gagttgattgaatcaacgtgtgggaaatgctca

SEQ ID NO: 439592 - DNA, 33 bp, Homo sapien
gagttgattgaatcaatgtgtgggaaatgctca

SEQ ID NO: 439593 - DNA, 33 bp, Homo sapien
cctaattagataggcaaagcagcagatcagaaa

SEQ ID NO: 439594 - DNA, 33 bp, Homo sapien
cctaattagataggcacagcagcagatcagaaa

SEQ ID NO: 439595 - DNA, 33 bp, Homo sapien
gtatttaaagagttaacgacagctcagtaggca

SEQ ID NO: 439596 - DNA, 33 bp, Homo sapien
gtatttaaagagttaatgacagctcagtaggca

SEQ ID NO: 439597 - DNA, 33 bp, Homo sapien
attctgcaatttctgcaagatcctaatatactg

SEQ ID NO: 439598 - DNA, 33 bp, Homo sapien
attctgcaatttctgccagatcctaatatactg

SEQ ID NO: 439599 - DNA, 33 bp, Homo sapien
accctgtatttcccctaagagaatgaccctgta

SEQ ID NO: 439600 - DNA, 33 bp, Homo sapien
accctgtatttcccctgagagaatgaccctgta

SEQ ID NO: 439601 - DNA, 33 bp, Homo sapien
ggagctatttgaggagccacatcagcatacctg

SEQ ID NO: 439602 - DNA, 33 bp, Homo sapien
ggagctatttgaggaggcacatcagcatacctg

SEQ ID NO: 439603 - DNA, 33 bp, Homo sapien
gcacatcaagcttttaactagccgtgtgtacaa

SEQ ID NO: 439604 - DNA, 33 bp, Homo sapien
gcacatcaagcttttagctagccgtgtgtacaa

SEQ ID NO: 439605 - DNA, 33 bp, Homo sapien
gctatttggtcccctaagacactggttcaattg

SEQ ID NO: 439606 - DNA, 33 bp, Homo sapien
gctatttggtcccctacgacactggttcaattg

SEQ ID NO: 439607 - DNA, 33 bp, Homo sapien
gaatcatacagagtttaaaaaatgttggtatgt

SEQ ID NO: 439608 - DNA, 33 bp, Homo sapien
gaatcatacagagttttaaaaatgttggtatgt

SEQ ID NO: 439609 - DNA, 33 bp, Homo sapien
ttttgtcacaggaccaaatctactgatactaac

SEQ ID NO: 439610 - DNA, 33 bp, Homo sapien
ttttgtcacaggaccagatctactgatactaac

SEQ ID NO: 439611 - DNA, 33 bp, Homo sapien
gtccattaggaggaccacataaaacgtagggat

SEQ ID NO: 439612 - DNA, 33 bp, Homo sapien
gtccattaggaggaccgcataaaacgtagggat

SEQ ID NO: 439613 - DNA, 33 bp, Homo sapien
tctcaaaagacagctaaaatgctcataccaaag

SEQ ID NO: 439614 - DNA, 33 bp, Homo sapien
tctcaaaagacagctagaatgctcataccaaag

SEQ ID NO: 439615 - DNA, 33 bp, Homo sapien
gctactacataaggacaattttttaacagttca

SEQ ID NO: 439616 - DNA, 33 bp, Homo sapien
gctactacataaggacgattttttaacagttca

SEQ ID NO: 439617 - DNA, 33 bp, Homo sapien
ggagcatatattataactcaggcactgtgctaa

SEQ ID NO: 439618 - DNA, 33 bp, Homo sapien
ggagcatatattataattcaggcactgtgctaa

SEQ ID NO: 439619 - DNA, 33 bp, Homo sapien
tgaaattggtatacaaagcacctggcactgtac

SEQ ID NO: 439620 - DNA, 33 bp, Homo sapien
tgaaattggtatacaaggcacctggcactgtac

SEQ ID NO: 439621 - DNA, 33 bp, Homo sapien
gtttcacaaatttctccgaccagggaacacttt

SEQ ID NO: 439622 - DNA, 33 bp, Homo sapien
gtttcacaaatttctctgaccagggaacacttt

SEQ ID NO: 439623 - DNA, 33 bp, Homo sapien
atttaactatggattcaatttttagattcatat

SEQ ID NO: 439624 - DNA, 33 bp, Homo sapien
atttaactatggattcgatttttagattcatat

SEQ ID NO: 439625 - DNA, 33 bp, Homo sapien
ttggggactttaccaacgaaccacagctgacat

SEQ ID NO: 439626 - DNA, 33 bp, Homo sapien
ttggggactttaccaaggaaccacagctgacat

SEQ ID NO: 439627 - DNA, 33 bp, Homo sapien
acaactctgcatctaccggttgtatgatacaag

SEQ ID NO: 439628 - DNA, 33 bp, Homo sapien
acaactctgcatctactggttgtatgatacaag

SEQ ID NO: 439629 - DNA, 33 bp, Homo sapien
aacagatggtctttaaataaccttcaaacgaga

SEQ ID NO: 439630 - DNA, 33 bp, Homo sapien
aacagatggtctttaagtaaccttcaaacgaga

SEQ ID NO: 439631 - DNA, 33 bp, Homo sapien
gtaagatcaggaaataagacatcagatggggct

SEQ ID NO: 439632 - DNA, 33 bp, Homo sapien
gtaagatcaggaaataggacatcagatggggct

SEQ ID NO: 439633 - DNA, 33 bp, Homo sapien
tggtgatggtggtttaactatagccagctttga

SEQ ID NO: 439634 - DNA, 33 bp, Homo sapien
tggtgatggtggtttagctatagccagctttga

SEQ ID NO: 439635 - DNA, 33 bp, Homo sapien
ctttccaaagggaagaagcaagttgaggcaggc

SEQ ID NO: 439636 - DNA, 33 bp, Homo sapien
ctttccaaagggaagacgcaagttgaggcaggc

SEQ ID NO: 439637 - DNA, 33 bp, Homo sapien
tatgtagcactgaaacacatattttgagagtta

SEQ ID NO: 439638 - DNA, 33 bp, Homo sapien
tatgtagcactgaaacgcatattttgagagtta

SEQ ID NO: 439639 - DNA, 33 bp, Homo sapien
cataaagggtgtttcaatatgctttatgctctc

SEQ ID NO: 439640 - DNA, 33 bp, Homo sapien
cataaagggtgtttcagtatgctttatgctctc

SEQ ID NO: 439641 - DNA, 33 bp, Homo sapien
gcagctctagtctgtacctattctctggattct

SEQ ID NO: 439642 - DNA, 33 bp, Homo sapien
gcagctctagtctgtatctattctctggattct

SEQ ID NO: 439643 - DNA, 33 bp, Homo sapien
ctccacttccaattacacatatctggtcatttg

SEQ ID NO: 439644 - DNA, 33 bp, Homo sapien
ctccacttccaattacgcatatctggtcatttg

SEQ ID NO: 439645 - DNA, 33 bp, Homo sapien
cgggtgctatgggataactgcatttcactgtac

SEQ ID NO: 439646 - DNA, 33 bp, Homo sapien
cgggtgctatgggatacctgcatttcactgtac

SEQ ID NO: 439647 - DNA, 33 bp, Homo sapien
acagcatataaatcaaatccttcattcaacact

SEQ ID NO: 439648 - DNA, 33 bp, Homo sapien
acagcatataaatcaactccttcattcaacact

SEQ ID NO: 439649 - DNA, 33 bp, Homo sapien
cctgacaacttgttctaactgtagaaactaggg

SEQ ID NO: 439650 - DNA, 33 bp, Homo sapien
cctgacaacttgttctgactgtagaaactaggg

SEQ ID NO: 439651 - DNA, 33 bp, Homo sapien
caactttgtgaaagaaaatcaaatttagaatca

SEQ ID NO: 439652 - DNA, 33 bp, Homo sapien
caactttgtgaaagaacatcaaatttagaatca

SEQ ID NO: 439653 - DNA, 33 bp, Homo sapien
ttttccctcattcagagtagtcagtagttcctg

SEQ ID NO: 439654 - DNA, 33 bp, Homo sapien
ttttccctcattcagattagtcagtagttcctg

SEQ ID NO: 439655 - DNA, 33 bp, Homo sapien
gtctacttgagagaagacatatttagaaaaaca

SEQ ID NO: 439656 - DNA, 33 bp, Homo sapien
gtctacttgagagaaggcatatttagaaaaaca

SEQ ID NO: 439657 - DNA, 33 bp, Homo sapien
tcttcagcagtgagtaaagaccatccagtggag

SEQ ID NO: 439658 - DNA, 33 bp, Homo sapien
tcttcagcagtgagtatagaccatccagtggag

SEQ ID NO: 439659 - DNA, 33 bp, Homo sapien
tacattgaattcaaaccgtccatccccgtacat

SEQ ID NO: 439660 - DNA, 33 bp, Homo sapien
tacattgaattcaaactgtccatccccgtacat

SEQ ID NO: 439661 - DNA, 33 bp, Homo sapien
aacagtattagattgactaaaagcatggtgcat

SEQ ID NO: 439662 - DNA, 33 bp, Homo sapien
aacagtattagattgattaaaagcatggtgcat

SEQ ID NO: 439663 - DNA, 33 bp, Homo sapien
aaagacatactcccacactatttcgcatttact

SEQ ID NO: 439664 - DNA, 33 bp, Homo sapien
aaagacatactcccacgctatttcgcatttact

SEQ ID NO: 439665 - DNA, 33 bp, Homo sapien
tctccttgcacatttaaatttttaacctatcat

SEQ ID NO: 439666 - DNA, 33 bp, Homo sapien
tctccttgcacatttagatttttaacctatcat

SEQ ID NO: 439667 - DNA, 33 bp, Homo sapien
cagaaacctccaatcaatctgacagaacacacc

SEQ ID NO: 439668 - DNA, 33 bp, Homo sapien
cagaaacctccaatcagtctgacagaacacacc

SEQ ID NO: 439669 - DNA, 33 bp, Homo sapien
tgatctaagacttaataagacatcacttggggt

SEQ ID NO: 439670 - DNA, 33 bp, Homo sapien
tgatctaagacttaatgagacatcacttggggt

SEQ ID NO: 439671 - DNA, 33 bp, Homo sapien
ccttctgacatggaaactttattcctttctcta

SEQ ID NO: 439672 - DNA, 33 bp, Homo sapien
ccttctgacatggaaattttattcctttctcta

SEQ ID NO: 439673 - DNA, 33 bp, Homo sapien
aataatgtttgactcagtccctggcaccatggt

SEQ ID NO: 439674 - DNA, 33 bp, Homo sapien
aataatgtttgactcattccctggcaccatggt

SEQ ID NO: 439675 - DNA, 33 bp, Homo sapien
tccctggttctggccactggagttgctcactca

SEQ ID NO: 439676 - DNA, 33 bp, Homo sapien
tccctggttctggccattggagttgctcactca

SEQ ID NO: 439677 - DNA, 33 bp, Homo sapien
gtttcatctacctgaaatagttctttcacctat

SEQ ID NO: 439678 - DNA, 33 bp, Homo sapien
gtttcatctacctgaactagttctttcacctat

SEQ ID NO: 439679 - DNA, 33 bp, Homo sapien
catattttatccatgacccattctctctctgtc

SEQ ID NO: 439680 - DNA, 33 bp, Homo sapien
catattttatccatgatccattctctctctgtc

SEQ ID NO: 439681 - DNA, 33 bp, Homo sapien
ctttctgaactaacagcatatgatgaacatctt

SEQ ID NO: 439682 - DNA, 33 bp, Homo sapien
ctttctgaactaacagtatatgatgaacatctt

SEQ ID NO: 439683 - DNA, 33 bp, Homo sapien
acagcacacggggagcaagggcagcagcctctt

SEQ ID NO: 439684 - DNA, 33 bp, Homo sapien
acagcacacggggagcgagggcagcagcctctt

SEQ ID NO: 439685 - DNA, 33 bp, Homo sapien
gctgccgtgaaggtgaccttttattccctttcc

SEQ ID NO: 439686 - DNA, 33 bp, Homo sapien
gctgccgtgaaggtgatcttttattccctttcc

SEQ ID NO: 439687 - DNA, 33 bp, Homo sapien
gccagttggcattcggcagcacgttggagtcag

SEQ ID NO: 439688 - DNA, 33 bp, Homo sapien
gccagttggcattcggtagcacgttggagtcag

SEQ ID NO: 439689 - DNA, 33 bp, Homo sapien
aggtcctggctcagcaatcaagccatagcaaca

SEQ ID NO: 439690 - DNA, 33 bp, Homo sapien
aggtcctggctcagcagtcaagccatagcaaca

SEQ ID NO: 439691 - DNA, 33 bp, Homo sapien
ggtttggattatgatgccaactagtaaatattc

SEQ ID NO: 439692 - DNA, 33 bp, Homo sapien
ggtttggattatgatggcaactagtaaatattc

SEQ ID NO: 439693 - DNA, 33 bp, Homo sapien
cagaaatcatactaagacctttaaatgcattat

SEQ ID NO: 439694 - DNA, 33 bp, Homo sapien
cagaaatcatactaagccctttaaatgcattat

SEQ ID NO: 439695 - DNA, 33 bp, Homo sapien
ttcccctgggcctaagaccaccttgactagaac

SEQ ID NO: 439696 - DNA, 33 bp, Homo sapien
ttcccctgggcctaagtccaccttgactagaac

SEQ ID NO: 439697 - DNA, 33 bp, Homo sapien
ccccttgtaccagctaacattctataaaattgg

SEQ ID NO: 439698 - DNA, 33 bp, Homo sapien
ccccttgtaccagctagcattctataaaattgg

SEQ ID NO: 439699 - DNA, 33 bp, Homo sapien
aagtgaatgccgtagccgaggacattacagcct

SEQ ID NO: 439700 - DNA, 33 bp, Homo sapien
aagtgaatgccgtagcggaggacattacagcct

SEQ ID NO: 439701 - DNA, 33 bp, Homo sapien
ttagggcttggcatgaagatttcatccagatgt

SEQ ID NO: 439702 - DNA, 33 bp, Homo sapien
ttagggcttggcatgaggatttcatccagatgt

SEQ ID NO: 439703 - DNA, 33 bp, Homo sapien
tgggtaacagagaggcaaaagtccctgctcagt

SEQ ID NO: 439704 - DNA, 33 bp, Homo sapien
tgggtaacagagaggcgaaagtccctgctcagt

SEQ ID NO: 439705 - DNA, 33 bp, Homo sapien
gtatctttttcagggaaccaattaagaacgcta

SEQ ID NO: 439706 - DNA, 33 bp, Homo sapien
gtatctttttcagggatccaattaagaacgcta

SEQ ID NO: 439707 - DNA, 33 bp, Homo sapien
tctaaaatttcttaggccagcacagcttaggaa

SEQ ID NO: 439708 - DNA, 33 bp, Homo sapien
tctaaaatttcttaggtcagcacagcttaggaa

SEQ ID NO: 439709 - DNA, 33 bp, Homo sapien
tgatgtttaattttcagaatgcagtaaggcttc

SEQ ID NO: 439710 - DNA, 33 bp, Homo sapien
tgatgtttaattttcataatgcagtaaggcttc

SEQ ID NO: 439711 - DNA, 33 bp, Homo sapien
tagcaatgacaaacaaagtcccatcccatccag

SEQ ID NO: 439712 - DNA, 33 bp, Homo sapien
tagcaatgacaaacaacgtcccatcccatccag

SEQ ID NO: 439713 - DNA, 33 bp, Homo sapien
tgagcataatgattaagggaaggaatcgtgaag

SEQ ID NO: 439714 - DNA, 33 bp, Homo sapien
tgagcataatgattaatggaaggaatcgtgaag

SEQ ID NO: 439715 - DNA, 33 bp, Homo sapien
ttcccttatactcttacgggactaccatcatat

SEQ ID NO: 439716 - DNA, 33 bp, Homo sapien
ttcccttatactcttatgggactaccatcatat

SEQ ID NO: 439717 - DNA, 33 bp, Homo sapien
agtggttatagccagggcaagagtttggtctct

SEQ ID NO: 439718 - DNA, 33 bp, Homo sapien
agtggttatagccaggtcaagagtttggtctct

SEQ ID NO: 439719 - DNA, 33 bp, Homo sapien
ttgcctaaagccaggcagcaatgggagatcaaa

SEQ ID NO: 439720 - DNA, 33 bp, Homo sapien
ttgcctaaagccaggccgcaatgggagatcaaa

SEQ ID NO: 439721 - DNA, 33 bp, Homo sapien
gctcaggttgtagaaaaggttagtgaagtcggg

SEQ ID NO: 439722 - DNA, 33 bp, Homo sapien
gctcaggttgtagaaatggttagtgaagtcggg

SEQ ID NO: 439723 - DNA, 33 bp, Homo sapien
tcttattctctacttacagatctgccccatata

SEQ ID NO: 439724 - DNA, 33 bp, Homo sapien
tcttattctctacttatagatctgccccatata

SEQ ID NO: 439725 - DNA, 33 bp, Homo sapien
tacaggtggaaaatgcccttctctttgatggag

SEQ ID NO: 439726 - DNA, 33 bp, Homo sapien
tacaggtggaaaatgctcttctctttgatggag

SEQ ID NO: 439727 - DNA, 33 bp, Homo sapien
gtttatcaagctgtcccataaccccgtgctaaa

SEQ ID NO: 439728 - DNA, 33 bp, Homo sapien
gtttatcaagctgtccgataaccccgtgctaaa

SEQ ID NO: 439729 - DNA, 33 bp, Homo sapien
tgggaattgttctggcaatgtgggtgaatctct

SEQ ID NO: 439730 - DNA, 33 bp, Homo sapien
tgggaattgttctggccatgtgggtgaatctct

SEQ ID NO: 439731 - DNA, 33 bp, Homo sapien
aggcatagggaatggaagaaaatgctggactta

SEQ ID NO: 439732 - DNA, 33 bp, Homo sapien
aggcatagggaatggaggaaaatgctggactta

SEQ ID NO: 439733 - DNA, 33 bp, Homo sapien
ggtcattccttctttacctgcccattgaacatt

SEQ ID NO: 439734 - DNA, 33 bp, Homo sapien
ggtcattccttctttatctgcccattgaacatt

SEQ ID NO: 439735 - DNA, 33 bp, Homo sapien
catatagaagagagacaaaactgcatagaaaag

SEQ ID NO: 439736 - DNA, 33 bp, Homo sapien
catatagaagagagaccaaactgcatagaaaag

SEQ ID NO: 439737 - DNA, 33 bp, Homo sapien
tctttacggcggaaaaaccagtctgtatttctt

SEQ ID NO: 439738 - DNA, 33 bp, Homo sapien
tctttacggcggaaaacccagtctgtatttctt

SEQ ID NO: 439739 - DNA, 33 bp, Homo sapien
accaaaagatgtgaacaaaaatgtaatgcatga

SEQ ID NO: 439740 - DNA, 33 bp, Homo sapien
accaaaagatgtgaaccaaaatgtaatgcatga

SEQ ID NO: 439741 - DNA, 33 bp, Homo sapien
aagacgatagacacataagggatgaccattaga

SEQ ID NO: 439742 - DNA, 33 bp, Homo sapien
aagacgatagacacatgagggatgaccattaga

SEQ ID NO: 439743 - DNA, 33 bp, Homo sapien
tttagttatgagatccagagatggcatgatttc

SEQ ID NO: 439744 - DNA, 33 bp, Homo sapien
tttagttatgagatccggagatggcatgatttc

SEQ ID NO: 439745 - DNA, 33 bp, Homo sapien
gtttcctaaatctctgaaagttggcattgtctc

SEQ ID NO: 439746 - DNA, 33 bp, Homo sapien
gtttcctaaatctctggaagttggcattgtctc

SEQ ID NO: 439747 - DNA, 33 bp, Homo sapien
tttacatagcaaattaacacaaacttatttttt

SEQ ID NO: 439748 - DNA, 33 bp, Homo sapien
tttacatagcaaattaccacaaacttatttttt

SEQ ID NO: 439749 - DNA, 33 bp, Homo sapien
actattttctgttcctcagctttcagactcaga

SEQ ID NO: 439750 - DNA, 33 bp, Homo sapien
actattttctgttccttagctttcagactcaga

SEQ ID NO: 439751 - DNA, 33 bp, Homo sapien
aaccatcacaatagagaagtcttaaattccgtc

SEQ ID NO: 439752 - DNA, 33 bp, Homo sapien
aaccatcacaatagaggagtcttaaattccgtc

SEQ ID NO: 439753 - DNA, 33 bp, Homo sapien
ggccaagagctactgaaaatggttgttaacatg

SEQ ID NO: 439754 - DNA, 33 bp, Homo sapien
ggccaagagctactgataatggttgttaacatg

SEQ ID NO: 439755 - DNA, 33 bp, Homo sapien
tctgcttaggattttgaagctctggtaaacgac

SEQ ID NO: 439756 - DNA, 33 bp, Homo sapien
tctgcttaggattttgcagctctggtaaacgac

SEQ ID NO: 439757 - DNA, 33 bp, Homo sapien
atatcctgagtcgtcccaattcttagacctttt

SEQ ID NO: 439758 - DNA, 33 bp, Homo sapien
atatcctgagtcgtcctaattcttagacctttt

SEQ ID NO: 439759 - DNA, 33 bp, Homo sapien
ccatcaagaatggtcaatataggcctccaatct

SEQ ID NO: 439760 - DNA, 33 bp, Homo sapien
ccatcaagaatggtcagtataggcctccaatct

SEQ ID NO: 439761 - DNA, 33 bp, Homo sapien
tccacttaaaaaaagcaacaacaaggataaata

SEQ ID NO: 439762 - DNA, 33 bp, Homo sapien
tccacttaaaaaaagcgacaacaaggataaata

SEQ ID NO: 439763 - DNA, 33 bp, Homo sapien
gacttcatgtggacaacggctaacagtgccatt

SEQ ID NO: 439764 - DNA, 33 bp, Homo sapien
gacttcatgtggacaatggctaacagtgccatt

SEQ ID NO: 439765 - DNA, 33 bp, Homo sapien
aaaaaaaagtccaccactgaatacatcagaaca

SEQ ID NO: 439766 - DNA, 33 bp, Homo sapien
aaaaaaaagtccaccattgaatacatcagaaca

SEQ ID NO: 439767 - DNA, 33 bp, Homo sapien
ttgcaccaacctaacaatgcctacctgcatatt

SEQ ID NO: 439768 - DNA, 33 bp, Homo sapien
ttgcaccaacctaacagtgcctacctgcatatt

SEQ ID NO: 439769 - DNA, 33 bp, Homo sapien
attttcttatactgcaacaaagctagcacattt

SEQ ID NO: 439770 - DNA, 33 bp, Homo sapien
attttcttatactgcatcaaagctagcacattt

SEQ ID NO: 439771 - DNA, 33 bp, Homo sapien
tcaataccatagccaccagtgaaatgtagttat

SEQ ID NO: 439772 - DNA, 33 bp, Homo sapien
tcaataccatagccactagtgaaatgtagttat

SEQ ID NO: 439773 - DNA, 33 bp, Homo sapien
gttttccctttgtgtgaaataatgtaagtaagt

SEQ ID NO: 439774 - DNA, 33 bp, Homo sapien
gttttccctttgtgtgcaataatgtaagtaagt

SEQ ID NO: 439775 - DNA, 33 bp, Homo sapien
actcaggtaaaactaccgctagcctggtaaagt

SEQ ID NO: 439776 - DNA, 33 bp, Homo sapien
actcaggtaaaactactgctagcctggtaaagt

SEQ ID NO: 439777 - DNA, 33 bp, Homo sapien
atttaaaagtagcaatcagatgttagtgtcctt

SEQ ID NO: 439778 - DNA, 33 bp, Homo sapien
atttaaaagtagcaattagatgttagtgtcctt

SEQ ID NO: 439779 - DNA, 33 bp, Homo sapien
aacagaatttgcatgaatatccatgaccaagac

SEQ ID NO: 439780 - DNA, 33 bp, Homo sapien
aacagaatttgcatgagtatccatgaccaagac

SEQ ID NO: 439781 - DNA, 33 bp, Homo sapien
accctgcaaactctagaccatacctgtcctaga

SEQ ID NO: 439782 - DNA, 33 bp, Homo sapien
accctgcaaactctagtccatacctgtcctaga

SEQ ID NO: 439783 - DNA, 33 bp, Homo sapien
tggaaatttggatccacgcaaataaacaaaaag

SEQ ID NO: 439784 - DNA, 33 bp, Homo sapien
tggaaatttggatccatgcaaataaacaaaaag

SEQ ID NO: 439785 - DNA, 33 bp, Homo sapien
caaaatgttgtggttcaatgtgcatttttcatc

SEQ ID NO: 439786 - DNA, 33 bp, Homo sapien
caaaatgttgtggttcgatgtgcatttttcatc

SEQ ID NO: 439787 - DNA, 33 bp, Homo sapien
cctctaaatgcctctacactaggagacttgctg

SEQ ID NO: 439788 - DNA, 33 bp, Homo sapien
cctctaaatgcctctatactaggagacttgctg

SEQ ID NO: 439789 - DNA, 33 bp, Homo sapien
atttgtcgaaaacgcgccaagataataaggggc

SEQ ID NO: 439790 - DNA, 33 bp, Homo sapien
atttgtcgaaaacgcgtcaagataataaggggc

SEQ ID NO: 439791 - DNA, 33 bp, Homo sapien
aggagatgacccttgaaatgggctttataggat

SEQ ID NO: 439792 - DNA, 33 bp, Homo sapien
aggagatgacccttgagatgggctttataggat

SEQ ID NO: 439793 - DNA, 33 bp, Homo sapien
acactcgatgggaacaatgaaatggtttaagta

SEQ ID NO: 439794 - DNA, 33 bp, Homo sapien
acactcgatgggaacagtgaaatggtttaagta

SEQ ID NO: 439795 - DNA, 33 bp, Homo sapien
caccttggaacaaaataaattccacgtatatga

SEQ ID NO: 439796 - DNA, 33 bp, Homo sapien
caccttggaacaaaattaattccacgtatatga

SEQ ID NO: 439797 - DNA, 33 bp, Homo sapien
tagagttgagttggagactagcaaataagattg

SEQ ID NO: 439798 - DNA, 33 bp, Homo sapien
tagagttgagttggagtctagcaaataagattg

SEQ ID NO: 439799 - DNA, 33 bp, Homo sapien
tgcctcacacctcatgcatagtaccaggacctt

SEQ ID NO: 439800 - DNA, 33 bp, Homo sapien
tgcctcacacctcatggatagtaccaggacctt

SEQ ID NO: 439801 - DNA, 33 bp, Homo sapien
tgcaataaaagccagactatataacatctttct

SEQ ID NO: 439802 - DNA, 33 bp, Homo sapien
tgcaataaaagccagattatataacatctttct

SEQ ID NO: 439803 - DNA, 33 bp, Homo sapien
gtggttcttttgtttaaagcaagaagtatgtgg

SEQ ID NO: 439804 - DNA, 33 bp, Homo sapien
gtggttcttttgtttagagcaagaagtatgtgg

SEQ ID NO: 439805 - DNA, 33 bp, Homo sapien
aggtctcaatccttaaatgggctatcaaccagt

SEQ ID NO: 439806 - DNA, 33 bp, Homo sapien
aggtctcaatccttaagtgggctatcaaccagt

SEQ ID NO: 439807 - DNA, 33 bp, Homo sapien
gcctctctcatgtatcccccacatggccgctgg

SEQ ID NO: 439808 - DNA, 33 bp, Homo sapien
gcctctctcatgtatctcccacatggccgctgg

SEQ ID NO: 439809 - DNA, 33 bp, Homo sapien
aaaatgaagtaatataaagattgaccttgtctc

SEQ ID NO: 439810 - DNA, 33 bp, Homo sapien
aaaatgaagtaatatagagattgaccttgtctc

SEQ ID NO: 439811 - DNA, 33 bp, Homo sapien
gaatatggagtttttaagtgtggtggtcatgat

SEQ ID NO: 439812 - DNA, 33 bp, Homo sapien
gaatatggagtttttacgtgtggtggtcatgat

SEQ ID NO: 439813 - DNA, 33 bp, Homo sapien
aataaaggattggctaactgaatactcagactt

SEQ ID NO: 439814 - DNA, 33 bp, Homo sapien
aataaaggattggctacctgaatactcagactt

SEQ ID NO: 439815 - DNA, 33 bp, Homo sapien
gcaggaactcaaagagaataatggtatgacaag

SEQ ID NO: 439816 - DNA, 33 bp, Homo sapien
gcaggaactcaaagaggataatggtatgacaag

SEQ ID NO: 439817 - DNA, 33 bp, Homo sapien
ttactttcagatattccattctacgggttgtct

SEQ ID NO: 439818 - DNA, 33 bp, Homo sapien
ttactttcagatattctattctacgggttgtct

SEQ ID NO: 439819 - DNA, 33 bp, Homo sapien
ctggcccatcttaagtgaccccgataagtcaca

SEQ ID NO: 439820 - DNA, 33 bp, Homo sapien
ctggcccatcttaagttaccccgataagtcaca

SEQ ID NO: 439821 - DNA, 33 bp, Homo sapien
gtagtattccatggtacgtatgtatccaagttt

SEQ ID NO: 439822 - DNA, 33 bp, Homo sapien
gtagtattccatggtatgtatgtatccaagttt

SEQ ID NO: 439823 - DNA, 33 bp, Homo sapien
aggaagctggacatacggatttggatttcagaa

SEQ ID NO: 439824 - DNA, 33 bp, Homo sapien
aggaagctggacatactgatttggatttcagaa

SEQ ID NO: 439825 - DNA, 33 bp, Homo sapien
gcagaactatctggtcaaaaataaatcacattt

SEQ ID NO: 439826 - DNA, 33 bp, Homo sapien
gcagaactatctggtcgaaaataaatcacattt

SEQ ID NO: 439827 - DNA, 33 bp, Homo sapien
taaatacatattgaccactagtaaaagtcagcg

SEQ ID NO: 439828 - DNA, 33 bp, Homo sapien
taaatacatattgacccctagtaaaagtcagcg

SEQ ID NO: 439829 - DNA, 33 bp, Homo sapien
cttgattttcaacacaccaaggtgatcaggatg

SEQ ID NO: 439830 - DNA, 33 bp, Homo sapien
cttgattttcaacacagcaaggtgatcaggatg

SEQ ID NO: 439831 - DNA, 33 bp, Homo sapien
cagccattaacagagacgccccagaaataagta

SEQ ID NO: 439832 - DNA, 33 bp, Homo sapien
cagccattaacagagatgccccagaaataagta

SEQ ID NO: 439833 - DNA, 33 bp, Homo sapien
gatcgtatggtaggtaactctatgtttaacctg

SEQ ID NO: 439834 - DNA, 33 bp, Homo sapien
gatcgtatggtaggtacctctatgtttaacctg

SEQ ID NO: 439835 - DNA, 33 bp, Homo sapien
accttagatttagcaacggtttcttagatatga

SEQ ID NO: 439836 - DNA, 33 bp, Homo sapien
accttagatttagcaatggtttcttagatatga

SEQ ID NO: 439837 - DNA, 33 bp, Homo sapien
gcttctttttgttccaatgaattatacaaggtt

SEQ ID NO: 439838 - DNA, 33 bp, Homo sapien
gcttctttttgttccagtgaattatacaaggtt

SEQ ID NO: 439839 - DNA, 33 bp, Homo sapien
gcaactgccaaaaaaaatatttgaatatcttta

SEQ ID NO: 439840 - DNA, 33 bp, Homo sapien
gcaactgccaaaaaaagtatttgaatatcttta

SEQ ID NO: 439841 - DNA, 33 bp, Homo sapien
ggcttacacaaggtcacgctctctatttgaata

SEQ ID NO: 439842 - DNA, 33 bp, Homo sapien
ggcttacacaaggtcatgctctctatttgaata

SEQ ID NO: 439843 - DNA, 33 bp, Homo sapien
gtccaagtttagtagcaagcccattctccgttt

SEQ ID NO: 439844 - DNA, 33 bp, Homo sapien
gtccaagtttagtagcgagcccattctccgttt

SEQ ID NO: 439845 - DNA, 33 bp, Homo sapien
ggcaagcggcaatgaaatgggcgctgagagtag

SEQ ID NO: 439846 - DNA, 33 bp, Homo sapien
ggcaagcggcaatgaagtgggcgctgagagtag

SEQ ID NO: 439847 - DNA, 33 bp, Homo sapien
agcaagcacattttaactggaaacaaacaggat

SEQ ID NO: 439848 - DNA, 33 bp, Homo sapien
agcaagcacattttaagtggaaacaaacaggat

SEQ ID NO: 439849 - DNA, 33 bp, Homo sapien
tatctttttcaccgtacgtaaacctgagataaa

SEQ ID NO: 439850 - DNA, 33 bp, Homo sapien
tatctttttcaccgtatgtaaacctgagataaa

SEQ ID NO: 439851 - DNA, 33 bp, Homo sapien
catttttttccttcaaatgagtactttgtgttt

SEQ ID NO: 439852 - DNA, 33 bp, Homo sapien
catttttttccttcaagtgagtactttgtgttt

SEQ ID NO: 439853 - DNA, 33 bp, Homo sapien
catttcatattcccaggaagtatgcagtgccat

SEQ ID NO: 439854 - DNA, 33 bp, Homo sapien
catttcatattcccagtaagtatgcagtgccat

SEQ ID NO: 439855 - DNA, 33 bp, Homo sapien
ctccactaataacaaaagactgaacttcaacac

SEQ ID NO: 439856 - DNA, 33 bp, Homo sapien
ctccactaataacaaaggactgaacttcaacac

SEQ ID NO: 439857 - DNA, 33 bp, Homo sapien
gcccaagatctctttacgaagaaccatgtatgt

SEQ ID NO: 439858 - DNA, 33 bp, Homo sapien
gcccaagatctctttatgaagaaccatgtatgt

SEQ ID NO: 439859 - DNA, 33 bp, Homo sapien
tgtattcaagcatggaaattttttggcacataa

SEQ ID NO: 439860 - DNA, 33 bp, Homo sapien
tgtattcaagcatggatattttttggcacataa

SEQ ID NO: 439861 - DNA, 33 bp, Homo sapien
gaacctgtgacaattacaggttaagagtagcag

SEQ ID NO: 439862 - DNA, 33 bp, Homo sapien
gaacctgtgacaattataggttaagagtagcag

SEQ ID NO: 439863 - DNA, 33 bp, Homo sapien
ttgaaaaagaaaatataaagcacagtgctatga

SEQ ID NO: 439864 - DNA, 33 bp, Homo sapien
ttgaaaaagaaaatatcaagcacagtgctatga

SEQ ID NO: 439865 - DNA, 33 bp, Homo sapien
atttatgttcatgttaccgactagacacatact

SEQ ID NO: 439866 - DNA, 33 bp, Homo sapien
atttatgttcatgttatcgactagacacatact

SEQ ID NO: 439867 - DNA, 33 bp, Homo sapien
gaatttataatactggaatctgctactctaatg

SEQ ID NO: 439868 - DNA, 33 bp, Homo sapien
gaatttataatactgggatctgctactctaatg

SEQ ID NO: 439869 - DNA, 33 bp, Homo sapien
attgtgttttaagatcacaaaaagtgctagata

SEQ ID NO: 439870 - DNA, 33 bp, Homo sapien
attgtgttttaagatcgcaaaaagtgctagata

SEQ ID NO: 439871 - DNA, 33 bp, Homo sapien
actgagctaaggatgcactttcttctaatcttg

SEQ ID NO: 439872 - DNA, 33 bp, Homo sapien
actgagctaaggatgctctttcttctaatcttg

SEQ ID NO: 439873 - DNA, 33 bp, Homo sapien
actttgtgttcaatcaaaattaactgcttcttc

SEQ ID NO: 439874 - DNA, 33 bp, Homo sapien
actttgtgttcaatcagaattaactgcttcttc

SEQ ID NO: 439875 - DNA, 33 bp, Homo sapien
aatgtgctgtgaaacactctaactgaaatcagt

SEQ ID NO: 439876 - DNA, 33 bp, Homo sapien
aatgtgctgtgaaacattctaactgaaatcagt

SEQ ID NO: 439877 - DNA, 33 bp, Homo sapien
acttgtggactaaaacacaccattttggtacca

SEQ ID NO: 439878 - DNA, 33 bp, Homo sapien
acttgtggactaaaacgcaccattttggtacca

SEQ ID NO: 439879 - DNA, 33 bp, Homo sapien
tctcagcttgtttcctcaactacatatctggaa

SEQ ID NO: 439880 - DNA, 33 bp, Homo sapien
tctcagcttgtttccttaactacatatctggaa

SEQ ID NO: 439881 - DNA, 33 bp, Homo sapien
cttccctgacccccacactagtcatcatcaaca

SEQ ID NO: 439882 - DNA, 33 bp, Homo sapien
cttccctgacccccacgctagtcatcatcaaca

SEQ ID NO: 439883 - DNA, 33 bp, Homo sapien
aataaacctgtctgaaactttgagaaataggct

SEQ ID NO: 439884 - DNA, 33 bp, Homo sapien
aataaacctgtctgaagctttgagaaataggct

SEQ ID NO: 439885 - DNA, 33 bp, Homo sapien
gggtcctttctcccaacctggattatcaccaat

SEQ ID NO: 439886 - DNA, 33 bp, Homo sapien
gggtcctttctcccaagctggattatcaccaat

SEQ ID NO: 439887 - DNA, 33 bp, Homo sapien
aacaaaataccaaaaaatattcagagagccttg

SEQ ID NO: 439888 - DNA, 33 bp, Homo sapien
aacaaaataccaaaaagtattcagagagccttg

SEQ ID NO: 439889 - DNA, 33 bp, Homo sapien
cagcacatattagtcactaagccctttccaact

SEQ ID NO: 439890 - DNA, 33 bp, Homo sapien
cagcacatattagtcattaagccctttccaact

SEQ ID NO: 439891 - DNA, 33 bp, Homo sapien
acattgatgggaggaaagaatgacactgatgcg

SEQ ID NO: 439892 - DNA, 33 bp, Homo sapien
acattgatgggaggaaggaatgacactgatgcg

SEQ ID NO: 439893 - DNA, 33 bp, Homo sapien
acactgatgcgtaattcaaaagccatacttagt

SEQ ID NO: 439894 - DNA, 33 bp, Homo sapien
acactgatgcgtaattgaaaagccatacttagt

SEQ ID NO: 439895 - DNA, 33 bp, Homo sapien
aaataatcaaaaatgaataacttctgtctacta

SEQ ID NO: 439896 - DNA, 33 bp, Homo sapien
aaataatcaaaaatgagtaacttctgtctacta

SEQ ID NO: 439897 - DNA, 33 bp, Homo sapien
caacaattatggctaccaaatgaaattgcatag

SEQ ID NO: 439898 - DNA, 33 bp, Homo sapien
caacaattatggctacgaaatgaaattgcatag

SEQ ID NO: 439899 - DNA, 33 bp, Homo sapien
agcagaaaatggataaaggttgaaaaagtattt

SEQ ID NO: 439900 - DNA, 33 bp, Homo sapien
agcagaaaatggataagggttgaaaaagtattt

SEQ ID NO: 439901 - DNA, 33 bp, Homo sapien
ggtagaatcctactcactagcctacagacctgg

SEQ ID NO: 439902 - DNA, 33 bp, Homo sapien
ggtagaatcctactcattagcctacagacctgg

SEQ ID NO: 439903 - DNA, 33 bp, Homo sapien
caagaaaattactatgaaccacaagtagattcc

SEQ ID NO: 439904 - DNA, 33 bp, Homo sapien
caagaaaattactatggaccacaagtagattcc

SEQ ID NO: 439905 - DNA, 33 bp, Homo sapien
agaggaagaaaaatagcattgctagttcagttt

SEQ ID NO: 439906 - DNA, 33 bp, Homo sapien
agaggaagaaaaatagtattgctagttcagttt

SEQ ID NO: 439907 - DNA, 33 bp, Homo sapien
tcacattagagtcagcacagtaaagaggtaatt

SEQ ID NO: 439908 - DNA, 33 bp, Homo sapien
tcacattagagtcagcgcagtaaagaggtaatt

SEQ ID NO: 439909 - DNA, 33 bp, Homo sapien
caaaatacattataccaaaagcaaaatgagatt

SEQ ID NO: 439910 - DNA, 33 bp, Homo sapien
caaaatacattataccgaaagcaaaatgagatt

SEQ ID NO: 439911 - DNA, 33 bp, Homo sapien
ttaagggaaacatcaagggaaaacttagacaaa

SEQ ID NO: 439912 - DNA, 33 bp, Homo sapien
ttaagggaaacatcaatggaaaacttagacaaa

SEQ ID NO: 439913 - DNA, 33 bp, Homo sapien
aaccttggtattgttacctgttgcatcagtgac

SEQ ID NO: 439914 - DNA, 33 bp, Homo sapien
aaccttggtattgttatctgttgcatcagtgac

SEQ ID NO: 439915 - DNA, 33 bp, Homo sapien
tcatgtgataaaaggacacgtatgtgctggcag

SEQ ID NO: 439916 - DNA, 33 bp, Homo sapien
tcatgtgataaaaggagacgtatgtgctggcag

SEQ ID NO: 439917 - DNA, 33 bp, Homo sapien
ggagctgctaaagtcaaataggtgggaaacaca

SEQ ID NO: 439918 - DNA, 33 bp, Homo sapien
ggagctgctaaagtcagataggtgggaaacaca

SEQ ID NO: 439919 - DNA, 33 bp, Homo sapien
taattaatatgtgaaaagaacaacattaggttt

SEQ ID NO: 439920 - DNA, 33 bp, Homo sapien
taattaatatgtgaaaggaacaacattaggttt

SEQ ID NO: 439921 - DNA, 33 bp, Homo sapien
ttagtaaggcctggcaaaatgtgatttagtatt

SEQ ID NO: 439922 - DNA, 33 bp, Homo sapien
ttagtaaggcctggcagaatgtgatttagtatt

SEQ ID NO: 439923 - DNA, 33 bp, Homo sapien
actttttaggggccaacgtgcaaagaagagttg

SEQ ID NO: 439924 - DNA, 33 bp, Homo sapien
actttttaggggccaatgtgcaaagaagagttg

SEQ ID NO: 439925 - DNA, 33 bp, Homo sapien
gggaatcacactgaaacgcaagaaaggatcctg

SEQ ID NO: 439926 - DNA, 33 bp, Homo sapien
gggaatcacactgaaaggcaagaaaggatcctg

SEQ ID NO: 439927 - DNA, 33 bp, Homo sapien
gggagcacccaggaaccaacctgaacctcctct

SEQ ID NO: 439928 - DNA, 33 bp, Homo sapien
gggagcacccaggaacgaacctgaacctcctct

SEQ ID NO: 439929 - DNA, 33 bp, Homo sapien
tcttgtatttccttgacgaaaattttccttgat

SEQ ID NO: 439930 - DNA, 33 bp, Homo sapien
tcttgtatttccttgatgaaaattttccttgat

SEQ ID NO: 439931 - DNA, 33 bp, Homo sapien
ttgcaaactcttatgacgttggctgaatatgtt

SEQ ID NO: 439932 - DNA, 33 bp, Homo sapien
ttgcaaactcttatgatgttggctgaatatgtt

SEQ ID NO: 439933 - DNA, 33 bp, Homo sapien
gcctctggtgagtttgcaaaatcctctgttaaa

SEQ ID NO: 439934 - DNA, 33 bp, Homo sapien
gcctctggtgagtttgtaaaatcctctgttaaa

SEQ ID NO: 439935 - DNA, 33 bp, Homo sapien
tgttttgtggtataaaagactaaattttagaaa

SEQ ID NO: 439936 - DNA, 33 bp, Homo sapien
tgttttgtggtataaaggactaaattttagaaa

SEQ ID NO: 439937 - DNA, 33 bp, Homo sapien
taatgcacatttggtacctgggccacttgtttt

SEQ ID NO: 439938 - DNA, 33 bp, Homo sapien
taatgcacatttggtagctgggccacttgtttt

SEQ ID NO: 439939 - DNA, 33 bp, Homo sapien
cagagtaaagaagtacagaagttaaacgattaa

SEQ ID NO: 439940 - DNA, 33 bp, Homo sapien
cagagtaaagaagtacggaagttaaacgattaa

SEQ ID NO: 439941 - DNA, 33 bp, Homo sapien
ttatttcaaggatgacaacaactgttttatagt

SEQ ID NO: 439942 - DNA, 33 bp, Homo sapien
ttatttcaaggatgacgacaactgttttatagt

SEQ ID NO: 439943 - DNA, 33 bp, Homo sapien
tttattgctcgttaaccctcttctatttctctc

SEQ ID NO: 439944 - DNA, 33 bp, Homo sapien
tttattgctcgttaactctcttctatttctctc

SEQ ID NO: 439945 - DNA, 33 bp, Homo sapien
taagctggtttcttgcactaattatgcagcaag

SEQ ID NO: 439946 - DNA, 33 bp, Homo sapien
taagctggtttcttgcgctaattatgcagcaag

SEQ ID NO: 439947 - DNA, 33 bp, Homo sapien
aacatgggtactctgcaatgttaagtttcttaa

SEQ ID NO: 439948 - DNA, 33 bp, Homo sapien
aacatgggtactctgcgatgttaagtttcttaa

SEQ ID NO: 439949 - DNA, 33 bp, Homo sapien
taagcaaagcaacagacgttctctcattgaggg

SEQ ID NO: 439950 - DNA, 33 bp, Homo sapien
taagcaaagcaacagatgttctctcattgaggg

SEQ ID NO: 439951 - DNA, 33 bp, Homo sapien
gggtagaacctgacaaaaggagagtccatggat

SEQ ID NO: 439952 - DNA, 33 bp, Homo sapien
gggtagaacctgacaacaggagagtccatggat

SEQ ID NO: 439953 - DNA, 33 bp, Homo sapien
taataactatggcacaaatgttcaggagtgtat

SEQ ID NO: 439954 - DNA, 33 bp, Homo sapien
taataactatggcacagatgttcaggagtgtat

SEQ ID NO: 439955 - DNA, 33 bp, Homo sapien
acctctttcctgacacacagaacatttttgtta

SEQ ID NO: 439956 - DNA, 33 bp, Homo sapien
acctctttcctgacacgcagaacatttttgtta

SEQ ID NO: 439957 - DNA, 33 bp, Homo sapien
cggcaggctgcctaccactctcacacctctttc

SEQ ID NO: 439958 - DNA, 33 bp, Homo sapien
cggcaggctgcctaccgctctcacacctctttc

SEQ ID NO: 439959 - DNA, 33 bp, Homo sapien
gagtttcttccaaatacgcatctatcgagattg

SEQ ID NO: 439960 - DNA, 33 bp, Homo sapien
gagtttcttccaaatatgcatctatcgagattg

SEQ ID NO: 439961 - DNA, 33 bp, Homo sapien
tcctcacaggccacagactgatatcaggggttg

SEQ ID NO: 439962 - DNA, 33 bp, Homo sapien
tcctcacaggccacagtctgatatcaggggttg

SEQ ID NO: 439963 - DNA, 33 bp, Homo sapien
gattaatcacccagtagaggctaaatgtgaaag

SEQ ID NO: 439964 - DNA, 33 bp, Homo sapien
gattaatcacccagtataggctaaatgtgaaag

SEQ ID NO: 439965 - DNA, 33 bp, Homo sapien
caggcatttctagcaacggtgaaattaatacag

SEQ ID NO: 439966 - DNA, 33 bp, Homo sapien
caggcatttctagcaatggtgaaattaatacag

SEQ ID NO: 439967 - DNA, 33 bp, Homo sapien
tctatgtttctttgcaccataggaaaaaggaat

SEQ ID NO: 439968 - DNA, 33 bp, Homo sapien
tctatgtttctttgcatcataggaaaaaggaat

SEQ ID NO: 439969 - DNA, 33 bp, Homo sapien
caatctctgtgctggacaggtatcacactggct

SEQ ID NO: 439970 - DNA, 33 bp, Homo sapien
caatctctgtgctggataggtatcacactggct

SEQ ID NO: 439971 - DNA, 33 bp, Homo sapien
tttttttgggggctgacgaatatattctggaac

SEQ ID NO: 439972 - DNA, 33 bp, Homo sapien
tttttttgggggctgatgaatatattctggaac

SEQ ID NO: 439973 - DNA, 33 bp, Homo sapien
gacctagtgtgaccaaaactgcgatctgtccct

SEQ ID NO: 439974 - DNA, 33 bp, Homo sapien
gacctagtgtgaccaagactgcgatctgtccct

SEQ ID NO: 439975 - DNA, 33 bp, Homo sapien
agttgagtctcaggtaaaccgaatctgttttct

SEQ ID NO: 439976 - DNA, 33 bp, Homo sapien
agttgagtctcaggtagaccgaatctgttttct

SEQ ID NO: 439977 - DNA, 33 bp, Homo sapien
cagatcactataaagacgtttttcaatctattc

SEQ ID NO: 439978 - DNA, 33 bp, Homo sapien
cagatcactataaagatgtttttcaatctattc

SEQ ID NO: 439979 - DNA, 33 bp, Homo sapien
ccattattcccgaagacgatgccacaaaaaaac

SEQ ID NO: 439980 - DNA, 33 bp, Homo sapien
ccattattcccgaagatgatgccacaaaaaaac

SEQ ID NO: 439981 - DNA, 33 bp, Homo sapien
ggtcataaacatgaacaaggaccacacacacac

SEQ ID NO: 439982 - DNA, 33 bp, Homo sapien
ggtcataaacatgaacgaggaccacacacacac

SEQ ID NO: 439983 - DNA, 33 bp, Homo sapien
gtagacttaagaaagcacccactcatgatacat

SEQ ID NO: 439984 - DNA, 33 bp, Homo sapien
gtagacttaagaaagcgcccactcatgatacat

SEQ ID NO: 439985 - DNA, 33 bp, Homo sapien
aacattttcactaccccagaaagcaacccccca

SEQ ID NO: 439986 - DNA, 33 bp, Homo sapien
aacattttcactaccctagaaagcaacccccca

SEQ ID NO: 439987 - DNA, 33 bp, Homo sapien
gtaggattggatgagaaaacacggaaacaaatt

SEQ ID NO: 439988 - DNA, 33 bp, Homo sapien
gtaggattggatgagataacacggaaacaaatt

SEQ ID NO: 439989 - DNA, 33 bp, Homo sapien
tgttctggccagtgggcatatcaggtaaaaagc

SEQ ID NO: 439990 - DNA, 33 bp, Homo sapien
tgttctggccagtgggtatatcaggtaaaaagc

SEQ ID NO: 439991 - DNA, 33 bp, Homo sapien
taatctgtttttatatcaaagtcatgtgaaggg

SEQ ID NO: 439992 - DNA, 33 bp, Homo sapien
taatctgtttttatatgaaagtcatgtgaaggg

SEQ ID NO: 439993 - DNA, 33 bp, Homo sapien
ctcagagcttgaaaaacaccattgttctctgct

SEQ ID NO: 439994 - DNA, 33 bp, Homo sapien
ctcagagcttgaaaaataccattgttctctgct

SEQ ID NO: 439995 - DNA, 33 bp, Homo sapien
attttatctgtgattgaaaaattaacctcaaaa

SEQ ID NO: 439996 - DNA, 33 bp, Homo sapien
attttatctgtgattgcaaaattaacctcaaaa

SEQ ID NO: 439997 - DNA, 33 bp, Homo sapien
ggatatcaaagttccaagatgtcttttgaggtt

SEQ ID NO: 439998 - DNA, 33 bp, Homo sapien
ggatatcaaagttccaggatgtcttttgaggtt

SEQ ID NO: 439999 - DNA, 33 bp, Homo sapien
caaggaaaccagtcaaccagttatcagaattaa

SEQ ID NO: 440000 - DNA, 33 bp, Homo sapien
caaggaaaccagtcaatcagttatcagaattaa

SEQ ID NO: 440001 - DNA, 33 bp, Homo sapien
tcataaaatgtctgtggatagtccagcagctga

SEQ ID NO: 440002 - DNA, 33 bp, Homo sapien
tcataaaatgtctgtgtatagtccagcagctga

SEQ ID NO: 440003 - DNA, 33 bp, Homo sapien
tcacagcatctgaggaagactttattacctcca

SEQ ID NO: 440004 - DNA, 33 bp, Homo sapien
tcacagcatctgaggatgactttattacctcca

SEQ ID NO: 440005 - DNA, 33 bp, Homo sapien
ttctagaatgagcgccactgtatccattatcat

SEQ ID NO: 440006 - DNA, 33 bp, Homo sapien
ttctagaatgagcgcctctgtatccattatcat

SEQ ID NO: 440007 - DNA, 33 bp, Homo sapien
ccatcctgctggactacgaaaatgtctggtgcc

SEQ ID NO: 440008 - DNA, 33 bp, Homo sapien
ccatcctgctggactatgaaaatgtctggtgcc

SEQ ID NO: 440009 - DNA, 33 bp, Homo sapien
agtgattttagggcaaagaacctcatatctttg

SEQ ID NO: 440010 - DNA, 33 bp, Homo sapien
agtgattttagggcaaggaacctcatatctttg

SEQ ID NO: 440011 - DNA, 33 bp, Homo sapien
aaatttagtactcaagcagtgctaggtggatat

SEQ ID NO: 440012 - DNA, 33 bp, Homo sapien
aaatttagtactcaagtagtgctaggtggatat

SEQ ID NO: 440013 - DNA, 33 bp, Homo sapien
caaaaatgggaatactaagaggcgagaatcact

SEQ ID NO: 440014 - DNA, 33 bp, Homo sapien
caaaaatgggaatactgagaggcgagaatcact

SEQ ID NO: 440015 - DNA, 33 bp, Homo sapien
ttccgtggtgaaaataaacatggtaaactatgt

SEQ ID NO: 440016 - DNA, 33 bp, Homo sapien
ttccgtggtgaaaatacacatggtaaactatgt

SEQ ID NO: 440017 - DNA, 33 bp, Homo sapien
aaacttagccataaacaagttagagggacttgc

SEQ ID NO: 440018 - DNA, 33 bp, Homo sapien
aaacttagccataaacgagttagagggacttgc

SEQ ID NO: 440019 - DNA, 33 bp, Homo sapien
agaaccgtgaggagtacgtgagctgaaactgat

SEQ ID NO: 440020 - DNA, 33 bp, Homo sapien
agaaccgtgaggagtatgtgagctgaaactgat

SEQ ID NO: 440021 - DNA, 33 bp, Homo sapien
ctttacaaaggtaatcaagataaacggaggtca

SEQ ID NO: 440022 - DNA, 33 bp, Homo sapien
ctttacaaaggtaatcgagataaacggaggtca

SEQ ID NO: 440023 - DNA, 33 bp, Homo sapien
tccacaaatgcattagccaagtcttttgattgc

SEQ ID NO: 440024 - DNA, 33 bp, Homo sapien
tccacaaatgcattaggcaagtcttttgattgc

SEQ ID NO: 440025 - DNA, 33 bp, Homo sapien
tgttctataagccgtaacatagcttaaaggtag

SEQ ID NO: 440026 - DNA, 33 bp, Homo sapien
tgttctataagccgtagcatagcttaaaggtag

SEQ ID NO: 440027 - DNA, 33 bp, Homo sapien
caatgaactaacttaaagaatcaacatgagctc

SEQ ID NO: 440028 - DNA, 33 bp, Homo sapien
caatgaactaacttaaggaatcaacatgagctc

SEQ ID NO: 440029 - DNA, 33 bp, Homo sapien
cagcataccaaacagacgaccatactgagtgag

SEQ ID NO: 440030 - DNA, 33 bp, Homo sapien
cagcataccaaacagatgaccatactgagtgag

SEQ ID NO: 440031 - DNA, 33 bp, Homo sapien
ggaacatgatgctgccaggaaactctgaagagg

SEQ ID NO: 440032 - DNA, 33 bp, Homo sapien
ggaacatgatgctgccgggaaactctgaagagg

SEQ ID NO: 440033 - DNA, 33 bp, Homo sapien
tatagaaaacatactacggcccctactgccact

SEQ ID NO: 440034 - DNA, 33 bp, Homo sapien
tatagaaaacatactatggcccctactgccact

SEQ ID NO: 440035 - DNA, 33 bp, Homo sapien
gagactgaagcagaaacataatttgagcccagg

SEQ ID NO: 440036 - DNA, 33 bp, Homo sapien
gagactgaagcagaaagataatttgagcccagg

SEQ ID NO: 440037 - DNA, 33 bp, Homo sapien
ggtatgttgccaaaaagctcagtttaaaagagt

SEQ ID NO: 440038 - DNA, 33 bp, Homo sapien
ggtatgttgccaaaaatctcagtttaaaagagt

SEQ ID NO: 440039 - DNA, 33 bp, Homo sapien
aactactgagtttgccactctatattttcaggc

SEQ ID NO: 440040 - DNA, 33 bp, Homo sapien
aactactgagtttgccgctctatattttcaggc

SEQ ID NO: 440041 - DNA, 33 bp, Homo sapien
caagcccaactgctaaagacgagggaaagcctc

SEQ ID NO: 440042 - DNA, 33 bp, Homo sapien
caagcccaactgctaaggacgagggaaagcctc

SEQ ID NO: 440043 - DNA, 33 bp, Homo sapien
taatttctttctatgacagagtgacaagccatg

SEQ ID NO: 440044 - DNA, 33 bp, Homo sapien
taatttctttctatgatagagtgacaagccatg

SEQ ID NO: 440045 - DNA, 33 bp, Homo sapien
gtgctctttaacccacaaactgcaacacaaatc

SEQ ID NO: 440046 - DNA, 33 bp, Homo sapien
gtgctctttaacccaccaactgcaacacaaatc

SEQ ID NO: 440047 - DNA, 33 bp, Homo sapien
tccgtttgaaatccaccgggtatctactctgag

SEQ ID NO: 440048 - DNA, 33 bp, Homo sapien
tccgtttgaaatccactgggtatctactctgag

SEQ ID NO: 440049 - DNA, 33 bp, Homo sapien
tttcctcccagttctccaagtcagataacagaa

SEQ ID NO: 440050 - DNA, 33 bp, Homo sapien
tttcctcccagttctcgaagtcagataacagaa

SEQ ID NO: 440051 - DNA, 33 bp, Homo sapien
cttcttcttgaccaaccggttgcaccattggga

SEQ ID NO: 440052 - DNA, 33 bp, Homo sapien
cttcttcttgaccaactggttgcaccattggga

SEQ ID NO: 440053 - DNA, 33 bp, Homo sapien
tccctctagaccagggacaagtttgttttatcc

SEQ ID NO: 440054 - DNA, 33 bp, Homo sapien
tccctctagaccaggggcaagtttgttttatcc

SEQ ID NO: 440055 - DNA, 33 bp, Homo sapien
tgtccatgaacagatgaatatgtcaacaaacta

SEQ ID NO: 440056 - DNA, 33 bp, Homo sapien
tgtccatgaacagatgcatatgtcaacaaacta

SEQ ID NO: 440057 - DNA, 33 bp, Homo sapien
ataaatctactctgaacgttcatgtacaagtta

SEQ ID NO: 440058 - DNA, 33 bp, Homo sapien
ataaatctactctgaatgttcatgtacaagtta

SEQ ID NO: 440059 - DNA, 33 bp, Homo sapien
ttctgcctgaaaattccagtatttcctctgtac

SEQ ID NO: 440060 - DNA, 33 bp, Homo sapien
ttctgcctgaaaattctagtatttcctctgtac

SEQ ID NO: 440061 - DNA, 33 bp, Homo sapien
agggcatggtaggacaacatgacgaccgagatg

SEQ ID NO: 440062 - DNA, 33 bp, Homo sapien
agggcatggtaggacagcatgacgaccgagatg

SEQ ID NO: 440063 - DNA, 33 bp, Homo sapien
tatcctcttacagagaaaacaaccacaggcttc

SEQ ID NO: 440064 - DNA, 33 bp, Homo sapien
tatcctcttacagagagaacaaccacaggcttc

SEQ ID NO: 440065 - DNA, 33 bp, Homo sapien
atagcatagagcctaacacatcaccagatggca

SEQ ID NO: 440066 - DNA, 33 bp, Homo sapien
atagcatagagcctaatacatcaccagatggca

SEQ ID NO: 440067 - DNA, 33 bp, Homo sapien
taaggcaggtgcagtaagaagtgaaggcagagg

SEQ ID NO: 440068 - DNA, 33 bp, Homo sapien
taaggcaggtgcagtatgaagtgaaggcagagg

SEQ ID NO: 440069 - DNA, 33 bp, Homo sapien
ttacccaggttcatgacgacttaggagataagc

SEQ ID NO: 440070 - DNA, 33 bp, Homo sapien
ttacccaggttcatgatgacttaggagataagc

SEQ ID NO: 440071 - DNA, 33 bp, Homo sapien
agagattatgaaagtcccagtataaacaaatgc

SEQ ID NO: 440072 - DNA, 33 bp, Homo sapien
agagattatgaaagtctcagtataaacaaatgc

SEQ ID NO: 440073 - DNA, 33 bp, Homo sapien
atttcagaaattatagacgtaagaaatagtgac

SEQ ID NO: 440074 - DNA, 33 bp, Homo sapien
atttcagaaattatagtcgtaagaaatagtgac

SEQ ID NO: 440075 - DNA, 33 bp, Homo sapien
agaaaagagagggtcaatcttcctttttataga

SEQ ID NO: 440076 - DNA, 33 bp, Homo sapien
agaaaagagagggtcattcttcctttttataga

SEQ ID NO: 440077 - DNA, 33 bp, Homo sapien
acttccagcagaaacaatcctagtcaggcacta

SEQ ID NO: 440078 - DNA, 33 bp, Homo sapien
acttccagcagaaacactcctagtcaggcacta

SEQ ID NO: 440079 - DNA, 33 bp, Homo sapien
tccagtccccagtgaacatgagccagaacgttg

SEQ ID NO: 440080 - DNA, 33 bp, Homo sapien
tccagtccccagtgaatatgagccagaacgttg

SEQ ID NO: 440081 - DNA, 33 bp, Homo sapien
tttaacacaagtgaaactgcattttaattatta

SEQ ID NO: 440082 - DNA, 33 bp, Homo sapien
tttaacacaagtgaaattgcattttaattatta

SEQ ID NO: 440083 - DNA, 33 bp, Homo sapien
gagaggaaattaccaacctgcataatggagaca

SEQ ID NO: 440084 - DNA, 33 bp, Homo sapien
gagaggaaattaccaagctgcataatggagaca

SEQ ID NO: 440085 - DNA, 33 bp, Homo sapien
gcatagcatgaggtcaaacagcaatatgcagag

SEQ ID NO: 440086 - DNA, 33 bp, Homo sapien
gcatagcatgaggtcagacagcaatatgcagag

SEQ ID NO: 440087 - DNA, 33 bp, Homo sapien
gggtagtttttgagcaatgctattcagtggcta

SEQ ID NO: 440088 - DNA, 33 bp, Homo sapien
gggtagtttttgagcattgctattcagtggcta

SEQ ID NO: 440089 - DNA, 33 bp, Homo sapien
tctttgctgcagtcaaactctacttgttacatt

SEQ ID NO: 440090 - DNA, 33 bp, Homo sapien
tctttgctgcagtcaagctctacttgttacatt

SEQ ID NO: 440091 - DNA, 33 bp, Homo sapien
cagggccctgttcaaccatcacttcctccctca

SEQ ID NO: 440092 - DNA, 33 bp, Homo sapien
cagggccctgttcaacgatcacttcctccctca

SEQ ID NO: 440093 - DNA, 33 bp, Homo sapien
cattcagcaattcatacgccatgctcagagatc

SEQ ID NO: 440094 - DNA, 33 bp, Homo sapien
cattcagcaattcatatgccatgctcagagatc

SEQ ID NO: 440095 - DNA, 33 bp, Homo sapien
acctaatcatcgtttagaggccctacctcttaa

SEQ ID NO: 440096 - DNA, 33 bp, Homo sapien
acctaatcatcgtttataggccctacctcttaa

SEQ ID NO: 440097 - DNA, 33 bp, Homo sapien
tattttctgtttgtgacaatgagctatccaaag

SEQ ID NO: 440098 - DNA, 33 bp, Homo sapien
tattttctgtttgtgagaatgagctatccaaag

SEQ ID NO: 440099 - DNA, 33 bp, Homo sapien
agaagagaataaataaggatgcaagctattatt

SEQ ID NO: 440100 - DNA, 33 bp, Homo sapien
agaagagaataaataatgatgcaagctattatt

SEQ ID NO: 440101 - DNA, 33 bp, Homo sapien
accagcaagtcaatgaggaaagaacctccattt

SEQ ID NO: 440102 - DNA, 33 bp, Homo sapien
accagcaagtcaatgatgaaagaacctccattt

SEQ ID NO: 440103 - DNA, 33 bp, Homo sapien
ggcttttaccctccaacaatccaaaggtcttgc

SEQ ID NO: 440104 - DNA, 33 bp, Homo sapien
ggcttttaccctccaataatccaaaggtcttgc

SEQ ID NO: 440105 - DNA, 33 bp, Homo sapien
gacaccaaaaagtgacggcacttgctatctaat

SEQ ID NO: 440106 - DNA, 33 bp, Homo sapien
gacaccaaaaagtgactgcacttgctatctaat

SEQ ID NO: 440107 - DNA, 33 bp, Homo sapien
agggctgtctcaaggacagaacaaaagagtgag

SEQ ID NO: 440108 - DNA, 33 bp, Homo sapien
agggctgtctcaaggagagaacaaaagagtgag

SEQ ID NO: 440109 - DNA, 33 bp, Homo sapien
actcaaaaggctcaaaatcatacttccctatat

SEQ ID NO: 440110 - DNA, 33 bp, Homo sapien
actcaaaaggctcaaagtcatacttccctatat

SEQ ID NO: 440111 - DNA, 33 bp, Homo sapien
gggtatttgcattcgaagcttaaaggaacaaag

SEQ ID NO: 440112 - DNA, 33 bp, Homo sapien
gggtatttgcattcgatgcttaaaggaacaaag

SEQ ID NO: 440113 - DNA, 33 bp, Homo sapien
agatttatcactagcacaggtggaacagttcac

SEQ ID NO: 440114 - DNA, 33 bp, Homo sapien
agatttatcactagcataggtggaacagttcac

SEQ ID NO: 440115 - DNA, 33 bp, Homo sapien
caaacaagttcaacaacaatcaggagagaagac

SEQ ID NO: 440116 - DNA, 33 bp, Homo sapien
caaacaagttcaacaagaatcaggagagaagac

SEQ ID NO: 440117 - DNA, 33 bp, Homo sapien
atgtcattatatagtgaataactgtacttgact

SEQ ID NO: 440118 - DNA, 33 bp, Homo sapien
atgtcattatatagtgcataactgtacttgact

SEQ ID NO: 440119 - DNA, 33 bp, Homo sapien
gagaatggtaataaataaagttggagagtcagg

SEQ ID NO: 440120 - DNA, 33 bp, Homo sapien
gagaatggtaataaatgaagttggagagtcagg

SEQ ID NO: 440121 - DNA, 33 bp, Homo sapien
ggggttccctgcttgtaaaagggatacgaaaaa

SEQ ID NO: 440122 - DNA, 33 bp, Homo sapien
ggggttccctgcttgtgaaagggatacgaaaaa

SEQ ID NO: 440123 - DNA, 33 bp, Homo sapien
ccagtggaaagcgcaaatagctgggttagagaa

SEQ ID NO: 440124 - DNA, 33 bp, Homo sapien
ccagtggaaagcgcaagtagctgggttagagaa

SEQ ID NO: 440125 - DNA, 33 bp, Homo sapien
aatctgaagaagtttcacaatccaactaccagt

SEQ ID NO: 440126 - DNA, 33 bp, Homo sapien
aatctgaagaagtttcgcaatccaactaccagt

SEQ ID NO: 440127 - DNA, 33 bp, Homo sapien
tcacagacaaatgtaaactatacaaggccagag

SEQ ID NO: 440128 - DNA, 33 bp, Homo sapien
tcacagacaaatgtaagctatacaaggccagag

SEQ ID NO: 440129 - DNA, 33 bp, Homo sapien
agcttgactcatccacaagctctgcatcttcta

SEQ ID NO: 440130 - DNA, 33 bp, Homo sapien
agcttgactcatccacgagctctgcatcttcta

SEQ ID NO: 440131 - DNA, 33 bp, Homo sapien
agagaaaggaagttaggaagttcaggcagaagg

SEQ ID NO: 440132 - DNA, 33 bp, Homo sapien
agagaaaggaagttagtaagttcaggcagaagg

SEQ ID NO: 440133 - DNA, 33 bp, Homo sapien
ttcctcttggtcaccaaataggctattgatcaa

SEQ ID NO: 440134 - DNA, 33 bp, Homo sapien
ttcctcttggtcaccacataggctattgatcaa

SEQ ID NO: 440135 - DNA, 33 bp, Homo sapien
tcccatcttgacctccaaaggaaactgtgagtt

SEQ ID NO: 440136 - DNA, 33 bp, Homo sapien
tcccatcttgacctcccaaggaaactgtgagtt

SEQ ID NO: 440137 - DNA, 33 bp, Homo sapien
tctagaaaaagtaatcactgctaacatttgaaa

SEQ ID NO: 440138 - DNA, 33 bp, Homo sapien
tctagaaaaagtaatcgctgctaacatttgaaa

SEQ ID NO: 440139 - DNA, 33 bp, Homo sapien
ataaaatatatttggaaagccatcttcaagctt

SEQ ID NO: 440140 - DNA, 33 bp, Homo sapien
ataaaatatatttggatagccatcttcaagctt

SEQ ID NO: 440141 - DNA, 33 bp, Homo sapien
ctgagacaacctcttacgttcattgtatccttt

SEQ ID NO: 440142 - DNA, 33 bp, Homo sapien
ctgagacaacctcttatgttcattgtatccttt

SEQ ID NO: 440143 - DNA, 33 bp, Homo sapien
gtaagtgagtcccaggacagagagctggagatg

SEQ ID NO: 440144 - DNA, 33 bp, Homo sapien
gtaagtgagtcccaggtcagagagctggagatg

SEQ ID NO: 440145 - DNA, 33 bp, Homo sapien
aactctggttgtatatgagaatcacttgagagc

SEQ ID NO: 440146 - DNA, 33 bp, Homo sapien
aactctggttgtatattagaatcacttgagagc

SEQ ID NO: 440147 - DNA, 33 bp, Homo sapien
tgccttctattttataagtaatctcaacagcag

SEQ ID NO: 440148 - DNA, 33 bp, Homo sapien
tgccttctattttataggtaatctcaacagcag

SEQ ID NO: 440149 - DNA, 33 bp, Homo sapien
gaacattctctaacctaaatctcagtcttttag

SEQ ID NO: 440150 - DNA, 33 bp, Homo sapien
gaacattctctaacctgaatctcagtcttttag

SEQ ID NO: 440151 - DNA, 33 bp, Homo sapien
gagaactttccaaaatcaatgacaccaaaccac

SEQ ID NO: 440152 - DNA, 33 bp, Homo sapien
gagaactttccaaaattaatgacaccaaaccac

SEQ ID NO: 440153 - DNA, 33 bp, Homo sapien
tctagcaagtgggcacccaatagtagttataat

SEQ ID NO: 440154 - DNA, 33 bp, Homo sapien
tctagcaagtgggcactcaatagtagttataat

SEQ ID NO: 440155 - DNA, 33 bp, Homo sapien
aatgcattatctaaaccgcctgtgactttgaga

SEQ ID NO: 440156 - DNA, 33 bp, Homo sapien
aatgcattatctaaactgcctgtgactttgaga

SEQ ID NO: 440157 - DNA, 33 bp, Homo sapien
cagccacaccatgataaggtaccactcagtcat

SEQ ID NO: 440158 - DNA, 33 bp, Homo sapien
cagccacaccatgatagggtaccactcagtcat

SEQ ID NO: 440159 - DNA, 33 bp, Homo sapien
ttttcgtctgatataactatagctctttttttt

SEQ ID NO: 440160 - DNA, 33 bp, Homo sapien
ttttcgtctgatataagtatagctctttttttt

SEQ ID NO: 440161 - DNA, 33 bp, Homo sapien
atctggagacatcaacactccactttcagcatt

SEQ ID NO: 440162 - DNA, 33 bp, Homo sapien
atctggagacatcaacgctccactttcagcatt

SEQ ID NO: 440163 - DNA, 33 bp, Homo sapien
tgtttaaacttatgcagtctttgggccagtctt

SEQ ID NO: 440164 - DNA, 33 bp, Homo sapien
tgtttaaacttatgcattctttgggccagtctt

SEQ ID NO: 440165 - DNA, 33 bp, Homo sapien
agtcactgcactaatgcaaaggcaagaagaaca

SEQ ID NO: 440166 - DNA, 33 bp, Homo sapien
agtcactgcactaatgtaaaggcaagaagaaca

SEQ ID NO: 440167 - DNA, 33 bp, Homo sapien
acaataactcatggacaatggcctagctggtta

SEQ ID NO: 440168 - DNA, 33 bp, Homo sapien
acaataactcatggacgatggcctagctggtta

SEQ ID NO: 440169 - DNA, 33 bp, Homo sapien
ccaaatgatctgccaaccctctgaataaccagc

SEQ ID NO: 440170 - DNA, 33 bp, Homo sapien
ccaaatgatctgccaatcctctgaataaccagc

SEQ ID NO: 440171 - DNA, 33 bp, Homo sapien
gtcaagtctatttcaactctgtttccaagtctg

SEQ ID NO: 440172 - DNA, 33 bp, Homo sapien
gtcaagtctatttcaagtctgtttccaagtctg

SEQ ID NO: 440173 - DNA, 33 bp, Homo sapien
ggtaggtttgaataaacagagaacttaaaggag

SEQ ID NO: 440174 - DNA, 33 bp, Homo sapien
ggtaggtttgaataaatagagaacttaaaggag

SEQ ID NO: 440175 - DNA, 33 bp, Homo sapien
gcaaaaaattcagaaactctatcagaccatccc

SEQ ID NO: 440176 - DNA, 33 bp, Homo sapien
gcaaaaaattcagaaattctatcagaccatccc

SEQ ID NO: 440177 - DNA, 33 bp, Homo sapien
cttcctattaaattgaacttatcatgatgtaat

SEQ ID NO: 440178 - DNA, 33 bp, Homo sapien
cttcctattaaattgaccttatcatgatgtaat

SEQ ID NO: 440179 - DNA, 33 bp, Homo sapien
tgactgaaggatgccaagacagtttcaagggtc

SEQ ID NO: 440180 - DNA, 33 bp, Homo sapien
tgactgaaggatgccaggacagtttcaagggtc

SEQ ID NO: 440181 - DNA, 33 bp, Homo sapien
ctcactggcacaatcaacggagccatttttctt

SEQ ID NO: 440182 - DNA, 33 bp, Homo sapien
ctcactggcacaatcatcggagccatttttctt

SEQ ID NO: 440183 - DNA, 33 bp, Homo sapien
caccaagaaggagagactaatgaatcaccaagt

SEQ ID NO: 440184 - DNA, 33 bp, Homo sapien
caccaagaaggagagagtaatgaatcaccaagt

SEQ ID NO: 440185 - DNA, 33 bp, Homo sapien
tgtcagggaaataggaactctctcctccactgc

SEQ ID NO: 440186 - DNA, 33 bp, Homo sapien
tgtcagggaaataggagctctctcctccactgc

SEQ ID NO: 440187 - DNA, 33 bp, Homo sapien
ttctgacgcatcaccaaaggccacttaggttca

SEQ ID NO: 440188 - DNA, 33 bp, Homo sapien
ttctgacgcatcaccagaggccacttaggttca

SEQ ID NO: 440189 - DNA, 33 bp, Homo sapien
gtttccaaaatttaggcagcacaaaataatcca

SEQ ID NO: 440190 - DNA, 33 bp, Homo sapien
gtttccaaaatttagggagcacaaaataatcca

SEQ ID NO: 440191 - DNA, 33 bp, Homo sapien
ctggaggcaaagtagacctggcccacatggagt

SEQ ID NO: 440192 - DNA, 33 bp, Homo sapien
ctggaggcaaagtagatctggcccacatggagt

SEQ ID NO: 440193 - DNA, 33 bp, Homo sapien
agcacattcttggaaaggcactttgtttgtcct

SEQ ID NO: 440194 - DNA, 33 bp, Homo sapien
agcacattcttggaaatgcactttgtttgtcct

SEQ ID NO: 440195 - DNA, 33 bp, Homo sapien
gaacccagtgttttgaaaaatttatctaccaag

SEQ ID NO: 440196 - DNA, 33 bp, Homo sapien
gaacccagtgttttgacaaatttatctaccaag

SEQ ID NO: 440197 - DNA, 33 bp, Homo sapien
tacatgcctgccagtaccaggtcctgggccaca

SEQ ID NO: 440198 - DNA, 33 bp, Homo sapien
tacatgcctgccagtatcaggtcctgggccaca

SEQ ID NO: 440199 - DNA, 33 bp, Homo sapien
tcaaaaagtggggaaacgtagccttattgtagg

SEQ ID NO: 440200 - DNA, 33 bp, Homo sapien
tcaaaaagtggggaaaggtagccttattgtagg

SEQ ID NO: 440201 - DNA, 33 bp, Homo sapien
ctgcctgcagaacacaatgaacaggaaatgcag

SEQ ID NO: 440202 - DNA, 33 bp, Homo sapien
ctgcctgcagaacacattgaacaggaaatgcag

SEQ ID NO: 440203 - DNA, 33 bp, Homo sapien
gcccaatgttacaataggacttcaggcttgtag

SEQ ID NO: 440204 - DNA, 33 bp, Homo sapien
gcccaatgttacaatatgacttcaggcttgtag

SEQ ID NO: 440205 - DNA, 33 bp, Homo sapien
agtgcatagtttttcaaaatcaaagcttctacc

SEQ ID NO: 440206 - DNA, 33 bp, Homo sapien
agtgcatagtttttcagaatcaaagcttctacc

SEQ ID NO: 440207 - DNA, 33 bp, Homo sapien
aacattgacaaagttgcacaaagagatgtaaac

SEQ ID NO: 440208 - DNA, 33 bp, Homo sapien
aacattgacaaagttgtacaaagagatgtaaac

SEQ ID NO: 440209 - DNA, 33 bp, Homo sapien
gagcgagttaattccaatatggtgtcaaccaag

SEQ ID NO: 440210 - DNA, 33 bp, Homo sapien
gagcgagttaattccagtatggtgtcaaccaag

SEQ ID NO: 440211 - DNA, 33 bp, Homo sapien
gagaagaatctagcaacgagaatgacctcattt

SEQ ID NO: 440212 - DNA, 33 bp, Homo sapien
gagaagaatctagcaatgagaatgacctcattt

SEQ ID NO: 440213 - DNA, 33 bp, Homo sapien
ttccctaatgacttcaaaataggtgtcttgaaa

SEQ ID NO: 440214 - DNA, 33 bp, Homo sapien
ttccctaatgacttcacaataggtgtcttgaaa

SEQ ID NO: 440215 - DNA, 33 bp, Homo sapien
cattcactggtaaatacgcacattgtgaccttt

SEQ ID NO: 440216 - DNA, 33 bp, Homo sapien
cattcactggtaaatatgcacattgtgaccttt

SEQ ID NO: 440217 - DNA, 33 bp, Homo sapien
tggcttgctttgaacaaccccacgtggccccac

SEQ ID NO: 440218 - DNA, 33 bp, Homo sapien
tggcttgctttgaacacccccacgtggccccac

SEQ ID NO: 440219 - DNA, 33 bp, Homo sapien
agccaaacgctgcaatcattctttacagacact

SEQ ID NO: 440220 - DNA, 33 bp, Homo sapien
agccaaacgctgcaatgattctttacagacact

SEQ ID NO: 440221 - DNA, 33 bp, Homo sapien
attaaaatgaataaataaatccgtaaatcaatg

SEQ ID NO: 440222 - DNA, 33 bp, Homo sapien
attaaaatgaataaattaatccgtaaatcaatg

SEQ ID NO: 440223 - DNA, 33 bp, Homo sapien
gttttcatgtgattgccacatcctaacagggct

SEQ ID NO: 440224 - DNA, 33 bp, Homo sapien
gttttcatgtgattgctacatcctaacagggct

SEQ ID NO: 440225 - DNA, 33 bp, Homo sapien
aaaattctgaaccgaacacttagcaaatgaagc

SEQ ID NO: 440226 - DNA, 33 bp, Homo sapien
aaaattctgaaccgaatacttagcaaatgaagc

SEQ ID NO: 440227 - DNA, 33 bp, Homo sapien
atgtcataccagagaaaagtgcttgcttttaga

SEQ ID NO: 440228 - DNA, 33 bp, Homo sapien
atgtcataccagagaacagtgcttgcttttaga

SEQ ID NO: 440229 - DNA, 33 bp, Homo sapien
ttgaaaatgttggtagaattataggaatgtctg

SEQ ID NO: 440230 - DNA, 33 bp, Homo sapien
ttgaaaatgttggtagtattataggaatgtctg

SEQ ID NO: 440231 - DNA, 33 bp, Homo sapien
ctaactccaaaacctccaaggaaagcttgggct

SEQ ID NO: 440232 - DNA, 33 bp, Homo sapien
ctaactccaaaacctctaaggaaagcttgggct

SEQ ID NO: 440233 - DNA, 33 bp, Homo sapien
aaagtcaagcgcaaaccgatggggagacagtgg

SEQ ID NO: 440234 - DNA, 33 bp, Homo sapien
aaagtcaagcgcaaactgatggggagacagtgg

SEQ ID NO: 440235 - DNA, 33 bp, Homo sapien
tagttatccaaatcaaataactcttgagagtga

SEQ ID NO: 440236 - DNA, 33 bp, Homo sapien
tagttatccaaatcaagtaactcttgagagtga

SEQ ID NO: 440237 - DNA, 33 bp, Homo sapien
aatgttaagagataaaccccagtccctgctcat

SEQ ID NO: 440238 - DNA, 33 bp, Homo sapien
aatgttaagagataaatcccagtccctgctcat

SEQ ID NO: 440239 - DNA, 33 bp, Homo sapien
taaaattagtcacaagcattttcagtgtcccat

SEQ ID NO: 440240 - DNA, 33 bp, Homo sapien
taaaattagtcacaagtattttcagtgtcccat

SEQ ID NO: 440241 - DNA, 33 bp, Homo sapien
agagagtcacatatacacctcttgttttatttt

SEQ ID NO: 440242 - DNA, 33 bp, Homo sapien
agagagtcacatatacgcctcttgttttatttt

SEQ ID NO: 440243 - DNA, 33 bp, Homo sapien
ttttctttttcaaaacagaagagagtgcaaatt

SEQ ID NO: 440244 - DNA, 33 bp, Homo sapien
ttttctttttcaaaacggaagagagtgcaaatt

SEQ ID NO: 440245 - DNA, 33 bp, Homo sapien
catatgtgacctcataaaaaatctgtgcaaaga

SEQ ID NO: 440246 - DNA, 33 bp, Homo sapien
catatgtgacctcatacaaaatctgtgcaaaga

SEQ ID NO: 440247 - DNA, 33 bp, Homo sapien
ttgcaagggcagttaccaataacttaaagcatt

SEQ ID NO: 440248 - DNA, 33 bp, Homo sapien
ttgcaagggcagttactaataacttaaagcatt

SEQ ID NO: 440249 - DNA, 33 bp, Homo sapien
tgcctcttggtcctgacgttgttgcaccctgcc

SEQ ID NO: 440250 - DNA, 33 bp, Homo sapien
tgcctcttggtcctgaggttgttgcaccctgcc

SEQ ID NO: 440251 - DNA, 33 bp, Homo sapien
cagaattagcattcaaactcagatgtcagagtt

SEQ ID NO: 440252 - DNA, 33 bp, Homo sapien
cagaattagcattcaacctcagatgtcagagtt

SEQ ID NO: 440253 - DNA, 33 bp, Homo sapien
aggaagcatgccctaccaacttccaggtctcca

SEQ ID NO: 440254 - DNA, 33 bp, Homo sapien
aggaagcatgccctactaacttccaggtctcca

SEQ ID NO: 440255 - DNA, 33 bp, Homo sapien
tacatttctgcccccacgtagctgctcccaggt

SEQ ID NO: 440256 - DNA, 33 bp, Homo sapien
tacatttctgcccccaggtagctgctcccaggt

SEQ ID NO: 440257 - DNA, 33 bp, Homo sapien
ggttaggatacttggccgaggtaacacagtagt

SEQ ID NO: 440258 - DNA, 33 bp, Homo sapien
ggttaggatacttggctgaggtaacacagtagt

SEQ ID NO: 440259 - DNA, 33 bp, Homo sapien
taagacttcagtgaaacctttagcctgctttag

SEQ ID NO: 440260 - DNA, 33 bp, Homo sapien
taagacttcagtgaaatctttagcctgctttag

SEQ ID NO: 440261 - DNA, 33 bp, Homo sapien
ctacaaatacatctccaaactggggcactttgg

SEQ ID NO: 440262 - DNA, 33 bp, Homo sapien
ctacaaatacatctcctaactggggcactttgg

SEQ ID NO: 440263 - DNA, 33 bp, Homo sapien
actgcttctctgaagggatactagttgcctcat

SEQ ID NO: 440264 - DNA, 33 bp, Homo sapien
actgcttctctgaaggtatactagttgcctcat

SEQ ID NO: 440265 - DNA, 33 bp, Homo sapien
tcaagtttacaatacacctacctgatatccagc

SEQ ID NO: 440266 - DNA, 33 bp, Homo sapien
tcaagtttacaatacatctacctgatatccagc

SEQ ID NO: 440267 - DNA, 33 bp, Homo sapien
gctttgggctctgtccacttagatcttgagttc

SEQ ID NO: 440268 - DNA, 33 bp, Homo sapien
gctttgggctctgtccgcttagatcttgagttc

SEQ ID NO: 440269 - DNA, 33 bp, Homo sapien
aagagacattttgcacaagaaactggaaatcaa

SEQ ID NO: 440270 - DNA, 33 bp, Homo sapien
aagagacattttgcacgagaaactggaaatcaa

SEQ ID NO: 440271 - DNA, 33 bp, Homo sapien
cagtcaaaataaccaaacttctccaggagtggg

SEQ ID NO: 440272 - DNA, 33 bp, Homo sapien
cagtcaaaataaccaagcttctccaggagtggg

SEQ ID NO: 440273 - DNA, 33 bp, Homo sapien
tctgttttgagtcttggagacctagctttctgg

SEQ ID NO: 440274 - DNA, 33 bp, Homo sapien
tctgttttgagtcttgtagacctagctttctgg

SEQ ID NO: 440275 - DNA, 33 bp, Homo sapien
aagactaacattaacaagaacaacaaaacccaa

SEQ ID NO: 440276 - DNA, 33 bp, Homo sapien
aagactaacattaacatgaacaacaaaacccaa

SEQ ID NO: 440277 - DNA, 33 bp, Homo sapien
gaaagcagtctggtagcagtgtaacaagaacta

SEQ ID NO: 440278 - DNA, 33 bp, Homo sapien
gaaagcagtctggtagtagtgtaacaagaacta

SEQ ID NO: 440279 - DNA, 33 bp, Homo sapien
aatagcaatcagaccaagacctgcagaagaaag

SEQ ID NO: 440280 - DNA, 33 bp, Homo sapien
aatagcaatcagaccaggacctgcagaagaaag

SEQ ID NO: 440281 - DNA, 33 bp, Homo sapien
ttcggaggtttaactccgagccagtgcttcttc

SEQ ID NO: 440282 - DNA, 33 bp, Homo sapien
ttcggaggtttaactctgagccagtgcttcttc

SEQ ID NO: 440283 - DNA, 33 bp, Homo sapien
tctgagactgttcccactcaggttctgtggact

SEQ ID NO: 440284 - DNA, 33 bp, Homo sapien
tctgagactgttcccattcaggttctgtggact

SEQ ID NO: 440285 - DNA, 33 bp, Homo sapien
agcctaagtacccaacaactctcatgctatgcg

SEQ ID NO: 440286 - DNA, 33 bp, Homo sapien
agcctaagtacccaacgactctcatgctatgcg

SEQ ID NO: 440287 - DNA, 33 bp, Homo sapien
gtttttagcacaaagcacataatcttgaacaat

SEQ ID NO: 440288 - DNA, 33 bp, Homo sapien
gtttttagcacaaagcgcataatcttgaacaat

SEQ ID NO: 440289 - DNA, 33 bp, Homo sapien
aattatttcatgagcagcccttacttatagctt

SEQ ID NO: 440290 - DNA, 33 bp, Homo sapien
aattatttcatgagcatcccttacttatagctt

SEQ ID NO: 440291 - DNA, 33 bp, Homo sapien
gtgtaatcatgtgatgaaaagtctaaatctcaa

SEQ ID NO: 440292 - DNA, 33 bp, Homo sapien
gtgtaatcatgtgatggaaagtctaaatctcaa

SEQ ID NO: 440293 - DNA, 33 bp, Homo sapien
actcttttctgacatcactgagcaagcatccac

SEQ ID NO: 440294 - DNA, 33 bp, Homo sapien
actcttttctgacatctctgagcaagcatccac

SEQ ID NO: 440295 - DNA, 33 bp, Homo sapien
ttgtcttaaaattaaccggtagtgcttttgtat

SEQ ID NO: 440296 - DNA, 33 bp, Homo sapien
ttgtcttaaaattaactggtagtgcttttgtat

SEQ ID NO: 440297 - DNA, 33 bp, Homo sapien
agactcttcttggaccaagacctcatgacactt

SEQ ID NO: 440298 - DNA, 33 bp, Homo sapien
agactcttcttggaccgagacctcatgacactt

SEQ ID NO: 440299 - DNA, 33 bp, Homo sapien
caaaattaaagtgctcacatgaaatctagctag

SEQ ID NO: 440300 - DNA, 33 bp, Homo sapien
caaaattaaagtgctcgcatgaaatctagctag

SEQ ID NO: 440301 - DNA, 33 bp, Homo sapien
aataattttgtaagtaagacatggtaatagtta

SEQ ID NO: 440302 - DNA, 33 bp, Homo sapien
aataattttgtaagtaggacatggtaatagtta

SEQ ID NO: 440303 - DNA, 33 bp, Homo sapien
ctcactgagatgctgcaagtctcacttttctca

SEQ ID NO: 440304 - DNA, 33 bp, Homo sapien
ctcactgagatgctgcgagtctcacttttctca

SEQ ID NO: 440305 - DNA, 33 bp, Homo sapien
tgtttgtaggccttctaaaggtagatcagttat

SEQ ID NO: 440306 - DNA, 33 bp, Homo sapien
tgtttgtaggccttctgaaggtagatcagttat

SEQ ID NO: 440307 - DNA, 33 bp, Homo sapien
agcccaatggtggtgaagggtttattaatccat

SEQ ID NO: 440308 - DNA, 33 bp, Homo sapien
agcccaatggtggtgacgggtttattaatccat

SEQ ID NO: 440309 - DNA, 33 bp, Homo sapien
aagaggcaaagcatgacacatgaaggcagctta

SEQ ID NO: 440310 - DNA, 33 bp, Homo sapien
aagaggcaaagcatgagacatgaaggcagctta

SEQ ID NO: 440311 - DNA, 33 bp, Homo sapien
acaagaattgaaaacccagcaatctgactcaat

SEQ ID NO: 440312 - DNA, 33 bp, Homo sapien
acaagaattgaaaacctagcaatctgactcaat

SEQ ID NO: 440313 - DNA, 33 bp, Homo sapien
cagaatgtccaagaagcctctttgaagatgtct

SEQ ID NO: 440314 - DNA, 33 bp, Homo sapien
cagaatgtccaagaaggctctttgaagatgtct

SEQ ID NO: 440315 - DNA, 33 bp, Homo sapien
tatttcttgctaactccccaaaatgagtgctct

SEQ ID NO: 440316 - DNA, 33 bp, Homo sapien
tatttcttgctaactctccaaaatgagtgctct

SEQ ID NO: 440317 - DNA, 33 bp, Homo sapien
tgactcaggcaagaaacagaaaatgtgcttggt

SEQ ID NO: 440318 - DNA, 33 bp, Homo sapien
tgactcaggcaagaaatagaaaatgtgcttggt

SEQ ID NO: 440319 - DNA, 33 bp, Homo sapien
gtgaggcacctaacaccgcatttgagatttcag

SEQ ID NO: 440320 - DNA, 33 bp, Homo sapien
gtgaggcacctaacactgcatttgagatttcag

SEQ ID NO: 440321 - DNA, 33 bp, Homo sapien
atgagagggattgcacaaagtcaatgtagataa

SEQ ID NO: 440322 - DNA, 33 bp, Homo sapien
atgagagggattgcacgaagtcaatgtagataa

SEQ ID NO: 440323 - DNA, 33 bp, Homo sapien
aggtacgtaatggaaaataaactagagctggct

SEQ ID NO: 440324 - DNA, 33 bp, Homo sapien
aggtacgtaatggaaagtaaactagagctggct

SEQ ID NO: 440325 - DNA, 33 bp, Homo sapien
gagatagatctaactccgagcaagcaataccat

SEQ ID NO: 440326 - DNA, 33 bp, Homo sapien
gagatagatctaactctgagcaagcaataccat

SEQ ID NO: 440327 - DNA, 33 bp, Homo sapien
ggcaataggatgaggacgaatatccaggtcatt

SEQ ID NO: 440328 - DNA, 33 bp, Homo sapien
ggcaataggatgaggatgaatatccaggtcatt

SEQ ID NO: 440329 - DNA, 33 bp, Homo sapien
ctgcagtatgaaattacgtaatagctcatcttt

SEQ ID NO: 440330 - DNA, 33 bp, Homo sapien
ctgcagtatgaaattatgtaatagctcatcttt

SEQ ID NO: 440331 - DNA, 33 bp, Homo sapien
agcttgctcaaggccactggaagagagctaagc

SEQ ID NO: 440332 - DNA, 33 bp, Homo sapien
agcttgctcaaggccattggaagagagctaagc

SEQ ID NO: 440333 - DNA, 33 bp, Homo sapien
aaaccaataatatataacttctggctaggcagg

SEQ ID NO: 440334 - DNA, 33 bp, Homo sapien
aaaccaataatatataccttctggctaggcagg

SEQ ID NO: 440335 - DNA, 33 bp, Homo sapien
ttaaccagagacaaatcagcagcggtgagaaca

SEQ ID NO: 440336 - DNA, 33 bp, Homo sapien
ttaaccagagacaaatgagcagcggtgagaaca

SEQ ID NO: 440337 - DNA, 33 bp, Homo sapien
aatttcatacctgctaaatatgaaacattaagg

SEQ ID NO: 440338 - DNA, 33 bp, Homo sapien
aatttcatacctgctacatatgaaacattaagg

SEQ ID NO: 440339 - DNA, 33 bp, Homo sapien
gggacttatgtatgccgcactgactgaagtaaa

SEQ ID NO: 440340 - DNA, 33 bp, Homo sapien
gggacttatgtatgcctcactgactgaagtaaa

SEQ ID NO: 440341 - DNA, 33 bp, Homo sapien
attttatcacaaatggacataatgataaattat

SEQ ID NO: 440342 - DNA, 33 bp, Homo sapien
attttatcacaaatggtcataatgataaattat

SEQ ID NO: 440343 - DNA, 33 bp, Homo sapien
tggcacaaactgcatcaaaggattctgcaaagg

SEQ ID NO: 440344 - DNA, 33 bp, Homo sapien
tggcacaaactgcatcgaaggattctgcaaagg

SEQ ID NO: 440345 - DNA, 33 bp, Homo sapien
attgattctacacctacgtccagaggcccctcc

SEQ ID NO: 440346 - DNA, 33 bp, Homo sapien
attgattctacacctatgtccagaggcccctcc

SEQ ID NO: 440347 - DNA, 33 bp, Homo sapien
ttctcattgtacagacaagagcaagctgcttat

SEQ ID NO: 440348 - DNA, 33 bp, Homo sapien
ttctcattgtacagacgagagcaagctgcttat

SEQ ID NO: 440349 - DNA, 33 bp, Homo sapien
aggtgttgtctgagtaaaggcctttgtagtgaa

SEQ ID NO: 440350 - DNA, 33 bp, Homo sapien
aggtgttgtctgagtagaggcctttgtagtgaa

SEQ ID NO: 440351 - DNA, 33 bp, Homo sapien
acaggtaagaaaatcacgttcatttcagaattg

SEQ ID NO: 440352 - DNA, 33 bp, Homo sapien
acaggtaagaaaatcatgttcatttcagaattg

SEQ ID NO: 440353 - DNA, 33 bp, Homo sapien
taattaaccttactcaatacttcatatgattga

SEQ ID NO: 440354 - DNA, 33 bp, Homo sapien
taattaaccttactcagtacttcatatgattga

SEQ ID NO: 440355 - DNA, 33 bp, Homo sapien
tgctcataacttctacaacataatacttatcat

SEQ ID NO: 440356 - DNA, 33 bp, Homo sapien
tgctcataacttctacgacataatacttatcat

SEQ ID NO: 440357 - DNA, 33 bp, Homo sapien
ctgatctatgaagcaaagacagccctagttttc

SEQ ID NO: 440358 - DNA, 33 bp, Homo sapien
ctgatctatgaagcaatgacagccctagttttc

SEQ ID NO: 440359 - DNA, 33 bp, Homo sapien
ctagttttcagtctcacgatttccgctctctgt

SEQ ID NO: 440360 - DNA, 33 bp, Homo sapien
ctagttttcagtctcatgatttccgctctctgt

SEQ ID NO: 440361 - DNA, 33 bp, Homo sapien
ccctgatttgtctgaagtaggccaaacaaggat

SEQ ID NO: 440362 - DNA, 33 bp, Homo sapien
ccctgatttgtctgaattaggccaaacaaggat

SEQ ID NO: 440363 - DNA, 33 bp, Homo sapien
acagcctttaatgtacaagcaaatccaccgaac

SEQ ID NO: 440364 - DNA, 33 bp, Homo sapien
acagcctttaatgtaccagcaaatccaccgaac

SEQ ID NO: 440365 - DNA, 33 bp, Homo sapien
cagtttgcaggtcatacgttttgtagatttcta

SEQ ID NO: 440366 - DNA, 33 bp, Homo sapien
cagtttgcaggtcatatgttttgtagatttcta

SEQ ID NO: 440367 - DNA, 33 bp, Homo sapien
gacagtacatcactgaaggcagtagaacatggc

SEQ ID NO: 440368 - DNA, 33 bp, Homo sapien
gacagtacatcactgagggcagtagaacatggc

SEQ ID NO: 440369 - DNA, 33 bp, Homo sapien
atgtgtctgtttttagcccatattatgttttgg

SEQ ID NO: 440370 - DNA, 33 bp, Homo sapien
atgtgtctgtttttagtccatattatgttttgg

SEQ ID NO: 440371 - DNA, 33 bp, Homo sapien
tcgtagattcagattgaaattcaagctctgccc

SEQ ID NO: 440372 - DNA, 33 bp, Homo sapien
tcgtagattcagattggaattcaagctctgccc

SEQ ID NO: 440373 - DNA, 33 bp, Homo sapien
ttggaaataatatggaaagagaggaagtggaca

SEQ ID NO: 440374 - DNA, 33 bp, Homo sapien
ttggaaataatatggagagagaggaagtggaca

SEQ ID NO: 440375 - DNA, 33 bp, Homo sapien
tgcctcctcaagtccaatgcaaatggagtggcc

SEQ ID NO: 440376 - DNA, 33 bp, Homo sapien
tgcctcctcaagtccagtgcaaatggagtggcc

SEQ ID NO: 440377 - DNA, 33 bp, Homo sapien
ccatttaataaggcaaatctgatgggagtgtaa

SEQ ID NO: 440378 - DNA, 33 bp, Homo sapien
ccatttaataaggcaactctgatgggagtgtaa

SEQ ID NO: 440379 - DNA, 33 bp, Homo sapien
caggtggagagtgtccaatttgcacaggtctag

SEQ ID NO: 440380 - DNA, 33 bp, Homo sapien
caggtggagagtgtccgatttgcacaggtctag

SEQ ID NO: 440381 - DNA, 33 bp, Homo sapien
ggtctatcaaaaaggacgttggaatcctacagt

SEQ ID NO: 440382 - DNA, 33 bp, Homo sapien
ggtctatcaaaaaggaggttggaatcctacagt

SEQ ID NO: 440383 - DNA, 33 bp, Homo sapien
ccatttgagatagtccaatggcatttatgatat

SEQ ID NO: 440384 - DNA, 33 bp, Homo sapien
ccatttgagatagtccgatggcatttatgatat

SEQ ID NO: 440385 - DNA, 33 bp, Homo sapien
gaggaagatcccaaacgggatggaggcaaagtg

SEQ ID NO: 440386 - DNA, 33 bp, Homo sapien
gaggaagatcccaaactggatggaggcaaagtg

SEQ ID NO: 440387 - DNA, 33 bp, Homo sapien
tctgaaagttctgccagaaatcccaccctttct

SEQ ID NO: 440388 - DNA, 33 bp, Homo sapien
tctgaaagttctgccataaatcccaccctttct

SEQ ID NO: 440389 - DNA, 33 bp, Homo sapien
ggttcttatttggccccgacattctatacgcac

SEQ ID NO: 440390 - DNA, 33 bp, Homo sapien
ggttcttatttggccctgacattctatacgcac

SEQ ID NO: 440391 - DNA, 33 bp, Homo sapien
aggtctcagggccaggcagggaaagagtgactt

SEQ ID NO: 440392 - DNA, 33 bp, Homo sapien
aggtctcagggccaggtagggaaagagtgactt

SEQ ID NO: 440393 - DNA, 33 bp, Homo sapien
aactctcctacccaaaagcacgggccatcacca

SEQ ID NO: 440394 - DNA, 33 bp, Homo sapien
aactctcctacccaaaggcacgggccatcacca

SEQ ID NO: 440395 - DNA, 33 bp, Homo sapien
cagttggatgatagaacggcatatgacggtcat

SEQ ID NO: 440396 - DNA, 33 bp, Homo sapien
cagttggatgatagaatggcatatgacggtcat

SEQ ID NO: 440397 - DNA, 33 bp, Homo sapien
gagactaaacaaggacacatccaatctacacct

SEQ ID NO: 440398 - DNA, 33 bp, Homo sapien
gagactaaacaaggacgcatccaatctacacct

SEQ ID NO: 440399 - DNA, 33 bp, Homo sapien
tagtgcagagagagaaactgtgtgcttgtggga

SEQ ID NO: 440400 - DNA, 33 bp, Homo sapien
tagtgcagagagagaacctgtgtgcttgtggga

SEQ ID NO: 440401 - DNA, 33 bp, Homo sapien
ttaatctttcagaggcacagagtttgtttcaca

SEQ ID NO: 440402 - DNA, 33 bp, Homo sapien
ttaatctttcagaggcgcagagtttgtttcaca

SEQ ID NO: 440403 - DNA, 33 bp, Homo sapien
gttgtcactgcaaacaagatggtcagggaacct

SEQ ID NO: 440404 - DNA, 33 bp, Homo sapien
gttgtcactgcaaacaggatggtcagggaacct

SEQ ID NO: 440405 - DNA, 33 bp, Homo sapien
gcaaaacgtcatttccaattctgtctatgagtg

SEQ ID NO: 440406 - DNA, 33 bp, Homo sapien
gcaaaacgtcatttccgattctgtctatgagtg

SEQ ID NO: 440407 - DNA, 33 bp, Homo sapien
ttcttttctgccagataacttgagctggaatat

SEQ ID NO: 440408 - DNA, 33 bp, Homo sapien
ttcttttctgccagatgacttgagctggaatat

SEQ ID NO: 440409 - DNA, 33 bp, Homo sapien
gccaggggtatcattcaatctgagtccaaaggc

SEQ ID NO: 440410 - DNA, 33 bp, Homo sapien
gccaggggtatcattcgatctgagtccaaaggc

SEQ ID NO: 440411 - DNA, 33 bp, Homo sapien
ggtaatgtggatgataaggtaacttccactctg

SEQ ID NO: 440412 - DNA, 33 bp, Homo sapien
ggtaatgtggatgatagggtaacttccactctg

SEQ ID NO: 440413 - DNA, 33 bp, Homo sapien
aacagaacacagggaaccgaatggtgagacaca

SEQ ID NO: 440414 - DNA, 33 bp, Homo sapien
aacagaacacagggaatcgaatggtgagacaca

SEQ ID NO: 440415 - DNA, 33 bp, Homo sapien
tgagtgcagtcaaaagaatgtgctacagagtca

SEQ ID NO: 440416 - DNA, 33 bp, Homo sapien
tgagtgcagtcaaaaggatgtgctacagagtca

SEQ ID NO: 440417 - DNA, 33 bp, Homo sapien
ggactacagatgcctaaacttaaaaagatcaaa

SEQ ID NO: 440418 - DNA, 33 bp, Homo sapien
ggactacagatgcctacacttaaaaagatcaaa

SEQ ID NO: 440419 - DNA, 33 bp, Homo sapien
gggcacccgaacacagaacccatgagtgagcct

SEQ ID NO: 440420 - DNA, 33 bp, Homo sapien
gggcacccgaacacagtacccatgagtgagcct

SEQ ID NO: 440421 - DNA, 33 bp, Homo sapien
gcgtccggccaaccaaataattcttcagtcaga

SEQ ID NO: 440422 - DNA, 33 bp, Homo sapien
gcgtccggccaaccaagtaattcttcagtcaga

SEQ ID NO: 440423 - DNA, 33 bp, Homo sapien
ttccttcatgagaataataagatggcaaaactc

SEQ ID NO: 440424 - DNA, 33 bp, Homo sapien
ttccttcatgagaatagtaagatggcaaaactc

SEQ ID NO: 440425 - DNA, 33 bp, Homo sapien
gatgcagagactgcgactaaaggcagatttttg

SEQ ID NO: 440426 - DNA, 33 bp, Homo sapien
gatgcagagactgcgagtaaaggcagatttttg

SEQ ID NO: 440427 - DNA, 33 bp, Homo sapien
gacccagctttctttgaagacccctaggctgtt

SEQ ID NO: 440428 - DNA, 33 bp, Homo sapien
gacccagctttctttgtagacccctaggctgtt

SEQ ID NO: 440429 - DNA, 33 bp, Homo sapien
gcctggcatcacatccagctttgaaatgcgact

SEQ ID NO: 440430 - DNA, 33 bp, Homo sapien
gcctggcatcacatccggctttgaaatgcgact

SEQ ID NO: 440431 - DNA, 33 bp, Homo sapien
gcctgtgaaatgaaaacttacaccaggagttcc

SEQ ID NO: 440432 - DNA, 33 bp, Homo sapien
gcctgtgaaatgaaaagttacaccaggagttcc

SEQ ID NO: 440433 - DNA, 33 bp, Homo sapien
tgacttatatagaaaactagacacaattctgga

SEQ ID NO: 440434 - DNA, 33 bp, Homo sapien
tgacttatatagaaaattagacacaattctgga

SEQ ID NO: 440435 - DNA, 33 bp, Homo sapien
ctttaagtgattctgaagagaaactggttagga

SEQ ID NO: 440436 - DNA, 33 bp, Homo sapien
ctttaagtgattctgatgagaaactggttagga

SEQ ID NO: 440437 - DNA, 33 bp, Homo sapien
gatctagattatcttcccttctaacactttggc

SEQ ID NO: 440438 - DNA, 33 bp, Homo sapien
gatctagattatcttctcttctaacactttggc

SEQ ID NO: 440439 - DNA, 33 bp, Homo sapien
gtcttctatcctgctaactcattgcaattctcc

SEQ ID NO: 440440 - DNA, 33 bp, Homo sapien
gtcttctatcctgctagctcattgcaattctcc

SEQ ID NO: 440441 - DNA, 33 bp, Homo sapien
cattgtgggttgacagccactaggggaaatgtt

SEQ ID NO: 440442 - DNA, 33 bp, Homo sapien
cattgtgggttgacagtcactaggggaaatgtt

SEQ ID NO: 440443 - DNA, 33 bp, Homo sapien
gatagcaccctggtcaaactggagcctagctgg

SEQ ID NO: 440444 - DNA, 33 bp, Homo sapien
gatagcaccctggtcagactggagcctagctgg

SEQ ID NO: 440445 - DNA, 33 bp, Homo sapien
gcacagaacccaaccagtcagaacaggcatcag

SEQ ID NO: 440446 - DNA, 33 bp, Homo sapien
gcacagaacccaaccattcagaacaggcatcag

SEQ ID NO: 440447 - DNA, 33 bp, Homo sapien
actgttatatttaggaaacttaggagcataatc

SEQ ID NO: 440448 - DNA, 33 bp, Homo sapien
actgttatatttaggagacttaggagcataatc

SEQ ID NO: 440449 - DNA, 33 bp, Homo sapien
agaaatccaagaccaaacacgtattgaggttta

SEQ ID NO: 440450 - DNA, 33 bp, Homo sapien
agaaatccaagaccaaccacgtattgaggttta

SEQ ID NO: 440451 - DNA, 33 bp, Homo sapien
cgggaatgggtggataaatgctcctgattcttc

SEQ ID NO: 440452 - DNA, 33 bp, Homo sapien
cgggaatgggtggatacatgctcctgattcttc

SEQ ID NO: 440453 - DNA, 33 bp, Homo sapien
ctatttggagaaaaaagttcagcgggctccaac

SEQ ID NO: 440454 - DNA, 33 bp, Homo sapien
ctatttggagaaaaaatttcagcgggctccaac

SEQ ID NO: 440455 - DNA, 33 bp, Homo sapien
accaatctcctagtaaaagaagcgtgcacccgc

SEQ ID NO: 440456 - DNA, 33 bp, Homo sapien
accaatctcctagtaagagaagcgtgcacccgc

SEQ ID NO: 440457 - DNA, 33 bp, Homo sapien
caccttcctagtgatgacaacttgatcccaaca

SEQ ID NO: 440458 - DNA, 33 bp, Homo sapien
caccttcctagtgatgtcaacttgatcccaaca

SEQ ID NO: 440459 - DNA, 33 bp, Homo sapien
agatcctcctgcgaaaattaagaccactgggga

SEQ ID NO: 440460 - DNA, 33 bp, Homo sapien
agatcctcctgcgaaacttaagaccactgggga

SEQ ID NO: 440461 - DNA, 33 bp, Homo sapien
actcatataaggcaaactcatcatgcactgttc

SEQ ID NO: 440462 - DNA, 33 bp, Homo sapien
actcatataaggcaaattcatcatgcactgttc

SEQ ID NO: 440463 - DNA, 33 bp, Homo sapien
gtcaaattattccaacagtgaagtctcatgggt

SEQ ID NO: 440464 - DNA, 33 bp, Homo sapien
gtcaaattattccaactgtgaagtctcatgggt

SEQ ID NO: 440465 - DNA, 33 bp, Homo sapien
gatttttcaaagagcacgttcccagcaaacaca

SEQ ID NO: 440466 - DNA, 33 bp, Homo sapien
gatttttcaaagagcatgttcccagcaaacaca

SEQ ID NO: 440467 - DNA, 33 bp, Homo sapien
cctgacagcataggaaagatcatttagccatta

SEQ ID NO: 440468 - DNA, 33 bp, Homo sapien
cctgacagcataggaaggatcatttagccatta

SEQ ID NO: 440469 - DNA, 33 bp, Homo sapien
tttgaggatgtgggcaagcatgagcatctccat

SEQ ID NO: 440470 - DNA, 33 bp, Homo sapien
tttgaggatgtgggcaggcatgagcatctccat

SEQ ID NO: 440471 - DNA, 33 bp, Homo sapien
tttgcatgtcagcaagaaaaattgtctcacaac

SEQ ID NO: 440472 - DNA, 33 bp, Homo sapien
tttgcatgtcagcaagcaaaattgtctcacaac

SEQ ID NO: 440473 - DNA, 33 bp, Homo sapien
aaaacaaatgagctacaggaactgagtgcttaa

SEQ ID NO: 440474 - DNA, 33 bp, Homo sapien
aaaacaaatgagctacgggaactgagtgcttaa

SEQ ID NO: 440475 - DNA, 33 bp, Homo sapien
aaacatatttagtaaaaagatctgatgccatta

SEQ ID NO: 440476 - DNA, 33 bp, Homo sapien
aaacatatttagtaaatagatctgatgccatta

SEQ ID NO: 440477 - DNA, 33 bp, Homo sapien
gggcagttggaaaggcacttattttgtctggta

SEQ ID NO: 440478 - DNA, 33 bp, Homo sapien
gggcagttggaaaggcgcttattttgtctggta

SEQ ID NO: 440479 - DNA, 33 bp, Homo sapien
ctgtccatgggcgtcactctgatctaactgctg

SEQ ID NO: 440480 - DNA, 33 bp, Homo sapien
ctgtccatgggcgtcattctgatctaactgctg

SEQ ID NO: 440481 - DNA, 33 bp, Homo sapien
atctttcttgcaccacaatttctgcatttgtaa

SEQ ID NO: 440482 - DNA, 33 bp, Homo sapien
atctttcttgcaccacgatttctgcatttgtaa

SEQ ID NO: 440483 - DNA, 33 bp, Homo sapien
ctttttggttaaaaaaacttcatgccttgaatt

SEQ ID NO: 440484 - DNA, 33 bp, Homo sapien
ctttttggttaaaaaaccttcatgccttgaatt

SEQ ID NO: 440485 - DNA, 33 bp, Homo sapien
aaaggtattccctttcaaacgctctttccaaac

SEQ ID NO: 440486 - DNA, 33 bp, Homo sapien
aaaggtattccctttcgaacgctctttccaaac

SEQ ID NO: 440487 - DNA, 33 bp, Homo sapien
agaagaaggggtatcacggaaggccgtgcaggg

SEQ ID NO: 440488 - DNA, 33 bp, Homo sapien
agaagaaggggtatcatggaaggccgtgcaggg

SEQ ID NO: 440489 - DNA, 33 bp, Homo sapien
ctgggcaggttgctgccgatcgtgggtcaaagt

SEQ ID NO: 440490 - DNA, 33 bp, Homo sapien
ctgggcaggttgctgctgatcgtgggtcaaagt

SEQ ID NO: 440491 - DNA, 33 bp, Homo sapien
gtgaagtctcctgaaacgaactccagcaaattg

SEQ ID NO: 440492 - DNA, 33 bp, Homo sapien
gtgaagtctcctgaaatgaactccagcaaattg

SEQ ID NO: 440493 - DNA, 33 bp, Homo sapien
tgatagagaacttttgaaaccaaatgtatatat

SEQ ID NO: 440494 - DNA, 33 bp, Homo sapien
tgatagagaacttttggaaccaaatgtatatat

SEQ ID NO: 440495 - DNA, 33 bp, Homo sapien
gagttggggaaggaaacgttcttagaaagctct

SEQ ID NO: 440496 - DNA, 33 bp, Homo sapien
gagttggggaaggaaatgttcttagaaagctct

SEQ ID NO: 440497 - DNA, 33 bp, Homo sapien
tccaaattaaagcacacacttgctagtctcact

SEQ ID NO: 440498 - DNA, 33 bp, Homo sapien
tccaaattaaagcacatacttgctagtctcact

SEQ ID NO: 440499 - DNA, 33 bp, Homo sapien
aattccaattcatcaccaggtagaataatttga

SEQ ID NO: 440500 - DNA, 33 bp, Homo sapien
aattccaattcatcactaggtagaataatttga

SEQ ID NO: 440501 - DNA, 33 bp, Homo sapien
tttttttccacggagaagtagtagcaatggtct

SEQ ID NO: 440502 - DNA, 33 bp, Homo sapien
tttttttccacggagaggtagtagcaatggtct

SEQ ID NO: 440503 - DNA, 33 bp, Homo sapien
gtgttttggttccctaccgctgcacagcaaatc

SEQ ID NO: 440504 - DNA, 33 bp, Homo sapien
gtgttttggttccctatcgctgcacagcaaatc

SEQ ID NO: 440505 - DNA, 33 bp, Homo sapien
gaggagcaccaggaaaagaatcaacattttaga

SEQ ID NO: 440506 - DNA, 33 bp, Homo sapien
gaggagcaccaggaaaggaatcaacattttaga

SEQ ID NO: 440507 - DNA, 33 bp, Homo sapien
agctcatgggatgagacagtgcagggaacataa

SEQ ID NO: 440508 - DNA, 33 bp, Homo sapien
agctcatgggatgagagagtgcagggaacataa

SEQ ID NO: 440509 - DNA, 33 bp, Homo sapien
tgtgaaacctgaggagaagcacaactcataaga

SEQ ID NO: 440510 - DNA, 33 bp, Homo sapien
tgtgaaacctgaggaggagcacaactcataaga

SEQ ID NO: 440511 - DNA, 33 bp, Homo sapien
agactggcttttgagaacctgagtctagggcgt

SEQ ID NO: 440512 - DNA, 33 bp, Homo sapien
agactggcttttgagaccctgagtctagggcgt

SEQ ID NO: 440513 - DNA, 33 bp, Homo sapien
ctgggattacaggggcaaactggcagttgttaa

SEQ ID NO: 440514 - DNA, 33 bp, Homo sapien
ctgggattacaggggcgaactggcagttgttaa

SEQ ID NO: 440515 - DNA, 33 bp, Homo sapien
ttgttatctcaactgcaaactcataaattgtga

SEQ ID NO: 440516 - DNA, 33 bp, Homo sapien
ttgttatctcaactgcgaactcataaattgtga

SEQ ID NO: 440517 - DNA, 33 bp, Homo sapien
atgagtaagagtcagcagaaacaatggaagaca

SEQ ID NO: 440518 - DNA, 33 bp, Homo sapien
atgagtaagagtcagcggaaacaatggaagaca

SEQ ID NO: 440519 - DNA, 33 bp, Homo sapien
gtaattgttgggtagacgcaaaacggactggag

SEQ ID NO: 440520 - DNA, 33 bp, Homo sapien
gtaattgttgggtagatgcaaaacggactggag

SEQ ID NO: 440521 - DNA, 33 bp, Homo sapien
tggaatgtaaacagaggccgagtgtgtgttggc

SEQ ID NO: 440522 - DNA, 33 bp, Homo sapien
tggaatgtaaacagagtccgagtgtgtgttggc

SEQ ID NO: 440523 - DNA, 33 bp, Homo sapien
aagctgtgatgtgaaacctgttctgtgaaggtg

SEQ ID NO: 440524 - DNA, 33 bp, Homo sapien
aagctgtgatgtgaaatctgttctgtgaaggtg

SEQ ID NO: 440525 - DNA, 33 bp, Homo sapien
ctcagcatttacccacaatgggaattccagctt

SEQ ID NO: 440526 - DNA, 33 bp, Homo sapien
ctcagcatttacccacgatgggaattccagctt

SEQ ID NO: 440527 - DNA, 33 bp, Homo sapien
ccaagtgcacttctcactattacaacaatctca

SEQ ID NO: 440528 - DNA, 33 bp, Homo sapien
ccaagtgcacttctcagtattacaacaatctca

SEQ ID NO: 440529 - DNA, 33 bp, Homo sapien
ttttgagccaggggtaaagtcaggcacggtgac

SEQ ID NO: 440530 - DNA, 33 bp, Homo sapien
ttttgagccaggggtagagtcaggcacggtgac

SEQ ID NO: 440531 - DNA, 33 bp, Homo sapien
tggcagccagtgatctcacctagatgaggtctg

SEQ ID NO: 440532 - DNA, 33 bp, Homo sapien
tggcagccagtgatcttacctagatgaggtctg

SEQ ID NO: 440533 - DNA, 33 bp, Homo sapien
tagggttttgattgcaagcaacagcaattgaat

SEQ ID NO: 440534 - DNA, 33 bp, Homo sapien
tagggttttgattgcaggcaacagcaattgaat

SEQ ID NO: 440535 - DNA, 33 bp, Homo sapien
tgaattcaacagagaaagaattaactgaaggaa

SEQ ID NO: 440536 - DNA, 33 bp, Homo sapien
tgaattcaacagagaaggaattaactgaaggaa

SEQ ID NO: 440537 - DNA, 33 bp, Homo sapien
tctctccagtgtgacaagtactccagtgctacc

SEQ ID NO: 440538 - DNA, 33 bp, Homo sapien
tctctccagtgtgacaggtactccagtgctacc

SEQ ID NO: 440539 - DNA, 33 bp, Homo sapien
agacagacacataaacaaacaatccttcattgc

SEQ ID NO: 440540 - DNA, 33 bp, Homo sapien
agacagacacataaaccaacaatccttcattgc

SEQ ID NO: 440541 - DNA, 33 bp, Homo sapien
aggtgcctaatctatacgagacagacacataaa

SEQ ID NO: 440542 - DNA, 33 bp, Homo sapien
aggtgcctaatctatatgagacagacacataaa

SEQ ID NO: 440543 - DNA, 33 bp, Homo sapien
gcttgggactggagataaatcattgggatgtgg

SEQ ID NO: 440544 - DNA, 33 bp, Homo sapien
gcttgggactggagatgaatcattgggatgtgg

SEQ ID NO: 440545 - DNA, 33 bp, Homo sapien
cttgaatggagtaaacagtcaaggggtctgatt

SEQ ID NO: 440546 - DNA, 33 bp, Homo sapien
cttgaatggagtaaacggtcaaggggtctgatt

SEQ ID NO: 440547 - DNA, 33 bp, Homo sapien
aaaccctgctgtagtgcagtatcagttttacgt

SEQ ID NO: 440548 - DNA, 33 bp, Homo sapien
aaaccctgctgtagtgtagtatcagttttacgt

SEQ ID NO: 440549 - DNA, 33 bp, Homo sapien
atggctcaatgtgacaacccttacaaaagcaag

SEQ ID NO: 440550 - DNA, 33 bp, Homo sapien
atggctcaatgtgacatcccttacaaaagcaag

SEQ ID NO: 440551 - DNA, 33 bp, Homo sapien
gagggccttacagacccggcagttgaaggtatg

SEQ ID NO: 440552 - DNA, 33 bp, Homo sapien
gagggccttacagacctggcagttgaaggtatg

SEQ ID NO: 440553 - DNA, 33 bp, Homo sapien
ttgctgacacattagacgatctagatatgtgtc

SEQ ID NO: 440554 - DNA, 33 bp, Homo sapien
ttgctgacacattagaggatctagatatgtgtc

SEQ ID NO: 440555 - DNA, 33 bp, Homo sapien
agcttgctctagatcacggaagtcaaagctttc

SEQ ID NO: 440556 - DNA, 33 bp, Homo sapien
agcttgctctagatcatggaagtcaaagctttc

SEQ ID NO: 440557 - DNA, 33 bp, Homo sapien
ttctattttgcattagccagttaaggttctgat

SEQ ID NO: 440558 - DNA, 33 bp, Homo sapien
ttctattttgcattagtcagttaaggttctgat

SEQ ID NO: 440559 - DNA, 33 bp, Homo sapien
atgactgttcagaataatagtgccagctccatg

SEQ ID NO: 440560 - DNA, 33 bp, Homo sapien
atgactgttcagaatattagtgccagctccatg

SEQ ID NO: 440561 - DNA, 33 bp, Homo sapien
gtgatacagcaccaggcaaagtgttctactttt

SEQ ID NO: 440562 - DNA, 33 bp, Homo sapien
gtgatacagcaccagggaaagtgttctactttt

SEQ ID NO: 440563 - DNA, 33 bp, Homo sapien
tctgggcactaaagcactccctgccagtcactc

SEQ ID NO: 440564 - DNA, 33 bp, Homo sapien
tctgggcactaaagcagtccctgccagtcactc

SEQ ID NO: 440565 - DNA, 33 bp, Homo sapien
ctgtgcaaagtcagaaccatctatataatatat

SEQ ID NO: 440566 - DNA, 33 bp, Homo sapien
ctgtgcaaagtcagaatcatctatataatatat

SEQ ID NO: 440567 - DNA, 33 bp, Homo sapien
tcttcactcaagatctaactaaatcaatgtgca

SEQ ID NO: 440568 - DNA, 33 bp, Homo sapien
tcttcactcaagatctgactaaatcaatgtgca

SEQ ID NO: 440569 - DNA, 33 bp, Homo sapien
atgtgtacagttatccacttttcacaggtgata

SEQ ID NO: 440570 - DNA, 33 bp, Homo sapien
atgtgtacagttatccgcttttcacaggtgata

SEQ ID NO: 440571 - DNA, 33 bp, Homo sapien
ttttggatttatgcccacagaagagtttcacag

SEQ ID NO: 440572 - DNA, 33 bp, Homo sapien
ttttggatttatgcccgcagaagagtttcacag

SEQ ID NO: 440573 - DNA, 33 bp, Homo sapien
ttctcttaattgaggaacttaggtggtggttcc

SEQ ID NO: 440574 - DNA, 33 bp, Homo sapien
ttctcttaattgaggaccttaggtggtggttcc

SEQ ID NO: 440575 - DNA, 33 bp, Homo sapien
aaaacaggccttatgacgtttctctttaaaaat

SEQ ID NO: 440576 - DNA, 33 bp, Homo sapien
aaaacaggccttatgatgtttctctttaaaaat

SEQ ID NO: 440577 - DNA, 33 bp, Homo sapien
cgggtgacaagctgtcccttctgagagtgccag

SEQ ID NO: 440578 - DNA, 33 bp, Homo sapien
cgggtgacaagctgtctcttctgagagtgccag

SEQ ID NO: 440579 - DNA, 33 bp, Homo sapien
cattcccaccagcatcaagtgggagctccagtc

SEQ ID NO: 440580 - DNA, 33 bp, Homo sapien
cattcccaccagcatcgagtgggagctccagtc

SEQ ID NO: 440581 - DNA, 33 bp, Homo sapien
gtctcacctatcccgaaaggaatgcagacagaa

SEQ ID NO: 440582 - DNA, 33 bp, Homo sapien
gtctcacctatcccgacaggaatgcagacagaa

SEQ ID NO: 440583 - DNA, 33 bp, Homo sapien
tctccatctggtttgaaaatgcacgctatggtc

SEQ ID NO: 440584 - DNA, 33 bp, Homo sapien
tctccatctggtttgagaatgcacgctatggtc

SEQ ID NO: 440585 - DNA, 33 bp, Homo sapien
gagtcatttaacatcacgaataactgaaatctg

SEQ ID NO: 440586 - DNA, 33 bp, Homo sapien
gagtcatttaacatcatgaataactgaaatctg

SEQ ID NO: 440587 - DNA, 33 bp, Homo sapien
tatgcggggaacctgacgctgatgaaagggagg

SEQ ID NO: 440588 - DNA, 33 bp, Homo sapien
tatgcggggaacctgatgctgatgaaagggagg

SEQ ID NO: 440589 - DNA, 33 bp, Homo sapien
gatcaaaaataagtacaagcattttcgtttgaa

SEQ ID NO: 440590 - DNA, 33 bp, Homo sapien
gatcaaaaataagtacgagcattttcgtttgaa

SEQ ID NO: 440591 - DNA, 33 bp, Homo sapien
ttgtggcatttgctccaagttgttgctcatttt

SEQ ID NO: 440592 - DNA, 33 bp, Homo sapien
ttgtggcatttgctccgagttgttgctcatttt

SEQ ID NO: 440593 - DNA, 33 bp, Homo sapien
ttgcagcaaagtctccactacttaaggctcttt

SEQ ID NO: 440594 - DNA, 33 bp, Homo sapien
ttgcagcaaagtctcctctacttaaggctcttt

SEQ ID NO: 440595 - DNA, 33 bp, Homo sapien
cataatggacatttgcaccctttaaggaagtaa

SEQ ID NO: 440596 - DNA, 33 bp, Homo sapien
cataatggacatttgcgccctttaaggaagtaa

SEQ ID NO: 440597 - DNA, 33 bp, Homo sapien
tcctttcccttaatacaactcatctgctctcct

SEQ ID NO: 440598 - DNA, 33 bp, Homo sapien
tcctttcccttaatacgactcatctgctctcct

SEQ ID NO: 440599 - DNA, 33 bp, Homo sapien
agaacattggcacaaacgagttgcgaacatctt

SEQ ID NO: 440600 - DNA, 33 bp, Homo sapien
agaacattggcacaaatgagttgcgaacatctt

SEQ ID NO: 440601 - DNA, 33 bp, Homo sapien
cttgagatacttcacactccaggagtcttccat

SEQ ID NO: 440602 - DNA, 33 bp, Homo sapien
cttgagatacttcacattccaggagtcttccat

SEQ ID NO: 440603 - DNA, 33 bp, Homo sapien
ccgagtctcaaaaacaatgaaggcaggtgactg

SEQ ID NO: 440604 - DNA, 33 bp, Homo sapien
ccgagtctcaaaaacagtgaaggcaggtgactg

SEQ ID NO: 440605 - DNA, 33 bp, Homo sapien
gactctgagtggtgtcacaaggaaccttatgca

SEQ ID NO: 440606 - DNA, 33 bp, Homo sapien
gactctgagtggtgtcgcaaggaaccttatgca

SEQ ID NO: 440607 - DNA, 33 bp, Homo sapien
ttatccaatctgctccaaacaaagctcctttaa

SEQ ID NO: 440608 - DNA, 33 bp, Homo sapien
ttatccaatctgctccgaacaaagctcctttaa

SEQ ID NO: 440609 - DNA, 33 bp, Homo sapien
atgttcaagtggagtcacggctcggttatccaa

SEQ ID NO: 440610 - DNA, 33 bp, Homo sapien
atgttcaagtggagtcgcggctcggttatccaa

SEQ ID NO: 440611 - DNA, 33 bp, Homo sapien
gaggagggaacttgtacacccactacagcccca

SEQ ID NO: 440612 - DNA, 33 bp, Homo sapien
gaggagggaacttgtagacccactacagcccca

SEQ ID NO: 440613 - DNA, 33 bp, Homo sapien
agatgcttgaagagccaatgggacctccatgac

SEQ ID NO: 440614 - DNA, 33 bp, Homo sapien
agatgcttgaagagccgatgggacctccatgac

SEQ ID NO: 440615 - DNA, 33 bp, Homo sapien
ctttgtgagaatgagaaataagcacctctccta

SEQ ID NO: 440616 - DNA, 33 bp, Homo sapien
ctttgtgagaatgagacataagcacctctccta

SEQ ID NO: 440617 - DNA, 33 bp, Homo sapien
atggcaggcaaggaacagtctccatttgatgct

SEQ ID NO: 440618 - DNA, 33 bp, Homo sapien
atggcaggcaaggaacggtctccatttgatgct

SEQ ID NO: 440619 - DNA, 33 bp, Homo sapien
cagggaatggtacagaaaagtgacctgtctggc

SEQ ID NO: 440620 - DNA, 33 bp, Homo sapien
cagggaatggtacagagaagtgacctgtctggc

SEQ ID NO: 440621 - DNA, 33 bp, Homo sapien
tgtaaaaagccagatactaagtagttgaggctt

SEQ ID NO: 440622 - DNA, 33 bp, Homo sapien
tgtaaaaagccagatattaagtagttgaggctt

SEQ ID NO: 440623 - DNA, 33 bp, Homo sapien
aactaggctagtcttacagctttatcgcagttt

SEQ ID NO: 440624 - DNA, 33 bp, Homo sapien
aactaggctagtcttatagctttatcgcagttt

SEQ ID NO: 440625 - DNA, 33 bp, Homo sapien
ccaggccaagaaactacgtaaggacaaacaaaa

SEQ ID NO: 440626 - DNA, 33 bp, Homo sapien
ccaggccaagaaactatgtaaggacaaacaaaa

SEQ ID NO: 440627 - DNA, 33 bp, Homo sapien
cctgggtgaacgggggcacagaggtctttgtga

SEQ ID NO: 440628 - DNA, 33 bp, Homo sapien
cctgggtgaacgggggtacagaggtctttgtga

SEQ ID NO: 440629 - DNA, 33 bp, Homo sapien
cagctaggtaggaaaccaaccatgtaagcagtg

SEQ ID NO: 440630 - DNA, 33 bp, Homo sapien
cagctaggtaggaaactaaccatgtaagcagtg

SEQ ID NO: 440631 - DNA, 33 bp, Homo sapien
aaaatcaaaaggcggcacagtgaaaacatttta

SEQ ID NO: 440632 - DNA, 33 bp, Homo sapien
aaaatcaaaaggcggcgcagtgaaaacatttta

SEQ ID NO: 440633 - DNA, 33 bp, Homo sapien
gttatttttactcttccaggacatactaaaaca

SEQ ID NO: 440634 - DNA, 33 bp, Homo sapien
gttatttttactcttctaggacatactaaaaca

SEQ ID NO: 440635 - DNA, 33 bp, Homo sapien
ttgctggaagaagtcaaaccctactctccaacc

SEQ ID NO: 440636 - DNA, 33 bp, Homo sapien
ttgctggaagaagtcacaccctactctccaacc

SEQ ID NO: 440637 - DNA, 33 bp, Homo sapien
gtgtgcccttaggtgtaaatcagggccttgaag

SEQ ID NO: 440638 - DNA, 33 bp, Homo sapien
gtgtgcccttaggtgtcaatcagggccttgaag

SEQ ID NO: 440639 - DNA, 33 bp, Homo sapien
actgggatgcacagtacagactgcagatttaca

SEQ ID NO: 440640 - DNA, 33 bp, Homo sapien
actgggatgcacagtagagactgcagatttaca

SEQ ID NO: 440641 - DNA, 33 bp, Homo sapien
cgaccaaaaaaaagttcaacagcaatggagcag

SEQ ID NO: 440642 - DNA, 33 bp, Homo sapien
cgaccaaaaaaaagttgaacagcaatggagcag

SEQ ID NO: 440643 - DNA, 33 bp, Homo sapien
gcctcacccactctgcactggttctttgtaacc

SEQ ID NO: 440644 - DNA, 33 bp, Homo sapien
gcctcacccactctgcgctggttctttgtaacc

SEQ ID NO: 440645 - DNA, 33 bp, Homo sapien
caatgcagccaaattactaatcaaatagcctat

SEQ ID NO: 440646 - DNA, 33 bp, Homo sapien
caatgcagccaaattattaatcaaatagcctat

SEQ ID NO: 440647 - DNA, 33 bp, Homo sapien
cgaggcgcggctcacaactacccaatcagacta

SEQ ID NO: 440648 - DNA, 33 bp, Homo sapien
cgaggcgcggctcacacctacccaatcagacta

SEQ ID NO: 440649 - DNA, 33 bp, Homo sapien
gaaggcccgttttgtacaaggttgcatggaaaa

SEQ ID NO: 440650 - DNA, 33 bp, Homo sapien
gaaggcccgttttgtagaaggttgcatggaaaa

SEQ ID NO: 440651 - DNA, 33 bp, Homo sapien
gagctgctcgtcttgacccattctctatcttat

SEQ ID NO: 440652 - DNA, 33 bp, Homo sapien
gagctgctcgtcttgatccattctctatcttat

SEQ ID NO: 440653 - DNA, 33 bp, Homo sapien
tgagaggaagtattcacggactgtggtgatctt

SEQ ID NO: 440654 - DNA, 33 bp, Homo sapien
tgagaggaagtattcatggactgtggtgatctt

SEQ ID NO: 440655 - DNA, 33 bp, Homo sapien
ccatttcattcatgagcaggctgaagttaagag

SEQ ID NO: 440656 - DNA, 33 bp, Homo sapien
ccatttcattcatgagtaggctgaagttaagag

SEQ ID NO: 440657 - DNA, 33 bp, Homo sapien
atttattatcacgcttgaaaatgtcaaggaaat

SEQ ID NO: 440658 - DNA, 33 bp, Homo sapien
atttattatcacgctttaaaatgtcaaggaaat

SEQ ID NO: 440659 - DNA, 33 bp, Homo sapien
ggtggggtggaaccagaaatactgaaatgtaat

SEQ ID NO: 440660 - DNA, 33 bp, Homo sapien
ggtggggtggaaccagcaatactgaaatgtaat

SEQ ID NO: 440661 - DNA, 33 bp, Homo sapien
agttgaacactggaaactatcagcatacctctg

SEQ ID NO: 440662 - DNA, 33 bp, Homo sapien
agttgaacactggaaattatcagcatacctctg

SEQ ID NO: 440663 - DNA, 33 bp, Homo sapien
aatttatcctgaagaaaaactaaagaaatgaat

SEQ ID NO: 440664 - DNA, 33 bp, Homo sapien
aatttatcctgaagaacaactaaagaaatgaat

SEQ ID NO: 440665 - DNA, 33 bp, Homo sapien
gtattcggagaaatcaaagggtgtggagggaaa

SEQ ID NO: 440666 - DNA, 33 bp, Homo sapien
gtattcggagaaatcacagggtgtggagggaaa

SEQ ID NO: 440667 - DNA, 33 bp, Homo sapien
ataaagaaagaaatagacatcatgctttgtaat

SEQ ID NO: 440668 - DNA, 33 bp, Homo sapien
ataaagaaagaaataggcatcatgctttgtaat

SEQ ID NO: 440669 - DNA, 33 bp, Homo sapien
cgactggtacatacaacagcaaaactgctgata

SEQ ID NO: 440670 - DNA, 33 bp, Homo sapien
cgactggtacatacaatagcaaaactgctgata

SEQ ID NO: 440671 - DNA, 33 bp, Homo sapien
aaatgccttagcacaagtatatcaaggctcgta

SEQ ID NO: 440672 - DNA, 33 bp, Homo sapien
aaatgccttagcacaattatatcaaggctcgta

SEQ ID NO: 440673 - DNA, 33 bp, Homo sapien
gttgtaatatcataacaggttggactggctagg

SEQ ID NO: 440674 - DNA, 33 bp, Homo sapien
gttgtaatatcataacgggttggactggctagg

SEQ ID NO: 440675 - DNA, 33 bp, Homo sapien
aacaagccaggagaaaatatttctgaggagttt

SEQ ID NO: 440676 - DNA, 33 bp, Homo sapien
aacaagccaggagaaagtatttctgaggagttt

SEQ ID NO: 440677 - DNA, 33 bp, Homo sapien
caaaaaattttcaacccagtttgagatagatat

SEQ ID NO: 440678 - DNA, 33 bp, Homo sapien
caaaaaattttcaacctagtttgagatagatat

SEQ ID NO: 440679 - DNA, 33 bp, Homo sapien
ctctcaatcgtgtaccaaatttctaacatgggc

SEQ ID NO: 440680 - DNA, 33 bp, Homo sapien
ctctcaatcgtgtaccgaatttctaacatgggc

SEQ ID NO: 440681 - DNA, 33 bp, Homo sapien
atgtgttttatgctctaaatcaggagtgagcaa

SEQ ID NO: 440682 - DNA, 33 bp, Homo sapien
atgtgttttatgctctgaatcaggagtgagcaa

SEQ ID NO: 440683 - DNA, 33 bp, Homo sapien
tttagaaacttgtgtccaatgtacattcagaat

SEQ ID NO: 440684 - DNA, 33 bp, Homo sapien
tttagaaacttgtgtctaatgtacattcagaat

SEQ ID NO: 440685 - DNA, 33 bp, Homo sapien
aatgcttatttgtgaacgtactttagaaacttg

SEQ ID NO: 440686 - DNA, 33 bp, Homo sapien
aatgcttatttgtgaatgtactttagaaacttg

SEQ ID NO: 440687 - DNA, 33 bp, Homo sapien
ctgggaaaatctctacgggcaaccatagatgac

SEQ ID NO: 440688 - DNA, 33 bp, Homo sapien
ctgggaaaatctctactggcaaccatagatgac

SEQ ID NO: 440689 - DNA, 33 bp, Homo sapien
tgagctaatttgtacacagcgtatacagtaaac

SEQ ID NO: 440690 - DNA, 33 bp, Homo sapien
tgagctaatttgtacatagcgtatacagtaaac

SEQ ID NO: 440691 - DNA, 33 bp, Homo sapien
gcttcagttgctctcaacctctgcagctactgt

SEQ ID NO: 440692 - DNA, 33 bp, Homo sapien
gcttcagttgctctcaccctctgcagctactgt

SEQ ID NO: 440693 - DNA, 33 bp, Homo sapien
caaggatcagggtctcaccccagcattgtatac

SEQ ID NO: 440694 - DNA, 33 bp, Homo sapien
caaggatcagggtctcgccccagcattgtatac

SEQ ID NO: 440695 - DNA, 33 bp, Homo sapien
tatccgcaactactgacgattcaatgatcagat

SEQ ID NO: 440696 - DNA, 33 bp, Homo sapien
tatccgcaactactgatgattcaatgatcagat

SEQ ID NO: 440697 - DNA, 33 bp, Homo sapien
tttatagatggttctacatatgtctccttttgc

SEQ ID NO: 440698 - DNA, 33 bp, Homo sapien
tttatagatggttctatatatgtctccttttgc

SEQ ID NO: 440699 - DNA, 33 bp, Homo sapien
ttgtatttttctctcacgtcattttcctgggtt

SEQ ID NO: 440700 - DNA, 33 bp, Homo sapien
ttgtatttttctctcatgtcattttcctgggtt

SEQ ID NO: 440701 - DNA, 33 bp, Homo sapien
ctagactggtgcattaactacattggcattgat

SEQ ID NO: 440702 - DNA, 33 bp, Homo sapien
ctagactggtgcattacctacattggcattgat

SEQ ID NO: 440703 - DNA, 33 bp, Homo sapien
attatcccatatccaacagctgatgtcttcttg

SEQ ID NO: 440704 - DNA, 33 bp, Homo sapien
attatcccatatccaatagctgatgtcttcttg

SEQ ID NO: 440705 - DNA, 33 bp, Homo sapien
tgctttgtgtgagcaaatagcataaatagtcta

SEQ ID NO: 440706 - DNA, 33 bp, Homo sapien
tgctttgtgtgagcaagtagcataaatagtcta

SEQ ID NO: 440707 - DNA, 33 bp, Homo sapien
gggcttctgcgtgagaactactccatgagccat

SEQ ID NO: 440708 - DNA, 33 bp, Homo sapien
gggcttctgcgtgagacctactccatgagccat

SEQ ID NO: 440709 - DNA, 33 bp, Homo sapien
gcagttgaaaagtcaacgatggtacagttacag

SEQ ID NO: 440710 - DNA, 33 bp, Homo sapien
gcagttgaaaagtcaatgatggtacagttacag

SEQ ID NO: 440711 - DNA, 33 bp, Homo sapien
accaagtaggtactcacgtaagcactcaattca

SEQ ID NO: 440712 - DNA, 33 bp, Homo sapien
accaagtaggtactcatgtaagcactcaattca

SEQ ID NO: 440713 - DNA, 33 bp, Homo sapien
ggtaggaacttcacaacgaacttcacacaatca

SEQ ID NO: 440714 - DNA, 33 bp, Homo sapien
ggtaggaacttcacaatgaacttcacacaatca

SEQ ID NO: 440715 - DNA, 33 bp, Homo sapien
tacgtaatgcctaaaacacgtgctgtaaaaatg

SEQ ID NO: 440716 - DNA, 33 bp, Homo sapien
tacgtaatgcctaaaatacgtgctgtaaaaatg

SEQ ID NO: 440717 - DNA, 33 bp, Homo sapien
gagcaactcacaaaggaaaaaatcctgatagct

SEQ ID NO: 440718 - DNA, 33 bp, Homo sapien
gagcaactcacaaagggaaaaatcctgatagct

SEQ ID NO: 440719 - DNA, 33 bp, Homo sapien
cactcagctcaggttaagatattgagctacagt

SEQ ID NO: 440720 - DNA, 33 bp, Homo sapien
cactcagctcaggttaggatattgagctacagt

SEQ ID NO: 440721 - DNA, 33 bp, Homo sapien
agcactgaattcaactaaaattatctcacaaaa

SEQ ID NO: 440722 - DNA, 33 bp, Homo sapien
agcactgaattcaactgaaattatctcacaaaa

SEQ ID NO: 440723 - DNA, 33 bp, Homo sapien
acataatattcactgacgtaaaggcactacagt

SEQ ID NO: 440724 - DNA, 33 bp, Homo sapien
acataatattcactgatgtaaaggcactacagt

SEQ ID NO: 440725 - DNA, 33 bp, Homo sapien
acaacaaagactgaaaagactgtgctatccctc

SEQ ID NO: 440726 - DNA, 33 bp, Homo sapien
acaacaaagactgaaaggactgtgctatccctc

SEQ ID NO: 440727 - DNA, 33 bp, Homo sapien
gaaatttgtatcctcagcctaatagcaagaaaa

SEQ ID NO: 440728 - DNA, 33 bp, Homo sapien
gaaatttgtatcctcatcctaatagcaagaaaa

SEQ ID NO: 440729 - DNA, 33 bp, Homo sapien
gtgtttctccatccacactgcatttcttagact

SEQ ID NO: 440730 - DNA, 33 bp, Homo sapien
gtgtttctccatccacgctgcatttcttagact

SEQ ID NO: 440731 - DNA, 33 bp, Homo sapien
tcctccatcagcttaggaccctaacactgtagc

SEQ ID NO: 440732 - DNA, 33 bp, Homo sapien
tcctccatcagcttagtaccctaacactgtagc

SEQ ID NO: 440733 - DNA, 33 bp, Homo sapien
acacagtcaagcttagaacctcaaacatttgct

SEQ ID NO: 440734 - DNA, 33 bp, Homo sapien
acacagtcaagcttaggacctcaaacatttgct

SEQ ID NO: 440735 - DNA, 33 bp, Homo sapien
agctagcaagaagcaaaggttgatttttgttgt

SEQ ID NO: 440736 - DNA, 33 bp, Homo sapien
agctagcaagaagcaagggttgatttttgttgt

SEQ ID NO: 440737 - DNA, 33 bp, Homo sapien
tggcctttggtctacacgatggagaaagaacag

SEQ ID NO: 440738 - DNA, 33 bp, Homo sapien
tggcctttggtctacatgatggagaaagaacag

SEQ ID NO: 440739 - DNA, 33 bp, Homo sapien
ggctcatttggaaggcagcctcagtacattctt

SEQ ID NO: 440740 - DNA, 33 bp, Homo sapien
ggctcatttggaaggccgcctcagtacattctt

SEQ ID NO: 440741 - DNA, 33 bp, Homo sapien
acaagaattagatcaacgaacttttcaagcaat

SEQ ID NO: 440742 - DNA, 33 bp, Homo sapien
acaagaattagatcaatgaacttttcaagcaat

SEQ ID NO: 440743 - DNA, 33 bp, Homo sapien
aactcatgaaagtgtcacctgtaacgaatccta

SEQ ID NO: 440744 - DNA, 33 bp, Homo sapien
aactcatgaaagtgtcgcctgtaacgaatccta

SEQ ID NO: 440745 - DNA, 33 bp, Homo sapien
ccgtattactcaataacatagaccttttctccc

SEQ ID NO: 440746 - DNA, 33 bp, Homo sapien
ccgtattactcaataatatagaccttttctccc

SEQ ID NO: 440747 - DNA, 33 bp, Homo sapien
acgtgcccaacagagaaaaacttctgcctggta

SEQ ID NO: 440748 - DNA, 33 bp, Homo sapien
acgtgcccaacagagagaaacttctgcctggta

SEQ ID NO: 440749 - DNA, 33 bp, Homo sapien
ggaactattacatggcagactcttttcactctc

SEQ ID NO: 440750 - DNA, 33 bp, Homo sapien
ggaactattacatggcggactcttttcactctc

SEQ ID NO: 440751 - DNA, 33 bp, Homo sapien
gtggccaggtaagaaccgaggtaccttatttct

SEQ ID NO: 440752 - DNA, 33 bp, Homo sapien
gtggccaggtaagaactgaggtaccttatttct

SEQ ID NO: 440753 - DNA, 33 bp, Homo sapien
ccaagaagctgaactacacaatcactaaactac

SEQ ID NO: 440754 - DNA, 33 bp, Homo sapien
ccaagaagctgaactagacaatcactaaactac

SEQ ID NO: 440755 - DNA, 33 bp, Homo sapien
agttgcataataggaacggcaaaccttagacta

SEQ ID NO: 440756 - DNA, 33 bp, Homo sapien
agttgcataataggaatggcaaaccttagacta

SEQ ID NO: 440757 - DNA, 33 bp, Homo sapien
atgaaaatatgaggctcaactctgaataatgtt

SEQ ID NO: 440758 - DNA, 33 bp, Homo sapien
atgaaaatatgaggcttaactctgaataatgtt

SEQ ID NO: 440759 - DNA, 33 bp, Homo sapien
aacattaacaagattgaaatttacagagaactg

SEQ ID NO: 440760 - DNA, 33 bp, Homo sapien
aacattaacaagattggaatttacagagaactg

SEQ ID NO: 440761 - DNA, 33 bp, Homo sapien
agcctcattgggaatacagcatcaacgccttga

SEQ ID NO: 440762 - DNA, 33 bp, Homo sapien
agcctcattgggaatatagcatcaacgccttga

SEQ ID NO: 440763 - DNA, 33 bp, Homo sapien
gaataaaacttgcatccctatctgctggtaggt

SEQ ID NO: 440764 - DNA, 33 bp, Homo sapien
gaataaaacttgcatcgctatctgctggtaggt

SEQ ID NO: 440765 - DNA, 33 bp, Homo sapien
taaccccataacttccaagtcaaaaatatatca

SEQ ID NO: 440766 - DNA, 33 bp, Homo sapien
taaccccataacttcccagtcaaaaatatatca

SEQ ID NO: 440767 - DNA, 33 bp, Homo sapien
gttcatttaaaagtagaccactaccacttctgg

SEQ ID NO: 440768 - DNA, 33 bp, Homo sapien
gttcatttaaaagtaggccactaccacttctgg

SEQ ID NO: 440769 - DNA, 33 bp, Homo sapien
cctgtgtgactcctaccatcctgtaaccttttg

SEQ ID NO: 440770 - DNA, 33 bp, Homo sapien
cctgtgtgactcctactatcctgtaaccttttg

SEQ ID NO: 440771 - DNA, 33 bp, Homo sapien
ggaagaggagcgactccaaagtttggcaatgga

SEQ ID NO: 440772 - DNA, 33 bp, Homo sapien
ggaagaggagcgactctaaagtttggcaatgga

SEQ ID NO: 440773 - DNA, 33 bp, Homo sapien
ttttccccacgttttaacatctctataatctgc

SEQ ID NO: 440774 - DNA, 33 bp, Homo sapien
ttttccccacgttttatcatctctataatctgc

SEQ ID NO: 440775 - DNA, 33 bp, Homo sapien
cacatggtttcactgacgtttcagaaattctag

SEQ ID NO: 440776 - DNA, 33 bp, Homo sapien
cacatggtttcactgatgtttcagaaattctag

SEQ ID NO: 440777 - DNA, 33 bp, Homo sapien
gaacctgggttaatcacgccagtatgcgatcaa

SEQ ID NO: 440778 - DNA, 33 bp, Homo sapien
gaacctgggttaatcatgccagtatgcgatcaa

SEQ ID NO: 440779 - DNA, 33 bp, Homo sapien
gaatccaggcagcaataataataagccattaaa

SEQ ID NO: 440780 - DNA, 33 bp, Homo sapien
gaatccaggcagcaatcataataagccattaaa

SEQ ID NO: 440781 - DNA, 33 bp, Homo sapien
ctggcacatagaaacacacaacccatgtctgct

SEQ ID NO: 440782 - DNA, 33 bp, Homo sapien
ctggcacatagaaacatacaacccatgtctgct

SEQ ID NO: 440783 - DNA, 33 bp, Homo sapien
tagaaacttggatatcaaagagaagaaagcaga

SEQ ID NO: 440784 - DNA, 33 bp, Homo sapien
tagaaacttggatatcgaagagaagaaagcaga

SEQ ID NO: 440785 - DNA, 33 bp, Homo sapien
actcagtaggaacgcaaaattgaatgttgattg

SEQ ID NO: 440786 - DNA, 33 bp, Homo sapien
actcagtaggaacgcacaattgaatgttgattg

SEQ ID NO: 440787 - DNA, 33 bp, Homo sapien
ctccaatgaaggagaacgttgtgacctcggcta

SEQ ID NO: 440788 - DNA, 33 bp, Homo sapien
ctccaatgaaggagaatgttgtgacctcggcta

SEQ ID NO: 440789 - DNA, 33 bp, Homo sapien
agagctgtaacactcaccgcctaggtctgcagc

SEQ ID NO: 440790 - DNA, 33 bp, Homo sapien
agagctgtaacactcatcgcctaggtctgcagc

SEQ ID NO: 440791 - DNA, 33 bp, Homo sapien
cccagatgcacttgacgccattctgtccggagc

SEQ ID NO: 440792 - DNA, 33 bp, Homo sapien
cccagatgcacttgactccattctgtccggagc

SEQ ID NO: 440793 - DNA, 33 bp, Homo sapien
cagtgaaaccttgaaaaaagtgcccacctcatt

SEQ ID NO: 440794 - DNA, 33 bp, Homo sapien
cagtgaaaccttgaaacaagtgcccacctcatt

SEQ ID NO: 440795 - DNA, 33 bp, Homo sapien
cctcatgctatgcaccaaggcctgctcattgta

SEQ ID NO: 440796 - DNA, 33 bp, Homo sapien
cctcatgctatgcaccgaggcctgctcattgta

SEQ ID NO: 440797 - DNA, 33 bp, Homo sapien
ggagatgagaggctatcagaagttctaagaaga

SEQ ID NO: 440798 - DNA, 33 bp, Homo sapien
ggagatgagaggctattagaagttctaagaaga

SEQ ID NO: 440799 - DNA, 33 bp, Homo sapien
ttattgaaatggaaaacaaatgataccactgcc

SEQ ID NO: 440800 - DNA, 33 bp, Homo sapien
ttattgaaatggaaaagaaatgataccactgcc

SEQ ID NO: 440801 - DNA, 33 bp, Homo sapien
tcaggctcaaagtccaagtcagtggaatagaga

SEQ ID NO: 440802 - DNA, 33 bp, Homo sapien
tcaggctcaaagtccaggtcagtggaatagaga

SEQ ID NO: 440803 - DNA, 33 bp, Homo sapien
cctctgttgaagcctacacctcagaatgtagca

SEQ ID NO: 440804 - DNA, 33 bp, Homo sapien
cctctgttgaagcctatacctcagaatgtagca

SEQ ID NO: 440805 - DNA, 33 bp, Homo sapien
aaatccatagaaaccacgtagctcagggcataa

SEQ ID NO: 440806 - DNA, 33 bp, Homo sapien
aaatccatagaaaccatgtagctcagggcataa

SEQ ID NO: 440807 - DNA, 33 bp, Homo sapien
tcatgttggatagatacagggggttgagtagca

SEQ ID NO: 440808 - DNA, 33 bp, Homo sapien
tcatgttggatagatatagggggttgagtagca

SEQ ID NO: 440809 - DNA, 33 bp, Homo sapien
catcttcttatgagacaccagtaacagtggatt

SEQ ID NO: 440810 - DNA, 33 bp, Homo sapien
catcttcttatgagactccagtaacagtggatt

SEQ ID NO: 440811 - DNA, 33 bp, Homo sapien
attggcatgaattattaaaacgaaatgacctct

SEQ ID NO: 440812 - DNA, 33 bp, Homo sapien
attggcatgaattattgaaacgaaatgacctct

SEQ ID NO: 440813 - DNA, 33 bp, Homo sapien
tgggtggttctcacaccagaagtgacagccttt

SEQ ID NO: 440814 - DNA, 33 bp, Homo sapien
tgggtggttctcacactagaagtgacagccttt

SEQ ID NO: 440815 - DNA, 33 bp, Homo sapien
cagcactaggttattgcactggaagggccatcg

SEQ ID NO: 440816 - DNA, 33 bp, Homo sapien
cagcactaggttattgtactggaagggccatcg

SEQ ID NO: 440817 - DNA, 33 bp, Homo sapien
tatagattaggagttacattgcttgggttcaag

SEQ ID NO: 440818 - DNA, 33 bp, Homo sapien
tatagattaggagttatattgcttgggttcaag

SEQ ID NO: 440819 - DNA, 33 bp, Homo sapien
ggggcaagttgtatcacggtggttagggtatag

SEQ ID NO: 440820 - DNA, 33 bp, Homo sapien
ggggcaagttgtatcatggtggttagggtatag

SEQ ID NO: 440821 - DNA, 33 bp, Homo sapien
cagatggacccaaacacccgctagtatctctaa

SEQ ID NO: 440822 - DNA, 33 bp, Homo sapien
cagatggacccaaacatccgctagtatctctaa

SEQ ID NO: 440823 - DNA, 33 bp, Homo sapien
agcaaggacggcaactcagtcatgtcccctctt

SEQ ID NO: 440824 - DNA, 33 bp, Homo sapien
agcaaggacggcaacttagtcatgtcccctctt

SEQ ID NO: 440825 - DNA, 33 bp, Homo sapien
agtccagaacttctaaactcctgaaacactttg

SEQ ID NO: 440826 - DNA, 33 bp, Homo sapien
agtccagaacttctaagctcctgaaacactttg

SEQ ID NO: 440827 - DNA, 33 bp, Homo sapien
aagagctggtcagatacaggggtgtttaggatc

SEQ ID NO: 440828 - DNA, 33 bp, Homo sapien
aagagctggtcagatataggggtgtttaggatc

SEQ ID NO: 440829 - DNA, 33 bp, Homo sapien
tgggtctgggggcgccactcaacctgcccttag

SEQ ID NO: 440830 - DNA, 33 bp, Homo sapien
tgggtctgggggcgccgctcaacctgcccttag

SEQ ID NO: 440831 - DNA, 33 bp, Homo sapien
cctgtatccactaccaaagtcaagatacggaac

SEQ ID NO: 440832 - DNA, 33 bp, Homo sapien
cctgtatccactaccagagtcaagatacggaac

SEQ ID NO: 440833 - DNA, 33 bp, Homo sapien
tttttaatattttcacagagttaagtcactttg

SEQ ID NO: 440834 - DNA, 33 bp, Homo sapien
tttttaatattttcacggagttaagtcactttg

SEQ ID NO: 440835 - DNA, 33 bp, Homo sapien
catcaatctgatttgcactttcttcttcatgtg

SEQ ID NO: 440836 - DNA, 33 bp, Homo sapien
catcaatctgatttgccctttcttcttcatgtg

SEQ ID NO: 440837 - DNA, 33 bp, Homo sapien
cctttgtctctgctgcacaggagatagtggctc

SEQ ID NO: 440838 - DNA, 33 bp, Homo sapien
cctttgtctctgctgcccaggagatagtggctc

SEQ ID NO: 440839 - DNA, 33 bp, Homo sapien
ctgcctagaatgatcacccctccaccaaccaca

SEQ ID NO: 440840 - DNA, 33 bp, Homo sapien
ctgcctagaatgatcatccctccaccaaccaca

SEQ ID NO: 440841 - DNA, 33 bp, Homo sapien
cggcatgaaaggatgaaagactccgaagggccc

SEQ ID NO: 440842 - DNA, 33 bp, Homo sapien
cggcatgaaaggatgacagactccgaagggccc

SEQ ID NO: 440843 - DNA, 33 bp, Homo sapien
ctgatagagagccttacggattgggttgacact

SEQ ID NO: 440844 - DNA, 33 bp, Homo sapien
ctgatagagagccttatggattgggttgacact

SEQ ID NO: 440845 - DNA, 33 bp, Homo sapien
tcgcttgtcctcctaaccaagcctcttccatca

SEQ ID NO: 440846 - DNA, 33 bp, Homo sapien
tcgcttgtcctcctaatcaagcctcttccatca

SEQ ID NO: 440847 - DNA, 33 bp, Homo sapien
aggccagctttagcacagtctcaagatagctat

SEQ ID NO: 440848 - DNA, 33 bp, Homo sapien
aggccagctttagcacggtctcaagatagctat

SEQ ID NO: 440849 - DNA, 33 bp, Homo sapien
actttggtcaggaccccgctgtttcctgcattt

SEQ ID NO: 440850 - DNA, 33 bp, Homo sapien
actttggtcaggaccctgctgtttcctgcattt

SEQ ID NO: 440851 - DNA, 33 bp, Homo sapien
ttcagaatagtttccaaaggatcagtattagtt

SEQ ID NO: 440852 - DNA, 33 bp, Homo sapien
ttcagaatagtttccagaggatcagtattagtt

SEQ ID NO: 440853 - DNA, 33 bp, Homo sapien
aagagatcttcaaaataaaaaccaatgccactt

SEQ ID NO: 440854 - DNA, 33 bp, Homo sapien
aagagatcttcaaaatgaaaaccaatgccactt

SEQ ID NO: 440855 - DNA, 33 bp, Homo sapien
accttcactatatatacgtagaatccaatgtcc

SEQ ID NO: 440856 - DNA, 33 bp, Homo sapien
accttcactatatatatgtagaatccaatgtcc

SEQ ID NO: 440857 - DNA, 33 bp, Homo sapien
gagaacttggactttaacagtatgaaacctaga

SEQ ID NO: 440858 - DNA, 33 bp, Homo sapien
gagaacttggactttaccagtatgaaacctaga

SEQ ID NO: 440859 - DNA, 33 bp, Homo sapien
taagacggacagtaagaaacagggattttagag

SEQ ID NO: 440860 - DNA, 33 bp, Homo sapien
taagacggacagtaaggaacagggattttagag

SEQ ID NO: 440861 - DNA, 33 bp, Homo sapien
aatattctcatacaagaccttttctggacatat

SEQ ID NO: 440862 - DNA, 33 bp, Homo sapien
aatattctcatacaaggccttttctggacatat

SEQ ID NO: 440863 - DNA, 33 bp, Homo sapien
tatatgtaaaatgtcaaatagtattgcatgaaa

SEQ ID NO: 440864 - DNA, 33 bp, Homo sapien
tatatgtaaaatgtcagatagtattgcatgaaa

SEQ ID NO: 440865 - DNA, 33 bp, Homo sapien
taatctacacagtctcaacagatacttcctttc

SEQ ID NO: 440866 - DNA, 33 bp, Homo sapien
taatctacacagtctcgacagatacttcctttc

SEQ ID NO: 440867 - DNA, 33 bp, Homo sapien
ataaatgatactgagaatataacctgataatgt

SEQ ID NO: 440868 - DNA, 33 bp, Homo sapien
ataaatgatactgagactataacctgataatgt

SEQ ID NO: 440869 - DNA, 33 bp, Homo sapien
aggtaattaagctacacattgattttcacgtca

SEQ ID NO: 440870 - DNA, 33 bp, Homo sapien
aggtaattaagctacagattgattttcacgtca

SEQ ID NO: 440871 - DNA, 33 bp, Homo sapien
cgaagggaaaggggaactgaccagtgggatgct

SEQ ID NO: 440872 - DNA, 33 bp, Homo sapien
cgaagggaaaggggaagtgaccagtgggatgct

SEQ ID NO: 440873 - DNA, 33 bp, Homo sapien
cttccacggtttctgtaaagagtctcccactgg

SEQ ID NO: 440874 - DNA, 33 bp, Homo sapien
cttccacggtttctgtgaagagtctcccactgg

SEQ ID NO: 440875 - DNA, 33 bp, Homo sapien
agcatcttaacatcaggacagccctctttacta

SEQ ID NO: 440876 - DNA, 33 bp, Homo sapien
agcatcttaacatcagtacagccctctttacta

SEQ ID NO: 440877 - DNA, 33 bp, Homo sapien
atacagttcaataccaaattgtttacaacagtt

SEQ ID NO: 440878 - DNA, 33 bp, Homo sapien
atacagttcaataccagattgtttacaacagtt

SEQ ID NO: 440879 - DNA, 33 bp, Homo sapien
taaaaaatggaaaagccattcctaacttgtgga

SEQ ID NO: 440880 - DNA, 33 bp, Homo sapien
taaaaaatggaaaagcgattcctaacttgtgga

SEQ ID NO: 440881 - DNA, 33 bp, Homo sapien
cagtggcgataaaggacgggagcagttggaaaa

SEQ ID NO: 440882 - DNA, 33 bp, Homo sapien
cagtggcgataaaggatgggagcagttggaaaa

SEQ ID NO: 440883 - DNA, 33 bp, Homo sapien
agctctccgtcaactcacggggtttaacagaga

SEQ ID NO: 440884 - DNA, 33 bp, Homo sapien
agctctccgtcaactcgcggggtttaacagaga

SEQ ID NO: 440885 - DNA, 33 bp, Homo sapien
ctctgcagacaaacataaagtcatgaagtaagg

SEQ ID NO: 440886 - DNA, 33 bp, Homo sapien
ctctgcagacaaacatgaagtcatgaagtaagg

SEQ ID NO: 440887 - DNA, 33 bp, Homo sapien
aaatgagggttgctgcacagctgtaaaacctca

SEQ ID NO: 440888 - DNA, 33 bp, Homo sapien
aaatgagggttgctgcccagctgtaaaacctca

SEQ ID NO: 440889 - DNA, 33 bp, Homo sapien
tccttgattcaattgtaaactgcctctatgcag

SEQ ID NO: 440890 - DNA, 33 bp, Homo sapien
tccttgattcaattgtgaactgcctctatgcag

SEQ ID NO: 440891 - DNA, 33 bp, Homo sapien
atttagtcagctgccaaattgcgaggtacaaaa

SEQ ID NO: 440892 - DNA, 33 bp, Homo sapien
atttagtcagctgccagattgcgaggtacaaaa

SEQ ID NO: 440893 - DNA, 33 bp, Homo sapien
aaaaactcatggatggaaaatttctttttgttt

SEQ ID NO: 440894 - DNA, 33 bp, Homo sapien
aaaaactcatggatgggaaatttctttttgttt

SEQ ID NO: 440895 - DNA, 33 bp, Homo sapien
gtcaaatgagtgttaccatatgtttatgtttct

SEQ ID NO: 440896 - DNA, 33 bp, Homo sapien
gtcaaatgagtgttacgatatgtttatgtttct

SEQ ID NO: 440897 - DNA, 33 bp, Homo sapien
actggtttaatcagagaactcttgagtttattt

SEQ ID NO: 440898 - DNA, 33 bp, Homo sapien
actggtttaatcagaggactcttgagtttattt

SEQ ID NO: 440899 - DNA, 33 bp, Homo sapien
cacaatgtttttaaaacgtatgagacctagact

SEQ ID NO: 440900 - DNA, 33 bp, Homo sapien
cacaatgtttttaaaaggtatgagacctagact

SEQ ID NO: 440901 - DNA, 33 bp, Homo sapien
cactctgtgcttctccccgtgtatagttcataa

SEQ ID NO: 440902 - DNA, 33 bp, Homo sapien
cactctgtgcttctcctcgtgtatagttcataa

SEQ ID NO: 440903 - DNA, 33 bp, Homo sapien
gattcatctgcagaaaatgggccaaaggagaaa

SEQ ID NO: 440904 - DNA, 33 bp, Homo sapien
gattcatctgcagaaactgggccaaaggagaaa

SEQ ID NO: 440905 - DNA, 33 bp, Homo sapien
ggtagtaatgaacataaaacagagaggatagaa

SEQ ID NO: 440906 - DNA, 33 bp, Homo sapien
ggtagtaatgaacatacaacagagaggatagaa

SEQ ID NO: 440907 - DNA, 33 bp, Homo sapien
tttcggtatcaaatgaagtaacataatagctgc

SEQ ID NO: 440908 - DNA, 33 bp, Homo sapien
tttcggtatcaaatgaggtaacataatagctgc

SEQ ID NO: 440909 - DNA, 33 bp, Homo sapien
ttttgtatttgtaatcgagtacttgaacatttt

SEQ ID NO: 440910 - DNA, 33 bp, Homo sapien
ttttgtatttgtaatctagtacttgaacatttt

SEQ ID NO: 440911 - DNA, 33 bp, Homo sapien
gcaaaggtgcctgttacgacttcatgaagactg

SEQ ID NO: 440912 - DNA, 33 bp, Homo sapien
gcaaaggtgcctgttatgacttcatgaagactg

SEQ ID NO: 440913 - DNA, 33 bp, Homo sapien
catcttgcactaagctcactccgcattcttttg

SEQ ID NO: 440914 - DNA, 33 bp, Homo sapien
catcttgcactaagcttactccgcattcttttg

SEQ ID NO: 440915 - DNA, 33 bp, Homo sapien
ctactcatttaattaactgttttgccaatgtct

SEQ ID NO: 440916 - DNA, 33 bp, Homo sapien
ctactcatttaattaattgttttgccaatgtct

SEQ ID NO: 440917 - DNA, 33 bp, Homo sapien
agatactgtaaaggaaaaacaatgaataaaagc

SEQ ID NO: 440918 - DNA, 33 bp, Homo sapien
agatactgtaaaggaagaacaatgaataaaagc

SEQ ID NO: 440919 - DNA, 33 bp, Homo sapien
aaagggttcaaatctacctctgtctatggcctg

SEQ ID NO: 440920 - DNA, 33 bp, Homo sapien
aaagggttcaaatctagctctgtctatggcctg

SEQ ID NO: 440921 - DNA, 33 bp, Homo sapien
aaggtgtgagggaataagataaaatcaccctag

SEQ ID NO: 440922 - DNA, 33 bp, Homo sapien
aaggtgtgagggaatacgataaaatcaccctag

SEQ ID NO: 440923 - DNA, 33 bp, Homo sapien
gcaagatttgaaggaacgaagctgtgggagacc

SEQ ID NO: 440924 - DNA, 33 bp, Homo sapien
gcaagatttgaaggaatgaagctgtgggagacc

SEQ ID NO: 440925 - DNA, 33 bp, Homo sapien
gttcgtggcattagtaagtgactcctgtgttga

SEQ ID NO: 440926 - DNA, 33 bp, Homo sapien
gttcgtggcattagtatgtgactcctgtgttga

SEQ ID NO: 440927 - DNA, 33 bp, Homo sapien
tccttctgcagtggagacaaacagccaggaaga

SEQ ID NO: 440928 - DNA, 33 bp, Homo sapien
tccttctgcagtggaggcaaacagccaggaaga

SEQ ID NO: 440929 - DNA, 33 bp, Homo sapien
tgagctgagtggcctacataggtgagtggatgg

SEQ ID NO: 440930 - DNA, 33 bp, Homo sapien
tgagctgagtggcctatataggtgagtggatgg

SEQ ID NO: 440931 - DNA, 33 bp, Homo sapien
tttacctctaatacaactgaacatatgtgctcc

SEQ ID NO: 440932 - DNA, 33 bp, Homo sapien
tttacctctaatacaagtgaacatatgtgctcc

SEQ ID NO: 440933 - DNA, 33 bp, Homo sapien
atcgactttgtggttaaggtcttccttgtgtta

SEQ ID NO: 440934 - DNA, 33 bp, Homo sapien
atcgactttgtggttagggtcttccttgtgtta

SEQ ID NO: 440935 - DNA, 33 bp, Homo sapien
aaatttgaaaagggcaaaattagtgcaatttga

SEQ ID NO: 440936 - DNA, 33 bp, Homo sapien
aaatttgaaaagggcagaattagtgcaatttga

SEQ ID NO: 440937 - DNA, 33 bp, Homo sapien
tctttccagggcgtcaatcattgtgaaggagag

SEQ ID NO: 440938 - DNA, 33 bp, Homo sapien
tctttccagggcgtcagtcattgtgaaggagag

SEQ ID NO: 440939 - DNA, 33 bp, Homo sapien
tctgtttctgtgcttacgggtctctgtttcagg

SEQ ID NO: 440940 - DNA, 33 bp, Homo sapien
tctgtttctgtgcttatgggtctctgtttcagg

SEQ ID NO: 440941 - DNA, 33 bp, Homo sapien
gaactaaacagtgtcacatcacaaggaaattaa

SEQ ID NO: 440942 - DNA, 33 bp, Homo sapien
gaactaaacagtgtcatatcacaaggaaattaa

SEQ ID NO: 440943 - DNA, 33 bp, Homo sapien
atttccccatgaactcactgtaaagcagtaaaa

SEQ ID NO: 440944 - DNA, 33 bp, Homo sapien
atttccccatgaactcgctgtaaagcagtaaaa

SEQ ID NO: 440945 - DNA, 33 bp, Homo sapien
tgttctgctaacttacagccaacaaaaaattca

SEQ ID NO: 440946 - DNA, 33 bp, Homo sapien
tgttctgctaacttacggccaacaaaaaattca

SEQ ID NO: 440947 - DNA, 33 bp, Homo sapien
atgctataaaaccaggcatcaagaatgctactg

SEQ ID NO: 440948 - DNA, 33 bp, Homo sapien
atgctataaaaccaggtatcaagaatgctactg

SEQ ID NO: 440949 - DNA, 33 bp, Homo sapien
tttcgttcctatccacaattcatattcctgtta

SEQ ID NO: 440950 - DNA, 33 bp, Homo sapien
tttcgttcctatccacgattcatattcctgtta

SEQ ID NO: 440951 - DNA, 33 bp, Homo sapien
taactggaaatgttaacctgcataactaaagga

SEQ ID NO: 440952 - DNA, 33 bp, Homo sapien
taactggaaatgttaatctgcataactaaagga

SEQ ID NO: 440953 - DNA, 33 bp, Homo sapien
tcgctccttaacaggcagagagacaagctgcgt

SEQ ID NO: 440954 - DNA, 33 bp, Homo sapien
tcgctccttaacaggcggagagacaagctgcgt

SEQ ID NO: 440955 - DNA, 33 bp, Homo sapien
acaaaaaccacatccaaaaagatcactggtatc

SEQ ID NO: 440956 - DNA, 33 bp, Homo sapien
acaaaaaccacatccagaaagatcactggtatc

SEQ ID NO: 440957 - DNA, 33 bp, Homo sapien
acgaatccaatgtcccacatggtttttatatca

SEQ ID NO: 440958 - DNA, 33 bp, Homo sapien
acgaatccaatgtcccgcatggtttttatatca

SEQ ID NO: 440959 - DNA, 33 bp, Homo sapien
aagaactgtgtattaaagcctctcaaatgcacc

SEQ ID NO: 440960 - DNA, 33 bp, Homo sapien
aagaactgtgtattaacgcctctcaaatgcacc

SEQ ID NO: 440961 - DNA, 33 bp, Homo sapien
cagaaatgctggaggaactgggtcatttcacaa

SEQ ID NO: 440962 - DNA, 33 bp, Homo sapien
cagaaatgctggaggagctgggtcatttcacaa

SEQ ID NO: 440963 - DNA, 33 bp, Homo sapien
ttgaagatctctcaaaacagtgcagaaaaggat

SEQ ID NO: 440964 - DNA, 33 bp, Homo sapien
ttgaagatctctcaaagcagtgcagaaaaggat

SEQ ID NO: 440965 - DNA, 33 bp, Homo sapien
ttctggagagaacagcaatcagattgacatcag

SEQ ID NO: 440966 - DNA, 33 bp, Homo sapien
ttctggagagaacagctatcagattgacatcag

SEQ ID NO: 440967 - DNA, 33 bp, Homo sapien
tcttctgtcattttgaagtctgatgtcaatctg

SEQ ID NO: 440968 - DNA, 33 bp, Homo sapien
tcttctgtcattttgaggtctgatgtcaatctg

SEQ ID NO: 440969 - DNA, 33 bp, Homo sapien
tttgtgaacaacagtcccatttaatgtcccaca

SEQ ID NO: 440970 - DNA, 33 bp, Homo sapien
tttgtgaacaacagtctcatttaatgtcccaca

SEQ ID NO: 440971 - DNA, 33 bp, Homo sapien
acaatgtggtagaaggaatatctcaagtcctat

SEQ ID NO: 440972 - DNA, 33 bp, Homo sapien
acaatgtggtagaaggcatatctcaagtcctat

SEQ ID NO: 440973 - DNA, 33 bp, Homo sapien
gattatttagcagcaaacttacttgggatgatc

SEQ ID NO: 440974 - DNA, 33 bp, Homo sapien
gattatttagcagcaatcttacttgggatgatc

SEQ ID NO: 440975 - DNA, 33 bp, Homo sapien
tcctgggaaacacatcaccacaatgttctttca

SEQ ID NO: 440976 - DNA, 33 bp, Homo sapien
tcctgggaaacacatcgccacaatgttctttca

SEQ ID NO: 440977 - DNA, 33 bp, Homo sapien
acctggaattggtagaagtgcaaattcttgggc

SEQ ID NO: 440978 - DNA, 33 bp, Homo sapien
acctggaattggtagaggtgcaaattcttgggc

SEQ ID NO: 440979 - DNA, 33 bp, Homo sapien
ttagaattagagcttaagtatagcttgtttcac

SEQ ID NO: 440980 - DNA, 33 bp, Homo sapien
ttagaattagagcttacgtatagcttgtttcac

SEQ ID NO: 440981 - DNA, 33 bp, Homo sapien
aattattcttcaagataatcagaaggctttgct

SEQ ID NO: 440982 - DNA, 33 bp, Homo sapien
aattattcttcaagatgatcagaaggctttgct

SEQ ID NO: 440983 - DNA, 33 bp, Homo sapien
aaccccagtgaaaaaacagtcatgatcctggcc

SEQ ID NO: 440984 - DNA, 33 bp, Homo sapien
aaccccagtgaaaaaagagtcatgatcctggcc

SEQ ID NO: 440985 - DNA, 33 bp, Homo sapien
gcaagtgaaagtgaaacagctgtaatgaaatta

SEQ ID NO: 440986 - DNA, 33 bp, Homo sapien
gcaagtgaaagtgaaatagctgtaatgaaatta

SEQ ID NO: 440987 - DNA, 33 bp, Homo sapien
ggaacgtcccttgtcacctatgaaacccgatat

SEQ ID NO: 440988 - DNA, 33 bp, Homo sapien
ggaacgtcccttgtcatctatgaaacccgatat

SEQ ID NO: 440989 - DNA, 33 bp, Homo sapien
gtcatggtgcgcaaacagtgacctcatggcccc

SEQ ID NO: 440990 - DNA, 33 bp, Homo sapien
gtcatggtgcgcaaacggtgacctcatggcccc

SEQ ID NO: 440991 - DNA, 33 bp, Homo sapien
cttgccattgtaatctcactgggtatgttttct

SEQ ID NO: 440992 - DNA, 33 bp, Homo sapien
cttgccattgtaatcttactgggtatgttttct

SEQ ID NO: 440993 - DNA, 33 bp, Homo sapien
agcaaagatggttaaagattcattgaatcatca

SEQ ID NO: 440994 - DNA, 33 bp, Homo sapien
agcaaagatggttaaatattcattgaatcatca

SEQ ID NO: 440995 - DNA, 33 bp, Homo sapien
ttctccatgatgtccgcccccctcttcagccat

SEQ ID NO: 440996 - DNA, 33 bp, Homo sapien
ttctccatgatgtccgtccccctcttcagccat

SEQ ID NO: 440997 - DNA, 33 bp, Homo sapien
ccttcttcacatttacagatctagaagcgtgac

SEQ ID NO: 440998 - DNA, 33 bp, Homo sapien
ccttcttcacatttaccgatctagaagcgtgac

SEQ ID NO: 440999 - DNA, 33 bp, Homo sapien
cttgatgctcagaggcggacagagcaggatgtc

SEQ ID NO: 441000 - DNA, 33 bp, Homo sapien
cttgatgctcagaggctgacagagcaggatgtc

SEQ ID NO: 441001 - DNA, 33 bp, Homo sapien
ccaggcagaaggttggaagctgcttctttgggg

SEQ ID NO: 441002 - DNA, 33 bp, Homo sapien
ccaggcagaaggttggcagctgcttctttgggg

SEQ ID NO: 441003 - DNA, 33 bp, Homo sapien
aaggaccacagcacgacgtcaggaattttcact

SEQ ID NO: 441004 - DNA, 33 bp, Homo sapien
aaggaccacagcacgatgtcaggaattttcact

SEQ ID NO: 441005 - DNA, 33 bp, Homo sapien
ttctcccacctccacactgagaactgctttaac

SEQ ID NO: 441006 - DNA, 33 bp, Homo sapien
ttctcccacctccacattgagaactgctttaac

SEQ ID NO: 441007 - DNA, 33 bp, Homo sapien
ttgcaaagaaatatccaataaaaaatgtcaata

SEQ ID NO: 441008 - DNA, 33 bp, Homo sapien
ttgcaaagaaatatccgataaaaaatgtcaata

SEQ ID NO: 441009 - DNA, 33 bp, Homo sapien
gtgatgattggatcacggagtccacaccagcca

SEQ ID NO: 441010 - DNA, 33 bp, Homo sapien
gtgatgattggatcactgagtccacaccagcca

SEQ ID NO: 441011 - DNA, 33 bp, Homo sapien
ttgtgattagagcaaaaattagactgtttggca

SEQ ID NO: 441012 - DNA, 33 bp, Homo sapien
ttgtgattagagcaaatattagactgtttggca

SEQ ID NO: 441013 - DNA, 33 bp, Homo sapien
aaaggaatgagtgagcactggtactggcctgag

SEQ ID NO: 441014 - DNA, 33 bp, Homo sapien
aaaggaatgagtgagcgctggtactggcctgag

SEQ ID NO: 441015 - DNA, 33 bp, Homo sapien
cacataaacactattaccctcatctacacatgg

SEQ ID NO: 441016 - DNA, 33 bp, Homo sapien
cacataaacactattatcctcatctacacatgg

SEQ ID NO: 441017 - DNA, 33 bp, Homo sapien
ctctcctgcttttcacagtcaaacttctggaaa

SEQ ID NO: 441018 - DNA, 33 bp, Homo sapien
ctctcctgcttttcaccgtcaaacttctggaaa

SEQ ID NO: 441019 - DNA, 33 bp, Homo sapien
cactattttcagaataaaaccaagatgcttgct

SEQ ID NO: 441020 - DNA, 33 bp, Homo sapien
cactattttcagaatataaccaagatgcttgct

SEQ ID NO: 441021 - DNA, 33 bp, Homo sapien
taatggaatgaataaccgtggtgtatttcccac

SEQ ID NO: 441022 - DNA, 33 bp, Homo sapien
taatggaatgaataactgtggtgtatttcccac

SEQ ID NO: 441023 - DNA, 33 bp, Homo sapien
catttcctctatgatgcatttcaagcttcacct

SEQ ID NO: 441024 - DNA, 33 bp, Homo sapien
catttcctctatgatgtatttcaagcttcacct

SEQ ID NO: 441025 - DNA, 33 bp, Homo sapien
tattcaaacatgacaaatatccttataaatagg

SEQ ID NO: 441026 - DNA, 33 bp, Homo sapien
tattcaaacatgacaagtatccttataaatagg

SEQ ID NO: 441027 - DNA, 33 bp, Homo sapien
aactttaggtttctaacaaagcacttctaaggg

SEQ ID NO: 441028 - DNA, 33 bp, Homo sapien
aactttaggtttctaataaagcacttctaaggg

SEQ ID NO: 441029 - DNA, 33 bp, Homo sapien
ttcctcccacatagacagagcttgtcctccttt

SEQ ID NO: 441030 - DNA, 33 bp, Homo sapien
ttcctcccacatagacggagcttgtcctccttt

SEQ ID NO: 441031 - DNA, 33 bp, Homo sapien
catagtccccatgatacgctgaacaggacaaag

SEQ ID NO: 441032 - DNA, 33 bp, Homo sapien
catagtccccatgatatgctgaacaggacaaag

SEQ ID NO: 441033 - DNA, 33 bp, Homo sapien
gccacattcagagtaaagctgggcattcacttg

SEQ ID NO: 441034 - DNA, 33 bp, Homo sapien
gccacattcagagtaaggctgggcattcacttg

SEQ ID NO: 441035 - DNA, 33 bp, Homo sapien
ggacgggaagacaatcaaaagaggagctgggtg

SEQ ID NO: 441036 - DNA, 33 bp, Homo sapien
ggacgggaagacaatcgaaagaggagctgggtg

SEQ ID NO: 441037 - DNA, 33 bp, Homo sapien
ttgtggaaaagaaaaacgaccctgaaagcgaaa

SEQ ID NO: 441038 - DNA, 33 bp, Homo sapien
ttgtggaaaagaaaaatgaccctgaaagcgaaa

SEQ ID NO: 441039 - DNA, 33 bp, Homo sapien
gaatttgaatttgtgaatatagagctacttaga

SEQ ID NO: 441040 - DNA, 33 bp, Homo sapien
gaatttgaatttgtgactatagagctacttaga

SEQ ID NO: 441041 - DNA, 33 bp, Homo sapien
cagtcaaatctccagacgccaaggcttgggtga

SEQ ID NO: 441042 - DNA, 33 bp, Homo sapien
cagtcaaatctccagatgccaaggcttgggtga

SEQ ID NO: 441043 - DNA, 33 bp, Homo sapien
gtagacaactgaaagacgacattgggactgcat

SEQ ID NO: 441044 - DNA, 33 bp, Homo sapien
gtagacaactgaaagatgacattgggactgcat

SEQ ID NO: 441045 - DNA, 33 bp, Homo sapien
tggtccatttctggatcacttccggtccacttc

SEQ ID NO: 441046 - DNA, 33 bp, Homo sapien
tggtccatttctggattacttccggtccacttc

SEQ ID NO: 441047 - DNA, 33 bp, Homo sapien
aggctgatggctgagactatgctcaagtgccag

SEQ ID NO: 441048 - DNA, 33 bp, Homo sapien
aggctgatggctgagattatgctcaagtgccag

SEQ ID NO: 441049 - DNA, 33 bp, Homo sapien
cattcagagtttctggaaattgtcaaaagggca

SEQ ID NO: 441050 - DNA, 33 bp, Homo sapien
cattcagagtttctggtaattgtcaaaagggca

SEQ ID NO: 441051 - DNA, 33 bp, Homo sapien
gctgctcaccctccagcaagtcacaatgtttgc

SEQ ID NO: 441052 - DNA, 33 bp, Homo sapien
gctgctcaccctccaggaagtcacaatgtttgc

SEQ ID NO: 441053 - DNA, 33 bp, Homo sapien
ggcagtgctaggtggggaatcttttatcaagtt

SEQ ID NO: 441054 - DNA, 33 bp, Homo sapien
ggcagtgctaggtgggtaatcttttatcaagtt

SEQ ID NO: 441055 - DNA, 33 bp, Homo sapien
gtttctttgcattccaacttcacctccattaca

SEQ ID NO: 441056 - DNA, 33 bp, Homo sapien
gtttctttgcattccatcttcacctccattaca

SEQ ID NO: 441057 - DNA, 33 bp, Homo sapien
aaggaaataaatgagcaacaatatggaaataac

SEQ ID NO: 441058 - DNA, 33 bp, Homo sapien
aaggaaataaatgagcgacaatatggaaataac

SEQ ID NO: 441059 - DNA, 33 bp, Homo sapien
gaccgcccagagtgtagcacagagaatggatca

SEQ ID NO: 441060 - DNA, 33 bp, Homo sapien
gaccgcccagagtgtatcacagagaatggatca

SEQ ID NO: 441061 - DNA, 33 bp, Homo sapien
gcagtgggaatagagaaacctggacaaactcca

SEQ ID NO: 441062 - DNA, 33 bp, Homo sapien
gcagtgggaatagagagacctggacaaactcca

SEQ ID NO: 441063 - DNA, 33 bp, Homo sapien
ggctgtgactccgcccaagttactgccacagcc

SEQ ID NO: 441064 - DNA, 33 bp, Homo sapien
ggctgtgactccgcccgagttactgccacagcc

SEQ ID NO: 441065 - DNA, 33 bp, Homo sapien
aagcacagtgtgaacacgagtgggtcggaggtc

SEQ ID NO: 441066 - DNA, 33 bp, Homo sapien
aagcacagtgtgaacatgagtgggtcggaggtc

SEQ ID NO: 441067 - DNA, 33 bp, Homo sapien
taatcactttgtgagtcactatgggtttaacta

SEQ ID NO: 441068 - DNA, 33 bp, Homo sapien
taatcactttgtgagttactatgggtttaacta

SEQ ID NO: 441069 - DNA, 33 bp, Homo sapien
taattcatgcaaattacagcaaataatcaacac

SEQ ID NO: 441070 - DNA, 33 bp, Homo sapien
taattcatgcaaattagagcaaataatcaacac

SEQ ID NO: 441071 - DNA, 33 bp, Homo sapien
gtgaaatgttagaggaatcaaaaggaggccagt

SEQ ID NO: 441072 - DNA, 33 bp, Homo sapien
gtgaaatgttagaggagtcaaaaggaggccagt

SEQ ID NO: 441073 - DNA, 33 bp, Homo sapien
ctgagggaagttaagtaactcactggaggccac

SEQ ID NO: 441074 - DNA, 33 bp, Homo sapien
ctgagggaagttaagtgactcactggaggccac

SEQ ID NO: 441075 - DNA, 33 bp, Homo sapien
tacacaactgcttttccactttgcaacagctta

SEQ ID NO: 441076 - DNA, 33 bp, Homo sapien
tacacaactgcttttctactttgcaacagctta

SEQ ID NO: 441077 - DNA, 33 bp, Homo sapien
cttaataaaaatgctacgatgtgggtatagaca

SEQ ID NO: 441078 - DNA, 33 bp, Homo sapien
cttaataaaaatgctatgatgtgggtatagaca

SEQ ID NO: 441079 - DNA, 33 bp, Homo sapien
ggtcagcatgcactagaacactacctggttcct

SEQ ID NO: 441080 - DNA, 33 bp, Homo sapien
ggtcagcatgcactaggacactacctggttcct

SEQ ID NO: 441081 - DNA, 33 bp, Homo sapien
caggtagcagcgtagcgaaggtcctgtgagaaa

SEQ ID NO: 441082 - DNA, 33 bp, Homo sapien
caggtagcagcgtagctaaggtcctgtgagaaa

SEQ ID NO: 441083 - DNA, 33 bp, Homo sapien
ctacaacccaaaattcagaacttgaacaggaaa

SEQ ID NO: 441084 - DNA, 33 bp, Homo sapien
ctacaacccaaaattcggaacttgaacaggaaa

SEQ ID NO: 441085 - DNA, 33 bp, Homo sapien
tgggcaagtatacccacgtatttgtgttgttct

SEQ ID NO: 441086 - DNA, 33 bp, Homo sapien
tgggcaagtatacccaggtatttgtgttgttct

SEQ ID NO: 441087 - DNA, 33 bp, Homo sapien
atgtacaaacatacataaaagtacataaaatac

SEQ ID NO: 441088 - DNA, 33 bp, Homo sapien
atgtacaaacatacatgaaagtacataaaatac

SEQ ID NO: 441089 - DNA, 33 bp, Homo sapien
ccaagcttcaggtcaaagccataggaaagaaaa

SEQ ID NO: 441090 - DNA, 33 bp, Homo sapien
ccaagcttcaggtcaaggccataggaaagaaaa

SEQ ID NO: 441091 - DNA, 33 bp, Homo sapien
agcctcccaaagatgaagaccaatcttaactgc

SEQ ID NO: 441092 - DNA, 33 bp, Homo sapien
agcctcccaaagatgaggaccaatcttaactgc

SEQ ID NO: 441093 - DNA, 33 bp, Homo sapien
accatttgtcaataaaacccagaactatgctac

SEQ ID NO: 441094 - DNA, 33 bp, Homo sapien
accatttgtcaataaatcccagaactatgctac

SEQ ID NO: 441095 - DNA, 33 bp, Homo sapien
ataattggtggcatctgaaattagatctgaacg

SEQ ID NO: 441096 - DNA, 33 bp, Homo sapien
ataattggtggcatcttaaattagatctgaacg

SEQ ID NO: 441097 - DNA, 33 bp, Homo sapien
caatatgcagtgctcactaacaacctggaggag

SEQ ID NO: 441098 - DNA, 33 bp, Homo sapien
caatatgcagtgctcattaacaacctggaggag

SEQ ID NO: 441099 - DNA, 33 bp, Homo sapien
ctcattttgcattatccgaaaatgtaatctaac

SEQ ID NO: 441100 - DNA, 33 bp, Homo sapien
ctcattttgcattatctgaaaatgtaatctaac

SEQ ID NO: 441101 - DNA, 33 bp, Homo sapien
cacagtggtggacagacactagcaatgattttc

SEQ ID NO: 441102 - DNA, 33 bp, Homo sapien
cacagtggtggacagatactagcaatgattttc

SEQ ID NO: 441103 - DNA, 33 bp, Homo sapien
aaaggccaagaaatacacggagacttcagcctt

SEQ ID NO: 441104 - DNA, 33 bp, Homo sapien
aaaggccaagaaatacgcggagacttcagcctt

SEQ ID NO: 441105 - DNA, 33 bp, Homo sapien
ctgcaggaatcaggtcacttggtgaagagaaga

SEQ ID NO: 441106 - DNA, 33 bp, Homo sapien
ctgcaggaatcaggtcgcttggtgaagagaaga

SEQ ID NO: 441107 - DNA, 33 bp, Homo sapien
aggaactgaaatcaaaaatttgtcagagcaggt

SEQ ID NO: 441108 - DNA, 33 bp, Homo sapien
aggaactgaaatcaaacatttgtcagagcaggt

SEQ ID NO: 441109 - DNA, 33 bp, Homo sapien
aacagatctagagtaacagaaagcttatcagtg

SEQ ID NO: 441110 - DNA, 33 bp, Homo sapien
aacagatctagagtaagagaaagcttatcagtg

SEQ ID NO: 441111 - DNA, 33 bp, Homo sapien
aattagataagctataaagcctgagtggagggt

SEQ ID NO: 441112 - DNA, 33 bp, Homo sapien
aattagataagctatacagcctgagtggagggt

SEQ ID NO: 441113 - DNA, 33 bp, Homo sapien
ttccctcaaaggcctcgaagaatgatccctgat

SEQ ID NO: 441114 - DNA, 33 bp, Homo sapien
ttccctcaaaggcctctaagaatgatccctgat

SEQ ID NO: 441115 - DNA, 33 bp, Homo sapien
ggctttttgaaatgtgcaaaacagctcatgcat

SEQ ID NO: 441116 - DNA, 33 bp, Homo sapien
ggctttttgaaatgtggaaaacagctcatgcat

SEQ ID NO: 441117 - DNA, 33 bp, Homo sapien
ccttttagctcagtgaacatggatagttcatca

SEQ ID NO: 441118 - DNA, 33 bp, Homo sapien
ccttttagctcagtgaccatggatagttcatca

SEQ ID NO: 441119 - DNA, 33 bp, Homo sapien
aacacacaggccctacaagaatgttttgatagt

SEQ ID NO: 441120 - DNA, 33 bp, Homo sapien
aacacacaggccctaccagaatgttttgatagt

SEQ ID NO: 441121 - DNA, 33 bp, Homo sapien
ttggtagtctttcaacacttaccctccatccat

SEQ ID NO: 441122 - DNA, 33 bp, Homo sapien
ttggtagtctttcaacccttaccctccatccat

SEQ ID NO: 441123 - DNA, 33 bp, Homo sapien
gttccaattttccacagtctcaccaacacttct

SEQ ID NO: 441124 - DNA, 33 bp, Homo sapien
gttccaattttccacattctcaccaacacttct

SEQ ID NO: 441125 - DNA, 33 bp, Homo sapien
taaaaacaatttcttacggcctatggaagaaga

SEQ ID NO: 441126 - DNA, 33 bp, Homo sapien
taaaaacaatttcttatggcctatggaagaaga

SEQ ID NO: 441127 - DNA, 33 bp, Homo sapien
aggacttggatttaggcatggttgatagtgacc

SEQ ID NO: 441128 - DNA, 33 bp, Homo sapien
aggacttggatttaggtatggttgatagtgacc

SEQ ID NO: 441129 - DNA, 33 bp, Homo sapien
agtactggtaccaaaaaaagatatagacaatgg

SEQ ID NO: 441130 - DNA, 33 bp, Homo sapien
agtactggtaccaaaacaagatatagacaatgg

SEQ ID NO: 441131 - DNA, 33 bp, Homo sapien
agacatccttgtgaggaaaagtgcagatattac

SEQ ID NO: 441132 - DNA, 33 bp, Homo sapien
agacatccttgtgagggaaagtgcagatattac

SEQ ID NO: 441133 - DNA, 33 bp, Homo sapien
ggagacccccagataaccataacagggaagcag

SEQ ID NO: 441134 - DNA, 33 bp, Homo sapien
ggagacccccagataatcataacagggaagcag

SEQ ID NO: 441135 - DNA, 33 bp, Homo sapien
gtgggtatatgccataagcttttgagtattatt

SEQ ID NO: 441136 - DNA, 33 bp, Homo sapien
gtgggtatatgccatatgcttttgagtattatt

SEQ ID NO: 441137 - DNA, 33 bp, Homo sapien
aaatttgggagtcaaaggtaacaagaataatat

SEQ ID NO: 441138 - DNA, 33 bp, Homo sapien
aaatttgggagtcaaatgtaacaagaataatat

SEQ ID NO: 441139 - DNA, 33 bp, Homo sapien
atgcaatgtcagtattaaaaagagcttagctag

SEQ ID NO: 441140 - DNA, 33 bp, Homo sapien
atgcaatgtcagtatttaaaagagcttagctag

SEQ ID NO: 441141 - DNA, 33 bp, Homo sapien
tcattgttagttgcccacatgtaaaaatggggt

SEQ ID NO: 441142 - DNA, 33 bp, Homo sapien
tcattgttagttgcccgcatgtaaaaatggggt

SEQ ID NO: 441143 - DNA, 33 bp, Homo sapien
aactctggttcagatccataaatatgtgttggg

SEQ ID NO: 441144 - DNA, 33 bp, Homo sapien
aactctggttcagatctataaatatgtgttggg

SEQ ID NO: 441145 - DNA, 33 bp, Homo sapien
ccttctcttctaattcaaagtcaacatacacat

SEQ ID NO: 441146 - DNA, 33 bp, Homo sapien
ccttctcttctaattccaagtcaacatacacat

SEQ ID NO: 441147 - DNA, 33 bp, Homo sapien
caaccaaaaatccaggaccagatagcatcatgg

SEQ ID NO: 441148 - DNA, 33 bp, Homo sapien
caaccaaaaatccagggccagatagcatcatgg

SEQ ID NO: 441149 - DNA, 33 bp, Homo sapien
tttcctcttcttgaaagcctcttcttgaaatcc

SEQ ID NO: 441150 - DNA, 33 bp, Homo sapien
tttcctcttcttgaaatcctcttcttgaaatcc

SEQ ID NO: 441151 - DNA, 33 bp, Homo sapien
ttattcattgactcaaacacgactgtgtgcaac

SEQ ID NO: 441152 - DNA, 33 bp, Homo sapien
ttattcattgactcaaccacgactgtgtgcaac

SEQ ID NO: 441153 - DNA, 33 bp, Homo sapien
tgatgtgagcgttcatcaaatgaggagacaggg

SEQ ID NO: 441154 - DNA, 33 bp, Homo sapien
tgatgtgagcgttcattaaatgaggagacaggg

SEQ ID NO: 441155 - DNA, 33 bp, Homo sapien
ttaactcatttcagaaacccttgaagatttcca

SEQ ID NO: 441156 - DNA, 33 bp, Homo sapien
ttaactcatttcagaagcccttgaagatttcca

SEQ ID NO: 441157 - DNA, 33 bp, Homo sapien
gattaaatgatgaagcggaaatgaataaacttc

SEQ ID NO: 441158 - DNA, 33 bp, Homo sapien
gattaaatgatgaagctgaaatgaataaacttc

SEQ ID NO: 441159 - DNA, 33 bp, Homo sapien
aatgtgttgtacaaaaagtttcatgtaataaaa

SEQ ID NO: 441160 - DNA, 33 bp, Homo sapien
aatgtgttgtacaaaatgtttcatgtaataaaa

SEQ ID NO: 441161 - DNA, 33 bp, Homo sapien
aggaaagtaaggttcccgctgcaaggtgttagc

SEQ ID NO: 441162 - DNA, 33 bp, Homo sapien
aggaaagtaaggttcctgctgcaaggtgttagc

SEQ ID NO: 441163 - DNA, 33 bp, Homo sapien
ctaaatattcctggcacagcatttagctaacac

SEQ ID NO: 441164 - DNA, 33 bp, Homo sapien
ctaaatattcctggcagagcatttagctaacac

SEQ ID NO: 441165 - DNA, 33 bp, Homo sapien
gaaggttctgatcgacacaaggtgccatgaaga

SEQ ID NO: 441166 - DNA, 33 bp, Homo sapien
gaaggttctgatcgacgcaaggtgccatgaaga

SEQ ID NO: 441167 - DNA, 33 bp, Homo sapien
caaagcttcttcaagcactgcagagccatagat

SEQ ID NO: 441168 - DNA, 33 bp, Homo sapien
caaagcttcttcaagcgctgcagagccatagat

SEQ ID NO: 441169 - DNA, 33 bp, Homo sapien
ttaggaccccaaacgccctgcctaagtgcattc

SEQ ID NO: 441170 - DNA, 33 bp, Homo sapien
ttaggaccccaaacgctctgcctaagtgcattc

SEQ ID NO: 441171 - DNA, 33 bp, Homo sapien
aagtccagtttatccaagtccaagaagtagtaa

SEQ ID NO: 441172 - DNA, 33 bp, Homo sapien
aagtccagtttatccaggtccaagaagtagtaa

SEQ ID NO: 441173 - DNA, 33 bp, Homo sapien
cttctccagatggaagatgttctttaagggatg

SEQ ID NO: 441174 - DNA, 33 bp, Homo sapien
cttctccagatggaagttgttctttaagggatg

SEQ ID NO: 441175 - DNA, 33 bp, Homo sapien
ggtcactggatgccagcattatctggttaaaca

SEQ ID NO: 441176 - DNA, 33 bp, Homo sapien
ggtcactggatgccaggattatctggttaaaca

SEQ ID NO: 441177 - DNA, 33 bp, Homo sapien
ctgggtctccggcttgcagatggcagatcgtgg

SEQ ID NO: 441178 - DNA, 33 bp, Homo sapien
ctgggtctccggcttgtagatggcagatcgtgg

SEQ ID NO: 441179 - DNA, 33 bp, Homo sapien
atttcagcctgaaaaaggtatactgcatagatc

SEQ ID NO: 441180 - DNA, 33 bp, Homo sapien
atttcagcctgaaaaatgtatactgcatagatc

SEQ ID NO: 441181 - DNA, 33 bp, Homo sapien
gaactagacaatgaagactcatgctggattttc

SEQ ID NO: 441182 - DNA, 33 bp, Homo sapien
gaactagacaatgaagtctcatgctggattttc

SEQ ID NO: 441183 - DNA, 33 bp, Homo sapien
cttagaatctctgcaaaccactgagtctttaaa

SEQ ID NO: 441184 - DNA, 33 bp, Homo sapien
cttagaatctctgcaagccactgagtctttaaa

SEQ ID NO: 441185 - DNA, 33 bp, Homo sapien
ctctactaaacacttacataagcacatccaagt

SEQ ID NO: 441186 - DNA, 33 bp, Homo sapien
ctctactaaacacttagataagcacatccaagt

SEQ ID NO: 441187 - DNA, 33 bp, Homo sapien
ctagcttaagcaaaacagaggtctattttaaga

SEQ ID NO: 441188 - DNA, 33 bp, Homo sapien
ctagcttaagcaaaacggaggtctattttaaga

SEQ ID NO: 441189 - DNA, 33 bp, Homo sapien
aataccttgagaaatagaacaggaaagcaggta

SEQ ID NO: 441190 - DNA, 33 bp, Homo sapien
aataccttgagaaatataacaggaaagcaggta

SEQ ID NO: 441191 - DNA, 33 bp, Homo sapien
tctgttatgaaaatcactccttatctttgctgc

SEQ ID NO: 441192 - DNA, 33 bp, Homo sapien
tctgttatgaaaatcattccttatctttgctgc

SEQ ID NO: 441193 - DNA, 33 bp, Homo sapien
acagcacctttggcacactttggtttgcatacc

SEQ ID NO: 441194 - DNA, 33 bp, Homo sapien
acagcacctttggcacgctttggtttgcatacc

SEQ ID NO: 441195 - DNA, 33 bp, Homo sapien
ttttcctgggtaagaaatcatagtcagtctttg

SEQ ID NO: 441196 - DNA, 33 bp, Homo sapien
ttttcctgggtaagaagtcatagtcagtctttg

SEQ ID NO: 441197 - DNA, 33 bp, Homo sapien
ttagtgttttagcaaagaatccatcacgccaac

SEQ ID NO: 441198 - DNA, 33 bp, Homo sapien
ttagtgttttagcaaataatccatcacgccaac

SEQ ID NO: 441199 - DNA, 33 bp, Homo sapien
tgaaaacatgaaaacaaattccggtattgaata

SEQ ID NO: 441200 - DNA, 33 bp, Homo sapien
tgaaaacatgaaaacacattccggtattgaata

SEQ ID NO: 441201 - DNA, 33 bp, Homo sapien
gtttcctcctagaacacacattgtcctgcaaag

SEQ ID NO: 441202 - DNA, 33 bp, Homo sapien
gtttcctcctagaacatacattgtcctgcaaag

SEQ ID NO: 441203 - DNA, 33 bp, Homo sapien
gttttgcccaatcaccactcgctgaggcttttc

SEQ ID NO: 441204 - DNA, 33 bp, Homo sapien
gttttgcccaatcaccgctcgctgaggcttttc

SEQ ID NO: 441205 - DNA, 33 bp, Homo sapien
ccttgccaaaatcataaatggcctgctttgatt

SEQ ID NO: 441206 - DNA, 33 bp, Homo sapien
ccttgccaaaatcatagatggcctgctttgatt

SEQ ID NO: 441207 - DNA, 33 bp, Homo sapien
agcttaaagcatagaactgtatattcaaccaat

SEQ ID NO: 441208 - DNA, 33 bp, Homo sapien
agcttaaagcatagaagtgtatattcaaccaat

SEQ ID NO: 441209 - DNA, 33 bp, Homo sapien
gatttggaagaggaccaaaaacacttctctaaa

SEQ ID NO: 441210 - DNA, 33 bp, Homo sapien
gatttggaagaggaccgaaaacacttctctaaa

SEQ ID NO: 441211 - DNA, 33 bp, Homo sapien
gagaattccacgttaaaatttttagcttgttgg

SEQ ID NO: 441212 - DNA, 33 bp, Homo sapien
gagaattccacgttaacatttttagcttgttgg

SEQ ID NO: 441213 - DNA, 33 bp, Homo sapien
ttaagcaggaggtagaagagtgtcagaaccaga

SEQ ID NO: 441214 - DNA, 33 bp, Homo sapien
ttaagcaggaggtagaggagtgtcagaaccaga

SEQ ID NO: 441215 - DNA, 33 bp, Homo sapien
gatattgtgcctgagaagaaggtgaggcaacca

SEQ ID NO: 441216 - DNA, 33 bp, Homo sapien
gatattgtgcctgagaggaaggtgaggcaacca

SEQ ID NO: 441217 - DNA, 33 bp, Homo sapien
aggaaagttattggagcaatccaggccaaacaa

SEQ ID NO: 441218 - DNA, 33 bp, Homo sapien
aggaaagttattggaggaatccaggccaaacaa

SEQ ID NO: 441219 - DNA, 33 bp, Homo sapien
ggtaagatttgtaacactgcttctaggtcattt

SEQ ID NO: 441220 - DNA, 33 bp, Homo sapien
ggtaagatttgtaacagtgcttctaggtcattt

SEQ ID NO: 441221 - DNA, 33 bp, Homo sapien
ctcagctgagaagtgacagaattagaaaacaat

SEQ ID NO: 441222 - DNA, 33 bp, Homo sapien
ctcagctgagaagtgatagaattagaaaacaat

SEQ ID NO: 441223 - DNA, 33 bp, Homo sapien
gatgggactatggggcaattaggaaggaggcaa

SEQ ID NO: 441224 - DNA, 33 bp, Homo sapien
gatgggactatggggcgattaggaaggaggcaa

SEQ ID NO: 441225 - DNA, 33 bp, Homo sapien
catcctccctgaataaaccataccatagcacac

SEQ ID NO: 441226 - DNA, 33 bp, Homo sapien
catcctccctgaataagccataccatagcacac

SEQ ID NO: 441227 - DNA, 33 bp, Homo sapien
gtacagtgcatgaatgcatataaacacacacat

SEQ ID NO: 441228 - DNA, 33 bp, Homo sapien
gtacagtgcatgaatgtatataaacacacacat

SEQ ID NO: 441229 - DNA, 33 bp, Homo sapien
cggaagaaaatgatacacataaacagaaaacac

SEQ ID NO: 441230 - DNA, 33 bp, Homo sapien
cggaagaaaatgatacgcataaacagaaaacac

SEQ ID NO: 441231 - DNA, 33 bp, Homo sapien
tggaagctggagaacactgtccaggccccagca

SEQ ID NO: 441232 - DNA, 33 bp, Homo sapien
tggaagctggagaacattgtccaggccccagca

SEQ ID NO: 441233 - DNA, 33 bp, Homo sapien
ctgcccaaataaacatcagccaagaaggagatg

SEQ ID NO: 441234 - DNA, 33 bp, Homo sapien
ctgcccaaataaacattagccaagaaggagatg

SEQ ID NO: 441235 - DNA, 33 bp, Homo sapien
ccaaagttcaacagggaagatacacctctctga

SEQ ID NO: 441236 - DNA, 33 bp, Homo sapien
ccaaagttcaacagggcagatacacctctctga

SEQ ID NO: 441237 - DNA, 33 bp, Homo sapien
cttttctaggtgcaggaaactcagaaagggcat

SEQ ID NO: 441238 - DNA, 33 bp, Homo sapien
cttttctaggtgcagggaactcagaaagggcat

SEQ ID NO: 441239 - DNA, 33 bp, Homo sapien
gaactggattagcagaggtgataaaggcagctt

SEQ ID NO: 441240 - DNA, 33 bp, Homo sapien
gaactggattagcagatgtgataaaggcagctt

SEQ ID NO: 441241 - DNA, 33 bp, Homo sapien
aatggatgctcgaaaaatctttgggaaatggat

SEQ ID NO: 441242 - DNA, 33 bp, Homo sapien
aatggatgctcgaaaagtctttgggaaatggat

SEQ ID NO: 441243 - DNA, 33 bp, Homo sapien
ctatgttgaccctgtacattcaacaattacact

SEQ ID NO: 441244 - DNA, 33 bp, Homo sapien
ctatgttgaccctgtatattcaacaattacact

SEQ ID NO: 441245 - DNA, 33 bp, Homo sapien
aggccaagtaacctgcccaaggtcgctgagcct

SEQ ID NO: 441246 - DNA, 33 bp, Homo sapien
aggccaagtaacctgcgcaaggtcgctgagcct

SEQ ID NO: 441247 - DNA, 33 bp, Homo sapien
ccttatctgtaaatgagaaggttgaactacatg

SEQ ID NO: 441248 - DNA, 33 bp, Homo sapien
ccttatctgtaaatgataaggttgaactacatg

SEQ ID NO: 441249 - DNA, 33 bp, Homo sapien
taaaggacatcatctacgaggtaagttacactt

SEQ ID NO: 441250 - DNA, 33 bp, Homo sapien
taaaggacatcatctatgaggtaagttacactt

SEQ ID NO: 441251 - DNA, 33 bp, Homo sapien
gtcaacctggatgatcaacaagcccgtttcctc

SEQ ID NO: 441252 - DNA, 33 bp, Homo sapien
gtcaacctggatgatcgacaagcccgtttcctc

SEQ ID NO: 441253 - DNA, 33 bp, Homo sapien
gtgacacttcttaaagactgaagcatgtggcat

SEQ ID NO: 441254 - DNA, 33 bp, Homo sapien
gtgacacttcttaaagcctgaagcatgtggcat

SEQ ID NO: 441255 - DNA, 33 bp, Homo sapien
caagggcctttctagcaagggtgaactttgaag

SEQ ID NO: 441256 - DNA, 33 bp, Homo sapien
caagggcctttctagccagggtgaactttgaag

SEQ ID NO: 441257 - DNA, 33 bp, Homo sapien
tgaattctcagaaactcagtattctctacattt

SEQ ID NO: 441258 - DNA, 33 bp, Homo sapien
tgaattctcagaaacttagtattctctacattt

SEQ ID NO: 441259 - DNA, 33 bp, Homo sapien
gggtcatccataaaaaaagcacttttggccaag

SEQ ID NO: 441260 - DNA, 33 bp, Homo sapien
gggtcatccataaaaacagcacttttggccaag

SEQ ID NO: 441261 - DNA, 33 bp, Homo sapien
agttcataactaacccaagaaacatctggggtc

SEQ ID NO: 441262 - DNA, 33 bp, Homo sapien
agttcataactaacccgagaaacatctggggtc

SEQ ID NO: 441263 - DNA, 33 bp, Homo sapien
ttccttttttccccaaccatcttctaagagaat

SEQ ID NO: 441264 - DNA, 33 bp, Homo sapien
ttccttttttccccaatcatcttctaagagaat

SEQ ID NO: 441265 - DNA, 33 bp, Homo sapien
gtgagagctcacatcaactacaggaggaggcgg

SEQ ID NO: 441266 - DNA, 33 bp, Homo sapien
gtgagagctcacatcagctacaggaggaggcgg

SEQ ID NO: 441267 - DNA, 33 bp, Homo sapien
ctcttagaaggtgacccacagccctaaagagtt

SEQ ID NO: 441268 - DNA, 33 bp, Homo sapien
ctcttagaaggtgacctacagccctaaagagtt

SEQ ID NO: 441269 - DNA, 33 bp, Homo sapien
gcttcttacatggtatcaggcaagagtgtgtgt

SEQ ID NO: 441270 - DNA, 33 bp, Homo sapien
gcttcttacatggtattaggcaagagtgtgtgt

SEQ ID NO: 441271 - DNA, 33 bp, Homo sapien
tgacttataagagggccgatgcttatgtgtgta

SEQ ID NO: 441272 - DNA, 33 bp, Homo sapien
tgacttataagagggctgatgcttatgtgtgta

SEQ ID NO: 441273 - DNA, 33 bp, Homo sapien
ttctgaccaaccctgcaaactgtctctggctac

SEQ ID NO: 441274 - DNA, 33 bp, Homo sapien
ttctgaccaaccctgcgaactgtctctggctac

SEQ ID NO: 441275 - DNA, 33 bp, Homo sapien
aggaaccgctctcaacccttctgattctttcta

SEQ ID NO: 441276 - DNA, 33 bp, Homo sapien
aggaaccgctctcaactcttctgattctttcta

SEQ ID NO: 441277 - DNA, 33 bp, Homo sapien
tgctctagtttattcacggtgtatttaaaacag

SEQ ID NO: 441278 - DNA, 33 bp, Homo sapien
tgctctagtttattcatggtgtatttaaaacag

SEQ ID NO: 441279 - DNA, 33 bp, Homo sapien
ccagaacttaaatacaagagcgaaccatttata

SEQ ID NO: 441280 - DNA, 33 bp, Homo sapien
ccagaacttaaatacaggagcgaaccatttata

SEQ ID NO: 441281 - DNA, 33 bp, Homo sapien
tttttacctcttgcaacgtccttttataattgt

SEQ ID NO: 441282 - DNA, 33 bp, Homo sapien
tttttacctcttgcaatgtccttttataattgt

SEQ ID NO: 441283 - DNA, 33 bp, Homo sapien
cctgaaggatctgagacgttagccctgcctgaa

SEQ ID NO: 441284 - DNA, 33 bp, Homo sapien
cctgaaggatctgagatgttagccctgcctgaa

SEQ ID NO: 441285 - DNA, 33 bp, Homo sapien
cttaaatactgtgatacaaagtcactacatctt

SEQ ID NO: 441286 - DNA, 33 bp, Homo sapien
cttaaatactgtgatataaagtcactacatctt

SEQ ID NO: 441287 - DNA, 33 bp, Homo sapien
tcattgtctcctgctcacattactttccccatt

SEQ ID NO: 441288 - DNA, 33 bp, Homo sapien
tcattgtctcctgctcgcattactttccccatt

SEQ ID NO: 441289 - DNA, 33 bp, Homo sapien
atgttgcagtaggaataaccttgaatcttatgt

SEQ ID NO: 441290 - DNA, 33 bp, Homo sapien
atgttgcagtaggaatgaccttgaatcttatgt

SEQ ID NO: 441291 - DNA, 33 bp, Homo sapien
gtttggcatatttgcagaataccagctgagcat

SEQ ID NO: 441292 - DNA, 33 bp, Homo sapien
gtttggcatatttgcataataccagctgagcat

SEQ ID NO: 441293 - DNA, 33 bp, Homo sapien
aagaatgattgtctccccagaatccacacgagc

SEQ ID NO: 441294 - DNA, 33 bp, Homo sapien
aagaatgattgtctcctcagaatccacacgagc

SEQ ID NO: 441295 - DNA, 33 bp, Homo sapien
caatcattcttaatacccttcacgtgttgtagc

SEQ ID NO: 441296 - DNA, 33 bp, Homo sapien
caatcattcttaatacgcttcacgtgttgtagc

SEQ ID NO: 441297 - DNA, 33 bp, Homo sapien
cagagccgttttcccacatctgctattcccttt

SEQ ID NO: 441298 - DNA, 33 bp, Homo sapien
cagagccgttttcccatatctgctattcccttt

SEQ ID NO: 441299 - DNA, 33 bp, Homo sapien
cgtcacattgtccaaaatggctcatcacctccg

SEQ ID NO: 441300 - DNA, 33 bp, Homo sapien
cgtcacattgtccaaattggctcatcacctccg

SEQ ID NO: 441301 - DNA, 33 bp, Homo sapien
ttcttgtgtattgatccacatcactagggcatt

SEQ ID NO: 441302 - DNA, 33 bp, Homo sapien
ttcttgtgtattgatctacatcactagggcatt

SEQ ID NO: 441303 - DNA, 33 bp, Homo sapien
aagtcattacaagtgaaactctctcctttaaga

SEQ ID NO: 441304 - DNA, 33 bp, Homo sapien
aagtcattacaagtgagactctctcctttaaga

SEQ ID NO: 441305 - DNA, 33 bp, Homo sapien
gctgtgtggaagggaacgtcttcaagtctttat

SEQ ID NO: 441306 - DNA, 33 bp, Homo sapien
gctgtgtggaagggaaggtcttcaagtctttat

SEQ ID NO: 441307 - DNA, 33 bp, Homo sapien
actcttacctcacacacaaaaaagcaaaacccg

SEQ ID NO: 441308 - DNA, 33 bp, Homo sapien
actcttacctcacacagaaaaaagcaaaacccg

SEQ ID NO: 441309 - DNA, 33 bp, Homo sapien
aggaagcctgtctttgaataggagacagccttt

SEQ ID NO: 441310 - DNA, 33 bp, Homo sapien
aggaagcctgtctttgtataggagacagccttt

SEQ ID NO: 441311 - DNA, 33 bp, Homo sapien
gagacagaaaaggacacggaaaaggctgagaaa

SEQ ID NO: 441312 - DNA, 33 bp, Homo sapien
gagacagaaaaggacatggaaaaggctgagaaa

SEQ ID NO: 441313 - DNA, 33 bp, Homo sapien
tctactgttgttatggaagctcattaactgaga

SEQ ID NO: 441314 - DNA, 33 bp, Homo sapien
tctactgttgttatggtagctcattaactgaga

SEQ ID NO: 441315 - DNA, 33 bp, Homo sapien
agaagtaagaagtgcaaaggtgcaacaacaaga

SEQ ID NO: 441316 - DNA, 33 bp, Homo sapien
agaagtaagaagtgcagaggtgcaacaacaaga

SEQ ID NO: 441317 - DNA, 33 bp, Homo sapien
tggacacattgcagctcaaggccatgcttagga

SEQ ID NO: 441318 - DNA, 33 bp, Homo sapien
tggacacattgcagctgaaggccatgcttagga

SEQ ID NO: 441319 - DNA, 33 bp, Homo sapien
tgagagttagaggggaacaacatagagccagca

SEQ ID NO: 441320 - DNA, 33 bp, Homo sapien
tgagagttagaggggagcaacatagagccagca

SEQ ID NO: 441321 - DNA, 33 bp, Homo sapien
agtctcaggaactaggacatgttgtaaaaacca

SEQ ID NO: 441322 - DNA, 33 bp, Homo sapien
agtctcaggaactaggtcatgttgtaaaaacca

SEQ ID NO: 441323 - DNA, 33 bp, Homo sapien
gctgatgctagagaccacactgtgagaatcact

SEQ ID NO: 441324 - DNA, 33 bp, Homo sapien
gctgatgctagagaccgcactgtgagaatcact

SEQ ID NO: 441325 - DNA, 33 bp, Homo sapien
aaataaaatgttacacaatagctccttcacacc

SEQ ID NO: 441326 - DNA, 33 bp, Homo sapien
aaataaaatgttacacgatagctccttcacacc

SEQ ID NO: 441327 - DNA, 33 bp, Homo sapien
gaaagtgccaggggaactgcaacttggcaatgg

SEQ ID NO: 441328 - DNA, 33 bp, Homo sapien
gaaagtgccaggggaagtgcaacttggcaatgg

SEQ ID NO: 441329 - DNA, 33 bp, Homo sapien
tcctccttctgtttaacacatttttccatctca

SEQ ID NO: 441330 - DNA, 33 bp, Homo sapien
tcctccttctgtttaatacatttttccatctca

SEQ ID NO: 441331 - DNA, 33 bp, Homo sapien
agtccctcataggctacaatcaggtgtcagctg

SEQ ID NO: 441332 - DNA, 33 bp, Homo sapien
agtccctcataggctataatcaggtgtcagctg

SEQ ID NO: 441333 - DNA, 33 bp, Homo sapien
tttctctggagccaacgggcaaggacattattg

SEQ ID NO: 441334 - DNA, 33 bp, Homo sapien
tttctctggagccaactggcaaggacattattg

SEQ ID NO: 441335 - DNA, 33 bp, Homo sapien
ttagtcatgtgctacacaatggtgtttctgtca

SEQ ID NO: 441336 - DNA, 33 bp, Homo sapien
ttagtcatgtgctacataatggtgtttctgtca

SEQ ID NO: 441337 - DNA, 33 bp, Homo sapien
attccacttcaacaaaaaagtcctgaatcactg

SEQ ID NO: 441338 - DNA, 33 bp, Homo sapien
attccacttcaacaaagaagtcctgaatcactg

SEQ ID NO: 441339 - DNA, 33 bp, Homo sapien
aaactcagtggctgaaaaccagcacccattatt

SEQ ID NO: 441340 - DNA, 33 bp, Homo sapien
aaactcagtggctgaataccagcacccattatt

SEQ ID NO: 441341 - DNA, 33 bp, Homo sapien
atcaacatttcccagcagctacgactccatatc

SEQ ID NO: 441342 - DNA, 33 bp, Homo sapien
atcaacatttcccagcggctacgactccatatc

SEQ ID NO: 441343 - DNA, 33 bp, Homo sapien
ttaaaatcagaaacaaaaggtagaaaatcatga

SEQ ID NO: 441344 - DNA, 33 bp, Homo sapien
ttaaaatcagaaacaagaggtagaaaatcatga

SEQ ID NO: 441345 - DNA, 33 bp, Homo sapien
aacagctttctcaaacgagctttctcatcacca

SEQ ID NO: 441346 - DNA, 33 bp, Homo sapien
aacagctttctcaaactagctttctcatcacca

SEQ ID NO: 441347 - DNA, 33 bp, Homo sapien
gcttttgggtacacagacccattacatacatga

SEQ ID NO: 441348 - DNA, 33 bp, Homo sapien
gcttttgggtacacaggcccattacatacatga

SEQ ID NO: 441349 - DNA, 33 bp, Homo sapien
atgtatcaggcctgcacgcccaaagcttatgtg

SEQ ID NO: 441350 - DNA, 33 bp, Homo sapien
atgtatcaggcctgcatgcccaaagcttatgtg

SEQ ID NO: 441351 - DNA, 33 bp, Homo sapien
agggagtaacaggtaacaaaagtgtactgtgtg

SEQ ID NO: 441352 - DNA, 33 bp, Homo sapien
agggagtaacaggtaataaaagtgtactgtgtg

SEQ ID NO: 441353 - DNA, 33 bp, Homo sapien
gttcctttttattgccaagttagtgttcacgtt

SEQ ID NO: 441354 - DNA, 33 bp, Homo sapien
gttcctttttattgcccagttagtgttcacgtt

SEQ ID NO: 441355 - DNA, 33 bp, Homo sapien
acagatttcagccccagtgaagtctaaatcact

SEQ ID NO: 441356 - DNA, 33 bp, Homo sapien
acagatttcagccccattgaagtctaaatcact

SEQ ID NO: 441357 - DNA, 33 bp, Homo sapien
atcaaatacacaattacagtagttgtcaaaaaa

SEQ ID NO: 441358 - DNA, 33 bp, Homo sapien
atcaaatacacaattatagtagttgtcaaaaaa

SEQ ID NO: 441359 - DNA, 33 bp, Homo sapien
attacattttaataccaggatgagggagttaag

SEQ ID NO: 441360 - DNA, 33 bp, Homo sapien
attacattttaatacctggatgagggagttaag

SEQ ID NO: 441361 - DNA, 33 bp, Homo sapien
tcctagtgccctggccagctcaagattaaatgc

SEQ ID NO: 441362 - DNA, 33 bp, Homo sapien
tcctagtgccctggccggctcaagattaaatgc

SEQ ID NO: 441363 - DNA, 33 bp, Homo sapien
tcagctctccttttaaatacaggtgactgtagc

SEQ ID NO: 441364 - DNA, 33 bp, Homo sapien
tcagctctccttttaactacaggtgactgtagc

SEQ ID NO: 441365 - DNA, 33 bp, Homo sapien
aggcttttgagaggtcaaagaggctccttgtca

SEQ ID NO: 441366 - DNA, 33 bp, Homo sapien
aggcttttgagaggtcgaagaggctccttgtca

SEQ ID NO: 441367 - DNA, 33 bp, Homo sapien
tacagttcggacattcaagcatcgcgatttctc

SEQ ID NO: 441368 - DNA, 33 bp, Homo sapien
tacagttcggacattcgagcatcgcgatttctc

SEQ ID NO: 441369 - DNA, 33 bp, Homo sapien
gccattcatgaacttacgggccgtattctacat

SEQ ID NO: 441370 - DNA, 33 bp, Homo sapien
gccattcatgaacttatgggccgtattctacat

SEQ ID NO: 441371 - DNA, 33 bp, Homo sapien
caagaggaaagtctaaaggcatcacagaatctc

SEQ ID NO: 441372 - DNA, 33 bp, Homo sapien
caagaggaaagtctaagggcatcacagaatctc

SEQ ID NO: 441373 - DNA, 33 bp, Homo sapien
cccagatgtgattaacacaagttccaaagtaag

SEQ ID NO: 441374 - DNA, 33 bp, Homo sapien
cccagatgtgattaactcaagttccaaagtaag

SEQ ID NO: 441375 - DNA, 33 bp, Homo sapien
cacatattacaaaccaatgaggaaggaagtatt

SEQ ID NO: 441376 - DNA, 33 bp, Homo sapien
cacatattacaaaccagtgaggaaggaagtatt

SEQ ID NO: 441377 - DNA, 33 bp, Homo sapien
gttttgtggccaccaccgtcatagcaatattta

SEQ ID NO: 441378 - DNA, 33 bp, Homo sapien
gttttgtggccaccactgtcatagcaatattta

SEQ ID NO: 441379 - DNA, 33 bp, Homo sapien
gacaaggtaaggtcaacacagtggtataaaaat

SEQ ID NO: 441380 - DNA, 33 bp, Homo sapien
gacaaggtaaggtcaagacagtggtataaaaat

SEQ ID NO: 441381 - DNA, 33 bp, Homo sapien
tactgacactcttcacagaactagaaaaaacga

SEQ ID NO: 441382 - DNA, 33 bp, Homo sapien
tactgacactcttcacggaactagaaaaaacga

SEQ ID NO: 441383 - DNA, 33 bp, Homo sapien
acaccatcgagcctcaacgattttaatgctttc

SEQ ID NO: 441384 - DNA, 33 bp, Homo sapien
acaccatcgagcctcaccgattttaatgctttc

SEQ ID NO: 441385 - DNA, 33 bp, Homo sapien
atggtccattaactcaaaaagatgttcttaatc

SEQ ID NO: 441386 - DNA, 33 bp, Homo sapien
atggtccattaactcagaaagatgttcttaatc

SEQ ID NO: 441387 - DNA, 33 bp, Homo sapien
aaggtggtggttctgaagtaatggtaagtgtga

SEQ ID NO: 441388 - DNA, 33 bp, Homo sapien
aaggtggtggttctgacgtaatggtaagtgtga

SEQ ID NO: 441389 - DNA, 33 bp, Homo sapien
acctgggcatctctgaaaggagctaaacttggt

SEQ ID NO: 441390 - DNA, 33 bp, Homo sapien
acctgggcatctctgagaggagctaaacttggt

SEQ ID NO: 441391 - DNA, 33 bp, Homo sapien
acagaacaccacattcacttttcatgagcctga

SEQ ID NO: 441392 - DNA, 33 bp, Homo sapien
acagaacaccacattcccttttcatgagcctga

SEQ ID NO: 441393 - DNA, 33 bp, Homo sapien
agaatttaaggacgccactctgagaacatgaat

SEQ ID NO: 441394 - DNA, 33 bp, Homo sapien
agaatttaaggacgccgctctgagaacatgaat

SEQ ID NO: 441395 - DNA, 33 bp, Homo sapien
atattgattggttgagaatattgtggccagagg

SEQ ID NO: 441396 - DNA, 33 bp, Homo sapien
atattgattggttgaggatattgtggccagagg

SEQ ID NO: 441397 - DNA, 33 bp, Homo sapien
actctacaaatagagaccagttacactttgtca

SEQ ID NO: 441398 - DNA, 33 bp, Homo sapien
actctacaaatagagatcagttacactttgtca

SEQ ID NO: 441399 - DNA, 33 bp, Homo sapien
gagggagaagtaaagtgaaagactgatcaacag

SEQ ID NO: 441400 - DNA, 33 bp, Homo sapien
gagggagaagtaaagttaaagactgatcaacag

SEQ ID NO: 441401 - DNA, 33 bp, Homo sapien
tggccctggagaaatacatctgcagtttctaat

SEQ ID NO: 441402 - DNA, 33 bp, Homo sapien
tggccctggagaaatatatctgcagtttctaat

SEQ ID NO: 441403 - DNA, 33 bp, Homo sapien
ggtgcacatgggccctaaggagcaatgtccatg

SEQ ID NO: 441404 - DNA, 33 bp, Homo sapien
ggtgcacatgggccctgaggagcaatgtccatg

SEQ ID NO: 441405 - DNA, 33 bp, Homo sapien
agaaaaacatctatctgaagtcactgttacttc

SEQ ID NO: 441406 - DNA, 33 bp, Homo sapien
agaaaaacatctatcttaagtcactgttacttc

SEQ ID NO: 441407 - DNA, 33 bp, Homo sapien
tggttgtgctcaaatacgttcttattgaccttg

SEQ ID NO: 441408 - DNA, 33 bp, Homo sapien
tggttgtgctcaaatatgttcttattgaccttg

SEQ ID NO: 441409 - DNA, 33 bp, Homo sapien
tctagtcccttttacactagagggtgctgctag

SEQ ID NO: 441410 - DNA, 33 bp, Homo sapien
tctagtcccttttacattagagggtgctgctag

SEQ ID NO: 441411 - DNA, 33 bp, Homo sapien
gaagcaaacagtggcaaaaacagcaagaactat

SEQ ID NO: 441412 - DNA, 33 bp, Homo sapien
gaagcaaacagtggcataaacagcaagaactat

SEQ ID NO: 441413 - DNA, 33 bp, Homo sapien
agctattaactgaaaaaaagcaattgtagaata

SEQ ID NO: 441414 - DNA, 33 bp, Homo sapien
agctattaactgaaaacaagcaattgtagaata

SEQ ID NO: 441415 - DNA, 33 bp, Homo sapien
gaaataggatcctacgaagatgaagttgtgaaa

SEQ ID NO: 441416 - DNA, 33 bp, Homo sapien
gaaataggatcctacggagatgaagttgtgaaa

SEQ ID NO: 441417 - DNA, 33 bp, Homo sapien
gaaaataacacctcctctttgtaatgctttcac

SEQ ID NO: 441418 - DNA, 33 bp, Homo sapien
gaaaataacacctcctttttgtaatgctttcac

SEQ ID NO: 441419 - DNA, 33 bp, Homo sapien
gacacagctgggctaccggcaattaagatctta

SEQ ID NO: 441420 - DNA, 33 bp, Homo sapien
gacacagctgggctactggcaattaagatctta

SEQ ID NO: 441421 - DNA, 33 bp, Homo sapien
atactcaacaatgcctcaaatgccagcagaccc

SEQ ID NO: 441422 - DNA, 33 bp, Homo sapien
atactcaacaatgccttaaatgccagcagaccc

SEQ ID NO: 441423 - DNA, 33 bp, Homo sapien
gacagagaggttgttcaatacatatttgctgaa

SEQ ID NO: 441424 - DNA, 33 bp, Homo sapien
gacagagaggttgttctatacatatttgctgaa

SEQ ID NO: 441425 - DNA, 33 bp, Homo sapien
acaaacaaacaaaaaaacttgtgaagaagagag

SEQ ID NO: 441426 - DNA, 33 bp, Homo sapien
acaaacaaacaaaaaatcttgtgaagaagagag

SEQ ID NO: 441427 - DNA, 33 bp, Homo sapien
aaagatgaagttcataagactcacaaaattcaa

SEQ ID NO: 441428 - DNA, 33 bp, Homo sapien
aaagatgaagttcatacgactcacaaaattcaa

SEQ ID NO: 441429 - DNA, 33 bp, Homo sapien
tcttgccaagtctgcacgttgaatgttttagat

SEQ ID NO: 441430 - DNA, 33 bp, Homo sapien
tcttgccaagtctgcatgttgaatgttttagat

SEQ ID NO: 441431 - DNA, 33 bp, Homo sapien
aagccaaaatcacagcaagtttttaaaaagcat

SEQ ID NO: 441432 - DNA, 33 bp, Homo sapien
aagccaaaatcacagcgagtttttaaaaagcat

SEQ ID NO: 441433 - DNA, 33 bp, Homo sapien
tttctctatggaagtcaagagttctctgtattc

SEQ ID NO: 441434 - DNA, 33 bp, Homo sapien
tttctctatggaagtcgagagttctctgtattc

SEQ ID NO: 441435 - DNA, 33 bp, Homo sapien
gctcacagtattgagaacaacagtttgacctta

SEQ ID NO: 441436 - DNA, 33 bp, Homo sapien
gctcacagtattgagagcaacagtttgacctta

SEQ ID NO: 441437 - DNA, 33 bp, Homo sapien
cttctcatgagaaaaaataaggtgataagtgct

SEQ ID NO: 441438 - DNA, 33 bp, Homo sapien
cttctcatgagaaaaagtaaggtgataagtgct

SEQ ID NO: 441439 - DNA, 33 bp, Homo sapien
catgcctcagtagcaactctggcaatcctttat

SEQ ID NO: 441440 - DNA, 33 bp, Homo sapien
catgcctcagtagcaattctggcaatcctttat

SEQ ID NO: 441441 - DNA, 33 bp, Homo sapien
cctggcagagaggatgacacccattcacattga

SEQ ID NO: 441442 - DNA, 33 bp, Homo sapien
cctggcagagaggatggcacccattcacattga

SEQ ID NO: 441443 - DNA, 33 bp, Homo sapien
tgaggatgtttcctgcagagattagcacatgag

SEQ ID NO: 441444 - DNA, 33 bp, Homo sapien
tgaggatgtttcctgcggagattagcacatgag

SEQ ID NO: 441445 - DNA, 33 bp, Homo sapien
ctcaaggacttgttggccatgaagaatggggga

SEQ ID NO: 441446 - DNA, 33 bp, Homo sapien
ctcaaggacttgttggtcatgaagaatggggga

SEQ ID NO: 441447 - DNA, 33 bp, Homo sapien
gtatcctggatccataaatttactgttcacaca

SEQ ID NO: 441448 - DNA, 33 bp, Homo sapien
gtatcctggatccatatatttactgttcacaca

SEQ ID NO: 441449 - DNA, 33 bp, Homo sapien
tcaggaggttaccttaagaatgttgtgaccatc

SEQ ID NO: 441450 - DNA, 33 bp, Homo sapien
tcaggaggttaccttacgaatgttgtgaccatc

SEQ ID NO: 441451 - DNA, 33 bp, Homo sapien
gaagctaaagttctgaataaatgaaatacccca

SEQ ID NO: 441452 - DNA, 33 bp, Homo sapien
gaagctaaagttctgagtaaatgaaatacccca

SEQ ID NO: 441453 - DNA, 33 bp, Homo sapien
aggatttcaacccataccattccagaaggatct

SEQ ID NO: 441454 - DNA, 33 bp, Homo sapien
aggatttcaacccatatcattccagaaggatct

SEQ ID NO: 441455 - DNA, 33 bp, Homo sapien
tacctcctttgtgaaactggtagtcgagctttt

SEQ ID NO: 441456 - DNA, 33 bp, Homo sapien
tacctcctttgtgaaattggtagtcgagctttt

SEQ ID NO: 441457 - DNA, 33 bp, Homo sapien
aggcttttcctattcacacagaaggagcagtag

SEQ ID NO: 441458 - DNA, 33 bp, Homo sapien
aggcttttcctattcatacagaaggagcagtag

SEQ ID NO: 441459 - DNA, 33 bp, Homo sapien
ttgatccttgatttccccagaaatgtttgagtt

SEQ ID NO: 441460 - DNA, 33 bp, Homo sapien
ttgatccttgatttcctcagaaatgtttgagtt

SEQ ID NO: 441461 - DNA, 33 bp, Homo sapien
ctcatcagtagtgcaacagtgtgccagaatgac

SEQ ID NO: 441462 - DNA, 33 bp, Homo sapien
ctcatcagtagtgcaatagtgtgccagaatgac

SEQ ID NO: 441463 - DNA, 33 bp, Homo sapien
gttcctaccagccgaaccaatcagccatttcaa

SEQ ID NO: 441464 - DNA, 33 bp, Homo sapien
gttcctaccagccgaatcaatcagccatttcaa

SEQ ID NO: 441465 - DNA, 33 bp, Homo sapien
gaaggaatgttcaacaatgatttgcagcatggt

SEQ ID NO: 441466 - DNA, 33 bp, Homo sapien
gaaggaatgttcaacagtgatttgcagcatggt

SEQ ID NO: 441467 - DNA, 33 bp, Homo sapien
ctctgttctcctcatgaaataatcaccaccaac

SEQ ID NO: 441468 - DNA, 33 bp, Homo sapien
ctctgttctcctcatggaataatcaccaccaac

SEQ ID NO: 441469 - DNA, 33 bp, Homo sapien
tcttgatggcctgttgcataattttgcttgctt

SEQ ID NO: 441470 - DNA, 33 bp, Homo sapien
tcttgatggcctgttggataattttgcttgctt

SEQ ID NO: 441471 - DNA, 33 bp, Homo sapien
aacatggacaggctgaataactcaagagttacg

SEQ ID NO: 441472 - DNA, 33 bp, Homo sapien
aacatggacaggctgagtaactcaagagttacg

SEQ ID NO: 441473 - DNA, 33 bp, Homo sapien
taggtgattgctctcaaggaccacaatgtgatg

SEQ ID NO: 441474 - DNA, 33 bp, Homo sapien
taggtgattgctctcagggaccacaatgtgatg

SEQ ID NO: 441475 - DNA, 33 bp, Homo sapien
tggtatatgtaacctcaagagagaaaacagtta

SEQ ID NO: 441476 - DNA, 33 bp, Homo sapien
tggtatatgtaacctcgagagagaaaacagtta

SEQ ID NO: 441477 - DNA, 33 bp, Homo sapien
gctgcggcctccactacgttgtgaatgatgaat

SEQ ID NO: 441478 - DNA, 33 bp, Homo sapien
gctgcggcctccactatgttgtgaatgatgaat

SEQ ID NO: 441479 - DNA, 33 bp, Homo sapien
caaacccacattaacaaatcattatcacccaga

SEQ ID NO: 441480 - DNA, 33 bp, Homo sapien
caaacccacattaacacatcattatcacccaga

SEQ ID NO: 441481 - DNA, 33 bp, Homo sapien
ctgtagattaggtaaaagtattgcatccatgga

SEQ ID NO: 441482 - DNA, 33 bp, Homo sapien
ctgtagattaggtaaacgtattgcatccatgga

SEQ ID NO: 441483 - DNA, 33 bp, Homo sapien
ggctttgcactcaatacgccaccaaaactgtcc

SEQ ID NO: 441484 - DNA, 33 bp, Homo sapien
ggctttgcactcaatatgccaccaaaactgtcc

SEQ ID NO: 441485 - DNA, 33 bp, Homo sapien
gccactcaaagttggacgctgtctctcctttgg

SEQ ID NO: 441486 - DNA, 33 bp, Homo sapien
gccactcaaagttggatgctgtctctcctttgg

SEQ ID NO: 441487 - DNA, 33 bp, Homo sapien
atgctgacttggtgtacgcaatggagagttctg

SEQ ID NO: 441488 - DNA, 33 bp, Homo sapien
atgctgacttggtgtaggcaatggagagttctg

SEQ ID NO: 441489 - DNA, 33 bp, Homo sapien
ccattgagaaagtgttcaaagtatacaatgaag

SEQ ID NO: 441490 - DNA, 33 bp, Homo sapien
ccattgagaaagtgtttaaagtatacaatgaag

SEQ ID NO: 441491 - DNA, 33 bp, Homo sapien
tctgatgacggtgaaaatagaaatcactgacac

SEQ ID NO: 441492 - DNA, 33 bp, Homo sapien
tctgatgacggtgaaagtagaaatcactgacac

SEQ ID NO: 441493 - DNA, 33 bp, Homo sapien
aaaaatgcttgttgaccaatgggtggtgaagaa

SEQ ID NO: 441494 - DNA, 33 bp, Homo sapien
aaaaatgcttgttgactaatgggtggtgaagaa

SEQ ID NO: 441495 - DNA, 33 bp, Homo sapien
atacaaaagtagaacacaaaagtgctagatttt

SEQ ID NO: 441496 - DNA, 33 bp, Homo sapien
atacaaaagtagaacataaaagtgctagatttt

SEQ ID NO: 441497 - DNA, 33 bp, Homo sapien
acctattgtgatgggcaaataatggcccccaaa

SEQ ID NO: 441498 - DNA, 33 bp, Homo sapien
acctattgtgatgggcgaataatggcccccaaa

SEQ ID NO: 441499 - DNA, 33 bp, Homo sapien
ttacaggcgctctctaccacacctgactaattt

SEQ ID NO: 441500 - DNA, 33 bp, Homo sapien
ttacaggcgctctctagcacacctgactaattt

SEQ ID NO: 441501 - DNA, 33 bp, Homo sapien
tttcatcacgttgaccaccttggtgtttccaga

SEQ ID NO: 441502 - DNA, 33 bp, Homo sapien
tttcatcacgttgacctccttggtgtttccaga

SEQ ID NO: 441503 - DNA, 33 bp, Homo sapien
taagagtgaagatatccgaggtggtgttgaagg

SEQ ID NO: 441504 - DNA, 33 bp, Homo sapien
taagagtgaagatatctgaggtggtgttgaagg

SEQ ID NO: 441505 - DNA, 33 bp, Homo sapien
ttcacaagccttcactcaattgctggtttgatt

SEQ ID NO: 441506 - DNA, 33 bp, Homo sapien
ttcacaagccttcactgaattgctggtttgatt

SEQ ID NO: 441507 - DNA, 33 bp, Homo sapien
tgaaggaagaatgagccaatttcagatctgagg

SEQ ID NO: 441508 - DNA, 33 bp, Homo sapien
tgaaggaagaatgagctaatttcagatctgagg

SEQ ID NO: 441509 - DNA, 33 bp, Homo sapien
tctgatggatttataaaggggagttgccatgca

SEQ ID NO: 441510 - DNA, 33 bp, Homo sapien
tctgatggatttataagggggagttgccatgca

SEQ ID NO: 441511 - DNA, 33 bp, Homo sapien; identical to SEQ ID NO: 441509

SEQ ID NO: 441512 - DNA, 33 bp, Homo sapien; identical to SEQ ID NO: 441510

SEQ ID NO: 441513 - DNA, 33 bp, Homo sapien
ggaagctaggggaaacactttttattcagtgcc

SEQ ID NO: 441514 - DNA, 33 bp, Homo sapien
ggaagctaggggaaacgctttttattcagtgcc

SEQ ID NO: 441515 - DNA, 33 bp, Homo sapien
atctccccagcggcaacggaggtcagctagatc

SEQ ID NO: 441516 - DNA, 33 bp, Homo sapien
atctccccagcggcaatggaggtcagctagatc

SEQ ID NO: 441517 - DNA, 33 bp, Homo sapien
gcattacagaaagaataaactccaagtcgttta

SEQ ID NO: 441518 - DNA, 33 bp, Homo sapien
gcattacagaaagaatgaactccaagtcgttta

SEQ ID NO: 441519 - DNA, 33 bp, Homo sapien
gacacataattttacgaaggttatacttggcac

SEQ ID NO: 441520 - DNA, 33 bp, Homo sapien
gacacataattttacgcaggttatacttggcac

SEQ ID NO: 441521 - DNA, 33 bp, Homo sapien
ccccagacgatgctaacgtacagcccaggttga

SEQ ID NO: 441522 - DNA, 33 bp, Homo sapien
ccccagacgatgctaatgtacagcccaggttga

SEQ ID NO: 441523 - DNA, 33 bp, Homo sapien
cagagccattctgtaaacacaggccaaatttta

SEQ ID NO: 441524 - DNA, 33 bp, Homo sapien
cagagccattctgtaagcacaggccaaatttta

SEQ ID NO: 441525 - DNA, 33 bp, Homo sapien
aggagtaagagctggaaacacaatagatgtggc

SEQ ID NO: 441526 - DNA, 33 bp, Homo sapien
aggagtaagagctggagacacaatagatgtggc

SEQ ID NO: 441527 - DNA, 33 bp, Homo sapien
gggatctggaggatgcaaaggtgctaacctcga

SEQ ID NO: 441528 - DNA, 33 bp, Homo sapien
gggatctggaggatgcgaaggtgctaacctcga

SEQ ID NO: 441529 - DNA, 33 bp, Homo sapien
tcagagtgactttctacagttttattacatcaa

SEQ ID NO: 441530 - DNA, 33 bp, Homo sapien
tcagagtgactttctagagttttattacatcaa

SEQ ID NO: 441531 - DNA, 33 bp, Homo sapien
aaatatggttctcaaaaaatatatagctctaat

SEQ ID NO: 441532 - DNA, 33 bp, Homo sapien
aaatatggttctcaaagaatatatagctctaat

SEQ ID NO: 441533 - DNA, 33 bp, Homo sapien
gttaaaaaatgtccaagatgttcaggcaattct

SEQ ID NO: 441534 - DNA, 33 bp, Homo sapien
gttaaaaaatgtccaatatgttcaggcaattct

SEQ ID NO: 441535 - DNA, 33 bp, Homo sapien
agaacaacttattcacagatagatacattttct

SEQ ID NO: 441536 - DNA, 33 bp, Homo sapien
agaacaacttattcacggatagatacattttct

SEQ ID NO: 441537 - DNA, 33 bp, Homo sapien
ggatgtggcaattagaccactagtgacctttag

SEQ ID NO: 441538 - DNA, 33 bp, Homo sapien
ggatgtggcaattagagcactagtgacctttag

SEQ ID NO: 441539 - DNA, 33 bp, Homo sapien
gcatggagacaagtgcaaatcactttacatgag

SEQ ID NO: 441540 - DNA, 33 bp, Homo sapien
gcatggagacaagtgccaatcactttacatgag

SEQ ID NO: 441541 - DNA, 33 bp, Homo sapien
gaaccagagagagaaagtgcaaacaagatggaa

SEQ ID NO: 441542 - DNA, 33 bp, Homo sapien
gaaccagagagagaaattgcaaacaagatggaa

SEQ ID NO: 441543 - DNA, 33 bp, Homo sapien
aactttgaaaggccaaagaaggaagaaagcttg

SEQ ID NO: 441544 - DNA, 33 bp, Homo sapien
aactttgaaaggccaaggaaggaagaaagcttg

SEQ ID NO: 441545 - DNA, 33 bp, Homo sapien
gagatgaaggattcaaacctggagagttaagca

SEQ ID NO: 441546 - DNA, 33 bp, Homo sapien
gagatgaaggattcaagcctggagagttaagca

SEQ ID NO: 441547 - DNA, 33 bp, Homo sapien
gtaactggaaagttgacattttagatacctcaa

SEQ ID NO: 441548 - DNA, 33 bp, Homo sapien
gtaactggaaagttgatattttagatacctcaa

SEQ ID NO: 441549 - DNA, 33 bp, Homo sapien
ttctcctaccctaaaaaactgccaacactgagg

SEQ ID NO: 441550 - DNA, 33 bp, Homo sapien
ttctcctaccctaaaagactgccaacactgagg

SEQ ID NO: 441551 - DNA, 33 bp, Homo sapien
attgagcagatgtcaggcaaatcctgtaataat

SEQ ID NO: 441552 - DNA, 33 bp, Homo sapien
attgagcagatgtcagtcaaatcctgtaataat

SEQ ID NO: 441553 - DNA, 33 bp, Homo sapien
actctatgagaagcaaaattgtgtggtaattaa

SEQ ID NO: 441554 - DNA, 33 bp, Homo sapien
actctatgagaagcaacattgtgtggtaattaa

SEQ ID NO: 441555 - DNA, 33 bp, Homo sapien
ctgaacgttccgcaaagaattgttgtggggcct

SEQ ID NO: 441556 - DNA, 33 bp, Homo sapien
ctgaacgttccgcaaataattgttgtggggcct

SEQ ID NO: 441557 - DNA, 33 bp, Homo sapien
gtcaaaagactgcaaactgccgggagtggtggc

SEQ ID NO: 441558 - DNA, 33 bp, Homo sapien
gtcaaaagactgcaaattgccgggagtggtggc

SEQ ID NO: 441559 - DNA, 33 bp, Homo sapien
cctttcaaaacagctaggctcaaataaagtatt

SEQ ID NO: 441560 - DNA, 33 bp, Homo sapien
cctttcaaaacagctatgctcaaataaagtatt

SEQ ID NO: 441561 - DNA, 33 bp, Homo sapien
tcttctaactcacgacacacttcttcacttgga

SEQ ID NO: 441562 - DNA, 33 bp, Homo sapien
tcttctaactcacgacgcacttcttcacttgga

SEQ ID NO: 441563 - DNA, 33 bp, Homo sapien
tctctttaatatccaaaaccctgaagttgactc

SEQ ID NO: 441564 - DNA, 33 bp, Homo sapien
tctctttaatatccaagaccctgaagttgactc

SEQ ID NO: 441565 - DNA, 33 bp, Homo sapien
aatacatataggctcaccattgagacgcggctg

SEQ ID NO: 441566 - DNA, 33 bp, Homo sapien
aatacatataggctcatcattgagacgcggctg

SEQ ID NO: 441567 - DNA, 33 bp, Homo sapien
ctagttgccgggctaacgtgagaggatcgtttg

SEQ ID NO: 441568 - DNA, 33 bp, Homo sapien
ctagttgccgggctaatgtgagaggatcgtttg

SEQ ID NO: 441569 - DNA, 33 bp, Homo sapien
aagatacttgctttcacggtaccatttccaagt

SEQ ID NO: 441570 - DNA, 33 bp, Homo sapien
aagatacttgctttcatggtaccatttccaagt

SEQ ID NO: 441571 - DNA, 33 bp, Homo sapien
gcctttactctgaatcacatatgctatgtttct

SEQ ID NO: 441572 - DNA, 33 bp, Homo sapien
gcctttactctgaatcgcatatgctatgtttct

SEQ ID NO: 441573 - DNA, 33 bp, Homo sapien
aggctccctgcaacggaagaggcttttgtgaat

SEQ ID NO: 441574 - DNA, 33 bp, Homo sapien
aggctccctgcaacgggagaggcttttgtgaat

SEQ ID NO: 441575 - DNA, 33 bp, Homo sapien
acgtactgaatccccgcacaagaaatgcagagt

SEQ ID NO: 441576 - DNA, 33 bp, Homo sapien
acgtactgaatccccgtacaagaaatgcagagt

SEQ ID NO: 441577 - DNA, 33 bp, Homo sapien
atgacttacgtggtcacaatcacgctaaatgca

SEQ ID NO: 441578 - DNA, 33 bp, Homo sapien
atgacttacgtggtcagaatcacgctaaatgca

SEQ ID NO: 441579 - DNA, 33 bp, Homo sapien
agtaagcttctcctcacgtggaagtcattagct

SEQ ID NO: 441580 - DNA, 33 bp, Homo sapien
agtaagcttctcctcatgtggaagtcattagct

SEQ ID NO: 441581 - DNA, 33 bp, Homo sapien
agtaatgagtagattcacccgcaggtaaaacaa

SEQ ID NO: 441582 - DNA, 33 bp, Homo sapien
agtaatgagtagattcgcccgcaggtaaaacaa

SEQ ID NO: 441583 - DNA, 33 bp, Homo sapien
gcaatcacacacgtgaacagaacaggtcccggg

SEQ ID NO: 441584 - DNA, 33 bp, Homo sapien
gcaatcacacacgtgagcagaacaggtcccggg

SEQ ID NO: 441585 - DNA, 33 bp, Homo sapien
aagaagcagaactcataagagtgggattcatta

SEQ ID NO: 441586 - DNA, 33 bp, Homo sapien
aagaagcagaactcatgagagtgggattcatta

SEQ ID NO: 441587 - DNA, 33 bp, Homo sapien
tattgctcagttccatgaaataatccctggagc

SEQ ID NO: 441588 - DNA, 33 bp, Homo sapien
tattgctcagttccattaaataatccctggagc

SEQ ID NO: 441589 - DNA, 33 bp, Homo sapien
accctcatgataggaccagaaattgctccaggg

SEQ ID NO: 441590 - DNA, 33 bp, Homo sapien
accctcatgataggactagaaattgctccaggg

SEQ ID NO: 441591 - DNA, 33 bp, Homo sapien
agtcaacacagggatacgtaattgtaatttcca

SEQ ID NO: 441592 - DNA, 33 bp, Homo sapien
agtcaacacagggatatgtaattgtaatttcca

SEQ ID NO: 441593 - DNA, 33 bp, Homo sapien
gggaatgaatttcttacgatcccttacaaggtg

SEQ ID NO: 441594 - DNA, 33 bp, Homo sapien
gggaatgaatttcttatgatcccttacaaggtg

SEQ ID NO: 441595 - DNA, 33 bp, Homo sapien
taagaactaagctcacacataaagccacgcatt

SEQ ID NO: 441596 - DNA, 33 bp, Homo sapien
taagaactaagctcacgcataaagccacgcatt

SEQ ID NO: 441597 - DNA, 33 bp, Homo sapien
atctgtgaagaaggagacatggtaatcaggaaa

SEQ ID NO: 441598 - DNA, 33 bp, Homo sapien
atctgtgaagaaggaggcatggtaatcaggaaa

SEQ ID NO: 441599 - DNA, 33 bp, Homo sapien
gctgggaaagattacactcagtcgtttatattt

SEQ ID NO: 441600 - DNA, 33 bp, Homo sapien
gctgggaaagattacattcagtcgtttatattt

SEQ ID NO: 441601 - DNA, 33 bp, Homo sapien
tgtctggtgtgaaccacgggggtttagaggaat

SEQ ID NO: 441602 - DNA, 33 bp, Homo sapien
tgtctggtgtgaaccatgggggtttagaggaat

SEQ ID NO: 441603 - DNA, 33 bp, Homo sapien
gaggaatcaaatgatgaatggcaggcttagctt

SEQ ID NO: 441604 - DNA, 33 bp, Homo sapien
gaggaatcaaatgatgcatggcaggcttagctt

SEQ ID NO: 441605 - DNA, 33 bp, Homo sapien
gtatatacagctactacatacccataataatta

SEQ ID NO: 441606 - DNA, 33 bp, Homo sapien
gtatatacagctactagatacccataataatta

SEQ ID NO: 441607 - DNA, 33 bp, Homo sapien
aaagactgattggtcacaacaaaatacatactt

SEQ ID NO: 441608 - DNA, 33 bp, Homo sapien
aaagactgattggtcataacaaaatacatactt

SEQ ID NO: 441609 - DNA, 33 bp, Homo sapien
ggcttgatgactgtgacagtgaaggagagacaa

SEQ ID NO: 441610 - DNA, 33 bp, Homo sapien
ggcttgatgactgtgagagtgaaggagagacaa

SEQ ID NO: 441611 - DNA, 33 bp, Homo sapien
ttagacaatagcctacacactatcgatagaaac

SEQ ID NO: 441612 - DNA, 33 bp, Homo sapien
ttagacaatagcctacgcactatcgatagaaac

SEQ ID NO: 441613 - DNA, 33 bp, Homo sapien
gtagtgaggaggtccacgatgttaccacgtcgc

SEQ ID NO: 441614 - DNA, 33 bp, Homo sapien
gtagtgaggaggtccatgatgttaccacgtcgc

SEQ ID NO: 441615 - DNA, 33 bp, Homo sapien
tcaaagctcagacataccatctttcactgttca

SEQ ID NO: 441616 - DNA, 33 bp, Homo sapien
tcaaagctcagacatatcatctttcactgttca

SEQ ID NO: 441617 - DNA, 33 bp, Homo sapien
taagaatcatgtttaagtattttccaccagtcc

SEQ ID NO: 441618 - DNA, 33 bp, Homo sapien
taagaatcatgtttaattattttccaccagtcc

SEQ ID NO: 441619 - DNA, 33 bp, Homo sapien
gcagactggaccaactcagtgaagaaataggca

SEQ ID NO: 441620 - DNA, 33 bp, Homo sapien
gcagactggaccaacttagtgaagaaataggca

SEQ ID NO: 441621 - DNA, 33 bp, Homo sapien
tcacattcaacctgccagaactgctgaaaggca

SEQ ID NO: 441622 - DNA, 33 bp, Homo sapien
tcacattcaacctgccggaactgctgaaaggca

SEQ ID NO: 441623 - DNA, 33 bp, Homo sapien
ggaggcctcaccatcaagcgaaaggctaaaggc

SEQ ID NO: 441624 - DNA, 33 bp, Homo sapien
ggaggcctcaccatcatgcgaaaggctaaaggc

SEQ ID NO: 441625 - DNA, 33 bp, Homo sapien; identical to SEQ ID NO: 441623

SEQ ID NO: 441626 - DNA, 33 bp, Homo sapien; identical to SEQ ID NO: 441624

SEQ ID NO: 441627 - DNA, 33 bp, Homo sapien
ctgctacatgtaaccaacttcgttaatatggtt

SEQ ID NO: 441628 - DNA, 33 bp, Homo sapien
ctgctacatgtaaccagcttcgttaatatggtt

SEQ ID NO: 441629 - DNA, 33 bp, Homo sapien
aaattatggtgaagaacatccaggcttcatact

SEQ ID NO: 441630 - DNA, 33 bp, Homo sapien
aaattatggtgaagaagatccaggcttcatact

SEQ ID NO: 441631 - DNA, 33 bp, Homo sapien
aacttctgtgactaggaattggagatcaggaaa

SEQ ID NO: 441632 - DNA, 33 bp, Homo sapien
aacttctgtgactaggtattggagatcaggaaa

SEQ ID NO: 441633 - DNA, 33 bp, Homo sapien
taaaagagaattttaccgcctccctcgcactct

SEQ ID NO: 441634 - DNA, 33 bp, Homo sapien
taaaagagaattttactgcctccctcgcactct

SEQ ID NO: 441635 - DNA, 33 bp, Homo sapien
atctagtgaatttgaccaccttttctcatgctg

SEQ ID NO: 441636 - DNA, 33 bp, Homo sapien
atctagtgaatttgactaccttttctcatgctg

SEQ ID NO: 441637 - DNA, 33 bp, Homo sapien
acaacttttgctaatacgtctctctcaaaaact

SEQ ID NO: 441638 - DNA, 33 bp, Homo sapien
acaacttttgctaatatgtctctctcaaaaact

SEQ ID NO: 441639 - DNA, 33 bp, Homo sapien
ggaatcaaaacttatacgtggattttcagatgt

SEQ ID NO: 441640 - DNA, 33 bp, Homo sapien
ggaatcaaaacttatatgtggattttcagatgt

SEQ ID NO: 441641 - DNA, 33 bp, Homo sapien
caaagggcctaaagacaggagcagaaagaaggc

SEQ ID NO: 441642 - DNA, 33 bp, Homo sapien
caaagggcctaaagaccggagcagaaagaaggc

SEQ ID NO: 441643 - DNA, 33 bp, Homo sapien
atgattgctagtgggcgctgactgttgactcag

SEQ ID NO: 441644 - DNA, 33 bp, Homo sapien
atgattgctagtgggctctgactgttgactcag

SEQ ID NO: 441645 - DNA, 33 bp, Homo sapien
ttctatcatagtttacaaaagtacttcaattgg

SEQ ID NO: 441646 - DNA, 33 bp, Homo sapien
ttctatcatagtttacgaaagtacttcaattgg

SEQ ID NO: 441647 - DNA, 33 bp, Homo sapien
attcagtgctctgaaaagaggcattttcttcat

SEQ ID NO: 441648 - DNA, 33 bp, Homo sapien
attcagtgctctgaaaggaggcattttcttcat

SEQ ID NO: 441649 - DNA, 33 bp, Homo sapien
ctagcagaaacctgcccagactaattcacagtc

SEQ ID NO: 441650 - DNA, 33 bp, Homo sapien
ctagcagaaacctgcctagactaattcacagtc

SEQ ID NO: 441651 - DNA, 33 bp, Homo sapien
gacctgaatacagcccagattgctagcagaaac

SEQ ID NO: 441652 - DNA, 33 bp, Homo sapien
gacctgaatacagcccggattgctagcagaaac

SEQ ID NO: 441653 - DNA, 33 bp, Homo sapien
aaacaaattcaaaaaaatggaagaagcaactgg

SEQ ID NO: 441654 - DNA, 33 bp, Homo sapien
aaacaaattcaaaaaagtggaagaagcaactgg

SEQ ID NO: 441655 - DNA, 33 bp, Homo sapien
aagaaattgtaagcatcagaacagaactaaatg

SEQ ID NO: 441656 - DNA, 33 bp, Homo sapien
aagaaattgtaagcattagaacagaactaaatg

SEQ ID NO: 441657 - DNA, 33 bp, Homo sapien
taggtccgatgtgttacagcatttagtgtaaga

SEQ ID NO: 441658 - DNA, 33 bp, Homo sapien
taggtccgatgtgttatagcatttagtgtaaga

SEQ ID NO: 441659 - DNA, 33 bp, Homo sapien
cagacatataggaggaaaaagctggaagaaata

SEQ ID NO: 441660 - DNA, 33 bp, Homo sapien
cagacatataggaggagaaagctggaagaaata

SEQ ID NO: 441661 - DNA, 33 bp, Homo sapien
ggcaccattgaaatacagaaacagacatagtcc

SEQ ID NO: 441662 - DNA, 33 bp, Homo sapien
ggcaccattgaaatacggaaacagacatagtcc

SEQ ID NO: 441663 - DNA, 33 bp, Homo sapien
agaggagaattagtgaaaaatcctctcacagta

SEQ ID NO: 441664 - DNA, 33 bp, Homo sapien
agaggagaattagtgacaaatcctctcacagta

SEQ ID NO: 441665 - DNA, 33 bp, Homo sapien
attcactggcagtaagactccagagctcttttc

SEQ ID NO: 441666 - DNA, 33 bp, Homo sapien
attcactggcagtaagcctccagagctcttttc

SEQ ID NO: 441667 - DNA, 33 bp, Homo sapien
atccatgttcaagatacaggccagccctctaag

SEQ ID NO: 441668 - DNA, 33 bp, Homo sapien
atccatgttcaagatataggccagccctctaag

SEQ ID NO: 441669 - DNA, 33 bp, Homo sapien
gacacactctacaaacaggcaggactttgtgca

SEQ ID NO: 441670 - DNA, 33 bp, Homo sapien
gacacactctacaaaccggcaggactttgtgca

SEQ ID NO: 441671 - DNA, 33 bp, Homo sapien
aggagagattgtatcccgatggaaatgacaaga

SEQ ID NO: 441672 - DNA, 33 bp, Homo sapien
aggagagattgtatcctgatggaaatgacaaga

SEQ ID NO: 441673 - DNA, 33 bp, Homo sapien
actgtccttggcaaacagataatcattgcatag

SEQ ID NO: 441674 - DNA, 33 bp, Homo sapien
actgtccttggcaaaccgataatcattgcatag

SEQ ID NO: 441675 - DNA, 33 bp, Homo sapien
ctccacataagtttaacctcaaatcagctttgt

SEQ ID NO: 441676 - DNA, 33 bp, Homo sapien
ctccacataagtttaatctcaaatcagctttgt

SEQ ID NO: 441677 - DNA, 33 bp, Homo sapien
catgcaatggcaataacgtgtggtgagaactca

SEQ ID NO: 441678 - DNA, 33 bp, Homo sapien
catgcaatggcaataatgtgtggtgagaactca

SEQ ID NO: 441679 - DNA, 33 bp, Homo sapien
attaacagggattctgaagataacttacccaaa

SEQ ID NO: 441680 - DNA, 33 bp, Homo sapien
attaacagggattctggagataacttacccaaa

SEQ ID NO: 441681 - DNA, 33 bp, Homo sapien
tttgttagctagcccactagatactatttctct

SEQ ID NO: 441682 - DNA, 33 bp, Homo sapien
tttgttagctagcccattagatactatttctct

SEQ ID NO: 441683 - DNA, 33 bp, Homo sapien
gggtaaaagacaagtgaagaacaatatttgctg

SEQ ID NO: 441684 - DNA, 33 bp, Homo sapien
gggtaaaagacaagtggagaacaatatttgctg

SEQ ID NO: 441685 - DNA, 33 bp, Homo sapien
aaagcagagtttttgcaagaaaagaactgattt

SEQ ID NO: 441686 - DNA, 33 bp, Homo sapien
aaagcagagtttttgcgagaaaagaactgattt

SEQ ID NO: 441687 - DNA, 33 bp, Homo sapien
aactttgtctgctgaacctaaagaataaggaga

SEQ ID NO: 441688 - DNA, 33 bp, Homo sapien
aactttgtctgctgaatctaaagaataaggaga

SEQ ID NO: 441689 - DNA, 33 bp, Homo sapien
cagggtttgaggtctacgatggccacatcttca

SEQ ID NO: 441690 - DNA, 33 bp, Homo sapien
cagggtttgaggtctatgatggccacatcttca

SEQ ID NO: 441691 - DNA, 33 bp, Homo sapien
ttatgccgcagtgcagaatactatctggtagag

SEQ ID NO: 441692 - DNA, 33 bp, Homo sapien
ttatgccgcagtgcaggatactatctggtagag

SEQ ID NO: 441693 - DNA, 33 bp, Homo sapien
ggatttatatagttcacgggttaggccattttg

SEQ ID NO: 441694 - DNA, 33 bp, Homo sapien
ggatttatatagttcatgggttaggccattttg

SEQ ID NO: 441695 - DNA, 33 bp, Homo sapien
caccactttcttccagaccccaaagtcaagtag

SEQ ID NO: 441696 - DNA, 33 bp, Homo sapien
caccactttcttccagcccccaaagtcaagtag

SEQ ID NO: 441697 - DNA, 33 bp, Homo sapien
tacctaaatgagacaaatgaaacgcatatacat

SEQ ID NO: 441698 - DNA, 33 bp, Homo sapien
tacctaaatgagacaactgaaacgcatatacat

SEQ ID NO: 441699 - DNA, 33 bp, Homo sapien
gtacagtttgaatccaggtaacgtgatgctgtc

SEQ ID NO: 441700 - DNA, 33 bp, Homo sapien
gtacagtttgaatccatgtaacgtgatgctgtc

SEQ ID NO: 441701 - DNA, 33 bp, Homo sapien
tggtccttgcctgtgaaaggtgagtggtctgtg

SEQ ID NO: 441702 - DNA, 33 bp, Homo sapien
tggtccttgcctgtgagaggtgagtggtctgtg

SEQ ID NO: 441703 - DNA, 33 bp, Homo sapien
tacaatttgtcagaaaaactcttctcctccata

SEQ ID NO: 441704 - DNA, 33 bp, Homo sapien
tacaatttgtcagaaacactcttctcctccata

SEQ ID NO: 441705 - DNA, 33 bp, Homo sapien
ggaaagagaataacccaaaatgtagcagctccc

SEQ ID NO: 441706 - DNA, 33 bp, Homo sapien
ggaaagagaataacccgaaatgtagcagctccc

SEQ ID NO: 441707 - DNA, 33 bp, Homo sapien
cgaccgggtaccacaacattctgtcttgccaca

SEQ ID NO: 441708 - DNA, 33 bp, Homo sapien
cgaccgggtaccacaatattctgtcttgccaca

SEQ ID NO: 441709 - DNA, 33 bp, Homo sapien
tatgaacactatcttacgggctttaatcctcac

SEQ ID NO: 441710 - DNA, 33 bp, Homo sapien
tatgaacactatcttatgggctttaatcctcac

SEQ ID NO: 441711 - DNA, 33 bp, Homo sapien
gttgagttaaaaagtgcagcatcatggctcttg

SEQ ID NO: 441712 - DNA, 33 bp, Homo sapien
gttgagttaaaaagtgtagcatcatggctcttg

SEQ ID NO: 441713 - DNA, 33 bp, Homo sapien
gataaccagtatggtaaactgtacagcctggaa

SEQ ID NO: 441714 - DNA, 33 bp, Homo sapien
gataaccagtatggtagactgtacagcctggaa

SEQ ID NO: 441715 - DNA, 33 bp, Homo sapien
ctggtctgcaaggccaacatctgggtacacagg

SEQ ID NO: 441716 - DNA, 33 bp, Homo sapien
ctggtctgcaaggccagcatctgggtacacagg

SEQ ID NO: 441717 - DNA, 33 bp, Homo sapien
taaaaatcattttagactatgaataacaatcgt

SEQ ID NO: 441718 - DNA, 33 bp, Homo sapien
taaaaatcattttagagtatgaataacaatcgt

SEQ ID NO: 441719 - DNA, 33 bp, Homo sapien
ctccatccgtgtgaaaactcttaatcacagctt

SEQ ID NO: 441720 - DNA, 33 bp, Homo sapien
ctccatccgtgtgaaacctcttaatcacagctt

SEQ ID NO: 441721 - DNA, 33 bp, Homo sapien
tctcacattacgattcacaagacatgtttttct

SEQ ID NO: 441722 - DNA, 33 bp, Homo sapien
tctcacattacgattcgcaagacatgtttttct

SEQ ID NO: 441723 - DNA, 33 bp, Homo sapien
tgcagaaccattttcaggtggattgcattaagt

SEQ ID NO: 441724 - DNA, 33 bp, Homo sapien
tgcagaaccattttcatgtggattgcattaagt

SEQ ID NO: 441725 - DNA, 33 bp, Homo sapien
ccatgactacaaagaactgatgtgatatgtttt

SEQ ID NO: 441726 - DNA, 33 bp, Homo sapien
ccatgactacaaagaattgatgtgatatgtttt

SEQ ID NO: 441727 - DNA, 33 bp, Homo sapien
agaattaaagggcagccaaactggaaaggaaga

SEQ ID NO: 441728 - DNA, 33 bp, Homo sapien
agaattaaagggcagctaaactggaaaggaaga

SEQ ID NO: 441729 - DNA, 33 bp, Homo sapien
gatggtgggttacttaagaaaaatgcttcactg

SEQ ID NO: 441730 - DNA, 33 bp, Homo sapien
gatggtgggttacttatgaaaaatgcttcactg

SEQ ID NO: 441731 - DNA, 33 bp, Homo sapien
ttgagattgctgatataaaatgtaaacccttga

SEQ ID NO: 441732 - DNA, 33 bp, Homo sapien
ttgagattgctgatattaaatgtaaacccttga

SEQ ID NO: 441733 - DNA, 33 bp, Homo sapien
tctggtatgaatatgacgatgttcgtggctatc

SEQ ID NO: 441734 - DNA, 33 bp, Homo sapien
tctggtatgaatatgatgatgttcgtggctatc

SEQ ID NO: 441735 - DNA, 33 bp, Homo sapien
aagaaatataaaacaacaagtcaggtaagaagc

SEQ ID NO: 441736 - DNA, 33 bp, Homo sapien
aagaaatataaaacaagaagtcaggtaagaagc

SEQ ID NO: 441737 - DNA, 33 bp, Homo sapien
catggttaagaagaaaagagaacgaaatgcaag

SEQ ID NO: 441738 - DNA, 33 bp, Homo sapien
catggttaagaagaaacgagaacgaaatgcaag

SEQ ID NO: 441739 - DNA, 33 bp, Homo sapien
taaaaatgttttaaaaagagaactctgccagaa

SEQ ID NO: 441740 - DNA, 33 bp, Homo sapien
taaaaatgttttaaaaggagaactctgccagaa

SEQ ID NO: 441741 - DNA, 33 bp, Homo sapien
ctcagttatctaaaacagaaatctcagaattat

SEQ ID NO: 441742 - DNA, 33 bp, Homo sapien
ctcagttatctaaaacggaaatctcagaattat

SEQ ID NO: 441743 - DNA, 33 bp, Homo sapien
taaagcttattattcacatagcaaacagcaaaa

SEQ ID NO: 441744 - DNA, 33 bp, Homo sapien
taaagcttattattcatatagcaaacagcaaaa

SEQ ID NO: 441745 - DNA, 33 bp, Homo sapien
acactgagaacatgttaaaatctcctaattctt

SEQ ID NO: 441746 - DNA, 33 bp, Homo sapien
acactgagaacatgtttaaatctcctaattctt

SEQ ID NO: 441747 - DNA, 33 bp, Homo sapien
ggtcattccctgatgacgccaccagaagtgaac

SEQ ID NO: 441748 - DNA, 33 bp, Homo sapien
ggtcattccctgatgatgccaccagaagtgaac

SEQ ID NO: 441749 - DNA, 33 bp, Homo sapien
atctcacagaatcaacaaagaacagaaattaag

SEQ ID NO: 441750 - DNA, 33 bp, Homo sapien
atctcacagaatcaacgaagaacagaaattaag

SEQ ID NO: 441751 - DNA, 33 bp, Homo sapien
gatattccaccaaaaaggttgtacatatggcca

SEQ ID NO: 441752 - DNA, 33 bp, Homo sapien
gatattccaccaaaaatgttgtacatatggcca

SEQ ID NO: 441753 - DNA, 33 bp, Homo sapien
agtcgaagagagaagtaactgcttagtgaatat

SEQ ID NO: 441754 - DNA, 33 bp, Homo sapien
agtcgaagagagaagtgactgcttagtgaatat

SEQ ID NO: 441755 - DNA, 33 bp, Homo sapien
caaattccagatcagaacatttcattgcttgtg

SEQ ID NO: 441756 - DNA, 33 bp, Homo sapien
caaattccagatcagagcatttcattgcttgtg

SEQ ID NO: 441757 - DNA, 33 bp, Homo sapien
tgagaatggaaaattagagtgaaacttctggat

SEQ ID NO: 441758 - DNA, 33 bp, Homo sapien
tgagaatggaaaattatagtgaaacttctggat

SEQ ID NO: 441759 - DNA, 33 bp, Homo sapien
taacatagtactggaaaaaaagtccaaaggtta

SEQ ID NO: 441760 - DNA, 33 bp, Homo sapien
taacatagtactggaataaaagtccaaaggtta

SEQ ID NO: 441761 - DNA, 33 bp, Homo sapien
tacatagtatgtgatgaagttttataaagcttt

SEQ ID NO: 441762 - DNA, 33 bp, Homo sapien
tacatagtatgtgatgcagttttataaagcttt

SEQ ID NO: 441763 - DNA, 33 bp, Homo sapien
acaggtgttatagctacgcatctgtgaagggcc

SEQ ID NO: 441764 - DNA, 33 bp, Homo sapien
acaggtgttatagctatgcatctgtgaagggcc

SEQ ID NO: 441765 - DNA, 33 bp, Homo sapien
ttgacttagttgagagaaatcttcatgagttat

SEQ ID NO: 441766 - DNA, 33 bp, Homo sapien
ttgacttagttgagagcaatcttcatgagttat

SEQ ID NO: 441767 - DNA, 33 bp, Homo sapien
ctccaacttggctacacgtttgaattacctggg

SEQ ID NO: 441768 - DNA, 33 bp, Homo sapien
ctccaacttggctacatgtttgaattacctggg

SEQ ID NO: 441769 - DNA, 33 bp, Homo sapien
ctagatgctaaccttccactattttatggtatc

SEQ ID NO: 441770 - DNA, 33 bp, Homo sapien
ctagatgctaaccttctactattttatggtatc

SEQ ID NO: 441771 - DNA, 33 bp, Homo sapien
ataggaatcctggtgcaagcatctccttctagt

SEQ ID NO: 441772 - DNA, 33 bp, Homo sapien
ataggaatcctggtgccagcatctccttctagt

SEQ ID NO: 441773 - DNA, 33 bp, Homo sapien
cccaatttccatctgagacttcagcctggactt

SEQ ID NO: 441774 - DNA, 33 bp, Homo sapien
cccaatttccatctgatacttcagcctggactt

SEQ ID NO: 441775 - DNA, 33 bp, Homo sapien
aggaagacaagggaaaccttagaacttcttaga

SEQ ID NO: 441776 - DNA, 33 bp, Homo sapien
aggaagacaagggaaatcttagaacttcttaga

SEQ ID NO: 441777 - DNA, 33 bp, Homo sapien
aaaagaaattgaccagcagtgcagttttcttag

SEQ ID NO: 441778 - DNA, 33 bp, Homo sapien
aaaagaaattgaccaggagtgcagttttcttag

SEQ ID NO: 441779 - DNA, 33 bp, Homo sapien
aagtgatgagtgtgcccaattaaaatcacatgc

SEQ ID NO: 441780 - DNA, 33 bp, Homo sapien
aagtgatgagtgtgccgaattaaaatcacatgc

SEQ ID NO: 441781 - DNA, 33 bp, Homo sapien
atacctctataagccactccagagaagaagctg

SEQ ID NO: 441782 - DNA, 33 bp, Homo sapien
atacctctataagccattccagagaagaagctg

SEQ ID NO: 441783 - DNA, 33 bp, Homo sapien
ttttgttcttttcttacggatcagtagtatccc

SEQ ID NO: 441784 - DNA, 33 bp, Homo sapien
ttttgttcttttcttatggatcagtagtatccc

SEQ ID NO: 441785 - DNA, 33 bp, Homo sapien
atttactagcaaagaaagtgctcattagataca

SEQ ID NO: 441786 - DNA, 33 bp, Homo sapien
atttactagcaaagaatgtgctcattagataca

SEQ ID NO: 441787 - DNA, 33 bp, Homo sapien
ttgggatcctatgaaacgtccattggatgatta

SEQ ID NO: 441788 - DNA, 33 bp, Homo sapien
ttgggatcctatgaaaggtccattggatgatta

SEQ ID NO: 441789 - DNA, 33 bp, Homo sapien
taactctttcatcaacgcatgggcaaaaaccaa

SEQ ID NO: 441790 - DNA, 33 bp, Homo sapien
taactctttcatcaactcatgggcaaaaaccaa

SEQ ID NO: 441791 - DNA, 33 bp, Homo sapien
tgaaactttgaacacaactatgattagaaaata

SEQ ID NO: 441792 - DNA, 33 bp, Homo sapien
tgaaactttgaacacagctatgattagaaaata

SEQ ID NO: 441793 - DNA, 33 bp, Homo sapien
gagtcctaaattcaaggccccttaatatgtgct

SEQ ID NO: 441794 - DNA, 33 bp, Homo sapien
gagtcctaaattcaagtccccttaatatgtgct

SEQ ID NO: 441795 - DNA, 33 bp, Homo sapien
ccccatgattcagttaccacgcactgggtgcct

SEQ ID NO: 441796 - DNA, 33 bp, Homo sapien
ccccatgattcagttatcacgcactgggtgcct

SEQ ID NO: 441797 - DNA, 33 bp, Homo sapien
gcatacaaaaatcttccagctctgttcacaact

SEQ ID NO: 441798 - DNA, 33 bp, Homo sapien
gcatacaaaaatcttctagctctgttcacaact

SEQ ID NO: 441799 - DNA, 33 bp, Homo sapien
gtaaaccaatagtttccaaatgactaatgcatg

SEQ ID NO: 441800 - DNA, 33 bp, Homo sapien
gtaaaccaatagtttctaaatgactaatgcatg

SEQ ID NO: 441801 - DNA, 33 bp, Homo sapien
aggttgggcatactgacggacccaaagaccttg

SEQ ID NO: 441802 - DNA, 33 bp, Homo sapien
aggttgggcatactgatggacccaaagaccttg

SEQ ID NO: 441803 - DNA, 33 bp, Homo sapien
accccaagatgtgagggatctgaatttctccta

SEQ ID NO: 441804 - DNA, 33 bp, Homo sapien
accccaagatgtgaggtatctgaatttctccta

SEQ ID NO: 441805 - DNA, 33 bp, Homo sapien
atcattatgtggtttcactacactgataaaacc

SEQ ID NO: 441806 - DNA, 33 bp, Homo sapien
atcattatgtggtttcgctacactgataaaacc

SEQ ID NO: 441807 - DNA, 33 bp, Homo sapien
aacttttatgcttcaaagaacaccagcaagaaa

SEQ ID NO: 441808 - DNA, 33 bp, Homo sapien
aacttttatgcttcaacgaacaccagcaagaaa

SEQ ID NO: 441809 - DNA, 33 bp, Homo sapien
taggatgactacaatgaaaagacagtaacaagt

SEQ ID NO: 441810 - DNA, 33 bp, Homo sapien
taggatgactacaatgtaaagacagtaacaagt

SEQ ID NO: 441811 - DNA, 33 bp, Homo sapien
atgagttctgcttcagcacttggagttgcagaa

SEQ ID NO: 441812 - DNA, 33 bp, Homo sapien
atgagttctgcttcagtacttggagttgcagaa

SEQ ID NO: 441813 - DNA, 33 bp, Homo sapien
tgtttgaggatttagaaaagtggagttacatga

SEQ ID NO: 441814 - DNA, 33 bp, Homo sapien
tgtttgaggatttagacaagtggagttacatga

SEQ ID NO: 441815 - DNA, 33 bp, Homo sapien
tattatttgaaattccacagtttttttctggat

SEQ ID NO: 441816 - DNA, 33 bp, Homo sapien
tattatttgaaattccgcagtttttttctggat

SEQ ID NO: 441817 - DNA, 33 bp, Homo sapien
gtactctaagcatttccagtaagagatatcttt

SEQ ID NO: 441818 - DNA, 33 bp, Homo sapien
gtactctaagcatttcgagtaagagatatcttt

SEQ ID NO: 441819 - DNA, 33 bp, Homo sapien
ttgacttgagaaggaacagagttaagaacactc

SEQ ID NO: 441820 - DNA, 33 bp, Homo sapien
ttgacttgagaaggaatagagttaagaacactc

SEQ ID NO: 441821 - DNA, 33 bp, Homo sapien
tgcggtatgtgaacaactggaggatgagcaagg

SEQ ID NO: 441822 - DNA, 33 bp, Homo sapien
tgcggtatgtgaacaagtggaggatgagcaagg

SEQ ID NO: 441823 - DNA, 33 bp, Homo sapien
agagagaatagagaaaaagaagagctgcagccc

SEQ ID NO: 441824 - DNA, 33 bp, Homo sapien
agagagaatagagaaagagaagagctgcagccc

SEQ ID NO: 441825 - DNA, 33 bp, Homo sapien
ttttaatttgaactcaccaagtttcctgccctg

SEQ ID NO: 441826 - DNA, 33 bp, Homo sapien
ttttaatttgaactcagcaagtttcctgccctg

SEQ ID NO: 441827 - DNA, 33 bp, Homo sapien
acaaaataaaactgaacgtgccctaaatccagg

SEQ ID NO: 441828 - DNA, 33 bp, Homo sapien
acaaaataaaactgaatgtgccctaaatccagg

SEQ ID NO: 441829 - DNA, 33 bp, Homo sapien
cccaaaagaatgggaacagtaattaagagaagt

SEQ ID NO: 441830 - DNA, 33 bp, Homo sapien
cccaaaagaatgggaatagtaattaagagaagt

SEQ ID NO: 441831 - DNA, 33 bp, Homo sapien
ctttgtcacttaaaaaattctccttatgatcca

SEQ ID NO: 441832 - DNA, 33 bp, Homo sapien
ctttgtcacttaaaaatttctccttatgatcca

SEQ ID NO: 441833 - DNA, 33 bp, Homo sapien
aggcttgagagaatccagacaagtcccaaatac

SEQ ID NO: 441834 - DNA, 33 bp, Homo sapien
aggcttgagagaatccggacaagtcccaaatac

SEQ ID NO: 441835 - DNA, 33 bp, Homo sapien
gattttaaaggatttcacttgaaacactactga

SEQ ID NO: 441836 - DNA, 33 bp, Homo sapien
gattttaaaggatttcgcttgaaacactactga

SEQ ID NO: 441837 - DNA, 33 bp, Homo sapien
aatgtagtagcagtccaagtttgagagttctac

SEQ ID NO: 441838 - DNA, 33 bp, Homo sapien
aatgtagtagcagtcccagtttgagagttctac

SEQ ID NO: 441839 - DNA, 33 bp, Homo sapien
attctcaggaaacgtgcagggacaaacaacctg

SEQ ID NO: 441840 - DNA, 33 bp, Homo sapien
attctcaggaaacgtgtagggacaaacaacctg

SEQ ID NO: 441841 - DNA, 33 bp, Homo sapien
aaaacattcacaataaagctagtcattgttaac

SEQ ID NO: 441842 - DNA, 33 bp, Homo sapien
aaaacattcacaataaggctagtcattgttaac

SEQ ID NO: 441843 - DNA, 33 bp, Homo sapien
acagggcaaagtgacacgaacactcagaaaagc

SEQ ID NO: 441844 - DNA, 33 bp, Homo sapien
acagggcaaagtgacaggaacactcagaaaagc

SEQ ID NO: 441845 - DNA, 33 bp, Homo sapien
gttagagcacattaaaacaactttggctactgt

SEQ ID NO: 441846 - DNA, 33 bp, Homo sapien
gttagagcacattaaagcaactttggctactgt

SEQ ID NO: 441847 - DNA, 33 bp, Homo sapien
gatttacaattaccaaccataaagtaatataaa

SEQ ID NO: 441848 - DNA, 33 bp, Homo sapien
gatttacaattaccaagcataaagtaatataaa

SEQ ID NO: 441849 - DNA, 33 bp, Homo sapien
gataagctaccagccacgtggagacaaagtaaa

SEQ ID NO: 441850 - DNA, 33 bp, Homo sapien
gataagctaccagccatgtggagacaaagtaaa

SEQ ID NO: 441851 - DNA, 33 bp, Homo sapien
catgttaaggtattaaatgtccacaatggaatt

SEQ ID NO: 441852 - DNA, 33 bp, Homo sapien
catgttaaggtattaactgtccacaatggaatt

SEQ ID NO: 441853 - DNA, 33 bp, Homo sapien
ttttggaaatcaagaaaaagtataggccatatt

SEQ ID NO: 441854 - DNA, 33 bp, Homo sapien
ttttggaaatcaagaagaagtataggccatatt

SEQ ID NO: 441855 - DNA, 33 bp, Homo sapien
aatatgaaaagaagaacgaaaatggatgtagaa

SEQ ID NO: 441856 - DNA, 33 bp, Homo sapien
aatatgaaaagaagaatgaaaatggatgtagaa

SEQ ID NO: 441857 - DNA, 33 bp, Homo sapien
gaacccctctgttttgcattggcaggtaatgtg

SEQ ID NO: 441858 - DNA, 33 bp, Homo sapien
gaacccctctgttttgtattggcaggtaatgtg

SEQ ID NO: 441859 - DNA, 33 bp, Homo sapien
atgacacaaggacacagcatgaggggttcttca

SEQ ID NO: 441860 - DNA, 33 bp, Homo sapien
atgacacaaggacacatcatgaggggttcttca

SEQ ID NO: 441861 - DNA, 33 bp, Homo sapien
ttgtttgtaaactatcagacacttttcgtcata

SEQ ID NO: 441862 - DNA, 33 bp, Homo sapien
ttgtttgtaaactatcggacacttttcgtcata

SEQ ID NO: 441863 - DNA, 33 bp, Homo sapien
agactcaatttgagtacgcctttaaagtaagtt

SEQ ID NO: 441864 - DNA, 33 bp, Homo sapien
agactcaatttgagtatgcctttaaagtaagtt

SEQ ID NO: 441865 - DNA, 33 bp, Homo sapien
ggaatttttgtagcccaaagaaacaagagccta

SEQ ID NO: 441866 - DNA, 33 bp, Homo sapien
ggaatttttgtagcccgaagaaacaagagccta

SEQ ID NO: 441867 - DNA, 33 bp, Homo sapien
agttggcttttggagacagtcatctgagctatg

SEQ ID NO: 441868 - DNA, 33 bp, Homo sapien
agttggcttttggagagagtcatctgagctatg

SEQ ID NO: 441869 - DNA, 33 bp, Homo sapien
agaacctggggaactcgcaggagtctgcacgca

SEQ ID NO: 441870 - DNA, 33 bp, Homo sapien
agaacctggggaactctcaggagtctgcacgca

SEQ ID NO: 441871 - DNA, 33 bp, Homo sapien
ccaagaggaacatataacaggtcctggtggttt

SEQ ID NO: 441872 - DNA, 33 bp, Homo sapien
ccaagaggaacatatatcaggtcctggtggttt

SEQ ID NO: 441873 - DNA, 33 bp, Homo sapien
acttagcatgatcaatgaaaactaggaaaagaa

SEQ ID NO: 441874 - DNA, 33 bp, Homo sapien
acttagcatgatcaattaaaactaggaaaagaa

SEQ ID NO: 441875 - DNA, 33 bp, Homo sapien
gaaagtgagtggtatgaaaagcactttaattct

SEQ ID NO: 441876 - DNA, 33 bp, Homo sapien
gaaagtgagtggtatgcaaagcactttaattct

SEQ ID NO: 441877 - DNA, 33 bp, Homo sapien
ctctaaggtttagtcactcttgggggcacacct

SEQ ID NO: 441878 - DNA, 33 bp, Homo sapien
ctctaaggtttagtcagtcttgggggcacacct

SEQ ID NO: 441879 - DNA, 33 bp, Homo sapien
gcaggaataccacagcaacgagaatataccttt

SEQ ID NO: 441880 - DNA, 33 bp, Homo sapien
gcaggaataccacagcgacgagaatataccttt

SEQ ID NO: 441881 - DNA, 33 bp, Homo sapien
aaccatattaaggcacaaattatattttctctt

SEQ ID NO: 441882 - DNA, 33 bp, Homo sapien
aaccatattaaggcacgaattatattttctctt

SEQ ID NO: 441883 - DNA, 33 bp, Homo sapien
ctccccacaattttcaaagaatacaatgcattg

SEQ ID NO: 441884 - DNA, 33 bp, Homo sapien
ctccccacaattttcacagaatacaatgcattg

SEQ ID NO: 441885 - DNA, 33 bp, Homo sapien
cgagttgtgtatctaactgctctctagaagggc

SEQ ID NO: 441886 - DNA, 33 bp, Homo sapien
cgagttgtgtatctaattgctctctagaagggc

SEQ ID NO: 441887 - DNA, 33 bp, Homo sapien
ttttcagtaatatttcacttgagaatggtaaaa

SEQ ID NO: 441888 - DNA, 33 bp, Homo sapien
ttttcagtaatatttcgcttgagaatggtaaaa

SEQ ID NO: 441889 - DNA, 33 bp, Homo sapien
cttacgtttatgtttcacaagacaattaattct

SEQ ID NO: 441890 - DNA, 33 bp, Homo sapien
cttacgtttatgtttcccaagacaattaattct

SEQ ID NO: 441891 - DNA, 33 bp, Homo sapien
gatttcccaagtgacaaatacccttgatatgtc

SEQ ID NO: 441892 - DNA, 33 bp, Homo sapien
gatttcccaagtgacagatacccttgatatgtc

SEQ ID NO: 441893 - DNA, 33 bp, Homo sapien
acttgggaaatccaagaaagagtaagatggatt

SEQ ID NO: 441894 - DNA, 33 bp, Homo sapien
acttgggaaatccaaggaagagtaagatggatt

SEQ ID NO: 441895 - DNA, 33 bp, Homo sapien
ttgaaagctgtactgacattaaagaatgcatta

SEQ ID NO: 441896 - DNA, 33 bp, Homo sapien
ttgaaagctgtactgatattaaagaatgcatta

SEQ ID NO: 441897 - DNA, 33 bp, Homo sapien
gtggatgagcatattcaaagtggcttgtagcca

SEQ ID NO: 441898 - DNA, 33 bp, Homo sapien
gtggatgagcatattcgaagtggcttgtagcca

SEQ ID NO: 441899 - DNA, 33 bp, Homo sapien
gatgtcactaatgaacaccagctaatataagac

SEQ ID NO: 441900 - DNA, 33 bp, Homo sapien
gatgtcactaatgaacgccagctaatataagac

SEQ ID NO: 441901 - DNA, 33 bp, Homo sapien
aatgaaaaattgcagacagtttatctagctcaa

SEQ ID NO: 441902 - DNA, 33 bp, Homo sapien
aatgaaaaattgcagagagtttatctagctcaa

SEQ ID NO: 441903 - DNA, 33 bp, Homo sapien
caaatatatagactacaaagttaagccttctct

SEQ ID NO: 441904 - DNA, 33 bp, Homo sapien
caaatatatagactacgaagttaagccttctct

SEQ ID NO: 441905 - DNA, 33 bp, Homo sapien
gagtaatacatgaatgcagcctgaaaaaagtcc

SEQ ID NO: 441906 - DNA, 33 bp, Homo sapien
gagtaatacatgaatgtagcctgaaaaaagtcc

SEQ ID NO: 441907 - DNA, 33 bp, Homo sapien
cttccagaatcaaaaccgtaaaactacaaattg

SEQ ID NO: 441908 - DNA, 33 bp, Homo sapien
cttccagaatcaaaactgtaaaactacaaattg

SEQ ID NO: 441909 - DNA, 33 bp, Homo sapien
ttaagaaagcaagttgaaatgtatgacaaaaat

SEQ ID NO: 441910 - DNA, 33 bp, Homo sapien
ttaagaaagcaagttgcaatgtatgacaaaaat

SEQ ID NO: 441911 - DNA, 33 bp, Homo sapien
ttttgttggtgtataaaagtgctatggatttga

SEQ ID NO: 441912 - DNA, 33 bp, Homo sapien
ttttgttggtgtataagagtgctatggatttga

SEQ ID NO: 441913 - DNA, 33 bp, Homo sapien
agcttctggttgccaccgcgttccctggtgccc

SEQ ID NO: 441914 - DNA, 33 bp, Homo sapien
agcttctggttgccactgcgttccctggtgccc

SEQ ID NO: 441915 - DNA, 33 bp, Homo sapien
tgtaaatagtgaaaaacggagaggagtgaccta

SEQ ID NO: 441916 - DNA, 33 bp, Homo sapien
tgtaaatagtgaaaaatggagaggagtgaccta

SEQ ID NO: 441917 - DNA, 33 bp, Homo sapien
agagacatagatatggaagcaaaaatctttatt

SEQ ID NO: 441918 - DNA, 33 bp, Homo sapien
agagacatagatatgggagcaaaaatctttatt

SEQ ID NO: 441919 - DNA, 33 bp, Homo sapien
ttcaatgatttgaacagaagttcctgccacaaa

SEQ ID NO: 441920 - DNA, 33 bp, Homo sapien
ttcaatgatttgaacataagttcctgccacaaa

SEQ ID NO: 441921 - DNA, 33 bp, Homo sapien
tggtatccgggattcaactgagctcaacagagc

SEQ ID NO: 441922 - DNA, 33 bp, Homo sapien
tggtatccgggattcagctgagctcaacagagc

SEQ ID NO: 441923 - DNA, 33 bp, Homo sapien
tgttttcacagtctgccattgagtgtctgtggc

SEQ ID NO: 441924 - DNA, 33 bp, Homo sapien
tgttttcacagtctgctattgagtgtctgtggc

SEQ ID NO: 441925 - DNA, 33 bp, Homo sapien
acaaactgaaaacactaacacattcctgtaata

SEQ ID NO: 441926 - DNA, 33 bp, Homo sapien
acaaactgaaaacactgacacattcctgtaata

SEQ ID NO: 441927 - DNA, 33 bp, Homo sapien
taccaagatactgagggaagtactagtggcata

SEQ ID NO: 441928 - DNA, 33 bp, Homo sapien
taccaagatactgaggtaagtactagtggcata

SEQ ID NO: 441929 - DNA, 33 bp, Homo sapien
atgttttacattctgcaacagtgtctgcatact

SEQ ID NO: 441930 - DNA, 33 bp, Homo sapien
atgttttacattctgccacagtgtctgcatact

SEQ ID NO: 441931 - DNA, 33 bp, Homo sapien
acctgaatgattctcaacatattatgcataaaa

SEQ ID NO: 441932 - DNA, 33 bp, Homo sapien
acctgaatgattctcaccatattatgcataaaa

SEQ ID NO: 441933 - DNA, 33 bp, Homo sapien
tgctgttattacgcaacgtgttatttcaggaca

SEQ ID NO: 441934 - DNA, 33 bp, Homo sapien
tgctgttattacgcaatgtgttatttcaggaca

SEQ ID NO: 441935 - DNA, 33 bp, Homo sapien
aatagtagcactgacccatttgtgttatgtgtc

SEQ ID NO: 441936 - DNA, 33 bp, Homo sapien
aatagtagcactgacctatttgtgttatgtgtc

SEQ ID NO: 441937 - DNA, 33 bp, Homo sapien
ttaaactaaaagcctacaaaagacacaatttgc

SEQ ID NO: 441938 - DNA, 33 bp, Homo sapien
ttaaactaaaagcctataaaagacacaatttgc

SEQ ID NO: 441939 - DNA, 33 bp, Homo sapien
ttttcttattgatttcaagcactttatttttat

SEQ ID NO: 441940 - DNA, 33 bp, Homo sapien
ttttcttattgatttccagcactttatttttat

SEQ ID NO: 441941 - DNA, 33 bp, Homo sapien
taccacctctcctccccaaagttaaatgcaatt

SEQ ID NO: 441942 - DNA, 33 bp, Homo sapien
taccacctctcctccctaaagttaaatgcaatt

SEQ ID NO: 441943 - DNA, 33 bp, Homo sapien
ggtggttgttgactgacatgaaccatgagagag

SEQ ID NO: 441944 - DNA, 33 bp, Homo sapien
ggtggttgttgactgagatgaaccatgagagag

SEQ ID NO: 441945 - DNA, 33 bp, Homo sapien
ccatagtataagaaaccgcattgcgaagttaaa

SEQ ID NO: 441946 - DNA, 33 bp, Homo sapien
ccatagtataagaaactgcattgcgaagttaaa

SEQ ID NO: 441947 - DNA, 33 bp, Homo sapien
tgttttatgtaacaccgcaggaaagggtctttt

SEQ ID NO: 441948 - DNA, 33 bp, Homo sapien
tgttttatgtaacacctcaggaaagggtctttt

SEQ ID NO: 441949 - DNA, 33 bp, Homo sapien
attattctcagaattaaatgagttaacctgcaa

SEQ ID NO: 441950 - DNA, 33 bp, Homo sapien
attattctcagaattacatgagttaacctgcaa

SEQ ID NO: 441951 - DNA, 33 bp, Homo sapien
taatgtatcaaatatgaaatggattaaggaata

SEQ ID NO: 441952 - DNA, 33 bp, Homo sapien
taatgtatcaaatatgtaatggattaaggaata

SEQ ID NO: 441953 - DNA, 33 bp, Homo sapien
ttcttattaatttgccaaagtttcttatgtatg

SEQ ID NO: 441954 - DNA, 33 bp, Homo sapien
ttcttattaatttgccgaagtttcttatgtatg

SEQ ID NO: 441955 - DNA, 33 bp, Homo sapien
aaaataaattttaaaaaacttgctgtgaaagaa

SEQ ID NO: 441956 - DNA, 33 bp, Homo sapien
aaaataaattttaaaacacttgctgtgaaagaa

SEQ ID NO: 441957 - DNA, 33 bp, Homo sapien
tctgagagctgcctaaactaaatggagcttttt

SEQ ID NO: 441958 - DNA, 33 bp, Homo sapien
tctgagagctgcctaagctaaatggagcttttt

SEQ ID NO: 441959 - DNA, 33 bp, Homo sapien
agcttgaacaagaaaaacttattaacaaatctc

SEQ ID NO: 441960 - DNA, 33 bp, Homo sapien
agcttgaacaagaaaagcttattaacaaatctc

SEQ ID NO: 441961 - DNA, 33 bp, Homo sapien
atgaaagcctagttaaacaaatgaaacctacac

SEQ ID NO: 441962 - DNA, 33 bp, Homo sapien
atgaaagcctagttaagcaaatgaaacctacac

SEQ ID NO: 441963 - DNA, 33 bp, Homo sapien
tacatacagaaaagcaagtatatctttagtgtg

SEQ ID NO: 441964 - DNA, 33 bp, Homo sapien
tacatacagaaaagcacgtatatctttagtgtg

SEQ ID NO: 441965 - DNA, 33 bp, Homo sapien
gagacagaatcaactcgactggtatgcttgtct

SEQ ID NO: 441966 - DNA, 33 bp, Homo sapien
gagacagaatcaactctactggtatgcttgtct

SEQ ID NO: 441967 - DNA, 33 bp, Homo sapien
tatattattgtatgtaacatttcagtctgtcag

SEQ ID NO: 441968 - DNA, 33 bp, Homo sapien
tatattattgtatgtaccatttcagtctgtcag

SEQ ID NO: 441969 - DNA, 33 bp, Homo sapien
aacttagattatcagaagtagggtattaacatt

SEQ ID NO: 441970 - DNA, 33 bp, Homo sapien
aacttagattatcagaggtagggtattaacatt

SEQ ID NO: 441971 - DNA, 33 bp, Homo sapien
tattattaaacttacaacattttctgaaactgc

SEQ ID NO: 441972 - DNA, 33 bp, Homo sapien
tattattaaacttacagcattttctgaaactgc

SEQ ID NO: 441973 - DNA, 33 bp, Homo sapien
cttgtcttgctacaccaagtgcacagattcctg

SEQ ID NO: 441974 - DNA, 33 bp, Homo sapien
cttgtcttgctacaccgagtgcacagattcctg

SEQ ID NO: 441975 - DNA, 33 bp, Homo sapien
cagatttaatggactaacaggatgtaggaagga

SEQ ID NO: 441976 - DNA, 33 bp, Homo sapien
cagatttaatggactatcaggatgtaggaagga

SEQ ID NO: 441977 - DNA, 33 bp, Homo sapien
ggcatggattgtgaaacggctttggacatttaa

SEQ ID NO: 441978 - DNA, 33 bp, Homo sapien
ggcatggattgtgaaatggctttggacatttaa

SEQ ID NO: 441979 - DNA, 33 bp, Homo sapien
taaaccatatattcaaactctctcatttgtctc

SEQ ID NO: 441980 - DNA, 33 bp, Homo sapien
taaaccatatattcaacctctctcatttgtctc

SEQ ID NO: 441981 - DNA, 33 bp, Homo sapien
atttggctcttctataaaaactaaatctgacct

SEQ ID NO: 441982 - DNA, 33 bp, Homo sapien
atttggctcttctatacaaactaaatctgacct

SEQ ID NO: 441983 - DNA, 33 bp, Homo sapien
accaaggaatccacacactaattgagtcaacat

SEQ ID NO: 441984 - DNA, 33 bp, Homo sapien
accaaggaatccacacgctaattgagtcaacat

SEQ ID NO: 441985 - DNA, 33 bp, Homo sapien
gaccacctttatccaacgtgatgttgactcaat

SEQ ID NO: 441986 - DNA, 33 bp, Homo sapien
gaccacctttatccaatgtgatgttgactcaat

SEQ ID NO: 441987 - DNA, 33 bp, Homo sapien
acttttggaattcatacagttagacagttagga

SEQ ID NO: 441988 - DNA, 33 bp, Homo sapien
acttttggaattcatatagttagacagttagga

SEQ ID NO: 441989 - DNA, 33 bp, Homo sapien
gttcaataagtcacagcacattgtgatattaga

SEQ ID NO: 441990 - DNA, 33 bp, Homo sapien
gttcaataagtcacagtacattgtgatattaga

SEQ ID NO: 441991 - DNA, 33 bp, Homo sapien
gtctctaacttctctaaccaaatggtatttggg

SEQ ID NO: 441992 - DNA, 33 bp, Homo sapien
gtctctaacttctctacccaaatggtatttggg

SEQ ID NO: 441993 - DNA, 33 bp, Homo sapien
gttcttctaatggagcagcaagtctggcacccg

SEQ ID NO: 441994 - DNA, 33 bp, Homo sapien
gttcttctaatggagcggcaagtctggcacccg

SEQ ID NO: 441995 - DNA, 33 bp, Homo sapien
cttttgctgttgaaagcatagttgattgatggc

SEQ ID NO: 441996 - DNA, 33 bp, Homo sapien
cttttgctgttgaaagtatagttgattgatggc

SEQ ID NO: 441997 - DNA, 33 bp, Homo sapien
tgttgttggattgcaaaaataatttatatagct

SEQ ID NO: 441998 - DNA, 33 bp, Homo sapien
tgttgttggattgcaagaataatttatatagct

SEQ ID NO: 441999 - DNA, 33 bp, Homo sapien
gctggaattcttgtaaccttccacagagcatag

SEQ ID NO: 442000 - DNA, 33 bp, Homo sapien
gctggaattcttgtaatcttccacagagcatag

SEQ ID NO: 442001 - DNA, 33 bp, Homo sapien
tcctgaacagatatgacgattgttctgccttaa

SEQ ID NO: 442002 - DNA, 33 bp, Homo sapien
tcctgaacagatatgatgattgttctgccttaa

SEQ ID NO: 442003 - DNA, 33 bp, Homo sapien
ttattgtattggtcaaattagtcaagcttaagg

SEQ ID NO: 442004 - DNA, 33 bp, Homo sapien
ttattgtattggtcaagttagtcaagcttaagg

SEQ ID NO: 442005 - DNA, 33 bp, Homo sapien
caacaactgtatgaacacaattttagacacaat

SEQ ID NO: 442006 - DNA, 33 bp, Homo sapien
caacaactgtatgaacgcaattttagacacaat

SEQ ID NO: 442007 - DNA, 33 bp, Homo sapien
tcttctttccacttcaatctccaaactctcctc

SEQ ID NO: 442008 - DNA, 33 bp, Homo sapien
tcttctttccacttcagtctccaaactctcctc

SEQ ID NO: 442009 - DNA, 33 bp, Homo sapien
agatctcttattttcaagatgaatcaagttctc

SEQ ID NO: 442010 - DNA, 33 bp, Homo sapien
agatctcttattttcatgatgaatcaagttctc

SEQ ID NO: 442011 - DNA, 33 bp, Homo sapien
atctccctgtacaaaaaagccatcctctatatt

SEQ ID NO: 442012 - DNA, 33 bp, Homo sapien
atctccctgtacaaaacagccatcctctatatt

SEQ ID NO: 442013 - DNA, 33 bp, Homo sapien
taattttattcatgtacgtaatcaacttgaatc

SEQ ID NO: 442014 - DNA, 33 bp, Homo sapien
taattttattcatgtatgtaatcaacttgaatc

SEQ ID NO: 442015 - DNA, 33 bp, Homo sapien
gcctccagaaattggaaaggcaagaaataattc

SEQ ID NO: 442016 - DNA, 33 bp, Homo sapien
gcctccagaaattggagaggcaagaaataattc

SEQ ID NO: 442017 - DNA, 33 bp, Homo sapien
atttaggttggatcatcaaattctttctgtgaa

SEQ ID NO: 442018 - DNA, 33 bp, Homo sapien
atttaggttggatcatgaaattctttctgtgaa

SEQ ID NO: 442019 - DNA, 33 bp, Homo sapien
ttctccattgtcggaccctcccatagttgagat

SEQ ID NO: 442020 - DNA, 33 bp, Homo sapien
ttctccattgtcggactctcccatagttgagat

SEQ ID NO: 442021 - DNA, 33 bp, Homo sapien
gtggacattggacagaatagcttcttatactct

SEQ ID NO: 442022 - DNA, 33 bp, Homo sapien
gtggacattggacagagtagcttcttatactct

SEQ ID NO: 442023 - DNA, 33 bp, Homo sapien
tttccaaactcttaaccgatccctgatctacaa

SEQ ID NO: 442024 - DNA, 33 bp, Homo sapien
tttccaaactcttaactgatccctgatctacaa

SEQ ID NO: 442025 - DNA, 33 bp, Homo sapien
tgacatagctaatgcaacgtttttcaggcagcc

SEQ ID NO: 442026 - DNA, 33 bp, Homo sapien
tgacatagctaatgcagcgtttttcaggcagcc

SEQ ID NO: 442027 - DNA, 33 bp, Homo sapien
cagtagtctctgaacccgcaatgttcctatgca

SEQ ID NO: 442028 - DNA, 33 bp, Homo sapien
cagtagtctctgaacctgcaatgttcctatgca

SEQ ID NO: 442029 - DNA, 33 bp, Homo sapien
catttttcataagccacgttaagtgtttctctt

SEQ ID NO: 442030 - DNA, 33 bp, Homo sapien
catttttcataagccatgttaagtgtttctctt

SEQ ID NO: 442031 - DNA, 33 bp, Homo sapien
tcctgatgacgccccccagaactctgaagtctg

SEQ ID NO: 442032 - DNA, 33 bp, Homo sapien
tcctgatgacgccccctagaactctgaagtctg

SEQ ID NO: 442033 - DNA, 33 bp, Homo sapien
caaagggaatgactgccctgagcttacaaattc

SEQ ID NO: 442034 - DNA, 33 bp, Homo sapien
caaagggaatgactgctctgagcttacaaattc

SEQ ID NO: 442035 - DNA, 33 bp, Homo sapien
gtaaatgttctctttcacaaaattttccacgca

SEQ ID NO: 442036 - DNA, 33 bp, Homo sapien
gtaaatgttctctttcgcaaaattttccacgca

SEQ ID NO: 442037 - DNA, 33 bp, Homo sapien
tacctgaactaatcataatcagtgttatcccat

SEQ ID NO: 442038 - DNA, 33 bp, Homo sapien
tacctgaactaatcatgatcagtgttatcccat

SEQ ID NO: 442039 - DNA, 33 bp, Homo sapien
aacacactaataatccaccctttcaaaatgcaa

SEQ ID NO: 442040 - DNA, 33 bp, Homo sapien
aacacactaataatccgccctttcaaaatgcaa

SEQ ID NO: 442041 - DNA, 33 bp, Homo sapien
tagagaagctctttaaggctgactgaagcaact

SEQ ID NO: 442042 - DNA, 33 bp, Homo sapien
tagagaagctctttaatgctgactgaagcaact

SEQ ID NO: 442043 - DNA, 33 bp, Homo sapien
gtgaagtatccttaaccgcagagtaggttctca

SEQ ID NO: 442044 - DNA, 33 bp, Homo sapien
gtgaagtatccttaactgcagagtaggttctca

SEQ ID NO: 442045 - DNA, 33 bp, Homo sapien
cttggtacaacaaggacacgtgctgtaaggccc

SEQ ID NO: 442046 - DNA, 33 bp, Homo sapien
cttggtacaacaaggatacgtgctgtaaggccc

SEQ ID NO: 442047 - DNA, 33 bp, Homo sapien
ggacttcctaatactcaaaattacacataatat

SEQ ID NO: 442048 - DNA, 33 bp, Homo sapien
ggacttcctaatactcgaaattacacataatat

SEQ ID NO: 442049 - DNA, 33 bp, Homo sapien
attgccatgtgacatcacagctatcacagggca

SEQ ID NO: 442050 - DNA, 33 bp, Homo sapien
attgccatgtgacatcgcagctatcacagggca

SEQ ID NO: 442051 - DNA, 33 bp, Homo sapien
tgttctgaatactgtacgcaattgaaacacaac

SEQ ID NO: 442052 - DNA, 33 bp, Homo sapien
tgttctgaatactgtatgcaattgaaacacaac

SEQ ID NO: 442053 - DNA, 33 bp, Homo sapien
agtctcaagtttgaaggccataaaatcaggcag

SEQ ID NO: 442054 - DNA, 33 bp, Homo sapien
agtctcaagtttgaagtccataaaatcaggcag

SEQ ID NO: 442055 - DNA, 33 bp, Homo sapien
tatatcatggcctaaaaattttaagaactgttc

SEQ ID NO: 442056 - DNA, 33 bp, Homo sapien
tatatcatggcctaaacattttaagaactgttc

SEQ ID NO: 442057 - DNA, 33 bp, Homo sapien
tacttcttggcaaatacgttaaacattagtttc

SEQ ID NO: 442058 - DNA, 33 bp, Homo sapien
tacttcttggcaaatatgttaaacattagtttc

SEQ ID NO: 442059 - DNA, 33 bp, Homo sapien
tttccactaagctgccgcaaataccaattacat

SEQ ID NO: 442060 - DNA, 33 bp, Homo sapien
tttccactaagctgcctcaaataccaattacat

SEQ ID NO: 442061 - DNA, 33 bp, Homo sapien
gatgaggaatgtattgaaacaaaggtgactctt

SEQ ID NO: 442062 - DNA, 33 bp, Homo sapien
gatgaggaatgtattggaacaaaggtgactctt

SEQ ID NO: 442063 - DNA, 33 bp, Homo sapien
taatgactacatatcaaacttggactcactttt

SEQ ID NO: 442064 - DNA, 33 bp, Homo sapien
taatgactacatatcagacttggactcactttt

SEQ ID NO: 442065 - DNA, 33 bp, Homo sapien
acttcaaccctctcccactagatctcgtgggcg

SEQ ID NO: 442066 - DNA, 33 bp, Homo sapien
acttcaaccctctccccctagatctcgtgggcg

SEQ ID NO: 442067 - DNA, 33 bp, Homo sapien
gatctagagtaaaataactaccaacatcttcaa

SEQ ID NO: 442068 - DNA, 33 bp, Homo sapien
gatctagagtaaaatagctaccaacatcttcaa

SEQ ID NO: 442069 - DNA, 33 bp, Homo sapien
taaagcacaccttatcaattactttattactaa

SEQ ID NO: 442070 - DNA, 33 bp, Homo sapien
taaagcacaccttatcgattactttattactaa

SEQ ID NO: 442071 - DNA, 33 bp, Homo sapien
cacaatgttttctaaaattctggcaggaaaaag

SEQ ID NO: 442072 - DNA, 33 bp, Homo sapien
cacaatgttttctaaagttctggcaggaaaaag

SEQ ID NO: 442073 - DNA, 33 bp, Homo sapien
tctccagtattgggacacttttcattaatctta

SEQ ID NO: 442074 - DNA, 33 bp, Homo sapien
tctccagtattgggacccttttcattaatctta

SEQ ID NO: 442075 - DNA, 33 bp, Homo sapien
cagttgacttttcatacggaactctggaagtta

SEQ ID NO: 442076 - DNA, 33 bp, Homo sapien
cagttgacttttcatatggaactctggaagtta

SEQ ID NO: 442077 - DNA, 33 bp, Homo sapien
aaatatttggatgtcacgtgttacccttataca

SEQ ID NO: 442078 - DNA, 33 bp, Homo sapien
aaatatttggatgtcatgtgttacccttataca

SEQ ID NO: 442079 - DNA, 33 bp, Homo sapien
gaatcagaaatccacaaacatttaaactgaaac

SEQ ID NO: 442080 - DNA, 33 bp, Homo sapien
gaatcagaaatccacagacatttaaactgaaac

SEQ ID NO: 442081 - DNA, 33 bp, Homo sapien
gcatttatcacttttacattacgctatcgtaac

SEQ ID NO: 442082 - DNA, 33 bp, Homo sapien
gcatttatcacttttatattacgctatcgtaac

SEQ ID NO: 442083 - DNA, 33 bp, Homo sapien
agcatccttggtaaaacatagcatctcctactt

SEQ ID NO: 442084 - DNA, 33 bp, Homo sapien
agcatccttggtaaaatatagcatctcctactt

SEQ ID NO: 442085 - DNA, 33 bp, Homo sapien
agcagcagcactcactataatttctgatattgc

SEQ ID NO: 442086 - DNA, 33 bp, Homo sapien
agcagcagcactcactgtaatttctgatattgc

SEQ ID NO: 442087 - DNA, 33 bp, Homo sapien
tttagacttggtagtacggaaaagaagcagcag

SEQ ID NO: 442088 - DNA, 33 bp, Homo sapien
tttagacttggtagtatggaaaagaagcagcag

SEQ ID NO: 442089 - DNA, 33 bp, Homo sapien
cacctggattcaaaggccatcatcataatacag

SEQ ID NO: 442090 - DNA, 33 bp, Homo sapien
cacctggattcaaaggtcatcatcataatacag

SEQ ID NO: 442091 - DNA, 33 bp, Homo sapien
cagttcccagcttacaatggttcaactcacaat

SEQ ID NO: 442092 - DNA, 33 bp, Homo sapien
cagttcccagcttacagtggttcaactcacaat

SEQ ID NO: 442093 - DNA, 33 bp, Homo sapien
agatattgaagacattcaagtaaaacctaactg

SEQ ID NO: 442094 - DNA, 33 bp, Homo sapien
agatattgaagacatttaagtaaaacctaactg

SEQ ID NO: 442095 - DNA, 33 bp, Homo sapien
tcctgagtcccttctacatacaagcactattct

SEQ ID NO: 442096 - DNA, 33 bp, Homo sapien
tcctgagtcccttctatatacaagcactattct

SEQ ID NO: 442097 - DNA, 33 bp, Homo sapien
tctgggaggagagcaaacttcatgaagccttag

SEQ ID NO: 442098 - DNA, 33 bp, Homo sapien
tctgggaggagagcaaccttcatgaagccttag

SEQ ID NO: 442099 - DNA, 33 bp, Homo sapien
ctatggaatattaaccagcaagagagatccagt

SEQ ID NO: 442100 - DNA, 33 bp, Homo sapien
ctatggaatattaacctgcaagagagatccagt

SEQ ID NO: 442101 - DNA, 33 bp, Homo sapien
gtgggaagaatttaaacgtggccaaactaaaga

SEQ ID NO: 442102 - DNA, 33 bp, Homo sapien
gtgggaagaatttaaatgtggccaaactaaaga

SEQ ID NO: 442103 - DNA, 33 bp, Homo sapien
actccttcaagctaaacggatggtgatcaggag

SEQ ID NO: 442104 - DNA, 33 bp, Homo sapien
actccttcaagctaaatggatggtgatcaggag

SEQ ID NO: 442105 - DNA, 33 bp, Homo sapien
cagaaaaggggctcataagtctctatgttcata

SEQ ID NO: 442106 - DNA, 33 bp, Homo sapien
cagaaaaggggctcatgagtctctatgttcata

SEQ ID NO: 442107 - DNA, 33 bp, Homo sapien
caaaagttgtttaatccaccacgtattagtaca

SEQ ID NO: 442108 - DNA, 33 bp, Homo sapien
caaaagttgtttaatctaccacgtattagtaca

SEQ ID NO: 442109 - DNA, 33 bp, Homo sapien
taaacaacttttggcccacaaaacagaaagcgt

SEQ ID NO: 442110 - DNA, 33 bp, Homo sapien
taaacaacttttggcctacaaaacagaaagcgt

SEQ ID NO: 442111 - DNA, 33 bp, Homo sapien
tgtatcattttagtaacaaagctaggcaaggaa

SEQ ID NO: 442112 - DNA, 33 bp, Homo sapien
tgtatcattttagtaagaaagctaggcaaggaa

SEQ ID NO: 442113 - DNA, 33 bp, Homo sapien
acatcaagttcagattaaaacagaagacaatga

SEQ ID NO: 442114 - DNA, 33 bp, Homo sapien
acatcaagttcagattgaaacagaagacaatga

SEQ ID NO: 442115 - DNA, 33 bp, Homo sapien
gaagaaagcagccatacgaggatacgagaaaga

SEQ ID NO: 442116 - DNA, 33 bp, Homo sapien
gaagaaagcagccatatgaggatacgagaaaga

SEQ ID NO: 442117 - DNA, 33 bp, Homo sapien
acaaaatttgtcacaaccagaggccgaaaacac

SEQ ID NO: 442118 - DNA, 33 bp, Homo sapien
acaaaatttgtcacaatcagaggccgaaaacac

SEQ ID NO: 442119 - DNA, 33 bp, Homo sapien
tctagtgccaacaaaacgcctggcactgcactt

SEQ ID NO: 442120 - DNA, 33 bp, Homo sapien
tctagtgccaacaaaatgcctggcactgcactt

SEQ ID NO: 442121 - DNA, 33 bp, Homo sapien
aattcatagggttgtcagaaggatggaatgaga

SEQ ID NO: 442122 - DNA, 33 bp, Homo sapien
aattcatagggttgtcggaaggatggaatgaga

SEQ ID NO: 442123 - DNA, 33 bp, Homo sapien
caatctctcctctcaaccctcagcacttactac

SEQ ID NO: 442124 - DNA, 33 bp, Homo sapien
caatctctcctctcaatcctcagcacttactac

SEQ ID NO: 442125 - DNA, 33 bp, Homo sapien
aagagaagactactgcactatgactgacaggaa

SEQ ID NO: 442126 - DNA, 33 bp, Homo sapien
aagagaagactactgcgctatgactgacaggaa

SEQ ID NO: 442127 - DNA, 33 bp, Homo sapien
tccacaccagaatatcaccaataattattacta

SEQ ID NO: 442128 - DNA, 33 bp, Homo sapien
tccacaccagaatatcgccaataattattacta

SEQ ID NO: 442129 - DNA, 33 bp, Homo sapien
gacacaaacactcacacgtcattgcatctcatc

SEQ ID NO: 442130 - DNA, 33 bp, Homo sapien
gacacaaacactcacaggtcattgcatctcatc

SEQ ID NO: 442131 - DNA, 33 bp, Homo sapien
gttaatgaagatgtaccctggttgccagctatt

SEQ ID NO: 442132 - DNA, 33 bp, Homo sapien
gttaatgaagatgtactctggttgccagctatt

SEQ ID NO: 442133 - DNA, 33 bp, Homo sapien
aagcataaaggtagacacaactataacacttca

SEQ ID NO: 442134 - DNA, 33 bp, Homo sapien
aagcataaaggtagacgcaactataacacttca

SEQ ID NO: 442135 - DNA, 33 bp, Homo sapien
tggtgaacatttcataaaaccaaactgactttg

SEQ ID NO: 442136 - DNA, 33 bp, Homo sapien
tggtgaacatttcatataaccaaactgactttg

SEQ ID NO: 442137 - DNA, 33 bp, Homo sapien
gtcatctgctgttaatcaaacagttttagactg

SEQ ID NO: 442138 - DNA, 33 bp, Homo sapien
gtcatctgctgttaatgaaacagttttagactg

SEQ ID NO: 442139 - DNA, 33 bp, Homo sapien
gaagttaaatgtcctgaaaaaaggaagagaatg

SEQ ID NO: 442140 - DNA, 33 bp, Homo sapien
gaagttaaatgtcctgcaaaaaggaagagaatg

SEQ ID NO: 442141 - DNA, 33 bp, Homo sapien
attgatgtcatgaatacctgtgtcataagaaaa

SEQ ID NO: 442142 - DNA, 33 bp, Homo sapien
attgatgtcatgaatatctgtgtcataagaaaa

SEQ ID NO: 442143 - DNA, 33 bp, Homo sapien
gagaaactaatgccacactaaaaactctgagct

SEQ ID NO: 442144 - DNA, 33 bp, Homo sapien
gagaaactaatgccacgctaaaaactctgagct

SEQ ID NO: 442145 - DNA, 33 bp, Homo sapien
tctgttaatatgttgacgaaagtttaccttatt

SEQ ID NO: 442146 - DNA, 33 bp, Homo sapien
tctgttaatatgttgatgaaagtttaccttatt

SEQ ID NO: 442147 - DNA, 33 bp, Homo sapien
cagagggtttggtctcaagaaaggctaataaat

SEQ ID NO: 442148 - DNA, 33 bp, Homo sapien
cagagggtttggtctcgagaaaggctaataaat

SEQ ID NO: 442149 - DNA, 33 bp, Homo sapien
agtaaaattgtggggaaaagaaatcctgaaaaa

SEQ ID NO: 442150 - DNA, 33 bp, Homo sapien
agtaaaattgtggggagaagaaatcctgaaaaa

SEQ ID NO: 442151 - DNA, 33 bp, Homo sapien
tttaaatggttgggaaaaaaatcaaaagaagag

SEQ ID NO: 442152 - DNA, 33 bp, Homo sapien
tttaaatggttgggaacaaaatcaaaagaagag

SEQ ID NO: 442153 - DNA, 33 bp, Homo sapien
taccctgggcacaaccgcttattttatcatttg

SEQ ID NO: 442154 - DNA, 33 bp, Homo sapien
taccctgggcacaacctcttattttatcatttg

SEQ ID NO: 442155 - DNA, 33 bp, Homo sapien
ttagttgaaagttactaaactcatagtgcaggg

SEQ ID NO: 442156 - DNA, 33 bp, Homo sapien
ttagttgaaagttactgaactcatagtgcaggg

SEQ ID NO: 442157 - DNA, 33 bp, Homo sapien
acagtcgcagcaactccaaatcgacagtcttgt

SEQ ID NO: 442158 - DNA, 33 bp, Homo sapien
acagtcgcagcaactctaaatcgacagtcttgt

SEQ ID NO: 442159 - DNA, 33 bp, Homo sapien
attattgttcatctaacgacataaatctgccag

SEQ ID NO: 442160 - DNA, 33 bp, Homo sapien
attattgttcatctaaggacataaatctgccag

SEQ ID NO: 442161 - DNA, 33 bp, Homo sapien
gagggtacagtgtgaaacttaaagaagtgggag

SEQ ID NO: 442162 - DNA, 33 bp, Homo sapien
gagggtacagtgtgaaccttaaagaagtgggag

SEQ ID NO: 442163 - DNA, 33 bp, Homo sapien
taacctctttcctacccgacccagagagatcca

SEQ ID NO: 442164 - DNA, 33 bp, Homo sapien
taacctctttcctacctgacccagagagatcca

SEQ ID NO: 442165 - DNA, 33 bp, Homo sapien
aattgttctattcaacaggcaagattacttcta

SEQ ID NO: 442166 - DNA, 33 bp, Homo sapien
aattgttctattcaacgggcaagattacttcta

SEQ ID NO: 442167 - DNA, 33 bp, Homo sapien
tttcatctaaatagtcacaaattccattttcaa

SEQ ID NO: 442168 - DNA, 33 bp, Homo sapien
tttcatctaaatagtcccaaattccattttcaa

SEQ ID NO: 442169 - DNA, 33 bp, Homo sapien
gtgtgctctgtcaggaaatcaagtatccctggt

SEQ ID NO: 442170 - DNA, 33 bp, Homo sapien
gtgtgctctgtcaggacatcaagtatccctggt

SEQ ID NO: 442171 - DNA, 33 bp, Homo sapien
gaaaaacagacttaggaaagtgaacggaaatct

SEQ ID NO: 442172 - DNA, 33 bp, Homo sapien
gaaaaacagacttagggaagtgaacggaaatct

SEQ ID NO: 442173 - DNA, 33 bp, Homo sapien
ccatgacttcagctccaaagagaaatcgtgttt

SEQ ID NO: 442174 - DNA, 33 bp, Homo sapien
ccatgacttcagctccgaagagaaatcgtgttt

SEQ ID NO: 442175 - DNA, 33 bp, Homo sapien
aagattttgtgggtcccgaactgagagagacag

SEQ ID NO: 442176 - DNA, 33 bp, Homo sapien
aagattttgtgggtcctgaactgagagagacag

SEQ ID NO: 442177 - DNA, 33 bp, Homo sapien
actgagcagcttccacacgataagttgtaagta

SEQ ID NO: 442178 - DNA, 33 bp, Homo sapien
actgagcagcttccacgcgataagttgtaagta

SEQ ID NO: 442179 - DNA, 33 bp, Homo sapien
tgctttgattcactgcactggtcaacttagagt

SEQ ID NO: 442180 - DNA, 33 bp, Homo sapien
tgctttgattcactgcgctggtcaacttagagt

SEQ ID NO: 442181 - DNA, 33 bp, Homo sapien
tgaagttgtttgatatcacaaggcttattttga

SEQ ID NO: 442182 - DNA, 33 bp, Homo sapien
tgaagttgtttgatattacaaggcttattttga

SEQ ID NO: 442183 - DNA, 33 bp, Homo sapien
taaagtcgtaacaagacggcccttgaagaaatg

SEQ ID NO: 442184 - DNA, 33 bp, Homo sapien
taaagtcgtaacaagatggcccttgaagaaatg

SEQ ID NO: 442185 - DNA, 33 bp, Homo sapien
acctgctgattgatcccaggtagcacttggagc

SEQ ID NO: 442186 - DNA, 33 bp, Homo sapien
acctgctgattgatccgaggtagcacttggagc

SEQ ID NO: 442187 - DNA, 33 bp, Homo sapien
aaatcagcattttaaaacaccattgatttctag

SEQ ID NO: 442188 - DNA, 33 bp, Homo sapien
aaatcagcattttaaaccaccattgatttctag

SEQ ID NO: 442189 - DNA, 33 bp, Homo sapien
ttaactattcagtgcaggaggagtaaacagtgg

SEQ ID NO: 442190 - DNA, 33 bp, Homo sapien
ttaactattcagtgcatgaggagtaaacagtgg

SEQ ID NO: 442191 - DNA, 33 bp, Homo sapien
agcagcattcatttacaaaatttacagctaata

SEQ ID NO: 442192 - DNA, 33 bp, Homo sapien
agcagcattcatttacgaaatttacagctaata

SEQ ID NO: 442193 - DNA, 33 bp, Homo sapien
gccaggttttcagaaaatgaaggagaatgataa

SEQ ID NO: 442194 - DNA, 33 bp, Homo sapien
gccaggttttcagaaagtgaaggagaatgataa

SEQ ID NO: 442195 - DNA, 33 bp, Homo sapien
ctttttcccattcataacagagacatggacaag

SEQ ID NO: 442196 - DNA, 33 bp, Homo sapien
ctttttcccattcataccagagacatggacaag

SEQ ID NO: 442197 - DNA, 33 bp, Homo sapien
taggtttactcataaccgtcagaaattggaaaa

SEQ ID NO: 442198 - DNA, 33 bp, Homo sapien
taggtttactcataactgtcagaaattggaaaa

SEQ ID NO: 442199 - DNA, 33 bp, Homo sapien
taaaataaaaaaacaccgattggctcatgacag

SEQ ID NO: 442200 - DNA, 33 bp, Homo sapien
taaaataaaaaaacactgattggctcatgacag

SEQ ID NO: 442201 - DNA, 33 bp, Homo sapien
aaaataaggatcataactgtgcctacctcatgg

SEQ ID NO: 442202 - DNA, 33 bp, Homo sapien
aaaataaggatcataattgtgcctacctcatgg

SEQ ID NO: 442203 - DNA, 33 bp, Homo sapien
attttgactccagaaacgaacagttcacaaaac

SEQ ID NO: 442204 - DNA, 33 bp, Homo sapien
attttgactccagaaatgaacagttcacaaaac

SEQ ID NO: 442205 - DNA, 33 bp, Homo sapien
aaaataaagacccaaaactcctcacttaaactc

SEQ ID NO: 442206 - DNA, 33 bp, Homo sapien
aaaataaagacccaaacctcctcacttaaactc

SEQ ID NO: 442207 - DNA, 33 bp, Homo sapien
ttagcacagaagtggacgacctgtaagaggcct

SEQ ID NO: 442208 - DNA, 33 bp, Homo sapien
ttagcacagaagtggatgacctgtaagaggcct

SEQ ID NO: 442209 - DNA, 33 bp, Homo sapien
ttgaaaacctctgatacgtagttactcactctc

SEQ ID NO: 442210 - DNA, 33 bp, Homo sapien
ttgaaaacctctgatatgtagttactcactctc

SEQ ID NO: 442211 - DNA, 33 bp, Homo sapien
ttggggttcattctaaaatctccagaatagctc

SEQ ID NO: 442212 - DNA, 33 bp, Homo sapien
ttggggttcattctaacatctccagaatagctc

SEQ ID NO: 442213 - DNA, 33 bp, Homo sapien
gctctaggcttgggaaaacacagaaataggacc

SEQ ID NO: 442214 - DNA, 33 bp, Homo sapien
gctctaggcttgggaatacacagaaataggacc

SEQ ID NO: 442215 - DNA, 33 bp, Homo sapien
atcccccaaatatcacaaagtaggaagattgat

SEQ ID NO: 442216 - DNA, 33 bp, Homo sapien
atcccccaaatatcacgaagtaggaagattgat

SEQ ID NO: 442217 - DNA, 33 bp, Homo sapien
ttctttctgactccacagtgcgtacctaacagg

SEQ ID NO: 442218 - DNA, 33 bp, Homo sapien
ttctttctgactccacggtgcgtacctaacagg

SEQ ID NO: 442219 - DNA, 33 bp, Homo sapien
agtgaagctgaaactgaacacagctcctaaaca

SEQ ID NO: 442220 - DNA, 33 bp, Homo sapien
agtgaagctgaaactggacacagctcctaaaca

SEQ ID NO: 442221 - DNA, 33 bp, Homo sapien
ccaaacaatgggtccaagctcaatcactaaagg

SEQ ID NO: 442222 - DNA, 33 bp, Homo sapien
ccaaacaatgggtccaggctcaatcactaaagg

SEQ ID NO: 442223 - DNA, 33 bp, Homo sapien
gcagcttcttgctgtgaactcacgtggtggaag

SEQ ID NO: 442224 - DNA, 33 bp, Homo sapien
gcagcttcttgctgtgtactcacgtggtggaag

SEQ ID NO: 442225 - DNA, 33 bp, Homo sapien
ataaaggaggaataaactcagcagacagcaaat

SEQ ID NO: 442226 - DNA, 33 bp, Homo sapien
ataaaggaggaataaattcagcagacagcaaat

SEQ ID NO: 442227 - DNA, 33 bp, Homo sapien
atcagctttggtataaaccattaacccagtaag

SEQ ID NO: 442228 - DNA, 33 bp, Homo sapien
atcagctttggtataagccattaacccagtaag

SEQ ID NO: 442229 - DNA, 33 bp, Homo sapien
tttggggccagtgtaacagaaaagcaatgctgg

SEQ ID NO: 442230 - DNA, 33 bp, Homo sapien
tttggggccagtgtaatagaaaagcaatgctgg

SEQ ID NO: 442231 - DNA, 33 bp, Homo sapien
aacctggaacaccatcaattctcctctttacct

SEQ ID NO: 442232 - DNA, 33 bp, Homo sapien
aacctggaacaccatcgattctcctctttacct

SEQ ID NO: 442233 - DNA, 33 bp, Homo sapien
gaaaaatcagaatacacaagcctcgctaagttc

SEQ ID NO: 442234 - DNA, 33 bp, Homo sapien
gaaaaatcagaatacagaagcctcgctaagttc

SEQ ID NO: 442235 - DNA, 33 bp, Homo sapien
agcataaaaatacacacgtttaactatttcttc

SEQ ID NO: 442236 - DNA, 33 bp, Homo sapien
agcataaaaatacacaggtttaactatttcttc

SEQ ID NO: 442237 - DNA, 33 bp, Homo sapien
atgcctctttggcataagaattatttagagctg

SEQ ID NO: 442238 - DNA, 33 bp, Homo sapien
atgcctctttggcataggaattatttagagctg

SEQ ID NO: 442239 - DNA, 33 bp, Homo sapien
tgtaccagtctaaatcactagagatgtaacagc

SEQ ID NO: 442240 - DNA, 33 bp, Homo sapien
tgtaccagtctaaatcgctagagatgtaacagc

SEQ ID NO: 442241 - DNA, 33 bp, Homo sapien
atatatacatgagagtcacccagggaaaaatga

SEQ ID NO: 442242 - DNA, 33 bp, Homo sapien
atatatacatgagagttacccagggaaaaatga

SEQ ID NO: 442243 - DNA, 33 bp, Homo sapien
ggatacagtttctggccaagcaccctaaaactc

SEQ ID NO: 442244 - DNA, 33 bp, Homo sapien
ggatacagtttctggctaagcaccctaaaactc

SEQ ID NO: 442245 - DNA, 33 bp, Homo sapien
ttgccttctgtgttcagagtttctagcgattta

SEQ ID NO: 442246 - DNA, 33 bp, Homo sapien
ttgccttctgtgttcatagtttctagcgattta

SEQ ID NO: 442247 - DNA, 33 bp, Homo sapien
gtgaaatgcttccttcacctttgcctcaaccgt

SEQ ID NO: 442248 - DNA, 33 bp, Homo sapien
gtgaaatgcttccttcgcctttgcctcaaccgt

SEQ ID NO: 442249 - DNA, 33 bp, Homo sapien
tcctgggtatctccaaggtacacatgaggcaga

SEQ ID NO: 442250 - DNA, 33 bp, Homo sapien
tcctgggtatctccaatgtacacatgaggcaga

SEQ ID NO: 442251 - DNA, 33 bp, Homo sapien
ataaaaagagtgacagacatcttccttcttctc

SEQ ID NO: 442252 - DNA, 33 bp, Homo sapien
ataaaaagagtgacaggcatcttccttcttctc

SEQ ID NO: 442253 - DNA, 33 bp, Homo sapien
tgcccaggtatcacaagactagtagcaactaag

SEQ ID NO: 442254 - DNA, 33 bp, Homo sapien
tgcccaggtatcacaatactagtagcaactaag

SEQ ID NO: 442255 - DNA, 33 bp, Homo sapien
ccaattatgtctaaggaccgtccccttgctcct

SEQ ID NO: 442256 - DNA, 33 bp, Homo sapien
ccaattatgtctaagggccgtccccttgctcct

SEQ ID NO: 442257 - DNA, 33 bp, Homo sapien
gttcattttgacagcactcagaacactaatctg

SEQ ID NO: 442258 - DNA, 33 bp, Homo sapien
gttcattttgacagcattcagaacactaatctg

SEQ ID NO: 442259 - DNA, 33 bp, Homo sapien
ttgtctgtgaaaagccagagtcctgagactgaa

SEQ ID NO: 442260 - DNA, 33 bp, Homo sapien
ttgtctgtgaaaagccggagtcctgagactgaa

SEQ ID NO: 442261 - DNA, 33 bp, Homo sapien
atggaagttcttgagactatcttgcacaacttt

SEQ ID NO: 442262 - DNA, 33 bp, Homo sapien
atggaagttcttgagattatcttgcacaacttt

SEQ ID NO: 442263 - DNA, 33 bp, Homo sapien
aaatagatacttgtacaccaatgttcatatcag

SEQ ID NO: 442264 - DNA, 33 bp, Homo sapien
aaatagatacttgtacgccaatgttcatatcag

SEQ ID NO: 442265 - DNA, 33 bp, Homo sapien
tctgaagtacctagaagagtcaaggtcacagag

SEQ ID NO: 442266 - DNA, 33 bp, Homo sapien
tctgaagtacctagaatagtcaaggtcacagag

SEQ ID NO: 442267 - DNA, 33 bp, Homo sapien
tctttgcacaccaagagattaagataaattttc

SEQ ID NO: 442268 - DNA, 33 bp, Homo sapien
tctttgcacaccaagatattaagataaattttc

SEQ ID NO: 442269 - DNA, 33 bp, Homo sapien
ataacctcacagataacggcacaaactcttaaa

SEQ ID NO: 442270 - DNA, 33 bp, Homo sapien
ataacctcacagataatggcacaaactcttaaa

SEQ ID NO: 442271 - DNA, 33 bp, Homo sapien
cagacatacacatcagaatttcctgacaggaac

SEQ ID NO: 442272 - DNA, 33 bp, Homo sapien
cagacatacacatcaggatttcctgacaggaac

SEQ ID NO: 442273 - DNA, 33 bp, Homo sapien
tctgacgagttgcccaggtctgttggtagataa

SEQ ID NO: 442274 - DNA, 33 bp, Homo sapien
tctgacgagttgcccatgtctgttggtagataa

SEQ ID NO: 442275 - DNA, 33 bp, Homo sapien
taaagtaaaggtaaaacatgaaactgaattatc

SEQ ID NO: 442276 - DNA, 33 bp, Homo sapien
taaagtaaaggtaaaatatgaaactgaattatc

SEQ ID NO: 442277 - DNA, 33 bp, Homo sapien
ctctttccttctacccagcaaagttcaaggttg

SEQ ID NO: 442278 - DNA, 33 bp, Homo sapien
ctctttccttctacccggcaaagttcaaggttg

SEQ ID NO: 442279 - DNA, 33 bp, Homo sapien
tgaccccaaacttctacgcttcagaacacggat

SEQ ID NO: 442280 - DNA, 33 bp, Homo sapien
tgaccccaaacttctatgcttcagaacacggat

SEQ ID NO: 442281 - DNA, 33 bp, Homo sapien
taaaatatattttccagtaaagagaccttattt

SEQ ID NO: 442282 - DNA, 33 bp, Homo sapien
taaaatatattttccattaaagagaccttattt

SEQ ID NO: 442283 - DNA, 33 bp, Homo sapien
cattgactggcttttgcactcagcttaactgag

SEQ ID NO: 442284 - DNA, 33 bp, Homo sapien
cattgactggcttttgtactcagcttaactgag

SEQ ID NO: 442285 - DNA, 33 bp, Homo sapien
acatggcagttctcgaccaatacctcattcagc

SEQ ID NO: 442286 - DNA, 33 bp, Homo sapien
acatggcagttctcgatcaatacctcattcagc

SEQ ID NO: 442287 - DNA, 33 bp, Homo sapien
ttattattttagaaaaaccagcagctgccagct

SEQ ID NO: 442288 - DNA, 33 bp, Homo sapien
ttattattttagaaaacccagcagctgccagct

SEQ ID NO: 442289 - DNA, 33 bp, Homo sapien
ggaggttatctcaggtcaagttcccacaggcta

SEQ ID NO: 442290 - DNA, 33 bp, Homo sapien
ggaggttatctcaggttaagttcccacaggcta

SEQ ID NO: 442291 - DNA, 33 bp, Homo sapien
ggtcaagaagacatggccaaggtcacattgtaa

SEQ ID NO: 442292 - DNA, 33 bp, Homo sapien
ggtcaagaagacatggtcaaggtcacattgtaa

SEQ ID NO: 442293 - DNA, 33 bp, Homo sapien
aggtccttaaacgacacgaatgaaaagcaagaa

SEQ ID NO: 442294 - DNA, 33 bp, Homo sapien
aggtccttaaacgacatgaatgaaaagcaagaa

SEQ ID NO: 442295 - DNA, 33 bp, Homo sapien
tggcaccttcaccaccaaaccaatgccagcaac

SEQ ID NO: 442296 - DNA, 33 bp, Homo sapien
tggcaccttcaccaccgaaccaatgccagcaac

SEQ ID NO: 442297 - DNA, 33 bp, Homo sapien
accctgctgtcactaaaccccagtctgggtggc

SEQ ID NO: 442298 - DNA, 33 bp, Homo sapien
accctgctgtcactaagccccagtctgggtggc

SEQ ID NO: 442299 - DNA, 33 bp, Homo sapien
ggctgggtgactgggaaaaatagagaggctgag

SEQ ID NO: 442300 - DNA, 33 bp, Homo sapien
ggctgggtgactgggagaaatagagaggctgag

SEQ ID NO: 442301 - DNA, 33 bp, Homo sapien
gagaggtaagtcagccagaacatgggttttggt

SEQ ID NO: 442302 - DNA, 33 bp, Homo sapien
gagaggtaagtcagccggaacatgggttttggt

SEQ ID NO: 442303 - DNA, 33 bp, Homo sapien
cttcacacagttggaacaggaacaaaagagtgt

SEQ ID NO: 442304 - DNA, 33 bp, Homo sapien
cttcacacagttggaataggaacaaaagagtgt

SEQ ID NO: 442305 - DNA, 33 bp, Homo sapien
gtcaaagtaatagggcagatagagccttgacat

SEQ ID NO: 442306 - DNA, 33 bp, Homo sapien
gtcaaagtaatagggcggatagagccttgacat

SEQ ID NO: 442307 - DNA, 33 bp, Homo sapien
ccttcttctctgaagcagaccttaaaacctagg

SEQ ID NO: 442308 - DNA, 33 bp, Homo sapien
ccttcttctctgaagcggaccttaaaacctagg

SEQ ID NO: 442309 - DNA, 33 bp, Homo sapien
ctgggttgagggacaacgcaactattaagtaga

SEQ ID NO: 442310 - DNA, 33 bp, Homo sapien
ctgggttgagggacaatgcaactattaagtaga

SEQ ID NO: 442311 - DNA, 33 bp, Homo sapien
tttttgtgtctaattccataatccagatttttc

SEQ ID NO: 442312 - DNA, 33 bp, Homo sapien
tttttgtgtctaattcgataatccagatttttc

SEQ ID NO: 442313 - DNA, 33 bp, Homo sapien
tcaaggaatgagcaaggctatgttctgtgggga

SEQ ID NO: 442314 - DNA, 33 bp, Homo sapien
tcaaggaatgagcaagtctatgttctgtgggga

SEQ ID NO: 442315 - DNA, 33 bp, Homo sapien
ggattacaggctttgaaagacaggatatttaca

SEQ ID NO: 442316 - DNA, 33 bp, Homo sapien
ggattacaggctttgacagacaggatatttaca

SEQ ID NO: 442317 - DNA, 33 bp, Homo sapien
gcagccattgacaatacgtaacaaatggacatg

SEQ ID NO: 442318 - DNA, 33 bp, Homo sapien
gcagccattgacaatatgtaacaaatggacatg

SEQ ID NO: 442319 - DNA, 33 bp, Homo sapien
tgctgccggttgcataagagtctagcacacaca

SEQ ID NO: 442320 - DNA, 33 bp, Homo sapien
tgctgccggttgcataggagtctagcacacaca

SEQ ID NO: 442321 - DNA, 33 bp, Homo sapien
cccagcagggcctacgcatcctttggtgacttg

SEQ ID NO: 442322 - DNA, 33 bp, Homo sapien
cccagcagggcctacgtatcctttggtgacttg

SEQ ID NO: 442323 - DNA, 33 bp, Homo sapien
tggaatctttggaaagaaaacactgggtgctga

SEQ ID NO: 442324 - DNA, 33 bp, Homo sapien
tggaatctttggaaagtaaacactgggtgctga

SEQ ID NO: 442325 - DNA, 33 bp, Homo sapien
cccctcacaactccacaaagaacgtagtccagg

SEQ ID NO: 442326 - DNA, 33 bp, Homo sapien
cccctcacaactccacgaagaacgtagtccagg

SEQ ID NO: 442327 - DNA, 33 bp, Homo sapien
gggaatgttcaggttaagatcaagattatggag

SEQ ID NO: 442328 - DNA, 33 bp, Homo sapien
gggaatgttcaggttaggatcaagattatggag

SEQ ID NO: 442329 - DNA, 33 bp, Homo sapien
acgtttctccagaaaagatatgaatggccagta

SEQ ID NO: 442330 - DNA, 33 bp, Homo sapien
acgtttctccagaaaatatatgaatggccagta

SEQ ID NO: 442331 - DNA, 33 bp, Homo sapien
acgtgtggtttaatgcactgctgttatcatctt

SEQ ID NO: 442332 - DNA, 33 bp, Homo sapien
acgtgtggtttaatgctctgctgttatcatctt

SEQ ID NO: 442333 - DNA, 33 bp, Homo sapien
tcctaaatatggctcacgtatgtccaaccgtca

SEQ ID NO: 442334 - DNA, 33 bp, Homo sapien
tcctaaatatggctcatgtatgtccaaccgtca

SEQ ID NO: 442335 - DNA, 33 bp, Homo sapien
acctgggaaatcattcacactttccgagaatca

SEQ ID NO: 442336 - DNA, 33 bp, Homo sapien
acctgggaaatcattcgcactttccgagaatca

SEQ ID NO: 442337 - DNA, 33 bp, Homo sapien
gattatatatagcagaatagtgcagtggcttaa

SEQ ID NO: 442338 - DNA, 33 bp, Homo sapien
gattatatatagcagagtagtgcagtggcttaa

SEQ ID NO: 442339 - DNA, 33 bp, Homo sapien
ccctttcctctcgccaatcttaacctctctggc

SEQ ID NO: 442340 - DNA, 33 bp, Homo sapien
ccctttcctctcgccagtcttaacctctctggc

SEQ ID NO: 442341 - DNA, 33 bp, Homo sapien
atttttatagtagcacagtaggatgtatattaa

SEQ ID NO: 442342 - DNA, 33 bp, Homo sapien
atttttatagtagcacggtaggatgtatattaa

SEQ ID NO: 442343 - DNA, 33 bp, Homo sapien
ccaggaagaagtctgccatcaccattggcacac

SEQ ID NO: 442344 - DNA, 33 bp, Homo sapien
ccaggaagaagtctgctatcaccattggcacac

SEQ ID NO: 442345 - DNA, 33 bp, Homo sapien
cctttcacaaaagaaacgatgcagttttgctga

SEQ ID NO: 442346 - DNA, 33 bp, Homo sapien
cctttcacaaaagaaaggatgcagttttgctga

SEQ ID NO: 442347 - DNA, 33 bp, Homo sapien
gggactgaatccttaaacctgcggagtctgatg

SEQ ID NO: 442348 - DNA, 33 bp, Homo sapien
gggactgaatccttaagcctgcggagtctgatg

SEQ ID NO: 442349 - DNA, 33 bp, Homo sapien
tttcaggttcacatgagatatgaatctctgagt

SEQ ID NO: 442350 - DNA, 33 bp, Homo sapien
tttcaggttcacatgatatatgaatctctgagt

SEQ ID NO: 442351 - DNA, 33 bp, Homo sapien
acaaatgcttaacaaacctgcttttcgtggcat

SEQ ID NO: 442352 - DNA, 33 bp, Homo sapien
acaaatgcttaacaaatctgcttttcgtggcat

SEQ ID NO: 442353 - DNA, 33 bp, Homo sapien
gtattcctcagctttcaaacatttataatctgt

SEQ ID NO: 442354 - DNA, 33 bp, Homo sapien
gtattcctcagctttcgaacatttataatctgt

SEQ ID NO: 442355 - DNA, 33 bp, Homo sapien
tgtgttatcaagttacacttagtgcatgagttt

SEQ ID NO: 442356 - DNA, 33 bp, Homo sapien
tgtgttatcaagttactcttagtgcatgagttt

SEQ ID NO: 442357 - DNA, 33 bp, Homo sapien
aatttatgaagaccacagtctgtttctacttca

SEQ ID NO: 442358 - DNA, 33 bp, Homo sapien
aatttatgaagaccactgtctgtttctacttca

SEQ ID NO: 442359 - DNA, 33 bp, Homo sapien
gagaggatgatgtgtcccattgacagggccatt

SEQ ID NO: 442360 - DNA, 33 bp, Homo sapien
gagaggatgatgtgtctcattgacagggccatt

SEQ ID NO: 442361 - DNA, 33 bp, Homo sapien
aaatctagattgaccacgacttgaacaagaaag

SEQ ID NO: 442362 - DNA, 33 bp, Homo sapien
aaatctagattgaccatgacttgaacaagaaag

SEQ ID NO: 442363 - DNA, 33 bp, Homo sapien
caccttccatcaataacagcatggatcattggt

SEQ ID NO: 442364 - DNA, 33 bp, Homo sapien
caccttccatcaataagagcatggatcattggt

SEQ ID NO: 442365 - DNA, 33 bp, Homo sapien
tgctaacaccaacacaatagttttgaaaacagg

SEQ ID NO: 442366 - DNA, 33 bp, Homo sapien
tgctaacaccaacacattagttttgaaaacagg

SEQ ID NO: 442367 - DNA, 33 bp, Homo sapien
gagataccaaatagtacatgaggagacatttct

SEQ ID NO: 442368 - DNA, 33 bp, Homo sapien
gagataccaaatagtagatgaggagacatttct

SEQ ID NO: 442369 - DNA, 33 bp, Homo sapien
tgactagttaactcaccgcaattaattattgtg

SEQ ID NO: 442370 - DNA, 33 bp, Homo sapien
tgactagttaactcacggcaattaattattgtg

SEQ ID NO: 442371 - DNA, 33 bp, Homo sapien
acttcttccaggcaacacttatgaattttgcat

SEQ ID NO: 442372 - DNA, 33 bp, Homo sapien
acttcttccaggcaacccttatgaattttgcat

SEQ ID NO: 442373 - DNA, 33 bp, Homo sapien
gtaaaaatgattattaagaatggtagcatttca

SEQ ID NO: 442374 - DNA, 33 bp, Homo sapien
gtaaaaatgattattaggaatggtagcatttca

SEQ ID NO: 442375 - DNA, 33 bp, Homo sapien
acagatatcttgatagcattggtattcaacttt

SEQ ID NO: 442376 - DNA, 33 bp, Homo sapien
acagatatcttgataggattggtattcaacttt

SEQ ID NO: 442377 - DNA, 33 bp, Homo sapien
aaaaatagaagctaaacgtctctgtattaatta

SEQ ID NO: 442378 - DNA, 33 bp, Homo sapien
aaaaatagaagctaaatgtctctgtattaatta

SEQ ID NO: 442379 - DNA, 33 bp, Homo sapien
agaagcctgtacctataagtctattccctgtag

SEQ ID NO: 442380 - DNA, 33 bp, Homo sapien
agaagcctgtacctatgagtctattccctgtag

SEQ ID NO: 442381 - DNA, 33 bp, Homo sapien
aaaatagaatcctgaccgcaattaaatcactgc

SEQ ID NO: 442382 - DNA, 33 bp, Homo sapien
aaaatagaatcctgactgcaattaaatcactgc

SEQ ID NO: 442383 - DNA, 33 bp, Homo sapien
agttaatttacaaagaagtgaagggagtcagat

SEQ ID NO: 442384 - DNA, 33 bp, Homo sapien
agttaatttacaaagacgtgaagggagtcagat

SEQ ID NO: 442385 - DNA, 33 bp, Homo sapien
gcttatggaaatggaacgagaccaaggatgtac

SEQ ID NO: 442386 - DNA, 33 bp, Homo sapien
gcttatggaaatggaatgagaccaaggatgtac

SEQ ID NO: 442387 - DNA, 33 bp, Homo sapien
gcttcctgaatataaccgggacatgagcttatg

SEQ ID NO: 442388 - DNA, 33 bp, Homo sapien
gcttcctgaatataactgggacatgagcttatg

SEQ ID NO: 442389 - DNA, 33 bp, Homo sapien
aaataaaatagtattaccagattgatgttctct

SEQ ID NO: 442390 - DNA, 33 bp, Homo sapien
aaataaaatagtattatcagattgatgttctct

SEQ ID NO: 442391 - DNA, 33 bp, Homo sapien
cactaatcatacagtcacagacatcaacacaaa

SEQ ID NO: 442392 - DNA, 33 bp, Homo sapien
cactaatcatacagtcgcagacatcaacacaaa

SEQ ID NO: 442393 - DNA, 33 bp, Homo sapien
ttaataacaatacttcagaagactggatttaac

SEQ ID NO: 442394 - DNA, 33 bp, Homo sapien
ttaataacaatacttcggaagactggatttaac

SEQ ID NO: 442395 - DNA, 33 bp, Homo sapien
gggtggtggagaaccacatgaggaataaccaag

SEQ ID NO: 442396 - DNA, 33 bp, Homo sapien
gggtggtggagaaccatatgaggaataaccaag

SEQ ID NO: 442397 - DNA, 33 bp, Homo sapien
aggagtataagggtaactcttcaactctcaacc

SEQ ID NO: 442398 - DNA, 33 bp, Homo sapien
aggagtataagggtaattcttcaactctcaacc

SEQ ID NO: 442399 - DNA, 33 bp, Homo sapien
tgcctggcctgtggaaaacccacttctaagaaa

SEQ ID NO: 442400 - DNA, 33 bp, Homo sapien
tgcctggcctgtggaagacccacttctaagaaa

SEQ ID NO: 442401 - DNA, 33 bp, Homo sapien
gattacaggcgctggccacaatgcctagctaat

SEQ ID NO: 442402 - DNA, 33 bp, Homo sapien
gattacaggcgctggctacaatgcctagctaat

SEQ ID NO: 442403 - DNA, 33 bp, Homo sapien
tttacgacatgataaacattacaacgaagtata

SEQ ID NO: 442404 - DNA, 33 bp, Homo sapien
tttacgacatgataaagattacaacgaagtata

SEQ ID NO: 442405 - DNA, 33 bp, Homo sapien
tttatcatgtcgtaaacattcaatgatgatggg

SEQ ID NO: 442406 - DNA, 33 bp, Homo sapien
tttatcatgtcgtaaatattcaatgatgatggg

SEQ ID NO: 442407 - DNA, 33 bp, Homo sapien
tgtatttatcctagaacactgtctccttgaatt

SEQ ID NO: 442408 - DNA, 33 bp, Homo sapien
tgtatttatcctagaagactgtctccttgaatt

SEQ ID NO: 442409 - DNA, 33 bp, Homo sapien
gaacaagtccaaagtaagggaagatagttataa

SEQ ID NO: 442410 - DNA, 33 bp, Homo sapien
gaacaagtccaaagtaggggaagatagttataa

SEQ ID NO: 442411 - DNA, 33 bp, Homo sapien
ctacaaattagcttcaaagatgcaaaataaaac

SEQ ID NO: 442412 - DNA, 33 bp, Homo sapien
ctacaaattagcttcagagatgcaaaataaaac

SEQ ID NO: 442413 - DNA, 33 bp, Homo sapien
gatttggaaactgaaaacttgctgagttgtact

SEQ ID NO: 442414 - DNA, 33 bp, Homo sapien
gatttggaaactgaaatcttgctgagttgtact

SEQ ID NO: 442415 - DNA, 33 bp, Homo sapien
tttattttcttctgtaagtaggccctgatgctg

SEQ ID NO: 442416 - DNA, 33 bp, Homo sapien
tttattttcttctgtaggtaggccctgatgctg

SEQ ID NO: 442417 - DNA, 33 bp, Homo sapien
gttggaaaaaattgtacgtttagaatattgtta

SEQ ID NO: 442418 - DNA, 33 bp, Homo sapien
gttggaaaaaattgtatgtttagaatattgtta

SEQ ID NO: 442419 - DNA, 33 bp, Homo sapien
agtggccagaattctacggtgagagttagcaaa

SEQ ID NO: 442420 - DNA, 33 bp, Homo sapien
agtggccagaattctatggtgagagttagcaaa

SEQ ID NO: 442421 - DNA, 33 bp, Homo sapien
atctgcagtaatgtaaccctgacacctatacct

SEQ ID NO: 442422 - DNA, 33 bp, Homo sapien
atctgcagtaatgtaatcctgacacctatacct

SEQ ID NO: 442423 - DNA, 33 bp, Homo sapien
gaaccagggaaagaaaatgttgtttgttgtgaa

SEQ ID NO: 442424 - DNA, 33 bp, Homo sapien
gaaccagggaaagaaagtgttgtttgttgtgaa

SEQ ID NO: 442425 - DNA, 33 bp, Homo sapien
ccttaacaggatactaagctctagtacttctga

SEQ ID NO: 442426 - DNA, 33 bp, Homo sapien
ccttaacaggatactatgctctagtacttctga

SEQ ID NO: 442427 - DNA, 33 bp, Homo sapien
taaatcctgctaactacgtacaagacaacttcc

SEQ ID NO: 442428 - DNA, 33 bp, Homo sapien
taaatcctgctaactatgtacaagacaacttcc

SEQ ID NO: 442429 - DNA, 33 bp, Homo sapien
tagagaacttaagaaacttgtccaagatataca

SEQ ID NO: 442430 - DNA, 33 bp, Homo sapien
tagagaacttaagaaatttgtccaagatataca

SEQ ID NO: 442431 - DNA, 33 bp, Homo sapien
actattaagtggacacaatggaattaaaatcca

SEQ ID NO: 442432 - DNA, 33 bp, Homo sapien
actattaagtggacacgatggaattaaaatcca

SEQ ID NO: 442433 - DNA, 33 bp, Homo sapien
tgtcctctccctttagaatataagctctgtgag

SEQ ID NO: 442434 - DNA, 33 bp, Homo sapien
tgtcctctccctttagcatataagctctgtgag

SEQ ID NO: 442435 - DNA, 33 bp, Homo sapien
attttcgaaagcaactcaaaacatcaatgtcta

SEQ ID NO: 442436 - DNA, 33 bp, Homo sapien
attttcgaaagcaacttaaaacatcaatgtcta

SEQ ID NO: 442437 - DNA, 33 bp, Homo sapien
tgtatccttctaccaacttcccagtctcctctc

SEQ ID NO: 442438 - DNA, 33 bp, Homo sapien
tgtatccttctaccaatttcccagtctcctctc

SEQ ID NO: 442439 - DNA, 33 bp, Homo sapien
ctcacttcctcatctaaagaagaaaacacacgc

SEQ ID NO: 442440 - DNA, 33 bp, Homo sapien
ctcacttcctcatctacagaagaaaacacacgc

SEQ ID NO: 442441 - DNA, 33 bp, Homo sapien
ctggctctactgaaaactaaaaaacttagccag

SEQ ID NO: 442442 - DNA, 33 bp, Homo sapien
ctggctctactgaaaattaaaaaacttagccag

SEQ ID NO: 442443 - DNA, 33 bp, Homo sapien
acgaactgccgggcagaacaaaatccaacactc

SEQ ID NO: 442444 - DNA, 33 bp, Homo sapien
acgaactgccgggcagcacaaaatccaacactc

SEQ ID NO: 442445 - DNA, 33 bp, Homo sapien
gattcaaccaatagcgcatcaaaaatattcaga

SEQ ID NO: 442446 - DNA, 33 bp, Homo sapien
gattcaaccaatagcggatcaaaaatattcaga

SEQ ID NO: 442447 - DNA, 33 bp, Homo sapien
gaaggtgttatttaacaaaagcatagcggctga

SEQ ID NO: 442448 - DNA, 33 bp, Homo sapien
gaaggtgttatttaactaaagcatagcggctga

SEQ ID NO: 442449 - DNA, 33 bp, Homo sapien
cagagggcagctaaaaataggttttgtctaaga

SEQ ID NO: 442450 - DNA, 33 bp, Homo sapien
cagagggcagctaaaagtaggttttgtctaaga

SEQ ID NO: 442451 - DNA, 33 bp, Homo sapien
gaaaagcattgtgctgcaaaaaattaacagttc

SEQ ID NO: 442452 - DNA, 33 bp, Homo sapien
gaaaagcattgtgctgtaaaaaattaacagttc

SEQ ID NO: 442453 - DNA, 33 bp, Homo sapien
cttatgtaatgctaaccgacattctggcttata

SEQ ID NO: 442454 - DNA, 33 bp, Homo sapien
cttatgtaatgctaactgacattctggcttata

SEQ ID NO: 442455 - DNA, 33 bp, Homo sapien
gatcaggtcatggatgccacagaattactgaga

SEQ ID NO: 442456 - DNA, 33 bp, Homo sapien
gatcaggtcatggatgtcacagaattactgaga

SEQ ID NO: 442457 - DNA, 33 bp, Homo sapien
catgcaggcacagcccagattttgcctcaaaaa

SEQ ID NO: 442458 - DNA, 33 bp, Homo sapien
catgcaggcacagcccggattttgcctcaaaaa

SEQ ID NO: 442459 - DNA, 33 bp, Homo sapien
acgaaaaggtgagaaacgatcaagttatctctg

SEQ ID NO: 442460 - DNA, 33 bp, Homo sapien
acgaaaaggtgagaaatgatcaagttatctctg

SEQ ID NO: 442461 - DNA, 33 bp, Homo sapien
acactatcaaacaacaagatttaattcacaatg

SEQ ID NO: 442462 - DNA, 33 bp, Homo sapien
acactatcaaacaacaggatttaattcacaatg

SEQ ID NO: 442463 - DNA, 33 bp, Homo sapien
aaactttattaaaaccaatgattctcagacttt

SEQ ID NO: 442464 - DNA, 33 bp, Homo sapien
aaactttattaaaaccgatgattctcagacttt

SEQ ID NO: 442465 - DNA, 33 bp, Homo sapien
tgagaaaggtattaaactgatgataatgatatt

SEQ ID NO: 442466 - DNA, 33 bp, Homo sapien
tgagaaaggtattaaattgatgataatgatatt

SEQ ID NO: 442467 - DNA, 33 bp, Homo sapien
caaacacgggacttccagaatagaccaaaggct

SEQ ID NO: 442468 - DNA, 33 bp, Homo sapien
caaacacgggacttccggaatagaccaaaggct

SEQ ID NO: 442469 - DNA, 33 bp, Homo sapien
gtgttacgaggaaaatcacatgaaataatgtag

SEQ ID NO: 442470 - DNA, 33 bp, Homo sapien
gtgttacgaggaaaatgacatgaaataatgtag

SEQ ID NO: 442471 - DNA, 33 bp, Homo sapien
tgccagccccaaacaaccagtggtcaactttct

SEQ ID NO: 442472 - DNA, 33 bp, Homo sapien
tgccagccccaaacaatcagtggtcaactttct

SEQ ID NO: 442473 - DNA, 33 bp, Homo sapien
ggagagcctgttgataccatcatttggtaggca

SEQ ID NO: 442474 - DNA, 33 bp, Homo sapien
ggagagcctgttgatatcatcatttggtaggca

SEQ ID NO: 442475 - DNA, 33 bp, Homo sapien
cactcttttcattttgctaagtttgtttatttt

SEQ ID NO: 442476 - DNA, 33 bp, Homo sapien
cactcttttcattttggtaagtttgtttatttt

SEQ ID NO: 442477 - DNA, 33 bp, Homo sapien
agtgtggaaacaaggccgaaagaagtggccaga

SEQ ID NO: 442478 - DNA, 33 bp, Homo sapien
agtgtggaaacaaggctgaaagaagtggccaga

SEQ ID NO: 442479 - DNA, 33 bp, Homo sapien
aagattcaggtttcagaaagcatacacaaatca

SEQ ID NO: 442480 - DNA, 33 bp, Homo sapien
aagattcaggtttcaggaagcatacacaaatca

SEQ ID NO: 442481 - DNA, 33 bp, Homo sapien
accaccgtatgtccaacagattaactgactttt

SEQ ID NO: 442482 - DNA, 33 bp, Homo sapien
accaccgtatgtccaatagattaactgactttt

SEQ ID NO: 442483 - DNA, 33 bp, Homo sapien
tgaaagcccgaaagcacctactaggaggtttaa

SEQ ID NO: 442484 - DNA, 33 bp, Homo sapien
tgaaagcccgaaagcatctactaggaggtttaa

SEQ ID NO: 442485 - DNA, 33 bp, Homo sapien
cctttgctcgagtccacagccgagtgagaaatg

SEQ ID NO: 442486 - DNA, 33 bp, Homo sapien
cctttgctcgagtccatagccgagtgagaaatg

SEQ ID NO: 442487 - DNA, 33 bp, Homo sapien
ttggaatctgagatgacgacacaagttcaaaat

SEQ ID NO: 442488 - DNA, 33 bp, Homo sapien
ttggaatctgagatgatgacacaagttcaaaat

SEQ ID NO: 442489 - DNA, 33 bp, Homo sapien
ctaggtttttcctctcaaatatgctcctcaaat

SEQ ID NO: 442490 - DNA, 33 bp, Homo sapien
ctaggtttttcctctctaatatgctcctcaaat

SEQ ID NO: 442491 - DNA, 33 bp, Homo sapien
tgttccaaatgataatcaagtcccataccttat

SEQ ID NO: 442492 - DNA, 33 bp, Homo sapien
tgttccaaatgataattaagtcccataccttat

SEQ ID NO: 442493 - DNA, 33 bp, Homo sapien
aaaaaatagctttgataacgtagacaagaattg

SEQ ID NO: 442494 - DNA, 33 bp, Homo sapien
aaaaaatagctttgatgacgtagacaagaattg

SEQ ID NO: 442495 - DNA, 33 bp, Homo sapien
gaatggcaaaaaaagacaccagattaggagaga

SEQ ID NO: 442496 - DNA, 33 bp, Homo sapien
gaatggcaaaaaaagataccagattaggagaga

SEQ ID NO: 442497 - DNA, 33 bp, Homo sapien
agaaggaatgaatagaaaaagagattctcattt

SEQ ID NO: 442498 - DNA, 33 bp, Homo sapien
agaaggaatgaatagacaaagagattctcattt

SEQ ID NO: 442499 - DNA, 33 bp, Homo sapien
aagaagctggaaaatacggaaaactgaggaaat

SEQ ID NO: 442500 - DNA, 33 bp, Homo sapien
aagaagctggaaaatatggaaaactgaggaaat

SEQ ID NO: 442501 - DNA, 33 bp, Homo sapien
ataatcacagtcataacgaacaaacccatcaac

SEQ ID NO: 442502 - DNA, 33 bp, Homo sapien
ataatcacagtcataatgaacaaacccatcaac

SEQ ID NO: 442503 - DNA, 33 bp, Homo sapien
tgacaccatacgaacacaaaatattagcaatac

SEQ ID NO: 442504 - DNA, 33 bp, Homo sapien
tgacaccatacgaacataaaatattagcaatac

SEQ ID NO: 442505 - DNA, 33 bp, Homo sapien
ttattgagcctgggtaaattgaaattaaagcct

SEQ ID NO: 442506 - DNA, 33 bp, Homo sapien
ttattgagcctgggtatattgaaattaaagcct

SEQ ID NO: 442507 - DNA, 33 bp, Homo sapien
tcctacatacagtacactacatctttgacagta

SEQ ID NO: 442508 - DNA, 33 bp, Homo sapien
tcctacatacagtacagtacatctttgacagta

SEQ ID NO: 442509 - DNA, 33 bp, Homo sapien
ttgcttcctcctgtccaaagcaactttttcaaa

SEQ ID NO: 442510 - DNA, 33 bp, Homo sapien
ttgcttcctcctgtccgaagcaactttttcaaa

SEQ ID NO: 442511 - DNA, 33 bp, Homo sapien
tttggagaggaattgaagatcaggaaaatataa

SEQ ID NO: 442512 - DNA, 33 bp, Homo sapien
tttggagaggaattgaggatcaggaaaatataa

SEQ ID NO: 442513 - DNA, 33 bp, Homo sapien
cagaagcaaatcatcacggccttgggttaggca

SEQ ID NO: 442514 - DNA, 33 bp, Homo sapien
cagaagcaaatcatcatggccttgggttaggca

SEQ ID NO: 442515 - DNA, 33 bp, Homo sapien
ctgccattgaattacacgtaaacctcattaact

SEQ ID NO: 442516 - DNA, 33 bp, Homo sapien
ctgccattgaattacatgtaaacctcattaact

SEQ ID NO: 442517 - DNA, 33 bp, Homo sapien
catttggcaatatatacgtagatgtgcataaaa

SEQ ID NO: 442518 - DNA, 33 bp, Homo sapien
catttggcaatatatatgtagatgtgcataaaa

SEQ ID NO: 442519 - DNA, 33 bp, Homo sapien
cttcaaagacaaaaacaaacattgaggctgccc

SEQ ID NO: 442520 - DNA, 33 bp, Homo sapien
cttcaaagacaaaaacgaacattgaggctgccc

SEQ ID NO: 442521 - DNA, 33 bp, Homo sapien
aacaggaggaactacaaaaatctctctggcaat

SEQ ID NO: 442522 - DNA, 33 bp, Homo sapien
aacaggaggaactacagaaatctctctggcaat

SEQ ID NO: 442523 - DNA, 33 bp, Homo sapien
ggaagggatttgggcacgagtgatatttttgct

SEQ ID NO: 442524 - DNA, 33 bp, Homo sapien
ggaagggatttgggcatgagtgatatttttgct

SEQ ID NO: 442525 - DNA, 33 bp, Homo sapien
gatgtgtctcaaagcaaagtagtaatttttaag

SEQ ID NO: 442526 - DNA, 33 bp, Homo sapien
gatgtgtctcaaagcatagtagtaatttttaag

SEQ ID NO: 442527 - DNA, 33 bp, Homo sapien
atgaaagcagcgtcatgacatcttctaagaatc

SEQ ID NO: 442528 - DNA, 33 bp, Homo sapien
atgaaagcagcgtcattacatcttctaagaatc

SEQ ID NO: 442529 - DNA, 33 bp, Homo sapien
atacatataccaggaaactaatagggtatggtc

SEQ ID NO: 442530 - DNA, 33 bp, Homo sapien
atacatataccaggaacctaatagggtatggtc

SEQ ID NO: 442531 - DNA, 33 bp, Homo sapien
tggacttgtcctactgaatttctggacttttaa

SEQ ID NO: 442532 - DNA, 33 bp, Homo sapien
tggacttgtcctactggatttctggacttttaa

SEQ ID NO: 442533 - DNA, 33 bp, Homo sapien
aaacaaaggactataacgtaacacaaaatgaca

SEQ ID NO: 442534 - DNA, 33 bp, Homo sapien
aaacaaaggactataatgtaacacaaaatgaca

SEQ ID NO: 442535 - DNA, 33 bp, Homo sapien
gttgtaagatgaacaacgtactgcataaaggac

SEQ ID NO: 442536 - DNA, 33 bp, Homo sapien
gttgtaagatgaacaatgtactgcataaaggac

SEQ ID NO: 442537 - DNA, 33 bp, Homo sapien
catcatatgtgaaaaactggatatataatgtat

SEQ ID NO: 442538 - DNA, 33 bp, Homo sapien
catcatatgtgaaaaattggatatataatgtat

SEQ ID NO: 442539 - DNA, 33 bp, Homo sapien
tctgatcattacttgacagttctttaaattctt

SEQ ID NO: 442540 - DNA, 33 bp, Homo sapien
tctgatcattacttgatagttctttaaattctt

SEQ ID NO: 442541 - DNA, 33 bp, Homo sapien
gcagtgtgtgcatagaccacaaggtgaaaaatt

SEQ ID NO: 442542 - DNA, 33 bp, Homo sapien
gcagtgtgtgcatagatcacaaggtgaaaaatt

SEQ ID NO: 442543 - DNA, 33 bp, Homo sapien
tttgagatacactgtaaaagtagatgggcatga

SEQ ID NO: 442544 - DNA, 33 bp, Homo sapien
tttgagatacactgtagaagtagatgggcatga

SEQ ID NO: 442545 - DNA, 33 bp, Homo sapien
aggtgcacactatccacgtagaagagttttcat

SEQ ID NO: 442546 - DNA, 33 bp, Homo sapien
aggtgcacactatccatgtagaagagttttcat

SEQ ID NO: 442547 - DNA, 33 bp, Homo sapien
tccaggtgtgtgcagacgattaaaagacagcag

SEQ ID NO: 442548 - DNA, 33 bp, Homo sapien
tccaggtgtgtgcagatgattaaaagacagcag

SEQ ID NO: 442549 - DNA, 33 bp, Homo sapien
tggagtgtttgcagggaaccgaaggaaggacag

SEQ ID NO: 442550 - DNA, 33 bp, Homo sapien
tggagtgtttgcaggggaccgaaggaaggacag

SEQ ID NO: 442551 - DNA, 33 bp, Homo sapien
aatggactgtgagatcaagggggcagttaaatt

SEQ ID NO: 442552 - DNA, 33 bp, Homo sapien
aatggactgtgagatcgagggggcagttaaatt

SEQ ID NO: 442553 - DNA, 33 bp, Homo sapien
atctctgactgtacaacagacattgagaaccac

SEQ ID NO: 442554 - DNA, 33 bp, Homo sapien
atctctgactgtacaatagacattgagaaccac

SEQ ID NO: 442555 - DNA, 33 bp, Homo sapien
ttttctccagaagatacagtttgatgtagtcag

SEQ ID NO: 442556 - DNA, 33 bp, Homo sapien
ttttctccagaagatagagtttgatgtagtcag

SEQ ID NO: 442557 - DNA, 33 bp, Homo sapien
agaagaactgcaaaccacatcggatttctctgt

SEQ ID NO: 442558 - DNA, 33 bp, Homo sapien
agaagaactgcaaaccgcatcggatttctctgt

SEQ ID NO: 442559 - DNA, 33 bp, Homo sapien
gggatttgtttttcaactgcgtaaaattaaaga

SEQ ID NO: 442560 - DNA, 33 bp, Homo sapien
gggatttgtttttcaattgcgtaaaattaaaga

SEQ ID NO: 442561 - DNA, 33 bp, Homo sapien
aaaaagggtcatcactaaaacattgctcactgc

SEQ ID NO: 442562 - DNA, 33 bp, Homo sapien
aaaaagggtcatcactcaaacattgctcactgc

SEQ ID NO: 442563 - DNA, 33 bp, Homo sapien
gtatggatgaaaggataaagagctaacagtcat

SEQ ID NO: 442564 - DNA, 33 bp, Homo sapien
gtatggatgaaaggatgaagagctaacagtcat

SEQ ID NO: 442565 - DNA, 33 bp, Homo sapien
gagagctgcatgatgaagggagcacagtgcatt

SEQ ID NO: 442566 - DNA, 33 bp, Homo sapien
gagagctgcatgatgaggggagcacagtgcatt

SEQ ID NO: 442567 - DNA, 33 bp, Homo sapien
tcttattttgcaattacatatcaaggtaaacca

SEQ ID NO: 442568 - DNA, 33 bp, Homo sapien
tcttattttgcaattatatatcaaggtaaacca

SEQ ID NO: 442569 - DNA, 33 bp, Homo sapien
aaacatgatcctctaacgtttcagtgacttcct

SEQ ID NO: 442570 - DNA, 33 bp, Homo sapien
aaacatgatcctctaatgtttcagtgacttcct

SEQ ID NO: 442571 - DNA, 33 bp, Homo sapien
gagctgtctgaaaaataatcattctcctcacaa

SEQ ID NO: 442572 - DNA, 33 bp, Homo sapien
gagctgtctgaaaaatcatcattctcctcacaa

SEQ ID NO: 442573 - DNA, 33 bp, Homo sapien
tcagtgatattatagacgttagtcactgggtgc

SEQ ID NO: 442574 - DNA, 33 bp, Homo sapien
tcagtgatattatagatgttagtcactgggtgc

SEQ ID NO: 442575 - DNA, 33 bp, Homo sapien
ttgttaccactccacacgagattttcctcgaat

SEQ ID NO: 442576 - DNA, 33 bp, Homo sapien
ttgttaccactccacatgagattttcctcgaat

SEQ ID NO: 442577 - DNA, 33 bp, Homo sapien
aatcctatgtcccccaaggtttcaacaaagagg

SEQ ID NO: 442578 - DNA, 33 bp, Homo sapien
aatcctatgtcccccacggtttcaacaaagagg

SEQ ID NO: 442579 - DNA, 33 bp, Homo sapien
tgcacaagataagtccacaagtcacagcgctga

SEQ ID NO: 442580 - DNA, 33 bp, Homo sapien
tgcacaagataagtccgcaagtcacagcgctga

SEQ ID NO: 442581 - DNA, 33 bp, Homo sapien
cctgagcccaggaatgaacaagtgtcagagaca

SEQ ID NO: 442582 - DNA, 33 bp, Homo sapien
cctgagcccaggaatgtacaagtgtcagagaca

SEQ ID NO: 442583 - DNA, 33 bp, Homo sapien
cgactatgccagagacaggcagatgttgggaaa

SEQ ID NO: 442584 - DNA, 33 bp, Homo sapien
cgactatgccagagacgggcagatgttgggaaa

SEQ ID NO: 442585 - DNA, 33 bp, Homo sapien
ttagcacctagagcaaatgcaaatacgtgtgca

SEQ ID NO: 442586 - DNA, 33 bp, Homo sapien
ttagcacctagagcaagtgcaaatacgtgtgca

SEQ ID NO: 442587 - DNA, 33 bp, Homo sapien
taagccacctagcctacggtattttgttatagc

SEQ ID NO: 442588 - DNA, 33 bp, Homo sapien
taagccacctagcctatggtattttgttatagc

SEQ ID NO: 442589 - DNA, 33 bp, Homo sapien
tccaaaatcagggtgccagcctggccgagttgt

SEQ ID NO: 442590 - DNA, 33 bp, Homo sapien
tccaaaatcagggtgctagcctggccgagttgt

SEQ ID NO: 442591 - DNA, 33 bp, Homo sapien
tcttgcccttctgccacgtgagggtacagcagg

SEQ ID NO: 442592 - DNA, 33 bp, Homo sapien
tcttgcccttctgccatgtgagggtacagcagg

SEQ ID NO: 442593 - DNA, 33 bp, Homo sapien
aaagaacctgtaaacacggcttgaagagtctca

SEQ ID NO: 442594 - DNA, 33 bp, Homo sapien
aaagaacctgtaaacatggcttgaagagtctca

SEQ ID NO: 442595 - DNA, 33 bp, Homo sapien
cccagcccgggatttacaggattgacactgctg

SEQ ID NO: 442596 - DNA, 33 bp, Homo sapien
cccagcccgggatttataggattgacactgctg

SEQ ID NO: 442597 - DNA, 33 bp, Homo sapien
tttgttattgagcaacaaccgagacatggctct

SEQ ID NO: 442598 - DNA, 33 bp, Homo sapien
tttgttattgagcaacgaccgagacatggctct

SEQ ID NO: 442599 - DNA, 33 bp, Homo sapien
ctgtcaggctgcaaaacgtaggacattggtagg

SEQ ID NO: 442600 - DNA, 33 bp, Homo sapien
ctgtcaggctgcaaaatgtaggacattggtagg

SEQ ID NO: 442601 - DNA, 33 bp, Homo sapien
tattaatggttaatatcagcaagaaggacttgt

SEQ ID NO: 442602 - DNA, 33 bp, Homo sapien
tattaatggttaatattagcaagaaggacttgt

SEQ ID NO: 442603 - DNA, 33 bp, Homo sapien
tcactttacagaaacactgtgtaccattccaac

SEQ ID NO: 442604 - DNA, 33 bp, Homo sapien
tcactttacagaaacagtgtgtaccattccaac

SEQ ID NO: 442605 - DNA, 33 bp, Homo sapien
agagagcaatgctgaaattaagggttgagatgt

SEQ ID NO: 442606 - DNA, 33 bp, Homo sapien
agagagcaatgctgaacttaagggttgagatgt

SEQ ID NO: 442607 - DNA, 33 bp, Homo sapien
atttaaacaggacgcacgtgaattgagctagga

SEQ ID NO: 442608 - DNA, 33 bp, Homo sapien
atttaaacaggacgcatgtgaattgagctagga

SEQ ID NO: 442609 - DNA, 33 bp, Homo sapien
gagattgaaaacactcaatatcagactcatcca

SEQ ID NO: 442610 - DNA, 33 bp, Homo sapien
gagattgaaaacactcgatatcagactcatcca

SEQ ID NO: 442611 - DNA, 33 bp, Homo sapien
accctaaaagttgaaacgattgatgttcttgga

SEQ ID NO: 442612 - DNA, 33 bp, Homo sapien
accctaaaagttgaaatgattgatgttcttgga

SEQ ID NO: 442613 - DNA, 33 bp, Homo sapien
cagtattgaatagctacagaaaattcacagctt

SEQ ID NO: 442614 - DNA, 33 bp, Homo sapien
cagtattgaatagctagagaaaattcacagctt

SEQ ID NO: 442615 - DNA, 33 bp, Homo sapien
ggaatggtgtaatccaaaggagcaggctgagaa

SEQ ID NO: 442616 - DNA, 33 bp, Homo sapien
ggaatggtgtaatccacaggagcaggctgagaa

SEQ ID NO: 442617 - DNA, 33 bp, Homo sapien
gcctaccaggcagtcaaaagacttcaatccacc

SEQ ID NO: 442618 - DNA, 33 bp, Homo sapien
gcctaccaggcagtcacaagacttcaatccacc

SEQ ID NO: 442619 - DNA, 33 bp, Homo sapien
ggtctttgcagatgtccatgtcacacttcatga

SEQ ID NO: 442620 - DNA, 33 bp, Homo sapien
ggtctttgcagatgtctatgtcacacttcatga

SEQ ID NO: 442621 - DNA, 33 bp, Homo sapien; identical to SEQ ID NO: 442619

SEQ ID NO: 442622 - DNA, 33 bp, Homo sapien; identical to SEQ ID NO: 442620

SEQ ID NO: 442623 - DNA, 33 bp, Homo sapien
atcactctagttgatcaaaatatggttctggaa

SEQ ID NO: 442624 - DNA, 33 bp, Homo sapien
atcactctagttgatctaaatatggttctggaa

SEQ ID NO: 442625 - DNA, 33 bp, Homo sapien
agtgacaaaatggcaaagtatgatgctgcgggg

SEQ ID NO: 442626 - DNA, 33 bp, Homo sapien
agtgacaaaatggcaacgtatgatgctgcgggg

SEQ ID NO: 442627 - DNA, 33 bp, Homo sapien
ggtaactcagatctccaccatcgctaacagatc

SEQ ID NO: 442628 - DNA, 33 bp, Homo sapien
ggtaactcagatctccgccatcgctaacagatc

SEQ ID NO: 442629 - DNA, 33 bp, Homo sapien
cttccttcaaggtcaaagtgtattagtcagagt

SEQ ID NO: 442630 - DNA, 33 bp, Homo sapien
cttccttcaaggtcaaggtgtattagtcagagt

SEQ ID NO: 442631 - DNA, 33 bp, Homo sapien
acccagggagaagaaaacgttgccagaaagcag

SEQ ID NO: 442632 - DNA, 33 bp, Homo sapien
acccagggagaagaaagcgttgccagaaagcag

SEQ ID NO: 442633 - DNA, 33 bp, Homo sapien
cagaaacagaaaaaaaatccataaaatttgtat

SEQ ID NO: 442634 - DNA, 33 bp, Homo sapien
cagaaacagaaaaaaattccataaaatttgtat

SEQ ID NO: 442635 - DNA, 33 bp, Homo sapien
tgtcagtccttcaaggaatccccagacaaacac

SEQ ID NO: 442636 - DNA, 33 bp, Homo sapien
tgtcagtccttcaagggatccccagacaaacac

SEQ ID NO: 442637 - DNA, 33 bp, Homo sapien
tatttaaatgtggtaactggatataagattctt

SEQ ID NO: 442638 - DNA, 33 bp, Homo sapien
tatttaaatgtggtaagtggatataagattctt

SEQ ID NO: 442639 - DNA, 33 bp, Homo sapien
tccctcctattaggacactaagcccatcagggg

SEQ ID NO: 442640 - DNA, 33 bp, Homo sapien
tccctcctattaggaccctaagcccatcagggg

SEQ ID NO: 442641 - DNA, 33 bp, Homo sapien
caaatgtcttagaacaaaaagcaaacattttaa

SEQ ID NO: 442642 - DNA, 33 bp, Homo sapien
caaatgtcttagaacagaaagcaaacattttaa

SEQ ID NO: 442643 - DNA, 33 bp, Homo sapien
tgctaggggtatagcaatgaactaaccagaatg

SEQ ID NO: 442644 - DNA, 33 bp, Homo sapien
tgctaggggtatagcagtgaactaaccagaatg

SEQ ID NO: 442645 - DNA, 33 bp, Homo sapien
ccattagggcaggcacaagtccaatttgactgg

SEQ ID NO: 442646 - DNA, 33 bp, Homo sapien
ccattagggcaggcacgagtccaatttgactgg

SEQ ID NO: 442647 - DNA, 33 bp, Homo sapien
ttaaaagccctacctccgaccacagtcacattc

SEQ ID NO: 442648 - DNA, 33 bp, Homo sapien
ttaaaagccctacctctgaccacagtcacattc

SEQ ID NO: 442649 - DNA, 33 bp, Homo sapien
ttcgaggcatttattaactgtggtgagaatgtg

SEQ ID NO: 442650 - DNA, 33 bp, Homo sapien
ttcgaggcatttattagctgtggtgagaatgtg

SEQ ID NO: 442651 - DNA, 33 bp, Homo sapien
gctgctatgcaaataaatgctttcgctgtgttc

SEQ ID NO: 442652 - DNA, 33 bp, Homo sapien
gctgctatgcaaataagtgctttcgctgtgttc

SEQ ID NO: 442653 - DNA, 33 bp, Homo sapien
tgatctttgcctctaacgtatttcatgaaccat

SEQ ID NO: 442654 - DNA, 33 bp, Homo sapien
tgatctttgcctctaatgtatttcatgaaccat

SEQ ID NO: 442655 - DNA, 33 bp, Homo sapien
caccgcagttgtgtgaagaatgtgagatttatg

SEQ ID NO: 442656 - DNA, 33 bp, Homo sapien
caccgcagttgtgtgaggaatgtgagatttatg

SEQ ID NO: 442657 - DNA, 33 bp, Homo sapien
gtgaaggactcatggccacttgatttttgtgaa

SEQ ID NO: 442658 - DNA, 33 bp, Homo sapien
gtgaaggactcatggctacttgatttttgtgaa

SEQ ID NO: 442659 - DNA, 33 bp, Homo sapien
catggttcttgtagtccctcgatatagactata

SEQ ID NO: 442660 - DNA, 33 bp, Homo sapien
catggttcttgtagtctctcgatatagactata

SEQ ID NO: 442661 - DNA, 33 bp, Homo sapien
aaattgcttaataatacacagagttgccaatga

SEQ ID NO: 442662 - DNA, 33 bp, Homo sapien
aaattgcttaataatatacagagttgccaatga

SEQ ID NO: 442663 - DNA, 33 bp, Homo sapien
cctcaacttcccatcacgaaacaagtacatttc

SEQ ID NO: 442664 - DNA, 33 bp, Homo sapien
cctcaacttcccatcatgaaacaagtacatttc

SEQ ID NO: 442665 - DNA, 33 bp, Homo sapien
taaataatcatatacccggacattgtagtagtt

SEQ ID NO: 442666 - DNA, 33 bp, Homo sapien
taaataatcatatacctggacattgtagtagtt

SEQ ID NO: 442667 - DNA, 33 bp, Homo sapien
tttcctttcttccgccgcctttataactgctac

SEQ ID NO: 442668 - DNA, 33 bp, Homo sapien
tttcctttcttccgcctcctttataactgctac

SEQ ID NO: 442669 - DNA, 33 bp, Homo sapien
ttatgaggctttagggaaatgtcaaccctcaaa

SEQ ID NO: 442670 - DNA, 33 bp, Homo sapien
ttatgaggctttaggggaatgtcaaccctcaaa

SEQ ID NO: 442671 - DNA, 33 bp, Homo sapien
gcgatggcagcttaacagaggaggaacaagcta

SEQ ID NO: 442672 - DNA, 33 bp, Homo sapien
gcgatggcagcttaacggaggaggaacaagcta

SEQ ID NO: 442673 - DNA, 33 bp, Homo sapien
tttagaaaacaaacacagcagcagtatggaaaa

SEQ ID NO: 442674 - DNA, 33 bp, Homo sapien
tttagaaaacaaacacggcagcagtatggaaaa

SEQ ID NO: 442675 - DNA, 33 bp, Homo sapien
ttgtggtatcacgctacgtcttagggagctatg

SEQ ID NO: 442676 - DNA, 33 bp, Homo sapien
ttgtggtatcacgctatgtcttagggagctatg

SEQ ID NO: 442677 - DNA, 33 bp, Homo sapien
tcactgagctgttttgaaacttaaatgagagga

SEQ ID NO: 442678 - DNA, 33 bp, Homo sapien
tcactgagctgttttggaacttaaatgagagga

SEQ ID NO: 442679 - DNA, 33 bp, Homo sapien
aaaagtgactttgctacgagagacaggttaggg

SEQ ID NO: 442680 - DNA, 33 bp, Homo sapien
aaaagtgactttgctatgagagacaggttaggg

SEQ ID NO: 442681 - DNA, 33 bp, Homo sapien
tacaccaatttaccaacgattcacgtagctttc

SEQ ID NO: 442682 - DNA, 33 bp, Homo sapien
tacaccaatttaccaatgattcacgtagctttc

SEQ ID NO: 442683 - DNA, 33 bp, Homo sapien
gcatcaacccaccaccaacaagctaagaatggt

SEQ ID NO: 442684 - DNA, 33 bp, Homo sapien
gcatcaacccaccaccgacaagctaagaatggt

SEQ ID NO: 442685 - DNA, 33 bp, Homo sapien
actttatttgtagacactgaagtttgaatttca

SEQ ID NO: 442686 - DNA, 33 bp, Homo sapien
actttatttgtagacattgaagtttgaatttca

SEQ ID NO: 442687 - DNA, 33 bp, Homo sapien
acacaaaatctttgtacggaacccgcacatctc

SEQ ID NO: 442688 - DNA, 33 bp, Homo sapien
acacaaaatctttgtatggaacccgcacatctc

SEQ ID NO: 442689 - DNA, 33 bp, Homo sapien
gtaagttaccagagatcagtgacttgcggacaa

SEQ ID NO: 442690 - DNA, 33 bp, Homo sapien
gtaagttaccagagattagtgacttgcggacaa

SEQ ID NO: 442691 - DNA, 33 bp, Homo sapien
gcagataagaattaagacatgtaattattggcc

SEQ ID NO: 442692 - DNA, 33 bp, Homo sapien
gcagataagaattaagtcatgtaattattggcc

SEQ ID NO: 442693 - DNA, 33 bp, Homo sapien
tgttgttcagttctaggacctattatttttaag

SEQ ID NO: 442694 - DNA, 33 bp, Homo sapien
tgttgttcagttctagtacctattatttttaag

SEQ ID NO: 442695 - DNA, 33 bp, Homo sapien
ttaggctgatgtaataaaagcaaagactggtcc

SEQ ID NO: 442696 - DNA, 33 bp, Homo sapien
ttaggctgatgtaatacaagcaaagactggtcc

SEQ ID NO: 442697 - DNA, 33 bp, Homo sapien
ctctggcttcctcttcacgcgacattctccctg

SEQ ID NO: 442698 - DNA, 33 bp, Homo sapien
ctctggcttcctcttcgcgcgacattctccctg

SEQ ID NO: 442699 - DNA, 33 bp, Homo sapien
ttgattgtaggctggacggcttcattgtagaag

SEQ ID NO: 442700 - DNA, 33 bp, Homo sapien
ttgattgtaggctggatggcttcattgtagaag

SEQ ID NO: 442701 - DNA, 33 bp, Homo sapien
ctggcaaagggtagaccatccagaagtaggcgc

SEQ ID NO: 442702 - DNA, 33 bp, Homo sapien
ctggcaaagggtagacgatccagaagtaggcgc

SEQ ID NO: 442703 - DNA, 33 bp, Homo sapien
tcctgatcggtttcatcatctgaacttagacct

SEQ ID NO: 442704 - DNA, 33 bp, Homo sapien
tcctgatcggtttcattatctgaacttagacct

SEQ ID NO: 442705 - DNA, 33 bp, Homo sapien
gtgaatacttcagcagactgatttcattttgaa

SEQ ID NO: 442706 - DNA, 33 bp, Homo sapien
gtgaatacttcagcaggctgatttcattttgaa

SEQ ID NO: 442707 - DNA, 33 bp, Homo sapien
gttgctagggtgtaagcccatgtgtgttgtaaa

SEQ ID NO: 442708 - DNA, 33 bp, Homo sapien
gttgctagggtgtaagtccatgtgtgttgtaaa

SEQ ID NO: 442709 - DNA, 33 bp, Homo sapien
gtaacaaaggagcataaatttagtggcttaaaa

SEQ ID NO: 442710 - DNA, 33 bp, Homo sapien
gtaacaaaggagcatacatttagtggcttaaaa

SEQ ID NO: 442711 - DNA, 33 bp, Homo sapien
cagaccaaaacgattgaaagtctctggtctaga

SEQ ID NO: 442712 - DNA, 33 bp, Homo sapien
cagaccaaaacgattggaagtctctggtctaga

SEQ ID NO: 442713 - DNA, 33 bp, Homo sapien
tggatagacacaaatcacaagttccaccctttt

SEQ ID NO: 442714 - DNA, 33 bp, Homo sapien
tggatagacacaaatctcaagttccaccctttt

SEQ ID NO: 442715 - DNA, 33 bp, Homo sapien
atatccttttaaaatcagacatcttaaattttg

SEQ ID NO: 442716 - DNA, 33 bp, Homo sapien
atatccttttaaaatcggacatcttaaattttg

SEQ ID NO: 442717 - DNA, 33 bp, Homo sapien
tgtacagacgtcaacactgtatgcaaaatactg

SEQ ID NO: 442718 - DNA, 33 bp, Homo sapien
tgtacagacgtcaacattgtatgcaaaatactg

SEQ ID NO: 442719 - DNA, 33 bp, Homo sapien
aatcagacagaaatagcagctgtgtagcagtct

SEQ ID NO: 442720 - DNA, 33 bp, Homo sapien
aatcagacagaaatagtagctgtgtagcagtct

SEQ ID NO: 442721 - DNA, 33 bp, Homo sapien
ttgttttcattgacaccgaatttaatttatatc

SEQ ID NO: 442722 - DNA, 33 bp, Homo sapien
ttgttttcattgacactgaatttaatttatatc

SEQ ID NO: 442723 - DNA, 33 bp, Homo sapien
acctatctgtaatacaagcaaaaatgagaaaat

SEQ ID NO: 442724 - DNA, 33 bp, Homo sapien
acctatctgtaatacaggcaaaaatgagaaaat

SEQ ID NO: 442725 - DNA, 33 bp, Homo sapien
ataacacagttttcaaagccagtggaactctta

SEQ ID NO: 442726 - DNA, 33 bp, Homo sapien
ataacacagttttcaatgccagtggaactctta

SEQ ID NO: 442727 - DNA, 33 bp, Homo sapien
catttttctactgtgtaaaaacaccgagaatgt

SEQ ID NO: 442728 - DNA, 33 bp, Homo sapien
catttttctactgtgtgaaaacaccgagaatgt

SEQ ID NO: 442729 - DNA, 33 bp, Homo sapien
cttgtgcagaatgggacatgtgaatcactgtgt

SEQ ID NO: 442730 - DNA, 33 bp, Homo sapien
cttgtgcagaatgggagatgtgaatcactgtgt

SEQ ID NO: 442731 - DNA, 33 bp, Homo sapien
aagaggggtgttaccagggcattacttatgctt

SEQ ID NO: 442732 - DNA, 33 bp, Homo sapien
aagaggggtgttaccatggcattacttatgctt

SEQ ID NO: 442733 - DNA, 33 bp, Homo sapien
ttactcatatatctgacaggagctcttctgcac

SEQ ID NO: 442734 - DNA, 33 bp, Homo sapien
ttactcatatatctgataggagctcttctgcac

SEQ ID NO: 442735 - DNA, 33 bp, Homo sapien
gtcccataagctgcaacagaatgggagatttaa

SEQ ID NO: 442736 - DNA, 33 bp, Homo sapien
gtcccataagctgcaatagaatgggagatttaa

SEQ ID NO: 442737 - DNA, 33 bp, Homo sapien
tctggatgaattctaacgcaccattctgttcta

SEQ ID NO: 442738 - DNA, 33 bp, Homo sapien
tctggatgaattctaatgcaccattctgttcta

SEQ ID NO: 442739 - DNA, 33 bp, Homo sapien
gtcctagctggttctaaaaatggaattactttt

SEQ ID NO: 442740 - DNA, 33 bp, Homo sapien
gtcctagctggttctagaaatggaattactttt

SEQ ID NO: 442741 - DNA, 33 bp, Homo sapien
aatctgcattataacagtgcatgctgaagtttg

SEQ ID NO: 442742 - DNA, 33 bp, Homo sapien
aatctgcattataacattgcatgctgaagtttg

SEQ ID NO: 442743 - DNA, 33 bp, Homo sapien
cactgtaccaagaaacagagaagatgtgagagt

SEQ ID NO: 442744 - DNA, 33 bp, Homo sapien
cactgtaccaagaaactgagaagatgtgagagt

SEQ ID NO: 442745 - DNA, 33 bp, Homo sapien
gacagtcaaagcctcactctactcctcactgca

SEQ ID NO: 442746 - DNA, 33 bp, Homo sapien
gacagtcaaagcctcattctactcctcactgca

SEQ ID NO: 442747 - DNA, 33 bp, Homo sapien
catggctagtcactaaaagtccactaatatttt

SEQ ID NO: 442748 - DNA, 33 bp, Homo sapien
catggctagtcactaatagtccactaatatttt

SEQ ID NO: 442749 - DNA, 33 bp, Homo sapien
tttttttttgtgatgacaacatttatatctact

SEQ ID NO: 442750 - DNA, 33 bp, Homo sapien
tttttttttgtgatgagaacatttatatctact

SEQ ID NO: 442751 - DNA, 33 bp, Homo sapien
agttctatagatgtacacactgaagagatcagt

SEQ ID NO: 442752 - DNA, 33 bp, Homo sapien
agttctatagatgtacgcactgaagagatcagt

SEQ ID NO: 442753 - DNA, 33 bp, Homo sapien
ctcatgtaagttataacgaattccaactggaat

SEQ ID NO: 442754 - DNA, 33 bp, Homo sapien
ctcatgtaagttataatgaattccaactggaat

SEQ ID NO: 442755 - DNA, 33 bp, Homo sapien
tcagaatgtcaaaagacagccctcgtcactgaa

SEQ ID NO: 442756 - DNA, 33 bp, Homo sapien
tcagaatgtcaaaagatagccctcgtcactgaa

SEQ ID NO: 442757 - DNA, 33 bp, Homo sapien
atgaaagattgactcaaggtttttatatcaagc

SEQ ID NO: 442758 - DNA, 33 bp, Homo sapien
atgaaagattgactcagggtttttatatcaagc

SEQ ID NO: 442759 - DNA, 33 bp, Homo sapien
tataccaaaatgctcaatatcattccttttgct

SEQ ID NO: 442760 - DNA, 33 bp, Homo sapien
tataccaaaatgctcactatcattccttttgct

SEQ ID NO: 442761 - DNA, 33 bp, Homo sapien
aacttctctcagcataaagttcaaaagtctcag

SEQ ID NO: 442762 - DNA, 33 bp, Homo sapien
aacttctctcagcatagagttcaaaagtctcag

SEQ ID NO: 442763 - DNA, 33 bp, Homo sapien
ttgctgagtagcattccatagcatggacatatt

SEQ ID NO: 442764 - DNA, 33 bp, Homo sapien
ttgctgagtagcattctatagcatggacatatt

SEQ ID NO: 442765 - DNA, 33 bp, Homo sapien
ctcagtttttaattctgacccagtgcttgaggg

SEQ ID NO: 442766 - DNA, 33 bp, Homo sapien
ctcagtttttaattcttacccagtgcttgaggg

SEQ ID NO: 442767 - DNA, 33 bp, Homo sapien
aacgggtctgaggtcaactcttgagatggtgtc

SEQ ID NO: 442768 - DNA, 33 bp, Homo sapien
aacgggtctgaggtcagctcttgagatggtgtc

SEQ ID NO: 442769 - DNA, 33 bp, Homo sapien
caactttcagtcgtacacgcatggggaaggtgg

SEQ ID NO: 442770 - DNA, 33 bp, Homo sapien
caactttcagtcgtacgcgcatggggaaggtgg

SEQ ID NO: 442771 - DNA, 33 bp, Homo sapien
gcatcctaacccacagaagctcacgcgggagga

SEQ ID NO: 442772 - DNA, 33 bp, Homo sapien
gcatcctaacccacaggagctcacgcgggagga

SEQ ID NO: 442773 - DNA, 33 bp, Homo sapien
tccccaaacaactgcacctcctctcacagccaa

SEQ ID NO: 442774 - DNA, 33 bp, Homo sapien
tccccaaacaactgcagctcctctcacagccaa

SEQ ID NO: 442775 - DNA, 33 bp, Homo sapien
aaatgggatgggattcacactgcatcagcccag

SEQ ID NO: 442776 - DNA, 33 bp, Homo sapien
aaatgggatgggattcgcactgcatcagcccag

SEQ ID NO: 442777 - DNA, 33 bp, Homo sapien
gaaaacttgctgtaatcacttattagttcctgg

SEQ ID NO: 442778 - DNA, 33 bp, Homo sapien
gaaaacttgctgtaatgacttattagttcctgg

SEQ ID NO: 442779 - DNA, 33 bp, Homo sapien
gataacttggatgaaacagaccaattccgtgaa

SEQ ID NO: 442780 - DNA, 33 bp, Homo sapien
gataacttggatgaaatagaccaattccgtgaa

SEQ ID NO: 442781 - DNA, 33 bp, Homo sapien
atagtggtcccttgtaggggtggtgactagagg

SEQ ID NO: 442782 - DNA, 33 bp, Homo sapien
atagtggtcccttgtatgggtggtgactagagg

SEQ ID NO: 442783 - DNA, 33 bp, Homo sapien
ccaagacacctggcaaaagcaaaattgaaacca

SEQ ID NO: 442784 - DNA, 33 bp, Homo sapien
ccaagacacctggcaacagcaaaattgaaacca

SEQ ID NO: 442785 - DNA, 33 bp, Homo sapien
ggtaggattgctcccacactttcacaggtgagc

SEQ ID NO: 442786 - DNA, 33 bp, Homo sapien
ggtaggattgctcccagactttcacaggtgagc

SEQ ID NO: 442787 - DNA, 33 bp, Homo sapien
acccaggtctctcaaacttcacagctccatgca

SEQ ID NO: 442788 - DNA, 33 bp, Homo sapien
acccaggtctctcaaatttcacagctccatgca

SEQ ID NO: 442789 - DNA, 33 bp, Homo sapien
aaagaatatagaagaaaacatcagtagagaaga

SEQ ID NO: 442790 - DNA, 33 bp, Homo sapien
aaagaatatagaagaagacatcagtagagaaga

SEQ ID NO: 442791 - DNA, 33 bp, Homo sapien
ttatctctccaaactgcatttcattttagcagt

SEQ ID NO: 442792 - DNA, 33 bp, Homo sapien
ttatctctccaaactgtatttcattttagcagt

SEQ ID NO: 442793 - DNA, 33 bp, Homo sapien
actttctgcttttggacgtataagcacagcgtg

SEQ ID NO: 442794 - DNA, 33 bp, Homo sapien
actttctgcttttggatgtataagcacagcgtg

SEQ ID NO: 442795 - DNA, 33 bp, Homo sapien
taacacaaagcaaggcaatttcagttatatagt

SEQ ID NO: 442796 - DNA, 33 bp, Homo sapien
taacacaaagcaaggcgatttcagttatatagt

SEQ ID NO: 442797 - DNA, 33 bp, Homo sapien
ttgctttggtgaatgacgtgccgggatgaggtg

SEQ ID NO: 442798 - DNA, 33 bp, Homo sapien
ttgctttggtgaatgatgtgccgggatgaggtg

SEQ ID NO: 442799 - DNA, 33 bp, Homo sapien
tcattcaccaaagcaacatttctttgcagtctg

SEQ ID NO: 442800 - DNA, 33 bp, Homo sapien
tcattcaccaaagcaatatttctttgcagtctg

SEQ ID NO: 442801 - DNA, 33 bp, Homo sapien
tggtaccagcacgtaaaggagtcaagcgcagca

SEQ ID NO: 442802 - DNA, 33 bp, Homo sapien
tggtaccagcacgtaagggagtcaagcgcagca

SEQ ID NO: 442803 - DNA, 33 bp, Homo sapien
tggatgcagttcttccaaagaatccgtggtaaa

SEQ ID NO: 442804 - DNA, 33 bp, Homo sapien
tggatgcagttcttccgaagaatccgtggtaaa

SEQ ID NO: 442805 - DNA, 33 bp, Homo sapien
ggagatgactgtgatgaaatagtgactaagttc

SEQ ID NO: 442806 - DNA, 33 bp, Homo sapien
ggagatgactgtgatggaatagtgactaagttc

SEQ ID NO: 442807 - DNA, 33 bp, Homo sapien
caagtgtcacaacccactgaactgatgatcaaa

SEQ ID NO: 442808 - DNA, 33 bp, Homo sapien
caagtgtcacaacccattgaactgatgatcaaa

SEQ ID NO: 442809 - DNA, 33 bp, Homo sapien
agccatttgacaaatacgtgttgagcttcatgc

SEQ ID NO: 442810 - DNA, 33 bp, Homo sapien
agccatttgacaaatatgtgttgagcttcatgc

SEQ ID NO: 442811 - DNA, 33 bp, Homo sapien
taaaaatccagatggcaaatgaccagcagattc

SEQ ID NO: 442812 - DNA, 33 bp, Homo sapien
taaaaatccagatggcgaatgaccagcagattc

SEQ ID NO: 442813 - DNA, 33 bp, Homo sapien
aaggccacacagccaacgtgccatgtgctacag

SEQ ID NO: 442814 - DNA, 33 bp, Homo sapien
aaggccacacagccaatgtgccatgtgctacag

SEQ ID NO: 442815 - DNA, 33 bp, Homo sapien
tggcaagggcttacccaacttcacggatcacag

SEQ ID NO: 442816 - DNA, 33 bp, Homo sapien
tggcaagggcttacccgacttcacggatcacag

SEQ ID NO: 442817 - DNA, 33 bp, Homo sapien
cctaatactccaaacacagcagcagtctccttg

SEQ ID NO: 442818 - DNA, 33 bp, Homo sapien
cctaatactccaaacatagcagcagtctccttg

SEQ ID NO: 442819 - DNA, 33 bp, Homo sapien
caccctcttaggcagcacttgtcaaagtttgtc

SEQ ID NO: 442820 - DNA, 33 bp, Homo sapien
caccctcttaggcagcccttgtcaaagtttgtc

SEQ ID NO: 442821 - DNA, 33 bp, Homo sapien
aaaggccgtatctataagaccttgaaatctcat

SEQ ID NO: 442822 - DNA, 33 bp, Homo sapien
aaaggccgtatctatatgaccttgaaatctcat

SEQ ID NO: 442823 - DNA, 33 bp, Homo sapien
actcaaaagcaccccaacgtataatagtcttac

SEQ ID NO: 442824 - DNA, 33 bp, Homo sapien
actcaaaagcaccccagcgtataatagtcttac

SEQ ID NO: 442825 - DNA, 33 bp, Homo sapien
gcagctgttagtaccacgacaggtaaatggtgg

SEQ ID NO: 442826 - DNA, 33 bp, Homo sapien
gcagctgttagtaccaggacaggtaaatggtgg

SEQ ID NO: 442827 - DNA, 33 bp, Homo sapien
tcaaatggcatgaaaaacatattccaataacac

SEQ ID NO: 442828 - DNA, 33 bp, Homo sapien
tcaaatggcatgaaaaccatattccaataacac

SEQ ID NO: 442829 - DNA, 33 bp, Homo sapien
tgagcccatttaactccctgttttctagctcat

SEQ ID NO: 442830 - DNA, 33 bp, Homo sapien
tgagcccatttaactctctgttttctagctcat

SEQ ID NO: 442831 - DNA, 33 bp, Homo sapien
ttctcactgctttgtaggacttccaagagactc

SEQ ID NO: 442832 - DNA, 33 bp, Homo sapien
ttctcactgctttgtatgacttccaagagactc

SEQ ID NO: 442833 - DNA, 33 bp, Homo sapien
tgacccagaatgtcaactgatctaagttctaaa

SEQ ID NO: 442834 - DNA, 33 bp, Homo sapien
tgacccagaatgtcaattgatctaagttctaaa

SEQ ID NO: 442835 - DNA, 33 bp, Homo sapien
aattctgtttcaacaccgagaggagttcacatg

SEQ ID NO: 442836 - DNA, 33 bp, Homo sapien
aattctgtttcaacactgagaggagttcacatg

SEQ ID NO: 442837 - DNA, 33 bp, Homo sapien
gccttgaagcaagtccactgtcattttgttaaa

SEQ ID NO: 442838 - DNA, 33 bp, Homo sapien
gccttgaagcaagtccgctgtcattttgttaaa

SEQ ID NO: 442839 - DNA, 33 bp, Homo sapien
tcccaatcgcaaagctaagagagagagattctg

SEQ ID NO: 442840 - DNA, 33 bp, Homo sapien
tcccaatcgcaaagctgagagagagagattctg

SEQ ID NO: 442841 - DNA, 33 bp, Homo sapien
agcacagcagagagaacgaagttatggggaggg

SEQ ID NO: 442842 - DNA, 33 bp, Homo sapien
agcacagcagagagaatgaagttatggggaggg

SEQ ID NO: 442843 - DNA, 33 bp, Homo sapien
cacctgctggggggcacctccttacttcaccac

SEQ ID NO: 442844 - DNA, 33 bp, Homo sapien
cacctgctggggggcatctccttacttcaccac

SEQ ID NO: 442845 - DNA, 33 bp, Homo sapien
aaactactcattgaaccactatgtgcagggtgc

SEQ ID NO: 442846 - DNA, 33 bp, Homo sapien
aaactactcattgaactactatgtgcagggtgc

SEQ ID NO: 442847 - DNA, 33 bp, Homo sapien
acaccccgtgatgaaacgtcacactcaaccatt

SEQ ID NO: 442848 - DNA, 33 bp, Homo sapien
acaccccgtgatgaaatgtcacactcaaccatt

SEQ ID NO: 442849 - DNA, 33 bp, Homo sapien
atgcatttaacagccacgtgaagtagacagtct

SEQ ID NO: 442850 - DNA, 33 bp, Homo sapien
atgcatttaacagccaggtgaagtagacagtct

SEQ ID NO: 442851 - DNA, 33 bp, Homo sapien
ggaagatagaggaaaaatctgtaccaggtacaa

SEQ ID NO: 442852 - DNA, 33 bp, Homo sapien
ggaagatagaggaaaagtctgtaccaggtacaa

SEQ ID NO: 442853 - DNA, 33 bp, Homo sapien
tccctatcagtgacataaaactgaaaacaatct

SEQ ID NO: 442854 - DNA, 33 bp, Homo sapien
tccctatcagtgacatgaaactgaaaacaatct

SEQ ID NO: 442855 - DNA, 33 bp, Homo sapien
tgtagaagaatgcataccaagtgttaacattgg

SEQ ID NO: 442856 - DNA, 33 bp, Homo sapien
tgtagaagaatgcatagcaagtgttaacattgg

SEQ ID NO: 442857 - DNA, 33 bp, Homo sapien
tgaaatagctattcaaagatgtacttcagtaag

SEQ ID NO: 442858 - DNA, 33 bp, Homo sapien
tgaaatagctattcaaggatgtacttcagtaag

SEQ ID NO: 442859 - DNA, 33 bp, Homo sapien
aagcttaaacaccaaacctggatggaaacagag

SEQ ID NO: 442860 - DNA, 33 bp, Homo sapien
aagcttaaacaccaaatctggatggaaacagag

SEQ ID NO: 442861 - DNA, 33 bp, Homo sapien
tcaaagttattggctaaattccagcctcccttt

SEQ ID NO: 442862 - DNA, 33 bp, Homo sapien
tcaaagttattggctacattccagcctcccttt

SEQ ID NO: 442863 - DNA, 33 bp, Homo sapien
ggcaattctggtgacacaaaaatcaggccaggc

SEQ ID NO: 442864 - DNA, 33 bp, Homo sapien
ggcaattctggtgacataaaaatcaggccaggc

SEQ ID NO: 442865 - DNA, 33 bp, Homo sapien
catgttacttgaagacaaccgtaactgaggtgt

SEQ ID NO: 442866 - DNA, 33 bp, Homo sapien
catgttacttgaagacgaccgtaactgaggtgt

SEQ ID NO: 442867 - DNA, 33 bp, Homo sapien
tgacacgtttgactcactaaaaaaaatggtagt

SEQ ID NO: 442868 - DNA, 33 bp, Homo sapien
tgacacgtttgactcattaaaaaaaatggtagt

SEQ ID NO: 442869 - DNA, 33 bp, Homo sapien
gtcgagagagagtataatacactagcaggagta

SEQ ID NO: 442870 - DNA, 33 bp, Homo sapien
gtcgagagagagtatagtacactagcaggagta

SEQ ID NO: 442871 - DNA, 33 bp, Homo sapien
ttgttttgcatttttagctacaaaggaagccag

SEQ ID NO: 442872 - DNA, 33 bp, Homo sapien
ttgttttgcatttttatctacaaaggaagccag

SEQ ID NO: 442873 - DNA, 33 bp, Homo sapien
tttgtaaatatccctgaaaagatacacagggca

SEQ ID NO: 442874 - DNA, 33 bp, Homo sapien
tttgtaaatatccctggaaagatacacagggca

SEQ ID NO: 442875 - DNA, 33 bp, Homo sapien
gtaagttaagcctcacactagggttattttgcc

SEQ ID NO: 442876 - DNA, 33 bp, Homo sapien
gtaagttaagcctcacgctagggttattttgcc

SEQ ID NO: 442877 - DNA, 33 bp, Homo sapien
atgggatggtctagcacaagccacaaatattct

SEQ ID NO: 442878 - DNA, 33 bp, Homo sapien
atgggatggtctagcagaagccacaaatattct

SEQ ID NO: 442879 - DNA, 33 bp, Homo sapien
cagctataaatccagacggctgcagatgtgtta

SEQ ID NO: 442880 - DNA, 33 bp, Homo sapien
cagctataaatccagatggctgcagatgtgtta

SEQ ID NO: 442881 - DNA, 33 bp, Homo sapien
ccgatcacccaggctcaaaacctagggtgcatt

SEQ ID NO: 442882 - DNA, 33 bp, Homo sapien
ccgatcacccaggctcgaaacctagggtgcatt

SEQ ID NO: 442883 - DNA, 33 bp, Homo sapien
aactgttgagtccaagaaaggttttggagggat

SEQ ID NO: 442884 - DNA, 33 bp, Homo sapien
aactgttgagtccaaggaaggttttggagggat

SEQ ID NO: 442885 - DNA, 33 bp, Homo sapien
gatagcttattaatacaattcttgctgattctc

SEQ ID NO: 442886 - DNA, 33 bp, Homo sapien
gatagcttattaatacgattcttgctgattctc

SEQ ID NO: 442887 - DNA, 33 bp, Homo sapien
tcacaacagtgataaaacagaggttcacatggc

SEQ ID NO: 442888 - DNA, 33 bp, Homo sapien
tcacaacagtgataaagcagaggttcacatggc

SEQ ID NO: 442889 - DNA, 33 bp, Homo sapien
gggagtttcagcatgggccaggaaactactttc

SEQ ID NO: 442890 - DNA, 33 bp, Homo sapien
gggagtttcagcatggtccaggaaactactttc

SEQ ID NO: 442891 - DNA, 33 bp, Homo sapien
ttaatacttgaagcacaaaacaaaggatcagtg

SEQ ID NO: 442892 - DNA, 33 bp, Homo sapien
ttaatacttgaagcaccaaacaaaggatcagtg

SEQ ID NO: 442893 - DNA, 33 bp, Homo sapien
ccattcttctgaggtcaccagtcataatactgg

SEQ ID NO: 442894 - DNA, 33 bp, Homo sapien
ccattcttctgaggtctccagtcataatactgg

SEQ ID NO: 442895 - DNA, 33 bp, Homo sapien
taaatacttggctcaacgtcacagctactcaat

SEQ ID NO: 442896 - DNA, 33 bp, Homo sapien
taaatacttggctcaaggtcacagctactcaat

SEQ ID NO: 442897 - DNA, 33 bp, Homo sapien
gtcactcagttcttcaaattcttccattctctg

SEQ ID NO: 442898 - DNA, 33 bp, Homo sapien
gtcactcagttcttcacattcttccattctctg

SEQ ID NO: 442899 - DNA, 33 bp, Homo sapien
actgggtagaattttacgtagtaactaggtaga

SEQ ID NO: 442900 - DNA, 33 bp, Homo sapien
actgggtagaattttatgtagtaactaggtaga

SEQ ID NO: 442901 - DNA, 33 bp, Homo sapien
accacaaaaaatccaacgagtggtcattaggca

SEQ ID NO: 442902 - DNA, 33 bp, Homo sapien
accacaaaaaatccaatgagtggtcattaggca

SEQ ID NO: 442903 - DNA, 33 bp, Homo sapien
ggcatagcgagaataccaatctaggaagcgact

SEQ ID NO: 442904 - DNA, 33 bp, Homo sapien
ggcatagcgagaatactaatctaggaagcgact

SEQ ID NO: 442905 - DNA, 33 bp, Homo sapien
aaaaaattatgattgacctcaagttccacaatt

SEQ ID NO: 442906 - DNA, 33 bp, Homo sapien
aaaaaattatgattgatctcaagttccacaatt

SEQ ID NO: 442907 - DNA, 33 bp, Homo sapien
atgtgtttttctgtatcaagtcaacacagaatc

SEQ ID NO: 442908 - DNA, 33 bp, Homo sapien
atgtgtttttctgtattaagtcaacacagaatc

SEQ ID NO: 442909 - DNA, 33 bp, Homo sapien
tttaagaaaggtgccacatttgcagaacaggga

SEQ ID NO: 442910 - DNA, 33 bp, Homo sapien
tttaagaaaggtgccagatttgcagaacaggga

SEQ ID NO: 442911 - DNA, 33 bp, Homo sapien
tttactattttccttacgtgatttctcccacta

SEQ ID NO: 442912 - DNA, 33 bp, Homo sapien
tttactattttccttatgtgatttctcccacta

SEQ ID NO: 442913 - DNA, 33 bp, Homo sapien
ggttttaatggaaatacgtgatgtggactagca

SEQ ID NO: 442914 - DNA, 33 bp, Homo sapien
ggttttaatggaaatatgtgatgtggactagca

SEQ ID NO: 442915 - DNA, 33 bp, Homo sapien
aggagaaacttttacacggtacatagatataca

SEQ ID NO: 442916 - DNA, 33 bp, Homo sapien
aggagaaacttttacatggtacatagatataca

SEQ ID NO: 442917 - DNA, 33 bp, Homo sapien
attgatactgcatttaacatacaattttgcact

SEQ ID NO: 442918 - DNA, 33 bp, Homo sapien
attgatactgcatttagcatacaattttgcact

SEQ ID NO: 442919 - DNA, 33 bp, Homo sapien
ggtgaggtgtgtttccaaatctgaaatctcagc

SEQ ID NO: 442920 - DNA, 33 bp, Homo sapien
ggtgaggtgtgtttccgaatctgaaatctcagc

SEQ ID NO: 442921 - DNA, 33 bp, Homo sapien
gatgatacatcaatgactcatgtttgagaaaaa

SEQ ID NO: 442922 - DNA, 33 bp, Homo sapien
gatgatacatcaatgagtcatgtttgagaaaaa

SEQ ID NO: 442923 - DNA, 33 bp, Homo sapien
acatcataatcctataaaagcacaaaaatatgg

SEQ ID NO: 442924 - DNA, 33 bp, Homo sapien
acatcataatcctatacaagcacaaaaatatgg

SEQ ID NO: 442925 - DNA, 33 bp, Homo sapien
acacataaaaacacataaggacaagtaaaactg

SEQ ID NO: 442926 - DNA, 33 bp, Homo sapien
acacataaaaacacatgaggacaagtaaaactg

SEQ ID NO: 442927 - DNA, 33 bp, Homo sapien
ttggaccttgaattgcccttaaatcacacatgc

SEQ ID NO: 442928 - DNA, 33 bp, Homo sapien
ttggaccttgaattgctcttaaatcacacatgc

SEQ ID NO: 442929 - DNA, 33 bp, Homo sapien
gtagatgatctattagaaacaaagtgtctgcca

SEQ ID NO: 442930 - DNA, 33 bp, Homo sapien
gtagatgatctattagcaacaaagtgtctgcca

SEQ ID NO: 442931 - DNA, 33 bp, Homo sapien
gtgtcagaattcactgcaagatctgagtgagag

SEQ ID NO: 442932 - DNA, 33 bp, Homo sapien
gtgtcagaattcactgtaagatctgagtgagag

SEQ ID NO: 442933 - DNA, 33 bp, Homo sapien
tcaaataaggtttcaactaatgttttccctctt

SEQ ID NO: 442934 - DNA, 33 bp, Homo sapien
tcaaataaggtttcaattaatgttttccctctt

SEQ ID NO: 442935 - DNA, 33 bp, Homo sapien
aaagacatggatcttacagttcagtaggtgaga

SEQ ID NO: 442936 - DNA, 33 bp, Homo sapien
aaagacatggatcttatagttcagtaggtgaga

SEQ ID NO: 442937 - DNA, 33 bp, Homo sapien
ctgaacactaaggcaccggtgtgaagtttgttg

SEQ ID NO: 442938 - DNA, 33 bp, Homo sapien
ctgaacactaaggcactggtgtgaagtttgttg

SEQ ID NO: 442939 - DNA, 33 bp, Homo sapien
tgtggcacattcatacaatggagtattactcag

SEQ ID NO: 442940 - DNA, 33 bp, Homo sapien
tgtggcacattcatacgatggagtattactcag

SEQ ID NO: 442941 - DNA, 33 bp, Homo sapien
gcctagataagaaaagaagtggcagccactgtg

SEQ ID NO: 442942 - DNA, 33 bp, Homo sapien
gcctagataagaaaaggagtggcagccactgtg

SEQ ID NO: 442943 - DNA, 33 bp, Homo sapien
agtaggagaatgcaaaaacgatatgatgatgct

SEQ ID NO: 442944 - DNA, 33 bp, Homo sapien
agtaggagaatgcaaatacgatatgatgatgct

SEQ ID NO: 442945 - DNA, 33 bp, Homo sapien
tagaccaggggttcaagaccaacccgagcaaca

SEQ ID NO: 442946 - DNA, 33 bp, Homo sapien
tagaccaggggttcaataccaacccgagcaaca

SEQ ID NO: 442947 - DNA, 33 bp, Homo sapien
cccaaagactcagcacaaagccagaccaccatg

SEQ ID NO: 442948 - DNA, 33 bp, Homo sapien
cccaaagactcagcacgaagccagaccaccatg

SEQ ID NO: 442949 - DNA, 33 bp, Homo sapien
tcacatttccagacccaaatcctcagagatctg

SEQ ID NO: 442950 - DNA, 33 bp, Homo sapien
tcacatttccagaccccaatcctcagagatctg

SEQ ID NO: 442951 - DNA, 33 bp, Homo sapien
tcaattacctctcacaatgtcatagtgcagaca

SEQ ID NO: 442952 - DNA, 33 bp, Homo sapien
tcaattacctctcacagtgtcatagtgcagaca

SEQ ID NO: 442953 - DNA, 33 bp, Homo sapien
agggactgcattgacacaaattcccaggactct

SEQ ID NO: 442954 - DNA, 33 bp, Homo sapien
agggactgcattgacataaattcccaggactct

SEQ ID NO: 442955 - DNA, 33 bp, Homo sapien
tccagactgggactcacgaagaagtgtctgttc

SEQ ID NO: 442956 - DNA, 33 bp, Homo sapien
tccagactgggactcatgaagaagtgtctgttc

SEQ ID NO: 442957 - DNA, 33 bp, Homo sapien
cccagacatggaggaccctgagattcacttgta

SEQ ID NO: 442958 - DNA, 33 bp, Homo sapien
cccagacatggaggactctgagattcacttgta

SEQ ID NO: 442959 - DNA, 33 bp, Homo sapien
ttgctggatagaaggactcactcttaaatccca

SEQ ID NO: 442960 - DNA, 33 bp, Homo sapien
ttgctggatagaaggattcactcttaaatccca

SEQ ID NO: 442961 - DNA, 33 bp, Homo sapien
gtaaggtctattttcagcccagtttataaatga

SEQ ID NO: 442962 - DNA, 33 bp, Homo sapien
gtaaggtctattttcatcccagtttataaatga

SEQ ID NO: 442963 - DNA, 33 bp, Homo sapien
ttatacatgctttgcaataacactttatgtaag

SEQ ID NO: 442964 - DNA, 33 bp, Homo sapien
ttatacatgctttgcagtaacactttatgtaag

SEQ ID NO: 442965 - DNA, 33 bp, Homo sapien
cacccagttagaatcacccaaaggcatttcact

SEQ ID NO: 442966 - DNA, 33 bp, Homo sapien
cacccagttagaatcatccaaaggcatttcact

SEQ ID NO: 442967 - DNA, 33 bp, Homo sapien
ggaaaggacctgaaacagagctggttgcttctc

SEQ ID NO: 442968 - DNA, 33 bp, Homo sapien
ggaaaggacctgaaacggagctggttgcttctc

SEQ ID NO: 442969 - DNA, 33 bp, Homo sapien
aggaccggaaggtgaaatattcgatgaaataaa

SEQ ID NO: 442970 - DNA, 33 bp, Homo sapien
aggaccggaaggtgaagtattcgatgaaataaa

SEQ ID NO: 442971 - DNA, 33 bp, Homo sapien
gtccacaattgaaagaaatgattcaggctgaag

SEQ ID NO: 442972 - DNA, 33 bp, Homo sapien
gtccacaattgaaagagatgattcaggctgaag

SEQ ID NO: 442973 - DNA, 33 bp, Homo sapien
gctaaatgatatctacaatactctgacacagta

SEQ ID NO: 442974 - DNA, 33 bp, Homo sapien
gctaaatgatatctacgatactctgacacagta

SEQ ID NO: 442975 - DNA, 33 bp, Homo sapien
taaactcttggtatgacgttgctttcatctagt

SEQ ID NO: 442976 - DNA, 33 bp, Homo sapien
taaactcttggtatgatgttgctttcatctagt

SEQ ID NO: 442977 - DNA, 33 bp, Homo sapien
ccctttctgccacttacgttgtaaactcttggt

SEQ ID NO: 442978 - DNA, 33 bp, Homo sapien
ccctttctgccacttatgttgtaaactcttggt

SEQ ID NO: 442979 - DNA, 33 bp, Homo sapien
actgatcagatttaccgggcagtatttgattga

SEQ ID NO: 442980 - DNA, 33 bp, Homo sapien
actgatcagatttacctggcagtatttgattga

SEQ ID NO: 442981 - DNA, 33 bp, Homo sapien
ggtctgtacatggaaaaggttgtagttgcaaaa

SEQ ID NO: 442982 - DNA, 33 bp, Homo sapien
ggtctgtacatggaaatggttgtagttgcaaaa

SEQ ID NO: 442983 - DNA, 33 bp, Homo sapien
ataagtacagccatgcactcaggccagttccca

SEQ ID NO: 442984 - DNA, 33 bp, Homo sapien
ataagtacagccatgcgctcaggccagttccca

SEQ ID NO: 442985 - DNA, 33 bp, Homo sapien
atctctaatagacagcagagttttccagaggct

SEQ ID NO: 442986 - DNA, 33 bp, Homo sapien
atctctaatagacagcggagttttccagaggct

SEQ ID NO: 442987 - DNA, 33 bp, Homo sapien
tcaaagtactggcctcaaagcctgtgggtgaat

SEQ ID NO: 442988 - DNA, 33 bp, Homo sapien
tcaaagtactggcctccaagcctgtgggtgaat

SEQ ID NO: 442989 - DNA, 33 bp, Homo sapien
gagcccagtggtcacacctcttctccagcatat

SEQ ID NO: 442990 - DNA, 33 bp, Homo sapien
gagcccagtggtcacatctcttctccagcatat

SEQ ID NO: 442991 - DNA, 33 bp, Homo sapien
agaatgtcctttcagactcaacaaggtatgtgg

SEQ ID NO: 442992 - DNA, 33 bp, Homo sapien
agaatgtcctttcagagtcaacaaggtatgtgg

SEQ ID NO: 442993 - DNA, 33 bp, Homo sapien
gggctcttctgtttgacggtcgccttccttatc

SEQ ID NO: 442994 - DNA, 33 bp, Homo sapien
gggctcttctgtttgatggtcgccttccttatc

SEQ ID NO: 442995 - DNA, 33 bp, Homo sapien
agactgtatggctgtaaatataggcaacgtttg

SEQ ID NO: 442996 - DNA, 33 bp, Homo sapien
agactgtatggctgtacatataggcaacgtttg

SEQ ID NO: 442997 - DNA, 33 bp, Homo sapien
gtaaaagacctggctcaattgaaaacataaggt

SEQ ID NO: 442998 - DNA, 33 bp, Homo sapien
gtaaaagacctggctcgattgaaaacataaggt

SEQ ID NO: 442999 - DNA, 33 bp, Homo sapien
gtgagaatccctgtgcaagtcagctagaagccc

SEQ ID NO: 443000 - DNA, 33 bp, Homo sapien
gtgagaatccctgtgcgagtcagctagaagccc

SEQ ID NO: 443001 - DNA, 33 bp, Homo sapien
cttaaagtgtctcctgcaatttggaaaacactg

SEQ ID NO: 443002 - DNA, 33 bp, Homo sapien
cttaaagtgtctcctggaatttggaaaacactg

SEQ ID NO: 443003 - DNA, 33 bp, Homo sapien
ttgaactcatgaagacagactccagagctggac

SEQ ID NO: 443004 - DNA, 33 bp, Homo sapien
ttgaactcatgaagactgactccagagctggac

SEQ ID NO: 443005 - DNA, 33 bp, Homo sapien
aggagccatagagagacgggatgattttaagaa

SEQ ID NO: 443006 - DNA, 33 bp, Homo sapien
aggagccatagagagatgggatgattttaagaa

SEQ ID NO: 443007 - DNA, 33 bp, Homo sapien
ttaaataatccagctccaatattgtcacagcta

SEQ ID NO: 443008 - DNA, 33 bp, Homo sapien
ttaaataatccagctctaatattgtcacagcta

SEQ ID NO: 443009 - DNA, 33 bp, Homo sapien
aaatcttcttcaaagcgcattttatgattaacg

SEQ ID NO: 443010 - DNA, 33 bp, Homo sapien
aaatcttcttcaaagctcattttatgattaacg

SEQ ID NO: 443011 - DNA, 33 bp, Homo sapien
gagtatgttattgatacgaatgttccaaagtga

SEQ ID NO: 443012 - DNA, 33 bp, Homo sapien
gagtatgttattgatatgaatgttccaaagtga

SEQ ID NO: 443013 - DNA, 33 bp, Homo sapien
gcatgattgtatttcaagtatgtaaaataaaat

SEQ ID NO: 443014 - DNA, 33 bp, Homo sapien
gcatgattgtatttcaggtatgtaaaataaaat

SEQ ID NO: 443015 - DNA, 33 bp, Homo sapien
agaagatcagcactaacgaggctggtgtcctcc

SEQ ID NO: 443016 - DNA, 33 bp, Homo sapien
agaagatcagcactaatgaggctggtgtcctcc

SEQ ID NO: 443017 - DNA, 33 bp, Homo sapien
aaagtaaacccaacaactatggtgtttctcagg

SEQ ID NO: 443018 - DNA, 33 bp, Homo sapien
aaagtaaacccaacaattatggtgtttctcagg

SEQ ID NO: 443019 - DNA, 33 bp, Homo sapien
actagaaaaggtgtgtgaaagttattcaatatt

SEQ ID NO: 443020 - DNA, 33 bp, Homo sapien
actagaaaaggtgtgttaaagttattcaatatt

SEQ ID NO: 443021 - DNA, 33 bp, Homo sapien
tggtgtcttactgctaggcttgttcatctgagt

SEQ ID NO: 443022 - DNA, 33 bp, Homo sapien
tggtgtcttactgctatgcttgttcatctgagt

SEQ ID NO: 443023 - DNA, 33 bp, Homo sapien
atgctttatgttttaacatccctatccatttat

SEQ ID NO: 443024 - DNA, 33 bp, Homo sapien
atgctttatgttttaatatccctatccatttat

SEQ ID NO: 443025 - DNA, 33 bp, Homo sapien
atcctcactgatttcaagaaaacaacactacca

SEQ ID NO: 443026 - DNA, 33 bp, Homo sapien
atcctcactgatttcaggaaaacaacactacca

SEQ ID NO: 443027 - DNA, 33 bp, Homo sapien
gtcagtgggtggcgaaaatgagattcatccctt

SEQ ID NO: 443028 - DNA, 33 bp, Homo sapien
gtcagtgggtggcgaagatgagattcatccctt

SEQ ID NO: 443029 - DNA, 33 bp, Homo sapien
gaatgtcaaaaacataccactgagcaaaagaag

SEQ ID NO: 443030 - DNA, 33 bp, Homo sapien
gaatgtcaaaaacatatcactgagcaaaagaag

SEQ ID NO: 443031 - DNA, 33 bp, Homo sapien
aatagagtgtccaacaacatttatggtaattat

SEQ ID NO: 443032 - DNA, 33 bp, Homo sapien
aatagagtgtccaacagcatttatggtaattat

SEQ ID NO: 443033 - DNA, 33 bp, Homo sapien
gagattcttgacccccaggaaatgtgagatcag

SEQ ID NO: 443034 - DNA, 33 bp, Homo sapien
gagattcttgacccccgggaaatgtgagatcag

SEQ ID NO: 443035 - DNA, 33 bp, Homo sapien
gacttggcacagattgaaagggatgtgaaagac

SEQ ID NO: 443036 - DNA, 33 bp, Homo sapien
gacttggcacagattggaagggatgtgaaagac

SEQ ID NO: 443037 - DNA, 33 bp, Homo sapien
tctctctctaatactacagcagaagcaggttac

SEQ ID NO: 443038 - DNA, 33 bp, Homo sapien
tctctctctaatactatagcagaagcaggttac

SEQ ID NO: 443039 - DNA, 33 bp, Homo sapien
tatgatgcactttccaactccaagtagatttta

SEQ ID NO: 443040 - DNA, 33 bp, Homo sapien
tatgatgcactttccatctccaagtagatttta

SEQ ID NO: 443041 - DNA, 33 bp, Homo sapien
agagcacaagtggaccagaacctggaaaaatgt

SEQ ID NO: 443042 - DNA, 33 bp, Homo sapien
agagcacaagtggaccggaacctggaaaaatgt

SEQ ID NO: 443043 - DNA, 33 bp, Homo sapien
atttttagtccatcaacgccccattagtctatt

SEQ ID NO: 443044 - DNA, 33 bp, Homo sapien
atttttagtccatcaatgccccattagtctatt

SEQ ID NO: 443045 - DNA, 33 bp, Homo sapien
gccaccgctgtagtagcattcggatcatcacct

SEQ ID NO: 443046 - DNA, 33 bp, Homo sapien
gccaccgctgtagtaggattcggatcatcacct

SEQ ID NO: 443047 - DNA, 33 bp, Homo sapien
gacgttagattccttcactttggtacccaagta

SEQ ID NO: 443048 - DNA, 33 bp, Homo sapien
gacgttagattccttcgctttggtacccaagta

SEQ ID NO: 443049 - DNA, 33 bp, Homo sapien
gatgcaaaaatcttcaaacaagtactagcaaac

SEQ ID NO: 443050 - DNA, 33 bp, Homo sapien
gatgcaaaaatcttcagacaagtactagcaaac

SEQ ID NO: 443051 - DNA, 33 bp, Homo sapien
ttggaactaacaaaaaagtcctttaatagttga

SEQ ID NO: 443052 - DNA, 33 bp, Homo sapien
ttggaactaacaaaaatgtcctttaatagttga

SEQ ID NO: 443053 - DNA, 33 bp, Homo sapien
ttatttgggtggatataaatttcaacctattca

SEQ ID NO: 443054 - DNA, 33 bp, Homo sapien
ttatttgggtggatatgaatttcaacctattca

SEQ ID NO: 443055 - DNA, 33 bp, Homo sapien
ctctcactcagcatgacactttttatatttgtc

SEQ ID NO: 443056 - DNA, 33 bp, Homo sapien
ctctcactcagcatgatactttttatatttgtc

SEQ ID NO: 443057 - DNA, 33 bp, Homo sapien
ttgtaaaggaaatggccaacttacagggttcat

SEQ ID NO: 443058 - DNA, 33 bp, Homo sapien
ttgtaaaggaaatggctaacttacagggttcat

SEQ ID NO: 443059 - DNA, 33 bp, Homo sapien
gtcttcatgtcacctagtcagaagttcatatca

SEQ ID NO: 443060 - DNA, 33 bp, Homo sapien
gtcttcatgtcacctattcagaagttcatatca

SEQ ID NO: 443061 - DNA, 33 bp, Homo sapien
cagaggagtacctaaccaactgatatttaaaaa

SEQ ID NO: 443062 - DNA, 33 bp, Homo sapien
cagaggagtacctaactaactgatatttaaaaa

SEQ ID NO: 443063 - DNA, 33 bp, Homo sapien
ggtatttgattaaatgaccacatgaaaaatgga

SEQ ID NO: 443064 - DNA, 33 bp, Homo sapien
ggtatttgattaaatggccacatgaaaaatgga

SEQ ID NO: 443065 - DNA, 33 bp, Homo sapien
gaattattgccctgaacaccccactaggatctc

SEQ ID NO: 443066 - DNA, 33 bp, Homo sapien
gaattattgccctgaataccccactaggatctc

SEQ ID NO: 443067 - DNA, 33 bp, Homo sapien
ttccgagtttggtgtcgaattctctcaaatcaa

SEQ ID NO: 443068 - DNA, 33 bp, Homo sapien
ttccgagtttggtgtctaattctctcaaatcaa

SEQ ID NO: 443069 - DNA, 33 bp, Homo sapien
cctctcattttaaagacagaagtgacttgccca

SEQ ID NO: 443070 - DNA, 33 bp, Homo sapien
cctctcattttaaagatagaagtgacttgccca

SEQ ID NO: 443071 - DNA, 33 bp, Homo sapien
acatactggatacctacgttgcaagtaacttct

SEQ ID NO: 443072 - DNA, 33 bp, Homo sapien
acatactggatacctatgttgcaagtaacttct

SEQ ID NO: 443073 - DNA, 33 bp, Homo sapien
ctgcttcctcaggaaccacattatgtggcagaa

SEQ ID NO: 443074 - DNA, 33 bp, Homo sapien
ctgcttcctcaggaactacattatgtggcagaa

SEQ ID NO: 443075 - DNA, 33 bp, Homo sapien
agacactagcttctaacggagtgctggtgtcac

SEQ ID NO: 443076 - DNA, 33 bp, Homo sapien
agacactagcttctaagggagtgctggtgtcac

SEQ ID NO: 443077 - DNA, 33 bp, Homo sapien
ctcaaatctacagaaaaatagcaacattcaagt

SEQ ID NO: 443078 - DNA, 33 bp, Homo sapien
ctcaaatctacagaaagatagcaacattcaagt

SEQ ID NO: 443079 - DNA, 33 bp, Homo sapien
ctataaaaacgtatgactactgtgtacccacaa

SEQ ID NO: 443080 - DNA, 33 bp, Homo sapien
ctataaaaacgtatgagtactgtgtacccacaa

SEQ ID NO: 443081 - DNA, 33 bp, Homo sapien
caaaccagattcttagccacagggcaccagtgg

SEQ ID NO: 443082 - DNA, 33 bp, Homo sapien
caaaccagattcttagtcacagggcaccagtgg

SEQ ID NO: 443083 - DNA, 33 bp, Homo sapien
tagacagcatctctgaaaatttaggtgtcacag

SEQ ID NO: 443084 - DNA, 33 bp, Homo sapien
tagacagcatctctgacaatttaggtgtcacag

SEQ ID NO: 443085 - DNA, 33 bp, Homo sapien
ttgcttagctataccaagccaagtgggatagct

SEQ ID NO: 443086 - DNA, 33 bp, Homo sapien
ttgcttagctataccatgccaagtgggatagct

SEQ ID NO: 443087 - DNA, 33 bp, Homo sapien
ttatataaggtcattaaagtgagtcaagaacgg

SEQ ID NO: 443088 - DNA, 33 bp, Homo sapien
ttatataaggtcattacagtgagtcaagaacgg

SEQ ID NO: 443089 - DNA, 33 bp, Homo sapien
ctgtgttgtttgccaaagactttagggtagggg

SEQ ID NO: 443090 - DNA, 33 bp, Homo sapien
ctgtgttgtttgccaaggactttagggtagggg

SEQ ID NO: 443091 - DNA, 33 bp, Homo sapien
ttctaggactcagtgacgtctacttccatgttg

SEQ ID NO: 443092 - DNA, 33 bp, Homo sapien
ttctaggactcagtgatgtctacttccatgttg

SEQ ID NO: 443093 - DNA, 33 bp, Homo sapien
ttttaagttgggagataataagtcatcttgttt

SEQ ID NO: 443094 - DNA, 33 bp, Homo sapien
ttttaagttgggagatcataagtcatcttgttt

SEQ ID NO: 443095 - DNA, 33 bp, Homo sapien
ttttggtaaaaagcaaagcaactagttacataa

SEQ ID NO: 443096 - DNA, 33 bp, Homo sapien
ttttggtaaaaagcaaggcaactagttacataa

SEQ ID NO: 443097 - DNA, 33 bp, Homo sapien
cctctactcttactcaacataggacaggagaag

SEQ ID NO: 443098 - DNA, 33 bp, Homo sapien
cctctactcttactcagcataggacaggagaag

SEQ ID NO: 443099 - DNA, 33 bp, Homo sapien
tcacctagagaaaggaaaccagattcccatcac

SEQ ID NO: 443100 - DNA, 33 bp, Homo sapien
tcacctagagaaaggagaccagattcccatcac

SEQ ID NO: 443101 - DNA, 33 bp, Homo sapien
aaaatcagactttaaaaccaagttcttttatga

SEQ ID NO: 443102 - DNA, 33 bp, Homo sapien
aaaatcagactttaaagccaagttcttttatga

SEQ ID NO: 443103 - DNA, 33 bp, Homo sapien
tgctaatttttatttaagtgtcacctgatgaaa

SEQ ID NO: 443104 - DNA, 33 bp, Homo sapien
tgctaatttttatttatgtgtcacctgatgaaa

SEQ ID NO: 443105 - DNA, 33 bp, Homo sapien
gccacaactttttacccgggattgcttggatta

SEQ ID NO: 443106 - DNA, 33 bp, Homo sapien
gccacaactttttacctgggattgcttggatta

SEQ ID NO: 443107 - DNA, 33 bp, Homo sapien
tcctcatgaatgtccaatgatattacatctgat

SEQ ID NO: 443108 - DNA, 33 bp, Homo sapien
tcctcatgaatgtccagtgatattacatctgat

SEQ ID NO: 443109 - DNA, 33 bp, Homo sapien
agacaaccccaactgcgattttgagatcaattt

SEQ ID NO: 443110 - DNA, 33 bp, Homo sapien
agacaaccccaactgctattttgagatcaattt

SEQ ID NO: 443111 - DNA, 33 bp, Homo sapien
gggaccagctcgctaacctttgaaacagttcaa

SEQ ID NO: 443112 - DNA, 33 bp, Homo sapien
gggaccagctcgctaatctttgaaacagttcaa

SEQ ID NO: 443113 - DNA, 33 bp, Homo sapien
aaattacaaaaaataacaggaaaatctggtagg

SEQ ID NO: 443114 - DNA, 33 bp, Homo sapien
aaattacaaaaaataagaggaaaatctggtagg

SEQ ID NO: 443115 - DNA, 33 bp, Homo sapien
atatttgggcaagaaaagatgaagttaaatgtt

SEQ ID NO: 443116 - DNA, 33 bp, Homo sapien
atatttgggcaagaaaggatgaagttaaatgtt

SEQ ID NO: 443117 - DNA, 33 bp, Homo sapien
cactgaaagtcaagtcacaaaaaattatttatg

SEQ ID NO: 443118 - DNA, 33 bp, Homo sapien
cactgaaagtcaagtctcaaaaaattatttatg

SEQ ID NO: 443119 - DNA, 33 bp, Homo sapien
atctgaggtcatcaacaatgcttgatcagtcag

SEQ ID NO: 443120 - DNA, 33 bp, Homo sapien
atctgaggtcatcaacgatgcttgatcagtcag

SEQ ID NO: 443121 - DNA, 33 bp, Homo sapien
ctgtggaaattgtgacaactccttctagcctaa

SEQ ID NO: 443122 - DNA, 33 bp, Homo sapien
ctgtggaaattgtgaccactccttctagcctaa

SEQ ID NO: 443123 - DNA, 33 bp, Homo sapien
acaatctttaaacaaccgtaacatcaccagcca

SEQ ID NO: 443124 - DNA, 33 bp, Homo sapien
acaatctttaaacaactgtaacatcaccagcca

SEQ ID NO: 443125 - DNA, 33 bp, Homo sapien
gaagctctgtcttctggactcttggaatcaggc

SEQ ID NO: 443126 - DNA, 33 bp, Homo sapien
gaagctctgtcttctgtactcttggaatcaggc

SEQ ID NO: 443127 - DNA, 33 bp, Homo sapien
tagagcctctggtagaacactcatactgagcag

SEQ ID NO: 443128 - DNA, 33 bp, Homo sapien
tagagcctctggtagagcactcatactgagcag

SEQ ID NO: 443129 - DNA, 33 bp, Homo sapien
caggcatgagagcctgaagaacagaagcacccc

SEQ ID NO: 443130 - DNA, 33 bp, Homo sapien
caggcatgagagcctgcagaacagaagcacccc

SEQ ID NO: 443131 - DNA, 33 bp, Homo sapien
tacaatttctggacaccaaaaatagaggttggg

SEQ ID NO: 443132 - DNA, 33 bp, Homo sapien
tacaatttctggacactaaaaatagaggttggg

SEQ ID NO: 443133 - DNA, 33 bp, Homo sapien
tctagctcaccaagaaatgcttgaaattatagg

SEQ ID NO: 443134 - DNA, 33 bp, Homo sapien
tctagctcaccaagaagtgcttgaaattatagg

SEQ ID NO: 443135 - DNA, 33 bp, Homo sapien
gctctgagtacttacacagtaaaagaaatccct

SEQ ID NO: 443136 - DNA, 33 bp, Homo sapien
gctctgagtacttacatagtaaaagaaatccct

SEQ ID NO: 443137 - DNA, 33 bp, Homo sapien
ctctaagtagcctgaaatagagccatggataat

SEQ ID NO: 443138 - DNA, 33 bp, Homo sapien
ctctaagtagcctgaattagagccatggataat

SEQ ID NO: 443139 - DNA, 33 bp, Homo sapien
aaaaatctggcttaaactgattgaatcatgtaa

SEQ ID NO: 443140 - DNA, 33 bp, Homo sapien
aaaaatctggcttaaattgattgaatcatgtaa

SEQ ID NO: 443141 - DNA, 33 bp, Homo sapien
tgtctcggtataaaagccgatcatacattcgtt

SEQ ID NO: 443142 - DNA, 33 bp, Homo sapien
tgtctcggtataaaaggcgatcatacattcgtt

SEQ ID NO: 443143 - DNA, 33 bp, Homo sapien; identical to SEQ ID NO: 443141

SEQ ID NO: 443144 - DNA, 33 bp, Homo sapien; identical to SEQ ID NO: 443142

SEQ ID NO: 443145 - DNA, 33 bp, Homo sapien
tttactattttagtaaagggaatgtggcaggag

SEQ ID NO: 443146 - DNA, 33 bp, Homo sapien
tttactattttagtaaggggaatgtggcaggag

SEQ ID NO: 443147 - DNA, 33 bp, Homo sapien
ttcattacaaggtggccatctatgacactgttg

SEQ ID NO: 443148 - DNA, 33 bp, Homo sapien
ttcattacaaggtggctatctatgacactgttg

SEQ ID NO: 443149 - DNA, 33 bp, Homo sapien
ctcctttttcagtatgccaaccctgatcccatc

SEQ ID NO: 443150 - DNA, 33 bp, Homo sapien
ctcctttttcagtatggcaaccctgatcccatc

SEQ ID NO: 443151 - DNA, 33 bp, Homo sapien
cgaagcaacatccttgcatcttttgtccttatc

SEQ ID NO: 443152 - DNA, 33 bp, Homo sapien
cgaagcaacatccttgtatcttttgtccttatc

SEQ ID NO: 443153 - DNA, 33 bp, Homo sapien
ttgttagggagtgtaacacctctgtcgaagtac

SEQ ID NO: 443154 - DNA, 33 bp, Homo sapien
ttgttagggagtgtaatacctctgtcgaagtac

SEQ ID NO: 443155 - DNA, 33 bp, Homo sapien
aacagtgatacttccaaaattacctattttaca

SEQ ID NO: 443156 - DNA, 33 bp, Homo sapien
aacagtgatacttccataattacctattttaca

SEQ ID NO: 443157 - DNA, 33 bp, Homo sapien
ttactttaacaacccacagcacttcatttagca

SEQ ID NO: 443158 - DNA, 33 bp, Homo sapien
ttactttaacaacccagagcacttcatttagca

SEQ ID NO: 443159 - DNA, 33 bp, Homo sapien
cactgaccttcaggtaactttccttctatctat

SEQ ID NO: 443160 - DNA, 33 bp, Homo sapien
cactgaccttcaggtatctttccttctatctat

SEQ ID NO: 443161 - DNA, 33 bp, Homo sapien
gagatagctgattgataaatagataagatagac

SEQ ID NO: 443162 - DNA, 33 bp, Homo sapien
gagatagctgattgattaatagataagatagac

SEQ ID NO: 443163 - DNA, 33 bp, Homo sapien
aatgaagtcactttcaaagcagttctctacaat

SEQ ID NO: 443164 - DNA, 33 bp, Homo sapien
aatgaagtcactttcagagcagttctctacaat

SEQ ID NO: 443165 - DNA, 33 bp, Homo sapien
cagttctctacaattcaacagttcataaaagca

SEQ ID NO: 443166 - DNA, 33 bp, Homo sapien
cagttctctacaattctacagttcataaaagca

SEQ ID NO: 443167 - DNA, 33 bp, Homo sapien
ggaagggcagctgttacgcaaggccagccctag

SEQ ID NO: 443168 - DNA, 33 bp, Homo sapien
ggaagggcagctgttatgcaaggccagccctag

SEQ ID NO: 443169 - DNA, 33 bp, Homo sapien
ctttgtccacgcttacaccccaactctatccac

SEQ ID NO: 443170 - DNA, 33 bp, Homo sapien
ctttgtccacgcttactccccaactctatccac

SEQ ID NO: 443171 - DNA, 33 bp, Homo sapien
ttcctggcccatagtaagaactaaacaagtgtt

SEQ ID NO: 443172 - DNA, 33 bp, Homo sapien
ttcctggcccatagtacgaactaaacaagtgtt

SEQ ID NO: 443173 - DNA, 33 bp, Homo sapien
tgggtataaagttgaacaagctaataacatcag

SEQ ID NO: 443174 - DNA, 33 bp, Homo sapien
tgggtataaagttgaataagctaataacatcag

SEQ ID NO: 443175 - DNA, 33 bp, Homo sapien
taataagaaaaagaaaaggatgatctgccacaa

SEQ ID NO: 443176 - DNA, 33 bp, Homo sapien
taataagaaaaagaaacggatgatctgccacaa

SEQ ID NO: 443177 - DNA, 33 bp, Homo sapien
tgcataagataaccaactgcattttatttttcg

SEQ ID NO: 443178 - DNA, 33 bp, Homo sapien
tgcataagataaccaagtgcattttatttttcg

SEQ ID NO: 443179 - DNA, 33 bp, Homo sapien
ttagttttagggtgagcaaaatctgccgaaaaa

SEQ ID NO: 443180 - DNA, 33 bp, Homo sapien
ttagttttagggtgaggaaaatctgccgaaaaa

SEQ ID NO: 443181 - DNA, 33 bp, Homo sapien
taaaactcatgaattaaatttacacggaaaatg

SEQ ID NO: 443182 - DNA, 33 bp, Homo sapien
taaaactcatgaattacatttacacggaaaatg

SEQ ID NO: 443183 - DNA, 33 bp, Homo sapien
ttaaggctcttactcactcaaataacattttgt

SEQ ID NO: 443184 - DNA, 33 bp, Homo sapien
ttaaggctcttactcattcaaataacattttgt

SEQ ID NO: 443185 - DNA, 33 bp, Homo sapien
cagacattattgatgaagactacaactgaggaa

SEQ ID NO: 443186 - DNA, 33 bp, Homo sapien
cagacattattgatgatgactacaactgaggaa

SEQ ID NO: 443187 - DNA, 33 bp, Homo sapien
agttgaaaatgttcctaaagtggataaaaatgt

SEQ ID NO: 443188 - DNA, 33 bp, Homo sapien
agttgaaaatgttccttaagtggataaaaatgt

SEQ ID NO: 443189 - DNA, 33 bp, Homo sapien
gactttttatggtagggatgaaaccaaagtgag

SEQ ID NO: 443190 - DNA, 33 bp, Homo sapien
gactttttatggtaggtatgaaaccaaagtgag

SEQ ID NO: 443191 - DNA, 33 bp, Homo sapien
aaaatgctctctctaacccaggatgcctaacta

SEQ ID NO: 443192 - DNA, 33 bp, Homo sapien
aaaatgctctctctaagccaggatgcctaacta

SEQ ID NO: 443193 - DNA, 33 bp, Homo sapien
aacagaagggcaaagcaatgaaaagtaaatata

SEQ ID NO: 443194 - DNA, 33 bp, Homo sapien
aacagaagggcaaagcgatgaaaagtaaatata

SEQ ID NO: 443195 - DNA, 33 bp, Homo sapien
gcaaaatcatgagctgcaaaaggataacagaag

SEQ ID NO: 443196 - DNA, 33 bp, Homo sapien
gcaaaatcatgagctggaaaaggataacagaag

SEQ ID NO: 443197 - DNA, 33 bp, Homo sapien
gagttagaagcagtccagaacaagaacctaaga

SEQ ID NO: 443198 - DNA, 33 bp, Homo sapien
gagttagaagcagtccggaacaagaacctaaga

SEQ ID NO: 443199 - DNA, 33 bp, Homo sapien
tcagcaatagcagataagtgagtttctgtttct

SEQ ID NO: 443200 - DNA, 33 bp, Homo sapien
tcagcaatagcagatatgtgagtttctgtttct

SEQ ID NO: 443201 - DNA, 33 bp, Homo sapien
agcaggctgaggtcacagcttttgtagtagagt

SEQ ID NO: 443202 - DNA, 33 bp, Homo sapien
agcaggctgaggtcacggcttttgtagtagagt

SEQ ID NO: 443203 - DNA, 33 bp, Homo sapien
actgaatgaatttggaagagaaaatgaatttcg

SEQ ID NO: 443204 - DNA, 33 bp, Homo sapien
actgaatgaatttggaggagaaaatgaatttcg

SEQ ID NO: 443205 - DNA, 33 bp, Homo sapien
tcttgaaagagtagtcaaagagggctgtcttca

SEQ ID NO: 443206 - DNA, 33 bp, Homo sapien
tcttgaaagagtagtcgaagagggctgtcttca

SEQ ID NO: 443207 - DNA, 33 bp, Homo sapien
gtgactagaatactgagaagtgggctctcttca

SEQ ID NO: 443208 - DNA, 33 bp, Homo sapien
gtgactagaatactgataagtgggctctcttca

SEQ ID NO: 443209 - DNA, 33 bp, Homo sapien
tcttgaagtggctttacgtacctgagacatctg

SEQ ID NO: 443210 - DNA, 33 bp, Homo sapien
tcttgaagtggctttatgtacctgagacatctg

SEQ ID NO: 443211 - DNA, 33 bp, Homo sapien
ctataaataccccctgcagaatgtaaatggcta

SEQ ID NO: 443212 - DNA, 33 bp, Homo sapien
ctataaataccccctgtagaatgtaaatggcta

SEQ ID NO: 443213 - DNA, 33 bp, Homo sapien
ctatgcaaaatgtccaatgcaaagaaggtattc

SEQ ID NO: 443214 - DNA, 33 bp, Homo sapien
ctatgcaaaatgtccagtgcaaagaaggtattc

SEQ ID NO: 443215 - DNA, 33 bp, Homo sapien
cttgtgaccaagcataaaatgttttaccagtga

SEQ ID NO: 443216 - DNA, 33 bp, Homo sapien
cttgtgaccaagcatacaatgttttaccagtga

SEQ ID NO: 443217 - DNA, 33 bp, Homo sapien
aaaagagacagattcactagttatcatccagat

SEQ ID NO: 443218 - DNA, 33 bp, Homo sapien
aaaagagacagattcagtagttatcatccagat

SEQ ID NO: 443219 - DNA, 33 bp, Homo sapien
cctctattggcaaagccgaacactgggccagtc

SEQ ID NO: 443220 - DNA, 33 bp, Homo sapien
cctctattggcaaagctgaacactgggccagtc

SEQ ID NO: 443221 - DNA, 33 bp, Homo sapien
ggcttctcgtaagccacctttggccatctgaca

SEQ ID NO: 443222 - DNA, 33 bp, Homo sapien
ggcttctcgtaagccagctttggccatctgaca

SEQ ID NO: 443223 - DNA, 33 bp, Homo sapien
agattcctgggatccaaagtcaccttctgaggt

SEQ ID NO: 443224 - DNA, 33 bp, Homo sapien
agattcctgggatccagagtcaccttctgaggt

SEQ ID NO: 443225 - DNA, 33 bp, Homo sapien
acatcagcctgatctactactgttgtaatactt

SEQ ID NO: 443226 - DNA, 33 bp, Homo sapien
acatcagcctgatctagtactgttgtaatactt

SEQ ID NO: 443227 - DNA, 33 bp, Homo sapien
tttaatttcagccaaacaaagaggatatagagg

SEQ ID NO: 443228 - DNA, 33 bp, Homo sapien
tttaatttcagccaaagaaagaggatatagagg

SEQ ID NO: 443229 - DNA, 33 bp, Homo sapien
cttttctggaatgtcaactgagaagaatgtgcc

SEQ ID NO: 443230 - DNA, 33 bp, Homo sapien
cttttctggaatgtcagctgagaagaatgtgcc

SEQ ID NO: 443231 - DNA, 33 bp, Homo sapien
tccagtagagggcgccggatagtcatctttgcc

SEQ ID NO: 443232 - DNA, 33 bp, Homo sapien
tccagtagagggcgcctgatagtcatctttgcc

SEQ ID NO: 443233 - DNA, 33 bp, Homo sapien
gatcctctccccagacagctagacttttacaaa

SEQ ID NO: 443234 - DNA, 33 bp, Homo sapien
gatcctctccccagacggctagacttttacaaa

SEQ ID NO: 443235 - DNA, 33 bp, Homo sapien
ggtgggtgtggcttaacagtattctctagtgaa

SEQ ID NO: 443236 - DNA, 33 bp, Homo sapien
ggtgggtgtggcttaagagtattctctagtgaa

SEQ ID NO: 443237 - DNA, 33 bp, Homo sapien
acattctgtccaacatcagaacctatgattcct

SEQ ID NO: 443238 - DNA, 33 bp, Homo sapien
acattctgtccaacatgagaacctatgattcct

SEQ ID NO: 443239 - DNA, 33 bp, Homo sapien
ggttcccggcaaaggcaatgactataccagaac

SEQ ID NO: 443240 - DNA, 33 bp, Homo sapien
ggttcccggcaaaggcgatgactataccagaac

SEQ ID NO: 443241 - DNA, 33 bp, Homo sapien
ttataaggttagaaacccagcacaagataaaaa

SEQ ID NO: 443242 - DNA, 33 bp, Homo sapien
ttataaggttagaaactcagcacaagataaaaa

SEQ ID NO: 443243 - DNA, 33 bp, Homo sapien
gagcacactgagaaagaaggacatgacagccgg

SEQ ID NO: 443244 - DNA, 33 bp, Homo sapien
gagcacactgagaaaggaggacatgacagccgg

SEQ ID NO: 443245 - DNA, 33 bp, Homo sapien
tatttctggagataccacagggcagaaagtggg

SEQ ID NO: 443246 - DNA, 33 bp, Homo sapien
tatttctggagataccgcagggcagaaagtggg

SEQ ID NO: 443247 - DNA, 33 bp, Homo sapien
ttctgagactattggaaaagaagcatgttctca

SEQ ID NO: 443248 - DNA, 33 bp, Homo sapien
ttctgagactattggagaagaagcatgttctca

SEQ ID NO: 443249 - DNA, 33 bp, Homo sapien
tacttcttatattacaaagatacaatggcaatc

SEQ ID NO: 443250 - DNA, 33 bp, Homo sapien
tacttcttatattacatagatacaatggcaatc

SEQ ID NO: 443251 - DNA, 33 bp, Homo sapien
aacaatgctagaagaacaggcagactgaggcca

SEQ ID NO: 443252 - DNA, 33 bp, Homo sapien
aacaatgctagaagaataggcagactgaggcca

SEQ ID NO: 443253 - DNA, 33 bp, Homo sapien
gcacgggggttctggacactgtcaactctatac

SEQ ID NO: 443254 - DNA, 33 bp, Homo sapien
gcacgggggttctggatactgtcaactctatac

SEQ ID NO: 443255 - DNA, 33 bp, Homo sapien
ggctgagttttaataacactgcattcaccaaaa

SEQ ID NO: 443256 - DNA, 33 bp, Homo sapien
ggctgagttttaataatactgcattcaccaaaa

SEQ ID NO: 443257 - DNA, 33 bp, Homo sapien
actaatcttttgctggacatatatttagcaaac

SEQ ID NO: 443258 - DNA, 33 bp, Homo sapien
actaatcttttgctggtcatatatttagcaaac

SEQ ID NO: 443259 - DNA, 33 bp, Homo sapien
tgagctagtgagaaagcactgcaggatagtaag

SEQ ID NO: 443260 - DNA, 33 bp, Homo sapien
tgagctagtgagaaagtactgcaggatagtaag

SEQ ID NO: 443261 - DNA, 33 bp, Homo sapien
aggggaatacctagaaaactcctattgctatta

SEQ ID NO: 443262 - DNA, 33 bp, Homo sapien
aggggaatacctagaacactcctattgctatta

SEQ ID NO: 443263 - DNA, 33 bp, Homo sapien
ctcgctctccttatgcagacaagctccagtaga

SEQ ID NO: 443264 - DNA, 33 bp, Homo sapien
ctcgctctccttatgcggacaagctccagtaga

SEQ ID NO: 443265 - DNA, 33 bp, Homo sapien
gaagaattctttttgaagctaatcatagtgctg

SEQ ID NO: 443266 - DNA, 33 bp, Homo sapien
gaagaattctttttgacgctaatcatagtgctg

SEQ ID NO: 443267 - DNA, 33 bp, Homo sapien
ctcacagccaattgtactaaccaggctggatcc

SEQ ID NO: 443268 - DNA, 33 bp, Homo sapien
ctcacagccaattgtattaaccaggctggatcc

SEQ ID NO: 443269 - DNA, 33 bp, Homo sapien
ccctcatacactgtaaatattcagtccccacac

SEQ ID NO: 443270 - DNA, 33 bp, Homo sapien
ccctcatacactgtaagtattcagtccccacac

SEQ ID NO: 443271 - DNA, 33 bp, Homo sapien
gacccaagtggccatacccctgtttacatatcc

SEQ ID NO: 443272 - DNA, 33 bp, Homo sapien
gacccaagtggccatatccctgtttacatatcc

SEQ ID NO: 443273 - DNA, 33 bp, Homo sapien
aattaaaactagggaaactgaggtcatttatct

SEQ ID NO: 443274 - DNA, 33 bp, Homo sapien
aattaaaactagggaacctgaggtcatttatct

SEQ ID NO: 443275 - DNA, 33 bp, Homo sapien
tctggatcaccattcccgaaacaaaagaataac

SEQ ID NO: 443276 - DNA, 33 bp, Homo sapien
tctggatcaccattcctgaaacaaaagaataac

SEQ ID NO: 443277 - DNA, 33 bp, Homo sapien
tcttttgtatctcaccaatcttctttagtatca

SEQ ID NO: 443278 - DNA, 33 bp, Homo sapien
tcttttgtatctcaccgatcttctttagtatca

SEQ ID NO: 443279 - DNA, 33 bp, Homo sapien
aaccccaagaagatcagagatgtatacctgagg

SEQ ID NO: 443280 - DNA, 33 bp, Homo sapien
aaccccaagaagatcatagatgtatacctgagg

SEQ ID NO: 443281 - DNA, 33 bp, Homo sapien
gatgatgtcatcagcaactttttttggagacag

SEQ ID NO: 443282 - DNA, 33 bp, Homo sapien
gatgatgtcatcagcagctttttttggagacag

SEQ ID NO: 443283 - DNA, 33 bp, Homo sapien
gattatcaaagccctcaacgatctgccaagaga

SEQ ID NO: 443284 - DNA, 33 bp, Homo sapien
gattatcaaagccctccacgatctgccaagaga

SEQ ID NO: 443285 - DNA, 33 bp, Homo sapien
aactgggaatttcaccacagcaccgttgatgtc

SEQ ID NO: 443286 - DNA, 33 bp, Homo sapien
aactgggaatttcaccgcagcaccgttgatgtc

SEQ ID NO: 443287 - DNA, 33 bp, Homo sapien
atcaaggttaccatcaagcaggtttataattgt

SEQ ID NO: 443288 - DNA, 33 bp, Homo sapien
atcaaggttaccatcaggcaggtttataattgt

SEQ ID NO: 443289 - DNA, 33 bp, Homo sapien
tgagcagctattggtaccctttcaagcaacctt

SEQ ID NO: 443290 - DNA, 33 bp, Homo sapien
tgagcagctattggtatcctttcaagcaacctt

SEQ ID NO: 443291 - DNA, 33 bp, Homo sapien
ctggagtggtttcaggaataattgctaagagta

SEQ ID NO: 443292 - DNA, 33 bp, Homo sapien
ctggagtggtttcaggcataattgctaagagta

SEQ ID NO: 443293 - DNA, 33 bp, Homo sapien
caaggtccccttctgaaaagatgatacaaacat

SEQ ID NO: 443294 - DNA, 33 bp, Homo sapien
caaggtccccttctgagaagatgatacaaacat

SEQ ID NO: 443295 - DNA, 33 bp, Homo sapien
atctgcaatgagaaacaaggatcccagtaccta

SEQ ID NO: 443296 - DNA, 33 bp, Homo sapien
atctgcaatgagaaacgaggatcccagtaccta

SEQ ID NO: 443297 - DNA, 33 bp, Homo sapien
gttccttgttaacatacatacagcttttcggaa

SEQ ID NO: 443298 - DNA, 33 bp, Homo sapien
gttccttgttaacatatatacagcttttcggaa

SEQ ID NO: 443299 - DNA, 33 bp, Homo sapien
aatacagtatcaaggaaggacgttgctaagcca

SEQ ID NO: 443300 - DNA, 33 bp, Homo sapien
aatacagtatcaaggagggacgttgctaagcca

SEQ ID NO: 443301 - DNA, 33 bp, Homo sapien
caccaccgagaatagaacaattccacagggcct

SEQ ID NO: 443302 - DNA, 33 bp, Homo sapien
caccaccgagaatagagcaattccacagggcct

SEQ ID NO: 443303 - DNA, 33 bp, Homo sapien
ataatcattatcatccacctgttctaccttttc

SEQ ID NO: 443304 - DNA, 33 bp, Homo sapien
ataatcattatcatcctcctgttctaccttttc

SEQ ID NO: 443305 - DNA, 33 bp, Homo sapien
tatccgttccttttgaccactgtggggaaccgt

SEQ ID NO: 443306 - DNA, 33 bp, Homo sapien
tatccgttccttttgatcactgtggggaaccgt

SEQ ID NO: 443307 - DNA, 33 bp, Homo sapien
aatgacctcattttaacatgaacagctttgtga

SEQ ID NO: 443308 - DNA, 33 bp, Homo sapien
aatgacctcattttaatatgaacagctttgtga

SEQ ID NO: 443309 - DNA, 33 bp, Homo sapien
gaccaacattatcttcaaaaaacaataagtggt

SEQ ID NO: 443310 - DNA, 33 bp, Homo sapien
gaccaacattatcttcgaaaaacaataagtggt

SEQ ID NO: 443311 - DNA, 33 bp, Homo sapien
tggaggtggagtgcacacagaggaagaatgttt

SEQ ID NO: 443312 - DNA, 33 bp, Homo sapien
tggaggtggagtgcacgcagaggaagaatgttt

SEQ ID NO: 443313 - DNA, 33 bp, Homo sapien
tactctctactacatgaagaaggttcctggggt

SEQ ID NO: 443314 - DNA, 33 bp, Homo sapien
tactctctactacatggagaaggttcctggggt

SEQ ID NO: 443315 - DNA, 33 bp, Homo sapien
ttggtgatgtgaaaaccccctgactacacgtcc

SEQ ID NO: 443316 - DNA, 33 bp, Homo sapien
ttggtgatgtgaaaactccctgactacacgtcc

SEQ ID NO: 443317 - DNA, 33 bp, Homo sapien
tacaacaagaagtagcggatccaaagtcacaag

SEQ ID NO: 443318 - DNA, 33 bp, Homo sapien
tacaacaagaagtagctgatccaaagtcacaag

SEQ ID NO: 443319 - DNA, 33 bp, Homo sapien
tggggataaaactataacattacactggaagag

SEQ ID NO: 443320 - DNA, 33 bp, Homo sapien
tggggataaaactatagcattacactggaagag

SEQ ID NO: 443321 - DNA, 33 bp, Homo sapien
cccagatgagtacggacgtgttgtgcatccatt

SEQ ID NO: 443322 - DNA, 33 bp, Homo sapien
cccagatgagtacggatgtgttgtgcatccatt

SEQ ID NO: 443323 - DNA, 33 bp, Homo sapien
aataaataaatacttacgcagccgtggtgggag

SEQ ID NO: 443324 - DNA, 33 bp, Homo sapien
aataaataaatacttatgcagccgtggtgggag

SEQ ID NO: 443325 - DNA, 33 bp, Homo sapien
aaaaatgagaggacacagctctgatgaacaata

SEQ ID NO: 443326 - DNA, 33 bp, Homo sapien
aaaaatgagaggacacggctctgatgaacaata

SEQ ID NO: 443327 - DNA, 33 bp, Homo sapien
cattcacagttatcaaggcatgaaaaaaaaaga

SEQ ID NO: 443328 - DNA, 33 bp, Homo sapien
cattcacagttatcaatgcatgaaaaaaaaaga

SEQ ID NO: 443329 - DNA, 33 bp, Homo sapien
atggcttgtatttgcacatcaaaggttgcctgc

SEQ ID NO: 443330 - DNA, 33 bp, Homo sapien
atggcttgtatttgcatatcaaaggttgcctgc

SEQ ID NO: 443331 - DNA, 33 bp, Homo sapien
tctctactttcttaaacgaaacatcctgaacat

SEQ ID NO: 443332 - DNA, 33 bp, Homo sapien
tctctactttcttaaatgaaacatcctgaacat

SEQ ID NO: 443333 - DNA, 33 bp, Homo sapien
ggatagtcaagactcacgtttattcagatgctc

SEQ ID NO: 443334 - DNA, 33 bp, Homo sapien
ggatagtcaagactcatgtttattcagatgctc

SEQ ID NO: 443335 - DNA, 33 bp, Homo sapien
acctgactttctttgtaaaataatgtgaagcag

SEQ ID NO: 443336 - DNA, 33 bp, Homo sapien
acctgactttctttgtcaaataatgtgaagcag

SEQ ID NO: 443337 - DNA, 33 bp, Homo sapien
atgctcatgggttataggcaaacaaccacacat

SEQ ID NO: 443338 - DNA, 33 bp, Homo sapien
atgctcatgggttatatgcaaacaaccacacat

SEQ ID NO: 443339 - DNA, 33 bp, Homo sapien
aaacagggaacaagaaacaggataaacctagga

SEQ ID NO: 443340 - DNA, 33 bp, Homo sapien
aaacagggaacaagaagcaggataaacctagga

SEQ ID NO: 443341 - DNA, 33 bp, Homo sapien
tttttttctgcaccgacgaacagcatattttag

SEQ ID NO: 443342 - DNA, 33 bp, Homo sapien
tttttttctgcaccgatgaacagcatattttag

SEQ ID NO: 443343 - DNA, 33 bp, Homo sapien
tccatgcctataaacactgagatgtggcaccca

SEQ ID NO: 443344 - DNA, 33 bp, Homo sapien
tccatgcctataaacattgagatgtggcaccca

SEQ ID NO: 443345 - DNA, 33 bp, Homo sapien
aaataacatttcagagcaatatagcaatgcatt

SEQ ID NO: 443346 - DNA, 33 bp, Homo sapien
aaataacatttcagagtaatatagcaatgcatt

SEQ ID NO: 443347 - DNA, 33 bp, Homo sapien
aaaatatgaaactagacgaggcaataggagaaa

SEQ ID NO: 443348 - DNA, 33 bp, Homo sapien
aaaatatgaaactagaggaggcaataggagaaa

SEQ ID NO: 443349 - DNA, 33 bp, Homo sapien
tgatgtttgggtagaccgagtaaaagctgagaa

SEQ ID NO: 443350 - DNA, 33 bp, Homo sapien
tgatgtttgggtagactgagtaaaagctgagaa

SEQ ID NO: 443351 - DNA, 33 bp, Homo sapien
acatacatacataaaaaatactcttatttgatc

SEQ ID NO: 443352 - DNA, 33 bp, Homo sapien
acatacatacataaaacatactcttatttgatc

SEQ ID NO: 443353 - DNA, 33 bp, Homo sapien
gggattatgaaaaaggaccttgagctccataag

SEQ ID NO: 443354 - DNA, 33 bp, Homo sapien
gggattatgaaaaaggcccttgagctccataag

SEQ ID NO: 443355 - DNA, 33 bp, Homo sapien
tggtccttaatgttccagaagtccctaacgctc

SEQ ID NO: 443356 - DNA, 33 bp, Homo sapien
tggtccttaatgttcccgaagtccctaacgctc

SEQ ID NO: 443357 - DNA, 33 bp, Homo sapien
ctaaacatttgtatcagcccagaaaaagcacat

SEQ ID NO: 443358 - DNA, 33 bp, Homo sapien
ctaaacatttgtatcatcccagaaaaagcacat

SEQ ID NO: 443359 - DNA, 33 bp, Homo sapien
aattgatctgtaggaacttcccaaagtgaataa

SEQ ID NO: 443360 - DNA, 33 bp, Homo sapien
aattgatctgtaggaatttcccaaagtgaataa

SEQ ID NO: 443361 - DNA, 33 bp, Homo sapien
gacagccttaatttagaagtgaggaggaacacc

SEQ ID NO: 443362 - DNA, 33 bp, Homo sapien
gacagccttaatttaggagtgaggaggaacacc

SEQ ID NO: 443363 - DNA, 33 bp, Homo sapien
aactttgttctgtacacggactaaatattgtct

SEQ ID NO: 443364 - DNA, 33 bp, Homo sapien
aactttgttctgtacatggactaaatattgtct

SEQ ID NO: 443365 - DNA, 33 bp, Homo sapien
tgtaaggagattactcaaccaaacacacacata

SEQ ID NO: 443366 - DNA, 33 bp, Homo sapien
tgtaaggagattactcgaccaaacacacacata

SEQ ID NO: 443367 - DNA, 33 bp, Homo sapien
gtgacaagtgacaggaagacacagttaaccgtc

SEQ ID NO: 443368 - DNA, 33 bp, Homo sapien
gtgacaagtgacaggaggacacagttaaccgtc

SEQ ID NO: 443369 - DNA, 33 bp, Homo sapien
atttttctttatcttgaagaaaagcaccaagtg

SEQ ID NO: 443370 - DNA, 33 bp, Homo sapien
atttttctttatcttgcagaaaagcaccaagtg

SEQ ID NO: 443371 - DNA, 33 bp, Homo sapien
actagagcacacccaactagaatgcagatctgg

SEQ ID NO: 443372 - DNA, 33 bp, Homo sapien
actagagcacacccaattagaatgcagatctgg

SEQ ID NO: 443373 - DNA, 33 bp, Homo sapien
agttgaacaatcaacaataggtactgatgccct

SEQ ID NO: 443374 - DNA, 33 bp, Homo sapien
agttgaacaatcaacagtaggtactgatgccct

SEQ ID NO: 443375 - DNA, 33 bp, Homo sapien
ccatgtggtttcccaacaatccgaatatgttat

SEQ ID NO: 443376 - DNA, 33 bp, Homo sapien
ccatgtggtttcccaataatccgaatatgttat

SEQ ID NO: 443377 - DNA, 33 bp, Homo sapien
tcaaactgacttgctaaaagttttgaatttgtg

SEQ ID NO: 443378 - DNA, 33 bp, Homo sapien
tcaaactgacttgctataagttttgaatttgtg

SEQ ID NO: 443379 - DNA, 33 bp, Homo sapien
caagataatgtaggagaagatttacatgtagct

SEQ ID NO: 443380 - DNA, 33 bp, Homo sapien
caagataatgtaggaggagatttacatgtagct

SEQ ID NO: 443381 - DNA, 33 bp, Homo sapien
aaacatttacttcgaagtgtcacaagcacattg

SEQ ID NO: 443382 - DNA, 33 bp, Homo sapien
aaacatttacttcgaattgtcacaagcacattg

SEQ ID NO: 443383 - DNA, 33 bp, Homo sapien
aggccactgcgatcaacgccccaataacatatt

SEQ ID NO: 443384 - DNA, 33 bp, Homo sapien
aggccactgcgatcaatgccccaataacatatt

SEQ ID NO: 443385 - DNA, 33 bp, Homo sapien
ctctaatatgcctcgacgggtcatggtaatata

SEQ ID NO: 443386 - DNA, 33 bp, Homo sapien
ctctaatatgcctcgatgggtcatggtaatata

SEQ ID NO: 443387 - DNA, 33 bp, Homo sapien
ctagtgtatgagatcacctcagcaatgtgtaat

SEQ ID NO: 443388 - DNA, 33 bp, Homo sapien
ctagtgtatgagatcagctcagcaatgtgtaat

SEQ ID NO: 443389 - DNA, 33 bp, Homo sapien
tcctgtccatgaacacaaaatattctaagtctg

SEQ ID NO: 443390 - DNA, 33 bp, Homo sapien
tcctgtccatgaacacgaaatattctaagtctg

SEQ ID NO: 443391 - DNA, 33 bp, Homo sapien
tggaagacgggaaatcactacagatcccataga

SEQ ID NO: 443392 - DNA, 33 bp, Homo sapien
tggaagacgggaaatccctacagatcccataga

SEQ ID NO: 443393 - DNA, 33 bp, Homo sapien
agtcttgagaaactatcatagactggaggagat

SEQ ID NO: 443394 - DNA, 33 bp, Homo sapien
agtcttgagaaactatgatagactggaggagat

SEQ ID NO: 443395 - DNA, 33 bp, Homo sapien
gacaagcacaaagcacaggccagtttacaaaat

SEQ ID NO: 443396 - DNA, 33 bp, Homo sapien
gacaagcacaaagcacgggccagtttacaaaat

SEQ ID NO: 443397 - DNA, 33 bp, Homo sapien
gtccagagaagtaagtcaatgttctgaagacat

SEQ ID NO: 443398 - DNA, 33 bp, Homo sapien
gtccagagaagtaagtgaatgttctgaagacat

SEQ ID NO: 443399 - DNA, 33 bp, Homo sapien
tgagaaaactgccactcacaaccatgctataat

SEQ ID NO: 443400 - DNA, 33 bp, Homo sapien
tgagaaaactgccacttacaaccatgctataat

SEQ ID NO: 443401 - DNA, 33 bp, Homo sapien
aacattgattctgaaaagtaagcctgctccctt

SEQ ID NO: 443402 - DNA, 33 bp, Homo sapien
aacattgattctgaaaggtaagcctgctccctt

SEQ ID NO: 443403 - DNA, 33 bp, Homo sapien
catggctgttgactacacaaaaatatagaaagt

SEQ ID NO: 443404 - DNA, 33 bp, Homo sapien
catggctgttgactactcaaaaatatagaaagt

SEQ ID NO: 443405 - DNA, 33 bp, Homo sapien
gtactatgttggataggaattgtgatagtggga

SEQ ID NO: 443406 - DNA, 33 bp, Homo sapien
gtactatgttggatagtaattgtgatagtggga

SEQ ID NO: 443407 - DNA, 33 bp, Homo sapien
ttcattgacgtgcaacagttctttctctgattt

SEQ ID NO: 443408 - DNA, 33 bp, Homo sapien
ttcattgacgtgcaaccgttctttctctgattt

SEQ ID NO: 443409 - DNA, 33 bp, Homo sapien
tttggctttctggaaacttcattgacgtgcaac

SEQ ID NO: 443410 - DNA, 33 bp, Homo sapien
tttggctttctggaaagttcattgacgtgcaac

SEQ ID NO: 443411 - DNA, 33 bp, Homo sapien
acttgacagaaactagcagattacaagtaaaca

SEQ ID NO: 443412 - DNA, 33 bp, Homo sapien
acttgacagaaactaggagattacaagtaaaca

SEQ ID NO: 443413 - DNA, 33 bp, Homo sapien
attgcttgtgcttagacggtagaccacaagata

SEQ ID NO: 443414 - DNA, 33 bp, Homo sapien
attgcttgtgcttagatggtagaccacaagata

SEQ ID NO: 443415 - DNA, 33 bp, Homo sapien
cttggagatgtggagaaatagccatccagggag

SEQ ID NO: 443416 - DNA, 33 bp, Homo sapien
cttggagatgtggagacatagccatccagggag

SEQ ID NO: 443417 - DNA, 33 bp, Homo sapien
acacccatttttgctaactaaggaaagaacttc

SEQ ID NO: 443418 - DNA, 33 bp, Homo sapien
acacccatttttgctagctaaggaaagaacttc

SEQ ID NO: 443419 - DNA, 33 bp, Homo sapien
ttttcaataatagatgccaatgccactgcaata

SEQ ID NO: 443420 - DNA, 33 bp, Homo sapien
ttttcaataatagatgtcaatgccactgcaata

SEQ ID NO: 443421 - DNA, 33 bp, Homo sapien
ctcactttgtgaaatgcacgcccatgtgaacac

SEQ ID NO: 443422 - DNA, 33 bp, Homo sapien
ctcactttgtgaaatgtacgcccatgtgaacac

SEQ ID NO: 443423 - DNA, 33 bp, Homo sapien
tgcccttgaacttttccatttctaccatgagtt

SEQ ID NO: 443424 - DNA, 33 bp, Homo sapien
tgcccttgaacttttctatttctaccatgagtt

SEQ ID NO: 443425 - DNA, 33 bp, Homo sapien
ctgacctttatcataactaacatccctctcttg

SEQ ID NO: 443426 - DNA, 33 bp, Homo sapien
ctgacctttatcataagtaacatccctctcttg

SEQ ID NO: 443427 - DNA, 33 bp, Homo sapien
tactatattccaagtacgcttgccttcttaatg

SEQ ID NO: 443428 - DNA, 33 bp, Homo sapien
tactatattccaagtatgcttgccttcttaatg

SEQ ID NO: 443429 - DNA, 33 bp, Homo sapien
attactttcatagaccaatcaaagcaagaacag

SEQ ID NO: 443430 - DNA, 33 bp, Homo sapien
attactttcatagacccatcaaagcaagaacag

SEQ ID NO: 443431 - DNA, 33 bp, Homo sapien
agtcccacactctttaagaagatgatcttggaa

SEQ ID NO: 443432 - DNA, 33 bp, Homo sapien
agtcccacactctttaggaagatgatcttggaa

SEQ ID NO: 443433 - DNA, 33 bp, Homo sapien
aaataatatcattcacaccaccttctatgctta

SEQ ID NO: 443434 - DNA, 33 bp, Homo sapien
aaataatatcattcactccaccttctatgctta

SEQ ID NO: 443435 - DNA, 33 bp, Homo sapien
cctaaaatggctaaaaccacttttcccagtgat

SEQ ID NO: 443436 - DNA, 33 bp, Homo sapien
cctaaaatggctaaaatcacttttcccagtgat

SEQ ID NO: 443437 - DNA, 33 bp, Homo sapien
ctaggagtataaactcggaggttagggtagtgt

SEQ ID NO: 443438 - DNA, 33 bp, Homo sapien
ctaggagtataaactctgaggttagggtagtgt

SEQ ID NO: 443439 - DNA, 33 bp, Homo sapien
aatgctaattgccgaaatatcacctgacgctca

SEQ ID NO: 443440 - DNA, 33 bp, Homo sapien
aatgctaattgccgaactatcacctgacgctca

SEQ ID NO: 443441 - DNA, 33 bp, Homo sapien
tgcttttgcaagaaagcatatggtaagtacaaa

SEQ ID NO: 443442 - DNA, 33 bp, Homo sapien
tgcttttgcaagaaagtatatggtaagtacaaa

SEQ ID NO: 443443 - DNA, 33 bp, Homo sapien
tgtaatagtgtgataaacattagacaaacccaa

SEQ ID NO: 443444 - DNA, 33 bp, Homo sapien
tgtaatagtgtgataatcattagacaaacccaa

SEQ ID NO: 443445 - DNA, 33 bp, Homo sapien
gaaaaaaatacattaactaaagcaatggaaatt

SEQ ID NO: 443446 - DNA, 33 bp, Homo sapien
gaaaaaaatacattaagtaaagcaatggaaatt

SEQ ID NO: 443447 - DNA, 33 bp, Homo sapien
tggcataattaacctaacattaccttttcatca

SEQ ID NO: 443448 - DNA, 33 bp, Homo sapien
tggcataattaacctatcattaccttttcatca

SEQ ID NO: 443449 - DNA, 33 bp, Homo sapien
tatgcagttttagaaaattacacttgatctttc

SEQ ID NO: 443450 - DNA, 33 bp, Homo sapien
tatgcagttttagaaatttacacttgatctttc

SEQ ID NO: 443451 - DNA, 33 bp, Homo sapien
gggccaggctctcttacggtggctcccacttgt

SEQ ID NO: 443452 - DNA, 33 bp, Homo sapien
gggccaggctctcttatggtggctcccacttgt

SEQ ID NO: 443453 - DNA, 33 bp, Homo sapien
ccagttaggcttagagaagaatgttgactaact

SEQ ID NO: 443454 - DNA, 33 bp, Homo sapien
ccagttaggcttagagtagaatgttgactaact

SEQ ID NO: 443455 - DNA, 33 bp, Homo sapien
atgaaatatcccacagactcaagcaaaacacta

SEQ ID NO: 443456 - DNA, 33 bp, Homo sapien
atgaaatatcccacagtctcaagcaaaacacta

SEQ ID NO: 443457 - DNA, 33 bp, Homo sapien
ggtatttcgtggcaaacttatcttgaggtaaac

SEQ ID NO: 443458 - DNA, 33 bp, Homo sapien
ggtatttcgtggcaaagttatcttgaggtaaac

SEQ ID NO: 443459 - DNA, 33 bp, Homo sapien
atgaattttctccaacaccaatggtctcatcag

SEQ ID NO: 443460 - DNA, 33 bp, Homo sapien
atgaattttctccaaccccaatggtctcatcag

SEQ ID NO: 443461 - DNA, 33 bp, Homo sapien
tggttttgaaatatacagacatgaaatttggga

SEQ ID NO: 443462 - DNA, 33 bp, Homo sapien
tggttttgaaatatacggacatgaaatttggga

SEQ ID NO: 443463 - DNA, 33 bp, Homo sapien
atgtaatattccactacgtatgtgtactacgtt

SEQ ID NO: 443464 - DNA, 33 bp, Homo sapien
atgtaatattccactatgtatgtgtactacgtt

SEQ ID NO: 443465 - DNA, 33 bp, Homo sapien
ttgttaatgtaaattagcacagccgttatggaa

SEQ ID NO: 443466 - DNA, 33 bp, Homo sapien
ttgttaatgtaaattatcacagccgttatggaa

SEQ ID NO: 443467 - DNA, 33 bp, Homo sapien
tttgattttgtagacaaagagtaaaaaatgaca

SEQ ID NO: 443468 - DNA, 33 bp, Homo sapien
tttgattttgtagacagagagtaaaaaatgaca

SEQ ID NO: 443469 - DNA, 33 bp, Homo sapien
atgacacccaagaaaacgtaattgtttgtgact

SEQ ID NO: 443470 - DNA, 33 bp, Homo sapien
atgacacccaagaaaatgtaattgtttgtgact

SEQ ID NO: 443471 - DNA, 33 bp, Homo sapien
tgccccattttgacaacaaaaggacaaatgtag

SEQ ID NO: 443472 - DNA, 33 bp, Homo sapien
tgccccattttgacaataaaaggacaaatgtag

SEQ ID NO: 443473 - DNA, 33 bp, Homo sapien
ttctatcaccatccaaagcttccttttatcact

SEQ ID NO: 443474 - DNA, 33 bp, Homo sapien
ttctatcaccatccaaggcttccttttatcact

SEQ ID NO: 443475 - DNA, 33 bp, Homo sapien
attgttaaaggtgctacgataaaagttgtaaaa

SEQ ID NO: 443476 - DNA, 33 bp, Homo sapien
attgttaaaggtgctatgataaaagttgtaaaa

SEQ ID NO: 443477 - DNA, 33 bp, Homo sapien
tatctcttttttcctacctgatgagaagttaaa

SEQ ID NO: 443478 - DNA, 33 bp, Homo sapien
tatctcttttttcctatctgatgagaagttaaa

SEQ ID NO: 443479 - DNA, 33 bp, Homo sapien
aactgcttgcaaaagacaacacctggctttgtg

SEQ ID NO: 443480 - DNA, 33 bp, Homo sapien
aactgcttgcaaaagagaacacctggctttgtg

SEQ ID NO: 443481 - DNA, 33 bp, Homo sapien
cccctggtagcctaaacggagaagagcaaaagt

SEQ ID NO: 443482 - DNA, 33 bp, Homo sapien
cccctggtagcctaaatggagaagagcaaaagt

SEQ ID NO: 443483 - DNA, 33 bp, Homo sapien
actaagttccgtttaccaggttgatcttgtcca

SEQ ID NO: 443484 - DNA, 33 bp, Homo sapien
actaagttccgtttactaggttgatcttgtcca

SEQ ID NO: 443485 - DNA, 33 bp, Homo sapien
tccacctgttatgaaaaagtcttagcaaaaaca

SEQ ID NO: 443486 - DNA, 33 bp, Homo sapien
tccacctgttatgaaagagtcttagcaaaaaca

SEQ ID NO: 443487 - DNA, 33 bp, Homo sapien
atgtttgagttctgagaaaatgtcgagtatgca

SEQ ID NO: 443488 - DNA, 33 bp, Homo sapien
atgtttgagttctgaggaaatgtcgagtatgca

SEQ ID NO: 443489 - DNA, 33 bp, Homo sapien
gcaaatctaagaaaagccttggtaatagagtac

SEQ ID NO: 443490 - DNA, 33 bp, Homo sapien
gcaaatctaagaaaagtcttggtaatagagtac

SEQ ID NO: 443491 - DNA, 33 bp, Homo sapien
gacagtctggaacaaaaagctgtcaatgtcttg

SEQ ID NO: 443492 - DNA, 33 bp, Homo sapien
gacagtctggaacaaagagctgtcaatgtcttg

SEQ ID NO: 443493 - DNA, 33 bp, Homo sapien
cttcagaaggaacaagacatgtgtttttgatac

SEQ ID NO: 443494 - DNA, 33 bp, Homo sapien
cttcagaaggaacaagtcatgtgtttttgatac

SEQ ID NO: 443495 - DNA, 33 bp, Homo sapien
ctccttctcattatccgcaactgtggcaagcag

SEQ ID NO: 443496 - DNA, 33 bp, Homo sapien
ctccttctcattatcctcaactgtggcaagcag

SEQ ID NO: 443497 - DNA, 33 bp, Homo sapien
agacccatagtggacaactgtgttctgtaggca

SEQ ID NO: 443498 - DNA, 33 bp, Homo sapien
agacccatagtggacagctgtgttctgtaggca

SEQ ID NO: 443499 - DNA, 33 bp, Homo sapien
tttcatctggtaattcaatccagtatcttttat

SEQ ID NO: 443500 - DNA, 33 bp, Homo sapien
tttcatctggtaattcgatccagtatcttttat

SEQ ID NO: 443501 - DNA, 33 bp, Homo sapien
ccaggagagggtgcaagcatactatttacatga

SEQ ID NO: 443502 - DNA, 33 bp, Homo sapien
ccaggagagggtgcaatcatactatttacatga

SEQ ID NO: 443503 - DNA, 33 bp, Homo sapien
aaagaagctttaccaaaagacaatggactggac

SEQ ID NO: 443504 - DNA, 33 bp, Homo sapien
aaagaagctttaccaagagacaatggactggac

SEQ ID NO: 443505 - DNA, 33 bp, Homo sapien
aacatatcactggcaaaaggttaaagcaaccag

SEQ ID NO: 443506 - DNA, 33 bp, Homo sapien
aacatatcactggcaacaggttaaagcaaccag

SEQ ID NO: 443507 - DNA, 33 bp, Homo sapien
atcagaacacattggcaagattttattaataga

SEQ ID NO: 443508 - DNA, 33 bp, Homo sapien
atcagaacacattggcgagattttattaataga

SEQ ID NO: 443509 - DNA, 33 bp, Homo sapien
atctactaatacagtacgcacagataaaagttg

SEQ ID NO: 443510 - DNA, 33 bp, Homo sapien
atctactaatacagtatgcacagataaaagttg

SEQ ID NO: 443511 - DNA, 33 bp, Homo sapien
agttttcacaatacaacgctaaaatcacatctt

SEQ ID NO: 443512 - DNA, 33 bp, Homo sapien
agttttcacaatacaatgctaaaatcacatctt

SEQ ID NO: 443513 - DNA, 33 bp, Homo sapien
ctgggaatgagtgggaaattctttatgtgaaat

SEQ ID NO: 443514 - DNA, 33 bp, Homo sapien
ctgggaatgagtgggagattctttatgtgaaat

SEQ ID NO: 443515 - DNA, 33 bp, Homo sapien
gaagcatagcaaggcacatttccacagagtggg

SEQ ID NO: 443516 - DNA, 33 bp, Homo sapien
gaagcatagcaaggcatatttccacagagtggg

SEQ ID NO: 443517 - DNA, 33 bp, Homo sapien
tcaacttgagcctgtaaggaggtgtcacagatt

SEQ ID NO: 443518 - DNA, 33 bp, Homo sapien
tcaacttgagcctgtagggaggtgtcacagatt

SEQ ID NO: 443519 - DNA, 33 bp, Homo sapien
ctcttaaacttaaatccagctgtgtctgcaagg

SEQ ID NO: 443520 - DNA, 33 bp, Homo sapien
ctcttaaacttaaatctagctgtgtctgcaagg

SEQ ID NO: 443521 - DNA, 33 bp, Homo sapien
ctgaatcagtgatgctaaaataatgcctgttca

SEQ ID NO: 443522 - DNA, 33 bp, Homo sapien
ctgaatcagtgatgctcaaataatgcctgttca

SEQ ID NO: 443523 - DNA, 33 bp, Homo sapien
cagtgatgccgtgtaccagataattatttcaga

SEQ ID NO: 443524 - DNA, 33 bp, Homo sapien
cagtgatgccgtgtactagataattatttcaga

SEQ ID NO: 443525 - DNA, 33 bp, Homo sapien
ttatacaactctaggacgcctttaactttaatc

SEQ ID NO: 443526 - DNA, 33 bp, Homo sapien
ttatacaactctaggatgcctttaactttaatc

SEQ ID NO: 443527 - DNA, 33 bp, Homo sapien
tttactctgttagtcacaaggaatgaaacatag

SEQ ID NO: 443528 - DNA, 33 bp, Homo sapien
tttactctgttagtcataaggaatgaaacatag

SEQ ID NO: 443529 - DNA, 33 bp, Homo sapien
tatatttttgttgtggaattacactgaaagcca

SEQ ID NO: 443530 - DNA, 33 bp, Homo sapien
tatatttttgttgtgggattacactgaaagcca

SEQ ID NO: 443531 - DNA, 33 bp, Homo sapien
atcttctgctaagtaactcccaatcagtgtagg

SEQ ID NO: 443532 - DNA, 33 bp, Homo sapien
atcttctgctaagtaagtcccaatcagtgtagg

SEQ ID NO: 443533 - DNA, 33 bp, Homo sapien
ataccagtaatactaacagatgtgaaagtgttt

SEQ ID NO: 443534 - DNA, 33 bp, Homo sapien
ataccagtaatactaatagatgtgaaagtgttt

SEQ ID NO: 443535 - DNA, 33 bp, Homo sapien
gcagcagataaaattcaccggcataaaatgagg

SEQ ID NO: 443536 - DNA, 33 bp, Homo sapien
gcagcagataaaattcgccggcataaaatgagg

SEQ ID NO: 443537 - DNA, 33 bp, Homo sapien
ttgttattgcaagcaactgtcgcttaacaggga

SEQ ID NO: 443538 - DNA, 33 bp, Homo sapien
ttgttattgcaagcaagtgtcgcttaacaggga

SEQ ID NO: 443539 - DNA, 33 bp, Homo sapien
cagtcccgagttacaactggaaatcactgggga

SEQ ID NO: 443540 - DNA, 33 bp, Homo sapien
cagtcccgagttacaattggaaatcactgggga

SEQ ID NO: 443541 - DNA, 33 bp, Homo sapien
ttatgcaactgattcacgtgttgactaggctta

SEQ ID NO: 443542 - DNA, 33 bp, Homo sapien
ttatgcaactgattcatgtgttgactaggctta

SEQ ID NO: 443543 - DNA, 33 bp, Homo sapien
attgttaagttggtccacatttggaattaggcg

SEQ ID NO: 443544 - DNA, 33 bp, Homo sapien
attgttaagttggtccgcatttggaattaggcg

SEQ ID NO: 443545 - DNA, 33 bp, Homo sapien
ctatatttatatgacaagtgcaaggaattgggc

SEQ ID NO: 443546 - DNA, 33 bp, Homo sapien
ctatatttatatgacaggtgcaaggaattgggc

SEQ ID NO: 443547 - DNA, 33 bp, Homo sapien
atctctgcaattccccgaagcgtgctggattgc

SEQ ID NO: 443548 - DNA, 33 bp, Homo sapien
atctctgcaattcccctaagcgtgctggattgc

SEQ ID NO: 443549 - DNA, 33 bp, Homo sapien
ttatatacataggtcccagcaaggtacattaca

SEQ ID NO: 443550 - DNA, 33 bp, Homo sapien
ttatatacataggtcctagcaaggtacattaca

SEQ ID NO: 443551 - DNA, 33 bp, Homo sapien
gcacatgggaatgtgaactaatttgtaatattt

SEQ ID NO: 443552 - DNA, 33 bp, Homo sapien
gcacatgggaatgtgagctaatttgtaatattt

SEQ ID NO: 443553 - DNA, 33 bp, Homo sapien
atttggctgaaatgtaaatagggtaaagaaaat

SEQ ID NO: 443554 - DNA, 33 bp, Homo sapien
atttggctgaaatgtacatagggtaaagaaaat

SEQ ID NO: 443555 - DNA, 33 bp, Homo sapien
cagaacaaaagggaaactgatgcaagctctgtg

SEQ ID NO: 443556 - DNA, 33 bp, Homo sapien
cagaacaaaagggaaattgatgcaagctctgtg

SEQ ID NO: 443557 - DNA, 33 bp, Homo sapien
gataattgttatggtacagaagtagagggtcat

SEQ ID NO: 443558 - DNA, 33 bp, Homo sapien
gataattgttatggtatagaagtagagggtcat

SEQ ID NO: 443559 - DNA, 33 bp, Homo sapien
gtactaggtgctacaaataatacagtcaaaaca

SEQ ID NO: 443560 - DNA, 33 bp, Homo sapien
gtactaggtgctacaagtaatacagtcaaaaca

SEQ ID NO: 443561 - DNA, 33 bp, Homo sapien
aaaatagaacctttgaacctttatctctactat

SEQ ID NO: 443562 - DNA, 33 bp, Homo sapien
aaaatagaacctttgagcctttatctctactat

SEQ ID NO: 443563 - DNA, 33 bp, Homo sapien
aaacaggaaggttcatgagtcccatgttgcaaa

SEQ ID NO: 443564 - DNA, 33 bp, Homo sapien
aaacaggaaggttcattagtcccatgttgcaaa

SEQ ID NO: 443565 - DNA, 33 bp, Homo sapien
tatatgggtcagtggggaactacctgttaaaca

SEQ ID NO: 443566 - DNA, 33 bp, Homo sapien
tatatgggtcagtgggtaactacctgttaaaca

SEQ ID NO: 443567 - DNA, 33 bp, Homo sapien
agtgaacaacctatctaaagaagcccaagccac

SEQ ID NO: 443568 - DNA, 33 bp, Homo sapien
agtgaacaacctatctgaagaagcccaagccac

SEQ ID NO: 443569 - DNA, 33 bp, Homo sapien
cttctcctttgccttacaccatgactgcaagtt

SEQ ID NO: 443570 - DNA, 33 bp, Homo sapien
cttctcctttgccttataccatgactgcaagtt

SEQ ID NO: 443571 - DNA, 33 bp, Homo sapien
aataaataaaaatgaacgcaatatcagtgtatt

SEQ ID NO: 443572 - DNA, 33 bp, Homo sapien
aataaataaaaatgaatgcaatatcagtgtatt

SEQ ID NO: 443573 - DNA, 33 bp, Homo sapien
tcaaattcctttcttacgctgagctgtcattgc

SEQ ID NO: 443574 - DNA, 33 bp, Homo sapien
tcaaattcctttcttatgctgagctgtcattgc

SEQ ID NO: 443575 - DNA, 33 bp, Homo sapien
ttattccactaagtgacctgttactaaattgtt

SEQ ID NO: 443576 - DNA, 33 bp, Homo sapien
ttattccactaagtgatctgttactaaattgtt

SEQ ID NO: 443577 - DNA, 33 bp, Homo sapien
tgacctggaagtaaacccatagtatctttgggt

SEQ ID NO: 443578 - DNA, 33 bp, Homo sapien
tgacctggaagtaaacgcatagtatctttgggt

SEQ ID NO: 443579 - DNA, 33 bp, Homo sapien
agaccgaggcttatcaaagatttcttgtgtttg

SEQ ID NO: 443580 - DNA, 33 bp, Homo sapien
agaccgaggcttatcacagatttcttgtgtttg

SEQ ID NO: 443581 - DNA, 33 bp, Homo sapien
gtataaataaatgacaacgaagcaattgcaact

SEQ ID NO: 443582 - DNA, 33 bp, Homo sapien
gtataaataaatgacagcgaagcaattgcaact

SEQ ID NO: 443583 - DNA, 33 bp, Homo sapien
tcacaatttttaagtcaacacctggaatttgga

SEQ ID NO: 443584 - DNA, 33 bp, Homo sapien
tcacaatttttaagtccacacctggaatttgga

SEQ ID NO: 443585 - DNA, 33 bp, Homo sapien
atagttatgtgcattaaagataaaaagtttcct

SEQ ID NO: 443586 - DNA, 33 bp, Homo sapien
atagttatgtgcattagagataaaaagtttcct

SEQ ID NO: 443587 - DNA, 33 bp, Homo sapien
gcctagaagagtataaacaaatttgaagcaaga

SEQ ID NO: 443588 - DNA, 33 bp, Homo sapien
gcctagaagagtataagcaaatttgaagcaaga

SEQ ID NO: 443589 - DNA, 33 bp, Homo sapien
agaccatccatcccacagcatctgattccttgg

SEQ ID NO: 443590 - DNA, 33 bp, Homo sapien
agaccatccatcccacggcatctgattccttgg

SEQ ID NO: 443591 - DNA, 33 bp, Homo sapien
aggctctattagaaagcaacagctgttcagaga

SEQ ID NO: 443592 - DNA, 33 bp, Homo sapien
aggctctattagaaagtaacagctgttcagaga

SEQ ID NO: 443593 - DNA, 33 bp, Homo sapien
agcacagttaactacacacttcaaaaagaggtg

SEQ ID NO: 443594 - DNA, 33 bp, Homo sapien
agcacagttaactacagacttcaaaaagaggtg

SEQ ID NO: 443595 - DNA, 33 bp, Homo sapien
tggaaatgagcaaatacagaccatgcagagttc

SEQ ID NO: 443596 - DNA, 33 bp, Homo sapien
tggaaatgagcaaatatagaccatgcagagttc

SEQ ID NO: 443597 - DNA, 33 bp, Homo sapien
tatcatcaaagacctgccaacctaaaattatct

SEQ ID NO: 443598 - DNA, 33 bp, Homo sapien
tatcatcaaagacctgtcaacctaaaattatct

SEQ ID NO: 443599 - DNA, 33 bp, Homo sapien
aatataccagattccaaaaatgtttacattgtt

SEQ ID NO: 443600 - DNA, 33 bp, Homo sapien
aatataccagattccataaatgtttacattgtt

SEQ ID NO: 443601 - DNA, 33 bp, Homo sapien
attgttcttcagatcaccagttttatgttttgt

SEQ ID NO: 443602 - DNA, 33 bp, Homo sapien
attgttcttcagatcatcagttttatgttttgt

SEQ ID NO: 443603 - DNA, 33 bp, Homo sapien
tacaccacagtgccacacaatacaaatgtaata

SEQ ID NO: 443604 - DNA, 33 bp, Homo sapien
tacaccacagtgccacgcaatacaaatgtaata

SEQ ID NO: 443605 - DNA, 33 bp, Homo sapien
ttctatcgtttttgtaaccataaatcctctagc

SEQ ID NO: 443606 - DNA, 33 bp, Homo sapien
ttctatcgtttttgtagccataaatcctctagc

SEQ ID NO: 443607 - DNA, 33 bp, Homo sapien
ctgagtatactactaaccataggcaggaaactg

SEQ ID NO: 443608 - DNA, 33 bp, Homo sapien
ctgagtatactactaatcataggcaggaaactg

SEQ ID NO: 443609 - DNA, 33 bp, Homo sapien
aggccagagttaatacagaatcagagcaaagct

SEQ ID NO: 443610 - DNA, 33 bp, Homo sapien
aggccagagttaatacggaatcagagcaaagct

SEQ ID NO: 443611 - DNA, 33 bp, Homo sapien
actaaattcactgtgaaaaaaagagaggagtca

SEQ ID NO: 443612 - DNA, 33 bp, Homo sapien
actaaattcactgtgagaaaaagagaggagtca

SEQ ID NO: 443613 - DNA, 33 bp, Homo sapien
atcagtgggtgattgaaattaaggctgaaacgc

SEQ ID NO: 443614 - DNA, 33 bp, Homo sapien
atcagtgggtgattgagattaaggctgaaacgc

SEQ ID NO: 443615 - DNA, 33 bp, Homo sapien
accagaggttgagagaagttcagagcttccaga

SEQ ID NO: 443616 - DNA, 33 bp, Homo sapien
accagaggttgagagaggttcagagcttccaga

SEQ ID NO: 443617 - DNA, 33 bp, Homo sapien
attgcaatttctctgaagtatgccaatattctg

SEQ ID NO: 443618 - DNA, 33 bp, Homo sapien
attgcaatttctctgaggtatgccaatattctg

SEQ ID NO: 443619 - DNA, 33 bp, Homo sapien
ctagattttcaacttacgtcagttatgttcaca

SEQ ID NO: 443620 - DNA, 33 bp, Homo sapien
ctagattttcaacttatgtcagttatgttcaca

SEQ ID NO: 443621 - DNA, 33 bp, Homo sapien
gaaatgctccaatacagcctcatatggaaggtt

SEQ ID NO: 443622 - DNA, 33 bp, Homo sapien
gaaatgctccaatacatcctcatatggaaggtt

SEQ ID NO: 443623 - DNA, 33 bp, Homo sapien
catctcccttcagatgaaaaacccaggagaaag

SEQ ID NO: 443624 - DNA, 33 bp, Homo sapien
catctcccttcagatggaaaacccaggagaaag

SEQ ID NO: 443625 - DNA, 33 bp, Homo sapien
ccaggtcttaaccagaagcaaacaacagaacaa

SEQ ID NO: 443626 - DNA, 33 bp, Homo sapien
ccaggtcttaaccagaggcaaacaacagaacaa

SEQ ID NO: 443627 - DNA, 33 bp, Homo sapien
aaactgtatatttgatcaagacctagtgacaaa

SEQ ID NO: 443628 - DNA, 33 bp, Homo sapien
aaactgtatatttgatgaagacctagtgacaaa

SEQ ID NO: 443629 - DNA, 33 bp, Homo sapien
atagataggacaaaaaaagatggctgggcaagg

SEQ ID NO: 443630 - DNA, 33 bp, Homo sapien
atagataggacaaaaatagatggctgggcaagg

SEQ ID NO: 443631 - DNA, 33 bp, Homo sapien
gaataagaaattttgaagcagagaatgtaatta

SEQ ID NO: 443632 - DNA, 33 bp, Homo sapien
gaataagaaattttgaggcagagaatgtaatta

SEQ ID NO: 443633 - DNA, 33 bp, Homo sapien
gacaaagaacattagactccagttctaacatta

SEQ ID NO: 443634 - DNA, 33 bp, Homo sapien
gacaaagaacattagattccagttctaacatta

SEQ ID NO: 443635 - DNA, 33 bp, Homo sapien
aaaatcactaaacacaagatttctctatgaacc

SEQ ID NO: 443636 - DNA, 33 bp, Homo sapien
aaaatcactaaacacaggatttctctatgaacc

SEQ ID NO: 443637 - DNA, 33 bp, Homo sapien
acttttgatagtggaccagatgtagtgggggcg

SEQ ID NO: 443638 - DNA, 33 bp, Homo sapien
acttttgatagtggacgagatgtagtgggggcg

SEQ ID NO: 443639 - DNA, 33 bp, Homo sapien
gatccaggaggaggcacgatgtacattttcctt

SEQ ID NO: 443640 - DNA, 33 bp, Homo sapien
gatccaggaggaggcatgatgtacattttcctt

SEQ ID NO: 443641 - DNA, 33 bp, Homo sapien
aggtgtacaataagtaacatgatgttgtgtgtg

SEQ ID NO: 443642 - DNA, 33 bp, Homo sapien
aggtgtacaataagtagcatgatgttgtgtgtg

SEQ ID NO: 443643 - DNA, 33 bp, Homo sapien
acagcaatcacttattcaaccagatctcctcct

SEQ ID NO: 443644 - DNA, 33 bp, Homo sapien
acagcaatcacttattgaaccagatctcctcct

SEQ ID NO: 443645 - DNA, 33 bp, Homo sapien
ctctttccaacactcaaaatctcatagggaaag

SEQ ID NO: 443646 - DNA, 33 bp, Homo sapien
ctctttccaacactcacaatctcatagggaaag

SEQ ID NO: 443647 - DNA, 33 bp, Homo sapien
atatagacacaagttcaccagtataatgtagaa

SEQ ID NO: 443648 - DNA, 33 bp, Homo sapien
atatagacacaagttcgccagtataatgtagaa

SEQ ID NO: 443649 - DNA, 33 bp, Homo sapien
tttttcaaatacgtcacgtgtcttcattttttt

SEQ ID NO: 443650 - DNA, 33 bp, Homo sapien
tttttcaaatacgtcatgtgtcttcattttttt

SEQ ID NO: 443651 - DNA, 33 bp, Homo sapien
attttattcatttaaaatatccaagataggcaa

SEQ ID NO: 443652 - DNA, 33 bp, Homo sapien
attttattcatttaaattatccaagataggcaa

SEQ ID NO: 443653 - DNA, 33 bp, Homo sapien
actacactcaggaataaggcaagaggtaggaac

SEQ ID NO: 443654 - DNA, 33 bp, Homo sapien
actacactcaggaatagggcaagaggtaggaac

SEQ ID NO: 443655 - DNA, 33 bp, Homo sapien
cagcaaaagcaagagacctagaatggaaactgg

SEQ ID NO: 443656 - DNA, 33 bp, Homo sapien
cagcaaaagcaagagagctagaatggaaactgg

SEQ ID NO: 443657 - DNA, 33 bp, Homo sapien
aaaatgttgtatgagacgtatttttcaaaattg

SEQ ID NO: 443658 - DNA, 33 bp, Homo sapien
aaaatgttgtatgagatgtatttttcaaaattg

SEQ ID NO: 443659 - DNA, 33 bp, Homo sapien
aattgtcagagattcaatatcttttgtctgaaa

SEQ ID NO: 443660 - DNA, 33 bp, Homo sapien
aattgtcagagattcagtatcttttgtctgaaa

SEQ ID NO: 443661 - DNA, 33 bp, Homo sapien
ggcattatagttaacactccacaacagcagcat

SEQ ID NO: 443662 - DNA, 33 bp, Homo sapien
ggcattatagttaacattccacaacagcagcat

SEQ ID NO: 443663 - DNA, 33 bp, Homo sapien
ttggtttaataatggaagatctgatgacaatgt

SEQ ID NO: 443664 - DNA, 33 bp, Homo sapien
ttggtttaataatggatgatctgatgacaatgt

SEQ ID NO: 443665 - DNA, 33 bp, Homo sapien
ttttaggaagtaaatcagaggaccgacataatc

SEQ ID NO: 443666 - DNA, 33 bp, Homo sapien
ttttaggaagtaaatcggaggaccgacataatc

SEQ ID NO: 443667 - DNA, 33 bp, Homo sapien
aaggcaaggcatgatgaaagtgttgttatattt

SEQ ID NO: 443668 - DNA, 33 bp, Homo sapien
aaggcaaggcatgatgcaagtgttgttatattt

SEQ ID NO: 443669 - DNA, 33 bp, Homo sapien
tgttagatctgtaaaacgttacccattcaaatg

SEQ ID NO: 443670 - DNA, 33 bp, Homo sapien
tgttagatctgtaaaatgttacccattcaaatg

SEQ ID NO: 443671 - DNA, 33 bp, Homo sapien
catgaagtatatgtacagaatcccactgagtaa

SEQ ID NO: 443672 - DNA, 33 bp, Homo sapien
catgaagtatatgtacggaatcccactgagtaa

SEQ ID NO: 443673 - DNA, 33 bp, Homo sapien
cttaaataaaaacttaagcaggttccatatgac

SEQ ID NO: 443674 - DNA, 33 bp, Homo sapien
cttaaataaaaacttaggcaggttccatatgac

SEQ ID NO: 443675 - DNA, 33 bp, Homo sapien
cttgttctaagccctggaaattttggctagtga

SEQ ID NO: 443676 - DNA, 33 bp, Homo sapien
cttgttctaagccctgtaaattttggctagtga

SEQ ID NO: 443677 - DNA, 33 bp, Homo sapien
taaaaagtcagtccaaaagctccaaaaaatgac

SEQ ID NO: 443678 - DNA, 33 bp, Homo sapien
taaaaagtcagtccaacagctccaaaaaatgac

SEQ ID NO: 443679 - DNA, 33 bp, Homo sapien
tctgttgcagcagctgaagttggagtcactaat

SEQ ID NO: 443680 - DNA, 33 bp, Homo sapien
tctgttgcagcagctgcagttggagtcactaat

SEQ ID NO: 443681 - DNA, 33 bp, Homo sapien
ttgtagaataatttcactcattgtaaagtaaat

SEQ ID NO: 443682 - DNA, 33 bp, Homo sapien
ttgtagaataatttcagtcattgtaaagtaaat

SEQ ID NO: 443683 - DNA, 33 bp, Homo sapien
tttattgcacctctcacagacagtgttttttac

SEQ ID NO: 443684 - DNA, 33 bp, Homo sapien
tttattgcacctctcagagacagtgttttttac

SEQ ID NO: 443685 - DNA, 33 bp, Homo sapien
taagaatgagataaagacttatttctgatacag

SEQ ID NO: 443686 - DNA, 33 bp, Homo sapien
taagaatgagataaagccttatttctgatacag

SEQ ID NO: 443687 - DNA, 33 bp, Homo sapien
ttcagagttttcaacccataaaagagcaagaca

SEQ ID NO: 443688 - DNA, 33 bp, Homo sapien
ttcagagttttcaaccgataaaagagcaagaca

SEQ ID NO: 443689 - DNA, 33 bp, Homo sapien
ctgagcatgtcaaaaaaattacactagacaaag

SEQ ID NO: 443690 - DNA, 33 bp, Homo sapien
ctgagcatgtcaaaaagattacactagacaaag

SEQ ID NO: 443691 - DNA, 33 bp, Homo sapien
atccatttgcttgacaatcaacttaacagttat

SEQ ID NO: 443692 - DNA, 33 bp, Homo sapien
atccatttgcttgacattcaacttaacagttat

SEQ ID NO: 443693 - DNA, 33 bp, Homo sapien
tgaatgccacaatttaaatgcattaactggaaa

SEQ ID NO: 443694 - DNA, 33 bp, Homo sapien
tgaatgccacaatttatatgcattaactggaaa

SEQ ID NO: 443695 - DNA, 33 bp, Homo sapien
ttatgaaattctcataagcaaagaaaaagaaca

SEQ ID NO: 443696 - DNA, 33 bp, Homo sapien
ttatgaaattctcataggcaaagaaaaagaaca

SEQ ID NO: 443697 - DNA, 33 bp, Homo sapien
gaaaaaaaatgtttcccactggcataagtgtag

SEQ ID NO: 443698 - DNA, 33 bp, Homo sapien
gaaaaaaaatgtttcctactggcataagtgtag

SEQ ID NO: 443699 - DNA, 33 bp, Homo sapien
gaaaagaaaaagtccaagtatgcagcaatgttg

SEQ ID NO: 443700 - DNA, 33 bp, Homo sapien
gaaaagaaaaagtccacgtatgcagcaatgttg

SEQ ID NO: 443701 - DNA, 33 bp, Homo sapien
attatagtaggttacactgaagaagtcaggaag

SEQ ID NO: 443702 - DNA, 33 bp, Homo sapien
attatagtaggttacattgaagaagtcaggaag

SEQ ID NO: 443703 - DNA, 33 bp, Homo sapien
aacagtagagaggaaaaagtcaaagataaaggg

SEQ ID NO: 443704 - DNA, 33 bp, Homo sapien
aacagtagagaggaaagagtcaaagataaaggg

SEQ ID NO: 443705 - DNA, 33 bp, Homo sapien
taaatctgaggcagtaactgcaatatgcttgcc

SEQ ID NO: 443706 - DNA, 33 bp, Homo sapien
taaatctgaggcagtagctgcaatatgcttgcc

SEQ ID NO: 443707 - DNA, 33 bp, Homo sapien
atcttgaccacatgataacgaacagcagtcgtg

SEQ ID NO: 443708 - DNA, 33 bp, Homo sapien
atcttgaccacatgatgacgaacagcagtcgtg

SEQ ID NO: 443709 - DNA, 33 bp, Homo sapien
aatgtcataacccagaagctccttattccaggg

SEQ ID NO: 443710 - DNA, 33 bp, Homo sapien
aatgtcataacccagaggctccttattccaggg

SEQ ID NO: 443711 - DNA, 33 bp, Homo sapien
ttggtattactgacaaccacatttcttagttct

SEQ ID NO: 443712 - DNA, 33 bp, Homo sapien
ttggtattactgacaagcacatttcttagttct

SEQ ID NO: 443713 - DNA, 33 bp, Homo sapien
agtatctgagttcttcaagtgttaggattccct

SEQ ID NO: 443714 - DNA, 33 bp, Homo sapien
agtatctgagttcttctagtgttaggattccct

SEQ ID NO: 443715 - DNA, 33 bp, Homo sapien
cgtttttcacactgaacctggggcttagtgaca

SEQ ID NO: 443716 - DNA, 33 bp, Homo sapien
cgtttttcacactgaatctggggcttagtgaca

SEQ ID NO: 443717 - DNA, 33 bp, Homo sapien
taatacttcaagtgtacagtggcaatggggaga

SEQ ID NO: 443718 - DNA, 33 bp, Homo sapien
taatacttcaagtgtatagtggcaatggggaga

SEQ ID NO: 443719 - DNA, 33 bp, Homo sapien
agaatgtttcatatgaaggtaatgataacaatc

SEQ ID NO: 443720 - DNA, 33 bp, Homo sapien
agaatgtttcatatgatggtaatgataacaatc

SEQ ID NO: 443721 - DNA, 33 bp, Homo sapien
tatgatcacaacaaaacgagaagcggatagagt

SEQ ID NO: 443722 - DNA, 33 bp, Homo sapien
tatgatcacaacaaaatgagaagcggatagagt

SEQ ID NO: 443723 - DNA, 33 bp, Homo sapien
gtgtctcagactgttactaaagctgtccatcct

SEQ ID NO: 443724 - DNA, 33 bp, Homo sapien
gtgtctcagactgttattaaagctgtccatcct

SEQ ID NO: 443725 - DNA, 33 bp, Homo sapien
attccacagttatttaagtcatgatcaaactta

SEQ ID NO: 443726 - DNA, 33 bp, Homo sapien
attccacagttatttaggtcatgatcaaactta

SEQ ID NO: 443727 - DNA, 33 bp, Homo sapien
aacaaagtaaattcgaaacggattacagactta

SEQ ID NO: 443728 - DNA, 33 bp, Homo sapien
aacaaagtaaattcgagacggattacagactta

SEQ ID NO: 443729 - DNA, 33 bp, Homo sapien
gagatgaaagatgacacctggatgtagtagaca

SEQ ID NO: 443730 - DNA, 33 bp, Homo sapien
gagatgaaagatgacagctggatgtagtagaca

SEQ ID NO: 443731 - DNA, 33 bp, Homo sapien
ctgcatgtgtcagaaaaaaaagaagcaagtaaa

SEQ ID NO: 443732 - DNA, 33 bp, Homo sapien
ctgcatgtgtcagaaagaaaagaagcaagtaaa

SEQ ID NO: 443733 - DNA, 33 bp, Homo sapien
gatcactgaaatgccaaatatattccttcctgc

SEQ ID NO: 443734 - DNA, 33 bp, Homo sapien
gatcactgaaatgccagatatattccttcctgc

SEQ ID NO: 443735 - DNA, 33 bp, Homo sapien
tgtccagggtaacataaccatctatcctctttg

SEQ ID NO: 443736 - DNA, 33 bp, Homo sapien
tgtccagggtaacatagccatctatcctctttg

SEQ ID NO: 443737 - DNA, 33 bp, Homo sapien
acaggaaaagctatgcagataattgtcctgtaa

SEQ ID NO: 443738 - DNA, 33 bp, Homo sapien
acaggaaaagctatgcggataattgtcctgtaa

SEQ ID NO: 443739 - DNA, 33 bp, Homo sapien
gacttggttaaattgccaccttctactcgttaa

SEQ ID NO: 443740 - DNA, 33 bp, Homo sapien
gacttggttaaattgctaccttctactcgttaa

SEQ ID NO: 443741 - DNA, 33 bp, Homo sapien
ggtgcttctatggacactgagtaattggtagag

SEQ ID NO: 443742 - DNA, 33 bp, Homo sapien
ggtgcttctatggacattgagtaattggtagag

SEQ ID NO: 443743 - DNA, 33 bp, Homo sapien
tttctatttctctcctcaaagaaccacacatat

SEQ ID NO: 443744 - DNA, 33 bp, Homo sapien
tttctatttctctccttaaagaaccacacatat

SEQ ID NO: 443745 - DNA, 33 bp, Homo sapien
aataagtagacttcttaaaatactttgatttat

SEQ ID NO: 443746 - DNA, 33 bp, Homo sapien
aataagtagacttcttgaaatactttgatttat

SEQ ID NO: 443747 - DNA, 33 bp, Homo sapien
ccaacatcatttttaacatacagcaaaattcta

SEQ ID NO: 443748 - DNA, 33 bp, Homo sapien
ccaacatcatttttaagatacagcaaaattcta

SEQ ID NO: 443749 - DNA, 33 bp, Homo sapien
tcagctctactctacaagtctgttattccccgt

SEQ ID NO: 443750 - DNA, 33 bp, Homo sapien
tcagctctactctacaggtctgttattccccgt

SEQ ID NO: 443751 - DNA, 33 bp, Homo sapien
tctcattgttgtttaaatgtccacgggtaaaaa

SEQ ID NO: 443752 - DNA, 33 bp, Homo sapien
tctcattgttgtttaagtgtccacgggtaaaaa

SEQ ID NO: 443753 - DNA, 33 bp, Homo sapien
taaaaagctggacacccaattaggaaatctaat

SEQ ID NO: 443754 - DNA, 33 bp, Homo sapien
taaaaagctggacaccgaattaggaaatctaat

SEQ ID NO: 443755 - DNA, 33 bp, Homo sapien
attttgaccagccacaatctagaaaaaggcatt

SEQ ID NO: 443756 - DNA, 33 bp, Homo sapien
attttgaccagccacagtctagaaaaaggcatt

SEQ ID NO: 443757 - DNA, 33 bp, Homo sapien
aagaatgtcagctaggaatgcacgttcagtagc

SEQ ID NO: 443758 - DNA, 33 bp, Homo sapien
aagaatgtcagctaggcatgcacgttcagtagc

SEQ ID NO: 443759 - DNA, 33 bp, Homo sapien
tcacttaaccagtcaaattacctagagaagtag

SEQ ID NO: 443760 - DNA, 33 bp, Homo sapien
tcacttaaccagtcaacttacctagagaagtag

SEQ ID NO: 443761 - DNA, 33 bp, Homo sapien
ccactacatatgcaaaatcagggcacattagaa

SEQ ID NO: 443762 - DNA, 33 bp, Homo sapien
ccactacatatgcaaattcagggcacattagaa

SEQ ID NO: 443763 - DNA, 33 bp, Homo sapien
tttaaaaaaactaagaagatgaatcaaacactg

SEQ ID NO: 443764 - DNA, 33 bp, Homo sapien
tttaaaaaaactaagaggatgaatcaaacactg

SEQ ID NO: 443765 - DNA, 33 bp, Homo sapien
tgaggagatgacagaacacttaggaagtcgtgg

SEQ ID NO: 443766 - DNA, 33 bp, Homo sapien
tgaggagatgacagaatacttaggaagtcgtgg

SEQ ID NO: 443767 - DNA, 33 bp, Homo sapien
ttggaaaatttgcagacgggctgtatggtagaa

SEQ ID NO: 443768 - DNA, 33 bp, Homo sapien
ttggaaaatttgcagatgggctgtatggtagaa

SEQ ID NO: 443769 - DNA, 33 bp, Homo sapien
gaatttgcagtggctaccttttgactacatggt

SEQ ID NO: 443770 - DNA, 33 bp, Homo sapien
gaatttgcagtggctatcttttgactacatggt

SEQ ID NO: 443771 - DNA, 33 bp, Homo sapien
atttcttccttacaaaatctgaagtctagtata

SEQ ID NO: 443772 - DNA, 33 bp, Homo sapien
atttcttccttacaaagtctgaagtctagtata

SEQ ID NO: 443773 - DNA, 33 bp, Homo sapien
atgcagctggtaccagaacaattaatgcactca

SEQ ID NO: 443774 - DNA, 33 bp, Homo sapien
atgcagctggtaccaggacaattaatgcactca

SEQ ID NO: 443775 - DNA, 33 bp, Homo sapien
aagtaagcaagtcctaaagagctttcaaaaatg

SEQ ID NO: 443776 - DNA, 33 bp, Homo sapien
aagtaagcaagtcctacagagctttcaaaaatg

SEQ ID NO: 443777 - DNA, 33 bp, Homo sapien
catcagtacttaactacgtccaggtgttttctc

SEQ ID NO: 443778 - DNA, 33 bp, Homo sapien
catcagtacttaactatgtccaggtgttttctc

SEQ ID NO: 443779 - DNA, 33 bp, Homo sapien
atttttctcataacatcacaggactctagaaga

SEQ ID NO: 443780 - DNA, 33 bp, Homo sapien
atttttctcataacattacaggactctagaaga

SEQ ID NO: 443781 - DNA, 33 bp, Homo sapien
cattcatttgcctgaaaatccctggtgagaaag

SEQ ID NO: 443782 - DNA, 33 bp, Homo sapien
cattcatttgcctgaacatccctggtgagaaag

SEQ ID NO: 443783 - DNA, 33 bp, Homo sapien
gttagtacagtcttgaccttttacaactggtca

SEQ ID NO: 443784 - DNA, 33 bp, Homo sapien
gttagtacagtcttgatcttttacaactggtca

SEQ ID NO: 443785 - DNA, 33 bp, Homo sapien
tgtgcttacagttaaaggcacagatattagtaa

SEQ ID NO: 443786 - DNA, 33 bp, Homo sapien
tgtgcttacagttaaatgcacagatattagtaa

SEQ ID NO: 443787 - DNA, 33 bp, Homo sapien
atttactatgtgacacaaaggaagtaattcacg

SEQ ID NO: 443788 - DNA, 33 bp, Homo sapien
atttactatgtgacacgaaggaagtaattcacg

SEQ ID NO: 443789 - DNA, 33 bp, Homo sapien
ctgtccaagtctacctaaatttctgatacacat

SEQ ID NO: 443790 - DNA, 33 bp, Homo sapien
ctgtccaagtctacctgaatttctgatacacat

SEQ ID NO: 443791 - DNA, 33 bp, Homo sapien
gaaaaatcactgagcacctaagaacttcagctg

SEQ ID NO: 443792 - DNA, 33 bp, Homo sapien
gaaaaatcactgagcagctaagaacttcagctg

SEQ ID NO: 443793 - DNA, 33 bp, Homo sapien
agaaacaatacaagataacattcagccttaaga

SEQ ID NO: 443794 - DNA, 33 bp, Homo sapien
agaaacaatacaagatgacattcagccttaaga

SEQ ID NO: 443795 - DNA, 33 bp, Homo sapien
ttaaagggagtggttacgtttacagaggataga

SEQ ID NO: 443796 - DNA, 33 bp, Homo sapien
ttaaagggagtggttatgtttacagaggataga

SEQ ID NO: 443797 - DNA, 33 bp, Homo sapien
acaaagtctcactctaagcactcattttctact

SEQ ID NO: 443798 - DNA, 33 bp, Homo sapien
acaaagtctcactctatgcactcattttctact

SEQ ID NO: 443799 - DNA, 33 bp, Homo sapien
ctcaaataaaaaggacgctggtagcatgactat

SEQ ID NO: 443800 - DNA, 33 bp, Homo sapien
ctcaaataaaaaggactctggtagcatgactat

SEQ ID NO: 443801 - DNA, 33 bp, Homo sapien
gagcagtgagaatgaaaccatggtgctatcttc

SEQ ID NO: 443802 - DNA, 33 bp, Homo sapien
gagcagtgagaatgaagccatggtgctatcttc

SEQ ID NO: 443803 - DNA, 33 bp, Homo sapien
gatgccagatttctgaactaccataccgtgagc

SEQ ID NO: 443804 - DNA, 33 bp, Homo sapien
gatgccagatttctgacctaccataccgtgagc

SEQ ID NO: 443805 - DNA, 33 bp, Homo sapien
ctctgcagatcttccacataagaactcagccca

SEQ ID NO: 443806 - DNA, 33 bp, Homo sapien
ctctgcagatcttccagataagaactcagccca

SEQ ID NO: 443807 - DNA, 33 bp, Homo sapien
ttctagcatcagtatagcaaacataaggtgaac

SEQ ID NO: 443808 - DNA, 33 bp, Homo sapien
ttctagcatcagtatatcaaacataaggtgaac

SEQ ID NO: 443809 - DNA, 33 bp, Homo sapien
aattttcagttaagccagattactaagcttgag

SEQ ID NO: 443810 - DNA, 33 bp, Homo sapien
aattttcagttaagcccgattactaagcttgag

SEQ ID NO: 443811 - DNA, 33 bp, Homo sapien
cagaaacttactctgaactgtttgttttctccc

SEQ ID NO: 443812 - DNA, 33 bp, Homo sapien
cagaaacttactctgatctgtttgttttctccc

SEQ ID NO: 443813 - DNA, 33 bp, Homo sapien
atcatagagatggaaaatgattactggttgtca

SEQ ID NO: 443814 - DNA, 33 bp, Homo sapien
atcatagagatggaaagtgattactggttgtca

SEQ ID NO: 443815 - DNA, 33 bp, Homo sapien
caattacacttgaaagcaggaaaaatgcttgtt

SEQ ID NO: 443816 - DNA, 33 bp, Homo sapien
caattacacttgaaaggaggaaaaatgcttgtt

SEQ ID NO: 443817 - DNA, 33 bp, Homo sapien
gataacactaatttccaaacactcaaaattcca

SEQ ID NO: 443818 - DNA, 33 bp, Homo sapien
gataacactaatttccgaacactcaaaattcca

SEQ ID NO: 443819 - DNA, 33 bp, Homo sapien
cctaaaagacttagcaaactgaatggaggaaaa

SEQ ID NO: 443820 - DNA, 33 bp, Homo sapien
cctaaaagacttagcagactgaatggaggaaaa

SEQ ID NO: 443821 - DNA, 33 bp, Homo sapien
acctcataacaccatacagttctttttaaaact

SEQ ID NO: 443822 - DNA, 33 bp, Homo sapien
acctcataacaccatatagttctttttaaaact

SEQ ID NO: 443823 - DNA, 33 bp, Homo sapien
ctttaccaaagagacactggaagccacagttaa

SEQ ID NO: 443824 - DNA, 33 bp, Homo sapien
ctttaccaaagagacattggaagccacagttaa

SEQ ID NO: 443825 - DNA, 33 bp, Homo sapien
attacaacacatagacaaactaagtatgttgta

SEQ ID NO: 443826 - DNA, 33 bp, Homo sapien
attacaacacatagacgaactaagtatgttgta

SEQ ID NO: 443827 - DNA, 33 bp, Homo sapien
taggaggcaacttctacataaggacagaggcga

SEQ ID NO: 443828 - DNA, 33 bp, Homo sapien
taggaggcaacttctatataaggacagaggcga

SEQ ID NO: 443829 - DNA, 33 bp, Homo sapien
ccacctaaaaatgataaggtggagaagcaaaga

SEQ ID NO: 443830 - DNA, 33 bp, Homo sapien
ccacctaaaaatgatagggtggagaagcaaaga

SEQ ID NO: 443831 - DNA, 33 bp, Homo sapien
tgctgagctggaatcacaaacagaaattaacaa

SEQ ID NO: 443832 - DNA, 33 bp, Homo sapien
tgctgagctggaatcagaaacagaaattaacaa

SEQ ID NO: 443833 - DNA, 33 bp, Homo sapien
gtcagtaactatgttaaattctgagatactaaa

SEQ ID NO: 443834 - DNA, 33 bp, Homo sapien
gtcagtaactatgttagattctgagatactaaa

SEQ ID NO: 443835 - DNA, 33 bp, Homo sapien
tatgaatcacatggtaaatttccgttacatcag

SEQ ID NO: 443836 - DNA, 33 bp, Homo sapien
tatgaatcacatggtagatttccgttacatcag

SEQ ID NO: 443837 - DNA, 33 bp, Homo sapien
ttcttggagaatattgcaagcctggtatgaaag

SEQ ID NO: 443838 - DNA, 33 bp, Homo sapien
ttcttggagaatattgtaagcctggtatgaaag

SEQ ID NO: 443839 - DNA, 33 bp, Homo sapien
aattatgaatttacacaaaatctcttatattaa

SEQ ID NO: 443840 - DNA, 33 bp, Homo sapien
aattatgaatttacacgaaatctcttatattaa

SEQ ID NO: 443841 - DNA, 33 bp, Homo sapien
tcagtaactggacaggaagaaactaaattacct

SEQ ID NO: 443842 - DNA, 33 bp, Homo sapien
tcagtaactggacagggagaaactaaattacct

SEQ ID NO: 443843 - DNA, 33 bp, Homo sapien
cctgtccagttactgacagatgcctttgaagtt

SEQ ID NO: 443844 - DNA, 33 bp, Homo sapien
cctgtccagttactgatagatgcctttgaagtt

SEQ ID NO: 443845 - DNA, 33 bp, Homo sapien
ctttgaggagctgaaaaaaaagtgatgaaacaa

SEQ ID NO: 443846 - DNA, 33 bp, Homo sapien
ctttgaggagctgaaagaaaagtgatgaaacaa

SEQ ID NO: 443847 - DNA, 33 bp, Homo sapien
ctgattttcttttttaacctctgaactgattct

SEQ ID NO: 443848 - DNA, 33 bp, Homo sapien
ctgattttcttttttatcctctgaactgattct

SEQ ID NO: 443849 - DNA, 33 bp, Homo sapien
ttgatttttttgtaggacacatttcaagatgtg

SEQ ID NO: 443850 - DNA, 33 bp, Homo sapien
ttgatttttttgtagggcacatttcaagatgtg

SEQ ID NO: 443851 - DNA, 33 bp, Homo sapien
cagacaaagagtgtaactgaaataaccaatgtt

SEQ ID NO: 443852 - DNA, 33 bp, Homo sapien
cagacaaagagtgtaattgaaataaccaatgtt

SEQ ID NO: 443853 - DNA, 33 bp, Homo sapien
atgtacacattgagccacagggacaacgtattc

SEQ ID NO: 443854 - DNA, 33 bp, Homo sapien
atgtacacattgagccgcagggacaacgtattc

SEQ ID NO: 443855 - DNA, 33 bp, Homo sapien
ctaattggagaggcaaccagacactccacctgc

SEQ ID NO: 443856 - DNA, 33 bp, Homo sapien
ctaattggagaggcaagcagacactccacctgc

SEQ ID NO: 443857 - DNA, 33 bp, Homo sapien
gatgagcagtttcaaactaaaagctagatttat

SEQ ID NO: 443858 - DNA, 33 bp, Homo sapien
gatgagcagtttcaaattaaaagctagatttat

SEQ ID NO: 443859 - DNA, 33 bp, Homo sapien
gtttattgtgggcaaccccagttggtctgctct

SEQ ID NO: 443860 - DNA, 33 bp, Homo sapien
gtttattgtgggcaactccagttggtctgctct

SEQ ID NO: 443861 - DNA, 33 bp, Homo sapien
gcatcaagaacagcaaataagagttcaccaggc

SEQ ID NO: 443862 - DNA, 33 bp, Homo sapien
gcatcaagaacagcaagtaagagttcaccaggc

SEQ ID NO: 443863 - DNA, 33 bp, Homo sapien
ttaattcatactgttcaaaatagccttaaaaat

SEQ ID NO: 443864 - DNA, 33 bp, Homo sapien
ttaattcatactgttccaaatagccttaaaaat

SEQ ID NO: 443865 - DNA, 33 bp, Homo sapien
tcagttagattctggacgtgtttgtcagacaac

SEQ ID NO: 443866 - DNA, 33 bp, Homo sapien
tcagttagattctggaggtgtttgtcagacaac

SEQ ID NO: 443867 - DNA, 33 bp, Homo sapien
ctattttgttacatgtcaaatgttatctgtgtg

SEQ ID NO: 443868 - DNA, 33 bp, Homo sapien
ctattttgttacatgtgaaatgttatctgtgtg

SEQ ID NO: 443869 - DNA, 33 bp, Homo sapien
tcaggcatataactgaaagtcttccactctgtc

SEQ ID NO: 443870 - DNA, 33 bp, Homo sapien
tcaggcatataactgagagtcttccactctgtc

SEQ ID NO: 443871 - DNA, 33 bp, Homo sapien
ttccgcatttatcttaaaaaagacaaagattct

SEQ ID NO: 443872 - DNA, 33 bp, Homo sapien
ttccgcatttatcttacaaaagacaaagattct

SEQ ID NO: 443873 - DNA, 33 bp, Homo sapien
gtttggctccaacctaacatatcgccgaggttt

SEQ ID NO: 443874 - DNA, 33 bp, Homo sapien
gtttggctccaacctatcatatcgccgaggttt

SEQ ID NO: 443875 - DNA, 33 bp, Homo sapien
gaatttgtcaacctcacattctgaatttagaac

SEQ ID NO: 443876 - DNA, 33 bp, Homo sapien
gaatttgtcaacctcagattctgaatttagaac

SEQ ID NO: 443877 - DNA, 33 bp, Homo sapien
actgatttgttagcaacggcagctcctaaaagc

SEQ ID NO: 443878 - DNA, 33 bp, Homo sapien
actgatttgttagcaatggcagctcctaaaagc

SEQ ID NO: 443879 - DNA, 33 bp, Homo sapien
gtggataaatttgcttcgcgtttggagagtttt

SEQ ID NO: 443880 - DNA, 33 bp, Homo sapien
gtggataaatttgctttgcgtttggagagtttt

SEQ ID NO: 443881 - DNA, 33 bp, Homo sapien
aaagcaacaatataacacccacagctttcctac

SEQ ID NO: 443882 - DNA, 33 bp, Homo sapien
aaagcaacaatataacgcccacagctttcctac

SEQ ID NO: 443883 - DNA, 33 bp, Homo sapien
tttccccaacagcaaaggatgttttagttaatg

SEQ ID NO: 443884 - DNA, 33 bp, Homo sapien
tttccccaacagcaaatgatgttttagttaatg

SEQ ID NO: 443885 - DNA, 33 bp, Homo sapien
tgcaatcttcaggacaagtgcatttatttgaaa

SEQ ID NO: 443886 - DNA, 33 bp, Homo sapien
tgcaatcttcaggacaggtgcatttatttgaaa

SEQ ID NO: 443887 - DNA, 33 bp, Homo sapien
agaatcagtaacaccactgcttgaggaagacta

SEQ ID NO: 443888 - DNA, 33 bp, Homo sapien
agaatcagtaacaccattgcttgaggaagacta

SEQ ID NO: 443889 - DNA, 33 bp, Homo sapien
ttgaaattatgccagagactttttgaggtaagc

SEQ ID NO: 443890 - DNA, 33 bp, Homo sapien
ttgaaattatgccagatactttttgaggtaagc

SEQ ID NO: 443891 - DNA, 33 bp, Homo sapien
tatagctagttaataaacctatttctcctctgt

SEQ ID NO: 443892 - DNA, 33 bp, Homo sapien
tatagctagttaataaccctatttctcctctgt

SEQ ID NO: 443893 - DNA, 33 bp, Homo sapien
atctactgaaagaaacaagtgacacactgcctg

SEQ ID NO: 443894 - DNA, 33 bp, Homo sapien
atctactgaaagaaacgagtgacacactgcctg

SEQ ID NO: 443895 - DNA, 33 bp, Homo sapien
agttgtcttgagctaaagggaaaaggaggagct

SEQ ID NO: 443896 - DNA, 33 bp, Homo sapien
agttgtcttgagctaaggggaaaaggaggagct

SEQ ID NO: 443897 - DNA, 33 bp, Homo sapien
attaaacgtttttgtccacaagagtatctttat

SEQ ID NO: 443898 - DNA, 33 bp, Homo sapien
attaaacgtttttgtctacaagagtatctttat

SEQ ID NO: 443899 - DNA, 33 bp, Homo sapien
cctgcactgtaacggccatgtttatcctctgct

SEQ ID NO: 443900 - DNA, 33 bp, Homo sapien
cctgcactgtaacggctatgtttatcctctgct

SEQ ID NO: 443901 - DNA, 33 bp, Homo sapien
tgacggattgagtagcacgtttgtcaggttatg

SEQ ID NO: 443902 - DNA, 33 bp, Homo sapien
tgacggattgagtagcgcgtttgtcaggttatg

SEQ ID NO: 443903 - DNA, 33 bp, Homo sapien
gagctcaagcgctggacaggctcaccaacaaac

SEQ ID NO: 443904 - DNA, 33 bp, Homo sapien
gagctcaagcgctggataggctcaccaacaaac

SEQ ID NO: 443905 - DNA, 33 bp, Homo sapien
attgaagtaatttcctcaaaacactgaaatagc

SEQ ID NO: 443906 - DNA, 33 bp, Homo sapien
attgaagtaatttcctgaaaacactgaaatagc

SEQ ID NO: 443907 - DNA, 33 bp, Homo sapien
aaaataacaggatttccctataaccctatggag

SEQ ID NO: 443908 - DNA, 33 bp, Homo sapien
aaaataacaggatttctctataaccctatggag

SEQ ID NO: 443909 - DNA, 33 bp, Homo sapien
aaatttataaaaatgcacctaacagtgatggcc

SEQ ID NO: 443910 - DNA, 33 bp, Homo sapien
aaatttataaaaatgctcctaacagtgatggcc

SEQ ID NO: 443911 - DNA, 33 bp, Homo sapien
ttataatccatgttcacaaaaagcattgtgcat

SEQ ID NO: 443912 - DNA, 33 bp, Homo sapien
ttataatccatgttcataaaaagcattgtgcat

SEQ ID NO: 443913 - DNA, 33 bp, Homo sapien
ttgtaattcctggagaacaacgtaaagtttttt

SEQ ID NO: 443914 - DNA, 33 bp, Homo sapien
ttgtaattcctggagagcaacgtaaagtttttt

SEQ ID NO: 443915 - DNA, 33 bp, Homo sapien
aatgtttgaaagaaaaaaattaatgagaggaag

SEQ ID NO: 443916 - DNA, 33 bp, Homo sapien
aatgtttgaaagaaaacaattaatgagaggaag

SEQ ID NO: 443917 - DNA, 33 bp, Homo sapien
gctctcatttgactgtaaaaaggcataaatttt

SEQ ID NO: 443918 - DNA, 33 bp, Homo sapien
gctctcatttgactgtgaaaaggcataaatttt

SEQ ID NO: 443919 - DNA, 33 bp, Homo sapien
aagagaccattgataaaatccatggagggcaca

SEQ ID NO: 443920 - DNA, 33 bp, Homo sapien
aagagaccattgataacatccatggagggcaca

SEQ ID NO: 443921 - DNA, 33 bp, Homo sapien
gtgagcccacttaagaccagcataaaaatatcc

SEQ ID NO: 443922 - DNA, 33 bp, Homo sapien
gtgagcccacttaagatcagcataaaaatatcc

SEQ ID NO: 443923 - DNA, 33 bp, Homo sapien
taaaaaatatgactataacgaatagtggagtct

SEQ ID NO: 443924 - DNA, 33 bp, Homo sapien
taaaaaatatgactatcacgaatagtggagtct

SEQ ID NO: 443925 - DNA, 33 bp, Homo sapien
ttttttaatccaacaacagaatttgccaaagac

SEQ ID NO: 443926 - DNA, 33 bp, Homo sapien
ttttttaatccaacaatagaatttgccaaagac

SEQ ID NO: 443927 - DNA, 33 bp, Homo sapien
attattcatggggttaaaaagttagggaatatt

SEQ ID NO: 443928 - DNA, 33 bp, Homo sapien
attattcatggggttacaaagttagggaatatt

SEQ ID NO: 443929 - DNA, 33 bp, Homo sapien
catttttagcctatagcctaattgaaaaactcc

SEQ ID NO: 443930 - DNA, 33 bp, Homo sapien
catttttagcctatagtctaattgaaaaactcc

SEQ ID NO: 443931 - DNA, 33 bp, Homo sapien
ggcagagatacattacacttctcattctaaaaa

SEQ ID NO: 443932 - DNA, 33 bp, Homo sapien
ggcagagatacattacgcttctcattctaaaaa

SEQ ID NO: 443933 - DNA, 33 bp, Homo sapien
gaggaatatagcaagaacctgcatctataataa

SEQ ID NO: 443934 - DNA, 33 bp, Homo sapien
gaggaatatagcaagaccctgcatctataataa

SEQ ID NO: 443935 - DNA, 33 bp, Homo sapien
gaacaaggaacatacactggtagacctcctgta

SEQ ID NO: 443936 - DNA, 33 bp, Homo sapien
gaacaaggaacatacattggtagacctcctgta

SEQ ID NO: 443937 - DNA, 33 bp, Homo sapien
agtttcaactctccaacagaacaaggaacatac

SEQ ID NO: 443938 - DNA, 33 bp, Homo sapien
agtttcaactctccaatagaacaaggaacatac

SEQ ID NO: 443939 - DNA, 33 bp, Homo sapien
catggtcaattagtccacacatactgttaactt

SEQ ID NO: 443940 - DNA, 33 bp, Homo sapien
catggtcaattagtccgcacatactgttaactt

SEQ ID NO: 443941 - DNA, 33 bp, Homo sapien
aagctgaggcattaaaaataatctaaacttgac

SEQ ID NO: 443942 - DNA, 33 bp, Homo sapien
aagctgaggcattaaagataatctaaacttgac

SEQ ID NO: 443943 - DNA, 33 bp, Homo sapien
ggtcatcaaaatcacaagtgagagcatggtaaa

SEQ ID NO: 443944 - DNA, 33 bp, Homo sapien
ggtcatcaaaatcacaggtgagagcatggtaaa

SEQ ID NO: 443945 - DNA, 33 bp, Homo sapien
tacagtgagtaggaagaattgtttgagtggagc

SEQ ID NO: 443946 - DNA, 33 bp, Homo sapien
tacagtgagtaggaagtattgtttgagtggagc

SEQ ID NO: 443947 - DNA, 33 bp, Homo sapien
taggaaaatacccaaaccagaaactccaagtca

SEQ ID NO: 443948 - DNA, 33 bp, Homo sapien
taggaaaatacccaaatcagaaactccaagtca

SEQ ID NO: 443949 - DNA, 33 bp, Homo sapien
gtaagttcaagatagcagacccacacaatttcc

SEQ ID NO: 443950 - DNA, 33 bp, Homo sapien
gtaagttcaagatagcggacccacacaatttcc

SEQ ID NO: 443951 - DNA, 33 bp, Homo sapien
ttgttggcttcagatgaatcagaaataaccatg

SEQ ID NO: 443952 - DNA, 33 bp, Homo sapien
ttgttggcttcagatggatcagaaataaccatg

SEQ ID NO: 443953 - DNA, 33 bp, Homo sapien
attttatggctaattaaaaatgatgattgttca

SEQ ID NO: 443954 - DNA, 33 bp, Homo sapien
attttatggctaattagaaatgatgattgttca

SEQ ID NO: 443955 - DNA, 33 bp, Homo sapien
caaatgtcatctcttacgttggactttctctga

SEQ ID NO: 443956 - DNA, 33 bp, Homo sapien
caaatgtcatctcttatgttggactttctctga

SEQ ID NO: 443957 - DNA, 33 bp, Homo sapien
atgtggccttatttagcaatggtaccattttgt

SEQ ID NO: 443958 - DNA, 33 bp, Homo sapien
atgtggccttatttagtaatggtaccattttgt

SEQ ID NO: 443959 - DNA, 33 bp, Homo sapien
ccatctgcacagtaaactggaaaatgatttcta

SEQ ID NO: 443960 - DNA, 33 bp, Homo sapien
ccatctgcacagtaaattggaaaatgatttcta

SEQ ID NO: 443961 - DNA, 33 bp, Homo sapien
cttacagtgaattgcactaagattcatactgta

SEQ ID NO: 443962 - DNA, 33 bp, Homo sapien
cttacagtgaattgcagtaagattcatactgta

SEQ ID NO: 443963 - DNA, 33 bp, Homo sapien
ttttactgctgtaataacactctaacttctttt

SEQ ID NO: 443964 - DNA, 33 bp, Homo sapien
ttttactgctgtaatagcactctaacttctttt

SEQ ID NO: 443965 - DNA, 33 bp, Homo sapien
aatattaatttctaaccatgtaagcgcatataa

SEQ ID NO: 443966 - DNA, 33 bp, Homo sapien
aatattaatttctaactatgtaagcgcatataa

SEQ ID NO: 443967 - DNA, 33 bp, Homo sapien
ttaaatttatctttgacagttgctgaaaatctc

SEQ ID NO: 443968 - DNA, 33 bp, Homo sapien
ttaaatttatctttgagagttgctgaaaatctc

SEQ ID NO: 443969 - DNA, 33 bp, Homo sapien
tgggatagatgcctaaaccatgatgcctgccca

SEQ ID NO: 443970 - DNA, 33 bp, Homo sapien
tgggatagatgcctaagccatgatgcctgccca

SEQ ID NO: 443971 - DNA, 33 bp, Homo sapien
tacttagaaggctagaatcaactaaacagaatt

SEQ ID NO: 443972 - DNA, 33 bp, Homo sapien
tacttagaaggctagagtcaactaaacagaatt

SEQ ID NO: 443973 - DNA, 33 bp, Homo sapien
aataaaggcttgaacactatttgtctgtttctg

SEQ ID NO: 443974 - DNA, 33 bp, Homo sapien
aataaaggcttgaacattatttgtctgtttctg

SEQ ID NO: 443975 - DNA, 33 bp, Homo sapien
ccttcacaggagttaagagagtcctccaaaacc

SEQ ID NO: 443976 - DNA, 33 bp, Homo sapien
ccttcacaggagttaatagagtcctccaaaacc

SEQ ID NO: 443977 - DNA, 33 bp, Homo sapien
tcttcctgcttccatacgtaagtctattgcata

SEQ ID NO: 443978 - DNA, 33 bp, Homo sapien
tcttcctgcttccataggtaagtctattgcata

SEQ ID NO: 443979 - DNA, 33 bp, Homo sapien
ctacatttattctgaacaattagtttgatagtc

SEQ ID NO: 443980 - DNA, 33 bp, Homo sapien
ctacatttattctgaagaattagtttgatagtc

SEQ ID NO: 443981 - DNA, 33 bp, Homo sapien
aactgcttttattgacaaccacataaaatcacc

SEQ ID NO: 443982 - DNA, 33 bp, Homo sapien
aactgcttttattgacgaccacataaaatcacc

SEQ ID NO: 443983 - DNA, 33 bp, Homo sapien
attaatgtctggttatcagagatcattaatggc

SEQ ID NO: 443984 - DNA, 33 bp, Homo sapien
attaatgtctggttattagagatcattaatggc

SEQ ID NO: 443985 - DNA, 33 bp, Homo sapien
tttatcaagagctacaaattaatcacatttaag

SEQ ID NO: 443986 - DNA, 33 bp, Homo sapien
tttatcaagagctacatattaatcacatttaag

SEQ ID NO: 443987 - DNA, 33 bp, Homo sapien
aagaccttctgaatccaacctctgacacttctt

SEQ ID NO: 443988 - DNA, 33 bp, Homo sapien
aagaccttctgaatccgacctctgacacttctt

SEQ ID NO: 443989 - DNA, 33 bp, Homo sapien
ttatattcccaaataacatcttccactcttctg

SEQ ID NO: 443990 - DNA, 33 bp, Homo sapien
ttatattcccaaataatatcttccactcttctg

SEQ ID NO: 443991 - DNA, 33 bp, Homo sapien
tatttaattggtgttacgctcttgcaaaaattt

SEQ ID NO: 443992 - DNA, 33 bp, Homo sapien
tatttaattggtgttatgctcttgcaaaaattt

SEQ ID NO: 443993 - DNA, 33 bp, Homo sapien
taacactaatttttcaatatatacctataactg

SEQ ID NO: 443994 - DNA, 33 bp, Homo sapien
taacactaatttttcagtatatacctataactg

SEQ ID NO: 443995 - DNA, 33 bp, Homo sapien
gtgcaaaaatagtacacaggagaggcagcctca

SEQ ID NO: 443996 - DNA, 33 bp, Homo sapien
gtgcaaaaatagtacagaggagaggcagcctca

SEQ ID NO: 443997 - DNA, 33 bp, Homo sapien
tttaacatttaaagaaactgcccaactatttta

SEQ ID NO: 443998 - DNA, 33 bp, Homo sapien
tttaacatttaaagaagctgcccaactatttta

SEQ ID NO: 443999 - DNA, 33 bp, Homo sapien
ccttttcctgacttgaacgcatttaatgaagaa

SEQ ID NO: 444000 - DNA, 33 bp, Homo sapien
ccttttcctgacttgagcgcatttaatgaagaa

SEQ ID NO: 444001 - DNA, 33 bp, Homo sapien
atactcataaagtccacggtggattctgatcag

SEQ ID NO: 444002 - DNA, 33 bp, Homo sapien
atactcataaagtccatggtggattctgatcag

SEQ ID NO: 444003 - DNA, 33 bp, Homo sapien
gaagcatggcgttggcaaaaggggccataccca

SEQ ID NO: 444004 - DNA, 33 bp, Homo sapien
gaagcatggcgttggcgaaaggggccataccca

SEQ ID NO: 444005 - DNA, 33 bp, Homo sapien
gtgggctattagcaatcaagttcttggagagtc

SEQ ID NO: 444006 - DNA, 33 bp, Homo sapien
gtgggctattagcaattaagttcttggagagtc

SEQ ID NO: 444007 - DNA, 33 bp, Homo sapien
gacatataaatcagacgcggatggaggtgtgag

SEQ ID NO: 444008 - DNA, 33 bp, Homo sapien
gacatataaatcagactcggatggaggtgtgag

SEQ ID NO: 444009 - DNA, 33 bp, Homo sapien
gtttaaatataaacaccgaaggccaatccatct

SEQ ID NO: 444010 - DNA, 33 bp, Homo sapien
gtttaaatataaacactgaaggccaatccatct

SEQ ID NO: 444011 - DNA, 33 bp, Homo sapien
gtttgcaggaaaaataagtttccagtgtgatgc

SEQ ID NO: 444012 - DNA, 33 bp, Homo sapien
gtttgcaggaaaaataggtttccagtgtgatgc

SEQ ID NO: 444013 - DNA, 33 bp, Homo sapien
ggcctctcctgactaccagggcaaggattgttt

SEQ ID NO: 444014 - DNA, 33 bp, Homo sapien
ggcctctcctgactacgagggcaaggattgttt

SEQ ID NO: 444015 - DNA, 33 bp, Homo sapien
ttgcttagttttatgaactcgaatttttccaag

SEQ ID NO: 444016 - DNA, 33 bp, Homo sapien
ttgcttagttttatgacctcgaatttttccaag

SEQ ID NO: 444017 - DNA, 33 bp, Homo sapien
acaaaagaaatggagcggaatttaagaatataa

SEQ ID NO: 444018 - DNA, 33 bp, Homo sapien
acaaaagaaatggagctgaatttaagaatataa

SEQ ID NO: 444019 - DNA, 33 bp, Homo sapien
tgtaaggtatatagaagaatgttttggtataca

SEQ ID NO: 444020 - DNA, 33 bp, Homo sapien
tgtaaggtatatagaataatgttttggtataca

SEQ ID NO: 444021 - DNA, 33 bp, Homo sapien
actaccatttatgacaacatagatgaaactgat

SEQ ID NO: 444022 - DNA, 33 bp, Homo sapien
actaccatttatgacagcatagatgaaactgat

SEQ ID NO: 444023 - DNA, 33 bp, Homo sapien
tctcagaagttctaaacgtagcaagaattaaac

SEQ ID NO: 444024 - DNA, 33 bp, Homo sapien
tctcagaagttctaaatgtagcaagaattaaac

SEQ ID NO: 444025 - DNA, 33 bp, Homo sapien
tacttccagagttagggaaatctcttagaaatt

SEQ ID NO: 444026 - DNA, 33 bp, Homo sapien
tacttccagagttaggtaaatctcttagaaatt

SEQ ID NO: 444027 - DNA, 33 bp, Homo sapien
cactttatctcaaccacattttgctaggctttt

SEQ ID NO: 444028 - DNA, 33 bp, Homo sapien
cactttatctcaaccagattttgctaggctttt

SEQ ID NO: 444029 - DNA, 33 bp, Homo sapien
tacactattagggtaaaactcttctgttcattc

SEQ ID NO: 444030 - DNA, 33 bp, Homo sapien
tacactattagggtaagactcttctgttcattc

SEQ ID NO: 444031 - DNA, 33 bp, Homo sapien
atactaaggagggagaatcataaagcagaaaag

SEQ ID NO: 444032 - DNA, 33 bp, Homo sapien
atactaaggagggagactcataaagcagaaaag

SEQ ID NO: 444033 - DNA, 33 bp, Homo sapien
aattgtcaattatttgcacggtgatgaatgaag

SEQ ID NO: 444034 - DNA, 33 bp, Homo sapien
aattgtcaattatttgtacggtgatgaatgaag

SEQ ID NO: 444035 - DNA, 33 bp, Homo sapien
acacctgcttttacaccaaaattagccttgcaa

SEQ ID NO: 444036 - DNA, 33 bp, Homo sapien
acacctgcttttacactaaaattagccttgcaa

SEQ ID NO: 444037 - DNA, 33 bp, Homo sapien
cttaacaggcctcctactaagtagcattttcta

SEQ ID NO: 444038 - DNA, 33 bp, Homo sapien
cttaacaggcctcctagtaagtagcattttcta

SEQ ID NO: 444039 - DNA, 33 bp, Homo sapien
tggaggtgtcatttccagagagaaaaatgtttc

SEQ ID NO: 444040 - DNA, 33 bp, Homo sapien
tggaggtgtcatttccggagagaaaaatgtttc

SEQ ID NO: 444041 - DNA, 33 bp, Homo sapien
ccagcagatcataaagaattgagaacagggaac

SEQ ID NO: 444042 - DNA, 33 bp, Homo sapien
ccagcagatcataaagtattgagaacagggaac

SEQ ID NO: 444043 - DNA, 33 bp, Homo sapien
agcgtttaaagctggaaaaacttcaacaataaa

SEQ ID NO: 444044 - DNA, 33 bp, Homo sapien
agcgtttaaagctggacaaacttcaacaataaa

SEQ ID NO: 444045 - DNA, 33 bp, Homo sapien
tatgtatgtcactgaccagaaaacaaaaaaagt

SEQ ID NO: 444046 - DNA, 33 bp, Homo sapien
tatgtatgtcactgactagaaaacaaaaaaagt

SEQ ID NO: 444047 - DNA, 33 bp, Homo sapien
caaaaattacaacgaaatgatcttgccctgaag

SEQ ID NO: 444048 - DNA, 33 bp, Homo sapien
caaaaattacaacgaagtgatcttgccctgaag

SEQ ID NO: 444049 - DNA, 33 bp, Homo sapien
gtacatcatcttccaaagaatctcattactgca

SEQ ID NO: 444050 - DNA, 33 bp, Homo sapien
gtacatcatcttccaaggaatctcattactgca

SEQ ID NO: 444051 - DNA, 33 bp, Homo sapien
acattctcacatggtaagtaaaaagtagcaaat

SEQ ID NO: 444052 - DNA, 33 bp, Homo sapien
acattctcacatggtaggtaaaaagtagcaaat

SEQ ID NO: 444053 - DNA, 33 bp, Homo sapien
tagcaaggataaaagcaatgagaagctttcaag

SEQ ID NO: 444054 - DNA, 33 bp, Homo sapien
tagcaaggataaaagcgatgagaagctttcaag

SEQ ID NO: 444055 - DNA, 33 bp, Homo sapien
agaaaaggaaagagaagataggcctcaaaagta

SEQ ID NO: 444056 - DNA, 33 bp, Homo sapien
agaaaaggaaagagaatataggcctcaaaagta

SEQ ID NO: 444057 - DNA, 33 bp, Homo sapien
gtgatataaacataagaattccaacactgtgag

SEQ ID NO: 444058 - DNA, 33 bp, Homo sapien
gtgatataaacataaggattccaacactgtgag

SEQ ID NO: 444059 - DNA, 33 bp, Homo sapien
gtggcacaaactcctacggttctctgaaatcaa

SEQ ID NO: 444060 - DNA, 33 bp, Homo sapien
gtggcacaaactcctatggttctctgaaatcaa

SEQ ID NO: 444061 - DNA, 33 bp, Homo sapien
cccacacacatgtaaactcttcctagcacaatt

SEQ ID NO: 444062 - DNA, 33 bp, Homo sapien
cccacacacatgtaaattcttcctagcacaatt

SEQ ID NO: 444063 - DNA, 33 bp, Homo sapien
tttgacccttctttcacaggcacagagaactca

SEQ ID NO: 444064 - DNA, 33 bp, Homo sapien
tttgacccttctttcataggcacagagaactca

SEQ ID NO: 444065 - DNA, 33 bp, Homo sapien
ttgaagagttcagcaaccttttaatgttccctg

SEQ ID NO: 444066 - DNA, 33 bp, Homo sapien
ttgaagagttcagcaatcttttaatgttccctg

SEQ ID NO: 444067 - DNA, 33 bp, Homo sapien
ggtacctttggatgtacgtaagagtgagcattt

SEQ ID NO: 444068 - DNA, 33 bp, Homo sapien
ggtacctttggatgtatgtaagagtgagcattt

SEQ ID NO: 444069 - DNA, 33 bp, Homo sapien
tctatgactctcccatgactataattgctatta

SEQ ID NO: 444070 - DNA, 33 bp, Homo sapien
tctatgactctcccattactataattgctatta

SEQ ID NO: 444071 - DNA, 33 bp, Homo sapien
aatgaagaaaagtacaaggaaggttgacattat

SEQ ID NO: 444072 - DNA, 33 bp, Homo sapien
aatgaagaaaagtacagggaaggttgacattat

SEQ ID NO: 444073 - DNA, 33 bp, Homo sapien
tcctctaaggtgcaccagaaaggaagtgttcac

SEQ ID NO: 444074 - DNA, 33 bp, Homo sapien
tcctctaaggtgcaccggaaaggaagtgttcac

SEQ ID NO: 444075 - DNA, 33 bp, Homo sapien
cataaactgacggcaactggagtttaaatagtc

SEQ ID NO: 444076 - DNA, 33 bp, Homo sapien
cataaactgacggcaattggagtttaaatagtc

SEQ ID NO: 444077 - DNA, 33 bp, Homo sapien
acattgccataggaaccaataatttaagtatgc

SEQ ID NO: 444078 - DNA, 33 bp, Homo sapien
acattgccataggaactaataatttaagtatgc

SEQ ID NO: 444079 - DNA, 33 bp, Homo sapien
ccagcaataatacataccaatgtctgaagagca

SEQ ID NO: 444080 - DNA, 33 bp, Homo sapien
ccagcaataatacatatcaatgtctgaagagca

SEQ ID NO: 444081 - DNA, 33 bp, Homo sapien
tgccggtaatatcaagacattggagcaggagct

SEQ ID NO: 444082 - DNA, 33 bp, Homo sapien
tgccggtaatatcaaggcattggagcaggagct

SEQ ID NO: 444083 - DNA, 33 bp, Homo sapien
ccaggtcacctgcactcacaattccaaccaaaa

SEQ ID NO: 444084 - DNA, 33 bp, Homo sapien
ccaggtcacctgcacttacaattccaaccaaaa

SEQ ID NO: 444085 - DNA, 33 bp, Homo sapien
tttgcaacacagcctagcaagaaaatcataggc

SEQ ID NO: 444086 - DNA, 33 bp, Homo sapien
tttgcaacacagcctatcaagaaaatcataggc

SEQ ID NO: 444087 - DNA, 33 bp, Homo sapien
aatataccaatgaaagccacagctgatatgatt

SEQ ID NO: 444088 - DNA, 33 bp, Homo sapien
aatataccaatgaaaggcacagctgatatgatt

SEQ ID NO: 444089 - DNA, 33 bp, Homo sapien
atttacactatgtggcagatttgttctgagcca

SEQ ID NO: 444090 - DNA, 33 bp, Homo sapien
atttacactatgtggcggatttgttctgagcca

SEQ ID NO: 444091 - DNA, 33 bp, Homo sapien
ttcaagacttgtggcaccttcaaagataggaat

SEQ ID NO: 444092 - DNA, 33 bp, Homo sapien
ttcaagacttgtggcatcttcaaagataggaat

SEQ ID NO: 444093 - DNA, 33 bp, Homo sapien
aactttaaggcttgccaaacttaatgacaggca

SEQ ID NO: 444094 - DNA, 33 bp, Homo sapien
aactttaaggcttgccgaacttaatgacaggca

SEQ ID NO: 444095 - DNA, 33 bp, Homo sapien
tggtcctgttaaaccacgtcagtttgaagtgtc

SEQ ID NO: 444096 - DNA, 33 bp, Homo sapien
tggtcctgttaaaccatgtcagtttgaagtgtc

SEQ ID NO: 444097 - DNA, 33 bp, Homo sapien
tttgatatttattcaacttcaccaggtatggtt

SEQ ID NO: 444098 - DNA, 33 bp, Homo sapien
tttgatatttattcaatttcaccaggtatggtt

SEQ ID NO: 444099 - DNA, 33 bp, Homo sapien
gatgaattttgtttgccattgttcattaggaat

SEQ ID NO: 444100 - DNA, 33 bp, Homo sapien
gatgaattttgtttgctattgttcattaggaat

SEQ ID NO: 444101 - DNA, 33 bp, Homo sapien
tagtaagtcaaaagcaataaagcattctcggag

SEQ ID NO: 444102 - DNA, 33 bp, Homo sapien
tagtaagtcaaaagcagtaaagcattctcggag

SEQ ID NO: 444103 - DNA, 33 bp, Homo sapien
gggcccattctttaccaatggcaccatgtagct

SEQ ID NO: 444104 - DNA, 33 bp, Homo sapien
gggcccattctttaccgatggcaccatgtagct

SEQ ID NO: 444105 - DNA, 33 bp, Homo sapien
ttcaaccatagcactaaaatggactgaattgac

SEQ ID NO: 444106 - DNA, 33 bp, Homo sapien
ttcaaccatagcactagaatggactgaattgac

SEQ ID NO: 444107 - DNA, 33 bp, Homo sapien
ataccttagtttctcaacaaatcatatatattt

SEQ ID NO: 444108 - DNA, 33 bp, Homo sapien
ataccttagtttctcatcaaatcatatatattt

SEQ ID NO: 444109 - DNA, 33 bp, Homo sapien
ataagaaggcatatgcacgtttactatttttgt

SEQ ID NO: 444110 - DNA, 33 bp, Homo sapien
ataagaaggcatatgcgcgtttactatttttgt

SEQ ID NO: 444111 - DNA, 33 bp, Homo sapien
tgcagtttctacctaccgctttgtgagtgcgca

SEQ ID NO: 444112 - DNA, 33 bp, Homo sapien
tgcagtttctacctactgctttgtgagtgcgca

SEQ ID NO: 444113 - DNA, 33 bp, Homo sapien
ttacaaaagaacctcaagaatttaaatgcagca

SEQ ID NO: 444114 - DNA, 33 bp, Homo sapien
ttacaaaagaacctcacgaatttaaatgcagca

SEQ ID NO: 444115 - DNA, 33 bp, Homo sapien
catagaggaattgaccacaatattggcatatat

SEQ ID NO: 444116 - DNA, 33 bp, Homo sapien
catagaggaattgacctcaatattggcatatat

SEQ ID NO: 444117 - DNA, 33 bp, Homo sapien
ctgttcataacctccacacaagctgtgctaaat

SEQ ID NO: 444118 - DNA, 33 bp, Homo sapien
ctgttcataacctccatacaagctgtgctaaat

SEQ ID NO: 444119 - DNA, 33 bp, Homo sapien
catatgaattatttgcaaccattattaactcat

SEQ ID NO: 444120 - DNA, 33 bp, Homo sapien
catatgaattatttgcgaccattattaactcat

SEQ ID NO: 444121 - DNA, 33 bp, Homo sapien
aacttaacagagttatcacaactttgcattttg

SEQ ID NO: 444122 - DNA, 33 bp, Homo sapien
aacttaacagagttatgacaactttgcattttg

SEQ ID NO: 444123 - DNA, 33 bp, Homo sapien
gcagattttgaggattaaagattttgcaaatga

SEQ ID NO: 444124 - DNA, 33 bp, Homo sapien
gcagattttgaggattcaagattttgcaaatga

SEQ ID NO: 444125 - DNA, 33 bp, Homo sapien
tactgtccagcatgaacggcgagtattatactg

SEQ ID NO: 444126 - DNA, 33 bp, Homo sapien
tactgtccagcatgaatggcgagtattatactg

SEQ ID NO: 444127 - DNA, 33 bp, Homo sapien
ttactaataagttcaaagtggttgctatttctt

SEQ ID NO: 444128 - DNA, 33 bp, Homo sapien
ttactaataagttcaaggtggttgctatttctt

SEQ ID NO: 444129 - DNA, 33 bp, Homo sapien
aagttaacacctaagaactcaatcagttgctat

SEQ ID NO: 444130 - DNA, 33 bp, Homo sapien
aagttaacacctaagagctcaatcagttgctat

SEQ ID NO: 444131 - DNA, 33 bp, Homo sapien
gcactaacttagtagaaaagaggcagagctaac

SEQ ID NO: 444132 - DNA, 33 bp, Homo sapien
gcactaacttagtagagaagaggcagagctaac

SEQ ID NO: 444133 - DNA, 33 bp, Homo sapien
agagtcatgaaacttacaaccggtgatacctaa

SEQ ID NO: 444134 - DNA, 33 bp, Homo sapien
agagtcatgaaacttagaaccggtgatacctaa

SEQ ID NO: 444135 - DNA, 33 bp, Homo sapien
aagctctaaattattgaactcatgacgatcatg

SEQ ID NO: 444136 - DNA, 33 bp, Homo sapien
aagctctaaattattggactcatgacgatcatg

SEQ ID NO: 444137 - DNA, 33 bp, Homo sapien
acttaaaatgcattcactatttcctcagagaga

SEQ ID NO: 444138 - DNA, 33 bp, Homo sapien
acttaaaatgcattcagtatttcctcagagaga

SEQ ID NO: 444139 - DNA, 33 bp, Homo sapien
tcacttgagtattacaagatagttcctattcac

SEQ ID NO: 444140 - DNA, 33 bp, Homo sapien
tcacttgagtattacaggatagttcctattcac

SEQ ID NO: 444141 - DNA, 33 bp, Homo sapien
caagtttatatatcaaagtaaccatcacatcca

SEQ ID NO: 444142 - DNA, 33 bp, Homo sapien
caagtttatatatcaaggtaaccatcacatcca

SEQ ID NO: 444143 - DNA, 33 bp, Homo sapien
ttcttcatcacgaaaaataaaacaagctgtgga

SEQ ID NO: 444144 - DNA, 33 bp, Homo sapien
ttcttcatcacgaaaagtaaaacaagctgtgga

SEQ ID NO: 444145 - DNA, 33 bp, Homo sapien
tggaatctttgaaaagaatcgagagcccaaaag

SEQ ID NO: 444146 - DNA, 33 bp, Homo sapien
tggaatctttgaaaagtatcgagagcccaaaag

SEQ ID NO: 444147 - DNA, 33 bp, Homo sapien
agactattctaatcctaaaaacttcaccaatga

SEQ ID NO: 444148 - DNA, 33 bp, Homo sapien
agactattctaatcctgaaaacttcaccaatga

SEQ ID NO: 444149 - DNA, 33 bp, Homo sapien
catagaaagaatcatgaagaaggtcccttggct

SEQ ID NO: 444150 - DNA, 33 bp, Homo sapien
catagaaagaatcatggagaaggtcccttggct

SEQ ID NO: 444151 - DNA, 33 bp, Homo sapien
tagtttaattccactaaatctgccttcaacagt

SEQ ID NO: 444152 - DNA, 33 bp, Homo sapien
tagtttaattccactatatctgccttcaacagt

SEQ ID NO: 444153 - DNA, 33 bp, Homo sapien
gaaattaaaagaatcaagcctaatatttgatgt

SEQ ID NO: 444154 - DNA, 33 bp, Homo sapien
gaaattaaaagaatcatgcctaatatttgatgt

SEQ ID NO: 444155 - DNA, 33 bp, Homo sapien
tatttaagcattcaaacagcatggatactgggg

SEQ ID NO: 444156 - DNA, 33 bp, Homo sapien
tatttaagcattcaaatagcatggatactgggg

SEQ ID NO: 444157 - DNA, 33 bp, Homo sapien
attgttgacctgcgggaattgtacacattttac

SEQ ID NO: 444158 - DNA, 33 bp, Homo sapien
attgttgacctgcggggattgtacacattttac

SEQ ID NO: 444159 - DNA, 33 bp, Homo sapien
tacactcaccactagactatataattgctatgt

SEQ ID NO: 444160 - DNA, 33 bp, Homo sapien
tacactcaccactagattatataattgctatgt

SEQ ID NO: 444161 - DNA, 33 bp, Homo sapien
atgtgcagtcagctacactcttgtcacatctca

SEQ ID NO: 444162 - DNA, 33 bp, Homo sapien
atgtgcagtcagctacgctcttgtcacatctca

SEQ ID NO: 444163 - DNA, 33 bp, Homo sapien
tgaatgtcttggttgacgcttcctggcaacttc

SEQ ID NO: 444164 - DNA, 33 bp, Homo sapien
tgaatgtcttggttgatgcttcctggcaacttc

SEQ ID NO: 444165 - DNA, 33 bp, Homo sapien
gtgaatgtttacacaacgtggccaatgcttctc

SEQ ID NO: 444166 - DNA, 33 bp, Homo sapien
gtgaatgtttacacaatgtggccaatgcttctc

SEQ ID NO: 444167 - DNA, 33 bp, Homo sapien
ctttatatcttgaatcaatgtagaatttaaaat

SEQ ID NO: 444168 - DNA, 33 bp, Homo sapien
ctttatatcttgaatcgatgtagaatttaaaat

SEQ ID NO: 444169 - DNA, 33 bp, Homo sapien
cttccctcagttcccaatgagtgattattcaat

SEQ ID NO: 444170 - DNA, 33 bp, Homo sapien
cttccctcagttcccattgagtgattattcaat

SEQ ID NO: 444171 - DNA, 33 bp, Homo sapien
tccaatgtctttatgaccttgcaaacattcctt

SEQ ID NO: 444172 - DNA, 33 bp, Homo sapien
tccaatgtctttatgatcttgcaaacattcctt

SEQ ID NO: 444173 - DNA, 33 bp, Homo sapien
tatatccaagagaactaaaaacatatattaaca

SEQ ID NO: 444174 - DNA, 33 bp, Homo sapien
tatatccaagagaacttaaaacatatattaaca

SEQ ID NO: 444175 - DNA, 33 bp, Homo sapien
agtagaagtcagatataaatggccccatattgt

SEQ ID NO: 444176 - DNA, 33 bp, Homo sapien
agtagaagtcagatatcaatggccccatattgt

SEQ ID NO: 444177 - DNA, 33 bp, Homo sapien
agtttgcttagtaaaaagattgcttttggagac

SEQ ID NO: 444178 - DNA, 33 bp, Homo sapien
agtttgcttagtaaaaggattgcttttggagac

SEQ ID NO: 444179 - DNA, 33 bp, Homo sapien
gaaaaggccaccaagcagagtcctgaggcaccc

SEQ ID NO: 444180 - DNA, 33 bp, Homo sapien
gaaaaggccaccaagcggagtcctgaggcaccc

SEQ ID NO: 444181 - DNA, 33 bp, Homo sapien
ttctggcctgctatgtaaaatcttctccacaag

SEQ ID NO: 444182 - DNA, 33 bp, Homo sapien
ttctggcctgctatgttaaatcttctccacaag

SEQ ID NO: 444183 - DNA, 33 bp, Homo sapien
tgaataagcccaattgacaaagacatattttac

SEQ ID NO: 444184 - DNA, 33 bp, Homo sapien
tgaataagcccaattggcaaagacatattttac

SEQ ID NO: 444185 - DNA, 33 bp, Homo sapien
gcttcaggccaccttcaaaactacgctgaatag

SEQ ID NO: 444186 - DNA, 33 bp, Homo sapien
gcttcaggccaccttccaaactacgctgaatag

SEQ ID NO: 444187 - DNA, 33 bp, Homo sapien
aattaagagtggaaagaagtcacaatattaaac

SEQ ID NO: 444188 - DNA, 33 bp, Homo sapien
aattaagagtggaaaggagtcacaatattaaac

SEQ ID NO: 444189 - DNA, 33 bp, Homo sapien
atttgtctttacatcacggaactatcaaaatca

SEQ ID NO: 444190 - DNA, 33 bp, Homo sapien
atttgtctttacatcatggaactatcaaaatca

SEQ ID NO: 444191 - DNA, 33 bp, Homo sapien
ctgatgaaaggtaaacccttcctcctgtctgag

SEQ ID NO: 444192 - DNA, 33 bp, Homo sapien
ctgatgaaaggtaaacgcttcctcctgtctgag

SEQ ID NO: 444193 - DNA, 33 bp, Homo sapien
tatttgccatacttaccataattacaatacagt

SEQ ID NO: 444194 - DNA, 33 bp, Homo sapien
tatttgccatacttactataattacaatacagt

SEQ ID NO: 444195 - DNA, 33 bp, Homo sapien
tatgtgaattttaagaagttttgcttcaatggt

SEQ ID NO: 444196 - DNA, 33 bp, Homo sapien
tatgtgaattttaagatgttttgcttcaatggt

SEQ ID NO: 444197 - DNA, 33 bp, Homo sapien
tcgcattaacctgagacacagttttgaaggtca

SEQ ID NO: 444198 - DNA, 33 bp, Homo sapien
tcgcattaacctgagagacagttttgaaggtca

SEQ ID NO: 444199 - DNA, 33 bp, Homo sapien
gttgcctgcagaattaccttgaatatgtagatt

SEQ ID NO: 444200 - DNA, 33 bp, Homo sapien
gttgcctgcagaattagcttgaatatgtagatt

SEQ ID NO: 444201 - DNA, 33 bp, Homo sapien
cagagttttagaaatactatacagcagcattaa

SEQ ID NO: 444202 - DNA, 33 bp, Homo sapien
cagagttttagaaatagtatacagcagcattaa

SEQ ID NO: 444203 - DNA, 33 bp, Homo sapien
tcccaaatgatgccccaaaaaaacaaataacca

SEQ ID NO: 444204 - DNA, 33 bp, Homo sapien
tcccaaatgatgcccccaaaaaacaaataacca

SEQ ID NO: 444205 - DNA, 33 bp, Homo sapien
aatacattaacttcatgatctttggcttcaata

SEQ ID NO: 444206 - DNA, 33 bp, Homo sapien
aatacattaacttcattatctttggcttcaata

SEQ ID NO: 444207 - DNA, 33 bp, Homo sapien
atgttttcatttgtcacgcagaataaatcaaga

SEQ ID NO: 444208 - DNA, 33 bp, Homo sapien
atgttttcatttgtcatgcagaataaatcaaga

SEQ ID NO: 444209 - DNA, 33 bp, Homo sapien
tggaattgctgttagcacagttaaaaagaagtg

SEQ ID NO: 444210 - DNA, 33 bp, Homo sapien
tggaattgctgttagcgcagttaaaaagaagtg

SEQ ID NO: 444211 - DNA, 33 bp, Homo sapien
atttaattggcctacaaatttaataatgcttgg

SEQ ID NO: 444212 - DNA, 33 bp, Homo sapien
atttaattggcctacagatttaataatgcttgg

SEQ ID NO: 444213 - DNA, 33 bp, Homo sapien
cctatctttctgattaacctactacattttgaa

SEQ ID NO: 444214 - DNA, 33 bp, Homo sapien
cctatctttctgattatcctactacattttgaa

SEQ ID NO: 444215 - DNA, 33 bp, Homo sapien
atcacattactcaaaacgacgtgcaatttaaaa

SEQ ID NO: 444216 - DNA, 33 bp, Homo sapien
atcacattactcaaaatgacgtgcaatttaaaa

SEQ ID NO: 444217 - DNA, 33 bp, Homo sapien
ctgtaacctaaatacaccaatgtaaaattttct

SEQ ID NO: 444218 - DNA, 33 bp, Homo sapien
ctgtaacctaaatacagcaatgtaaaattttct

SEQ ID NO: 444219 - DNA, 33 bp, Homo sapien
ataaacagttgctgataaagggaaagaaaactt

SEQ ID NO: 444220 - DNA, 33 bp, Homo sapien
ataaacagttgctgattaagggaaagaaaactt

SEQ ID NO: 444221 - DNA, 33 bp, Homo sapien
ggcatgtatgagcccaatcttacattgaccact

SEQ ID NO: 444222 - DNA, 33 bp, Homo sapien
ggcatgtatgagcccagtcttacattgaccact

SEQ ID NO: 444223 - DNA, 33 bp, Homo sapien
tcatcagctaaagcaacagtgaggataaggttt

SEQ ID NO: 444224 - DNA, 33 bp, Homo sapien
tcatcagctaaagcaatagtgaggataaggttt

SEQ ID NO: 444225 - DNA, 33 bp, Homo sapien
caaagagatattccataaaactccagtaatctt

SEQ ID NO: 444226 - DNA, 33 bp, Homo sapien
caaagagatattccatgaaactccagtaatctt

SEQ ID NO: 444227 - DNA, 33 bp, Homo sapien
cagatgttgtcaaggacatggagaaaactaaac

SEQ ID NO: 444228 - DNA, 33 bp, Homo sapien
cagatgttgtcaaggatatggagaaaactaaac

SEQ ID NO: 444229 - DNA, 33 bp, Homo sapien
tgtaaatcagtacagccactatagaaaacagta

SEQ ID NO: 444230 - DNA, 33 bp, Homo sapien
tgtaaatcagtacagctactatagaaaacagta

SEQ ID NO: 444231 - DNA, 33 bp, Homo sapien
tgagagttacaataaaccacaagaataggttga

SEQ ID NO: 444232 - DNA, 33 bp, Homo sapien
tgagagttacaataaatcacaagaataggttga

SEQ ID NO: 444233 - DNA, 33 bp, Homo sapien
ttaatcctgatttccccgacatttagttcaata

SEQ ID NO: 444234 - DNA, 33 bp, Homo sapien
ttaatcctgatttccctgacatttagttcaata

SEQ ID NO: 444235 - DNA, 33 bp, Homo sapien
acagattcatctcatcccaacagtaggtcattt

SEQ ID NO: 444236 - DNA, 33 bp, Homo sapien
acagattcatctcatctcaacagtaggtcattt

SEQ ID NO: 444237 - DNA, 33 bp, Homo sapien
caagggaccccccagcagatcacaactcaacaa

SEQ ID NO: 444238 - DNA, 33 bp, Homo sapien
caagggaccccccagcggatcacaactcaacaa

SEQ ID NO: 444239 - DNA, 33 bp, Homo sapien
ttcctgtcaagtgctacagacatctgtgatcgt

SEQ ID NO: 444240 - DNA, 33 bp, Homo sapien
ttcctgtcaagtgctatagacatctgtgatcgt

SEQ ID NO: 444241 - DNA, 33 bp, Homo sapien
tcactttgtaaaatgacgtccaatcaacctatt

SEQ ID NO: 444242 - DNA, 33 bp, Homo sapien
tcactttgtaaaatgatgtccaatcaacctatt

SEQ ID NO: 444243 - DNA, 33 bp, Homo sapien
caagaacacagctcttaaactaaaaaggcatta

SEQ ID NO: 444244 - DNA, 33 bp, Homo sapien
caagaacacagctcttgaactaaaaaggcatta

SEQ ID NO: 444245 - DNA, 33 bp, Homo sapien
ctttctagttttctacgaagattacctagcatt

SEQ ID NO: 444246 - DNA, 33 bp, Homo sapien
ctttctagttttctactaagattacctagcatt

SEQ ID NO: 444247 - DNA, 33 bp, Homo sapien
tgtagtataattcttaaatcaagtggagtaaat

SEQ ID NO: 444248 - DNA, 33 bp, Homo sapien
tgtagtataattcttacatcaagtggagtaaat

SEQ ID NO: 444249 - DNA, 33 bp, Homo sapien
tgagaatagcaatgataacttctgtcttgaatc

SEQ ID NO: 444250 - DNA, 33 bp, Homo sapien
tgagaatagcaatgatgacttctgtcttgaatc

SEQ ID NO: 444251 - DNA, 33 bp, Homo sapien
aagacgaaatttctgacgagaagacaactaaaa

SEQ ID NO: 444252 - DNA, 33 bp, Homo sapien
aagacgaaatttctgatgagaagacaactaaaa

SEQ ID NO: 444253 - DNA, 33 bp, Homo sapien
aacttataatgtatgacatgacccttaattgtc

SEQ ID NO: 444254 - DNA, 33 bp, Homo sapien
aacttataatgtatgatatgacccttaattgtc

SEQ ID NO: 444255 - DNA, 33 bp, Homo sapien
atatcttcagcctagacgagtattgatctcttt

SEQ ID NO: 444256 - DNA, 33 bp, Homo sapien
atatcttcagcctagatgagtattgatctcttt

SEQ ID NO: 444257 - DNA, 33 bp, Homo sapien
acagcatatttacttacgtgttcaatcccaata

SEQ ID NO: 444258 - DNA, 33 bp, Homo sapien
acagcatatttacttatgtgttcaatcccaata

SEQ ID NO: 444259 - DNA, 33 bp, Homo sapien
tccttgctagtcttccacttgtagacgcatcgc

SEQ ID NO: 444260 - DNA, 33 bp, Homo sapien
tccttgctagtcttccgcttgtagacgcatcgc

SEQ ID NO: 444261 - DNA, 33 bp, Homo sapien
tgagcctgcattacatcagccatcctggaaatg

SEQ ID NO: 444262 - DNA, 33 bp, Homo sapien
tgagcctgcattacattagccatcctggaaatg

SEQ ID NO: 444263 - DNA, 33 bp, Homo sapien
cactaagtgtctaaaggcttacctcttaatttt

SEQ ID NO: 444264 - DNA, 33 bp, Homo sapien
cactaagtgtctaaagtcttacctcttaatttt

SEQ ID NO: 444265 - DNA, 33 bp, Homo sapien
ttaatacgtgccggacagtattttggatgcagc

SEQ ID NO: 444266 - DNA, 33 bp, Homo sapien
ttaatacgtgccggacggtattttggatgcagc

SEQ ID NO: 444267 - DNA, 33 bp, Homo sapien
catttctatatactgagaacgtccatgctgaga

SEQ ID NO: 444268 - DNA, 33 bp, Homo sapien
catttctatatactgataacgtccatgctgaga

SEQ ID NO: 444269 - DNA, 33 bp, Homo sapien
agctctagatcccaaagttatcaccaaactaaa

SEQ ID NO: 444270 - DNA, 33 bp, Homo sapien
agctctagatcccaaatttatcaccaaactaaa

SEQ ID NO: 444271 - DNA, 33 bp, Homo sapien
gtccatgaagatgcaaacagtgtctattttata

SEQ ID NO: 444272 - DNA, 33 bp, Homo sapien
gtccatgaagatgcaagcagtgtctattttata

SEQ ID NO: 444273 - DNA, 33 bp, Homo sapien
atgtactttgcaacaacgtcaatgaaactagag

SEQ ID NO: 444274 - DNA, 33 bp, Homo sapien
atgtactttgcaacaatgtcaatgaaactagag

SEQ ID NO: 444275 - DNA, 33 bp, Homo sapien
cagacaacacagacaaataggtaggcagatcag

SEQ ID NO: 444276 - DNA, 33 bp, Homo sapien
cagacaacacagacaattaggtaggcagatcag

SEQ ID NO: 444277 - DNA, 33 bp, Homo sapien
caaacacaaatctatgcaacagaaatcatcttg

SEQ ID NO: 444278 - DNA, 33 bp, Homo sapien
caaacacaaatctatgtaacagaaatcatcttg

SEQ ID NO: 444279 - DNA, 33 bp, Homo sapien
agaaattgtgaaactgaaggctatatctttctt

SEQ ID NO: 444280 - DNA, 33 bp, Homo sapien
agaaattgtgaaactgcaggctatatctttctt

SEQ ID NO: 444281 - DNA, 33 bp, Homo sapien
cttccatatatccccaatcgatcacaaaaataa

SEQ ID NO: 444282 - DNA, 33 bp, Homo sapien
cttccatatatccccagtcgatcacaaaaataa

SEQ ID NO: 444283 - DNA, 33 bp, Homo sapien
gttgcagatatgaaaacacttcaatacttcgtt

SEQ ID NO: 444284 - DNA, 33 bp, Homo sapien
gttgcagatatgaaaagacttcaatacttcgtt

SEQ ID NO: 444285 - DNA, 33 bp, Homo sapien
atgttttgcaccagtactacgtaaacatttatg

SEQ ID NO: 444286 - DNA, 33 bp, Homo sapien
atgttttgcaccagtattacgtaaacatttatg

SEQ ID NO: 444287 - DNA, 33 bp, Homo sapien
ccatatcctccatgctaactggcttatcaatga

SEQ ID NO: 444288 - DNA, 33 bp, Homo sapien
ccatatcctccatgctgactggcttatcaatga

SEQ ID NO: 444289 - DNA, 33 bp, Homo sapien
aatccaaagatatggccgaggtactgcagaaga

SEQ ID NO: 444290 - DNA, 33 bp, Homo sapien
aatccaaagatatggctgaggtactgcagaaga

SEQ ID NO: 444291 - DNA, 33 bp, Homo sapien
aaaaaaacaagtgcaagtcaagctaactggctt

SEQ ID NO: 444292 - DNA, 33 bp, Homo sapien
aaaaaaacaagtgcaattcaagctaactggctt

SEQ ID NO: 444293 - DNA, 33 bp, Homo sapien
tcctgatcctgcaatacagtagatgtctttctt

SEQ ID NO: 444294 - DNA, 33 bp, Homo sapien
tcctgatcctgcaatatagtagatgtctttctt

SEQ ID NO: 444295 - DNA, 33 bp, Homo sapien
ggtcagatttgagttacgcctctgaaaacctac

SEQ ID NO: 444296 - DNA, 33 bp, Homo sapien
ggtcagatttgagttatgcctctgaaaacctac

SEQ ID NO: 444297 - DNA, 33 bp, Homo sapien
taatggggaattaaccaatctctgaaatatggt

SEQ ID NO: 444298 - DNA, 33 bp, Homo sapien
taatggggaattaaccgatctctgaaatatggt

SEQ ID NO: 444299 - DNA, 33 bp, Homo sapien
tttccagggaaggcaaacattctgggatgtcaa

SEQ ID NO: 444300 - DNA, 33 bp, Homo sapien
tttccagggaaggcaagcattctgggatgtcaa

SEQ ID NO: 444301 - DNA, 33 bp, Homo sapien
tagtttacgcaaaaaccgaaatctgagatataa

SEQ ID NO: 444302 - DNA, 33 bp, Homo sapien
tagtttacgcaaaaactgaaatctgagatataa

SEQ ID NO: 444303 - DNA, 33 bp, Homo sapien
tttattgaaaaacacacaaaatcattttaatta

SEQ ID NO: 444304 - DNA, 33 bp, Homo sapien
tttattgaaaaacacagaaaatcattttaatta

SEQ ID NO: 444305 - DNA, 33 bp, Homo sapien
ttcctctaaccgtacactccagagcctgatcct

SEQ ID NO: 444306 - DNA, 33 bp, Homo sapien
ttcctctaaccgtacagtccagagcctgatcct

SEQ ID NO: 444307 - DNA, 33 bp, Homo sapien
ttcagcaaatatgataagctctggggaattaat

SEQ ID NO: 444308 - DNA, 33 bp, Homo sapien
ttcagcaaatatgatacgctctggggaattaat

SEQ ID NO: 444309 - DNA, 33 bp, Homo sapien
taactgcatcacacccgaacaatttactgcatg

SEQ ID NO: 444310 - DNA, 33 bp, Homo sapien
taactgcatcacaccctaacaatttactgcatg

SEQ ID NO: 444311 - DNA, 33 bp, Homo sapien
aatttactgcatgatcactgtcatccacaataa

SEQ ID NO: 444312 - DNA, 33 bp, Homo sapien
aatttactgcatgatcgctgtcatccacaataa

SEQ ID NO: 444313 - DNA, 33 bp, Homo sapien
agtagccttcgatttccctaaacctcatttatg

SEQ ID NO: 444314 - DNA, 33 bp, Homo sapien
agtagccttcgatttctctaaacctcatttatg

SEQ ID NO: 444315 - DNA, 33 bp, Homo sapien
cctggggttgcacaagaaaaacagagatttcac

SEQ ID NO: 444316 - DNA, 33 bp, Homo sapien
cctggggttgcacaaggaaaacagagatttcac

SEQ ID NO: 444317 - DNA, 33 bp, Homo sapien
gatcaaaacaagacaccaattgtccccaaatga

SEQ ID NO: 444318 - DNA, 33 bp, Homo sapien
gatcaaaacaagacacgaattgtccccaaatga

SEQ ID NO: 444319 - DNA, 33 bp, Homo sapien
gccagtggtgaaagaaagtagctttattgaggt

SEQ ID NO: 444320 - DNA, 33 bp, Homo sapien
gccagtggtgaaagaacgtagctttattgaggt

SEQ ID NO: 444321 - DNA, 33 bp, Homo sapien
ttataatggtttataccaactgagcatatcaga

SEQ ID NO: 444322 - DNA, 33 bp, Homo sapien
ttataatggtttatactaactgagcatatcaga

SEQ ID NO: 444323 - DNA, 33 bp, Homo sapien
agtctctgagttacagcctctgctttctgtcca

SEQ ID NO: 444324 - DNA, 33 bp, Homo sapien
agtctctgagttacagtctctgctttctgtcca

SEQ ID NO: 444325 - DNA, 33 bp, Homo sapien
ttagaagccataggaacgtgggcatagaggctt

SEQ ID NO: 444326 - DNA, 33 bp, Homo sapien
ttagaagccataggaatgtgggcatagaggctt

SEQ ID NO: 444327 - DNA, 33 bp, Homo sapien
aaatataagtgttaagcatttagaggataacaa

SEQ ID NO: 444328 - DNA, 33 bp, Homo sapien
aaatataagtgttaaggatttagaggataacaa

SEQ ID NO: 444329 - DNA, 33 bp, Homo sapien
ttattgatttggactccataaggcttaattaca

SEQ ID NO: 444330 - DNA, 33 bp, Homo sapien
ttattgatttggactctataaggcttaattaca

SEQ ID NO: 444331 - DNA, 33 bp, Homo sapien
acaaggcaaagttaaaatgttctatgtagatat

SEQ ID NO: 444332 - DNA, 33 bp, Homo sapien
acaaggcaaagttaaagtgttctatgtagatat

SEQ ID NO: 444333 - DNA, 33 bp, Homo sapien
taatagttttccaatgaaagtagatacacctct

SEQ ID NO: 444334 - DNA, 33 bp, Homo sapien
taatagttttccaatgcaagtagatacacctct

SEQ ID NO: 444335 - DNA, 33 bp, Homo sapien
caatgatgagatgaaacggaaggtctaggagct

SEQ ID NO: 444336 - DNA, 33 bp, Homo sapien
caatgatgagatgaaatggaaggtctaggagct

SEQ ID NO: 444337 - DNA, 33 bp, Homo sapien
agtcagtggattcttcaagagttatttcatttt

SEQ ID NO: 444338 - DNA, 33 bp, Homo sapien
agtcagtggattcttcgagagttatttcatttt

SEQ ID NO: 444339 - DNA, 33 bp, Homo sapien
atacaaattaaaaccaagatgaagtaacactac

SEQ ID NO: 444340 - DNA, 33 bp, Homo sapien
atacaaattaaaaccaggatgaagtaacactac

SEQ ID NO: 444341 - DNA, 33 bp, Homo sapien
ctacatttttgatgtacgtacttattgcaataa

SEQ ID NO: 444342 - DNA, 33 bp, Homo sapien
ctacatttttgatgtatgtacttattgcaataa

SEQ ID NO: 444343 - DNA, 33 bp, Homo sapien
tgaccaatgctggagaaatagagatatgtggct

SEQ ID NO: 444344 - DNA, 33 bp, Homo sapien
tgaccaatgctggagagatagagatatgtggct

SEQ ID NO: 444345 - DNA, 33 bp, Homo sapien
gaacaagcctagagtacgaaaatgacaataaat

SEQ ID NO: 444346 - DNA, 33 bp, Homo sapien
gaacaagcctagagtatgaaaatgacaataaat

SEQ ID NO: 444347 - DNA, 33 bp, Homo sapien
gctcctactacctgagactaagaaacataatat

SEQ ID NO: 444348 - DNA, 33 bp, Homo sapien
gctcctactacctgagtctaagaaacataatat

SEQ ID NO: 444349 - DNA, 33 bp, Homo sapien
agggtaagatactcacaacatcattcaccatat

SEQ ID NO: 444350 - DNA, 33 bp, Homo sapien
agggtaagatactcacgacatcattcaccatat

SEQ ID NO: 444351 - DNA, 33 bp, Homo sapien
cctacaagaccttacacgtttcactcttcctac

SEQ ID NO: 444352 - DNA, 33 bp, Homo sapien
cctacaagaccttacaggtttcactcttcctac

SEQ ID NO: 444353 - DNA, 33 bp, Homo sapien
cattgagcatttactacgtgtatgtcatcctgc

SEQ ID NO: 444354 - DNA, 33 bp, Homo sapien
cattgagcatttactatgtgtatgtcatcctgc

SEQ ID NO: 444355 - DNA, 33 bp, Homo sapien
atctagatgggtgataaacaaggagtggcagtt

SEQ ID NO: 444356 - DNA, 33 bp, Homo sapien
atctagatgggtgatacacaaggagtggcagtt

SEQ ID NO: 444357 - DNA, 33 bp, Homo sapien
aatgcagttgtttctgaagaacagtatgtcact

SEQ ID NO: 444358 - DNA, 33 bp, Homo sapien
aatgcagttgtttctggagaacagtatgtcact

SEQ ID NO: 444359 - DNA, 33 bp, Homo sapien
tttcccaatgttgaacaattctaactcacatat

SEQ ID NO: 444360 - DNA, 33 bp, Homo sapien
tttcccaatgttgaactattctaactcacatat

SEQ ID NO: 444361 - DNA, 33 bp, Homo sapien
tgattttagtccagtaagatgagtataagattt

SEQ ID NO: 444362 - DNA, 33 bp, Homo sapien
tgattttagtccagtaggatgagtataagattt

SEQ ID NO: 444363 - DNA, 33 bp, Homo sapien
aaaaacaagggacagacaaatgtaattcaacat

SEQ ID NO: 444364 - DNA, 33 bp, Homo sapien
aaaaacaagggacagagaaatgtaattcaacat

SEQ ID NO: 444365 - DNA, 33 bp, Homo sapien
attgctgacgcaataaatgagtggaaggataag

SEQ ID NO: 444366 - DNA, 33 bp, Homo sapien
attgctgacgcaataagtgagtggaaggataag

SEQ ID NO: 444367 - DNA, 33 bp, Homo sapien
atgctaggtactcaaaaattccagaaattattg

SEQ ID NO: 444368 - DNA, 33 bp, Homo sapien
atgctaggtactcaaacattccagaaattattg

SEQ ID NO: 444369 - DNA, 33 bp, Homo sapien
aaacaatgtattcttcgaaagcgtgtatccatt

SEQ ID NO: 444370 - DNA, 33 bp, Homo sapien
aaacaatgtattcttctaaagcgtgtatccatt

SEQ ID NO: 444371 - DNA, 33 bp, Homo sapien
tttgaaccttttggtcaagtttcatattccagc

SEQ ID NO: 444372 - DNA, 33 bp, Homo sapien
tttgaaccttttggtcgagtttcatattccagc

SEQ ID NO: 444373 - DNA, 33 bp, Homo sapien
tctcttgctctggtagaaagtattaacatactg

SEQ ID NO: 444374 - DNA, 33 bp, Homo sapien
tctcttgctctggtaggaagtattaacatactg

SEQ ID NO: 444375 - DNA, 33 bp, Homo sapien
tttggaaactctgataaatagattgccattata

SEQ ID NO: 444376 - DNA, 33 bp, Homo sapien
tttggaaactctgatatatagattgccattata

SEQ ID NO: 444377 - DNA, 33 bp, Homo sapien
atctattttcattaaccgtaactctattttcaa

SEQ ID NO: 444378 - DNA, 33 bp, Homo sapien
atctattttcattaactgtaactctattttcaa

SEQ ID NO: 444379 - DNA, 33 bp, Homo sapien
attcacttctcaagtaaagcatggaaattaaat

SEQ ID NO: 444380 - DNA, 33 bp, Homo sapien
attcacttctcaagtagagcatggaaattaaat

SEQ ID NO: 444381 - DNA, 33 bp, Homo sapien
aaattatagagtatacggaaaactgaaagacac

SEQ ID NO: 444382 - DNA, 33 bp, Homo sapien
aaattatagagtatactgaaaactgaaagacac

SEQ ID NO: 444383 - DNA, 33 bp, Homo sapien
ctcttctctctgttaacgatttcctctgatgtg

SEQ ID NO: 444384 - DNA, 33 bp, Homo sapien
ctcttctctctgttaatgatttcctctgatgtg

SEQ ID NO: 444385 - DNA, 33 bp, Homo sapien
gttctgtcctagatcagctatttttacaaggag

SEQ ID NO: 444386 - DNA, 33 bp, Homo sapien
gttctgtcctagatcatctatttttacaaggag

SEQ ID NO: 444387 - DNA, 33 bp, Homo sapien
agatactggtaacacaaccataatgaatcattt

SEQ ID NO: 444388 - DNA, 33 bp, Homo sapien
agatactggtaacacacccataatgaatcattt

SEQ ID NO: 444389 - DNA, 33 bp, Homo sapien
gacatagcaactttaactgaggacattactaag

SEQ ID NO: 444390 - DNA, 33 bp, Homo sapien
gacatagcaactttaattgaggacattactaag

SEQ ID NO: 444391 - DNA, 33 bp, Homo sapien
tgctaatgttggaattcaaaggtcaagaagcta

SEQ ID NO: 444392 - DNA, 33 bp, Homo sapien
tgctaatgttggaatttaaaggtcaagaagcta

SEQ ID NO: 444393 - DNA, 33 bp, Homo sapien
tggtaacaaaaatgtaggaaaatgctgaattgt

SEQ ID NO: 444394 - DNA, 33 bp, Homo sapien
tggtaacaaaaatgtatgaaaatgctgaattgt

SEQ ID NO: 444395 - DNA, 33 bp, Homo sapien
aaatgttttactatgcaataaaaattcatgtat

SEQ ID NO: 444396 - DNA, 33 bp, Homo sapien
aaatgttttactatgcgataaaaattcatgtat

SEQ ID NO: 444397 - DNA, 33 bp, Homo sapien
cagagactctggacaactgagacatttaggata

SEQ ID NO: 444398 - DNA, 33 bp, Homo sapien
cagagactctggacaattgagacatttaggata

SEQ ID NO: 444399 - DNA, 33 bp, Homo sapien
cttatcatcttttaaccaatcagcggtgttaga

SEQ ID NO: 444400 - DNA, 33 bp, Homo sapien
cttatcatcttttaactaatcagcggtgttaga

SEQ ID NO: 444401 - DNA, 33 bp, Homo sapien
tctaacctatagcttccaggagtacagccttgt

SEQ ID NO: 444402 - DNA, 33 bp, Homo sapien
tctaacctatagcttctaggagtacagccttgt

SEQ ID NO: 444403 - DNA, 33 bp, Homo sapien
gagaggtccttgtagcaaagaaatattcttgac

SEQ ID NO: 444404 - DNA, 33 bp, Homo sapien
gagaggtccttgtagcgaagaaatattcttgac

SEQ ID NO: 444405 - DNA, 33 bp, Homo sapien
accctccacttctccacgtacctcattcttact

SEQ ID NO: 444406 - DNA, 33 bp, Homo sapien
accctccacttctccatgtacctcattcttact

SEQ ID NO: 444407 - DNA, 33 bp, Homo sapien
gagtagaggagagaagaaggcgtacctataaaa

SEQ ID NO: 444408 - DNA, 33 bp, Homo sapien
gagtagaggagagaagtaggcgtacctataaaa

SEQ ID NO: 444409 - DNA, 33 bp, Homo sapien
tctatcattgcaagtagccatcatgttatcatt

SEQ ID NO: 444410 - DNA, 33 bp, Homo sapien
tctatcattgcaagtatccatcatgttatcatt

SEQ ID NO: 444411 - DNA, 33 bp, Homo sapien
attctgtttttaataacacctccaagatagaat

SEQ ID NO: 444412 - DNA, 33 bp, Homo sapien
attctgtttttaataagacctccaagatagaat

SEQ ID NO: 444413 - DNA, 33 bp, Homo sapien
caaaactttctcatcaaaattagagtaacatct

SEQ ID NO: 444414 - DNA, 33 bp, Homo sapien
caaaactttctcatcataattagagtaacatct

SEQ ID NO: 444415 - DNA, 33 bp, Homo sapien
tttttaatttgtgtcaacttagtgattgatttc

SEQ ID NO: 444416 - DNA, 33 bp, Homo sapien
tttttaatttgtgtcaccttagtgattgatttc

SEQ ID NO: 444417 - DNA, 33 bp, Homo sapien
ccttaacgtatattaagtctggtcttcaggttt

SEQ ID NO: 444418 - DNA, 33 bp, Homo sapien
ccttaacgtatattaattctggtcttcaggttt

SEQ ID NO: 444419 - DNA, 33 bp, Homo sapien
tcatcatcaatgcctacgtgtttccaatcagtt

SEQ ID NO: 444420 - DNA, 33 bp, Homo sapien
tcatcatcaatgcctatgtgtttccaatcagtt

SEQ ID NO: 444421 - DNA, 33 bp, Homo sapien
gaggatcataaagtaaatatttccaattacagc

SEQ ID NO: 444422 - DNA, 33 bp, Homo sapien
gaggatcataaagtaagtatttccaattacagc

SEQ ID NO: 444423 - DNA, 33 bp, Homo sapien
ttattagacctgttgcaaagaaacatgatgtca

SEQ ID NO: 444424 - DNA, 33 bp, Homo sapien
ttattagacctgttgcgaagaaacatgatgtca

SEQ ID NO: 444425 - DNA, 33 bp, Homo sapien
tttccttatgcaatcaaggtatcctaattgaac

SEQ ID NO: 444426 - DNA, 33 bp, Homo sapien
tttccttatgcaatcagggtatcctaattgaac

SEQ ID NO: 444427 - DNA, 33 bp, Homo sapien
atactgattacaatccaggactgaccttgttaa

SEQ ID NO: 444428 - DNA, 33 bp, Homo sapien
atactgattacaatccgggactgaccttgttaa

SEQ ID NO: 444429 - DNA, 33 bp, Homo sapien
aaaacctgaggacatacagataataaatgcctg

SEQ ID NO: 444430 - DNA, 33 bp, Homo sapien
aaaacctgaggacatatagataataaatgcctg

SEQ ID NO: 444431 - DNA, 33 bp, Homo sapien
tgaaatactcaaaggcacatgtggctacaggct

SEQ ID NO: 444432 - DNA, 33 bp, Homo sapien
tgaaatactcaaaggcccatgtggctacaggct

SEQ ID NO: 444433 - DNA, 33 bp, Homo sapien
taatatcactcaaaataagctcagtctagaggt

SEQ ID NO: 444434 - DNA, 33 bp, Homo sapien
taatatcactcaaaattagctcagtctagaggt

SEQ ID NO: 444435 - DNA, 33 bp, Homo sapien
atgttattttcctaaaagagcataggatctagt

SEQ ID NO: 444436 - DNA, 33 bp, Homo sapien
atgttattttcctaaaggagcataggatctagt

SEQ ID NO: 444437 - DNA, 33 bp, Homo sapien
caagagctttaagagccatgacatgattccccc

SEQ ID NO: 444438 - DNA, 33 bp, Homo sapien
caagagctttaagagctatgacatgattccccc

SEQ ID NO: 444439 - DNA, 33 bp, Homo sapien
acagggccaaggaacaaggagagatgatgaact

SEQ ID NO: 444440 - DNA, 33 bp, Homo sapien
acagggccaaggaacagggagagatgatgaact

SEQ ID NO: 444441 - DNA, 33 bp, Homo sapien
acaaagtatttaagtaagtggtaattgacttgg

SEQ ID NO: 444442 - DNA, 33 bp, Homo sapien
acaaagtatttaagtatgtggtaattgacttgg

SEQ ID NO: 444443 - DNA, 33 bp, Homo sapien
ttgatgtccagcaaacacatacacaaaagaata

SEQ ID NO: 444444 - DNA, 33 bp, Homo sapien
ttgatgtccagcaaacgcatacacaaaagaata

SEQ ID NO: 444445 - DNA, 33 bp, Homo sapien
ttttaatatgaggacacggaagaaagaaaacag

SEQ ID NO: 444446 - DNA, 33 bp, Homo sapien
ttttaatatgaggacatggaagaaagaaaacag

SEQ ID NO: 444447 - DNA, 33 bp, Homo sapien
tgctcactgaaccagactactgtaagggccttc

SEQ ID NO: 444448 - DNA, 33 bp, Homo sapien
tgctcactgaaccagattactgtaagggccttc

SEQ ID NO: 444449 - DNA, 33 bp, Homo sapien
cgactacacctttccaatctctgttctcccctc

SEQ ID NO: 444450 - DNA, 33 bp, Homo sapien
cgactacacctttccagtctctgttctcccctc

SEQ ID NO: 444451 - DNA, 33 bp, Homo sapien
actctacattattccaacttctcaattttccaa

SEQ ID NO: 444452 - DNA, 33 bp, Homo sapien
actctacattattccagcttctcaattttccaa

SEQ ID NO: 444453 - DNA, 33 bp, Homo sapien
ccagtaatgcctgggaacataagctcagcaggg

SEQ ID NO: 444454 - DNA, 33 bp, Homo sapien
ccagtaatgcctgggaccataagctcagcaggg

SEQ ID NO: 444455 - DNA, 33 bp, Homo sapien
atctggtgtaataacagtgaattttgctctcta

SEQ ID NO: 444456 - DNA, 33 bp, Homo sapien
atctggtgtaataacattgaattttgctctcta

SEQ ID NO: 444457 - DNA, 33 bp, Homo sapien
taataatacagttctacgaaatggaaaataaat

SEQ ID NO: 444458 - DNA, 33 bp, Homo sapien
taataatacagttctatgaaatggaaaataaat

SEQ ID NO: 444459 - DNA, 33 bp, Homo sapien
cacatccatcaccatacatagttactgtgtgtg

SEQ ID NO: 444460 - DNA, 33 bp, Homo sapien
cacatccatcaccatatatagttactgtgtgtg

SEQ ID NO: 444461 - DNA, 33 bp, Homo sapien
ttttaaaaattgtagaacaagagctaactgacc

SEQ ID NO: 444462 - DNA, 33 bp, Homo sapien
ttttaaaaattgtagaccaagagctaactgacc

SEQ ID NO: 444463 - DNA, 33 bp, Homo sapien
ttagaaacaaagacccagatgctgtgtgtgctt

SEQ ID NO: 444464 - DNA, 33 bp, Homo sapien
ttagaaacaaagacccggatgctgtgtgtgctt

SEQ ID NO: 444465 - DNA, 33 bp, Homo sapien
gcatggggaatgaaagaacacacgtttaaattg

SEQ ID NO: 444466 - DNA, 33 bp, Homo sapien
gcatggggaatgaaaggacacacgtttaaattg

SEQ ID NO: 444467 - DNA, 33 bp, Homo sapien
aaagtaactgttaaaaatcactaagtattatgt

SEQ ID NO: 444468 - DNA, 33 bp, Homo sapien
aaagtaactgttaaaattcactaagtattatgt

SEQ ID NO: 444469 - DNA, 33 bp, Homo sapien
ctgtttagatgtggggaaaagtagtgtgaggct

SEQ ID NO: 444470 - DNA, 33 bp, Homo sapien
ctgtttagatgtgggggaaagtagtgtgaggct

SEQ ID NO: 444471 - DNA, 33 bp, Homo sapien
acaagaagtcagtatacgtataacctttcaaaa

SEQ ID NO: 444472 - DNA, 33 bp, Homo sapien
acaagaagtcagtatatgtataacctttcaaaa

SEQ ID NO: 444473 - DNA, 33 bp, Homo sapien
aagcagaattttgggtaaagaggataagtgcat

SEQ ID NO: 444474 - DNA, 33 bp, Homo sapien
aagcagaattttgggtgaagaggataagtgcat

SEQ ID NO: 444475 - DNA, 33 bp, Homo sapien
atgccaggcaccttgcaatgactgtatttcatt

SEQ ID NO: 444476 - DNA, 33 bp, Homo sapien
atgccaggcaccttgcgatgactgtatttcatt

SEQ ID NO: 444477 - DNA, 33 bp, Homo sapien
taactagattagccaaaatactgtgcaagaagt

SEQ ID NO: 444478 - DNA, 33 bp, Homo sapien
taactagattagccaacatactgtgcaagaagt

SEQ ID NO: 444479 - DNA, 33 bp, Homo sapien
cagaggtcatttttggccagttattgaaaggcg

SEQ ID NO: 444480 - DNA, 33 bp, Homo sapien
cagaggtcatttttggtcagttattgaaaggcg

SEQ ID NO: 444481 - DNA, 33 bp, Homo sapien
gtgtgtaaaatggccccaaatgcagtgctcatg

SEQ ID NO: 444482 - DNA, 33 bp, Homo sapien
gtgtgtaaaatggcccgaaatgcagtgctcatg

SEQ ID NO: 444483 - DNA, 33 bp, Homo sapien
aataaaggaatggaggaatagcagagaaaggac

SEQ ID NO: 444484 - DNA, 33 bp, Homo sapien
aataaaggaatggagggatagcagagaaaggac

SEQ ID NO: 444485 - DNA, 33 bp, Homo sapien
agtaaaactaatgttgaatttttggagtatgtt

SEQ ID NO: 444486 - DNA, 33 bp, Homo sapien
agtaaaactaatgttggatttttggagtatgtt

SEQ ID NO: 444487 - DNA, 33 bp, Homo sapien
atgtaaacaacttgatcaggaaaagaaaaagaa

SEQ ID NO: 444488 - DNA, 33 bp, Homo sapien
atgtaaacaacttgattaggaaaagaaaaagaa

SEQ ID NO: 444489 - DNA, 33 bp, Homo sapien
atattcactattcagacgatgggtacaacagaa

SEQ ID NO: 444490 - DNA, 33 bp, Homo sapien
atattcactattcagatgatgggtacaacagaa

SEQ ID NO: 444491 - DNA, 33 bp, Homo sapien
gtgccaggcgctggtgacaaagaacacatcact

SEQ ID NO: 444492 - DNA, 33 bp, Homo sapien
gtgccaggcgctggtggcaaagaacacatcact

SEQ ID NO: 444493 - DNA, 33 bp, Homo sapien
gataactttctgctccccgcataattaactgtt

SEQ ID NO: 444494 - DNA, 33 bp, Homo sapien
gataactttctgctcctcgcataattaactgtt

SEQ ID NO: 444495 - DNA, 33 bp, Homo sapien
gcttttttattctagcgaagttctttgttctaa

SEQ ID NO: 444496 - DNA, 33 bp, Homo sapien
gcttttttattctagctaagttctttgttctaa

SEQ ID NO: 444497 - DNA, 33 bp, Homo sapien
tatatctctagtccacacaataacacattgctt

SEQ ID NO: 444498 - DNA, 33 bp, Homo sapien
tatatctctagtccacgcaataacacattgctt

SEQ ID NO: 444499 - DNA, 33 bp, Homo sapien
aaacaacgtccaaaaaagtattgtttcaacatt

SEQ ID NO: 444500 - DNA, 33 bp, Homo sapien
aaacaacgtccaaaaaggtattgtttcaacatt

SEQ ID NO: 444501 - DNA, 33 bp, Homo sapien
tggtctccgtattttacggcaaatttcttgtat

SEQ ID NO: 444502 - DNA, 33 bp, Homo sapien
tggtctccgtattttatggcaaatttcttgtat

SEQ ID NO: 444503 - DNA, 33 bp, Homo sapien
ggccagtgtcaaggttcaaagatataggtttca

SEQ ID NO: 444504 - DNA, 33 bp, Homo sapien
ggccagtgtcaaggttgaaagatataggtttca

SEQ ID NO: 444505 - DNA, 33 bp, Homo sapien
tacctaagcctgataaattaaaattgaaagtgt

SEQ ID NO: 444506 - DNA, 33 bp, Homo sapien
tacctaagcctgataagttaaaattgaaagtgt

SEQ ID NO: 444507 - DNA, 33 bp, Homo sapien
ctcgaagcctagagacagtcactttcctccaat

SEQ ID NO: 444508 - DNA, 33 bp, Homo sapien
ctcgaagcctagagaccgtcactttcctccaat

SEQ ID NO: 444509 - DNA, 33 bp, Homo sapien
ttgagtaaaatccacaacgagagacatcataca

SEQ ID NO: 444510 - DNA, 33 bp, Homo sapien
ttgagtaaaatccacatcgagagacatcataca

SEQ ID NO: 444511 - DNA, 33 bp, Homo sapien
ttgccctcaacaaaagacttgctcaagttaaat

SEQ ID NO: 444512 - DNA, 33 bp, Homo sapien
ttgccctcaacaaaagccttgctcaagttaaat

SEQ ID NO: 444513 - DNA, 33 bp, Homo sapien
ctaagatcaattaggacatggtgtgaatacatt

SEQ ID NO: 444514 - DNA, 33 bp, Homo sapien
ctaagatcaattaggatatggtgtgaatacatt

SEQ ID NO: 444515 - DNA, 33 bp, Homo sapien
atgctccctttcacacaaggtgattgcacacat

SEQ ID NO: 444516 - DNA, 33 bp, Homo sapien
atgctccctttcacacgaggtgattgcacacat

SEQ ID NO: 444517 - DNA, 33 bp, Homo sapien
tggaaggaattatccacctgactggccaattat

SEQ ID NO: 444518 - DNA, 33 bp, Homo sapien
tggaaggaattatccatctgactggccaattat

SEQ ID NO: 444519 - DNA, 33 bp, Homo sapien
cctgaaatatagcacaaactttttgaattaaat

SEQ ID NO: 444520 - DNA, 33 bp, Homo sapien
cctgaaatatagcacatactttttgaattaaat

SEQ ID NO: 444521 - DNA, 33 bp, Homo sapien
taaaagagtcattatgcaaatataccacatcaa

SEQ ID NO: 444522 - DNA, 33 bp, Homo sapien
taaaagagtcattatgtaaatataccacatcaa

SEQ ID NO: 444523 - DNA, 33 bp, Homo sapien
tagtttgcataggaacaagtgagcaatattttt

SEQ ID NO: 444524 - DNA, 33 bp, Homo sapien
tagtttgcataggaacgagtgagcaatattttt

SEQ ID NO: 444525 - DNA, 33 bp, Homo sapien
aagcagtcctgctgtaaccaaagtagttaaata

SEQ ID NO: 444526 - DNA, 33 bp, Homo sapien
aagcagtcctgctgtagccaaagtagttaaata

SEQ ID NO: 444527 - DNA, 33 bp, Homo sapien
taatgcaaaaagcaaactctgtgaaatacttaa

SEQ ID NO: 444528 - DNA, 33 bp, Homo sapien
taatgcaaaaagcaaagtctgtgaaatacttaa

SEQ ID NO: 444529 - DNA, 33 bp, Homo sapien
ggacctgcctttgcctgaagctgatgtagcaat

SEQ ID NO: 444530 - DNA, 33 bp, Homo sapien
ggacctgcctttgccttaagctgatgtagcaat

SEQ ID NO: 444531 - DNA, 33 bp, Homo sapien
atcttggagatgctagcaactggtgagccccaa

SEQ ID NO: 444532 - DNA, 33 bp, Homo sapien
atcttggagatgctagtaactggtgagccccaa

SEQ ID NO: 444533 - DNA, 33 bp, Homo sapien
atagtacacaaagaaagattagttgactagtct

SEQ ID NO: 444534 - DNA, 33 bp, Homo sapien
atagtacacaaagaaatattagttgactagtct

SEQ ID NO: 444535 - DNA, 33 bp, Homo sapien
taagtgttctcgataactgttttcactgaattt

SEQ ID NO: 444536 - DNA, 33 bp, Homo sapien
taagtgttctcgataattgttttcactgaattt

SEQ ID NO: 444537 - DNA, 33 bp, Homo sapien
aaaccatgagatgaaacgagctcggatctctga

SEQ ID NO: 444538 - DNA, 33 bp, Homo sapien
aaaccatgagatgaaaggagctcggatctctga

SEQ ID NO: 444539 - DNA, 33 bp, Homo sapien
tctattgtagcaaagaccacataatatgaagaa

SEQ ID NO: 444540 - DNA, 33 bp, Homo sapien
tctattgtagcaaagagcacataatatgaagaa

SEQ ID NO: 444541 - DNA, 33 bp, Homo sapien
cttggaatagtcaaagaagtcactggtgttgtg

SEQ ID NO: 444542 - DNA, 33 bp, Homo sapien
cttggaatagtcaaaggagtcactggtgttgtg

SEQ ID NO: 444543 - DNA, 33 bp, Homo sapien
gctgcttcgcattccacgtgagaaaatggaaaa

SEQ ID NO: 444544 - DNA, 33 bp, Homo sapien
gctgcttcgcattccatgtgagaaaatggaaaa

SEQ ID NO: 444545 - DNA, 33 bp, Homo sapien
aattacttaatacaaaagtagtacatgcttaac

SEQ ID NO: 444546 - DNA, 33 bp, Homo sapien
aattacttaatacaaaggtagtacatgcttaac

SEQ ID NO: 444547 - DNA, 33 bp, Homo sapien
aagcttatcctaggaaatgtatatgaaacaatt

SEQ ID NO: 444548 - DNA, 33 bp, Homo sapien
aagcttatcctaggaagtgtatatgaaacaatt

SEQ ID NO: 444549 - DNA, 33 bp, Homo sapien
ctgtctagtgagctacacagatttactttcatt

SEQ ID NO: 444550 - DNA, 33 bp, Homo sapien
ctgtctagtgagctacccagatttactttcatt

SEQ ID NO: 444551 - DNA, 33 bp, Homo sapien
tctctatgaatgctacaatatttgaatgaatgc

SEQ ID NO: 444552 - DNA, 33 bp, Homo sapien
tctctatgaatgctacgatatttgaatgaatgc

SEQ ID NO: 444553 - DNA, 33 bp, Homo sapien
gaagaaagaaagaaaccgagccaaatgcggtgg

SEQ ID NO: 444554 - DNA, 33 bp, Homo sapien
gaagaaagaaagaaactgagccaaatgcggtgg

SEQ ID NO: 444555 - DNA, 33 bp, Homo sapien
agctatgatttgctacaatcctttctcggtaag

SEQ ID NO: 444556 - DNA, 33 bp, Homo sapien
agctatgatttgctacgatcctttctcggtaag

SEQ ID NO: 444557 - DNA, 33 bp, Homo sapien
cccaaacatttcagaacgcgctttgttttcaag

SEQ ID NO: 444558 - DNA, 33 bp, Homo sapien
cccaaacatttcagaatgcgctttgttttcaag

SEQ ID NO: 444559 - DNA, 33 bp, Homo sapien
aatgtgggggtggacaacatctaataggctgcc

SEQ ID NO: 444560 - DNA, 33 bp, Homo sapien
aatgtgggggtggacaccatctaataggctgcc

SEQ ID NO: 444561 - DNA, 33 bp, Homo sapien
tgctggagaaagcgtccactcacagattgttct

SEQ ID NO: 444562 - DNA, 33 bp, Homo sapien
tgctggagaaagcgtctactcacagattgttct

SEQ ID NO: 444563 - DNA, 33 bp, Homo sapien
tcccaccccaagggaaaattttagacatgaacc

SEQ ID NO: 444564 - DNA, 33 bp, Homo sapien
tcccaccccaagggaagattttagacatgaacc

SEQ ID NO: 444565 - DNA, 33 bp, Homo sapien
aaaggtacaggcttacaaaaatgatctttacaa

SEQ ID NO: 444566 - DNA, 33 bp, Homo sapien
aaaggtacaggcttacgaaaatgatctttacaa

SEQ ID NO: 444567 - DNA, 33 bp, Homo sapien
ctctcatctgataattcaaactgattcgtttcc

SEQ ID NO: 444568 - DNA, 33 bp, Homo sapien
ctctcatctgataatttaaactgattcgtttcc

SEQ ID NO: 444569 - DNA, 33 bp, Homo sapien
atgcaaaaattagtaaatgtggaaatactctca

SEQ ID NO: 444570 - DNA, 33 bp, Homo sapien
atgcaaaaattagtaattgtggaaatactctca

SEQ ID NO: 444571 - DNA, 33 bp, Homo sapien
ttcagacttttgtcccagactcttgtgacacag

SEQ ID NO: 444572 - DNA, 33 bp, Homo sapien
ttcagacttttgtcccggactcttgtgacacag

SEQ ID NO: 444573 - DNA, 33 bp, Homo sapien
tccagctgaggttacagtaagatcatttgggat

SEQ ID NO: 444574 - DNA, 33 bp, Homo sapien
tccagctgaggttacattaagatcatttgggat

SEQ ID NO: 444575 - DNA, 33 bp, Homo sapien
aatactcagaaacagtcaaaatttgattgaccc

SEQ ID NO: 444576 - DNA, 33 bp, Homo sapien
aatactcagaaacagttaaaatttgattgaccc

SEQ ID NO: 444577 - DNA, 33 bp, Homo sapien
cataaaaatcatctcactgaagtactcatttac

SEQ ID NO: 444578 - DNA, 33 bp, Homo sapien
cataaaaatcatctcattgaagtactcatttac

SEQ ID NO: 444579 - DNA, 33 bp, Homo sapien
tttagcccaacaaacacaatgaggaattctatg

SEQ ID NO: 444580 - DNA, 33 bp, Homo sapien
tttagcccaacaaacataatgaggaattctatg

SEQ ID NO: 444581 - DNA, 33 bp, Homo sapien
cattatggctaaacataacttggaaatagaaca

SEQ ID NO: 444582 - DNA, 33 bp, Homo sapien
cattatggctaaacatgacttggaaatagaaca

SEQ ID NO: 444583 - DNA, 33 bp, Homo sapien
acaacattaaaatgccccatatcccatatttaa

SEQ ID NO: 444584 - DNA, 33 bp, Homo sapien
acaacattaaaatgcctcatatcccatatttaa

SEQ ID NO: 444585 - DNA, 33 bp, Homo sapien
ccttgataaaatcatcaaaaatgagactattta

SEQ ID NO: 444586 - DNA, 33 bp, Homo sapien
ccttgataaaatcatcgaaaatgagactattta

SEQ ID NO: 444587 - DNA, 33 bp, Homo sapien
tgggaaagtttgacgacgggtaagaaattctat

SEQ ID NO: 444588 - DNA, 33 bp, Homo sapien
tgggaaagtttgacgatgggtaagaaattctat

SEQ ID NO: 444589 - DNA, 33 bp, Homo sapien
gaaggaaatcaagaacagtcagccatattaaaa

SEQ ID NO: 444590 - DNA, 33 bp, Homo sapien
gaaggaaatcaagaacggtcagccatattaaaa

SEQ ID NO: 444591 - DNA, 33 bp, Homo sapien
aatgtgtacaaatcaacagtaagcatatcatat

SEQ ID NO: 444592 - DNA, 33 bp, Homo sapien
aatgtgtacaaatcaatagtaagcatatcatat

SEQ ID NO: 444593 - DNA, 33 bp, Homo sapien
ctaaccattcacagaaccatgttgtaggtccta

SEQ ID NO: 444594 - DNA, 33 bp, Homo sapien
ctaaccattcacagaatcatgttgtaggtccta

SEQ ID NO: 444595 - DNA, 33 bp, Homo sapien
tttcattttgagcccaagtctttacctgtcaaa

SEQ ID NO: 444596 - DNA, 33 bp, Homo sapien
tttcattttgagcccatgtctttacctgtcaaa

SEQ ID NO: 444597 - DNA, 33 bp, Homo sapien
atgttatttagctgaacggttttgaatacaaaa

SEQ ID NO: 444598 - DNA, 33 bp, Homo sapien
atgttatttagctgaatggttttgaatacaaaa

SEQ ID NO: 444599 - DNA, 33 bp, Homo sapien
ttgctaggagtcttgaaaaataaagattaacca

SEQ ID NO: 444600 - DNA, 33 bp, Homo sapien
ttgctaggagtcttgacaaataaagattaacca

SEQ ID NO: 444601 - DNA, 33 bp, Homo sapien
tacaaccttatattcaaaacacaccaactagat

SEQ ID NO: 444602 - DNA, 33 bp, Homo sapien
tacaaccttatattcagaacacaccaactagat

SEQ ID NO: 444603 - DNA, 33 bp, Homo sapien
tactgacataaaggaacgcagaatggttgtgag

SEQ ID NO: 444604 - DNA, 33 bp, Homo sapien
tactgacataaaggaatgcagaatggttgtgag

SEQ ID NO: 444605 - DNA, 33 bp, Homo sapien
tcagaagtgatgcttgaatatgtcatgaaggat

SEQ ID NO: 444606 - DNA, 33 bp, Homo sapien
tcagaagtgatgcttggatatgtcatgaaggat

SEQ ID NO: 444607 - DNA, 33 bp, Homo sapien
tggcttccacagttctcacaattgctttttctt

SEQ ID NO: 444608 - DNA, 33 bp, Homo sapien
tggcttccacagttcttacaattgctttttctt

SEQ ID NO: 444609 - DNA, 33 bp, Homo sapien
catattttgtgacatacagtgtgagtgctgaga

SEQ ID NO: 444610 - DNA, 33 bp, Homo sapien
catattttgtgacatatagtgtgagtgctgaga

SEQ ID NO: 444611 - DNA, 33 bp, Homo sapien
atgttctgtttaatgagagtgatgcagtagggt

SEQ ID NO: 444612 - DNA, 33 bp, Homo sapien
atgttctgtttaatgatagtgatgcagtagggt

SEQ ID NO: 444613 - DNA, 33 bp, Homo sapien
gtgtcataggttttcaagagattggagctaaat

SEQ ID NO: 444614 - DNA, 33 bp, Homo sapien
gtgtcataggttttcaggagattggagctaaat

SEQ ID NO: 444615 - DNA, 33 bp, Homo sapien
cagaggcagttacttacagccagacccattttt

SEQ ID NO: 444616 - DNA, 33 bp, Homo sapien
cagaggcagttacttatagccagacccattttt

SEQ ID NO: 444617 - DNA, 33 bp, Homo sapien
tcatttcattcattgccagtttcaatggcatgg

SEQ ID NO: 444618 - DNA, 33 bp, Homo sapien
tcatttcattcattgctagtttcaatggcatgg

SEQ ID NO: 444619 - DNA, 33 bp, Homo sapien
agcattcaagtcaagacagcaagggaagtatat

SEQ ID NO: 444620 - DNA, 33 bp, Homo sapien
agcattcaagtcaagatagcaagggaagtatat

SEQ ID NO: 444621 - DNA, 33 bp, Homo sapien
attgcaaacagttgcagagtgttaccagggtag

SEQ ID NO: 444622 - DNA, 33 bp, Homo sapien
attgcaaacagttgcatagtgttaccagggtag

SEQ ID NO: 444623 - DNA, 33 bp, Homo sapien
tgtgcaaggaagtccagtctagcttaatgtttc

SEQ ID NO: 444624 - DNA, 33 bp, Homo sapien
tgtgcaaggaagtccattctagcttaatgtttc

SEQ ID NO: 444625 - DNA, 33 bp, Homo sapien
taccacatatgacatacaataccgctactacaa

SEQ ID NO: 444626 - DNA, 33 bp, Homo sapien
taccacatatgacatataataccgctactacaa

SEQ ID NO: 444627 - DNA, 33 bp, Homo sapien
tttattctcccagcaaattgcatagtgaaattc

SEQ ID NO: 444628 - DNA, 33 bp, Homo sapien
tttattctcccagcaagttgcatagtgaaattc

SEQ ID NO: 444629 - DNA, 33 bp, Homo sapien
tagatggagccatgagaacgaaacaattcagta

SEQ ID NO: 444630 - DNA, 33 bp, Homo sapien
tagatggagccatgaggacgaaacaattcagta

SEQ ID NO: 444631 - DNA, 33 bp, Homo sapien
tgaggaaaaactgttcagaaagattcaaaatga

SEQ ID NO: 444632 - DNA, 33 bp, Homo sapien
tgaggaaaaactgttcggaaagattcaaaatga

SEQ ID NO: 444633 - DNA, 33 bp, Homo sapien
tcaagtataattttcagctgctttcaacactga

SEQ ID NO: 444634 - DNA, 33 bp, Homo sapien
tcaagtataattttcatctgctttcaacactga

SEQ ID NO: 444635 - DNA, 33 bp, Homo sapien
ccagaacaaattatgggagagtgcatggtggga

SEQ ID NO: 444636 - DNA, 33 bp, Homo sapien
ccagaacaaattatggtagagtgcatggtggga

SEQ ID NO: 444637 - DNA, 33 bp, Homo sapien
cccaccaatatgtactaaggtcatagaggaaga

SEQ ID NO: 444638 - DNA, 33 bp, Homo sapien
cccaccaatatgtactgaggtcatagaggaaga

SEQ ID NO: 444639 - DNA, 33 bp, Homo sapien
gctaataatcaaacagcagtgcatcttcataag

SEQ ID NO: 444640 - DNA, 33 bp, Homo sapien
gctaataatcaaacagtagtgcatcttcataag

SEQ ID NO: 444641 - DNA, 33 bp, Homo sapien
aaaagatttatgtttcaaatggcaatttcaagt

SEQ ID NO: 444642 - DNA, 33 bp, Homo sapien
aaaagatttatgtttcgaatggcaatttcaagt

SEQ ID NO: 444643 - DNA, 33 bp, Homo sapien
aaaagggtcattgatacgcatggtatttgcctt

SEQ ID NO: 444644 - DNA, 33 bp, Homo sapien
aaaagggtcattgatatgcatggtatttgcctt

SEQ ID NO: 444645 - DNA, 33 bp, Homo sapien
ataatgtagtctagctcaaggagaaagcattca

SEQ ID NO: 444646 - DNA, 33 bp, Homo sapien
ataatgtagtctagctgaaggagaaagcattca

SEQ ID NO: 444647 - DNA, 33 bp, Homo sapien
agaatataaaaaatgcaaatctacaattaatac

SEQ ID NO: 444648 - DNA, 33 bp, Homo sapien
agaatataaaaaatgccaatctacaattaatac

SEQ ID NO: 444649 - DNA, 33 bp, Homo sapien
aaagacatatgctaaagaaacatcattacagtt

SEQ ID NO: 444650 - DNA, 33 bp, Homo sapien
aaagacatatgctaaataaacatcattacagtt

SEQ ID NO: 444651 - DNA, 33 bp, Homo sapien
taggatggtgaaactacgcctgggactttttat

SEQ ID NO: 444652 - DNA, 33 bp, Homo sapien
taggatggtgaaactatgcctgggactttttat

SEQ ID NO: 444653 - DNA, 33 bp, Homo sapien
taagcttctccaaataaaatttactgctccaga

SEQ ID NO: 444654 - DNA, 33 bp, Homo sapien
taagcttctccaaatagaatttactgctccaga

SEQ ID NO: 444655 - DNA, 33 bp, Homo sapien
tcagtagacattttcaatatggtcttggagagg

SEQ ID NO: 444656 - DNA, 33 bp, Homo sapien
tcagtagacattttcagtatggtcttggagagg

SEQ ID NO: 444657 - DNA, 33 bp, Homo sapien
actaaaactattagcacagggtttggcatgaac

SEQ ID NO: 444658 - DNA, 33 bp, Homo sapien
actaaaactattagcagagggtttggcatgaac

SEQ ID NO: 444659 - DNA, 33 bp, Homo sapien
cttacttgggttctgtaaactgtcttagcaccc

SEQ ID NO: 444660 - DNA, 33 bp, Homo sapien
cttacttgggttctgtgaactgtcttagcaccc

SEQ ID NO: 444661 - DNA, 33 bp, Homo sapien
gtgaaaatcagtaaagccattttgcaaaacaat

SEQ ID NO: 444662 - DNA, 33 bp, Homo sapien
gtgaaaatcagtaaagtcattttgcaaaacaat

SEQ ID NO: 444663 - DNA, 33 bp, Homo sapien
tgtaaagctgcatagaaactctttttttttttt

SEQ ID NO: 444664 - DNA, 33 bp, Homo sapien
tgtaaagctgcatagacactctttttttttttt

SEQ ID NO: 444665 - DNA, 33 bp, Homo sapien
aaattgttactcgaaacgctttgatacaaaaaa

SEQ ID NO: 444666 - DNA, 33 bp, Homo sapien
aaattgttactcgaaatgctttgatacaaaaaa

SEQ ID NO: 444667 - DNA, 33 bp, Homo sapien
gatatttaccaagccactcagctttcccagggg

SEQ ID NO: 444668 - DNA, 33 bp, Homo sapien
gatatttaccaagccattcagctttcccagggg

SEQ ID NO: 444669 - DNA, 33 bp, Homo sapien
ttcgttgaagacatacaaagttgagcatacatt

SEQ ID NO: 444670 - DNA, 33 bp, Homo sapien
ttcgttgaagacataccaagttgagcatacatt

SEQ ID NO: 444671 - DNA, 33 bp, Homo sapien
caaaggtaatgagctacaataacatttgaaaac

SEQ ID NO: 444672 - DNA, 33 bp, Homo sapien
caaaggtaatgagctataataacatttgaaaac

SEQ ID NO: 444673 - DNA, 33 bp, Homo sapien
aagggagaagcaagaacattgaaactgaagtag

SEQ ID NO: 444674 - DNA, 33 bp, Homo sapien
aagggagaagcaagaatattgaaactgaagtag

SEQ ID NO: 444675 - DNA, 33 bp, Homo sapien
taaaaaaccttcatgcaaaaatttagtgacaag

SEQ ID NO: 444676 - DNA, 33 bp, Homo sapien
taaaaaaccttcatgccaaaatttagtgacaag

SEQ ID NO: 444677 - DNA, 33 bp, Homo sapien
gtttattctctgtgcaagtacagacaatacact

SEQ ID NO: 444678 - DNA, 33 bp, Homo sapien
gtttattctctgtgcaggtacagacaatacact

SEQ ID NO: 444679 - DNA, 33 bp, Homo sapien
tggatgaagttggaaacgatcattctctgcaaa

SEQ ID NO: 444680 - DNA, 33 bp, Homo sapien
tggatgaagttggaaatgatcattctctgcaaa

SEQ ID NO: 444681 - DNA, 33 bp, Homo sapien
acactaacaactttagaatctgctgatgaagca

SEQ ID NO: 444682 - DNA, 33 bp, Homo sapien
acactaacaactttaggatctgctgatgaagca

SEQ ID NO: 444683 - DNA, 33 bp, Homo sapien
caaggtggcatggtcacagtcctcagaagcata

SEQ ID NO: 444684 - DNA, 33 bp, Homo sapien
caaggtggcatggtcagagtcctcagaagcata

SEQ ID NO: 444685 - DNA, 33 bp, Homo sapien
cttctttcttgaggataaaagttcctatcaggt

SEQ ID NO: 444686 - DNA, 33 bp, Homo sapien
cttctttcttgaggatgaaagttcctatcaggt

SEQ ID NO: 444687 - DNA, 33 bp, Homo sapien
agttaacacaagattcccggtaggcaactacat

SEQ ID NO: 444688 - DNA, 33 bp, Homo sapien
agttaacacaagattctcggtaggcaactacat

SEQ ID NO: 444689 - DNA, 33 bp, Homo sapien
ctaggcacgagcaagccatatgtacagcgttat

SEQ ID NO: 444690 - DNA, 33 bp, Homo sapien
ctaggcacgagcaagctatatgtacagcgttat

SEQ ID NO: 444691 - DNA, 33 bp, Homo sapien
gaggtcaggtgaataaagtggacgaggcaaaaa

SEQ ID NO: 444692 - DNA, 33 bp, Homo sapien
gaggtcaggtgaataaggtggacgaggcaaaaa

SEQ ID NO: 444693 - DNA, 33 bp, Homo sapien
tcccaaagtagtcaaactagtagagacagaaag

SEQ ID NO: 444694 - DNA, 33 bp, Homo sapien
tcccaaagtagtcaaattagtagagacagaaag

SEQ ID NO: 444695 - DNA, 33 bp, Homo sapien
ttgctggatgttctgcactagccatatctttcc

SEQ ID NO: 444696 - DNA, 33 bp, Homo sapien
ttgctggatgttctgccctagccatatctttcc

SEQ ID NO: 444697 - DNA, 33 bp, Homo sapien
tagattgtgtgttatgaataaattaaataaata

SEQ ID NO: 444698 - DNA, 33 bp, Homo sapien
tagattgtgtgttatggataaattaaataaata

SEQ ID NO: 444699 - DNA, 33 bp, Homo sapien
tcctcttttataagcaaatcattttggtagtta

SEQ ID NO: 444700 - DNA, 33 bp, Homo sapien
tcctcttttataagcatatcattttggtagtta

SEQ ID NO: 444701 - DNA, 33 bp, Homo sapien
tttggtgtagagtcaacgatgggttacagtaag

SEQ ID NO: 444702 - DNA, 33 bp, Homo sapien
tttggtgtagagtcaaggatgggttacagtaag

SEQ ID NO: 444703 - DNA, 33 bp, Homo sapien
ttgagaaaagtggagaccagaataaagggggct

SEQ ID NO: 444704 - DNA, 33 bp, Homo sapien
ttgagaaaagtggagagcagaataaagggggct

SEQ ID NO: 444705 - DNA, 33 bp, Homo sapien
tattcagggccctagaactctttagttagcagg

SEQ ID NO: 444706 - DNA, 33 bp, Homo sapien
tattcagggccctagagctctttagttagcagg

SEQ ID NO: 444707 - DNA, 33 bp, Homo sapien
tggtgtccttgcaggaagaacaattcatagagt

SEQ ID NO: 444708 - DNA, 33 bp, Homo sapien
tggtgtccttgcaggaggaacaattcatagagt

SEQ ID NO: 444709 - DNA, 33 bp, Homo sapien
actaccaaagttaaatcaatatgaccttttaat

SEQ ID NO: 444710 - DNA, 33 bp, Homo sapien
actaccaaagttaaatgaatatgaccttttaat

SEQ ID NO: 444711 - DNA, 33 bp, Homo sapien
gcatgggattacagcacacgaggacttgttcct

SEQ ID NO: 444712 - DNA, 33 bp, Homo sapien
gcatgggattacagcatacgaggacttgttcct

SEQ ID NO: 444713 - DNA, 33 bp, Homo sapien
aataaatctctctggaatatgttctgcaaaatt

SEQ ID NO: 444714 - DNA, 33 bp, Homo sapien
aataaatctctctggactatgttctgcaaaatt

SEQ ID NO: 444715 - DNA, 33 bp, Homo sapien
tggtcgtttatttttccacccaagttatagaag

SEQ ID NO: 444716 - DNA, 33 bp, Homo sapien
tggtcgtttatttttctacccaagttatagaag

SEQ ID NO: 444717 - DNA, 33 bp, Homo sapien
aatttattttgtgagaactggaattttcttact

SEQ ID NO: 444718 - DNA, 33 bp, Homo sapien
aatttattttgtgagatctggaattttcttact

SEQ ID NO: 444719 - DNA, 33 bp, Homo sapien
gtttcctgtaaaaggtcaagaattagcctggaa

SEQ ID NO: 444720 - DNA, 33 bp, Homo sapien
gtttcctgtaaaaggtgaagaattagcctggaa

SEQ ID NO: 444721 - DNA, 33 bp, Homo sapien
tacttcaaaaatggccccactgtatatcataga

SEQ ID NO: 444722 - DNA, 33 bp, Homo sapien
tacttcaaaaatggcctcactgtatatcataga

SEQ ID NO: 444723 - DNA, 33 bp, Homo sapien
aatgtggttagtactacatctgcaagaccccca

SEQ ID NO: 444724 - DNA, 33 bp, Homo sapien
aatgtggttagtactatatctgcaagaccccca

SEQ ID NO: 444725 - DNA, 33 bp, Homo sapien
ttgtggcctactgatacaattgaatattacact

SEQ ID NO: 444726 - DNA, 33 bp, Homo sapien
ttgtggcctactgatataattgaatattacact

SEQ ID NO: 444727 - DNA, 33 bp, Homo sapien
attgtagtaaaagccacgaatcttggttccatc

SEQ ID NO: 444728 - DNA, 33 bp, Homo sapien
attgtagtaaaagccatgaatcttggttccatc

SEQ ID NO: 444729 - DNA, 33 bp, Homo sapien
aataaaatctagtagaacctggtaatacatttc

SEQ ID NO: 444730 - DNA, 33 bp, Homo sapien
aataaaatctagtagaccctggtaatacatttc

SEQ ID NO: 444731 - DNA, 33 bp, Homo sapien
taaaagtaatttcatcaccaaagttgtctataa

SEQ ID NO: 444732 - DNA, 33 bp, Homo sapien
taaaagtaatttcatctccaaagttgtctataa

SEQ ID NO: 444733 - DNA, 33 bp, Homo sapien
agtcatcagattgacaaaaataagtgcaattaa

SEQ ID NO: 444734 - DNA, 33 bp, Homo sapien
agtcatcagattgacacaaataagtgcaattaa

SEQ ID NO: 444735 - DNA, 33 bp, Homo sapien
aaagttgtgttctcaactactctctgcatataa

SEQ ID NO: 444736 - DNA, 33 bp, Homo sapien
aaagttgtgttctcaattactctctgcatataa

SEQ ID NO: 444737 - DNA, 33 bp, Homo sapien
ctctttttaacaactaactgtggcaggaaacaa

SEQ ID NO: 444738 - DNA, 33 bp, Homo sapien
ctctttttaacaactagctgtggcaggaaacaa

SEQ ID NO: 444739 - DNA, 33 bp, Homo sapien
tgtcaggtgggtaacaacctggtgaaaaataga

SEQ ID NO: 444740 - DNA, 33 bp, Homo sapien
tgtcaggtgggtaacaccctggtgaaaaataga

SEQ ID NO: 444741 - DNA, 33 bp, Homo sapien
agaaaacggtaaatgccacagtgtatggtcaga

SEQ ID NO: 444742 - DNA, 33 bp, Homo sapien
agaaaacggtaaatgctacagtgtatggtcaga

SEQ ID NO: 444743 - DNA, 33 bp, Homo sapien
gtctattagttctgccagattcagacagttaat

SEQ ID NO: 444744 - DNA, 33 bp, Homo sapien
gtctattagttctgccggattcagacagttaat

SEQ ID NO: 444745 - DNA, 33 bp, Homo sapien
ctacagaacatcgagcaaagtgcgaactgtgcc

SEQ ID NO: 444746 - DNA, 33 bp, Homo sapien
ctacagaacatcgagctaagtgcgaactgtgcc

SEQ ID NO: 444747 - DNA, 33 bp, Homo sapien
tattgacttgtagcaacggagcaatgtacttca

SEQ ID NO: 444748 - DNA, 33 bp, Homo sapien
tattgacttgtagcaatggagcaatgtacttca

SEQ ID NO: 444749 - DNA, 33 bp, Homo sapien
aagtgcttgagcaatacgttaagtatcccaaag

SEQ ID NO: 444750 - DNA, 33 bp, Homo sapien
aagtgcttgagcaatatgttaagtatcccaaag

SEQ ID NO: 444751 - DNA, 33 bp, Homo sapien
gtgaaatacacaaaagaccttcaacatttggca

SEQ ID NO: 444752 - DNA, 33 bp, Homo sapien
gtgaaatacacaaaagtccttcaacatttggca

SEQ ID NO: 444753 - DNA, 33 bp, Homo sapien
agccttctgccaactacattttgtcattagttt

SEQ ID NO: 444754 - DNA, 33 bp, Homo sapien
agccttctgccaactatattttgtcattagttt

SEQ ID NO: 444755 - DNA, 33 bp, Homo sapien
ccactgttcttgagtacattcaatgccatcaac

SEQ ID NO: 444756 - DNA, 33 bp, Homo sapien
ccactgttcttgagtatattcaatgccatcaac

SEQ ID NO: 444757 - DNA, 33 bp, Homo sapien
ttctgagcttccctaagaactccttcctaatta

SEQ ID NO: 444758 - DNA, 33 bp, Homo sapien
ttctgagcttccctaataactccttcctaatta

SEQ ID NO: 444759 - DNA, 33 bp, Homo sapien
gtctcatactgtcgcccagtttgcagtgcaatg

SEQ ID NO: 444760 - DNA, 33 bp, Homo sapien
gtctcatactgtcgcctagtttgcagtgcaatg

SEQ ID NO: 444761 - DNA, 33 bp, Homo sapien
tggtaaactacagagcaacaatttgattctagg

SEQ ID NO: 444762 - DNA, 33 bp, Homo sapien
tggtaaactacagagcgacaatttgattctagg

SEQ ID NO: 444763 - DNA, 33 bp, Homo sapien
catttaaatcaccctgaacagggcaaagcactt

SEQ ID NO: 444764 - DNA, 33 bp, Homo sapien
catttaaatcaccctggacagggcaaagcactt

SEQ ID NO: 444765 - DNA, 33 bp, Homo sapien
ctacattaggaaaatacaggtgatttcaaagcc

SEQ ID NO: 444766 - DNA, 33 bp, Homo sapien
ctacattaggaaaatataggtgatttcaaagcc

SEQ ID NO: 444767 - DNA, 33 bp, Homo sapien
tgcctctgtctttcgcaaatagaacgtacaaca

SEQ ID NO: 444768 - DNA, 33 bp, Homo sapien
tgcctctgtctttcgcgaatagaacgtacaaca

SEQ ID NO: 444769 - DNA, 33 bp, Homo sapien
taccattcaagcatcacatatatcctcagaaat

SEQ ID NO: 444770 - DNA, 33 bp, Homo sapien
taccattcaagcatcatatatatcctcagaaat

SEQ ID NO: 444771 - DNA, 33 bp, Homo sapien
tgcaaatgctttgatgcaacagctcaagacaga

SEQ ID NO: 444772 - DNA, 33 bp, Homo sapien
tgcaaatgctttgatgtaacagctcaagacaga

SEQ ID NO: 444773 - DNA, 33 bp, Homo sapien
aaagaaactgaatcagccacatgattggtaggc

SEQ ID NO: 444774 - DNA, 33 bp, Homo sapien
aaagaaactgaatcaggcacatgattggtaggc

SEQ ID NO: 444775 - DNA, 33 bp, Homo sapien
tcttgagttccaaacacgtgtattccatcctga

SEQ ID NO: 444776 - DNA, 33 bp, Homo sapien
tcttgagttccaaacatgtgtattccatcctga

SEQ ID NO: 444777 - DNA, 33 bp, Homo sapien
ccactttgaaagcaccaatgactcaatccctgc

SEQ ID NO: 444778 - DNA, 33 bp, Homo sapien
ccactttgaaagcacccatgactcaatccctgc

SEQ ID NO: 444779 - DNA, 33 bp, Homo sapien
ttctagagtcagacaacatggcatcagttccat

SEQ ID NO: 444780 - DNA, 33 bp, Homo sapien
ttctagagtcagacaatatggcatcagttccat

SEQ ID NO: 444781 - DNA, 33 bp, Homo sapien
tccataatcctatttcactactgtgctttaact

SEQ ID NO: 444782 - DNA, 33 bp, Homo sapien
tccataatcctatttcgctactgtgctttaact

SEQ ID NO: 444783 - DNA, 33 bp, Homo sapien
tcttgtttttagtacacgattagaagtgtgacc

SEQ ID NO: 444784 - DNA, 33 bp, Homo sapien
tcttgtttttagtacatgattagaagtgtgacc

SEQ ID NO: 444785 - DNA, 33 bp, Homo sapien
ttatttctcagctttgaatttgccctttaaagc

SEQ ID NO: 444786 - DNA, 33 bp, Homo sapien
ttatttctcagctttgcatttgccctttaaagc

SEQ ID NO: 444787 - DNA, 33 bp, Homo sapien
gaggaggtagaagtgacaatctggttttgcaga

SEQ ID NO: 444788 - DNA, 33 bp, Homo sapien
gaggaggtagaagtgataatctggttttgcaga

SEQ ID NO: 444789 - DNA, 33 bp, Homo sapien
aggtgctcaagggaaagattagggcagaaaaaa

SEQ ID NO: 444790 - DNA, 33 bp, Homo sapien
aggtgctcaagggaaatattagggcagaaaaaa

SEQ ID NO: 444791 - DNA, 33 bp, Homo sapien
acaagacaagcaagaaatcgtctctccactcac

SEQ ID NO: 444792 - DNA, 33 bp, Homo sapien
acaagacaagcaagaagtcgtctctccactcac

SEQ ID NO: 444793 - DNA, 33 bp, Homo sapien
ggtagatctgaaggcaatgatatgaggtctcac

SEQ ID NO: 444794 - DNA, 33 bp, Homo sapien
ggtagatctgaaggcattgatatgaggtctcac

SEQ ID NO: 444795 - DNA, 33 bp, Homo sapien
tccatactcgtagccaacatcttatctcataac

SEQ ID NO: 444796 - DNA, 33 bp, Homo sapien
tccatactcgtagccagcatcttatctcataac

SEQ ID NO: 444797 - DNA, 33 bp, Homo sapien
agccagggtggcacaccgaaatgacagagacaa

SEQ ID NO: 444798 - DNA, 33 bp, Homo sapien
agccagggtggcacactgaaatgacagagacaa

SEQ ID NO: 444799 - DNA, 33 bp, Homo sapien
catggcttatggtgaaaaagtttgttaggttgt

SEQ ID NO: 444800 - DNA, 33 bp, Homo sapien
catggcttatggtgaagaagtttgttaggttgt

SEQ ID NO: 444801 - DNA, 33 bp, Homo sapien
aaccatccttcataacaggaaaatatctgcatt

SEQ ID NO: 444802 - DNA, 33 bp, Homo sapien
aaccatccttcataacgggaaaatatctgcatt

SEQ ID NO: 444803 - DNA, 33 bp, Homo sapien
cactccatttagatacagatttgcttttcctaa

SEQ ID NO: 444804 - DNA, 33 bp, Homo sapien
cactccatttagatacggatttgcttttcctaa

SEQ ID NO: 444805 - DNA, 33 bp, Homo sapien
aaatggcagcaggaataacagtgtgatctgaca

SEQ ID NO: 444806 - DNA, 33 bp, Homo sapien
aaatggcagcaggaatgacagtgtgatctgaca

SEQ ID NO: 444807 - DNA, 33 bp, Homo sapien
gtctgtccctgttgataagcacattttaataaa

SEQ ID NO: 444808 - DNA, 33 bp, Homo sapien
gtctgtccctgttgatgagcacattttaataaa

SEQ ID NO: 444809 - DNA, 33 bp, Homo sapien
ccatgatcacataaaactcagagtgattgcaat

SEQ ID NO: 444810 - DNA, 33 bp, Homo sapien
ccatgatcacataaaagtcagagtgattgcaat

SEQ ID NO: 444811 - DNA, 33 bp, Homo sapien; identical to SEQ ID NO: 444809

SEQ ID NO: 444812 - DNA, 33 bp, Homo sapien; identical to SEQ ID NO: 444810

SEQ ID NO: 444813 - DNA, 33 bp, Homo sapien
atgtgatcatgggcaacggaaatgatttaacag

SEQ ID NO: 444814 - DNA, 33 bp, Homo sapien
atgtgatcatgggcaatggaaatgatttaacag

SEQ ID NO: 444815 - DNA, 33 bp, Homo sapien
aatgagcattacattaaaagtgcatctgcctgt

SEQ ID NO: 444816 - DNA, 33 bp, Homo sapien
aatgagcattacattagaagtgcatctgcctgt

SEQ ID NO: 444817 - DNA, 33 bp, Homo sapien
aacaatgtagctgttcaaatcagacacggaagc

SEQ ID NO: 444818 - DNA, 33 bp, Homo sapien
aacaatgtagctgttcgaatcagacacggaagc

SEQ ID NO: 444819 - DNA, 33 bp, Homo sapien
ctatctggtgtctaataaatggatttggaagag

SEQ ID NO: 444820 - DNA, 33 bp, Homo sapien
ctatctggtgtctaatgaatggatttggaagag

SEQ ID NO: 444821 - DNA, 33 bp, Homo sapien
aagactaatgcatcaacctgtacatttcctcat

SEQ ID NO: 444822 - DNA, 33 bp, Homo sapien
aagactaatgcatcaagctgtacatttcctcat

SEQ ID NO: 444823 - DNA, 33 bp, Homo sapien
cacgtgacattgtccaaccttaaaaagagaacc

SEQ ID NO: 444824 - DNA, 33 bp, Homo sapien
cacgtgacattgtccagccttaaaaagagaacc

SEQ ID NO: 444825 - DNA, 33 bp, Homo sapien
atatagagaccataaaattattggaggagagat

SEQ ID NO: 444826 - DNA, 33 bp, Homo sapien
atatagagaccataaagttattggaggagagat

SEQ ID NO: 444827 - DNA, 33 bp, Homo sapien
aggaatattttcatagccattgtttcacaagaa

SEQ ID NO: 444828 - DNA, 33 bp, Homo sapien
aggaatattttcatagtcattgtttcacaagaa

SEQ ID NO: 444829 - DNA, 33 bp, Homo sapien
ctctacagtttctgataaaaagttcattgtcat

SEQ ID NO: 444830 - DNA, 33 bp, Homo sapien
ctctacagtttctgatgaaaagttcattgtcat

SEQ ID NO: 444831 - DNA, 33 bp, Homo sapien
aaaattaccatcagctaaaaacaatgtggctag

SEQ ID NO: 444832 - DNA, 33 bp, Homo sapien
aaaattaccatcagctgaaaacaatgtggctag

SEQ ID NO: 444833 - DNA, 33 bp, Homo sapien
tggaatattttgtaacagcagaatttcttcaca

SEQ ID NO: 444834 - DNA, 33 bp, Homo sapien
tggaatattttgtaacggcagaatttcttcaca

SEQ ID NO: 444835 - DNA, 33 bp, Homo sapien
ggaaatattttgatgacggataaaatagctggc

SEQ ID NO: 444836 - DNA, 33 bp, Homo sapien
ggaaatattttgatgatggataaaatagctggc

SEQ ID NO: 444837 - DNA, 33 bp, Homo sapien
gcttgataacttggaaaaaggtgctcactgaga

SEQ ID NO: 444838 - DNA, 33 bp, Homo sapien
gcttgataacttggaacaaggtgctcactgaga

SEQ ID NO: 444839 - DNA, 33 bp, Homo sapien
atgtaagagagtttgaataagtgaagtataaga

SEQ ID NO: 444840 - DNA, 33 bp, Homo sapien
atgtaagagagtttgagtaagtgaagtataaga

SEQ ID NO: 444841 - DNA, 33 bp, Homo sapien
ccttgttcacttgtaacctcctgttggcatcag

SEQ ID NO: 444842 - DNA, 33 bp, Homo sapien
ccttgttcacttgtaatctcctgttggcatcag

SEQ ID NO: 444843 - DNA, 33 bp, Homo sapien
aggcacaaaaaaggtaccagcatcgaccactgg

SEQ ID NO: 444844 - DNA, 33 bp, Homo sapien
aggcacaaaaaaggtatcagcatcgaccactgg

SEQ ID NO: 444845 - DNA, 33 bp, Homo sapien
tccacaaacatacaaaataatccctcaggtaca

SEQ ID NO: 444846 - DNA, 33 bp, Homo sapien
tccacaaacatacaaagtaatccctcaggtaca

SEQ ID NO: 444847 - DNA, 33 bp, Homo sapien
ggttttctctggtttcaaatataaaatccacaa

SEQ ID NO: 444848 - DNA, 33 bp, Homo sapien
ggttttctctggtttcgaatataaaatccacaa

SEQ ID NO: 444849 - DNA, 33 bp, Homo sapien
caaagcaggaaagcaaaagaacttttcatggaa

SEQ ID NO: 444850 - DNA, 33 bp, Homo sapien
caaagcaggaaagcaagagaacttttcatggaa

SEQ ID NO: 444851 - DNA, 33 bp, Homo sapien
cattgccccactgtacacaccagaaatttaggt

SEQ ID NO: 444852 - DNA, 33 bp, Homo sapien
cattgccccactgtactcaccagaaatttaggt

SEQ ID NO: 444853 - DNA, 33 bp, Homo sapien
ctgctgattaaattgtaaaacgatgaaatctag

SEQ ID NO: 444854 - DNA, 33 bp, Homo sapien
ctgctgattaaattgttaaacgatgaaatctag

SEQ ID NO: 444855 - DNA, 33 bp, Homo sapien
aaaaaaaaaaatggaaggtagctctgggtctgg

SEQ ID NO: 444856 - DNA, 33 bp, Homo sapien
aaaaaaaaaaatggaatgtagctctgggtctgg

SEQ ID NO: 444857 - DNA, 33 bp, Homo sapien
gcaaattaaaagccaaataaacagtaattctta

SEQ ID NO: 444858 - DNA, 33 bp, Homo sapien
gcaaattaaaagccaagtaaacagtaattctta

SEQ ID NO: 444859 - DNA, 33 bp, Homo sapien
ataagatgccattaaaactcttgagtgagattt

SEQ ID NO: 444860 - DNA, 33 bp, Homo sapien
ataagatgccattaaagctcttgagtgagattt

SEQ ID NO: 444861 - DNA, 33 bp, Homo sapien
gttatcttctctcttccatgcctggttattatt

SEQ ID NO: 444862 - DNA, 33 bp, Homo sapien
gttatcttctctcttctatgcctggttattatt

SEQ ID NO: 444863 - DNA, 33 bp, Homo sapien
caacagatgctggtacaaatgtggagaaatggg

SEQ ID NO: 444864 - DNA, 33 bp, Homo sapien
caacagatgctggtacgaatgtggagaaatggg

SEQ ID NO: 444865 - DNA, 33 bp, Homo sapien
gtatttcagccttatcaagttataatcaagatc

SEQ ID NO: 444866 - DNA, 33 bp, Homo sapien
gtatttcagccttatcgagttataatcaagatc

SEQ ID NO: 444867 - DNA, 33 bp, Homo sapien
agcttccatttagttacgtaaaaggcccacata

SEQ ID NO: 444868 - DNA, 33 bp, Homo sapien
agcttccatttagttatgtaaaaggcccacata

SEQ ID NO: 444869 - DNA, 33 bp, Homo sapien
atggctaaaggtcttcaatagttacatctacat

SEQ ID NO: 444870 - DNA, 33 bp, Homo sapien
atggctaaaggtcttcgatagttacatctacat

SEQ ID NO: 444871 - DNA, 33 bp, Homo sapien
tgtagctcttgtctcacgggtacaaaactcctc

SEQ ID NO: 444872 - DNA, 33 bp, Homo sapien
tgtagctcttgtctcatgggtacaaaactcctc

SEQ ID NO: 444873 - DNA, 33 bp, Homo sapien
ctgccatattaaattccaagttcgctagtggtc

SEQ ID NO: 444874 - DNA, 33 bp, Homo sapien
ctgccatattaaattctaagttcgctagtggtc

SEQ ID NO: 444875 - DNA, 33 bp, Homo sapien
actgacatctctttccaagtgcaaaattgtcag

SEQ ID NO: 444876 - DNA, 33 bp, Homo sapien
actgacatctctttccgagtgcaaaattgtcag

SEQ ID NO: 444877 - DNA, 33 bp, Homo sapien
tagatttgaagatttacaaggcatgattctctt

SEQ ID NO: 444878 - DNA, 33 bp, Homo sapien
tagatttgaagatttagaaggcatgattctctt

SEQ ID NO: 444879 - DNA, 33 bp, Homo sapien
tgcagatgaaggaataatactacaggaacggtg

SEQ ID NO: 444880 - DNA, 33 bp, Homo sapien
tgcagatgaaggaatagtactacaggaacggtg

SEQ ID NO: 444881 - DNA, 33 bp, Homo sapien
aatcattagccatcaaattcttcatgagttcct

SEQ ID NO: 444882 - DNA, 33 bp, Homo sapien
aatcattagccatcaagttcttcatgagttcct

SEQ ID NO: 444883 - DNA, 33 bp, Homo sapien
aaagaatttgtttgccacaacctcaggtttaat

SEQ ID NO: 444884 - DNA, 33 bp, Homo sapien
aaagaatttgtttgcctcaacctcaggtttaat

SEQ ID NO: 444885 - DNA, 33 bp, Homo sapien
tttaatcaaaagggtcaatggcattatgcagat

SEQ ID NO: 444886 - DNA, 33 bp, Homo sapien
tttaatcaaaagggtcgatggcattatgcagat

SEQ ID NO: 444887 - DNA, 33 bp, Homo sapien
cagccagatatcaaaacagtcagaatctatcat

SEQ ID NO: 444888 - DNA, 33 bp, Homo sapien
cagccagatatcaaaagagtcagaatctatcat

SEQ ID NO: 444889 - DNA, 33 bp, Homo sapien
ggtctgtatgggactcgatttccagggaagcct

SEQ ID NO: 444890 - DNA, 33 bp, Homo sapien
ggtctgtatgggactctatttccagggaagcct

SEQ ID NO: 444891 - DNA, 33 bp, Homo sapien
atcaactttgactgtaacttagaaattatacag

SEQ ID NO: 444892 - DNA, 33 bp, Homo sapien
atcaactttgactgtaccttagaaattatacag

SEQ ID NO: 444893 - DNA, 33 bp, Homo sapien
ttccaatccatgagaacgaagtgtttttcattt

SEQ ID NO: 444894 - DNA, 33 bp, Homo sapien
ttccaatccatgagaatgaagtgtttttcattt

SEQ ID NO: 444895 - DNA, 33 bp, Homo sapien
ttgagtacagacctgaaaacaagcaacaaggag

SEQ ID NO: 444896 - DNA, 33 bp, Homo sapien
ttgagtacagacctgagaacaagcaacaaggag

SEQ ID NO: 444897 - DNA, 33 bp, Homo sapien
caaggaacttgcaatccagctaatgagccttac

SEQ ID NO: 444898 - DNA, 33 bp, Homo sapien
caaggaacttgcaatctagctaatgagccttac

SEQ ID NO: 444899 - DNA, 33 bp, Homo sapien
ttaaattaaccacaggaaatatgagcataaata

SEQ ID NO: 444900 - DNA, 33 bp, Homo sapien
ttaaattaaccacagggaatatgagcataaata

SEQ ID NO: 444901 - DNA, 33 bp, Homo sapien
catttctatattccacacatggtgtaagcacta

SEQ ID NO: 444902 - DNA, 33 bp, Homo sapien
catttctatattccacgcatggtgtaagcacta

SEQ ID NO: 444903 - DNA, 33 bp, Homo sapien
cgtattgggccccacaaatcatgtagccggtcc

SEQ ID NO: 444904 - DNA, 33 bp, Homo sapien
cgtattgggccccacagatcatgtagccggtcc

SEQ ID NO: 444905 - DNA, 33 bp, Homo sapien
gcagccgctgaaccaacaagcttcctagatagg

SEQ ID NO: 444906 - DNA, 33 bp, Homo sapien
gcagccgctgaaccaataagcttcctagatagg

SEQ ID NO: 444907 - DNA, 33 bp, Homo sapien
gagtgatgaaactaggaagaatctacagtgtct

SEQ ID NO: 444908 - DNA, 33 bp, Homo sapien
gagtgatgaaactagggagaatctacagtgtct

SEQ ID NO: 444909 - DNA, 33 bp, Homo sapien
ctgagtcacagcgttacggttctgagaaggtca

SEQ ID NO: 444910 - DNA, 33 bp, Homo sapien
ctgagtcacagcgttatggttctgagaaggtca

SEQ ID NO: 444911 - DNA, 33 bp, Homo sapien
cctcaatgtgtaaataaagcaaaatctagatct

SEQ ID NO: 444912 - DNA, 33 bp, Homo sapien
cctcaatgtgtaaatagagcaaaatctagatct

SEQ ID NO: 444913 - DNA, 33 bp, Homo sapien
atgtgattattttgaccacctcctgcagtttat

SEQ ID NO: 444914 - DNA, 33 bp, Homo sapien
atgtgattattttgactacctcctgcagtttat

SEQ ID NO: 444915 - DNA, 33 bp, Homo sapien
gattttaaagagtatcactggattcaactttta

SEQ ID NO: 444916 - DNA, 33 bp, Homo sapien
gattttaaagagtatctctggattcaactttta

SEQ ID NO: 444917 - DNA, 33 bp, Homo sapien
tagtgaaaaactctccaatttctcaacagtaag

SEQ ID NO: 444918 - DNA, 33 bp, Homo sapien
tagtgaaaaactctccgatttctcaacagtaag

SEQ ID NO: 444919 - DNA, 33 bp, Homo sapien
cgagtcatagatgaccaaaatgaaatcactttt

SEQ ID NO: 444920 - DNA, 33 bp, Homo sapien
cgagtcatagatgaccgaaatgaaatcactttt

SEQ ID NO: 444921 - DNA, 33 bp, Homo sapien
aaacacatatgagaccgaaggatcaactgagaa

SEQ ID NO: 444922 - DNA, 33 bp, Homo sapien
aaacacatatgagacctaaggatcaactgagaa

SEQ ID NO: 444923 - DNA, 33 bp, Homo sapien
ctatattatgctttgaaaattggtttattcctc

SEQ ID NO: 444924 - DNA, 33 bp, Homo sapien
ctatattatgctttgagaattggtttattcctc

SEQ ID NO: 444925 - DNA, 33 bp, Homo sapien
taatatagagaagaaaaattgcattgtttagag

SEQ ID NO: 444926 - DNA, 33 bp, Homo sapien
taatatagagaagaaacattgcattgtttagag

SEQ ID NO: 444927 - DNA, 33 bp, Homo sapien
aaaatgtgccgtatgaaaatgatttttatgtaa

SEQ ID NO: 444928 - DNA, 33 bp, Homo sapien
aaaatgtgccgtatgagaatgatttttatgtaa

SEQ ID NO: 444929 - DNA, 33 bp, Homo sapien
ccattctaaatggtgcactgatcaaatctgaaa

SEQ ID NO: 444930 - DNA, 33 bp, Homo sapien
ccattctaaatggtgccctgatcaaatctgaaa

SEQ ID NO: 444931 - DNA, 33 bp, Homo sapien
tgcccattcccaccacaacttcacacaggcagg

SEQ ID NO: 444932 - DNA, 33 bp, Homo sapien
tgcccattcccaccacgacttcacacaggcagg

SEQ ID NO: 444933 - DNA, 33 bp, Homo sapien
gcctgcagttaaggagacctggagagcagccgg

SEQ ID NO: 444934 - DNA, 33 bp, Homo sapien
gcctgcagttaaggaggcctggagagcagccgg

SEQ ID NO: 444935 - DNA, 33 bp, Homo sapien
tcggtcataaaaagacaagaagcctggtaggaa

SEQ ID NO: 444936 - DNA, 33 bp, Homo sapien
tcggtcataaaaagactagaagcctggtaggaa

SEQ ID NO: 444937 - DNA, 33 bp, Homo sapien
gtaaaatgctgctctagaggtaaaaactaacaa

SEQ ID NO: 444938 - DNA, 33 bp, Homo sapien
gtaaaatgctgctctataggtaaaaactaacaa

SEQ ID NO: 444939 - DNA, 33 bp, Homo sapien
actttcatcaggactaaatgtaccacacgaaag

SEQ ID NO: 444940 - DNA, 33 bp, Homo sapien
actttcatcaggactatatgtaccacacgaaag

SEQ ID NO: 444941 - DNA, 33 bp, Homo sapien
tgagtcactgcttgaacacagtagctatgttgc

SEQ ID NO: 444942 - DNA, 33 bp, Homo sapien
tgagtcactgcttgaatacagtagctatgttgc

SEQ ID NO: 444943 - DNA, 33 bp, Homo sapien
cgttttcataataaaactcaaatctccaacatt

SEQ ID NO: 444944 - DNA, 33 bp, Homo sapien
cgttttcataataaaattcaaatctccaacatt

SEQ ID NO: 444945 - DNA, 33 bp, Homo sapien
acagattggtaggcataataacttgcatttcta

SEQ ID NO: 444946 - DNA, 33 bp, Homo sapien
acagattggtaggcatgataacttgcatttcta

SEQ ID NO: 444947 - DNA, 33 bp, Homo sapien
tcgattccttttttccagcaaaatatcatttta

SEQ ID NO: 444948 - DNA, 33 bp, Homo sapien
tcgattccttttttccggcaaaatatcatttta

SEQ ID NO: 444949 - DNA, 33 bp, Homo sapien
atcgaatttatgcagactcaatgctctatttta

SEQ ID NO: 444950 - DNA, 33 bp, Homo sapien
atcgaatttatgcagattcaatgctctatttta

SEQ ID NO: 444951 - DNA, 33 bp, Homo sapien
aaaggaactaaaatgcagaaatatccaaaatac

SEQ ID NO: 444952 - DNA, 33 bp, Homo sapien
aaaggaactaaaatgcggaaatatccaaaatac

SEQ ID NO: 444953 - DNA, 33 bp, Homo sapien
gtaataagagactttaagtgcttatgaaaacac

SEQ ID NO: 444954 - DNA, 33 bp, Homo sapien
gtaataagagactttaggtgcttatgaaaacac

SEQ ID NO: 444955 - DNA, 33 bp, Homo sapien
ttagaaatggtggtaccggttaggttcctggtt

SEQ ID NO: 444956 - DNA, 33 bp, Homo sapien
ttagaaatggtggtacgggttaggttcctggtt

SEQ ID NO: 444957 - DNA, 33 bp, Homo sapien
aaggttattatcaacacaatgccaagcagcaga

SEQ ID NO: 444958 - DNA, 33 bp, Homo sapien
aaggttattatcaacagaatgccaagcagcaga

SEQ ID NO: 444959 - DNA, 33 bp, Homo sapien
ctgcattttaaatttcacaagtctcttagtagt

SEQ ID NO: 444960 - DNA, 33 bp, Homo sapien
ctgcattttaaatttcgcaagtctcttagtagt

SEQ ID NO: 444961 - DNA, 33 bp, Homo sapien
ctaaaactttgttaaacgattaccactagaaaa

SEQ ID NO: 444962 - DNA, 33 bp, Homo sapien
ctaaaactttgttaaatgattaccactagaaaa

SEQ ID NO: 444963 - DNA, 33 bp, Homo sapien
gacatgtaatggtgccaatttttgatccacttg

SEQ ID NO: 444964 - DNA, 33 bp, Homo sapien
gacatgtaatggtgccgatttttgatccacttg

SEQ ID NO: 444965 - DNA, 33 bp, Homo sapien
tttgatgtgacaattcaaacctttgtgccattg

SEQ ID NO: 444966 - DNA, 33 bp, Homo sapien
tttgatgtgacaattcgaacctttgtgccattg

SEQ ID NO: 444967 - DNA, 33 bp, Homo sapien
ttttcattatggtctacgatttctatgagtttg

SEQ ID NO: 444968 - DNA, 33 bp, Homo sapien
ttttcattatggtctaggatttctatgagtttg

SEQ ID NO: 444969 - DNA, 33 bp, Homo sapien
atctctggcttcaagacgtattctggtttatgt

SEQ ID NO: 444970 - DNA, 33 bp, Homo sapien
atctctggcttcaagatgtattctggtttatgt

SEQ ID NO: 444971 - DNA, 33 bp, Homo sapien
agatttgttccaagaaatatatgttaaatgatt

SEQ ID NO: 444972 - DNA, 33 bp, Homo sapien
agatttgttccaagaagtatatgttaaatgatt

SEQ ID NO: 444973 - DNA, 33 bp, Homo sapien
tgaagatattccttcacgtctcagtaatcattt

SEQ ID NO: 444974 - DNA, 33 bp, Homo sapien
tgaagatattccttcatgtctcagtaatcattt

SEQ ID NO: 444975 - DNA, 33 bp, Homo sapien
ttcacgttgtatcacactaataacatggcttat

SEQ ID NO: 444976 - DNA, 33 bp, Homo sapien
ttcacgttgtatcacattaataacatggcttat

SEQ ID NO: 444977 - DNA, 33 bp, Homo sapien
taaatatgggtacctacgcctaaaaatgaatac

SEQ ID NO: 444978 - DNA, 33 bp, Homo sapien
taaatatgggtacctatgcctaaaaatgaatac

SEQ ID NO: 444979 - DNA, 33 bp, Homo sapien
atgtaattccacctaaggtctggaaatgctcca

SEQ ID NO: 444980 - DNA, 33 bp, Homo sapien
atgtaattccacctaatgtctggaaatgctcca

SEQ ID NO: 444981 - DNA, 33 bp, Homo sapien
taatccctgaattaaagcgaaaacaggatggta

SEQ ID NO: 444982 - DNA, 33 bp, Homo sapien
taatccctgaattaaatcgaaaacaggatggta

SEQ ID NO: 444983 - DNA, 33 bp, Homo sapien
gtgtggcttaggttctagtggtacatggaagca

SEQ ID NO: 444984 - DNA, 33 bp, Homo sapien
gtgtggcttaggttctggtggtacatggaagca

SEQ ID NO: 444985 - DNA, 33 bp, Homo sapien
aaagaagctagaaagacgtaattattaagtgga

SEQ ID NO: 444986 - DNA, 33 bp, Homo sapien
aaagaagctagaaagatgtaattattaagtgga

SEQ ID NO: 444987 - DNA, 33 bp, Homo sapien
tctcattgatcctggagtattttgacaggcact

SEQ ID NO: 444988 - DNA, 33 bp, Homo sapien
tctcattgatcctggattattttgacaggcact

SEQ ID NO: 444989 - DNA, 33 bp, Homo sapien
ttaattttagtggaaccctgcccacattaacaa

SEQ ID NO: 444990 - DNA, 33 bp, Homo sapien
ttaattttagtggaactctgcccacattaacaa

SEQ ID NO: 444991 - DNA, 33 bp, Homo sapien
gcagtggattcccatacagcaacagagaaataa

SEQ ID NO: 444992 - DNA, 33 bp, Homo sapien
gcagtggattcccatagagcaacagagaaataa

SEQ ID NO: 444993 - DNA, 33 bp, Homo sapien
gcatttgctgcgaagagaaagaaatgaagggac

SEQ ID NO: 444994 - DNA, 33 bp, Homo sapien
gcatttgctgcgaagataaagaaatgaagggac

SEQ ID NO: 444995 - DNA, 33 bp, Homo sapien
tagctcagccaaaggaagttttaagaaaggaag

SEQ ID NO: 444996 - DNA, 33 bp, Homo sapien
tagctcagccaaaggaggttttaagaaaggaag

SEQ ID NO: 444997 - DNA, 33 bp, Homo sapien
cacttaaaaagctcaaagtcctcccaagaacct

SEQ ID NO: 444998 - DNA, 33 bp, Homo sapien
cacttaaaaagctcaaggtcctcccaagaacct

SEQ ID NO: 444999 - DNA, 33 bp, Homo sapien
gttagtaaacgtctgcgatacaaacatatgcaa

SEQ ID NO: 445000 - DNA, 33 bp, Homo sapien
gttagtaaacgtctgctatacaaacatatgcaa

SEQ ID NO: 445001 - DNA, 33 bp, Homo sapien
caatttcagaattataacagtgaaaagtcagga

SEQ ID NO: 445002 - DNA, 33 bp, Homo sapien
caatttcagaattatagcagtgaaaagtcagga

SEQ ID NO: 445003 - DNA, 33 bp, Homo sapien
tctggtaggcatgttaagattgtggcaaaactt

SEQ ID NO: 445004 - DNA, 33 bp, Homo sapien
tctggtaggcatgttaggattgtggcaaaactt

SEQ ID NO: 445005 - DNA, 33 bp, Homo sapien
tcttgtgaactaagaacgagaactcactcgtta

SEQ ID NO: 445006 - DNA, 33 bp, Homo sapien
tcttgtgaactaagaatgagaactcactcgtta

SEQ ID NO: 445007 - DNA, 33 bp, Homo sapien
ggatttcggattggaacagaagcagctcatttc

SEQ ID NO: 445008 - DNA, 33 bp, Homo sapien
ggatttcggattggaagagaagcagctcatttc

SEQ ID NO: 445009 - DNA, 33 bp, Homo sapien
aatggaaagctttagacgagtcctttaaagttt

SEQ ID NO: 445010 - DNA, 33 bp, Homo sapien
aatggaaagctttagatgagtcctttaaagttt

SEQ ID NO: 445011 - DNA, 33 bp, Homo sapien
ctatcttttctttcaagcttttaacttctcatt

SEQ ID NO: 445012 - DNA, 33 bp, Homo sapien
ctatcttttctttcaatcttttaacttctcatt

SEQ ID NO: 445013 - DNA, 33 bp, Homo sapien
tcaccctggttcattccacatctatcatccttc

SEQ ID NO: 445014 - DNA, 33 bp, Homo sapien
tcaccctggttcattcgacatctatcatccttc

SEQ ID NO: 445015 - DNA, 33 bp, Homo sapien
cagggatataattggaaagcattatgctgagct

SEQ ID NO: 445016 - DNA, 33 bp, Homo sapien
cagggatataattggagagcattatgctgagct

SEQ ID NO: 445017 - DNA, 33 bp, Homo sapien
ttccagatagaaggacaccacaattaaattagt

SEQ ID NO: 445018 - DNA, 33 bp, Homo sapien
ttccagatagaaggacgccacaattaaattagt

SEQ ID NO: 445019 - DNA, 33 bp, Homo sapien
aatccctgtgtccagcaaataaaacagatgtcc

SEQ ID NO: 445020 - DNA, 33 bp, Homo sapien
aatccctgtgtccagcgaataaaacagatgtcc

SEQ ID NO: 445021 - DNA, 33 bp, Homo sapien
tccattctacttcaagactgttcagatttgaat

SEQ ID NO: 445022 - DNA, 33 bp, Homo sapien
tccattctacttcaagtctgttcagatttgaat

SEQ ID NO: 445023 - DNA, 33 bp, Homo sapien
ttcagagtgttcagtacgcaatcaaatgttact

SEQ ID NO: 445024 - DNA, 33 bp, Homo sapien
ttcagagtgttcagtatgcaatcaaatgttact

SEQ ID NO: 445025 - DNA, 33 bp, Homo sapien
cattgtttgtaatttacggaaatcaagaataat

SEQ ID NO: 445026 - DNA, 33 bp, Homo sapien
cattgtttgtaatttatggaaatcaagaataat

SEQ ID NO: 445027 - DNA, 33 bp, Homo sapien
tgacattcatggtgtcaaattgtatgaaaaaat

SEQ ID NO: 445028 - DNA, 33 bp, Homo sapien
tgacattcatggtgtccaattgtatgaaaaaat

SEQ ID NO: 445029 - DNA, 33 bp, Homo sapien
tgtttataaagaaatactactgctgcataaatc

SEQ ID NO: 445030 - DNA, 33 bp, Homo sapien
tgtttataaagaaatattactgctgcataaatc

SEQ ID NO: 445031 - DNA, 33 bp, Homo sapien
tctcagaaggtcacaacatggctatgatataat

SEQ ID NO: 445032 - DNA, 33 bp, Homo sapien
tctcagaaggtcacaatatggctatgatataat

SEQ ID NO: 445033 - DNA, 33 bp, Homo sapien
taaaaaataacttcacactcaataagtcacaca

SEQ ID NO: 445034 - DNA, 33 bp, Homo sapien
taaaaaataacttcactctcaataagtcacaca

SEQ ID NO: 445035 - DNA, 33 bp, Homo sapien
ctcaaatatttaacggccattcatactgtgggg

SEQ ID NO: 445036 - DNA, 33 bp, Homo sapien
ctcaaatatttaacggtcattcatactgtgggg

SEQ ID NO: 445037 - DNA, 33 bp, Homo sapien
ttacttaaggctgatacatccaaacaatagaag

SEQ ID NO: 445038 - DNA, 33 bp, Homo sapien
ttacttaaggctgatatatccaaacaatagaag

SEQ ID NO: 445039 - DNA, 33 bp, Homo sapien
tctaatgtttgctctcaagaagcatattttact

SEQ ID NO: 445040 - DNA, 33 bp, Homo sapien
tctaatgtttgctctcgagaagcatattttact

SEQ ID NO: 445041 - DNA, 33 bp, Homo sapien
acagcctacttgcacacattggagtcatcccaa

SEQ ID NO: 445042 - DNA, 33 bp, Homo sapien
acagcctacttgcacatattggagtcatcccaa

SEQ ID NO: 445043 - DNA, 33 bp, Homo sapien
aactctatcaacctaaagcagtttaatctttaa

SEQ ID NO: 445044 - DNA, 33 bp, Homo sapien
aactctatcaacctaaggcagtttaatctttaa

SEQ ID NO: 445045 - DNA, 33 bp, Homo sapien
tactgaatctctcttacggaaataaaatgcact

SEQ ID NO: 445046 - DNA, 33 bp, Homo sapien
tactgaatctctcttatggaaataaaatgcact

SEQ ID NO: 445047 - DNA, 33 bp, Homo sapien
tgccaataatagaaaaacctactgcaaagattt

SEQ ID NO: 445048 - DNA, 33 bp, Homo sapien
tgccaataatagaaaagcctactgcaaagattt

SEQ ID NO: 445049 - DNA, 33 bp, Homo sapien
atgttattattgacaccgattttatggcttaaa

SEQ ID NO: 445050 - DNA, 33 bp, Homo sapien
atgttattattgacactgattttatggcttaaa

SEQ ID NO: 445051 - DNA, 33 bp, Homo sapien
tcttgcaatacgttgtcaactttcttgctatct

SEQ ID NO: 445052 - DNA, 33 bp, Homo sapien
tcttgcaatacgttgttaactttcttgctatct

SEQ ID NO: 445053 - DNA, 33 bp, Homo sapien
ttattaccgacaccataaggatgagacctaatg

SEQ ID NO: 445054 - DNA, 33 bp, Homo sapien
ttattaccgacaccatgaggatgagacctaatg

SEQ ID NO: 445055 - DNA, 33 bp, Homo sapien
cctgaggtaatctgtacaaaagttatcgtatga

SEQ ID NO: 445056 - DNA, 33 bp, Homo sapien
cctgaggtaatctgtataaaagttatcgtatga

SEQ ID NO: 445057 - DNA, 33 bp, Homo sapien
atatgtaaaagtttggaaaaatgatcaactaat

SEQ ID NO: 445058 - DNA, 33 bp, Homo sapien
atatgtaaaagtttgggaaaatgatcaactaat

SEQ ID NO: 445059 - DNA, 33 bp, Homo sapien
acaaattaagagaaaacgcaatacatacgataa

SEQ ID NO: 445060 - DNA, 33 bp, Homo sapien
acaaattaagagaaaatgcaatacatacgataa

SEQ ID NO: 445061 - DNA, 33 bp, Homo sapien
aaacaaaagttccagaaaagagaaaatagatga

SEQ ID NO: 445062 - DNA, 33 bp, Homo sapien
aaacaaaagttccagacaagagaaaatagatga

SEQ ID NO: 445063 - DNA, 33 bp, Homo sapien
ctctaattctttcacactcactatctcttcacc

SEQ ID NO: 445064 - DNA, 33 bp, Homo sapien
ctctaattctttcacattcactatctcttcacc

SEQ ID NO: 445065 - DNA, 33 bp, Homo sapien
catgttggataccaagccttgactctttgtctt

SEQ ID NO: 445066 - DNA, 33 bp, Homo sapien
catgttggataccaagtcttgactctttgtctt

SEQ ID NO: 445067 - DNA, 33 bp, Homo sapien
aagacacaccattaggcagatcagatgtcctca

SEQ ID NO: 445068 - DNA, 33 bp, Homo sapien
aagacacaccattaggtagatcagatgtcctca

SEQ ID NO: 445069 - DNA, 33 bp, Homo sapien
gtgttccagatgagcaaaatccagcatattaaa

SEQ ID NO: 445070 - DNA, 33 bp, Homo sapien
gtgttccagatgagcacaatccagcatattaaa

SEQ ID NO: 445071 - DNA, 33 bp, Homo sapien
cgcatactcagtgctccgacagaactagacaac

SEQ ID NO: 445072 - DNA, 33 bp, Homo sapien
cgcatactcagtgctctgacagaactagacaac

SEQ ID NO: 445073 - DNA, 33 bp, Homo sapien
cactgatgggatcaggaatgattgaccgttttc

SEQ ID NO: 445074 - DNA, 33 bp, Homo sapien
cactgatgggatcagggatgattgaccgttttc

SEQ ID NO: 445075 - DNA, 33 bp, Homo sapien
tacattttgaatgatacggcactagaatgaaca

SEQ ID NO: 445076 - DNA, 33 bp, Homo sapien
tacattttgaatgatatggcactagaatgaaca

SEQ ID NO: 445077 - DNA, 33 bp, Homo sapien
agtacaatttgttgaaacagaaacctagagagt

SEQ ID NO: 445078 - DNA, 33 bp, Homo sapien
agtacaatttgttgaaccagaaacctagagagt

SEQ ID NO: 445079 - DNA, 33 bp, Homo sapien
caatctacatatgcagacatttttattattttt

SEQ ID NO: 445080 - DNA, 33 bp, Homo sapien
caatctacatatgcaggcatttttattattttt

SEQ ID NO: 445081 - DNA, 33 bp, Homo sapien
cttggaaagggcacgtaaaactggagtgttctg

SEQ ID NO: 445082 - DNA, 33 bp, Homo sapien
cttggaaagggcacgtgaaactggagtgttctg

SEQ ID NO: 445083 - DNA, 33 bp, Homo sapien
tctgccaattcacctacgcaagtgtcatgaacg

SEQ ID NO: 445084 - DNA, 33 bp, Homo sapien
tctgccaattcacctatgcaagtgtcatgaacg

SEQ ID NO: 445085 - DNA, 33 bp, Homo sapien
attccagtgataggcagagtaatagctatttca

SEQ ID NO: 445086 - DNA, 33 bp, Homo sapien
attccagtgataggcatagtaatagctatttca

SEQ ID NO: 445087 - DNA, 33 bp, Homo sapien
atgaaaggattgaaacaggactgaacctctctc

SEQ ID NO: 445088 - DNA, 33 bp, Homo sapien
atgaaaggattgaaacgggactgaacctctctc

SEQ ID NO: 445089 - DNA, 33 bp, Homo sapien
gtatttttattgggacggcaagatttgttcaat

SEQ ID NO: 445090 - DNA, 33 bp, Homo sapien
gtatttttattgggactgcaagatttgttcaat

SEQ ID NO: 445091 - DNA, 33 bp, Homo sapien
atttggagacaaaggaataatagccaaagccat

SEQ ID NO: 445092 - DNA, 33 bp, Homo sapien
atttggagacaaaggagtaatagccaaagccat

SEQ ID NO: 445093 - DNA, 33 bp, Homo sapien
gtcagctgcccggaaacagctaagcatgagtta

SEQ ID NO: 445094 - DNA, 33 bp, Homo sapien
gtcagctgcccggaaagagctaagcatgagtta

SEQ ID NO: 445095 - DNA, 33 bp, Homo sapien
ccagtctaaacttgagaaaaatgtaggagtgtg

SEQ ID NO: 445096 - DNA, 33 bp, Homo sapien
ccagtctaaacttgaggaaaatgtaggagtgtg

SEQ ID NO: 445097 - DNA, 33 bp, Homo sapien
aaaatcagatcgcttcactggagaattattcta

SEQ ID NO: 445098 - DNA, 33 bp, Homo sapien
aaaatcagatcgcttcgctggagaattattcta

SEQ ID NO: 445099 - DNA, 33 bp, Homo sapien
gcacctgatattaagcagccaaacattggatac

SEQ ID NO: 445100 - DNA, 33 bp, Homo sapien
gcacctgatattaagcggccaaacattggatac

SEQ ID NO: 445101 - DNA, 33 bp, Homo sapien
ctgggttcatcttccgaccaataacaatgaggc

SEQ ID NO: 445102 - DNA, 33 bp, Homo sapien
ctgggttcatcttccggccaataacaatgaggc

SEQ ID NO: 445103 - DNA, 33 bp, Homo sapien
gaccagtggagcactcactactggtgaactata

SEQ ID NO: 445104 - DNA, 33 bp, Homo sapien
gaccagtggagcactcgctactggtgaactata

SEQ ID NO: 445105 - DNA, 33 bp, Homo sapien
agggtaaatgaatatgcaattttgatgaacact

SEQ ID NO: 445106 - DNA, 33 bp, Homo sapien
agggtaaatgaatatgtaattttgatgaacact

SEQ ID NO: 445107 - DNA, 33 bp, Homo sapien
tctgtgttacttggaacataaagcaaaagcatc

SEQ ID NO: 445108 - DNA, 33 bp, Homo sapien
tctgtgttacttggaatataaagcaaaagcatc

SEQ ID NO: 445109 - DNA, 33 bp, Homo sapien
attctttttcacattacatcacaagaagttaaa

SEQ ID NO: 445110 - DNA, 33 bp, Homo sapien
attctttttcacattatatcacaagaagttaaa

SEQ ID NO: 445111 - DNA, 33 bp, Homo sapien
aaatgagcattggtaacaggaaaaaaatgaaga

SEQ ID NO: 445112 - DNA, 33 bp, Homo sapien
aaatgagcattggtaagaggaaaaaaatgaaga

SEQ ID NO: 445113 - DNA, 33 bp, Homo sapien
ataattcaagaaaaagaaacatcgaaagttata

SEQ ID NO: 445114 - DNA, 33 bp, Homo sapien
ataattcaagaaaaagtaacatcgaaagttata

SEQ ID NO: 445115 - DNA, 33 bp, Homo sapien
aaaatggtacagaaaacttggaacacagtttgg

SEQ ID NO: 445116 - DNA, 33 bp, Homo sapien
aaaatggtacagaaaatttggaacacagtttgg

SEQ ID NO: 445117 - DNA, 33 bp, Homo sapien
cctggtgaaaatgatgcaaaacttaaggtgcat

SEQ ID NO: 445118 - DNA, 33 bp, Homo sapien
cctggtgaaaatgatggaaaacttaaggtgcat

SEQ ID NO: 445119 - DNA, 33 bp, Homo sapien
aatctactgtaacaatcagctcttaagtgtata

SEQ ID NO: 445120 - DNA, 33 bp, Homo sapien
aatctactgtaacaattagctcttaagtgtata

SEQ ID NO: 445121 - DNA, 33 bp, Homo sapien
aagttgcagaaaaatgcataaagtatcatacca

SEQ ID NO: 445122 - DNA, 33 bp, Homo sapien
aagttgcagaaaaatggataaagtatcatacca

SEQ ID NO: 445123 - DNA, 33 bp, Homo sapien
gtgctgtgtttggagtgaaaccctcgatctctg

SEQ ID NO: 445124 - DNA, 33 bp, Homo sapien
gtgctgtgtttggagttaaaccctcgatctctg

SEQ ID NO: 445125 - DNA, 33 bp, Homo sapien
catgtacgtgtttgtaagggaagggaaacagaa

SEQ ID NO: 445126 - DNA, 33 bp, Homo sapien
catgtacgtgtttgtaggggaagggaaacagaa

SEQ ID NO: 445127 - DNA, 33 bp, Homo sapien
cttggcctgattaagcagaaaagctgtagtctg

SEQ ID NO: 445128 - DNA, 33 bp, Homo sapien
cttggcctgattaagcggaaaagctgtagtctg

SEQ ID NO: 445129 - DNA, 33 bp, Homo sapien
aaagacctgttgatccagattgtgtaagaatta

SEQ ID NO: 445130 - DNA, 33 bp, Homo sapien
aaagacctgttgatccggattgtgtaagaatta

SEQ ID NO: 445131 - DNA, 33 bp, Homo sapien
gttgttttccaagttgaataaaagggataaacc

SEQ ID NO: 445132 - DNA, 33 bp, Homo sapien
gttgttttccaagttggataaaagggataaacc

SEQ ID NO: 445133 - DNA, 33 bp, Homo sapien
gtaataaaccttcacacgtatcctcaaacctta

SEQ ID NO: 445134 - DNA, 33 bp, Homo sapien
gtaataaaccttcacatgtatcctcaaacctta

SEQ ID NO: 445135 - DNA, 33 bp, Homo sapien
gattcagaaactggcacatcaactttaatagaa

SEQ ID NO: 445136 - DNA, 33 bp, Homo sapien
gattcagaaactggcatatcaactttaatagaa

SEQ ID NO: 445137 - DNA, 33 bp, Homo sapien
aatttgtagtagaaacggagattatttctccac

SEQ ID NO: 445138 - DNA, 33 bp, Homo sapien
aatttgtagtagaaactgagattatttctccac

SEQ ID NO: 445139 - DNA, 33 bp, Homo sapien
ttgcgaaagtcaatcacaagactttttttcccc

SEQ ID NO: 445140 - DNA, 33 bp, Homo sapien
ttgcgaaagtcaatcagaagactttttttcccc

SEQ ID NO: 445141 - DNA, 33 bp, Homo sapien
tatgaaaattttatgacaatgcaactgagtata

SEQ ID NO: 445142 - DNA, 33 bp, Homo sapien
tatgaaaattttatgataatgcaactgagtata

SEQ ID NO: 445143 - DNA, 33 bp, Homo sapien
gttattacatcatgccagcttcctagaagatat

SEQ ID NO: 445144 - DNA, 33 bp, Homo sapien
gttattacatcatgccggcttcctagaagatat

SEQ ID NO: 445145 - DNA, 33 bp, Homo sapien
ttccagatttcgattacgtgtagcaactctgtg

SEQ ID NO: 445146 - DNA, 33 bp, Homo sapien
ttccagatttcgattatgtgtagcaactctgtg

SEQ ID NO: 445147 - DNA, 33 bp, Homo sapien
agtcttatctcaccccagactaaaaccctgtaa

SEQ ID NO: 445148 - DNA, 33 bp, Homo sapien
agtcttatctcaccccggactaaaaccctgtaa

SEQ ID NO: 445149 - DNA, 33 bp, Homo sapien
atgggaacttaaaggacgaattgagttagggtg

SEQ ID NO: 445150 - DNA, 33 bp, Homo sapien
atgggaacttaaaggatgaattgagttagggtg

SEQ ID NO: 445151 - DNA, 33 bp, Homo sapien
aggctactcagaaaaaaacggattctgaactca

SEQ ID NO: 445152 - DNA, 33 bp, Homo sapien
aggctactcagaaaaacacggattctgaactca

SEQ ID NO: 445153 - DNA, 33 bp, Homo sapien
atactgttgcatataaatgtttttgctgtgaga

SEQ ID NO: 445154 - DNA, 33 bp, Homo sapien
atactgttgcatataattgtttttgctgtgaga

SEQ ID NO: 445155 - DNA, 33 bp, Homo sapien
ttgactactgatttaaaacagatatacaattta

SEQ ID NO: 445156 - DNA, 33 bp, Homo sapien
ttgactactgatttaagacagatatacaattta

SEQ ID NO: 445157 - DNA, 33 bp, Homo sapien
ctttttcacgttgttacggtgtcttctcacaac

SEQ ID NO: 445158 - DNA, 33 bp, Homo sapien
ctttttcacgttgttatggtgtcttctcacaac

SEQ ID NO: 445159 - DNA, 33 bp, Homo sapien
aggtgtccaggtagtcaatcaggacaacaagct

SEQ ID NO: 445160 - DNA, 33 bp, Homo sapien
aggtgtccaggtagtcgatcaggacaacaagct

SEQ ID NO: 445161 - DNA, 33 bp, Homo sapien
ccataaagagacagaaaacttttgttcagtgct

SEQ ID NO: 445162 - DNA, 33 bp, Homo sapien
ccataaagagacagaagacttttgttcagtgct

SEQ ID NO: 445163 - DNA, 33 bp, Homo sapien
aagtaagttgcataaaatgttgacctagactct

SEQ ID NO: 445164 - DNA, 33 bp, Homo sapien
aagtaagttgcataaactgttgacctagactct

SEQ ID NO: 445165 - DNA, 33 bp, Homo sapien
ctgcaaaacatctgcaagtaaagctgccataag

SEQ ID NO: 445166 - DNA, 33 bp, Homo sapien
ctgcaaaacatctgcacgtaaagctgccataag

SEQ ID NO: 445167 - DNA, 33 bp, Homo sapien
ggtatgagtcttctgaaacaaggatacgcagac

SEQ ID NO: 445168 - DNA, 33 bp, Homo sapien
ggtatgagtcttctgagacaaggatacgcagac

SEQ ID NO: 445169 - DNA, 33 bp, Homo sapien
atcagaaaagccttaactattaccagaaagcct

SEQ ID NO: 445170 - DNA, 33 bp, Homo sapien
atcagaaaagccttaattattaccagaaagcct

SEQ ID NO: 445171 - DNA, 33 bp, Homo sapien
agattttcaaatgtaaccattatctggaatgtt

SEQ ID NO: 445172 - DNA, 33 bp, Homo sapien
agattttcaaatgtaatcattatctggaatgtt

SEQ ID NO: 445173 - DNA, 33 bp, Homo sapien
tttttcccgcatttcactccttacatcctttgt

SEQ ID NO: 445174 - DNA, 33 bp, Homo sapien
tttttcccgcatttcattccttacatcctttgt

SEQ ID NO: 445175 - DNA, 33 bp, Homo sapien
caagctgaacctgttacgagtttgcagctctac

SEQ ID NO: 445176 - DNA, 33 bp, Homo sapien
caagctgaacctgttaggagtttgcagctctac

SEQ ID NO: 445177 - DNA, 33 bp, Homo sapien
tctctcaatctagaaacctctttgctattccta

SEQ ID NO: 445178 - DNA, 33 bp, Homo sapien
tctctcaatctagaaatctctttgctattccta

SEQ ID NO: 445179 - DNA, 33 bp, Homo sapien
ttgacaaaaagattaaaaaaccttcatggactt

SEQ ID NO: 445180 - DNA, 33 bp, Homo sapien
ttgacaaaaagattaagaaaccttcatggactt

SEQ ID NO: 445181 - DNA, 33 bp, Homo sapien
ctataaaggcattaaaacaatcattttctattg

SEQ ID NO: 445182 - DNA, 33 bp, Homo sapien
ctataaaggcattaaaccaatcattttctattg

SEQ ID NO: 445183 - DNA, 33 bp, Homo sapien
atttatcaaatttctaccatgttccagccgtga

SEQ ID NO: 445184 - DNA, 33 bp, Homo sapien
atttatcaaatttctatcatgttccagccgtga

SEQ ID NO: 445185 - DNA, 33 bp, Homo sapien
tctggaagctaattgaaagctagaaatttggaa

SEQ ID NO: 445186 - DNA, 33 bp, Homo sapien
tctggaagctaattgacagctagaaatttggaa

SEQ ID NO: 445187 - DNA, 33 bp, Homo sapien
tctggctattctgtaccattcaaataacaactt

SEQ ID NO: 445188 - DNA, 33 bp, Homo sapien
tctggctattctgtactattcaaataacaactt

SEQ ID NO: 445189 - DNA, 33 bp, Homo sapien
aacagaaaacatttccaaagacttataatatca

SEQ ID NO: 445190 - DNA, 33 bp, Homo sapien
aacagaaaacatttccgaagacttataatatca

SEQ ID NO: 445191 - DNA, 33 bp, Homo sapien
tgtattccacagaaaccatattgctgcataaca

SEQ ID NO: 445192 - DNA, 33 bp, Homo sapien
tgtattccacagaaactatattgctgcataaca

SEQ ID NO: 445193 - DNA, 33 bp, Homo sapien
tagattattggcttgagtaccttacttctaatg

SEQ ID NO: 445194 - DNA, 33 bp, Homo sapien
tagattattggcttgattaccttacttctaatg

SEQ ID NO: 445195 - DNA, 33 bp, Homo sapien
gactttcctaagtacagagggattttttggatt

SEQ ID NO: 445196 - DNA, 33 bp, Homo sapien
gactttcctaagtacatagggattttttggatt

SEQ ID NO: 445197 - DNA, 33 bp, Homo sapien
ttgtaaatatttgaaaatcaagcttattttgtt

SEQ ID NO: 445198 - DNA, 33 bp, Homo sapien
ttgtaaatatttgaaagtcaagcttattttgtt

SEQ ID NO: 445199 - DNA, 33 bp, Homo sapien
tctagaatccatacctaagcgagaagcagcagc

SEQ ID NO: 445200 - DNA, 33 bp, Homo sapien
tctagaatccatacctgagcgagaagcagcagc

SEQ ID NO: 445201 - DNA, 33 bp, Homo sapien
tctcatcatctcaaacacaagtagtaaaacaaa

SEQ ID NO: 445202 - DNA, 33 bp, Homo sapien
tctcatcatctcaaacgcaagtagtaaaacaaa

SEQ ID NO: 445203 - DNA, 33 bp, Homo sapien
atattcagtgttcagaagacctaaactttcaag

SEQ ID NO: 445204 - DNA, 33 bp, Homo sapien
atattcagtgttcagaggacctaaactttcaag

SEQ ID NO: 445205 - DNA, 33 bp, Homo sapien
ggcacattagaggggacggttaaagatatcctc

SEQ ID NO: 445206 - DNA, 33 bp, Homo sapien
ggcacattagaggggatggttaaagatatcctc

SEQ ID NO: 445207 - DNA, 33 bp, Homo sapien
ggtaattatatccaaaatgctgtttccatgctg

SEQ ID NO: 445208 - DNA, 33 bp, Homo sapien
ggtaattatatccaaagtgctgtttccatgctg

SEQ ID NO: 445209 - DNA, 33 bp, Homo sapien
cactaatgaaagcataacttaattaatgcactt

SEQ ID NO: 445210 - DNA, 33 bp, Homo sapien
cactaatgaaagcatatcttaattaatgcactt

SEQ ID NO: 445211 - DNA, 33 bp, Homo sapien
tgctacctcgggatctcactcttagtaagaagt

SEQ ID NO: 445212 - DNA, 33 bp, Homo sapien
tgctacctcgggatctgactcttagtaagaagt

SEQ ID NO: 445213 - DNA, 33 bp, Homo sapien
gaaatctttgggaataagagtctgacctgtgca

SEQ ID NO: 445214 - DNA, 33 bp, Homo sapien
gaaatctttgggaataggagtctgacctgtgca

SEQ ID NO: 445215 - DNA, 33 bp, Homo sapien
tgttatgagcctgttacagtaatctaggtagaa

SEQ ID NO: 445216 - DNA, 33 bp, Homo sapien
tgttatgagcctgttatagtaatctaggtagaa

SEQ ID NO: 445217 - DNA, 33 bp, Homo sapien
attttggatttatgaacgtagaaaggaaagttg

SEQ ID NO: 445218 - DNA, 33 bp, Homo sapien
attttggatttatgaatgtagaaaggaaagttg

SEQ ID NO: 445219 - DNA, 33 bp, Homo sapien
tggaaatggagagaaaaaactggatccaatgta

SEQ ID NO: 445220 - DNA, 33 bp, Homo sapien
tggaaatggagagaaataactggatccaatgta

SEQ ID NO: 445221 - DNA, 33 bp, Homo sapien
aagatttgtattcaacagttcagcctttctcat

SEQ ID NO: 445222 - DNA, 33 bp, Homo sapien
aagatttgtattcaaccgttcagcctttctcat

SEQ ID NO: 445223 - DNA, 33 bp, Homo sapien
taatctttagttctgcaaatattgtatctgctg

SEQ ID NO: 445224 - DNA, 33 bp, Homo sapien
taatctttagttctgcgaatattgtatctgctg

SEQ ID NO: 445225 - DNA, 33 bp, Homo sapien
atgaggtcacaagtcaacttagcaagtctacac

SEQ ID NO: 445226 - DNA, 33 bp, Homo sapien
atgaggtcacaagtcagcttagcaagtctacac

SEQ ID NO: 445227 - DNA, 33 bp, Homo sapien
aaaacgtttaaatgaaatatgagcctggaataa

SEQ ID NO: 445228 - DNA, 33 bp, Homo sapien
aaaacgtttaaatgaactatgagcctggaataa

SEQ ID NO: 445229 - DNA, 33 bp, Homo sapien
aacaatagactactacccctttgtatgaatata

SEQ ID NO: 445230 - DNA, 33 bp, Homo sapien
aacaatagactactactcctttgtatgaatata

SEQ ID NO: 445231 - DNA, 33 bp, Homo sapien
tactactctggtggtaactatatttaaagcata

SEQ ID NO: 445232 - DNA, 33 bp, Homo sapien
tactactctggtggtatctatatttaaagcata

SEQ ID NO: 445233 - DNA, 33 bp, Homo sapien
gctgttttcttttgtcactctgtacctaactct

SEQ ID NO: 445234 - DNA, 33 bp, Homo sapien
gctgttttcttttgtcgctctgtacctaactct

SEQ ID NO: 445235 - DNA, 33 bp, Homo sapien
catttagaaattatgaaactgaagtgtattaca

SEQ ID NO: 445236 - DNA, 33 bp, Homo sapien
catttagaaattatgagactgaagtgtattaca

SEQ ID NO: 445237 - DNA, 33 bp, Homo sapien
tatataaaatagccttaaaaatacatcacttaa

SEQ ID NO: 445238 - DNA, 33 bp, Homo sapien
tatataaaatagccttgaaaatacatcacttaa

SEQ ID NO: 445239 - DNA, 33 bp, Homo sapien
aagtagacttttcaaacaaatcatgtgctcatt

SEQ ID NO: 445240 - DNA, 33 bp, Homo sapien
aagtagacttttcaaataaatcatgtgctcatt

SEQ ID NO: 445241 - DNA, 33 bp, Homo sapien
ttccttttttactccactatttcggcattaaat

SEQ ID NO: 445242 - DNA, 33 bp, Homo sapien
ttccttttttactccattatttcggcattaaat

SEQ ID NO: 445243 - DNA, 33 bp, Homo sapien
tgcttggtggtcatttcaaacagataaattacc

SEQ ID NO: 445244 - DNA, 33 bp, Homo sapien
tgcttggtggtcattttaaacagataaattacc

SEQ ID NO: 445245 - DNA, 33 bp, Homo sapien
tttccatttcatggccaaaataaaggctattct

SEQ ID NO: 445246 - DNA, 33 bp, Homo sapien
tttccatttcatggccgaaataaaggctattct

SEQ ID NO: 445247 - DNA, 33 bp, Homo sapien
ttcgaaatttattgcaagtaaagcagaaacatg

SEQ ID NO: 445248 - DNA, 33 bp, Homo sapien
ttcgaaatttattgcaggtaaagcagaaacatg

SEQ ID NO: 445249 - DNA, 33 bp, Homo sapien
cataactgtttcagccaattcacatctatacat

SEQ ID NO: 445250 - DNA, 33 bp, Homo sapien
cataactgtttcagccgattcacatctatacat

SEQ ID NO: 445251 - DNA, 33 bp, Homo sapien
aaggcaaaatggtgcagcaactataaaaaactg

SEQ ID NO: 445252 - DNA, 33 bp, Homo sapien
aaggcaaaatggtgcatcaactataaaaaactg

SEQ ID NO: 445253 - DNA, 33 bp, Homo sapien
agttaatgatacatctaaaaaaacattcattat

SEQ ID NO: 445254 - DNA, 33 bp, Homo sapien
agttaatgatacatctgaaaaaacattcattat

SEQ ID NO: 445255 - DNA, 33 bp, Homo sapien
cgtaggtttcttcgaccatgaaaaaagaggaga

SEQ ID NO: 445256 - DNA, 33 bp, Homo sapien
cgtaggtttcttcgactatgaaaaaagaggaga

SEQ ID NO: 445257 - DNA, 33 bp, Homo sapien
ctcttttagaaataccaacacagagtgagagat

SEQ ID NO: 445258 - DNA, 33 bp, Homo sapien
ctcttttagaaataccgacacagagtgagagat

SEQ ID NO: 445259 - DNA, 33 bp, Homo sapien
gtgagaatagtactcaataggtccttgctcaac

SEQ ID NO: 445260 - DNA, 33 bp, Homo sapien
gtgagaatagtactcagtaggtccttgctcaac

SEQ ID NO: 445261 - DNA, 33 bp, Homo sapien
tatgcatcagatacaaactaaatatttcagttt

SEQ ID NO: 445262 - DNA, 33 bp, Homo sapien
tatgcatcagatacaacctaaatatttcagttt

SEQ ID NO: 445263 - DNA, 33 bp, Homo sapien
cacaggcaagagagacaacgtggtagcctggcg

SEQ ID NO: 445264 - DNA, 33 bp, Homo sapien
cacaggcaagagagacgacgtggtagcctggcg

SEQ ID NO: 445265 - DNA, 33 bp, Homo sapien
agagaggaaagcggaaaaataagtcttgtggac

SEQ ID NO: 445266 - DNA, 33 bp, Homo sapien
agagaggaaagcggaagaataagtcttgtggac

SEQ ID NO: 445267 - DNA, 33 bp, Homo sapien
cgaccgaaacagtagcaccagtccacaagactt

SEQ ID NO: 445268 - DNA, 33 bp, Homo sapien
cgaccgaaacagtagcgccagtccacaagactt

SEQ ID NO: 445269 - DNA, 33 bp, Homo sapien
gtaacctgttcctatgcagcaaagagatggtgc

SEQ ID NO: 445270 - DNA, 33 bp, Homo sapien
gtaacctgttcctatggagcaaagagatggtgc

SEQ ID NO: 445271 - DNA, 33 bp, Homo sapien
ttcattagtcataaaacttaccccagaactttg

SEQ ID NO: 445272 - DNA, 33 bp, Homo sapien
ttcattagtcataaaatttaccccagaactttg

SEQ ID NO: 445273 - DNA, 33 bp, Homo sapien
cgctgattaccaatgaatattagttggatgaat

SEQ ID NO: 445274 - DNA, 33 bp, Homo sapien
cgctgattaccaatgagtattagttggatgaat

SEQ ID NO: 445275 - DNA, 33 bp, Homo sapien
gccatcctgattttcaagtctattgttgctata

SEQ ID NO: 445276 - DNA, 33 bp, Homo sapien
gccatcctgattttcaggtctattgttgctata

SEQ ID NO: 445277 - DNA, 33 bp, Homo sapien
tagtacacttcctgcaggttgatatctccagaa

SEQ ID NO: 445278 - DNA, 33 bp, Homo sapien
tagtacacttcctgcatgttgatatctccagaa

SEQ ID NO: 445279 - DNA, 33 bp, Homo sapien
agaggcacatcaattcaaatttatgtcatattt

SEQ ID NO: 445280 - DNA, 33 bp, Homo sapien
agaggcacatcaattcgaatttatgtcatattt

SEQ ID NO: 445281 - DNA, 33 bp, Homo sapien
ttcccctacgtgatgactaaaagaaaaacacca

SEQ ID NO: 445282 - DNA, 33 bp, Homo sapien
ttcccctacgtgatgattaaaagaaaaacacca

SEQ ID NO: 445283 - DNA, 33 bp, Homo sapien
aatattggaaaataaaggtggatgtggtgtttt

SEQ ID NO: 445284 - DNA, 33 bp, Homo sapien
aatattggaaaataaatgtggatgtggtgtttt

SEQ ID NO: 445285 - DNA, 33 bp, Homo sapien
ctcaaaatgtggagtaagtttgattattaaatt

SEQ ID NO: 445286 - DNA, 33 bp, Homo sapien
ctcaaaatgtggagtatgtttgattattaaatt

SEQ ID NO: 445287 - DNA, 33 bp, Homo sapien
gaacatagaaactatacaccaggcagctatttt

SEQ ID NO: 445288 - DNA, 33 bp, Homo sapien
gaacatagaaactatagaccaggcagctatttt

SEQ ID NO: 445289 - DNA, 33 bp, Homo sapien
gtgattatctccacaacgaatctcagtatatat

SEQ ID NO: 445290 - DNA, 33 bp, Homo sapien
gtgattatctccacaatgaatctcagtatatat

SEQ ID NO: 445291 - DNA, 33 bp, Homo sapien
tgaatgagaagtaacaaattatccaacattatt

SEQ ID NO: 445292 - DNA, 33 bp, Homo sapien
tgaatgagaagtaacagattatccaacattatt

SEQ ID NO: 445293 - DNA, 33 bp, Homo sapien
cagcactgaacacttaaatccaaagctattttc

SEQ ID NO: 445294 - DNA, 33 bp, Homo sapien
cagcactgaacacttacatccaaagctattttc

SEQ ID NO: 445295 - DNA, 33 bp, Homo sapien
gatgtcttgcaattaaaccaaaagtgtgccagc

SEQ ID NO: 445296 - DNA, 33 bp, Homo sapien
gatgtcttgcaattaagccaaaagtgtgccagc

SEQ ID NO: 445297 - DNA, 33 bp, Homo sapien
caattggcctggttacaaaataatgaaaattat

SEQ ID NO: 445298 - DNA, 33 bp, Homo sapien
caattggcctggttacgaaataatgaaaattat

SEQ ID NO: 445299 - DNA, 33 bp, Homo sapien
gggcacagatgtcttaaaaaatctaacaagaat

SEQ ID NO: 445300 - DNA, 33 bp, Homo sapien
gggcacagatgtcttacaaaatctaacaagaat

SEQ ID NO: 445301 - DNA, 33 bp, Homo sapien
caactgaaaatgcatggcatacttattttaaat

SEQ ID NO: 445302 - DNA, 33 bp, Homo sapien
caactgaaaatgcatgtcatacttattttaaat

SEQ ID NO: 445303 - DNA, 33 bp, Homo sapien
gtgtcatcatctcaaaaaggaaagcctctgcac

SEQ ID NO: 445304 - DNA, 33 bp, Homo sapien
gtgtcatcatctcaaagaggaaagcctctgcac

SEQ ID NO: 445305 - DNA, 33 bp, Homo sapien
cctcatgcaatgcagaacctttacaagaaataa

SEQ ID NO: 445306 - DNA, 33 bp, Homo sapien
cctcatgcaatgcagaccctttacaagaaataa

SEQ ID NO: 445307 - DNA, 33 bp, Homo sapien
gaaaagcaaatgcctgaaaagttcctgccatta

SEQ ID NO: 445308 - DNA, 33 bp, Homo sapien
gaaaagcaaatgcctggaaagttcctgccatta

SEQ ID NO: 445309 - DNA, 33 bp, Homo sapien
cttccattcaactttgaacaaaaccctaactcc

SEQ ID NO: 445310 - DNA, 33 bp, Homo sapien
cttccattcaactttggacaaaaccctaactcc

SEQ ID NO: 445311 - DNA, 33 bp, Homo sapien
tctactgtcagtaggacgtcttgctttatgaca

SEQ ID NO: 445312 - DNA, 33 bp, Homo sapien
tctactgtcagtaggatgtcttgctttatgaca

SEQ ID NO: 445313 - DNA, 33 bp, Homo sapien
ttttgtcctgtatactaacaaattgaaattata

SEQ ID NO: 445314 - DNA, 33 bp, Homo sapien
ttttgtcctgtatactcacaaattgaaattata

SEQ ID NO: 445315 - DNA, 33 bp, Homo sapien
tcactgtatagccaagaatcacttacaatagca

SEQ ID NO: 445316 - DNA, 33 bp, Homo sapien
tcactgtatagccaagcatcacttacaatagca

SEQ ID NO: 445317 - DNA, 33 bp, Homo sapien
agtttaggttagataacgtatgctaaatgcttc

SEQ ID NO: 445318 - DNA, 33 bp, Homo sapien
agtttaggttagataatgtatgctaaatgcttc

SEQ ID NO: 445319 - DNA, 33 bp, Homo sapien
ggattgtgttcttgaactcattctcggctagaa

SEQ ID NO: 445320 - DNA, 33 bp, Homo sapien
ggattgtgttcttgaagtcattctcggctagaa

SEQ ID NO: 445321 - DNA, 33 bp, Homo sapien
taatagagtacattcaagtatgagctatgttcc

SEQ ID NO: 445322 - DNA, 33 bp, Homo sapien
taatagagtacattcaggtatgagctatgttcc

SEQ ID NO: 445323 - DNA, 33 bp, Homo sapien
aatcttttgaagtctcaatgttctcaactgtaa

SEQ ID NO: 445324 - DNA, 33 bp, Homo sapien
aatcttttgaagtctcgatgttctcaactgtaa

SEQ ID NO: 445325 - DNA, 33 bp, Homo sapien
taactggcttttttaaaggtgtatggtctagaa

SEQ ID NO: 445326 - DNA, 33 bp, Homo sapien
taactggcttttttaatggtgtatggtctagaa

SEQ ID NO: 445327 - DNA, 33 bp, Homo sapien
agaggtcaagtagtaaacagatgcagagaacct

SEQ ID NO: 445328 - DNA, 33 bp, Homo sapien
agaggtcaagtagtaagcagatgcagagaacct

SEQ ID NO: 445329 - DNA, 33 bp, Homo sapien
atggtcagctgagaaactgtcacaggtcctcaa

SEQ ID NO: 445330 - DNA, 33 bp, Homo sapien
atggtcagctgagaaattgtcacaggtcctcaa

SEQ ID NO: 445331 - DNA, 33 bp, Homo sapien
aatgtaaattaccagacatacatacagcacctt

SEQ ID NO: 445332 - DNA, 33 bp, Homo sapien
aatgtaaattaccagagatacatacagcacctt

SEQ ID NO: 445333 - DNA, 33 bp, Homo sapien
agaaaaagttggagaacgtatgaagagagacaa

SEQ ID NO: 445334 - DNA, 33 bp, Homo sapien
agaaaaagttggagaatgtatgaagagagacaa

SEQ ID NO: 445335 - DNA, 33 bp, Homo sapien
tttgtgttttactttacgtggtctaaaattttg

SEQ ID NO: 445336 - DNA, 33 bp, Homo sapien
tttgtgttttactttatgtggtctaaaattttg

SEQ ID NO: 445337 - DNA, 33 bp, Homo sapien
aaatacacacgcaacagtatatgtacaaaaata

SEQ ID NO: 445338 - DNA, 33 bp, Homo sapien
aaatacacacgcaacattatatgtacaaaaata

SEQ ID NO: 445339 - DNA, 33 bp, Homo sapien
atacaagtctttgttacgatcatttaaatacac

SEQ ID NO: 445340 - DNA, 33 bp, Homo sapien
atacaagtctttgttatgatcatttaaatacac

SEQ ID NO: 445341 - DNA, 33 bp, Homo sapien
ttgcttcactaccctccccagtagacaaaatca

SEQ ID NO: 445342 - DNA, 33 bp, Homo sapien
ttgcttcactaccctctccagtagacaaaatca

SEQ ID NO: 445343 - DNA, 33 bp, Homo sapien
ttttatgtggttacgacgactaatgttcttaaa

SEQ ID NO: 445344 - DNA, 33 bp, Homo sapien
ttttatgtggttacgatgactaatgttcttaaa

SEQ ID NO: 445345 - DNA, 33 bp, Homo sapien
ctcattccaaagaagaccaaccagctatcactt

SEQ ID NO: 445346 - DNA, 33 bp, Homo sapien
ctcattccaaagaagatcaaccagctatcactt

SEQ ID NO: 445347 - DNA, 33 bp, Homo sapien
agcttcttctattaaacgtgttggagagaagaa

SEQ ID NO: 445348 - DNA, 33 bp, Homo sapien
agcttcttctattaaatgtgttggagagaagaa

SEQ ID NO: 445349 - DNA, 33 bp, Homo sapien
ctttctgtcaaagtcaacgttctcccattatca

SEQ ID NO: 445350 - DNA, 33 bp, Homo sapien
ctttctgtcaaagtcagcgttctcccattatca

SEQ ID NO: 445351 - DNA, 33 bp, Homo sapien
gtaggtagccactcaactccactgtctccacaa

SEQ ID NO: 445352 - DNA, 33 bp, Homo sapien
gtaggtagccactcaagtccactgtctccacaa

SEQ ID NO: 445353 - DNA, 33 bp, Homo sapien
ttgactagagtcatacaatccttcttcttcatc

SEQ ID NO: 445354 - DNA, 33 bp, Homo sapien
ttgactagagtcatacgatccttcttcttcatc

SEQ ID NO: 445355 - DNA, 33 bp, Homo sapien
atccagggtatgtggccacgatcaatgccaatt

SEQ ID NO: 445356 - DNA, 33 bp, Homo sapien
atccagggtatgtggctacgatcaatgccaatt

SEQ ID NO: 445357 - DNA, 33 bp, Homo sapien
gtgttttgatgtaggcactatataaacaagaag

SEQ ID NO: 445358 - DNA, 33 bp, Homo sapien
gtgttttgatgtaggcgctatataaacaagaag

SEQ ID NO: 445359 - DNA, 33 bp, Homo sapien
ggggaatggtaaattgccaaaactgctatactc

SEQ ID NO: 445360 - DNA, 33 bp, Homo sapien
ggggaatggtaaattgtcaaaactgctatactc

SEQ ID NO: 445361 - DNA, 33 bp, Homo sapien
ggcaagcatttctggcaattagattattgttta

SEQ ID NO: 445362 - DNA, 33 bp, Homo sapien
ggcaagcatttctggcgattagattattgttta

SEQ ID NO: 445363 - DNA, 33 bp, Homo sapien
ttgtttaagaaagctaaataatagatggtccaa

SEQ ID NO: 445364 - DNA, 33 bp, Homo sapien
ttgtttaagaaagctacataatagatggtccaa

SEQ ID NO: 445365 - DNA, 33 bp, Homo sapien
acttacttcagtttcagatcagctcctcatgat

SEQ ID NO: 445366 - DNA, 33 bp, Homo sapien
acttacttcagtttcatatcagctcctcatgat

SEQ ID NO: 445367 - DNA, 33 bp, Homo sapien
ttttaatgctctttaaggagagtaagttacagt

SEQ ID NO: 445368 - DNA, 33 bp, Homo sapien
ttttaatgctctttaatgagagtaagttacagt

SEQ ID NO: 445369 - DNA, 33 bp, Homo sapien
gaaaattacaatactcacaattaacaaattaat

SEQ ID NO: 445370 - DNA, 33 bp, Homo sapien
gaaaattacaatactcgcaattaacaaattaat

SEQ ID NO: 445371 - DNA, 33 bp, Homo sapien
catacaacaaccttacaagttgcaaaagaattg

SEQ ID NO: 445372 - DNA, 33 bp, Homo sapien
catacaacaaccttaccagttgcaaaagaattg

SEQ ID NO: 445373 - DNA, 33 bp, Homo sapien
ttgggtaccttggcagcccttccacacttttaa

SEQ ID NO: 445374 - DNA, 33 bp, Homo sapien
ttgggtaccttggcagtccttccacacttttaa

SEQ ID NO: 445375 - DNA, 33 bp, Homo sapien
gctaaaaaataaggaggcacttcaaaagagaac

SEQ ID NO: 445376 - DNA, 33 bp, Homo sapien
gctaaaaaataaggagtcacttcaaaagagaac

SEQ ID NO: 445377 - DNA, 33 bp, Homo sapien
atagactgaccaatgaataaattagtgaaaaaa

SEQ ID NO: 445378 - DNA, 33 bp, Homo sapien
atagactgaccaatgagtaaattagtgaaaaaa

SEQ ID NO: 445379 - DNA, 33 bp, Homo sapien
ctgagctttctgcatcacctgtgagaatatcca

SEQ ID NO: 445380 - DNA, 33 bp, Homo sapien
ctgagctttctgcatcgcctgtgagaatatcca

SEQ ID NO: 445381 - DNA, 33 bp, Homo sapien
tgttgcaatgaggtgactagtgagtactgctat

SEQ ID NO: 445382 - DNA, 33 bp, Homo sapien
tgttgcaatgaggtgagtagtgagtactgctat

SEQ ID NO: 445383 - DNA, 33 bp, Homo sapien
tttttatggtttgataagagacaaaaaactacc

SEQ ID NO: 445384 - DNA, 33 bp, Homo sapien
tttttatggtttgataggagacaaaaaactacc

SEQ ID NO: 445385 - DNA, 33 bp, Homo sapien
atttgcatcttgtttaggacatccttttctaac

SEQ ID NO: 445386 - DNA, 33 bp, Homo sapien
atttgcatcttgtttatgacatccttttctaac

SEQ ID NO: 445387 - DNA, 33 bp, Homo sapien
ctacacttatttttagacctgggatactctctt

SEQ ID NO: 445388 - DNA, 33 bp, Homo sapien
ctacacttatttttaggcctgggatactctctt

SEQ ID NO: 445389 - DNA, 33 bp, Homo sapien
gaaaataggcttagacaggaaaacaaactaatt

SEQ ID NO: 445390 - DNA, 33 bp, Homo sapien
gaaaataggcttagacgggaaaacaaactaatt

SEQ ID NO: 445391 - DNA, 33 bp, Homo sapien
agaatggctagatccaaatagtctatctgggcc

SEQ ID NO: 445392 - DNA, 33 bp, Homo sapien
agaatggctagatccacatagtctatctgggcc

SEQ ID NO: 445393 - DNA, 33 bp, Homo sapien
ttcgtgtcatagaccacaatgagcatttattat

SEQ ID NO: 445394 - DNA, 33 bp, Homo sapien
ttcgtgtcatagaccagaatgagcatttattat

SEQ ID NO: 445395 - DNA, 33 bp, Homo sapien
tgaccatgaaagggtaactgaatcatactgacc

SEQ ID NO: 445396 - DNA, 33 bp, Homo sapien
tgaccatgaaagggtagctgaatcatactgacc

SEQ ID NO: 445397 - DNA, 33 bp, Homo sapien
gatgacagcaaagaagcagagcattggactcaa

SEQ ID NO: 445398 - DNA, 33 bp, Homo sapien
gatgacagcaaagaagtagagcattggactcaa

SEQ ID NO: 445399 - DNA, 33 bp, Homo sapien
tcttatttcttatttcaaaatgtgcatagagta

SEQ ID NO: 445400 - DNA, 33 bp, Homo sapien
tcttatttcttatttcgaaatgtgcatagagta

SEQ ID NO: 445401 - DNA, 33 bp, Homo sapien
aatatatgtgcagttacagagaaaaggaattca

SEQ ID NO: 445402 - DNA, 33 bp, Homo sapien
aatatatgtgcagttagagagaaaaggaattca

SEQ ID NO: 445403 - DNA, 33 bp, Homo sapien
ctaatgtaataaggaaagaccacgtgagctgca

SEQ ID NO: 445404 - DNA, 33 bp, Homo sapien
ctaatgtaataaggaaggaccacgtgagctgca

SEQ ID NO: 445405 - DNA, 33 bp, Homo sapien
aacaaaggcattgtcaaactagacacttgtaac

SEQ ID NO: 445406 - DNA, 33 bp, Homo sapien
aacaaaggcattgtcagactagacacttgtaac

SEQ ID NO: 445407 - DNA, 33 bp, Homo sapien
aactgatttgccagtgaaaatttttaagcaaga

SEQ ID NO: 445408 - DNA, 33 bp, Homo sapien
aactgatttgccagtggaaatttttaagcaaga

SEQ ID NO: 445409 - DNA, 33 bp, Homo sapien
ttcagccagagaataacaagattagacctgtaa

SEQ ID NO: 445410 - DNA, 33 bp, Homo sapien
ttcagccagagaataataagattagacctgtaa

SEQ ID NO: 445411 - DNA, 33 bp, Homo sapien
taggagtatgtggcacacctagaatgaagaagg

SEQ ID NO: 445412 - DNA, 33 bp, Homo sapien
taggagtatgtggcacgcctagaatgaagaagg

SEQ ID NO: 445413 - DNA, 33 bp, Homo sapien
aatgcttctccaagaccaggaggtgtgtaatag

SEQ ID NO: 445414 - DNA, 33 bp, Homo sapien
aatgcttctccaagacgaggaggtgtgtaatag

SEQ ID NO: 445415 - DNA, 33 bp, Homo sapien
tcatctttggatgctcaaactgtcaacagctca

SEQ ID NO: 445416 - DNA, 33 bp, Homo sapien
tcatctttggatgctccaactgtcaacagctca

SEQ ID NO: 445417 - DNA, 33 bp, Homo sapien
tcattttagccatgaacaagaggcagattgaag

SEQ ID NO: 445418 - DNA, 33 bp, Homo sapien
tcattttagccatgaagaagaggcagattgaag

SEQ ID NO: 445419 - DNA, 33 bp, Homo sapien
tagaggcagagtatgacgtctagataaaacaat

SEQ ID NO: 445420 - DNA, 33 bp, Homo sapien
tagaggcagagtatgatgtctagataaaacaat

SEQ ID NO: 445421 - DNA, 33 bp, Homo sapien
agttaacacaataaagcctacatatgacaaatc

SEQ ID NO: 445422 - DNA, 33 bp, Homo sapien
agttaacacaataaaggctacatatgacaaatc

SEQ ID NO: 445423 - DNA, 33 bp, Homo sapien
tttacacattgactatcacattaactgtagatt

SEQ ID NO: 445424 - DNA, 33 bp, Homo sapien
tttacacattgactatgacattaactgtagatt

SEQ ID NO: 445425 - DNA, 33 bp, Homo sapien
caaccacttgcccaaacagtctgggaattgctg

SEQ ID NO: 445426 - DNA, 33 bp, Homo sapien
caaccacttgcccaaatagtctgggaattgctg

SEQ ID NO: 445427 - DNA, 33 bp, Homo sapien
ggtgatgccagttcatcagtagagacaatgtca

SEQ ID NO: 445428 - DNA, 33 bp, Homo sapien
ggtgatgccagttcattagtagagacaatgtca

SEQ ID NO: 445429 - DNA, 33 bp, Homo sapien
cctttcttcaggtgaaaatgtaggcattaagaa

SEQ ID NO: 445430 - DNA, 33 bp, Homo sapien
cctttcttcaggtgaacatgtaggcattaagaa

SEQ ID NO: 445431 - DNA, 33 bp, Homo sapien
ttgtgggcagtacctacaaacaatttaaaatat

SEQ ID NO: 445432 - DNA, 33 bp, Homo sapien
ttgtgggcagtacctataaacaatttaaaatat

SEQ ID NO: 445433 - DNA, 33 bp, Homo sapien
actaaacaaagccaaactgagagtcattgtaca

SEQ ID NO: 445434 - DNA, 33 bp, Homo sapien
actaaacaaagccaaattgagagtcattgtaca

SEQ ID NO: 445435 - DNA, 33 bp, Homo sapien
tgagagtcattgtacaaaattcctggccactac

SEQ ID NO: 445436 - DNA, 33 bp, Homo sapien
tgagagtcattgtacacaattcctggccactac

SEQ ID NO: 445437 - DNA, 33 bp, Homo sapien
gaaaatagactttagggacaaacttgaggatat

SEQ ID NO: 445438 - DNA, 33 bp, Homo sapien
gaaaatagactttaggtacaaacttgaggatat

SEQ ID NO: 445439 - DNA, 33 bp, Homo sapien
atcaagttttacgtgaaaagagaatgattgaga

SEQ ID NO: 445440 - DNA, 33 bp, Homo sapien
atcaagttttacgtgagaagagaatgattgaga

SEQ ID NO: 445441 - DNA, 33 bp, Homo sapien
ctgttagagtcaaatactatgtaatgattttta

SEQ ID NO: 445442 - DNA, 33 bp, Homo sapien
ctgttagagtcaaatattatgtaatgattttta

SEQ ID NO: 445443 - DNA, 33 bp, Homo sapien
ctaatccaaactgccaagctgatgtgtcttgac

SEQ ID NO: 445444 - DNA, 33 bp, Homo sapien
ctaatccaaactgccacgctgatgtgtcttgac

SEQ ID NO: 445445 - DNA, 33 bp, Homo sapien
agctaccagatggcacgattacaagaagtaatc

SEQ ID NO: 445446 - DNA, 33 bp, Homo sapien
agctaccagatggcactattacaagaagtaatc

SEQ ID NO: 445447 - DNA, 33 bp, Homo sapien
aaatattacataattaaatttcacaacataact

SEQ ID NO: 445448 - DNA, 33 bp, Homo sapien
aaatattacataattacatttcacaacataact

SEQ ID NO: 445449 - DNA, 33 bp, Homo sapien
ctataaaactctcctagaatgcagttgtgtggt

SEQ ID NO: 445450 - DNA, 33 bp, Homo sapien
ctataaaactctcctataatgcagttgtgtggt

SEQ ID NO: 445451 - DNA, 33 bp, Homo sapien
acttttcccattttgacgtagttcttggattac

SEQ ID NO: 445452 - DNA, 33 bp, Homo sapien
acttttcccattttgatgtagttcttggattac

SEQ ID NO: 445453 - DNA, 33 bp, Homo sapien
ctcattaccactgtgaagaaatgtaagcatctc

SEQ ID NO: 445454 - DNA, 33 bp, Homo sapien
ctcattaccactgtgacgaaatgtaagcatctc

SEQ ID NO: 445455 - DNA, 33 bp, Homo sapien
gggtccggcagaagtcaaccgtgtcagtgtgat

SEQ ID NO: 445456 - DNA, 33 bp, Homo sapien
gggtccggcagaagtcgaccgtgtcagtgtgat

SEQ ID NO: 445457 - DNA, 33 bp, Homo sapien
tttcttacattaaggacattaagtgagaagcca

SEQ ID NO: 445458 - DNA, 33 bp, Homo sapien
tttcttacattaaggatattaagtgagaagcca

SEQ ID NO: 445459 - DNA, 33 bp, Homo sapien
accgcttactagctaaatcagcacaaaagttca

SEQ ID NO: 445460 - DNA, 33 bp, Homo sapien
accgcttactagctaagtcagcacaaaagttca

SEQ ID NO: 445461 - DNA, 33 bp, Homo sapien
catttaactttcttaccgacatcaaggcaaagt

SEQ ID NO: 445462 - DNA, 33 bp, Homo sapien
catttaactttcttactgacatcaaggcaaagt

SEQ ID NO: 445463 - DNA, 33 bp, Homo sapien
caacatattaatttacaaagcctgttcacaatt

SEQ ID NO: 445464 - DNA, 33 bp, Homo sapien
caacatattaatttaccaagcctgttcacaatt

SEQ ID NO: 445465 - DNA, 33 bp, Homo sapien
gaattttaaatgactcacccctacattcaaatt

SEQ ID NO: 445466 - DNA, 33 bp, Homo sapien
gaattttaaatgactcccccctacattcaaatt

SEQ ID NO: 445467 - DNA, 33 bp, Homo sapien
cttccattcttacataacacatatctaccaact

SEQ ID NO: 445468 - DNA, 33 bp, Homo sapien
cttccattcttacatagcacatatctaccaact

SEQ ID NO: 445469 - DNA, 33 bp, Homo sapien
atcttagctgctaacgacatggacatttgccac

SEQ ID NO: 445470 - DNA, 33 bp, Homo sapien
atcttagctgctaacggcatggacatttgccac

SEQ ID NO: 445471 - DNA, 33 bp, Homo sapien
tgtgtgttacagaaccagctacaacctcaaaag

SEQ ID NO: 445472 - DNA, 33 bp, Homo sapien
tgtgtgttacagaaccggctacaacctcaaaag

SEQ ID NO: 445473 - DNA, 33 bp, Homo sapien
agtgggaggatcataaacatgggcccaggcagc

SEQ ID NO: 445474 - DNA, 33 bp, Homo sapien
agtgggaggatcataatcatgggcccaggcagc

SEQ ID NO: 445475 - DNA, 33 bp, Homo sapien
aagtcaagaaatttccaaagaaacaggcatcag

SEQ ID NO: 445476 - DNA, 33 bp, Homo sapien
aagtcaagaaatttccgaagaaacaggcatcag

SEQ ID NO: 445477 - DNA, 33 bp, Homo sapien
caataagtttgaaatcaaataacaaaataaata

SEQ ID NO: 445478 - DNA, 33 bp, Homo sapien
caataagtttgaaatcgaataacaaaataaata

SEQ ID NO: 445479 - DNA, 33 bp, Homo sapien
attggtacaattgggacggcttttagaatcata

SEQ ID NO: 445480 - DNA, 33 bp, Homo sapien
attggtacaattgggatggcttttagaatcata

SEQ ID NO: 445481 - DNA, 33 bp, Homo sapien
ccagcagtaatctgaacgtaaatcattgtatac

SEQ ID NO: 445482 - DNA, 33 bp, Homo sapien
ccagcagtaatctgaatgtaaatcattgtatac

SEQ ID NO: 445483 - DNA, 33 bp, Homo sapien
tgtgaaaacttggtgaaaaatttcttccttgag

SEQ ID NO: 445484 - DNA, 33 bp, Homo sapien
tgtgaaaacttggtgagaaatttcttccttgag

SEQ ID NO: 445485 - DNA, 33 bp, Homo sapien
aaaggatggagatgacacaatagctaatcattt

SEQ ID NO: 445486 - DNA, 33 bp, Homo sapien
aaaggatggagatgacgcaatagctaatcattt

SEQ ID NO: 445487 - DNA, 33 bp, Homo sapien
tgcattttttcatttaacttttacacatacaca

SEQ ID NO: 445488 - DNA, 33 bp, Homo sapien
tgcattttttcatttatcttttacacatacaca

SEQ ID NO: 445489 - DNA, 33 bp, Homo sapien
ggaaatctaaaaatacactctagatctttcctg

SEQ ID NO: 445490 - DNA, 33 bp, Homo sapien
ggaaatctaaaaatacgctctagatctttcctg

SEQ ID NO: 445491 - DNA, 33 bp, Homo sapien
gtggcttggactactgaataaattctcagtctg

SEQ ID NO: 445492 - DNA, 33 bp, Homo sapien
gtggcttggactactgtataaattctcagtctg

SEQ ID NO: 445493 - DNA, 33 bp, Homo sapien
atacagaagtaagtggaaaatctacacacagcg

SEQ ID NO: 445494 - DNA, 33 bp, Homo sapien
atacagaagtaagtggcaaatctacacacagcg

SEQ ID NO: 445495 - DNA, 33 bp, Homo sapien
aaaacttccaggatgacgatgataggtcataca

SEQ ID NO: 445496 - DNA, 33 bp, Homo sapien
aaaacttccaggatgaggatgataggtcataca

SEQ ID NO: 445497 - DNA, 33 bp, Homo sapien
ctggggtaagggtggaatacactgtcatgaaat

SEQ ID NO: 445498 - DNA, 33 bp, Homo sapien
ctggggtaagggtggagtacactgtcatgaaat

SEQ ID NO: 445499 - DNA, 33 bp, Homo sapien
tgaattatttcttcacagctattgattagtttt

SEQ ID NO: 445500 - DNA, 33 bp, Homo sapien
tgaattatttcttcacggctattgattagtttt

SEQ ID NO: 445501 - DNA, 33 bp, Homo sapien
gctctgagtctactgacgcatttgttgtaaggt

SEQ ID NO: 445502 - DNA, 33 bp, Homo sapien
gctctgagtctactgatgcatttgttgtaaggt

SEQ ID NO: 445503 - DNA, 33 bp, Homo sapien
tattaatgtatgtatacgtgtattgtgtgtgta

SEQ ID NO: 445504 - DNA, 33 bp, Homo sapien
tattaatgtatgtatatgtgtattgtgtgtgta

SEQ ID NO: 445505 - DNA, 33 bp, Homo sapien
acggtagccaaaaagaaagtgaaataccggctg

SEQ ID NO: 445506 - DNA, 33 bp, Homo sapien
acggtagccaaaaagagagtgaaataccggctg

SEQ ID NO: 445507 - DNA, 33 bp, Homo sapien
aaaatcaaactcataaatgctcagcgtaggatg

SEQ ID NO: 445508 - DNA, 33 bp, Homo sapien
aaaatcaaactcataagtgctcagcgtaggatg

SEQ ID NO: 445509 - DNA, 33 bp, Homo sapien
ctccgattcttatttacgaaaagccagaaaact

SEQ ID NO: 445510 - DNA, 33 bp, Homo sapien
ctccgattcttatttatgaaaagccagaaaact

SEQ ID NO: 445511 - DNA, 33 bp, Homo sapien
tcattgtgtgcgcagtaaccttaccttgcccgg

SEQ ID NO: 445512 - DNA, 33 bp, Homo sapien
tcattgtgtgcgcagtcaccttaccttgcccgg

SEQ ID NO: 445513 - DNA, 33 bp, Homo sapien
gaaagaagacagagcaaaaaccagagagagagt

SEQ ID NO: 445514 - DNA, 33 bp, Homo sapien
gaaagaagacagagcagaaaccagagagagagt

SEQ ID NO: 445515 - DNA, 33 bp, Homo sapien
ggaaacaagaaagctcaatttttactgccatca

SEQ ID NO: 445516 - DNA, 33 bp, Homo sapien
ggaaacaagaaagctctatttttactgccatca

SEQ ID NO: 445517 - DNA, 33 bp, Homo sapien
atcaagtgacgattacccgtgccttccaagaat

SEQ ID NO: 445518 - DNA, 33 bp, Homo sapien
atcaagtgacgattacgcgtgccttccaagaat

SEQ ID NO: 445519 - DNA, 33 bp, Homo sapien
atcacctgactaatccaagcaaccttttactgt

SEQ ID NO: 445520 - DNA, 33 bp, Homo sapien
atcacctgactaatcccagcaaccttttactgt

SEQ ID NO: 445521 - DNA, 33 bp, Homo sapien
aagcacacaacaatacacagtcatccatatacc

SEQ ID NO: 445522 - DNA, 33 bp, Homo sapien
aagcacacaacaatacgcagtcatccatatacc

SEQ ID NO: 445523 - DNA, 33 bp, Homo sapien
acctcattagtttagaagctggagaaataaatg

SEQ ID NO: 445524 - DNA, 33 bp, Homo sapien
acctcattagtttagatgctggagaaataaatg

SEQ ID NO: 445525 - DNA, 33 bp, Homo sapien
acccatctccattgcccgaaaagtaaaacctgt

SEQ ID NO: 445526 - DNA, 33 bp, Homo sapien
acccatctccattgcctgaaaagtaaaacctgt

SEQ ID NO: 445527 - DNA, 33 bp, Homo sapien
cctcaagggatgtgaacgagaaaaggcttggcc

SEQ ID NO: 445528 - DNA, 33 bp, Homo sapien
cctcaagggatgtgaatgagaaaaggcttggcc

SEQ ID NO: 445529 - DNA, 33 bp, Homo sapien
accatcagatcctgtaagacttattcactatca

SEQ ID NO: 445530 - DNA, 33 bp, Homo sapien
accatcagatcctgtacgacttattcactatca

SEQ ID NO: 445531 - DNA, 33 bp, Homo sapien
cagatacaataaacaaactccaaggccatagtc

SEQ ID NO: 445532 - DNA, 33 bp, Homo sapien
cagatacaataaacaatctccaaggccatagtc

SEQ ID NO: 445533 - DNA, 33 bp, Homo sapien
ctggctagacattaccactgagtaaatggcaat

SEQ ID NO: 445534 - DNA, 33 bp, Homo sapien
ctggctagacattaccgctgagtaaatggcaat

SEQ ID NO: 445535 - DNA, 33 bp, Homo sapien
gaattgtcgattcacactactcatttcttcagt

SEQ ID NO: 445536 - DNA, 33 bp, Homo sapien
gaattgtcgattcacattactcatttcttcagt

SEQ ID NO: 445537 - DNA, 33 bp, Homo sapien
ttgtcagtaattccagaaaataaaatgccctat

SEQ ID NO: 445538 - DNA, 33 bp, Homo sapien
ttgtcagtaattccaggaaataaaatgccctat

SEQ ID NO: 445539 - DNA, 33 bp, Homo sapien
tgtgattatacattgccccataccaatatattt

SEQ ID NO: 445540 - DNA, 33 bp, Homo sapien
tgtgattatacattgctccataccaatatattt

SEQ ID NO: 445541 - DNA, 33 bp, Homo sapien
atttttcctgtaacaaaactgagatattggtgg

SEQ ID NO: 445542 - DNA, 33 bp, Homo sapien
atttttcctgtaacaagactgagatattggtgg

SEQ ID NO: 445543 - DNA, 33 bp, Homo sapien
gtcaaagattgctgaacccaaagagtattatgt

SEQ ID NO: 445544 - DNA, 33 bp, Homo sapien
gtcaaagattgctgaatccaaagagtattatgt

SEQ ID NO: 445545 - DNA, 33 bp, Homo sapien
gaatcctgagctgtaacaaataactcatctgat

SEQ ID NO: 445546 - DNA, 33 bp, Homo sapien
gaatcctgagctgtaataaataactcatctgat

SEQ ID NO: 445547 - DNA, 33 bp, Homo sapien
gaaagatgtgggataaattaatatgcttgctgg

SEQ ID NO: 445548 - DNA, 33 bp, Homo sapien
gaaagatgtgggataatttaatatgcttgctgg

SEQ ID NO: 445549 - DNA, 33 bp, Homo sapien
tccttgtgtggtctaaaagaagcctaggaagaa

SEQ ID NO: 445550 - DNA, 33 bp, Homo sapien
tccttgtgtggtctaagagaagcctaggaagaa

SEQ ID NO: 445551 - DNA, 33 bp, Homo sapien
aagacagatgaccgacgaagcaacagtaaaaag

SEQ ID NO: 445552 - DNA, 33 bp, Homo sapien
aagacagatgaccgactaagcaacagtaaaaag

SEQ ID NO: 445553 - DNA, 33 bp, Homo sapien
ctctttgcctttagataaatgtttgcctagtac

SEQ ID NO: 445554 - DNA, 33 bp, Homo sapien
ctctttgcctttagatgaatgtttgcctagtac

SEQ ID NO: 445555 - DNA, 33 bp, Homo sapien
aaccaagctgtatagcacaactcttgaatacag

SEQ ID NO: 445556 - DNA, 33 bp, Homo sapien
aaccaagctgtatagcgcaactcttgaatacag

SEQ ID NO: 445557 - DNA, 33 bp, Homo sapien
gttttgttgctacactaagcctctgtgtgaaat

SEQ ID NO: 445558 - DNA, 33 bp, Homo sapien
gttttgttgctacactgagcctctgtgtgaaat

SEQ ID NO: 445559 - DNA, 33 bp, Homo sapien
aaagaaatcccataaccatgaacagtcattctc

SEQ ID NO: 445560 - DNA, 33 bp, Homo sapien
aaagaaatcccataacgatgaacagtcattctc

SEQ ID NO: 445561 - DNA, 33 bp, Homo sapien
ctcagtatgtttaaaagaactgaaatcacacta

SEQ ID NO: 445562 - DNA, 33 bp, Homo sapien
ctcagtatgtttaaaataactgaaatcacacta

SEQ ID NO: 445563 - DNA, 33 bp, Homo sapien
agcttaacatagatacagatggttccatgtaaa

SEQ ID NO: 445564 - DNA, 33 bp, Homo sapien
agcttaacatagatacggatggttccatgtaaa

SEQ ID NO: 445565 - DNA, 33 bp, Homo sapien
ggcccagatagagctacgtcatggatgatggat

SEQ ID NO: 445566 - DNA, 33 bp, Homo sapien
ggcccagatagagctatgtcatggatgatggat

SEQ ID NO: 445567 - DNA, 33 bp, Homo sapien
ctgtttaaatagtttccaaccaagatagatgtt

SEQ ID NO: 445568 - DNA, 33 bp, Homo sapien
ctgtttaaatagtttcgaaccaagatagatgtt

SEQ ID NO: 445569 - DNA, 33 bp, Homo sapien
aaaaacataagcacagccagttgctctaaagtg

SEQ ID NO: 445570 - DNA, 33 bp, Homo sapien
aaaaacataagcacagtcagttgctctaaagtg

SEQ ID NO: 445571 - DNA, 33 bp, Homo sapien
acaaggtgaaaacagaagtgaattttccttgcc

SEQ ID NO: 445572 - DNA, 33 bp, Homo sapien
acaaggtgaaaacagacgtgaattttccttgcc

SEQ ID NO: 445573 - DNA, 33 bp, Homo sapien
gggctggaattctagaaatgcagttgacttcct

SEQ ID NO: 445574 - DNA, 33 bp, Homo sapien
gggctggaattctagagatgcagttgacttcct

SEQ ID NO: 445575 - DNA, 33 bp, Homo sapien
cacataaatgtgaagaagtcgagaaatacactt

SEQ ID NO: 445576 - DNA, 33 bp, Homo sapien
cacataaatgtgaagacgtcgagaaatacactt

SEQ ID NO: 445577 - DNA, 33 bp, Homo sapien
gaatcagaaaatttcaccagtgctactttccag

SEQ ID NO: 445578 - DNA, 33 bp, Homo sapien
gaatcagaaaatttcatcagtgctactttccag

SEQ ID NO: 445579 - DNA, 33 bp, Homo sapien
caacactctcacataaagcatcagttatagggc

SEQ ID NO: 445580 - DNA, 33 bp, Homo sapien
caacactctcacataaggcatcagttatagggc

SEQ ID NO: 445581 - DNA, 33 bp, Homo sapien
ataaaatctggtttgacgaagagtacagaaaag

SEQ ID NO: 445582 - DNA, 33 bp, Homo sapien
ataaaatctggtttgatgaagagtacagaaaag

SEQ ID NO: 445583 - DNA, 33 bp, Homo sapien
actactgtgaaatatactaggaactcatatgtg

SEQ ID NO: 445584 - DNA, 33 bp, Homo sapien
actactgtgaaatatagtaggaactcatatgtg

SEQ ID NO: 445585 - DNA, 33 bp, Homo sapien
gtccttaaattagctacggacaattaagtgtta

SEQ ID NO: 445586 - DNA, 33 bp, Homo sapien
gtccttaaattagctatggacaattaagtgtta

SEQ ID NO: 445587 - DNA, 33 bp, Homo sapien
actttcatttcaagataaagtttgtgccaatgt

SEQ ID NO: 445588 - DNA, 33 bp, Homo sapien
actttcatttcaagatgaagtttgtgccaatgt

SEQ ID NO: 445589 - DNA, 33 bp, Homo sapien
ctgtgtacttttaacactgcactctacatttaa

SEQ ID NO: 445590 - DNA, 33 bp, Homo sapien
ctgtgtacttttaacattgcactctacatttaa

SEQ ID NO: 445591 - DNA, 33 bp, Homo sapien
ctttaactttgtgttacgccctatctggaacat

SEQ ID NO: 445592 - DNA, 33 bp, Homo sapien
ctttaactttgtgttatgccctatctggaacat

SEQ ID NO: 445593 - DNA, 33 bp, Homo sapien
gaggcaatcctaaggacggaagaacacagagag

SEQ ID NO: 445594 - DNA, 33 bp, Homo sapien
gaggcaatcctaaggatggaagaacacagagag

SEQ ID NO: 445595 - DNA, 33 bp, Homo sapien
aaattttcagtaagcactcagttgttttccttg

SEQ ID NO: 445596 - DNA, 33 bp, Homo sapien
aaattttcagtaagcattcagttgttttccttg

SEQ ID NO: 445597 - DNA, 33 bp, Homo sapien
gcttttcctactcctaaaattcataggtctagt

SEQ ID NO: 445598 - DNA, 33 bp, Homo sapien
gcttttcctactcctagaattcataggtctagt

SEQ ID NO: 445599 - DNA, 33 bp, Homo sapien
tcccagtccaaccgtaacaaaaaacagtatcag

SEQ ID NO: 445600 - DNA, 33 bp, Homo sapien
tcccagtccaaccgtaccaaaaaacagtatcag

SEQ ID NO: 445601 - DNA, 33 bp, Homo sapien
taaatgcttgctaaaccaaccacacttaatatt

SEQ ID NO: 445602 - DNA, 33 bp, Homo sapien
taaatgcttgctaaactaaccacacttaatatt

SEQ ID NO: 445603 - DNA, 33 bp, Homo sapien
ttctaaaatgaccctgaagggagtgctcagttc

SEQ ID NO: 445604 - DNA, 33 bp, Homo sapien
ttctaaaatgaccctgtagggagtgctcagttc

SEQ ID NO: 445605 - DNA, 33 bp, Homo sapien
tcttgctcttttctaaaatagaggccgtgcatg

SEQ ID NO: 445606 - DNA, 33 bp, Homo sapien
tcttgctcttttctaacatagaggccgtgcatg

SEQ ID NO: 445607 - DNA, 33 bp, Homo sapien
ggtcatcattctggcaaatccacattttagaag

SEQ ID NO: 445608 - DNA, 33 bp, Homo sapien
ggtcatcattctggcagatccacattttagaag

SEQ ID NO: 445609 - DNA, 33 bp, Homo sapien
acaaattcgtggcagcactttacataaaacagg

SEQ ID NO: 445610 - DNA, 33 bp, Homo sapien
acaaattcgtggcagcgctttacataaaacagg

SEQ ID NO: 445611 - DNA, 33 bp, Homo sapien
aggaaatacatgatacaagtaatgagatgagaa

SEQ ID NO: 445612 - DNA, 33 bp, Homo sapien
aggaaatacatgataccagtaatgagatgagaa

SEQ ID NO: 445613 - DNA, 33 bp, Homo sapien
atttgatatcttattcaaaacttcggcaactga

SEQ ID NO: 445614 - DNA, 33 bp, Homo sapien
atttgatatcttattcgaaacttcggcaactga

SEQ ID NO: 445615 - DNA, 33 bp, Homo sapien
taaaaagtcgaaacaaaaatggcggatagatat

SEQ ID NO: 445616 - DNA, 33 bp, Homo sapien
taaaaagtcgaaacaataatggcggatagatat

SEQ ID NO: 445617 - DNA, 33 bp, Homo sapien
attttacacaaagcagaacctatctaaatacat

SEQ ID NO: 445618 - DNA, 33 bp, Homo sapien
attttacacaaagcaggacctatctaaatacat

SEQ ID NO: 445619 - DNA, 33 bp, Homo sapien
ttatgattagatcaaactcactgctaaattaat

SEQ ID NO: 445620 - DNA, 33 bp, Homo sapien
ttatgattagatcaaagtcactgctaaattaat

SEQ ID NO: 445621 - DNA, 33 bp, Homo sapien
tgaattattacgcttacacacatctcagagcaa

SEQ ID NO: 445622 - DNA, 33 bp, Homo sapien
tgaattattacgcttatacacatctcagagcaa

SEQ ID NO: 445623 - DNA, 33 bp, Homo sapien
acaaatagttagaaaacgcaaagcctgaagcaa

SEQ ID NO: 445624 - DNA, 33 bp, Homo sapien
acaaatagttagaaaatgcaaagcctgaagcaa

SEQ ID NO: 445625 - DNA, 33 bp, Homo sapien
tcaaagtattattaaactgccagaataaatata

SEQ ID NO: 445626 - DNA, 33 bp, Homo sapien
tcaaagtattattaaagtgccagaataaatata

SEQ ID NO: 445627 - DNA, 33 bp, Homo sapien
ggaagaatattgatcaaggaattaggagctctg

SEQ ID NO: 445628 - DNA, 33 bp, Homo sapien
ggaagaatattgatcagggaattaggagctctg

SEQ ID NO: 445629 - DNA, 33 bp, Homo sapien
tcagaatcagaagagacagtggaatccatattt

SEQ ID NO: 445630 - DNA, 33 bp, Homo sapien
tcagaatcagaagagatagtggaatccatattt

SEQ ID NO: 445631 - DNA, 33 bp, Homo sapien
ttataaatgcccctaacgaaataaaaatgcact

SEQ ID NO: 445632 - DNA, 33 bp, Homo sapien
ttataaatgcccctaatgaaataaaaatgcact

SEQ ID NO: 445633 - DNA, 33 bp, Homo sapien
tacagaaaactcgaagaaatagaagtagtaaaa

SEQ ID NO: 445634 - DNA, 33 bp, Homo sapien
tacagaaaactcgaaggaatagaagtagtaaaa

SEQ ID NO: 445635 - DNA, 33 bp, Homo sapien
taagtaaacaagataaatattaactgctgagtt

SEQ ID NO: 445636 - DNA, 33 bp, Homo sapien
taagtaaacaagataagtattaactgctgagtt

SEQ ID NO: 445637 - DNA, 33 bp, Homo sapien
ataaatgcaataccataatcacaaccaacatat

SEQ ID NO: 445638 - DNA, 33 bp, Homo sapien
ataaatgcaataccatgatcacaaccaacatat

SEQ ID NO: 445639 - DNA, 33 bp, Homo sapien
ccccttgtgtctggtcaatatcttgattaattg

SEQ ID NO: 445640 - DNA, 33 bp, Homo sapien
ccccttgtgtctggtcgatatcttgattaattg

SEQ ID NO: 445641 - DNA, 33 bp, Homo sapien
catacccttcaaccaaaagagccagtgaaacca

SEQ ID NO: 445642 - DNA, 33 bp, Homo sapien
catacccttcaaccaagagagccagtgaaacca

SEQ ID NO: 445643 - DNA, 33 bp, Homo sapien
gctgagtccagggcaacgatgttctacctatca

SEQ ID NO: 445644 - DNA, 33 bp, Homo sapien
gctgagtccagggcaatgatgttctacctatca

SEQ ID NO: 445645 - DNA, 33 bp, Homo sapien
gcaacacagagtcaaacatcaggctcagttctc

SEQ ID NO: 445646 - DNA, 33 bp, Homo sapien
gcaacacagagtcaaatatcaggctcagttctc

SEQ ID NO: 445647 - DNA, 33 bp, Homo sapien
atcattttatgtaatacgaaaggccagaatgct

SEQ ID NO: 445648 - DNA, 33 bp, Homo sapien
atcattttatgtaatatgaaaggccagaatgct

SEQ ID NO: 445649 - DNA, 33 bp, Homo sapien
tttaaaagtctcattgcaaatctattactgcac

SEQ ID NO: 445650 - DNA, 33 bp, Homo sapien
tttaaaagtctcattggaaatctattactgcac

SEQ ID NO: 445651 - DNA, 33 bp, Homo sapien
attaacggcttatgaaatgagataaattaggag

SEQ ID NO: 445652 - DNA, 33 bp, Homo sapien
attaacggcttatgaagtgagataaattaggag

SEQ ID NO: 445653 - DNA, 33 bp, Homo sapien
tttcttcttttatggaggtaagactagaaggaa

SEQ ID NO: 445654 - DNA, 33 bp, Homo sapien
tttcttcttttatggatgtaagactagaaggaa

SEQ ID NO: 445655 - DNA, 33 bp, Homo sapien
atatggaaaatatttcacttacttttcattcac

SEQ ID NO: 445656 - DNA, 33 bp, Homo sapien
atatggaaaatatttcgcttacttttcattcac

SEQ ID NO: 445657 - DNA, 33 bp, Homo sapien
gcaggcaccatgttgccatttgctattatattg

SEQ ID NO: 445658 - DNA, 33 bp, Homo sapien
gcaggcaccatgttgctatttgctattatattg

SEQ ID NO: 445659 - DNA, 33 bp, Homo sapien
aatgttcctatcatgaaaagcacttttatttac

SEQ ID NO: 445660 - DNA, 33 bp, Homo sapien
aatgttcctatcatgagaagcacttttatttac

SEQ ID NO: 445661 - DNA, 33 bp, Homo sapien
gggggaagcctgttgaatagaaagtgagaacac

SEQ ID NO: 445662 - DNA, 33 bp, Homo sapien
gggggaagcctgttgattagaaagtgagaacac

SEQ ID NO: 445663 - DNA, 33 bp, Homo sapien
gcaggcaaaattgctacggtccattcaagactt

SEQ ID NO: 445664 - DNA, 33 bp, Homo sapien
gcaggcaaaattgctatggtccattcaagactt

SEQ ID NO: 445665 - DNA, 33 bp, Homo sapien
tttgacagaaaattaacgcaatttaacacaaaa

SEQ ID NO: 445666 - DNA, 33 bp, Homo sapien
tttgacagaaaattaatgcaatttaacacaaaa

SEQ ID NO: 445667 - DNA, 33 bp, Homo sapien
aataagcttatgaaaaagagtattgtccttgct

SEQ ID NO: 445668 - DNA, 33 bp, Homo sapien
aataagcttatgaaaaggagtattgtccttgct

SEQ ID NO: 445669 - DNA, 33 bp, Homo sapien
aaactttaagaattaccggcagatatacctctg

SEQ ID NO: 445670 - DNA, 33 bp, Homo sapien
aaactttaagaattactggcagatatacctctg

SEQ ID NO: 445671 - DNA, 33 bp, Homo sapien
gaacatgacatatttcaaaatttgtatgagaaa

SEQ ID NO: 445672 - DNA, 33 bp, Homo sapien
gaacatgacatatttccaaatttgtatgagaaa

SEQ ID NO: 445673 - DNA, 33 bp, Homo sapien
tgtatcttatgcctacaccaaacctggatattt

SEQ ID NO: 445674 - DNA, 33 bp, Homo sapien
tgtatcttatgcctacgccaaacctggatattt

SEQ ID NO: 445675 - DNA, 33 bp, Homo sapien
tgaaaacagtgctcaccgggggcaatgatggac

SEQ ID NO: 445676 - DNA, 33 bp, Homo sapien
tgaaaacagtgctcactgggggcaatgatggac

SEQ ID NO: 445677 - DNA, 33 bp, Homo sapien
gtaccctgggtgaagacggaagcattaaacatc

SEQ ID NO: 445678 - DNA, 33 bp, Homo sapien
gtaccctgggtgaagatggaagcattaaacatc

SEQ ID NO: 445679 - DNA, 33 bp, Homo sapien
tggctgggccagggataaaggaaactagtaagc

SEQ ID NO: 445680 - DNA, 33 bp, Homo sapien
tggctgggccagggatgaaggaaactagtaagc

SEQ ID NO: 445681 - DNA, 33 bp, Homo sapien
gatcactgtttgaagacctttgatattcttaat

SEQ ID NO: 445682 - DNA, 33 bp, Homo sapien
gatcactgtttgaagagctttgatattcttaat

SEQ ID NO: 445683 - DNA, 33 bp, Homo sapien
aaacttggtctaggtgaaagatagcacagcccc

SEQ ID NO: 445684 - DNA, 33 bp, Homo sapien
aaacttggtctaggtggaagatagcacagcccc

SEQ ID NO: 445685 - DNA, 33 bp, Homo sapien
atttcacagtgcctgacgatgttcaaaatgtgt

SEQ ID NO: 445686 - DNA, 33 bp, Homo sapien
atttcacagtgcctgatgatgttcaaaatgtgt

SEQ ID NO: 445687 - DNA, 33 bp, Homo sapien
tggagtctagtcatcaacaaacataatgtgcat

SEQ ID NO: 445688 - DNA, 33 bp, Homo sapien
tggagtctagtcatcatcaaacataatgtgcat

SEQ ID NO: 445689 - DNA, 33 bp, Homo sapien
cagttccaggacaagacgatagacaaattattc

SEQ ID NO: 445690 - DNA, 33 bp, Homo sapien
cagttccaggacaagatgatagacaaattattc

SEQ ID NO: 445691 - DNA, 33 bp, Homo sapien
gcttgcacttggaaaggattagttcagtttact

SEQ ID NO: 445692 - DNA, 33 bp, Homo sapien
gcttgcacttggaaagtattagttcagtttact

SEQ ID NO: 445693 - DNA, 33 bp, Homo sapien
ctttcatagtaagaaacggttgttgagacatta

SEQ ID NO: 445694 - DNA, 33 bp, Homo sapien
ctttcatagtaagaaatggttgttgagacatta

SEQ ID NO: 445695 - DNA, 33 bp, Homo sapien
aagtgagaatcagaaactggtcttggcagaaaa

SEQ ID NO: 445696 - DNA, 33 bp, Homo sapien
aagtgagaatcagaaagtggtcttggcagaaaa

SEQ ID NO: 445697 - DNA, 33 bp, Homo sapien
ctttctgactgttctacggttctataacttaca

SEQ ID NO: 445698 - DNA, 33 bp, Homo sapien
ctttctgactgttctatggttctataacttaca

SEQ ID NO: 445699 - DNA, 33 bp, Homo sapien
gaacctcttagttttacgtggccttgaacgacc

SEQ ID NO: 445700 - DNA, 33 bp, Homo sapien
gaacctcttagttttatgtggccttgaacgacc

SEQ ID NO: 445701 - DNA, 33 bp, Homo sapien
agatctacaggctaaactaagaaatcccatagc

SEQ ID NO: 445702 - DNA, 33 bp, Homo sapien
agatctacaggctaaattaagaaatcccatagc

SEQ ID NO: 445703 - DNA, 33 bp, Homo sapien
aattgtctctagaaaacccagaggtcatgtgga

SEQ ID NO: 445704 - DNA, 33 bp, Homo sapien
aattgtctctagaaaatccagaggtcatgtgga

SEQ ID NO: 445705 - DNA, 33 bp, Homo sapien
attatctcctgaaggacgatttagcaaattgat

SEQ ID NO: 445706 - DNA, 33 bp, Homo sapien
attatctcctgaaggatgatttagcaaattgat

SEQ ID NO: 445707 - DNA, 33 bp, Homo sapien
catcagttggacacaaattccttggagataggt

SEQ ID NO: 445708 - DNA, 33 bp, Homo sapien
catcagttggacacaagttccttggagataggt

SEQ ID NO: 445709 - DNA, 33 bp, Homo sapien
catgctggccacaagacagcaatttctattcac

SEQ ID NO: 445710 - DNA, 33 bp, Homo sapien
catgctggccacaagagagcaatttctattcac

SEQ ID NO: 445711 - DNA, 33 bp, Homo sapien
tttataacccatggccaaaacttgttgtggaag

SEQ ID NO: 445712 - DNA, 33 bp, Homo sapien
tttataacccatggccgaaacttgttgtggaag

SEQ ID NO: 445713 - DNA, 33 bp, Homo sapien
ccagttcagccttcaacgaaactacttaagctt

SEQ ID NO: 445714 - DNA, 33 bp, Homo sapien
ccagttcagccttcaatgaaactacttaagctt

SEQ ID NO: 445715 - DNA, 33 bp, Homo sapien
taaaacggaggcttacaaaggagagattcgaaa

SEQ ID NO: 445716 - DNA, 33 bp, Homo sapien
taaaacggaggcttacgaaggagagattcgaaa

SEQ ID NO: 445717 - DNA, 33 bp, Homo sapien
tttgtatactcgtaccacaagaagtttcagtta

SEQ ID NO: 445718 - DNA, 33 bp, Homo sapien
tttgtatactcgtaccgcaagaagtttcagtta

SEQ ID NO: 445719 - DNA, 33 bp, Homo sapien
ccccacaatcacatacgccagttcttcgaaata

SEQ ID NO: 445720 - DNA, 33 bp, Homo sapien
ccccacaatcacatactccagttcttcgaaata

SEQ ID NO: 445721 - DNA, 33 bp, Homo sapien
aaatgacaatgttatacgacaaacctgtagaac

SEQ ID NO: 445722 - DNA, 33 bp, Homo sapien
aaatgacaatgttatatgacaaacctgtagaac

SEQ ID NO: 445723 - DNA, 33 bp, Homo sapien
attttacagagattgagtaagtttgcatgtata

SEQ ID NO: 445724 - DNA, 33 bp, Homo sapien
attttacagagattgattaagtttgcatgtata

SEQ ID NO: 445725 - DNA, 33 bp, Homo sapien
atgtattttagggaaacctggtactggctgtta

SEQ ID NO: 445726 - DNA, 33 bp, Homo sapien
atgtattttagggaaatctggtactggctgtta

SEQ ID NO: 445727 - DNA, 33 bp, Homo sapien
aaaattattttaggacagacacaaagaagagaa

SEQ ID NO: 445728 - DNA, 33 bp, Homo sapien
aaaattattttaggaccgacacaaagaagagaa

SEQ ID NO: 445729 - DNA, 33 bp, Homo sapien
ccaactttgttgtgaaagctgataacagagtat

SEQ ID NO: 445730 - DNA, 33 bp, Homo sapien
ccaactttgttgtgaacgctgataacagagtat

SEQ ID NO: 445731 - DNA, 33 bp, Homo sapien
tgaactttaaagacataaataactcagctagta

SEQ ID NO: 445732 - DNA, 33 bp, Homo sapien
tgaactttaaagacatcaataactcagctagta

SEQ ID NO: 445733 - DNA, 33 bp, Homo sapien
aacaggtgagtagtgcaacttatgctgaatctt

SEQ ID NO: 445734 - DNA, 33 bp, Homo sapien
aacaggtgagtagtgccacttatgctgaatctt

SEQ ID NO: 445735 - DNA, 33 bp, Homo sapien
atgctctgtgggttgaagggtgagaggtgtgtt

SEQ ID NO: 445736 - DNA, 33 bp, Homo sapien
atgctctgtgggttgaggggtgagaggtgtgtt

SEQ ID NO: 445737 - DNA, 33 bp, Homo sapien
aaataaaataaataaaactatcatatgaaccag

SEQ ID NO: 445738 - DNA, 33 bp, Homo sapien
aaataaaataaataaagctatcatatgaaccag

SEQ ID NO: 445739 - DNA, 33 bp, Homo sapien
taggtatgactgacaaccttgtagaaatgggac

SEQ ID NO: 445740 - DNA, 33 bp, Homo sapien
taggtatgactgacaatcttgtagaaatgggac

SEQ ID NO: 445741 - DNA, 33 bp, Homo sapien
aaatgttgaaaccaccactgcatgcttgattta

SEQ ID NO: 445742 - DNA, 33 bp, Homo sapien
aaatgttgaaaccacctctgcatgcttgattta

SEQ ID NO: 445743 - DNA, 33 bp, Homo sapien
attttaagcgccaaaccatttaggttattaatc

SEQ ID NO: 445744 - DNA, 33 bp, Homo sapien
attttaagcgccaaacgatttaggttattaatc

SEQ ID NO: 445745 - DNA, 33 bp, Homo sapien
ggtgacagtatctatgacagtctcactgctatg

SEQ ID NO: 445746 - DNA, 33 bp, Homo sapien
ggtgacagtatctatggcagtctcactgctatg

SEQ ID NO: 445747 - DNA, 33 bp, Homo sapien
aggaaaacaaacgaggcaggtgatgctttgtag

SEQ ID NO: 445748 - DNA, 33 bp, Homo sapien
aggaaaacaaacgaggtaggtgatgctttgtag

SEQ ID NO: 445749 - DNA, 33 bp, Homo sapien
cttactaaacagaggaaaatagatataaccatc

SEQ ID NO: 445750 - DNA, 33 bp, Homo sapien
cttactaaacagaggacaatagatataaccatc

SEQ ID NO: 445751 - DNA, 33 bp, Homo sapien
agggtgatattccacaaggctccatgtggtcat

SEQ ID NO: 445752 - DNA, 33 bp, Homo sapien
agggtgatattccacagggctccatgtggtcat

SEQ ID NO: 445753 - DNA, 33 bp, Homo sapien
aaacagatctgtcataagtagaagtatatcttt

SEQ ID NO: 445754 - DNA, 33 bp, Homo sapien
aaacagatctgtcatacgtagaagtatatcttt

SEQ ID NO: 445755 - DNA, 33 bp, Homo sapien
taatctgaatcacaaacctgccggggcctgcat

SEQ ID NO: 445756 - DNA, 33 bp, Homo sapien
taatctgaatcacaaagctgccggggcctgcat

SEQ ID NO: 445757 - DNA, 33 bp, Homo sapien
gtacagaatcattagaaatggtgttaatctctt

SEQ ID NO: 445758 - DNA, 33 bp, Homo sapien
gtacagaatcattagagatggtgttaatctctt

SEQ ID NO: 445759 - DNA, 33 bp, Homo sapien
agagcaactgaacaccagcatcctttctccaaa

SEQ ID NO: 445760 - DNA, 33 bp, Homo sapien
agagcaactgaacaccggcatcctttctccaaa

SEQ ID NO: 445761 - DNA, 33 bp, Homo sapien
atttgttttggtcccaacttccaaaaatgaaga

SEQ ID NO: 445762 - DNA, 33 bp, Homo sapien
atttgttttggtcccatcttccaaaaatgaaga

SEQ ID NO: 445763 - DNA, 33 bp, Homo sapien
ttcccgtgtgtgtgaggattgccgacctgcggg

SEQ ID NO: 445764 - DNA, 33 bp, Homo sapien
ttcccgtgtgtgtgagtattgccgacctgcggg

SEQ ID NO: 445765 - DNA, 33 bp, Homo sapien
atatgtcctattgctacgcgccattttttaaat

SEQ ID NO: 445766 - DNA, 33 bp, Homo sapien
atatgtcctattgctatgcgccattttttaaat

SEQ ID NO: 445767 - DNA, 33 bp, Homo sapien
ctccacaaatcttatccagtcaagaaacagacc

SEQ ID NO: 445768 - DNA, 33 bp, Homo sapien
ctccacaaatcttatctagtcaagaaacagacc

SEQ ID NO: 445769 - DNA, 33 bp, Homo sapien
aatcccttgcctaaaacctaaagtcaaaatatc

SEQ ID NO: 445770 - DNA, 33 bp, Homo sapien
aatcccttgcctaaaatctaaagtcaaaatatc

SEQ ID NO: 445771 - DNA, 33 bp, Homo sapien
acatacgaaaatgacactatcatatctattaat

SEQ ID NO: 445772 - DNA, 33 bp, Homo sapien
acatacgaaaatgacagtatcatatctattaat

SEQ ID NO: 445773 - DNA, 33 bp, Homo sapien
attcttagacatgacaccaaacctatgggcaac

SEQ ID NO: 445774 - DNA, 33 bp, Homo sapien
attcttagacatgacagcaaacctatgggcaac

SEQ ID NO: 445775 - DNA, 33 bp, Homo sapien
gccttttgtttctgcactctttgacttagcata

SEQ ID NO: 445776 - DNA, 33 bp, Homo sapien
gccttttgtttctgcattctttgacttagcata

SEQ ID NO: 445777 - DNA, 33 bp, Homo sapien
gcaaatttgaataatccaggctaaactaatctc

SEQ ID NO: 445778 - DNA, 33 bp, Homo sapien
gcaaatttgaataatctaggctaaactaatctc

SEQ ID NO: 445779 - DNA, 33 bp, Homo sapien
ccaaatataacaaaaaacagatcataaacctca

SEQ ID NO: 445780 - DNA, 33 bp, Homo sapien
ccaaatataacaaaaaccagatcataaacctca

SEQ ID NO: 445781 - DNA, 33 bp, Homo sapien
ttttaattcctgctaaatatttcctcatgatgg

SEQ ID NO: 445782 - DNA, 33 bp, Homo sapien
ttttaattcctgctaattatttcctcatgatgg

SEQ ID NO: 445783 - DNA, 33 bp, Homo sapien
tagtgagggtattttgaatcattatagctacag

SEQ ID NO: 445784 - DNA, 33 bp, Homo sapien
tagtgagggtattttgcatcattatagctacag

SEQ ID NO: 445785 - DNA, 33 bp, Homo sapien
attctgtgcaatcataaaagttaagtgattgca

SEQ ID NO: 445786 - DNA, 33 bp, Homo sapien
attctgtgcaatcatacaagttaagtgattgca

SEQ ID NO: 445787 - DNA, 33 bp, Homo sapien
cagattccctggagaacggtcttctgatctctt

SEQ ID NO: 445788 - DNA, 33 bp, Homo sapien
cagattccctggagaatggtcttctgatctctt

SEQ ID NO: 445789 - DNA, 33 bp, Homo sapien
ctcagtgtgttcagaactgtcagaacttcatcg

SEQ ID NO: 445790 - DNA, 33 bp, Homo sapien
ctcagtgtgttcagaattgtcagaacttcatcg

SEQ ID NO: 445791 - DNA, 33 bp, Homo sapien
gaataggcagcgtgaacggtattaaatttatga

SEQ ID NO: 445792 - DNA, 33 bp, Homo sapien
gaataggcagcgtgaatggtattaaatttatga

SEQ ID NO: 445793 - DNA, 33 bp, Homo sapien
gagattattcgaaatacgttacttgaaatttta

SEQ ID NO: 445794 - DNA, 33 bp, Homo sapien
gagattattcgaaataggttacttgaaatttta

SEQ ID NO: 445795 - DNA, 33 bp, Homo sapien
tcttctttgcttcttacgagtcagctaagagtc

SEQ ID NO: 445796 - DNA, 33 bp, Homo sapien
tcttctttgcttcttatgagtcagctaagagtc

SEQ ID NO: 445797 - DNA, 33 bp, Homo sapien
agggtacgcattacagaaaaccaattcaaaact

SEQ ID NO: 445798 - DNA, 33 bp, Homo sapien
agggtacgcattacaggaaaccaattcaaaact

SEQ ID NO: 445799 - DNA, 33 bp, Homo sapien
acccattttgagatgaataagacatggctgaga

SEQ ID NO: 445800 - DNA, 33 bp, Homo sapien
acccattttgagatgagtaagacatggctgaga

SEQ ID NO: 445801 - DNA, 33 bp, Homo sapien
ttctctttataattaccactccttttcctctcc

SEQ ID NO: 445802 - DNA, 33 bp, Homo sapien
ttctctttataattactactccttttcctctcc

SEQ ID NO: 445803 - DNA, 33 bp, Homo sapien
tatttaaggcctgaacacactttatctttataa

SEQ ID NO: 445804 - DNA, 33 bp, Homo sapien
tatttaaggcctgaacgcactttatctttataa

SEQ ID NO: 445805 - DNA, 33 bp, Homo sapien
tgtaggtcccattcaccgtacagaattttaata

SEQ ID NO: 445806 - DNA, 33 bp, Homo sapien
tgtaggtcccattcactgtacagaattttaata

SEQ ID NO: 445807 - DNA, 33 bp, Homo sapien
gctgtgattattcgtaagttttttgttctttta

SEQ ID NO: 445808 - DNA, 33 bp, Homo sapien
gctgtgattattcgtacgttttttgttctttta

SEQ ID NO: 445809 - DNA, 33 bp, Homo sapien
agagaggaggaaactgcagctgaaaaggtaagc

SEQ ID NO: 445810 - DNA, 33 bp, Homo sapien
agagaggaggaaactgtagctgaaaaggtaagc

SEQ ID NO: 445811 - DNA, 33 bp, Homo sapien
acactgctttgaattacaaactttatgttatga

SEQ ID NO: 445812 - DNA, 33 bp, Homo sapien
acactgctttgaattataaactttatgttatga

SEQ ID NO: 445813 - DNA, 33 bp, Homo sapien
acacacaaatgttaccagaacccaaaactgtaa

SEQ ID NO: 445814 - DNA, 33 bp, Homo sapien
acacacaaatgttaccggaacccaaaactgtaa

SEQ ID NO: 445815 - DNA, 33 bp, Homo sapien
tgcactcctatgagaactgaatgccgccactga

SEQ ID NO: 445816 - DNA, 33 bp, Homo sapien
tgcactcctatgagaattgaatgccgccactga

SEQ ID NO: 445817 - DNA, 33 bp, Homo sapien
accttgagcccctgtaccataacttttatctca

SEQ ID NO: 445818 - DNA, 33 bp, Homo sapien
accttgagcccctgtatcataacttttatctca

SEQ ID NO: 445819 - DNA, 33 bp, Homo sapien
aaaaaaatgctgagtcaagatggataagcaggg

SEQ ID NO: 445820 - DNA, 33 bp, Homo sapien
aaaaaaatgctgagtcgagatggataagcaggg

SEQ ID NO: 445821 - DNA, 33 bp, Homo sapien
ttttcagagaagcaaacgctcagggaattcatt

SEQ ID NO: 445822 - DNA, 33 bp, Homo sapien
ttttcagagaagcaaatgctcagggaattcatt

SEQ ID NO: 445823 - DNA, 33 bp, Homo sapien
ctagcaacatggcgacagaatcaaatcctcaca

SEQ ID NO: 445824 - DNA, 33 bp, Homo sapien
ctagcaacatggcgacggaatcaaatcctcaca

SEQ ID NO: 445825 - DNA, 33 bp, Homo sapien
gtaaatgaagccaaaaatgcatctatattttgc

SEQ ID NO: 445826 - DNA, 33 bp, Homo sapien
gtaaatgaagccaaaagtgcatctatattttgc

SEQ ID NO: 445827 - DNA, 33 bp, Homo sapien
atagctgatatatagaaatttagagagtatttt

SEQ ID NO: 445828 - DNA, 33 bp, Homo sapien
atagctgatatatagagatttagagagtatttt

SEQ ID NO: 445829 - DNA, 33 bp, Homo sapien
aagtagagtcttacaccgtgaatttttaatctg

SEQ ID NO: 445830 - DNA, 33 bp, Homo sapien
aagtagagtcttacactgtgaatttttaatctg

SEQ ID NO: 445831 - DNA, 33 bp, Homo sapien
tttttgaacttagtcaaagaaggcctttctaaa

SEQ ID NO: 445832 - DNA, 33 bp, Homo sapien
tttttgaacttagtcacagaaggcctttctaaa

SEQ ID NO: 445833 - DNA, 33 bp, Homo sapien
cctaatgatttgaacactgagcatcttttcatg

SEQ ID NO: 445834 - DNA, 33 bp, Homo sapien
cctaatgatttgaacattgagcatcttttcatg

SEQ ID NO: 445835 - DNA, 33 bp, Homo sapien
gctaagtaaaataggcaagtcacaattttggtt

SEQ ID NO: 445836 - DNA, 33 bp, Homo sapien
gctaagtaaaataggccagtcacaattttggtt

SEQ ID NO: 445837 - DNA, 33 bp, Homo sapien
tattcaattctgctacagaaggcaagagagaaa

SEQ ID NO: 445838 - DNA, 33 bp, Homo sapien
tattcaattctgctaccgaaggcaagagagaaa

SEQ ID NO: 445839 - DNA, 33 bp, Homo sapien
tgtgctcacacgaaaacatccagaggcaggatg

SEQ ID NO: 445840 - DNA, 33 bp, Homo sapien
tgtgctcacacgaaaatatccagaggcaggatg

SEQ ID NO: 445841 - DNA, 33 bp, Homo sapien
tgtgctttagcatgaacgtttgatttgagcctg

SEQ ID NO: 445842 - DNA, 33 bp, Homo sapien
tgtgctttagcatgaatgtttgatttgagcctg

SEQ ID NO: 445843 - DNA, 33 bp, Homo sapien
atatgctttgtgaaataaagtttatgggaggct

SEQ ID NO: 445844 - DNA, 33 bp, Homo sapien
atatgctttgtgaaatcaagtttatgggaggct

SEQ ID NO: 445845 - DNA, 33 bp, Homo sapien
tcacccactcaaaaaacgcctattgggccaggc

SEQ ID NO: 445846 - DNA, 33 bp, Homo sapien
tcacccactcaaaaaatgcctattgggccaggc

SEQ ID NO: 445847 - DNA, 33 bp, Homo sapien
atacctgatttaatccagaagagtcatcctgtc

SEQ ID NO: 445848 - DNA, 33 bp, Homo sapien
atacctgatttaatccggaagagtcatcctgtc

SEQ ID NO: 445849 - DNA, 33 bp, Homo sapien
gattggaggaaatgtacctcagcaattgtagtg

SEQ ID NO: 445850 - DNA, 33 bp, Homo sapien
gattggaggaaatgtagctcagcaattgtagtg

SEQ ID NO: 445851 - DNA, 33 bp, Homo sapien
caaagggccaaggacacagtttgcccttgatta

SEQ ID NO: 445852 - DNA, 33 bp, Homo sapien
caaagggccaaggacagagtttgcccttgatta

SEQ ID NO: 445853 - DNA, 33 bp, Homo sapien
ttttggtgaagccatcacacagcctgcacagcc

SEQ ID NO: 445854 - DNA, 33 bp, Homo sapien
ttttggtgaagccatcgcacagcctgcacagcc

SEQ ID NO: 445855 - DNA, 33 bp, Homo sapien
ccttgaaagtgaagccaggatcacaaggctgtg

SEQ ID NO: 445856 - DNA, 33 bp, Homo sapien
ccttgaaagtgaagccgggatcacaaggctgtg

SEQ ID NO: 445857 - DNA, 33 bp, Homo sapien
atacaatagtttgagaaataacagaagagccaa

SEQ ID NO: 445858 - DNA, 33 bp, Homo sapien
atacaatagtttgagagataacagaagagccaa

SEQ ID NO: 445859 - DNA, 33 bp, Homo sapien
gctgttctgtcaaccccagatcctcccatagct

SEQ ID NO: 445860 - DNA, 33 bp, Homo sapien
gctgttctgtcaaccctagatcctcccatagct

SEQ ID NO: 445861 - DNA, 33 bp, Homo sapien
gtacctcatgagaaaaaaaatcagcactgggga

SEQ ID NO: 445862 - DNA, 33 bp, Homo sapien
gtacctcatgagaaaagaaatcagcactgggga

SEQ ID NO: 445863 - DNA, 33 bp, Homo sapien
ggcaattaaaaagaagcccatgtagcaaagctc

SEQ ID NO: 445864 - DNA, 33 bp, Homo sapien
ggcaattaaaaagaagtccatgtagcaaagctc

SEQ ID NO: 445865 - DNA, 33 bp, Homo sapien
ctaggtaattcataaacgacaggcagccgggtg

SEQ ID NO: 445866 - DNA, 33 bp, Homo sapien
ctaggtaattcataaatgacaggcagccgggtg

SEQ ID NO: 445867 - DNA, 33 bp, Homo sapien
gagacttgcagtgtgaaagtagtaatttactct

SEQ ID NO: 445868 - DNA, 33 bp, Homo sapien
gagacttgcagtgtgatagtagtaatttactct

SEQ ID NO: 445869 - DNA, 33 bp, Homo sapien
aggaccacagtagacactctgccctcatagaac

SEQ ID NO: 445870 - DNA, 33 bp, Homo sapien
aggaccacagtagacattctgccctcatagaac

SEQ ID NO: 445871 - DNA, 33 bp, Homo sapien
aacatgaaaaccgcaactactttctgtataccc

SEQ ID NO: 445872 - DNA, 33 bp, Homo sapien
aacatgaaaaccgcaagtactttctgtataccc

SEQ ID NO: 445873 - DNA, 33 bp, Homo sapien
ggttttcatgttgttacctacaccttaaaggca

SEQ ID NO: 445874 - DNA, 33 bp, Homo sapien
ggttttcatgttgttatctacaccttaaaggca

SEQ ID NO: 445875 - DNA, 33 bp, Homo sapien
acatttaggtatatgacccattttgacttaatt

SEQ ID NO: 445876 - DNA, 33 bp, Homo sapien
acatttaggtatatgatccattttgacttaatt

SEQ ID NO: 445877 - DNA, 33 bp, Homo sapien
agtgcatatgtgtttacaattgctgtgtcttcg

SEQ ID NO: 445878 - DNA, 33 bp, Homo sapien
agtgcatatgtgtttataattgctgtgtcttcg

SEQ ID NO: 445879 - DNA, 33 bp, Homo sapien
aactttagttcacaggcaaaattcagcatatca

SEQ ID NO: 445880 - DNA, 33 bp, Homo sapien
aactttagttcacaggtaaaattcagcatatca

SEQ ID NO: 445881 - DNA, 33 bp, Homo sapien
taatcaagaaagggaacgtgcttatacaaaatc

SEQ ID NO: 445882 - DNA, 33 bp, Homo sapien
taatcaagaaagggaatgtgcttatacaaaatc

SEQ ID NO: 445883 - DNA, 33 bp, Homo sapien
ttcaattcaagaagtcactaattataaaccccc

SEQ ID NO: 445884 - DNA, 33 bp, Homo sapien
ttcaattcaagaagtcgctaattataaaccccc

SEQ ID NO: 445885 - DNA, 33 bp, Homo sapien
tccggaaggatttccacgacctccagtctgaga

SEQ ID NO: 445886 - DNA, 33 bp, Homo sapien
tccggaaggatttccatgacctccagtctgaga

SEQ ID NO: 445887 - DNA, 33 bp, Homo sapien
ggactgaattatgtaacgtcataaaccaacact

SEQ ID NO: 445888 - DNA, 33 bp, Homo sapien
ggactgaattatgtaatgtcataaaccaacact

SEQ ID NO: 445889 - DNA, 33 bp, Homo sapien
aatgggcataccaaaccgatggactcattgtgg

SEQ ID NO: 445890 - DNA, 33 bp, Homo sapien
aatgggcataccaaactgatggactcattgtgg

SEQ ID NO: 445891 - DNA, 33 bp, Homo sapien
agtattcactctgggccaggtgccgtttcagaa

SEQ ID NO: 445892 - DNA, 33 bp, Homo sapien
agtattcactctgggctaggtgccgtttcagaa

SEQ ID NO: 445893 - DNA, 33 bp, Homo sapien
cctaccatggaaccacaagaaatttcccctttt

SEQ ID NO: 445894 - DNA, 33 bp, Homo sapien
cctaccatggaaccacgagaaatttcccctttt

SEQ ID NO: 445895 - DNA, 33 bp, Homo sapien
tttgacattcctactactaagggggttatgagc

SEQ ID NO: 445896 - DNA, 33 bp, Homo sapien
tttgacattcctactattaagggggttatgagc

SEQ ID NO: 445897 - DNA, 33 bp, Homo sapien
gagctgtcatcaataccatgagtcaatatatgg

SEQ ID NO: 445898 - DNA, 33 bp, Homo sapien
gagctgtcatcaatactatgagtcaatatatgg

SEQ ID NO: 445899 - DNA, 33 bp, Homo sapien
aggtgaagcaggtacacgaaggcatttagtgcg

SEQ ID NO: 445900 - DNA, 33 bp, Homo sapien
aggtgaagcaggtacaggaaggcatttagtgcg

SEQ ID NO: 445901 - DNA, 33 bp, Homo sapien
attattattgcttttaggaagaggctatgagat

SEQ ID NO: 445902 - DNA, 33 bp, Homo sapien
attattattgcttttatgaagaggctatgagat

SEQ ID NO: 445903 - DNA, 33 bp, Homo sapien
aagatattgtcaccagcattttaagggaacagg

SEQ ID NO: 445904 - DNA, 33 bp, Homo sapien
aagatattgtcaccaggattttaagggaacagg

SEQ ID NO: 445905 - DNA, 33 bp, Homo sapien
ggagctaactgcctaaactctgtcctgttccct

SEQ ID NO: 445906 - DNA, 33 bp, Homo sapien
ggagctaactgcctaacctctgtcctgttccct

SEQ ID NO: 445907 - DNA, 33 bp, Homo sapien
tggctctctgtgagaaaaaagaatgaagagatg

SEQ ID NO: 445908 - DNA, 33 bp, Homo sapien
tggctctctgtgagaagaaagaatgaagagatg

SEQ ID NO: 445909 - DNA, 33 bp, Homo sapien
gaatttatggtttggagggcatgagtctccaga

SEQ ID NO: 445910 - DNA, 33 bp, Homo sapien
gaatttatggtttggatggcatgagtctccaga

SEQ ID NO: 445911 - DNA, 33 bp, Homo sapien
agtaccccaggctgcactcaaggccaattctct

SEQ ID NO: 445912 - DNA, 33 bp, Homo sapien
agtaccccaggctgcattcaaggccaattctct

SEQ ID NO: 445913 - DNA, 33 bp, Homo sapien
ttgctaagatggaacaaagaagggagagcagta

SEQ ID NO: 445914 - DNA, 33 bp, Homo sapien
ttgctaagatggaacacagaagggagagcagta

SEQ ID NO: 445915 - DNA, 33 bp, Homo sapien
ggaaatgcaaaggaaacggcacttcagactaca

SEQ ID NO: 445916 - DNA, 33 bp, Homo sapien
ggaaatgcaaaggaaagggcacttcagactaca

SEQ ID NO: 445917 - DNA, 33 bp, Homo sapien
gtggagacagcagtaaatgtgtttttctgtctc

SEQ ID NO: 445918 - DNA, 33 bp, Homo sapien
gtggagacagcagtaagtgtgtttttctgtctc

SEQ ID NO: 445919 - DNA, 33 bp, Homo sapien
taccaaacacttaaaaaatcaggactgaagccg

SEQ ID NO: 445920 - DNA, 33 bp, Homo sapien
taccaaacacttaaaagatcaggactgaagccg

SEQ ID NO: 445921 - DNA, 33 bp, Homo sapien
agaggaccagggaaggaatctggcaggagacaa

SEQ ID NO: 445922 - DNA, 33 bp, Homo sapien
agaggaccagggaaggcatctggcaggagacaa

SEQ ID NO: 445923 - DNA, 33 bp, Homo sapien
tctatacacacgcgcaaataaatatatattcaa

SEQ ID NO: 445924 - DNA, 33 bp, Homo sapien
tctatacacacgcgcacataaatatatattcaa

SEQ ID NO: 445925 - DNA, 33 bp, Homo sapien
cgtgccaccttttgaacgctcatctgtctgcac

SEQ ID NO: 445926 - DNA, 33 bp, Homo sapien
cgtgccaccttttgaatgctcatctgtctgcac

SEQ ID NO: 445927 - DNA, 33 bp, Homo sapien
ttcttctctccaggtacagttggttcgggtgcc

SEQ ID NO: 445928 - DNA, 33 bp, Homo sapien
ttcttctctccaggtatagttggttcgggtgcc

SEQ ID NO: 445929 - DNA, 33 bp, Homo sapien
aggaacaccaggaatcaccaggattcaccagaa

SEQ ID NO: 445930 - DNA, 33 bp, Homo sapien
aggaacaccaggaatcgccaggattcaccagaa

SEQ ID NO: 445931 - DNA, 33 bp, Homo sapien
tcaatcaatacgccagactactgcaaataaaat

SEQ ID NO: 445932 - DNA, 33 bp, Homo sapien
tcaatcaatacgccaggctactgcaaataaaat

SEQ ID NO: 445933 - DNA, 33 bp, Homo sapien
ctttgcagtctgagagaagtgtatcagcattgt

SEQ ID NO: 445934 - DNA, 33 bp, Homo sapien
ctttgcagtctgagaggagtgtatcagcattgt

SEQ ID NO: 445935 - DNA, 33 bp, Homo sapien
tgtatgtgcttttctacgtatgtacccttttat

SEQ ID NO: 445936 - DNA, 33 bp, Homo sapien
tgtatgtgcttttctatgtatgtacccttttat

SEQ ID NO: 445937 - DNA, 33 bp, Homo sapien
aatgtttgaacaaggccattcatctgtattagc

SEQ ID NO: 445938 - DNA, 33 bp, Homo sapien
aatgtttgaacaaggctattcatctgtattagc

SEQ ID NO: 445939 - DNA, 33 bp, Homo sapien
ccagatggtaaatcgaccctagaaaggttagat

SEQ ID NO: 445940 - DNA, 33 bp, Homo sapien
ccagatggtaaatcgatcctagaaaggttagat

SEQ ID NO: 445941 - DNA, 33 bp, Homo sapien
acagcaacacgctagaagaagatttaaggatga

SEQ ID NO: 445942 - DNA, 33 bp, Homo sapien
acagcaacacgctagaggaagatttaaggatga

SEQ ID NO: 445943 - DNA, 33 bp, Homo sapien
tactgctctttctacaatgataaattgcataac

SEQ ID NO: 445944 - DNA, 33 bp, Homo sapien
tactgctctttctacattgataaattgcataac

SEQ ID NO: 445945 - DNA, 33 bp, Homo sapien
gaaagaactacattaaacaatcctaccctaatc

SEQ ID NO: 445946 - DNA, 33 bp, Homo sapien
gaaagaactacattaatcaatcctaccctaatc

SEQ ID NO: 445947 - DNA, 33 bp, Homo sapien
aggaacttgccctagacacatgtgggcctaagt

SEQ ID NO: 445948 - DNA, 33 bp, Homo sapien
aggaacttgccctagatacatgtgggcctaagt

SEQ ID NO: 445949 - DNA, 33 bp, Homo sapien
aatggatcaaaggcttaaaagtgtttcattgag

SEQ ID NO: 445950 - DNA, 33 bp, Homo sapien
aatggatcaaaggcttgaaagtgtttcattgag

SEQ ID NO: 445951 - DNA, 33 bp, Homo sapien
gaataaaaatagtgagaaaaatagcaatgcata

SEQ ID NO: 445952 - DNA, 33 bp, Homo sapien
gaataaaaatagtgaggaaaatagcaatgcata

SEQ ID NO: 445953 - DNA, 33 bp, Homo sapien
ttttaaaacgcctcaaagtttgtatggattggt

SEQ ID NO: 445954 - DNA, 33 bp, Homo sapien
ttttaaaacgcctcaaggtttgtatggattggt

SEQ ID NO: 445955 - DNA, 33 bp, Homo sapien
tacaagcatcttgtcaatcaagtttgtaaattg

SEQ ID NO: 445956 - DNA, 33 bp, Homo sapien
tacaagcatcttgtcagtcaagtttgtaaattg

SEQ ID NO: 445957 - DNA, 33 bp, Homo sapien
agcaaagagggtgcaaagatgttcggactgaga

SEQ ID NO: 445958 - DNA, 33 bp, Homo sapien
agcaaagagggtgcaaggatgttcggactgaga

SEQ ID NO: 445959 - DNA, 33 bp, Homo sapien
aaagcacattgcattacaggtcagatgtactac

SEQ ID NO: 445960 - DNA, 33 bp, Homo sapien
aaagcacattgcattagaggtcagatgtactac

SEQ ID NO: 445961 - DNA, 33 bp, Homo sapien
aaaagcctctgattgaatataagccctatgtaa

SEQ ID NO: 445962 - DNA, 33 bp, Homo sapien
aaaagcctctgattgagtataagccctatgtaa

SEQ ID NO: 445963 - DNA, 33 bp, Homo sapien
atgtcatgcaacactacggacatacttaaactg

SEQ ID NO: 445964 - DNA, 33 bp, Homo sapien
atgtcatgcaacactagggacatacttaaactg

SEQ ID NO: 445965 - DNA, 33 bp, Homo sapien
aggattttgtcagggacccattgacagctgatt

SEQ ID NO: 445966 - DNA, 33 bp, Homo sapien
aggattttgtcagggatccattgacagctgatt

SEQ ID NO: 445967 - DNA, 33 bp, Homo sapien
cattttgaagtggaaaatgaagcatctattctt

SEQ ID NO: 445968 - DNA, 33 bp, Homo sapien
cattttgaagtggaaagtgaagcatctattctt

SEQ ID NO: 445969 - DNA, 33 bp, Homo sapien
taaatacatttaatagacaaagtgtttgtgttt

SEQ ID NO: 445970 - DNA, 33 bp, Homo sapien
taaatacatttaatagtcaaagtgtttgtgttt

SEQ ID NO: 445971 - DNA, 33 bp, Homo sapien
tatttactaaacatgacagagtttttctcaaga

SEQ ID NO: 445972 - DNA, 33 bp, Homo sapien
tatttactaaacatgatagagtttttctcaaga

SEQ ID NO: 445973 - DNA, 33 bp, Homo sapien
tacaaagtgacaaggaagtgcatgccaagtttc

SEQ ID NO: 445974 - DNA, 33 bp, Homo sapien
tacaaagtgacaaggaggtgcatgccaagtttc

SEQ ID NO: 445975 - DNA, 33 bp, Homo sapien
tatttaatcacccagacgttaagcctagtacct

SEQ ID NO: 445976 - DNA, 33 bp, Homo sapien
tatttaatcacccagatgttaagcctagtacct

SEQ ID NO: 445977 - DNA, 33 bp, Homo sapien
cccatctgtactaaaaatacgacaattagccag

SEQ ID NO: 445978 - DNA, 33 bp, Homo sapien
cccatctgtactaaaactacgacaattagccag

SEQ ID NO: 445979 - DNA, 33 bp, Homo sapien
tatgcctgaaaagcataaggtcttacttaatcc

SEQ ID NO: 445980 - DNA, 33 bp, Homo sapien
tatgcctgaaaagcatgaggtcttacttaatcc

SEQ ID NO: 445981 - DNA, 33 bp, Homo sapien
gaccacttgggattcaccagtttacattagaat

SEQ ID NO: 445982 - DNA, 33 bp, Homo sapien
gaccacttgggattcatcagtttacattagaat

SEQ ID NO: 445983 - DNA, 33 bp, Homo sapien
aaagaactaagccccaataagtgctgtgttgca

SEQ ID NO: 445984 - DNA, 33 bp, Homo sapien
aaagaactaagccccagtaagtgctgtgttgca

SEQ ID NO: 445985 - DNA, 33 bp, Homo sapien
taattgaatgtttgaacacccaagtttcatata

SEQ ID NO: 445986 - DNA, 33 bp, Homo sapien
taattgaatgtttgaatacccaagtttcatata

SEQ ID NO: 445987 - DNA, 33 bp, Homo sapien
tgctacaacatgaaataacttagaagacattat

SEQ ID NO: 445988 - DNA, 33 bp, Homo sapien
tgctacaacatgaaatgacttagaagacattat

SEQ ID NO: 445989 - DNA, 33 bp, Homo sapien
aaaatggaaaaatacccgctgcattagtggaat

SEQ ID NO: 445990 - DNA, 33 bp, Homo sapien
aaaatggaaaaatacctgctgcattagtggaat

SEQ ID NO: 445991 - DNA, 33 bp, Homo sapien
gaagacttagatcatggagttatatctttcggg

SEQ ID NO: 445992 - DNA, 33 bp, Homo sapien
gaagacttagatcatgtagttatatctttcggg

SEQ ID NO: 445993 - DNA, 33 bp, Homo sapien
atggatgtgcaatgtacgttacctccaaagtac

SEQ ID NO: 445994 - DNA, 33 bp, Homo sapien
atggatgtgcaatgtatgttacctccaaagtac

SEQ ID NO: 445995 - DNA, 33 bp, Homo sapien
acgagattgtcgtaagccataaaacacatgatg

SEQ ID NO: 445996 - DNA, 33 bp, Homo sapien
acgagattgtcgtaagtcataaaacacatgatg

SEQ ID NO: 445997 - DNA, 33 bp, Homo sapien
tgttaacaaggaaagacgtagattgtttgtaac

SEQ ID NO: 445998 - DNA, 33 bp, Homo sapien
tgttaacaaggaaagatgtagattgtttgtaac

SEQ ID NO: 445999 - DNA, 33 bp, Homo sapien
ttcatcctccttctctcaagactgcttttaaaa

SEQ ID NO: 446000 - DNA, 33 bp, Homo sapien
ttcatcctccttctcttaagactgcttttaaaa

SEQ ID NO: 446001 - DNA, 33 bp, Homo sapien
ttctgtgtccttagaaaggttgtaaataccata

SEQ ID NO: 446002 - DNA, 33 bp, Homo sapien
ttctgtgtccttagaatggttgtaaataccata

SEQ ID NO: 446003 - DNA, 33 bp, Homo sapien
agggagcagttataccaggtacatcacaaatgt

SEQ ID NO: 446004 - DNA, 33 bp, Homo sapien
agggagcagttataccgggtacatcacaaatgt

SEQ ID NO: 446005 - DNA, 33 bp, Homo sapien
tgcaactattttaatgccactcctatacccaga

SEQ ID NO: 446006 - DNA, 33 bp, Homo sapien
tgcaactattttaatgtcactcctatacccaga

SEQ ID NO: 446007 - DNA, 33 bp, Homo sapien
gggctacagagactcacgaaactttcatcaaaa

SEQ ID NO: 446008 - DNA, 33 bp, Homo sapien
gggctacagagactcatgaaactttcatcaaaa

SEQ ID NO: 446009 - DNA, 33 bp, Homo sapien
gaggctatgacatcaacagatcttttctgaggc

SEQ ID NO: 446010 - DNA, 33 bp, Homo sapien
gaggctatgacatcaagagatcttttctgaggc

SEQ ID NO: 446011 - DNA, 33 bp, Homo sapien
tgtgaagtgcctagaactgagcctggtacaagg

SEQ ID NO: 446012 - DNA, 33 bp, Homo sapien
tgtgaagtgcctagaattgagcctggtacaagg

SEQ ID NO: 446013 - DNA, 33 bp, Homo sapien
tctccactcactgctcgataaggacctgaccca

SEQ ID NO: 446014 - DNA, 33 bp, Homo sapien
tctccactcactgctctataaggacctgaccca

SEQ ID NO: 446015 - DNA, 33 bp, Homo sapien
tattcttagttgtcacaataaaatatctcattg

SEQ ID NO: 446016 - DNA, 33 bp, Homo sapien
tattcttagttgtcacgataaaatatctcattg

SEQ ID NO: 446017 - DNA, 33 bp, Homo sapien
ccaactcagaaataaaacaagcttaaaggcaga

SEQ ID NO: 446018 - DNA, 33 bp, Homo sapien
ccaactcagaaataaagcaagcttaaaggcaga

SEQ ID NO: 446019 - DNA, 33 bp, Homo sapien
gattagagtagcaagaccttcagaatggttcaa

SEQ ID NO: 446020 - DNA, 33 bp, Homo sapien
gattagagtagcaagatcttcagaatggttcaa

SEQ ID NO: 446021 - DNA, 33 bp, Homo sapien
acaggcctcctcagaaacagtgctctcaacatt

SEQ ID NO: 446022 - DNA, 33 bp, Homo sapien
acaggcctcctcagaagcagtgctctcaacatt

SEQ ID NO: 446023 - DNA, 33 bp, Homo sapien
taatatgcatctctagacatggataaatttatg

SEQ ID NO: 446024 - DNA, 33 bp, Homo sapien
taatatgcatctctaggcatggataaatttatg

SEQ ID NO: 446025 - DNA, 33 bp, Homo sapien
tccttataaatcaccaatctaatattctattat

SEQ ID NO: 446026 - DNA, 33 bp, Homo sapien
tccttataaatcaccagtctaatattctattat

SEQ ID NO: 446027 - DNA, 33 bp, Homo sapien
aagcttgcttaccctgaatcacctgttccttcc

SEQ ID NO: 446028 - DNA, 33 bp, Homo sapien
aagcttgcttaccctgcatcacctgttccttcc

SEQ ID NO: 446029 - DNA, 33 bp, Homo sapien
taaattcatggagagcccacatttcccctcagg

SEQ ID NO: 446030 - DNA, 33 bp, Homo sapien
taaattcatggagagctcacatttcccctcagg

SEQ ID NO: 446031 - DNA, 33 bp, Homo sapien
atttccacttttagcaactgatcttattacttg

SEQ ID NO: 446032 - DNA, 33 bp, Homo sapien
atttccacttttagcacctgatcttattacttg

SEQ ID NO: 446033 - DNA, 33 bp, Homo sapien
gctaaaagtggaaatactaaagaagacagcact

SEQ ID NO: 446034 - DNA, 33 bp, Homo sapien
gctaaaagtggaaatattaaagaagacagcact

SEQ ID NO: 446035 - DNA, 33 bp, Homo sapien
tttagcatcgtatacactataacctcagagctt

SEQ ID NO: 446036 - DNA, 33 bp, Homo sapien
tttagcatcgtatacattataacctcagagctt

SEQ ID NO: 446037 - DNA, 33 bp, Homo sapien
tgagacagctttaaacccagcaaaacatgtcgt

SEQ ID NO: 446038 - DNA, 33 bp, Homo sapien
tgagacagctttaaactcagcaaaacatgtcgt

SEQ ID NO: 446039 - DNA, 33 bp, Homo sapien
tttttatgtttccaccaaacaaactgtccaagg

SEQ ID NO: 446040 - DNA, 33 bp, Homo sapien
tttttatgtttccaccgaacaaactgtccaagg

SEQ ID NO: 446041 - DNA, 33 bp, Homo sapien
acaagtaccacaacacaagatgatggaatgaat

SEQ ID NO: 446042 - DNA, 33 bp, Homo sapien
acaagtaccacaacacgagatgatggaatgaat

SEQ ID NO: 446043 - DNA, 33 bp, Homo sapien
tgagaaagaaccatcaataaagaatagaggaat

SEQ ID NO: 446044 - DNA, 33 bp, Homo sapien
tgagaaagaaccatcactaaagaatagaggaat

SEQ ID NO: 446045 - DNA, 33 bp, Homo sapien
gaaagcactcccagaacagcatcccccagaggg

SEQ ID NO: 446046 - DNA, 33 bp, Homo sapien
gaaagcactcccagaagagcatcccccagaggg

SEQ ID NO: 446047 - DNA, 33 bp, Homo sapien
ggaataaatgttttgactacttaaatgtctgaa

SEQ ID NO: 446048 - DNA, 33 bp, Homo sapien
ggaataaatgttttgagtacttaaatgtctgaa

SEQ ID NO: 446049 - DNA, 33 bp, Homo sapien
tagaattttgctgcaaaactttgaactaaaatg

SEQ ID NO: 446050 - DNA, 33 bp, Homo sapien
tagaattttgctgcaatactttgaactaaaatg

SEQ ID NO: 446051 - DNA, 33 bp, Homo sapien
gtgagcacaaacttaaatgccccaacaatggac

SEQ ID NO: 446052 - DNA, 33 bp, Homo sapien
gtgagcacaaacttaattgccccaacaatggac

SEQ ID NO: 446053 - DNA, 33 bp, Homo sapien
gtaaagtaagtttcaaggaactccttatgtaga

SEQ ID NO: 446054 - DNA, 33 bp, Homo sapien
gtaaagtaagtttcaatgaactccttatgtaga

SEQ ID NO: 446055 - DNA, 33 bp, Homo sapien
ggacggattccccacaatgaaagtttcagttca

SEQ ID NO: 446056 - DNA, 33 bp, Homo sapien
ggacggattccccacagtgaaagtttcagttca

SEQ ID NO: 446057 - DNA, 33 bp, Homo sapien
ttgcacagttctgtgaatattgacaagtgtata

SEQ ID NO: 446058 - DNA, 33 bp, Homo sapien
ttgcacagttctgtgagtattgacaagtgtata

SEQ ID NO: 446059 - DNA, 33 bp, Homo sapien
tcaagagaaaatttacaggaaggagatgtttta

SEQ ID NO: 446060 - DNA, 33 bp, Homo sapien
tcaagagaaaatttacgggaaggagatgtttta

SEQ ID NO: 446061 - DNA, 33 bp, Homo sapien
agactaatcaatgtcacgtggagtcacactaac

SEQ ID NO: 446062 - DNA, 33 bp, Homo sapien
agactaatcaatgtcatgtggagtcacactaac

SEQ ID NO: 446063 - DNA, 33 bp, Homo sapien
ttctctatttccagtaggctcattaggctccat

SEQ ID NO: 446064 - DNA, 33 bp, Homo sapien
ttctctatttccagtatgctcattaggctccat

SEQ ID NO: 446065 - DNA, 33 bp, Homo sapien
tgacatcaccacacagccgactttagaaaagta

SEQ ID NO: 446066 - DNA, 33 bp, Homo sapien
tgacatcaccacacaggcgactttagaaaagta

SEQ ID NO: 446067 - DNA, 33 bp, Homo sapien
acactaattttcctcaaattaaaatcaatacag

SEQ ID NO: 446068 - DNA, 33 bp, Homo sapien
acactaattttcctcagattaaaatcaatacag

SEQ ID NO: 446069 - DNA, 33 bp, Homo sapien
aaaataatactgattacctgctgtaagttttac

SEQ ID NO: 446070 - DNA, 33 bp, Homo sapien
aaaataatactgattatctgctgtaagttttac

SEQ ID NO: 446071 - DNA, 33 bp, Homo sapien
gatgagtttcagcaccaagattaaaacatgaag

SEQ ID NO: 446072 - DNA, 33 bp, Homo sapien
gatgagtttcagcaccgagattaaaacatgaag

SEQ ID NO: 446073 - DNA, 33 bp, Homo sapien
taccttcactgttatcaatggagtttatgtaac

SEQ ID NO: 446074 - DNA, 33 bp, Homo sapien
taccttcactgttatcgatggagtttatgtaac

SEQ ID NO: 446075 - DNA, 33 bp, Homo sapien
gtcaaagatgaatcctcaaaagagagctcaagc

SEQ ID NO: 446076 - DNA, 33 bp, Homo sapien
gtcaaagatgaatccttaaaagagagctcaagc

SEQ ID NO: 446077 - DNA, 33 bp, Homo sapien
gcaaagacatagaatcaaatcagtctaggtgcc

SEQ ID NO: 446078 - DNA, 33 bp, Homo sapien
gcaaagacatagaatcgaatcagtctaggtgcc

SEQ ID NO: 446079 - DNA, 33 bp, Homo sapien
gtgggttctgcattcacaagttgaactaactgc

SEQ ID NO: 446080 - DNA, 33 bp, Homo sapien
gtgggttctgcattcataagttgaactaactgc

SEQ ID NO: 446081 - DNA, 33 bp, Homo sapien
agttttgtacttcccaacaatctttatgcaata

SEQ ID NO: 446082 - DNA, 33 bp, Homo sapien
agttttgtacttcccaccaatctttatgcaata

SEQ ID NO: 446083 - DNA, 33 bp, Homo sapien
gcaaatattattgagaaggcaaataagtccaaa

SEQ ID NO: 446084 - DNA, 33 bp, Homo sapien
gcaaatattattgagatggcaaataagtccaaa

SEQ ID NO: 446085 - DNA, 33 bp, Homo sapien
ttaggtcaaggaaaagccatagatccagttact

SEQ ID NO: 446086 - DNA, 33 bp, Homo sapien
ttaggtcaaggaaaagtcatagatccagttact

SEQ ID NO: 446087 - DNA, 33 bp, Homo sapien
gaacctgaagaatgcaaagaaaagaaagaggag

SEQ ID NO: 446088 - DNA, 33 bp, Homo sapien
gaacctgaagaatgcatagaaaagaaagaggag

SEQ ID NO: 446089 - DNA, 33 bp, Homo sapien
cttttgaactaaaaaacgtgtgtaagtacatat

SEQ ID NO: 446090 - DNA, 33 bp, Homo sapien
cttttgaactaaaaaatgtgtgtaagtacatat

SEQ ID NO: 446091 - DNA, 33 bp, Homo sapien
ttttccataatttcacaagccatcattataaca

SEQ ID NO: 446092 - DNA, 33 bp, Homo sapien
ttttccataatttcacgagccatcattataaca

SEQ ID NO: 446093 - DNA, 33 bp, Homo sapien
taccagtatttgcttcaaaacctttggttcccc

SEQ ID NO: 446094 - DNA, 33 bp, Homo sapien
taccagtatttgcttcgaaacctttggttcccc

SEQ ID NO: 446095 - DNA, 33 bp, Homo sapien
aactctaaatgtacaaaactagcctacaataag

SEQ ID NO: 446096 - DNA, 33 bp, Homo sapien
aactctaaatgtacaatactagcctacaataag

SEQ ID NO: 446097 - DNA, 33 bp, Homo sapien
aataaaacattgtcccagagagagaaagaattc

SEQ ID NO: 446098 - DNA, 33 bp, Homo sapien
aataaaacattgtccccgagagagaaagaattc

SEQ ID NO: 446099 - DNA, 33 bp, Homo sapien
gaattgagttttgaaagataagcaggagttagt

SEQ ID NO: 446100 - DNA, 33 bp, Homo sapien
gaattgagttttgaaatataagcaggagttagt

SEQ ID NO: 446101 - DNA, 33 bp, Homo sapien
ttaagttccttacctacgagacatattagacaa

SEQ ID NO: 446102 - DNA, 33 bp, Homo sapien
ttaagttccttacctatgagacatattagacaa

SEQ ID NO: 446103 - DNA, 33 bp, Homo sapien
gctttgtctcctgtaacctaaactctctgtaaa

SEQ ID NO: 446104 - DNA, 33 bp, Homo sapien
gctttgtctcctgtaatctaaactctctgtaaa

SEQ ID NO: 446105 - DNA, 33 bp, Homo sapien
tttaggcaacatggtgcaagcaagaaatcaagt

SEQ ID NO: 446106 - DNA, 33 bp, Homo sapien
tttaggcaacatggtggaagcaagaaatcaagt

SEQ ID NO: 446107 - DNA, 33 bp, Homo sapien
aaagacaatttataccactagattcttaggaat

SEQ ID NO: 446108 - DNA, 33 bp, Homo sapien
aaagacaatttataccgctagattcttaggaat

SEQ ID NO: 446109 - DNA, 33 bp, Homo sapien
ataaacctaagtctccaccaaaagatgaatgga

SEQ ID NO: 446110 - DNA, 33 bp, Homo sapien
ataaacctaagtctccgccaaaagatgaatgga

SEQ ID NO: 446111 - DNA, 33 bp, Homo sapien
ttaattgaacacatacaatttcattttatctgc

SEQ ID NO: 446112 - DNA, 33 bp, Homo sapien
ttaattgaacacatactatttcattttatctgc

SEQ ID NO: 446113 - DNA, 33 bp, Homo sapien
aggactttggatgtaccgagaatgaaatggaca

SEQ ID NO: 446114 - DNA, 33 bp, Homo sapien
aggactttggatgtactgagaatgaaatggaca

SEQ ID NO: 446115 - DNA, 33 bp, Homo sapien
cttcagggtgcagcagacaaagataccctagcg

SEQ ID NO: 446116 - DNA, 33 bp, Homo sapien
cttcagggtgcagcagtcaaagataccctagcg

SEQ ID NO: 446117 - DNA, 33 bp, Homo sapien
ctatgataatctaactcaacctttcagcatctg

SEQ ID NO: 446118 - DNA, 33 bp, Homo sapien
ctatgataatctaacttaacctttcagcatctg

SEQ ID NO: 446119 - DNA, 33 bp, Homo sapien
atatcttaaacacacaactacatgaaaacttaa

SEQ ID NO: 446120 - DNA, 33 bp, Homo sapien
atatcttaaacacacagctacatgaaaacttaa

SEQ ID NO: 446121 - DNA, 33 bp, Homo sapien
gcaccttccattataaactggaaatggtgaaca

SEQ ID NO: 446122 - DNA, 33 bp, Homo sapien
gcaccttccattataacctggaaatggtgaaca

SEQ ID NO: 446123 - DNA, 33 bp, Homo sapien
gcagtgtgaaaatggaataacacaaccaccatg

SEQ ID NO: 446124 - DNA, 33 bp, Homo sapien
gcagtgtgaaaatggagtaacacaaccaccatg

SEQ ID NO: 446125 - DNA, 33 bp, Homo sapien
cttataagcttttgggaaataactaacctatac

SEQ ID NO: 446126 - DNA, 33 bp, Homo sapien
cttataagcttttgggcaataactaacctatac

SEQ ID NO: 446127 - DNA, 33 bp, Homo sapien
tgggcaagtccaagaacgcttgtagaccaagcc

SEQ ID NO: 446128 - DNA, 33 bp, Homo sapien
tgggcaagtccaagaatgcttgtagaccaagcc

SEQ ID NO: 446129 - DNA, 33 bp, Homo sapien
ggagtctccatgaaaaagtcatagtccagctca

SEQ ID NO: 446130 - DNA, 33 bp, Homo sapien
ggagtctccatgaaaacgtcatagtccagctca

SEQ ID NO: 446131 - DNA, 33 bp, Homo sapien
cactacctgctggaacactcagggtctcaagaa

SEQ ID NO: 446132 - DNA, 33 bp, Homo sapien
cactacctgctggaactctcagggtctcaagaa

SEQ ID NO: 446133 - DNA, 33 bp, Homo sapien
acttacattgctacaaacacgaacataaaattt

SEQ ID NO: 446134 - DNA, 33 bp, Homo sapien
acttacattgctacaagcacgaacataaaattt

SEQ ID NO: 446135 - DNA, 33 bp, Homo sapien
agcataataatagctccctaaatgtgtccgtgt

SEQ ID NO: 446136 - DNA, 33 bp, Homo sapien
agcataataatagctctctaaatgtgtccgtgt

SEQ ID NO: 446137 - DNA, 33 bp, Homo sapien
tcctttttctgttcataaaccttctcaaaccag

SEQ ID NO: 446138 - DNA, 33 bp, Homo sapien
tcctttttctgttcatcaaccttctcaaaccag

SEQ ID NO: 446139 - DNA, 33 bp, Homo sapien
gaagtgaatgtggaacgcttgccactgcttttg

SEQ ID NO: 446140 - DNA, 33 bp, Homo sapien
gaagtgaatgtggaactcttgccactgcttttg

SEQ ID NO: 446141 - DNA, 33 bp, Homo sapien
gttttaggctattatgaataaaccatgcatgga

SEQ ID NO: 446142 - DNA, 33 bp, Homo sapien
gttttaggctattatggataaaccatgcatgga

SEQ ID NO: 446143 - DNA, 33 bp, Homo sapien
ttcattctttacactaccttaagaacagtagga

SEQ ID NO: 446144 - DNA, 33 bp, Homo sapien
ttcattctttacactatcttaagaacagtagga

SEQ ID NO: 446145 - DNA, 33 bp, Homo sapien
gttcctttcaattgtggaagataagtcttaata

SEQ ID NO: 446146 - DNA, 33 bp, Homo sapien
gttcctttcaattgtgtaagataagtcttaata

SEQ ID NO: 446147 - DNA, 33 bp, Homo sapien
tgcagacgtttgttgaactacacttttacttta

SEQ ID NO: 446148 - DNA, 33 bp, Homo sapien
tgcagacgtttgttgagctacacttttacttta

SEQ ID NO: 446149 - DNA, 33 bp, Homo sapien
aacacattgctgtttgaagaagtgacacaatgg

SEQ ID NO: 446150 - DNA, 33 bp, Homo sapien
aacacattgctgtttgtagaagtgacacaatgg

SEQ ID NO: 446151 - DNA, 33 bp, Homo sapien
ttttatttatttttataacctgcagaaagaaaa

SEQ ID NO: 446152 - DNA, 33 bp, Homo sapien
ttttatttatttttattacctgcagaaagaaaa

SEQ ID NO: 446153 - DNA, 33 bp, Homo sapien
attgaatgttaactacaaagtctgtataattca

SEQ ID NO: 446154 - DNA, 33 bp, Homo sapien
attgaatgttaactacgaagtctgtataattca

SEQ ID NO: 446155 - DNA, 33 bp, Homo sapien
acaatccagatggtctcagacataaacgtgcaa

SEQ ID NO: 446156 - DNA, 33 bp, Homo sapien
acaatccagatggtcttagacataaacgtgcaa

SEQ ID NO: 446157 - DNA, 33 bp, Homo sapien
tctagggtgtgatagacgcttcaaaacttttgc

SEQ ID NO: 446158 - DNA, 33 bp, Homo sapien
tctagggtgtgatagatgcttcaaaacttttgc

SEQ ID NO: 446159 - DNA, 33 bp, Homo sapien
cacaaccttttctgggcatcttgatatgactta

SEQ ID NO: 446160 - DNA, 33 bp, Homo sapien
cacaaccttttctggggatcttgatatgactta

SEQ ID NO: 446161 - DNA, 33 bp, Homo sapien
tgaaatgcatattttaccttctttcacagtaat

SEQ ID NO: 446162 - DNA, 33 bp, Homo sapien
tgaaatgcatattttatcttctttcacagtaat

SEQ ID NO: 446163 - DNA, 33 bp, Homo sapien
aagaagtgtggtgatacacaaagcaagatccag

SEQ ID NO: 446164 - DNA, 33 bp, Homo sapien
aagaagtgtggtgatatacaaagcaagatccag

SEQ ID NO: 446165 - DNA, 33 bp, Homo sapien
actttttatttgtcaaaatgtgttggcatccaa

SEQ ID NO: 446166 - DNA, 33 bp, Homo sapien
actttttatttgtcaatatgtgttggcatccaa

SEQ ID NO: 446167 - DNA, 33 bp, Homo sapien
gttgaactaatttacacgcccggctcctatttc

SEQ ID NO: 446168 - DNA, 33 bp, Homo sapien
gttgaactaatttacatgcccggctcctatttc

SEQ ID NO: 446169 - DNA, 33 bp, Homo sapien
gaagacatttacgtgaccaagaaacatatgaaa

SEQ ID NO: 446170 - DNA, 33 bp, Homo sapien
gaagacatttacgtgatcaagaaacatatgaaa

SEQ ID NO: 446171 - DNA, 33 bp, Homo sapien
ataagttacaagcagaagaacagtattcataaa

SEQ ID NO: 446172 - DNA, 33 bp, Homo sapien
ataagttacaagcagatgaacagtattcataaa

SEQ ID NO: 446173 - DNA, 33 bp, Homo sapien
gaacactttaagggcccctttacacaataaaac

SEQ ID NO: 446174 - DNA, 33 bp, Homo sapien
gaacactttaagggcctctttacacaataaaac

SEQ ID NO: 446175 - DNA, 33 bp, Homo sapien
gtcaattatgttaaaaatgatgtcatgatatat

SEQ ID NO: 446176 - DNA, 33 bp, Homo sapien
gtcaattatgttaaaactgatgtcatgatatat

SEQ ID NO: 446177 - DNA, 33 bp, Homo sapien
atagtaaaaatgttcaaactcgatctttcagtt

SEQ ID NO: 446178 - DNA, 33 bp, Homo sapien
atagtaaaaatgttcagactcgatctttcagtt

SEQ ID NO: 446179 - DNA, 33 bp, Homo sapien
tgaatcacctctgctcgcatttagtacggcaaa

SEQ ID NO: 446180 - DNA, 33 bp, Homo sapien
tgaatcacctctgctctcatttagtacggcaaa

SEQ ID NO: 446181 - DNA, 33 bp, Homo sapien
aataatacttgtcaaaaatgaggagctttactg

SEQ ID NO: 446182 - DNA, 33 bp, Homo sapien
aataatacttgtcaaatatgaggagctttactg

SEQ ID NO: 446183 - DNA, 33 bp, Homo sapien
tcatgaaaactgttgcaccctataatttgtcta

SEQ ID NO: 446184 - DNA, 33 bp, Homo sapien
tcatgaaaactgttgctccctataatttgtcta

SEQ ID NO: 446185 - DNA, 33 bp, Homo sapien
accaatgtgtagcaaacgagaacttctaaacaa

SEQ ID NO: 446186 - DNA, 33 bp, Homo sapien
accaatgtgtagcaaatgagaacttctaaacaa

SEQ ID NO: 446187 - DNA, 33 bp, Homo sapien
gtgttccaattgcttgcagaatttgtaatgact

SEQ ID NO: 446188 - DNA, 33 bp, Homo sapien
gtgttccaattgcttgtagaatttgtaatgact

SEQ ID NO: 446189 - DNA, 33 bp, Homo sapien
agagttcctgcatgaccgagttcctcctttctg

SEQ ID NO: 446190 - DNA, 33 bp, Homo sapien
agagttcctgcatgactgagttcctcctttctg

SEQ ID NO: 446191 - DNA, 33 bp, Homo sapien
gttttaactggaaaacacaactaatcataggtg

SEQ ID NO: 446192 - DNA, 33 bp, Homo sapien
gttttaactggaaaacgcaactaatcataggtg

SEQ ID NO: 446193 - DNA, 33 bp, Homo sapien
caatgttggttatctccacaaatgacttgagca

SEQ ID NO: 446194 - DNA, 33 bp, Homo sapien
caatgttggttatctctacaaatgacttgagca

SEQ ID NO: 446195 - DNA, 33 bp, Homo sapien
cctgtgaatataaatgaacggaggcaatcaaca

SEQ ID NO: 446196 - DNA, 33 bp, Homo sapien
cctgtgaatataaatgcacggaggcaatcaaca

SEQ ID NO: 446197 - DNA, 33 bp, Homo sapien
gtatatatgccatgaactgatcagtaatacaaa

SEQ ID NO: 446198 - DNA, 33 bp, Homo sapien
gtatatatgccatgaagtgatcagtaatacaaa

SEQ ID NO: 446199 - DNA, 33 bp, Homo sapien
agagccatataaggaactaaatgtagatgacta

SEQ ID NO: 446200 - DNA, 33 bp, Homo sapien
agagccatataaggaagtaaatgtagatgacta

SEQ ID NO: 446201 - DNA, 33 bp, Homo sapien
ttctctctccgatagacagataattgatagata

SEQ ID NO: 446202 - DNA, 33 bp, Homo sapien
ttctctctccgatagatagataattgatagata

SEQ ID NO: 446203 - DNA, 33 bp, Homo sapien
gtcgttcacctcagaaactgaacgacattctca

SEQ ID NO: 446204 - DNA, 33 bp, Homo sapien
gtcgttcacctcagaagctgaacgacattctca

SEQ ID NO: 446205 - DNA, 33 bp, Homo sapien
tcaaagctgtccacccaagttagagtctcccat

SEQ ID NO: 446206 - DNA, 33 bp, Homo sapien
tcaaagctgtccacccgagttagagtctcccat

SEQ ID NO: 446207 - DNA, 33 bp, Homo sapien
cctcacctgtaatgaaaagatgtaacttttaag

SEQ ID NO: 446208 - DNA, 33 bp, Homo sapien
cctcacctgtaatgaagagatgtaacttttaag

SEQ ID NO: 446209 - DNA, 33 bp, Homo sapien
tttggaataaatccaactcatcttgtgaaggac

SEQ ID NO: 446210 - DNA, 33 bp, Homo sapien
tttggaataaatccaagtcatcttgtgaaggac

SEQ ID NO: 446211 - DNA, 33 bp, Homo sapien
cctccattgtcacaaggccctttctatatgtat

SEQ ID NO: 446212 - DNA, 33 bp, Homo sapien
cctccattgtcacaagtccctttctatatgtat

SEQ ID NO: 446213 - DNA, 33 bp, Homo sapien
tccatttgtttatttgcagtagttgtcatctga

SEQ ID NO: 446214 - DNA, 33 bp, Homo sapien
tccatttgtttatttgtagtagttgtcatctga

SEQ ID NO: 446215 - DNA, 33 bp, Homo sapien
cagtaagcagaagaaacaaatgatgaatcttaa

SEQ ID NO: 446216 - DNA, 33 bp, Homo sapien
cagtaagcagaagaaataaatgatgaatcttaa

SEQ ID NO: 446217 - DNA, 33 bp, Homo sapien
taccaaaacttcaagacgcaacctataaaaaat

SEQ ID NO: 446218 - DNA, 33 bp, Homo sapien
taccaaaacttcaagatgcaacctataaaaaat

SEQ ID NO: 446219 - DNA, 33 bp, Homo sapien
ttggtatcatttctggaaggtctaaaacagact

SEQ ID NO: 446220 - DNA, 33 bp, Homo sapien
ttggtatcatttctgggaggtctaaaacagact

SEQ ID NO: 446221 - DNA, 33 bp, Homo sapien
tttgagtaactaagaaaactgtacaataagcag

SEQ ID NO: 446222 - DNA, 33 bp, Homo sapien
tttgagtaactaagaacactgtacaataagcag

SEQ ID NO: 446223 - DNA, 33 bp, Homo sapien
ggagtgaccatcccaccgtgaaccccaacaaaa

SEQ ID NO: 446224 - DNA, 33 bp, Homo sapien
ggagtgaccatcccactgtgaaccccaacaaaa

SEQ ID NO: 446225 - DNA, 33 bp, Homo sapien
ttctacctattcttcaagattcaactgcaatat

SEQ ID NO: 446226 - DNA, 33 bp, Homo sapien
ttctacctattcttcaggattcaactgcaatat

SEQ ID NO: 446227 - DNA, 33 bp, Homo sapien
tcttgagagtaacaagcaatgtaagagagaata

SEQ ID NO: 446228 - DNA, 33 bp, Homo sapien
tcttgagagtaacaagtaatgtaagagagaata

SEQ ID NO: 446229 - DNA, 33 bp, Homo sapien
ccttgcacctaccaagaacgtattatacctggc

SEQ ID NO: 446230 - DNA, 33 bp, Homo sapien
ccttgcacctaccaagcacgtattatacctggc

SEQ ID NO: 446231 - DNA, 33 bp, Homo sapien
aaactgaaacttacatgaatttctcaccatctt

SEQ ID NO: 446232 - DNA, 33 bp, Homo sapien
aaactgaaacttacattaatttctcaccatctt

SEQ ID NO: 446233 - DNA, 33 bp, Homo sapien
taatatctagatcctcagactatggctatgggg

SEQ ID NO: 446234 - DNA, 33 bp, Homo sapien
taatatctagatcctccgactatggctatgggg

SEQ ID NO: 446235 - DNA, 33 bp, Homo sapien
atgattctgctaaaaccgtcatccttgaaatta

SEQ ID NO: 446236 - DNA, 33 bp, Homo sapien
atgattctgctaaaactgtcatccttgaaatta

SEQ ID NO: 446237 - DNA, 33 bp, Homo sapien
ccctggccagcttctgcacgagctctctctcaa

SEQ ID NO: 446238 - DNA, 33 bp, Homo sapien
ccctggccagcttctggacgagctctctctcaa

SEQ ID NO: 446239 - DNA, 33 bp, Homo sapien
gcataaattgtactgaaaatctttaggtagtct

SEQ ID NO: 446240 - DNA, 33 bp, Homo sapien
gcataaattgtactgataatctttaggtagtct

SEQ ID NO: 446241 - DNA, 33 bp, Homo sapien
atattgtattgatcgacgatggatggtgactat

SEQ ID NO: 446242 - DNA, 33 bp, Homo sapien
atattgtattgatcgatgatggatggtgactat

SEQ ID NO: 446243 - DNA, 33 bp, Homo sapien
aggcagtttaagtgaacgctaagattattttct

SEQ ID NO: 446244 - DNA, 33 bp, Homo sapien
aggcagtttaagtgaaggctaagattattttct

SEQ ID NO: 446245 - DNA, 33 bp, Homo sapien
aactctatgccacttgcatggataattgatgta

SEQ ID NO: 446246 - DNA, 33 bp, Homo sapien
aactctatgccacttgtatggataattgatgta

SEQ ID NO: 446247 - DNA, 33 bp, Homo sapien
agtttctcgcctttcaagttcattatgagataa

SEQ ID NO: 446248 - DNA, 33 bp, Homo sapien
agtttctcgcctttcacgttcattatgagataa

SEQ ID NO: 446249 - DNA, 33 bp, Homo sapien
gctggagatgcataataacttttaactgagaga

SEQ ID NO: 446250 - DNA, 33 bp, Homo sapien
gctggagatgcataatgacttttaactgagaga

SEQ ID NO: 446251 - DNA, 33 bp, Homo sapien
tcatgattacctgggaataacagtttgtgaagc

SEQ ID NO: 446252 - DNA, 33 bp, Homo sapien
tcatgattacctgggagtaacagtttgtgaagc

SEQ ID NO: 446253 - DNA, 33 bp, Homo sapien
cttttctttttttatcaaaatctggacaaacta

SEQ ID NO: 446254 - DNA, 33 bp, Homo sapien
cttttctttttttatccaaatctggacaaacta

SEQ ID NO: 446255 - DNA, 33 bp, Homo sapien
tctctctgaccacttacatatcttagcatataa

SEQ ID NO: 446256 - DNA, 33 bp, Homo sapien
tctctctgaccacttagatatcttagcatataa

SEQ ID NO: 446257 - DNA, 33 bp, Homo sapien
ttgatgctcaacacaaattcattggagacaatg

SEQ ID NO: 446258 - DNA, 33 bp, Homo sapien
ttgatgctcaacacaatttcattggagacaatg

SEQ ID NO: 446259 - DNA, 33 bp, Homo sapien
ccttttggcacacaaaccttctctggtaaggga

SEQ ID NO: 446260 - DNA, 33 bp, Homo sapien
ccttttggcacacaaatcttctctggtaaggga

SEQ ID NO: 446261 - DNA, 33 bp, Homo sapien
ctaaactaaggtaagagtcaacataacaaaaaa

SEQ ID NO: 446262 - DNA, 33 bp, Homo sapien
ctaaactaaggtaagattcaacataacaaaaaa

SEQ ID NO: 446263 - DNA, 33 bp, Homo sapien
ttagatcatagataaaagcaaaaccattcctgc

SEQ ID NO: 446264 - DNA, 33 bp, Homo sapien
ttagatcatagataaaggcaaaaccattcctgc

SEQ ID NO: 446265 - DNA, 33 bp, Homo sapien
tataatctaaccaagacggtggaggtgaggtac

SEQ ID NO: 446266 - DNA, 33 bp, Homo sapien
tataatctaaccaagatggtggaggtgaggtac

SEQ ID NO: 446267 - DNA, 33 bp, Homo sapien
taaaacatttagtgtaagaatagatgcagacac

SEQ ID NO: 446268 - DNA, 33 bp, Homo sapien
taaaacatttagtgtacgaatagatgcagacac

SEQ ID NO: 446269 - DNA, 33 bp, Homo sapien
tgctgattttttcataacatctgttcttgtaac

SEQ ID NO: 446270 - DNA, 33 bp, Homo sapien
tgctgattttttcatagcatctgttcttgtaac

SEQ ID NO: 446271 - DNA, 33 bp, Homo sapien
ttttcatcattcaagactatttcaaaaacactc

SEQ ID NO: 446272 - DNA, 33 bp, Homo sapien
ttttcatcattcaagattatttcaaaaacactc

SEQ ID NO: 446273 - DNA, 33 bp, Homo sapien
atatggaaactgttcaaatttctaacaagacct

SEQ ID NO: 446274 - DNA, 33 bp, Homo sapien
atatggaaactgttcagatttctaacaagacct

SEQ ID NO: 446275 - DNA, 33 bp, Homo sapien
catttgcaatatgtcaaaaaagcaacacaactt

SEQ ID NO: 446276 - DNA, 33 bp, Homo sapien
catttgcaatatgtcataaaagcaacacaactt

SEQ ID NO: 446277 - DNA, 33 bp, Homo sapien
ggagcttggttaggaaaacgaaagacgtccagt

SEQ ID NO: 446278 - DNA, 33 bp, Homo sapien
ggagcttggttaggaagacgaaagacgtccagt

SEQ ID NO: 446279 - DNA, 33 bp, Homo sapien
gttacaatttgacctgaaaacatacatttcact

SEQ ID NO: 446280 - DNA, 33 bp, Homo sapien
gttacaatttgacctgcaaacatacatttcact

SEQ ID NO: 446281 - DNA, 33 bp, Homo sapien
atgtgagttttggacactaatatggtgtgttcc

SEQ ID NO: 446282 - DNA, 33 bp, Homo sapien
atgtgagttttggacattaatatggtgtgttcc

SEQ ID NO: 446283 - DNA, 33 bp, Homo sapien
cacttttgctagccaaacctcttcctttctccc

SEQ ID NO: 446284 - DNA, 33 bp, Homo sapien
cacttttgctagccaatcctcttcctttctccc

SEQ ID NO: 446285 - DNA, 33 bp, Homo sapien
caaaatgaagaagtcaatactgttaccttttta

SEQ ID NO: 446286 - DNA, 33 bp, Homo sapien
caaaatgaagaagtcagtactgttaccttttta

SEQ ID NO: 446287 - DNA, 33 bp, Homo sapien
aaacaaaaatttcacaatgactaaagctgaaat

SEQ ID NO: 446288 - DNA, 33 bp, Homo sapien
aaacaaaaatttcacagtgactaaagctgaaat

SEQ ID NO: 446289 - DNA, 33 bp, Homo sapien
agtttcatctttttcacgttctgtctcatcttg

SEQ ID NO: 446290 - DNA, 33 bp, Homo sapien
agtttcatctttttcatgttctgtctcatcttg

SEQ ID NO: 446291 - DNA, 33 bp, Homo sapien
tctccattagatgaaacactgagaactctttta

SEQ ID NO: 446292 - DNA, 33 bp, Homo sapien
tctccattagatgaaatactgagaactctttta

SEQ ID NO: 446293 - DNA, 33 bp, Homo sapien
tatagatgtttccaacaatactttcatcaacat

SEQ ID NO: 446294 - DNA, 33 bp, Homo sapien
tatagatgtttccaacgatactttcatcaacat

SEQ ID NO: 446295 - DNA, 33 bp, Homo sapien
taccatccatggactcaatttctcatgttgtga

SEQ ID NO: 446296 - DNA, 33 bp, Homo sapien
taccatccatggactcgatttctcatgttgtga

SEQ ID NO: 446297 - DNA, 33 bp, Homo sapien
atttagaacatcaataaacataaatataaatat

SEQ ID NO: 446298 - DNA, 33 bp, Homo sapien
atttagaacatcaatagacataaatataaatat

SEQ ID NO: 446299 - DNA, 33 bp, Homo sapien
cacagtttagctctcaaaaataatggagacatt

SEQ ID NO: 446300 - DNA, 33 bp, Homo sapien
cacagtttagctctcagaaataatggagacatt

SEQ ID NO: 446301 - DNA, 33 bp, Homo sapien
aggattatcagattagcagtgctccaaggaaga

SEQ ID NO: 446302 - DNA, 33 bp, Homo sapien
aggattatcagattagtagtgctccaaggaaga

SEQ ID NO: 446303 - DNA, 33 bp, Homo sapien
gcctctaaggaaggagaaaattcaaagaagaac

SEQ ID NO: 446304 - DNA, 33 bp, Homo sapien
gcctctaaggaaggaggaaattcaaagaagaac

SEQ ID NO: 446305 - DNA, 33 bp, Homo sapien
ttccagtgtcagttaaagagtatttcttgtact

SEQ ID NO: 446306 - DNA, 33 bp, Homo sapien
ttccagtgtcagttaacgagtatttcttgtact

SEQ ID NO: 446307 - DNA, 33 bp, Homo sapien
gtaaagctatggcatacgagtttttttgtaact

SEQ ID NO: 446308 - DNA, 33 bp, Homo sapien
gtaaagctatggcatatgagtttttttgtaact

SEQ ID NO: 446309 - DNA, 33 bp, Homo sapien
ttttgtcaactcaaaaatattgtttacatggaa

SEQ ID NO: 446310 - DNA, 33 bp, Homo sapien
ttttgtcaactcaaaactattgtttacatggaa

SEQ ID NO: 446311 - DNA, 33 bp, Homo sapien
tcatattgaatagtgacatttgattaaaggctt

SEQ ID NO: 446312 - DNA, 33 bp, Homo sapien
tcatattgaatagtgagatttgattaaaggctt

SEQ ID NO: 446313 - DNA, 33 bp, Homo sapien
ctgagtgttcaggacaaatgcttcatgccattg

SEQ ID NO: 446314 - DNA, 33 bp, Homo sapien
ctgagtgttcaggacagatgcttcatgccattg

SEQ ID NO: 446315 - DNA, 33 bp, Homo sapien
tgctttacaaataaccaaggaatattacaaact

SEQ ID NO: 446316 - DNA, 33 bp, Homo sapien
tgctttacaaataaccgaggaatattacaaact

SEQ ID NO: 446317 - DNA, 33 bp, Homo sapien
atcaagtatccataaagatccagtaagtttctg

SEQ ID NO: 446318 - DNA, 33 bp, Homo sapien
atcaagtatccataaatatccagtaagtttctg

SEQ ID NO: 446319 - DNA, 33 bp, Homo sapien
tcgcaaaaacctttagaagacaccatactgtag

SEQ ID NO: 446320 - DNA, 33 bp, Homo sapien
tcgcaaaaacctttaggagacaccatactgtag

SEQ ID NO: 446321 - DNA, 33 bp, Homo sapien
aaaggcagtgagaaaaatacaaattggttagga

SEQ ID NO: 446322 - DNA, 33 bp, Homo sapien
aaaggcagtgagaaaactacaaattggttagga

SEQ ID NO: 446323 - DNA, 33 bp, Homo sapien
tatttttctctgcgtacagtaaatgaatgccca

SEQ ID NO: 446324 - DNA, 33 bp, Homo sapien
tatttttctctgcgtatagtaaatgaatgccca

SEQ ID NO: 446325 - DNA, 33 bp, Homo sapien
agtcatgtcaactatacatttaaatggcaaaaa

SEQ ID NO: 446326 - DNA, 33 bp, Homo sapien
agtcatgtcaactatagatttaaatggcaaaaa

SEQ ID NO: 446327 - DNA, 33 bp, Homo sapien
agatcttgttttctaacgcataatttccctgtt

SEQ ID NO: 446328 - DNA, 33 bp, Homo sapien
agatcttgttttctaatgcataatttccctgtt

SEQ ID NO: 446329 - DNA, 33 bp, Homo sapien
acataaatctacacctcagcgatattaataagc

SEQ ID NO: 446330 - DNA, 33 bp, Homo sapien
acataaatctacacctgagcgatattaataagc

SEQ ID NO: 446331 - DNA, 33 bp, Homo sapien
gtgatgaaatcagggcaatttggatatccatca

SEQ ID NO: 446332 - DNA, 33 bp, Homo sapien
gtgatgaaatcagggccatttggatatccatca

SEQ ID NO: 446333 - DNA, 33 bp, Homo sapien
agttctgttctccattcaagaggtctagatgat

SEQ ID NO: 446334 - DNA, 33 bp, Homo sapien
agttctgttctccatttaagaggtctagatgat

SEQ ID NO: 446335 - DNA, 33 bp, Homo sapien
tgctcctatgagatcaactttttctaaacaagt

SEQ ID NO: 446336 - DNA, 33 bp, Homo sapien
tgctcctatgagatcagctttttctaaacaagt

SEQ ID NO: 446337 - DNA, 33 bp, Homo sapien
caggttttggattggccgaagcctttgtaattg

SEQ ID NO: 446338 - DNA, 33 bp, Homo sapien
caggttttggattggctgaagcctttgtaattg

SEQ ID NO: 446339 - DNA, 33 bp, Homo sapien
cactaggcataaaaatcaattctatgagattct

SEQ ID NO: 446340 - DNA, 33 bp, Homo sapien
cactaggcataaaaattaattctatgagattct

SEQ ID NO: 446341 - DNA, 33 bp, Homo sapien
aattggaagcatgataaggaacaccggttaaaa

SEQ ID NO: 446342 - DNA, 33 bp, Homo sapien
aattggaagcatgatatggaacaccggttaaaa

SEQ ID NO: 446343 - DNA, 33 bp, Homo sapien
gaagtctctatttgtcaaattatggcaattatt

SEQ ID NO: 446344 - DNA, 33 bp, Homo sapien
gaagtctctatttgtctaattatggcaattatt

SEQ ID NO: 446345 - DNA, 33 bp, Homo sapien
aactcacagatgaggaactatactgtttgttgt

SEQ ID NO: 446346 - DNA, 33 bp, Homo sapien
aactcacagatgaggagctatactgtttgttgt

SEQ ID NO: 446347 - DNA, 33 bp, Homo sapien
ttaaaagaagaaacgacataacaattatacctc

SEQ ID NO: 446348 - DNA, 33 bp, Homo sapien
ttaaaagaagaaacgagataacaattatacctc

SEQ ID NO: 446349 - DNA, 33 bp, Homo sapien
ctgagagaaacgacaacaagctgtcaaacggat

SEQ ID NO: 446350 - DNA, 33 bp, Homo sapien
ctgagagaaacgacaataagctgtcaaacggat

SEQ ID NO: 446351 - DNA, 33 bp, Homo sapien
tagttattgtgaattacacctcaatgaagagat

SEQ ID NO: 446352 - DNA, 33 bp, Homo sapien
tagttattgtgaattatacctcaatgaagagat

SEQ ID NO: 446353 - DNA, 33 bp, Homo sapien
acattatgctgtcaataaaatcacaaagtcttc

SEQ ID NO: 446354 - DNA, 33 bp, Homo sapien
acattatgctgtcaatcaaatcacaaagtcttc

SEQ ID NO: 446355 - DNA, 33 bp, Homo sapien
tcaaatgacaagattaccagtttgggtaacatg

SEQ ID NO: 446356 - DNA, 33 bp, Homo sapien
tcaaatgacaagattatcagtttgggtaacatg

SEQ ID NO: 446357 - DNA, 33 bp, Homo sapien
ttgagtgtgctttatagctaaacaaagagagat

SEQ ID NO: 446358 - DNA, 33 bp, Homo sapien
ttgagtgtgctttatatctaaacaaagagagat

SEQ ID NO: 446359 - DNA, 33 bp, Homo sapien
attcctcttccaactacatcatttcatgaggat

SEQ ID NO: 446360 - DNA, 33 bp, Homo sapien
attcctcttccaactagatcatttcatgaggat

SEQ ID NO: 446361 - DNA, 33 bp, Homo sapien
atttttgaatttccagccataccacagattttt

SEQ ID NO: 446362 - DNA, 33 bp, Homo sapien
atttttgaatttccagtcataccacagattttt

SEQ ID NO: 446363 - DNA, 33 bp, Homo sapien
aatgcaaaataaaagccaacatatcccaatatc

SEQ ID NO: 446364 - DNA, 33 bp, Homo sapien
aatgcaaaataaaagctaacatatcccaatatc

SEQ ID NO: 446365 - DNA, 33 bp, Homo sapien
ttctgactaaagtggaaccaggcctgaaattaa

SEQ ID NO: 446366 - DNA, 33 bp, Homo sapien
ttctgactaaagtggatccaggcctgaaattaa

SEQ ID NO: 446367 - DNA, 33 bp, Homo sapien
ccaactatactctaagactgaattcttgggtta

SEQ ID NO: 446368 - DNA, 33 bp, Homo sapien
ccaactatactctaaggctgaattcttgggtta

SEQ ID NO: 446369 - DNA, 33 bp, Homo sapien
tccctgctccttcctcaaatcctctgctaacac

SEQ ID NO: 446370 - DNA, 33 bp, Homo sapien
tccctgctccttcctcgaatcctctgctaacac

SEQ ID NO: 446371 - DNA, 33 bp, Homo sapien
tttgtatccattaaacaagccaggcaaagaggt

SEQ ID NO: 446372 - DNA, 33 bp, Homo sapien
tttgtatccattaaacgagccaggcaaagaggt

SEQ ID NO: 446373 - DNA, 33 bp, Homo sapien
cctgtgtcagaatttaataaatatacaatttaa

SEQ ID NO: 446374 - DNA, 33 bp, Homo sapien
cctgtgtcagaatttactaaatatacaatttaa

SEQ ID NO: 446375 - DNA, 33 bp, Homo sapien
gtacaaaggttagaacggtaatttgtgctgtta

SEQ ID NO: 446376 - DNA, 33 bp, Homo sapien
gtacaaaggttagaactgtaatttgtgctgtta

SEQ ID NO: 446377 - DNA, 33 bp, Homo sapien
agagccacgagtcacgcagagctacagcttcct

SEQ ID NO: 446378 - DNA, 33 bp, Homo sapien
agagccacgagtcacggagagctacagcttcct

SEQ ID NO: 446379 - DNA, 33 bp, Homo sapien
aatggtgcatacacacaattgcacagtgcacat

SEQ ID NO: 446380 - DNA, 33 bp, Homo sapien
aatggtgcatacacacgattgcacagtgcacat

SEQ ID NO: 446381 - DNA, 33 bp, Homo sapien
ctggtcagagtagtcacagtctgtggagaggat

SEQ ID NO: 446382 - DNA, 33 bp, Homo sapien
ctggtcagagtagtcatagtctgtggagaggat

SEQ ID NO: 446383 - DNA, 33 bp, Homo sapien
gtcccttccctggccaaaactgactgaccacac

SEQ ID NO: 446384 - DNA, 33 bp, Homo sapien
gtcccttccctggccacaactgactgaccacac

SEQ ID NO: 446385 - DNA, 33 bp, Homo sapien
tggaagggaaacctgacgtgtattatctaaaat

SEQ ID NO: 446386 - DNA, 33 bp, Homo sapien
tggaagggaaacctgatgtgtattatctaaaat

SEQ ID NO: 446387 - DNA, 33 bp, Homo sapien
agagcagttatcagaacgggttggtttgacctg

SEQ ID NO: 446388 - DNA, 33 bp, Homo sapien
agagcagttatcagaatgggttggtttgacctg

SEQ ID NO: 446389 - DNA, 33 bp, Homo sapien
gtaaaattcagcactaagtcctaacaatcttat

SEQ ID NO: 446390 - DNA, 33 bp, Homo sapien
gtaaaattcagcactatgtcctaacaatcttat

SEQ ID NO: 446391 - DNA, 33 bp, Homo sapien
aattgatggaatatccaattttacgtgtgtgtg

SEQ ID NO: 446392 - DNA, 33 bp, Homo sapien
aattgatggaatatcctattttacgtgtgtgtg

SEQ ID NO: 446393 - DNA, 33 bp, Homo sapien
aacccaggaaattacaactcttgcatcttcagc

SEQ ID NO: 446394 - DNA, 33 bp, Homo sapien
aacccaggaaattacagctcttgcatcttcagc

SEQ ID NO: 446395 - DNA, 33 bp, Homo sapien
agtaatgttgagtttccctgactcattatttta

SEQ ID NO: 446396 - DNA, 33 bp, Homo sapien
agtaatgttgagtttctctgactcattatttta

SEQ ID NO: 446397 - DNA, 33 bp, Homo sapien
aataagttacattgcactatgtgactaaatgta

SEQ ID NO: 446398 - DNA, 33 bp, Homo sapien
aataagttacattgcattatgtgactaaatgta

SEQ ID NO: 446399 - DNA, 33 bp, Homo sapien
actgactttcatatccagactgcataagaaaga

SEQ ID NO: 446400 - DNA, 33 bp, Homo sapien
actgactttcatatccggactgcataagaaaga

SEQ ID NO: 446401 - DNA, 33 bp, Homo sapien
aaacagtgaatatggcaactgcccacctagaaa

SEQ ID NO: 446402 - DNA, 33 bp, Homo sapien
aaacagtgaatatggcgactgcccacctagaaa

SEQ ID NO: 446403 - DNA, 33 bp, Homo sapien
ttatatgagttagaaaacgatgacctctactga

SEQ ID NO: 446404 - DNA, 33 bp, Homo sapien
ttatatgagttagaaagcgatgacctctactga

SEQ ID NO: 446405 - DNA, 33 bp, Homo sapien
atgttttgtcttcatcacaattaaagtatatta

SEQ ID NO: 446406 - DNA, 33 bp, Homo sapien
atgttttgtcttcatcgcaattaaagtatatta

SEQ ID NO: 446407 - DNA, 33 bp, Homo sapien
tgtgaaatattttaccaaagaatgtgctgttag

SEQ ID NO: 446408 - DNA, 33 bp, Homo sapien
tgtgaaatattttaccgaagaatgtgctgttag

SEQ ID NO: 446409 - DNA, 33 bp, Homo sapien
cagttggctctacaggaaaattctatcaaaact

SEQ ID NO: 446410 - DNA, 33 bp, Homo sapien
cagttggctctacaggcaaattctatcaaaact

SEQ ID NO: 446411 - DNA, 33 bp, Homo sapien
tgattatagtgtgttcccatttgctttcatcta

SEQ ID NO: 446412 - DNA, 33 bp, Homo sapien
tgattatagtgtgttcgcatttgctttcatcta

SEQ ID NO: 446413 - DNA, 33 bp, Homo sapien
gctcacactcctttgcgccttctaaacatgctt

SEQ ID NO: 446414 - DNA, 33 bp, Homo sapien
gctcacactcctttgctccttctaaacatgctt

SEQ ID NO: 446415 - DNA, 33 bp, Homo sapien
ttcagctgatgtgttacgattgtgcttaagtaa

SEQ ID NO: 446416 - DNA, 33 bp, Homo sapien
ttcagctgatgtgttatgattgtgcttaagtaa

SEQ ID NO: 446417 - DNA, 33 bp, Homo sapien
ggtgactttagaaagaaaggctacgaaagatac

SEQ ID NO: 446418 - DNA, 33 bp, Homo sapien
ggtgactttagaaagagaggctacgaaagatac

SEQ ID NO: 446419 - DNA, 33 bp, Homo sapien
acaagtaaacaaacgacacatcttaatacattg

SEQ ID NO: 446420 - DNA, 33 bp, Homo sapien
acaagtaaacaaacgatacatcttaatacattg

SEQ ID NO: 446421 - DNA, 33 bp, Homo sapien
cagtatctaatttccacggattgagtaaagttc

SEQ ID NO: 446422 - DNA, 33 bp, Homo sapien
cagtatctaatttccatggattgagtaaagttc

SEQ ID NO: 446423 - DNA, 33 bp, Homo sapien
agttcctgaaattggacatagatacactagaaa

SEQ ID NO: 446424 - DNA, 33 bp, Homo sapien
agttcctgaaattggagatagatacactagaaa

SEQ ID NO: 446425 - DNA, 33 bp, Homo sapien
cttttagagaaaaagagccagctgtccaaccca

SEQ ID NO: 446426 - DNA, 33 bp, Homo sapien
cttttagagaaaaagatccagctgtccaaccca

SEQ ID NO: 446427 - DNA, 33 bp, Homo sapien
caattctcagctaacaactccaaccaaaatgtt

SEQ ID NO: 446428 - DNA, 33 bp, Homo sapien
caattctcagctaacatctccaaccaaaatgtt

SEQ ID NO: 446429 - DNA, 33 bp, Homo sapien
tgaggtgtaaggattggaatttgctcaattatt

SEQ ID NO: 446430 - DNA, 33 bp, Homo sapien
tgaggtgtaaggattgtaatttgctcaattatt

SEQ ID NO: 446431 - DNA, 33 bp, Homo sapien
gttaatccacttcagtaaaatggcattttttct

SEQ ID NO: 446432 - DNA, 33 bp, Homo sapien
gttaatccacttcagtgaaatggcattttttct

SEQ ID NO: 446433 - DNA, 33 bp, Homo sapien
aatcacttccagggtgaaatgctaaagaatagg

SEQ ID NO: 446434 - DNA, 33 bp, Homo sapien
aatcacttccagggtggaatgctaaagaatagg

SEQ ID NO: 446435 - DNA, 33 bp, Homo sapien
tctgcttcaattttagcagaactttggcagggt

SEQ ID NO: 446436 - DNA, 33 bp, Homo sapien
tctgcttcaattttagtagaactttggcagggt

SEQ ID NO: 446437 - DNA, 33 bp, Homo sapien
caaacttaaagagtcaatgacaagtgtcagcct

SEQ ID NO: 446438 - DNA, 33 bp, Homo sapien
caaacttaaagagtcagtgacaagtgtcagcct

SEQ ID NO: 446439 - DNA, 33 bp, Homo sapien
attcacagatttatacgaccattaccacaatca

SEQ ID NO: 446440 - DNA, 33 bp, Homo sapien
attcacagatttatactaccattaccacaatca

SEQ ID NO: 446441 - DNA, 33 bp, Homo sapien
catttgtgtcactgaaaccttgattcttttcct

SEQ ID NO: 446442 - DNA, 33 bp, Homo sapien
catttgtgtcactgaagccttgattcttttcct

SEQ ID NO: 446443 - DNA, 33 bp, Homo sapien
gaagatctagtaaacacagaaatgtgcctgttt

SEQ ID NO: 446444 - DNA, 33 bp, Homo sapien
gaagatctagtaaacatagaaatgtgcctgttt

SEQ ID NO: 446445 - DNA, 33 bp, Homo sapien
ggaaccaaagaattgaatagacacacacactta

SEQ ID NO: 446446 - DNA, 33 bp, Homo sapien
ggaaccaaagaattgagtagacacacacactta

SEQ ID NO: 446447 - DNA, 33 bp, Homo sapien
gtccgatactggttgtaaaatgctgtgttcaga

SEQ ID NO: 446448 - DNA, 33 bp, Homo sapien
gtccgatactggttgtgaaatgctgtgttcaga

SEQ ID NO: 446449 - DNA, 33 bp, Homo sapien
ccaactaggactaaatcatgtcattggttttgc

SEQ ID NO: 446450 - DNA, 33 bp, Homo sapien
ccaactaggactaaattatgtcattggttttgc

SEQ ID NO: 446451 - DNA, 33 bp, Homo sapien
aatttacttgttggcactcaagtttatgttctg

SEQ ID NO: 446452 - DNA, 33 bp, Homo sapien
aatttacttgttggcattcaagtttatgttctg

SEQ ID NO: 446453 - DNA, 33 bp, Homo sapien
atccatggggtgtcatgatactcactcctatcc

SEQ ID NO: 446454 - DNA, 33 bp, Homo sapien
atccatggggtgtcattatactcactcctatcc

SEQ ID NO: 446455 - DNA, 33 bp, Homo sapien
agggatgtggagtaaccagagctcacactttac

SEQ ID NO: 446456 - DNA, 33 bp, Homo sapien
agggatgtggagtaactagagctcacactttac

SEQ ID NO: 446457 - DNA, 33 bp, Homo sapien
tcaaaatgtaacaaaaaatcaaattcaatcaaa

SEQ ID NO: 446458 - DNA, 33 bp, Homo sapien
tcaaaatgtaacaaaatatcaaattcaatcaaa

SEQ ID NO: 446459 - DNA, 33 bp, Homo sapien
aaatcatctggataaaactaacattcaggaatt

SEQ ID NO: 446460 - DNA, 33 bp, Homo sapien
aaatcatctggataaagctaacattcaggaatt

SEQ ID NO: 446461 - DNA, 33 bp, Homo sapien
ctcatacactcttgggaacaacctgcctgtgca

SEQ ID NO: 446462 - DNA, 33 bp, Homo sapien
ctcatacactcttggggacaacctgcctgtgca

SEQ ID NO: 446463 - DNA, 33 bp, Homo sapien
gaatgcaaattggtgaccttctgtagaaaacat

SEQ ID NO: 446464 - DNA, 33 bp, Homo sapien
gaatgcaaattggtgagcttctgtagaaaacat

SEQ ID NO: 446465 - DNA, 33 bp, Homo sapien
tattgagttgtttgaacgctctgtatattctgg

SEQ ID NO: 446466 - DNA, 33 bp, Homo sapien
tattgagttgtttgaatgctctgtatattctgg

SEQ ID NO: 446467 - DNA, 33 bp, Homo sapien
aatgacattcataagagaggagccctcatgtcc

SEQ ID NO: 446468 - DNA, 33 bp, Homo sapien
aatgacattcataagataggagccctcatgtcc

SEQ ID NO: 446469 - DNA, 33 bp, Homo sapien
ctaaaaaattctacaaatcagtaaaacagagat

SEQ ID NO: 446470 - DNA, 33 bp, Homo sapien
ctaaaaaattctacaagtcagtaaaacagagat

SEQ ID NO: 446471 - DNA, 33 bp, Homo sapien
cttacttatgtgcaaaggagaaatcgcctagtt

SEQ ID NO: 446472 - DNA, 33 bp, Homo sapien
cttacttatgtgcaaatgagaaatcgcctagtt

SEQ ID NO: 446473 - DNA, 33 bp, Homo sapien
ctctctctaaaggaagacactcttaatctaaga

SEQ ID NO: 446474 - DNA, 33 bp, Homo sapien
ctctctctaaaggaaggcactcttaatctaaga

SEQ ID NO: 446475 - DNA, 33 bp, Homo sapien
gtgtctgtaaaaaccaatgaggacataaactgt

SEQ ID NO: 446476 - DNA, 33 bp, Homo sapien
gtgtctgtaaaaaccagtgaggacataaactgt

SEQ ID NO: 446477 - DNA, 33 bp, Homo sapien
aaagcataatatgtatcacatgtatctagatag

SEQ ID NO: 446478 - DNA, 33 bp, Homo sapien
aaagcataatatgtatgacatgtatctagatag

SEQ ID NO: 446479 - DNA, 33 bp, Homo sapien
ctctccacttacattacataaaaaaactcaaaa

SEQ ID NO: 446480 - DNA, 33 bp, Homo sapien
ctctccacttacattagataaaaaaactcaaaa

SEQ ID NO: 446481 - DNA, 33 bp, Homo sapien
tgcctttaattattcccgagcttaggccaagct

SEQ ID NO: 446482 - DNA, 33 bp, Homo sapien
tgcctttaattattcctgagcttaggccaagct

SEQ ID NO: 446483 - DNA, 33 bp, Homo sapien
tgactggcagcattaactgacctcttgattttt

SEQ ID NO: 446484 - DNA, 33 bp, Homo sapien
tgactggcagcattaagtgacctcttgattttt

SEQ ID NO: 446485 - DNA, 33 bp, Homo sapien
ttgtcattgttcaccactagcttattttatata

SEQ ID NO: 446486 - DNA, 33 bp, Homo sapien
ttgtcattgttcaccagtagcttattttatata

SEQ ID NO: 446487 - DNA, 33 bp, Homo sapien
tcttgatatttcttgacatgttgataccctttg

SEQ ID NO: 446488 - DNA, 33 bp, Homo sapien
tcttgatatttcttgatatgttgataccctttg

SEQ ID NO: 446489 - DNA, 33 bp, Homo sapien
ataatatgtacatgaaacaataggtaacctctc

SEQ ID NO: 446490 - DNA, 33 bp, Homo sapien
ataatatgtacatgaatcaataggtaacctctc

SEQ ID NO: 446491 - DNA, 33 bp, Homo sapien
tcgctcttgtctcttacaccctgccctccagtt

SEQ ID NO: 446492 - DNA, 33 bp, Homo sapien
tcgctcttgtctcttataccctgccctccagtt

SEQ ID NO: 446493 - DNA, 33 bp, Homo sapien
ttccctttccatcccagtcttcttcaatgtaga

SEQ ID NO: 446494 - DNA, 33 bp, Homo sapien
ttccctttccatcccattcttcttcaatgtaga

SEQ ID NO: 446495 - DNA, 33 bp, Homo sapien
ttaatatcagggtttacgttttgttctggaatc

SEQ ID NO: 446496 - DNA, 33 bp, Homo sapien
ttaatatcagggtttatgttttgttctggaatc

SEQ ID NO: 446497 - DNA, 33 bp, Homo sapien
aaaagaaatcaaaaaagagcatccattatgaag

SEQ ID NO: 446498 - DNA, 33 bp, Homo sapien
aaaagaaatcaaaaaatagcatccattatgaag

SEQ ID NO: 446499 - DNA, 33 bp, Homo sapien
taattacagtgtatcacgggcattgaccaaaac

SEQ ID NO: 446500 - DNA, 33 bp, Homo sapien
taattacagtgtatcatgggcattgaccaaaac

SEQ ID NO: 446501 - DNA, 33 bp, Homo sapien
ttaaatttcggttaaacgctgggtagtaaggga

SEQ ID NO: 446502 - DNA, 33 bp, Homo sapien
ttaaatttcggttaaatgctgggtagtaaggga

SEQ ID NO: 446503 - DNA, 33 bp, Homo sapien
aaagttaaccataaacactttacagatctctga

SEQ ID NO: 446504 - DNA, 33 bp, Homo sapien
aaagttaaccataaacgctttacagatctctga

SEQ ID NO: 446505 - DNA, 33 bp, Homo sapien
cttgattctgaatcaacagagcaaaggtgaatt

SEQ ID NO: 446506 - DNA, 33 bp, Homo sapien
cttgattctgaatcaatagagcaaaggtgaatt

SEQ ID NO: 446507 - DNA, 33 bp, Homo sapien
ttttaaaatttctacaatcatatagcctgacaa

SEQ ID NO: 446508 - DNA, 33 bp, Homo sapien
ttttaaaatttctacagtcatatagcctgacaa

SEQ ID NO: 446509 - DNA, 33 bp, Homo sapien
aaaaggcattttccgaccagagcgttaaatgga

SEQ ID NO: 446510 - DNA, 33 bp, Homo sapien
aaaaggcattttccgatcagagcgttaaatgga

SEQ ID NO: 446511 - DNA, 33 bp, Homo sapien
taattctgagaaaggacaataagagcaatcaga

SEQ ID NO: 446512 - DNA, 33 bp, Homo sapien
taattctgagaaaggataataagagcaatcaga

SEQ ID NO: 446513 - DNA, 33 bp, Homo sapien
cataagggatgccttaccactcacagaatgcct

SEQ ID NO: 446514 - DNA, 33 bp, Homo sapien
cataagggatgccttatcactcacagaatgcct

SEQ ID NO: 446515 - DNA, 33 bp, Homo sapien
atgactcctaagtgtcaattgtgtccacaaaga

SEQ ID NO: 446516 - DNA, 33 bp, Homo sapien
atgactcctaagtgtccattgtgtccacaaaga

SEQ ID NO: 446517 - DNA, 33 bp, Homo sapien
cagtgtaatggcctgacggttgacttgccctct

SEQ ID NO: 446518 - DNA, 33 bp, Homo sapien
cagtgtaatggcctgatggttgacttgccctct

SEQ ID NO: 446519 - DNA, 33 bp, Homo sapien
ttgatttagaattgataaacacctgcgcttgca

SEQ ID NO: 446520 - DNA, 33 bp, Homo sapien
ttgatttagaattgatgaacacctgcgcttgca

SEQ ID NO: 446521 - DNA, 33 bp, Homo sapien
aaaatggagctcttgcacccacactcagccctt

SEQ ID NO: 446522 - DNA, 33 bp, Homo sapien
aaaatggagctcttgcgcccacactcagccctt

SEQ ID NO: 446523 - DNA, 33 bp, Homo sapien
gaactttaatcttttgaaggtaattttggtctt

SEQ ID NO: 446524 - DNA, 33 bp, Homo sapien
gaactttaatcttttggaggtaattttggtctt

SEQ ID NO: 446525 - DNA, 33 bp, Homo sapien
atatatttttgtggtacaagataatgcttctat

SEQ ID NO: 446526 - DNA, 33 bp, Homo sapien
atatatttttgtggtagaagataatgcttctat

SEQ ID NO: 446527 - DNA, 33 bp, Homo sapien
ggatttgattttaggaaggagtaacaacaagat

SEQ ID NO: 446528 - DNA, 33 bp, Homo sapien
ggatttgattttaggacggagtaacaacaagat

SEQ ID NO: 446529 - DNA, 33 bp, Homo sapien
tgaataaatgttggagcaaacaattgcttaatc

SEQ ID NO: 446530 - DNA, 33 bp, Homo sapien
tgaataaatgttggagtaaacaattgcttaatc

SEQ ID NO: 446531 - DNA, 33 bp, Homo sapien
ctgggtggtctaacctaaagtccattaaattgt

SEQ ID NO: 446532 - DNA, 33 bp, Homo sapien
ctgggtggtctaacctgaagtccattaaattgt

SEQ ID NO: 446533 - DNA, 33 bp, Homo sapien
tgtccaatccttcaccggaaacaagagaccacc

SEQ ID NO: 446534 - DNA, 33 bp, Homo sapien
tgtccaatccttcacctgaaacaagagaccacc

SEQ ID NO: 446535 - DNA, 33 bp, Homo sapien
cctaactctattgttgcagacgaagcatttgag

SEQ ID NO: 446536 - DNA, 33 bp, Homo sapien
cctaactctattgttgtagacgaagcatttgag

SEQ ID NO: 446537 - DNA, 33 bp, Homo sapien
tctgcctggcattctaccctacaaatgctagcc

SEQ ID NO: 446538 - DNA, 33 bp, Homo sapien
tctgcctggcattctatcctacaaatgctagcc

SEQ ID NO: 446539 - DNA, 33 bp, Homo sapien
ctaaattaaaagcgacaggtgacaattaagata

SEQ ID NO: 446540 - DNA, 33 bp, Homo sapien
ctaaattaaaagcgacgggtgacaattaagata

SEQ ID NO: 446541 - DNA, 33 bp, Homo sapien
tgtaaaacaacaaagaagcaggatcactgtttt

SEQ ID NO: 446542 - DNA, 33 bp, Homo sapien
tgtaaaacaacaaagatgcaggatcactgtttt

SEQ ID NO: 446543 - DNA, 33 bp, Homo sapien
tctcaaagatgtgaagaacagtctcattctctc

SEQ ID NO: 446544 - DNA, 33 bp, Homo sapien
tctcaaagatgtgaaggacagtctcattctctc

SEQ ID NO: 446545 - DNA, 33 bp, Homo sapien
tatttcactcactgtcaaggatttacctatgga

SEQ ID NO: 446546 - DNA, 33 bp, Homo sapien
tatttcactcactgtcgaggatttacctatgga

SEQ ID NO: 446547 - DNA, 33 bp, Homo sapien
actcagggaagatttcgaaaaaaccctgcctat

SEQ ID NO: 446548 - DNA, 33 bp, Homo sapien
actcagggaagatttctaaaaaaccctgcctat

SEQ ID NO: 446549 - DNA, 33 bp, Homo sapien
actcttaactgctgctaaaaaattcttattaat

SEQ ID NO: 446550 - DNA, 33 bp, Homo sapien
actcttaactgctgctgaaaaattcttattaat

SEQ ID NO: 446551 - DNA, 33 bp, Homo sapien
gaaacaaactgccataacttagaaatggaatta

SEQ ID NO: 446552 - DNA, 33 bp, Homo sapien
gaaacaaactgccataccttagaaatggaatta

SEQ ID NO: 446553 - DNA, 33 bp, Homo sapien
ttgaggacttcatttccatgagacagggcacta

SEQ ID NO: 446554 - DNA, 33 bp, Homo sapien
ttgaggacttcatttctatgagacagggcacta

SEQ ID NO: 446555 - DNA, 33 bp, Homo sapien
gactagtgaggccacaagaccaaatgggaggca

SEQ ID NO: 446556 - DNA, 33 bp, Homo sapien
gactagtgaggccacaggaccaaatgggaggca

SEQ ID NO: 446557 - DNA, 33 bp, Homo sapien
gctgctaataaaaatgcatcaaagactgggtaa

SEQ ID NO: 446558 - DNA, 33 bp, Homo sapien
gctgctaataaaaatgtatcaaagactgggtaa

SEQ ID NO: 446559 - DNA, 33 bp, Homo sapien
gcaatcaatagtaccaaactgaaacatgactaa

SEQ ID NO: 446560 - DNA, 33 bp, Homo sapien
gcaatcaatagtaccagactgaaacatgactaa

SEQ ID NO: 446561 - DNA, 33 bp, Homo sapien
tgtgacttagctcaaaatactcaatcagtaatg

SEQ ID NO: 446562 - DNA, 33 bp, Homo sapien
tgtgacttagctcaaactactcaatcagtaatg

SEQ ID NO: 446563 - DNA, 33 bp, Homo sapien
cttttggacttatcatcacataccctggtttct

SEQ ID NO: 446564 - DNA, 33 bp, Homo sapien
cttttggacttatcattacataccctggtttct

SEQ ID NO: 446565 - DNA, 33 bp, Homo sapien
attggtagagagccaacacttcagaaaaagagt

SEQ ID NO: 446566 - DNA, 33 bp, Homo sapien
attggtagagagccaatacttcagaaaaagagt

SEQ ID NO: 446567 - DNA, 33 bp, Homo sapien
tttagtcttatataaaatcttctgtctatagct

SEQ ID NO: 446568 - DNA, 33 bp, Homo sapien
tttagtcttatataaagtcttctgtctatagct

SEQ ID NO: 446569 - DNA, 33 bp, Homo sapien
attcagggaacctttccactcgtatgttagaca

SEQ ID NO: 446570 - DNA, 33 bp, Homo sapien
attcagggaacctttctactcgtatgttagaca

SEQ ID NO: 446571 - DNA, 33 bp, Homo sapien
atgtacaagtgctagcggaaatactctacaaag

SEQ ID NO: 446572 - DNA, 33 bp, Homo sapien
atgtacaagtgctagctgaaatactctacaaag

SEQ ID NO: 446573 - DNA, 33 bp, Homo sapien
ttgtacatttgtgacacagtaaatagtttcaca

SEQ ID NO: 446574 - DNA, 33 bp, Homo sapien
ttgtacatttgtgacagagtaaatagtttcaca

SEQ ID NO: 446575 - DNA, 33 bp, Homo sapien
aataatacagaagactcaacattttacactgga

SEQ ID NO: 446576 - DNA, 33 bp, Homo sapien
aataatacagaagactgaacattttacactgga

SEQ ID NO: 446577 - DNA, 33 bp, Homo sapien
aacataacaatggttcaagagattgtatttact

SEQ ID NO: 446578 - DNA, 33 bp, Homo sapien
aacataacaatggttcgagagattgtatttact

SEQ ID NO: 446579 - DNA, 33 bp, Homo sapien
taaagctgaagatctgaaaagggttggaagcag

SEQ ID NO: 446580 - DNA, 33 bp, Homo sapien
taaagctgaagatctggaaagggttggaagcag

SEQ ID NO: 446581 - DNA, 33 bp, Homo sapien
agctacacaaattatcaattcctcatgcttccg

SEQ ID NO: 446582 - DNA, 33 bp, Homo sapien
agctacacaaattatcgattcctcatgcttccg

SEQ ID NO: 446583 - DNA, 33 bp, Homo sapien
agtgcataaggattcaaagcaatatcaaaagac

SEQ ID NO: 446584 - DNA, 33 bp, Homo sapien
agtgcataaggattcagagcaatatcaaaagac

SEQ ID NO: 446585 - DNA, 33 bp, Homo sapien
atcccagagatcactgaagatggaggagaaagt

SEQ ID NO: 446586 - DNA, 33 bp, Homo sapien
atcccagagatcactggagatggaggagaaagt

SEQ ID NO: 446587 - DNA, 33 bp, Homo sapien
tttacaaatttgttagaagagtatttatcgtat

SEQ ID NO: 446588 - DNA, 33 bp, Homo sapien
tttacaaatttgttaggagagtatttatcgtat

SEQ ID NO: 446589 - DNA, 33 bp, Homo sapien
attatattacaggaagaaacttgacataaattt

SEQ ID NO: 446590 - DNA, 33 bp, Homo sapien
attatattacaggaaggaacttgacataaattt

SEQ ID NO: 446591 - DNA, 33 bp, Homo sapien
ccacagccaagttactaaacagtcaaatgacca

SEQ ID NO: 446592 - DNA, 33 bp, Homo sapien
ccacagccaagttactcaacagtcaaatgacca

SEQ ID NO: 446593 - DNA, 33 bp, Homo sapien
ttttatatcagcaagaaacagaaaacgttacta

SEQ ID NO: 446594 - DNA, 33 bp, Homo sapien
ttttatatcagcaagagacagaaaacgttacta

SEQ ID NO: 446595 - DNA, 33 bp, Homo sapien
ctctctgatatttcagcaactgcttttgcctta

SEQ ID NO: 446596 - DNA, 33 bp, Homo sapien
ctctctgatatttcagtaactgcttttgcctta

SEQ ID NO: 446597 - DNA, 33 bp, Homo sapien
acagatatctgaggaacaaaaggaatcaaaact

SEQ ID NO: 446598 - DNA, 33 bp, Homo sapien
acagatatctgaggaataaaaggaatcaaaact

SEQ ID NO: 446599 - DNA, 33 bp, Homo sapien
ttatttctaagctgaacgatgttagacatttcc

SEQ ID NO: 446600 - DNA, 33 bp, Homo sapien
ttatttctaagctgaatgatgttagacatttcc

SEQ ID NO: 446601 - DNA, 33 bp, Homo sapien
agaagatgtggagatacggtatatttttaaagt

SEQ ID NO: 446602 - DNA, 33 bp, Homo sapien
agaagatgtggagatatggtatatttttaaagt

SEQ ID NO: 446603 - DNA, 33 bp, Homo sapien
gcttctttttccatgcaaacataaagttcagtt

SEQ ID NO: 446604 - DNA, 33 bp, Homo sapien
gcttctttttccatgctaacataaagttcagtt

SEQ ID NO: 446605 - DNA, 33 bp, Homo sapien
tgataaatctcttccaagtgagaaactgaccaa

SEQ ID NO: 446606 - DNA, 33 bp, Homo sapien
tgataaatctcttccaggtgagaaactgaccaa

SEQ ID NO: 446607 - DNA, 33 bp, Homo sapien
gtctctttaccaagggcagcattcctggaagct

SEQ ID NO: 446608 - DNA, 33 bp, Homo sapien
gtctctttaccaagggtagcattcctggaagct

SEQ ID NO: 446609 - DNA, 33 bp, Homo sapien
aattcaaagaaatacacgacaacacagagaaat

SEQ ID NO: 446610 - DNA, 33 bp, Homo sapien
aattcaaagaaatacatgacaacacagagaaat

SEQ ID NO: 446611 - DNA, 33 bp, Homo sapien
agatagtaggatggaacatacttaacacaccaa

SEQ ID NO: 446612 - DNA, 33 bp, Homo sapien
agatagtaggatggaatatacttaacacaccaa

SEQ ID NO: 446613 - DNA, 33 bp, Homo sapien
tcttgtaaaacctgcccaagttatagttaaaaa

SEQ ID NO: 446614 - DNA, 33 bp, Homo sapien
tcttgtaaaacctgccgaagttatagttaaaaa

SEQ ID NO: 446615 - DNA, 33 bp, Homo sapien
ttatatcacaatattccctcaacctccaactga

SEQ ID NO: 446616 - DNA, 33 bp, Homo sapien
ttatatcacaatattctctcaacctccaactga

SEQ ID NO: 446617 - DNA, 33 bp, Homo sapien
ttgtccttgtctctacagcagtggagtttcctt

SEQ ID NO: 446618 - DNA, 33 bp, Homo sapien
ttgtccttgtctctacggcagtggagtttcctt

SEQ ID NO: 446619 - DNA, 33 bp, Homo sapien
gccttagataaaacaccgtaaacttgcggctta

SEQ ID NO: 446620 - DNA, 33 bp, Homo sapien
gccttagataaaacactgtaaacttgcggctta

SEQ ID NO: 446621 - DNA, 33 bp, Homo sapien
aaagggagattttgagaagtcatcaataagcac

SEQ ID NO: 446622 - DNA, 33 bp, Homo sapien
aaagggagattttgaggagtcatcaataagcac

SEQ ID NO: 446623 - DNA, 33 bp, Homo sapien
gaaagcttatagcaccaaatgccttcatcgaga

SEQ ID NO: 446624 - DNA, 33 bp, Homo sapien
gaaagcttatagcaccgaatgccttcatcgaga

SEQ ID NO: 446625 - DNA, 33 bp, Homo sapien
tcttaacgttgctttacgtgcatcctagagatg

SEQ ID NO: 446626 - DNA, 33 bp, Homo sapien
tcttaacgttgctttaggtgcatcctagagatg

SEQ ID NO: 446627 - DNA, 33 bp, Homo sapien
cccggcctgaatgcaactgtttaacttcatttt

SEQ ID NO: 446628 - DNA, 33 bp, Homo sapien
cccggcctgaatgcaattgtttaacttcatttt

SEQ ID NO: 446629 - DNA, 33 bp, Homo sapien
cctttgttgaacagaacggtaagagcaggcatc

SEQ ID NO: 446630 - DNA, 33 bp, Homo sapien
cctttgttgaacagaatggtaagagcaggcatc

SEQ ID NO: 446631 - DNA, 33 bp, Homo sapien
attatcagtgcttacaagcagacgacctaaggg

SEQ ID NO: 446632 - DNA, 33 bp, Homo sapien
attatcagtgcttacaggcagacgacctaaggg

SEQ ID NO: 446633 - DNA, 33 bp, Homo sapien
taagtgagttttactacgatctactgtatgtaa

SEQ ID NO: 446634 - DNA, 33 bp, Homo sapien
taagtgagttttactatgatctactgtatgtaa

SEQ ID NO: 446635 - DNA, 33 bp, Homo sapien
ccttgtctactcaaaaaatacacttggactagt

SEQ ID NO: 446636 - DNA, 33 bp, Homo sapien
ccttgtctactcaaaacatacacttggactagt

SEQ ID NO: 446637 - DNA, 33 bp, Homo sapien
cacagagtttgttttcacgtgagaaggttcctg

SEQ ID NO: 446638 - DNA, 33 bp, Homo sapien
cacagagtttgttttctcgtgagaaggttcctg

SEQ ID NO: 446639 - DNA, 33 bp, Homo sapien
gaatgcctttgattgaaaatatttgtgcttgta

SEQ ID NO: 446640 - DNA, 33 bp, Homo sapien
gaatgcctttgattgagaatatttgtgcttgta

SEQ ID NO: 446641 - DNA, 33 bp, Homo sapien
cactgttcaacgaaataatagtgtggctagttt

SEQ ID NO: 446642 - DNA, 33 bp, Homo sapien
cactgttcaacgaaatgatagtgtggctagttt

SEQ ID NO: 446643 - DNA, 33 bp, Homo sapien
aatagctttaaactgcaatcaggatattcacat

SEQ ID NO: 446644 - DNA, 33 bp, Homo sapien
aatagctttaaactgcgatcaggatattcacat

SEQ ID NO: 446645 - DNA, 33 bp, Homo sapien
tggggaccaagattcacgtccatttccaaaact

SEQ ID NO: 446646 - DNA, 33 bp, Homo sapien
tggggaccaagattcatgtccatttccaaaact

SEQ ID NO: 446647 - DNA, 33 bp, Homo sapien
tttttactttgaaatacagcttggaagattagt

SEQ ID NO: 446648 - DNA, 33 bp, Homo sapien
tttttactttgaaatatagcttggaagattagt

SEQ ID NO: 446649 - DNA, 33 bp, Homo sapien
ccacatagtttacaggaagttttatgaattatg

SEQ ID NO: 446650 - DNA, 33 bp, Homo sapien
ccacatagtttacagggagttttatgaattatg

SEQ ID NO: 446651 - DNA, 33 bp, Homo sapien
ctcattttgaagcagaagccctagttcctcata

SEQ ID NO: 446652 - DNA, 33 bp, Homo sapien
ctcattttgaagcagacgccctagttcctcata

SEQ ID NO: 446653 - DNA, 33 bp, Homo sapien
ataatttctgggccaactgcaacaatgcagact

SEQ ID NO: 446654 - DNA, 33 bp, Homo sapien
ataatttctgggccaattgcaacaatgcagact

SEQ ID NO: 446655 - DNA, 33 bp, Homo sapien
acaaataattgtttacccattcccctactgatg

SEQ ID NO: 446656 - DNA, 33 bp, Homo sapien
acaaataattgtttactcattcccctactgatg

SEQ ID NO: 446657 - DNA, 33 bp, Homo sapien
tatgaagattctacatcataccatatgggctga

SEQ ID NO: 446658 - DNA, 33 bp, Homo sapien
tatgaagattctacatgataccatatgggctga

SEQ ID NO: 446659 - DNA, 33 bp, Homo sapien
tcaactgaaaacccaacacagacacagctgatt

SEQ ID NO: 446660 - DNA, 33 bp, Homo sapien
tcaactgaaaacccaatacagacacagctgatt

SEQ ID NO: 446661 - DNA, 33 bp, Homo sapien
agtttcctttcgactacgacgagttcgggaatt

SEQ ID NO: 446662 - DNA, 33 bp, Homo sapien
agtttcctttcgactatgacgagttcgggaatt

SEQ ID NO: 446663 - DNA, 33 bp, Homo sapien
tgagaatttcattttccattttgggaacacgtg

SEQ ID NO: 446664 - DNA, 33 bp, Homo sapien
tgagaatttcattttcgattttgggaacacgtg

SEQ ID NO: 446665 - DNA, 33 bp, Homo sapien
cgagttaatattatcaaccagtagcaaattcac

SEQ ID NO: 446666 - DNA, 33 bp, Homo sapien
cgagttaatattatcagccagtagcaaattcac

SEQ ID NO: 446667 - DNA, 33 bp, Homo sapien
gacttttatatgcaccaaggaaccaacaacttc

SEQ ID NO: 446668 - DNA, 33 bp, Homo sapien
gacttttatatgcaccgaggaaccaacaacttc

SEQ ID NO: 446669 - DNA, 33 bp, Homo sapien
tccactaacatgtgaactgaggaatactttctt

SEQ ID NO: 446670 - DNA, 33 bp, Homo sapien
tccactaacatgtgaattgaggaatactttctt

SEQ ID NO: 446671 - DNA, 33 bp, Homo sapien
acatttctcatgagcaaacaggatgaagtctca

SEQ ID NO: 446672 - DNA, 33 bp, Homo sapien
acatttctcatgagcagacaggatgaagtctca

SEQ ID NO: 446673 - DNA, 33 bp, Homo sapien
aacaactccatcgagtaaatggaagtgtgaata

SEQ ID NO: 446674 - DNA, 33 bp, Homo sapien
aacaactccatcgagtgaatggaagtgtgaata

SEQ ID NO: 446675 - DNA, 33 bp, Homo sapien
tacctgcttgaagccaaatgtcattataaaaga

SEQ ID NO: 446676 - DNA, 33 bp, Homo sapien
tacctgcttgaagccagatgtcattataaaaga

SEQ ID NO: 446677 - DNA, 33 bp, Homo sapien
taaatgtgaccattgagggagagggaggtatca

SEQ ID NO: 446678 - DNA, 33 bp, Homo sapien
taaatgtgaccattgatggagagggaggtatca

SEQ ID NO: 446679 - DNA, 33 bp, Homo sapien
gccatcttttgctttaatagtaaggtgaaagcc

SEQ ID NO: 446680 - DNA, 33 bp, Homo sapien
gccatcttttgctttagtagtaaggtgaaagcc

SEQ ID NO: 446681 - DNA, 33 bp, Homo sapien
aaattatataaaaaaaagttcatgccatacaga

SEQ ID NO: 446682 - DNA, 33 bp, Homo sapien
aaattatataaaaaaacgttcatgccatacaga

SEQ ID NO: 446683 - DNA, 33 bp, Homo sapien
tatagtaatgtgataactgcccaaatatattaa

SEQ ID NO: 446684 - DNA, 33 bp, Homo sapien
tatagtaatgtgataagtgcccaaatatattaa

SEQ ID NO: 446685 - DNA, 33 bp, Homo sapien
gtggtacactctgtgacggcaaatggatttggt

SEQ ID NO: 446686 - DNA, 33 bp, Homo sapien
gtggtacactctgtgatggcaaatggatttggt

SEQ ID NO: 446687 - DNA, 33 bp, Homo sapien
ataaaatgacctgcagcataggaaaagcatata

SEQ ID NO: 446688 - DNA, 33 bp, Homo sapien
ataaaatgacctgcagtataggaaaagcatata

SEQ ID NO: 446689 - DNA, 33 bp, Homo sapien
tgaagatgaggaaatgcaattggaaacataatg

SEQ ID NO: 446690 - DNA, 33 bp, Homo sapien
tgaagatgaggaaatgtaattggaaacataatg

SEQ ID NO: 446691 - DNA, 33 bp, Homo sapien
tcaatgttttaggatgaatcaactcagatattc

SEQ ID NO: 446692 - DNA, 33 bp, Homo sapien
tcaatgttttaggatgtatcaactcagatattc

SEQ ID NO: 446693 - DNA, 33 bp, Homo sapien
ttctattattactaaaagtgccctaatttaggt

SEQ ID NO: 446694 - DNA, 33 bp, Homo sapien
ttctattattactaaaggtgccctaatttaggt

SEQ ID NO: 446695 - DNA, 33 bp, Homo sapien
attactgtaacctttacaccaagtcttaaaatt

SEQ ID NO: 446696 - DNA, 33 bp, Homo sapien
attactgtaacctttataccaagtcttaaaatt

SEQ ID NO: 446697 - DNA, 33 bp, Homo sapien
cacataggccttctctaaaaacaaactcagctt

SEQ ID NO: 446698 - DNA, 33 bp, Homo sapien
cacataggccttctctgaaaacaaactcagctt

SEQ ID NO: 446699 - DNA, 33 bp, Homo sapien
tcctgaagttgttacaccaaaagaacctttcta

SEQ ID NO: 446700 - DNA, 33 bp, Homo sapien
tcctgaagttgttacatcaaaagaacctttcta

SEQ ID NO: 446701 - DNA, 33 bp, Homo sapien
cttcagaaagctacagccagtgaactcagcgtt

SEQ ID NO: 446702 - DNA, 33 bp, Homo sapien
cttcagaaagctacagtcagtgaactcagcgtt

SEQ ID NO: 446703 - DNA, 33 bp, Homo sapien
catgtgggcacaactgcaaatgtgtatgattgt

SEQ ID NO: 446704 - DNA, 33 bp, Homo sapien
catgtgggcacaactgtaaatgtgtatgattgt

SEQ ID NO: 446705 - DNA, 33 bp, Homo sapien
agttttgttttttgagaatgtcgtccacatgga

SEQ ID NO: 446706 - DNA, 33 bp, Homo sapien
agttttgttttttgaggatgtcgtccacatgga

SEQ ID NO: 446707 - DNA, 33 bp, Homo sapien
atagattaccaagagacctacaaggaaagttta

SEQ ID NO: 446708 - DNA, 33 bp, Homo sapien
atagattaccaagagatctacaaggaaagttta

SEQ ID NO: 446709 - DNA, 33 bp, Homo sapien
gtacgagctcataaatcagaaggttgtcagtat

SEQ ID NO: 446710 - DNA, 33 bp, Homo sapien
gtacgagctcataaattagaaggttgtcagtat

SEQ ID NO: 446711 - DNA, 33 bp, Homo sapien
agcctgttaaatcaacacacccttttgtaaagt

SEQ ID NO: 446712 - DNA, 33 bp, Homo sapien
agcctgttaaatcaactcacccttttgtaaagt

SEQ ID NO: 446713 - DNA, 33 bp, Homo sapien
aaagaagcagtgagaacagcataaagaattagg

SEQ ID NO: 446714 - DNA, 33 bp, Homo sapien
aaagaagcagtgagaatagcataaagaattagg

SEQ ID NO: 446715 - DNA, 33 bp, Homo sapien
aaggctgaattctgaacgaaatgagattaggaa

SEQ ID NO: 446716 - DNA, 33 bp, Homo sapien
aaggctgaattctgaaggaaatgagattaggaa

SEQ ID NO: 446717 - DNA, 33 bp, Homo sapien
tattagctcgttttcgaattgctgataaaggca

SEQ ID NO: 446718 - DNA, 33 bp, Homo sapien
tattagctcgttttcgcattgctgataaaggca

SEQ ID NO: 446719 - DNA, 33 bp, Homo sapien
ttctccatgagccccccactgctgcagcaaact

SEQ ID NO: 446720 - DNA, 33 bp, Homo sapien
ttctccatgagcccccgactgctgcagcaaact

SEQ ID NO: 446721 - DNA, 33 bp, Homo sapien
tagtgaatacatcttacgaaatctgatgctttt

SEQ ID NO: 446722 - DNA, 33 bp, Homo sapien
tagtgaatacatcttatgaaatctgatgctttt

SEQ ID NO: 446723 - DNA, 33 bp, Homo sapien
aaacgcttcttaagccacctgaactgcaataaa

SEQ ID NO: 446724 - DNA, 33 bp, Homo sapien
aaacgcttcttaagccgcctgaactgcaataaa

SEQ ID NO: 446725 - DNA, 33 bp, Homo sapien
acagagtggtcagaaacgcttctgctaccattt

SEQ ID NO: 446726 - DNA, 33 bp, Homo sapien
acagagtggtcagaaatgcttctgctaccattt

SEQ ID NO: 446727 - DNA, 33 bp, Homo sapien
ctgttgctttttaacacggtaagagacacatgg

SEQ ID NO: 446728 - DNA, 33 bp, Homo sapien
ctgttgctttttaacatggtaagagacacatgg

SEQ ID NO: 446729 - DNA, 33 bp, Homo sapien
cataggaagactgaaagtccagcaaaatatgtg

SEQ ID NO: 446730 - DNA, 33 bp, Homo sapien
cataggaagactgaaattccagcaaaatatgtg

SEQ ID NO: 446731 - DNA, 33 bp, Homo sapien
tataagaatgagatgaaaacatggctatcaaag

SEQ ID NO: 446732 - DNA, 33 bp, Homo sapien
tataagaatgagatgagaacatggctatcaaag

SEQ ID NO: 446733 - DNA, 33 bp, Homo sapien
agtttgtgttgaatcacgtaagttcttccagct

SEQ ID NO: 446734 - DNA, 33 bp, Homo sapien
agtttgtgttgaatcatgtaagttcttccagct

SEQ ID NO: 446735 - DNA, 33 bp, Homo sapien
agttctgtggaaattacgaaaatcagttcacag

SEQ ID NO: 446736 - DNA, 33 bp, Homo sapien
agttctgtggaaattatgaaaatcagttcacag

SEQ ID NO: 446737 - DNA, 33 bp, Homo sapien
gttctataaaacacgaaggatgacgttatgtaa

SEQ ID NO: 446738 - DNA, 33 bp, Homo sapien
gttctataaaacacgagggatgacgttatgtaa

SEQ ID NO: 446739 - DNA, 33 bp, Homo sapien
gaaaaggggagtctaaatatggatacaacttcc

SEQ ID NO: 446740 - DNA, 33 bp, Homo sapien
gaaaaggggagtctaagtatggatacaacttcc

SEQ ID NO: 446741 - DNA, 33 bp, Homo sapien
ttatccacagtaacggcacattctattcttatt

SEQ ID NO: 446742 - DNA, 33 bp, Homo sapien
ttatccacagtaacggtacattctattcttatt

SEQ ID NO: 446743 - DNA, 33 bp, Homo sapien
atatggaaaaacagaaatcatcacagcctgctc

SEQ ID NO: 446744 - DNA, 33 bp, Homo sapien
atatggaaaaacagaagtcatcacagcctgctc

SEQ ID NO: 446745 - DNA, 33 bp, Homo sapien
gactccacaaaatttgaaagaaacttgtaacaa

SEQ ID NO: 446746 - DNA, 33 bp, Homo sapien
gactccacaaaatttgcaagaaacttgtaacaa

SEQ ID NO: 446747 - DNA, 33 bp, Homo sapien
gtgattctccacacaagtcagaagcccctgaga

SEQ ID NO: 446748 - DNA, 33 bp, Homo sapien
gtgattctccacacaattcagaagcccctgaga

SEQ ID NO: 446749 - DNA, 33 bp, Homo sapien
gcatccaaagcattcacaggagtgactggaaca

SEQ ID NO: 446750 - DNA, 33 bp, Homo sapien
gcatccaaagcattcagaggagtgactggaaca

SEQ ID NO: 446751 - DNA, 33 bp, Homo sapien
acattgaaaatgcctacgagaatttgttcttta

SEQ ID NO: 446752 - DNA, 33 bp, Homo sapien
acattgaaaatgcctatgagaatttgttcttta

SEQ ID NO: 446753 - DNA, 33 bp, Homo sapien
taaatcatatgtataaaaacagatttgagtctt

SEQ ID NO: 446754 - DNA, 33 bp, Homo sapien
taaatcatatgtataagaacagatttgagtctt

SEQ ID NO: 446755 - DNA, 33 bp, Homo sapien
ctcttgagaagttgtacgcctttctcacatttc

SEQ ID NO: 446756 - DNA, 33 bp, Homo sapien
ctcttgagaagttgtatgcctttctcacatttc

SEQ ID NO: 446757 - DNA, 33 bp, Homo sapien
aggctcatgtttcagcccaatggacaagaacat

SEQ ID NO: 446758 - DNA, 33 bp, Homo sapien
aggctcatgtttcagctcaatggacaagaacat

SEQ ID NO: 446759 - DNA, 33 bp, Homo sapien
aatgtgtgaaagatataaaagggctttgctttt

SEQ ID NO: 446760 - DNA, 33 bp, Homo sapien
aatgtgtgaaagatatcaaagggctttgctttt

SEQ ID NO: 446761 - DNA, 33 bp, Homo sapien
tgtttccattaggaagcattgattggagtgacc

SEQ ID NO: 446762 - DNA, 33 bp, Homo sapien
tgtttccattaggaagtattgattggagtgacc

SEQ ID NO: 446763 - DNA, 33 bp, Homo sapien
gattcattctcaacctaaacaaaggcaaaggga

SEQ ID NO: 446764 - DNA, 33 bp, Homo sapien
gattcattctcaacctgaacaaaggcaaaggga

SEQ ID NO: 446765 - DNA, 33 bp, Homo sapien
agcagggccttcagaagagatgaatttcccctt

SEQ ID NO: 446766 - DNA, 33 bp, Homo sapien
agcagggccttcagaatagatgaatttcccctt

SEQ ID NO: 446767 - DNA, 33 bp, Homo sapien
atttacccagtaccaaagtaatttccacatttt

SEQ ID NO: 446768 - DNA, 33 bp, Homo sapien
atttacccagtaccaaggtaatttccacatttt

SEQ ID NO: 446769 - DNA, 33 bp, Homo sapien
aagcttttttgagaggaatatgagtaggctctg

SEQ ID NO: 446770 - DNA, 33 bp, Homo sapien
aagcttttttgagaggtatatgagtaggctctg

SEQ ID NO: 446771 - DNA, 33 bp, Homo sapien
aacccgagactgcaagacttcaaatttgtcttc

SEQ ID NO: 446772 - DNA, 33 bp, Homo sapien
aacccgagactgcaaggcttcaaatttgtcttc

SEQ ID NO: 446773 - DNA, 33 bp, Homo sapien
gattcagtggctagaaagataaattataggaac

SEQ ID NO: 446774 - DNA, 33 bp, Homo sapien
gattcagtggctagaatgataaattataggaac

SEQ ID NO: 446775 - DNA, 33 bp, Homo sapien
aaacactcatttcctaaaacaacaatgattgta

SEQ ID NO: 446776 - DNA, 33 bp, Homo sapien
aaacactcatttcctagaacaacaatgattgta

SEQ ID NO: 446777 - DNA, 33 bp, Homo sapien
ttgaaatccactaagacagtagatcgtaagtgt

SEQ ID NO: 446778 - DNA, 33 bp, Homo sapien
ttgaaatccactaagagagtagatcgtaagtgt

SEQ ID NO: 446779 - DNA, 33 bp, Homo sapien
acctatgaaagactaacgtgatctcagagaaaa

SEQ ID NO: 446780 - DNA, 33 bp, Homo sapien
acctatgaaagactaatgtgatctcagagaaaa

SEQ ID NO: 446781 - DNA, 33 bp, Homo sapien
tggtggttatgctaccaacttgtatcacttggg

SEQ ID NO: 446782 - DNA, 33 bp, Homo sapien
tggtggttatgctacccacttgtatcacttggg

SEQ ID NO: 446783 - DNA, 33 bp, Homo sapien
gagctggagtccagagaattgaagggacagacc

SEQ ID NO: 446784 - DNA, 33 bp, Homo sapien
gagctggagtccagagtattgaagggacagacc

SEQ ID NO: 446785 - DNA, 33 bp, Homo sapien
cagtcataaaaggccagacattgtataatcctg

SEQ ID NO: 446786 - DNA, 33 bp, Homo sapien
cagtcataaaaggccatacattgtataatcctg

SEQ ID NO: 446787 - DNA, 33 bp, Homo sapien
aatttagaattttacacgacaattttatgctag

SEQ ID NO: 446788 - DNA, 33 bp, Homo sapien
aatttagaattttacatgacaattttatgctag

SEQ ID NO: 446789 - DNA, 33 bp, Homo sapien
aaatgattttgttaccaggcagtatttaaagta

SEQ ID NO: 446790 - DNA, 33 bp, Homo sapien
aaatgattttgttacctggcagtatttaaagta

SEQ ID NO: 446791 - DNA, 33 bp, Homo sapien
agggagctctgaaggacagaagccgcttggatc

SEQ ID NO: 446792 - DNA, 33 bp, Homo sapien
agggagctctgaaggatagaagccgcttggatc

SEQ ID NO: 446793 - DNA, 33 bp, Homo sapien
gcctttgttatataaccaatttgtccaattata

SEQ ID NO: 446794 - DNA, 33 bp, Homo sapien
gcctttgttatataacgaatttgtccaattata

SEQ ID NO: 446795 - DNA, 33 bp, Homo sapien
atactatccagatgcaaaaagatgtcacatata

SEQ ID NO: 446796 - DNA, 33 bp, Homo sapien
atactatccagatgcagaaagatgtcacatata

SEQ ID NO: 446797 - DNA, 33 bp, Homo sapien
tagattttggtatcatcatccctacaatcaaat

SEQ ID NO: 446798 - DNA, 33 bp, Homo sapien
tagattttggtatcattatccctacaatcaaat

SEQ ID NO: 446799 - DNA, 33 bp, Homo sapien
ttttgtagacaaaacacaggagcttcagatgcc

SEQ ID NO: 446800 - DNA, 33 bp, Homo sapien
ttttgtagacaaaacataggagcttcagatgcc

SEQ ID NO: 446801 - DNA, 33 bp, Homo sapien
atttccttggcatatgaattacacacccatcaa

SEQ ID NO: 446802 - DNA, 33 bp, Homo sapien
atttccttggcatatgcattacacacccatcaa

SEQ ID NO: 446803 - DNA, 33 bp, Homo sapien
caacccagctgtgagcaccacttcagctccact

SEQ ID NO: 446804 - DNA, 33 bp, Homo sapien
caacccagctgtgagcgccacttcagctccact

SEQ ID NO: 446805 - DNA, 33 bp, Homo sapien
tccattgttaagacaaacacctcgggatgccta

SEQ ID NO: 446806 - DNA, 33 bp, Homo sapien
tccattgttaagacaagcacctcgggatgccta

SEQ ID NO: 446807 - DNA, 33 bp, Homo sapien
aggaagacagcgagcacagccttgtgagactga

SEQ ID NO: 446808 - DNA, 33 bp, Homo sapien
aggaagacagcgagcatagccttgtgagactga

SEQ ID NO: 446809 - DNA, 33 bp, Homo sapien
tctcagcatggttacaatattaatgctgggtac

SEQ ID NO: 446810 - DNA, 33 bp, Homo sapien
tctcagcatggttacagtattaatgctgggtac

SEQ ID NO: 446811 - DNA, 33 bp, Homo sapien
cattcacattccctaacgtgagtcaagaaggta

SEQ ID NO: 446812 - DNA, 33 bp, Homo sapien
cattcacattccctaaggtgagtcaagaaggta

SEQ ID NO: 446813 - DNA, 33 bp, Homo sapien
ctgacatcttaatctcaagagacgatttttttt

SEQ ID NO: 446814 - DNA, 33 bp, Homo sapien
ctgacatcttaatctcgagagacgatttttttt

SEQ ID NO: 446815 - DNA, 33 bp, Homo sapien
tcaaatttgtccatggaagtaatcaacaaattg

SEQ ID NO: 446816 - DNA, 33 bp, Homo sapien
tcaaatttgtccatggcagtaatcaacaaattg

SEQ ID NO: 446817 - DNA, 33 bp, Homo sapien
agtagttgcactgctacaatcatatcttctttt

SEQ ID NO: 446818 - DNA, 33 bp, Homo sapien
agtagttgcactgctataatcatatcttctttt

SEQ ID NO: 446819 - DNA, 33 bp, Homo sapien
gtaaattttttctctacgatgagtgtgttttgt

SEQ ID NO: 446820 - DNA, 33 bp, Homo sapien
gtaaattttttctctatgatgagtgtgttttgt

SEQ ID NO: 446821 - DNA, 33 bp, Homo sapien
ggtcacttgtcctgcacatagtcacagttgctg

SEQ ID NO: 446822 - DNA, 33 bp, Homo sapien
ggtcacttgtcctgcatatagtcacagttgctg

SEQ ID NO: 446823 - DNA, 33 bp, Homo sapien
caatgctagggaaacaagtgtggccacaagtgc

SEQ ID NO: 446824 - DNA, 33 bp, Homo sapien
caatgctagggaaacaggtgtggccacaagtgc

SEQ ID NO: 446825 - DNA, 33 bp, Homo sapien
tggcttaaaccatcaaatggctcatttaaaaat

SEQ ID NO: 446826 - DNA, 33 bp, Homo sapien
tggcttaaaccatcaagtggctcatttaaaaat

SEQ ID NO: 446827 - DNA, 33 bp, Homo sapien
gactcatttatttacacgttttcctgaagctat

SEQ ID NO: 446828 - DNA, 33 bp, Homo sapien
gactcatttatttacatgttttcctgaagctat

SEQ ID NO: 446829 - DNA, 33 bp, Homo sapien
tttcaaaaggataggcagatttcttaaccttga

SEQ ID NO: 446830 - DNA, 33 bp, Homo sapien
tttcaaaaggataggcggatttcttaaccttga

SEQ ID NO: 446831 - DNA, 33 bp, Homo sapien
gggatattttctgttacggagacgttgctctca

SEQ ID NO: 446832 - DNA, 33 bp, Homo sapien
gggatattttctgttatggagacgttgctctca

SEQ ID NO: 446833 - DNA, 33 bp, Homo sapien
tcttttggtgacatcaatgaaaagtattccctt

SEQ ID NO: 446834 - DNA, 33 bp, Homo sapien
tcttttggtgacatcagtgaaaagtattccctt

SEQ ID NO: 446835 - DNA, 33 bp, Homo sapien
agcaaaccaagcagaaaaattgtcttgcacttc

SEQ ID NO: 446836 - DNA, 33 bp, Homo sapien
agcaaaccaagcagaacaattgtcttgcacttc

SEQ ID NO: 446837 - DNA, 33 bp, Homo sapien
ctcaccactttcccaacacacggctacatttgt

SEQ ID NO: 446838 - DNA, 33 bp, Homo sapien
ctcaccactttcccaagacacggctacatttgt

SEQ ID NO: 446839 - DNA, 33 bp, Homo sapien
gcctgagggaattacaatacaaaggatgtgatg

SEQ ID NO: 446840 - DNA, 33 bp, Homo sapien
gcctgagggaattacagtacaaaggatgtgatg

SEQ ID NO: 446841 - DNA, 33 bp, Homo sapien
aatggaaacaatcaacggggcaaggaggcagag

SEQ ID NO: 446842 - DNA, 33 bp, Homo sapien
aatggaaacaatcaactgggcaaggaggcagag

SEQ ID NO: 446843 - DNA, 33 bp, Homo sapien
catccatcagacagtcacatgttgggaaaagtt

SEQ ID NO: 446844 - DNA, 33 bp, Homo sapien
catccatcagacagtctcatgttgggaaaagtt

SEQ ID NO: 446845 - DNA, 33 bp, Homo sapien
attgacataaacctaaatgagtgaggaagcaaa

SEQ ID NO: 446846 - DNA, 33 bp, Homo sapien
attgacataaacctaagtgagtgaggaagcaaa

SEQ ID NO: 446847 - DNA, 33 bp, Homo sapien
tgagaaatcaaagacaatggtgatacttcagag

SEQ ID NO: 446848 - DNA, 33 bp, Homo sapien
tgagaaatcaaagacagtggtgatacttcagag

SEQ ID NO: 446849 - DNA, 33 bp, Homo sapien
acaactacaacctgccacactatgtctgaagag

SEQ ID NO: 446850 - DNA, 33 bp, Homo sapien
acaactacaacctgccgcactatgtctgaagag

SEQ ID NO: 446851 - DNA, 33 bp, Homo sapien
tccatctccttcccaactctggttgaaattttt

SEQ ID NO: 446852 - DNA, 33 bp, Homo sapien
tccatctccttcccaagtctggttgaaattttt

SEQ ID NO: 446853 - DNA, 33 bp, Homo sapien
atatggtgttagtaagactagaaatccctgatc

SEQ ID NO: 446854 - DNA, 33 bp, Homo sapien
atatggtgttagtaagtctagaaatccctgatc

SEQ ID NO: 446855 - DNA, 33 bp, Homo sapien
gtttcagtgcagatacagattcatgagaatgtt

SEQ ID NO: 446856 - DNA, 33 bp, Homo sapien
gtttcagtgcagatacggattcatgagaatgtt

SEQ ID NO: 446857 - DNA, 33 bp, Homo sapien
agaatacgctcctggaaaacagagagacgctaa

SEQ ID NO: 446858 - DNA, 33 bp, Homo sapien
agaatacgctcctggacaacagagagacgctaa

SEQ ID NO: 446859 - DNA, 33 bp, Homo sapien
actaatcttatcaaacagtctgttggtcacacc

SEQ ID NO: 446860 - DNA, 33 bp, Homo sapien
actaatcttatcaaacggtctgttggtcacacc

SEQ ID NO: 446861 - DNA, 33 bp, Homo sapien
gtatctcaatttcagaagaacacaggctacctc

SEQ ID NO: 446862 - DNA, 33 bp, Homo sapien
gtatctcaatttcagatgaacacaggctacctc

SEQ ID NO: 446863 - DNA, 33 bp, Homo sapien
gtttttagttgaagaacacggctaaatcttttt

SEQ ID NO: 446864 - DNA, 33 bp, Homo sapien
gtttttagttgaagaagacggctaaatcttttt

SEQ ID NO: 446865 - DNA, 33 bp, Homo sapien
ggggcggtgcatagacaaatggagccccaccca

SEQ ID NO: 446866 - DNA, 33 bp, Homo sapien
ggggcggtgcatagacgaatggagccccaccca

SEQ ID NO: 446867 - DNA, 33 bp, Homo sapien
taaccctaggcaaaaactgacacttccatacct

SEQ ID NO: 446868 - DNA, 33 bp, Homo sapien
taaccctaggcaaaaattgacacttccatacct

SEQ ID NO: 446869 - DNA, 33 bp, Homo sapien
ttgatttgccattttcaaatatctgttaagcat

SEQ ID NO: 446870 - DNA, 33 bp, Homo sapien
ttgatttgccattttccaatatctgttaagcat

SEQ ID NO: 446871 - DNA, 33 bp, Homo sapien
tacattgtgaattaagccctgcacaattttatc

SEQ ID NO: 446872 - DNA, 33 bp, Homo sapien
tacattgtgaattaagtcctgcacaattttatc

SEQ ID NO: 446873 - DNA, 33 bp, Homo sapien
ctgacccacaacttagaaaagcaaagttccaca

SEQ ID NO: 446874 - DNA, 33 bp, Homo sapien
ctgacccacaacttaggaaagcaaagttccaca

SEQ ID NO: 446875 - DNA, 33 bp, Homo sapien
tctggttagaacttcacgtgcctatgtgcatat

SEQ ID NO: 446876 - DNA, 33 bp, Homo sapien
tctggttagaacttcatgtgcctatgtgcatat

SEQ ID NO: 446877 - DNA, 33 bp, Homo sapien
catttagatagagagaccatggaattcttctct

SEQ ID NO: 446878 - DNA, 33 bp, Homo sapien
catttagatagagagatcatggaattcttctct

SEQ ID NO: 446879 - DNA, 33 bp, Homo sapien
agttttctggattagactcattaaggaaatccc

SEQ ID NO: 446880 - DNA, 33 bp, Homo sapien
agttttctggattagattcattaaggaaatccc

SEQ ID NO: 446881 - DNA, 33 bp, Homo sapien
agttattcaaagtgataacctaaaattatgaaa

SEQ ID NO: 446882 - DNA, 33 bp, Homo sapien
agttattcaaagtgattacctaaaattatgaaa

SEQ ID NO: 446883 - DNA, 33 bp, Homo sapien
agatacacctaagcaacgatctacttagaataa

SEQ ID NO: 446884 - DNA, 33 bp, Homo sapien
agatacacctaagcaaggatctacttagaataa

SEQ ID NO: 446885 - DNA, 33 bp, Homo sapien
gaagaggaaatctcccaatatatgcgcctatta

SEQ ID NO: 446886 - DNA, 33 bp, Homo sapien
gaagaggaaatctccctatatatgcgcctatta

SEQ ID NO: 446887 - DNA, 33 bp, Homo sapien
aacacatggacatacaaaggggaaccatacagc

SEQ ID NO: 446888 - DNA, 33 bp, Homo sapien
aacacatggacatacagaggggaaccatacagc

SEQ ID NO: 446889 - DNA, 33 bp, Homo sapien
ttcctggacatctaacaatctgcccgttactct

SEQ ID NO: 446890 - DNA, 33 bp, Homo sapien
ttcctggacatctaaccatctgcccgttactct

SEQ ID NO: 446891 - DNA, 33 bp, Homo sapien
taagcaggtcttgaagaatggagacaatggtca

SEQ ID NO: 446892 - DNA, 33 bp, Homo sapien
taagcaggtcttgaaggatggagacaatggtca

SEQ ID NO: 446893 - DNA, 33 bp, Homo sapien
gatacctatattctcaagtttctgctacaaact

SEQ ID NO: 446894 - DNA, 33 bp, Homo sapien
gatacctatattctcaggtttctgctacaaact

SEQ ID NO: 446895 - DNA, 33 bp, Homo sapien
ttatcagccagtattgaaatttgtcaatatatc

SEQ ID NO: 446896 - DNA, 33 bp, Homo sapien
ttatcagccagtattgtaatttgtcaatatatc

SEQ ID NO: 446897 - DNA, 33 bp, Homo sapien
tttcatgacatttcacaattagaaatacgatgg

SEQ ID NO: 446898 - DNA, 33 bp, Homo sapien
tttcatgacatttcacgattagaaatacgatgg

SEQ ID NO: 446899 - DNA, 33 bp, Homo sapien
cagcatcacacatgacaggaaagtagtgtgctc

SEQ ID NO: 446900 - DNA, 33 bp, Homo sapien
cagcatcacacatgacgggaaagtagtgtgctc

SEQ ID NO: 446901 - DNA, 33 bp, Homo sapien
gcctttgctacaaccaagtctaatatgaaatac

SEQ ID NO: 446902 - DNA, 33 bp, Homo sapien
gcctttgctacaaccacgtctaatatgaaatac

SEQ ID NO: 446903 - DNA, 33 bp, Homo sapien
atgtttcaattctacaagaaaagcagaaaacat

SEQ ID NO: 446904 - DNA, 33 bp, Homo sapien
atgtttcaattctacaggaaaagcagaaaacat

SEQ ID NO: 446905 - DNA, 33 bp, Homo sapien
cttttccaagatgggacctgaatgtctctctta

SEQ ID NO: 446906 - DNA, 33 bp, Homo sapien
cttttccaagatgggatctgaatgtctctctta

SEQ ID NO: 446907 - DNA, 33 bp, Homo sapien
gagctattctgttctacatatggcctggcttgc

SEQ ID NO: 446908 - DNA, 33 bp, Homo sapien
gagctattctgttctatatatggcctggcttgc

SEQ ID NO: 446909 - DNA, 33 bp, Homo sapien
aatgcagaatccactaagcttattctattagat

SEQ ID NO: 446910 - DNA, 33 bp, Homo sapien
aatgcagaatccactacgcttattctattagat

SEQ ID NO: 446911 - DNA, 33 bp, Homo sapien
catcatattacatcacaaaaaattggaaaacga

SEQ ID NO: 446912 - DNA, 33 bp, Homo sapien
catcatattacatcacgaaaaattggaaaacga

SEQ ID NO: 446913 - DNA, 33 bp, Homo sapien
cagttccaaatggagacgttaagtaggaatttc

SEQ ID NO: 446914 - DNA, 33 bp, Homo sapien
cagttccaaatggagatgttaagtaggaatttc

SEQ ID NO: 446915 - DNA, 33 bp, Homo sapien
agcaaaatgattatcaacctcttcctcttatcc

SEQ ID NO: 446916 - DNA, 33 bp, Homo sapien
agcaaaatgattatcaccctcttcctcttatcc

SEQ ID NO: 446917 - DNA, 33 bp, Homo sapien
catggtgatgtgtttacgcttggctctaatctt

SEQ ID NO: 446918 - DNA, 33 bp, Homo sapien
catggtgatgtgtttaggcttggctctaatctt

SEQ ID NO: 446919 - DNA, 33 bp, Homo sapien
tagtatttctgattcaaaggtgatattctatct

SEQ ID NO: 446920 - DNA, 33 bp, Homo sapien
tagtatttctgattcagaggtgatattctatct

SEQ ID NO: 446921 - DNA, 33 bp, Homo sapien
tttgaatcacacaaaacgtttagtctacaattt

SEQ ID NO: 446922 - DNA, 33 bp, Homo sapien
tttgaatcacacaaaatgtttagtctacaattt

SEQ ID NO: 446923 - DNA, 33 bp, Homo sapien
tcactcaaaacaatgccgacatatgagaataac

SEQ ID NO: 446924 - DNA, 33 bp, Homo sapien
tcactcaaaacaatgctgacatatgagaataac

SEQ ID NO: 446925 - DNA, 33 bp, Homo sapien
ttgtctctctgcaataactttctcctggctttg

SEQ ID NO: 446926 - DNA, 33 bp, Homo sapien
ttgtctctctgcaatacctttctcctggctttg

SEQ ID NO: 446927 - DNA, 33 bp, Homo sapien
aagctgcatttaaagacaataccaagagtccta

SEQ ID NO: 446928 - DNA, 33 bp, Homo sapien
aagctgcatttaaagagaataccaagagtccta

SEQ ID NO: 446929 - DNA, 33 bp, Homo sapien
attcttttgtactacaccaaagctcaacaagtg

SEQ ID NO: 446930 - DNA, 33 bp, Homo sapien
attcttttgtactacatcaaagctcaacaagtg

SEQ ID NO: 446931 - DNA, 33 bp, Homo sapien
ctgtaaactaaataaacggtgtcaatgaaaatc

SEQ ID NO: 446932 - DNA, 33 bp, Homo sapien
ctgtaaactaaataaatggtgtcaatgaaaatc

SEQ ID NO: 446933 - DNA, 33 bp, Homo sapien
ctttattgtgtccttaacttatttatgtggctg

SEQ ID NO: 446934 - DNA, 33 bp, Homo sapien
ctttattgtgtccttatcttatttatgtggctg

SEQ ID NO: 446935 - DNA, 33 bp, Homo sapien
tcttttccagactgacagaaattcatgcagtgc

SEQ ID NO: 446936 - DNA, 33 bp, Homo sapien
tcttttccagactgacggaaattcatgcagtgc

SEQ ID NO: 446937 - DNA, 33 bp, Homo sapien
tacattctagagagaccggattgaaaaatgtta

SEQ ID NO: 446938 - DNA, 33 bp, Homo sapien
tacattctagagagactggattgaaaaatgtta

SEQ ID NO: 446939 - DNA, 33 bp, Homo sapien
tgatgaaatttcttcacggtatgtttgctgggc

SEQ ID NO: 446940 - DNA, 33 bp, Homo sapien
tgatgaaatttcttcatggtatgtttgctgggc

SEQ ID NO: 446941 - DNA, 33 bp, Homo sapien
tatggagacagaaaccaccctataggaaggagc

SEQ ID NO: 446942 - DNA, 33 bp, Homo sapien
tatggagacagaaaccgccctataggaaggagc

SEQ ID NO: 446943 - DNA, 33 bp, Homo sapien
aggaaggagcctgtaaagtagcaccaagtatta

SEQ ID NO: 446944 - DNA, 33 bp, Homo sapien
aggaaggagcctgtaaggtagcaccaagtatta

SEQ ID NO: 446945 - DNA, 33 bp, Homo sapien
gctaagaggtgattagacattcggtattaatac

SEQ ID NO: 446946 - DNA, 33 bp, Homo sapien
gctaagaggtgattaggcattcggtattaatac

SEQ ID NO: 446947 - DNA, 33 bp, Homo sapien
tcttttaaaactctcaaaatagtcactgcaatt

SEQ ID NO: 446948 - DNA, 33 bp, Homo sapien
tcttttaaaactctcacaatagtcactgcaatt

SEQ ID NO: 446949 - DNA, 33 bp, Homo sapien
attttgcttttgtaccaaaaagaaatgaagaat

SEQ ID NO: 446950 - DNA, 33 bp, Homo sapien
attttgcttttgtacctaaaagaaatgaagaat

SEQ ID NO: 446951 - DNA, 33 bp, Homo sapien
aagtttcaaatgattacaatgtacacagatgta

SEQ ID NO: 446952 - DNA, 33 bp, Homo sapien
aagtttcaaatgattagaatgtacacagatgta

SEQ ID NO: 446953 - DNA, 33 bp, Homo sapien
tcacctcaacgtctcacgttcttcaactctaaa

SEQ ID NO: 446954 - DNA, 33 bp, Homo sapien
tcacctcaacgtctcatgttcttcaactctaaa

SEQ ID NO: 446955 - DNA, 33 bp, Homo sapien
cctgtattcatactctaactttgccacctgctt

SEQ ID NO: 446956 - DNA, 33 bp, Homo sapien
cctgtattcatactctgactttgccacctgctt

SEQ ID NO: 446957 - DNA, 33 bp, Homo sapien
ttaatattttccttcaagcatctctgtatgttt

SEQ ID NO: 446958 - DNA, 33 bp, Homo sapien
ttaatattttccttcaggcatctctgtatgttt

SEQ ID NO: 446959 - DNA, 33 bp, Homo sapien
gctcacaaatgtattaaaagaagagacacacaa

SEQ ID NO: 446960 - DNA, 33 bp, Homo sapien
gctcacaaatgtattacaagaagagacacacaa

SEQ ID NO: 446961 - DNA, 33 bp, Homo sapien
gttcccccacaactcacgaaactgtctgacagg

SEQ ID NO: 446962 - DNA, 33 bp, Homo sapien
gttcccccacaactcaggaaactgtctgacagg

SEQ ID NO: 446963 - DNA, 33 bp, Homo sapien
ttttggtcagatgttaacttttgctacttgcag

SEQ ID NO: 446964 - DNA, 33 bp, Homo sapien
ttttggtcagatgttatcttttgctacttgcag

SEQ ID NO: 446965 - DNA, 33 bp, Homo sapien
tgctcctcctgtattacccaaacagctgttaaa

SEQ ID NO: 446966 - DNA, 33 bp, Homo sapien
tgctcctcctgtattagccaaacagctgttaaa

SEQ ID NO: 446967 - DNA, 33 bp, Homo sapien
ctgccaacttcgggctcaccaaacaataaaccg

SEQ ID NO: 446968 - DNA, 33 bp, Homo sapien
ctgccaacttcgggcttaccaaacaataaaccg

SEQ ID NO: 446969 - DNA, 33 bp, Homo sapien
ttccaaacattagttacagtgtcgacacgtgga

SEQ ID NO: 446970 - DNA, 33 bp, Homo sapien
ttccaaacattagttatagtgtcgacacgtgga

SEQ ID NO: 446971 - DNA, 33 bp, Homo sapien
aggtgagaactgaggaaaaggaaagcctggcag

SEQ ID NO: 446972 - DNA, 33 bp, Homo sapien
aggtgagaactgaggataaggaaagcctggcag

SEQ ID NO: 446973 - DNA, 33 bp, Homo sapien
taaattctagaatcaccgagaacaactgaaatc

SEQ ID NO: 446974 - DNA, 33 bp, Homo sapien
taaattctagaatcactgagaacaactgaaatc

SEQ ID NO: 446975 - DNA, 33 bp, Homo sapien
agaacaactgaaatcaccccaatagaatcacaa

SEQ ID NO: 446976 - DNA, 33 bp, Homo sapien
agaacaactgaaatcatcccaatagaatcacaa

SEQ ID NO: 446977 - DNA, 33 bp, Homo sapien
ggcttaacttctcaaagacaccaatttgttcaa

SEQ ID NO: 446978 - DNA, 33 bp, Homo sapien
ggcttaacttctcaaatacaccaatttgttcaa

SEQ ID NO: 446979 - DNA, 33 bp, Homo sapien
aaagtagctaccgccacaattcagaaaaaaacg

SEQ ID NO: 446980 - DNA, 33 bp, Homo sapien
aaagtagctaccgccataattcagaaaaaaacg

SEQ ID NO: 446981 - DNA, 33 bp, Homo sapien
tgtttgcttttaaagacgtttcaagagacgtaa

SEQ ID NO: 446982 - DNA, 33 bp, Homo sapien
tgtttgcttttaaagatgtttcaagagacgtaa

SEQ ID NO: 446983 - DNA, 33 bp, Homo sapien
catgcgtatctggtagacaagaccatttgaaaa

SEQ ID NO: 446984 - DNA, 33 bp, Homo sapien
catgcgtatctggtagtcaagaccatttgaaaa

SEQ ID NO: 446985 - DNA, 33 bp, Homo sapien
gatgggatgtaagaaacactccagctgctattg

SEQ ID NO: 446986 - DNA, 33 bp, Homo sapien
gatgggatgtaagaaagactccagctgctattg

SEQ ID NO: 446987 - DNA, 33 bp, Homo sapien
tgcctccttcgttacacactgagaaagccttgt

SEQ ID NO: 446988 - DNA, 33 bp, Homo sapien
tgcctccttcgttacatactgagaaagccttgt

SEQ ID NO: 446989 - DNA, 33 bp, Homo sapien
tagtcagagatttcagaagattttaccaagaag

SEQ ID NO: 446990 - DNA, 33 bp, Homo sapien
tagtcagagatttcaggagattttaccaagaag

SEQ ID NO: 446991 - DNA, 33 bp, Homo sapien
ttcgacatagaggtaaccttaggactgacccaa

SEQ ID NO: 446992 - DNA, 33 bp, Homo sapien
ttcgacatagaggtaatcttaggactgacccaa

SEQ ID NO: 446993 - DNA, 33 bp, Homo sapien
gagctcatttctgtgccgcaactgagtgtcttt

SEQ ID NO: 446994 - DNA, 33 bp, Homo sapien
gagctcatttctgtgctgcaactgagtgtcttt

SEQ ID NO: 446995 - DNA, 33 bp, Homo sapien
gtatttgagaagaacaagaaatgaatcatgcac

SEQ ID NO: 446996 - DNA, 33 bp, Homo sapien
gtatttgagaagaacaggaaatgaatcatgcac

SEQ ID NO: 446997 - DNA, 33 bp, Homo sapien
aaaattgtgccttctcaacccatctgagcctaa

SEQ ID NO: 446998 - DNA, 33 bp, Homo sapien
aaaattgtgccttctccacccatctgagcctaa

SEQ ID NO: 446999 - DNA, 33 bp, Homo sapien
ctgggatagcatattgcagaggagaggctcagt

SEQ ID NO: 447000 - DNA, 33 bp, Homo sapien
ctgggatagcatattgtagaggagaggctcagt

SEQ ID NO: 447001 - DNA, 33 bp, Homo sapien
gataattcatcttcctaacacaggttgtttctt

SEQ ID NO: 447002 - DNA, 33 bp, Homo sapien
gataattcatcttcctgacacaggttgtttctt

SEQ ID NO: 447003 - DNA, 33 bp, Homo sapien
catacctgggtggacaaattataatcaaaacac

SEQ ID NO: 447004 - DNA, 33 bp, Homo sapien
catacctgggtggacagattataatcaaaacac

SEQ ID NO: 447005 - DNA, 33 bp, Homo sapien
taagtcctatgaggcaagtagcgagtacctttt

SEQ ID NO: 447006 - DNA, 33 bp, Homo sapien
taagtcctatgaggcaggtagcgagtacctttt

SEQ ID NO: 447007 - DNA, 33 bp, Homo sapien
aattttgtaatgcctacacgcatattcttcatc

SEQ ID NO: 447008 - DNA, 33 bp, Homo sapien
aattttgtaatgcctatacgcatattcttcatc

SEQ ID NO: 447009 - DNA, 33 bp, Homo sapien
gctacgttgctaaacaagtagtccttttatggg

SEQ ID NO: 447010 - DNA, 33 bp, Homo sapien
gctacgttgctaaacaggtagtccttttatggg

SEQ ID NO: 447011 - DNA, 33 bp, Homo sapien
ttattattagtgcttacgtacttcaggtgtcct

SEQ ID NO: 447012 - DNA, 33 bp, Homo sapien
ttattattagtgcttatgtacttcaggtgtcct

SEQ ID NO: 447013 - DNA, 33 bp, Homo sapien
catactttctcacgccaaacacatagtttatta

SEQ ID NO: 447014 - DNA, 33 bp, Homo sapien
catactttctcacgccgaacacatagtttatta

SEQ ID NO: 447015 - DNA, 33 bp, Homo sapien
gtcaagatagtggatcaaaactatactgcattg

SEQ ID NO: 447016 - DNA, 33 bp, Homo sapien
gtcaagatagtggatcgaaactatactgcattg

SEQ ID NO: 447017 - DNA, 33 bp, Homo sapien
ctgacatccaagagaaaggcgatgacagacctt

SEQ ID NO: 447018 - DNA, 33 bp, Homo sapien
ctgacatccaagagaagggcgatgacagacctt

SEQ ID NO: 447019 - DNA, 33 bp, Homo sapien
aaagacaattcataaacgatgtgacttacatgg

SEQ ID NO: 447020 - DNA, 33 bp, Homo sapien
aaagacaattcataaatgatgtgacttacatgg

SEQ ID NO: 447021 - DNA, 33 bp, Homo sapien
acgttgaatctgtttacagggctttgcagtaca

SEQ ID NO: 447022 - DNA, 33 bp, Homo sapien
acgttgaatctgtttatagggctttgcagtaca

SEQ ID NO: 447023 - DNA, 33 bp, Homo sapien
atgactataagtgtaacatgactgtgctttaac

SEQ ID NO: 447024 - DNA, 33 bp, Homo sapien
atgactataagtgtaatatgactgtgctttaac

SEQ ID NO: 447025 - DNA, 33 bp, Homo sapien
atgatattgtggaaaacgtcaaagaggcctgaa

SEQ ID NO: 447026 - DNA, 33 bp, Homo sapien
atgatattgtggaaaatgtcaaagaggcctgaa

SEQ ID NO: 447027 - DNA, 33 bp, Homo sapien
ggtacccaagttgcaaaatgagatccccttcct

SEQ ID NO: 447028 - DNA, 33 bp, Homo sapien
ggtacccaagttgcaagatgagatccccttcct

SEQ ID NO: 447029 - DNA, 33 bp, Homo sapien
gagctgggtcatgggcagagtttgagccaactc

SEQ ID NO: 447030 - DNA, 33 bp, Homo sapien
gagctgggtcatgggccgagtttgagccaactc

SEQ ID NO: 447031 - DNA, 33 bp, Homo sapien
cagtccccatgtaatacccccatccggcatgta

SEQ ID NO: 447032 - DNA, 33 bp, Homo sapien
cagtccccatgtaatatccccatccggcatgta

SEQ ID NO: 447033 - DNA, 33 bp, Homo sapien
cacttatcaacaaacaagtttctagtttccaat

SEQ ID NO: 447034 - DNA, 33 bp, Homo sapien
cacttatcaacaaacaggtttctagtttccaat

SEQ ID NO: 447035 - DNA, 33 bp, Homo sapien
agctgttgggctcccaggctaactcacaaatcc

SEQ ID NO: 447036 - DNA, 33 bp, Homo sapien
agctgttgggctcccatgctaactcacaaatcc

SEQ ID NO: 447037 - DNA, 33 bp, Homo sapien
taagcagtttggagaagtagtgaataagaaata

SEQ ID NO: 447038 - DNA, 33 bp, Homo sapien
taagcagtttggagaattagtgaataagaaata

SEQ ID NO: 447039 - DNA, 33 bp, Homo sapien
actacaaaaaagatcaagtttcagattcagtga

SEQ ID NO: 447040 - DNA, 33 bp, Homo sapien
actacaaaaaagatcatgtttcagattcagtga

SEQ ID NO: 447041 - DNA, 33 bp, Homo sapien
acaagagcaagtgcaacgtgaactagcttgtgc

SEQ ID NO: 447042 - DNA, 33 bp, Homo sapien
acaagagcaagtgcaatgtgaactagcttgtgc

SEQ ID NO: 447043 - DNA, 33 bp, Homo sapien
aattgagtgtaaagacagaaactttgtgtgtta

SEQ ID NO: 447044 - DNA, 33 bp, Homo sapien
aattgagtgtaaagacggaaactttgtgtgtta

SEQ ID NO: 447045 - DNA, 33 bp, Homo sapien
aactcttttaattgccggaaagagcatctcgaa

SEQ ID NO: 447046 - DNA, 33 bp, Homo sapien
aactcttttaattgcctgaaagagcatctcgaa

SEQ ID NO: 447047 - DNA, 33 bp, Homo sapien
aaagtggaacttgagaaaagaaagtaatattag

SEQ ID NO: 447048 - DNA, 33 bp, Homo sapien
aaagtggaacttgagacaagaaagtaatattag

SEQ ID NO: 447049 - DNA, 33 bp, Homo sapien
tgagcatcacctgaagacatttctcatgtgctg

SEQ ID NO: 447050 - DNA, 33 bp, Homo sapien
tgagcatcacctgaaggcatttctcatgtgctg

SEQ ID NO: 447051 - DNA, 33 bp, Homo sapien
tcatgggaattgtcctaaaatccgagttcccag

SEQ ID NO: 447052 - DNA, 33 bp, Homo sapien
tcatgggaattgtcctgaaatccgagttcccag

SEQ ID NO: 447053 - DNA, 33 bp, Homo sapien
ttaactgctacacacactgaaaatagagaaaaa

SEQ ID NO: 447054 - DNA, 33 bp, Homo sapien
ttaactgctacacacattgaaaatagagaaaaa

SEQ ID NO: 447055 - DNA, 33 bp, Homo sapien
tacgtactcttgatgacaataatgagaatccat

SEQ ID NO: 447056 - DNA, 33 bp, Homo sapien
tacgtactcttgatgagaataatgagaatccat

SEQ ID NO: 447057 - DNA, 33 bp, Homo sapien
taccacaaaataccaggatctccattgcatctg

SEQ ID NO: 447058 - DNA, 33 bp, Homo sapien
taccacaaaataccagtatctccattgcatctg

SEQ ID NO: 447059 - DNA, 33 bp, Homo sapien
attctatatctaataaaacattgctcataaagc

SEQ ID NO: 447060 - DNA, 33 bp, Homo sapien
attctatatctaataagacattgctcataaagc

SEQ ID NO: 447061 - DNA, 33 bp, Homo sapien
tatgctccaaaccaaccattgtatttctttgca

SEQ ID NO: 447062 - DNA, 33 bp, Homo sapien
tatgctccaaaccaactattgtatttctttgca

SEQ ID NO: 447063 - DNA, 33 bp, Homo sapien
ctaataaaaggagtaactgattacagatatgga

SEQ ID NO: 447064 - DNA, 33 bp, Homo sapien
ctaataaaaggagtaattgattacagatatgga

SEQ ID NO: 447065 - DNA, 33 bp, Homo sapien
agtacaaattcatcggaaggtcacatatacaga

SEQ ID NO: 447066 - DNA, 33 bp, Homo sapien
agtacaaattcatcgggaggtcacatatacaga

SEQ ID NO: 447067 - DNA, 33 bp, Homo sapien
gttttgtattttcatcacaacctacagaatgaa

SEQ ID NO: 447068 - DNA, 33 bp, Homo sapien
gttttgtattttcatcgcaacctacagaatgaa

SEQ ID NO: 447069 - DNA, 33 bp, Homo sapien
tttatagaaagctttacgtaggatttgtaaaat

SEQ ID NO: 447070 - DNA, 33 bp, Homo sapien
tttatagaaagctttatgtaggatttgtaaaat

SEQ ID NO: 447071 - DNA, 33 bp, Homo sapien
gcttcatcagtccatgaacttcaagacctcaca

SEQ ID NO: 447072 - DNA, 33 bp, Homo sapien
gcttcatcagtccatgcacttcaagacctcaca

SEQ ID NO: 447073 - DNA, 33 bp, Homo sapien
agaggacctgctaaatcacgtgctatatgcact

SEQ ID NO: 447074 - DNA, 33 bp, Homo sapien
agaggacctgctaaattacgtgctatatgcact

SEQ ID NO: 447075 - DNA, 33 bp, Homo sapien
gtgtcatacctgatgacgtaccacagagcttct

SEQ ID NO: 447076 - DNA, 33 bp, Homo sapien
gtgtcatacctgatgatgtaccacagagcttct

SEQ ID NO: 447077 - DNA, 33 bp, Homo sapien
tcttgccgacatccagcctaattacaactcgag

SEQ ID NO: 447078 - DNA, 33 bp, Homo sapien
tcttgccgacatccaggctaattacaactcgag

SEQ ID NO: 447079 - DNA, 33 bp, Homo sapien
aaactacacatagcaaacctcaaatttgaacag

SEQ ID NO: 447080 - DNA, 33 bp, Homo sapien
aaactacacatagcaatcctcaaatttgaacag

SEQ ID NO: 447081 - DNA, 33 bp, Homo sapien
tgtctgccataaatataagcctggatggtcaga

SEQ ID NO: 447082 - DNA, 33 bp, Homo sapien
tgtctgccataaatattagcctggatggtcaga

SEQ ID NO: 447083 - DNA, 33 bp, Homo sapien
atgttaatttgtttgaatattgtgcacaatgtc

SEQ ID NO: 447084 - DNA, 33 bp, Homo sapien
atgttaatttgtttgagtattgtgcacaatgtc

SEQ ID NO: 447085 - DNA, 33 bp, Homo sapien
agaccgaatgattaagaaagtatgaattcctgc

SEQ ID NO: 447086 - DNA, 33 bp, Homo sapien
agaccgaatgattaaggaagtatgaattcctgc

SEQ ID NO: 447087 - DNA, 33 bp, Homo sapien
agtcacagttttcctaacatatgcttccaggga

SEQ ID NO: 447088 - DNA, 33 bp, Homo sapien
agtcacagttttcctagcatatgcttccaggga

SEQ ID NO: 447089 - DNA, 33 bp, Homo sapien
gcttttgattttcaaaacttgggtgggggagtt

SEQ ID NO: 447090 - DNA, 33 bp, Homo sapien
gcttttgattttcaaaccttgggtgggggagtt

SEQ ID NO: 447091 - DNA, 33 bp, Homo sapien
tcagaactacaggacacaattaacatcatgaac

SEQ ID NO: 447092 - DNA, 33 bp, Homo sapien
tcagaactacaggacataattaacatcatgaac

SEQ ID NO: 447093 - DNA, 33 bp, Homo sapien
ttacttgaccaaaatgaagttttaggagttaaa

SEQ ID NO: 447094 - DNA, 33 bp, Homo sapien
ttacttgaccaaaatggagttttaggagttaaa

SEQ ID NO: 447095 - DNA, 33 bp, Homo sapien
cttgaaatttcctctaggatagcttctctttgg

SEQ ID NO: 447096 - DNA, 33 bp, Homo sapien
cttgaaatttcctctatgatagcttctctttgg

SEQ ID NO: 447097 - DNA, 33 bp, Homo sapien
gattttctgccaagacaataagaagagtacttt

SEQ ID NO: 447098 - DNA, 33 bp, Homo sapien
gattttctgccaagacgataagaagagtacttt

SEQ ID NO: 447099 - DNA, 33 bp, Homo sapien
gatcatttaaaagtgacggcaaatactctcaat

SEQ ID NO: 447100 - DNA, 33 bp, Homo sapien
gatcatttaaaagtgatggcaaatactctcaat

SEQ ID NO: 447101 - DNA, 33 bp, Homo sapien
gtttatttttgtctctcaatactttaagacttt

SEQ ID NO: 447102 - DNA, 33 bp, Homo sapien
gtttatttttgtctctgaatactttaagacttt

SEQ ID NO: 447103 - DNA, 33 bp, Homo sapien
caaggttcatagattacgttttcgttaactctt

SEQ ID NO: 447104 - DNA, 33 bp, Homo sapien
caaggttcatagattatgttttcgttaactctt

SEQ ID NO: 447105 - DNA, 33 bp, Homo sapien
gtcacttagaacgaaaatcaaattggcatagtt

SEQ ID NO: 447106 - DNA, 33 bp, Homo sapien
gtcacttagaacgaaagtcaaattggcatagtt

SEQ ID NO: 447107 - DNA, 33 bp, Homo sapien
cattgcttatgcaaaccgtacattcgtcttctg

SEQ ID NO: 447108 - DNA, 33 bp, Homo sapien
cattgcttatgcaaactgtacattcgtcttctg

SEQ ID NO: 447109 - DNA, 33 bp, Homo sapien
tccctcattccaactaaactcaaactccaagca

SEQ ID NO: 447110 - DNA, 33 bp, Homo sapien
tccctcattccaactagactcaaactccaagca

SEQ ID NO: 447111 - DNA, 33 bp, Homo sapien
tcatcatttttactgacacgaaaatactaaaac

SEQ ID NO: 447112 - DNA, 33 bp, Homo sapien
tcatcatttttactgatacgaaaatactaaaac

SEQ ID NO: 447113 - DNA, 33 bp, Homo sapien
gacaggagtggggagagagcttaggccatggcc

SEQ ID NO: 447114 - DNA, 33 bp, Homo sapien
gacaggagtggggagatagcttaggccatggcc

SEQ ID NO: 447115 - DNA, 33 bp, Homo sapien
aatcatggaagcagtacgggtggaatattttgt

SEQ ID NO: 447116 - DNA, 33 bp, Homo sapien
aatcatggaagcagtatgggtggaatattttgt

SEQ ID NO: 447117 - DNA, 33 bp, Homo sapien
aagcagaggtgaccgaaagtcccaattgttgta

SEQ ID NO: 447118 - DNA, 33 bp, Homo sapien
aagcagaggtgaccgagagtcccaattgttgta

SEQ ID NO: 447119 - DNA, 33 bp, Homo sapien
aatatgaaaatttgtgccaagcactatcctaag

SEQ ID NO: 447120 - DNA, 33 bp, Homo sapien
aatatgaaaatttgtgtcaagcactatcctaag

SEQ ID NO: 447121 - DNA, 33 bp, Homo sapien
cggaaggtgggtgtcaaaattttgtgtctcata

SEQ ID NO: 447122 - DNA, 33 bp, Homo sapien
cggaaggtgggtgtcagaattttgtgtctcata

SEQ ID NO: 447123 - DNA, 33 bp, Homo sapien
taccttacttttcaagcctaagattcatctctc

SEQ ID NO: 447124 - DNA, 33 bp, Homo sapien
taccttacttttcaaggctaagattcatctctc

SEQ ID NO: 447125 - DNA, 33 bp, Homo sapien
aaatcagagtctccaggacaatcttaatggaac

SEQ ID NO: 447126 - DNA, 33 bp, Homo sapien
aaatcagagtctccagtacaatcttaatggaac

SEQ ID NO: 447127 - DNA, 33 bp, Homo sapien
gattatccatttaaccactcaaggacatatcgg

SEQ ID NO: 447128 - DNA, 33 bp, Homo sapien
gattatccatttaaccgctcaaggacatatcgg

SEQ ID NO: 447129 - DNA, 33 bp, Homo sapien
tctttaaaagatacaacgtgccaaacctcaaca

SEQ ID NO: 447130 - DNA, 33 bp, Homo sapien
tctttaaaagatacaatgtgccaaacctcaaca

SEQ ID NO: 447131 - DNA, 33 bp, Homo sapien
actacagattctatggacattaaaacaataata

SEQ ID NO: 447132 - DNA, 33 bp, Homo sapien
actacagattctatgggcattaaaacaataata

SEQ ID NO: 447133 - DNA, 33 bp, Homo sapien
aaatcaggctacacgtaacatactaaagattat

SEQ ID NO: 447134 - DNA, 33 bp, Homo sapien
aaatcaggctacacgtgacatactaaagattat

SEQ ID NO: 447135 - DNA, 33 bp, Homo sapien
cttttatattgaatccagcacaaaattacatca

SEQ ID NO: 447136 - DNA, 33 bp, Homo sapien
cttttatattgaatccggcacaaaattacatca

SEQ ID NO: 447137 - DNA, 33 bp, Homo sapien
tatccttactcctttggataggaaagcatttct

SEQ ID NO: 447138 - DNA, 33 bp, Homo sapien
tatccttactcctttgtataggaaagcatttct

SEQ ID NO: 447139 - DNA, 33 bp, Homo sapien
tggtcaataaacatacaaaaacttgcactgctt

SEQ ID NO: 447140 - DNA, 33 bp, Homo sapien
tggtcaataaacatacgaaaacttgcactgctt

SEQ ID NO: 447141 - DNA, 33 bp, Homo sapien
taaaatcatctaattcacacataaaattgtgtt

SEQ ID NO: 447142 - DNA, 33 bp, Homo sapien
taaaatcatctaattctcacataaaattgtgtt

SEQ ID NO: 447143 - DNA, 33 bp, Homo sapien
gaccagaatctgtctacgaggcagctctgctgt

SEQ ID NO: 447144 - DNA, 33 bp, Homo sapien
gaccagaatctgtctatgaggcagctctgctgt

SEQ ID NO: 447145 - DNA, 33 bp, Homo sapien
cctgtagtgaccagcaaggtagcgacaagtcct

SEQ ID NO: 447146 - DNA, 33 bp, Homo sapien
cctgtagtgaccagcagggtagcgacaagtcct

SEQ ID NO: 447147 - DNA, 33 bp, Homo sapien
ttttaaaataatgtgggaagttgttaagaaatg

SEQ ID NO: 447148 - DNA, 33 bp, Homo sapien
ttttaaaataatgtggtaagttgttaagaaatg

SEQ ID NO: 447149 - DNA, 33 bp, Homo sapien
caactaatggtcatgacgtctaaagaataaagt

SEQ ID NO: 447150 - DNA, 33 bp, Homo sapien
caactaatggtcatgatgtctaaagaataaagt

SEQ ID NO: 447151 - DNA, 33 bp, Homo sapien
gagcacagtgagtataccatcccattctcttca

SEQ ID NO: 447152 - DNA, 33 bp, Homo sapien
gagcacagtgagtatatcatcccattctcttca

SEQ ID NO: 447153 - DNA, 33 bp, Homo sapien
taagtctgtgactacaataaaaaacactggatg

SEQ ID NO: 447154 - DNA, 33 bp, Homo sapien
taagtctgtgactacattaaaaaacactggatg

SEQ ID NO: 447155 - DNA, 33 bp, Homo sapien
ttatattgttgacctacgctaaaagttaattac

SEQ ID NO: 447156 - DNA, 33 bp, Homo sapien
ttatattgttgacctatgctaaaagttaattac

SEQ ID NO: 447157 - DNA, 33 bp, Homo sapien
attacagactcatcaacgacaccgtatttccca

SEQ ID NO: 447158 - DNA, 33 bp, Homo sapien
attacagactcatcaatgacaccgtatttccca

SEQ ID NO: 447159 - DNA, 33 bp, Homo sapien
acctagtcatcactgacagttcccttgggatat

SEQ ID NO: 447160 - DNA, 33 bp, Homo sapien
acctagtcatcactgatagttcccttgggatat

SEQ ID NO: 447161 - DNA, 33 bp, Homo sapien
attacacatatggctcactctaaatgcctgttc

SEQ ID NO: 447162 - DNA, 33 bp, Homo sapien
attacacatatggctcgctctaaatgcctgttc

SEQ ID NO: 447163 - DNA, 33 bp, Homo sapien
caagaaaattcaactacagatcagtatctctga

SEQ ID NO: 447164 - DNA, 33 bp, Homo sapien
caagaaaattcaactatagatcagtatctctga

SEQ ID NO: 447165 - DNA, 33 bp, Homo sapien
tgaagagaacaaagtacgaaaacagtgaaaatt

SEQ ID NO: 447166 - DNA, 33 bp, Homo sapien
tgaagagaacaaagtatgaaaacagtgaaaatt

SEQ ID NO: 447167 - DNA, 33 bp, Homo sapien
gacagagatgccttaaactactgacttttcccc

SEQ ID NO: 447168 - DNA, 33 bp, Homo sapien
gacagagatgccttaacctactgacttttcccc

SEQ ID NO: 447169 - DNA, 33 bp, Homo sapien
aatctatttggcaagaaatgagaaataatgaca

SEQ ID NO: 447170 - DNA, 33 bp, Homo sapien
aatctatttggcaagacatgagaaataatgaca

SEQ ID NO: 447171 - DNA, 33 bp, Homo sapien
gactgacatgcaaatacgaagaataagcaaaga

SEQ ID NO: 447172 - DNA, 33 bp, Homo sapien
gactgacatgcaaataggaagaataagcaaaga

SEQ ID NO: 447173 - DNA, 33 bp, Homo sapien
aatttggaattgttcaaagacacaaaagctcaa

SEQ ID NO: 447174 - DNA, 33 bp, Homo sapien
aatttggaattgttcatagacacaaaagctcaa

SEQ ID NO: 447175 - DNA, 33 bp, Homo sapien
acctcatgtgcctctgaactgaacattgtatct

SEQ ID NO: 447176 - DNA, 33 bp, Homo sapien
acctcatgtgcctctggactgaacattgtatct

SEQ ID NO: 447177 - DNA, 33 bp, Homo sapien
ccagaagacacagatgccactaactcatatggg

SEQ ID NO: 447178 - DNA, 33 bp, Homo sapien
ccagaagacacagatggcactaactcatatggg

SEQ ID NO: 447179 - DNA, 33 bp, Homo sapien
ctttaagtaggactgacgaaccaatgagagcaa

SEQ ID NO: 447180 - DNA, 33 bp, Homo sapien
ctttaagtaggactgatgaaccaatgagagcaa

SEQ ID NO: 447181 - DNA, 33 bp, Homo sapien
ctacagactccagccacgcaagcttttctgctc

SEQ ID NO: 447182 - DNA, 33 bp, Homo sapien
ctacagactccagccaggcaagcttttctgctc

SEQ ID NO: 447183 - DNA, 33 bp, Homo sapien
gaagaaatgtagggaaatatacaattgaaaggg

SEQ ID NO: 447184 - DNA, 33 bp, Homo sapien
gaagaaatgtagggaagtatacaattgaaaggg

SEQ ID NO: 447185 - DNA, 33 bp, Homo sapien
agtgggaatctcagaaaaaggcatagaaaagag

SEQ ID NO: 447186 - DNA, 33 bp, Homo sapien
agtgggaatctcagaacaaggcatagaaaagag

SEQ ID NO: 447187 - DNA, 33 bp, Homo sapien
gccaggttatttcctaaactggcattttgttat

SEQ ID NO: 447188 - DNA, 33 bp, Homo sapien
gccaggttatttcctagactggcattttgttat

SEQ ID NO: 447189 - DNA, 33 bp, Homo sapien
tggtggccgtggaggcaaggaacagtttctctc

SEQ ID NO: 447190 - DNA, 33 bp, Homo sapien
tggtggccgtggaggcgaggaacagtttctctc

SEQ ID NO: 447191 - DNA, 33 bp, Homo sapien
cggcaagaatagaaggaccagatttgttttccc

SEQ ID NO: 447192 - DNA, 33 bp, Homo sapien
cggcaagaatagaagggccagatttgttttccc

SEQ ID NO: 447193 - DNA, 33 bp, Homo sapien
gtcatgcccaattttcccgtcacccaaacgttg

SEQ ID NO: 447194 - DNA, 33 bp, Homo sapien
gtcatgcccaattttctcgtcacccaaacgttg

SEQ ID NO: 447195 - DNA, 33 bp, Homo sapien
tgtacagtgatagacacagaagaacagggaatt

SEQ ID NO: 447196 - DNA, 33 bp, Homo sapien
tgtacagtgatagacagagaagaacagggaatt

SEQ ID NO: 447197 - DNA, 33 bp, Homo sapien
catgtcaccttgcacacgggcagtggttccatg

SEQ ID NO: 447198 - DNA, 33 bp, Homo sapien
catgtcaccttgcacatgggcagtggttccatg

SEQ ID NO: 447199 - DNA, 33 bp, Homo sapien
ataccaatggaggcataaggattaacacagaga

SEQ ID NO: 447200 - DNA, 33 bp, Homo sapien
ataccaatggaggcatgaggattaacacagaga

SEQ ID NO: 447201 - DNA, 33 bp, Homo sapien
gctcttcagagaaacacggccaatggaatgtgt

SEQ ID NO: 447202 - DNA, 33 bp, Homo sapien
gctcttcagagaaacagggccaatggaatgtgt

SEQ ID NO: 447203 - DNA, 33 bp, Homo sapien
aatatacttcttagacacacttaacatttagat

SEQ ID NO: 447204 - DNA, 33 bp, Homo sapien
aatatacttcttagacgcacttaacatttagat

SEQ ID NO: 447205 - DNA, 33 bp, Homo sapien
agaaattcagaaaggaaattcaaagctaatggt

SEQ ID NO: 447206 - DNA, 33 bp, Homo sapien
agaaattcagaaaggatattcaaagctaatggt

SEQ ID NO: 447207 - DNA, 33 bp, Homo sapien
ctgccattggaaatgacgaacataatacgccct

SEQ ID NO: 447208 - DNA, 33 bp, Homo sapien
ctgccattggaaatgatgaacataatacgccct

SEQ ID NO: 447209 - DNA, 33 bp, Homo sapien
tttacactcttcaaaaatgtgaaaggattcgta

SEQ ID NO: 447210 - DNA, 33 bp, Homo sapien
tttacactcttcaaaagtgtgaaaggattcgta

SEQ ID NO: 447211 - DNA, 33 bp, Homo sapien
gttaaaaatcttgttgaactgtaaaaatatatc

SEQ ID NO: 447212 - DNA, 33 bp, Homo sapien
gttaaaaatcttgttgcactgtaaaaatatatc

SEQ ID NO: 447213 - DNA, 33 bp, Homo sapien
gacagatgataagtccaagatgtcacgtctcat

SEQ ID NO: 447214 - DNA, 33 bp, Homo sapien
gacagatgataagtccgagatgtcacgtctcat

SEQ ID NO: 447215 - DNA, 33 bp, Homo sapien
tggtagggacaatacccataaatcactggggac

SEQ ID NO: 447216 - DNA, 33 bp, Homo sapien
tggtagggacaatacctataaatcactggggac

SEQ ID NO: 447217 - DNA, 33 bp, Homo sapien
tttgatattacaagacaattgagagattattgc

SEQ ID NO: 447218 - DNA, 33 bp, Homo sapien
tttgatattacaagactattgagagattattgc

SEQ ID NO: 447219 - DNA, 33 bp, Homo sapien
tgactgtccaactataaccaactgtggatttgt

SEQ ID NO: 447220 - DNA, 33 bp, Homo sapien
tgactgtccaactatagccaactgtggatttgt

SEQ ID NO: 447221 - DNA, 33 bp, Homo sapien
gtgcttcgttcttttccatttaacttctcacca

SEQ ID NO: 447222 - DNA, 33 bp, Homo sapien
gtgcttcgttcttttctatttaacttctcacca

SEQ ID NO: 447223 - DNA, 33 bp, Homo sapien
cagtttgggatactcaacttaccatgagttttt

SEQ ID NO: 447224 - DNA, 33 bp, Homo sapien
cagtttgggatactcagcttaccatgagttttt

SEQ ID NO: 447225 - DNA, 33 bp, Homo sapien
tctggcagtgtcaatacgatatgaaaacctgat

SEQ ID NO: 447226 - DNA, 33 bp, Homo sapien
tctggcagtgtcaatatgatatgaaaacctgat

SEQ ID NO: 447227 - DNA, 33 bp, Homo sapien
aaacagggattggccacgtttgcctccaccatc

SEQ ID NO: 447228 - DNA, 33 bp, Homo sapien
aaacagggattggccatgtttgcctccaccatc

SEQ ID NO: 447229 - DNA, 33 bp, Homo sapien
ttcttcatgagctaaaaattgtaatcactgttg

SEQ ID NO: 447230 - DNA, 33 bp, Homo sapien
ttcttcatgagctaaagattgtaatcactgttg

SEQ ID NO: 447231 - DNA, 33 bp, Homo sapien
atgaacatgaagcgtgaaaggactgaggtagat

SEQ ID NO: 447232 - DNA, 33 bp, Homo sapien
atgaacatgaagcgtggaaggactgaggtagat

SEQ ID NO: 447233 - DNA, 33 bp, Homo sapien
cattgcaataccaaaaggaaaacaacatatctg

SEQ ID NO: 447234 - DNA, 33 bp, Homo sapien
cattgcaataccaaaatgaaaacaacatatctg

SEQ ID NO: 447235 - DNA, 33 bp, Homo sapien
tttcatttttggagccagagcacccttcttttc

SEQ ID NO: 447236 - DNA, 33 bp, Homo sapien
tttcatttttggagccggagcacccttcttttc

SEQ ID NO: 447237 - DNA, 33 bp, Homo sapien
ccctctatcattttatcctatctgagtccccag

SEQ ID NO: 447238 - DNA, 33 bp, Homo sapien
ccctctatcattttattctatctgagtccccag

SEQ ID NO: 447239 - DNA, 33 bp, Homo sapien
tccctttggactggtaaaattgtagcctggtgg

SEQ ID NO: 447240 - DNA, 33 bp, Homo sapien
tccctttggactggtataattgtagcctggtgg

SEQ ID NO: 447241 - DNA, 33 bp, Homo sapien
ccaaaataacattgaaaaagaagaaccacattg

SEQ ID NO: 447242 - DNA, 33 bp, Homo sapien
ccaaaataacattgaagaagaagaaccacattg

SEQ ID NO: 447243 - DNA, 33 bp, Homo sapien
tggaaaagccatcctaaaattcacattgaaatg

SEQ ID NO: 447244 - DNA, 33 bp, Homo sapien
tggaaaagccatcctataattcacattgaaatg

SEQ ID NO: 447245 - DNA, 33 bp, Homo sapien
tcttccaatttttgaacatggtagtctttctgt

SEQ ID NO: 447246 - DNA, 33 bp, Homo sapien
tcttccaatttttgaatatggtagtctttctgt

SEQ ID NO: 447247 - DNA, 33 bp, Homo sapien
agtaacttgtcagcaaaatgcagatatttaatg

SEQ ID NO: 447248 - DNA, 33 bp, Homo sapien
agtaacttgtcagcaagatgcagatatttaatg

SEQ ID NO: 447249 - DNA, 33 bp, Homo sapien
aaggtccctggaagtgcagttgaaaagaagagt

SEQ ID NO: 447250 - DNA, 33 bp, Homo sapien
aaggtccctggaagtgtagttgaaaagaagagt

SEQ ID NO: 447251 - DNA, 33 bp, Homo sapien
tctttgatctccaagactcatgattgtttttta

SEQ ID NO: 447252 - DNA, 33 bp, Homo sapien
tctttgatctccaagagtcatgattgtttttta

SEQ ID NO: 447253 - DNA, 33 bp, Homo sapien
atgaagccgggaaacaatgctattttgatgtta

SEQ ID NO: 447254 - DNA, 33 bp, Homo sapien
atgaagccgggaaacagtgctattttgatgtta

SEQ ID NO: 447255 - DNA, 33 bp, Homo sapien
tgctaagttaaaaggcaccgtggactttgtgac

SEQ ID NO: 447256 - DNA, 33 bp, Homo sapien
tgctaagttaaaaggccccgtggactttgtgac

SEQ ID NO: 447257 - DNA, 33 bp, Homo sapien
cttatgacattgggcccacctgtatgttctccc

SEQ ID NO: 447258 - DNA, 33 bp, Homo sapien
cttatgacattgggcctacctgtatgttctccc

SEQ ID NO: 447259 - DNA, 33 bp, Homo sapien
aaggtttgctgattgaaaatattaatgccatct

SEQ ID NO: 447260 - DNA, 33 bp, Homo sapien
aaggtttgctgattgacaatattaatgccatct

SEQ ID NO: 447261 - DNA, 33 bp, Homo sapien
tgttatagctggtttcaaaggtagtaccatatg

SEQ ID NO: 447262 - DNA, 33 bp, Homo sapien
tgttatagctggtttcgaaggtagtaccatatg

SEQ ID NO: 447263 - DNA, 33 bp, Homo sapien
cttctgaaattcaccactgctttctatttctca

SEQ ID NO: 447264 - DNA, 33 bp, Homo sapien
cttctgaaattcaccattgctttctatttctca

SEQ ID NO: 447265 - DNA, 33 bp, Homo sapien
agacagcaaaatcgacgcctctacttcctcctc

SEQ ID NO: 447266 - DNA, 33 bp, Homo sapien
agacagcaaaatcgactcctctacttcctcctc

SEQ ID NO: 447267 - DNA, 33 bp, Homo sapien
ttaggtagttctttataacaatgcaagaatgaa

SEQ ID NO: 447268 - DNA, 33 bp, Homo sapien
ttaggtagttctttattacaatgcaagaatgaa

SEQ ID NO: 447269 - DNA, 33 bp, Homo sapien
tgctcactgccctctagaaaagtctgctctccc

SEQ ID NO: 447270 - DNA, 33 bp, Homo sapien
tgctcactgccctctataaaagtctgctctccc

SEQ ID NO: 447271 - DNA, 33 bp, Homo sapien
acgtgcataaagttgaaagagccgaggagaatt

SEQ ID NO: 447272 - DNA, 33 bp, Homo sapien
acgtgcataaagttgagagagccgaggagaatt

SEQ ID NO: 447273 - DNA, 33 bp, Homo sapien
tcaattcctactacaccgtcaaggttgtaggcc

SEQ ID NO: 447274 - DNA, 33 bp, Homo sapien
tcaattcctactacactgtcaaggttgtaggcc

SEQ ID NO: 447275 - DNA, 33 bp, Homo sapien
aggaaagctaatgtaaacttttaggtagggccc

SEQ ID NO: 447276 - DNA, 33 bp, Homo sapien
aggaaagctaatgtaaccttttaggtagggccc

SEQ ID NO: 447277 - DNA, 33 bp, Homo sapien
tctctggctttaaacaaaaagatgactaaaact

SEQ ID NO: 447278 - DNA, 33 bp, Homo sapien
tctctggctttaaacagaaagatgactaaaact

SEQ ID NO: 447279 - DNA, 33 bp, Homo sapien
aggaaagtcctgatacactcttgcatctacccc

SEQ ID NO: 447280 - DNA, 33 bp, Homo sapien
aggaaagtcctgatacgctcttgcatctacccc

SEQ ID NO: 447281 - DNA, 33 bp, Homo sapien
atcattatcccatcagcattgccaaagttgtca

SEQ ID NO: 447282 - DNA, 33 bp, Homo sapien
atcattatcccatcagtattgccaaagttgtca

SEQ ID NO: 447283 - DNA, 33 bp, Homo sapien
gagcggtgtggagacgaccagatgacacattca

SEQ ID NO: 447284 - DNA, 33 bp, Homo sapien
gagcggtgtggagacggccagatgacacattca

SEQ ID NO: 447285 - DNA, 33 bp, Homo sapien
cttcagaaacaggaaacgatgtgaaataaatta

SEQ ID NO: 447286 - DNA, 33 bp, Homo sapien
cttcagaaacaggaaatgatgtgaaataaatta

SEQ ID NO: 447287 - DNA, 33 bp, Homo sapien
atccattccattttaacagttgtggaaggcagg

SEQ ID NO: 447288 - DNA, 33 bp, Homo sapien
atccattccattttaatagttgtggaaggcagg

SEQ ID NO: 447289 - DNA, 33 bp, Homo sapien
ttcttccaactgccccactcatgctgacgctgc

SEQ ID NO: 447290 - DNA, 33 bp, Homo sapien
ttcttccaactgccccgctcatgctgacgctgc

SEQ ID NO: 447291 - DNA, 33 bp, Homo sapien
catgattgtcacattcaaaaacgctaataccat

SEQ ID NO: 447292 - DNA, 33 bp, Homo sapien
catgattgtcacattcgaaaacgctaataccat

SEQ ID NO: 447293 - DNA, 33 bp, Homo sapien
gtcaactttttgagaacatacaggataaatgta

SEQ ID NO: 447294 - DNA, 33 bp, Homo sapien
gtcaactttttgagaatatacaggataaatgta

SEQ ID NO: 447295 - DNA, 33 bp, Homo sapien
aagaaatcacatttacaaaaacttgcatatcca

SEQ ID NO: 447296 - DNA, 33 bp, Homo sapien
aagaaatcacatttacgaaaacttgcatatcca

SEQ ID NO: 447297 - DNA, 33 bp, Homo sapien
tttacattttcgagtcaactttactaggacaat

SEQ ID NO: 447298 - DNA, 33 bp, Homo sapien
tttacattttcgagtcgactttactaggacaat

SEQ ID NO: 447299 - DNA, 33 bp, Homo sapien
gaccaaaatgagaacaacctctctgcagacaaa

SEQ ID NO: 447300 - DNA, 33 bp, Homo sapien
gaccaaaatgagaacaccctctctgcagacaaa

SEQ ID NO: 447301 - DNA, 33 bp, Homo sapien
gacctgtgccatggaaagtctgcattgtaaaca

SEQ ID NO: 447302 - DNA, 33 bp, Homo sapien
gacctgtgccatggaacgtctgcattgtaaaca

SEQ ID NO: 447303 - DNA, 33 bp, Homo sapien
tttcagcttatatgtaactagcattattcaagg

SEQ ID NO: 447304 - DNA, 33 bp, Homo sapien
tttcagcttatatgtagctagcattattcaagg

SEQ ID NO: 447305 - DNA, 33 bp, Homo sapien
gctagttccaacaacccaggtgaccacattcca

SEQ ID NO: 447306 - DNA, 33 bp, Homo sapien
gctagttccaacaaccgaggtgaccacattcca

SEQ ID NO: 447307 - DNA, 33 bp, Homo sapien
gtacgttataaagaaactgacatggaattgagg

SEQ ID NO: 447308 - DNA, 33 bp, Homo sapien
gtacgttataaagaaattgacatggaattgagg

SEQ ID NO: 447309 - DNA, 33 bp, Homo sapien
actcctgtaattaacactgaataacaaagctgg

SEQ ID NO: 447310 - DNA, 33 bp, Homo sapien
actcctgtaattaacattgaataacaaagctgg

SEQ ID NO: 447311 - DNA, 33 bp, Homo sapien
taaatcccttcattcacagccaactcattttca

SEQ ID NO: 447312 - DNA, 33 bp, Homo sapien
taaatcccttcattcatagccaactcattttca

SEQ ID NO: 447313 - DNA, 33 bp, Homo sapien
ggaatgtaaattagtacagcgaccacagaaaac

SEQ ID NO: 447314 - DNA, 33 bp, Homo sapien
ggaatgtaaattagtagagcgaccacagaaaac

SEQ ID NO: 447315 - DNA, 33 bp, Homo sapien
aatcttttcatatccaagtcccagaaagtgaca

SEQ ID NO: 447316 - DNA, 33 bp, Homo sapien
aatcttttcatatccacgtcccagaaagtgaca

SEQ ID NO: 447317 - DNA, 33 bp, Homo sapien
ctggtggacaacatgacagcttgttatgagact

SEQ ID NO: 447318 - DNA, 33 bp, Homo sapien
ctggtggacaacatgatagcttgttatgagact

SEQ ID NO: 447319 - DNA, 33 bp, Homo sapien
tcatttgcctcctctgaattgattgcaacaaag

SEQ ID NO: 447320 - DNA, 33 bp, Homo sapien
tcatttgcctcctctggattgattgcaacaaag

SEQ ID NO: 447321 - DNA, 33 bp, Homo sapien
aagatagcaactaatgccagacttcattgacaa

SEQ ID NO: 447322 - DNA, 33 bp, Homo sapien
aagatagcaactaatggcagacttcattgacaa

SEQ ID NO: 447323 - DNA, 33 bp, Homo sapien
agggcaattgaaactcactccattcttttcaaa

SEQ ID NO: 447324 - DNA, 33 bp, Homo sapien
agggcaattgaaactcgctccattcttttcaaa

SEQ ID NO: 447325 - DNA, 33 bp, Homo sapien
aagaggatcaactataaataagagagaagctat

SEQ ID NO: 447326 - DNA, 33 bp, Homo sapien
aagaggatcaactatagataagagagaagctat

SEQ ID NO: 447327 - DNA, 33 bp, Homo sapien
cagatggtatgacaccaaagaaacaatagtcta

SEQ ID NO: 447328 - DNA, 33 bp, Homo sapien
cagatggtatgacaccgaagaaacaatagtcta

SEQ ID NO: 447329 - DNA, 33 bp, Homo sapien
caatctactcacgagacaaacatcagatcaatt

SEQ ID NO: 447330 - DNA, 33 bp, Homo sapien
caatctactcacgagataaacatcagatcaatt

SEQ ID NO: 447331 - DNA, 33 bp, Homo sapien
taaaaatgaaggatacacaacaaactgagtttg

SEQ ID NO: 447332 - DNA, 33 bp, Homo sapien
taaaaatgaaggatacgcaacaaactgagtttg

SEQ ID NO: 447333 - DNA, 33 bp, Homo sapien
ttagggtgcttgaagacgaggagagaaagtttg

SEQ ID NO: 447334 - DNA, 33 bp, Homo sapien
ttagggtgcttgaagatgaggagagaaagtttg

SEQ ID NO: 447335 - DNA, 33 bp, Homo sapien
ggttaattttggtcaaagaatgtgtatggggaa

SEQ ID NO: 447336 - DNA, 33 bp, Homo sapien
ggttaattttggtcaaggaatgtgtatggggaa

SEQ ID NO: 447337 - DNA, 33 bp, Homo sapien
aggaaaagtcttattacgtgaatgcctttattt

SEQ ID NO: 447338 - DNA, 33 bp, Homo sapien
aggaaaagtcttattatgtgaatgcctttattt

SEQ ID NO: 447339 - DNA, 33 bp, Homo sapien
gtgatgctgttagaaacacagaccttttcagct

SEQ ID NO: 447340 - DNA, 33 bp, Homo sapien
gtgatgctgttagaaatacagaccttttcagct

SEQ ID NO: 447341 - DNA, 33 bp, Homo sapien
attcaagtaaataaaactgcttggaatgacaga

SEQ ID NO: 447342 - DNA, 33 bp, Homo sapien
attcaagtaaataaaattgcttggaatgacaga

SEQ ID NO: 447343 - DNA, 33 bp, Homo sapien
attatggaaaatttgaagagaagtgattttaac

SEQ ID NO: 447344 - DNA, 33 bp, Homo sapien
attatggaaaatttgaggagaagtgattttaac

SEQ ID NO: 447345 - DNA, 33 bp, Homo sapien
ttccacaagagtttccaaatacgtctcgtggct

SEQ ID NO: 447346 - DNA, 33 bp, Homo sapien
ttccacaagagtttccgaatacgtctcgtggct

SEQ ID NO: 447347 - DNA, 33 bp, Homo sapien
aaaagacagaaacaaaaccttctgaggccaatc

SEQ ID NO: 447348 - DNA, 33 bp, Homo sapien
aaaagacagaaacaaagccttctgaggccaatc

SEQ ID NO: 447349 - DNA, 33 bp, Homo sapien
atccagttgctatgtacaaaatttcaagaagtg

SEQ ID NO: 447350 - DNA, 33 bp, Homo sapien
atccagttgctatgtataaaatttcaagaagtg

SEQ ID NO: 447351 - DNA, 33 bp, Homo sapien
gtctatacactatataaaacggtttgaacgaaa

SEQ ID NO: 447352 - DNA, 33 bp, Homo sapien
gtctatacactatatacaacggtttgaacgaaa

SEQ ID NO: 447353 - DNA, 33 bp, Homo sapien
ctataagctactggaaacaggaagtatgaatga

SEQ ID NO: 447354 - DNA, 33 bp, Homo sapien
ctataagctactggaaccaggaagtatgaatga

SEQ ID NO: 447355 - DNA, 33 bp, Homo sapien
tttgcttcagttcggaacaatgttttactttct

SEQ ID NO: 447356 - DNA, 33 bp, Homo sapien
tttgcttcagttcggagcaatgttttactttct

SEQ ID NO: 447357 - DNA, 33 bp, Homo sapien
atagtacttgatgaggaagcaacctgtagcaag

SEQ ID NO: 447358 - DNA, 33 bp, Homo sapien
atagtacttgatgagggagcaacctgtagcaag

SEQ ID NO: 447359 - DNA, 33 bp, Homo sapien
ggtttacaagggaaaccggaacagcttcgtttt

SEQ ID NO: 447360 - DNA, 33 bp, Homo sapien
ggtttacaagggaaactggaacagcttcgtttt

SEQ ID NO: 447361 - DNA, 33 bp, Homo sapien
ctattagttctgtctcaagaaccctgattaata

SEQ ID NO: 447362 - DNA, 33 bp, Homo sapien
ctattagttctgtctcgagaaccctgattaata

SEQ ID NO: 447363 - DNA, 33 bp, Homo sapien
gggccaataaataacaacctgctttgctttcta

SEQ ID NO: 447364 - DNA, 33 bp, Homo sapien
gggccaataaataacaccctgctttgctttcta

SEQ ID NO: 447365 - DNA, 33 bp, Homo sapien
ttttgacgttttcccaaggtagagctattacca

SEQ ID NO: 447366 - DNA, 33 bp, Homo sapien
ttttgacgttttcccagggtagagctattacca

SEQ ID NO: 447367 - DNA, 33 bp, Homo sapien
tgaagtaagtcttaacaccatataatctaagtc

SEQ ID NO: 447368 - DNA, 33 bp, Homo sapien
tgaagtaagtcttaacgccatataatctaagtc

SEQ ID NO: 447369 - DNA, 33 bp, Homo sapien
tcagatttattttacaaatgaggggaagccatt

SEQ ID NO: 447370 - DNA, 33 bp, Homo sapien
tcagatttattttacacatgaggggaagccatt

SEQ ID NO: 447371 - DNA, 33 bp, Homo sapien
tcacttgtttctcccaatcacattgatctcgct

SEQ ID NO: 447372 - DNA, 33 bp, Homo sapien
tcacttgtttctcccattcacattgatctcgct

SEQ ID NO: 447373 - DNA, 33 bp, Homo sapien
tgtaatcttctgtttacaccttctctattcatt

SEQ ID NO: 447374 - DNA, 33 bp, Homo sapien
tgtaatcttctgtttataccttctctattcatt

SEQ ID NO: 447375 - DNA, 33 bp, Homo sapien
gctgtttttcactcgaaactctgacagcatctg

SEQ ID NO: 447376 - DNA, 33 bp, Homo sapien
gctgtttttcactcgacactctgacagcatctg

SEQ ID NO: 447377 - DNA, 33 bp, Homo sapien
cctagacacatgccacagcagagattttcacta

SEQ ID NO: 447378 - DNA, 33 bp, Homo sapien
cctagacacatgccacggcagagattttcacta

SEQ ID NO: 447379 - DNA, 33 bp, Homo sapien
tgggagaaactacccacgtaatctaatcacttc

SEQ ID NO: 447380 - DNA, 33 bp, Homo sapien
tgggagaaactacccatgtaatctaatcacttc

SEQ ID NO: 447381 - DNA, 33 bp, Homo sapien
atcttaatgatgtagaagtgtcataaccaagaa

SEQ ID NO: 447382 - DNA, 33 bp, Homo sapien
atcttaatgatgtagaggtgtcataaccaagaa

SEQ ID NO: 447383 - DNA, 33 bp, Homo sapien
atttttaagtgcagccaaatctatttctaaact

SEQ ID NO: 447384 - DNA, 33 bp, Homo sapien
atttttaagtgcagccgaatctatttctaaact

SEQ ID NO: 447385 - DNA, 33 bp, Homo sapien
gtgtggctaaaacaaaatatgttagatgctcag

SEQ ID NO: 447386 - DNA, 33 bp, Homo sapien
gtgtggctaaaacaaactatgttagatgctcag

SEQ ID NO: 447387 - DNA, 33 bp, Homo sapien
atctttcttatgttgacgtcacttgttacttgc

SEQ ID NO: 447388 - DNA, 33 bp, Homo sapien
atctttcttatgttgatgtcacttgttacttgc

SEQ ID NO: 447389 - DNA, 33 bp, Homo sapien
accatgttagccagtaaccttgtgatttcaacg

SEQ ID NO: 447390 - DNA, 33 bp, Homo sapien
accatgttagccagtatccttgtgatttcaacg

SEQ ID NO: 447391 - DNA, 33 bp, Homo sapien
aaatgtggcctacagaatagaagtatcagcatt

SEQ ID NO: 447392 - DNA, 33 bp, Homo sapien
aaatgtggcctacagactagaagtatcagcatt

SEQ ID NO: 447393 - DNA, 33 bp, Homo sapien
aaagcagaaaaactgcagacgttattgtaaaga

SEQ ID NO: 447394 - DNA, 33 bp, Homo sapien
aaagcagaaaaactgccgacgttattgtaaaga

SEQ ID NO: 447395 - DNA, 33 bp, Homo sapien
catgtaagggttaaggaacactcccctacactt

SEQ ID NO: 447396 - DNA, 33 bp, Homo sapien
catgtaagggttaaggcacactcccctacactt

SEQ ID NO: 447397 - DNA, 33 bp, Homo sapien
gacattttgatattgccccaccatttttggtgc

SEQ ID NO: 447398 - DNA, 33 bp, Homo sapien
gacattttgatattgctccaccatttttggtgc

SEQ ID NO: 447399 - DNA, 33 bp, Homo sapien
aatgcttagataaattaaatgttggaagtatct

SEQ ID NO: 447400 - DNA, 33 bp, Homo sapien
aatgcttagataaattgaatgttggaagtatct

SEQ ID NO: 447401 - DNA, 33 bp, Homo sapien
agtagagtgtggatgagaaataacagaatcagt

SEQ ID NO: 447402 - DNA, 33 bp, Homo sapien
agtagagtgtggatgataaataacagaatcagt

SEQ ID NO: 447403 - DNA, 33 bp, Homo sapien
ggacatggctgatagcaacggtcttagctgtaa

SEQ ID NO: 447404 - DNA, 33 bp, Homo sapien
ggacatggctgatagcgacggtcttagctgtaa

SEQ ID NO: 447405 - DNA, 33 bp, Homo sapien
caaagtgtttcaactccgaagtcacagtccgtg

SEQ ID NO: 447406 - DNA, 33 bp, Homo sapien
caaagtgtttcaactctgaagtcacagtccgtg

SEQ ID NO: 447407 - DNA, 33 bp, Homo sapien
gtgacacagaaataaaaagagaagaacatgtag

SEQ ID NO: 447408 - DNA, 33 bp, Homo sapien
gtgacacagaaataaagagagaagaacatgtag

SEQ ID NO: 447409 - DNA, 33 bp, Homo sapien
acccacacctctgtaaatagatctttcattaaa

SEQ ID NO: 447410 - DNA, 33 bp, Homo sapien
acccacacctctgtaagtagatctttcattaaa

SEQ ID NO: 447411 - DNA, 33 bp, Homo sapien
attatattagtaacaaagcttccatcagcaact

SEQ ID NO: 447412 - DNA, 33 bp, Homo sapien
attatattagtaacaatgcttccatcagcaact

SEQ ID NO: 447413 - DNA, 33 bp, Homo sapien
tttaataaacgttggcagaatgaagtaagatca

SEQ ID NO: 447414 - DNA, 33 bp, Homo sapien
tttaataaacgttggctgaatgaagtaagatca

SEQ ID NO: 447415 - DNA, 33 bp, Homo sapien
ttgtgtctcggttgccagacaagcaattagttg

SEQ ID NO: 447416 - DNA, 33 bp, Homo sapien
ttgtgtctcggttgccggacaagcaattagttg

SEQ ID NO: 447417 - DNA, 33 bp, Homo sapien
actccggttatatcatcatcagagttccccatt

SEQ ID NO: 447418 - DNA, 33 bp, Homo sapien
actccggttatatcattatcagagttccccatt

SEQ ID NO: 447419 - DNA, 33 bp, Homo sapien
ctttaaaaatattcgcaaagagaaggagagatg

SEQ ID NO: 447420 - DNA, 33 bp, Homo sapien
ctttaaaaatattcgcgaagagaaggagagatg

SEQ ID NO: 447421 - DNA, 33 bp, Homo sapien
aaattctaccacagcccgattgaacgagtttta

SEQ ID NO: 447422 - DNA, 33 bp, Homo sapien
aaattctaccacagcctgattgaacgagtttta

SEQ ID NO: 447423 - DNA, 33 bp, Homo sapien
agacttaaacgttagaaatttctacatacaagg

SEQ ID NO: 447424 - DNA, 33 bp, Homo sapien
agacttaaacgttagatatttctacatacaagg

SEQ ID NO: 447425 - DNA, 33 bp, Homo sapien
gaaagagacgtcctaacacaacagaaaacttta

SEQ ID NO: 447426 - DNA, 33 bp, Homo sapien
gaaagagacgtcctaagacaacagaaaacttta

SEQ ID NO: 447427 - DNA, 33 bp, Homo sapien
caatggtgatcttcataactttctgtgtatctg

SEQ ID NO: 447428 - DNA, 33 bp, Homo sapien
caatggtgatcttcattactttctgtgtatctg

SEQ ID NO: 447429 - DNA, 33 bp, Homo sapien
ttgaattattgtgcacacttctgcgtatgctgg

SEQ ID NO: 447430 - DNA, 33 bp, Homo sapien
ttgaattattgtgcacgcttctgcgtatgctgg

SEQ ID NO: 447431 - DNA, 33 bp, Homo sapien
taatagctaaatgctacgatggagagtgacagc

SEQ ID NO: 447432 - DNA, 33 bp, Homo sapien
taatagctaaatgctatgatggagagtgacagc

SEQ ID NO: 447433 - DNA, 33 bp, Homo sapien
ctgggctggttttggcagatttcttccagtgag

SEQ ID NO: 447434 - DNA, 33 bp, Homo sapien
ctgggctggttttggcggatttcttccagtgag

SEQ ID NO: 447435 - DNA, 33 bp, Homo sapien
actctggttgctatgccgatttttgagaaatgt

SEQ ID NO: 447436 - DNA, 33 bp, Homo sapien
actctggttgctatgctgatttttgagaaatgt

SEQ ID NO: 447437 - DNA, 33 bp, Homo sapien
atgtacagttttgtgaatatatttgttaaaaca

SEQ ID NO: 447438 - DNA, 33 bp, Homo sapien
atgtacagttttgtgactatatttgttaaaaca

SEQ ID NO: 447439 - DNA, 33 bp, Homo sapien
aaatttcaaacagtagcaatcaaatcaatcaca

SEQ ID NO: 447440 - DNA, 33 bp, Homo sapien
aaatttcaaacagtagtaatcaaatcaatcaca

SEQ ID NO: 447441 - DNA, 33 bp, Homo sapien
cagaaagcacggctgacgacaattttctaaaca

SEQ ID NO: 447442 - DNA, 33 bp, Homo sapien
cagaaagcacggctgatgacaattttctaaaca

SEQ ID NO: 447443 - DNA, 33 bp, Homo sapien
aagctacactgtacagaaaagaagcagctttgt

SEQ ID NO: 447444 - DNA, 33 bp, Homo sapien
aagctacactgtacaggaaagaagcagctttgt

SEQ ID NO: 447445 - DNA, 33 bp, Homo sapien
tgggaaaaaatgccaactacgttatctatttta

SEQ ID NO: 447446 - DNA, 33 bp, Homo sapien
tgggaaaaaatgccaattacgttatctatttta

SEQ ID NO: 447447 - DNA, 33 bp, Homo sapien
agaatattatagtgaaaacgatccaattttaat

SEQ ID NO: 447448 - DNA, 33 bp, Homo sapien
agaatattatagtgaagacgatccaattttaat

SEQ ID NO: 447449 - DNA, 33 bp, Homo sapien
ttcttttgttatgtacccttggagaaaagaaca

SEQ ID NO: 447450 - DNA, 33 bp, Homo sapien
ttcttttgttatgtactcttggagaaaagaaca

SEQ ID NO: 447451 - DNA, 33 bp, Homo sapien
tatagtgagaaaagtacggcagaaggtaccgac

SEQ ID NO: 447452 - DNA, 33 bp, Homo sapien
tatagtgagaaaagtatggcagaaggtaccgac

SEQ ID NO: 447453 - DNA, 33 bp, Homo sapien
ggtcaaacgttgctgccaagaggtgatagatga

SEQ ID NO: 447454 - DNA, 33 bp, Homo sapien
ggtcaaacgttgctgctaagaggtgatagatga

SEQ ID NO: 447455 - DNA, 33 bp, Homo sapien
ttagataattatccaccatttgtaacagccttg

SEQ ID NO: 447456 - DNA, 33 bp, Homo sapien
ttagataattatccactatttgtaacagccttg

SEQ ID NO: 447457 - DNA, 33 bp, Homo sapien
ctggacatgttcatacagagaaaagaaaaccca

SEQ ID NO: 447458 - DNA, 33 bp, Homo sapien
ctggacatgttcatacggagaaaagaaaaccca

SEQ ID NO: 447459 - DNA, 33 bp, Homo sapien
attgatatctttaggacgttgagtgttaaaatc

SEQ ID NO: 447460 - DNA, 33 bp, Homo sapien
attgatatctttaggatgttgagtgttaaaatc

SEQ ID NO: 447461 - DNA, 33 bp, Homo sapien
aaggacaaagtgcataactcaccttatatttaa

SEQ ID NO: 447462 - DNA, 33 bp, Homo sapien
aaggacaaagtgcatacctcaccttatatttaa

SEQ ID NO: 447463 - DNA, 33 bp, Homo sapien
ggtatcctgcatagaacaggcttaagtgaaaag

SEQ ID NO: 447464 - DNA, 33 bp, Homo sapien
ggtatcctgcatagaataggcttaagtgaaaag

SEQ ID NO: 447465 - DNA, 33 bp, Homo sapien
attgtggtatgtgtaaagaagagcttgaatggg

SEQ ID NO: 447466 - DNA, 33 bp, Homo sapien
attgtggtatgtgtaacgaagagcttgaatggg

SEQ ID NO: 447467 - DNA, 33 bp, Homo sapien
tctgtatttcgagggcacagaacaaggtaatag

SEQ ID NO: 447468 - DNA, 33 bp, Homo sapien
tctgtatttcgagggcgcagaacaaggtaatag

SEQ ID NO: 447469 - DNA, 33 bp, Homo sapien
atatgataaatggtaaaaacttatagatgccat

SEQ ID NO: 447470 - DNA, 33 bp, Homo sapien
atatgataaatggtaagaacttatagatgccat

SEQ ID NO: 447471 - DNA, 33 bp, Homo sapien
gatatgcattcagcagaaaagatttggtccagg

SEQ ID NO: 447472 - DNA, 33 bp, Homo sapien
gatatgcattcagcaggaaagatttggtccagg

SEQ ID NO: 447473 - DNA, 33 bp, Homo sapien
catggtcttgtatgtcagaaatcatggggttaa

SEQ ID NO: 447474 - DNA, 33 bp, Homo sapien
catggtcttgtatgtcggaaatcatggggttaa

SEQ ID NO: 447475 - DNA, 33 bp, Homo sapien
catgatttagtagccaaattgctatatggagga

SEQ ID NO: 447476 - DNA, 33 bp, Homo sapien
catgatttagtagccagattgctatatggagga

SEQ ID NO: 447477 - DNA, 33 bp, Homo sapien
tgacagttgtcattaccagggttacaactgcag

SEQ ID NO: 447478 - DNA, 33 bp, Homo sapien
tgacagttgtcattacgagggttacaactgcag

SEQ ID NO: 447479 - DNA, 33 bp, Homo sapien
ccttcaactttcaaaaccctaaatgttaagcgc

SEQ ID NO: 447480 - DNA, 33 bp, Homo sapien
ccttcaactttcaaaatcctaaatgttaagcgc

SEQ ID NO: 447481 - DNA, 33 bp, Homo sapien
cttgctcttcttctcagctagtgtcgcacactc

SEQ ID NO: 447482 - DNA, 33 bp, Homo sapien
cttgctcttcttctcatctagtgtcgcacactc

SEQ ID NO: 447483 - DNA, 33 bp, Homo sapien
ccttcagtacaaaaacagttcatgcattttatg

SEQ ID NO: 447484 - DNA, 33 bp, Homo sapien
ccttcagtacaaaaactgttcatgcattttatg

SEQ ID NO: 447485 - DNA, 33 bp, Homo sapien
ttaaactttgatatggccagttacccaaaaact

SEQ ID NO: 447486 - DNA, 33 bp, Homo sapien
ttaaactttgatatggtcagttacccaaaaact

SEQ ID NO: 447487 - DNA, 33 bp, Homo sapien
atcttcaaattaatgtaaagcaaaatgacttct

SEQ ID NO: 447488 - DNA, 33 bp, Homo sapien
atcttcaaattaatgtcaagcaaaatgacttct

SEQ ID NO: 447489 - DNA, 33 bp, Homo sapien
gtgctgatctagagaactgggcttcaggtgcag

SEQ ID NO: 447490 - DNA, 33 bp, Homo sapien
gtgctgatctagagaattgggcttcaggtgcag

SEQ ID NO: 447491 - DNA, 33 bp, Homo sapien
tgaaaaccttccttcacgagccagctttggcag

SEQ ID NO: 447492 - DNA, 33 bp, Homo sapien
tgaaaaccttccttcatgagccagctttggcag

SEQ ID NO: 447493 - DNA, 33 bp, Homo sapien
tgtctactcatgaaacacaaacttatatctcca

SEQ ID NO: 447494 - DNA, 33 bp, Homo sapien
tgtctactcatgaaacgcaaacttatatctcca

SEQ ID NO: 447495 - DNA, 33 bp, Homo sapien
gcttttcctaccatgcccggctctttcctctga

SEQ ID NO: 447496 - DNA, 33 bp, Homo sapien
gcttttcctaccatgcgcggctctttcctctga

SEQ ID NO: 447497 - DNA, 33 bp, Homo sapien
attgagggccaaagccaggatcttttgatgatg

SEQ ID NO: 447498 - DNA, 33 bp, Homo sapien
attgagggccaaagccgggatcttttgatgatg

SEQ ID NO: 447499 - DNA, 33 bp, Homo sapien
tcttctgatggacaataagtgaaaacatttcac

SEQ ID NO: 447500 - DNA, 33 bp, Homo sapien
tcttctgatggacaatgagtgaaaacatttcac

SEQ ID NO: 447501 - DNA, 33 bp, Homo sapien
tttctctgtgcgtttacaccctaaaatttcaaa

SEQ ID NO: 447502 - DNA, 33 bp, Homo sapien
tttctctgtgcgtttataccctaaaatttcaaa

SEQ ID NO: 447503 - DNA, 33 bp, Homo sapien
agttcaggttagaagacggtgggaggagagaat

SEQ ID NO: 447504 - DNA, 33 bp, Homo sapien
agttcaggttagaagatggtgggaggagagaat

SEQ ID NO: 447505 - DNA, 33 bp, Homo sapien
tcgagtctttagagtcaaaaaggccaaagaccg

SEQ ID NO: 447506 - DNA, 33 bp, Homo sapien
tcgagtctttagagtcgaaaaggccaaagaccg

SEQ ID NO: 447507 - DNA, 33 bp, Homo sapien
cagttgccttagacaaagtttaggtttttatgt

SEQ ID NO: 447508 - DNA, 33 bp, Homo sapien
cagttgccttagacaacgtttaggtttttatgt

SEQ ID NO: 447509 - DNA, 33 bp, Homo sapien
cagcttcataagtcaaaatttacaacctagtat

SEQ ID NO: 447510 - DNA, 33 bp, Homo sapien
cagcttcataagtcaacatttacaacctagtat

SEQ ID NO: 447511 - DNA, 33 bp, Homo sapien
tactggggattaatacaccctggatgagcttat

SEQ ID NO: 447512 - DNA, 33 bp, Homo sapien
tactggggattaatacgccctggatgagcttat

SEQ ID NO: 447513 - DNA, 33 bp, Homo sapien
gccccttgacaatgtaaatctttttcaaagcct

SEQ ID NO: 447514 - DNA, 33 bp, Homo sapien
gccccttgacaatgtacatctttttcaaagcct

SEQ ID NO: 447515 - DNA, 33 bp, Homo sapien
aaacgtaatcagcaggaaatagaactctatctc

SEQ ID NO: 447516 - DNA, 33 bp, Homo sapien
aaacgtaatcagcagggaatagaactctatctc

SEQ ID NO: 447517 - DNA, 33 bp, Homo sapien
aagtcccgtacattgaaagaagagggaggtgca

SEQ ID NO: 447518 - DNA, 33 bp, Homo sapien
aagtcccgtacattgagagaagagggaggtgca

SEQ ID NO: 447519 - DNA, 33 bp, Homo sapien
gagttctatgcttttgaatttcttagactccag

SEQ ID NO: 447520 - DNA, 33 bp, Homo sapien
gagttctatgcttttggatttcttagactccag

SEQ ID NO: 447521 - DNA, 33 bp, Homo sapien
ttcctacttggtcttaaatttgtcttctcttga

SEQ ID NO: 447522 - DNA, 33 bp, Homo sapien
ttcctacttggtcttagatttgtcttctcttga

SEQ ID NO: 447523 - DNA, 33 bp, Homo sapien
atgtaactcaacaactaaactctgctgctggaa

SEQ ID NO: 447524 - DNA, 33 bp, Homo sapien
atgtaactcaacaactcaactctgctgctggaa

SEQ ID NO: 447525 - DNA, 33 bp, Homo sapien
tgctgacaacctaaaggcaatgtggggtgtcaa

SEQ ID NO: 447526 - DNA, 33 bp, Homo sapien
tgctgacaacctaaagtcaatgtggggtgtcaa

SEQ ID NO: 447527 - DNA, 33 bp, Homo sapien
atccaattttagatacacaaatctgcttatgtt

SEQ ID NO: 447528 - DNA, 33 bp, Homo sapien
atccaattttagatacgcaaatctgcttatgtt

SEQ ID NO: 447529 - DNA, 33 bp, Homo sapien
aggaaatctgaataaactgtgcattgcagttaa

SEQ ID NO: 447530 - DNA, 33 bp, Homo sapien
aggaaatctgaataaagtgtgcattgcagttaa

SEQ ID NO: 447531 - DNA, 33 bp, Homo sapien
tggagaggacagcaaaaacacctggctccacaa

SEQ ID NO: 447532 - DNA, 33 bp, Homo sapien
tggagaggacagcaaacacacctggctccacaa

SEQ ID NO: 447533 - DNA, 33 bp, Homo sapien
catgttctcctgagcaatattaagcaaacacag

SEQ ID NO: 447534 - DNA, 33 bp, Homo sapien
catgttctcctgagcactattaagcaaacacag

SEQ ID NO: 447535 - DNA, 33 bp, Homo sapien
tttattgagattagaacctccaaatcctgctgg

SEQ ID NO: 447536 - DNA, 33 bp, Homo sapien
tttattgagattagaagctccaaatcctgctgg

SEQ ID NO: 447537 - DNA, 33 bp, Homo sapien
tgtagttaataaacaaacaaggcataatcatcc

SEQ ID NO: 447538 - DNA, 33 bp, Homo sapien
tgtagttaataaacaagcaaggcataatcatcc

SEQ ID NO: 447539 - DNA, 33 bp, Homo sapien
ctatttgttaaagatagaaaccttgagattcag

SEQ ID NO: 447540 - DNA, 33 bp, Homo sapien
ctatttgttaaagatataaaccttgagattcag

SEQ ID NO: 447541 - DNA, 33 bp, Homo sapien
atctttaacaaatagtaacagtatgctcaaatc

SEQ ID NO: 447542 - DNA, 33 bp, Homo sapien
atctttaacaaatagtgacagtatgctcaaatc

SEQ ID NO: 447543 - DNA, 33 bp, Homo sapien
acaaaaataatcacatgagttctacagaggtga

SEQ ID NO: 447544 - DNA, 33 bp, Homo sapien
acaaaaataatcacattagttctacagaggtga

SEQ ID NO: 447545 - DNA, 33 bp, Homo sapien
tctttcataatttacacattctcggtacatgaa

SEQ ID NO: 447546 - DNA, 33 bp, Homo sapien
tctttcataatttacatattctcggtacatgaa

SEQ ID NO: 447547 - DNA, 33 bp, Homo sapien
gaaaatgaaaaagaagccttcctattttaaata

SEQ ID NO: 447548 - DNA, 33 bp, Homo sapien
gaaaatgaaaaagaaggcttcctattttaaata

SEQ ID NO: 447549 - DNA, 33 bp, Homo sapien
gtctagaatattctacaaagatatgctctatac

SEQ ID NO: 447550 - DNA, 33 bp, Homo sapien
gtctagaatattctaccaagatatgctctatac

SEQ ID NO: 447551 - DNA, 33 bp, Homo sapien
gttaggttacatagtacatcagagagtatttct

SEQ ID NO: 447552 - DNA, 33 bp, Homo sapien
gttaggttacatagtagatcagagagtatttct

SEQ ID NO: 447553 - DNA, 33 bp, Homo sapien
cttttatgcttacaaaatgaccttaagtggaca

SEQ ID NO: 447554 - DNA, 33 bp, Homo sapien
cttttatgcttacaaattgaccttaagtggaca

SEQ ID NO: 447555 - DNA, 33 bp, Homo sapien
agttcttgctgttgtcactctatcattactatg

SEQ ID NO: 447556 - DNA, 33 bp, Homo sapien
agttcttgctgttgtcgctctatcattactatg

SEQ ID NO: 447557 - DNA, 33 bp, Homo sapien
acactccttctttgacccttccaatctgtttta

SEQ ID NO: 447558 - DNA, 33 bp, Homo sapien
acactccttctttgactcttccaatctgtttta

SEQ ID NO: 447559 - DNA, 33 bp, Homo sapien
attaagcttttcatagacattgcatgaaattca

SEQ ID NO: 447560 - DNA, 33 bp, Homo sapien
attaagcttttcataggcattgcatgaaattca

SEQ ID NO: 447561 - DNA, 33 bp, Homo sapien
gtttgatttcttcactaaaaattaggcaaatag

SEQ ID NO: 447562 - DNA, 33 bp, Homo sapien
gtttgatttcttcactgaaaattaggcaaatag

SEQ ID NO: 447563 - DNA, 33 bp, Homo sapien
tcagggaattggtgaaagtatttggagacagtc

SEQ ID NO: 447564 - DNA, 33 bp, Homo sapien
tcagggaattggtgaaggtatttggagacagtc

SEQ ID NO: 447565 - DNA, 33 bp, Homo sapien
cttgagccttgacttgcaatttatcaaaaggat

SEQ ID NO: 447566 - DNA, 33 bp, Homo sapien
cttgagccttgacttgtaatttatcaaaaggat

SEQ ID NO: 447567 - DNA, 33 bp, Homo sapien
ctttctcaggaccgtaggaacgtaacttcagtt

SEQ ID NO: 447568 - DNA, 33 bp, Homo sapien
ctttctcaggaccgtatgaacgtaacttcagtt

SEQ ID NO: 447569 - DNA, 33 bp, Homo sapien
caaaacattaagataaccatgcacaccctggta

SEQ ID NO: 447570 - DNA, 33 bp, Homo sapien
caaaacattaagataatcatgcacaccctggta

SEQ ID NO: 447571 - DNA, 33 bp, Homo sapien
agataggtaactataccgaaaatgaaacgaatt

SEQ ID NO: 447572 - DNA, 33 bp, Homo sapien
agataggtaactatactgaaaatgaaacgaatt

SEQ ID NO: 447573 - DNA, 33 bp, Homo sapien
atttttaattgtattccattgtgttggaggtgg

SEQ ID NO: 447574 - DNA, 33 bp, Homo sapien
atttttaattgtattctattgtgttggaggtgg

SEQ ID NO: 447575 - DNA, 33 bp, Homo sapien
gttattgaaacctaccaccacagatattcccat

SEQ ID NO: 447576 - DNA, 33 bp, Homo sapien
gttattgaaacctaccgccacagatattcccat

SEQ ID NO: 447577 - DNA, 33 bp, Homo sapien
ggttagcaagtcttcactagcattttatttaga

SEQ ID NO: 447578 - DNA, 33 bp, Homo sapien
ggttagcaagtcttcattagcattttatttaga

SEQ ID NO: 447579 - DNA, 33 bp, Homo sapien
gtactcgtcaactgaaaatgggtaggaaatatt

SEQ ID NO: 447580 - DNA, 33 bp, Homo sapien
gtactcgtcaactgaagatgggtaggaaatatt

SEQ ID NO: 447581 - DNA, 33 bp, Homo sapien
actactatgggacctacgtacccaggacgctga

SEQ ID NO: 447582 - DNA, 33 bp, Homo sapien
actactatgggacctatgtacccaggacgctga

SEQ ID NO: 447583 - DNA, 33 bp, Homo sapien
ctcgtatctcttggcacaggttcagtggtttca

SEQ ID NO: 447584 - DNA, 33 bp, Homo sapien
ctcgtatctcttggcataggttcagtggtttca

SEQ ID NO: 447585 - DNA, 33 bp, Homo sapien
actgccataagaaagaaactgcaatcctttaga

SEQ ID NO: 447586 - DNA, 33 bp, Homo sapien
actgccataagaaagacactgcaatcctttaga

SEQ ID NO: 447587 - DNA, 33 bp, Homo sapien
accctttcccagcatcaccttggcacctctgca

SEQ ID NO: 447588 - DNA, 33 bp, Homo sapien
accctttcccagcatcgccttggcacctctgca

SEQ ID NO: 447589 - DNA, 33 bp, Homo sapien
ccatatcctgggaagccattgtttgggagaccc

SEQ ID NO: 447590 - DNA, 33 bp, Homo sapien
ccatatcctgggaagcgattgtttgggagaccc

SEQ ID NO: 447591 - DNA, 33 bp, Homo sapien
cccagggagaagaaacaaaggcagataatcaaa

SEQ ID NO: 447592 - DNA, 33 bp, Homo sapien
cccagggagaagaaacgaaggcagataatcaaa

SEQ ID NO: 447593 - DNA, 33 bp, Homo sapien
tgatgcccaagaataaagaggaaattttcatat

SEQ ID NO: 447594 - DNA, 33 bp, Homo sapien
tgatgcccaagaataaggaggaaattttcatat

SEQ ID NO: 447595 - DNA, 33 bp, Homo sapien
tgacctgccatcatcacaagaaaaggccccgaa

SEQ ID NO: 447596 - DNA, 33 bp, Homo sapien
tgacctgccatcatcagaagaaaaggccccgaa

SEQ ID NO: 447597 - DNA, 33 bp, Homo sapien
agttggcaaaggaaaacatcaggaatacattca

SEQ ID NO: 447598 - DNA, 33 bp, Homo sapien
agttggcaaaggaaaagatcaggaatacattca

SEQ ID NO: 447599 - DNA, 33 bp, Homo sapien
ggaggctgaagcaggacgatgcaaccacctaag

SEQ ID NO: 447600 - DNA, 33 bp, Homo sapien
ggaggctgaagcaggatgatgcaaccacctaag

SEQ ID NO: 447601 - DNA, 33 bp, Homo sapien
tgaaggttgcacagccagattgcagtttgaaga

SEQ ID NO: 447602 - DNA, 33 bp, Homo sapien
tgaaggttgcacagccggattgcagtttgaaga

SEQ ID NO: 447603 - DNA, 33 bp, Homo sapien
gctcacaacacacggcccatcagatagagacaa

SEQ ID NO: 447604 - DNA, 33 bp, Homo sapien
gctcacaacacacggcgcatcagatagagacaa

SEQ ID NO: 447605 - DNA, 33 bp, Homo sapien
gttgtttgtctctttaacctccatgccatcctc

SEQ ID NO: 447606 - DNA, 33 bp, Homo sapien
gttgtttgtctctttagcctccatgccatcctc

SEQ ID NO: 447607 - DNA, 33 bp, Homo sapien
gttatgccctaaatataacttcattgcataaca

SEQ ID NO: 447608 - DNA, 33 bp, Homo sapien
gttatgccctaaatatgacttcattgcataaca

SEQ ID NO: 447609 - DNA, 33 bp, Homo sapien
cctgagctgagaaaagaaaccaggctccccatg

SEQ ID NO: 447610 - DNA, 33 bp, Homo sapien
cctgagctgagaaaagcaaccaggctccccatg

SEQ ID NO: 447611 - DNA, 33 bp, Homo sapien
cactaggcaaattagaaggaattcatccagagt

SEQ ID NO: 447612 - DNA, 33 bp, Homo sapien
cactaggcaaattagagggaattcatccagagt

SEQ ID NO: 447613 - DNA, 33 bp, Homo sapien
taagaaacattattccaaaagagatctgtggcc

SEQ ID NO: 447614 - DNA, 33 bp, Homo sapien
taagaaacattattccgaaagagatctgtggcc

SEQ ID NO: 447615 - DNA, 33 bp, Homo sapien
aaagcctaaggctgtaccaaaagctgctcatga

SEQ ID NO: 447616 - DNA, 33 bp, Homo sapien
aaagcctaaggctgtatcaaaagctgctcatga

SEQ ID NO: 447617 - DNA, 33 bp, Homo sapien
ttaatcctcttaatccaatagtgtagttttcat

SEQ ID NO: 447618 - DNA, 33 bp, Homo sapien
ttaatcctcttaatccgatagtgtagttttcat

SEQ ID NO: 447619 - DNA, 33 bp, Homo sapien
acaccgtcttcccaggcacttccttgtccacct

SEQ ID NO: 447620 - DNA, 33 bp, Homo sapien
acaccgtcttcccaggtacttccttgtccacct

SEQ ID NO: 447621 - DNA, 33 bp, Homo sapien
ctggcctcttattttgaaggcgtggagcacatt

SEQ ID NO: 447622 - DNA, 33 bp, Homo sapien
ctggcctcttattttgtaggcgtggagcacatt

SEQ ID NO: 447623 - DNA, 33 bp, Homo sapien
cacaagaaggcagaaaccactgcttacccacaa

SEQ ID NO: 447624 - DNA, 33 bp, Homo sapien
cacaagaaggcagaaatcactgcttacccacaa

SEQ ID NO: 447625 - DNA, 33 bp, Homo sapien
aacactggctggaacactcactaattccgtggc

SEQ ID NO: 447626 - DNA, 33 bp, Homo sapien
aacactggctggaacattcactaattccgtggc

SEQ ID NO: 447627 - DNA, 33 bp, Homo sapien
gaggaggaagagtaaccggagcctgtgggcccc

SEQ ID NO: 447628 - DNA, 33 bp, Homo sapien
gaggaggaagagtaactggagcctgtgggcccc

SEQ ID NO: 447629 - DNA, 33 bp, Homo sapien
cctcatcaagcccccacgaagcgtgtaacaggt

SEQ ID NO: 447630 - DNA, 33 bp, Homo sapien
cctcatcaagcccccatgaagcgtgtaacaggt

SEQ ID NO: 447631 - DNA, 33 bp, Homo sapien
aaagaaattatagtcaagtaaactcacagcaga

SEQ ID NO: 447632 - DNA, 33 bp, Homo sapien
aaagaaattatagtcaggtaaactcacagcaga

SEQ ID NO: 447633 - DNA, 33 bp, Homo sapien
cctcagaggacttttacatagacaaggagaaaa

SEQ ID NO: 447634 - DNA, 33 bp, Homo sapien
cctcagaggacttttatatagacaaggagaaaa

SEQ ID NO: 447635 - DNA, 33 bp, Homo sapien
aaagtagtaattgatcacacttctcccaaacag

SEQ ID NO: 447636 - DNA, 33 bp, Homo sapien
aaagtagtaattgatcgcacttctcccaaacag

SEQ ID NO: 447637 - DNA, 33 bp, Homo sapien
gaactacttgttatgcagatatacctcagctag

SEQ ID NO: 447638 - DNA, 33 bp, Homo sapien
gaactacttgttatgcggatatacctcagctag

SEQ ID NO: 447639 - DNA, 33 bp, Homo sapien
tgggactagtcacacgaccctgcctaacagtaa

SEQ ID NO: 447640 - DNA, 33 bp, Homo sapien
tgggactagtcacacggccctgcctaacagtaa

SEQ ID NO: 447641 - DNA, 33 bp, Homo sapien
cccagcgaacacaccacgtggtaccacctaact

SEQ ID NO: 447642 - DNA, 33 bp, Homo sapien
cccagcgaacacaccatgtggtaccacctaact

SEQ ID NO: 447643 - DNA, 33 bp, Homo sapien
aagggtcggttgatgacctttaacttgcccaca

SEQ ID NO: 447644 - DNA, 33 bp, Homo sapien
aagggtcggttgatgatctttaacttgcccaca

SEQ ID NO: 447645 - DNA, 33 bp, Homo sapien
ttccttatccaccaaaaagtctgcagcaatggt

SEQ ID NO: 447646 - DNA, 33 bp, Homo sapien
ttccttatccaccaaagagtctgcagcaatggt

SEQ ID NO: 447647 - DNA, 33 bp, Homo sapien
ccatctatgctttgacaggaactctatcatgtc

SEQ ID NO: 447648 - DNA, 33 bp, Homo sapien
ccatctatgctttgacgggaactctatcatgtc

SEQ ID NO: 447649 - DNA, 33 bp, Homo sapien
taatcctcactacttaactgctgtgttgctttg

SEQ ID NO: 447650 - DNA, 33 bp, Homo sapien
taatcctcactacttacctgctgtgttgctttg

SEQ ID NO: 447651 - DNA, 33 bp, Homo sapien
ataaaaaccgtatcaacaaaaatgtcctatttt

SEQ ID NO: 447652 - DNA, 33 bp, Homo sapien
ataaaaaccgtatcaataaaaatgtcctatttt

SEQ ID NO: 447653 - DNA, 33 bp, Homo sapien
atgtgtagatttgtaacagggtttgactgtgtc

SEQ ID NO: 447654 - DNA, 33 bp, Homo sapien
atgtgtagatttgtaatagggtttgactgtgtc

SEQ ID NO: 447655 - DNA, 33 bp, Homo sapien
tacaaatttactgtatgaatctgttttcacact

SEQ ID NO: 447656 - DNA, 33 bp, Homo sapien
tacaaatttactgtattaatctgttttcacact

SEQ ID NO: 447657 - DNA, 33 bp, Homo sapien
tgggggaaatatttaacgggttgatgaggggag

SEQ ID NO: 447658 - DNA, 33 bp, Homo sapien
tgggggaaatatttaatgggttgatgaggggag

SEQ ID NO: 447659 - DNA, 33 bp, Homo sapien
ctctccgtgctgcagccccgtgaatcagtccca

SEQ ID NO: 447660 - DNA, 33 bp, Homo sapien
ctctccgtgctgcagcgccgtgaatcagtccca

SEQ ID NO: 447661 - DNA, 33 bp, Homo sapien
gtcattttccccacacacaaatctggcagcttc

SEQ ID NO: 447662 - DNA, 33 bp, Homo sapien
gtcattttccccacacgcaaatctggcagcttc

SEQ ID NO: 447663 - DNA, 33 bp, Homo sapien
gcggctgtgcacggccacttcagtgaaagttcc

SEQ ID NO: 447664 - DNA, 33 bp, Homo sapien
gcggctgtgcacggccgcttcagtgaaagttcc

SEQ ID NO: 447665 - DNA, 33 bp, Homo sapien
ccagaatgagaacgtacgaacataacttaactc

SEQ ID NO: 447666 - DNA, 33 bp, Homo sapien
ccagaatgagaacgtatgaacataacttaactc

SEQ ID NO: 447667 - DNA, 33 bp, Homo sapien
tcagagagatgaggagaacatgagaccattccc

SEQ ID NO: 447668 - DNA, 33 bp, Homo sapien
tcagagagatgaggaggacatgagaccattccc

SEQ ID NO: 447669 - DNA, 33 bp, Homo sapien
atgtaaaattaaccataacaatgtccattctta

SEQ ID NO: 447670 - DNA, 33 bp, Homo sapien
atgtaaaattaaccatcacaatgtccattctta

SEQ ID NO: 447671 - DNA, 33 bp, Homo sapien
cctgcaatgtccccacacagaagctgttatgaa

SEQ ID NO: 447672 - DNA, 33 bp, Homo sapien
cctgcaatgtccccacgcagaagctgttatgaa

SEQ ID NO: 447673 - DNA, 33 bp, Homo sapien
atagtgatattgatcaacttgacgtgggtagat

SEQ ID NO: 447674 - DNA, 33 bp, Homo sapien
atagtgatattgatcatcttgacgtgggtagat

SEQ ID NO: 447675 - DNA, 33 bp, Homo sapien
tgaatgatttcctttacgactctgcaggggtag

SEQ ID NO: 447676 - DNA, 33 bp, Homo sapien
tgaatgatttcctttatgactctgcaggggtag

SEQ ID NO: 447677 - DNA, 33 bp, Homo sapien
ttaaagaaaaagaatgccaagcctatgattttg

SEQ ID NO: 447678 - DNA, 33 bp, Homo sapien
ttaaagaaaaagaatgtcaagcctatgattttg

SEQ ID NO: 447679 - DNA, 33 bp, Homo sapien
agaattgaaagaaatacacggatgattctagta

SEQ ID NO: 447680 - DNA, 33 bp, Homo sapien
agaattgaaagaaatatacggatgattctagta

SEQ ID NO: 447681 - DNA, 33 bp, Homo sapien
tgaagttgtccaatcacgacatggtccagggag

SEQ ID NO: 447682 - DNA, 33 bp, Homo sapien
tgaagttgtccaatcatgacatggtccagggag

SEQ ID NO: 447683 - DNA, 33 bp, Homo sapien
tattcctttcctcaagaagatgtctgaaaaacc

SEQ ID NO: 447684 - DNA, 33 bp, Homo sapien
tattcctttcctcaaggagatgtctgaaaaacc

SEQ ID NO: 447685 - DNA, 33 bp, Homo sapien
tattccataagagttccgaaccttaaatcaagg

SEQ ID NO: 447686 - DNA, 33 bp, Homo sapien
tattccataagagttctgaaccttaaatcaagg

SEQ ID NO: 447687 - DNA, 33 bp, Homo sapien
cgcatgaatgtagaccccatagacacattttct

SEQ ID NO: 447688 - DNA, 33 bp, Homo sapien
cgcatgaatgtagacctcatagacacattttct

SEQ ID NO: 447689 - DNA, 33 bp, Homo sapien
aaaaaaagagtgccagcagataaggtataggct

SEQ ID NO: 447690 - DNA, 33 bp, Homo sapien
aaaaaaagagtgccagtagataaggtataggct

SEQ ID NO: 447691 - DNA, 33 bp, Homo sapien
tttaactcctgatacaagaacaagtttcaaacc

SEQ ID NO: 447692 - DNA, 33 bp, Homo sapien
tttaactcctgatacaggaacaagtttcaaacc

SEQ ID NO: 447693 - DNA, 33 bp, Homo sapien
gtggcagggaaagtacaggatgagtctgaacca

SEQ ID NO: 447694 - DNA, 33 bp, Homo sapien
gtggcagggaaagtacgggatgagtctgaacca

SEQ ID NO: 447695 - DNA, 33 bp, Homo sapien
tcctgctgcagcgtagcccatcttgcaaaggca

SEQ ID NO: 447696 - DNA, 33 bp, Homo sapien
tcctgctgcagcgtagtccatcttgcaaaggca

SEQ ID NO: 447697 - DNA, 33 bp, Homo sapien
atggaccagtgaactacgccaggctcaaaactc

SEQ ID NO: 447698 - DNA, 33 bp, Homo sapien
atggaccagtgaactatgccaggctcaaaactc

SEQ ID NO: 447699 - DNA, 33 bp, Homo sapien
agcacgttcagtcggcaactttataaggatacc

SEQ ID NO: 447700 - DNA, 33 bp, Homo sapien
agcacgttcagtcggcgactttataaggatacc

SEQ ID NO: 447701 - DNA, 33 bp, Homo sapien
gtgatgaaataatctccacaaacccctgcaaca

SEQ ID NO: 447702 - DNA, 33 bp, Homo sapien
gtgatgaaataatctctacaaacccctgcaaca

SEQ ID NO: 447703 - DNA, 33 bp, Homo sapien
aaatctaaggactacaataaaatgacacagaag

SEQ ID NO: 447704 - DNA, 33 bp, Homo sapien
aaatctaaggactacagtaaaatgacacagaag

SEQ ID NO: 447705 - DNA, 33 bp, Homo sapien
taaaaacccttaaaatgatgaacctcacaagta

SEQ ID NO: 447706 - DNA, 33 bp, Homo sapien
taaaaacccttaaaattatgaacctcacaagta

SEQ ID NO: 447707 - DNA, 33 bp, Homo sapien
atgtcaacattgtccaatctagtgcaggatatt

SEQ ID NO: 447708 - DNA, 33 bp, Homo sapien
atgtcaacattgtccactctagtgcaggatatt

SEQ ID NO: 447709 - DNA, 33 bp, Homo sapien
acacagggctctgtaacggttcacaaggtttaa

SEQ ID NO: 447710 - DNA, 33 bp, Homo sapien
acacagggctctgtaatggttcacaaggtttaa

SEQ ID NO: 447711 - DNA, 33 bp, Homo sapien
attaagatcagtcctcaaaaccagtagtactca

SEQ ID NO: 447712 - DNA, 33 bp, Homo sapien
attaagatcagtcctccaaaccagtagtactca

SEQ ID NO: 447713 - DNA, 33 bp, Homo sapien
agaaatagtgtaaccagtcatggctctccgggt

SEQ ID NO: 447714 - DNA, 33 bp, Homo sapien
agaaatagtgtaaccattcatggctctccgggt

SEQ ID NO: 447715 - DNA, 33 bp, Homo sapien
aacaattgggagcaaaaaaagagatgccttaag

SEQ ID NO: 447716 - DNA, 33 bp, Homo sapien
aacaattgggagcaaacaaagagatgccttaag

SEQ ID NO: 447717 - DNA, 33 bp, Homo sapien
aagaccttcaccaacaaattttgtaatcctatg

SEQ ID NO: 447718 - DNA, 33 bp, Homo sapien
aagaccttcaccaacagattttgtaatcctatg

SEQ ID NO: 447719 - DNA, 33 bp, Homo sapien
tttgtgttgattttgcagacaaagaagatgctc

SEQ ID NO: 447720 - DNA, 33 bp, Homo sapien
tttgtgttgattttgcggacaaagaagatgctc

SEQ ID NO: 447721 - DNA, 33 bp, Homo sapien
gttaaatgttttagccaaagatagaggcatatc

SEQ ID NO: 447722 - DNA, 33 bp, Homo sapien
gttaaatgttttagccgaagatagaggcatatc

SEQ ID NO: 447723 - DNA, 33 bp, Homo sapien
gaaaaacacgaagggaaattcttggttacagaa

SEQ ID NO: 447724 - DNA, 33 bp, Homo sapien
gaaaaacacgaagggagattcttggttacagaa

SEQ ID NO: 447725 - DNA, 33 bp, Homo sapien
gcgccagggctgaaacaaagagtgcacgcaccg

SEQ ID NO: 447726 - DNA, 33 bp, Homo sapien
gcgccagggctgaaacgaagagtgcacgcaccg

SEQ ID NO: 447727 - DNA, 33 bp, Homo sapien
acacgtagattgtaacggctaatttggcttttg

SEQ ID NO: 447728 - DNA, 33 bp, Homo sapien
acacgtagattgtaactgctaatttggcttttg

SEQ ID NO: 447729 - DNA, 33 bp, Homo sapien
tgccaatgcccttttacaccaagttcactgcta

SEQ ID NO: 447730 - DNA, 33 bp, Homo sapien
tgccaatgcccttttataccaagttcactgcta

SEQ ID NO: 447731 - DNA, 33 bp, Homo sapien
tggcatagtcagcagactctaaaacaattggta

SEQ ID NO: 447732 - DNA, 33 bp, Homo sapien
tggcatagtcagcagattctaaaacaattggta

SEQ ID NO: 447733 - DNA, 33 bp, Homo sapien
gctgaactagtatgaaggaaaagctaggttttt

SEQ ID NO: 447734 - DNA, 33 bp, Homo sapien
gctgaactagtatgaatgaaaagctaggttttt

SEQ ID NO: 447735 - DNA, 33 bp, Homo sapien
tgttctggacattcagcagaatatcacatttgt

SEQ ID NO: 447736 - DNA, 33 bp, Homo sapien
tgttctggacattcaggagaatatcacatttgt

SEQ ID NO: 447737 - DNA, 33 bp, Homo sapien
agtggccttctcttcccaggaatcagatatcag

SEQ ID NO: 447738 - DNA, 33 bp, Homo sapien
agtggccttctcttcctaggaatcagatatcag

SEQ ID NO: 447739 - DNA, 33 bp, Homo sapien
ctccttacctcgtggccaagtccgcttcccgct

SEQ ID NO: 447740 - DNA, 33 bp, Homo sapien
ctccttacctcgtggctaagtccgcttcccgct

SEQ ID NO: 447741 - DNA, 33 bp, Homo sapien
ggaagatcaccttctcaacaagttaggcaacca

SEQ ID NO: 447742 - DNA, 33 bp, Homo sapien
ggaagatcaccttctccacaagttaggcaacca

SEQ ID NO: 447743 - DNA, 33 bp, Homo sapien
tgtaggtaatctggaacgtgtgaggtttggcct

SEQ ID NO: 447744 - DNA, 33 bp, Homo sapien
tgtaggtaatctggaatgtgtgaggtttggcct

SEQ ID NO: 447745 - DNA, 33 bp, Homo sapien
tcagcctataaaacccccgtgcactttgctgca

SEQ ID NO: 447746 - DNA, 33 bp, Homo sapien
tcagcctataaaaccctcgtgcactttgctgca

SEQ ID NO: 447747 - DNA, 33 bp, Homo sapien
gcttctttgcacactacataaatagcacacctg

SEQ ID NO: 447748 - DNA, 33 bp, Homo sapien
gcttctttgcacactatataaatagcacacctg

SEQ ID NO: 447749 - DNA, 33 bp, Homo sapien
actttgtctctttcccactgttcctcatcttac

SEQ ID NO: 447750 - DNA, 33 bp, Homo sapien
actttgtctctttcccgctgttcctcatcttac

SEQ ID NO: 447751 - DNA, 33 bp, Homo sapien
tccctgctcttcttgaaccactctatttaggtg

SEQ ID NO: 447752 - DNA, 33 bp, Homo sapien
tccctgctcttcttgacccactctatttaggtg

SEQ ID NO: 447753 - DNA, 33 bp, Homo sapien
tggatggggaggatcaacaaacctggactactt

SEQ ID NO: 447754 - DNA, 33 bp, Homo sapien
tggatggggaggatcagcaaacctggactactt

SEQ ID NO: 447755 - DNA, 33 bp, Homo sapien
ctgacccagccaggaacgactatgtgcttctaa

SEQ ID NO: 447756 - DNA, 33 bp, Homo sapien
ctgacccagccaggaatgactatgtgcttctaa

SEQ ID NO: 447757 - DNA, 33 bp, Homo sapien
acaatgaggccacaaagttgaaaaaagactcaa

SEQ ID NO: 447758 - DNA, 33 bp, Homo sapien
acaatgaggccacaaatttgaaaaaagactcaa

SEQ ID NO: 447759 - DNA, 33 bp, Homo sapien
gggctgtcctgctgtaaaccttcacatcagaga

SEQ ID NO: 447760 - DNA, 33 bp, Homo sapien
gggctgtcctgctgtagaccttcacatcagaga

SEQ ID NO: 447761 - DNA, 33 bp, Homo sapien
agcgttgccatttctgaaacccatagagctaga

SEQ ID NO: 447762 - DNA, 33 bp, Homo sapien
agcgttgccatttctgtaacccatagagctaga

SEQ ID NO: 447763 - DNA, 33 bp, Homo sapien
tgttctgagagtctaaaaaattaagcctgcatt

SEQ ID NO: 447764 - DNA, 33 bp, Homo sapien
tgttctgagagtctaagaaattaagcctgcatt

SEQ ID NO: 447765 - DNA, 33 bp, Homo sapien
tgatggttggaataaactcttgtgacttgtaaa

SEQ ID NO: 447766 - DNA, 33 bp, Homo sapien
tgatggttggaataaattcttgtgacttgtaaa

SEQ ID NO: 447767 - DNA, 33 bp, Homo sapien
caaaggtaagcacggaccacagatttaacacaa

SEQ ID NO: 447768 - DNA, 33 bp, Homo sapien
caaaggtaagcacggatcacagatttaacacaa

SEQ ID NO: 447769 - DNA, 33 bp, Homo sapien
caaggtcacacagtaacttaaaggcaaaatcga

SEQ ID NO: 447770 - DNA, 33 bp, Homo sapien
caaggtcacacagtaagttaaaggcaaaatcga

SEQ ID NO: 447771 - DNA, 33 bp, Homo sapien
ccaccaacttctaatcaagcagcaacccttctg

SEQ ID NO: 447772 - DNA, 33 bp, Homo sapien
ccaccaacttctaatccagcagcaacccttctg

SEQ ID NO: 447773 - DNA, 33 bp, Homo sapien
tctttctgaacgagacccagagttatccaaact

SEQ ID NO: 447774 - DNA, 33 bp, Homo sapien
tctttctgaacgagacgcagagttatccaaact

SEQ ID NO: 447775 - DNA, 33 bp, Homo sapien
aaggaaactcatagtaagtatgcagaggagaaa

SEQ ID NO: 447776 - DNA, 33 bp, Homo sapien
aaggaaactcatagtacgtatgcagaggagaaa

SEQ ID NO: 447777 - DNA, 33 bp, Homo sapien
atccttctgataggccccagctttttatatcac

SEQ ID NO: 447778 - DNA, 33 bp, Homo sapien
atccttctgataggcctcagctttttatatcac

SEQ ID NO: 447779 - DNA, 33 bp, Homo sapien
gtctgaaccagcactacgaaacaagagtatgtt

SEQ ID NO: 447780 - DNA, 33 bp, Homo sapien
gtctgaaccagcactatgaaacaagagtatgtt

SEQ ID NO: 447781 - DNA, 33 bp, Homo sapien
cccaccaggttcaccactcatttattcgggttc

SEQ ID NO: 447782 - DNA, 33 bp, Homo sapien
cccaccaggttcaccattcatttattcgggttc

SEQ ID NO: 447783 - DNA, 33 bp, Homo sapien
aaataacaagaaaacaatcatggccagatgcct

SEQ ID NO: 447784 - DNA, 33 bp, Homo sapien
aaataacaagaaaacagtcatggccagatgcct

SEQ ID NO: 447785 - DNA, 33 bp, Homo sapien
tcacacttgagaaaaaaaaagggcatcaacttt

SEQ ID NO: 447786 - DNA, 33 bp, Homo sapien
tcacacttgagaaaaagaaagggcatcaacttt

SEQ ID NO: 447787 - DNA, 33 bp, Homo sapien
acaaatggtatgattcaattgatatgaaatgtt

SEQ ID NO: 447788 - DNA, 33 bp, Homo sapien
acaaatggtatgattctattgatatgaaatgtt

SEQ ID NO: 447789 - DNA, 33 bp, Homo sapien
ctattgctaagctgaacttattttaccattatg

SEQ ID NO: 447790 - DNA, 33 bp, Homo sapien
ctattgctaagctgaatttattttaccattatg

SEQ ID NO: 447791 - DNA, 33 bp, Homo sapien
agggccgaaagagtagacgagggctggtggtct

SEQ ID NO: 447792 - DNA, 33 bp, Homo sapien
agggccgaaagagtagccgagggctggtggtct

SEQ ID NO: 447793 - DNA, 33 bp, Homo sapien
aactgtaagttggaatcactaaatctgaaagta

SEQ ID NO: 447794 - DNA, 33 bp, Homo sapien
aactgtaagttggaatgactaaatctgaaagta

SEQ ID NO: 447795 - DNA, 33 bp, Homo sapien
gagtaaaggaagaagcccaggcataaacatcag

SEQ ID NO: 447796 - DNA, 33 bp, Homo sapien
gagtaaaggaagaagcgcaggcataaacatcag

SEQ ID NO: 447797 - DNA, 33 bp, Homo sapien
taaatgggaagtaagaggactgaatcagcccct

SEQ ID NO: 447798 - DNA, 33 bp, Homo sapien
taaatgggaagtaagatgactgaatcagcccct

SEQ ID NO: 447799 - DNA, 33 bp, Homo sapien
ctcattcagagagtagaattgtttgtaaactct

SEQ ID NO: 447800 - DNA, 33 bp, Homo sapien
ctcattcagagagtaggattgtttgtaaactct

SEQ ID NO: 447801 - DNA, 33 bp, Homo sapien
atacatggttactcaacgagatgtgacgatgtg

SEQ ID NO: 447802 - DNA, 33 bp, Homo sapien
atacatggttactcaatgagatgtgacgatgtg

SEQ ID NO: 447803 - DNA, 33 bp, Homo sapien
tcaaacctatttcccgaacctccagtcatatgg

SEQ ID NO: 447804 - DNA, 33 bp, Homo sapien
tcaaacctatttcccgcacctccagtcatatgg

SEQ ID NO: 447805 - DNA, 33 bp, Homo sapien
gactcaaaatctttgccccttctaacagaaaat

SEQ ID NO: 447806 - DNA, 33 bp, Homo sapien
gactcaaaatctttgctccttctaacagaaaat

SEQ ID NO: 447807 - DNA, 33 bp, Homo sapien
ccactttgcactttgacggaaaagtaattggtc

SEQ ID NO: 447808 - DNA, 33 bp, Homo sapien
ccactttgcactttgatggaaaagtaattggtc

SEQ ID NO: 447809 - DNA, 33 bp, Homo sapien
actgaagttgaacctcaaagtcatggagtgaac

SEQ ID NO: 447810 - DNA, 33 bp, Homo sapien
actgaagttgaacctcgaagtcatggagtgaac

SEQ ID NO: 447811 - DNA, 33 bp, Homo sapien
ttaaaaaatataaaaacggagctatgtgaaatg

SEQ ID NO: 447812 - DNA, 33 bp, Homo sapien
ttaaaaaatataaaaatggagctatgtgaaatg

SEQ ID NO: 447813 - DNA, 33 bp, Homo sapien
gggtggagcctgctgactaaaacgaagtgccag

SEQ ID NO: 447814 - DNA, 33 bp, Homo sapien
gggtggagcctgctgattaaaacgaagtgccag

SEQ ID NO: 447815 - DNA, 33 bp, Homo sapien
aggagactaacttgtccataaatgtggattaaa

SEQ ID NO: 447816 - DNA, 33 bp, Homo sapien
aggagactaacttgtcgataaatgtggattaaa

SEQ ID NO: 447817 - DNA, 33 bp, Homo sapien
aagaacctttcactaacaacataagttgcttcc

SEQ ID NO: 447818 - DNA, 33 bp, Homo sapien
aagaacctttcactaataacataagttgcttcc

SEQ ID NO: 447819 - DNA, 33 bp, Homo sapien
cctaatgcctcccacaggcttttgcgaaatctc

SEQ ID NO: 447820 - DNA, 33 bp, Homo sapien
cctaatgcctcccacatgcttttgcgaaatctc

SEQ ID NO: 447821 - DNA, 33 bp, Homo sapien
tatgctgtcgagaacaaggtatatttgggtaac

SEQ ID NO: 447822 - DNA, 33 bp, Homo sapien
tatgctgtcgagaacacggtatatttgggtaac

SEQ ID NO: 447823 - DNA, 33 bp, Homo sapien
tcacacataaaagttcacagcagaattttgcac

SEQ ID NO: 447824 - DNA, 33 bp, Homo sapien
tcacacataaaagttcgcagcagaattttgcac

SEQ ID NO: 447825 - DNA, 33 bp, Homo sapien
tccactccatagctaacgcacactccagcgtaa

SEQ ID NO: 447826 - DNA, 33 bp, Homo sapien
tccactccatagctaatgcacactccagcgtaa

SEQ ID NO: 447827 - DNA, 33 bp, Homo sapien
cccctctagactacgcaagcatgatcctttccc

SEQ ID NO: 447828 - DNA, 33 bp, Homo sapien
cccctctagactacgccagcatgatcctttccc

SEQ ID NO: 447829 - DNA, 33 bp, Homo sapien
ttaacagcagtgggaacgtgttactgttagaat

SEQ ID NO: 447830 - DNA, 33 bp, Homo sapien
ttaacagcagtgggaatgtgttactgttagaat

SEQ ID NO: 447831 - DNA, 33 bp, Homo sapien
gatgtaaagcacatccacgagcaaggtgttgta

SEQ ID NO: 447832 - DNA, 33 bp, Homo sapien
gatgtaaagcacatccgcgagcaaggtgttgta

SEQ ID NO: 447833 - DNA, 33 bp, Homo sapien
tgggttctatctgagactctagccaggattcct

SEQ ID NO: 447834 - DNA, 33 bp, Homo sapien
tgggttctatctgagattctagccaggattcct

SEQ ID NO: 447835 - DNA, 33 bp, Homo sapien
ttttgccgttgcacctaaaactgcagaagttat

SEQ ID NO: 447836 - DNA, 33 bp, Homo sapien
ttttgccgttgcacctgaaactgcagaagttat

SEQ ID NO: 447837 - DNA, 33 bp, Homo sapien
tgaataagagcataaacgtgatccagaagatag

SEQ ID NO: 447838 - DNA, 33 bp, Homo sapien
tgaataagagcataaatgtgatccagaagatag

SEQ ID NO: 447839 - DNA, 33 bp, Homo sapien
gtttctcacgggcataatataaaagattgggag

SEQ ID NO: 447840 - DNA, 33 bp, Homo sapien
gtttctcacgggcatactataaaagattgggag

SEQ ID NO: 447841 - DNA, 33 bp, Homo sapien
gtcttcccctttgtaactaatggcaacccaatc

SEQ ID NO: 447842 - DNA, 33 bp, Homo sapien
gtcttcccctttgtaattaatggcaacccaatc

SEQ ID NO: 447843 - DNA, 33 bp, Homo sapien
aacgtcccgttctccacgaggccttcctgacca

SEQ ID NO: 447844 - DNA, 33 bp, Homo sapien
aacgtcccgttctccatgaggccttcctgacca

SEQ ID NO: 447845 - DNA, 33 bp, Homo sapien
gggaaaacagatacgcaagataaatgtgcaaaa

SEQ ID NO: 447846 - DNA, 33 bp, Homo sapien
gggaaaacagatacgcgagataaatgtgcaaaa

SEQ ID NO: 447847 - DNA, 33 bp, Homo sapien
tgattctggggataaaactgtgaaccagataaa

SEQ ID NO: 447848 - DNA, 33 bp, Homo sapien
tgattctggggataaagctgtgaaccagataaa

SEQ ID NO: 447849 - DNA, 33 bp, Homo sapien
aaaaaagaaatcaaacaggaattagaacgtgtt

SEQ ID NO: 447850 - DNA, 33 bp, Homo sapien
aaaaaagaaatcaaacgggaattagaacgtgtt

SEQ ID NO: 447851 - DNA, 33 bp, Homo sapien
cagttcacaacatatccgacatcaggcaacaaa

SEQ ID NO: 447852 - DNA, 33 bp, Homo sapien
cagttcacaacatatcggacatcaggcaacaaa

SEQ ID NO: 447853 - DNA, 33 bp, Homo sapien
gcgtgtgcccatgtaactatgtattgttttcta

SEQ ID NO: 447854 - DNA, 33 bp, Homo sapien
gcgtgtgcccatgtaagtatgtattgttttcta

SEQ ID NO: 447855 - DNA, 33 bp, Homo sapien
ctcccatgataaaccactaattcattaaccttc

SEQ ID NO: 447856 - DNA, 33 bp, Homo sapien
ctcccatgataaaccattaattcattaaccttc

SEQ ID NO: 447857 - DNA, 33 bp, Homo sapien
aggaatgttattgcccaatttttggtgtttcct

SEQ ID NO: 447858 - DNA, 33 bp, Homo sapien
aggaatgttattgccccatttttggtgtttcct

SEQ ID NO: 447859 - DNA, 33 bp, Homo sapien
cagaatgtgtaagacaccatatcaaaaacataa

SEQ ID NO: 447860 - DNA, 33 bp, Homo sapien
cagaatgtgtaagacatcatatcaaaaacataa

SEQ ID NO: 447861 - DNA, 33 bp, Homo sapien
ttgtcagatacattaaaaagagccaagcgttta

SEQ ID NO: 447862 - DNA, 33 bp, Homo sapien
ttgtcagatacattaacaagagccaagcgttta

SEQ ID NO: 447863 - DNA, 33 bp, Homo sapien
aacccacatacaacaaaatgctatgcaaacaat

SEQ ID NO: 447864 - DNA, 33 bp, Homo sapien
aacccacatacaacaagatgctatgcaaacaat

SEQ ID NO: 447865 - DNA, 33 bp, Homo sapien
tacaatgagctagaacagaagcgtatagcagga

SEQ ID NO: 447866 - DNA, 33 bp, Homo sapien
tacaatgagctagaacggaagcgtatagcagga

SEQ ID NO: 447867 - DNA, 33 bp, Homo sapien
ccacagtcttccaaataattagggtgcatggcc

SEQ ID NO: 447868 - DNA, 33 bp, Homo sapien
ccacagtcttccaaattattagggtgcatggcc

SEQ ID NO: 447869 - DNA, 33 bp, Homo sapien
gaacttctctagggaccgcctgtgaggagatat

SEQ ID NO: 447870 - DNA, 33 bp, Homo sapien
gaacttctctagggacggcctgtgaggagatat

SEQ ID NO: 447871 - DNA, 33 bp, Homo sapien
cagctaccagagggcccggccaaaaatcacaca

SEQ ID NO: 447872 - DNA, 33 bp, Homo sapien
cagctaccagagggcctggccaaaaatcacaca

SEQ ID NO: 447873 - DNA, 33 bp, Homo sapien
caaactttgggagacacggagtttatagtttag

SEQ ID NO: 447874 - DNA, 33 bp, Homo sapien
caaactttgggagacatggagtttatagtttag

SEQ ID NO: 447875 - DNA, 33 bp, Homo sapien
gcacacaaagtttgaaccaaccatgtcttcact

SEQ ID NO: 447876 - DNA, 33 bp, Homo sapien
gcacacaaagtttgaatcaaccatgtcttcact

SEQ ID NO: 447877 - DNA, 33 bp, Homo sapien
gagagtaaaggtaagacgctcctgaagtgtctg

SEQ ID NO: 447878 - DNA, 33 bp, Homo sapien
gagagtaaaggtaagatgctcctgaagtgtctg

SEQ ID NO: 447879 - DNA, 33 bp, Homo sapien
ggtacacccaagtaaacgtgagatgacagctgc

SEQ ID NO: 447880 - DNA, 33 bp, Homo sapien
ggtacacccaagtaaatgtgagatgacagctgc

SEQ ID NO: 447881 - DNA, 33 bp, Homo sapien
gaaaaaaatgaaataacacgagaatggccctga

SEQ ID NO: 447882 - DNA, 33 bp, Homo sapien
gaaaaaaatgaaataagacgagaatggccctga

SEQ ID NO: 447883 - DNA, 33 bp, Homo sapien
aagttgcatgtacatcaaaccatttgcctacct

SEQ ID NO: 447884 - DNA, 33 bp, Homo sapien
aagttgcatgtacatcgaaccatttgcctacct

SEQ ID NO: 447885 - DNA, 33 bp, Homo sapien
cagagagatgacactcaccattccattccttct

SEQ ID NO: 447886 - DNA, 33 bp, Homo sapien
cagagagatgacactcgccattccattccttct

SEQ ID NO: 447887 - DNA, 33 bp, Homo sapien
tgagcagacacttcctaaagagctaatttcacc

SEQ ID NO: 447888 - DNA, 33 bp, Homo sapien
tgagcagacacttcctgaagagctaatttcacc

SEQ ID NO: 447889 - DNA, 33 bp, Homo sapien
tgctaaaggtgggcacaacattgacaaagcgcc

SEQ ID NO: 447890 - DNA, 33 bp, Homo sapien
tgctaaaggtgggcacgacattgacaaagcgcc

SEQ ID NO: 447891 - DNA, 33 bp, Homo sapien
gtgactggccaggaaacggtcgcccagatcaag

SEQ ID NO: 447892 - DNA, 33 bp, Homo sapien
gtgactggccaggaaatggtcgcccagatcaag

SEQ ID NO: 447893 - DNA, 33 bp, Homo sapien; identical to SEQ ID NO: 447891

SEQ ID NO: 447894 - DNA, 33 bp, Homo sapien; identical to SEQ ID NO: 447892

SEQ ID NO: 447895 - DNA, 33 bp, Homo sapien
caagtccttctcaatccctgtatgtcacaactc

SEQ ID NO: 447896 - DNA, 33 bp, Homo sapien
caagtccttctcaatcgctgtatgtcacaactc

SEQ ID NO: 447897 - DNA, 33 bp, Homo sapien
ctgtgctggatgcttcacttgttctaaagcagg

SEQ ID NO: 447898 - DNA, 33 bp, Homo sapien
ctgtgctggatgcttcgcttgttctaaagcagg

SEQ ID NO: 447899 - DNA, 33 bp, Homo sapien
gatgcagctacagcaaatctgagtttcatgatt

SEQ ID NO: 447900 - DNA, 33 bp, Homo sapien
gatgcagctacagcaagtctgagtttcatgatt

SEQ ID NO: 447901 - DNA, 33 bp, Homo sapien
aggtcaacctcacaaactaggacttgcccgaga

SEQ ID NO: 447902 - DNA, 33 bp, Homo sapien
aggtcaacctcacaaattaggacttgcccgaga

SEQ ID NO: 447903 - DNA, 33 bp, Homo sapien
ctataactttttggaacggcctagcaaactttc

SEQ ID NO: 447904 - DNA, 33 bp, Homo sapien
ctataactttttggaatggcctagcaaactttc

SEQ ID NO: 447905 - DNA, 33 bp, Homo sapien
aagtttgtctgctcctgaaaagcatatggggcg

SEQ ID NO: 447906 - DNA, 33 bp, Homo sapien
aagtttgtctgctccttaaaagcatatggggcg

SEQ ID NO: 447907 - DNA, 33 bp, Homo sapien
gagctgggtataaacccgggatcaagtggttgc

SEQ ID NO: 447908 - DNA, 33 bp, Homo sapien
gagctgggtataaacctgggatcaagtggttgc

SEQ ID NO: 447909 - DNA, 33 bp, Homo sapien
ggggcctcttgtatgaaggcattaatccaattc

SEQ ID NO: 447910 - DNA, 33 bp, Homo sapien
ggggcctcttgtatgagggcattaatccaattc

SEQ ID NO: 447911 - DNA, 33 bp, Homo sapien
ttcagtccataataaccgtgtttaaagtgactg

SEQ ID NO: 447912 - DNA, 33 bp, Homo sapien
ttcagtccataataactgtgtttaaagtgactg

SEQ ID NO: 447913 - DNA, 33 bp, Homo sapien
atggtggagtcctggacggcccagaactgcttc

SEQ ID NO: 447914 - DNA, 33 bp, Homo sapien
atggtggagtcctggatggcccagaactgcttc

SEQ ID NO: 447915 - DNA, 33 bp, Homo sapien
gcttagatagtgaagcagaaaactggaaggagc

SEQ ID NO: 447916 - DNA, 33 bp, Homo sapien
gcttagatagtgaagcggaaaactggaaggagc

SEQ ID NO: 447917 - DNA, 33 bp, Homo sapien
tttacacacacacttaaatttatgttcttgaac

SEQ ID NO: 447918 - DNA, 33 bp, Homo sapien
tttacacacacacttagatttatgttcttgaac

SEQ ID NO: 447919 - DNA, 33 bp, Homo sapien
tgacctctgaaaatgacgaaataacaacttttt

SEQ ID NO: 447920 - DNA, 33 bp, Homo sapien
tgacctctgaaaatgatgaaataacaacttttt

SEQ ID NO: 447921 - DNA, 33 bp, Homo sapien
aatgtttagtcaataaaaaaagtccagggttgt

SEQ ID NO: 447922 - DNA, 33 bp, Homo sapien
aatgtttagtcaataagaaaagtccagggttgt

SEQ ID NO: 447923 - DNA, 33 bp, Homo sapien
ggctgccaaacatgcaaatagaagcaaaccttg

SEQ ID NO: 447924 - DNA, 33 bp, Homo sapien
ggctgccaaacatgcagatagaagcaaaccttg

SEQ ID NO: 447925 - DNA, 33 bp, Homo sapien
ccaatgccatgaatgccgattgtagctatgcag

SEQ ID NO: 447926 - DNA, 33 bp, Homo sapien
ccaatgccatgaatgctgattgtagctatgcag

SEQ ID NO: 447927 - DNA, 33 bp, Homo sapien
tatatttaagccataactgtgtatttattacct

SEQ ID NO: 447928 - DNA, 33 bp, Homo sapien
tatatttaagccataattgtgtatttattacct

SEQ ID NO: 447929 - DNA, 33 bp, Homo sapien
tgtgatctcatcatgacgattgggcttcacatg

SEQ ID NO: 447930 - DNA, 33 bp, Homo sapien
tgtgatctcatcatgaggattgggcttcacatg

SEQ ID NO: 447931 - DNA, 33 bp, Homo sapien
ttcaggaacaaataaaccttagtctcaggcact

SEQ ID NO: 447932 - DNA, 33 bp, Homo sapien
ttcaggaacaaataaagcttagtctcaggcact

SEQ ID NO: 447933 - DNA, 33 bp, Homo sapien
aggaaaacgccgggaccatgacacctgcagccc

SEQ ID NO: 447934 - DNA, 33 bp, Homo sapien
aggaaaacgccgggacgatgacacctgcagccc

SEQ ID NO: 447935 - DNA, 33 bp, Homo sapien
cctgcaaaagatttcaataacgcgaacctgaga

SEQ ID NO: 447936 - DNA, 33 bp, Homo sapien
cctgcaaaagatttcactaacgcgaacctgaga

SEQ ID NO: 447937 - DNA, 33 bp, Homo sapien
tgtgaatgagtggtaaactccaatactgttgca

SEQ ID NO: 447938 - DNA, 33 bp, Homo sapien
tgtgaatgagtggtaacctccaatactgttgca

SEQ ID NO: 447939 - DNA, 33 bp, Homo sapien
gggtgactggatttcacgtttggagtggaaccc

SEQ ID NO: 447940 - DNA, 33 bp, Homo sapien
gggtgactggatttcatgtttggagtggaaccc

SEQ ID NO: 447941 - DNA, 33 bp, Homo sapien
tacgatttctatacaaaccacgtgtattaaggt

SEQ ID NO: 447942 - DNA, 33 bp, Homo sapien
tacgatttctatacaacccacgtgtattaaggt

SEQ ID NO: 447943 - DNA, 33 bp, Homo sapien
ttctggaagcttcgccaactcctccaagccaca

SEQ ID NO: 447944 - DNA, 33 bp, Homo sapien
ttctggaagcttcgccgactcctccaagccaca

SEQ ID NO: 447945 - DNA, 33 bp, Homo sapien
ttctgcctcacacagacgttggcttctcctctc

SEQ ID NO: 447946 - DNA, 33 bp, Homo sapien
ttctgcctcacacagatgttggcttctcctctc

SEQ ID NO: 447947 - DNA, 33 bp, Homo sapien
aggctcatgaaacaaaagcatatttgacagaaa

SEQ ID NO: 447948 - DNA, 33 bp, Homo sapien
aggctcatgaaacaaaggcatatttgacagaaa

SEQ ID NO: 447949 - DNA, 33 bp, Homo sapien
aaaggaagcacaaataactctcaaactaagaaa

SEQ ID NO: 447950 - DNA, 33 bp, Homo sapien
aaaggaagcacaaatagctctcaaactaagaaa

SEQ ID NO: 447951 - DNA, 33 bp, Homo sapien
ctaactagaggttagacagaaaccaccatccag

SEQ ID NO: 447952 - DNA, 33 bp, Homo sapien
ctaactagaggttagatagaaaccaccatccag

SEQ ID NO: 447953 - DNA, 33 bp, Homo sapien
acccgcacgaggtgaacagaagttgtgaacagg

SEQ ID NO: 447954 - DNA, 33 bp, Homo sapien
acccgcacgaggtgaatagaagttgtgaacagg

SEQ ID NO: 447955 - DNA, 33 bp, Homo sapien
attccctcaacaattacagcaccttctgggtcc

SEQ ID NO: 447956 - DNA, 33 bp, Homo sapien
attccctcaacaattagagcaccttctgggtcc

SEQ ID NO: 447957 - DNA, 33 bp, Homo sapien
gggaggtgtgcaagaacggcagcaggagcctca

SEQ ID NO: 447958 - DNA, 33 bp, Homo sapien
gggaggtgtgcaagaatggcagcaggagcctca

SEQ ID NO: 447959 - DNA, 33 bp, Homo sapien
tcagcaaataaaggccactcttccttccaggaa

SEQ ID NO: 447960 - DNA, 33 bp, Homo sapien
tcagcaaataaaggccgctcttccttccaggaa

SEQ ID NO: 447961 - DNA, 33 bp, Homo sapien
tgcatgatgattgtaccggccaagagggaagtg

SEQ ID NO: 447962 - DNA, 33 bp, Homo sapien
tgcatgatgattgtactggccaagagggaagtg

SEQ ID NO: 447963 - DNA, 33 bp, Homo sapien
agcactgttttaacacagaagtgatggtgctct

SEQ ID NO: 447964 - DNA, 33 bp, Homo sapien
agcactgttttaacacggaagtgatggtgctct

SEQ ID NO: 447965 - DNA, 33 bp, Homo sapien
gcttaggttgataccaaaggaagttttgtttat

SEQ ID NO: 447966 - DNA, 33 bp, Homo sapien
gcttaggttgataccacaggaagttttgtttat

SEQ ID NO: 447967 - DNA, 33 bp, Homo sapien
aagtgtccaaaaaaccccagctgtagagactga

SEQ ID NO: 447968 - DNA, 33 bp, Homo sapien
aagtgtccaaaaaacctcagctgtagagactga

SEQ ID NO: 447969 - DNA, 33 bp, Homo sapien
gcattttttgttgaaacctgtacctttagaata

SEQ ID NO: 447970 - DNA, 33 bp, Homo sapien
gcattttttgttgaaatctgtacctttagaata

SEQ ID NO: 447971 - DNA, 33 bp, Homo sapien
atctattctctgtcaacgttgtcttttgaatcc

SEQ ID NO: 447972 - DNA, 33 bp, Homo sapien
atctattctctgtcaatgttgtcttttgaatcc

SEQ ID NO: 447973 - DNA, 33 bp, Homo sapien
atcttgtgagggcctcaactgaataagccagat

SEQ ID NO: 447974 - DNA, 33 bp, Homo sapien
atcttgtgagggcctcgactgaataagccagat

SEQ ID NO: 447975 - DNA, 33 bp, Homo sapien
cagaaagctcgaagacaagaatagaataggtcc

SEQ ID NO: 447976 - DNA, 33 bp, Homo sapien
cagaaagctcgaagaccagaatagaataggtcc

SEQ ID NO: 447977 - DNA, 33 bp, Homo sapien
caatcaagcgtcactgacaagccatccttgctt

SEQ ID NO: 447978 - DNA, 33 bp, Homo sapien
caatcaagcgtcactgtcaagccatccttgctt

SEQ ID NO: 447979 - DNA, 33 bp, Homo sapien
tttctggtctccgctaagcattcttttcttccc

SEQ ID NO: 447980 - DNA, 33 bp, Homo sapien
tttctggtctccgctacgcattcttttcttccc

SEQ ID NO: 447981 - DNA, 33 bp, Homo sapien
gtctatctgatgtagaaactaatagaatccttt

SEQ ID NO: 447982 - DNA, 33 bp, Homo sapien
gtctatctgatgtagagactaatagaatccttt

SEQ ID NO: 447983 - DNA, 33 bp, Homo sapien
gagggagcaaatgaagacatctcagaagtaaag

SEQ ID NO: 447984 - DNA, 33 bp, Homo sapien
gagggagcaaatgaagtcatctcagaagtaaag

SEQ ID NO: 447985 - DNA, 33 bp, Homo sapien
tcactcccctctaaaaatctaaagttcatacgg

SEQ ID NO: 447986 - DNA, 33 bp, Homo sapien
tcactcccctctaaaagtctaaagttcatacgg

SEQ ID NO: 447987 - DNA, 33 bp, Homo sapien
atgaaacaactcctaaaaatgatttacctcacc

SEQ ID NO: 447988 - DNA, 33 bp, Homo sapien
atgaaacaactcctaagaatgatttacctcacc

SEQ ID NO: 447989 - DNA, 33 bp, Homo sapien
caatgtcagtgatcaacgaagtaaatataacta

SEQ ID NO: 447990 - DNA, 33 bp, Homo sapien
caatgtcagtgatcaatgaagtaaatataacta

SEQ ID NO: 447991 - DNA, 33 bp, Homo sapien
gatgtaatcagccaaacagccaatgaggcagca

SEQ ID NO: 447992 - DNA, 33 bp, Homo sapien
gatgtaatcagccaaatagccaatgaggcagca

SEQ ID NO: 447993 - DNA, 33 bp, Homo sapien
tctgccacgtaagctaccgcgtctgccacgtaa

SEQ ID NO: 447994 - DNA, 33 bp, Homo sapien
tctgccacgtaagctatcgcgtctgccacgtaa

SEQ ID NO: 447995 - DNA, 33 bp, Homo sapien
atcacactcatcgtgaaaaaacatcagacaaac

SEQ ID NO: 447996 - DNA, 33 bp, Homo sapien
atcacactcatcgtgacaaaacatcagacaaac

SEQ ID NO: 447997 - DNA, 33 bp, Homo sapien
taagagattaacatccacgtaaaaccaactaca

SEQ ID NO: 447998 - DNA, 33 bp, Homo sapien
taagagattaacatccgcgtaaaaccaactaca

SEQ ID NO: 447999 - DNA, 33 bp, Homo sapien
tccttatgagaagggaaaatctggacacacaca

SEQ ID NO: 448000 - DNA, 33 bp, Homo sapien
tccttatgagaagggacaatctggacacacaca

SEQ ID NO: 448001 - DNA, 33 bp, Homo sapien
ctgaaaaggaacttcaaggcctctcggctcccc

SEQ ID NO: 448002 - DNA, 33 bp, Homo sapien
ctgaaaaggaacttcagggcctctcggctcccc

SEQ ID NO: 448003 - DNA, 33 bp, Homo sapien
atgagtttgcttcctggaagaatttgcctaaat

SEQ ID NO: 448004 - DNA, 33 bp, Homo sapien
atgagtttgcttcctgtaagaatttgcctaaat

SEQ ID NO: 448005 - DNA, 33 bp, Homo sapien
ataagagggaatggcaacagctctcttggggaa

SEQ ID NO: 448006 - DNA, 33 bp, Homo sapien
ataagagggaatggcagcagctctcttggggaa

SEQ ID NO: 448007 - DNA, 33 bp, Homo sapien
ccagacacccactagcagcgttctgggagaggc

SEQ ID NO: 448008 - DNA, 33 bp, Homo sapien
ccagacacccactagcggcgttctgggagaggc

SEQ ID NO: 448009 - DNA, 33 bp, Homo sapien
tttcccatcggtctccactagcttcctcaggct

SEQ ID NO: 448010 - DNA, 33 bp, Homo sapien
tttcccatcggtctccgctagcttcctcaggct

SEQ ID NO: 448011 - DNA, 33 bp, Homo sapien
ttacgtttctagatgacggaaggttccggaagt

SEQ ID NO: 448012 - DNA, 33 bp, Homo sapien
ttacgtttctagatgatggaaggttccggaagt

SEQ ID NO: 448013 - DNA, 33 bp, Homo sapien
gaggttaaggaatacacccaaagtcacatagct

SEQ ID NO: 448014 - DNA, 33 bp, Homo sapien
gaggttaaggaatacatccaaagtcacatagct

SEQ ID NO: 448015 - DNA, 33 bp, Homo sapien
gcaagatttgagcctgcaatattattatagaaa

SEQ ID NO: 448016 - DNA, 33 bp, Homo sapien
gcaagatttgagcctggaatattattatagaaa

SEQ ID NO: 448017 - DNA, 33 bp, Homo sapien
cacaacaagcctgtggccaagctgctatctgat

SEQ ID NO: 448018 - DNA, 33 bp, Homo sapien
cacaacaagcctgtggtcaagctgctatctgat

SEQ ID NO: 448019 - DNA, 33 bp, Homo sapien
aatttcaactctgaaaattacataatcacaaag

SEQ ID NO: 448020 - DNA, 33 bp, Homo sapien
aatttcaactctgaaagttacataatcacaaag

SEQ ID NO: 448021 - DNA, 33 bp, Homo sapien
gcctagggattggatacagcatggattatcagc

SEQ ID NO: 448022 - DNA, 33 bp, Homo sapien
gcctagggattggatagagcatggattatcagc

SEQ ID NO: 448023 - DNA, 33 bp, Homo sapien
gagaatttttgagaacaaaggcactgaggaggt

SEQ ID NO: 448024 - DNA, 33 bp, Homo sapien
gagaatttttgagaacgaaggcactgaggaggt

SEQ ID NO: 448025 - DNA, 33 bp, Homo sapien
aatgctaaagtgaccaaaccgaagattgctctg

SEQ ID NO: 448026 - DNA, 33 bp, Homo sapien
aatgctaaagtgaccataccgaagattgctctg

SEQ ID NO: 448027 - DNA, 33 bp, Homo sapien
catgactgagaaacacagaaagtgaagtcaggt

SEQ ID NO: 448028 - DNA, 33 bp, Homo sapien
catgactgagaaacacggaaagtgaagtcaggt

SEQ ID NO: 448029 - DNA, 33 bp, Homo sapien
tgtgtcacaatgtccaataaaacaaaatggatg

SEQ ID NO: 448030 - DNA, 33 bp, Homo sapien
tgtgtcacaatgtccactaaaacaaaatggatg

SEQ ID NO: 448031 - DNA, 33 bp, Homo sapien
accctgaaggatttcccctgatgtcatacaagc

SEQ ID NO: 448032 - DNA, 33 bp, Homo sapien
accctgaaggatttcctctgatgtcatacaagc

SEQ ID NO: 448033 - DNA, 33 bp, Homo sapien
attactgctactggtaaaaggtaaagctttctt

SEQ ID NO: 448034 - DNA, 33 bp, Homo sapien
attactgctactggtacaaggtaaagctttctt

SEQ ID NO: 448035 - DNA, 33 bp, Homo sapien
tggtggggagtggtgaaagcttcttgcaggata

SEQ ID NO: 448036 - DNA, 33 bp, Homo sapien
tggtggggagtggtgagagcttcttgcaggata

SEQ ID NO: 448037 - DNA, 33 bp, Homo sapien
acgctcagtggaggaccacagtgcattcctaaa

SEQ ID NO: 448038 - DNA, 33 bp, Homo sapien
acgctcagtggaggactacagtgcattcctaaa

SEQ ID NO: 448039 - DNA, 33 bp, Homo sapien
aaagcacagcataaaaaggaaaattaaagagaa

SEQ ID NO: 448040 - DNA, 33 bp, Homo sapien
aaagcacagcataaaagggaaaattaaagagaa

SEQ ID NO: 448041 - DNA, 33 bp, Homo sapien
ctgcgcaaggtaagagccaatagaaactagggg

SEQ ID NO: 448042 - DNA, 33 bp, Homo sapien
ctgcgcaaggtaagaggcaatagaaactagggg

SEQ ID NO: 448043 - DNA, 33 bp, Homo sapien
cctcgaggccaagacccgagcgaaatattctcg

SEQ ID NO: 448044 - DNA, 33 bp, Homo sapien
cctcgaggccaagacctgagcgaaatattctcg

SEQ ID NO: 448045 - DNA, 33 bp, Homo sapien
cattttaagatgctccaagaaaaaaaccctgaa

SEQ ID NO: 448046 - DNA, 33 bp, Homo sapien
cattttaagatgctccgagaaaaaaaccctgaa

SEQ ID NO: 448047 - DNA, 33 bp, Homo sapien
agtaaaatggggataagaaggataaggtaagca

SEQ ID NO: 448048 - DNA, 33 bp, Homo sapien
agtaaaatggggataataaggataaggtaagca

SEQ ID NO: 448049 - DNA, 33 bp, Homo sapien
aagggtgcggagggagaacactccagaaacaca

SEQ ID NO: 448050 - DNA, 33 bp, Homo sapien
aagggtgcggagggaggacactccagaaacaca

SEQ ID NO: 448051 - DNA, 33 bp, Homo sapien
attatgatgcaaattaacactttattggtcctt

SEQ ID NO: 448052 - DNA, 33 bp, Homo sapien
attatgatgcaaattaccactttattggtcctt

SEQ ID NO: 448053 - DNA, 33 bp, Homo sapien
agtgtgataagcaaggaagggaataaggctttc

SEQ ID NO: 448054 - DNA, 33 bp, Homo sapien
agtgtgataagcaagggagggaataaggctttc

SEQ ID NO: 448055 - DNA, 33 bp, Homo sapien
tcatagatcacttaccgaaaaagtactttgtat

SEQ ID NO: 448056 - DNA, 33 bp, Homo sapien
tcatagatcacttacctaaaaagtactttgtat

SEQ ID NO: 448057 - DNA, 33 bp, Homo sapien
ccaacttcaagtattcacaagatcatcctacag

SEQ ID NO: 448058 - DNA, 33 bp, Homo sapien
ccaacttcaagtattcgcaagatcatcctacag

SEQ ID NO: 448059 - DNA, 33 bp, Homo sapien
aaagagaagaaaaaagaagcattgcatagcatc

SEQ ID NO: 448060 - DNA, 33 bp, Homo sapien
aaagagaagaaaaaaggagcattgcatagcatc

SEQ ID NO: 448061 - DNA, 33 bp, Homo sapien
ctcgtatcctgactacgagaagaacgaagcagg

SEQ ID NO: 448062 - DNA, 33 bp, Homo sapien
ctcgtatcctgactactagaagaacgaagcagg

SEQ ID NO: 448063 - DNA, 33 bp, Homo sapien
tctccaaatactgtcacgtttggtaattaagaa

SEQ ID NO: 448064 - DNA, 33 bp, Homo sapien
tctccaaatactgtcatgtttggtaattaagaa

SEQ ID NO: 448065 - DNA, 33 bp, Homo sapien
caagcagttggctatacgcagttgtatctgttg

SEQ ID NO: 448066 - DNA, 33 bp, Homo sapien
caagcagttggctatatgcagttgtatctgttg

SEQ ID NO: 448067 - DNA, 33 bp, Homo sapien
ccaaactacactgctcacgtattttagatatgc

SEQ ID NO: 448068 - DNA, 33 bp, Homo sapien
ccaaactacactgctcgcgtattttagatatgc

SEQ ID NO: 448069 - DNA, 33 bp, Homo sapien
gttcactggcttcttacggatgggaaataatgg

SEQ ID NO: 448070 - DNA, 33 bp, Homo sapien
gttcactggcttcttatggatgggaaataatgg

SEQ ID NO: 448071 - DNA, 33 bp, Homo sapien
ctgtgaacaaccaacacggaaagcattaagaaa

SEQ ID NO: 448072 - DNA, 33 bp, Homo sapien
ctgtgaacaaccaacatggaaagcattaagaaa

SEQ ID NO: 448073 - DNA, 33 bp, Homo sapien
aagtggttctctttcaacttcaagcctttcctg

SEQ ID NO: 448074 - DNA, 33 bp, Homo sapien
aagtggttctctttcagcttcaagcctttcctg

SEQ ID NO: 448075 - DNA, 33 bp, Homo sapien
gtatattgttctcttccacggaccatcactcca

SEQ ID NO: 448076 - DNA, 33 bp, Homo sapien
gtatattgttctcttctacggaccatcactcca

SEQ ID NO: 448077 - DNA, 33 bp, Homo sapien
attaaagtaagaactaatactgtctcagagatg

SEQ ID NO: 448078 - DNA, 33 bp, Homo sapien
attaaagtaagaactagtactgtctcagagatg

SEQ ID NO: 448079 - DNA, 33 bp, Homo sapien
gaaaggatgaggaaaagaaactttatgctttaa

SEQ ID NO: 448080 - DNA, 33 bp, Homo sapien
gaaaggatgaggaaaataaactttatgctttaa

SEQ ID NO: 448081 - DNA, 33 bp, Homo sapien
aaaaggggcaaacttgcatctatgggtgaaata

SEQ ID NO: 448082 - DNA, 33 bp, Homo sapien
aaaaggggcaaacttgtatctatgggtgaaata

SEQ ID NO: 448083 - DNA, 33 bp, Homo sapien
ggaattaaaatacacaaacagatgtgcttggta

SEQ ID NO: 448084 - DNA, 33 bp, Homo sapien
ggaattaaaatacacacacagatgtgcttggta

SEQ ID NO: 448085 - DNA, 33 bp, Homo sapien
acaactaagtaaatcaatgatgaaagtgtatat

SEQ ID NO: 448086 - DNA, 33 bp, Homo sapien
acaactaagtaaatcagtgatgaaagtgtatat

SEQ ID NO: 448087 - DNA, 33 bp, Homo sapien
ttacaaacaaagggggaaaactatgattatatg

SEQ ID NO: 448088 - DNA, 33 bp, Homo sapien
ttacaaacaaaggggggaaactatgattatatg

SEQ ID NO: 448089 - DNA, 33 bp, Homo sapien
taatcgcatgacgtaaataaattgatactgcac

SEQ ID NO: 448090 - DNA, 33 bp, Homo sapien
taatcgcatgacgtaattaaattgatactgcac

SEQ ID NO: 448091 - DNA, 33 bp, Homo sapien
tggagataggagatacaccctcatgttccacca

SEQ ID NO: 448092 - DNA, 33 bp, Homo sapien
tggagataggagatacgccctcatgttccacca

SEQ ID NO: 448093 - DNA, 33 bp, Homo sapien
aaaacgaaacaagtcaatgaagaaaagcagttc

SEQ ID NO: 448094 - DNA, 33 bp, Homo sapien
aaaacgaaacaagtcagtgaagaaaagcagttc

SEQ ID NO: 448095 - DNA, 33 bp, Homo sapien
ggccatgagcttcccaacagtaaacataaagag

SEQ ID NO: 448096 - DNA, 33 bp, Homo sapien
ggccatgagcttcccagcagtaaacataaagag

SEQ ID NO: 448097 - DNA, 33 bp, Homo sapien
aagctcatggccaaaactgtgatccatctctag

SEQ ID NO: 448098 - DNA, 33 bp, Homo sapien
aagctcatggccaaaattgtgatccatctctag

SEQ ID NO: 448099 - DNA, 33 bp, Homo sapien
gtgtactttattttcaagggtcagattttttct

SEQ ID NO: 448100 - DNA, 33 bp, Homo sapien
gtgtactttattttcaggggtcagattttttct

SEQ ID NO: 448101 - DNA, 33 bp, Homo sapien
gaatgctgatttagcaccattctattttgcctt

SEQ ID NO: 448102 - DNA, 33 bp, Homo sapien
gaatgctgatttagcagcattctattttgcctt

SEQ ID NO: 448103 - DNA, 33 bp, Homo sapien
tttaaaacttacgtggaacataactgtgtgaaa

SEQ ID NO: 448104 - DNA, 33 bp, Homo sapien
tttaaaacttacgtgggacataactgtgtgaaa

SEQ ID NO: 448105 - DNA, 33 bp, Homo sapien
agtcaatagcaaataaataagagaggagagctg

SEQ ID NO: 448106 - DNA, 33 bp, Homo sapien
agtcaatagcaaataagtaagagaggagagctg

SEQ ID NO: 448107 - DNA, 33 bp, Homo sapien
acaatggtactatacacctaagaaaacagaaag

SEQ ID NO: 448108 - DNA, 33 bp, Homo sapien
acaatggtactatacatctaagaaaacagaaag

SEQ ID NO: 448109 - DNA, 33 bp, Homo sapien
actcatagtcctagaacagcttctacatgtcaa

SEQ ID NO: 448110 - DNA, 33 bp, Homo sapien
actcatagtcctagaatagcttctacatgtcaa

SEQ ID NO: 448111 - DNA, 33 bp, Homo sapien
attcttagaacctaaaaccatgccatgcctgag

SEQ ID NO: 448112 - DNA, 33 bp, Homo sapien
attcttagaacctaaagccatgccatgcctgag

SEQ ID NO: 448113 - DNA, 33 bp, Homo sapien
acagaagtttgaaatactatcataggggaactt

SEQ ID NO: 448114 - DNA, 33 bp, Homo sapien
acagaagtttgaaatattatcataggggaactt

SEQ ID NO: 448115 - DNA, 33 bp, Homo sapien
tttagagtcatcaaaacggggaaacaccatgag

SEQ ID NO: 448116 - DNA, 33 bp, Homo sapien
tttagagtcatcaaaatggggaaacaccatgag

SEQ ID NO: 448117 - DNA, 33 bp, Homo sapien
tgaagtttaatttgaactggggccgagctcctt

SEQ ID NO: 448118 - DNA, 33 bp, Homo sapien
tgaagtttaatttgaattggggccgagctcctt

SEQ ID NO: 448119 - DNA, 33 bp, Homo sapien
agtgttactatttttacagctgccatgtcttat

SEQ ID NO: 448120 - DNA, 33 bp, Homo sapien
agtgttactatttttatagctgccatgtcttat

SEQ ID NO: 448121 - DNA, 33 bp, Homo sapien
aacaactgaaacagcaatgacttcaaatcctat

SEQ ID NO: 448122 - DNA, 33 bp, Homo sapien
aacaactgaaacagcattgacttcaaatcctat

SEQ ID NO: 448123 - DNA, 33 bp, Homo sapien
atgccatattgggcacagaagctacctgtacct

SEQ ID NO: 448124 - DNA, 33 bp, Homo sapien
atgccatattgggcactgaagctacctgtacct

SEQ ID NO: 448125 - DNA, 33 bp, Homo sapien
tgtgatattttctttcaaactttacagtctaga

SEQ ID NO: 448126 - DNA, 33 bp, Homo sapien
tgtgatattttctttccaactttacagtctaga

SEQ ID NO: 448127 - DNA, 33 bp, Homo sapien
tgtttctcatgtgtacagcactttgacattggt

SEQ ID NO: 448128 - DNA, 33 bp, Homo sapien
tgtttctcatgtgtactgcactttgacattggt

SEQ ID NO: 448129 - DNA, 33 bp, Homo sapien
ttatgggtaagcagtaaaaatagacgtagaatg

SEQ ID NO: 448130 - DNA, 33 bp, Homo sapien
ttatgggtaagcagtataaatagacgtagaatg

SEQ ID NO: 448131 - DNA, 33 bp, Homo sapien
attttcaggacagatacggttttgttgatagcc

SEQ ID NO: 448132 - DNA, 33 bp, Homo sapien
attttcaggacagatatggttttgttgatagcc

SEQ ID NO: 448133 - DNA, 33 bp, Homo sapien
cccaagctgttccaaccatatttaaacattttt

SEQ ID NO: 448134 - DNA, 33 bp, Homo sapien
cccaagctgttccaactatatttaaacattttt

SEQ ID NO: 448135 - DNA, 33 bp, Homo sapien
aggagtatatatcttaagctgtcttacataaat

SEQ ID NO: 448136 - DNA, 33 bp, Homo sapien
aggagtatatatcttaggctgtcttacataaat

SEQ ID NO: 448137 - DNA, 33 bp, Homo sapien
agggagacttctgtcacatccattattggatgc

SEQ ID NO: 448138 - DNA, 33 bp, Homo sapien
agggagacttctgtcatatccattattggatgc

SEQ ID NO: 448139 - DNA, 33 bp, Homo sapien
ggttcaataacataaacaggctttttgtgtcca

SEQ ID NO: 448140 - DNA, 33 bp, Homo sapien
ggttcaataacataaagaggctttttgtgtcca

SEQ ID NO: 448141 - DNA, 33 bp, Homo sapien
tagtcagtactacacactcacttatgacctatg

SEQ ID NO: 448142 - DNA, 33 bp, Homo sapien
tagtcagtactacacagtcacttatgacctatg

SEQ ID NO: 448143 - DNA, 33 bp, Homo sapien
aactaaggatactaggcccattcctgagctggt

SEQ ID NO: 448144 - DNA, 33 bp, Homo sapien
aactaaggatactaggtccattcctgagctggt

SEQ ID NO: 448145 - DNA, 33 bp, Homo sapien
tgaaagagcttgaaaagtgtattcttttaagaa

SEQ ID NO: 448146 - DNA, 33 bp, Homo sapien
tgaaagagcttgaaaattgtattcttttaagaa

SEQ ID NO: 448147 - DNA, 33 bp, Homo sapien
tagtaattttcctcaccgcaaatagaaataaat

SEQ ID NO: 448148 - DNA, 33 bp, Homo sapien
tagtaattttcctcactgcaaatagaaataaat

SEQ ID NO: 448149 - DNA, 33 bp, Homo sapien
tccattaaatttcagaaggtcaagccatttagt

SEQ ID NO: 448150 - DNA, 33 bp, Homo sapien
tccattaaatttcagagggtcaagccatttagt

SEQ ID NO: 448151 - DNA, 33 bp, Homo sapien
cacccactgatacaaaccttcatctcaacatca

SEQ ID NO: 448152 - DNA, 33 bp, Homo sapien
cacccactgatacaaatcttcatctcaacatca

SEQ ID NO: 448153 - DNA, 33 bp, Homo sapien
atgtacacgacagtggcagctacatatgaaagt

SEQ ID NO: 448154 - DNA, 33 bp, Homo sapien
atgtacacgacagtgggagctacatatgaaagt

SEQ ID NO: 448155 - DNA, 33 bp, Homo sapien
tggctgtggagcctaacaggagaaaggagtccc

SEQ ID NO: 448156 - DNA, 33 bp, Homo sapien
tggctgtggagcctaagaggagaaaggagtccc

SEQ ID NO: 448157 - DNA, 33 bp, Homo sapien
caatgtgatcttaacaactttggacttatctat

SEQ ID NO: 448158 - DNA, 33 bp, Homo sapien
caatgtgatcttaacacctttggacttatctat

SEQ ID NO: 448159 - DNA, 33 bp, Homo sapien
tattctctgaaaatcaaacatctaatattcagc

SEQ ID NO: 448160 - DNA, 33 bp, Homo sapien
tattctctgaaaatcagacatctaatattcagc

SEQ ID NO: 448161 - DNA, 33 bp, Homo sapien
ggggaaaggcagtaaacatcagtgaaacttcag

SEQ ID NO: 448162 - DNA, 33 bp, Homo sapien
ggggaaaggcagtaaatatcagtgaaacttcag

SEQ ID NO: 448163 - DNA, 33 bp, Homo sapien
gccatttcctgtaaaactaaacatatacttact

SEQ ID NO: 448164 - DNA, 33 bp, Homo sapien
gccatttcctgtaaaattaaacatatacttact

SEQ ID NO: 448165 - DNA, 33 bp, Homo sapien
gcagacgtaaaatacaccctcttgaaaaaatag

SEQ ID NO: 448166 - DNA, 33 bp, Homo sapien
gcagacgtaaaatacagcctcttgaaaaaatag

SEQ ID NO: 448167 - DNA, 33 bp, Homo sapien
ttctacctctgcttacccagctgtctaaaaacg

SEQ ID NO: 448168 - DNA, 33 bp, Homo sapien
ttctacctctgcttactcagctgtctaaaaacg

SEQ ID NO: 448169 - DNA, 33 bp, Homo sapien
ggattgcagaaaacaaatgaagaacaacagagc

SEQ ID NO: 448170 - DNA, 33 bp, Homo sapien
ggattgcagaaaacaagtgaagaacaacagagc

SEQ ID NO: 448171 - DNA, 33 bp, Homo sapien
ctcaagaaagtaacaaaccattctcaagaaata

SEQ ID NO: 448172 - DNA, 33 bp, Homo sapien
ctcaagaaagtaacaatccattctcaagaaata

SEQ ID NO: 448173 - DNA, 33 bp, Homo sapien
caacatcaggaggtacaaggacaattaaaatat

SEQ ID NO: 448174 - DNA, 33 bp, Homo sapien
caacatcaggaggtacgaggacaattaaaatat

SEQ ID NO: 448175 - DNA, 33 bp, Homo sapien
gacctcctcagatacccgcaaatcactgctcat

SEQ ID NO: 448176 - DNA, 33 bp, Homo sapien
gacctcctcagatacctgcaaatcactgctcat

SEQ ID NO: 448177 - DNA, 33 bp, Homo sapien
ccaccatctgaaaacaggactcgagtgtaagct

SEQ ID NO: 448178 - DNA, 33 bp, Homo sapien
ccaccatctgaaaacatgactcgagtgtaagct

SEQ ID NO: 448179 - DNA, 33 bp, Homo sapien
aggggtgtatttgaaactctgttcatttgttaa

SEQ ID NO: 448180 - DNA, 33 bp, Homo sapien
aggggtgtatttgaaattctgttcatttgttaa

SEQ ID NO: 448181 - DNA, 33 bp, Homo sapien
ctgccttgtgctcacactaccattgccacggca

SEQ ID NO: 448182 - DNA, 33 bp, Homo sapien
ctgccttgtgctcacattaccattgccacggca

SEQ ID NO: 448183 - DNA, 33 bp, Homo sapien
ataatattcactcatgaaagaaagatggaagct

SEQ ID NO: 448184 - DNA, 33 bp, Homo sapien
ataatattcactcatggaagaaagatggaagct

SEQ ID NO: 448185 - DNA, 33 bp, Homo sapien
ttaaatttgcccatgacggaaagctgatatggc

SEQ ID NO: 448186 - DNA, 33 bp, Homo sapien
ttaaatttgcccatgatggaaagctgatatggc

SEQ ID NO: 448187 - DNA, 33 bp, Homo sapien
atctttcctgctacaccgagagctccttgagtg

SEQ ID NO: 448188 - DNA, 33 bp, Homo sapien
atctttcctgctacactgagagctccttgagtg

SEQ ID NO: 448189 - DNA, 33 bp, Homo sapien
tagcccagtagagaataaaatggaaaggcagct

SEQ ID NO: 448190 - DNA, 33 bp, Homo sapien
tagcccagtagagaatgaaatggaaaggcagct

SEQ ID NO: 448191 - DNA, 33 bp, Homo sapien
tcgtggattcactgcaactgtcggatgcgagtt

SEQ ID NO: 448192 - DNA, 33 bp, Homo sapien
tcgtggattcactgcagctgtcggatgcgagtt

SEQ ID NO: 448193 - DNA, 33 bp, Homo sapien
agaagccagcagccacaagcgccggggtgcccc

SEQ ID NO: 448194 - DNA, 33 bp, Homo sapien
agaagccagcagccacgagcgccggggtgcccc

SEQ ID NO: 448195 - DNA, 33 bp, Homo sapien
cagaagccaccatctacgtgttttctgtccatt

SEQ ID NO: 448196 - DNA, 33 bp, Homo sapien
cagaagccaccatctatgtgttttctgtccatt

SEQ ID NO: 448197 - DNA, 33 bp, Homo sapien
tcaagaggctcaaatacgttaatacgcatttcc

SEQ ID NO: 448198 - DNA, 33 bp, Homo sapien
tcaagaggctcaaatatgttaatacgcatttcc

SEQ ID NO: 448199 - DNA, 33 bp, Homo sapien
atcagccttgccagccacagggcagtggtggac

SEQ ID NO: 448200 - DNA, 33 bp, Homo sapien
atcagccttgccagccgcagggcagtggtggac

SEQ ID NO: 448201 - DNA, 33 bp, Homo sapien
catgcatggagtaaaacggggttcagcttccag

SEQ ID NO: 448202 - DNA, 33 bp, Homo sapien
catgcatggagtaaaatggggttcagcttccag

SEQ ID NO: 448203 - DNA, 33 bp, Homo sapien
cagctcctgctttataccaaaaatgttctacct

SEQ ID NO: 448204 - DNA, 33 bp, Homo sapien
cagctcctgctttatagcaaaaatgttctacct

SEQ ID NO: 448205 - DNA, 33 bp, Homo sapien
acactaagctccaataaaattaggcaaatgaga

SEQ ID NO: 448206 - DNA, 33 bp, Homo sapien
acactaagctccaatataattaggcaaatgaga

SEQ ID NO: 448207 - DNA, 33 bp, Homo sapien
cgtttcattgcagaaagaaaacgaatacaagca

SEQ ID NO: 448208 - DNA, 33 bp, Homo sapien
cgtttcattgcagaaataaaacgaatacaagca

SEQ ID NO: 448209 - DNA, 33 bp, Homo sapien
gtgtggcctgagatgacgatcacaaggacacaa

SEQ ID NO: 448210 - DNA, 33 bp, Homo sapien
gtgtggcctgagatgatgatcacaaggacacaa

SEQ ID NO: 448211 - DNA, 33 bp, Homo sapien
ttttctggatcaaaccaatggagaagtgaggga

SEQ ID NO: 448212 - DNA, 33 bp, Homo sapien
ttttctggatcaaaccgatggagaagtgaggga

SEQ ID NO: 448213 - DNA, 33 bp, Homo sapien
atttgtggggctcagaagcagcagaacatcctc

SEQ ID NO: 448214 - DNA, 33 bp, Homo sapien
atttgtggggctcagacgcagcagaacatcctc

SEQ ID NO: 448215 - DNA, 33 bp, Homo sapien
agatgtgcgattataacgaataacacagagcaa

SEQ ID NO: 448216 - DNA, 33 bp, Homo sapien
agatgtgcgattataatgaataacacagagcaa

SEQ ID NO: 448217 - DNA, 33 bp, Homo sapien
caatgtgcttaagagggatgagaaatgtatagt

SEQ ID NO: 448218 - DNA, 33 bp, Homo sapien
caatgtgcttaagaggtatgagaaatgtatagt

SEQ ID NO: 448219 - DNA, 33 bp, Homo sapien
aagaagagaaaagaaaactccaggaattgccgg

SEQ ID NO: 448220 - DNA, 33 bp, Homo sapien
aagaagagaaaagaaacctccaggaattgccgg

SEQ ID NO: 448221 - DNA, 33 bp, Homo sapien
ccctttatccttttcaccaggcggtattgcctc

SEQ ID NO: 448222 - DNA, 33 bp, Homo sapien
ccctttatccttttcatcaggcggtattgcctc

SEQ ID NO: 448223 - DNA, 33 bp, Homo sapien
gcatgacccactgtagcaattctgctctaggta

SEQ ID NO: 448224 - DNA, 33 bp, Homo sapien
gcatgacccactgtaggaattctgctctaggta

SEQ ID NO: 448225 - DNA, 33 bp, Homo sapien
aaggagctgcaagagcagaaagcatctctccct

SEQ ID NO: 448226 - DNA, 33 bp, Homo sapien
aaggagctgcaagagcggaaagcatctctccct

SEQ ID NO: 448227 - DNA, 33 bp, Homo sapien
gaccatgcgacacaagacatgggaaggcccctc

SEQ ID NO: 448228 - DNA, 33 bp, Homo sapien
gaccatgcgacacaaggcatgggaaggcccctc

SEQ ID NO: 448229 - DNA, 33 bp, Homo sapien
ctgctattcagaaacacgagagtccaggcaggc

SEQ ID NO: 448230 - DNA, 33 bp, Homo sapien
ctgctattcagaaacatgagagtccaggcaggc

SEQ ID NO: 448231 - DNA, 33 bp, Homo sapien
atgccaggcttcttaaactcgggatagcgacac

SEQ ID NO: 448232 - DNA, 33 bp, Homo sapien
atgccaggcttcttaacctcgggatagcgacac

SEQ ID NO: 448233 - DNA, 33 bp, Homo sapien
ggacaaagtctgttcacgttgtgagggctaaga

SEQ ID NO: 448234 - DNA, 33 bp, Homo sapien
ggacaaagtctgttcatgttgtgagggctaaga

SEQ ID NO: 448235 - DNA, 33 bp, Homo sapien
aaacatctcagcattgcagggtacgtaaataat

SEQ ID NO: 448236 - DNA, 33 bp, Homo sapien
aaacatctcagcattgtagggtacgtaaataat

SEQ ID NO: 448237 - DNA, 33 bp, Homo sapien
gtgtttgtcacctatcaccaaactaccctacag

SEQ ID NO: 448238 - DNA, 33 bp, Homo sapien
gtgtttgtcacctatcgccaaactaccctacag

SEQ ID NO: 448239 - DNA, 33 bp, Homo sapien
caacatctttgggtcacgattgttttggtctta

SEQ ID NO: 448240 - DNA, 33 bp, Homo sapien
caacatctttgggtcatgattgttttggtctta

SEQ ID NO: 448241 - DNA, 33 bp, Homo sapien
aatgtggcagtaaataaagcacaaacagaacgc

SEQ ID NO: 448242 - DNA, 33 bp, Homo sapien
aatgtggcagtaaatagagcacaaacagaacgc

SEQ ID NO: 448243 - DNA, 33 bp, Homo sapien
tgtggcataagacaaaagccagggcctcccgag

SEQ ID NO: 448244 - DNA, 33 bp, Homo sapien
tgtggcataagacaaaggccagggcctcccgag

SEQ ID NO: 448245 - DNA, 33 bp, Homo sapien
cccagaaactgaggcaaaggactgaagctactc

SEQ ID NO: 448246 - DNA, 33 bp, Homo sapien
cccagaaactgaggcagaggactgaagctactc

SEQ ID NO: 448247 - DNA, 33 bp, Homo sapien
atccaagaggaaatggaaacccagaaactgagg

SEQ ID NO: 448248 - DNA, 33 bp, Homo sapien
atccaagaggaaatggcaacccagaaactgagg

SEQ ID NO: 448249 - DNA, 33 bp, Homo sapien
tgggatgaatattagcaaccataaatgtgtgtt

SEQ ID NO: 448250 - DNA, 33 bp, Homo sapien
tgggatgaatattagcgaccataaatgtgtgtt

SEQ ID NO: 448251 - DNA, 33 bp, Homo sapien
gaggtgcaggcagcaaagaaaccaattcagcac

SEQ ID NO: 448252 - DNA, 33 bp, Homo sapien
gaggtgcaggcagcaaggaaaccaattcagcac

SEQ ID NO: 448253 - DNA, 33 bp, Homo sapien
ttcaacaatctggcaccaacccctcaaggaact

SEQ ID NO: 448254 - DNA, 33 bp, Homo sapien
ttcaacaatctggcacgaacccctcaaggaact

SEQ ID NO: 448255 - DNA, 33 bp, Homo sapien
tttccagaccaccccaggtgccaggaagctgta

SEQ ID NO: 448256 - DNA, 33 bp, Homo sapien
tttccagaccaccccatgtgccaggaagctgta

SEQ ID NO: 448257 - DNA, 33 bp, Homo sapien
ttggacacttgcaatggatggctgaggccactt

SEQ ID NO: 448258 - DNA, 33 bp, Homo sapien
ttggacacttgcaatgtatggctgaggccactt

SEQ ID NO: 448259 - DNA, 33 bp, Homo sapien
aactttgctattcaccaagtggtatctcctctc

SEQ ID NO: 448260 - DNA, 33 bp, Homo sapien
aactttgctattcaccgagtggtatctcctctc

SEQ ID NO: 448261 - DNA, 33 bp, Homo sapien
atcaaagataaactagaccaactttcatccttc

SEQ ID NO: 448262 - DNA, 33 bp, Homo sapien
atcaaagataaactagcccaactttcatccttc

SEQ ID NO: 448263 - DNA, 33 bp, Homo sapien
cgagacctgtgctatccatcttctttcgccttc

SEQ ID NO: 448264 - DNA, 33 bp, Homo sapien
cgagacctgtgctatctatcttctttcgccttc

SEQ ID NO: 448265 - DNA, 33 bp, Homo sapien
cccacagtaaagtcccaggaatacagagatgac

SEQ ID NO: 448266 - DNA, 33 bp, Homo sapien
cccacagtaaagtcccgggaatacagagatgac

SEQ ID NO: 448267 - DNA, 33 bp, Homo sapien
ttcaaatactggtcccaattcaggaggtacagg

SEQ ID NO: 448268 - DNA, 33 bp, Homo sapien
ttcaaatactggtcccgattcaggaggtacagg

SEQ ID NO: 448269 - DNA, 33 bp, Homo sapien
aggtgactcatacggacgttagcgggtaggaag

SEQ ID NO: 448270 - DNA, 33 bp, Homo sapien
aggtgactcatacggatgttagcgggtaggaag

SEQ ID NO: 448271 - DNA, 33 bp, Homo sapien
ttctgtgatatttagacgacacagaatcaaatg

SEQ ID NO: 448272 - DNA, 33 bp, Homo sapien
ttctgtgatatttagatgacacagaatcaaatg

SEQ ID NO: 448273 - DNA, 33 bp, Homo sapien
ctttcatggtcagaaccgtgatacttctactgg

SEQ ID NO: 448274 - DNA, 33 bp, Homo sapien
ctttcatggtcagaactgtgatacttctactgg

SEQ ID NO: 448275 - DNA, 33 bp, Homo sapien
accgtactgataatccagcttaaagtgaccacg

SEQ ID NO: 448276 - DNA, 33 bp, Homo sapien
accgtactgataatcccgcttaaagtgaccacg

SEQ ID NO: 448277 - DNA, 33 bp, Homo sapien
ttttgcatccagattgcattcagaaaacttgtt

SEQ ID NO: 448278 - DNA, 33 bp, Homo sapien
ttttgcatccagattgtattcagaaaacttgtt

SEQ ID NO: 448279 - DNA, 33 bp, Homo sapien
atgtcctcagtacaacacagaccttctttttgt

SEQ ID NO: 448280 - DNA, 33 bp, Homo sapien
atgtcctcagtacaacgcagaccttctttttgt

SEQ ID NO: 448281 - DNA, 33 bp, Homo sapien
ccataattcagggcaactgtcagtctttttaga

SEQ ID NO: 448282 - DNA, 33 bp, Homo sapien
ccataattcagggcaattgtcagtctttttaga

SEQ ID NO: 448283 - DNA, 33 bp, Homo sapien
agcctcgcatcaggccactacccttcttcataa

SEQ ID NO: 448284 - DNA, 33 bp, Homo sapien
agcctcgcatcaggccgctacccttcttcataa

SEQ ID NO: 448285 - DNA, 33 bp, Homo sapien
gcatagcttctagttcaaacgcctctaaggaga

SEQ ID NO: 448286 - DNA, 33 bp, Homo sapien
gcatagcttctagttcgaacgcctctaaggaga

SEQ ID NO: 448287 - DNA, 33 bp, Homo sapien
gggcgatgggacataccgtacctcgagcagtgt

SEQ ID NO: 448288 - DNA, 33 bp, Homo sapien
gggcgatgggacatactgtacctcgagcagtgt

SEQ ID NO: 448289 - DNA, 33 bp, Homo sapien
acaggtttggaatcaaagtagagataataaacc

SEQ ID NO: 448290 - DNA, 33 bp, Homo sapien
acaggtttggaatcaaggtagagataataaacc

SEQ ID NO: 448291 - DNA, 33 bp, Homo sapien
attcttgtgttcattaaatgagccattgtttag

SEQ ID NO: 448292 - DNA, 33 bp, Homo sapien
attcttgtgttcattagatgagccattgtttag

SEQ ID NO: 448293 - DNA, 33 bp, Homo sapien
tgagtttttcttgagaatatcttagtgtcaaat

SEQ ID NO: 448294 - DNA, 33 bp, Homo sapien
tgagtttttcttgagagtatcttagtgtcaaat

SEQ ID NO: 448295 - DNA, 33 bp, Homo sapien
ccctgctctctgttgaaacgtaagcctcactgg

SEQ ID NO: 448296 - DNA, 33 bp, Homo sapien
ccctgctctctgttgacacgtaagcctcactgg

SEQ ID NO: 448297 - DNA, 33 bp, Homo sapien
tctattattcgattcaaaatcccttacaggttg

SEQ ID NO: 448298 - DNA, 33 bp, Homo sapien
tctattattcgattcagaatcccttacaggttg

SEQ ID NO: 448299 - DNA, 33 bp, Homo sapien
cgctcctatagatccacgccttcgtgcctgctt

SEQ ID NO: 448300 - DNA, 33 bp, Homo sapien
cgctcctatagatccatgccttcgtgcctgctt

SEQ ID NO: 448301 - DNA, 33 bp, Homo sapien
cccttgtgcagcttccacgtcccacgtgcactg

SEQ ID NO: 448302 - DNA, 33 bp, Homo sapien
cccttgtgcagcttccgcgtcccacgtgcactg

SEQ ID NO: 448303 - DNA, 33 bp, Homo sapien
gcttttaatcaggaaacggcagtcctacatcac

SEQ ID NO: 448304 - DNA, 33 bp, Homo sapien
gcttttaatcaggaaatggcagtcctacatcac

SEQ ID NO: 448305 - DNA, 33 bp, Homo sapien
acagatactcttccaacgctgtattttacccaa

SEQ ID NO: 448306 - DNA, 33 bp, Homo sapien
acagatactcttccaaggctgtattttacccaa

SEQ ID NO: 448307 - DNA, 33 bp, Homo sapien
tgtggaaatgacctccaaaggaccatgccccag

SEQ ID NO: 448308 - DNA, 33 bp, Homo sapien
tgtggaaatgacctccgaaggaccatgccccag

SEQ ID NO: 448309 - DNA, 33 bp, Homo sapien
ggattacaggccacaacgtctggctaagttttg

SEQ ID NO: 448310 - DNA, 33 bp, Homo sapien
ggattacaggccacaatgtctggctaagttttg

SEQ ID NO: 448311 - DNA, 33 bp, Homo sapien
taaattatctgtgtagacgcattaaaactcaac

SEQ ID NO: 448312 - DNA, 33 bp, Homo sapien
taaattatctgtgtagccgcattaaaactcaac

SEQ ID NO: 448313 - DNA, 33 bp, Homo sapien
ccccctggaaggttccagaaaggcaagaatgag

SEQ ID NO: 448314 - DNA, 33 bp, Homo sapien
ccccctggaaggttccggaaaggcaagaatgag

SEQ ID NO: 448315 - DNA, 33 bp, Homo sapien
gggactgccggtcgtacgttgatgccattgggt

SEQ ID NO: 448316 - DNA, 33 bp, Homo sapien
gggactgccggtcgtatgttgatgccattgggt

SEQ ID NO: 448317 - DNA, 33 bp, Homo sapien
tccaacgtaccccgcaaaggtggctacaggagc

SEQ ID NO: 448318 - DNA, 33 bp, Homo sapien
tccaacgtaccccgcacaggtggctacaggagc

SEQ ID NO: 448319 - DNA, 33 bp, Homo sapien
tcacaacaaggctaccaatcgcttttacagggg

SEQ ID NO: 448320 - DNA, 33 bp, Homo sapien
tcacaacaaggctaccgatcgcttttacagggg

SEQ ID NO: 448321 - DNA, 33 bp, Homo sapien
ccggaactccgagcacaatgcctattcccccga

SEQ ID NO: 448322 - DNA, 33 bp, Homo sapien
ccggaactccgagcacgatgcctattcccccga

SEQ ID NO: 448323 - DNA, 33 bp, Homo sapien
aagtgagagtttaaccaattaataagagcaagt

SEQ ID NO: 448324 - DNA, 33 bp, Homo sapien
aagtgagagtttaacctattaataagagcaagt

SEQ ID NO: 448325 - DNA, 33 bp, Homo sapien
tgcagtactaatgtccaattcagcctcctttca

SEQ ID NO: 448326 - DNA, 33 bp, Homo sapien
tgcagtactaatgtcctattcagcctcctttca

SEQ ID NO: 448327 - DNA, 33 bp, Homo sapien
gggtagggctcgccccaatgagaaacatttaga

SEQ ID NO: 448328 - DNA, 33 bp, Homo sapien
gggtagggctcgccccgatgagaaacatttaga

SEQ ID NO: 448329 - DNA, 33 bp, Homo sapien
attgggtttgtagacccggagtcatcagactgc

SEQ ID NO: 448330 - DNA, 33 bp, Homo sapien
attgggtttgtagacctggagtcatcagactgc

SEQ ID NO: 448331 - DNA, 33 bp, Homo sapien
atggatgttcaaaagtaacaaacacaaacgcag

SEQ ID NO: 448332 - DNA, 33 bp, Homo sapien
atggatgttcaaaagtgacaaacacaaacgcag

SEQ ID NO: 448333 - DNA, 33 bp, Homo sapien
tgcttggattttgctaagtctgtatcagggagg

SEQ ID NO: 448334 - DNA, 33 bp, Homo sapien
tgcttggattttgctacgtctgtatcagggagg

SEQ ID NO: 448335 - DNA, 33 bp, Homo sapien
gcatttcatggaggtacgtggaaaagcagcaaa

SEQ ID NO: 448336 - DNA, 33 bp, Homo sapien
gcatttcatggaggtatgtggaaaagcagcaaa

SEQ ID NO: 448337 - DNA, 33 bp, Homo sapien
atatttaatgagacacccctctcaggtcagatg

SEQ ID NO: 448338 - DNA, 33 bp, Homo sapien
atatttaatgagacacgcctctcaggtcagatg

SEQ ID NO: 448339 - DNA, 33 bp, Homo sapien
attacaaaagcccaacagtccacgctccagctg

SEQ ID NO: 448340 - DNA, 33 bp, Homo sapien
attacaaaagcccaacggtccacgctccagctg

SEQ ID NO: 448341 - DNA, 33 bp, Homo sapien
tttttctatgaatgtgacaactctagggccctc

SEQ ID NO: 448342 - DNA, 33 bp, Homo sapien
tttttctatgaatgtggcaactctagggccctc

SEQ ID NO: 448343 - DNA, 33 bp, Homo sapien
ggcaccaaaaggtccactgacagttggagggat

SEQ ID NO: 448344 - DNA, 33 bp, Homo sapien
ggcaccaaaaggtccagtgacagttggagggat

SEQ ID NO: 448345 - DNA, 33 bp, Homo sapien
taacgtaagtgaacaaccagcgttaaaaaatat

SEQ ID NO: 448346 - DNA, 33 bp, Homo sapien
taacgtaagtgaacaatcagcgttaaaaaatat

SEQ ID NO: 448347 - DNA, 33 bp, Homo sapien
gtagttttctggttagaatgcagtgcttaaaga

SEQ ID NO: 448348 - DNA, 33 bp, Homo sapien
gtagttttctggttaggatgcagtgcttaaaga

SEQ ID NO: 448349 - DNA, 33 bp, Homo sapien
tttacagaacgcttcaggttagccaagcgcttt

SEQ ID NO: 448350 - DNA, 33 bp, Homo sapien
tttacagaacgcttcatgttagccaagcgcttt

SEQ ID NO: 448351 - DNA, 33 bp, Homo sapien
tctctttatctctcgaccatgtccagtcaataa

SEQ ID NO: 448352 - DNA, 33 bp, Homo sapien
tctctttatctctcgatcatgtccagtcaataa

SEQ ID NO: 448353 - DNA, 33 bp, Homo sapien
cctctgggctgttccacgctcctggctcacttc

SEQ ID NO: 448354 - DNA, 33 bp, Homo sapien
cctctgggctgttccatgctcctggctcacttc

SEQ ID NO: 448355 - DNA, 33 bp, Homo sapien
ataagacagtagccacaaaagagaaaatggaat

SEQ ID NO: 448356 - DNA, 33 bp, Homo sapien
ataagacagtagccacgaaagagaaaatggaat

SEQ ID NO: 448357 - DNA, 33 bp, Homo sapien
ctttttttcttccagccagtcatttaaagttta

SEQ ID NO: 448358 - DNA, 33 bp, Homo sapien
ctttttttcttccagctagtcatttaaagttta

SEQ ID NO: 448359 - DNA, 33 bp, Homo sapien
tgatgagacacgttgaaatcataaaatatttca

SEQ ID NO: 448360 - DNA, 33 bp, Homo sapien
tgatgagacacgttgagatcataaaatatttca

SEQ ID NO: 448361 - DNA, 33 bp, Homo sapien
tttggaggtctggtaacaggtgctccaaccaat

SEQ ID NO: 448362 - DNA, 33 bp, Homo sapien
tttggaggtctggtaataggtgctccaaccaat

SEQ ID NO: 448363 - DNA, 33 bp, Homo sapien
ttctacctcaattatgcaatcttagcaagacta

SEQ ID NO: 448364 - DNA, 33 bp, Homo sapien
ttctacctcaattatgtaatcttagcaagacta

SEQ ID NO: 448365 - DNA, 33 bp, Homo sapien
tccgtgtgagtaggtaaaaggcatctctggcct

SEQ ID NO: 448366 - DNA, 33 bp, Homo sapien
tccgtgtgagtaggtagaaggcatctctggcct

SEQ ID NO: 448367 - DNA, 33 bp, Homo sapien
gcagggcggctaggaaagaatcactctcagtcc

SEQ ID NO: 448368 - DNA, 33 bp, Homo sapien
gcagggcggctaggaaggaatcactctcagtcc

SEQ ID NO: 448369 - DNA, 33 bp, Homo sapien
gttttcaaaatctaacagtaaaagagcaaacaa

SEQ ID NO: 448370 - DNA, 33 bp, Homo sapien
gttttcaaaatctaacggtaaaagagcaaacaa

SEQ ID NO: 448371 - DNA, 33 bp, Homo sapien
gaaaagcgtggcccaacgttgaacagagaagtg

SEQ ID NO: 448372 - DNA, 33 bp, Homo sapien
gaaaagcgtggcccaatgttgaacagagaagtg

SEQ ID NO: 448373 - DNA, 33 bp, Homo sapien
cacatcaggaaggcacactagggtccgagtggc

SEQ ID NO: 448374 - DNA, 33 bp, Homo sapien
cacatcaggaaggcacgctagggtccgagtggc

SEQ ID NO: 448375 - DNA, 33 bp, Homo sapien
gaagggaagagaggcacgatggaatacggtctc

SEQ ID NO: 448376 - DNA, 33 bp, Homo sapien
gaagggaagagaggcatgatggaatacggtctc

SEQ ID NO: 448377 - DNA, 33 bp, Homo sapien
atacgacccccaactaaattccagacaactgaa

SEQ ID NO: 448378 - DNA, 33 bp, Homo sapien
atacgacccccaactagattccagacaactgaa

SEQ ID NO: 448379 - DNA, 33 bp, Homo sapien
tataagtagacattgcactgttcacttttaaca

SEQ ID NO: 448380 - DNA, 33 bp, Homo sapien
tataagtagacattgccctgttcacttttaaca

SEQ ID NO: 448381 - DNA, 33 bp, Homo sapien
gggtttgggagagtgaacaccacggatggatta

SEQ ID NO: 448382 - DNA, 33 bp, Homo sapien
gggtttgggagagtgagcaccacggatggatta

SEQ ID NO: 448383 - DNA, 33 bp, Homo sapien
ttgtcatgatgatgccaagttgaaggaccattc

SEQ ID NO: 448384 - DNA, 33 bp, Homo sapien
ttgtcatgatgatgccgagttgaaggaccattc

SEQ ID NO: 448385 - DNA, 33 bp, Homo sapien
aattcaagatgggggaaagcccggaaaagcaac

SEQ ID NO: 448386 - DNA, 33 bp, Homo sapien
aattcaagatgggggatagcccggaaaagcaac

SEQ ID NO: 448387 - DNA, 33 bp, Homo sapien
tcctcacgtgttttaaacttttgaggaagctgg

SEQ ID NO: 448388 - DNA, 33 bp, Homo sapien
tcctcacgtgttttaatcttttgaggaagctgg

SEQ ID NO: 448389 - DNA, 33 bp, Homo sapien
aggatgagaaaactcaagtgggctcatacatca

SEQ ID NO: 448390 - DNA, 33 bp, Homo sapien
aggatgagaaaactcacgtgggctcatacatca

SEQ ID NO: 448391 - DNA, 33 bp, Homo sapien
accacatgaaaaataccacaatgcatggaacag

SEQ ID NO: 448392 - DNA, 33 bp, Homo sapien
accacatgaaaaatactacaatgcatggaacag

SEQ ID NO: 448393 - DNA, 33 bp, Homo sapien
tcttgctatttgccgacattgctaaggctttgt

SEQ ID NO: 448394 - DNA, 33 bp, Homo sapien
tcttgctatttgccgatattgctaaggctttgt

SEQ ID NO: 448395 - DNA, 33 bp, Homo sapien
ctctcctgtaccgtccgcttgtttggcttcatg

SEQ ID NO: 448396 - DNA, 33 bp, Homo sapien
ctctcctgtaccgtcctcttgtttggcttcatg

SEQ ID NO: 448397 - DNA, 33 bp, Homo sapien
ggaggaatgtagggagaagtagaatccaagaat

SEQ ID NO: 448398 - DNA, 33 bp, Homo sapien
ggaggaatgtagggaggagtagaatccaagaat

SEQ ID NO: 448399 - DNA, 33 bp, Homo sapien
tctttctctgttacagaccatacagcttgtcta

SEQ ID NO: 448400 - DNA, 33 bp, Homo sapien
tctttctctgttacaggccatacagcttgtcta

SEQ ID NO: 448401 - DNA, 33 bp, Homo sapien
gattgcttgatttaaaattggtcaaagagatga

SEQ ID NO: 448402 - DNA, 33 bp, Homo sapien
gattgcttgatttaaatttggtcaaagagatga

SEQ ID NO: 448403 - DNA, 33 bp, Homo sapien
tttcataccatttgccactttcgttactgtctc

SEQ ID NO: 448404 - DNA, 33 bp, Homo sapien
tttcataccatttgccgctttcgttactgtctc

SEQ ID NO: 448405 - DNA, 33 bp, Homo sapien
tccagactgagagagcactttaagaccatcaaa

SEQ ID NO: 448406 - DNA, 33 bp, Homo sapien
tccagactgagagagccctttaagaccatcaaa

SEQ ID NO: 448407 - DNA, 33 bp, Homo sapien
ttggtatcttttctagaacttcctaaacaccca

SEQ ID NO: 448408 - DNA, 33 bp, Homo sapien
ttggtatcttttctaggacttcctaaacaccca

SEQ ID NO: 448409 - DNA, 33 bp, Homo sapien
gacttcatcaataacactcaccagtctggaagg

SEQ ID NO: 448410 - DNA, 33 bp, Homo sapien
gacttcatcaataacattcaccagtctggaagg

SEQ ID NO: 448411 - DNA, 33 bp, Homo sapien
tgacttatggcaatgaacaatgtagcacaagcc

SEQ ID NO: 448412 - DNA, 33 bp, Homo sapien
tgacttatggcaatgagcaatgtagcacaagcc

SEQ ID NO: 448413 - DNA, 33 bp, Homo sapien
caagaataactgactcaaagtgtgtttacaagt

SEQ ID NO: 448414 - DNA, 33 bp, Homo sapien
caagaataactgactcgaagtgtgtttacaagt

SEQ ID NO: 448415 - DNA, 33 bp, Homo sapien
agcagtggctggattacagagtaagtgggaaat

SEQ ID NO: 448416 - DNA, 33 bp, Homo sapien
agcagtggctggattatagagtaagtgggaaat

SEQ ID NO: 448417 - DNA, 33 bp, Homo sapien
tgtctcaggataagtacgataggagatggcctt

SEQ ID NO: 448418 - DNA, 33 bp, Homo sapien
tgtctcaggataagtatgataggagatggcctt

SEQ ID NO: 448419 - DNA, 33 bp, Homo sapien
aacgtgatcttttccaagtggcgtctgtttggg

SEQ ID NO: 448420 - DNA, 33 bp, Homo sapien
aacgtgatcttttccacgtggcgtctgtttggg

SEQ ID NO: 448421 - DNA, 33 bp, Homo sapien
tttaggggaacattataactggtctactatttt

SEQ ID NO: 448422 - DNA, 33 bp, Homo sapien
tttaggggaacattatgactggtctactatttt

SEQ ID NO: 448423 - DNA, 33 bp, Homo sapien
atagtgatgagtattgcatgtgggtaccagagg

SEQ ID NO: 448424 - DNA, 33 bp, Homo sapien
atagtgatgagtattgtatgtgggtaccagagg

SEQ ID NO: 448425 - DNA, 33 bp, Homo sapien
tggtaggaatggaaaacctcctccagctcatcc

SEQ ID NO: 448426 - DNA, 33 bp, Homo sapien
tggtaggaatggaaaatctcctccagctcatcc

SEQ ID NO: 448427 - DNA, 33 bp, Homo sapien
gaatggatgaccccgaagtgtgacaacatctgc

SEQ ID NO: 448428 - DNA, 33 bp, Homo sapien
gaatggatgaccccgacgtgtgacaacatctgc

SEQ ID NO: 448429 - DNA, 33 bp, Homo sapien
gatctctgagtaaggacgtttgttttgtgtgca

SEQ ID NO: 448430 - DNA, 33 bp, Homo sapien
gatctctgagtaaggatgtttgttttgtgtgca

SEQ ID NO: 448431 - DNA, 33 bp, Homo sapien
gctttgtaggaccatacctgtgcagtgatacgt

SEQ ID NO: 448432 - DNA, 33 bp, Homo sapien
gctttgtaggaccatagctgtgcagtgatacgt

SEQ ID NO: 448433 - DNA, 33 bp, Homo sapien
tgcacttcaatggaaacaaaatctgggattctt

SEQ ID NO: 448434 - DNA, 33 bp, Homo sapien
tgcacttcaatggaaataaaatctgggattctt

SEQ ID NO: 448435 - DNA, 33 bp, Homo sapien
acattttgcttagggcccaaaaagaatcccaga

SEQ ID NO: 448436 - DNA, 33 bp, Homo sapien
acattttgcttagggctcaaaaagaatcccaga

SEQ ID NO: 448437 - DNA, 33 bp, Homo sapien
tatgcagagatgcttcactcaggtaagtggtaa

SEQ ID NO: 448438 - DNA, 33 bp, Homo sapien
tatgcagagatgcttcgctcaggtaagtggtaa

SEQ ID NO: 448439 - DNA, 33 bp, Homo sapien
ccggaatctagtcacaaggaaacctcagcaacc

SEQ ID NO: 448440 - DNA, 33 bp, Homo sapien
ccggaatctagtcacagggaaacctcagcaacc

SEQ ID NO: 448441 - DNA, 33 bp, Homo sapien
tattgtatatccataccataatgactatttggc

SEQ ID NO: 448442 - DNA, 33 bp, Homo sapien
tattgtatatccatacgataatgactatttggc

SEQ ID NO: 448443 - DNA, 33 bp, Homo sapien
gtatgggctttccttacactcaagatggattag

SEQ ID NO: 448444 - DNA, 33 bp, Homo sapien
gtatgggctttccttatactcaagatggattag

SEQ ID NO: 448445 - DNA, 33 bp, Homo sapien
gtgctctactgaaaaccccaggctgccgttcca

SEQ ID NO: 448446 - DNA, 33 bp, Homo sapien
gtgctctactgaaaacgccaggctgccgttcca

SEQ ID NO: 448447 - DNA, 33 bp, Homo sapien
ctagaaattaaacagaaaaatgacacatccagt

SEQ ID NO: 448448 - DNA, 33 bp, Homo sapien
ctagaaattaaacagagaaatgacacatccagt

SEQ ID NO: 448449 - DNA, 33 bp, Homo sapien
gaatcctgatgaagtcagaagttgattccactc

SEQ ID NO: 448450 - DNA, 33 bp, Homo sapien
gaatcctgatgaagtcggaagttgattccactc

SEQ ID NO: 448451 - DNA, 33 bp, Homo sapien
tatcctgactaatgcaaattgatttctgatgct

SEQ ID NO: 448452 - DNA, 33 bp, Homo sapien
tatcctgactaatgcagattgatttctgatgct

SEQ ID NO: 448453 - DNA, 33 bp, Homo sapien
agaggcatctgccatgaataaggagaggcgagc

SEQ ID NO: 448454 - DNA, 33 bp, Homo sapien
agaggcatctgccatggataaggagaggcgagc

SEQ ID NO: 448455 - DNA, 33 bp, Homo sapien
tcttaaatatggctgacagaaacgagctaaaat

SEQ ID NO: 448456 - DNA, 33 bp, Homo sapien
tcttaaatatggctgagagaaacgagctaaaat

SEQ ID NO: 448457 - DNA, 33 bp, Homo sapien
aaggctaagtcctcgccattaaatgatcaatga

SEQ ID NO: 448458 - DNA, 33 bp, Homo sapien
aaggctaagtcctcgctattaaatgatcaatga

SEQ ID NO: 448459 - DNA, 33 bp, Homo sapien
taaatgctggtaataaaattagtgaagttgcca

SEQ ID NO: 448460 - DNA, 33 bp, Homo sapien
taaatgctggtaataagattagtgaagttgcca

SEQ ID NO: 448461 - DNA, 33 bp, Homo sapien
tgacaatttaagtatcactgacttgtccttatc

SEQ ID NO: 448462 - DNA, 33 bp, Homo sapien
tgacaatttaagtatctctgacttgtccttatc

SEQ ID NO: 448463 - DNA, 33 bp, Homo sapien
gaaaacctgcaccaaaccaagtaagagccacag

SEQ ID NO: 448464 - DNA, 33 bp, Homo sapien
gaaaacctgcaccaaatcaagtaagagccacag

SEQ ID NO: 448465 - DNA, 33 bp, Homo sapien
ccctttatccctaagtaaatgatgtacctactg

SEQ ID NO: 448466 - DNA, 33 bp, Homo sapien
ccctttatccctaagtgaatgatgtacctactg

SEQ ID NO: 448467 - DNA, 33 bp, Homo sapien
gctgtctttggcaccacatcgttgtcacccctc

SEQ ID NO: 448468 - DNA, 33 bp, Homo sapien
gctgtctttggcaccatatcgttgtcacccctc

SEQ ID NO: 448469 - DNA, 33 bp, Homo sapien
tccttctcccctgcaccaacgtcttccactctc

SEQ ID NO: 448470 - DNA, 33 bp, Homo sapien
tccttctcccctgcactaacgtcttccactctc

SEQ ID NO: 448471 - DNA, 33 bp, Homo sapien
cattagggttttcagaagtttgaaaattgaagg

SEQ ID NO: 448472 - DNA, 33 bp, Homo sapien
cattagggttttcagaggtttgaaaattgaagg

SEQ ID NO: 448473 - DNA, 33 bp, Homo sapien
ctacacctgggaactccagatagcactgcagcc

SEQ ID NO: 448474 - DNA, 33 bp, Homo sapien
ctacacctgggaactctagatagcactgcagcc

SEQ ID NO: 448475 - DNA, 33 bp, Homo sapien
gactgtatttaagagaaccttattcaacatgtc

SEQ ID NO: 448476 - DNA, 33 bp, Homo sapien
gactgtatttaagagacccttattcaacatgtc

SEQ ID NO: 448477 - DNA, 33 bp, Homo sapien
cagccctaggtgttatcaaccccatttgccaag

SEQ ID NO: 448478 - DNA, 33 bp, Homo sapien
cagccctaggtgttattaaccccatttgccaag

SEQ ID NO: 448479 - DNA, 33 bp, Homo sapien
catttgttactctgtcaatcttaatagcagccc

SEQ ID NO: 448480 - DNA, 33 bp, Homo sapien
catttgttactctgtcgatcttaatagcagccc

SEQ ID NO: 448481 - DNA, 33 bp, Homo sapien
acagtacatgattttacaggacagttagagtag

SEQ ID NO: 448482 - DNA, 33 bp, Homo sapien
acagtacatgattttataggacagttagagtag

SEQ ID NO: 448483 - DNA, 33 bp, Homo sapien
tggttcagtaaaaatacaagccacttcatgaca

SEQ ID NO: 448484 - DNA, 33 bp, Homo sapien
tggttcagtaaaaatataagccacttcatgaca

SEQ ID NO: 448485 - DNA, 33 bp, Homo sapien
atgagagtgagcagaacaagaaagagaaggagc

SEQ ID NO: 448486 - DNA, 33 bp, Homo sapien
atgagagtgagcagaagaagaaagagaaggagc

SEQ ID NO: 448487 - DNA, 33 bp, Homo sapien
atgactggggaagtagaatccggctaaggggga

SEQ ID NO: 448488 - DNA, 33 bp, Homo sapien
atgactggggaagtagtatccggctaaggggga

SEQ ID NO: 448489 - DNA, 33 bp, Homo sapien
tagagagtgtcggaacaactgagaaactctagc

SEQ ID NO: 448490 - DNA, 33 bp, Homo sapien
tagagagtgtcggaaccactgagaaactctagc

SEQ ID NO: 448491 - DNA, 33 bp, Homo sapien
tggctccagggaacccaaagtaacatcacagcc

SEQ ID NO: 448492 - DNA, 33 bp, Homo sapien
tggctccagggaacccgaagtaacatcacagcc

SEQ ID NO: 448493 - DNA, 33 bp, Homo sapien
gcaagtcgtttgataaatgggccaatagagtat

SEQ ID NO: 448494 - DNA, 33 bp, Homo sapien
gcaagtcgtttgataagtgggccaatagagtat

SEQ ID NO: 448495 - DNA, 33 bp, Homo sapien
aaagacttcacactaacacagacaaatgtgaaa

SEQ ID NO: 448496 - DNA, 33 bp, Homo sapien
aaagacttcacactaatacagacaaatgtgaaa

SEQ ID NO: 448497 - DNA, 33 bp, Homo sapien
agctactcagctctggaaaagttcagtataatg

SEQ ID NO: 448498 - DNA, 33 bp, Homo sapien
agctactcagctctgggaaagttcagtataatg

SEQ ID NO: 448499 - DNA, 33 bp, Homo sapien
ctgaggtctttaaaaacggacacgtagtgcagt

SEQ ID NO: 448500 - DNA, 33 bp, Homo sapien
ctgaggtctttaaaaatggacacgtagtgcagt

SEQ ID NO: 448501 - DNA, 33 bp, Homo sapien
gctgtcattttctagtaacaccttatgactcag

SEQ ID NO: 448502 - DNA, 33 bp, Homo sapien
gctgtcattttctagtgacaccttatgactcag

SEQ ID NO: 448503 - DNA, 33 bp, Homo sapien
ggttgtgctctgtagacaagtgccctggggagg

SEQ ID NO: 448504 - DNA, 33 bp, Homo sapien
ggttgtgctctgtagagaagtgccctggggagg

SEQ ID NO: 448505 - DNA, 33 bp, Homo sapien
gctgggagtgagatacgcaaaggaaaacaggga

SEQ ID NO: 448506 - DNA, 33 bp, Homo sapien
gctgggagtgagatactcaaaggaaaacaggga

SEQ ID NO: 448507 - DNA, 33 bp, Homo sapien
agagagggtttgcgctaaagctcagagtaaaag

SEQ ID NO: 448508 - DNA, 33 bp, Homo sapien
agagagggtttgcgctgaagctcagagtaaaag

SEQ ID NO: 448509 - DNA, 33 bp, Homo sapien
aggcccccaatagtaccaaacccgcgtgttcat

SEQ ID NO: 448510 - DNA, 33 bp, Homo sapien
aggcccccaatagtactaaacccgcgtgttcat

SEQ ID NO: 448511 - DNA, 33 bp, Homo sapien
attaaagaggtggagaagagatcagtaattttc

SEQ ID NO: 448512 - DNA, 33 bp, Homo sapien
attaaagaggtggagatgagatcagtaattttc

SEQ ID NO: 448513 - DNA, 33 bp, Homo sapien
ctggatggcttgacttcaaaggggaagcacaaa

SEQ ID NO: 448514 - DNA, 33 bp, Homo sapien
ctggatggcttgactttaaaggggaagcacaaa

SEQ ID NO: 448515 - DNA, 33 bp, Homo sapien
agttgcaaaaatagtacagaaagatcctatgaa

SEQ ID NO: 448516 - DNA, 33 bp, Homo sapien
agttgcaaaaatagtagagaaagatcctatgaa

SEQ ID NO: 448517 - DNA, 33 bp, Homo sapien
agaatttcttaatggaacaactatctgaccaaa

SEQ ID NO: 448518 - DNA, 33 bp, Homo sapien
agaatttcttaatggagcaactatctgaccaaa

SEQ ID NO: 448519 - DNA, 33 bp, Homo sapien
gtggaaactcctttcccctggagctctcccagg

SEQ ID NO: 448520 - DNA, 33 bp, Homo sapien
gtggaaactcctttcctctggagctctcccagg

SEQ ID NO: 448521 - DNA, 33 bp, Homo sapien
aaaagaaagaaaatgcaatggttggcatgtgtt

SEQ ID NO: 448522 - DNA, 33 bp, Homo sapien
aaaagaaagaaaatgcgatggttggcatgtgtt

SEQ ID NO: 448523 - DNA, 33 bp, Homo sapien
tctcatgaacagcatgcagtatccctgtggatt

SEQ ID NO: 448524 - DNA, 33 bp, Homo sapien
tctcatgaacagcatgtagtatccctgtggatt

SEQ ID NO: 448525 - DNA, 33 bp, Homo sapien
cgcattgagcaacataacacttccctctcaggt

SEQ ID NO: 448526 - DNA, 33 bp, Homo sapien
cgcattgagcaacataccacttccctctcaggt

SEQ ID NO: 448527 - DNA, 33 bp, Homo sapien; identical to SEQ ID NO: 448525

SEQ ID NO: 448528 - DNA, 33 bp, Homo sapien; identical to SEQ ID NO: 448526

SEQ ID NO: 448529 - DNA, 33 bp, Homo sapien
aactacaggctactccgcagagacaagtatttt

SEQ ID NO: 448530 - DNA, 33 bp, Homo sapien
aactacaggctactcctcagagacaagtatttt

SEQ ID NO: 448531 - DNA, 33 bp, Homo sapien
atctgccactcagataagaaaaaggtgcagatt

SEQ ID NO: 448532 - DNA, 33 bp, Homo sapien
atctgccactcagataggaaaaaggtgcagatt

SEQ ID NO: 448533 - DNA, 33 bp, Homo sapien
ggctctcgcccagcccagatgagagcactggga

SEQ ID NO: 448534 - DNA, 33 bp, Homo sapien
ggctctcgcccagcccggatgagagcactggga

SEQ ID NO: 448535 - DNA, 33 bp, Homo sapien
tgaattgtagatgcaccgagtgggcctctcctc

SEQ ID NO: 448536 - DNA, 33 bp, Homo sapien
tgaattgtagatgcactgagtgggcctctcctc

SEQ ID NO: 448537 - DNA, 33 bp, Homo sapien
gaagctgcctggttgcaaaacactcaccaaagt

SEQ ID NO: 448538 - DNA, 33 bp, Homo sapien
gaagctgcctggttgcgaaacactcaccaaagt

SEQ ID NO: 448539 - DNA, 33 bp, Homo sapien
ccccatttcttgagtccctttcagtttggagga

SEQ ID NO: 448540 - DNA, 33 bp, Homo sapien
ccccatttcttgagtctctttcagtttggagga

SEQ ID NO: 448541 - DNA, 33 bp, Homo sapien
ctgtcagtcctggagactccccagatgcttcct

SEQ ID NO: 448542 - DNA, 33 bp, Homo sapien
ctgtcagtcctggagattccccagatgcttcct

SEQ ID NO: 448543 - DNA, 33 bp, Homo sapien
ccctaactcctccatcaactacctgaatacgtg

SEQ ID NO: 448544 - DNA, 33 bp, Homo sapien
ccctaactcctccatcgactacctgaatacgtg

SEQ ID NO: 448545 - DNA, 33 bp, Homo sapien
atttttttctctcaccacctggagagcaaaagc

SEQ ID NO: 448546 - DNA, 33 bp, Homo sapien
atttttttctctcaccgcctggagagcaaaagc

SEQ ID NO: 448547 - DNA, 33 bp, Homo sapien
gctcctgaattatacacgcagctgcctccttga

SEQ ID NO: 448548 - DNA, 33 bp, Homo sapien
gctcctgaattatacatgcagctgcctccttga

SEQ ID NO: 448549 - DNA, 33 bp, Homo sapien
ctaaaatactgaaagcaaaactatgagagagga

SEQ ID NO: 448550 - DNA, 33 bp, Homo sapien
ctaaaatactgaaagcgaaactatgagagagga

SEQ ID NO: 448551 - DNA, 33 bp, Homo sapien
agttatagtgaagttagagaggtctccaaatca

SEQ ID NO: 448552 - DNA, 33 bp, Homo sapien
agttatagtgaagttatagaggtctccaaatca

SEQ ID NO: 448553 - DNA, 33 bp, Homo sapien
tttcaggtaccctgagccagtggttcatgtccc

SEQ ID NO: 448554 - DNA, 33 bp, Homo sapien
tttcaggtaccctgagtcagtggttcatgtccc

SEQ ID NO: 448555 - DNA, 33 bp, Homo sapien
ttacacctgcaccttgcagaaaagctagaggca

SEQ ID NO: 448556 - DNA, 33 bp, Homo sapien
ttacacctgcaccttgtagaaaagctagaggca

SEQ ID NO: 448557 - DNA, 33 bp, Homo sapien
tgtcaagaaatagaccccatcgtggtacatggc

SEQ ID NO: 448558 - DNA, 33 bp, Homo sapien
tgtcaagaaatagacctcatcgtggtacatggc

SEQ ID NO: 448559 - DNA, 33 bp, Homo sapien
gtttcagccagaaagacgacaggaagtatggct

SEQ ID NO: 448560 - DNA, 33 bp, Homo sapien
gtttcagccagaaagatgacaggaagtatggct

SEQ ID NO: 448561 - DNA, 33 bp, Homo sapien
ctgcagatagagaaaaaatccccttgagagaaa

SEQ ID NO: 448562 - DNA, 33 bp, Homo sapien
ctgcagatagagaaaagatccccttgagagaaa

SEQ ID NO: 448563 - DNA, 33 bp, Homo sapien
aaattatcaaggactagtacacacgggcctgga

SEQ ID NO: 448564 - DNA, 33 bp, Homo sapien
aaattatcaaggactattacacacgggcctgga

SEQ ID NO: 448565 - DNA, 33 bp, Homo sapien
tcataaaactctgcaactctaaacacttgcaca

SEQ ID NO: 448566 - DNA, 33 bp, Homo sapien
tcataaaactctgcaattctaaacacttgcaca

SEQ ID NO: 448567 - DNA, 33 bp, Homo sapien
atacttagaagatgtcaatgaggagcttttaat

SEQ ID NO: 448568 - DNA, 33 bp, Homo sapien
atacttagaagatgtcgatgaggagcttttaat

SEQ ID NO: 448569 - DNA, 33 bp, Homo sapien
ttacttctgccaatgccagttgctctgtgtagg

SEQ ID NO: 448570 - DNA, 33 bp, Homo sapien
ttacttctgccaatgcgagttgctctgtgtagg

SEQ ID NO: 448571 - DNA, 33 bp, Homo sapien
gactgctccttggactcagctgccacatttcaa

SEQ ID NO: 448572 - DNA, 33 bp, Homo sapien
gactgctccttggacttagctgccacatttcaa

SEQ ID NO: 448573 - DNA, 33 bp, Homo sapien
ttttcatccgtcagtaaccctagcacttttcca

SEQ ID NO: 448574 - DNA, 33 bp, Homo sapien
ttttcatccgtcagtatccctagcacttttcca

SEQ ID NO: 448575 - DNA, 33 bp, Homo sapien
gcctgaacagaatctgaagagacctaaataaat

SEQ ID NO: 448576 - DNA, 33 bp, Homo sapien
gcctgaacagaatctggagagacctaaataaat

SEQ ID NO: 448577 - DNA, 33 bp, Homo sapien
agattgctctaccaagaattccaaagcctattc

SEQ ID NO: 448578 - DNA, 33 bp, Homo sapien
agattgctctaccaagcattccaaagcctattc

SEQ ID NO: 448579 - DNA, 33 bp, Homo sapien
aaagccagcattaatgcagtgtcttttaggctg

SEQ ID NO: 448580 - DNA, 33 bp, Homo sapien
aaagccagcattaatgtagtgtcttttaggctg

SEQ ID NO: 448581 - DNA, 33 bp, Homo sapien
aatagtgaaattggacagacaaaaaatttgcag

SEQ ID NO: 448582 - DNA, 33 bp, Homo sapien
aatagtgaaattggactgacaaaaaatttgcag

SEQ ID NO: 448583 - DNA, 33 bp, Homo sapien
gagatactatcaaagacggctgggtgagcagga

SEQ ID NO: 448584 - DNA, 33 bp, Homo sapien
gagatactatcaaagatggctgggtgagcagga

SEQ ID NO: 448585 - DNA, 33 bp, Homo sapien
tacagaatattgcacacctatcacaggatgagt

SEQ ID NO: 448586 - DNA, 33 bp, Homo sapien
tacagaatattgcacatctatcacaggatgagt

SEQ ID NO: 448587 - DNA, 33 bp, Homo sapien
tgaataatacagcgtgaataagtaggttcccca

SEQ ID NO: 448588 - DNA, 33 bp, Homo sapien
tgaataatacagcgtggataagtaggttcccca

SEQ ID NO: 448589 - DNA, 33 bp, Homo sapien
tcaaattttttaagtacctgatgatctggagaa

SEQ ID NO: 448590 - DNA, 33 bp, Homo sapien
tcaaattttttaagtatctgatgatctggagaa

SEQ ID NO: 448591 - DNA, 33 bp, Homo sapien
caagcaggccacaacaacctgtttcataacttg

SEQ ID NO: 448592 - DNA, 33 bp, Homo sapien
caagcaggccacaacatcctgtttcataacttg

SEQ ID NO: 448593 - DNA, 33 bp, Homo sapien
aagcttttggtcttcactatgtcatgcaagctt

SEQ ID NO: 448594 - DNA, 33 bp, Homo sapien
aagcttttggtcttcagtatgtcatgcaagctt

SEQ ID NO: 448595 - DNA, 33 bp, Homo sapien
cttttcccagtgcaacaggaagaacattggcaa

SEQ ID NO: 448596 - DNA, 33 bp, Homo sapien
cttttcccagtgcaaccggaagaacattggcaa

SEQ ID NO: 448597 - DNA, 33 bp, Homo sapien
gtggttcacatgagaaagtgcatcgtggggctg

SEQ ID NO: 448598 - DNA, 33 bp, Homo sapien
gtggttcacatgagaacgtgcatcgtggggctg

SEQ ID NO: 448599 - DNA, 33 bp, Homo sapien
tatcataaagatttggcataacatggtaagaac

SEQ ID NO: 448600 - DNA, 33 bp, Homo sapien
tatcataaagatttggtataacatggtaagaac

SEQ ID NO: 448601 - DNA, 33 bp, Homo sapien
tgggttcacaaactcccgagacaggcagtgcag

SEQ ID NO: 448602 - DNA, 33 bp, Homo sapien
tgggttcacaaactcctgagacaggcagtgcag

SEQ ID NO: 448603 - DNA, 33 bp, Homo sapien
tgccttacgccatgctcaataaattgtagttat

SEQ ID NO: 448604 - DNA, 33 bp, Homo sapien
tgccttacgccatgcttaataaattgtagttat

SEQ ID NO: 448605 - DNA, 33 bp, Homo sapien
agagatcaccagtgaactctgggctgatagaag

SEQ ID NO: 448606 - DNA, 33 bp, Homo sapien
agagatcaccagtgaattctgggctgatagaag

SEQ ID NO: 448607 - DNA, 33 bp, Homo sapien
tgtgctgggcgtcaaacaaagtgcagaaatgag

SEQ ID NO: 448608 - DNA, 33 bp, Homo sapien
tgtgctgggcgtcaaagaaagtgcagaaatgag

SEQ ID NO: 448609 - DNA, 33 bp, Homo sapien
gtgtggcagaggaaagacgcaaacccagcacca

SEQ ID NO: 448610 - DNA, 33 bp, Homo sapien
gtgtggcagaggaaagtcgcaaacccagcacca

SEQ ID NO: 448611 - DNA, 33 bp, Homo sapien
catagcagctttcttacgtttcctcaaaaatga

SEQ ID NO: 448612 - DNA, 33 bp, Homo sapien
catagcagctttcttatgtttcctcaaaaatga

SEQ ID NO: 448613 - DNA, 33 bp, Homo sapien
cctggcctcactgttacgatagcattttgggta

SEQ ID NO: 448614 - DNA, 33 bp, Homo sapien
cctggcctcactgttatgatagcattttgggta

SEQ ID NO: 448615 - DNA, 33 bp, Homo sapien
aagacagaagatacaaagacttgagaaatcgct

SEQ ID NO: 448616 - DNA, 33 bp, Homo sapien
aagacagaagatacaacgacttgagaaatcgct

SEQ ID NO: 448617 - DNA, 33 bp, Homo sapien
tccttcctctacaaaactttacctatatctgtt

SEQ ID NO: 448618 - DNA, 33 bp, Homo sapien
tccttcctctacaaaagtttacctatatctgtt

SEQ ID NO: 448619 - DNA, 33 bp, Homo sapien
taaggattgtgctccacatagaaaagagctgca

SEQ ID NO: 448620 - DNA, 33 bp, Homo sapien
taaggattgtgctccatatagaaaagagctgca

SEQ ID NO: 448621 - DNA, 33 bp, Homo sapien
gaaataaacaagactgacaaaatgggagaagaa

SEQ ID NO: 448622 - DNA, 33 bp, Homo sapien
gaaataaacaagactgccaaaatgggagaagaa

SEQ ID NO: 448623 - DNA, 33 bp, Homo sapien
taccattcagtctcaccatttagagcagaagaa

SEQ ID NO: 448624 - DNA, 33 bp, Homo sapien
taccattcagtctcactatttagagcagaagaa

SEQ ID NO: 448625 - DNA, 33 bp, Homo sapien
acttcaccttttcaccaacttgaagagttatct

SEQ ID NO: 448626 - DNA, 33 bp, Homo sapien
acttcaccttttcaccgacttgaagagttatct

SEQ ID NO: 448627 - DNA, 33 bp, Homo sapien
atgtctttttatgtcacgaaattccctcttttt

SEQ ID NO: 448628 - DNA, 33 bp, Homo sapien
atgtctttttatgtcatgaaattccctcttttt

SEQ ID NO: 448629 - DNA, 33 bp, Homo sapien
tcttggtactgaatagaaagagcctcctggaat

SEQ ID NO: 448630 - DNA, 33 bp, Homo sapien
tcttggtactgaataggaagagcctcctggaat

SEQ ID NO: 448631 - DNA, 33 bp, Homo sapien
agtgaactttaagttacgtcaatacaaaatatc

SEQ ID NO: 448632 - DNA, 33 bp, Homo sapien
agtgaactttaagttaggtcaatacaaaatatc

SEQ ID NO: 448633 - DNA, 33 bp, Homo sapien
ctctttacatctcacgaaaacctaatctgaagt

SEQ ID NO: 448634 - DNA, 33 bp, Homo sapien
ctctttacatctcacggaaacctaatctgaagt

SEQ ID NO: 448635 - DNA, 33 bp, Homo sapien
gggtccataagcattcaaatagatgatcctatc

SEQ ID NO: 448636 - DNA, 33 bp, Homo sapien
gggtccataagcattccaatagatgatcctatc

SEQ ID NO: 448637 - DNA, 33 bp, Homo sapien
tcttcatcaatggaaaatgaagatgttatgttt

SEQ ID NO: 448638 - DNA, 33 bp, Homo sapien
tcttcatcaatggaaagtgaagatgttatgttt

SEQ ID NO: 448639 - DNA, 33 bp, Homo sapien
tttcacgttttgagaacctattggtgtagtaaa

SEQ ID NO: 448640 - DNA, 33 bp, Homo sapien
tttcacgttttgagaagctattggtgtagtaaa

SEQ ID NO: 448641 - DNA, 33 bp, Homo sapien
attcagcctggaatcacatttctcatcatcagg

SEQ ID NO: 448642 - DNA, 33 bp, Homo sapien
attcagcctggaatcatatttctcatcatcagg

SEQ ID NO: 448643 - DNA, 33 bp, Homo sapien
gcatttatacttccccaaatcgaacattttaat

SEQ ID NO: 448644 - DNA, 33 bp, Homo sapien
gcatttatacttcccctaatcgaacattttaat

SEQ ID NO: 448645 - DNA, 33 bp, Homo sapien
atccactgaatctgtccactaaggtatgtctaa

SEQ ID NO: 448646 - DNA, 33 bp, Homo sapien
atccactgaatctgtctactaaggtatgtctaa

SEQ ID NO: 448647 - DNA, 33 bp, Homo sapien
ctatcttctgtcttctcaactgggaaggacatt

SEQ ID NO: 448648 - DNA, 33 bp, Homo sapien
ctatcttctgtcttcttaactgggaaggacatt

SEQ ID NO: 448649 - DNA, 33 bp, Homo sapien
ctccaaccatccatccacaaccgtgggactggt

SEQ ID NO: 448650 - DNA, 33 bp, Homo sapien
ctccaaccatccatccgcaaccgtgggactggt

SEQ ID NO: 448651 - DNA, 33 bp, Homo sapien
taacattttaaaaggccgaagaagcaaacacac

SEQ ID NO: 448652 - DNA, 33 bp, Homo sapien
taacattttaaaaggctgaagaagcaaacacac

SEQ ID NO: 448653 - DNA, 33 bp, Homo sapien
tggaaatttcacaatgccatcgtgttagaaaag

SEQ ID NO: 448654 - DNA, 33 bp, Homo sapien
tggaaatttcacaatgtcatcgtgttagaaaag

SEQ ID NO: 448655 - DNA, 33 bp, Homo sapien
ttgcccctctatattgcacaacttatggcatga

SEQ ID NO: 448656 - DNA, 33 bp, Homo sapien
ttgcccctctatattggacaacttatggcatga

SEQ ID NO: 448657 - DNA, 33 bp, Homo sapien
acaacttcagtgctgtgaatgtttgtgttcctg

SEQ ID NO: 448658 - DNA, 33 bp, Homo sapien
acaacttcagtgctgttaatgtttgtgttcctg

SEQ ID NO: 448659 - DNA, 33 bp, Homo sapien
actccaggtaggtgtaagcattcaccctgtgat

SEQ ID NO: 448660 - DNA, 33 bp, Homo sapien
actccaggtaggtgtaggcattcaccctgtgat

SEQ ID NO: 448661 - DNA, 33 bp, Homo sapien
ggagcaggtgggacaccatcatactgcatacac

SEQ ID NO: 448662 - DNA, 33 bp, Homo sapien
ggagcaggtgggacactatcatactgcatacac

SEQ ID NO: 448663 - DNA, 33 bp, Homo sapien
agtcacagacatttaaactggttacatgccagt

SEQ ID NO: 448664 - DNA, 33 bp, Homo sapien
agtcacagacatttaatctggttacatgccagt

SEQ ID NO: 448665 - DNA, 33 bp, Homo sapien
ggggagagagggagggaatcgaggtggcttgtg

SEQ ID NO: 448666 - DNA, 33 bp, Homo sapien
ggggagagagggagggtatcgaggtggcttgtg

SEQ ID NO: 448667 - DNA, 33 bp, Homo sapien
agccataggcagcagaaactttggagccaaagc

SEQ ID NO: 448668 - DNA, 33 bp, Homo sapien
agccataggcagcagagactttggagccaaagc

SEQ ID NO: 448669 - DNA, 33 bp, Homo sapien
tgactggattacaacacattgccttgtaaaaat

SEQ ID NO: 448670 - DNA, 33 bp, Homo sapien
tgactggattacaacagattgccttgtaaaaat

SEQ ID NO: 448671 - DNA, 33 bp, Homo sapien
ccaaagtgctgagataaatcacgcccggctgat

SEQ ID NO: 448672 - DNA, 33 bp, Homo sapien
ccaaagtgctgagatagatcacgcccggctgat

SEQ ID NO: 448673 - DNA, 33 bp, Homo sapien
gaatcacttgagcctcagagctggagtttgcag

SEQ ID NO: 448674 - DNA, 33 bp, Homo sapien
gaatcacttgagcctcggagctggagtttgcag

SEQ ID NO: 448675 - DNA, 33 bp, Homo sapien
aaatcaacgggtataactgtggattgtgtattt

SEQ ID NO: 448676 - DNA, 33 bp, Homo sapien
aaatcaacgggtataattgtggattgtgtattt

SEQ ID NO: 448677 - DNA, 33 bp, Homo sapien
gtccaccccaaacgaacagaatacacatttttt

SEQ ID NO: 448678 - DNA, 33 bp, Homo sapien
gtccaccccaaacgaagagaatacacatttttt

SEQ ID NO: 448679 - DNA, 33 bp, Homo sapien
gatcgggtgatcaggacagacatcggaggagat

SEQ ID NO: 448680 - DNA, 33 bp, Homo sapien
gatcgggtgatcaggagagacatcggaggagat

SEQ ID NO: 448681 - DNA, 33 bp, Homo sapien
acgaacaagacagaaaatgttctatgcacatgg

SEQ ID NO: 448682 - DNA, 33 bp, Homo sapien
acgaacaagacagaaagtgttctatgcacatgg

SEQ ID NO: 448683 - DNA, 33 bp, Homo sapien
tgttaatgagtgttcaatcagcattagtgaatt

SEQ ID NO: 448684 - DNA, 33 bp, Homo sapien
tgttaatgagtgttcagtcagcattagtgaatt

SEQ ID NO: 448685 - DNA, 33 bp, Homo sapien
gtgatcagggtgatgaagccaaactgggctata

SEQ ID NO: 448686 - DNA, 33 bp, Homo sapien
gtgatcagggtgatgaggccaaactgggctata

SEQ ID NO: 448687 - DNA, 33 bp, Homo sapien
tttcaaagaatgtgtcaagtccaagcaaacttt

SEQ ID NO: 448688 - DNA, 33 bp, Homo sapien
tttcaaagaatgtgtcgagtccaagcaaacttt

SEQ ID NO: 448689 - DNA, 33 bp, Homo sapien
tcttttaatgtaaggaagacgttttatctgtcc

SEQ ID NO: 448690 - DNA, 33 bp, Homo sapien
tcttttaatgtaaggatgacgttttatctgtcc

SEQ ID NO: 448691 - DNA, 33 bp, Homo sapien
gtcctgtggctggaacactgaagatgtgagctt

SEQ ID NO: 448692 - DNA, 33 bp, Homo sapien
gtcctgtggctggaaccctgaagatgtgagctt

SEQ ID NO: 448693 - DNA, 33 bp, Homo sapien
tgaccaaaatttaccacgattttcctgattctg

SEQ ID NO: 448694 - DNA, 33 bp, Homo sapien
tgaccaaaatttaccatgattttcctgattctg

SEQ ID NO: 448695 - DNA, 33 bp, Homo sapien
taacaagttgcactgacattgaactagaaggaa

SEQ ID NO: 448696 - DNA, 33 bp, Homo sapien
taacaagttgcactgagattgaactagaaggaa

SEQ ID NO: 448697 - DNA, 33 bp, Homo sapien
ttgtgcaggtagtcaaagtattagtaattctga

SEQ ID NO: 448698 - DNA, 33 bp, Homo sapien
ttgtgcaggtagtcaaggtattagtaattctga

SEQ ID NO: 448699 - DNA, 33 bp, Homo sapien
actaaaatcaagttaacgtttgagtggtatgtt

SEQ ID NO: 448700 - DNA, 33 bp, Homo sapien
actaaaatcaagttaatgtttgagtggtatgtt

SEQ ID NO: 448701 - DNA, 33 bp, Homo sapien
caggccaacattccaaatcctgtggccaatcat

SEQ ID NO: 448702 - DNA, 33 bp, Homo sapien
caggccaacattccaactcctgtggccaatcat

SEQ ID NO: 448703 - DNA, 33 bp, Homo sapien
gttggtgcatcttgaaacttaaaccacctagaa

SEQ ID NO: 448704 - DNA, 33 bp, Homo sapien
gttggtgcatcttgaatcttaaaccacctagaa

SEQ ID NO: 448705 - DNA, 33 bp, Homo sapien
ttaaaatcatccttaacatccctgctgcattct

SEQ ID NO: 448706 - DNA, 33 bp, Homo sapien
ttaaaatcatccttaatatccctgctgcattct

SEQ ID NO: 448707 - DNA, 33 bp, Homo sapien
aaccaggtcaaaaaaggcctcaagaactaactg

SEQ ID NO: 448708 - DNA, 33 bp, Homo sapien
aaccaggtcaaaaaagtcctcaagaactaactg

SEQ ID NO: 448709 - DNA, 33 bp, Homo sapien
tagtcactgttggaacccatgcaatgataatat

SEQ ID NO: 448710 - DNA, 33 bp, Homo sapien
tagtcactgttggaactcatgcaatgataatat

SEQ ID NO: 448711 - DNA, 33 bp, Homo sapien
ctttcagggcctaataaagcttcttttcatata

SEQ ID NO: 448712 - DNA, 33 bp, Homo sapien
ctttcagggcctaatacagcttcttttcatata

SEQ ID NO: 448713 - DNA, 33 bp, Homo sapien
aactcagcaacttctacgataaaaaggtcctgg

SEQ ID NO: 448714 - DNA, 33 bp, Homo sapien
aactcagcaacttctatgataaaaaggtcctgg

SEQ ID NO: 448715 - DNA, 33 bp, Homo sapien
ttaggtaagaaccatccagacatctgaaatgca

SEQ ID NO: 448716 - DNA, 33 bp, Homo sapien
ttaggtaagaaccatcgagacatctgaaatgca

SEQ ID NO: 448717 - DNA, 33 bp, Homo sapien
tgttattctgtgctcaataagtgaaaatggaga

SEQ ID NO: 448718 - DNA, 33 bp, Homo sapien
tgttattctgtgctcagtaagtgaaaatggaga

SEQ ID NO: 448719 - DNA, 33 bp, Homo sapien
atttctgttcttcaaaatgtccccaccatcctg

SEQ ID NO: 448720 - DNA, 33 bp, Homo sapien
atttctgttcttcaaagtgtccccaccatcctg

SEQ ID NO: 448721 - DNA, 33 bp, Homo sapien
actgcatgaggtaataaatgtttgtcgttttat

SEQ ID NO: 448722 - DNA, 33 bp, Homo sapien
actgcatgaggtaatacatgtttgtcgttttat

SEQ ID NO: 448723 - DNA, 33 bp, Homo sapien
tcacatttgctaagtcccttttgctgtgtaatg

SEQ ID NO: 448724 - DNA, 33 bp, Homo sapien
tcacatttgctaagtcgcttttgctgtgtaatg

SEQ ID NO: 448725 - DNA, 33 bp, Homo sapien
tggccatattgctccaccctctggttctgtgat

SEQ ID NO: 448726 - DNA, 33 bp, Homo sapien
tggccatattgctccatcctctggttctgtgat

SEQ ID NO: 448727 - DNA, 33 bp, Homo sapien
cagatgctgcttagaccggggggccacaagctt

SEQ ID NO: 448728 - DNA, 33 bp, Homo sapien
cagatgctgcttagactggggggccacaagctt

SEQ ID NO: 448729 - DNA, 33 bp, Homo sapien
gactaaacgaaggttacgctgcaaaagaaagac

SEQ ID NO: 448730 - DNA, 33 bp, Homo sapien
gactaaacgaaggttatgctgcaaaagaaagac

SEQ ID NO: 448731 - DNA, 33 bp, Homo sapien
tccagacacagtgtagacaacctagacaaccaa

SEQ ID NO: 448732 - DNA, 33 bp, Homo sapien
tccagacacagtgtagccaacctagacaaccaa

SEQ ID NO: 448733 - DNA, 33 bp, Homo sapien
tattacaattgtcttgaagtaccacgaaccggg

SEQ ID NO: 448734 - DNA, 33 bp, Homo sapien
tattacaattgtcttggagtaccacgaaccggg

SEQ ID NO: 448735 - DNA, 33 bp, Homo sapien
tttaaacactttgtgaaggtattagacaaaata

SEQ ID NO: 448736 - DNA, 33 bp, Homo sapien
tttaaacactttgtgagggtattagacaaaata

SEQ ID NO: 448737 - DNA, 33 bp, Homo sapien
ctcccctccttggcataaaaggctttggaagtc

SEQ ID NO: 448738 - DNA, 33 bp, Homo sapien
ctcccctccttggcatgaaaggctttggaagtc

SEQ ID NO: 448739 - DNA, 33 bp, Homo sapien
ctgggctgagcaaccaacaaaagctgacaaatt

SEQ ID NO: 448740 - DNA, 33 bp, Homo sapien
ctgggctgagcaaccagcaaaagctgacaaatt

SEQ ID NO: 448741 - DNA, 33 bp, Homo sapien
aatctaatgatatctgaaaagcaaagaaaaagg

SEQ ID NO: 448742 - DNA, 33 bp, Homo sapien
aatctaatgatatctggaaagcaaagaaaaagg

SEQ ID NO: 448743 - DNA, 33 bp, Homo sapien
gatgaattgttttaaacgctaagaggagtgtga

SEQ ID NO: 448744 - DNA, 33 bp, Homo sapien
gatgaattgttttaaatgctaagaggagtgtga

SEQ ID NO: 448745 - DNA, 33 bp, Homo sapien
tgtattgggtgtgaagccaacaatgtttccaat

SEQ ID NO: 448746 - DNA, 33 bp, Homo sapien
tgtattgggtgtgaagtcaacaatgtttccaat

SEQ ID NO: 448747 - DNA, 33 bp, Homo sapien
aaagaagaggaagggacacttacaggtgccaat

SEQ ID NO: 448748 - DNA, 33 bp, Homo sapien
aaagaagaggaagggagacttacaggtgccaat

SEQ ID NO: 448749 - DNA, 33 bp, Homo sapien
tcaaaaggacacagtgaagtcattaaaaaccag

SEQ ID NO: 448750 - DNA, 33 bp, Homo sapien
tcaaaaggacacagtgcagtcattaaaaaccag

SEQ ID NO: 448751 - DNA, 33 bp, Homo sapien
gtgaaaggaatttcaacgctgatagtatattag

SEQ ID NO: 448752 - DNA, 33 bp, Homo sapien
gtgaaaggaatttcaatgctgatagtatattag

SEQ ID NO: 448753 - DNA, 33 bp, Homo sapien
tggttgtgtcatattcaaattttaattgctgtg

SEQ ID NO: 448754 - DNA, 33 bp, Homo sapien
tggttgtgtcatattcgaattttaattgctgtg

SEQ ID NO: 448755 - DNA, 33 bp, Homo sapien
gttgtatgcaggataactgtgtcatgtcaggtg

SEQ ID NO: 448756 - DNA, 33 bp, Homo sapien
gttgtatgcaggataattgtgtcatgtcaggtg

SEQ ID NO: 448757 - DNA, 33 bp, Homo sapien
tgatattttatttatcacaaaaggcttctgtag

SEQ ID NO: 448758 - DNA, 33 bp, Homo sapien
tgatattttatttatctcaaaaggcttctgtag

SEQ ID NO: 448759 - DNA, 33 bp, Homo sapien
ataatttagtgctttcaataactgatatgggaa

SEQ ID NO: 448760 - DNA, 33 bp, Homo sapien
ataatttagtgctttcgataactgatatgggaa

SEQ ID NO: 448761 - DNA, 33 bp, Homo sapien
ttgcaacaggctcctagtagcttctctgcctct

SEQ ID NO: 448762 - DNA, 33 bp, Homo sapien
ttgcaacaggctcctattagcttctctgcctct

SEQ ID NO: 448763 - DNA, 33 bp, Homo sapien
accaagacaaggaatgcatgagatggagcaggt

SEQ ID NO: 448764 - DNA, 33 bp, Homo sapien
accaagacaaggaatgtatgagatggagcaggt

SEQ ID NO: 448765 - DNA, 33 bp, Homo sapien
ttatagtttgtctacccacaaattgacagagac

SEQ ID NO: 448766 - DNA, 33 bp, Homo sapien
ttatagtttgtctacctacaaattgacagagac

SEQ ID NO: 448767 - DNA, 33 bp, Homo sapien
ctctgaaatctccccggaagccaaaactttctg

SEQ ID NO: 448768 - DNA, 33 bp, Homo sapien
ctctgaaatctccccgtaagccaaaactttctg

SEQ ID NO: 448769 - DNA, 33 bp, Homo sapien
attcgagaacggaaagaatcctgagagttacac

SEQ ID NO: 448770 - DNA, 33 bp, Homo sapien
attcgagaacggaaagtatcctgagagttacac

SEQ ID NO: 448771 - DNA, 33 bp, Homo sapien
ccttgttggattgtacccatcagtaagcctctt

SEQ ID NO: 448772 - DNA, 33 bp, Homo sapien
ccttgttggattgtacgcatcagtaagcctctt

SEQ ID NO: 448773 - DNA, 33 bp, Homo sapien
gatctttgaggacaaaggagatgccctgaatga

SEQ ID NO: 448774 - DNA, 33 bp, Homo sapien
gatctttgaggacaaatgagatgccctgaatga

SEQ ID NO: 448775 - DNA, 33 bp, Homo sapien
atcttcacatcaatacaaaattacttaaacatt

SEQ ID NO: 448776 - DNA, 33 bp, Homo sapien
atcttcacatcaatacgaaattacttaaacatt

SEQ ID NO: 448777 - DNA, 33 bp, Homo sapien
gaaaacccgatattagaaagaccatctatctac

SEQ ID NO: 448778 - DNA, 33 bp, Homo sapien
gaaaacccgatattaggaagaccatctatctac

SEQ ID NO: 448779 - DNA, 33 bp, Homo sapien
catttctgaactctccacttcaagacttctacc

SEQ ID NO: 448780 - DNA, 33 bp, Homo sapien
catttctgaactctccgcttcaagacttctacc

SEQ ID NO: 448781 - DNA, 33 bp, Homo sapien
ttcctgataccttgtaaagatggagataaaagg

SEQ ID NO: 448782 - DNA, 33 bp, Homo sapien
ttcctgataccttgtagagatggagataaaagg

SEQ ID NO: 448783 - DNA, 33 bp, Homo sapien
attagtatcagaaagaagccattgttaattgat

SEQ ID NO: 448784 - DNA, 33 bp, Homo sapien
attagtatcagaaagaggccattgttaattgat

SEQ ID NO: 448785 - DNA, 33 bp, Homo sapien
tcatcttgctgatttcacacctctattttttgc

SEQ ID NO: 448786 - DNA, 33 bp, Homo sapien
tcatcttgctgatttcgcacctctattttttgc

SEQ ID NO: 448787 - DNA, 33 bp, Homo sapien
attcacttaatggtgacctgtaagtctggtagg

SEQ ID NO: 448788 - DNA, 33 bp, Homo sapien
attcacttaatggtgatctgtaagtctggtagg

SEQ ID NO: 448789 - DNA, 33 bp, Homo sapien
taggcaatacaatgcaagacaaaggcatgggca

SEQ ID NO: 448790 - DNA, 33 bp, Homo sapien
taggcaatacaatgcaggacaaaggcatgggca

SEQ ID NO: 448791 - DNA, 33 bp, Homo sapien
acccatacaacggaacacaagacacatacacac

SEQ ID NO: 448792 - DNA, 33 bp, Homo sapien
acccatacaacggaacgcaagacacatacacac

SEQ ID NO: 448793 - DNA, 33 bp, Homo sapien
acccttcatcccctagaaagcactattctagcc

SEQ ID NO: 448794 - DNA, 33 bp, Homo sapien
acccttcatcccctagcaagcactattctagcc

SEQ ID NO: 448795 - DNA, 33 bp, Homo sapien
ttgatgtaatgaagtccaatcagtatctatgca

SEQ ID NO: 448796 - DNA, 33 bp, Homo sapien
ttgatgtaatgaagtctaatcagtatctatgca

SEQ ID NO: 448797 - DNA, 33 bp, Homo sapien
aggcatttagccgagtaaaagaatccatcaagt

SEQ ID NO: 448798 - DNA, 33 bp, Homo sapien
aggcatttagccgagtgaaagaatccatcaagt

SEQ ID NO: 448799 - DNA, 33 bp, Homo sapien
ttccttgtgtaagttacgttgcatttgtattta

SEQ ID NO: 448800 - DNA, 33 bp, Homo sapien
ttccttgtgtaagttaggttgcatttgtattta

SEQ ID NO: 448801 - DNA, 33 bp, Homo sapien
gacttaattgttgcaccagaggaaaaatcgtgt

SEQ ID NO: 448802 - DNA, 33 bp, Homo sapien
gacttaattgttgcactagaggaaaaatcgtgt

SEQ ID NO: 448803 - DNA, 33 bp, Homo sapien
gaatttcgatactgaaaggctaaatgtacactt

SEQ ID NO: 448804 - DNA, 33 bp, Homo sapien
gaatttcgatactgaagggctaaatgtacactt

SEQ ID NO: 448805 - DNA, 33 bp, Homo sapien
ctttgccatattaaaaatgtgaacagaagcatt

SEQ ID NO: 448806 - DNA, 33 bp, Homo sapien
ctttgccatattaaaactgtgaacagaagcatt

SEQ ID NO: 448807 - DNA, 33 bp, Homo sapien
cagaatgcaggagaataaagttgctctcaccct

SEQ ID NO: 448808 - DNA, 33 bp, Homo sapien
cagaatgcaggagaatgaagttgctctcaccct

SEQ ID NO: 448809 - DNA, 33 bp, Homo sapien
tacagtaagcaagttgaaaaagatggcatctta

SEQ ID NO: 448810 - DNA, 33 bp, Homo sapien
tacagtaagcaagttggaaaagatggcatctta

SEQ ID NO: 448811 - DNA, 33 bp, Homo sapien
tactttcatggctaaacgtgttgactgaataca

SEQ ID NO: 448812 - DNA, 33 bp, Homo sapien
tactttcatggctaaatgtgttgactgaataca

SEQ ID NO: 448813 - DNA, 33 bp, Homo sapien
gtctgcatgtgatacaatgacatagacctacac

SEQ ID NO: 448814 - DNA, 33 bp, Homo sapien
gtctgcatgtgatacagtgacatagacctacac

SEQ ID NO: 448815 - DNA, 33 bp, Homo sapien
ttttgcaaagggtcagaatcgtttcatattttc

SEQ ID NO: 448816 - DNA, 33 bp, Homo sapien
ttttgcaaagggtcaggatcgtttcatattttc

SEQ ID NO: 448817 - DNA, 33 bp, Homo sapien
aggcataataatggaacagaacggaaggccatg

SEQ ID NO: 448818 - DNA, 33 bp, Homo sapien
aggcataataatggaagagaacggaaggccatg

SEQ ID NO: 448819 - DNA, 33 bp, Homo sapien
aggtgcctttagagaaacttccatggagtctga

SEQ ID NO: 448820 - DNA, 33 bp, Homo sapien
aggtgcctttagagaaccttccatggagtctga

SEQ ID NO: 448821 - DNA, 33 bp, Homo sapien
ctcaacagtgcagaaacgtgctcaccaaaaaga

SEQ ID NO: 448822 - DNA, 33 bp, Homo sapien
ctcaacagtgcagaaatgtgctcaccaaaaaga

SEQ ID NO: 448823 - DNA, 33 bp, Homo sapien
agataacgccttctgacagtagaccaccctact

SEQ ID NO: 448824 - DNA, 33 bp, Homo sapien
agataacgccttctgagagtagaccaccctact

SEQ ID NO: 448825 - DNA, 33 bp, Homo sapien
cctccctaagaaaataacacttctacaatgtta

SEQ ID NO: 448826 - DNA, 33 bp, Homo sapien
cctccctaagaaaatagcacttctacaatgtta

SEQ ID NO: 448827 - DNA, 33 bp, Homo sapien
tggattaaagatttaaatgtaaggaatgtatag

SEQ ID NO: 448828 - DNA, 33 bp, Homo sapien
tggattaaagatttaagtgtaaggaatgtatag

SEQ ID NO: 448829 - DNA, 33 bp, Homo sapien
gggaaaaaatggactacacaatactgttaagaa

SEQ ID NO: 448830 - DNA, 33 bp, Homo sapien
gggaaaaaatggactatacaatactgttaagaa

SEQ ID NO: 448831 - DNA, 33 bp, Homo sapien
tctctatgtccataccacctttgcaatgtgact

SEQ ID NO: 448832 - DNA, 33 bp, Homo sapien
tctctatgtccatacctcctttgcaatgtgact

SEQ ID NO: 448833 - DNA, 33 bp, Homo sapien
ttccctctgtacctcacgtttggcaacgccatc

SEQ ID NO: 448834 - DNA, 33 bp, Homo sapien
ttccctctgtacctcatgtttggcaacgccatc

SEQ ID NO: 448835 - DNA, 33 bp, Homo sapien
ctcacaaatgggtacaagtgaaactgttacatt

SEQ ID NO: 448836 - DNA, 33 bp, Homo sapien
ctcacaaatgggtacaggtgaaactgttacatt

SEQ ID NO: 448837 - DNA, 33 bp, Homo sapien
tgcatggatgtcctacacagaacttcattcaca

SEQ ID NO: 448838 - DNA, 33 bp, Homo sapien
tgcatggatgtcctacgcagaacttcattcaca

SEQ ID NO: 448839 - DNA, 33 bp, Homo sapien
gatagatgccagagagcacaatagctagatcat

SEQ ID NO: 448840 - DNA, 33 bp, Homo sapien
gatagatgccagagagtacaatagctagatcat

SEQ ID NO: 448841 - DNA, 33 bp, Homo sapien
tgcccctctcatctggaagtgacatccagttcc

SEQ ID NO: 448842 - DNA, 33 bp, Homo sapien
tgcccctctcatctgggagtgacatccagttcc

SEQ ID NO: 448843 - DNA, 33 bp, Homo sapien
ttatgcataagtaaatcagcacacaaaaattga

SEQ ID NO: 448844 - DNA, 33 bp, Homo sapien
ttatgcataagtaaatgagcacacaaaaattga

SEQ ID NO: 448845 - DNA, 33 bp, Homo sapien
ttttttgaggtgtatgcacccagcagtggggtt

SEQ ID NO: 448846 - DNA, 33 bp, Homo sapien
ttttttgaggtgtatgtacccagcagtggggtt

SEQ ID NO: 448847 - DNA, 33 bp, Homo sapien
agggactgaatttaatcagacatcgttagttct

SEQ ID NO: 448848 - DNA, 33 bp, Homo sapien
agggactgaatttaattagacatcgttagttct

SEQ ID NO: 448849 - DNA, 33 bp, Homo sapien
ttggctaccttgaagcaacattcatttttaccc

SEQ ID NO: 448850 - DNA, 33 bp, Homo sapien
ttggctaccttgaagcgacattcatttttaccc

SEQ ID NO: 448851 - DNA, 33 bp, Homo sapien
atgatcagagaaaagacatttgggtacaaatac

SEQ ID NO: 448852 - DNA, 33 bp, Homo sapien
atgatcagagaaaagagatttgggtacaaatac

SEQ ID NO: 448853 - DNA, 33 bp, Homo sapien
gaataaaggagatacaaaaaagtatgctgaagg

SEQ ID NO: 448854 - DNA, 33 bp, Homo sapien
gaataaaggagatacagaaaagtatgctgaagg

SEQ ID NO: 448855 - DNA, 33 bp, Homo sapien
ggcatttcacattcaaagaaagtctgtgccaag

SEQ ID NO: 448856 - DNA, 33 bp, Homo sapien
ggcatttcacattcaaggaaagtctgtgccaag

SEQ ID NO: 448857 - DNA, 33 bp, Homo sapien
gtaatctatggcactaacatctaattatgattc

SEQ ID NO: 448858 - DNA, 33 bp, Homo sapien
gtaatctatggcactagcatctaattatgattc

SEQ ID NO: 448859 - DNA, 33 bp, Homo sapien
tattgttgatatttaacagagcaagtgtttgtt

SEQ ID NO: 448860 - DNA, 33 bp, Homo sapien
tattgttgatatttaatagagcaagtgtttgtt

SEQ ID NO: 448861 - DNA, 33 bp, Homo sapien
aactgctgattattccaatggagaatttagcag

SEQ ID NO: 448862 - DNA, 33 bp, Homo sapien
aactgctgattattccgatggagaatttagcag

SEQ ID NO: 448863 - DNA, 33 bp, Homo sapien
acatattgtaggacaaagagtgtatgcttagtg

SEQ ID NO: 448864 - DNA, 33 bp, Homo sapien
acatattgtaggacaacgagtgtatgcttagtg

SEQ ID NO: 448865 - DNA, 33 bp, Homo sapien
caaagaaggagtaagaaggcaaatgagttgttg

SEQ ID NO: 448866 - DNA, 33 bp, Homo sapien
caaagaaggagtaagagggcaaatgagttgttg

SEQ ID NO: 448867 - DNA, 33 bp, Homo sapien
cctgtgggcccctgagccgttgctaacaaataa

SEQ ID NO: 448868 - DNA, 33 bp, Homo sapien
cctgtgggcccctgaggcgttgctaacaaataa

SEQ ID NO: 448869 - DNA, 33 bp, Homo sapien
attagacactcgagtacactgataaataagaca

SEQ ID NO: 448870 - DNA, 33 bp, Homo sapien
attagacactcgagtatactgataaataagaca

SEQ ID NO: 448871 - DNA, 33 bp, Homo sapien
aggtcatggcttatcacagatgccctgctaatg

SEQ ID NO: 448872 - DNA, 33 bp, Homo sapien
aggtcatggcttatcatagatgccctgctaatg

SEQ ID NO: 448873 - DNA, 33 bp, Homo sapien
gcaattacctgtgcacaaacacggctgtctgca

SEQ ID NO: 448874 - DNA, 33 bp, Homo sapien
gcaattacctgtgcacgaacacggctgtctgca

SEQ ID NO: 448875 - DNA, 33 bp, Homo sapien
gtcaacattaacatccaccactttgcactgttg

SEQ ID NO: 448876 - DNA, 33 bp, Homo sapien
gtcaacattaacatccgccactttgcactgttg

SEQ ID NO: 448877 - DNA, 33 bp, Homo sapien
cttccagggtagaaatgaaacaccggcgagcag

SEQ ID NO: 448878 - DNA, 33 bp, Homo sapien
cttccagggtagaaattaaacaccggcgagcag

SEQ ID NO: 448879 - DNA, 33 bp, Homo sapien
cattagcattaaatcacagcctggatgctaaat

SEQ ID NO: 448880 - DNA, 33 bp, Homo sapien
cattagcattaaatcagagcctggatgctaaat

SEQ ID NO: 448881 - DNA, 33 bp, Homo sapien
gaactgagtccgcaaccacaaggtgccttgcag

SEQ ID NO: 448882 - DNA, 33 bp, Homo sapien
gaactgagtccgcaactacaaggtgccttgcag

SEQ ID NO: 448883 - DNA, 33 bp, Homo sapien
ctttgcctatttttaactgggctgtctttttgt

SEQ ID NO: 448884 - DNA, 33 bp, Homo sapien
ctttgcctatttttaagtgggctgtctttttgt

SEQ ID NO: 448885 - DNA, 33 bp, Homo sapien
aggacatgttataaaaatattgttccttatgac

SEQ ID NO: 448886 - DNA, 33 bp, Homo sapien
aggacatgttataaaactattgttccttatgac

SEQ ID NO: 448887 - DNA, 33 bp, Homo sapien
gagataaactttcagacgctgaagccccagaga

SEQ ID NO: 448888 - DNA, 33 bp, Homo sapien
gagataaactttcagatgctgaagccccagaga

SEQ ID NO: 448889 - DNA, 33 bp, Homo sapien
acttgccaggctagtaccaatcggttggtttta

SEQ ID NO: 448890 - DNA, 33 bp, Homo sapien
acttgccaggctagtagcaatcggttggtttta

SEQ ID NO: 448891 - DNA, 33 bp, Homo sapien
attttattttatgccaaagtttattcccatgat

SEQ ID NO: 448892 - DNA, 33 bp, Homo sapien
attttattttatgccagagtttattcccatgat

SEQ ID NO: 448893 - DNA, 33 bp, Homo sapien
tccaaagagatagtgacaaaacagatatttaag

SEQ ID NO: 448894 - DNA, 33 bp, Homo sapien
tccaaagagatagtgagaaaacagatatttaag

SEQ ID NO: 448895 - DNA, 33 bp, Homo sapien
tctgtttgtgaccaaacgtccgaggcagccaga

SEQ ID NO: 448896 - DNA, 33 bp, Homo sapien
tctgtttgtgaccaaaggtccgaggcagccaga

SEQ ID NO: 448897 - DNA, 33 bp, Homo sapien
tggagtccacgcccaacaaacttcacagaagcc

SEQ ID NO: 448898 - DNA, 33 bp, Homo sapien
tggagtccacgcccaataaacttcacagaagcc

SEQ ID NO: 448899 - DNA, 33 bp, Homo sapien
gtgaggaattctccccaatgctggtgtgaaagt

SEQ ID NO: 448900 - DNA, 33 bp, Homo sapien
gtgaggaattctccccgatgctggtgtgaaagt

SEQ ID NO: 448901 - DNA, 33 bp, Homo sapien
ctgacgccaacctgccaccctattacttcatgg

SEQ ID NO: 448902 - DNA, 33 bp, Homo sapien
ctgacgccaacctgcctccctattacttcatgg

SEQ ID NO: 448903 - DNA, 33 bp, Homo sapien
atgtttcactggaagagtaagtatactgattat

SEQ ID NO: 448904 - DNA, 33 bp, Homo sapien
atgtttcactggaagattaagtatactgattat

SEQ ID NO: 448905 - DNA, 33 bp, Homo sapien
gcaattcaaacacatcaccaggcttcactttta

SEQ ID NO: 448906 - DNA, 33 bp, Homo sapien
gcaattcaaacacatcgccaggcttcactttta

SEQ ID NO: 448907 - DNA, 33 bp, Homo sapien
tgtctgtattcagacaaacattaacaatttcct

SEQ ID NO: 448908 - DNA, 33 bp, Homo sapien
tgtctgtattcagacagacattaacaatttcct

SEQ ID NO: 448909 - DNA, 33 bp, Homo sapien
ttatgagagagtggcaagagataaaagagagga

SEQ ID NO: 448910 - DNA, 33 bp, Homo sapien
ttatgagagagtggcaggagataaaagagagga

SEQ ID NO: 448911 - DNA, 33 bp, Homo sapien
aacgaagcactccaaagatttcatttcacttac

SEQ ID NO: 448912 - DNA, 33 bp, Homo sapien
aacgaagcactccaaatatttcatttcacttac

SEQ ID NO: 448913 - DNA, 33 bp, Homo sapien
gtgcctttctcctgacagggtggggagaacact

SEQ ID NO: 448914 - DNA, 33 bp, Homo sapien
gtgcctttctcctgacggggtggggagaacact

SEQ ID NO: 448915 - DNA, 33 bp, Homo sapien
taggtgtacggaaaatcagggaggctcctttct

SEQ ID NO: 448916 - DNA, 33 bp, Homo sapien
taggtgtacggaaaattagggaggctcctttct

SEQ ID NO: 448917 - DNA, 33 bp, Homo sapien
ttatagcacaactgaaatattttacaacttaaa

SEQ ID NO: 448918 - DNA, 33 bp, Homo sapien
ttatagcacaactgaagtattttacaacttaaa

SEQ ID NO: 448919 - DNA, 33 bp, Homo sapien
aatatgaagctagaacccaatgggacctagata

SEQ ID NO: 448920 - DNA, 33 bp, Homo sapien
aatatgaagctagaactcaatgggacctagata

SEQ ID NO: 448921 - DNA, 33 bp, Homo sapien
tatgagtatgaatgtaacactctgttcagtgca

SEQ ID NO: 448922 - DNA, 33 bp, Homo sapien
tatgagtatgaatgtaccactctgttcagtgca

SEQ ID NO: 448923 - DNA, 33 bp, Homo sapien
tatatgaatttgggggaacataaatattcagaa

SEQ ID NO: 448924 - DNA, 33 bp, Homo sapien
tatatgaatttgggggtacataaatattcagaa

SEQ ID NO: 448925 - DNA, 33 bp, Homo sapien
ttccatagcatcccaacaagagaccaccaagcc

SEQ ID NO: 448926 - DNA, 33 bp, Homo sapien
ttccatagcatcccaagaagagaccaccaagcc

SEQ ID NO: 448927 - DNA, 33 bp, Homo sapien
acaggaaatgaaccaccacatcctggtacaggc

SEQ ID NO: 448928 - DNA, 33 bp, Homo sapien
acaggaaatgaaccactacatcctggtacaggc

SEQ ID NO: 448929 - DNA, 33 bp, Homo sapien
aagggatgcaaccgtaagccactccgtcgtcac

SEQ ID NO: 448930 - DNA, 33 bp, Homo sapien
aagggatgcaaccgtacgccactccgtcgtcac

SEQ ID NO: 448931 - DNA, 33 bp, Homo sapien
aggagaggaaagtcctcaagaatcagcttacaa

SEQ ID NO: 448932 - DNA, 33 bp, Homo sapien
aggagaggaaagtccttaagaatcagcttacaa

SEQ ID NO: 448933 - DNA, 33 bp, Homo sapien
agaagtcaaaatactcacgtttgtacccatctg

SEQ ID NO: 448934 - DNA, 33 bp, Homo sapien
agaagtcaaaatactcgcgtttgtacccatctg

SEQ ID NO: 448935 - DNA, 33 bp, Homo sapien
aacctgcatgggttcccgaaggtggcacagtct

SEQ ID NO: 448936 - DNA, 33 bp, Homo sapien
aacctgcatgggttccggaaggtggcacagtct

SEQ ID NO: 448937 - DNA, 33 bp, Homo sapien
gtcctgtggctatcaaaaccgtctttatatcac

SEQ ID NO: 448938 - DNA, 33 bp, Homo sapien
gtcctgtggctatcaacaccgtctttatatcac

SEQ ID NO: 448939 - DNA, 33 bp, Homo sapien
ggatcggcacatccaacggaagcctggaagctc

SEQ ID NO: 448940 - DNA, 33 bp, Homo sapien
ggatcggcacatccaatggaagcctggaagctc

SEQ ID NO: 448941 - DNA, 33 bp, Homo sapien
ttgcttttatggagaaatggatttatggaagtc

SEQ ID NO: 448942 - DNA, 33 bp, Homo sapien
ttgcttttatggagaagtggatttatggaagtc

SEQ ID NO: 448943 - DNA, 33 bp, Homo sapien
gaccgcccagatctataactgaccatgaagaaa

SEQ ID NO: 448944 - DNA, 33 bp, Homo sapien
gaccgcccagatctatgactgaccatgaagaaa

SEQ ID NO: 448945 - DNA, 33 bp, Homo sapien
caattccacagcgtcccgacaaccggcatctta

SEQ ID NO: 448946 - DNA, 33 bp, Homo sapien
caattccacagcgtcctgacaaccggcatctta

SEQ ID NO: 448947 - DNA, 33 bp, Homo sapien
cttgatgcagtagaaacaaaaggaaagaaacaa

SEQ ID NO: 448948 - DNA, 33 bp, Homo sapien
cttgatgcagtagaaataaaaggaaagaaacaa

SEQ ID NO: 448949 - DNA, 33 bp, Homo sapien
tcagtgcaggactaacaaaaggactgttccaaa

SEQ ID NO: 448950 - DNA, 33 bp, Homo sapien
tcagtgcaggactaacgaaaggactgttccaaa

SEQ ID NO: 448951 - DNA, 33 bp, Homo sapien
attcaaagctgtactaaaagaccaagcaatgtg

SEQ ID NO: 448952 - DNA, 33 bp, Homo sapien
attcaaagctgtactacaagaccaagcaatgtg

SEQ ID NO: 448953 - DNA, 33 bp, Homo sapien
agatgaagcaatgcagcccaggatgtataatgg

SEQ ID NO: 448954 - DNA, 33 bp, Homo sapien
agatgaagcaatgcagtccaggatgtataatgg

SEQ ID NO: 448955 - DNA, 33 bp, Homo sapien
acaagttcactaattcaaggagcggaagatcat

SEQ ID NO: 448956 - DNA, 33 bp, Homo sapien
acaagttcactaattcgaggagcggaagatcat

SEQ ID NO: 448957 - DNA, 33 bp, Homo sapien
ctgtttcatgttcttcaaactctactcgataac

SEQ ID NO: 448958 - DNA, 33 bp, Homo sapien
ctgtttcatgttcttcgaactctactcgataac

SEQ ID NO: 448959 - DNA, 33 bp, Homo sapien
agagggttataaaagaatacttccagagagcag

SEQ ID NO: 448960 - DNA, 33 bp, Homo sapien
agagggttataaaagagtacttccagagagcag

SEQ ID NO: 448961 - DNA, 33 bp, Homo sapien
tttctatctctcactccatttgaccgctgcatt

SEQ ID NO: 448962 - DNA, 33 bp, Homo sapien
tttctatctctcactctatttgaccgctgcatt

SEQ ID NO: 448963 - DNA, 33 bp, Homo sapien
ttctaacattccctaccggcttggtgaccttat

SEQ ID NO: 448964 - DNA, 33 bp, Homo sapien
ttctaacattccctactggcttggtgaccttat

SEQ ID NO: 448965 - DNA, 33 bp, Homo sapien
gggggcttccaaagacaagctaagtgcccaata

SEQ ID NO: 448966 - DNA, 33 bp, Homo sapien
gggggcttccaaagacgagctaagtgcccaata

SEQ ID NO: 448967 - DNA, 33 bp, Homo sapien
tattagttaagttcttcaaatctccaagaattc

SEQ ID NO: 448968 - DNA, 33 bp, Homo sapien
tattagttaagttctttaaatctccaagaattc

SEQ ID NO: 448969 - DNA, 33 bp, Homo sapien
ttgaagggaatcacagcaagatccttgggtgtg

SEQ ID NO: 448970 - DNA, 33 bp, Homo sapien
ttgaagggaatcacagtaagatccttgggtgtg

SEQ ID NO: 448971 - DNA, 33 bp, Homo sapien
agaggaaagaagctgacgcaaacatcccttcct

SEQ ID NO: 448972 - DNA, 33 bp, Homo sapien
agaggaaagaagctgatgcaaacatcccttcct

SEQ ID NO: 448973 - DNA, 33 bp, Homo sapien
ggtggtaatgattttccattcaccgtggatttc

SEQ ID NO: 448974 - DNA, 33 bp, Homo sapien
ggtggtaatgattttctattcaccgtggatttc

SEQ ID NO: 448975 - DNA, 33 bp, Homo sapien
ttcctctccgaacacaaatttgcatatgtcttc

SEQ ID NO: 448976 - DNA, 33 bp, Homo sapien
ttcctctccgaacacagatttgcatatgtcttc

SEQ ID NO: 448977 - DNA, 33 bp, Homo sapien
caggtggaggggtttgaatgtgtacttttgaga

SEQ ID NO: 448978 - DNA, 33 bp, Homo sapien
caggtggaggggtttggatgtgtacttttgaga

SEQ ID NO: 448979 - DNA, 33 bp, Homo sapien
gtctacttttgggtgccgaattgtggtgtcaaa

SEQ ID NO: 448980 - DNA, 33 bp, Homo sapien
gtctacttttgggtgctgaattgtggtgtcaaa

SEQ ID NO: 448981 - DNA, 33 bp, Homo sapien
caccaactgtctccctcagcgagaatccaagtg

SEQ ID NO: 448982 - DNA, 33 bp, Homo sapien
caccaactgtctcccttagcgagaatccaagtg

SEQ ID NO: 448983 - DNA, 33 bp, Homo sapien
ctctgactcgtagaacaatcttcactaagtttt

SEQ ID NO: 448984 - DNA, 33 bp, Homo sapien
ctctgactcgtagaacgatcttcactaagtttt

SEQ ID NO: 448985 - DNA, 33 bp, Homo sapien
ctacagaaactttgcccggaaaagtagtgactc

SEQ ID NO: 448986 - DNA, 33 bp, Homo sapien
ctacagaaactttgcctggaaaagtagtgactc

SEQ ID NO: 448987 - DNA, 33 bp, Homo sapien
ctttaattttcaatcccgatccgtactacttct

SEQ ID NO: 448988 - DNA, 33 bp, Homo sapien
ctttaattttcaatcctgatccgtactacttct

SEQ ID NO: 448989 - DNA, 33 bp, Homo sapien
tttcagcttattgaaacaggcttcccatatgga

SEQ ID NO: 448990 - DNA, 33 bp, Homo sapien
tttcagcttattgaaagaggcttcccatatgga

SEQ ID NO: 448991 - DNA, 33 bp, Homo sapien
ccactccagagtaaacacattgctatctttttc

SEQ ID NO: 448992 - DNA, 33 bp, Homo sapien
ccactccagagtaaactcattgctatctttttc

SEQ ID NO: 448993 - DNA, 33 bp, Homo sapien
actattgtctgattcaccattacagtaaccacc

SEQ ID NO: 448994 - DNA, 33 bp, Homo sapien
actattgtctgattcatcattacagtaaccacc

SEQ ID NO: 448995 - DNA, 33 bp, Homo sapien
ccatccaggtttctgcaaataccattattttct

SEQ ID NO: 448996 - DNA, 33 bp, Homo sapien
ccatccaggtttctgcgaataccattattttct

SEQ ID NO: 448997 - DNA, 33 bp, Homo sapien
gagaagtttccaaccacgtttatcggatgctga

SEQ ID NO: 448998 - DNA, 33 bp, Homo sapien
gagaagtttccaaccaggtttatcggatgctga

SEQ ID NO: 448999 - DNA, 33 bp, Homo sapien
aatgtggtcggcctacaatttgtaaatgagtct

SEQ ID NO: 449000 - DNA, 33 bp, Homo sapien
aatgtggtcggcctactatttgtaaatgagtct

SEQ ID NO: 449001 - DNA, 33 bp, Homo sapien
atgttatttaaagaaagattttgatgccaagac

SEQ ID NO: 449002 - DNA, 33 bp, Homo sapien
atgttatttaaagaaatattttgatgccaagac

SEQ ID NO: 449003 - DNA, 33 bp, Homo sapien
agtccaatgcaggctaaagatacctcacgttgg

SEQ ID NO: 449004 - DNA, 33 bp, Homo sapien
agtccaatgcaggctacagatacctcacgttgg

SEQ ID NO: 449005 - DNA, 33 bp, Homo sapien
tggacaaccatttattaaaaaagcctctcataa

SEQ ID NO: 449006 - DNA, 33 bp, Homo sapien
tggacaaccatttatttaaaaagcctctcataa

SEQ ID NO: 449007 - DNA, 33 bp, Homo sapien
agggtgccaagggacaagatactcacgttgggc

SEQ ID NO: 449008 - DNA, 33 bp, Homo sapien
agggtgccaagggacaggatactcacgttgggc

SEQ ID NO: 449009 - DNA, 33 bp, Homo sapien
gggagtctgaatttgccgaacaaaggtgagtat

SEQ ID NO: 449010 - DNA, 33 bp, Homo sapien
gggagtctgaatttgctgaacaaaggtgagtat

SEQ ID NO: 449011 - DNA, 33 bp, Homo sapien
tgctccagctgcttcagcccatcttggcaactt

SEQ ID NO: 449012 - DNA, 33 bp, Homo sapien
tgctccagctgcttcatcccatcttggcaactt

SEQ ID NO: 449013 - DNA, 33 bp, Homo sapien
gcccttctgacatcccacagaactaagacaagc

SEQ ID NO: 449014 - DNA, 33 bp, Homo sapien
gcccttctgacatcccgcagaactaagacaagc

SEQ ID NO: 449015 - DNA, 33 bp, Homo sapien
acataataggttaaaaacagatccttcgattta

SEQ ID NO: 449016 - DNA, 33 bp, Homo sapien
acataataggttaaaagcagatccttcgattta

SEQ ID NO: 449017 - DNA, 33 bp, Homo sapien
attattagtaatcctaaacatttgtatgccaat

SEQ ID NO: 449018 - DNA, 33 bp, Homo sapien
attattagtaatcctacacatttgtatgccaat

SEQ ID NO: 449019 - DNA, 33 bp, Homo sapien
agccaagtacaacagagaacttttagtcaataa

SEQ ID NO: 449020 - DNA, 33 bp, Homo sapien
agccaagtacaacagataacttttagtcaataa

SEQ ID NO: 449021 - DNA, 33 bp, Homo sapien
agctcaggtttagggggacctactgcttcttgg

SEQ ID NO: 449022 - DNA, 33 bp, Homo sapien
agctcaggtttaggggtacctactgcttcttgg

SEQ ID NO: 449023 - DNA, 33 bp, Homo sapien
tactttaactatgtcacgccaatctctcctggt

SEQ ID NO: 449024 - DNA, 33 bp, Homo sapien
tactttaactatgtcatgccaatctctcctggt

SEQ ID NO: 449025 - DNA, 33 bp, Homo sapien
gaagcttatagtaatgcagcagatttaacccaa

SEQ ID NO: 449026 - DNA, 33 bp, Homo sapien
gaagcttatagtaatgtagcagatttaacccaa

SEQ ID NO: 449027 - DNA, 33 bp, Homo sapien
gagacaactacaagacagaagaggacatttcat

SEQ ID NO: 449028 - DNA, 33 bp, Homo sapien
gagacaactacaagactgaagaggacatttcat

SEQ ID NO: 449029 - DNA, 33 bp, Homo sapien
ctgatgatgggagaaccactctcgaaaccactg

SEQ ID NO: 449030 - DNA, 33 bp, Homo sapien
ctgatgatgggagaactactctcgaaaccactg

SEQ ID NO: 449031 - DNA, 33 bp, Homo sapien
tcagatgaccgagacccaatgacaagccctgag

SEQ ID NO: 449032 - DNA, 33 bp, Homo sapien
tcagatgaccgagacctaatgacaagccctgag

SEQ ID NO: 449033 - DNA, 33 bp, Homo sapien
cttggtttgacaaataaaattagcagctaccct

SEQ ID NO: 449034 - DNA, 33 bp, Homo sapien
cttggtttgacaaatagaattagcagctaccct

SEQ ID NO: 449035 - DNA, 33 bp, Homo sapien
tttgcatttactgatacggatttttccacctgg

SEQ ID NO: 449036 - DNA, 33 bp, Homo sapien
tttgcatttactgatatggatttttccacctgg

SEQ ID NO: 449037 - DNA, 33 bp, Homo sapien
aagtgatcacggacgaggttttaggaaggagga

SEQ ID NO: 449038 - DNA, 33 bp, Homo sapien
aagtgatcacggacgatgttttaggaaggagga

SEQ ID NO: 449039 - DNA, 33 bp, Homo sapien
gttttgatccactgagaacctccaatcatctcg

SEQ ID NO: 449040 - DNA, 33 bp, Homo sapien
gttttgatccactgaggacctccaatcatctcg

SEQ ID NO: 449041 - DNA, 33 bp, Homo sapien
caggatccacaccctaagtcgctgcggtgatcc

SEQ ID NO: 449042 - DNA, 33 bp, Homo sapien
caggatccacaccctaggtcgctgcggtgatcc

SEQ ID NO: 449043 - DNA, 33 bp, Homo sapien
cctccaacattgaggacgaaatttggacatgag

SEQ ID NO: 449044 - DNA, 33 bp, Homo sapien
cctccaacattgaggatgaaatttggacatgag

SEQ ID NO: 449045 - DNA, 33 bp, Homo sapien
aaggtttactatcagaagcaagttttgttttaa

SEQ ID NO: 449046 - DNA, 33 bp, Homo sapien
aaggtttactatcagaggcaagttttgttttaa

SEQ ID NO: 449047 - DNA, 33 bp, Homo sapien
cagggatggacgcggaaggaattctgactcagc

SEQ ID NO: 449048 - DNA, 33 bp, Homo sapien
cagggatggacgcggacggaattctgactcagc

SEQ ID NO: 449049 - DNA, 33 bp, Homo sapien
catgtgtgctgtgaaaaaaaatgagaaaaacac

SEQ ID NO: 449050 - DNA, 33 bp, Homo sapien
catgtgtgctgtgaaagaaaatgagaaaaacac

SEQ ID NO: 449051 - DNA, 33 bp, Homo sapien
taagacattttgaagcagaaagtaaagctatgt

SEQ ID NO: 449052 - DNA, 33 bp, Homo sapien
taagacattttgaagcggaaagtaaagctatgt

SEQ ID NO: 449053 - DNA, 33 bp, Homo sapien
tcaaagaaagtgggtgcagtgcttagtctgttg

SEQ ID NO: 449054 - DNA, 33 bp, Homo sapien
tcaaagaaagtgggtgtagtgcttagtctgttg

SEQ ID NO: 449055 - DNA, 33 bp, Homo sapien
gcaggaaggcacatttaaaatacttgctgctca

SEQ ID NO: 449056 - DNA, 33 bp, Homo sapien
gcaggaaggcacatttgaaatacttgctgctca

SEQ ID NO: 449057 - DNA, 33 bp, Homo sapien
cagtttcacttcatcaagattttagctgaaggt

SEQ ID NO: 449058 - DNA, 33 bp, Homo sapien
cagtttcacttcatcacgattttagctgaaggt

SEQ ID NO: 449059 - DNA, 33 bp, Homo sapien
cacacctgaagcttgaagagaaataaagtagtt

SEQ ID NO: 449060 - DNA, 33 bp, Homo sapien
cacacctgaagcttgaggagaaataaagtagtt

SEQ ID NO: 449061 - DNA, 33 bp, Homo sapien
aaggcagcgctgtgacatgggaagggccctgtc

SEQ ID NO: 449062 - DNA, 33 bp, Homo sapien
aaggcagcgctgtgacgtgggaagggccctgtc

SEQ ID NO: 449063 - DNA, 33 bp, Homo sapien
cacggcttgactctcacggcaaagaaactcttt

SEQ ID NO: 449064 - DNA, 33 bp, Homo sapien
cacggcttgactctcatggcaaagaaactcttt

SEQ ID NO: 449065 - DNA, 33 bp, Homo sapien
atgtgctctgggtggacggtgtaacctgaggag

SEQ ID NO: 449066 - DNA, 33 bp, Homo sapien
atgtgctctgggtggatggtgtaacctgaggag

SEQ ID NO: 449067 - DNA, 33 bp, Homo sapien
atgtctcccggttcacacttattatagcaataa

SEQ ID NO: 449068 - DNA, 33 bp, Homo sapien
atgtctcccggttcacgcttattatagcaataa

SEQ ID NO: 449069 - DNA, 33 bp, Homo sapien
gtgaattcatcagaaccataagagtaagaatgt

SEQ ID NO: 449070 - DNA, 33 bp, Homo sapien
gtgaattcatcagaacgataagagtaagaatgt

SEQ ID NO: 449071 - DNA, 33 bp, Homo sapien
ctgggcaaagggaagaccctcggaagcaggtgg

SEQ ID NO: 449072 - DNA, 33 bp, Homo sapien
ctgggcaaagggaagatcctcggaagcaggtgg

SEQ ID NO: 449073 - DNA, 33 bp, Homo sapien
cgcgctgcttctgtcccctgtagttttggcacg

SEQ ID NO: 449074 - DNA, 33 bp, Homo sapien
cgcgctgcttctgtcctctgtagttttggcacg

SEQ ID NO: 449075 - DNA, 33 bp, Homo sapien
tcaactgcatagagaaaccggctcaaaatgcag

SEQ ID NO: 449076 - DNA, 33 bp, Homo sapien
tcaactgcatagagaagccggctcaaaatgcag

SEQ ID NO: 449077 - DNA, 33 bp, Homo sapien
ttacaaaggattctcgcccagagggtcaagtat

SEQ ID NO: 449078 - DNA, 33 bp, Homo sapien
ttacaaaggattctcggccagagggtcaagtat

SEQ ID NO: 449079 - DNA, 33 bp, Homo sapien
atttagcttccggaaacttagggcagtcacgtg

SEQ ID NO: 449080 - DNA, 33 bp, Homo sapien
atttagcttccggaaagttagggcagtcacgtg

SEQ ID NO: 449081 - DNA, 33 bp, Homo sapien
tcactccattgagtccaacaacaccaaaagcga

SEQ ID NO: 449082 - DNA, 33 bp, Homo sapien
tcactccattgagtccgacaacaccaaaagcga

SEQ ID NO: 449083 - DNA, 33 bp, Homo sapien
catgcggcactttccactgaagactctgtaggc

SEQ ID NO: 449084 - DNA, 33 bp, Homo sapien
catgcggcactttccattgaagactctgtaggc

SEQ ID NO: 449085 - DNA, 33 bp, Homo sapien
aggaccattgtgttcaactgtttttgatcaaca

SEQ ID NO: 449086 - DNA, 33 bp, Homo sapien
aggaccattgtgttcagctgtttttgatcaaca

SEQ ID NO: 449087 - DNA, 33 bp, Homo sapien
ccagtatttcaactaaacaatcccttctgtaag

SEQ ID NO: 449088 - DNA, 33 bp, Homo sapien
ccagtatttcaactaatcaatcccttctgtaag

SEQ ID NO: 449089 - DNA, 33 bp, Homo sapien
agctgtcctaagtcaaacagaaagacaaacagc

SEQ ID NO: 449090 - DNA, 33 bp, Homo sapien
agctgtcctaagtcaagcagaaagacaaacagc

SEQ ID NO: 449091 - DNA, 33 bp, Homo sapien
ccaaacggactatccaaatgtagtcactgaatt

SEQ ID NO: 449092 - DNA, 33 bp, Homo sapien
ccaaacggactatccagatgtagtcactgaatt

SEQ ID NO: 449093 - DNA, 33 bp, Homo sapien
ggaggctggaaaggataactgccggcacaggtg

SEQ ID NO: 449094 - DNA, 33 bp, Homo sapien
ggaggctggaaaggatcactgccggcacaggtg

SEQ ID NO: 449095 - DNA, 33 bp, Homo sapien
tgcagactctttgtgacacagacttgcattggc

SEQ ID NO: 449096 - DNA, 33 bp, Homo sapien
tgcagactctttgtgagacagacttgcattggc

SEQ ID NO: 449097 - DNA, 33 bp, Homo sapien
gctgctccttcctaaccgggatcttgagaaaga

SEQ ID NO: 449098 - DNA, 33 bp, Homo sapien
gctgctccttcctaactgggatcttgagaaaga

SEQ ID NO: 449099 - DNA, 33 bp, Homo sapien
ccagtttctcagtcacaaatctagcccagagct

SEQ ID NO: 449100 - DNA, 33 bp, Homo sapien
ccagtttctcagtcacgaatctagcccagagct

SEQ ID NO: 449101 - DNA, 33 bp, Homo sapien
agccatcctgtttgaccggatgacctttccagg

SEQ ID NO: 449102 - DNA, 33 bp, Homo sapien
agccatcctgtttgactggatgacctttccagg

SEQ ID NO: 449103 - DNA, 33 bp, Homo sapien
gtgagctgcttaataacctggctgtgggacttt

SEQ ID NO: 449104 - DNA, 33 bp, Homo sapien
gtgagctgcttaataatctggctgtgggacttt

SEQ ID NO: 449105 - DNA, 33 bp, Homo sapien
cattactaatgacttacgaacttgaatcagatt

SEQ ID NO: 449106 - DNA, 33 bp, Homo sapien
cattactaatgacttatgaacttgaatcagatt

SEQ ID NO: 449107 - DNA, 33 bp, Homo sapien
tctattttaaagtacaaacttgcgctaacaatt

SEQ ID NO: 449108 - DNA, 33 bp, Homo sapien
tctattttaaagtacagacttgcgctaacaatt

SEQ ID NO: 449109 - DNA, 33 bp, Homo sapien
agatgctgaaggagagacccagagttcacagtc

SEQ ID NO: 449110 - DNA, 33 bp, Homo sapien
agatgctgaaggagaggcccagagttcacagtc

SEQ ID NO: 449111 - DNA, 33 bp, Homo sapien
ttgtgtaagctatgcaacttctggttctgttta

SEQ ID NO: 449112 - DNA, 33 bp, Homo sapien
ttgtgtaagctatgcagcttctggttctgttta

SEQ ID NO: 449113 - DNA, 33 bp, Homo sapien
ttagatcaatctcgccgcctccttttgcggcct

SEQ ID NO: 449114 - DNA, 33 bp, Homo sapien
ttagatcaatctcgcctcctccttttgcggcct

SEQ ID NO: 449115 - DNA, 33 bp, Homo sapien
cccaccagcagtatacaaggcttctcatttcac

SEQ ID NO: 449116 - DNA, 33 bp, Homo sapien
cccaccagcagtatacgaggcttctcatttcac

SEQ ID NO: 449117 - DNA, 33 bp, Homo sapien
ctttctgtattttccacgctttctgtgacgaac

SEQ ID NO: 449118 - DNA, 33 bp, Homo sapien
ctttctgtattttccatgctttctgtgacgaac

SEQ ID NO: 449119 - DNA, 33 bp, Homo sapien
aaagtgaaatggtttcaaacggctttgcagcta

SEQ ID NO: 449120 - DNA, 33 bp, Homo sapien
aaagtgaaatggtttcgaacggctttgcagcta

SEQ ID NO: 449121 - DNA, 33 bp, Homo sapien
agaagagggactgagacaggaacctgtgcacta

SEQ ID NO: 449122 - DNA, 33 bp, Homo sapien
agaagagggactgagagaggaacctgtgcacta

SEQ ID NO: 449123 - DNA, 33 bp, Homo sapien
taaaactttaagtaaaagtgcccttggccaggc

SEQ ID NO: 449124 - DNA, 33 bp, Homo sapien
taaaactttaagtaaaggtgcccttggccaggc

SEQ ID NO: 449125 - DNA, 33 bp, Homo sapien
gtctttcatttttaagccataaatgagcattgg

SEQ ID NO: 449126 - DNA, 33 bp, Homo sapien
gtctttcatttttaagtcataaatgagcattgg

SEQ ID NO: 449127 - DNA, 33 bp, Homo sapien
ctatatataagcaataagcgatctgaaaattaa

SEQ ID NO: 449128 - DNA, 33 bp, Homo sapien
ctatatataagcaataggcgatctgaaaattaa

SEQ ID NO: 449129 - DNA, 33 bp, Homo sapien
gctgtactgtttggtaacattcccttgtaaagc

SEQ ID NO: 449130 - DNA, 33 bp, Homo sapien
gctgtactgtttggtagcattcccttgtaaagc

SEQ ID NO: 449131 - DNA, 33 bp, Homo sapien
agaggtagtatcacgacgggcaaagaccgattc

SEQ ID NO: 449132 - DNA, 33 bp, Homo sapien
agaggtagtatcacgatgggcaaagaccgattc

SEQ ID NO: 449133 - DNA, 33 bp, Homo sapien
ggacctttcacagcgaagataaatcagtgcctc

SEQ ID NO: 449134 - DNA, 33 bp, Homo sapien
ggacctttcacagcgaggataaatcagtgcctc

SEQ ID NO: 449135 - DNA, 33 bp, Homo sapien
catttcttcttctcacaggctagaatgctaaga

SEQ ID NO: 449136 - DNA, 33 bp, Homo sapien
catttcttcttctcacgggctagaatgctaaga

SEQ ID NO: 449137 - DNA, 33 bp, Homo sapien
gatgacgacaccaacgacaaacggaataaatca

SEQ ID NO: 449138 - DNA, 33 bp, Homo sapien
gatgacgacaccaacgccaaacggaataaatca

SEQ ID NO: 449139 - DNA, 33 bp, Homo sapien
aggactggaaaacagaaagtgatgatgacgaca

SEQ ID NO: 449140 - DNA, 33 bp, Homo sapien
aggactggaaaacagagagtgatgatgacgaca

SEQ ID NO: 449141 - DNA, 33 bp, Homo sapien
caaatacaacagcaaaacttacaggcaatttgg

SEQ ID NO: 449142 - DNA, 33 bp, Homo sapien
caaatacaacagcaaagcttacaggcaatttgg

SEQ ID NO: 449143 - DNA, 33 bp, Homo sapien
caaaggcgtctttaaccggagctgtgcggatgc

SEQ ID NO: 449144 - DNA, 33 bp, Homo sapien
caaaggcgtctttaactggagctgtgcggatgc

SEQ ID NO: 449145 - DNA, 33 bp, Homo sapien
ggcccctgctcaaggactagcgggaactgtgcc

SEQ ID NO: 449146 - DNA, 33 bp, Homo sapien
ggcccctgctcaaggattagcgggaactgtgcc

SEQ ID NO: 449147 - DNA, 33 bp, Homo sapien
agaaatgaacaaccaacccatgaaaacacacag

SEQ ID NO: 449148 - DNA, 33 bp, Homo sapien
agaaatgaacaaccaagccatgaaaacacacag

SEQ ID NO: 449149 - DNA, 33 bp, Homo sapien
cagggaaatgcaataacagatgaagaaaggatc

SEQ ID NO: 449150 - DNA, 33 bp, Homo sapien
cagggaaatgcaataatagatgaagaaaggatc

SEQ ID NO: 449151 - DNA, 33 bp, Homo sapien
ccagtcctagagaaatcaggtaagtcggtgagg

SEQ ID NO: 449152 - DNA, 33 bp, Homo sapien
ccagtcctagagaaattaggtaagtcggtgagg

SEQ ID NO: 449153 - DNA, 33 bp, Homo sapien
cagggacctatcttgccgatctggccactcctg

SEQ ID NO: 449154 - DNA, 33 bp, Homo sapien
cagggacctatcttgctgatctggccactcctg

SEQ ID NO: 449155 - DNA, 33 bp, Homo sapien
tcatttttgcagaagacatactcaatgttaaat

SEQ ID NO: 449156 - DNA, 33 bp, Homo sapien
tcatttttgcagaagagatactcaatgttaaat

SEQ ID NO: 449157 - DNA, 33 bp, Homo sapien
ctggattattcggagccattccttctttagcag

SEQ ID NO: 449158 - DNA, 33 bp, Homo sapien
ctggattattcggagcgattccttctttagcag

SEQ ID NO: 449159 - DNA, 33 bp, Homo sapien
atctaacaaattatcaatagccataagcaaatc

SEQ ID NO: 449160 - DNA, 33 bp, Homo sapien
atctaacaaattatcagtagccataagcaaatc

SEQ ID NO: 449161 - DNA, 33 bp, Homo sapien
aagtgcagggacagaaaactctccaggccgtaa

SEQ ID NO: 449162 - DNA, 33 bp, Homo sapien
aagtgcagggacagaagactctccaggccgtaa

SEQ ID NO: 449163 - DNA, 33 bp, Homo sapien
ggcagaagggacgaacaagctccctcaggcctc

SEQ ID NO: 449164 - DNA, 33 bp, Homo sapien
ggcagaagggacgaacgagctccctcaggcctc

SEQ ID NO: 449165 - DNA, 33 bp, Homo sapien
atggaccaaagtcaaacagttggtgatttttac

SEQ ID NO: 449166 - DNA, 33 bp, Homo sapien
atggaccaaagtcaaatagttggtgatttttac

SEQ ID NO: 449167 - DNA, 33 bp, Homo sapien
gcaaagtagattacacagagtaccagtcttaat

SEQ ID NO: 449168 - DNA, 33 bp, Homo sapien
gcaaagtagattacacggagtaccagtcttaat

SEQ ID NO: 449169 - DNA, 33 bp, Homo sapien
tttgtagctgtcaaaacaggccatcttttcatc

SEQ ID NO: 449170 - DNA, 33 bp, Homo sapien
tttgtagctgtcaaaataggccatcttttcatc

SEQ ID NO: 449171 - DNA, 33 bp, Homo sapien
tatgaagggaagtgtcaatatcagtaccacctc

SEQ ID NO: 449172 - DNA, 33 bp, Homo sapien
tatgaagggaagtgtcgatatcagtaccacctc

SEQ ID NO: 449173 - DNA, 33 bp, Homo sapien
agcagagggtctagagaaatctgatcgggattt

SEQ ID NO: 449174 - DNA, 33 bp, Homo sapien
agcagagggtctagagcaatctgatcgggattt

SEQ ID NO: 449175 - DNA, 33 bp, Homo sapien
cttgtaaaacattgcaatcaactctgagaaaag

SEQ ID NO: 449176 - DNA, 33 bp, Homo sapien
cttgtaaaacattgcagtcaactctgagaaaag

SEQ ID NO: 449177 - DNA, 33 bp, Homo sapien
cctgcttgaccgctgggaccctgtccattagga

SEQ ID NO: 449178 - DNA, 33 bp, Homo sapien
cctgcttgaccgctggtaccctgtccattagga

SEQ ID NO: 449179 - DNA, 33 bp, Homo sapien
taagcctctaaaggccagatgagtgttaggcaa

SEQ ID NO: 449180 - DNA, 33 bp, Homo sapien
taagcctctaaaggccggatgagtgttaggcaa

SEQ ID NO: 449181 - DNA, 33 bp, Homo sapien
aaaaaaatgccagagaagtccacccctaatttt

SEQ ID NO: 449182 - DNA, 33 bp, Homo sapien
aaaaaaatgccagagatgtccacccctaatttt

SEQ ID NO: 449183 - DNA, 33 bp, Homo sapien
ctgtgtattttcaatcaattacaacagaaaccc

SEQ ID NO: 449184 - DNA, 33 bp, Homo sapien
ctgtgtattttcaatccattacaacagaaaccc

SEQ ID NO: 449185 - DNA, 33 bp, Homo sapien
ctggcagtctctgaacaccttatcacctggtca

SEQ ID NO: 449186 - DNA, 33 bp, Homo sapien
ctggcagtctctgaacgccttatcacctggtca

SEQ ID NO: 449187 - DNA, 33 bp, Homo sapien
gcagccaggaagagaaagttcccaggattttca

SEQ ID NO: 449188 - DNA, 33 bp, Homo sapien
gcagccaggaagagaaggttcccaggattttca

SEQ ID NO: 449189 - DNA, 33 bp, Homo sapien
tacacaataaatattcacacaaagcagtgattc

SEQ ID NO: 449190 - DNA, 33 bp, Homo sapien
tacacaataaatattcgcacaaagcagtgattc

SEQ ID NO: 449191 - DNA, 33 bp, Homo sapien
tcgctggaacaggatccatgagctgcttcttca

SEQ ID NO: 449192 - DNA, 33 bp, Homo sapien
tcgctggaacaggatctatgagctgcttcttca

SEQ ID NO: 449193 - DNA, 33 bp, Homo sapien
cagattctacatcagcaatccttagtgcctgtt

SEQ ID NO: 449194 - DNA, 33 bp, Homo sapien
cagattctacatcagcgatccttagtgcctgtt

SEQ ID NO: 449195 - DNA, 33 bp, Homo sapien
gtcctcataattttcacaatcactcctgaatgg

SEQ ID NO: 449196 - DNA, 33 bp, Homo sapien
gtcctcataattttcataatcactcctgaatgg

SEQ ID NO: 449197 - DNA, 33 bp, Homo sapien
attattttttaagtgacgaaggtaacacaaact

SEQ ID NO: 449198 - DNA, 33 bp, Homo sapien
attattttttaagtgatgaaggtaacacaaact

SEQ ID NO: 449199 - DNA, 33 bp, Homo sapien
atgataaaagtaaaaaccttggtgcataaggaa

SEQ ID NO: 449200 - DNA, 33 bp, Homo sapien
atgataaaagtaaaaatcttggtgcataaggaa

SEQ ID NO: 449201 - DNA, 33 bp, Homo sapien
cgatcaagtggaccaaaaggaaaagtcggacct

SEQ ID NO: 449202 - DNA, 33 bp, Homo sapien
cgatcaagtggaccaagaggaaaagtcggacct

SEQ ID NO: 449203 - DNA, 33 bp, Homo sapien
gtttccccttatatgacaccaataaccaattgc

SEQ ID NO: 449204 - DNA, 33 bp, Homo sapien
gtttccccttatatgataccaataaccaattgc

SEQ ID NO: 449205 - DNA, 33 bp, Homo sapien
gacgtggatgagcaaaccatctggagttttatc

SEQ ID NO: 449206 - DNA, 33 bp, Homo sapien
gacgtggatgagcaaagcatctggagttttatc

SEQ ID NO: 449207 - DNA, 33 bp, Homo sapien
aagtataaaaagcaacaggtattagagaaaatt

SEQ ID NO: 449208 - DNA, 33 bp, Homo sapien
aagtataaaaagcaaccggtattagagaaaatt

SEQ ID NO: 449209 - DNA, 33 bp, Homo sapien
gcatgactgaggaaacaagaaatgcaatgccat

SEQ ID NO: 449210 - DNA, 33 bp, Homo sapien
gcatgactgaggaaacgagaaatgcaatgccat

SEQ ID NO: 449211 - DNA, 33 bp, Homo sapien
ggcagccctgcaacccaagaaggagtcaagata

SEQ ID NO: 449212 - DNA, 33 bp, Homo sapien
ggcagccctgcaacccgagaaggagtcaagata

SEQ ID NO: 449213 - DNA, 33 bp, Homo sapien
tagcacagggatgtcactctgtcagcaccagca

SEQ ID NO: 449214 - DNA, 33 bp, Homo sapien
tagcacagggatgtcattctgtcagcaccagca

SEQ ID NO: 449215 - DNA, 33 bp, Homo sapien
attgacaaaagtaatacgccaattgtaggaggc

SEQ ID NO: 449216 - DNA, 33 bp, Homo sapien
attgacaaaagtaatatgccaattgtaggaggc

SEQ ID NO: 449217 - DNA, 33 bp, Homo sapien
aaagtggtcttcatgacagaggattcctgccaa

SEQ ID NO: 449218 - DNA, 33 bp, Homo sapien
aaagtggtcttcatgagagaggattcctgccaa

SEQ ID NO: 449219 - DNA, 33 bp, Homo sapien
gtagaaacaacccaacagtcaactgatgaagag

SEQ ID NO: 449220 - DNA, 33 bp, Homo sapien
gtagaaacaacccaactgtcaactgatgaagag

SEQ ID NO: 449221 - DNA, 33 bp, Homo sapien
ctaacttaatacaaaaaggtgtttcaggagaaa

SEQ ID NO: 449222 - DNA, 33 bp, Homo sapien
ctaacttaatacaaaacggtgtttcaggagaaa

SEQ ID NO: 449223 - DNA, 33 bp, Homo sapien
gtacctgtccatgaaacgtctctgtagtagctg

SEQ ID NO: 449224 - DNA, 33 bp, Homo sapien
gtacctgtccatgaaatgtctctgtagtagctg

SEQ ID NO: 449225 - DNA, 33 bp, Homo sapien
tgtcacatggtatctcaatgtttactttttttc

SEQ ID NO: 449226 - DNA, 33 bp, Homo sapien
tgtcacatggtatctcgatgtttactttttttc

SEQ ID NO: 449227 - DNA, 33 bp, Homo sapien
attgtcaggaggatgacgtaagatgatgggttc

SEQ ID NO: 449228 - DNA, 33 bp, Homo sapien
attgtcaggaggatgatgtaagatgatgggttc

SEQ ID NO: 449229 - DNA, 33 bp, Homo sapien
agactctctaaaggaaagagcaacttagatccc

SEQ ID NO: 449230 - DNA, 33 bp, Homo sapien
agactctctaaaggaacgagcaacttagatccc

SEQ ID NO: 449231 - DNA, 33 bp, Homo sapien
tctgaaagcaaagaaccgtcaatctgaaatttt

SEQ ID NO: 449232 - DNA, 33 bp, Homo sapien
tctgaaagcaaagaactgtcaatctgaaatttt

SEQ ID NO: 449233 - DNA, 33 bp, Homo sapien
agtggagagaataccagagtcctccgccagtcc

SEQ ID NO: 449234 - DNA, 33 bp, Homo sapien
agtggagagaataccatagtcctccgccagtcc

SEQ ID NO: 449235 - DNA, 33 bp, Homo sapien
tgggcgacaaagcgagaccctgtttcaaaagaa

SEQ ID NO: 449236 - DNA, 33 bp, Homo sapien
tgggcgacaaagcgaggccctgtttcaaaagaa

SEQ ID NO: 449237 - DNA, 33 bp, Homo sapien
aatttacttatagaaaccccagtgcctgtgaga

SEQ ID NO: 449238 - DNA, 33 bp, Homo sapien
aatttacttatagaaatcccagtgcctgtgaga

SEQ ID NO: 449239 - DNA, 33 bp, Homo sapien
cttgggaacagcacccacaggaacagtgtctga

SEQ ID NO: 449240 - DNA, 33 bp, Homo sapien
cttgggaacagcaccctcaggaacagtgtctga

SEQ ID NO: 449241 - DNA, 33 bp, Homo sapien
cttgttttccttgctcaagatatgccctgggtt

SEQ ID NO: 449242 - DNA, 33 bp, Homo sapien
cttgttttccttgctcgagatatgccctgggtt

SEQ ID NO: 449243 - DNA, 33 bp, Homo sapien
ttaatctcataatataagatgctaccacgtatt

SEQ ID NO: 449244 - DNA, 33 bp, Homo sapien
ttaatctcataatataggatgctaccacgtatt

SEQ ID NO: 449245 - DNA, 33 bp, Homo sapien
agacacaagggtcatccgaagacaaaacaggag

SEQ ID NO: 449246 - DNA, 33 bp, Homo sapien
agacacaagggtcatctgaagacaaaacaggag

SEQ ID NO: 449247 - DNA, 33 bp, Homo sapien
acggttcaatcaacaaccgagccagaggggctt

SEQ ID NO: 449248 - DNA, 33 bp, Homo sapien
acggttcaatcaacaagcgagccagaggggctt

SEQ ID NO: 449249 - DNA, 33 bp, Homo sapien
ctgctgtgtcatttaacaatggtgatggtaaac

SEQ ID NO: 449250 - DNA, 33 bp, Homo sapien
ctgctgtgtcatttaagaatggtgatggtaaac

SEQ ID NO: 449251 - DNA, 33 bp, Homo sapien
ttacctattgatgctacgtgtctctgtctgtga

SEQ ID NO: 449252 - DNA, 33 bp, Homo sapien
ttacctattgatgctatgtgtctctgtctgtga

SEQ ID NO: 449253 - DNA, 33 bp, Homo sapien
actgctctacacaacactactgtcaaaaggaac

SEQ ID NO: 449254 - DNA, 33 bp, Homo sapien
actgctctacacaacattactgtcaaaaggaac

SEQ ID NO: 449255 - DNA, 33 bp, Homo sapien
gtttcctggtgatccagtccttaatttattccc

SEQ ID NO: 449256 - DNA, 33 bp, Homo sapien
gtttcctggtgatccattccttaatttattccc

SEQ ID NO: 449257 - DNA, 33 bp, Homo sapien
tcacctctaaatgccccgcctcttaatacgatt

SEQ ID NO: 449258 - DNA, 33 bp, Homo sapien
tcacctctaaatgccctgcctcttaatacgatt

SEQ ID NO: 449259 - DNA, 33 bp, Homo sapien
atttctgttctttctacattacccggtctcaga

SEQ ID NO: 449260 - DNA, 33 bp, Homo sapien
atttctgttctttctatattacccggtctcaga

SEQ ID NO: 449261 - DNA, 33 bp, Homo sapien
cgccttccatggtgaaagggactctgcagatgt

SEQ ID NO: 449262 - DNA, 33 bp, Homo sapien
cgccttccatggtgaaggggactctgcagatgt

SEQ ID NO: 449263 - DNA, 33 bp, Homo sapien
cagaaggcaacacgaccaggcaacaccttgatt

SEQ ID NO: 449264 - DNA, 33 bp, Homo sapien
cagaaggcaacacgactaggcaacaccttgatt

SEQ ID NO: 449265 - DNA, 33 bp, Homo sapien
cagatagcatgggaaactgttttaggcaacatc

SEQ ID NO: 449266 - DNA, 33 bp, Homo sapien
cagatagcatgggaaattgttttaggcaacatc

SEQ ID NO: 449267 - DNA, 33 bp, Homo sapien
ctgaaacccggaacaccggcctcaccaaatgct

SEQ ID NO: 449268 - DNA, 33 bp, Homo sapien
ctgaaacccggaacactggcctcaccaaatgct

SEQ ID NO: 449269 - DNA, 33 bp, Homo sapien
aagtggaaactcaaaagattgattgacaatata

SEQ ID NO: 449270 - DNA, 33 bp, Homo sapien
aagtggaaactcaaaatattgattgacaatata

SEQ ID NO: 449271 - DNA, 33 bp, Homo sapien
agctgagaacaaaaggcaggaacagcaacaaat

SEQ ID NO: 449272 - DNA, 33 bp, Homo sapien
agctgagaacaaaaggtaggaacagcaacaaat

SEQ ID NO: 449273 - DNA, 33 bp, Homo sapien
tgacatgcacaaagtacgggtgaacaagcactt

SEQ ID NO: 449274 - DNA, 33 bp, Homo sapien
tgacatgcacaaagtatgggtgaacaagcactt

SEQ ID NO: 449275 - DNA, 33 bp, Homo sapien
ggtgcctttaaaaaaaattcaattatgttagat

SEQ ID NO: 449276 - DNA, 33 bp, Homo sapien
ggtgcctttaaaaaaacttcaattatgttagat

SEQ ID NO: 449277 - DNA, 33 bp, Homo sapien
aagtgagtctcacaggcatcgatggggcagcat

SEQ ID NO: 449278 - DNA, 33 bp, Homo sapien
aagtgagtctcacaggtatcgatggggcagcat

SEQ ID NO: 449279 - DNA, 33 bp, Homo sapien
ctcctgccgcttcaaaagataaagtctggcagg

SEQ ID NO: 449280 - DNA, 33 bp, Homo sapien
ctcctgccgcttcaaaggataaagtctggcagg

SEQ ID NO: 449281 - DNA, 33 bp, Homo sapien
tcacacttccttcaaaatactaaagactccacg

SEQ ID NO: 449282 - DNA, 33 bp, Homo sapien
tcacacttccttcaaattactaaagactccacg

SEQ ID NO: 449283 - DNA, 33 bp, Homo sapien
ttctggcttctcttagcaatcataaaccggctg

SEQ ID NO: 449284 - DNA, 33 bp, Homo sapien
ttctggcttctcttagtaatcataaaccggctg

SEQ ID NO: 449285 - DNA, 33 bp, Homo sapien
gaaggcctgtgactgcaaggggcacgaacacac

SEQ ID NO: 449286 - DNA, 33 bp, Homo sapien
gaaggcctgtgactgcgaggggcacgaacacac

SEQ ID NO: 449287 - DNA, 33 bp, Homo sapien
atctagaggaaaagacaggaagagaaaagaaag

SEQ ID NO: 449288 - DNA, 33 bp, Homo sapien
atctagaggaaaagacgggaagagaaaagaaag

SEQ ID NO: 449289 - DNA, 33 bp, Homo sapien
agattgatgagaaaagaaagtaactggaaatct

SEQ ID NO: 449290 - DNA, 33 bp, Homo sapien
agattgatgagaaaaggaagtaactggaaatct

SEQ ID NO: 449291 - DNA, 33 bp, Homo sapien
gactggaaaaacaccagggacctcctttagaga

SEQ ID NO: 449292 - DNA, 33 bp, Homo sapien
gactggaaaaacaccatggacctcctttagaga

SEQ ID NO: 449293 - DNA, 33 bp, Homo sapien
agatacaaaaagttaaaggagaaagtcatctct

SEQ ID NO: 449294 - DNA, 33 bp, Homo sapien
agatacaaaaagttaatggagaaagtcatctct

SEQ ID NO: 449295 - DNA, 33 bp, Homo sapien
gtgttccttcagctccaaggaggtctcgaactc

SEQ ID NO: 449296 - DNA, 33 bp, Homo sapien
gtgttccttcagctccgaggaggtctcgaactc

SEQ ID NO: 449297 - DNA, 33 bp, Homo sapien
cctggaagagcttctgccaatttctatagcaag

SEQ ID NO: 449298 - DNA, 33 bp, Homo sapien
cctggaagagcttctgtcaatttctatagcaag

SEQ ID NO: 449299 - DNA, 33 bp, Homo sapien
aacatacttgataacaaatgaaaaggattttgt

SEQ ID NO: 449300 - DNA, 33 bp, Homo sapien
aacatacttgataacagatgaaaaggattttgt

SEQ ID NO: 449301 - DNA, 33 bp, Homo sapien
acatggtaccaaacacagtgccacacacaggaa

SEQ ID NO: 449302 - DNA, 33 bp, Homo sapien
acatggtaccaaacacggtgccacacacaggaa

SEQ ID NO: 449303 - DNA, 33 bp, Homo sapien
ttctatagcctctaaggagcccagagtctgaga

SEQ ID NO: 449304 - DNA, 33 bp, Homo sapien
ttctatagcctctaagtagcccagagtctgaga

SEQ ID NO: 449305 - DNA, 33 bp, Homo sapien
tactgcattatttcagcaattcaggacaagctt

SEQ ID NO: 449306 - DNA, 33 bp, Homo sapien
tactgcattatttcaggaattcaggacaagctt

SEQ ID NO: 449307 - DNA, 33 bp, Homo sapien
cttgggcaaagctaccagcggtggattttaaag

SEQ ID NO: 449308 - DNA, 33 bp, Homo sapien
cttgggcaaagctacccgcggtggattttaaag

SEQ ID NO: 449309 - DNA, 33 bp, Homo sapien
ctctctcctctggaccaatgacacagaaccaag

SEQ ID NO: 449310 - DNA, 33 bp, Homo sapien
ctctctcctctggaccgatgacacagaaccaag

SEQ ID NO: 449311 - DNA, 33 bp, Homo sapien
gtaaagctgtatagaaaatttatagactagttc

SEQ ID NO: 449312 - DNA, 33 bp, Homo sapien
gtaaagctgtatagaagatttatagactagttc

SEQ ID NO: 449313 - DNA, 33 bp, Homo sapien
tcaaggtgtattaacccgatgctaatttaggaa

SEQ ID NO: 449314 - DNA, 33 bp, Homo sapien
tcaaggtgtattaacctgatgctaatttaggaa

SEQ ID NO: 449315 - DNA, 33 bp, Homo sapien
cctttaggagagtgataaccaacattaggaaga

SEQ ID NO: 449316 - DNA, 33 bp, Homo sapien
cctttaggagagtgatgaccaacattaggaaga

SEQ ID NO: 449317 - DNA, 33 bp, Homo sapien
gcatccctgttatataaagaaacacttctgatt

SEQ ID NO: 449318 - DNA, 33 bp, Homo sapien
gcatccctgttatatacagaaacacttctgatt

SEQ ID NO: 449319 - DNA, 33 bp, Homo sapien
ttagttctatctcctaaagcaaaacataagcat

SEQ ID NO: 449320 - DNA, 33 bp, Homo sapien
ttagttctatctcctagagcaaaacataagcat

SEQ ID NO: 449321 - DNA, 33 bp, Homo sapien
gcatccaggtcactcaaagggacaactcgtgag

SEQ ID NO: 449322 - DNA, 33 bp, Homo sapien
gcatccaggtcactcagagggacaactcgtgag

SEQ ID NO: 449323 - DNA, 33 bp, Homo sapien
tccacaaagaggatgacaccggttccagtagaa

SEQ ID NO: 449324 - DNA, 33 bp, Homo sapien
tccacaaagaggatgataccggttccagtagaa

SEQ ID NO: 449325 - DNA, 33 bp, Homo sapien
tgtccaataaaagctaaactcaacgattagcta

SEQ ID NO: 449326 - DNA, 33 bp, Homo sapien
tgtccaataaaagctatactcaacgattagcta

SEQ ID NO: 449327 - DNA, 33 bp, Homo sapien
tcttgttgttttgaaacagcaaaattacagaaa

SEQ ID NO: 449328 - DNA, 33 bp, Homo sapien
tcttgttgttttgaaatagcaaaattacagaaa

SEQ ID NO: 449329 - DNA, 33 bp, Homo sapien
tctgttaagtgtcatacacattttcatatacgt

SEQ ID NO: 449330 - DNA, 33 bp, Homo sapien
tctgttaagtgtcatatacattttcatatacgt

SEQ ID NO: 449331 - DNA, 33 bp, Homo sapien
taattggttttaatcacggtctaatttcatcct

SEQ ID NO: 449332 - DNA, 33 bp, Homo sapien
taattggttttaatcatggtctaatttcatcct

SEQ ID NO: 449333 - DNA, 33 bp, Homo sapien
tgctgtgggaagcacactatttctagctgtggc

SEQ ID NO: 449334 - DNA, 33 bp, Homo sapien
tgctgtgggaagcacattatttctagctgtggc

SEQ ID NO: 449335 - DNA, 33 bp, Homo sapien
acccacaagtcctcacagaatgcccatgattct

SEQ ID NO: 449336 - DNA, 33 bp, Homo sapien
acccacaagtcctcacggaatgcccatgattct

SEQ ID NO: 449337 - DNA, 33 bp, Homo sapien
gccacagccgcatacacacaggtaacggggaag

SEQ ID NO: 449338 - DNA, 33 bp, Homo sapien
gccacagccgcatacatacaggtaacggggaag

SEQ ID NO: 449339 - DNA, 33 bp, Homo sapien
gaattatgttttctcacccatgatgtctacttc

SEQ ID NO: 449340 - DNA, 33 bp, Homo sapien
gaattatgttttctcatccatgatgtctacttc

SEQ ID NO: 449341 - DNA, 33 bp, Homo sapien
ggccagtcagaggcccagaatagcatctctgtc

SEQ ID NO: 449342 - DNA, 33 bp, Homo sapien
ggccagtcagaggcccggaatagcatctctgtc

SEQ ID NO: 449343 - DNA, 33 bp, Homo sapien
aggggtcttaaaaccaggcatttacacgtttgg

SEQ ID NO: 449344 - DNA, 33 bp, Homo sapien
aggggtcttaaaaccatgcatttacacgtttgg

SEQ ID NO: 449345 - DNA, 33 bp, Homo sapien
tgtcacttagatcgacaaagcagaactgcactt

SEQ ID NO: 449346 - DNA, 33 bp, Homo sapien
tgtcacttagatcgacgaagcagaactgcactt

SEQ ID NO: 449347 - DNA, 33 bp, Homo sapien
tattaatctattggaactgctccaagtcaacta

SEQ ID NO: 449348 - DNA, 33 bp, Homo sapien
tattaatctattggaagtgctccaagtcaacta

SEQ ID NO: 449349 - DNA, 33 bp, Homo sapien
gttgcagccaaaagagactatattttcccaaaa

SEQ ID NO: 449350 - DNA, 33 bp, Homo sapien
gttgcagccaaaagaggctatattttcccaaaa

SEQ ID NO: 449351 - DNA, 33 bp, Homo sapien
ctggttcctcgcgggtgaaatgatgggactgaa

SEQ ID NO: 449352 - DNA, 33 bp, Homo sapien
ctggttcctcgcgggttaaatgatgggactgaa

SEQ ID NO: 449353 - DNA, 33 bp, Homo sapien
ctgcggccccaggaacacttgtgacgtataagg

SEQ ID NO: 449354 - DNA, 33 bp, Homo sapien
ctgcggccccaggaacgcttgtgacgtataagg

SEQ ID NO: 449355 - DNA, 33 bp, Homo sapien
atgtgtgtcctaaaaactaagcaggccatgtgt

SEQ ID NO: 449356 - DNA, 33 bp, Homo sapien
atgtgtgtcctaaaaagtaagcaggccatgtgt

SEQ ID NO: 449357 - DNA, 33 bp, Homo sapien
attcaaatctgtaaaacgagtggtgacgtggga

SEQ ID NO: 449358 - DNA, 33 bp, Homo sapien
attcaaatctgtaaaatgagtggtgacgtggga

SEQ ID NO: 449359 - DNA, 33 bp, Homo sapien
ctgtaaaatgaaaatcagagcggtgaacctcat

SEQ ID NO: 449360 - DNA, 33 bp, Homo sapien
ctgtaaaatgaaaatccgagcggtgaacctcat

SEQ ID NO: 449361 - DNA, 33 bp, Homo sapien
ttttaaccacctttccacgtgtgtcctggagtg

SEQ ID NO: 449362 - DNA, 33 bp, Homo sapien
ttttaaccacctttccgcgtgtgtcctggagtg

SEQ ID NO: 449363 - DNA, 33 bp, Homo sapien
gtggaccctggccacaaagagatggagcctctg

SEQ ID NO: 449364 - DNA, 33 bp, Homo sapien
gtggaccctggccacagagagatggagcctctg

SEQ ID NO: 449365 - DNA, 33 bp, Homo sapien
caccaagagagccctcaaaaaccaagtgcggct

SEQ ID NO: 449366 - DNA, 33 bp, Homo sapien
caccaagagagccctcgaaaaccaagtgcggct

SEQ ID NO: 449367 - DNA, 33 bp, Homo sapien
tataggcattcctctcaaagtctcattactctg

SEQ ID NO: 449368 - DNA, 33 bp, Homo sapien
tataggcattcctctcgaagtctcattactctg

SEQ ID NO: 449369 - DNA, 33 bp, Homo sapien
ctagaagaatctgtggccaaatctcttatccaa

SEQ ID NO: 449370 - DNA, 33 bp, Homo sapien
ctagaagaatctgtggtcaaatctcttatccaa

SEQ ID NO: 449371 - DNA, 33 bp, Homo sapien
agcgagcgggatgagcaatgcactcacggtgcc

SEQ ID NO: 449372 - DNA, 33 bp, Homo sapien
agcgagcgggatgagcgatgcactcacggtgcc

SEQ ID NO: 449373 - DNA, 33 bp, Homo sapien
gttttcaggccaacagaaatgcatttagttagt

SEQ ID NO: 449374 - DNA, 33 bp, Homo sapien
gttttcaggccaacaggaatgcatttagttagt

SEQ ID NO: 449375 - DNA, 33 bp, Homo sapien
atctcaaaacattagacctaagggatcatccaa

SEQ ID NO: 449376 - DNA, 33 bp, Homo sapien
atctcaaaacattagagctaagggatcatccaa

SEQ ID NO: 449377 - DNA, 33 bp, Homo sapien
tatcattccctactgcaactctgcatttgcatg

SEQ ID NO: 449378 - DNA, 33 bp, Homo sapien
tatcattccctactgcgactctgcatttgcatg

SEQ ID NO: 449379 - DNA, 33 bp, Homo sapien
ccacagttacctaaaccaatatgcacctgcctt

SEQ ID NO: 449380 - DNA, 33 bp, Homo sapien
ccacagttacctaaacgaatatgcacctgcctt

SEQ ID NO: 449381 - DNA, 33 bp, Homo sapien
accagtgaaaagaggcacactttctagtcatca

SEQ ID NO: 449382 - DNA, 33 bp, Homo sapien
accagtgaaaagaggcgcactttctagtcatca

SEQ ID NO: 449383 - DNA, 33 bp, Homo sapien
taataaaatttacaccagaaggctgtcctgcct

SEQ ID NO: 449384 - DNA, 33 bp, Homo sapien
taataaaatttacaccggaaggctgtcctgcct

SEQ ID NO: 449385 - DNA, 33 bp, Homo sapien
atgcttttgttctttgaaattagggtgagactc

SEQ ID NO: 449386 - DNA, 33 bp, Homo sapien
atgcttttgttctttggaattagggtgagactc

SEQ ID NO: 449387 - DNA, 33 bp, Homo sapien
gtcacatggtagtcaacgacctcaaggtatttt

SEQ ID NO: 449388 - DNA, 33 bp, Homo sapien
gtcacatggtagtcaatgacctcaaggtatttt

SEQ ID NO: 449389 - DNA, 33 bp, Homo sapien
cagacattttttgaagcatacagagctttgttt

SEQ ID NO: 449390 - DNA, 33 bp, Homo sapien
cagacattttttgaaggatacagagctttgttt

SEQ ID NO: 449391 - DNA, 33 bp, Homo sapien
catgaggaaaacattcacaacttcattgctcag

SEQ ID NO: 449392 - DNA, 33 bp, Homo sapien
catgaggaaaacattcgcaacttcattgctcag

SEQ ID NO: 449393 - DNA, 33 bp, Homo sapien
aaacaagccagaattcagaatcctgcgcagaaa

SEQ ID NO: 449394 - DNA, 33 bp, Homo sapien
aaacaagccagaattccgaatcctgcgcagaaa

SEQ ID NO: 449395 - DNA, 33 bp, Homo sapien
atagccagactagcaaatagttaaagagaatag

SEQ ID NO: 449396 - DNA, 33 bp, Homo sapien
atagccagactagcaattagttaaagagaatag

SEQ ID NO: 449397 - DNA, 33 bp, Homo sapien
atcttaattacactacaaaatgatctcacaaag

SEQ ID NO: 449398 - DNA, 33 bp, Homo sapien
atcttaattacactaccaaatgatctcacaaag

SEQ ID NO: 449399 - DNA, 33 bp, Homo sapien
ttcgcacttgtatgcacgaactctttggaacac

SEQ ID NO: 449400 - DNA, 33 bp, Homo sapien
ttcgcacttgtatgcatgaactctttggaacac

SEQ ID NO: 449401 - DNA, 33 bp, Homo sapien
gcatacctggataaccgggtctggtgaggcagg

SEQ ID NO: 449402 - DNA, 33 bp, Homo sapien
gcatacctggataacctggtctggtgaggcagg

SEQ ID NO: 449403 - DNA, 33 bp, Homo sapien
ttcgtaaaagtcacggcaggatgggaccctccg

SEQ ID NO: 449404 - DNA, 33 bp, Homo sapien
ttcgtaaaagtcacggtaggatgggaccctccg

SEQ ID NO: 449405 - DNA, 33 bp, Homo sapien
agattgtgtgggtgccaacaggctttttactgt

SEQ ID NO: 449406 - DNA, 33 bp, Homo sapien
agattgtgtgggtgccgacaggctttttactgt

SEQ ID NO: 449407 - DNA, 33 bp, Homo sapien
gtacctactgccatgcaatcttcctgaataaat

SEQ ID NO: 449408 - DNA, 33 bp, Homo sapien
gtacctactgccatgcgatcttcctgaataaat

SEQ ID NO: 449409 - DNA, 33 bp, Homo sapien
agaagacgaaaccaaggccctgaaaacagaaga

SEQ ID NO: 449410 - DNA, 33 bp, Homo sapien
agaagacgaaaccaagtccctgaaaacagaaga

SEQ ID NO: 449411 - DNA, 33 bp, Homo sapien
atttttccccaagatacgcaaagaacggaagaa

SEQ ID NO: 449412 - DNA, 33 bp, Homo sapien
atttttccccaagatatgcaaagaacggaagaa

SEQ ID NO: 449413 - DNA, 33 bp, Homo sapien
gggtgtgtgatgaaaccggggcccacgataaga

SEQ ID NO: 449414 - DNA, 33 bp, Homo sapien
gggtgtgtgatgaaactggggcccacgataaga

SEQ ID NO: 449415 - DNA, 33 bp, Homo sapien
caccttggtggaaccacaggataattcagcata

SEQ ID NO: 449416 - DNA, 33 bp, Homo sapien
caccttggtggaaccataggataattcagcata

SEQ ID NO: 449417 - DNA, 33 bp, Homo sapien
ggtcacccagatggaaactggattgagacctag

SEQ ID NO: 449418 - DNA, 33 bp, Homo sapien
ggtcacccagatggaacctggattgagacctag

SEQ ID NO: 449419 - DNA, 33 bp, Homo sapien
ggaaactgaggctcagaaaagtggagtcttgtt

SEQ ID NO: 449420 - DNA, 33 bp, Homo sapien
ggaaactgaggctcaggaaagtggagtcttgtt

SEQ ID NO: 449421 - DNA, 33 bp, Homo sapien
acgatgcatttatttcaacaagggatttcacaa

SEQ ID NO: 449422 - DNA, 33 bp, Homo sapien
acgatgcatttatttctacaagggatttcacaa

SEQ ID NO: 449423 - DNA, 33 bp, Homo sapien
gtgagtcaattctgccaatgagcaagtcttcca

SEQ ID NO: 449424 - DNA, 33 bp, Homo sapien
gtgagtcaattctgcccatgagcaagtcttcca

SEQ ID NO: 449425 - DNA, 33 bp, Homo sapien
aggaagcgtgcgcggaaaagacagcaaaacacg

SEQ ID NO: 449426 - DNA, 33 bp, Homo sapien
aggaagcgtgcgcggagaagacagcaaaacacg

SEQ ID NO: 449427 - DNA, 33 bp, Homo sapien
agaacggacatgcagaaaacaaggaagtttggg

SEQ ID NO: 449428 - DNA, 33 bp, Homo sapien
agaacggacatgcagagaacaaggaagtttggg

SEQ ID NO: 449429 - DNA, 33 bp, Homo sapien
ctttgcctcccaccaacggacattatttggaat

SEQ ID NO: 449430 - DNA, 33 bp, Homo sapien
ctttgcctcccaccaatggacattatttggaat

SEQ ID NO: 449431 - DNA, 33 bp, Homo sapien
ggtgggaattataaacactcacttaaaatgaac

SEQ ID NO: 449432 - DNA, 33 bp, Homo sapien
ggtgggaattataaacgctcacttaaaatgaac

SEQ ID NO: 449433 - DNA, 33 bp, Homo sapien
ctcccacaagcaatgtaaaaagacaaactgaga

SEQ ID NO: 449434 - DNA, 33 bp, Homo sapien
ctcccacaagcaatgtgaaaagacaaactgaga

SEQ ID NO: 449435 - DNA, 33 bp, Homo sapien
tattgaggagtaaggcaattgttcgagttagga

SEQ ID NO: 449436 - DNA, 33 bp, Homo sapien
tattgaggagtaaggcgattgttcgagttagga

SEQ ID NO: 449437 - DNA, 33 bp, Homo sapien
tcaaatacagccattcaatcagcacttatttat

SEQ ID NO: 449438 - DNA, 33 bp, Homo sapien
tcaaatacagccattcgatcagcacttatttat

SEQ ID NO: 449439 - DNA, 33 bp, Homo sapien
aactggggatttgaaaagtagaagacgcagcgc

SEQ ID NO: 449440 - DNA, 33 bp, Homo sapien
aactggggatttgaaatgtagaagacgcagcgc

SEQ ID NO: 449441 - DNA, 33 bp, Homo sapien
gattatgtgggttatacctatctacattgactt

SEQ ID NO: 449442 - DNA, 33 bp, Homo sapien
gattatgtgggttatatctatctacattgactt

SEQ ID NO: 449443 - DNA, 33 bp, Homo sapien
cttgaggcttaaaccacggcaatgactttcttg

SEQ ID NO: 449444 - DNA, 33 bp, Homo sapien
cttgaggcttaaaccatggcaatgactttcttg

SEQ ID NO: 449445 - DNA, 33 bp, Homo sapien
cacagtcacttgttgccgaacagtttggccagt

SEQ ID NO: 449446 - DNA, 33 bp, Homo sapien
cacagtcacttgttgctgaacagtttggccagt

SEQ ID NO: 449447 - DNA, 33 bp, Homo sapien
gttctagtttcgccccaacctcctgccttgtga

SEQ ID NO: 449448 - DNA, 33 bp, Homo sapien
gttctagtttcgccccgacctcctgccttgtga

SEQ ID NO: 449449 - DNA, 33 bp, Homo sapien
ggcctgtctctgtataacttcttaaaactacat

SEQ ID NO: 449450 - DNA, 33 bp, Homo sapien
ggcctgtctctgtataccttcttaaaactacat

SEQ ID NO: 449451 - DNA, 33 bp, Homo sapien
aataagatggtttgagactatcagtgtcaatat

SEQ ID NO: 449452 - DNA, 33 bp, Homo sapien
aataagatggtttgagcctatcagtgtcaatat

SEQ ID NO: 449453 - DNA, 33 bp, Homo sapien
caagtataagcaacacggtggaagtctgaataa

SEQ ID NO: 449454 - DNA, 33 bp, Homo sapien
caagtataagcaacactgtggaagtctgaataa

SEQ ID NO: 449455 - DNA, 33 bp, Homo sapien
cagctttccacttaacaatgttttatgcacatc

SEQ ID NO: 449456 - DNA, 33 bp, Homo sapien
cagctttccacttaaccatgttttatgcacatc

SEQ ID NO: 449457 - DNA, 33 bp, Homo sapien
tgggcaaatcaagattaaaaatgatccaacaag

SEQ ID NO: 449458 - DNA, 33 bp, Homo sapien
tgggcaaatcaagatttaaaatgatccaacaag

SEQ ID NO: 449459 - DNA, 33 bp, Homo sapien
atgattatattactcacagagccacctcactgt

SEQ ID NO: 449460 - DNA, 33 bp, Homo sapien
atgattatattactcagagagccacctcactgt

SEQ ID NO: 449461 - DNA, 33 bp, Homo sapien
tgaaagatacagttgaggaatagtttaaaaaga

SEQ ID NO: 449462 - DNA, 33 bp, Homo sapien
tgaaagatacagttgatgaatagtttaaaaaga

SEQ ID NO: 449463 - DNA, 33 bp, Homo sapien
aatgtttttcgtgcaacgtttttcaagctggaa

SEQ ID NO: 449464 - DNA, 33 bp, Homo sapien
aatgtttttcgtgcaatgtttttcaagctggaa

SEQ ID NO: 449465 - DNA, 33 bp, Homo sapien
ttctcaaccgttggaacagaaaaaaatcagcaa

SEQ ID NO: 449466 - DNA, 33 bp, Homo sapien
ttctcaaccgttggaatagaaaaaaatcagcaa

SEQ ID NO: 449467 - DNA, 33 bp, Homo sapien
ttccaaaattatctcaatacaatcagggcaaga

SEQ ID NO: 449468 - DNA, 33 bp, Homo sapien
ttccaaaattatctcagtacaatcagggcaaga

SEQ ID NO: 449469 - DNA, 33 bp, Homo sapien
tccatttaatctggcacagtaacaacatttttt

SEQ ID NO: 449470 - DNA, 33 bp, Homo sapien
tccatttaatctggcatagtaacaacatttttt

SEQ ID NO: 449471 - DNA, 33 bp, Homo sapien
tgagaccctgctgcgccgatctgctgtgacagc

SEQ ID NO: 449472 - DNA, 33 bp, Homo sapien
tgagaccctgctgcgctgatctgctgtgacagc

SEQ ID NO: 449473 - DNA, 33 bp, Homo sapien
tgccaaggctgcacggcatctctcctgtctgag

SEQ ID NO: 449474 - DNA, 33 bp, Homo sapien
tgccaaggctgcacggtatctctcctgtctgag

SEQ ID NO: 449475 - DNA, 33 bp, Homo sapien
tagtgttgcaaaatgcacttgacacaggtcact

SEQ ID NO: 449476 - DNA, 33 bp, Homo sapien
tagtgttgcaaaatgctcttgacacaggtcact

SEQ ID NO: 449477 - DNA, 33 bp, Homo sapien
aaacggaaaatttgcacgtcctacaagcaatgt

SEQ ID NO: 449478 - DNA, 33 bp, Homo sapien
aaacggaaaatttgcatgtcctacaagcaatgt

SEQ ID NO: 449479 - DNA, 33 bp, Homo sapien
cctcaatgcgtggactcaaccaggacagcgaga

SEQ ID NO: 449480 - DNA, 33 bp, Homo sapien
cctcaatgcgtggacttaaccaggacagcgaga

SEQ ID NO: 449481 - DNA, 33 bp, Homo sapien
tacacttcagcatgtacgaattcccgtggaata

SEQ ID NO: 449482 - DNA, 33 bp, Homo sapien
tacacttcagcatgtatgaattcccgtggaata

SEQ ID NO: 449483 - DNA, 33 bp, Homo sapien
ccttaacagtgccttaaaaagagcagaagtttt

SEQ ID NO: 449484 - DNA, 33 bp, Homo sapien
ccttaacagtgccttacaaagagcagaagtttt

SEQ ID NO: 449485 - DNA, 33 bp, Homo sapien
ttttttagaaaagttagaagcatattttagact

SEQ ID NO: 449486 - DNA, 33 bp, Homo sapien
ttttttagaaaagttataagcatattttagact

SEQ ID NO: 449487 - DNA, 33 bp, Homo sapien
ggagcagcaggagcaacgcccgcaagagtgtga

SEQ ID NO: 449488 - DNA, 33 bp, Homo sapien
ggagcagcaggagcaatgcccgcaagagtgtga

SEQ ID NO: 449489 - DNA, 33 bp, Homo sapien
caaatgctgaggaaggaaatacacctacagcct

SEQ ID NO: 449490 - DNA, 33 bp, Homo sapien
caaatgctgaggaaggcaatacacctacagcct

SEQ ID NO: 449491 - DNA, 33 bp, Homo sapien
cactctttgtgtcaacccagtaaatggtgattt

SEQ ID NO: 449492 - DNA, 33 bp, Homo sapien
cactctttgtgtcaactcagtaaatggtgattt

SEQ ID NO: 449493 - DNA, 33 bp, Homo sapien
aatgaagtcccaggccccttccttgctctccaa

SEQ ID NO: 449494 - DNA, 33 bp, Homo sapien
aatgaagtcccaggccgcttccttgctctccaa

SEQ ID NO: 449495 - DNA, 33 bp, Homo sapien
aggctgatgcacagccagacaagttcacagcca

SEQ ID NO: 449496 - DNA, 33 bp, Homo sapien
aggctgatgcacagccggacaagttcacagcca

SEQ ID NO: 449497 - DNA, 33 bp, Homo sapien
ggtatgtactcagcaacatgggggactgaggcc

SEQ ID NO: 449498 - DNA, 33 bp, Homo sapien
ggtatgtactcagcaatatgggggactgaggcc

SEQ ID NO: 449499 - DNA, 33 bp, Homo sapien
agaaacgcaagcttcaagagcaagttattttta

SEQ ID NO: 449500 - DNA, 33 bp, Homo sapien
agaaacgcaagcttcatgagcaagttattttta

SEQ ID NO: 449501 - DNA, 33 bp, Homo sapien
tacctgaaagactctacgtggtagtttttgttt

SEQ ID NO: 449502 - DNA, 33 bp, Homo sapien
tacctgaaagactctatgtggtagtttttgttt

SEQ ID NO: 449503 - DNA, 33 bp, Homo sapien
gtaaataggaaaccacagtggtgagttaaaaag

SEQ ID NO: 449504 - DNA, 33 bp, Homo sapien
gtaaataggaaaccacggtggtgagttaaaaag

SEQ ID NO: 449505 - DNA, 33 bp, Homo sapien
tttgctactctgtttccattctctagttcatct

SEQ ID NO: 449506 - DNA, 33 bp, Homo sapien
tttgctactctgtttctattctctagttcatct

SEQ ID NO: 449507 - DNA, 33 bp, Homo sapien
gtgagctctcattaaaagtggtggtctcttaat

SEQ ID NO: 449508 - DNA, 33 bp, Homo sapien
gtgagctctcattaaacgtggtggtctcttaat

SEQ ID NO: 449509 - DNA, 33 bp, Homo sapien
gctatgaaaccaccccaagattgatttagaaaa

SEQ ID NO: 449510 - DNA, 33 bp, Homo sapien
gctatgaaaccaccccgagattgatttagaaaa

SEQ ID NO: 449511 - DNA, 33 bp, Homo sapien
catagccactgaagcactgagaccaggtcatcc

SEQ ID NO: 449512 - DNA, 33 bp, Homo sapien
catagccactgaagcattgagaccaggtcatcc

SEQ ID NO: 449513 - DNA, 33 bp, Homo sapien
cctacctgtctttagcaaacaggagactttatc

SEQ ID NO: 449514 - DNA, 33 bp, Homo sapien
cctacctgtctttagcgaacaggagactttatc

SEQ ID NO: 449515 - DNA, 33 bp, Homo sapien
tggaacactgaaaaccagcggcagaatggcaca

SEQ ID NO: 449516 - DNA, 33 bp, Homo sapien
tggaacactgaaaaccggcggcagaatggcaca

SEQ ID NO: 449517 - DNA, 33 bp, Homo sapien
ttgagaaaagaaactccaggtctgagaacaatg

SEQ ID NO: 449518 - DNA, 33 bp, Homo sapien
ttgagaaaagaaactctaggtctgagaacaatg

SEQ ID NO: 449519 - DNA, 33 bp, Homo sapien
tacacacacagagagaagtcctttttttaactt

SEQ ID NO: 449520 - DNA, 33 bp, Homo sapien
tacacacacagagagatgtcctttttttaactt

SEQ ID NO: 449521 - DNA, 33 bp, Homo sapien
aagcttaatctgcagcaatacaacttcctgtgc

SEQ ID NO: 449522 - DNA, 33 bp, Homo sapien
aagcttaatctgcagcgatacaacttcctgtgc

SEQ ID NO: 449523 - DNA, 33 bp, Homo sapien
aactcagggacatatacgaggatgttatcttta

SEQ ID NO: 449524 - DNA, 33 bp, Homo sapien
aactcagggacatatatgaggatgttatcttta

SEQ ID NO: 449525 - DNA, 33 bp, Homo sapien
tccactctctacttgacaatctccattcggatg

SEQ ID NO: 449526 - DNA, 33 bp, Homo sapien
tccactctctacttgataatctccattcggatg

SEQ ID NO: 449527 - DNA, 33 bp, Homo sapien
tacccaaagtgatagacgagtcaatgcaattcc

SEQ ID NO: 449528 - DNA, 33 bp, Homo sapien
tacccaaagtgatagatgagtcaatgcaattcc

SEQ ID NO: 449529 - DNA, 33 bp, Homo sapien
caaatatactcaacggacacaattccagtggtg

SEQ ID NO: 449530 - DNA, 33 bp, Homo sapien
caaatatactcaacgggcacaattccagtggtg

SEQ ID NO: 449531 - DNA, 33 bp, Homo sapien
cagtggtttggcatccacagaggagatgagggg

SEQ ID NO: 449532 - DNA, 33 bp, Homo sapien
cagtggtttggcatccgcagaggagatgagggg

SEQ ID NO: 449533 - DNA, 33 bp, Homo sapien
agatacgattatatccactaaccagggaattaa

SEQ ID NO: 449534 - DNA, 33 bp, Homo sapien
agatacgattatatcctctaaccagggaattaa

SEQ ID NO: 449535 - DNA, 33 bp, Homo sapien
cttcgtgtcaaacctcagactttcacttaataa

SEQ ID NO: 449536 - DNA, 33 bp, Homo sapien
cttcgtgtcaaacctcggactttcacttaataa

SEQ ID NO: 449537 - DNA, 33 bp, Homo sapien
aacggatagaccatccaagtgagtagctaacat

SEQ ID NO: 449538 - DNA, 33 bp, Homo sapien
aacggatagaccatcccagtgagtagctaacat

SEQ ID NO: 449539 - DNA, 33 bp, Homo sapien
acaccaaccgaggaaggacctgtgttcctgctc

SEQ ID NO: 449540 - DNA, 33 bp, Homo sapien
acaccaaccgaggaagtacctgtgttcctgctc

SEQ ID NO: 449541 - DNA, 33 bp, Homo sapien
ggtgagaagcttcccgaccagaacttgggggag

SEQ ID NO: 449542 - DNA, 33 bp, Homo sapien
ggtgagaagcttcccggccagaacttgggggag

SEQ ID NO: 449543 - DNA, 33 bp, Homo sapien
atctctgtgaacactccatattgatttgttcac

SEQ ID NO: 449544 - DNA, 33 bp, Homo sapien
atctctgtgaacactctatattgatttgttcac

SEQ ID NO: 449545 - DNA, 33 bp, Homo sapien
taagcagacatggtatcagacacactacggggt

SEQ ID NO: 449546 - DNA, 33 bp, Homo sapien
taagcagacatggtattagacacactacggggt

SEQ ID NO: 449547 - DNA, 33 bp, Homo sapien
gtggtactgattgctgaaatttggtcaatgaag

SEQ ID NO: 449548 - DNA, 33 bp, Homo sapien
gtggtactgattgctgcaatttggtcaatgaag

SEQ ID NO: 449549 - DNA, 33 bp, Homo sapien
actaacatggttgaaaacgaactcttggattct

SEQ ID NO: 449550 - DNA, 33 bp, Homo sapien
actaacatggttgaaaccgaactcttggattct

SEQ ID NO: 449551 - DNA, 33 bp, Homo sapien
tctcagtaactgtgaacacataacaccagccca

SEQ ID NO: 449552 - DNA, 33 bp, Homo sapien
tctcagtaactgtgaatacataacaccagccca

SEQ ID NO: 449553 - DNA, 33 bp, Homo sapien
ggattacacaaagaaacgaagctctggaaatgg

SEQ ID NO: 449554 - DNA, 33 bp, Homo sapien
ggattacacaaagaaatgaagctctggaaatgg

SEQ ID NO: 449555 - DNA, 33 bp, Homo sapien
agtatgaaattctctcggacaatcattttctct

SEQ ID NO: 449556 - DNA, 33 bp, Homo sapien
agtatgaaattctctctgacaatcattttctct

SEQ ID NO: 449557 - DNA, 33 bp, Homo sapien
caggatagcttgagaaggataaacaacagacaa

SEQ ID NO: 449558 - DNA, 33 bp, Homo sapien
caggatagcttgagaatgataaacaacagacaa

SEQ ID NO: 449559 - DNA, 33 bp, Homo sapien
tgcacaaagaactgtaggtcaagattccgaaat

SEQ ID NO: 449560 - DNA, 33 bp, Homo sapien
tgcacaaagaactgtatgtcaagattccgaaat

SEQ ID NO: 449561 - DNA, 33 bp, Homo sapien
catcagtgccaagaaccgaaccacacttatggg

SEQ ID NO: 449562 - DNA, 33 bp, Homo sapien
catcagtgccaagaactgaaccacacttatggg

SEQ ID NO: 449563 - DNA, 33 bp, Homo sapien
aaaacatatttcatcaaataatgctgacattat

SEQ ID NO: 449564 - DNA, 33 bp, Homo sapien
aaaacatatttcatcagataatgctgacattat

SEQ ID NO: 449565 - DNA, 33 bp, Homo sapien
ttcacggctttgttgacatataactcacagagc

SEQ ID NO: 449566 - DNA, 33 bp, Homo sapien
ttcacggctttgttgagatataactcacagagc

SEQ ID NO: 449567 - DNA, 33 bp, Homo sapien
gccccaatcaatacacagcacatttccacggcc

SEQ ID NO: 449568 - DNA, 33 bp, Homo sapien
gccccaatcaatacacggcacatttccacggcc

SEQ ID NO: 449569 - DNA, 33 bp, Homo sapien
cactagagcacataaacgagttcagtaagattg

SEQ ID NO: 449570 - DNA, 33 bp, Homo sapien
cactagagcacataaatgagttcagtaagattg

SEQ ID NO: 449571 - DNA, 33 bp, Homo sapien
cagatcagaaccatcaagaactggcaaaggaga

SEQ ID NO: 449572 - DNA, 33 bp, Homo sapien
cagatcagaaccatcatgaactggcaaaggaga

SEQ ID NO: 449573 - DNA, 33 bp, Homo sapien
taaaaatcatttctaccggaccagcattcagaa

SEQ ID NO: 449574 - DNA, 33 bp, Homo sapien
taaaaatcatttctactggaccagcattcagaa

SEQ ID NO: 449575 - DNA, 33 bp, Homo sapien
agttgatgttgtatgcacttagtttttgagatc

SEQ ID NO: 449576 - DNA, 33 bp, Homo sapien
agttgatgttgtatgcgcttagtttttgagatc

SEQ ID NO: 449577 - DNA, 33 bp, Homo sapien
gacaagggaaatcagacgaataaagcgagggtc

SEQ ID NO: 449578 - DNA, 33 bp, Homo sapien
gacaagggaaatcagatgaataaagcgagggtc

SEQ ID NO: 449579 - DNA, 33 bp, Homo sapien
acacatctgaaaacagaaagcaaccacttaaga

SEQ ID NO: 449580 - DNA, 33 bp, Homo sapien
acacatctgaaaacaggaagcaaccacttaaga

SEQ ID NO: 449581 - DNA, 33 bp, Homo sapien
gtgaaaggattgcttaaacccagaagttccaga

SEQ ID NO: 449582 - DNA, 33 bp, Homo sapien
gtgaaaggattgcttacacccagaagttccaga

SEQ ID NO: 449583 - DNA, 33 bp, Homo sapien
gaagttagaggttctcaaaaatcccaggaggta

SEQ ID NO: 449584 - DNA, 33 bp, Homo sapien
gaagttagaggttctcgaaaatcccaggaggta

SEQ ID NO: 449585 - DNA, 33 bp, Homo sapien
cttcatgagatgcacccgcataatcgtttacac

SEQ ID NO: 449586 - DNA, 33 bp, Homo sapien
cttcatgagatgcacctgcataatcgtttacac

SEQ ID NO: 449587 - DNA, 33 bp, Homo sapien
acattcagtgaacctccattaaatcaataaatg

SEQ ID NO: 449588 - DNA, 33 bp, Homo sapien
acattcagtgaacctctattaaatcaataaatg

SEQ ID NO: 449589 - DNA, 33 bp, Homo sapien
atagcagctttctcacaattcacaaactctggg

SEQ ID NO: 449590 - DNA, 33 bp, Homo sapien
atagcagctttctcaccattcacaaactctggg

SEQ ID NO: 449591 - DNA, 33 bp, Homo sapien
gaatatctagaaatagaattgctgtgtgcatgg

SEQ ID NO: 449592 - DNA, 33 bp, Homo sapien
gaatatctagaaataggattgctgtgtgcatgg

SEQ ID NO: 449593 - DNA, 33 bp, Homo sapien
aaaaggcatctacaaaaaaattctaatctcata

SEQ ID NO: 449594 - DNA, 33 bp, Homo sapien
aaaaggcatctacaaagaaattctaatctcata

SEQ ID NO: 449595 - DNA, 33 bp, Homo sapien
aagtttccctgtaagcactattttagcaaggat

SEQ ID NO: 449596 - DNA, 33 bp, Homo sapien
aagtttccctgtaagcgctattttagcaaggat

SEQ ID NO: 449597 - DNA, 33 bp, Homo sapien
gaggtctatgcttgacaatcatctcttaaagtg

SEQ ID NO: 449598 - DNA, 33 bp, Homo sapien
gaggtctatgcttgaccatcatctcttaaagtg

SEQ ID NO: 449599 - DNA, 33 bp, Homo sapien
acagtggctaaaactcggaaaatattgctaaac

SEQ ID NO: 449600 - DNA, 33 bp, Homo sapien
acagtggctaaaactctgaaaatattgctaaac

SEQ ID NO: 449601 - DNA, 33 bp, Homo sapien
gtcctacctgcagggtaaagcaaggagagaaaa

SEQ ID NO: 449602 - DNA, 33 bp, Homo sapien
gtcctacctgcagggtgaagcaaggagagaaaa

SEQ ID NO: 449603 - DNA, 33 bp, Homo sapien
tttgggtggagttagaaacttgaatcctttatt

SEQ ID NO: 449604 - DNA, 33 bp, Homo sapien
tttgggtggagttagagacttgaatcctttatt

SEQ ID NO: 449605 - DNA, 33 bp, Homo sapien
atagcatcttacctcacgatcaaacctggcaac

SEQ ID NO: 449606 - DNA, 33 bp, Homo sapien
atagcatcttacctcatgatcaaacctggcaac

SEQ ID NO: 449607 - DNA, 33 bp, Homo sapien
tgggctgtggcagcaactggtccacggaggcag

SEQ ID NO: 449608 - DNA, 33 bp, Homo sapien
tgggctgtggcagcaattggtccacggaggcag

SEQ ID NO: 449609 - DNA, 33 bp, Homo sapien
atccacggcacaagcactctgtctttcccatca

SEQ ID NO: 449610 - DNA, 33 bp, Homo sapien
atccacggcacaagcattctgtctttcccatca

SEQ ID NO: 449611 - DNA, 33 bp, Homo sapien
ggtagatggatgaagacgcctagtgcatgcaga

SEQ ID NO: 449612 - DNA, 33 bp, Homo sapien
ggtagatggatgaagatgcctagtgcatgcaga

SEQ ID NO: 449613 - DNA, 33 bp, Homo sapien
tccagcaacagaaggaccgtttttcccagatgg

SEQ ID NO: 449614 - DNA, 33 bp, Homo sapien
tccagcaacagaaggatcgtttttcccagatgg

SEQ ID NO: 449615 - DNA, 33 bp, Homo sapien
gtcatgtccagtcccacgccaaagtgtgagaga

SEQ ID NO: 449616 - DNA, 33 bp, Homo sapien
gtcatgtccagtcccatgccaaagtgtgagaga

SEQ ID NO: 449617 - DNA, 33 bp, Homo sapien
gcagtcacttcctccactgaaggcttgaaccct

SEQ ID NO: 449618 - DNA, 33 bp, Homo sapien
gcagtcacttcctccattgaaggcttgaaccct

SEQ ID NO: 449619 - DNA, 33 bp, Homo sapien
gtggattctgttggatcatatatgtctaaatat

SEQ ID NO: 449620 - DNA, 33 bp, Homo sapien
gtggattctgttggattatatatgtctaaatat

SEQ ID NO: 449621 - DNA, 33 bp, Homo sapien
acccgagaaggacccaatgaagacagcatcagc

SEQ ID NO: 449622 - DNA, 33 bp, Homo sapien
acccgagaaggacccactgaagacagcatcagc

SEQ ID NO: 449623 - DNA, 33 bp, Homo sapien
atatttgagtcacggaggtgcagagttgcttct

SEQ ID NO: 449624 - DNA, 33 bp, Homo sapien
atatttgagtcacggatgtgcagagttgcttct

SEQ ID NO: 449625 - DNA, 33 bp, Homo sapien
ctacgctggaccataaaatctgtgggaatgata

SEQ ID NO: 449626 - DNA, 33 bp, Homo sapien
ctacgctggaccataacatctgtgggaatgata

SEQ ID NO: 449627 - DNA, 33 bp, Homo sapien
catgccagagatatgacggagtgtggtctaaat

SEQ ID NO: 449628 - DNA, 33 bp, Homo sapien
catgccagagatatgatggagtgtggtctaaat

SEQ ID NO: 449629 - DNA, 33 bp, Homo sapien
tcatattgaatgtaaactgaaataaaactagga

SEQ ID NO: 449630 - DNA, 33 bp, Homo sapien
tcatattgaatgtaaagtgaaataaaactagga

SEQ ID NO: 449631 - DNA, 33 bp, Homo sapien
tctttctacaacagggaatgtgagtgacttgta

SEQ ID NO: 449632 - DNA, 33 bp, Homo sapien
tctttctacaacaggggatgtgagtgacttgta

SEQ ID NO: 449633 - DNA, 33 bp, Homo sapien
gtatagttcaaggttacggaatagcattttgct

SEQ ID NO: 449634 - DNA, 33 bp, Homo sapien
gtatagttcaaggttatggaatagcattttgct

SEQ ID NO: 449635 - DNA, 33 bp, Homo sapien
cctaactgtccttccacggatgaataaactgca

SEQ ID NO: 449636 - DNA, 33 bp, Homo sapien
cctaactgtccttccatggatgaataaactgca

SEQ ID NO: 449637 - DNA, 33 bp, Homo sapien
tacaatttaactctaaagttcctctcagctttt

SEQ ID NO: 449638 - DNA, 33 bp, Homo sapien
tacaatttaactctaaggttcctctcagctttt

SEQ ID NO: 449639 - DNA, 33 bp, Homo sapien
gagttatttagggtcaaacatctggttctgttt

SEQ ID NO: 449640 - DNA, 33 bp, Homo sapien
gagttatttagggtcagacatctggttctgttt

SEQ ID NO: 449641 - DNA, 33 bp, Homo sapien
ggtggtattttgatagaccattggaacagaata

SEQ ID NO: 449642 - DNA, 33 bp, Homo sapien
ggtggtattttgataggccattggaacagaata

SEQ ID NO: 449643 - DNA, 33 bp, Homo sapien
atagtctccaatttcaacccagtcactgtgaat

SEQ ID NO: 449644 - DNA, 33 bp, Homo sapien
atagtctccaatttcatcccagtcactgtgaat

SEQ ID NO: 449645 - DNA, 33 bp, Homo sapien
caaactatcacaagaacagagaaaccaaccccc

SEQ ID NO: 449646 - DNA, 33 bp, Homo sapien
caaactatcacaagaagagagaaaccaaccccc

SEQ ID NO: 449647 - DNA, 33 bp, Homo sapien; identical to SEQ ID NO: 449645

SEQ ID NO: 449648 - DNA, 33 bp, Homo sapien; identical to SEQ ID NO: 449646

SEQ ID NO: 449649 - DNA, 33 bp, Homo sapien
ccctggagaggtatgcagatttccttggaggat

SEQ ID NO: 449650 - DNA, 33 bp, Homo sapien
ccctggagaggtatgcggatttccttggaggat

SEQ ID NO: 449651 - DNA, 33 bp, Homo sapien
ccaagagagaagtcacagatgtggacacaccct

SEQ ID NO: 449652 - DNA, 33 bp, Homo sapien
ccaagagagaagtcacggatgtggacacaccct

SEQ ID NO: 449653 - DNA, 33 bp, Homo sapien
ttaatgtgatatacgcacaggagggacagccta

SEQ ID NO: 449654 - DNA, 33 bp, Homo sapien
ttaatgtgatatacgcgcaggagggacagccta

SEQ ID NO: 449655 - DNA, 33 bp, Homo sapien
tgtttcctgctaaaagcccttaataatgtctat

SEQ ID NO: 449656 - DNA, 33 bp, Homo sapien
tgtttcctgctaaaagtccttaataatgtctat

SEQ ID NO: 449657 - DNA, 33 bp, Homo sapien
cttgccattagtattcaatgctggacaaggcag

SEQ ID NO: 449658 - DNA, 33 bp, Homo sapien
cttgccattagtattcgatgctggacaaggcag

SEQ ID NO: 449659 - DNA, 33 bp, Homo sapien
gagacatacaaaacccactcacagcagcactgt

SEQ ID NO: 449660 - DNA, 33 bp, Homo sapien
gagacatacaaaacccgctcacagcagcactgt

SEQ ID NO: 449661 - DNA, 33 bp, Homo sapien
cacacatccgccttgcacccttactggagcttc

SEQ ID NO: 449662 - DNA, 33 bp, Homo sapien
cacacatccgccttgcccccttactggagcttc

SEQ ID NO: 449663 - DNA, 33 bp, Homo sapien
cttactggagcttctgaaacaccgagtcaggtc

SEQ ID NO: 449664 - DNA, 33 bp, Homo sapien
cttactggagcttctgcaacaccgagtcaggtc

SEQ ID NO: 449665 - DNA, 33 bp, Homo sapien
tgttaaaaagctatcaaagtatggcaagcagtt

SEQ ID NO: 449666 - DNA, 33 bp, Homo sapien
tgttaaaaagctatcacagtatggcaagcagtt

SEQ ID NO: 449667 - DNA, 33 bp, Homo sapien
gcagaaatgctgtaaacagtgatgtctaaatgt

SEQ ID NO: 449668 - DNA, 33 bp, Homo sapien
gcagaaatgctgtaaagagtgatgtctaaatgt

SEQ ID NO: 449669 - DNA, 33 bp, Homo sapien
tatgaagttcaagaacaaagcttgagaaagaaa

SEQ ID NO: 449670 - DNA, 33 bp, Homo sapien
tatgaagttcaagaacgaagcttgagaaagaaa

SEQ ID NO: 449671 - DNA, 33 bp, Homo sapien
ggctggcttttgagccactgggatagcctcaca

SEQ ID NO: 449672 - DNA, 33 bp, Homo sapien
ggctggcttttgagccgctgggatagcctcaca

SEQ ID NO: 449673 - DNA, 33 bp, Homo sapien
ccttgcctggagacaccgtggtacctcttgcta

SEQ ID NO: 449674 - DNA, 33 bp, Homo sapien
ccttgcctggagacactgtggtacctcttgcta

SEQ ID NO: 449675 - DNA, 33 bp, Homo sapien
aacctcctgacccttcgatcaggtgctccgaaa

SEQ ID NO: 449676 - DNA, 33 bp, Homo sapien
aacctcctgacccttctatcaggtgctccgaaa

SEQ ID NO: 449677 - DNA, 33 bp, Homo sapien
gatcttatgtaccaagaaatgtttgctacggct

SEQ ID NO: 449678 - DNA, 33 bp, Homo sapien
gatcttatgtaccaaggaatgtttgctacggct

SEQ ID NO: 449679 - DNA, 33 bp, Homo sapien
agggagagatgagaacagaaggaatggagaggg

SEQ ID NO: 449680 - DNA, 33 bp, Homo sapien
agggagagatgagaactgaaggaatggagaggg

SEQ ID NO: 449681 - DNA, 33 bp, Homo sapien
ttcttggacaggaacacgaccgctgctgcgccc

SEQ ID NO: 449682 - DNA, 33 bp, Homo sapien
ttcttggacaggaacatgaccgctgctgcgccc

SEQ ID NO: 449683 - DNA, 33 bp, Homo sapien
gctgaagggttaataacgagaagcacgtgctta

SEQ ID NO: 449684 - DNA, 33 bp, Homo sapien
gctgaagggttaataatgagaagcacgtgctta

SEQ ID NO: 449685 - DNA, 33 bp, Homo sapien
cttcaagcccagcaaaaaattcttactgcagcc

SEQ ID NO: 449686 - DNA, 33 bp, Homo sapien
cttcaagcccagcaaagaattcttactgcagcc

SEQ ID NO: 449687 - DNA, 33 bp, Homo sapien
agctatgttttcctacggctaaatgtgcctgtg

SEQ ID NO: 449688 - DNA, 33 bp, Homo sapien
agctatgttttcctactgctaaatgtgcctgtg

SEQ ID NO: 449689 - DNA, 33 bp, Homo sapien
tgggcttgattttaagccaattgatgtgggaaa

SEQ ID NO: 449690 - DNA, 33 bp, Homo sapien
tgggcttgattttaagtcaattgatgtgggaaa

SEQ ID NO: 449691 - DNA, 33 bp, Homo sapien
atcctgaaatgtatgaaggcaagctgtataggg

SEQ ID NO: 449692 - DNA, 33 bp, Homo sapien
atcctgaaatgtatgacggcaagctgtataggg

SEQ ID NO: 449693 - DNA, 33 bp, Homo sapien
cagactacaggataccaatgatttcactattga

SEQ ID NO: 449694 - DNA, 33 bp, Homo sapien
cagactacaggataccgatgatttcactattga

SEQ ID NO: 449695 - DNA, 33 bp, Homo sapien
tggctaatgcatgaaacgagagcaagaatggtg

SEQ ID NO: 449696 - DNA, 33 bp, Homo sapien
tggctaatgcatgaaaggagagcaagaatggtg

SEQ ID NO: 449697 - DNA, 33 bp, Homo sapien
tccagtactggactaaagcatcagaatgttctt

SEQ ID NO: 449698 - DNA, 33 bp, Homo sapien
tccagtactggactaatgcatcagaatgttctt

SEQ ID NO: 449699 - DNA, 33 bp, Homo sapien
aaatactgtgactgcaaaacatcaaatcaaggc

SEQ ID NO: 449700 - DNA, 33 bp, Homo sapien
aaatactgtgactgcagaacatcaaatcaaggc

SEQ ID NO: 449701 - DNA, 33 bp, Homo sapien
tccgaataggatggaactgttttttctgtggtg

SEQ ID NO: 449702 - DNA, 33 bp, Homo sapien
tccgaataggatggaattgttttttctgtggtg

SEQ ID NO: 449703 - DNA, 33 bp, Homo sapien
ctataggggtgtcgaaagtggattagaatttgg

SEQ ID NO: 449704 - DNA, 33 bp, Homo sapien
ctataggggtgtcgaaggtggattagaatttgg

SEQ ID NO: 449705 - DNA, 33 bp, Homo sapien
cagtctttaccctgctcagacgagcttcagctg

SEQ ID NO: 449706 - DNA, 33 bp, Homo sapien
cagtctttaccctgcttagacgagcttcagctg

SEQ ID NO: 449707 - DNA, 33 bp, Homo sapien
aaagcaactcagtcaacaaggtgaggccaccac

SEQ ID NO: 449708 - DNA, 33 bp, Homo sapien
aaagcaactcagtcaataaggtgaggccaccac

SEQ ID NO: 449709 - DNA, 33 bp, Homo sapien
tggctggtggagaagaagatatggagatggcat

SEQ ID NO: 449710 - DNA, 33 bp, Homo sapien
tggctggtggagaagaggatatggagatggcat

SEQ ID NO: 449711 - DNA, 33 bp, Homo sapien
gtgactccagaaacccagctctgtgttgggtgc

SEQ ID NO: 449712 - DNA, 33 bp, Homo sapien
gtgactccagaaacccggctctgtgttgggtgc

SEQ ID NO: 449713 - DNA, 33 bp, Homo sapien
gtagctgaggccctgaaatgattacatccctga

SEQ ID NO: 449714 - DNA, 33 bp, Homo sapien
gtagctgaggccctgatatgattacatccctga

SEQ ID NO: 449715 - DNA, 33 bp, Homo sapien
ttcatcacctacaggagctggcaacctatggat

SEQ ID NO: 449716 - DNA, 33 bp, Homo sapien
ttcatcacctacaggatctggcaacctatggat

SEQ ID NO: 449717 - DNA, 33 bp, Homo sapien
tgaactcaagatatgaaatgaagagaaatattt

SEQ ID NO: 449718 - DNA, 33 bp, Homo sapien
tgaactcaagatatgagatgaagagaaatattt

SEQ ID NO: 449719 - DNA, 33 bp, Homo sapien
tctgtggccaaaacacaagacaatgcctgtcaa

SEQ ID NO: 449720 - DNA, 33 bp, Homo sapien
tctgtggccaaaacacgagacaatgcctgtcaa

SEQ ID NO: 449721 - DNA, 33 bp, Homo sapien
agtttggatatttgcaaggacaatgatgacagt

SEQ ID NO: 449722 - DNA, 33 bp, Homo sapien
agtttggatatttgcatggacaatgatgacagt

SEQ ID NO: 449723 - DNA, 33 bp, Homo sapien
gccattgcccttgaagcatctttactgtggctg

SEQ ID NO: 449724 - DNA, 33 bp, Homo sapien
gccattgcccttgaagtatctttactgtggctg

SEQ ID NO: 449725 - DNA, 33 bp, Homo sapien
gtcttctgacatagtacgaaatgtgcacctctt

SEQ ID NO: 449726 - DNA, 33 bp, Homo sapien
gtcttctgacatagtatgaaatgtgcacctctt

SEQ ID NO: 449727 - DNA, 33 bp, Homo sapien
taatactcttaggaaccctgattctcaaagtaa

SEQ ID NO: 449728 - DNA, 33 bp, Homo sapien
taatactcttaggaactctgattctcaaagtaa

SEQ ID NO: 449729 - DNA, 33 bp, Homo sapien
cggcaactacttaaagacattcttgaggcctct

SEQ ID NO: 449730 - DNA, 33 bp, Homo sapien
cggcaactacttaaagtcattcttgaggcctct

SEQ ID NO: 449731 - DNA, 33 bp, Homo sapien
accaggaccagtccacaaaaagctgaggcactc

SEQ ID NO: 449732 - DNA, 33 bp, Homo sapien
accaggaccagtccacgaaaagctgaggcactc

SEQ ID NO: 449733 - DNA, 33 bp, Homo sapien
accattgagtttagcaaacaaaacgccaacatt

SEQ ID NO: 449734 - DNA, 33 bp, Homo sapien
accattgagtttagcagacaaaacgccaacatt

SEQ ID NO: 449735 - DNA, 33 bp, Homo sapien
ttgttcatcatggaaaagccctgaggatgttgc

SEQ ID NO: 449736 - DNA, 33 bp, Homo sapien
ttgttcatcatggaaaggccctgaggatgttgc

SEQ ID NO: 449737 - DNA, 33 bp, Homo sapien
atgtgtttcctgattagggggagctggcagtct

SEQ ID NO: 449738 - DNA, 33 bp, Homo sapien
atgtgtttcctgattatggggagctggcagtct

SEQ ID NO: 449739 - DNA, 33 bp, Homo sapien
tgtagactctacattaccgtttctcttgactgc

SEQ ID NO: 449740 - DNA, 33 bp, Homo sapien
tgtagactctacattatcgtttctcttgactgc

SEQ ID NO: 449741 - DNA, 33 bp, Homo sapien
attatgtgtcactagaagaagcaaaggagaggt

SEQ ID NO: 449742 - DNA, 33 bp, Homo sapien
attatgtgtcactagacgaagcaaaggagaggt

SEQ ID NO: 449743 - DNA, 33 bp, Homo sapien
gaacaagttattgacagagagaaatcagaatca

SEQ ID NO: 449744 - DNA, 33 bp, Homo sapien
gaacaagttattgacatagagaaatcagaatca

SEQ ID NO: 449745 - DNA, 33 bp, Homo sapien
tcctctcaagtaggtacgcctctatccttattt

SEQ ID NO: 449746 - DNA, 33 bp, Homo sapien
tcctctcaagtaggtatgcctctatccttattt

SEQ ID NO: 449747 - DNA, 33 bp, Homo sapien
agaattctggcacttgcaggatttagaatcaaa

SEQ ID NO: 449748 - DNA, 33 bp, Homo sapien
agaattctggcacttgtaggatttagaatcaaa

SEQ ID NO: 449749 - DNA, 33 bp, Homo sapien
ctgagtacgaaccactaaacagaagatgggggt

SEQ ID NO: 449750 - DNA, 33 bp, Homo sapien
ctgagtacgaaccacttaacagaagatgggggt

SEQ ID NO: 449751 - DNA, 33 bp, Homo sapien
ctgaatctaatcaagacgtcagagttaatattc

SEQ ID NO: 449752 - DNA, 33 bp, Homo sapien
ctgaatctaatcaagatgtcagagttaatattc

SEQ ID NO: 449753 - DNA, 33 bp, Homo sapien
ccacaggaaattagtgcaattagttgttaggaa

SEQ ID NO: 449754 - DNA, 33 bp, Homo sapien
ccacaggaaattagtgtaattagttgttaggaa

SEQ ID NO: 449755 - DNA, 33 bp, Homo sapien
ctagataccattgagaatacacaaagctgcaaa

SEQ ID NO: 449756 - DNA, 33 bp, Homo sapien
ctagataccattgagagtacacaaagctgcaaa

SEQ ID NO: 449757 - DNA, 33 bp, Homo sapien
aaacctcttttctttgcagattgcccagtctca

SEQ ID NO: 449758 - DNA, 33 bp, Homo sapien
aaacctcttttctttgtagattgcccagtctca

SEQ ID NO: 449759 - DNA, 33 bp, Homo sapien
catccaagaggtgaaactgcatgtgtaaaaaat

SEQ ID NO: 449760 - DNA, 33 bp, Homo sapien
catccaagaggtgaaattgcatgtgtaaaaaat

SEQ ID NO: 449761 - DNA, 33 bp, Homo sapien
caccttggcccgttcacgctctctactctgtaa

SEQ ID NO: 449762 - DNA, 33 bp, Homo sapien
caccttggcccgttcaggctctctactctgtaa

SEQ ID NO: 449763 - DNA, 33 bp, Homo sapien
tgctttttgcacaaaactgatttggctcttctg

SEQ ID NO: 449764 - DNA, 33 bp, Homo sapien
tgctttttgcacaaaattgatttggctcttctg

SEQ ID NO: 449765 - DNA, 33 bp, Homo sapien
aatagctctttaacaaacaagataagatctcat

SEQ ID NO: 449766 - DNA, 33 bp, Homo sapien
aatagctctttaacaagcaagataagatctcat

SEQ ID NO: 449767 - DNA, 33 bp, Homo sapien
atgaatacttatatcaaagcatcacaatatata

SEQ ID NO: 449768 - DNA, 33 bp, Homo sapien
atgaatacttatatcagagcatcacaatatata

SEQ ID NO: 449769 - DNA, 33 bp, Homo sapien
ttactcagtatacttcgcaaactgctttctcta

SEQ ID NO: 449770 - DNA, 33 bp, Homo sapien
ttactcagtatacttctcaaactgctttctcta

SEQ ID NO: 449771 - DNA, 33 bp, Homo sapien
tatataaattttctgcaagagttatttctccta

SEQ ID NO: 449772 - DNA, 33 bp, Homo sapien
tatataaattttctgctagagttatttctccta

SEQ ID NO: 449773 - DNA, 33 bp, Homo sapien
gatgtgtatttgatgacctttactccactagag

SEQ ID NO: 449774 - DNA, 33 bp, Homo sapien
gatgtgtatttgatgatctttactccactagag

SEQ ID NO: 449775 - DNA, 33 bp, Homo sapien
gtcatgccaggtgaaaaaagaccacatactgta

SEQ ID NO: 449776 - DNA, 33 bp, Homo sapien
gtcatgccaggtgaaagaagaccacatactgta

SEQ ID NO: 449777 - DNA, 33 bp, Homo sapien
attctctgaaggaagacgtggtgtttgagctga

SEQ ID NO: 449778 - DNA, 33 bp, Homo sapien
attctctgaaggaagaggtggtgtttgagctga

SEQ ID NO: 449779 - DNA, 33 bp, Homo sapien
ctgtgaagcctctttcacctgttccttctgatt

SEQ ID NO: 449780 - DNA, 33 bp, Homo sapien
ctgtgaagcctctttcgcctgttccttctgatt

SEQ ID NO: 449781 - DNA, 33 bp, Homo sapien
gaaataaagtcagatacaaaccaacatgagaac

SEQ ID NO: 449782 - DNA, 33 bp, Homo sapien
gaaataaagtcagatataaaccaacatgagaac

SEQ ID NO: 449783 - DNA, 33 bp, Homo sapien
catttacattccactaacctgtaacataggaaa

SEQ ID NO: 449784 - DNA, 33 bp, Homo sapien
catttacattccactagcctgtaacataggaaa

SEQ ID NO: 449785 - DNA, 33 bp, Homo sapien
gctgctattctcaaaaccaaacttctgttttaa

SEQ ID NO: 449786 - DNA, 33 bp, Homo sapien
gctgctattctcaaaatcaaacttctgttttaa

SEQ ID NO: 449787 - DNA, 33 bp, Homo sapien
caaacacctcatctctaaaacaggaacatagca

SEQ ID NO: 449788 - DNA, 33 bp, Homo sapien
caaacacctcatctctgaaacaggaacatagca

SEQ ID NO: 449789 - DNA, 33 bp, Homo sapien
ctaacgttatgtcatgcattctctgtgttctta

SEQ ID NO: 449790 - DNA, 33 bp, Homo sapien
ctaacgttatgtcatggattctctgtgttctta

SEQ ID NO: 449791 - DNA, 33 bp, Homo sapien
ctgaccttgacctcgaaacagacctcagccttt

SEQ ID NO: 449792 - DNA, 33 bp, Homo sapien
ctgaccttgacctcgacacagacctcagccttt

SEQ ID NO: 449793 - DNA, 33 bp, Homo sapien
ctactagagtgggcaacacaatgaagctctttc

SEQ ID NO: 449794 - DNA, 33 bp, Homo sapien
ctactagagtgggcaatacaatgaagctctttc

SEQ ID NO: 449795 - DNA, 33 bp, Homo sapien
atttcatctttgaaaaatagacaagagtagttt

SEQ ID NO: 449796 - DNA, 33 bp, Homo sapien
atttcatctttgaaaagtagacaagagtagttt

SEQ ID NO: 449797 - DNA, 33 bp, Homo sapien
agagaaaactagagaacagagttgcagaatctt

SEQ ID NO: 449798 - DNA, 33 bp, Homo sapien
agagaaaactagagaagagagttgcagaatctt

SEQ ID NO: 449799 - DNA, 33 bp, Homo sapien
ggcatgaatacatcaacagtggagataaaatgg

SEQ ID NO: 449800 - DNA, 33 bp, Homo sapien
ggcatgaatacatcaatagtggagataaaatgg

SEQ ID NO: 449801 - DNA, 33 bp, Homo sapien
ctcaacgattaaattacatattgcaagcaagcc

SEQ ID NO: 449802 - DNA, 33 bp, Homo sapien
ctcaacgattaaattatatattgcaagcaagcc

SEQ ID NO: 449803 - DNA, 33 bp, Homo sapien
ggacaccttgtatgacccttagagaaaggagca

SEQ ID NO: 449804 - DNA, 33 bp, Homo sapien
ggacaccttgtatgactcttagagaaaggagca

SEQ ID NO: 449805 - DNA, 33 bp, Homo sapien
gaccgacacacctgcaaaaacgtaattcctttg

SEQ ID NO: 449806 - DNA, 33 bp, Homo sapien
gaccgacacacctgcagaaacgtaattcctttg

SEQ ID NO: 449807 - DNA, 33 bp, Homo sapien
agctgctcctaaactgacactaaaatgggtttc

SEQ ID NO: 449808 - DNA, 33 bp, Homo sapien
agctgctcctaaactggcactaaaatgggtttc

SEQ ID NO: 449809 - DNA, 33 bp, Homo sapien
cagctgacgtgttcacaattttaagcttctact

SEQ ID NO: 449810 - DNA, 33 bp, Homo sapien
cagctgacgtgttcacgattttaagcttctact

SEQ ID NO: 449811 - DNA, 33 bp, Homo sapien
aggtatcttttccacaacctcttctgacaaagc

SEQ ID NO: 449812 - DNA, 33 bp, Homo sapien
aggtatcttttccacaccctcttctgacaaagc

SEQ ID NO: 449813 - DNA, 33 bp, Homo sapien
gtgtttgttaccagaaaacataaatgccgttat

SEQ ID NO: 449814 - DNA, 33 bp, Homo sapien
gtgtttgttaccagaacacataaatgccgttat

SEQ ID NO: 449815 - DNA, 33 bp, Homo sapien
aaggatcatagagacaaagaagtaactactgta

SEQ ID NO: 449816 - DNA, 33 bp, Homo sapien
aaggatcatagagacagagaagtaactactgta

SEQ ID NO: 449817 - DNA, 33 bp, Homo sapien
acaaatcaaatgcataaacctgactaaaagcat

SEQ ID NO: 449818 - DNA, 33 bp, Homo sapien
acaaatcaaatgcatagacctgactaaaagcat

SEQ ID NO: 449819 - DNA, 33 bp, Homo sapien
gcagctactttgaaaacggtttggcatctctct

SEQ ID NO: 449820 - DNA, 33 bp, Homo sapien
gcagctactttgaaaatggtttggcatctctct

SEQ ID NO: 449821 - DNA, 33 bp, Homo sapien
ttgaattgcttttttagatttgccaaaaatctg

SEQ ID NO: 449822 - DNA, 33 bp, Homo sapien
ttgaattgcttttttatatttgccaaaaatctg

SEQ ID NO: 449823 - DNA, 33 bp, Homo sapien
attaagctaacctgtcactagaaaactttacac

SEQ ID NO: 449824 - DNA, 33 bp, Homo sapien
attaagctaacctgtcgctagaaaactttacac

SEQ ID NO: 449825 - DNA, 33 bp, Homo sapien
aagataaagtacagcacgtttctgacactgcca

SEQ ID NO: 449826 - DNA, 33 bp, Homo sapien
aagataaagtacagcaggtttctgacactgcca

SEQ ID NO: 449827 - DNA, 33 bp, Homo sapien
tctctgtctgctttcccgctagttttatgtgaa

SEQ ID NO: 449828 - DNA, 33 bp, Homo sapien
tctctgtctgctttcctgctagttttatgtgaa

SEQ ID NO: 449829 - DNA, 33 bp, Homo sapien
gtgtaagcaatgcagcacacacaaatcaaaagg

SEQ ID NO: 449830 - DNA, 33 bp, Homo sapien
gtgtaagcaatgcagcgcacacaaatcaaaagg

SEQ ID NO: 449831 - DNA, 33 bp, Homo sapien
tatattttcacaccaagagtatgttggagcttt

SEQ ID NO: 449832 - DNA, 33 bp, Homo sapien
tatattttcacaccaatagtatgttggagcttt

SEQ ID NO: 449833 - DNA, 33 bp, Homo sapien
gccctggataacatatgaatagcttggatcatt

SEQ ID NO: 449834 - DNA, 33 bp, Homo sapien
gccctggataacatattaatagcttggatcatt

SEQ ID NO: 449835 - DNA, 33 bp, Homo sapien
ataaatggcaataaaagtttctttgagactgaa

SEQ ID NO: 449836 - DNA, 33 bp, Homo sapien
ataaatggcaataaaattttctttgagactgaa

SEQ ID NO: 449837 - DNA, 33 bp, Homo sapien
gcactctggcaacaccaaagaccctggctgcta

SEQ ID NO: 449838 - DNA, 33 bp, Homo sapien
gcactctggcaacaccgaagaccctggctgcta

SEQ ID NO: 449839 - DNA, 33 bp, Homo sapien
ttgccttgcacttatcactcaattgctgagatg

SEQ ID NO: 449840 - DNA, 33 bp, Homo sapien
ttgccttgcacttatcgctcaattgctgagatg

SEQ ID NO: 449841 - DNA, 33 bp, Homo sapien
ggaattgagaaaacaacgaggtggaggcggagg

SEQ ID NO: 449842 - DNA, 33 bp, Homo sapien
ggaattgagaaaacaatgaggtggaggcggagg

SEQ ID NO: 449843 - DNA, 33 bp, Homo sapien
tcttttttccattttcaaaatcgatcctcactg

SEQ ID NO: 449844 - DNA, 33 bp, Homo sapien
tcttttttccattttctaaatcgatcctcactg

SEQ ID NO: 449845 - DNA, 33 bp, Homo sapien
catagaattgaatgaaagagaaacacttactgg

SEQ ID NO: 449846 - DNA, 33 bp, Homo sapien
catagaattgaatgaaggagaaacacttactgg

SEQ ID NO: 449847 - DNA, 33 bp, Homo sapien
cagcatggtactgatacaaaaagagacacatag

SEQ ID NO: 449848 - DNA, 33 bp, Homo sapien
cagcatggtactgatagaaaaagagacacatag

SEQ ID NO: 449849 - DNA, 33 bp, Homo sapien
agcactctcatttacaatggccacacaaaggag

SEQ ID NO: 449850 - DNA, 33 bp, Homo sapien
agcactctcatttacagtggccacacaaaggag

SEQ ID NO: 449851 - DNA, 33 bp, Homo sapien
tttaaccacagtataacgcctttcaaaattgga

SEQ ID NO: 449852 - DNA, 33 bp, Homo sapien
tttaaccacagtataatgcctttcaaaattgga

SEQ ID NO: 449853 - DNA, 33 bp, Homo sapien
atgatgttatttttacacttagattcctgatcc

SEQ ID NO: 449854 - DNA, 33 bp, Homo sapien
atgatgttatttttacccttagattcctgatcc

SEQ ID NO: 449855 - DNA, 33 bp, Homo sapien
agaatataaactcctaagcaaatgagtagtcct

SEQ ID NO: 449856 - DNA, 33 bp, Homo sapien
agaatataaactcctacgcaaatgagtagtcct

SEQ ID NO: 449857 - DNA, 33 bp, Homo sapien
tttcaactctgtgcaacgctaggaacgggaaaa

SEQ ID NO: 449858 - DNA, 33 bp, Homo sapien
tttcaactctgtgcaatgctaggaacgggaaaa

SEQ ID NO: 449859 - DNA, 33 bp, Homo sapien
agatacatgaaagaccaggacagagttaaatgc

SEQ ID NO: 449860 - DNA, 33 bp, Homo sapien
agatacatgaaagaccgggacagagttaaatgc

SEQ ID NO: 449861 - DNA, 33 bp, Homo sapien
gtaactagactgattaaggtatagaaataatgt

SEQ ID NO: 449862 - DNA, 33 bp, Homo sapien
gtaactagactgattagggtatagaaataatgt

SEQ ID NO: 449863 - DNA, 33 bp, Homo sapien
gaatatgtgtttaatgacagcatattattctac

SEQ ID NO: 449864 - DNA, 33 bp, Homo sapien
gaatatgtgtttaatggcagcatattattctac

SEQ ID NO: 449865 - DNA, 33 bp, Homo sapien
tgctgtgtattgactcagaaatataaccagggg

SEQ ID NO: 449866 - DNA, 33 bp, Homo sapien
tgctgtgtattgactccgaaatataaccagggg

SEQ ID NO: 449867 - DNA, 33 bp, Homo sapien
gacctaagagaatctcacagatcctagaatcac

SEQ ID NO: 449868 - DNA, 33 bp, Homo sapien
gacctaagagaatctcgcagatcctagaatcac

SEQ ID NO: 449869 - DNA, 33 bp, Homo sapien
tgcttattcattcaccacccaaaagatacaggc

SEQ ID NO: 449870 - DNA, 33 bp, Homo sapien
tgcttattcattcaccgcccaaaagatacaggc

SEQ ID NO: 449871 - DNA, 33 bp, Homo sapien
accttccctgctgagccccgggtgtgtaaacat

SEQ ID NO: 449872 - DNA, 33 bp, Homo sapien
accttccctgctgagctccgggtgtgtaaacat

SEQ ID NO: 449873 - DNA, 33 bp, Homo sapien
ctgacaatggcctataagtcatgttggttatta

SEQ ID NO: 449874 - DNA, 33 bp, Homo sapien
ctgacaatggcctatatgtcatgttggttatta

SEQ ID NO: 449875 - DNA, 33 bp, Homo sapien
tgttactttgtttgcaccctccagtccttcctg

SEQ ID NO: 449876 - DNA, 33 bp, Homo sapien
tgttactttgtttgcatcctccagtccttcctg

SEQ ID NO: 449877 - DNA, 33 bp, Homo sapien
tgcttcaccatgtcaactatttaaaaacaaaca

SEQ ID NO: 449878 - DNA, 33 bp, Homo sapien
tgcttcaccatgtcaagtatttaaaaacaaaca

SEQ ID NO: 449879 - DNA, 33 bp, Homo sapien
aaataccacttattgaccagaaaagagaatttc

SEQ ID NO: 449880 - DNA, 33 bp, Homo sapien
aaataccacttattgatcagaaaagagaatttc

SEQ ID NO: 449881 - DNA, 33 bp, Homo sapien
ccctgagatttcagcaaattaaataagaacatg

SEQ ID NO: 449882 - DNA, 33 bp, Homo sapien
ccctgagatttcagcagattaaataagaacatg

SEQ ID NO: 449883 - DNA, 33 bp, Homo sapien
tttagcattcatgttacagccactgccagtgag

SEQ ID NO: 449884 - DNA, 33 bp, Homo sapien
tttagcattcatgttagagccactgccagtgag

SEQ ID NO: 449885 - DNA, 33 bp, Homo sapien
gctgtatttggagataaggctgttaaagtggtg

SEQ ID NO: 449886 - DNA, 33 bp, Homo sapien
gctgtatttggagatagggctgttaaagtggtg

SEQ ID NO: 449887 - DNA, 33 bp, Homo sapien
gtagaagcagctctaacgaaccattctctgtat

SEQ ID NO: 449888 - DNA, 33 bp, Homo sapien
gtagaagcagctctaatgaaccattctctgtat

SEQ ID NO: 449889 - DNA, 33 bp, Homo sapien
aattccaaacacaagcagaatttggcgtctcaa

SEQ ID NO: 449890 - DNA, 33 bp, Homo sapien
aattccaaacacaagcggaatttggcgtctcaa

SEQ ID NO: 449891 - DNA, 33 bp, Homo sapien
cctttgttgtacgttacattttaaaagtatttt

SEQ ID NO: 449892 - DNA, 33 bp, Homo sapien
cctttgttgtacgttagattttaaaagtatttt

SEQ ID NO: 449893 - DNA, 33 bp, Homo sapien
gactggacaacaaaggaaaaggaggctgatgag

SEQ ID NO: 449894 - DNA, 33 bp, Homo sapien
gactggacaacaaaggtaaaggaggctgatgag

SEQ ID NO: 449895 - DNA, 33 bp, Homo sapien
gcgggcattctggaaaacactcccttccagcag

SEQ ID NO: 449896 - DNA, 33 bp, Homo sapien
gcgggcattctggaaagcactcccttccagcag

SEQ ID NO: 449897 - DNA, 33 bp, Homo sapien
atctgcaaaacggggacgtaaaagcaactgtct

SEQ ID NO: 449898 - DNA, 33 bp, Homo sapien
atctgcaaaacggggatgtaaaagcaactgtct

SEQ ID NO: 449899 - DNA, 33 bp, Homo sapien
tccaccgggaattagaggagacttttgaaaaat

SEQ ID NO: 449900 - DNA, 33 bp, Homo sapien
tccaccgggaattagatgagacttttgaaaaat

SEQ ID NO: 449901 - DNA, 33 bp, Homo sapien
ggccaggcggtgtcccacgatggcgcttgccgg

SEQ ID NO: 449902 - DNA, 33 bp, Homo sapien
ggccaggcggtgtcccgcgatggcgcttgccgg

SEQ ID NO: 449903 - DNA, 33 bp, Homo sapien
agagaagtgcctgccgaatgatggaaacaggtg

SEQ ID NO: 449904 - DNA, 33 bp, Homo sapien
agagaagtgcctgccgcatgatggaaacaggtg

SEQ ID NO: 449905 - DNA, 33 bp, Homo sapien
tcagccagcttattaacgggaaggctgcaatat

SEQ ID NO: 449906 - DNA, 33 bp, Homo sapien
tcagccagcttattaaggggaaggctgcaatat

SEQ ID NO: 449907 - DNA, 33 bp, Homo sapien
tgatggatggtgctgaaacgaatttgagtattt

SEQ ID NO: 449908 - DNA, 33 bp, Homo sapien
tgatggatggtgctgagacgaatttgagtattt

SEQ ID NO: 449909 - DNA, 33 bp, Homo sapien
tgcctgtagcctaaccagacataagcaagcaga

SEQ ID NO: 449910 - DNA, 33 bp, Homo sapien
tgcctgtagcctaaccggacataagcaagcaga

SEQ ID NO: 449911 - DNA, 33 bp, Homo sapien
gaccagttacttgcaccctttttttggtaataa

SEQ ID NO: 449912 - DNA, 33 bp, Homo sapien
gaccagttacttgcacgctttttttggtaataa

SEQ ID NO: 449913 - DNA, 33 bp, Homo sapien
cttattggtctttaaccaacaaggaatctccac

SEQ ID NO: 449914 - DNA, 33 bp, Homo sapien
cttattggtctttaactaacaaggaatctccac

SEQ ID NO: 449915 - DNA, 33 bp, Homo sapien
ctgctcaaacctgcaaagagcctgggatggcat

SEQ ID NO: 449916 - DNA, 33 bp, Homo sapien
ctgctcaaacctgcaacgagcctgggatggcat

SEQ ID NO: 449917 - DNA, 33 bp, Homo sapien
ttaaatgccagtctgaaaccataaaccagcgca

SEQ ID NO: 449918 - DNA, 33 bp, Homo sapien
ttaaatgccagtctgataccataaaccagcgca

SEQ ID NO: 449919 - DNA, 33 bp, Homo sapien
gcttttccattagtgacgtgaggacagcaaaac

SEQ ID NO: 449920 - DNA, 33 bp, Homo sapien
gcttttccattagtgatgtgaggacagcaaaac

SEQ ID NO: 449921 - DNA, 33 bp, Homo sapien
ggcagacaggagcccaccgtgtacccgccaggt

SEQ ID NO: 449922 - DNA, 33 bp, Homo sapien
ggcagacaggagcccatcgtgtacccgccaggt

SEQ ID NO: 449923 - DNA, 33 bp, Homo sapien
atgcatatatttttgggaagttaattggactat

SEQ ID NO: 449924 - DNA, 33 bp, Homo sapien
atgcatatatttttggtaagttaattggactat

SEQ ID NO: 449925 - DNA, 33 bp, Homo sapien
caaggatgtttctaagcccagaaccaaggtgag

SEQ ID NO: 449926 - DNA, 33 bp, Homo sapien
caaggatgtttctaagtccagaaccaaggtgag

SEQ ID NO: 449927 - DNA, 33 bp, Homo sapien
tttaatgcagtgctgacacacagaaagtactta

SEQ ID NO: 449928 - DNA, 33 bp, Homo sapien
tttaatgcagtgctgagacacagaaagtactta

SEQ ID NO: 449929 - DNA, 33 bp, Homo sapien
aatggcagtaccaaagaccctttgattagaagt

SEQ ID NO: 449930 - DNA, 33 bp, Homo sapien
aatggcagtaccaaaggccctttgattagaagt

SEQ ID NO: 449931 - DNA, 33 bp, Homo sapien
gaagatggcatgaagactccatggacttttagg

SEQ ID NO: 449932 - DNA, 33 bp, Homo sapien
gaagatggcatgaagattccatggacttttagg

SEQ ID NO: 449933 - DNA, 33 bp, Homo sapien
cagggtggttcctggaaagtgtgaaaagggaag

SEQ ID NO: 449934 - DNA, 33 bp, Homo sapien
cagggtggttcctggagagtgtgaaaagggaag

SEQ ID NO: 449935 - DNA, 33 bp, Homo sapien
gctgatgtcggttcctaaaactaagacagccat

SEQ ID NO: 449936 - DNA, 33 bp, Homo sapien
gctgatgtcggttcctgaaactaagacagccat

SEQ ID NO: 449937 - DNA, 33 bp, Homo sapien
aattcatttacatctaacaaatctacataacac

SEQ ID NO: 449938 - DNA, 33 bp, Homo sapien
aattcatttacatctatcaaatctacataacac

SEQ ID NO: 449939 - DNA, 33 bp, Homo sapien
tccctcaaatatacgacactagtcaaggaattc

SEQ ID NO: 449940 - DNA, 33 bp, Homo sapien
tccctcaaatatacgatactagtcaaggaattc

SEQ ID NO: 449941 - DNA, 33 bp, Homo sapien
tgtacacagacctagaaggcatggtccaggcac

SEQ ID NO: 449942 - DNA, 33 bp, Homo sapien
tgtacacagacctagacggcatggtccaggcac

SEQ ID NO: 449943 - DNA, 33 bp, Homo sapien
gtgatttcctgtaatccgatgaacgtaaagttt

SEQ ID NO: 449944 - DNA, 33 bp, Homo sapien
gtgatttcctgtaatctgatgaacgtaaagttt

SEQ ID NO: 449945 - DNA, 33 bp, Homo sapien
gcactggaagcaaaggacctcagttgactgcat

SEQ ID NO: 449946 - DNA, 33 bp, Homo sapien
gcactggaagcaaaggccctcagttgactgcat

SEQ ID NO: 449947 - DNA, 33 bp, Homo sapien
ctctttttacattgtaaccattattgaggcgag

SEQ ID NO: 449948 - DNA, 33 bp, Homo sapien
ctctttttacattgtacccattattgaggcgag

SEQ ID NO: 449949 - DNA, 33 bp, Homo sapien
gcagcacattttatgacagtagatcggctcctt

SEQ ID NO: 449950 - DNA, 33 bp, Homo sapien
gcagcacattttatgagagtagatcggctcctt

SEQ ID NO: 449951 - DNA, 33 bp, Homo sapien
ttgtttatcatcctcactcggtaaacggggagc

SEQ ID NO: 449952 - DNA, 33 bp, Homo sapien
ttgtttatcatcctcagtcggtaaacggggagc

SEQ ID NO: 449953 - DNA, 33 bp, Homo sapien
tttattgacatacaataaactgtgcatatttga

SEQ ID NO: 449954 - DNA, 33 bp, Homo sapien
tttattgacatacaatgaactgtgcatatttga

SEQ ID NO: 449955 - DNA, 33 bp, Homo sapien
ccatatcacactatgaaagaataaattcgtgtt

SEQ ID NO: 449956 - DNA, 33 bp, Homo sapien
ccatatcacactatgagagaataaattcgtgtt

SEQ ID NO: 449957 - DNA, 33 bp, Homo sapien
caacagtttgcctaggcagaggtcaatctttga

SEQ ID NO: 449958 - DNA, 33 bp, Homo sapien
caacagtttgcctaggtagaggtcaatctttga

SEQ ID NO: 449959 - DNA, 33 bp, Homo sapien
aatcaaaggtaaggagaaaacaagatcacttgt

SEQ ID NO: 449960 - DNA, 33 bp, Homo sapien
aatcaaaggtaaggaggaaacaagatcacttgt

SEQ ID NO: 449961 - DNA, 33 bp, Homo sapien
ttgcagatctgggcaacgccagcgtagttcaca

SEQ ID NO: 449962 - DNA, 33 bp, Homo sapien
ttgcagatctgggcaatgccagcgtagttcaca

SEQ ID NO: 449963 - DNA, 33 bp, Homo sapien
caaaagctagagatgaataagcttgaggaagga

SEQ ID NO: 449964 - DNA, 33 bp, Homo sapien
caaaagctagagatgagtaagcttgaggaagga

SEQ ID NO: 449965 - DNA, 33 bp, Homo sapien
gcacacgttcacggagacctctcttggcaagct

SEQ ID NO: 449966 - DNA, 33 bp, Homo sapien
gcacacgttcacggaggcctctcttggcaagct

SEQ ID NO: 449967 - DNA, 33 bp, Homo sapien
gtaccgtgcacctcaccgccgcagagtagaaac

SEQ ID NO: 449968 - DNA, 33 bp, Homo sapien
gtaccgtgcacctcactgccgcagagtagaaac

SEQ ID NO: 449969 - DNA, 33 bp, Homo sapien
gctcatgaaataatcccgagaactctggtgagg

SEQ ID NO: 449970 - DNA, 33 bp, Homo sapien
gctcatgaaataatcctgagaactctggtgagg

SEQ ID NO: 449971 - DNA, 33 bp, Homo sapien
aaggaaaggactgacaatggattggaaaataac

SEQ ID NO: 449972 - DNA, 33 bp, Homo sapien
aaggaaaggactgacattggattggaaaataac

SEQ ID NO: 449973 - DNA, 33 bp, Homo sapien
ctctggacagaaaaagacttgggaaaaaggaga

SEQ ID NO: 449974 - DNA, 33 bp, Homo sapien
ctctggacagaaaaaggcttgggaaaaaggaga

SEQ ID NO: 449975 - DNA, 33 bp, Homo sapien
ttaacacatgtatagacgggcataactaccagc

SEQ ID NO: 449976 - DNA, 33 bp, Homo sapien
ttaacacatgtatagatgggcataactaccagc

SEQ ID NO: 449977 - DNA, 33 bp, Homo sapien
gagaattacaagtccacaattacaactggagac

SEQ ID NO: 449978 - DNA, 33 bp, Homo sapien
gagaattacaagtccataattacaactggagac

SEQ ID NO: 449979 - DNA, 33 bp, Homo sapien
agatatgagcctacacagtcgctgggactaata

SEQ ID NO: 449980 - DNA, 33 bp, Homo sapien
agatatgagcctacacggtcgctgggactaata

SEQ ID NO: 449981 - DNA, 33 bp, Homo sapien
gtgcttgggaaacaacacccaatgcattacagt

SEQ ID NO: 449982 - DNA, 33 bp, Homo sapien
gtgcttgggaaacaacgcccaatgcattacagt

SEQ ID NO: 449983 - DNA, 33 bp, Homo sapien
ttctgatttaatccagaatcatttaagaaccct

SEQ ID NO: 449984 - DNA, 33 bp, Homo sapien
ttctgatttaatccaggatcatttaagaaccct

SEQ ID NO: 449985 - DNA, 33 bp, Homo sapien
agatctgcccaagttgctgtaggtatccatagt

SEQ ID NO: 449986 - DNA, 33 bp, Homo sapien
agatctgcccaagttgttgtaggtatccatagt

SEQ ID NO: 449987 - DNA, 33 bp, Homo sapien
cagaatgctgtttatcaatggtgaaaaaaatat

SEQ ID NO: 449988 - DNA, 33 bp, Homo sapien
cagaatgctgtttatcgatggtgaaaaaaatat

SEQ ID NO: 449989 - DNA, 33 bp, Homo sapien
tattgaagtcaaggaaacacattacctgcatct

SEQ ID NO: 449990 - DNA, 33 bp, Homo sapien
tattgaagtcaaggaagcacattacctgcatct

SEQ ID NO: 449991 - DNA, 33 bp, Homo sapien
gtctagaacaaagagcagcattcctctgtaagg

SEQ ID NO: 449992 - DNA, 33 bp, Homo sapien
gtctagaacaaagagcggcattcctctgtaagg

SEQ ID NO: 449993 - DNA, 33 bp, Homo sapien
agcttgttaaactggcggataaacttgtggttc

SEQ ID NO: 449994 - DNA, 33 bp, Homo sapien
agcttgttaaactggctgataaacttgtggttc

SEQ ID NO: 449995 - DNA, 33 bp, Homo sapien
ttaattatctgctttacgcaaagttatttcaaa

SEQ ID NO: 449996 - DNA, 33 bp, Homo sapien
ttaattatctgctttatgcaaagttatttcaaa

SEQ ID NO: 449997 - DNA, 33 bp, Homo sapien
tggcaaaagcttaaaaatgagaggtcaggattt

SEQ ID NO: 449998 - DNA, 33 bp, Homo sapien
tggcaaaagcttaaaactgagaggtcaggattt

SEQ ID NO: 449999 - DNA, 33 bp, Homo sapien
caggaccacaggaagacgagggcccacgatgag

SEQ ID NO: 450000 - DNA, 33 bp, Homo sapien
caggaccacaggaagatgagggcccacgatgag

SEQ ID NO: 450001 - DNA, 33 bp, Homo sapien
ttttgctagctgtgcaatatattttcatggcga

SEQ ID NO: 450002 - DNA, 33 bp, Homo sapien
ttttgctagctgtgcagtatattttcatggcga

SEQ ID NO: 450003 - DNA, 33 bp, Homo sapien
agcaggtcaatggaccagaacacagaagccaga

SEQ ID NO: 450004 - DNA, 33 bp, Homo sapien
agcaggtcaatggaccggaacacagaagccaga

SEQ ID NO: 450005 - DNA, 33 bp, Homo sapien
ctccaattttgaggacagaatgtaatatctgca

SEQ ID NO: 450006 - DNA, 33 bp, Homo sapien
ctccaattttgaggacggaatgtaatatctgca

SEQ ID NO: 450007 - DNA, 33 bp, Homo sapien
ggagggagcaggtgggaagaacttatcacaagc

SEQ ID NO: 450008 - DNA, 33 bp, Homo sapien
ggagggagcaggtggggagaacttatcacaagc

SEQ ID NO: 450009 - DNA, 33 bp, Homo sapien
taaatctgtacaaaaactcatcattacttttcc

SEQ ID NO: 450010 - DNA, 33 bp, Homo sapien
taaatctgtacaaaaagtcatcattacttttcc

SEQ ID NO: 450011 - DNA, 33 bp, Homo sapien
cactgagtcctggatgccaggaattattcactg

SEQ ID NO: 450012 - DNA, 33 bp, Homo sapien
cactgagtcctggatgtcaggaattattcactg

SEQ ID NO: 450013 - DNA, 33 bp, Homo sapien
gttttagaatgcgacaatgggtttaatcctgtc

SEQ ID NO: 450014 - DNA, 33 bp, Homo sapien
gttttagaatgcgacagtgggtttaatcctgtc

SEQ ID NO: 450015 - DNA, 33 bp, Homo sapien
ttggtcctgttcctagcatattgttctttgtgt

SEQ ID NO: 450016 - DNA, 33 bp, Homo sapien
ttggtcctgttcctagtatattgttctttgtgt

SEQ ID NO: 450017 - DNA, 33 bp, Homo sapien
gagtttctttttattacgctgtgtggtgcaact

SEQ ID NO: 450018 - DNA, 33 bp, Homo sapien
gagtttctttttattatgctgtgtggtgcaact

SEQ ID NO: 450019 - DNA, 33 bp, Homo sapien
actatgagaagacatgaaggagaggtaaatgca

SEQ ID NO: 450020 - DNA, 33 bp, Homo sapien
actatgagaagacatggaggagaggtaaatgca

SEQ ID NO: 450021 - DNA, 33 bp, Homo sapien
gtcatccttacgaaacactcacattagctaagg

SEQ ID NO: 450022 - DNA, 33 bp, Homo sapien
gtcatccttacgaaacgctcacattagctaagg

SEQ ID NO: 450023 - DNA, 33 bp, Homo sapien
cattttcttctttcataaacacaaaaagcattt

SEQ ID NO: 450024 - DNA, 33 bp, Homo sapien
cattttcttctttcatgaacacaaaaagcattt

SEQ ID NO: 450025 - DNA, 33 bp, Homo sapien
ctgccctgagcatctacattacagtacttgctg

SEQ ID NO: 450026 - DNA, 33 bp, Homo sapien
ctgccctgagcatctatattacagtacttgctg

SEQ ID NO: 450027 - DNA, 33 bp, Homo sapien
tgcctctctaatcacaactgcggtctcacagat

SEQ ID NO: 450028 - DNA, 33 bp, Homo sapien
tgcctctctaatcacagctgcggtctcacagat

SEQ ID NO: 450029 - DNA, 33 bp, Homo sapien
tgcaatttgagtggcactcgatagaaatcatag

SEQ ID NO: 450030 - DNA, 33 bp, Homo sapien
tgcaatttgagtggcattcgatagaaatcatag

SEQ ID NO: 450031 - DNA, 33 bp, Homo sapien
aggaaaaaaagaaaaacgctggtgaataattgg

SEQ ID NO: 450032 - DNA, 33 bp, Homo sapien
aggaaaaaaagaaaaatgctggtgaataattgg

SEQ ID NO: 450033 - DNA, 33 bp, Homo sapien
ctctattaaaaaacaaagtggaacaacatcaag

SEQ ID NO: 450034 - DNA, 33 bp, Homo sapien
ctctattaaaaaacaaggtggaacaacatcaag

SEQ ID NO: 450035 - DNA, 33 bp, Homo sapien
attataggtgaaaatcacaggtatttccaaagg

SEQ ID NO: 450036 - DNA, 33 bp, Homo sapien
attataggtgaaaatcccaggtatttccaaagg

SEQ ID NO: 450037 - DNA, 33 bp, Homo sapien
ctgtcataacattgtaaaaccaagcctgcacaa

SEQ ID NO: 450038 - DNA, 33 bp, Homo sapien
ctgtcataacattgtacaaccaagcctgcacaa

SEQ ID NO: 450039 - DNA, 33 bp, Homo sapien
ctacaatgtataaaacacgcatctatcttcaga

SEQ ID NO: 450040 - DNA, 33 bp, Homo sapien
ctacaatgtataaaacgcgcatctatcttcaga

SEQ ID NO: 450041 - DNA, 33 bp, Homo sapien
aatactggtactatgacgagttaagaagtcaag

SEQ ID NO: 450042 - DNA, 33 bp, Homo sapien
aatactggtactatgatgagttaagaagtcaag

SEQ ID NO: 450043 - DNA, 33 bp, Homo sapien
tctctgcagccacgtcagaagcactgcatttta

SEQ ID NO: 450044 - DNA, 33 bp, Homo sapien
tctctgcagccacgtcggaagcactgcatttta

SEQ ID NO: 450045 - DNA, 33 bp, Homo sapien
tcatggctttatccacagtccacacctcctggc

SEQ ID NO: 450046 - DNA, 33 bp, Homo sapien
tcatggctttatccaccgtccacacctcctggc

SEQ ID NO: 450047 - DNA, 33 bp, Homo sapien
gggtcccctgctgttacgcattttacctcccaa

SEQ ID NO: 450048 - DNA, 33 bp, Homo sapien
gggtcccctgctgttatgcattttacctcccaa

SEQ ID NO: 450049 - DNA, 33 bp, Homo sapien
ctaacatcgtgcctttcaaacaatgcagcttag

SEQ ID NO: 450050 - DNA, 33 bp, Homo sapien
ctaacatcgtgccttttaaacaatgcagcttag

SEQ ID NO: 450051 - DNA, 33 bp, Homo sapien
tcggaagcaggcaacaatgtcaactgggtacag

SEQ ID NO: 450052 - DNA, 33 bp, Homo sapien
tcggaagcaggcaacagtgtcaactgggtacag

SEQ ID NO: 450053 - DNA, 33 bp, Homo sapien
cactgagaaaaatgagacccggcactgcatcta

SEQ ID NO: 450054 - DNA, 33 bp, Homo sapien
cactgagaaaaatgagccccggcactgcatcta

SEQ ID NO: 450055 - DNA, 33 bp, Homo sapien
acatttaaagacttaccgctgtgatagctaaca

SEQ ID NO: 450056 - DNA, 33 bp, Homo sapien
acatttaaagacttactgctgtgatagctaaca

SEQ ID NO: 450057 - DNA, 33 bp, Homo sapien
cattttaagacatgaaagtgcccatttcgcaga

SEQ ID NO: 450058 - DNA, 33 bp, Homo sapien
cattttaagacatgaatgtgcccatttcgcaga

SEQ ID NO: 450059 - DNA, 33 bp, Homo sapien
agaggttttatgtccacgtcatttaaggaaagg

SEQ ID NO: 450060 - DNA, 33 bp, Homo sapien
agaggttttatgtccatgtcatttaaggaaagg

SEQ ID NO: 450061 - DNA, 33 bp, Homo sapien
tagattaagtggattaagtggtgtgtagaattc

SEQ ID NO: 450062 - DNA, 33 bp, Homo sapien
tagattaagtggattacgtggtgtgtagaattc

SEQ ID NO: 450063 - DNA, 33 bp, Homo sapien
gtttgctttgagacccacaagcttgttcgccac

SEQ ID NO: 450064 - DNA, 33 bp, Homo sapien
gtttgctttgagacccgcaagcttgttcgccac

SEQ ID NO: 450065 - DNA, 33 bp, Homo sapien
accccacgtgcagtacacatgcagtgcctttat

SEQ ID NO: 450066 - DNA, 33 bp, Homo sapien
accccacgtgcagtacgcatgcagtgcctttat

SEQ ID NO: 450067 - DNA, 33 bp, Homo sapien
gagctgtccaggatgcacagtgactggagctct

SEQ ID NO: 450068 - DNA, 33 bp, Homo sapien
gagctgtccaggatgcgcagtgactggagctct

SEQ ID NO: 450069 - DNA, 33 bp, Homo sapien
ggatttggtgtacagacggttttgtcactcagg

SEQ ID NO: 450070 - DNA, 33 bp, Homo sapien
ggatttggtgtacagatggttttgtcactcagg

SEQ ID NO: 450071 - DNA, 33 bp, Homo sapien
aaggcctagtttaaatcaatgttctctcctcaa

SEQ ID NO: 450072 - DNA, 33 bp, Homo sapien
aaggcctagtttaaatgaatgttctctcctcaa

SEQ ID NO: 450073 - DNA, 33 bp, Homo sapien
tcatgtaccataacccgcatgcctaattaaaaa

SEQ ID NO: 450074 - DNA, 33 bp, Homo sapien
tcatgtaccataaccctcatgcctaattaaaaa

SEQ ID NO: 450075 - DNA, 33 bp, Homo sapien
tgggagagggtggaacagtagaagcgacatgct

SEQ ID NO: 450076 - DNA, 33 bp, Homo sapien
tgggagagggtggaacggtagaagcgacatgct

SEQ ID NO: 450077 - DNA, 33 bp, Homo sapien
accttccttctacttacataccctcatggtgac

SEQ ID NO: 450078 - DNA, 33 bp, Homo sapien
accttccttctacttatataccctcatggtgac

SEQ ID NO: 450079 - DNA, 33 bp, Homo sapien
caatttgtagtgtcataaacttttcatcaaaat

SEQ ID NO: 450080 - DNA, 33 bp, Homo sapien
caatttgtagtgtcattaacttttcatcaaaat

SEQ ID NO: 450081 - DNA, 33 bp, Homo sapien
caacaacctctgttgcaaattcagagaatctat

SEQ ID NO: 450082 - DNA, 33 bp, Homo sapien
caacaacctctgttgcgaattcagagaatctat

SEQ ID NO: 450083 - DNA, 33 bp, Homo sapien
ttgcctttccttcccaacctcgctttgcctgtc

SEQ ID NO: 450084 - DNA, 33 bp, Homo sapien
ttgcctttccttcccatcctcgctttgcctgtc

SEQ ID NO: 450085 - DNA, 33 bp, Homo sapien
gacgtgtggacacgtcacaccattgttccaaag

SEQ ID NO: 450086 - DNA, 33 bp, Homo sapien
gacgtgtggacacgtcgcaccattgttccaaag

SEQ ID NO: 450087 - DNA, 33 bp, Homo sapien
cattttcgtgctgataacgtcaaattgacccct

SEQ ID NO: 450088 - DNA, 33 bp, Homo sapien
cattttcgtgctgatatcgtcaaattgacccct

SEQ ID NO: 450089 - DNA, 33 bp, Homo sapien
attgccaccaggaagacggatgttgagaaaata

SEQ ID NO: 450090 - DNA, 33 bp, Homo sapien
attgccaccaggaagatggatgttgagaaaata

SEQ ID NO: 450091 - DNA, 33 bp, Homo sapien
tcccaggtggtataaaacaactcagagaactca

SEQ ID NO: 450092 - DNA, 33 bp, Homo sapien
tcccaggtggtataaagcaactcagagaactca

SEQ ID NO: 450093 - DNA, 33 bp, Homo sapien
atgtttctttacccaacttactccaggatccac

SEQ ID NO: 450094 - DNA, 33 bp, Homo sapien
atgtttctttacccaagttactccaggatccac

SEQ ID NO: 450095 - DNA, 33 bp, Homo sapien
ttccagccctttctccccaattctctataacct

SEQ ID NO: 450096 - DNA, 33 bp, Homo sapien
ttccagccctttctcctcaattctctataacct

SEQ ID NO: 450097 - DNA, 33 bp, Homo sapien
gtgtctacaccagcccacagaaaggtaatggtt

SEQ ID NO: 450098 - DNA, 33 bp, Homo sapien
gtgtctacaccagcccgcagaaaggtaatggtt

SEQ ID NO: 450099 - DNA, 33 bp, Homo sapien
ttgaagtggacttgtacgttggccagaaacgtc

SEQ ID NO: 450100 - DNA, 33 bp, Homo sapien
ttgaagtggacttgtaggttggccagaaacgtc

SEQ ID NO: 450101 - DNA, 33 bp, Homo sapien
ttattgagaatttaccagaagcctggcaccatg

SEQ ID NO: 450102 - DNA, 33 bp, Homo sapien
ttattgagaatttaccggaagcctggcaccatg

SEQ ID NO: 450103 - DNA, 33 bp, Homo sapien
agaacctggaagcaccagaactgaagctgctgt

SEQ ID NO: 450104 - DNA, 33 bp, Homo sapien
agaacctggaagcaccggaactgaagctgctgt

SEQ ID NO: 450105 - DNA, 33 bp, Homo sapien
aagcactggagttgacccaagccatggctcaaa

SEQ ID NO: 450106 - DNA, 33 bp, Homo sapien
aagcactggagttgactcaagccatggctcaaa

SEQ ID NO: 450107 - DNA, 33 bp, Homo sapien
gatggaattcagtcaaaagctaagcagtgtggt

SEQ ID NO: 450108 - DNA, 33 bp, Homo sapien
gatggaattcagtcaagagctaagcagtgtggt

SEQ ID NO: 450109 - DNA, 33 bp, Homo sapien
taacagcagttattgacggaacactctcaccca

SEQ ID NO: 450110 - DNA, 33 bp, Homo sapien
taacagcagttattgatggaacactctcaccca

SEQ ID NO: 450111 - DNA, 33 bp, Homo sapien
ttaatattgtcaggtacgtggtgtttgacgatg

SEQ ID NO: 450112 - DNA, 33 bp, Homo sapien
ttaatattgtcaggtatgtggtgtttgacgatg

SEQ ID NO: 450113 - DNA, 33 bp, Homo sapien
caaaccatgttcgcgaagcactgcaaaatgagg

SEQ ID NO: 450114 - DNA, 33 bp, Homo sapien
caaaccatgttcgcgaggcactgcaaaatgagg

SEQ ID NO: 450115 - DNA, 33 bp, Homo sapien
caaacaccaccatctacatttcaggaagttgaa

SEQ ID NO: 450116 - DNA, 33 bp, Homo sapien
caaacaccaccatctatatttcaggaagttgaa

SEQ ID NO: 450117 - DNA, 33 bp, Homo sapien
actcacaagatgaagcaaaagcagccgggagcc

SEQ ID NO: 450118 - DNA, 33 bp, Homo sapien
actcacaagatgaagcgaaagcagccgggagcc

SEQ ID NO: 450119 - DNA, 33 bp, Homo sapien
tcctccttccctctaaaacttttctctgttcct

SEQ ID NO: 450120 - DNA, 33 bp, Homo sapien
tcctccttccctctaagacttttctctgttcct

SEQ ID NO: 450121 - DNA, 33 bp, Homo sapien
gctggaagtggattcacgatgtttaagaaaatg

SEQ ID NO: 450122 - DNA, 33 bp, Homo sapien
gctggaagtggattcatgatgtttaagaaaatg

SEQ ID NO: 450123 - DNA, 33 bp, Homo sapien
ccaaatgaatgtcgaacaagagaatttatggtg

SEQ ID NO: 450124 - DNA, 33 bp, Homo sapien
ccaaatgaatgtcgaagaagagaatttatggtg

SEQ ID NO: 450125 - DNA, 33 bp, Homo sapien
gcctggatctcctctcagaaacacctgaagcca

SEQ ID NO: 450126 - DNA, 33 bp, Homo sapien
gcctggatctcctctcggaaacacctgaagcca

SEQ ID NO: 450127 - DNA, 33 bp, Homo sapien
gagaacctctgagctaagagctacaaaataaac

SEQ ID NO: 450128 - DNA, 33 bp, Homo sapien
gagaacctctgagctaggagctacaaaataaac

SEQ ID NO: 450129 - DNA, 33 bp, Homo sapien
ctaacttctttctaaaatccctcctgtacctca

SEQ ID NO: 450130 - DNA, 33 bp, Homo sapien
ctaacttctttctaaagtccctcctgtacctca

SEQ ID NO: 450131 - DNA, 33 bp, Homo sapien
aggcaggagcacttgcaaatgggatcagtgccc

SEQ ID NO: 450132 - DNA, 33 bp, Homo sapien
aggcaggagcacttgcgaatgggatcagtgccc

SEQ ID NO: 450133 - DNA, 33 bp, Homo sapien
tgggagacctcggtcacagcttttcatcagcat

SEQ ID NO: 450134 - DNA, 33 bp, Homo sapien
tgggagacctcggtcagagcttttcatcagcat

SEQ ID NO: 450135 - DNA, 33 bp, Homo sapien
ctcagcccatgcattgaaactgagcgcagccca

SEQ ID NO: 450136 - DNA, 33 bp, Homo sapien
ctcagcccatgcattggaactgagcgcagccca

SEQ ID NO: 450137 - DNA, 33 bp, Homo sapien
gcaacctcagtaaatcaaacatgggaccagcgt

SEQ ID NO: 450138 - DNA, 33 bp, Homo sapien
gcaacctcagtaaatcgaacatgggaccagcgt

SEQ ID NO: 450139 - DNA, 33 bp, Homo sapien
ccatcggacaaaaggccctcacactcctttatg

SEQ ID NO: 450140 - DNA, 33 bp, Homo sapien
ccatcggacaaaaggctctcacactcctttatg

SEQ ID NO: 450141 - DNA, 33 bp, Homo sapien
tcctgagatgtaggcactcttcatccttccacc

SEQ ID NO: 450142 - DNA, 33 bp, Homo sapien
tcctgagatgtaggcagtcttcatccttccacc

SEQ ID NO: 450143 - DNA, 33 bp, Homo sapien
gctcttcaaaccctaacgctggagggatgccac

SEQ ID NO: 450144 - DNA, 33 bp, Homo sapien
gctcttcaaaccctaatgctggagggatgccac

SEQ ID NO: 450145 - DNA, 33 bp, Homo sapien
cagcaaaggtgtgtagacacatattgaaatgct

SEQ ID NO: 450146 - DNA, 33 bp, Homo sapien
cagcaaaggtgtgtagccacatattgaaatgct

SEQ ID NO: 450147 - DNA, 33 bp, Homo sapien
tcagatgattcttaaacgatctttcactcgtgc

SEQ ID NO: 450148 - DNA, 33 bp, Homo sapien
tcagatgattcttaaatgatctttcactcgtgc

SEQ ID NO: 450149 - DNA, 33 bp, Homo sapien
ttgggtctgataggaacattaagtgatatgcta

SEQ ID NO: 450150 - DNA, 33 bp, Homo sapien
ttgggtctgataggaatattaagtgatatgcta

SEQ ID NO: 450151 - DNA, 33 bp, Homo sapien
aaagacaaagaaataacggttgggtctccaggc

SEQ ID NO: 450152 - DNA, 33 bp, Homo sapien
aaagacaaagaaataatggttgggtctccaggc

SEQ ID NO: 450153 - DNA, 33 bp, Homo sapien
ttatcccagtataaaaaggcataaccattgtct

SEQ ID NO: 450154 - DNA, 33 bp, Homo sapien
ttatcccagtataaaatggcataaccattgtct

SEQ ID NO: 450155 - DNA, 33 bp, Homo sapien
agaataaaatgaacccacaagacttcagattat

SEQ ID NO: 450156 - DNA, 33 bp, Homo sapien
agaataaaatgaaccctcaagacttcagattat

SEQ ID NO: 450157 - DNA, 33 bp, Homo sapien
cgtatttttatcttcacagcattggcagtcctt

SEQ ID NO: 450158 - DNA, 33 bp, Homo sapien
cgtatttttatcttcatagcattggcagtcctt

SEQ ID NO: 450159 - DNA, 33 bp, Homo sapien
caagatggcttacaaaaagaaagagtaatttgt

SEQ ID NO: 450160 - DNA, 33 bp, Homo sapien
caagatggcttacaaagagaaagagtaatttgt

SEQ ID NO: 450161 - DNA, 33 bp, Homo sapien
gggaaaatgaaagaagcctcagttccctccctc

SEQ ID NO: 450162 - DNA, 33 bp, Homo sapien
gggaaaatgaaagaagtctcagttccctccctc

SEQ ID NO: 450163 - DNA, 33 bp, Homo sapien
gaaaaatggcatgaaacgagaaggagaaaatgt

SEQ ID NO: 450164 - DNA, 33 bp, Homo sapien
gaaaaatggcatgaaaggagaaggagaaaatgt

SEQ ID NO: 450165 - DNA, 33 bp, Homo sapien
ctttgtccgctgaagacggagaggtgcaggtgt

SEQ ID NO: 450166 - DNA, 33 bp, Homo sapien
ctttgtccgctgaagatggagaggtgcaggtgt

SEQ ID NO: 450167 - DNA, 33 bp, Homo sapien
gtgtttactgttacaaaaaaggcaagaacttag

SEQ ID NO: 450168 - DNA, 33 bp, Homo sapien
gtgtttactgttacaacaaaggcaagaacttag

SEQ ID NO: 450169 - DNA, 33 bp, Homo sapien
accaactaaagttaacaaggtctacgtggactt

SEQ ID NO: 450170 - DNA, 33 bp, Homo sapien
accaactaaagttaaccaggtctacgtggactt

SEQ ID NO: 450171 - DNA, 33 bp, Homo sapien
tccgtgcctttattgccacaaatgtgagatccc

SEQ ID NO: 450172 - DNA, 33 bp, Homo sapien
tccgtgcctttattgcgacaaatgtgagatccc

SEQ ID NO: 450173 - DNA, 33 bp, Homo sapien
gcctatgtgtggttcacagaagagtcgcacttc

SEQ ID NO: 450174 - DNA, 33 bp, Homo sapien
gcctatgtgtggttcatagaagagtcgcacttc

SEQ ID NO: 450175 - DNA, 33 bp, Homo sapien
ctcacctttcctcccaagatactcgtgccagaa

SEQ ID NO: 450176 - DNA, 33 bp, Homo sapien
ctcacctttcctcccaggatactcgtgccagaa

SEQ ID NO: 450177 - DNA, 33 bp, Homo sapien
tgaaccaactcccccagtcgcctgtggggcacg

SEQ ID NO: 450178 - DNA, 33 bp, Homo sapien
tgaaccaactcccccattcgcctgtggggcacg

SEQ ID NO: 450179 - DNA, 33 bp, Homo sapien
catttatccaacttcaagtgatcacagagagaa

SEQ ID NO: 450180 - DNA, 33 bp, Homo sapien
catttatccaacttcaggtgatcacagagagaa

SEQ ID NO: 450181 - DNA, 33 bp, Homo sapien
ctatacagtacatcacaatgttaattttccaca

SEQ ID NO: 450182 - DNA, 33 bp, Homo sapien
ctatacagtacatcacgatgttaattttccaca

SEQ ID NO: 450183 - DNA, 33 bp, Homo sapien
cgtcctgacatagtcgcacttcactaacggttt

SEQ ID NO: 450184 - DNA, 33 bp, Homo sapien
cgtcctgacatagtcgtacttcactaacggttt

SEQ ID NO: 450185 - DNA, 33 bp, Homo sapien
aaacataccaaagcccactatgatcctagaccc

SEQ ID NO: 450186 - DNA, 33 bp, Homo sapien
aaacataccaaagcccgctatgatcctagaccc

SEQ ID NO: 450187 - DNA, 33 bp, Homo sapien
atcttccgccacagtaacttggctattgattca

SEQ ID NO: 450188 - DNA, 33 bp, Homo sapien
atcttccgccacagtagcttggctattgattca

SEQ ID NO: 450189 - DNA, 33 bp, Homo sapien
aaagaacccagaggaactggagagaccaggaac

SEQ ID NO: 450190 - DNA, 33 bp, Homo sapien
aaagaacccagaggaattggagagaccaggaac

SEQ ID NO: 450191 - DNA, 33 bp, Homo sapien
gtattaactgagaccacgcaaaaggctttcgga

SEQ ID NO: 450192 - DNA, 33 bp, Homo sapien
gtattaactgagaccatgcaaaaggctttcgga

SEQ ID NO: 450193 - DNA, 33 bp, Homo sapien
gttgcttccacaccaaagatcagcctgaagtct

SEQ ID NO: 450194 - DNA, 33 bp, Homo sapien
gttgcttccacaccaacgatcagcctgaagtct

SEQ ID NO: 450195 - DNA, 33 bp, Homo sapien
ccatcctttcagttacagaatcttcccagaggc

SEQ ID NO: 450196 - DNA, 33 bp, Homo sapien
ccatcctttcagttacggaatcttcccagaggc

SEQ ID NO: 450197 - DNA, 33 bp, Homo sapien
tgaaccgcactcaaacactcttcttcaagggca

SEQ ID NO: 450198 - DNA, 33 bp, Homo sapien
tgaaccgcactcaaaccctcttcttcaagggca

SEQ ID NO: 450199 - DNA, 33 bp, Homo sapien
cgccctgatctttggcaacttgtgtctttgcac

SEQ ID NO: 450200 - DNA, 33 bp, Homo sapien
cgccctgatctttggcgacttgtgtctttgcac

SEQ ID NO: 450201 - DNA, 33 bp, Homo sapien
gggcttgtaggatgaactgcacggcccaatata

SEQ ID NO: 450202 - DNA, 33 bp, Homo sapien
gggcttgtaggatgaattgcacggcccaatata

SEQ ID NO: 450203 - DNA, 33 bp, Homo sapien
aactaaaatcagagagaaactgataaggcccaa

SEQ ID NO: 450204 - DNA, 33 bp, Homo sapien
aactaaaatcagagaggaactgataaggcccaa

SEQ ID NO: 450205 - DNA, 33 bp, Homo sapien
tcaggaatgaatacaaataaacctctgtagcaa

SEQ ID NO: 450206 - DNA, 33 bp, Homo sapien
tcaggaatgaatacaagtaaacctctgtagcaa

SEQ ID NO: 450207 - DNA, 33 bp, Homo sapien
atgattactttaagcacggttttgtagttcttc

SEQ ID NO: 450208 - DNA, 33 bp, Homo sapien
atgattactttaagcatggttttgtagttcttc

SEQ ID NO: 450209 - DNA, 33 bp, Homo sapien
aggagcctgaacagccaaagcaaacctaagcaa

SEQ ID NO: 450210 - DNA, 33 bp, Homo sapien
aggagcctgaacagccgaagcaaacctaagcaa

SEQ ID NO: 450211 - DNA, 33 bp, Homo sapien
gtcaacattgtgattcaaagattcgcccgtgtg

SEQ ID NO: 450212 - DNA, 33 bp, Homo sapien
gtcaacattgtgattccaagattcgcccgtgtg

SEQ ID NO: 450213 - DNA, 33 bp, Homo sapien
gacaccacagttgacaacaaataccaggaacct

SEQ ID NO: 450214 - DNA, 33 bp, Homo sapien
gacaccacagttgacaccaaataccaggaacct

SEQ ID NO: 450215 - DNA, 33 bp, Homo sapien
cttgctttgttcgggaacttcgtctgtggggtc

SEQ ID NO: 450216 - DNA, 33 bp, Homo sapien
cttgctttgttcgggagcttcgtctgtggggtc

SEQ ID NO: 450217 - DNA, 33 bp, Homo sapien
gtgagcagaatctcccaggaacggcattcgaga

SEQ ID NO: 450218 - DNA, 33 bp, Homo sapien
gtgagcagaatctcccgggaacggcattcgaga

SEQ ID NO: 450219 - DNA, 33 bp, Homo sapien
gtggatgtggccgctacgagcaaactgcctgga

SEQ ID NO: 450220 - DNA, 33 bp, Homo sapien
gtggatgtggccgctatgagcaaactgcctgga

SEQ ID NO: 450221 - DNA, 33 bp, Homo sapien
ggaatgtcatttggaccagcactgtatttatat

SEQ ID NO: 450222 - DNA, 33 bp, Homo sapien
ggaatgtcatttggacgagcactgtatttatat

SEQ ID NO: 450223 - DNA, 33 bp, Homo sapien
attgattggaagtggaatagttggttctaattt

SEQ ID NO: 450224 - DNA, 33 bp, Homo sapien
attgattggaagtggagtagttggttctaattt

SEQ ID NO: 450225 - DNA, 33 bp, Homo sapien
tttctcatgtaatttcaacacatttatgattta

SEQ ID NO: 450226 - DNA, 33 bp, Homo sapien
tttctcatgtaatttcgacacatttatgattta

SEQ ID NO: 450227 - DNA, 33 bp, Homo sapien
caactgaaagaccgcactcattaatttatattt

SEQ ID NO: 450228 - DNA, 33 bp, Homo sapien
caactgaaagaccgcattcattaatttatattt

SEQ ID NO: 450229 - DNA, 33 bp, Homo sapien
taatccacaagcgggcagcaatctggtgactgt

SEQ ID NO: 450230 - DNA, 33 bp, Homo sapien
taatccacaagcgggcggcaatctggtgactgt

SEQ ID NO: 450231 - DNA, 33 bp, Homo sapien
cgcagagagaggccacagtgaacaaactgctca

SEQ ID NO: 450232 - DNA, 33 bp, Homo sapien
cgcagagagaggccacggtgaacaaactgctca

SEQ ID NO: 450233 - DNA, 33 bp, Homo sapien
agggtgcaaatgctccactcggtggccagtgtg

SEQ ID NO: 450234 - DNA, 33 bp, Homo sapien
agggtgcaaatgctccgctcggtggccagtgtg

SEQ ID NO: 450235 - DNA, 33 bp, Homo sapien
attatctaattaaatacataccacccacaccac

SEQ ID NO: 450236 - DNA, 33 bp, Homo sapien
attatctaattaaatatataccacccacaccac

SEQ ID NO: 450237 - DNA, 33 bp, Homo sapien
ccttgcttacatacagcctgcattgattccttt

SEQ ID NO: 450238 - DNA, 33 bp, Homo sapien
ccttgcttacatacaggctgcattgattccttt

SEQ ID NO: 450239 - DNA, 33 bp, Homo sapien
ttttattactgatcaaagcatcatcaaccttga

SEQ ID NO: 450240 - DNA, 33 bp, Homo sapien
ttttattactgatcaaggcatcatcaaccttga

SEQ ID NO: 450241 - DNA, 33 bp, Homo sapien
gtgaggaaagcatcggcaggaaataacgaacgc

SEQ ID NO: 450242 - DNA, 33 bp, Homo sapien
gtgaggaaagcatcggtaggaaataacgaacgc

SEQ ID NO: 450243 - DNA, 33 bp, Homo sapien
ccagagcaagcactgtaaaaactataccaacac

SEQ ID NO: 450244 - DNA, 33 bp, Homo sapien
ccagagcaagcactgtgaaaactataccaacac

SEQ ID NO: 450245 - DNA, 33 bp, Homo sapien
gggaaagagcctaaggaaattatgaaacaccaa

SEQ ID NO: 450246 - DNA, 33 bp, Homo sapien
gggaaagagcctaagggaattatgaaacaccaa

SEQ ID NO: 450247 - DNA, 33 bp, Homo sapien
cacatacagcaaaaccaatacaagtggaaagaa

SEQ ID NO: 450248 - DNA, 33 bp, Homo sapien
cacatacagcaaaaccgatacaagtggaaagaa

SEQ ID NO: 450249 - DNA, 33 bp, Homo sapien
attcaagagatgatggaaaaaaaatgaatcact

SEQ ID NO: 450250 - DNA, 33 bp, Homo sapien
attcaagagatgatgggaaaaaaatgaatcact

SEQ ID NO: 450251 - DNA, 33 bp, Homo sapien
tcttttaattatgaagccattagttttgtgggt

SEQ ID NO: 450252 - DNA, 33 bp, Homo sapien
tcttttaattatgaagtcattagttttgtgggt

SEQ ID NO: 450253 - DNA, 33 bp, Homo sapien
caaaatatgtatagaaggaaatccacagttctt

SEQ ID NO: 450254 - DNA, 33 bp, Homo sapien
caaaatatgtatagaatgaaatccacagttctt

SEQ ID NO: 450255 - DNA, 33 bp, Homo sapien
taatgccacgtagccaaccatcaggctatgaag

SEQ ID NO: 450256 - DNA, 33 bp, Homo sapien
taatgccacgtagccatccatcaggctatgaag

SEQ ID NO: 450257 - DNA, 33 bp, Homo sapien
gtatcatattgttcgacctgagaattgatttac

SEQ ID NO: 450258 - DNA, 33 bp, Homo sapien
gtatcatattgttcgatctgagaattgatttac

SEQ ID NO: 450259 - DNA, 33 bp, Homo sapien
ccactcctaggccctgacaatgactcatccact

SEQ ID NO: 450260 - DNA, 33 bp, Homo sapien
ccactcctaggccctggcaatgactcatccact

SEQ ID NO: 450261 - DNA, 33 bp, Homo sapien
taaagccactcttggactcaaggaaaaagaagc

SEQ ID NO: 450262 - DNA, 33 bp, Homo sapien
taaagccactcttggattcaaggaaaaagaagc

SEQ ID NO: 450263 - DNA, 33 bp, Homo sapien
atcctcacctgtacataactctctgcctgtttg

SEQ ID NO: 450264 - DNA, 33 bp, Homo sapien
atcctcacctgtacattactctctgcctgtttg

SEQ ID NO: 450265 - DNA, 33 bp, Homo sapien
tctgcctgtttgattgcagccactgctttttga

SEQ ID NO: 450266 - DNA, 33 bp, Homo sapien
tctgcctgtttgattgtagccactgctttttga

SEQ ID NO: 450267 - DNA, 33 bp, Homo sapien
tcttagtcactaaagccgactgaggtctgcccc

SEQ ID NO: 450268 - DNA, 33 bp, Homo sapien
tcttagtcactaaagcggactgaggtctgcccc

SEQ ID NO: 450269 - DNA, 33 bp, Homo sapien
gtattttttatctcaaccattgtttttgtgtct

SEQ ID NO: 450270 - DNA, 33 bp, Homo sapien
gtattttttatctcaagcattgtttttgtgtct

SEQ ID NO: 450271 - DNA, 33 bp, Homo sapien
catcatctaatttcaccctctctcctagctatc

SEQ ID NO: 450272 - DNA, 33 bp, Homo sapien
catcatctaatttcactctctctcctagctatc

SEQ ID NO: 450273 - DNA, 33 bp, Homo sapien
aacaaaaaaaccaagacgcatttctatgttgtg

SEQ ID NO: 450274 - DNA, 33 bp, Homo sapien
aacaaaaaaaccaagatgcatttctatgttgtg

SEQ ID NO: 450275 - DNA, 33 bp, Homo sapien
tggaagatttgcataggcagcaggagttgccta

SEQ ID NO: 450276 - DNA, 33 bp, Homo sapien
tggaagatttgcatagtcagcaggagttgccta

SEQ ID NO: 450277 - DNA, 33 bp, Homo sapien
gatctatagtgaaagcacctatttcattactaa

SEQ ID NO: 450278 - DNA, 33 bp, Homo sapien
gatctatagtgaaagcccctatttcattactaa

SEQ ID NO: 450279 - DNA, 33 bp, Homo sapien
attctgtcctaagcacacctacatttgtgatgt

SEQ ID NO: 450280 - DNA, 33 bp, Homo sapien
attctgtcctaagcacgcctacatttgtgatgt

SEQ ID NO: 450281 - DNA, 33 bp, Homo sapien
cctccctgtcagcctgaaagatggtttttgccc

SEQ ID NO: 450282 - DNA, 33 bp, Homo sapien
cctccctgtcagcctggaagatggtttttgccc

SEQ ID NO: 450283 - DNA, 33 bp, Homo sapien
acacgccctgccattcaccttattgcaagcaat

SEQ ID NO: 450284 - DNA, 33 bp, Homo sapien
acacgccctgccattcgccttattgcaagcaat

SEQ ID NO: 450285 - DNA, 33 bp, Homo sapien
aagcatctacttatgaagtgccagtcatggcct

SEQ ID NO: 450286 - DNA, 33 bp, Homo sapien
aagcatctacttatgaggtgccagtcatggcct

SEQ ID NO: 450287 - DNA, 33 bp, Homo sapien
agatttcactacaagacacgttgaaagaagttc

SEQ ID NO: 450288 - DNA, 33 bp, Homo sapien
agatttcactacaagatacgttgaaagaagttc

SEQ ID NO: 450289 - DNA, 33 bp, Homo sapien
tccaaaattgaaaaaacgcaatgtctgcaataa

SEQ ID NO: 450290 - DNA, 33 bp, Homo sapien
tccaaaattgaaaaaatgcaatgtctgcaataa

SEQ ID NO: 450291 - DNA, 33 bp, Homo sapien
ttgattagtgttggtacggtatctattttttac

SEQ ID NO: 450292 - DNA, 33 bp, Homo sapien
ttgattagtgttggtatggtatctattttttac

SEQ ID NO: 450293 - DNA, 33 bp, Homo sapien
cacccagaccaacttccagttctggaaactcca

SEQ ID NO: 450294 - DNA, 33 bp, Homo sapien
cacccagaccaacttctagttctggaaactcca

SEQ ID NO: 450295 - DNA, 33 bp, Homo sapien
tttgctcattacttggaagatatttgctagata

SEQ ID NO: 450296 - DNA, 33 bp, Homo sapien
tttgctcattacttgggagatatttgctagata

SEQ ID NO: 450297 - DNA, 33 bp, Homo sapien
ttccctttgtggctaccatacatcaaaaacagg

SEQ ID NO: 450298 - DNA, 33 bp, Homo sapien
ttccctttgtggctactatacatcaaaaacagg

SEQ ID NO: 450299 - DNA, 33 bp, Homo sapien
ttgcctacaataaaaacgttgagttcatatact

SEQ ID NO: 450300 - DNA, 33 bp, Homo sapien
ttgcctacaataaaaatgttgagttcatatact

SEQ ID NO: 450301 - DNA, 33 bp, Homo sapien
aattgctgtcacctgcactttggagtccctcag

SEQ ID NO: 450302 - DNA, 33 bp, Homo sapien
aattgctgtcacctgcgctttggagtccctcag

SEQ ID NO: 450303 - DNA, 33 bp, Homo sapien
ttatggagtgcagaaaatctatgtcagcagcaa

SEQ ID NO: 450304 - DNA, 33 bp, Homo sapien
ttatggagtgcagaaagtctatgtcagcagcaa

SEQ ID NO: 450305 - DNA, 33 bp, Homo sapien
ggagataagacatttcacctgcttttcttagtt

SEQ ID NO: 450306 - DNA, 33 bp, Homo sapien
ggagataagacatttctcctgcttttcttagtt

SEQ ID NO: 450307 - DNA, 33 bp, Homo sapien
tctgcagaaaccaggaatagagatgggttatcc

SEQ ID NO: 450308 - DNA, 33 bp, Homo sapien
tctgcagaaaccaggagtagagatgggttatcc

SEQ ID NO: 450309 - DNA, 33 bp, Homo sapien
ccatctaaatttggcacgggtgagacactggcc

SEQ ID NO: 450310 - DNA, 33 bp, Homo sapien
ccatctaaatttggcatgggtgagacactggcc

SEQ ID NO: 450311 - DNA, 33 bp, Homo sapien
ttctgagcaaaagaaacgtgttgtcagtcacta

SEQ ID NO: 450312 - DNA, 33 bp, Homo sapien
ttctgagcaaaagaaatgtgttgtcagtcacta

SEQ ID NO: 450313 - DNA, 33 bp, Homo sapien
cctggaataaaacaaccgattagcagtaaatac

SEQ ID NO: 450314 - DNA, 33 bp, Homo sapien
cctggaataaaacaactgattagcagtaaatac

SEQ ID NO: 450315 - DNA, 33 bp, Homo sapien
cacactatgccttctacgatttcactcatgtac

SEQ ID NO: 450316 - DNA, 33 bp, Homo sapien
cacactatgccttctatgatttcactcatgtac

SEQ ID NO: 450317 - DNA, 33 bp, Homo sapien
catggaatttgtgtgaaattaaattgtacaagc

SEQ ID NO: 450318 - DNA, 33 bp, Homo sapien
catggaatttgtgtgagattaaattgtacaagc

SEQ ID NO: 450319 - DNA, 33 bp, Homo sapien
tctaacactgctgtgaacattaacatacgggtc

SEQ ID NO: 450320 - DNA, 33 bp, Homo sapien
tctaacactgctgtgatcattaacatacgggtc

SEQ ID NO: 450321 - DNA, 33 bp, Homo sapien
tgttactaagtacaccaagagtctaaaattgtg

SEQ ID NO: 450322 - DNA, 33 bp, Homo sapien
tgttactaagtacaccgagagtctaaaattgtg

SEQ ID NO: 450323 - DNA, 33 bp, Homo sapien
aggcacagcagttccaactccctctccaggctc

SEQ ID NO: 450324 - DNA, 33 bp, Homo sapien
aggcacagcagttccatctccctctccaggctc

SEQ ID NO: 450325 - DNA, 33 bp, Homo sapien
ggtgccagcacagaagacttagtacctgcatgg

SEQ ID NO: 450326 - DNA, 33 bp, Homo sapien
ggtgccagcacagaaggcttagtacctgcatgg

SEQ ID NO: 450327 - DNA, 33 bp, Homo sapien
tacaataagtgctaacgctttttaaataagttt

SEQ ID NO: 450328 - DNA, 33 bp, Homo sapien
tacaataagtgctaactctttttaaataagttt

SEQ ID NO: 450329 - DNA, 33 bp, Homo sapien
gacgtttcttttgtgacggacactcagagttac

SEQ ID NO: 450330 - DNA, 33 bp, Homo sapien
gacgtttcttttgtgatggacactcagagttac

SEQ ID NO: 450331 - DNA, 33 bp, Homo sapien
aagaattgaacaaaaaccaacatgatgttttta

SEQ ID NO: 450332 - DNA, 33 bp, Homo sapien
aagaattgaacaaaaatcaacatgatgttttta

SEQ ID NO: 450333 - DNA, 33 bp, Homo sapien
aatgaatcagttaaacaaagagtcaggatttcc

SEQ ID NO: 450334 - DNA, 33 bp, Homo sapien
aatgaatcagttaaaccaagagtcaggatttcc

SEQ ID NO: 450335 - DNA, 33 bp, Homo sapien
aagaataaaagctacacagttttaggaaagcga

SEQ ID NO: 450336 - DNA, 33 bp, Homo sapien
aagaataaaagctacatagttttaggaaagcga

SEQ ID NO: 450337 - DNA, 33 bp, Homo sapien
gtaaaaagaatcaataccagctttcaagtctgg

SEQ ID NO: 450338 - DNA, 33 bp, Homo sapien
gtaaaaagaatcaatatcagctttcaagtctgg

SEQ ID NO: 450339 - DNA, 33 bp, Homo sapien
aagcaggtggttctgcacactaacgacgctctt

SEQ ID NO: 450340 - DNA, 33 bp, Homo sapien
aagcaggtggttctgcgcactaacgacgctctt

SEQ ID NO: 450341 - DNA, 33 bp, Homo sapien
cattgtgcagggtatacaatgtggtaagtgctt

SEQ ID NO: 450342 - DNA, 33 bp, Homo sapien
cattgtgcagggtatataatgtggtaagtgctt

SEQ ID NO: 450343 - DNA, 33 bp, Homo sapien
cttttctgaggttatcgacaatgttattattct

SEQ ID NO: 450344 - DNA, 33 bp, Homo sapien
cttttctgaggttatctacaatgttattattct

SEQ ID NO: 450345 - DNA, 33 bp, Homo sapien
tttgggacatatttaccgagctttgtttgtgtg

SEQ ID NO: 450346 - DNA, 33 bp, Homo sapien
tttgggacatatttactgagctttgtttgtgtg

SEQ ID NO: 450347 - DNA, 33 bp, Homo sapien
cacacaaagtgagaatcagtcagaaccactggc

SEQ ID NO: 450348 - DNA, 33 bp, Homo sapien
cacacaaagtgagaattagtcagaaccactggc

SEQ ID NO: 450349 - DNA, 33 bp, Homo sapien
acgcgtggacacacaccgaaagctctgaaggga

SEQ ID NO: 450350 - DNA, 33 bp, Homo sapien
acgcgtggacacacactgaaagctctgaaggga

SEQ ID NO: 450351 - DNA, 33 bp, Homo sapien
caacggcacatttcacaaccctaggagtccgcc

SEQ ID NO: 450352 - DNA, 33 bp, Homo sapien
caacggcacatttcacgaccctaggagtccgcc

SEQ ID NO: 450353 - DNA, 33 bp, Homo sapien
gcagatctgttccgacaccttcacaccctggat

SEQ ID NO: 450354 - DNA, 33 bp, Homo sapien
gcagatctgttccgacgccttcacaccctggat

SEQ ID NO: 450355 - DNA, 33 bp, Homo sapien
acctcgtttatgtcacagcgtttgtgagcctgg

SEQ ID NO: 450356 - DNA, 33 bp, Homo sapien
acctcgtttatgtcacggcgtttgtgagcctgg

SEQ ID NO: 450357 - DNA, 33 bp, Homo sapien
catgcataatgagttacagaaagagatgattag

SEQ ID NO: 450358 - DNA, 33 bp, Homo sapien
catgcataatgagttatagaaagagatgattag

SEQ ID NO: 450359 - DNA, 33 bp, Homo sapien
agaggccaatgaaccacgttatgaaaccacact

SEQ ID NO: 450360 - DNA, 33 bp, Homo sapien
agaggccaatgaaccatgttatgaaaccacact

SEQ ID NO: 450361 - DNA, 33 bp, Homo sapien
ctttagaaacacagacaggagcatgaacttctc

SEQ ID NO: 450362 - DNA, 33 bp, Homo sapien
ctttagaaacacagacgggagcatgaacttctc

SEQ ID NO: 450363 - DNA, 33 bp, Homo sapien
tgggcctgaagttttccctgcaggaagattgct

SEQ ID NO: 450364 - DNA, 33 bp, Homo sapien
tgggcctgaagttttctctgcaggaagattgct

SEQ ID NO: 450365 - DNA, 33 bp, Homo sapien
gttaatttagatttccacgtgtgtagtgttagt

SEQ ID NO: 450366 - DNA, 33 bp, Homo sapien
gttaatttagatttccgcgtgtgtagtgttagt

SEQ ID NO: 450367 - DNA, 33 bp, Homo sapien
acaccttccaaagctcaagatcaacaccttcca

SEQ ID NO: 450368 - DNA, 33 bp, Homo sapien
acaccttccaaagctccagatcaacaccttcca

SEQ ID NO: 450369 - DNA, 33 bp, Homo sapien
ctggatgccctaattcgacataagcagaggtat

SEQ ID NO: 450370 - DNA, 33 bp, Homo sapien
ctggatgccctaattctacataagcagaggtat

SEQ ID NO: 450371 - DNA, 33 bp, Homo sapien
tggaaatgtccacctcaagggctgtttgcttcc

SEQ ID NO: 450372 - DNA, 33 bp, Homo sapien
tggaaatgtccacctccagggctgtttgcttcc

SEQ ID NO: 450373 - DNA, 33 bp, Homo sapien
tggaatcaggctctgcgattcttttgcccggag

SEQ ID NO: 450374 - DNA, 33 bp, Homo sapien
tggaatcaggctctgctattcttttgcccggag

SEQ ID NO: 450375 - DNA, 33 bp, Homo sapien
tagcagcaaacaaagcagcagcatggagggtca

SEQ ID NO: 450376 - DNA, 33 bp, Homo sapien
tagcagcaaacaaagcggcagcatggagggtca

SEQ ID NO: 450377 - DNA, 33 bp, Homo sapien
agacagactttttctaaatgtccaaagagctga

SEQ ID NO: 450378 - DNA, 33 bp, Homo sapien
agacagactttttctagatgtccaaagagctga

SEQ ID NO: 450379 - DNA, 33 bp, Homo sapien
ctccctaacacggcgccaatagcaggaggaggc

SEQ ID NO: 450380 - DNA, 33 bp, Homo sapien
ctccctaacacggcgctaatagcaggaggaggc

SEQ ID NO: 450381 - DNA, 33 bp, Homo sapien
cacaaagtcatgcccacacgtggaaggaaatcc

SEQ ID NO: 450382 - DNA, 33 bp, Homo sapien
cacaaagtcatgcccatacgtggaaggaaatcc

SEQ ID NO: 450383 - DNA, 33 bp, Homo sapien
gagagaagtggcattcaaagcatttaagtaact

SEQ ID NO: 450384 - DNA, 33 bp, Homo sapien
gagagaagtggcattcgaagcatttaagtaact

SEQ ID NO: 450385 - DNA, 33 bp, Homo sapien
gcacagtggagacctcaaagacaggattattca

SEQ ID NO: 450386 - DNA, 33 bp, Homo sapien
gcacagtggagacctcgaagacaggattattca

SEQ ID NO: 450387 - DNA, 33 bp, Homo sapien
gtatctatgtttgtggaagatattggtgtgaag

SEQ ID NO: 450388 - DNA, 33 bp, Homo sapien
gtatctatgtttgtgggagatattggtgtgaag

SEQ ID NO: 450389 - DNA, 33 bp, Homo sapien
gaaaaccttgttctaacataggtgatatggttt

SEQ ID NO: 450390 - DNA, 33 bp, Homo sapien
gaaaaccttgttctaatataggtgatatggttt

SEQ ID NO: 450391 - DNA, 33 bp, Homo sapien
atgacctaaacgttcaccaaatgattaatggat

SEQ ID NO: 450392 - DNA, 33 bp, Homo sapien
atgacctaaacgttcagcaaatgattaatggat

SEQ ID NO: 450393 - DNA, 33 bp, Homo sapien
ctttctctaaggcaagcatttacctgccgccca

SEQ ID NO: 450394 - DNA, 33 bp, Homo sapien
ctttctctaaggcaaggatttacctgccgccca

SEQ ID NO: 450395 - DNA, 33 bp, Homo sapien
cagacgatttactgaaaaacatctacataaagg

SEQ ID NO: 450396 - DNA, 33 bp, Homo sapien
cagacgatttactgaacaacatctacataaagg

SEQ ID NO: 450397 - DNA, 33 bp, Homo sapien
aacgtctgaggaatgtaaagaaggaacaagggc

SEQ ID NO: 450398 - DNA, 33 bp, Homo sapien
aacgtctgaggaatgtgaagaaggaacaagggc

SEQ ID NO: 450399 - DNA, 33 bp, Homo sapien
caaacacaggccttcgcagaaaatcactcgcat

SEQ ID NO: 450400 - DNA, 33 bp, Homo sapien
caaacacaggccttcgtagaaaatcactcgcat

SEQ ID NO: 450401 - DNA, 33 bp, Homo sapien
ttctcctgactgaagacgcagatcgctgagtgc

SEQ ID NO: 450402 - DNA, 33 bp, Homo sapien
ttctcctgactgaagatgcagatcgctgagtgc

SEQ ID NO: 450403 - DNA, 33 bp, Homo sapien
cctcaaccatgaaaacacagaaaaagtagctgc

SEQ ID NO: 450404 - DNA, 33 bp, Homo sapien
cctcaaccatgaaaacgcagaaaaagtagctgc

SEQ ID NO: 450405 - DNA, 33 bp, Homo sapien
actcgtaccgcgtgcacggaaactacttacaca

SEQ ID NO: 450406 - DNA, 33 bp, Homo sapien
actcgtaccgcgtgcatggaaactacttacaca

SEQ ID NO: 450407 - DNA, 33 bp, Homo sapien
tcccgagaatctcagacgagaaagaaaggtggg

SEQ ID NO: 450408 - DNA, 33 bp, Homo sapien
tcccgagaatctcagatgagaaagaaaggtggg

SEQ ID NO: 450409 - DNA, 33 bp, Homo sapien
gttaagtcttccttcaagaatcacctattgctg

SEQ ID NO: 450410 - DNA, 33 bp, Homo sapien
gttaagtcttccttcacgaatcacctattgctg

SEQ ID NO: 450411 - DNA, 33 bp, Homo sapien
agcattttcacagaataactagaataacgaggt

SEQ ID NO: 450412 - DNA, 33 bp, Homo sapien
agcattttcacagaattactagaataacgaggt

SEQ ID NO: 450413 - DNA, 33 bp, Homo sapien
cgtggtgaataattacccatcactcctgtgttt

SEQ ID NO: 450414 - DNA, 33 bp, Homo sapien
cgtggtgaataattacgcatcactcctgtgttt

SEQ ID NO: 450415 - DNA, 33 bp, Homo sapien
aacacactgacgcgccagaaatggccagagatc

SEQ ID NO: 450416 - DNA, 33 bp, Homo sapien
aacacactgacgcgccggaaatggccagagatc

SEQ ID NO: 450417 - DNA, 33 bp, Homo sapien
cattcctagagttcgcagagaagtgaaaacgac

SEQ ID NO: 450418 - DNA, 33 bp, Homo sapien
cattcctagagttcgcggagaagtgaaaacgac

SEQ ID NO: 450419 - DNA, 33 bp, Homo sapien
aacatttgccagtagccgcgccgaggaggggcc

SEQ ID NO: 450420 - DNA, 33 bp, Homo sapien
aacatttgccagtagctgcgccgaggaggggcc

SEQ ID NO: 450421 - DNA, 33 bp, Homo sapien
aaaattgattctgatcaagcgagatatacgtat

SEQ ID NO: 450422 - DNA, 33 bp, Homo sapien
aaaattgattctgatcgagcgagatatacgtat

SEQ ID NO: 450423 - DNA, 33 bp, Homo sapien
ttacccatctgaacaacccagagaaagcaggct

SEQ ID NO: 450424 - DNA, 33 bp, Homo sapien
ttacccatctgaacaatccagagaaagcaggct

SEQ ID NO: 450425 - DNA, 33 bp, Homo sapien
cctctgccactgaaaaagtgtggtttgatggag

SEQ ID NO: 450426 - DNA, 33 bp, Homo sapien
cctctgccactgaaaacgtgtggtttgatggag

SEQ ID NO: 450427 - DNA, 33 bp, Homo sapien
cgcgccgactgtgtccacttcttcccctccgcg

SEQ ID NO: 450428 - DNA, 33 bp, Homo sapien
cgcgccgactgtgtccgcttcttcccctccgcg

SEQ ID NO: 450429 - DNA, 33 bp, Homo sapien
cggccccggcgagaggcacaaagcatttaaagg

SEQ ID NO: 450430 - DNA, 33 bp, Homo sapien
cggccccggcgagaggtacaaagcatttaaagg

SEQ ID NO: 450431 - DNA, 33 bp, Homo sapien
ggggtttcctcatcaaatccaaggccatttccc

SEQ ID NO: 450432 - DNA, 33 bp, Homo sapien
ggggtttcctcatcaagtccaaggccatttccc

SEQ ID NO: 450433 - DNA, 33 bp, Homo sapien
tacgaaacgttcctgacgcagcaagcagccggc

SEQ ID NO: 450434 - DNA, 33 bp, Homo sapien
tacgaaacgttcctgatgcagcaagcagccggc

SEQ ID NO: 450435 - DNA, 33 bp, Homo sapien
taagccagcagtttggcaagctaaggcagaagg

SEQ ID NO: 450436 - DNA, 33 bp, Homo sapien
taagccagcagtttgggaagctaaggcagaagg

SEQ ID NO: 450437 - DNA, 33 bp, Homo sapien
tgtttctaacttttgacgatatgcaaagtttct

SEQ ID NO: 450438 - DNA, 33 bp, Homo sapien
tgtttctaacttttgatgatatgcaaagtttct

SEQ ID NO: 450439 - DNA, 33 bp, Homo sapien
accacaatgaagacccaaaggcgagaaatgtga

SEQ ID NO: 450440 - DNA, 33 bp, Homo sapien
accacaatgaagacccgaaggcgagaaatgtga

SEQ ID NO: 450441 - DNA, 33 bp, Homo sapien
gcttccttattagatcgcattgcctctcccggg

SEQ ID NO: 450442 - DNA, 33 bp, Homo sapien
gcttccttattagatctcattgcctctcccggg

SEQ ID NO: 450443 - DNA, 33 bp, Homo sapien
tgatgcctgcacagcacggcggttggaattcat

SEQ ID NO: 450444 - DNA, 33 bp, Homo sapien
tgatgcctgcacagcatggcggttggaattcat

SEQ ID NO: 450445 - DNA, 33 bp, Homo sapien
ttcctgttgagggcaacggaagaatttggcaaa

SEQ ID NO: 450446 - DNA, 33 bp, Homo sapien
ttcctgttgagggcaatggaagaatttggcaaa

SEQ ID NO: 450447 - DNA, 33 bp, Homo sapien
gtcaccacacagctatcagaatgcctaaaatta

SEQ ID NO: 450448 - DNA, 33 bp, Homo sapien
gtcaccacacagctatgagaatgcctaaaatta

SEQ ID NO: 450449 - DNA, 33 bp, Homo sapien
ttaaattgtggcttaactggaccacaagtttag

SEQ ID NO: 450450 - DNA, 33 bp, Homo sapien
ttaaattgtggcttaattggaccacaagtttag

SEQ ID NO: 450451 - DNA, 33 bp, Homo sapien
ctgaggctaatggtgacgcatatgcttctaagt

SEQ ID NO: 450452 - DNA, 33 bp, Homo sapien
ctgaggctaatggtgaggcatatgcttctaagt

SEQ ID NO: 450453 - DNA, 33 bp, Homo sapien
tctctgaaatggaaaacgataatcccagtacga

SEQ ID NO: 450454 - DNA, 33 bp, Homo sapien
tctctgaaatggaaaatgataatcccagtacga

SEQ ID NO: 450455 - DNA, 33 bp, Homo sapien
cactgatgtctgttccaatagcttagagggcag

SEQ ID NO: 450456 - DNA, 33 bp, Homo sapien
cactgatgtctgttcccatagcttagagggcag

SEQ ID NO: 450457 - DNA, 33 bp, Homo sapien
tgatggcatagaggaacgtggctgatggcggtg

SEQ ID NO: 450458 - DNA, 33 bp, Homo sapien
tgatggcatagaggaaggtggctgatggcggtg

SEQ ID NO: 450459 - DNA, 33 bp, Homo sapien
ttggccagcgcaggccaggacttcaggcttccc

SEQ ID NO: 450460 - DNA, 33 bp, Homo sapien
ttggccagcgcaggccgggacttcaggcttccc

SEQ ID NO: 450461 - DNA, 33 bp, Homo sapien
cacatttaggaaagaaaataccactcaaagaca

SEQ ID NO: 450462 - DNA, 33 bp, Homo sapien
cacatttaggaaagaagataccactcaaagaca

SEQ ID NO: 450463 - DNA, 33 bp, Homo sapien
atgcacaaaaaccaaaatcttgtgatctttcta

SEQ ID NO: 450464 - DNA, 33 bp, Homo sapien
atgcacaaaaaccaaactcttgtgatctttcta

SEQ ID NO: 450465 - DNA, 33 bp, Homo sapien
ctctctcagcatcagaactctgcattccatcct

SEQ ID NO: 450466 - DNA, 33 bp, Homo sapien
ctctctcagcatcagatctctgcattccatcct

SEQ ID NO: 450467 - DNA, 33 bp, Homo sapien
atgtgtctatagtagaacgatttatattcctgg

SEQ ID NO: 450468 - DNA, 33 bp, Homo sapien
atgtgtctatagtagagcgatttatattcctgg

SEQ ID NO: 450469 - DNA, 33 bp, Homo sapien
ttgttagaaatcatgcagataacaaaagggtag

SEQ ID NO: 450470 - DNA, 33 bp, Homo sapien
ttgttagaaatcatgcggataacaaaagggtag

SEQ ID NO: 450471 - DNA, 33 bp, Homo sapien
cacagcaagaaaatgacgtgcattctcgatttc

SEQ ID NO: 450472 - DNA, 33 bp, Homo sapien
cacagcaagaaaatgatgtgcattctcgatttc

SEQ ID NO: 450473 - DNA, 33 bp, Homo sapien
aggtcacacagaaataccaccattgctactgaa

SEQ ID NO: 450474 - DNA, 33 bp, Homo sapien
aggtcacacagaaatagcaccattgctactgaa

SEQ ID NO: 450475 - DNA, 33 bp, Homo sapien
tacagaagaatgtcaaggacttaatggtgcaag

SEQ ID NO: 450476 - DNA, 33 bp, Homo sapien
tacagaagaatgtcaatgacttaatggtgcaag

SEQ ID NO: 450477 - DNA, 33 bp, Homo sapien
agttttcttctctgccaaatatctacctggtaa

SEQ ID NO: 450478 - DNA, 33 bp, Homo sapien
agttttcttctctgccgaatatctacctggtaa

SEQ ID NO: 450479 - DNA, 33 bp, Homo sapien
atatacaataaacttaaaaatgtggaatgtaat

SEQ ID NO: 450480 - DNA, 33 bp, Homo sapien
atatacaataaacttacaaatgtggaatgtaat

SEQ ID NO: 450481 - DNA, 33 bp, Homo sapien
ggggagcgtatcccgacgcccagaaccacggca

SEQ ID NO: 450482 - DNA, 33 bp, Homo sapien
ggggagcgtatcccgatgcccagaaccacggca

SEQ ID NO: 450483 - DNA, 33 bp, Homo sapien
tgccggcacattgagaacttttcacacaggttc

SEQ ID NO: 450484 - DNA, 33 bp, Homo sapien
tgccggcacattgagatcttttcacacaggttc

SEQ ID NO: 450485 - DNA, 33 bp, Homo sapien
tagaccattctccaaaagtggagcctcctactc

SEQ ID NO: 450486 - DNA, 33 bp, Homo sapien
tagaccattctccaaaggtggagcctcctactc

SEQ ID NO: 450487 - DNA, 33 bp, Homo sapien
ttttagcatttactcaataacaaattacccttt

SEQ ID NO: 450488 - DNA, 33 bp, Homo sapien
ttttagcatttactcagtaacaaattacccttt

SEQ ID NO: 450489 - DNA, 33 bp, Homo sapien
gtcacatgatcttcccacgtgtttgctgcactg

SEQ ID NO: 450490 - DNA, 33 bp, Homo sapien
gtcacatgatcttcccgcgtgtttgctgcactg

SEQ ID NO: 450491 - DNA, 33 bp, Homo sapien
tttcccaaagtagagaatatagtgaacccgtct

SEQ ID NO: 450492 - DNA, 33 bp, Homo sapien
tttcccaaagtagagagtatagtgaacccgtct

SEQ ID NO: 450493 - DNA, 33 bp, Homo sapien
agatgctcttagctagaaaacagattttatgtg

SEQ ID NO: 450494 - DNA, 33 bp, Homo sapien
agatgctcttagctaggaaacagattttatgtg

SEQ ID NO: 450495 - DNA, 33 bp, Homo sapien
ccgagtccgtgaagtgaaaagccaggagctttg

SEQ ID NO: 450496 - DNA, 33 bp, Homo sapien
ccgagtccgtgaagtggaaagccaggagctttg

SEQ ID NO: 450497 - DNA, 33 bp, Homo sapien
tgggaggataagaaggaatgatttcttgaagcc

SEQ ID NO: 450498 - DNA, 33 bp, Homo sapien
tgggaggataagaagggatgatttcttgaagcc

SEQ ID NO: 450499 - DNA, 33 bp, Homo sapien
ctgctcaacaaccttcaagtccagaatgcccca

SEQ ID NO: 450500 - DNA, 33 bp, Homo sapien
ctgctcaacaaccttcgagtccagaatgcccca

SEQ ID NO: 450501 - DNA, 33 bp, Homo sapien
ccaacatttttcaatacggagttaaatagcaaa

SEQ ID NO: 450502 - DNA, 33 bp, Homo sapien
ccaacatttttcaatatggagttaaatagcaaa

SEQ ID NO: 450503 - DNA, 33 bp, Homo sapien
tccataaatgctcctacggaaaatccaccactg

SEQ ID NO: 450504 - DNA, 33 bp, Homo sapien
tccataaatgctcctatggaaaatccaccactg

SEQ ID NO: 450505 - DNA, 33 bp, Homo sapien
aggagggcaaaaatcacctggtgaccattggac

SEQ ID NO: 450506 - DNA, 33 bp, Homo sapien
aggagggcaaaaatcatctggtgaccattggac

SEQ ID NO: 450507 - DNA, 33 bp, Homo sapien
cctaacttaaaaacctaaggctcagaaggcctt

SEQ ID NO: 450508 - DNA, 33 bp, Homo sapien
cctaacttaaaaacctgaggctcagaaggcctt

SEQ ID NO: 450509 - DNA, 33 bp, Homo sapien
cagcaatgctgccagaacccaaatgcattagtt

SEQ ID NO: 450510 - DNA, 33 bp, Homo sapien
cagcaatgctgccagagcccaaatgcattagtt

SEQ ID NO: 450511 - DNA, 33 bp, Homo sapien
tgaccgattatcccacactacgataaaaaagga

SEQ ID NO: 450512 - DNA, 33 bp, Homo sapien
tgaccgattatcccacgctacgataaaaaagga

SEQ ID NO: 450513 - DNA, 33 bp, Homo sapien; identical to SEQ ID NO: 450511

SEQ ID NO: 450514 - DNA, 33 bp, Homo sapien; identical to SEQ ID NO: 450512

SEQ ID NO: 450515 - DNA, 33 bp, Homo sapien
gagacacttttctcccaaaactgaaatacagtg

SEQ ID NO: 450516 - DNA, 33 bp, Homo sapien
gagacacttttctcccgaaactgaaatacagtg

SEQ ID NO: 450517 - DNA, 33 bp, Homo sapien; identical to SEQ ID NO: 450515

SEQ ID NO: 450518 - DNA, 33 bp, Homo sapien; identical to SEQ ID NO: 450516

SEQ ID NO: 450519 - DNA, 33 bp, Homo sapien
cagtgtctcataatacaataatgtggtcacaac

SEQ ID NO: 450520 - DNA, 33 bp, Homo sapien
cagtgtctcataatacgataatgtggtcacaac

SEQ ID NO: 450521 - DNA, 33 bp, Homo sapien; identical to SEQ ID NO: 450519

SEQ ID NO: 450522 - DNA, 33 bp, Homo sapien; identical to SEQ ID NO: 450520

SEQ ID NO: 450523 - DNA, 33 bp, Homo sapien
ctagctctcactgtcaacatttgcagcttttgt

SEQ ID NO: 450524 - DNA, 33 bp, Homo sapien
ctagctctcactgtcagcatttgcagcttttgt

SEQ ID NO: 450525 - DNA, 33 bp, Homo sapien
cggactttagcttccaacgtgttccagttaatg

SEQ ID NO: 450526 - DNA, 33 bp, Homo sapien
cggactttagcttccatcgtgttccagttaatg

SEQ ID NO: 450527 - DNA, 33 bp, Homo sapien
ttgtgtgtttcgtaccacagccctaaaatcagc

SEQ ID NO: 450528 - DNA, 33 bp, Homo sapien
ttgtgtgtttcgtaccgcagccctaaaatcagc

SEQ ID NO: 450529 - DNA, 33 bp, Homo sapien
ttgtttgtcttgaaaaaccatgtaagctaaaaa

SEQ ID NO: 450530 - DNA, 33 bp, Homo sapien
ttgtttgtcttgaaaacccatgtaagctaaaaa

SEQ ID NO: 450531 - DNA, 33 bp, Homo sapien
ccaaacacccaaacctaaacagtctgctcactg

SEQ ID NO: 450532 - DNA, 33 bp, Homo sapien
ccaaacacccaaacctgaacagtctgctcactg

SEQ ID NO: 450533 - DNA, 33 bp, Homo sapien
catttttgagtaatacaataaatctcactcctg

SEQ ID NO: 450534 - DNA, 33 bp, Homo sapien
catttttgagtaatacgataaatctcactcctg

SEQ ID NO: 450535 - DNA, 33 bp, Homo sapien
catgagcctggctgagaagcagttttcttttgt

SEQ ID NO: 450536 - DNA, 33 bp, Homo sapien
catgagcctggctgaggagcagttttcttttgt

SEQ ID NO: 450537 - DNA, 33 bp, Homo sapien
ggacaaaagcctcccaacaagacaaggtaaaag

SEQ ID NO: 450538 - DNA, 33 bp, Homo sapien
ggacaaaagcctcccagcaagacaaggtaaaag

SEQ ID NO: 450539 - DNA, 33 bp, Homo sapien
gctccgaggagcctgccgaagtcagaacaaatc

SEQ ID NO: 450540 - DNA, 33 bp, Homo sapien
gctccgaggagcctgctgaagtcagaacaaatc

SEQ ID NO: 450541 - DNA, 33 bp, Homo sapien
cgagctcatccctgtacaaggcctcaccagata

SEQ ID NO: 450542 - DNA, 33 bp, Homo sapien
cgagctcatccctgtataaggcctcaccagata

SEQ ID NO: 450543 - DNA, 33 bp, Homo sapien
ttcagttctgtgtttcccctgtacccaagatga

SEQ ID NO: 450544 - DNA, 33 bp, Homo sapien
ttcagttctgtgtttcgcctgtacccaagatga

SEQ ID NO: 450545 - DNA, 33 bp, Homo sapien
tactggaatgaagtaaatacgtgtggaagtttt

SEQ ID NO: 450546 - DNA, 33 bp, Homo sapien
tactggaatgaagtaagtacgtgtggaagtttt

SEQ ID NO: 450547 - DNA, 33 bp, Homo sapien
aaagtcacctgaacaccgaattcgtggatacag

SEQ ID NO: 450548 - DNA, 33 bp, Homo sapien
aaagtcacctgaacactgaattcgtggatacag

SEQ ID NO: 450549 - DNA, 33 bp, Homo sapien
tcacggcccacatagcaccatattcttcacatt

SEQ ID NO: 450550 - DNA, 33 bp, Homo sapien
tcacggcccacatagcgccatattcttcacatt

SEQ ID NO: 450551 - DNA, 33 bp, Homo sapien
ttgagcacagctaagacagttagtttaaaatct

SEQ ID NO: 450552 - DNA, 33 bp, Homo sapien
ttgagcacagctaagatagttagtttaaaatct

SEQ ID NO: 450553 - DNA, 33 bp, Homo sapien
gtggttaggatttcaacatacaagttttggtga

SEQ ID NO: 450554 - DNA, 33 bp, Homo sapien
gtggttaggatttcaatatacaagttttggtga

SEQ ID NO: 450555 - DNA, 33 bp, Homo sapien
agaggctagtatcagaaatgaaatccctaaatg

SEQ ID NO: 450556 - DNA, 33 bp, Homo sapien
agaggctagtatcagagatgaaatccctaaatg

SEQ ID NO: 450557 - DNA, 33 bp, Homo sapien
tactgatgcagagatacggtacttcacaaggga

SEQ ID NO: 450558 - DNA, 33 bp, Homo sapien
tactgatgcagagatatggtacttcacaaggga

SEQ ID NO: 450559 - DNA, 33 bp, Homo sapien
agacagtaagactcacacgtaaaccattaccct

SEQ ID NO: 450560 - DNA, 33 bp, Homo sapien
agacagtaagactcacgcgtaaaccattaccct

SEQ ID NO: 450561 - DNA, 33 bp, Homo sapien
tctccctgccctggaaattagctgaaagtcccc

SEQ ID NO: 450562 - DNA, 33 bp, Homo sapien
tctccctgccctggaagttagctgaaagtcccc

SEQ ID NO: 450563 - DNA, 33 bp, Homo sapien
acaacatgaacgcaacaagagaagtgaaagaaa

SEQ ID NO: 450564 - DNA, 33 bp, Homo sapien
acaacatgaacgcaacgagagaagtgaaagaaa

SEQ ID NO: 450565 - DNA, 33 bp, Homo sapien
ttgattcagaggtctaaatttttatttcagttt

SEQ ID NO: 450566 - DNA, 33 bp, Homo sapien
ttgattcagaggtctacatttttatttcagttt

SEQ ID NO: 450567 - DNA, 33 bp, Homo sapien
aagcaaattcaggctaaaacatgagccatactg

SEQ ID NO: 450568 - DNA, 33 bp, Homo sapien
aagcaaattcaggctataacatgagccatactg

SEQ ID NO: 450569 - DNA, 33 bp, Homo sapien
tcagaatgttccatgcacctgtccggaaagtcc

SEQ ID NO: 450570 - DNA, 33 bp, Homo sapien
tcagaatgttccatgcgcctgtccggaaagtcc

SEQ ID NO: 450571 - DNA, 33 bp, Homo sapien
ataaccataagagaaacttccagcagtacttca

SEQ ID NO: 450572 - DNA, 33 bp, Homo sapien
ataaccataagagaaatttccagcagtacttca

SEQ ID NO: 450573 - DNA, 33 bp, Homo sapien
ctggcagccatcaagagtcaaattacaattaca

SEQ ID NO: 450574 - DNA, 33 bp, Homo sapien
ctggcagccatcaagattcaaattacaattaca

SEQ ID NO: 450575 - DNA, 33 bp, Homo sapien
tttgagaactctgaccaaatctttcatacagat

SEQ ID NO: 450576 - DNA, 33 bp, Homo sapien
tttgagaactctgaccgaatctttcatacagat

SEQ ID NO: 450577 - DNA, 33 bp, Homo sapien
tgttgatcttccagcaacgtttatatatttagt

SEQ ID NO: 450578 - DNA, 33 bp, Homo sapien
tgttgatcttccagcagcgtttatatatttagt

SEQ ID NO: 450579 - DNA, 33 bp, Homo sapien
atgcctgagagcttgcaccggggtggaggtagc

SEQ ID NO: 450580 - DNA, 33 bp, Homo sapien
atgcctgagagcttgcgccggggtggaggtagc

SEQ ID NO: 450581 - DNA, 33 bp, Homo sapien
aaaaacagaacaaaggcccgagagccaccacac

SEQ ID NO: 450582 - DNA, 33 bp, Homo sapien
aaaaacagaacaaagggccgagagccaccacac

SEQ ID NO: 450583 - DNA, 33 bp, Homo sapien
ccagccagattcctccaagctcagtgtccgctg

SEQ ID NO: 450584 - DNA, 33 bp, Homo sapien
ccagccagattcctccgagctcagtgtccgctg

SEQ ID NO: 450585 - DNA, 33 bp, Homo sapien
tccccagaagaggagccactggcttgacacctt

SEQ ID NO: 450586 - DNA, 33 bp, Homo sapien
tccccagaagaggagctactggcttgacacctt

SEQ ID NO: 450587 - DNA, 33 bp, Homo sapien
tgtactttctgaacctcactgtggtccagaaca

SEQ ID NO: 450588 - DNA, 33 bp, Homo sapien
tgtactttctgaaccttactgtggtccagaaca

SEQ ID NO: 450589 - DNA, 33 bp, Homo sapien
acagtgaacagccatacgcaaacgggcaatact

SEQ ID NO: 450590 - DNA, 33 bp, Homo sapien
acagtgaacagccatatgcaaacgggcaatact

SEQ ID NO: 450591 - DNA, 33 bp, Homo sapien
ttatcagctgatggacacgtgggctgttctcgc

SEQ ID NO: 450592 - DNA, 33 bp, Homo sapien
ttatcagctgatggacgcgtgggctgttctcgc

SEQ ID NO: 450593 - DNA, 33 bp, Homo sapien
tgaacgtactgagaaactgagatgtgttttagg

SEQ ID NO: 450594 - DNA, 33 bp, Homo sapien
tgaacgtactgagaaagtgagatgtgttttagg

SEQ ID NO: 450595 - DNA, 33 bp, Homo sapien
gaacgtgtgggaatctgaaccctcacacatttt

SEQ ID NO: 450596 - DNA, 33 bp, Homo sapien
gaacgtgtgggaatcttaaccctcacacatttt

SEQ ID NO: 450597 - DNA, 33 bp, Homo sapien
ctggaaggtaagacataatcgtgttaatggtga

SEQ ID NO: 450598 - DNA, 33 bp, Homo sapien
ctggaaggtaagacatgatcgtgttaatggtga

SEQ ID NO: 450599 - DNA, 33 bp, Homo sapien
gctgtagctgaggggaaaaggtgaggtactttg

SEQ ID NO: 450600 - DNA, 33 bp, Homo sapien
gctgtagctgaggggagaaggtgaggtactttg

SEQ ID NO: 450601 - DNA, 33 bp, Homo sapien
tgctcttcccacctccaatgctgagctcttcct

SEQ ID NO: 450602 - DNA, 33 bp, Homo sapien
tgctcttcccacctccgatgctgagctcttcct

SEQ ID NO: 450603 - DNA, 33 bp, Homo sapien
cccttatacttctccaaacatttttacctgaat

SEQ ID NO: 450604 - DNA, 33 bp, Homo sapien
cccttatacttctccagacatttttacctgaat

SEQ ID NO: 450605 - DNA, 33 bp, Homo sapien
tcctctgcagacaccccggaaatcctactccaa

SEQ ID NO: 450606 - DNA, 33 bp, Homo sapien
tcctctgcagacaccctggaaatcctactccaa

SEQ ID NO: 450607 - DNA, 33 bp, Homo sapien
caggatggagcatcacagtaccatcacagctca

SEQ ID NO: 450608 - DNA, 33 bp, Homo sapien
caggatggagcatcacggtaccatcacagctca

SEQ ID NO: 450609 - DNA, 33 bp, Homo sapien
ctccagtttgggtcaagaagtgaggatctgtct

SEQ ID NO: 450610 - DNA, 33 bp, Homo sapien
ctccagtttgggtcaataagtgaggatctgtct

SEQ ID NO: 450611 - DNA, 33 bp, Homo sapien
acaataatgagacccaacggtgtgagacggtgt

SEQ ID NO: 450612 - DNA, 33 bp, Homo sapien
acaataatgagacccagcggtgtgagacggtgt

SEQ ID NO: 450613 - DNA, 33 bp, Homo sapien
gaaaatcaagtctggaatcaggaacataaggcg

SEQ ID NO: 450614 - DNA, 33 bp, Homo sapien
gaaaatcaagtctggagtcaggaacataaggcg

SEQ ID NO: 450615 - DNA, 33 bp, Homo sapien
taactttagtcccaaccctgtgctcacagaaac

SEQ ID NO: 450616 - DNA, 33 bp, Homo sapien
taactttagtcccaacgctgtgctcacagaaac

SEQ ID NO: 450617 - DNA, 33 bp, Homo sapien
aattcatggttgaacactgtcaaaagaatgttt

SEQ ID NO: 450618 - DNA, 33 bp, Homo sapien
aattcatggttgaacattgtcaaaagaatgttt

SEQ ID NO: 450619 - DNA, 33 bp, Homo sapien
gcagcgggagactgaaaaacaaagattccctac

SEQ ID NO: 450620 - DNA, 33 bp, Homo sapien
gcagcgggagactgaagaacaaagattccctac

SEQ ID NO: 450621 - DNA, 33 bp, Homo sapien
tatcttagatattccaatcaaatccaatctccc

SEQ ID NO: 450622 - DNA, 33 bp, Homo sapien
tatcttagatattccagtcaaatccaatctccc

SEQ ID NO: 450623 - DNA, 33 bp, Homo sapien
atcagaacagtagaaaacagcatgaatagaacc

SEQ ID NO: 450624 - DNA, 33 bp, Homo sapien
atcagaacagtagaaagcagcatgaatagaacc

SEQ ID NO: 450625 - DNA, 33 bp, Homo sapien
aaccaccttaacatgcccagagaaaaacacagt

SEQ ID NO: 450626 - DNA, 33 bp, Homo sapien
aaccaccttaacatgcgcagagaaaaacacagt

SEQ ID NO: 450627 - DNA, 33 bp, Homo sapien
cgtgggaggtcacggacggggtgaggtcgtcag

SEQ ID NO: 450628 - DNA, 33 bp, Homo sapien
cgtgggaggtcacggatggggtgaggtcgtcag

SEQ ID NO: 450629 - DNA, 33 bp, Homo sapien
gcaataccactaatgacaacaacagtaaagaca

SEQ ID NO: 450630 - DNA, 33 bp, Homo sapien
gcaataccactaatgataacaacagtaaagaca

SEQ ID NO: 450631 - DNA, 33 bp, Homo sapien
gggccacatgaagaagacatgcgatgtacatgg

SEQ ID NO: 450632 - DNA, 33 bp, Homo sapien
gggccacatgaagaagccatgcgatgtacatgg

SEQ ID NO: 450633 - DNA, 33 bp, Homo sapien
agggtaaccccgacaacattcctgcacataatc

SEQ ID NO: 450634 - DNA, 33 bp, Homo sapien
agggtaaccccgacaatattcctgcacataatc

SEQ ID NO: 450635 - DNA, 33 bp, Homo sapien
tgttctgagaatttaaatggcttgtatttttct

SEQ ID NO: 450636 - DNA, 33 bp, Homo sapien
tgttctgagaatttaagtggcttgtatttttct

SEQ ID NO: 450637 - DNA, 33 bp, Homo sapien
aggaaactgggaaaacaatatagaagagtaaac

SEQ ID NO: 450638 - DNA, 33 bp, Homo sapien
aggaaactgggaaaacgatatagaagagtaaac

SEQ ID NO: 450639 - DNA, 33 bp, Homo sapien
gccacatgtgtcagaccataaccgcctccttca

SEQ ID NO: 450640 - DNA, 33 bp, Homo sapien
gccacatgtgtcagactataaccgcctccttca

SEQ ID NO: 450641 - DNA, 33 bp, Homo sapien
gggaggtgctggctcacggggtagatcccgcct

SEQ ID NO: 450642 - DNA, 33 bp, Homo sapien
gggaggtgctggctcagggggtagatcccgcct

SEQ ID NO: 450643 - DNA, 33 bp, Homo sapien
tgaggtctattttcagcccaaagagtcggcttc

SEQ ID NO: 450644 - DNA, 33 bp, Homo sapien
tgaggtctattttcagtccaaagagtcggcttc

SEQ ID NO: 450645 - DNA, 33 bp, Homo sapien
aggatgttgctacacgcagttttgttgatggca

SEQ ID NO: 450646 - DNA, 33 bp, Homo sapien
aggatgttgctacacggagttttgttgatggca

SEQ ID NO: 450647 - DNA, 33 bp, Homo sapien
actgattcgtgcatcacgggttagcccagtggg

SEQ ID NO: 450648 - DNA, 33 bp, Homo sapien
actgattcgtgcatcatgggttagcccagtggg

SEQ ID NO: 450649 - DNA, 33 bp, Homo sapien
ctactcatccatcccccatctacacatccatca

SEQ ID NO: 450650 - DNA, 33 bp, Homo sapien
ctactcatccatcccctatctacacatccatca

SEQ ID NO: 450651 - DNA, 33 bp, Homo sapien
cagggaccggtgcgaacggaacacaggagcccg

SEQ ID NO: 450652 - DNA, 33 bp, Homo sapien
cagggaccggtgcgaatggaacacaggagcccg

SEQ ID NO: 450653 - DNA, 33 bp, Homo sapien
ggtctctttctgttccaccagcaccgaagccga

SEQ ID NO: 450654 - DNA, 33 bp, Homo sapien
ggtctctttctgttccgccagcaccgaagccga

SEQ ID NO: 450655 - DNA, 33 bp, Homo sapien
cacgcctccaacctaactccacgtggcccatga

SEQ ID NO: 450656 - DNA, 33 bp, Homo sapien
cacgcctccaacctaattccacgtggcccatga

SEQ ID NO: 450657 - DNA, 33 bp, Homo sapien
ctgagttgctatgaagcctagatgatctttatt

SEQ ID NO: 450658 - DNA, 33 bp, Homo sapien
ctgagttgctatgaagtctagatgatctttatt

SEQ ID NO: 450659 - DNA, 33 bp, Homo sapien
cgagttctgggacacaagaagctccatctccag

SEQ ID NO: 450660 - DNA, 33 bp, Homo sapien
cgagttctgggacacaggaagctccatctccag

SEQ ID NO: 450661 - DNA, 33 bp, Homo sapien
gctgggaggacagcatgaaaagaagaatgtgaa

SEQ ID NO: 450662 - DNA, 33 bp, Homo sapien
gctgggaggacagcattaaaagaagaatgtgaa

SEQ ID NO: 450663 - DNA, 33 bp, Homo sapien
agctttgcagatgtagacggttgaggtcacact

SEQ ID NO: 450664 - DNA, 33 bp, Homo sapien
agctttgcagatgtaggcggttgaggtcacact

SEQ ID NO: 450665 - DNA, 33 bp, Homo sapien
tctgtgctttaatgaaaaaatggggtcgtgctg

SEQ ID NO: 450666 - DNA, 33 bp, Homo sapien
tctgtgctttaatgaagaaatggggtcgtgctg

SEQ ID NO: 450667 - DNA, 33 bp, Homo sapien
tctttacgggttgacgaccttaatggttcctgc

SEQ ID NO: 450668 - DNA, 33 bp, Homo sapien
tctttacgggttgacggccttaatggttcctgc

SEQ ID NO: 450669 - DNA, 33 bp, Homo sapien
ggatgctgccccgagacgaccccacgacaccag

SEQ ID NO: 450670 - DNA, 33 bp, Homo sapien
ggatgctgccccgagatgaccccacgacaccag

SEQ ID NO: 450671 - DNA, 33 bp, Homo sapien
acccggagatgctcacccggctgttccctttta

SEQ ID NO: 450672 - DNA, 33 bp, Homo sapien
acccggagatgctcactcggctgttccctttta

SEQ ID NO: 450673 - DNA, 33 bp, Homo sapien
ggtgctcctgaccaccaagatgacggtcggaaa

SEQ ID NO: 450674 - DNA, 33 bp, Homo sapien
ggtgctcctgaccaccgagatgacggtcggaaa

SEQ ID NO: 450675 - DNA, 33 bp, Homo sapien
ccttgaaaacaccattgaaaaagccagaacccc

SEQ ID NO: 450676 - DNA, 33 bp, Homo sapien
ccttgaaaacaccatttaaaaagccagaacccc

SEQ ID NO: 450677 - DNA, 33 bp, Homo sapien
ctgctctcgctagatccatgtcagaaggaggga

SEQ ID NO: 450678 - DNA, 33 bp, Homo sapien
ctgctctcgctagatctatgtcagaaggaggga

SEQ ID NO: 450679 - DNA, 33 bp, Homo sapien
ggctaagctttctgctcagaagaaacccttctc

SEQ ID NO: 450680 - DNA, 33 bp, Homo sapien
ggctaagctttctgctgagaagaaacccttctc

SEQ ID NO: 450681 - DNA, 33 bp, Homo sapien
tggtgctgaaggaggacgcgctgcccggccaga

SEQ ID NO: 450682 - DNA, 33 bp, Homo sapien
tggtgctgaaggaggatgcgctgcccggccaga

SEQ ID NO: 450683 - DNA, 33 bp, Homo sapien; identical to SEQ ID NO: 450681

SEQ ID NO: 450684 - DNA, 33 bp, Homo sapien; identical to SEQ ID NO: 450682

SEQ ID NO: 450685 - DNA, 33 bp, Homo sapien
agagtgcgaaggagtacagttcactccacgagt

SEQ ID NO: 450686 - DNA, 33 bp, Homo sapien
agagtgcgaaggagtagagttcactccacgagt

SEQ ID NO: 450687 - DNA, 33 bp, Homo sapien
gcctcagcttcctccacgatagacggcatccta

SEQ ID NO: 450688 - DNA, 33 bp, Homo sapien
gcctcagcttcctccatgatagacggcatccta

SEQ ID NO: 450689 - DNA, 33 bp, Homo sapien
gccagccaggacgagacgcaagaccccgtcagg

SEQ ID NO: 450690 - DNA, 33 bp, Homo sapien
gccagccaggacgagatgcaagaccccgtcagg

SEQ ID NO: 450691 - DNA, 33 bp, Homo sapien
cagaggcgtttccaacaatgtatgacagcgaca

SEQ ID NO: 450692 - DNA, 33 bp, Homo sapien
cagaggcgtttccaaccatgtatgacagcgaca

SEQ ID NO: 450693 - DNA, 33 bp, Homo sapien
tggatgctgcctgtgtaaacattcgagtctgca

SEQ ID NO: 450694 - DNA, 33 bp, Homo sapien
tggatgctgcctgtgtgaacattcgagtctgca

SEQ ID NO: 450695 - DNA, 33 bp, Homo sapien
ggcctgggtcttttgacggcctcgtgcggttct

SEQ ID NO: 450696 - DNA, 33 bp, Homo sapien
ggcctgggtcttttgatggcctcgtgcggttct

SEQ ID NO: 450697 - DNA, 33 bp, Homo sapien
ctgagggcagagggaccggtcaaagagggtggc

SEQ ID NO: 450698 - DNA, 33 bp, Homo sapien
ctgagggcagagggactggtcaaagagggtggc

SEQ ID NO: 450699 - DNA, 33 bp, Homo sapien
tgagaagtcccaagctcagaggggagacctgcc

SEQ ID NO: 450700 - DNA, 33 bp, Homo sapien
tgagaagtcccaagctgagaggggagacctgcc

SEQ ID NO: 450701 - DNA, 33 bp, Homo sapien
tggtggcctcgcaagaaaaccaaattatagcgc

SEQ ID NO: 450702 - DNA, 33 bp, Homo sapien
tggtggcctcgcaagagaaccaaattatagcgc

SEQ ID NO: 450703 - DNA, 33 bp, Homo sapien
tctacatccagttctccaaccacaaggagctga

SEQ ID NO: 450704 - DNA, 33 bp, Homo sapien
tctacatccagttctctaaccacaaggagctga

SEQ ID NO: 450705 - DNA, 33 bp, Homo sapien
aacgtgaaattcacacagtgagctccaacttcg

SEQ ID NO: 450706 - DNA, 33 bp, Homo sapien
aacgtgaaattcacacggtgagctccaacttcg

SEQ ID NO: 450707 - DNA, 33 bp, Homo sapien
agctcatggaaaagagaatatgaaaggagtccc

SEQ ID NO: 450708 - DNA, 33 bp, Homo sapien
agctcatggaaaagaggatatgaaaggagtccc

SEQ ID NO: 450709 - DNA, 33 bp, Homo sapien
ctgagcaaatagggtaagcactgaagagtgtgc

SEQ ID NO: 450710 - DNA, 33 bp, Homo sapien
ctgagcaaatagggtaggcactgaagagtgtgc

SEQ ID NO: 450711 - DNA, 33 bp, Homo sapien
ctctacgttgtgaaaaaatgcgaggaagagaag

SEQ ID NO: 450712 - DNA, 33 bp, Homo sapien
ctctacgttgtgaaaagatgcgaggaagagaag

SEQ ID NO: 450713 - DNA, 33 bp, Homo sapien
taataataataataataaggctgtggcgtttgc

SEQ ID NO: 450714 - DNA, 33 bp, Homo sapien
taataataataataatgaggctgtggcgtttgc

SEQ ID NO: 450715 - DNA, 33 bp, Homo sapien
ggggcctcacgggagaaggcggacacgtcctag

SEQ ID NO: 450716 - DNA, 33 bp, Homo sapien
ggggcctcacgggagagggcggacacgtcctag

SEQ ID NO: 450717 - DNA, 33 bp, Homo sapien
cgcccagccattggcaactgtttgtacaacctg

SEQ ID NO: 450718 - DNA, 33 bp, Homo sapien
cgcccagccattggcagctgtttgtacaacctg

SEQ ID NO: 450719 - DNA, 33 bp, Homo sapien
aacatcccaattacgacgcgaacgcacccaaga

SEQ ID NO: 450720 - DNA, 33 bp, Homo sapien
aacatcccaattacgatgcgaacgcacccaaga

SEQ ID NO: 450721 - DNA, 33 bp, Homo sapien
tgggatgttccgagccacctggttcttttcagc

SEQ ID NO: 450722 - DNA, 33 bp, Homo sapien
tgggatgttccgagccgcctggttcttttcagc

SEQ ID NO: 450723 - DNA, 33 bp, Homo sapien
atgcacacacaggagaccatcaccccaacatag

SEQ ID NO: 450724 - DNA, 33 bp, Homo sapien
atgcacacacaggagatcatcaccccaacatag

SEQ ID NO: 450725 - DNA, 33 bp, Homo sapien
cgcagctgggcaagaactacatcagcgcctggg

SEQ ID NO: 450726 - DNA, 33 bp, Homo sapien
cgcagctgggcaagaattacatcagcgcctggg

SEQ ID NO: 450727 - DNA, 33 bp, Homo sapien
tgtactcaggtaagaaaagggcgcgtggggaga

SEQ ID NO: 450728 - DNA, 33 bp, Homo sapien
tgtactcaggtaagaagagggcgcgtggggaga

SEQ ID NO: 450729 - DNA, 33 bp, Homo sapien
ggaagaggcgaggcaaccagaaaccgtcgggga

SEQ ID NO: 450730 - DNA, 33 bp, Homo sapien
ggaagaggcgaggcaagcagaaaccgtcgggga

SEQ ID NO: 450731 - DNA, 33 bp, Homo sapien
ggttaagaccttgaggacaacatacaaatccca

SEQ ID NO: 450732 - DNA, 33 bp, Homo sapien
ggttaagaccttgagggcaacatacaaatccca

SEQ ID NO: 450733 - DNA, 33 bp, Homo sapien
gctcagaaaataaacacaagtctggagggtttt

SEQ ID NO: 450734 - DNA, 33 bp, Homo sapien
gctcagaaaataaacagaagtctggagggtttt

SEQ ID NO: 450735 - DNA, 33 bp, Homo sapien
cccatgtctacaaaacaataattagccaggaat

SEQ ID NO: 450736 - DNA, 33 bp, Homo sapien
cccatgtctacaaaacgataattagccaggaat

SEQ ID NO: 450737 - DNA, 33 bp, Homo sapien
ccagcaccagggccacactgttcctcgggcctc

SEQ ID NO: 450738 - DNA, 33 bp, Homo sapien
ccagcaccagggccacgctgttcctcgggcctc

SEQ ID NO: 450739 - DNA, 33 bp, Homo sapien
accccggttttgtataagcctggattgtagaac

SEQ ID NO: 450740 - DNA, 33 bp, Homo sapien
accccggttttgtatacgcctggattgtagaac

SEQ ID NO: 450741 - DNA, 33 bp, Homo sapien
gggagtccacggacgaagagaagatggagatgt

SEQ ID NO: 450742 - DNA, 33 bp, Homo sapien
gggagtccacggacgaggagaagatggagatgt

SEQ ID NO: 450743 - DNA, 33 bp, Homo sapien
gccccaatgtgacagcacagcccagggtccctg

SEQ ID NO: 450744 - DNA, 33 bp, Homo sapien
gccccaatgtgacagcgcagcccagggtccctg

SEQ ID NO: 450745 - DNA, 33 bp, Homo sapien
atggagaaatcaactccagtttcagggggttgg

SEQ ID NO: 450746 - DNA, 33 bp, Homo sapien
atggagaaatcaactctagtttcagggggttgg

SEQ ID NO: 450747 - DNA, 33 bp, Homo sapien
cccatcttgacaaaaacagcagttaaccatgcc

SEQ ID NO: 450748 - DNA, 33 bp, Homo sapien
cccatcttgacaaaaatagcagttaaccatgcc

SEQ ID NO: 450749 - DNA, 33 bp, Homo sapien
gtgctgagcaggagtcccgtctcgaggatgggg

SEQ ID NO: 450750 - DNA, 33 bp, Homo sapien
gtgctgagcaggagtctcgtctcgaggatgggg

SEQ ID NO: 450751 - DNA, 33 bp, Homo sapien
agccttcaaaggccgcaacgccaggaggaagct

SEQ ID NO: 450752 - DNA, 33 bp, Homo sapien
agccttcaaaggccgcgacgccaggaggaagct

SEQ ID NO: 450753 - DNA, 33 bp, Homo sapien
tgccagcaagccctccgcggatgtttgttgaat

SEQ ID NO: 450754 - DNA, 33 bp, Homo sapien
tgccagcaagccctcctcggatgtttgttgaat

SEQ ID NO: 450755 - DNA, 33 bp, Homo sapien
acaggggtctcaggaacgttcatgggatacaat

SEQ ID NO: 450756 - DNA, 33 bp, Homo sapien
acaggggtctcaggaatgttcatgggatacaat

SEQ ID NO: 450757 - DNA, 33 bp, Homo sapien
tgcaagtaagaggggaagaaactcagcgcagaa

SEQ ID NO: 450758 - DNA, 33 bp, Homo sapien
tgcaagtaagaggggaggaaactcagcgcagaa

SEQ ID NO: 450759 - DNA, 33 bp, Homo sapien
tctcttttgatccaggacagccctattgctgag

SEQ ID NO: 450760 - DNA, 33 bp, Homo sapien
tctcttttgatccagggcagccctattgctgag

SEQ ID NO: 450761 - DNA, 33 bp, Homo sapien
acagagctgtagtttgcaaagatgaagttcgga

SEQ ID NO: 450762 - DNA, 33 bp, Homo sapien
acagagctgtagtttggaaagatgaagttcgga

SEQ ID NO: 450763 - DNA, 33 bp, Homo sapien
ggggtactcctgacccagagtgaatggaggcca

SEQ ID NO: 450764 - DNA, 33 bp, Homo sapien
ggggtactcctgacccggagtgaatggaggcca

SEQ ID NO: 450765 - DNA, 33 bp, Homo sapien
gcgtggtcttgatatacggggcagaaagagctc

SEQ ID NO: 450766 - DNA, 33 bp, Homo sapien
gcgtggtcttgatatatggggcagaaagagctc

SEQ ID NO: 450767 - DNA, 33 bp, Homo sapien
gaagccaattacactggactcagggagggctga

SEQ ID NO: 450768 - DNA, 33 bp, Homo sapien
gaagccaattacactgtactcagggagggctga

SEQ ID NO: 450769 - DNA, 33 bp, Homo sapien
cccgcagtagctcattaaatcctcaagtcatcg

SEQ ID NO: 450770 - DNA, 33 bp, Homo sapien
cccgcagtagctcatttaatcctcaagtcatcg

SEQ ID NO: 450771 - DNA, 33 bp, Homo sapien
ggcagatggacttaccagctgcgcggagcccag

SEQ ID NO: 450772 - DNA, 33 bp, Homo sapien
ggcagatggacttaccggctgcgcggagcccag

SEQ ID NO: 450773 - DNA, 33 bp, Homo sapien
agcctgggtgtgcccaagtgagtaaaggatgga

SEQ ID NO: 450774 - DNA, 33 bp, Homo sapien
agcctgggtgtgcccaggtgagtaaaggatgga

SEQ ID NO: 450775 - DNA, 33 bp, Homo sapien
gcagccttacgtttcacggtctcttaaattcat

SEQ ID NO: 450776 - DNA, 33 bp, Homo sapien
gcagccttacgtttcagggtctcttaaattcat

SEQ ID NO: 450777 - DNA, 33 bp, Homo sapien
tcctgtccacccattaagcaactgtcccatgtt

SEQ ID NO: 450778 - DNA, 33 bp, Homo sapien
tcctgtccacccattaggcaactgtcccatgtt

SEQ ID NO: 450779 - DNA, 33 bp, Homo sapien
tttgaggtccatttacactctctgcgcgctcag

SEQ ID NO: 450780 - DNA, 33 bp, Homo sapien
tttgaggtccatttacgctctctgcgcgctcag

SEQ ID NO: 450781 - DNA, 33 bp, Homo sapien
cagaataaaaagtggaccaacttcaaggacgag

SEQ ID NO: 450782 - DNA, 33 bp, Homo sapien
cagaataaaaagtggatcaacttcaaggacgag

SEQ ID NO: 450783 - DNA, 33 bp, Homo sapien
tgttggggtgaggatcagagacaacgcacataa

SEQ ID NO: 450784 - DNA, 33 bp, Homo sapien
tgttggggtgaggatctgagacaacgcacataa

SEQ ID NO: 450785 - DNA, 33 bp, Homo sapien
tttcagaaagggatgaagttctgacccagacca

SEQ ID NO: 450786 - DNA, 33 bp, Homo sapien
tttcagaaagggatgaggttctgacccagacca

SEQ ID NO: 450787 - DNA, 33 bp, Homo sapien
gtggccgagtgccaaacaggtgagaggtcaatt

SEQ ID NO: 450788 - DNA, 33 bp, Homo sapien
gtggccgagtgccaaagaggtgagaggtcaatt

SEQ ID NO: 450789 - DNA, 33 bp, Homo sapien
gcggtttcaggttttacgattaaatgcaagtga

SEQ ID NO: 450790 - DNA, 33 bp, Homo sapien
gcggtttcaggttttatgattaaatgcaagtga

SEQ ID NO: 450791 - DNA, 33 bp, Homo sapien
cagggattcagatgtcagaattgggctgtggac

SEQ ID NO: 450792 - DNA, 33 bp, Homo sapien
cagggattcagatgtcggaattgggctgtggac

SEQ ID NO: 450793 - DNA, 33 bp, Homo sapien
ccgtgagggatatgcaaacctcatcactcaggg

SEQ ID NO: 450794 - DNA, 33 bp, Homo sapien
ccgtgagggatatgcacacctcatcactcaggg

SEQ ID NO: 450795 - DNA, 33 bp, Homo sapien
gctctagatcattcacagtagaatctgatggtg

SEQ ID NO: 450796 - DNA, 33 bp, Homo sapien
gctctagatcattcacggtagaatctgatggtg

SEQ ID NO: 450797 - DNA, 33 bp, Homo sapien
ttgaaggtggagacagaagaggacattcccaaa

SEQ ID NO: 450798 - DNA, 33 bp, Homo sapien
ttgaaggtggagacaggagaggacattcccaaa

SEQ ID NO: 450799 - DNA, 33 bp, Homo sapien
acgtccttacatattaacccctcttctgctgca

SEQ ID NO: 450800 - DNA, 33 bp, Homo sapien
acgtccttacatattaccccctcttctgctgca

SEQ ID NO: 450801 - DNA, 33 bp, Homo sapien
gagagcgcgcgtcctgaaatagagtgctggcct

SEQ ID NO: 450802 - DNA, 33 bp, Homo sapien
gagagcgcgcgtcctggaatagagtgctggcct

SEQ ID NO: 450803 - DNA, 33 bp, Homo sapien
gacgtgaagaaaacacaaaggtctgagacgtct

SEQ ID NO: 450804 - DNA, 33 bp, Homo sapien
gacgtgaagaaaacacgaaggtctgagacgtct

SEQ ID NO: 450805 - DNA, 33 bp, Homo sapien
gtcaattcctgactgcaagaactcaggcaccag

SEQ ID NO: 450806 - DNA, 33 bp, Homo sapien
gtcaattcctgactgcgagaactcaggcaccag

SEQ ID NO: 450807 - DNA, 33 bp, Homo sapien
tggaccaggcagtgcacgtcgaggagtagcacc

SEQ ID NO: 450808 - DNA, 33 bp, Homo sapien
tggaccaggcagtgcatgtcgaggagtagcacc

SEQ ID NO: 450809 - DNA, 33 bp, Homo sapien
cagggatggtaatggccctactatctcctgtcc

SEQ ID NO: 450810 - DNA, 33 bp, Homo sapien
cagggatggtaatggctctactatctcctgtcc

SEQ ID NO: 450811 - DNA, 33 bp, Homo sapien
ggtgtctcaggaacgcactccctctgcaggctc

SEQ ID NO: 450812 - DNA, 33 bp, Homo sapien
ggtgtctcaggaacgcgctccctctgcaggctc

SEQ ID NO: 450813 - DNA, 33 bp, Homo sapien
gctaacagtcctggagaccagaaatctgagatc

SEQ ID NO: 450814 - DNA, 33 bp, Homo sapien
gctaacagtcctggaggccagaaatctgagatc

SEQ ID NO: 450815 - DNA, 33 bp, Homo sapien
gactgttagcagataaatatttgttgtgttctt

SEQ ID NO: 450816 - DNA, 33 bp, Homo sapien
gactgttagcagataagtatttgttgtgttctt

SEQ ID NO: 450817 - DNA, 33 bp, Homo sapien
cagctcatacaaggaccaccaagtggccaacaa

SEQ ID NO: 450818 - DNA, 33 bp, Homo sapien
cagctcatacaaggacgaccaagtggccaacaa

SEQ ID NO: 450819 - DNA, 33 bp, Homo sapien
agagtccactcgggctcagaaggatccagcgtc

SEQ ID NO: 450820 - DNA, 33 bp, Homo sapien
agagtccactcgggcttagaaggatccagcgtc

SEQ ID NO: 450821 - DNA, 33 bp, Homo sapien
ctcagcgtcagggaaccgtcttgctccaggttt

SEQ ID NO: 450822 - DNA, 33 bp, Homo sapien
ctcagcgtcagggaactgtcttgctccaggttt

SEQ ID NO: 450823 - DNA, 33 bp, Homo sapien
cacgcgtgtccttcacagcctctagaacggcaa

SEQ ID NO: 450824 - DNA, 33 bp, Homo sapien
cacgcgtgtccttcacggcctctagaacggcaa

SEQ ID NO: 450825 - DNA, 33 bp, Homo sapien
tcgtggcccccgtggacatgttttctgccctgc

SEQ ID NO: 450826 - DNA, 33 bp, Homo sapien
tcgtggcccccgtggagatgttttctgccctgc

SEQ ID NO: 450827 - DNA, 33 bp, Homo sapien
tacagataggaagaaacctggcttgtgaggacg

SEQ ID NO: 450828 - DNA, 33 bp, Homo sapien
tacagataggaagaaatctggcttgtgaggacg

SEQ ID NO: 450829 - DNA, 33 bp, Homo sapien
gccgggctggcaactacggcccgtggcccaaat

SEQ ID NO: 450830 - DNA, 33 bp, Homo sapien
gccgggctggcaactatggcccgtggcccaaat

SEQ ID NO: 450831 - DNA, 33 bp, Homo sapien
gagtatcctgtagtaaccgggatggtttggatg

SEQ ID NO: 450832 - DNA, 33 bp, Homo sapien
gagtatcctgtagtaagcgggatggtttggatg

SEQ ID NO: 450833 - DNA, 33 bp, Homo sapien
tcttgttagagccccaatcaggttgtctggggc

SEQ ID NO: 450834 - DNA, 33 bp, Homo sapien
tcttgttagagccccactcaggttgtctggggc

SEQ ID NO: 450835 - DNA, 33 bp, Homo sapien
acagagtaagtgggaccatttcgtggtatgcgg

SEQ ID NO: 450836 - DNA, 33 bp, Homo sapien
acagagtaagtgggacgatttcgtggtatgcgg

SEQ ID NO: 450837 - DNA, 33 bp, Homo sapien
cttgagcatgagctcaatcaaagtcgatggcat

SEQ ID NO: 450838 - DNA, 33 bp, Homo sapien
cttgagcatgagctcagtcaaagtcgatggcat

SEQ ID NO: 450839 - DNA, 33 bp, Homo sapien; identical to SEQ ID NO: 450837

SEQ ID NO: 450840 - DNA, 33 bp, Homo sapien; identical to SEQ ID NO: 450838

SEQ ID NO: 450841 - DNA, 33 bp, Homo sapien
aaagctgggcacgacacgtggccctccttgctg

SEQ ID NO: 450842 - DNA, 33 bp, Homo sapien
aaagctgggcacgacatgtggccctccttgctg

SEQ ID NO: 450843 - DNA, 33 bp, Homo sapien
tgtggggtcgttttatcaatggactcaagccgt

SEQ ID NO: 450844 - DNA, 33 bp, Homo sapien
tgtggggtcgttttatgaatggactcaagccgt

SEQ ID NO: 450845 - DNA, 33 bp, Homo sapien
atccccctgaaaaccacgccccagactagaggt

SEQ ID NO: 450846 - DNA, 33 bp, Homo sapien
atccccctgaaaaccatgccccagactagaggt

SEQ ID NO: 450847 - DNA, 33 bp, Homo sapien
ctggtggctttcaggccgccaaatccgtgttgc

SEQ ID NO: 450848 - DNA, 33 bp, Homo sapien
ctggtggctttcaggcggccaaatccgtgttgc

SEQ ID NO: 450849 - DNA, 33 bp, Homo sapien
actcaaaaaaacaacaacactgtgggaggacgt

SEQ ID NO: 450850 - DNA, 33 bp, Homo sapien
actcaaaaaaacaacaccactgtgggaggacgt

SEQ ID NO: 450851 - DNA, 33 bp, Homo sapien
cagcctcaggcaggaacgcggacttctggccgt

SEQ ID NO: 450852 - DNA, 33 bp, Homo sapien
cagcctcaggcaggaatgcggacttctggccgt

SEQ ID NO: 450853 - DNA, 33 bp, Homo sapien
cgtgttgccaaagccacgaagaatgccacgctt

SEQ ID NO: 450854 - DNA, 33 bp, Homo sapien
cgtgttgccaaagccatgaagaatgccacgctt

SEQ ID NO: 450855 - DNA, 33 bp, Homo sapien
tccacgcatctcagcaacgaaccaagccctcgc

SEQ ID NO: 450856 - DNA, 33 bp, Homo sapien
tccacgcatctcagcaccgaaccaagccctcgc

SEQ ID NO: 450857 - DNA, 33 bp, Homo sapien
tttctgcctcaacacccgaatagcgaatgctcg

SEQ ID NO: 450858 - DNA, 33 bp, Homo sapien
tttctgcctcaacacctgaatagcgaatgctcg

SEQ ID NO: 450859 - DNA, 33 bp, Homo sapien
tcaatccttgcagcaaaaacatctttggggccg

SEQ ID NO: 450860 - DNA, 33 bp, Homo sapien
tcaatccttgcagcaagaacatctttggggccg

SEQ ID NO: 450861 - DNA, 33 bp, Homo sapien
gccttctggctgtaaccgggtttttcttctctg

SEQ ID NO: 450862 - DNA, 33 bp, Homo sapien
gccttctggctgtaactgggtttttcttctctg

SEQ ID NO: 450863 - DNA, 33 bp, Homo sapien
gtctgatcattaaacacagcttttgatacatat

SEQ ID NO: 450864 - DNA, 33 bp, Homo sapien
gtctgatcattaaacagagcttttgatacatat

SEQ ID NO: 450865 - DNA, 33 bp, Homo sapien
gagctctgtagctcggaaaaatgttataaagca

SEQ ID NO: 450866 - DNA, 33 bp, Homo sapien
gagctctgtagctcgggaaaatgttataaagca

SEQ ID NO: 450867 - DNA, 33 bp, Homo sapien
ttccaagttggcctcaagtcagcccccaaatat

SEQ ID NO: 450868 - DNA, 33 bp, Homo sapien
ttccaagttggcctcaggtcagcccccaaatat

SEQ ID NO: 450869 - DNA, 33 bp, Homo sapien
aaaacgatacacagaacgtaagggtcagggtga

SEQ ID NO: 450870 - DNA, 33 bp, Homo sapien
aaaacgatacacagaatgtaagggtcagggtga

SEQ ID NO: 450871 - DNA, 33 bp, Homo sapien
ctggcacagcggaaacacaaagtccaccctcat

SEQ ID NO: 450872 - DNA, 33 bp, Homo sapien
ctggcacagcggaaacgcaaagtccaccctcat

SEQ ID NO: 450873 - DNA, 33 bp, Homo sapien
tacttagacagacataaggtcactttcagctat

SEQ ID NO: 450874 - DNA, 33 bp, Homo sapien
tacttagacagacatacggtcactttcagctat

SEQ ID NO: 450875 - DNA, 33 bp, Homo sapien
ctgaaagcgcctttgcaaaagttctatcagtga

SEQ ID NO: 450876 - DNA, 33 bp, Homo sapien
ctgaaagcgcctttgcgaaagttctatcagtga

SEQ ID NO: 450877 - DNA, 33 bp, Homo sapien
tcagcaaatattcaccaagtgccaaccagctgt

SEQ ID NO: 450878 - DNA, 33 bp, Homo sapien
tcagcaaatattcaccgagtgccaaccagctgt

SEQ ID NO: 450879 - DNA, 33 bp, Homo sapien
cctcatgcagagacacacattttctttcttttt

SEQ ID NO: 450880 - DNA, 33 bp, Homo sapien
cctcatgcagagacacgcattttctttcttttt

SEQ ID NO: 450881 - DNA, 33 bp, Homo sapien
tgatgaggaacaaagccgctacgtgcatttacc

SEQ ID NO: 450882 - DNA, 33 bp, Homo sapien
tgatgaggaacaaagctgctacgtgcatttacc

SEQ ID NO: 450883 - DNA, 33 bp, Homo sapien
gagctaattactgtcaagaccagacggggtggc

SEQ ID NO: 450884 - DNA, 33 bp, Homo sapien
gagctaattactgtcaggaccagacggggtggc

SEQ ID NO: 450885 - DNA, 33 bp, Homo sapien
cctggaacgtgggaacacccttcagagctccct

SEQ ID NO: 450886 - DNA, 33 bp, Homo sapien
cctggaacgtgggaacgcccttcagagctccct

SEQ ID NO: 450887 - DNA, 33 bp, Homo sapien
cctcccagagtgataggattacatgcgtgagcc

SEQ ID NO: 450888 - DNA, 33 bp, Homo sapien
cctcccagagtgatagtattacatgcgtgagcc

SEQ ID NO: 450889 - DNA, 33 bp, Homo sapien
cttcctatgaccgacaacttgctaagtcattgc

SEQ ID NO: 450890 - DNA, 33 bp, Homo sapien
cttcctatgaccgacagcttgctaagtcattgc

SEQ ID NO: 450891 - DNA, 33 bp, Homo sapien
cttcatagggtcactgaaatgctttgtgttgtt

SEQ ID NO: 450892 - DNA, 33 bp, Homo sapien
cttcatagggtcactggaatgctttgtgttgtt

SEQ ID NO: 450893 - DNA, 33 bp, Homo sapien
gcctcactcaggttccacagtattcagtattgt

SEQ ID NO: 450894 - DNA, 33 bp, Homo sapien
gcctcactcaggttccgcagtattcagtattgt

SEQ ID NO: 450895 - DNA, 33 bp, Homo sapien
tcacagccagtgctaaaaaagaatgtagaggaa

SEQ ID NO: 450896 - DNA, 33 bp, Homo sapien
tcacagccagtgctaacaaagaatgtagaggaa

SEQ ID NO: 450897 - DNA, 33 bp, Homo sapien
ctcttgatgactttaactcatatttccttcatg

SEQ ID NO: 450898 - DNA, 33 bp, Homo sapien
ctcttgatgactttaattcatatttccttcatg

SEQ ID NO: 450899 - DNA, 33 bp, Homo sapien
agagtagtgaaccttgcaagtaaaatatatgca

SEQ ID NO: 450900 - DNA, 33 bp, Homo sapien
agagtagtgaaccttgtaagtaaaatatatgca

SEQ ID NO: 450901 - DNA, 33 bp, Homo sapien
cagcaaacggcaagaaagcaagtccaggatata

SEQ ID NO: 450902 - DNA, 33 bp, Homo sapien
cagcaaacggcaagaaggcaagtccaggatata

SEQ ID NO: 450903 - DNA, 33 bp, Homo sapien
agcgactcagcagatacctctcccgtgccccct

SEQ ID NO: 450904 - DNA, 33 bp, Homo sapien
agcgactcagcagatatctctcccgtgccccct

SEQ ID NO: 450905 - DNA, 33 bp, Homo sapien
atctagggaacgccaaaaagccctgccgtgctg

SEQ ID NO: 450906 - DNA, 33 bp, Homo sapien
atctagggaacgccaagaagccctgccgtgctg

SEQ ID NO: 450907 - DNA, 33 bp, Homo sapien
gaatgcctatcgatgacgtgagtgttgaatagg

SEQ ID NO: 450908 - DNA, 33 bp, Homo sapien
gaatgcctatcgatgatgtgagtgttgaatagg

SEQ ID NO: 450909 - DNA, 33 bp, Homo sapien
cagctctgtgaaggaactaaaaacttgctcgac

SEQ ID NO: 450910 - DNA, 33 bp, Homo sapien
cagctctgtgaaggaattaaaaacttgctcgac

SEQ ID NO: 450911 - DNA, 33 bp, Homo sapien
gaattcaaggcttcaccgagataaggaggtgcc

SEQ ID NO: 450912 - DNA, 33 bp, Homo sapien
gaattcaaggcttcactgagataaggaggtgcc

SEQ ID NO: 450913 - DNA, 33 bp, Homo sapien
cttttttccatttccacgtgcttttgtgttcca

SEQ ID NO: 450914 - DNA, 33 bp, Homo sapien
cttttttccatttccatgtgcttttgtgttcca

SEQ ID NO: 450915 - DNA, 33 bp, Homo sapien
tatgccttctacttacggatatttgttgaattt

SEQ ID NO: 450916 - DNA, 33 bp, Homo sapien
tatgccttctacttactgatatttgttgaattt

SEQ ID NO: 450917 - DNA, 33 bp, Homo sapien
ccacggggaacctcggaaaatgactgttacgga

SEQ ID NO: 450918 - DNA, 33 bp, Homo sapien
ccacggggaacctcgggaaatgactgttacgga

SEQ ID NO: 450919 - DNA, 33 bp, Homo sapien
ggtcatcgttctccataacctgtcccagaaaca

SEQ ID NO: 450920 - DNA, 33 bp, Homo sapien
ggtcatcgttctccatgacctgtcccagaaaca

SEQ ID NO: 450921 - DNA, 33 bp, Homo sapien
tcttgacactattaaactggggcttgattattc

SEQ ID NO: 450922 - DNA, 33 bp, Homo sapien
tcttgacactattaaattggggcttgattattc

SEQ ID NO: 450923 - DNA, 33 bp, Homo sapien
aggtctcttgagggaaatgctgaaatgttcccg

SEQ ID NO: 450924 - DNA, 33 bp, Homo sapien
aggtctcttgagggaagtgctgaaatgttcccg

SEQ ID NO: 450925 - DNA, 33 bp, Homo sapien
tgtgttatccaggaacaatctgtccaagctatt

SEQ ID NO: 450926 - DNA, 33 bp, Homo sapien
tgtgttatccaggaacgatctgtccaagctatt

SEQ ID NO: 450927 - DNA, 33 bp, Homo sapien
ggtggattttttaccaacgtaacctcatacaca

SEQ ID NO: 450928 - DNA, 33 bp, Homo sapien
ggtggattttttaccaccgtaacctcatacaca

SEQ ID NO: 450929 - DNA, 33 bp, Homo sapien
actcagaaacaacggccccccacggggctcaga

SEQ ID NO: 450930 - DNA, 33 bp, Homo sapien
actcagaaacaacggctccccacggggctcaga

SEQ ID NO: 450931 - DNA, 33 bp, Homo sapien
catagacgtgataggaagtgtcgttttcttata

SEQ ID NO: 450932 - DNA, 33 bp, Homo sapien
catagacgtgataggaggtgtcgttttcttata

SEQ ID NO: 450933 - DNA, 33 bp, Homo sapien
tataagaagcgaggcaagtacacattaacgcgg

SEQ ID NO: 450934 - DNA, 33 bp, Homo sapien
tataagaagcgaggcaggtacacattaacgcgg

SEQ ID NO: 450935 - DNA, 33 bp, Homo sapien
tacgggcgaccgattacacaagtgaccgcaggg

SEQ ID NO: 450936 - DNA, 33 bp, Homo sapien
tacgggcgaccgattagacaagtgaccgcaggg

SEQ ID NO: 450937 - DNA, 33 bp, Homo sapien
gcacgcccacgcaacagcacaggccacgctgct

SEQ ID NO: 450938 - DNA, 33 bp, Homo sapien
gcacgcccacgcaacatcacaggccacgctgct

SEQ ID NO: 450939 - DNA, 33 bp, Homo sapien
atgacaggatgggaccagacgaccagctgcaga

SEQ ID NO: 450940 - DNA, 33 bp, Homo sapien
atgacaggatgggaccggacgaccagctgcaga

SEQ ID NO: 450941 - DNA, 33 bp, Homo sapien
tcaatgcagaaagaaactactctgtaggccagg

SEQ ID NO: 450942 - DNA, 33 bp, Homo sapien
tcaatgcagaaagaaattactctgtaggccagg

SEQ ID NO: 450943 - DNA, 33 bp, Homo sapien
acctagatggtagagacatagtatagtagactt

SEQ ID NO: 450944 - DNA, 33 bp, Homo sapien
acctagatggtagagagatagtatagtagactt

SEQ ID NO: 450945 - DNA, 33 bp, Homo sapien
aactcagccttcactacgctgacctgacagcag

SEQ ID NO: 450946 - DNA, 33 bp, Homo sapien
aactcagccttcactatgctgacctgacagcag

SEQ ID NO: 450947 - DNA, 33 bp, Homo sapien
tggactctaagattcacgagaccaaaagcgctt

SEQ ID NO: 450948 - DNA, 33 bp, Homo sapien
tggactctaagattcatgagaccaaaagcgctt

SEQ ID NO: 450949 - DNA, 33 bp, Homo sapien
tgacattttcctcttacaaagacaccagtcagc

SEQ ID NO: 450950 - DNA, 33 bp, Homo sapien
tgacattttcctcttataaagacaccagtcagc

SEQ ID NO: 450951 - DNA, 33 bp, Homo sapien
agattctctcctgaaaaactatgttctcttgtg

SEQ ID NO: 450952 - DNA, 33 bp, Homo sapien
agattctctcctgaaatactatgttctcttgtg

SEQ ID NO: 450953 - DNA, 33 bp, Homo sapien
ctcttttattatgacaagccccgaaatgaatac

SEQ ID NO: 450954 - DNA, 33 bp, Homo sapien
ctcttttattatgacacgccccgaaatgaatac

SEQ ID NO: 450955 - DNA, 33 bp, Homo sapien
gtacaacaattcttgcacagatgacgattacaa

SEQ ID NO: 450956 - DNA, 33 bp, Homo sapien
gtacaacaattcttgcgcagatgacgattacaa

SEQ ID NO: 450957 - DNA, 33 bp, Homo sapien
attatgcagccatagaaagtcagaacactggca

SEQ ID NO: 450958 - DNA, 33 bp, Homo sapien
attatgcagccatagagagtcagaacactggca

SEQ ID NO: 450959 - DNA, 33 bp, Homo sapien
aagggcacatgctggaataaaaccgtgcagatg

SEQ ID NO: 450960 - DNA, 33 bp, Homo sapien
aagggcacatgctggattaaaaccgtgcagatg

SEQ ID NO: 450961 - DNA, 33 bp, Homo sapien
tcatggtgatttttgacgatgttacattcaagc

SEQ ID NO: 450962 - DNA, 33 bp, Homo sapien
tcatggtgatttttgatgatgttacattcaagc

SEQ ID NO: 450963 - DNA, 33 bp, Homo sapien
ttagcctgtaccccacaataaacaggtgttatc

SEQ ID NO: 450964 - DNA, 33 bp, Homo sapien
ttagcctgtaccccacgataaacaggtgttatc

SEQ ID NO: 450965 - DNA, 33 bp, Homo sapien
ctgagacagtgggtgacgcagttagttcaatca

SEQ ID NO: 450966 - DNA, 33 bp, Homo sapien
ctgagacagtgggtgaggcagttagttcaatca

SEQ ID NO: 450967 - DNA, 33 bp, Homo sapien
atagaccaacacaaaaagatgggaagctgtgtt

SEQ ID NO: 450968 - DNA, 33 bp, Homo sapien
atagaccaacacaaaaggatgggaagctgtgtt

SEQ ID NO: 450969 - DNA, 33 bp, Homo sapien
agtggggctcagatcaagtattttagcaatgtt

SEQ ID NO: 450970 - DNA, 33 bp, Homo sapien
agtggggctcagatcacgtattttagcaatgtt

SEQ ID NO: 450971 - DNA, 33 bp, Homo sapien
agccatgtaaggaatgaagctctaacaggctaa

SEQ ID NO: 450972 - DNA, 33 bp, Homo sapien
agccatgtaaggaatggagctctaacaggctaa

SEQ ID NO: 450973 - DNA, 33 bp, Homo sapien
acacccagtctactcaagtgtccattaaagtca

SEQ ID NO: 450974 - DNA, 33 bp, Homo sapien
acacccagtctactcatgtgtccattaaagtca

SEQ ID NO: 450975 - DNA, 33 bp, Homo sapien
gtgtggaacctattgcaacaccgtctgagctgt

SEQ ID NO: 450976 - DNA, 33 bp, Homo sapien
gtgtggaacctattgcgacaccgtctgagctgt

SEQ ID NO: 450977 - DNA, 33 bp, Homo sapien
gaggccgagccagctgcatcggttgaggtcagg

SEQ ID NO: 450978 - DNA, 33 bp, Homo sapien
gaggccgagccagctggatcggttgaggtcagg

SEQ ID NO: 450979 - DNA, 33 bp, Homo sapien
aatcccagtactttgaaaggctcaggtgcgagg

SEQ ID NO: 450980 - DNA, 33 bp, Homo sapien
aatcccagtactttgagaggctcaggtgcgagg

SEQ ID NO: 450981 - DNA, 33 bp, Homo sapien
agaccttgttacatcaacttacatcatcttaca

SEQ ID NO: 450982 - DNA, 33 bp, Homo sapien
agaccttgttacatcagcttacatcatcttaca

SEQ ID NO: 450983 - DNA, 33 bp, Homo sapien
tgcaaaggtggacctacggttggactcagcatc

SEQ ID NO: 450984 - DNA, 33 bp, Homo sapien
tgcaaaggtggacctatggttggactcagcatc

SEQ ID NO: 450985 - DNA, 33 bp, Homo sapien
tccaaagcaactgaccagcaaagggtcatctag

SEQ ID NO: 450986 - DNA, 33 bp, Homo sapien
tccaaagcaactgaccggcaaagggtcatctag

SEQ ID NO: 450987 - DNA, 33 bp, Homo sapien
ggagatctgctaccccaacagcaaagtctgtgg

SEQ ID NO: 450988 - DNA, 33 bp, Homo sapien
ggagatctgctaccccgacagcaaagtctgtgg

SEQ ID NO: 450989 - DNA, 33 bp, Homo sapien
tcgaaacaaatttccaatagcttcactggtcgg

SEQ ID NO: 450990 - DNA, 33 bp, Homo sapien
tcgaaacaaatttccagtagcttcactggtcgg

SEQ ID NO: 450991 - DNA, 33 bp, Homo sapien
ggagaatggcggatgcaatatctcagaggcaag

SEQ ID NO: 450992 - DNA, 33 bp, Homo sapien
ggagaatggcggatgcgatatctcagaggcaag

SEQ ID NO: 450993 - DNA, 33 bp, Homo sapien
cccccgagcctgtcacaatgtatttgttatttc

SEQ ID NO: 450994 - DNA, 33 bp, Homo sapien
cccccgagcctgtcacgatgtatttgttatttc

SEQ ID NO: 450995 - DNA, 33 bp, Homo sapien
ccccacagcttcctatcaatcagctcttttgtg

SEQ ID NO: 450996 - DNA, 33 bp, Homo sapien
ccccacagcttcctatgaatcagctcttttgtg

SEQ ID NO: 450997 - DNA, 33 bp, Homo sapien
cacccgcgagagagtgaatgggacgactgtggg

SEQ ID NO: 450998 - DNA, 33 bp, Homo sapien
cacccgcgagagagtggatgggacgactgtggg

SEQ ID NO: 450999 - DNA, 33 bp, Homo sapien
aggtcttgagcagtgaactctcatggccccacg

SEQ ID NO: 451000 - DNA, 33 bp, Homo sapien
aggtcttgagcagtgagctctcatggccccacg

SEQ ID NO: 451001 - DNA, 33 bp, Homo sapien
tttttgtatttttctacagatggtatttcacca

SEQ ID NO: 451002 - DNA, 33 bp, Homo sapien
tttttgtatttttctagagatggtatttcacca

SEQ ID NO: 451003 - DNA, 33 bp, Homo sapien
gtttcctgagcgaaccaaatgaacctggccctg

SEQ ID NO: 451004 - DNA, 33 bp, Homo sapien
gtttcctgagcgaaccgaatgaacctggccctg

SEQ ID NO: 451005 - DNA, 33 bp, Homo sapien
ctcccacataacccaccaaagccaggagaggtt

SEQ ID NO: 451006 - DNA, 33 bp, Homo sapien
ctcccacataacccacgaaagccaggagaggtt

SEQ ID NO: 451007 - DNA, 33 bp, Homo sapien
ttcatgaccaatgctcaccagagggacagcaca

SEQ ID NO: 451008 - DNA, 33 bp, Homo sapien
ttcatgaccaatgctcgccagagggacagcaca

SEQ ID NO: 451009 - DNA, 33 bp, Homo sapien
gcctcctcgcggtgccagaaaggtctgagcagg

SEQ ID NO: 451010 - DNA, 33 bp, Homo sapien
gcctcctcgcggtgccggaaaggtctgagcagg

SEQ ID NO: 451011 - DNA, 33 bp, Homo sapien
ctccgctgctggaaaaagttgtagcggccctgc

SEQ ID NO: 451012 - DNA, 33 bp, Homo sapien
ctccgctgctggaaaaggttgtagcggccctgc

SEQ ID NO: 451013 - DNA, 33 bp, Homo sapien
ggcatctctgagggcccagattgcacaaggtga

SEQ ID NO: 451014 - DNA, 33 bp, Homo sapien
ggcatctctgagggcctagattgcacaaggtga

SEQ ID NO: 451015 - DNA, 33 bp, Homo sapien
tttgcagatgagacacagaggaccagagaggtt

SEQ ID NO: 451016 - DNA, 33 bp, Homo sapien
tttgcagatgagacacggaggaccagagaggtt

SEQ ID NO: 451017 - DNA, 33 bp, Homo sapien
gacggtaagatttaaagcatgctagctgtgatt

SEQ ID NO: 451018 - DNA, 33 bp, Homo sapien
gacggtaagatttaaatcatgctagctgtgatt

SEQ ID NO: 451019 - DNA, 33 bp, Homo sapien
cattccatctttccaaccatccacccacattta

SEQ ID NO: 451020 - DNA, 33 bp, Homo sapien
cattccatctttccaatcatccacccacattta

SEQ ID NO: 451021 - DNA, 33 bp, Homo sapien
acgtctgggatatgccaagatccataatagcga

SEQ ID NO: 451022 - DNA, 33 bp, Homo sapien
acgtctgggatatgccgagatccataatagcga

SEQ ID NO: 451023 - DNA, 33 bp, Homo sapien
attcactcagtgaggccaggtagatgagggcga

SEQ ID NO: 451024 - DNA, 33 bp, Homo sapien
attcactcagtgaggctaggtagatgagggcga

SEQ ID NO: 451025 - DNA, 33 bp, Homo sapien; identical to SEQ ID NO: 451023

SEQ ID NO: 451026 - DNA, 33 bp, Homo sapien; identical to SEQ ID NO: 451024

SEQ ID NO: 451027 - DNA, 33 bp, Homo sapien
tgaggaattctaaaaacacgtagcatatcacgt

SEQ ID NO: 451028 - DNA, 33 bp, Homo sapien
tgaggaattctaaaaagacgtagcatatcacgt

SEQ ID NO: 451029 - DNA, 33 bp, Homo sapien
agacaatctttccagaagtgctttacaacagtg

SEQ ID NO: 451030 - DNA, 33 bp, Homo sapien
agacaatctttccagatgtgctttacaacagtg

SEQ ID NO: 451031 - DNA, 33 bp, Homo sapien
gagtaagctcaaaccacgtgaagaggctgtgga

SEQ ID NO: 451032 - DNA, 33 bp, Homo sapien
gagtaagctcaaaccatgtgaagaggctgtgga

SEQ ID NO: 451033 - DNA, 33 bp, Homo sapien
ggcggggagcgtgtacaatcaaccctgtgcttc

SEQ ID NO: 451034 - DNA, 33 bp, Homo sapien
ggcggggagcgtgtaccatcaaccctgtgcttc

SEQ ID NO: 451035 - DNA, 33 bp, Homo sapien
ctacactgtggacaaactcttttggatctggct

SEQ ID NO: 451036 - DNA, 33 bp, Homo sapien
ctacactgtggacaaagtcttttggatctggct

SEQ ID NO: 451037 - DNA, 33 bp, Homo sapien
tactggacccattttcaacacgaggtgaagccc

SEQ ID NO: 451038 - DNA, 33 bp, Homo sapien
tactggacccattttcgacacgaggtgaagccc

SEQ ID NO: 451039 - DNA, 33 bp, Homo sapien
atagaaatcatcataagagtgtgcatttattga

SEQ ID NO: 451040 - DNA, 33 bp, Homo sapien
atagaaatcatcataatagtgtgcatttattga

SEQ ID NO: 451041 - DNA, 33 bp, Homo sapien
aggggcttcttcatcacaatttctgtctgcaga

SEQ ID NO: 451042 - DNA, 33 bp, Homo sapien
aggggcttcttcatcataatttctgtctgcaga

SEQ ID NO: 451043 - DNA, 33 bp, Homo sapien
ttgggcctaatttagacgtggagcatagccagg

SEQ ID NO: 451044 - DNA, 33 bp, Homo sapien
ttgggcctaatttagatgtggagcatagccagg

SEQ ID NO: 451045 - DNA, 33 bp, Homo sapien
gctggagccgaatatcaacgctatcctggatct

SEQ ID NO: 451046 - DNA, 33 bp, Homo sapien
gctggagccgaatatcgacgctatcctggatct

SEQ ID NO: 451047 - DNA, 33 bp, Homo sapien
ggagttgagcaagaaacaaaagatccaggatag

SEQ ID NO: 451048 - DNA, 33 bp, Homo sapien
ggagttgagcaagaaagaaaagatccaggatag

SEQ ID NO: 451049 - DNA, 33 bp, Homo sapien
aaccacaatctctctcactttatctttgtgact

SEQ ID NO: 451050 - DNA, 33 bp, Homo sapien
aaccacaatctctctcgctttatctttgtgact

SEQ ID NO: 451051 - DNA, 33 bp, Homo sapien
tgcagtgttgggtccaaaaactgtagggcagtc

SEQ ID NO: 451052 - DNA, 33 bp, Homo sapien
tgcagtgttgggtccagaaactgtagggcagtc

SEQ ID NO: 451053 - DNA, 33 bp, Homo sapien
ccacagttattggaggcatgcaattatttagca

SEQ ID NO: 451054 - DNA, 33 bp, Homo sapien
ccacagttattggaggtatgcaattatttagca

SEQ ID NO: 451055 - DNA, 33 bp, Homo sapien
tagtttaaaatgtccaataatagcaagtgtcag

SEQ ID NO: 451056 - DNA, 33 bp, Homo sapien
tagtttaaaatgtccagtaatagcaagtgtcag

SEQ ID NO: 451057 - DNA, 33 bp, Homo sapien
cgtgagccactacaaccggccaaaggagatatg

SEQ ID NO: 451058 - DNA, 33 bp, Homo sapien
cgtgagccactacaactggccaaaggagatatg

SEQ ID NO: 451059 - DNA, 33 bp, Homo sapien
agctcctggcactttccagcacaatctggctca

SEQ ID NO: 451060 - DNA, 33 bp, Homo sapien
agctcctggcactttcgagcacaatctggctca

SEQ ID NO: 451061 - DNA, 33 bp, Homo sapien
ggggtgtgcccttttcacagatctcaagactga

SEQ ID NO: 451062 - DNA, 33 bp, Homo sapien
ggggtgtgcccttttcgcagatctcaagactga

SEQ ID NO: 451063 - DNA, 33 bp, Homo sapien
tacgatgtcgattacaagctttaaaatgttggc

SEQ ID NO: 451064 - DNA, 33 bp, Homo sapien
tacgatgtcgattacaggctttaaaatgttggc

SEQ ID NO: 451065 - DNA, 33 bp, Homo sapien
tcgacatcgtatacaactggaaaagatgttcat

SEQ ID NO: 451066 - DNA, 33 bp, Homo sapien
tcgacatcgtatacaattggaaaagatgttcat

SEQ ID NO: 451067 - DNA, 33 bp, Homo sapien
tttagagatgatttaaaatgagacggctggccg

SEQ ID NO: 451068 - DNA, 33 bp, Homo sapien
tttagagatgatttaagatgagacggctggccg

SEQ ID NO: 451069 - DNA, 33 bp, Homo sapien
agagagggaagaaacactggtggcatcacagag

SEQ ID NO: 451070 - DNA, 33 bp, Homo sapien
agagagggaagaaacattggtggcatcacagag

SEQ ID NO: 451071 - DNA, 33 bp, Homo sapien
ccctgctcacaacggaataaactcctagtgtgg

SEQ ID NO: 451072 - DNA, 33 bp, Homo sapien
ccctgctcacaacggattaaactcctagtgtgg

SEQ ID NO: 451073 - DNA, 33 bp, Homo sapien
ggaaaatattgagttacgtcactgctcacacca

SEQ ID NO: 451074 - DNA, 33 bp, Homo sapien
ggaaaatattgagttatgtcactgctcacacca

SEQ ID NO: 451075 - DNA, 33 bp, Homo sapien
agaccggcaccatttcacggggtgttaagaaaa

SEQ ID NO: 451076 - DNA, 33 bp, Homo sapien
agaccggcaccatttcgcggggtgttaagaaaa

SEQ ID NO: 451077 - DNA, 33 bp, Homo sapien
agttgatgagaaggacgaggagttggtgaggaa

SEQ ID NO: 451078 - DNA, 33 bp, Homo sapien
agttgatgagaaggactaggagttggtgaggaa

SEQ ID NO: 451079 - DNA, 33 bp, Homo sapien
cgtgccctcacttgccaagattttgtttcttcc

SEQ ID NO: 451080 - DNA, 33 bp, Homo sapien
cgtgccctcacttgcccagattttgtttcttcc

SEQ ID NO: 451081 - DNA, 33 bp, Homo sapien
acttgttaaagggcaaagtgagtccttagccac

SEQ ID NO: 451082 - DNA, 33 bp, Homo sapien
acttgttaaagggcaaggtgagtccttagccac

SEQ ID NO: 451083 - DNA, 33 bp, Homo sapien
gtaaaagaggtcaagacacagaacctagaaagg

SEQ ID NO: 451084 - DNA, 33 bp, Homo sapien
gtaaaagaggtcaagagacagaacctagaaagg

SEQ ID NO: 451085 - DNA, 33 bp, Homo sapien
acccggcttagtgtcacgactgaggtgctagaa

SEQ ID NO: 451086 - DNA, 33 bp, Homo sapien
acccggcttagtgtcaggactgaggtgctagaa

SEQ ID NO: 451087 - DNA, 33 bp, Homo sapien
ccctgtgtcaaaaaagaaagctgatagcggcag

SEQ ID NO: 451088 - DNA, 33 bp, Homo sapien
ccctgtgtcaaaaaaggaagctgatagcggcag

SEQ ID NO: 451089 - DNA, 33 bp, Homo sapien
aacccttaagtctgaaaatgggtcagtcacttt

SEQ ID NO: 451090 - DNA, 33 bp, Homo sapien
aacccttaagtctgaagatgggtcagtcacttt

SEQ ID NO: 451091 - DNA, 33 bp, Homo sapien
accctgaggacgctacactcagtgagagacgcc

SEQ ID NO: 451092 - DNA, 33 bp, Homo sapien
accctgaggacgctacgctcagtgagagacgcc

SEQ ID NO: 451093 - DNA, 33 bp, Homo sapien
aattactaaaactggccgaacagtcatgactta

SEQ ID NO: 451094 - DNA, 33 bp, Homo sapien
aattactaaaactggctgaacagtcatgactta

SEQ ID NO: 451095 - DNA, 33 bp, Homo sapien
gaacagtcatgacttacagacgcaaaagtcaac

SEQ ID NO: 451096 - DNA, 33 bp, Homo sapien
gaacagtcatgacttagagacgcaaaagtcaac

SEQ ID NO: 451097 - DNA, 33 bp, Homo sapien
ggagacgcagttgtttcaaaacttgggagcctt

SEQ ID NO: 451098 - DNA, 33 bp, Homo sapien
ggagacgcagttgtttgaaaacttgggagcctt

SEQ ID NO: 451099 - DNA, 33 bp, Homo sapien
ctcaccctgttctcaccgctggaacctccagga

SEQ ID NO: 451100 - DNA, 33 bp, Homo sapien
ctcaccctgttctcactgctggaacctccagga

SEQ ID NO: 451101 - DNA, 33 bp, Homo sapien
tcagagaaggacagccacttaccccgggccgca

SEQ ID NO: 451102 - DNA, 33 bp, Homo sapien
tcagagaaggacagccgcttaccccgggccgca

SEQ ID NO: 451103 - DNA, 33 bp, Homo sapien
tgtcgcccgtaggacccgagatctgattgtgtc

SEQ ID NO: 451104 - DNA, 33 bp, Homo sapien
tgtcgcccgtaggacctgagatctgattgtgtc

SEQ ID NO: 451105 - DNA, 33 bp, Homo sapien
tcctgaaactttgcacaatccaggagggcttcc

SEQ ID NO: 451106 - DNA, 33 bp, Homo sapien
tcctgaaactttgcacgatccaggagggcttcc

SEQ ID NO: 451107 - DNA, 33 bp, Homo sapien
gcgttaacagcgactacgagacggacggcgagg

SEQ ID NO: 451108 - DNA, 33 bp, Homo sapien
gcgttaacagcgactatgagacggacggcgagg

SEQ ID NO: 451109 - DNA, 33 bp, Homo sapien
gacctgtgacctctcgaaggctgccagctggtc

SEQ ID NO: 451110 - DNA, 33 bp, Homo sapien
gacctgtgacctctcgcaggctgccagctggtc

SEQ ID NO: 451111 - DNA, 33 bp, Homo sapien
aactcagtttcctcatcataagctggggaaaaa

SEQ ID NO: 451112 - DNA, 33 bp, Homo sapien
aactcagtttcctcattataagctggggaaaaa

SEQ ID NO: 451113 - DNA, 33 bp, Homo sapien
cagcccccaaaaggaacgtgtgatgcatggagc

SEQ ID NO: 451114 - DNA, 33 bp, Homo sapien
cagcccccaaaaggaatgtgtgatgcatggagc

SEQ ID NO: 451115 - DNA, 33 bp, Homo sapien
agtcaccaaacacatagtactcttggctgttcc

SEQ ID NO: 451116 - DNA, 33 bp, Homo sapien
agtcaccaaacacatattactcttggctgttcc

SEQ ID NO: 451117 - DNA, 33 bp, Homo sapien
cacacaaaaacagcataaattaactgaattagg

SEQ ID NO: 451118 - DNA, 33 bp, Homo sapien
cacacaaaaacagcatgaattaactgaattagg

SEQ ID NO: 451119 - DNA, 33 bp, Homo sapien
gccctcactgggctaagaacaaaagttgtggct

SEQ ID NO: 451120 - DNA, 33 bp, Homo sapien
gccctcactgggctaataacaaaagttgtggct

SEQ ID NO: 451121 - DNA, 33 bp, Homo sapien
caagattcatcacacccgactcaaagtagcaac

SEQ ID NO: 451122 - DNA, 33 bp, Homo sapien
caagattcatcacacctgactcaaagtagcaac

SEQ ID NO: 451123 - DNA, 33 bp, Homo sapien
tctttaatatgctggacgagctgctgaagccca

SEQ ID NO: 451124 - DNA, 33 bp, Homo sapien
tctttaatatgctggatgagctgctgaagccca

SEQ ID NO: 451125 - DNA, 33 bp, Homo sapien
ggccgggagacgagacaacgagatgacaggcaa

SEQ ID NO: 451126 - DNA, 33 bp, Homo sapien
ggccgggagacgagacgacgagatgacaggcaa

SEQ ID NO: 451127 - DNA, 33 bp, Homo sapien
tgcctccaagacttcacgtttcacatatgtttc

SEQ ID NO: 451128 - DNA, 33 bp, Homo sapien
tgcctccaagacttcatgtttcacatatgtttc

SEQ ID NO: 451129 - DNA, 33 bp, Homo sapien
ctgccagaccataaaccgccctgcagtagccct

SEQ ID NO: 451130 - DNA, 33 bp, Homo sapien
ctgccagaccataaactgccctgcagtagccct

SEQ ID NO: 451131 - DNA, 33 bp, Homo sapien
gtgggtgttcagacccaaaggcagaactgtcag

SEQ ID NO: 451132 - DNA, 33 bp, Homo sapien
gtgggtgttcagacccgaaggcagaactgtcag

SEQ ID NO: 451133 - DNA, 33 bp, Homo sapien
ctgtccctcctctgccagaaatcttctatggct

SEQ ID NO: 451134 - DNA, 33 bp, Homo sapien
ctgtccctcctctgccggaaatcttctatggct

SEQ ID NO: 451135 - DNA, 33 bp, Homo sapien
ttctgatctccttttaactgctctgtgttggat

SEQ ID NO: 451136 - DNA, 33 bp, Homo sapien
ttctgatctccttttatctgctctgtgttggat

SEQ ID NO: 451137 - DNA, 33 bp, Homo sapien
tgtcctgtgtcttcctcagccttgtgggacgga

SEQ ID NO: 451138 - DNA, 33 bp, Homo sapien
tgtcctgtgtcttccttagccttgtgggacgga

SEQ ID NO: 451139 - DNA, 33 bp, Homo sapien
gaatgttgggattaatcatgggagacttggtgg

SEQ ID NO: 451140 - DNA, 33 bp, Homo sapien
gaatgttgggattaatgatgggagacttggtgg

SEQ ID NO: 451141 - DNA, 33 bp, Homo sapien
aacgagtagccttccacgaataacgggctggga

SEQ ID NO: 451142 - DNA, 33 bp, Homo sapien
aacgagtagccttccatgaataacgggctggga

SEQ ID NO: 451143 - DNA, 33 bp, Homo sapien
gggttttgaatgccacgcagagttacctgaata

SEQ ID NO: 451144 - DNA, 33 bp, Homo sapien
gggttttgaatgccactcagagttacctgaata

SEQ ID NO: 451145 - DNA, 33 bp, Homo sapien
gtgacaaccacagatagcccaacactggcaagt

SEQ ID NO: 451146 - DNA, 33 bp, Homo sapien
gtgacaaccacagatatcccaacactggcaagt

SEQ ID NO: 451147 - DNA, 33 bp, Homo sapien
tgaccgcgtgacaaaacgtagtactttgtcgac

SEQ ID NO: 451148 - DNA, 33 bp, Homo sapien
tgaccgcgtgacaaaatgtagtactttgtcgac

SEQ ID NO: 451149 - DNA, 33 bp, Homo sapien
ggtccaggaatagataagaatggatgggaaata

SEQ ID NO: 451150 - DNA, 33 bp, Homo sapien
ggtccaggaatagataggaatggatgggaaata

SEQ ID NO: 451151 - DNA, 33 bp, Homo sapien
gggccctgggctaagacgtttccatatgccatc

SEQ ID NO: 451152 - DNA, 33 bp, Homo sapien
gggccctgggctaagaggtttccatatgccatc

SEQ ID NO: 451153 - DNA, 33 bp, Homo sapien
ttgacatcagcccagaactacgacatttttttt

SEQ ID NO: 451154 - DNA, 33 bp, Homo sapien
ttgacatcagcccagagctacgacatttttttt

SEQ ID NO: 451155 - DNA, 33 bp, Homo sapien
actcttccactgctgcactgaccacattcctcc

SEQ ID NO: 451156 - DNA, 33 bp, Homo sapien
actcttccactgctgcgctgaccacattcctcc

SEQ ID NO: 451157 - DNA, 33 bp, Homo sapien
aattgagaatgagctcaccatcgctggaggtat

SEQ ID NO: 451158 - DNA, 33 bp, Homo sapien
aattgagaatgagctccccatcgctggaggtat

SEQ ID NO: 451159 - DNA, 33 bp, Homo sapien
ctcacagctaaaagcaaactttctactccggca

SEQ ID NO: 451160 - DNA, 33 bp, Homo sapien
ctcacagctaaaagcagactttctactccggca

SEQ ID NO: 451161 - DNA, 33 bp, Homo sapien
gaaaggaaagaatccaagtcagtgagcctcagt

SEQ ID NO: 451162 - DNA, 33 bp, Homo sapien
gaaaggaaagaatccatgtcagtgagcctcagt

SEQ ID NO: 451163 - DNA, 33 bp, Homo sapien
acaatgcatgatgcataaggctgattttcatgt

SEQ ID NO: 451164 - DNA, 33 bp, Homo sapien
acaatgcatgatgcatgaggctgattttcatgt

SEQ ID NO: 451165 - DNA, 33 bp, Homo sapien
aatgcagaaacttggaaactctaaatgtccact

SEQ ID NO: 451166 - DNA, 33 bp, Homo sapien
aatgcagaaacttggagactctaaatgtccact

SEQ ID NO: 451167 - DNA, 33 bp, Homo sapien
acctcatctcgcactcacaggctgttattaggg

SEQ ID NO: 451168 - DNA, 33 bp, Homo sapien
acctcatctcgcactcgcaggctgttattaggg

SEQ ID NO: 451169 - DNA, 33 bp, Homo sapien
agcagctctcgctagccgcattctttcaccctc

SEQ ID NO: 451170 - DNA, 33 bp, Homo sapien
agcagctctcgctagcggcattctttcaccctc

SEQ ID NO: 451171 - DNA, 33 bp, Homo sapien
ccggaaacaaacaatacggtcgcggctacaaca

SEQ ID NO: 451172 - DNA, 33 bp, Homo sapien
ccggaaacaaacaatatggtcgcggctacaaca

SEQ ID NO: 451173 - DNA, 33 bp, Homo sapien
gcctccacttatgcacaattggtgttttgtaac

SEQ ID NO: 451174 - DNA, 33 bp, Homo sapien
gcctccacttatgcacgattggtgttttgtaac

SEQ ID NO: 451175 - DNA, 33 bp, Homo sapien
ctgtctttgttactcaagggtgtcttagatgtt

SEQ ID NO: 451176 - DNA, 33 bp, Homo sapien
ctgtctttgttactcaggggtgtcttagatgtt

SEQ ID NO: 451177 - DNA, 33 bp, Homo sapien
tcccaggaaggaagacaaacagggagtctggac

SEQ ID NO: 451178 - DNA, 33 bp, Homo sapien
tcccaggaaggaagacgaacagggagtctggac

SEQ ID NO: 451179 - DNA, 33 bp, Homo sapien
ctgcctccgtagtctcccttgttatctaatccc

SEQ ID NO: 451180 - DNA, 33 bp, Homo sapien
ctgcctccgtagtctctcttgttatctaatccc

SEQ ID NO: 451181 - DNA, 33 bp, Homo sapien
gggcagcccagggccacgtgtcaggattcgggc

SEQ ID NO: 451182 - DNA, 33 bp, Homo sapien
gggcagcccagggccatgtgtcaggattcgggc

SEQ ID NO: 451183 - DNA, 33 bp, Homo sapien
cttgccctgatgtctcacctggcagcttgctct

SEQ ID NO: 451184 - DNA, 33 bp, Homo sapien
cttgccctgatgtctcgcctggcagcttgctct

SEQ ID NO: 451185 - DNA, 33 bp, Homo sapien
cactgtctccaaaacacaaacccctagagcagt

SEQ ID NO: 451186 - DNA, 33 bp, Homo sapien
cactgtctccaaaacataaacccctagagcagt

SEQ ID NO: 451187 - DNA, 33 bp, Homo sapien
ctgtctcaaaaataataatatacgcctgtaatc

SEQ ID NO: 451188 - DNA, 33 bp, Homo sapien
ctgtctcaaaaataatgatatacgcctgtaatc

SEQ ID NO: 451189 - DNA, 33 bp, Homo sapien
ccaatatacatgaaacggttggaactgtgactg

SEQ ID NO: 451190 - DNA, 33 bp, Homo sapien
ccaatatacatgaaactgttggaactgtgactg

SEQ ID NO: 451191 - DNA, 33 bp, Homo sapien
cttggaggaagacagacgttcaggttcatgttt

SEQ ID NO: 451192 - DNA, 33 bp, Homo sapien
cttggaggaagacagatgttcaggttcatgttt

SEQ ID NO: 451193 - DNA, 33 bp, Homo sapien
gccgtagctacttaggcaatgagccagttacag

SEQ ID NO: 451194 - DNA, 33 bp, Homo sapien
gccgtagctacttaggtaatgagccagttacag

SEQ ID NO: 451195 - DNA, 33 bp, Homo sapien
cacacaaacaaaaaacagtgacttcagcaagtg

SEQ ID NO: 451196 - DNA, 33 bp, Homo sapien
cacacaaacaaaaaacggtgacttcagcaagtg

SEQ ID NO: 451197 - DNA, 33 bp, Homo sapien
gacataagagaacctacctttctaagttgtgtg

SEQ ID NO: 451198 - DNA, 33 bp, Homo sapien
gacataagagaacctatctttctaagttgtgtg

SEQ ID NO: 451199 - DNA, 33 bp, Homo sapien
gatagaaatttgaggccgatgagatatttgctg

SEQ ID NO: 451200 - DNA, 33 bp, Homo sapien
gatagaaatttgaggctgatgagatatttgctg

SEQ ID NO: 451201 - DNA, 33 bp, Homo sapien
aaccaaataggactgccgaacaatttaaataaa

SEQ ID NO: 451202 - DNA, 33 bp, Homo sapien
aaccaaataggactgcggaacaatttaaataaa

SEQ ID NO: 451203 - DNA, 33 bp, Homo sapien
ggcactgaaagtcttacgggtgacagacaggaa

SEQ ID NO: 451204 - DNA, 33 bp, Homo sapien
ggcactgaaagtcttatgggtgacagacaggaa

SEQ ID NO: 451205 - DNA, 33 bp, Homo sapien
ccacacgtccatgcaactgaagcgctttacata

SEQ ID NO: 451206 - DNA, 33 bp, Homo sapien
ccacacgtccatgcaattgaagcgctttacata

SEQ ID NO: 451207 - DNA, 33 bp, Homo sapien
caacaaattattccacagatcccactaatcatg

SEQ ID NO: 451208 - DNA, 33 bp, Homo sapien
caacaaattattccacggatcccactaatcatg

SEQ ID NO: 451209 - DNA, 33 bp, Homo sapien
atgccccgcacgttgcaaacagggtctgctggg

SEQ ID NO: 451210 - DNA, 33 bp, Homo sapien
atgccccgcacgttgcgaacagggtctgctggg

SEQ ID NO: 451211 - DNA, 33 bp, Homo sapien
ggtctaaacaagctaccgcaaacgtgtctgtca

SEQ ID NO: 451212 - DNA, 33 bp, Homo sapien
ggtctaaacaagctacggcaaacgtgtctgtca

SEQ ID NO: 451213 - DNA, 33 bp, Homo sapien
cgcggaatctgggctgcacgtgtgttctgtttg

SEQ ID NO: 451214 - DNA, 33 bp, Homo sapien
cgcggaatctgggctgtacgtgtgttctgtttg

SEQ ID NO: 451215 - DNA, 33 bp, Homo sapien
ttcaaatctccctggccgatccatcgaagaatt

SEQ ID NO: 451216 - DNA, 33 bp, Homo sapien
ttcaaatctccctggctgatccatcgaagaatt

SEQ ID NO: 451217 - DNA, 33 bp, Homo sapien
aaatgacaataattgaaggaaaccacgatgagg

SEQ ID NO: 451218 - DNA, 33 bp, Homo sapien
aaatgacaataattgacggaaaccacgatgagg

SEQ ID NO: 451219 - DNA, 33 bp, Homo sapien
ttcctcattagctctgccaaccctcgtctccct

SEQ ID NO: 451220 - DNA, 33 bp, Homo sapien
ttcctcattagctctggcaaccctcgtctccct

SEQ ID NO: 451221 - DNA, 33 bp, Homo sapien
acctaacccagacattcaacctccctctgctca

SEQ ID NO: 451222 - DNA, 33 bp, Homo sapien
acctaacccagacattgaacctccctctgctca

SEQ ID NO: 451223 - DNA, 33 bp, Homo sapien
ccacacacccctgtaaagacgagccattaccca

SEQ ID NO: 451224 - DNA, 33 bp, Homo sapien
ccacacacccctgtaacgacgagccattaccca

SEQ ID NO: 451225 - DNA, 33 bp, Homo sapien
ctgctaatacacgtaaaagcatagatgcatctt

SEQ ID NO: 451226 - DNA, 33 bp, Homo sapien
ctgctaatacacgtaacagcatagatgcatctt

SEQ ID NO: 451227 - DNA, 33 bp, Homo sapien
ggatatttctggacacccccggtcactgctcct

SEQ ID NO: 451228 - DNA, 33 bp, Homo sapien
ggatatttctggacactcccggtcactgctcct

SEQ ID NO: 451229 - DNA, 33 bp, Homo sapien; identical to SEQ ID NO: 451227

SEQ ID NO: 451230 - DNA, 33 bp, Homo sapien; identical to SEQ ID NO: 451228

SEQ ID NO: 451231 - DNA, 33 bp, Homo sapien
ccaggctgcagtgtaacggtgagatctcggctc

SEQ ID NO: 451232 - DNA, 33 bp, Homo sapien
ccaggctgcagtgtaatggtgagatctcggctc

SEQ ID NO: 451233 - DNA, 33 bp, Homo sapien
tccttctgtgcagttacgtgtctgtatctgaat

SEQ ID NO: 451234 - DNA, 33 bp, Homo sapien
tccttctgtgcagttatgtgtctgtatctgaat

SEQ ID NO: 451235 - DNA, 33 bp, Homo sapien
tgtgggtgtgtgcacaagagaaacggaaacata

SEQ ID NO: 451236 - DNA, 33 bp, Homo sapien
tgtgggtgtgtgcacaggagaaacggaaacata

SEQ ID NO: 451237 - DNA, 33 bp, Homo sapien
tctccggccccctccaatctatctcaagccttg

SEQ ID NO: 451238 - DNA, 33 bp, Homo sapien
tctccggccccctccactctatctcaagccttg

SEQ ID NO: 451239 - DNA, 33 bp, Homo sapien
gggtacttggagtcccaatgccactctctacac

SEQ ID NO: 451240 - DNA, 33 bp, Homo sapien
gggtacttggagtcccgatgccactctctacac

SEQ ID NO: 451241 - DNA, 33 bp, Homo sapien
gtgtcgaccccactcaacaccatctggcccaag

SEQ ID NO: 451242 - DNA, 33 bp, Homo sapien
gtgtcgaccccactcagcaccatctggcccaag

SEQ ID NO: 451243 - DNA, 33 bp, Homo sapien
agcgggagcccatgaccgattggacgccgccgg

SEQ ID NO: 451244 - DNA, 33 bp, Homo sapien
agcgggagcccatgactgattggacgccgccgg

SEQ ID NO: 451245 - DNA, 33 bp, Homo sapien
tagggaggggagacacagatacctaaaccgcta

SEQ ID NO: 451246 - DNA, 33 bp, Homo sapien
tagggaggggagacacggatacctaaaccgcta

SEQ ID NO: 451247 - DNA, 33 bp, Homo sapien
gctgtgagcagaaaaacgttgagttcccactta

SEQ ID NO: 451248 - DNA, 33 bp, Homo sapien
gctgtgagcagaaaaatgttgagttcccactta

SEQ ID NO: 451249 - DNA, 33 bp, Homo sapien
ccctttgtggcatccaaactgattttgatttgc

SEQ ID NO: 451250 - DNA, 33 bp, Homo sapien
ccctttgtggcatccagactgattttgatttgc

SEQ ID NO: 451251 - DNA, 33 bp, Homo sapien
caggaatgggaaaacacctagacacacctgcca

SEQ ID NO: 451252 - DNA, 33 bp, Homo sapien
caggaatgggaaaacatctagacacacctgcca

SEQ ID NO: 451253 - DNA, 33 bp, Homo sapien
cagcacaccgtcagtaactagagctcagtattt

SEQ ID NO: 451254 - DNA, 33 bp, Homo sapien
cagcacaccgtcagtacctagagctcagtattt

SEQ ID NO: 451255 - DNA, 33 bp, Homo sapien
agtgccggacctaaaaactttgtctatagtgaa

SEQ ID NO: 451256 - DNA, 33 bp, Homo sapien
agtgccggacctaaaagctttgtctatagtgaa

SEQ ID NO: 451257 - DNA, 33 bp, Homo sapien; identical to SEQ ID NO: 451255

SEQ ID NO: 451258 - DNA, 33 bp, Homo sapien; identical to SEQ ID NO: 451256

SEQ ID NO: 451259 - DNA, 33 bp, Homo sapien
gtcaggggttctcaaacggatttcaggaccctt

SEQ ID NO: 451260 - DNA, 33 bp, Homo sapien
gtcaggggttctcaaatggatttcaggaccctt

SEQ ID NO: 451261 - DNA, 33 bp, Homo sapien
ttatggcatctgtaacccacttcaaaatgatcc

SEQ ID NO: 451262 - DNA, 33 bp, Homo sapien
ttatggcatctgtaactcacttcaaaatgatcc

SEQ ID NO: 451263 - DNA, 33 bp, Homo sapien
cattcttctcaggccacgaggagtgcttaggga

SEQ ID NO: 451264 - DNA, 33 bp, Homo sapien
cattcttctcaggccatgaggagtgcttaggga

SEQ ID NO: 451265 - DNA, 33 bp, Homo sapien
ccttgtacagccccaactccgtctcatcccaca

SEQ ID NO: 451266 - DNA, 33 bp, Homo sapien
ccttgtacagccccaattccgtctcatcccaca

SEQ ID NO: 451267 - DNA, 33 bp, Homo sapien
acattgatacagtcaaaagtgagtttcctcctc

SEQ ID NO: 451268 - DNA, 33 bp, Homo sapien
acattgatacagtcaagagtgagtttcctcctc

SEQ ID NO: 451269 - DNA, 33 bp, Homo sapien
tctcacttctagaaaccggaaaagctgtggctc

SEQ ID NO: 451270 - DNA, 33 bp, Homo sapien
tctcacttctagaaactggaaaagctgtggctc

SEQ ID NO: 451271 - DNA, 33 bp, Homo sapien
ggcaccaggactttgacgaccttgaacgcaaat

SEQ ID NO: 451272 - DNA, 33 bp, Homo sapien
ggcaccaggactttgatgaccttgaacgcaaat

SEQ ID NO: 451273 - DNA, 33 bp, Homo sapien
tcttcatgtcttttgcccagtttgttgttgttg

SEQ ID NO: 451274 - DNA, 33 bp, Homo sapien
tcttcatgtcttttgcgcagtttgttgttgttg

SEQ ID NO: 451275 - DNA, 33 bp, Homo sapien
gtgtatgaagttcgcacggatcctcagggtgct

SEQ ID NO: 451276 - DNA, 33 bp, Homo sapien
gtgtatgaagttcgcatggatcctcagggtgct

SEQ ID NO: 451277 - DNA, 33 bp, Homo sapien
tcttaaaccagtggtgacaatgatttcaaataa

SEQ ID NO: 451278 - DNA, 33 bp, Homo sapien
tcttaaaccagtggtgtcaatgatttcaaataa

SEQ ID NO: 451279 - DNA, 33 bp, Homo sapien
ggtgccagagctcatcacgtagtcgccagcagc

SEQ ID NO: 451280 - DNA, 33 bp, Homo sapien
ggtgccagagctcatcgcgtagtcgccagcagc

SEQ ID NO: 451281 - DNA, 33 bp, Homo sapien
gctgtttaaccctggaaaagtttctagaacagt

SEQ ID NO: 451282 - DNA, 33 bp, Homo sapien
gctgtttaaccctggagaagtttctagaacagt

SEQ ID NO: 451283 - DNA, 33 bp, Homo sapien
ggaagagcggatccccaatgtgtgagctgatgc

SEQ ID NO: 451284 - DNA, 33 bp, Homo sapien
ggaagagcggatccccgatgtgtgagctgatgc

SEQ ID NO: 451285 - DNA, 33 bp, Homo sapien
ggatgttaaataaagacgaggagcccacttgac

SEQ ID NO: 451286 - DNA, 33 bp, Homo sapien
ggatgttaaataaagatgaggagcccacttgac

SEQ ID NO: 451287 - DNA, 33 bp, Homo sapien
tcaaaggctttatcaacgggcttagcagtgagc

SEQ ID NO: 451288 - DNA, 33 bp, Homo sapien
tcaaaggctttatcaatgggcttagcagtgagc

SEQ ID NO: 451289 - DNA, 33 bp, Homo sapien
acagagcggaactccaccaggaaaggaaaggaa

SEQ ID NO: 451290 - DNA, 33 bp, Homo sapien
acagagcggaactccatcaggaaaggaaaggaa

SEQ ID NO: 451291 - DNA, 33 bp, Homo sapien
atctccacgttgtgaaaagcgtgcccccggacc

SEQ ID NO: 451292 - DNA, 33 bp, Homo sapien
atctccacgttgtgaagagcgtgcccccggacc

SEQ ID NO: 451293 - DNA, 33 bp, Homo sapien
actccaacccgggtgacgaaacaaagccctgtc

SEQ ID NO: 451294 - DNA, 33 bp, Homo sapien
actccaacccgggtgatgaaacaaagccctgtc

SEQ ID NO: 451295 - DNA, 33 bp, Homo sapien
tgagtctccacagggcaagttctgaaggcggcg

SEQ ID NO: 451296 - DNA, 33 bp, Homo sapien
tgagtctccacagggcgagttctgaaggcggcg

SEQ ID NO: 451297 - DNA, 33 bp, Homo sapien
gagcccacttggacccagcagtgtgagcgccat

SEQ ID NO: 451298 - DNA, 33 bp, Homo sapien
gagcccacttggacccggcagtgtgagcgccat

SEQ ID NO: 451299 - DNA, 33 bp, Homo sapien
gttttagagctcccaccgcaggagtcccagggc

SEQ ID NO: 451300 - DNA, 33 bp, Homo sapien
gttttagagctcccactgcaggagtcccagggc

SEQ ID NO: 451301 - DNA, 33 bp, Homo sapien
tcaaaatctccaggaaaccttttataatggcac

SEQ ID NO: 451302 - DNA, 33 bp, Homo sapien
tcaaaatctccaggaagccttttataatggcac

SEQ ID NO: 451303 - DNA, 33 bp, Homo sapien
ggctaccattgcgggacaatcagcaggaaagga

SEQ ID NO: 451304 - DNA, 33 bp, Homo sapien
ggctaccattgcgggagaatcagcaggaaagga

SEQ ID NO: 451305 - DNA, 33 bp, Homo sapien
aactgcaagcatacaactcgatggcttttgtac

SEQ ID NO: 451306 - DNA, 33 bp, Homo sapien
aactgcaagcatacaattcgatggcttttgtac

SEQ ID NO: 451307 - DNA, 33 bp, Homo sapien
gataagagaagccctaaattgcctgcaaatcat

SEQ ID NO: 451308 - DNA, 33 bp, Homo sapien
gataagagaagccctacattgcctgcaaatcat

SEQ ID NO: 451309 - DNA, 33 bp, Homo sapien
ggaactggcggacctcacgtttctcactggagc

SEQ ID NO: 451310 - DNA, 33 bp, Homo sapien
ggaactggcggacctcgcgtttctcactggagc

SEQ ID NO: 451311 - DNA, 33 bp, Homo sapien
atgagtaaaggcaagaagaaatcaggctcattg

SEQ ID NO: 451312 - DNA, 33 bp, Homo sapien
atgagtaaaggcaagaggaaatcaggctcattg

SEQ ID NO: 451313 - DNA, 33 bp, Homo sapien
ccacccacggcaggagaacaaagccggcagagc

SEQ ID NO: 451314 - DNA, 33 bp, Homo sapien
ccacccacggcaggaggacaaagccggcagagc

SEQ ID NO: 451315 - DNA, 33 bp, Homo sapien
cttgcctatgaaacacagaccctatcagcccta

SEQ ID NO: 451316 - DNA, 33 bp, Homo sapien
cttgcctatgaaacacggaccctatcagcccta

SEQ ID NO: 451317 - DNA, 33 bp, Homo sapien
caccatggaaacggtcaaatgctacaaaacagg

SEQ ID NO: 451318 - DNA, 33 bp, Homo sapien
caccatggaaacggtccaatgctacaaaacagg

SEQ ID NO: 451319 - DNA, 33 bp, Homo sapien
agtcggtacacaaccaatgactgtagaaagccc

SEQ ID NO: 451320 - DNA, 33 bp, Homo sapien
agtcggtacacaaccagtgactgtagaaagccc

SEQ ID NO: 451321 - DNA, 33 bp, Homo sapien
ttgctggacaaaagacacctgtgaccgggctca

SEQ ID NO: 451322 - DNA, 33 bp, Homo sapien
ttgctggacaaaagacgcctgtgaccgggctca

SEQ ID NO: 451323 - DNA, 33 bp, Homo sapien
caacggtaccatttgcgacactttattacctct

SEQ ID NO: 451324 - DNA, 33 bp, Homo sapien
caacggtaccatttgctacactttattacctct

SEQ ID NO: 451325 - DNA, 33 bp, Homo sapien
gatctcgcagtggccacagaaagacacagtcac

SEQ ID NO: 451326 - DNA, 33 bp, Homo sapien
gatctcgcagtggccagagaaagacacagtcac

SEQ ID NO: 451327 - DNA, 33 bp, Homo sapien
ccagctgtagagtccacgctgccctgtcctggg

SEQ ID NO: 451328 - DNA, 33 bp, Homo sapien
ccagctgtagagtccatgctgccctgtcctggg

SEQ ID NO: 451329 - DNA, 33 bp, Homo sapien
cgcagccactgcctccaattttgcgctttccat

SEQ ID NO: 451330 - DNA, 33 bp, Homo sapien
cgcagccactgcctccgattttgcgctttccat

SEQ ID NO: 451331 - DNA, 33 bp, Homo sapien
gtgtcagcacccatcacgcttggtcgttcacca

SEQ ID NO: 451332 - DNA, 33 bp, Homo sapien
gtgtcagcacccatcatgcttggtcgttcacca

SEQ ID NO: 451333 - DNA, 33 bp, Homo sapien
ttcaactggatccaaacggtggcagaacatgaa

SEQ ID NO: 451334 - DNA, 33 bp, Homo sapien
ttcaactggatccaaatggtggcagaacatgaa

SEQ ID NO: 451335 - DNA, 33 bp, Homo sapien
cgttgcacgttacttcaaattaaatgttgttct

SEQ ID NO: 451336 - DNA, 33 bp, Homo sapien
cgttgcacgttacttcgaattaaatgttgttct

SEQ ID NO: 451337 - DNA, 33 bp, Homo sapien
agctccttgtccaggaataggtaaagtccttga

SEQ ID NO: 451338 - DNA, 33 bp, Homo sapien
agctccttgtccaggagtaggtaaagtccttga

SEQ ID NO: 451339 - DNA, 33 bp, Homo sapien
agtttcaagtaccacactcagggcccacactga

SEQ ID NO: 451340 - DNA, 33 bp, Homo sapien
agtttcaagtaccacagtcagggcccacactga

SEQ ID NO: 451341 - DNA, 33 bp, Homo sapien
aattttggcaggcgaccataccatagtgtttca

SEQ ID NO: 451342 - DNA, 33 bp, Homo sapien
aattttggcaggcgacgataccatagtgtttca

SEQ ID NO: 451343 - DNA, 33 bp, Homo sapien
aaacgaacgtcactcaatccaagtcccacaatg

SEQ ID NO: 451344 - DNA, 33 bp, Homo sapien
aaacgaacgtcactcagtccaagtcccacaatg

SEQ ID NO: 451345 - DNA, 33 bp, Homo sapien
ggtggaatgtgtataacctcatcctcttcctcc

SEQ ID NO: 451346 - DNA, 33 bp, Homo sapien
ggtggaatgtgtataatctcatcctcttcctcc

SEQ ID NO: 451347 - DNA, 33 bp, Homo sapien
ttgcctggtaggtatgcagcagactgacctggg

SEQ ID NO: 451348 - DNA, 33 bp, Homo sapien
ttgcctggtaggtatggagcagactgacctggg

SEQ ID NO: 451349 - DNA, 33 bp, Homo sapien
aagaaacagttacaataatgggttattccatcc

SEQ ID NO: 451350 - DNA, 33 bp, Homo sapien
aagaaacagttacaatgatgggttattccatcc

SEQ ID NO: 451351 - DNA, 33 bp, Homo sapien
gacaggcgctcagggacaccctaacagagacag

SEQ ID NO: 451352 - DNA, 33 bp, Homo sapien
gacaggcgctcagggagaccctaacagagacag

SEQ ID NO: 451353 - DNA, 33 bp, Homo sapien
ttttataaggtcatcagtcgtattagattagag

SEQ ID NO: 451354 - DNA, 33 bp, Homo sapien
ttttataaggtcatcattcgtattagattagag

SEQ ID NO: 451355 - DNA, 33 bp, Homo sapien
aagagataaacagaaactgagagacatagagga

SEQ ID NO: 451356 - DNA, 33 bp, Homo sapien
aagagataaacagaaattgagagacatagagga

SEQ ID NO: 451357 - DNA, 33 bp, Homo sapien
tatccatgtattctcaccattattcagctccca

SEQ ID NO: 451358 - DNA, 33 bp, Homo sapien
tatccatgtattctcatcattattcagctccca

SEQ ID NO: 451359 - DNA, 33 bp, Homo sapien
cagcttctgtgacatcaccctgctacattctgt

SEQ ID NO: 451360 - DNA, 33 bp, Homo sapien
cagcttctgtgacatcgccctgctacattctgt

SEQ ID NO: 451361 - DNA, 33 bp, Homo sapien
atggagaccaggagtcaccagggttctagatgc

SEQ ID NO: 451362 - DNA, 33 bp, Homo sapien
atggagaccaggagtcgccagggttctagatgc

SEQ ID NO: 451363 - DNA, 33 bp, Homo sapien
gggggcctgtggccagaacgcgagggcagttga

SEQ ID NO: 451364 - DNA, 33 bp, Homo sapien
gggggcctgtggccaggacgcgagggcagttga

SEQ ID NO: 451365 - DNA, 33 bp, Homo sapien
atcacggaggaaacatcagaaccgagactcagg

SEQ ID NO: 451366 - DNA, 33 bp, Homo sapien
atcacggaggaaacatgagaaccgagactcagg

SEQ ID NO: 451367 - DNA, 33 bp, Homo sapien
tccaagcctgctctgacattgcccgtggtgggc

SEQ ID NO: 451368 - DNA, 33 bp, Homo sapien
tccaagcctgctctgatattgcccgtggtgggc

SEQ ID NO: 451369 - DNA, 33 bp, Homo sapien
cccatcattaagcgacagatgctgcgtttactt

SEQ ID NO: 451370 - DNA, 33 bp, Homo sapien
cccatcattaagcgacggatgctgcgtttactt

SEQ ID NO: 451371 - DNA, 33 bp, Homo sapien
gcacacctacgccatacggtatgcttgagagcc

SEQ ID NO: 451372 - DNA, 33 bp, Homo sapien
gcacacctacgccatatggtatgcttgagagcc

SEQ ID NO: 451373 - DNA, 33 bp, Homo sapien
gtgcagccgtggacaccaactccttccttctgc

SEQ ID NO: 451374 - DNA, 33 bp, Homo sapien
gtgcagccgtggacactaactccttccttctgc

SEQ ID NO: 451375 - DNA, 33 bp, Homo sapien
aagactgggctgtaaacccccacactatcaaat

SEQ ID NO: 451376 - DNA, 33 bp, Homo sapien
aagactgggctgtaaatccccacactatcaaat

SEQ ID NO: 451377 - DNA, 33 bp, Homo sapien
gcaattaggagctgtgcactttaaacacaatga

SEQ ID NO: 451378 - DNA, 33 bp, Homo sapien
gcaattaggagctgtggactttaaacacaatga

SEQ ID NO: 451379 - DNA, 33 bp, Homo sapien
gctaggctccgtcccaggtgtttttggaacatc

SEQ ID NO: 451380 - DNA, 33 bp, Homo sapien
gctaggctccgtcccatgtgtttttggaacatc

SEQ ID NO: 451381 - DNA, 33 bp, Homo sapien
gatacaggcgatgacactgatgaaccttgagga

SEQ ID NO: 451382 - DNA, 33 bp, Homo sapien
gatacaggcgatgacattgatgaaccttgagga

SEQ ID NO: 451383 - DNA, 33 bp, Homo sapien
gtggcacaacctaaaacgcacaggacactcccc

SEQ ID NO: 451384 - DNA, 33 bp, Homo sapien
gtggcacaacctaaaatgcacaggacactcccc

SEQ ID NO: 451385 - DNA, 33 bp, Homo sapien
tgatgaaaaaggacaccattagagaaaatcctg

SEQ ID NO: 451386 - DNA, 33 bp, Homo sapien
tgatgaaaaaggacacgattagagaaaatcctg

SEQ ID NO: 451387 - DNA, 33 bp, Homo sapien
cacacctcacttcaaaaggcagctattggtggg

SEQ ID NO: 451388 - DNA, 33 bp, Homo sapien
cacacctcacttcaaacggcagctattggtggg

SEQ ID NO: 451389 - DNA, 33 bp, Homo sapien
cccggcctccttcactaacttctgaatccacct

SEQ ID NO: 451390 - DNA, 33 bp, Homo sapien
cccggcctccttcactgacttctgaatccacct

SEQ ID NO: 451391 - DNA, 33 bp, Homo sapien
ctcggcagtccttaaacgatttctgcaccatca

SEQ ID NO: 451392 - DNA, 33 bp, Homo sapien
ctcggcagtccttaaatgatttctgcaccatca

SEQ ID NO: 451393 - DNA, 33 bp, Homo sapien
ttcagaaaggctcacaatctcagtgtcagtcga

SEQ ID NO: 451394 - DNA, 33 bp, Homo sapien
ttcagaaaggctcacactctcagtgtcagtcga

SEQ ID NO: 451395 - DNA, 33 bp, Homo sapien
caactaggctgccagcacttccaggacagaaat

SEQ ID NO: 451396 - DNA, 33 bp, Homo sapien
caactaggctgccagcgcttccaggacagaaat

SEQ ID NO: 451397 - DNA, 33 bp, Homo sapien
tgtttaaaattgcaaccgggaggatcactggag

SEQ ID NO: 451398 - DNA, 33 bp, Homo sapien
tgtttaaaattgcaactgggaggatcactggag

SEQ ID NO: 451399 - DNA, 33 bp, Homo sapien
aaaaaaatgatctacacgggcttgattggtgcc

SEQ ID NO: 451400 - DNA, 33 bp, Homo sapien
aaaaaaatgatctacatgggcttgattggtgcc

SEQ ID NO: 451401 - DNA, 33 bp, Homo sapien
atgcaacattgaaaaaagtcatgaggggccagg

SEQ ID NO: 451402 - DNA, 33 bp, Homo sapien
atgcaacattgaaaaacgtcatgaggggccagg

SEQ ID NO: 451403 - DNA, 33 bp, Homo sapien
gctttttaaaatgggccagagtccgggcatggt

SEQ ID NO: 451404 - DNA, 33 bp, Homo sapien
gctttttaaaatgggctagagtccgggcatggt

SEQ ID NO: 451405 - DNA, 33 bp, Homo sapien
ggctatacttccagaaataaaacacagggagtt

SEQ ID NO: 451406 - DNA, 33 bp, Homo sapien
ggctatacttccagaagtaaaacacagggagtt

SEQ ID NO: 451407 - DNA, 33 bp, Homo sapien
atcagatcaagagctgcacctctcgagttgtgc

SEQ ID NO: 451408 - DNA, 33 bp, Homo sapien
atcagatcaagagctgtacctctcgagttgtgc

SEQ ID NO: 451409 - DNA, 33 bp, Homo sapien
gagtgattattgataacagtggtgagtgagact

SEQ ID NO: 451410 - DNA, 33 bp, Homo sapien
gagtgattattgataatagtggtgagtgagact

SEQ ID NO: 451411 - DNA, 33 bp, Homo sapien
aaattctcgtgtcaaacgcagataataaaacct

SEQ ID NO: 451412 - DNA, 33 bp, Homo sapien
aaattctcgtgtcaaatgcagataataaaacct

SEQ ID NO: 451413 - DNA, 33 bp, Homo sapien
attgtaattagaaatcaccttttggaaaagatc

SEQ ID NO: 451414 - DNA, 33 bp, Homo sapien
attgtaattagaaatccccttttggaaaagatc

SEQ ID NO: 451415 - DNA, 33 bp, Homo sapien
gatgcagttagggtcgacctttgacggcagaag

SEQ ID NO: 451416 - DNA, 33 bp, Homo sapien
gatgcagttagggtcgccctttgacggcagaag

SEQ ID NO: 451417 - DNA, 33 bp, Homo sapien
atctgagttccagagcacggctcacagaccttt

SEQ ID NO: 451418 - DNA, 33 bp, Homo sapien
atctgagttccagagcgcggctcacagaccttt

SEQ ID NO: 451419 - DNA, 33 bp, Homo sapien
tctctttggacccggacgtttttacactaatca

SEQ ID NO: 451420 - DNA, 33 bp, Homo sapien
tctctttggacccggatgtttttacactaatca

SEQ ID NO: 451421 - DNA, 33 bp, Homo sapien; identical to SEQ ID NO: 451419

SEQ ID NO: 451422 - DNA, 33 bp, Homo sapien; identical to SEQ ID NO: 451420

SEQ ID NO: 451423 - DNA, 33 bp, Homo sapien
ccctctcttggtcttccctgaaacagcagggtc

SEQ ID NO: 451424 - DNA, 33 bp, Homo sapien
ccctctcttggtcttctctgaaacagcagggtc

SEQ ID NO: 451425 - DNA, 33 bp, Homo sapien; identical to SEQ ID NO: 451423

SEQ ID NO: 451426 - DNA, 33 bp, Homo sapien; identical to SEQ ID NO: 451424

SEQ ID NO: 451427 - DNA, 33 bp, Homo sapien
ctgtgacctggacatactagtgtcttattagag

SEQ ID NO: 451428 - DNA, 33 bp, Homo sapien
ctgtgacctggacatattagtgtcttattagag

SEQ ID NO: 451429 - DNA, 33 bp, Homo sapien
ccttgattcctgttccaagtcagctgctagaca

SEQ ID NO: 451430 - DNA, 33 bp, Homo sapien
ccttgattcctgttccgagtcagctgctagaca

SEQ ID NO: 451431 - DNA, 33 bp, Homo sapien
ctactcaataaatacgcaggtctgtggaagctt

SEQ ID NO: 451432 - DNA, 33 bp, Homo sapien
ctactcaataaatacggaggtctgtggaagctt

SEQ ID NO: 451433 - DNA, 33 bp, Homo sapien
ttgaaggttgtgtgcacgcagctgggaggctta

SEQ ID NO: 451434 - DNA, 33 bp, Homo sapien
ttgaaggttgtgtgcatgcagctgggaggctta

SEQ ID NO: 451435 - DNA, 33 bp, Homo sapien
tcctgtgcacaccaaaccttctccaggaatagg

SEQ ID NO: 451436 - DNA, 33 bp, Homo sapien
tcctgtgcacaccaaagcttctccaggaatagg

SEQ ID NO: 451437 - DNA, 33 bp, Homo sapien
tccagacttgaataaacgtaggagttggccagg

SEQ ID NO: 451438 - DNA, 33 bp, Homo sapien
tccagacttgaataaatgtaggagttggccagg

SEQ ID NO: 451439 - DNA, 33 bp, Homo sapien
agcgcatcggcacaccagatgagggtctctctc

SEQ ID NO: 451440 - DNA, 33 bp, Homo sapien
agcgcatcggcacaccggatgagggtctctctc

SEQ ID NO: 451441 - DNA, 33 bp, Homo sapien
aggtaatataagagctcaccagatagagtagac

SEQ ID NO: 451442 - DNA, 33 bp, Homo sapien
aggtaatataagagcttaccagatagagtagac

SEQ ID NO: 451443 - DNA, 33 bp, Homo sapien
tcagcctaccagaggaataacctttgggtgctt

SEQ ID NO: 451444 - DNA, 33 bp, Homo sapien
tcagcctaccagaggagtaacctttgggtgctt

SEQ ID NO: 451445 - DNA, 33 bp, Homo sapien
gtttaaggtcatcctccctcaaaaccagtattc

SEQ ID NO: 451446 - DNA, 33 bp, Homo sapien
gtttaaggtcatcctctctcaaaaccagtattc

SEQ ID NO: 451447 - DNA, 33 bp, Homo sapien
gacatgagtggaattaggttgccacttctggag

SEQ ID NO: 451448 - DNA, 33 bp, Homo sapien
gacatgagtggaattatgttgccacttctggag

SEQ ID NO: 451449 - DNA, 33 bp, Homo sapien
agaggtcctcatgataacctactctgggctctg

SEQ ID NO: 451450 - DNA, 33 bp, Homo sapien
agaggtcctcatgataccctactctgggctctg

SEQ ID NO: 451451 - DNA, 33 bp, Homo sapien
ggcactggagggtccaatgagggccaagacccc

SEQ ID NO: 451452 - DNA, 33 bp, Homo sapien
ggcactggagggtccagtgagggccaagacccc

SEQ ID NO: 451453 - DNA, 33 bp, Homo sapien
ttgaagcattctcgcccgaaaatgttaacagca

SEQ ID NO: 451454 - DNA, 33 bp, Homo sapien
ttgaagcattctcgcctgaaaatgttaacagca

SEQ ID NO: 451455 - DNA, 33 bp, Homo sapien
tggggtccctgcttaccggcggccactgtgttc

SEQ ID NO: 451456 - DNA, 33 bp, Homo sapien
tggggtccctgcttactggcggccactgtgttc

SEQ ID NO: 451457 - DNA, 33 bp, Homo sapien
atcccacaccagatcacgtactccacacgtctc

SEQ ID NO: 451458 - DNA, 33 bp, Homo sapien
atcccacaccagatcatgtactccacacgtctc

SEQ ID NO: 451459 - DNA, 33 bp, Homo sapien
gttgttcatttgagcactgcccttactttgtca

SEQ ID NO: 451460 - DNA, 33 bp, Homo sapien
gttgttcatttgagcattgcccttactttgtca

SEQ ID NO: 451461 - DNA, 33 bp, Homo sapien
ataaaacctgagcataaagagctgtctcctttg

SEQ ID NO: 451462 - DNA, 33 bp, Homo sapien
ataaaacctgagcatacagagctgtctcctttg

SEQ ID NO: 451463 - DNA, 33 bp, Homo sapien
tgaaaagcccgctgtccctgcacgtcccacact

SEQ ID NO: 451464 - DNA, 33 bp, Homo sapien
tgaaaagcccgctgtcgctgcacgtcccacact

SEQ ID NO: 451465 - DNA, 33 bp, Homo sapien
aactcatttgaccagacgcttctcaaagttatt

SEQ ID NO: 451466 - DNA, 33 bp, Homo sapien
aactcatttgaccagatgcttctcaaagttatt

SEQ ID NO: 451467 - DNA, 33 bp, Homo sapien
tatctagggaaagggcccagatactgcctcttc

SEQ ID NO: 451468 - DNA, 33 bp, Homo sapien
tatctagggaaagggcgcagatactgcctcttc

SEQ ID NO: 451469 - DNA, 33 bp, Homo sapien
acatgtgagagttaaacagcaggcttcctggta

SEQ ID NO: 451470 - DNA, 33 bp, Homo sapien
acatgtgagagttaaatagcaggcttcctggta

SEQ ID NO: 451471 - DNA, 33 bp, Homo sapien
gggaacgatgatacgcaagtctgaggattgtgg

SEQ ID NO: 451472 - DNA, 33 bp, Homo sapien
gggaacgatgatacgcgagtctgaggattgtgg

SEQ ID NO: 451473 - DNA, 33 bp, Homo sapien
catgtcatcacttgctaaatagaatccagtcgt

SEQ ID NO: 451474 - DNA, 33 bp, Homo sapien
catgtcatcacttgctgaatagaatccagtcgt

SEQ ID NO: 451475 - DNA, 33 bp, Homo sapien
aacatacagaaagcaccggactaagccttcaag

SEQ ID NO: 451476 - DNA, 33 bp, Homo sapien
aacatacagaaagcacgggactaagccttcaag

SEQ ID NO: 451477 - DNA, 33 bp, Homo sapien
aaggcctcagtccacaggctaccattttctagt

SEQ ID NO: 451478 - DNA, 33 bp, Homo sapien
aaggcctcagtccacatgctaccattttctagt

SEQ ID NO: 451479 - DNA, 33 bp, Homo sapien
ggcaaactcgttttcacgcttgccagatagtaa

SEQ ID NO: 451480 - DNA, 33 bp, Homo sapien
ggcaaactcgttttcatgcttgccagatagtaa

SEQ ID NO: 451481 - DNA, 33 bp, Homo sapien
cggttactctcatgacacagggaagaagccagc

SEQ ID NO: 451482 - DNA, 33 bp, Homo sapien
cggttactctcatgacgcagggaagaagccagc

SEQ ID NO: 451483 - DNA, 33 bp, Homo sapien
ccgggtgtggcaggccaccgacttgagcagaag

SEQ ID NO: 451484 - DNA, 33 bp, Homo sapien
ccgggtgtggcaggccgccgacttgagcagaag

SEQ ID NO: 451485 - DNA, 33 bp, Homo sapien
actaagcgaaagtcccaagaaacaaaactctga

SEQ ID NO: 451486 - DNA, 33 bp, Homo sapien
actaagcgaaagtcccgagaaacaaaactctga

SEQ ID NO: 451487 - DNA, 33 bp, Homo sapien
tgcaacacagattcaaattctaacagtatagaa

SEQ ID NO: 451488 - DNA, 33 bp, Homo sapien
tgcaacacagattcaagttctaacagtatagaa

SEQ ID NO: 451489 - DNA, 33 bp, Homo sapien
ggaagcatttgacaaccctttaaaaattgcaac

SEQ ID NO: 451490 - DNA, 33 bp, Homo sapien
ggaagcatttgacaacgctttaaaaattgcaac

SEQ ID NO: 451491 - DNA, 33 bp, Homo sapien
caaccttgtgtatctgcaaccttgtgtattctt

SEQ ID NO: 451492 - DNA, 33 bp, Homo sapien
caaccttgtgtatctggaaccttgtgtattctt

SEQ ID NO: 451493 - DNA, 33 bp, Homo sapien
tttaaacaggtacatacaaaggtagatggaggg

SEQ ID NO: 451494 - DNA, 33 bp, Homo sapien
tttaaacaggtacatataaaggtagatggaggg

SEQ ID NO: 451495 - DNA, 33 bp, Homo sapien
atgcattatgcttaagaacatcatgctcagtga

SEQ ID NO: 451496 - DNA, 33 bp, Homo sapien
atgcattatgcttaaggacatcatgctcagtga

SEQ ID NO: 451497 - DNA, 33 bp, Homo sapien
cagcagttttaaagaacgtatgctcatagttga

SEQ ID NO: 451498 - DNA, 33 bp, Homo sapien
cagcagttttaaagaatgtatgctcatagttga

SEQ ID NO: 451499 - DNA, 33 bp, Homo sapien
gtatgctcatagttgacactgcgcacactctcg

SEQ ID NO: 451500 - DNA, 33 bp, Homo sapien
gtatgctcatagttgatactgcgcacactctcg

SEQ ID NO: 451501 - DNA, 33 bp, Homo sapien
tcattccaattccaccaggcttttacaaggatt

SEQ ID NO: 451502 - DNA, 33 bp, Homo sapien
tcattccaattccaccgggcttttacaaggatt

SEQ ID NO: 451503 - DNA, 33 bp, Homo sapien
gctgcctgcagaacaccattctcaagatgcagt

SEQ ID NO: 451504 - DNA, 33 bp, Homo sapien
gctgcctgcagaacactattctcaagatgcagt

SEQ ID NO: 451505 - DNA, 33 bp, Homo sapien
ctagcaaatagtaggcgctatctatctatctat

SEQ ID NO: 451506 - DNA, 33 bp, Homo sapien
ctagcaaatagtaggctctatctatctatctat

SEQ ID NO: 451507 - DNA, 33 bp, Homo sapien
gtaaaaatcaatgccacctctttcgaaaacact

SEQ ID NO: 451508 - DNA, 33 bp, Homo sapien
gtaaaaatcaatgccatctctttcgaaaacact

SEQ ID NO: 451509 - DNA, 33 bp, Homo sapien
cattgatttttaccacaatgaatgagagcacct

SEQ ID NO: 451510 - DNA, 33 bp, Homo sapien
cattgatttttaccacgatgaatgagagcacct

SEQ ID NO: 451511 - DNA, 33 bp, Homo sapien
aggagaaacaggataaatcttgctacataaaat

SEQ ID NO: 451512 - DNA, 33 bp, Homo sapien
aggagaaacaggataagtcttgctacataaaat

SEQ ID NO: 451513 - DNA, 33 bp, Homo sapien
gattctacaactgctaacgttttaccatatttt

SEQ ID NO: 451514 - DNA, 33 bp, Homo sapien
gattctacaactgctagcgttttaccatatttt

SEQ ID NO: 451515 - DNA, 33 bp, Homo sapien
agcctgggagtaactgcaaatagtcaccagagt

SEQ ID NO: 451516 - DNA, 33 bp, Homo sapien
agcctgggagtaactggaaatagtcaccagagt

SEQ ID NO: 451517 - DNA, 33 bp, Homo sapien
ttctgaataggtaacacacatacatacatgtgg

SEQ ID NO: 451518 - DNA, 33 bp, Homo sapien
ttctgaataggtaacagacatacatacatgtgg

SEQ ID NO: 451519 - DNA, 33 bp, Homo sapien
ttatgtgtgtaaaaaaattgcatatataaaaat

SEQ ID NO: 451520 - DNA, 33 bp, Homo sapien
ttatgtgtgtaaaaaatttgcatatataaaaat

SEQ ID NO: 451521 - DNA, 33 bp, Homo sapien
gaacacttagaacaccacattttatagatgaga

SEQ ID NO: 451522 - DNA, 33 bp, Homo sapien
gaacacttagaacaccgcattttatagatgaga

SEQ ID NO: 451523 - DNA, 33 bp, Homo sapien
atgccaaagaaagcggaatggggtctctctatg

SEQ ID NO: 451524 - DNA, 33 bp, Homo sapien
atgccaaagaaagcgggatggggtctctctatg

SEQ ID NO: 451525 - DNA, 33 bp, Homo sapien
aatggaagattgcaaaagtcagcctccactccc

SEQ ID NO: 451526 - DNA, 33 bp, Homo sapien
aatggaagattgcaaaggtcagcctccactccc

SEQ ID NO: 451527 - DNA, 33 bp, Homo sapien
tactggtaaatggataagttttgaactgaaaat

SEQ ID NO: 451528 - DNA, 33 bp, Homo sapien
tactggtaaatggatatgttttgaactgaaaat

SEQ ID NO: 451529 - DNA, 33 bp, Homo sapien
tgttctacattgttgacgttgagtgagagagtt

SEQ ID NO: 451530 - DNA, 33 bp, Homo sapien
tgttctacattgttgaggttgagtgagagagtt

SEQ ID NO: 451531 - DNA, 33 bp, Homo sapien
ctttctgtattgtcccacggttcttttccattt

SEQ ID NO: 451532 - DNA, 33 bp, Homo sapien
ctttctgtattgtcccgcggttcttttccattt

SEQ ID NO: 451533 - DNA, 33 bp, Homo sapien
atgctttaccagagccacccacaaatgccaccg

SEQ ID NO: 451534 - DNA, 33 bp, Homo sapien
atgctttaccagagccgcccacaaatgccaccg

SEQ ID NO: 451535 - DNA, 33 bp, Homo sapien
tttcctactcagagaaactggcaagtctgacga

SEQ ID NO: 451536 - DNA, 33 bp, Homo sapien
tttcctactcagagaatctggcaagtctgacga

SEQ ID NO: 451537 - DNA, 33 bp, Homo sapien
tctgcttcacctacgacctgttcctgaacctgg

SEQ ID NO: 451538 - DNA, 33 bp, Homo sapien
tctgcttcacctacgatctgttcctgaacctgg

SEQ ID NO: 451539 - DNA, 33 bp, Homo sapien
cgttaattttaaaagacgtatgtccacacacac

SEQ ID NO: 451540 - DNA, 33 bp, Homo sapien
cgttaattttaaaagatgtatgtccacacacac

SEQ ID NO: 451541 - DNA, 33 bp, Homo sapien
aatattagcagattagaagacgtgatgtctagg

SEQ ID NO: 451542 - DNA, 33 bp, Homo sapien
aatattagcagattagtagacgtgatgtctagg

SEQ ID NO: 451543 - DNA, 33 bp, Homo sapien
tgcttcgcatttccgaaaaccagaatcaattcc

SEQ ID NO: 451544 - DNA, 33 bp, Homo sapien
tgcttcgcatttccgataaccagaatcaattcc

SEQ ID NO: 451545 - DNA, 33 bp, Homo sapien
agatgcagtcacatgaagggatgctggccgggg

SEQ ID NO: 451546 - DNA, 33 bp, Homo sapien
agatgcagtcacatgaggggatgctggccgggg

SEQ ID NO: 451547 - DNA, 33 bp, Homo sapien
acgtgcttcccaaatcgactgtcacatcttatc

SEQ ID NO: 451548 - DNA, 33 bp, Homo sapien
acgtgcttcccaaatctactgtcacatcttatc

SEQ ID NO: 451549 - DNA, 33 bp, Homo sapien
ccagccagaaatgtctgaagtaatctcttggaa

SEQ ID NO: 451550 - DNA, 33 bp, Homo sapien
ccagccagaaatgtcttaagtaatctcttggaa

SEQ ID NO: 451551 - DNA, 33 bp, Homo sapien
ccaactcttacagtcaatctataatcggggagc

SEQ ID NO: 451552 - DNA, 33 bp, Homo sapien
ccaactcttacagtcagtctataatcggggagc

SEQ ID NO: 451553 - DNA, 33 bp, Homo sapien
gagtgcctcagtcgtgcattctgtcagcgtctc

SEQ ID NO: 451554 - DNA, 33 bp, Homo sapien
gagtgcctcagtcgtgtattctgtcagcgtctc

SEQ ID NO: 451555 - DNA, 33 bp, Homo sapien
tagtcgtaggaagaaccgaaggaggtggtggcg

SEQ ID NO: 451556 - DNA, 33 bp, Homo sapien
tagtcgtaggaagaactgaaggaggtggtggcg

SEQ ID NO: 451557 - DNA, 33 bp, Homo sapien
tcagcctctcaagcaactaggactgactgcagg

SEQ ID NO: 451558 - DNA, 33 bp, Homo sapien
tcagcctctcaagcaattaggactgactgcagg

SEQ ID NO: 451559 - DNA, 33 bp, Homo sapien
acaggtagacctcatgaaaggaaacgggattga

SEQ ID NO: 451560 - DNA, 33 bp, Homo sapien
acaggtagacctcatggaaggaaacgggattga

SEQ ID NO: 451561 - DNA, 33 bp, Homo sapien
agactgggacctgcctaaaacaaggattactat

SEQ ID NO: 451562 - DNA, 33 bp, Homo sapien
agactgggacctgccttaaacaaggattactat

SEQ ID NO: 451563 - DNA, 33 bp, Homo sapien
tctcaactgcccaaaaacagatgcctggtgaat

SEQ ID NO: 451564 - DNA, 33 bp, Homo sapien
tctcaactgcccaaaagcagatgcctggtgaat

SEQ ID NO: 451565 - DNA, 33 bp, Homo sapien
gcgttaaactgcttggcaatttcttgaggaggg

SEQ ID NO: 451566 - DNA, 33 bp, Homo sapien
gcgttaaactgcttggtaatttcttgaggaggg

SEQ ID NO: 451567 - DNA, 33 bp, Homo sapien
tgtttgataggcttcccgaaatcacatttcaac

SEQ ID NO: 451568 - DNA, 33 bp, Homo sapien
tgtttgataggcttcctgaaatcacatttcaac

SEQ ID NO: 451569 - DNA, 33 bp, Homo sapien
gatggatggtcaagagccatgagaagtaaaaag

SEQ ID NO: 451570 - DNA, 33 bp, Homo sapien
gatggatggtcaagagtcatgagaagtaaaaag

SEQ ID NO: 451571 - DNA, 33 bp, Homo sapien
tcctaagcactgaatacattgtagctattctta

SEQ ID NO: 451572 - DNA, 33 bp, Homo sapien
tcctaagcactgaatatattgtagctattctta

SEQ ID NO: 451573 - DNA, 33 bp, Homo sapien
ctgacttgtgaaccgaagctcaaaagccagcaa

SEQ ID NO: 451574 - DNA, 33 bp, Homo sapien
ctgacttgtgaaccgaggctcaaaagccagcaa

SEQ ID NO: 451575 - DNA, 33 bp, Homo sapien
agggggtaaaggttggcatcggcgtcagcccct

SEQ ID NO: 451576 - DNA, 33 bp, Homo sapien
agggggtaaaggttggtatcggcgtcagcccct

SEQ ID NO: 451577 - DNA, 33 bp, Homo sapien
agccaagcggcggttccacccgacccgagtagg

SEQ ID NO: 451578 - DNA, 33 bp, Homo sapien
agccaagcggcggttcgacccgacccgagtagg

SEQ ID NO: 451579 - DNA, 33 bp, Homo sapien
aggtctgtagcctgacagacagtttctcttctc

SEQ ID NO: 451580 - DNA, 33 bp, Homo sapien
aggtctgtagcctgacggacagtttctcttctc

SEQ ID NO: 451581 - DNA, 33 bp, Homo sapien
agactctaaggcagggacactgcagactcaaat

SEQ ID NO: 451582 - DNA, 33 bp, Homo sapien
agactctaaggcagggccactgcagactcaaat

SEQ ID NO: 451583 - DNA, 33 bp, Homo sapien
attgtgttcttgtgcacagagatctccatcctg

SEQ ID NO: 451584 - DNA, 33 bp, Homo sapien
attgtgttcttgtgcatagagatctccatcctg

SEQ ID NO: 451585 - DNA, 33 bp, Homo sapien
aaataaaaataatttcaagacagcagtagcaga

SEQ ID NO: 451586 - DNA, 33 bp, Homo sapien
aaataaaaataatttcgagacagcagtagcaga

SEQ ID NO: 451587 - DNA, 33 bp, Homo sapien
cctagaatcctgacacaggcagccagagttccg

SEQ ID NO: 451588 - DNA, 33 bp, Homo sapien
cctagaatcctgacacgggcagccagagttccg

SEQ ID NO: 451589 - DNA, 33 bp, Homo sapien
ctccagatgaaaacacagcttggtcaactcctt

SEQ ID NO: 451590 - DNA, 33 bp, Homo sapien
ctccagatgaaaacacggcttggtcaactcctt

SEQ ID NO: 451591 - DNA, 33 bp, Homo sapien
ttggctggattagttaacatccaaactggagtg

SEQ ID NO: 451592 - DNA, 33 bp, Homo sapien
ttggctggattagttaccatccaaactggagtg

SEQ ID NO: 451593 - DNA, 33 bp, Homo sapien
ctcacagaggaggaaacccacgtgttagagaag

SEQ ID NO: 451594 - DNA, 33 bp, Homo sapien
ctcacagaggaggaaatccacgtgttagagaag

SEQ ID NO: 451595 - DNA, 33 bp, Homo sapien
ccaaaattctttcactcaagtgcctccgacaca

SEQ ID NO: 451596 - DNA, 33 bp, Homo sapien
ccaaaattctttcactgaagtgcctccgacaca

SEQ ID NO: 451597 - DNA, 33 bp, Homo sapien
acaaagtaggtatagaaggaaggtatcttaaca

SEQ ID NO: 451598 - DNA, 33 bp, Homo sapien
acaaagtaggtatagatggaaggtatcttaaca

SEQ ID NO: 451599 - DNA, 33 bp, Homo sapien
gtctacattgatgttgaatcttgcaattgaatt

SEQ ID NO: 451600 - DNA, 33 bp, Homo sapien
gtctacattgatgttgtatcttgcaattgaatt

SEQ ID NO: 451601 - DNA, 33 bp, Homo sapien
ggcctgattacccccaaaaagtgcagcaaaaat

SEQ ID NO: 451602 - DNA, 33 bp, Homo sapien
ggcctgattacccccataaagtgcagcaaaaat

SEQ ID NO: 451603 - DNA, 33 bp, Homo sapien
aaaataaaatataacccgaaggaagctaaacac

SEQ ID NO: 451604 - DNA, 33 bp, Homo sapien
aaaataaaatataacctgaaggaagctaaacac

SEQ ID NO: 451605 - DNA, 33 bp, Homo sapien
gaggcattaagggtgaagaaaagactaattctc

SEQ ID NO: 451606 - DNA, 33 bp, Homo sapien
gaggcattaagggtgaggaaaagactaattctc

SEQ ID NO: 451607 - DNA, 33 bp, Homo sapien
agggtctgtacaccacaaaggcatccccaggaa

SEQ ID NO: 451608 - DNA, 33 bp, Homo sapien
agggtctgtacaccacgaaggcatccccaggaa

SEQ ID NO: 451609 - DNA, 33 bp, Homo sapien
caccacaattctttacactggcatttacaattt

SEQ ID NO: 451610 - DNA, 33 bp, Homo sapien
caccacaattctttaccctggcatttacaattt

SEQ ID NO: 451611 - DNA, 33 bp, Homo sapien
tccagccctgaccacacagaactaaaagcatct

SEQ ID NO: 451612 - DNA, 33 bp, Homo sapien
tccagccctgaccacatagaactaaaagcatct

SEQ ID NO: 451613 - DNA, 33 bp, Homo sapien
agaggaaagtttgcacactggatttgttggatg

SEQ ID NO: 451614 - DNA, 33 bp, Homo sapien
agaggaaagtttgcacgctggatttgttggatg

SEQ ID NO: 451615 - DNA, 33 bp, Homo sapien
tttgctgtgtaaggaaacaaacatatccataga

SEQ ID NO: 451616 - DNA, 33 bp, Homo sapien
tttgctgtgtaaggaagcaaacatatccataga

SEQ ID NO: 451617 - DNA, 33 bp, Homo sapien
agctgtaccagggttacggatagttgtaggaag

SEQ ID NO: 451618 - DNA, 33 bp, Homo sapien
agctgtaccagggttatggatagttgtaggaag

SEQ ID NO: 451619 - DNA, 33 bp, Homo sapien; identical to SEQ ID NO: 451617

SEQ ID NO: 451620 - DNA, 33 bp, Homo sapien; identical to SEQ ID NO: 451618

SEQ ID NO: 451621 - DNA, 33 bp, Homo sapien; identical to SEQ ID NO: 451617

SEQ ID NO: 451622 - DNA, 33 bp, Homo sapien; identical to SEQ ID NO: 451618

SEQ ID NO: 451623 - DNA, 33 bp, Homo sapien
tgctttgacagtctcaacttacgtggtcattgc

SEQ ID NO: 451624 - DNA, 33 bp, Homo sapien
tgctttgacagtctcagcttacgtggtcattgc

SEQ ID NO: 451625 - DNA, 33 bp, Homo sapien
tccagtgggggataaacaggttcaaatcagagc

SEQ ID NO: 451626 - DNA, 33 bp, Homo sapien
tccagtgggggataaagaggttcaaatcagagc

SEQ ID NO: 451627 - DNA, 33 bp, Homo sapien
cctcagagtccagtgacctccagttatcacccc

SEQ ID NO: 451628 - DNA, 33 bp, Homo sapien
cctcagagtccagtgagctccagttatcacccc

SEQ ID NO: 451629 - DNA, 33 bp, Homo sapien
gttcccagttctatctcacaatcttaccctgtc

SEQ ID NO: 451630 - DNA, 33 bp, Homo sapien
gttcccagttctatctgacaatcttaccctgtc

SEQ ID NO: 451631 - DNA, 33 bp, Homo sapien
cacacagcttggagtacccagattgtattctag

SEQ ID NO: 451632 - DNA, 33 bp, Homo sapien
cacacagcttggagtatccagattgtattctag

SEQ ID NO: 451633 - DNA, 33 bp, Homo sapien
atagatgggtttgcaactaataaaaactgattc

SEQ ID NO: 451634 - DNA, 33 bp, Homo sapien
atagatgggtttgcaagtaataaaaactgattc

SEQ ID NO: 451635 - DNA, 33 bp, Homo sapien
gaatgacacaaagtaactgtgagctatgatgat

SEQ ID NO: 451636 - DNA, 33 bp, Homo sapien
gaatgacacaaagtaagtgtgagctatgatgat

SEQ ID NO: 451637 - DNA, 33 bp, Homo sapien
ggaagtatttacatcacggaaatgagaaaacag

SEQ ID NO: 451638 - DNA, 33 bp, Homo sapien
ggaagtatttacatcatggaaatgagaaaacag

SEQ ID NO: 451639 - DNA, 33 bp, Homo sapien
aaggcgtttaggaagcaatgagtttgagtgttt

SEQ ID NO: 451640 - DNA, 33 bp, Homo sapien
aaggcgtttaggaagcgatgagtttgagtgttt

SEQ ID NO: 451641 - DNA, 33 bp, Homo sapien
cctgaaggcaacctctcactctccaaggtggct

SEQ ID NO: 451642 - DNA, 33 bp, Homo sapien
cctgaaggcaacctcttactctccaaggtggct

SEQ ID NO: 451643 - DNA, 33 bp, Homo sapien
gtgtggacacaccggtaaccccatccttgcttt

SEQ ID NO: 451644 - DNA, 33 bp, Homo sapien
gtgtggacacaccggtgaccccatccttgcttt

SEQ ID NO: 451645 - DNA, 33 bp, Homo sapien
tgattctgaatctgcaaggggggatgactgcca

SEQ ID NO: 451646 - DNA, 33 bp, Homo sapien
tgattctgaatctgcagggggggatgactgcca

SEQ ID NO: 451647 - DNA, 33 bp, Homo sapien
gaagcctgaaaggtgaaactgaggcagtgattc

SEQ ID NO: 451648 - DNA, 33 bp, Homo sapien
gaagcctgaaaggtgagactgaggcagtgattc

SEQ ID NO: 451649 - DNA, 33 bp, Homo sapien
aatgcagatctaaaccccctgcaggtaacctgg

SEQ ID NO: 451650 - DNA, 33 bp, Homo sapien
aatgcagatctaaacctcctgcaggtaacctgg

SEQ ID NO: 451651 - DNA, 33 bp, Homo sapien
tcaggggcagtactgagaatgaaaccaggttaa

SEQ ID NO: 451652 - DNA, 33 bp, Homo sapien
tcaggggcagtactgataatgaaaccaggttaa

SEQ ID NO: 451653 - DNA, 33 bp, Homo sapien
cattccagcaaacagaaaaagtgtgaaagctgt

SEQ ID NO: 451654 - DNA, 33 bp, Homo sapien
cattccagcaaacagacaaagtgtgaaagctgt

SEQ ID NO: 451655 - DNA, 33 bp, Homo sapien
agaatagatgttttacaagaccacaggctgaga

SEQ ID NO: 451656 - DNA, 33 bp, Homo sapien
agaatagatgttttacgagaccacaggctgaga

SEQ ID NO: 451657 - DNA, 33 bp, Homo sapien
gacaaacaggaagtgcacaggcattgcaaagac

SEQ ID NO: 451658 - DNA, 33 bp, Homo sapien
gacaaacaggaagtgcgcaggcattgcaaagac

SEQ ID NO: 451659 - DNA, 33 bp, Homo sapien
tatataagtcagggtacgtatgttaactgctgt

SEQ ID NO: 451660 - DNA, 33 bp, Homo sapien
tatataagtcagggtatgtatgttaactgctgt

SEQ ID NO: 451661 - DNA, 33 bp, Homo sapien
ttagggcatttgcacaatctttgccctctctgc

SEQ ID NO: 451662 - DNA, 33 bp, Homo sapien
ttagggcatttgcacagtctttgccctctctgc

SEQ ID NO: 451663 - DNA, 33 bp, Homo sapien
cacccttcctcctcaacgaaaatgtgagctgga

SEQ ID NO: 451664 - DNA, 33 bp, Homo sapien
cacccttcctcctcaatgaaaatgtgagctgga

SEQ ID NO: 451665 - DNA, 33 bp, Homo sapien
acgcagtgtcacttacagcagttttcgtaacaa

SEQ ID NO: 451666 - DNA, 33 bp, Homo sapien
acgcagtgtcacttacggcagttttcgtaacaa

SEQ ID NO: 451667 - DNA, 33 bp, Homo sapien
aggtttgaattactgacggcacttttggctatc

SEQ ID NO: 451668 - DNA, 33 bp, Homo sapien
aggtttgaattactgatggcacttttggctatc

SEQ ID NO: 451669 - DNA, 33 bp, Homo sapien
caggccatatacaagacgcaaatagcactggct

SEQ ID NO: 451670 - DNA, 33 bp, Homo sapien
caggccatatacaagatgcaaatagcactggct

SEQ ID NO: 451671 - DNA, 33 bp, Homo sapien
catatttaaccatgtacctcaaagatcctagac

SEQ ID NO: 451672 - DNA, 33 bp, Homo sapien
catatttaaccatgtatctcaaagatcctagac

SEQ ID NO: 451673 - DNA, 33 bp, Homo sapien
taaagaaaagtttagacaagattagagcattag

SEQ ID NO: 451674 - DNA, 33 bp, Homo sapien
taaagaaaagtttagataagattagagcattag

SEQ ID NO: 451675 - DNA, 33 bp, Homo sapien
ggacagttactattgcacttgcaaacaaggctt

SEQ ID NO: 451676 - DNA, 33 bp, Homo sapien
ggacagttactattgcgcttgcaaacaaggctt

SEQ ID NO: 451677 - DNA, 33 bp, Homo sapien
tctccacattcatttaagggatggtgactccat

SEQ ID NO: 451678 - DNA, 33 bp, Homo sapien
tctccacattcatttatgggatggtgactccat

SEQ ID NO: 451679 - DNA, 33 bp, Homo sapien
gccagatcttttggtcccaactggtcttgttct

SEQ ID NO: 451680 - DNA, 33 bp, Homo sapien
gccagatcttttggtctcaactggtcttgttct

SEQ ID NO: 451681 - DNA, 33 bp, Homo sapien
gggaatgcagtcctcaactgtattgttacatta

SEQ ID NO: 451682 - DNA, 33 bp, Homo sapien
gggaatgcagtcctcagctgtattgttacatta

SEQ ID NO: 451683 - DNA, 33 bp, Homo sapien
aatacagctggccctacgacttgcactgaccaa

SEQ ID NO: 451684 - DNA, 33 bp, Homo sapien
aatacagctggccctatgacttgcactgaccaa

SEQ ID NO: 451685 - DNA, 33 bp, Homo sapien
tttaccataccttgcactaagaggtggagtctg

SEQ ID NO: 451686 - DNA, 33 bp, Homo sapien
tttaccataccttgcattaagaggtggagtctg

SEQ ID NO: 451687 - DNA, 33 bp, Homo sapien
cccaagatgtagattgcaagagatgtgacttta

SEQ ID NO: 451688 - DNA, 33 bp, Homo sapien
cccaagatgtagattgtaagagatgtgacttta

SEQ ID NO: 451689 - DNA, 33 bp, Homo sapien
ccactcttcagacgtgaatgaatgtgcagatcc

SEQ ID NO: 451690 - DNA, 33 bp, Homo sapien
ccactcttcagacgtggatgaatgtgcagatcc

SEQ ID NO: 451691 - DNA, 33 bp, Homo sapien
tgatacatttctattacgctaagctagtaatga

SEQ ID NO: 451692 - DNA, 33 bp, Homo sapien
tgatacatttctattatgctaagctagtaatga

SEQ ID NO: 451693 - DNA, 33 bp, Homo sapien
aaccaggaacaccaagcctctaaggaatgcaaa

SEQ ID NO: 451694 - DNA, 33 bp, Homo sapien
aaccaggaacaccaaggctctaaggaatgcaaa

SEQ ID NO: 451695 - DNA, 33 bp, Homo sapien
aagaggaagtgaaaagcacggtccttctcttta

SEQ ID NO: 451696 - DNA, 33 bp, Homo sapien
aagaggaagtgaaaagtacggtccttctcttta

SEQ ID NO: 451697 - DNA, 33 bp, Homo sapien
gtggtgctgggtcatacgcttaaagagaaggac

SEQ ID NO: 451698 - DNA, 33 bp, Homo sapien
gtggtgctgggtcatatgcttaaagagaaggac

SEQ ID NO: 451699 - DNA, 33 bp, Homo sapien
agaattctcagggaaactaaaactcattacttg

SEQ ID NO: 451700 - DNA, 33 bp, Homo sapien
agaattctcagggaaattaaaactcattacttg

SEQ ID NO: 451701 - DNA, 33 bp, Homo sapien
ttatataacactcttcaaaagacaaaactctgg

SEQ ID NO: 451702 - DNA, 33 bp, Homo sapien
ttatataacactcttccaaagacaaaactctgg

SEQ ID NO: 451703 - DNA, 33 bp, Homo sapien
tgactgtcataccttaacccagcacatagcagc

SEQ ID NO: 451704 - DNA, 33 bp, Homo sapien
tgactgtcataccttagcccagcacatagcagc

SEQ ID NO: 451705 - DNA, 33 bp, Homo sapien
ccccaatgagacttaccctgatcttgctatata

SEQ ID NO: 451706 - DNA, 33 bp, Homo sapien
ccccaatgagacttactctgatcttgctatata

SEQ ID NO: 451707 - DNA, 33 bp, Homo sapien
aaatgagcgcttcttcaaagaccaccaggctcc

SEQ ID NO: 451708 - DNA, 33 bp, Homo sapien
aaatgagcgcttcttccaagaccaccaggctcc

SEQ ID NO: 451709 - DNA, 33 bp, Homo sapien
tgtctttaacagtaaacgaaagcccagaaaact

SEQ ID NO: 451710 - DNA, 33 bp, Homo sapien
tgtctttaacagtaaatgaaagcccagaaaact

SEQ ID NO: 451711 - DNA, 33 bp, Homo sapien
acaaccacaggaagaccgcccccaacattcttc

SEQ ID NO: 451712 - DNA, 33 bp, Homo sapien
acaaccacaggaagacggcccccaacattcttc

SEQ ID NO: 451713 - DNA, 33 bp, Homo sapien
tcccagggaaccaagacggcacatagacagata

SEQ ID NO: 451714 - DNA, 33 bp, Homo sapien
tcccagggaaccaagatggcacatagacagata

SEQ ID NO: 451715 - DNA, 33 bp, Homo sapien
gtagcgataactgtgacagagaaaatcctaaat

SEQ ID NO: 451716 - DNA, 33 bp, Homo sapien
gtagcgataactgtgatagagaaaatcctaaat

SEQ ID NO: 451717 - DNA, 33 bp, Homo sapien
ggattgggaggttttacagtgcccatagaagtg

SEQ ID NO: 451718 - DNA, 33 bp, Homo sapien
ggattgggaggttttagagtgcccatagaagtg

SEQ ID NO: 451719 - DNA, 33 bp, Homo sapien
ctaagtattcctggcacgaaaggaagagaaaaa

SEQ ID NO: 451720 - DNA, 33 bp, Homo sapien
ctaagtattcctggcatgaaaggaagagaaaaa

SEQ ID NO: 451721 - DNA, 33 bp, Homo sapien
gggcccattgatgccactgacctatgacaattg

SEQ ID NO: 451722 - DNA, 33 bp, Homo sapien
gggcccattgatgccattgacctatgacaattg

SEQ ID NO: 451723 - DNA, 33 bp, Homo sapien
taaagttttttcctgagagaagatttgcctaag

SEQ ID NO: 451724 - DNA, 33 bp, Homo sapien
taaagttttttcctgatagaagatttgcctaag

SEQ ID NO: 451725 - DNA, 33 bp, Homo sapien
ctgcatggaggtcacacctttatccacttacct

SEQ ID NO: 451726 - DNA, 33 bp, Homo sapien
ctgcatggaggtcacatctttatccacttacct

SEQ ID NO: 451727 - DNA, 33 bp, Homo sapien
ttgctaacaatagtcaccctactctaccagtga

SEQ ID NO: 451728 - DNA, 33 bp, Homo sapien
ttgctaacaatagtcatcctactctaccagtga

SEQ ID NO: 451729 - DNA, 33 bp, Homo sapien
gtactgggacatgttcaagaggacactaagaaa

SEQ ID NO: 451730 - DNA, 33 bp, Homo sapien
gtactgggacatgttcgagaggacactaagaaa

SEQ ID NO: 451731 - DNA, 33 bp, Homo sapien
attgattgactccttacaggtcaggtgtctact

SEQ ID NO: 451732 - DNA, 33 bp, Homo sapien
attgattgactccttataggtcaggtgtctact

SEQ ID NO: 451733 - DNA, 33 bp, Homo sapien
tcctgaattttagatgaagtcagatgtgagttc

SEQ ID NO: 451734 - DNA, 33 bp, Homo sapien
tcctgaattttagatggagtcagatgtgagttc

SEQ ID NO: 451735 - DNA, 33 bp, Homo sapien
cctttccctactctacagctcacagtaaggagt

SEQ ID NO: 451736 - DNA, 33 bp, Homo sapien
cctttccctactctaccgctcacagtaaggagt

SEQ ID NO: 451737 - DNA, 33 bp, Homo sapien
gcctagttagtggttaaggaagatcattttatt

SEQ ID NO: 451738 - DNA, 33 bp, Homo sapien
gcctagttagtggttacggaagatcattttatt

SEQ ID NO: 451739 - DNA, 33 bp, Homo sapien
agcagtctgccatagcacctaggacagttttct

SEQ ID NO: 451740 - DNA, 33 bp, Homo sapien
agcagtctgccatagcccctaggacagttttct

SEQ ID NO: 451741 - DNA, 33 bp, Homo sapien
atttagtagttctagacgcaaagaaagaatagg

SEQ ID NO: 451742 - DNA, 33 bp, Homo sapien
atttagtagttctagatgcaaagaaagaatagg

SEQ ID NO: 451743 - DNA, 33 bp, Homo sapien
actattttcaggccaacggatcaaagaacagaa

SEQ ID NO: 451744 - DNA, 33 bp, Homo sapien
actattttcaggccaatggatcaaagaacagaa

SEQ ID NO: 451745 - DNA, 33 bp, Homo sapien
atagtaacaagaacacagaatacttcatctctg

SEQ ID NO: 451746 - DNA, 33 bp, Homo sapien
atagtaacaagaacacggaatacttcatctctg

SEQ ID NO: 451747 - DNA, 33 bp, Homo sapien
tttgcatttttgaaaacggagtccttctcatgt

SEQ ID NO: 451748 - DNA, 33 bp, Homo sapien
tttgcatttttgaaaatggagtccttctcatgt

SEQ ID NO: 451749 - DNA, 33 bp, Homo sapien
aattaggatgggctgcagaattattagggaaag

SEQ ID NO: 451750 - DNA, 33 bp, Homo sapien
aattaggatgggctgcggaattattagggaaag

SEQ ID NO: 451751 - DNA, 33 bp, Homo sapien
ggcatagtacctgataggtagcttttcagccct

SEQ ID NO: 451752 - DNA, 33 bp, Homo sapien
ggcatagtacctgatatgtagcttttcagccct

SEQ ID NO: 451753 - DNA, 33 bp, Homo sapien
tttatcaagcaagttacatgcgggcagctggag

SEQ ID NO: 451754 - DNA, 33 bp, Homo sapien
tttatcaagcaagttagatgcgggcagctggag

SEQ ID NO: 451755 - DNA, 33 bp, Homo sapien
acactggagtttatgaccttggtgaggtggttg

SEQ ID NO: 451756 - DNA, 33 bp, Homo sapien
acactggagtttatgatcttggtgaggtggttg

SEQ ID NO: 451757 - DNA, 33 bp, Homo sapien
ctggttctgtatttaaagaaaaagtgggtgtgg

SEQ ID NO: 451758 - DNA, 33 bp, Homo sapien
ctggttctgtatttaaggaaaaagtgggtgtgg

SEQ ID NO: 451759 - DNA, 33 bp, Homo sapien
catgtgctgatgtgtacattatgggtgtcaggt

SEQ ID NO: 451760 - DNA, 33 bp, Homo sapien
catgtgctgatgtgtatattatgggtgtcaggt

SEQ ID NO: 451761 - DNA, 33 bp, Homo sapien
attagttctctttccactgccgtaatttaagtg

SEQ ID NO: 451762 - DNA, 33 bp, Homo sapien
attagttctctttccattgccgtaatttaagtg

SEQ ID NO: 451763 - DNA, 33 bp, Homo sapien
tacaaactttgccaacaagaagcaagaatgaca

SEQ ID NO: 451764 - DNA, 33 bp, Homo sapien
tacaaactttgccaacgagaagcaagaatgaca

SEQ ID NO: 451765 - DNA, 33 bp, Homo sapien
tgtgtttcttaacggacgagagaacattaaagg

SEQ ID NO: 451766 - DNA, 33 bp, Homo sapien
tgtgtttcttaacggatgagagaacattaaagg

SEQ ID NO: 451767 - DNA, 33 bp, Homo sapien
ggcaaatgtgaattcaataactgtgggaaaagc

SEQ ID NO: 451768 - DNA, 33 bp, Homo sapien
ggcaaatgtgaattcagtaactgtgggaaaagc

SEQ ID NO: 451769 - DNA, 33 bp, Homo sapien
ttcatacatcttgttaaagtttgctcatgttat

SEQ ID NO: 451770 - DNA, 33 bp, Homo sapien
ttcatacatcttgttagagtttgctcatgttat

SEQ ID NO: 451771 - DNA, 33 bp, Homo sapien
ttttccagatggttccaaatgtctactgttcat

SEQ ID NO: 451772 - DNA, 33 bp, Homo sapien
ttttccagatggttccgaatgtctactgttcat

SEQ ID NO: 451773 - DNA, 33 bp, Homo sapien
aaagttttaccatacaaattacactcacaagat

SEQ ID NO: 451774 - DNA, 33 bp, Homo sapien
aaagttttaccatacagattacactcacaagat

SEQ ID NO: 451775 - DNA, 33 bp, Homo sapien
atcctttatcttaagaagttctggctgagagtg

SEQ ID NO: 451776 - DNA, 33 bp, Homo sapien
atcctttatcttaagacgttctggctgagagtg

SEQ ID NO: 451777 - DNA, 33 bp, Homo sapien
caatacattggtctcccagaatgcaatttacaa

SEQ ID NO: 451778 - DNA, 33 bp, Homo sapien
caatacattggtctcctagaatgcaatttacaa

SEQ ID NO: 451779 - DNA, 33 bp, Homo sapien
ggccatcgattatgaaacttccattgctcactg

SEQ ID NO: 451780 - DNA, 33 bp, Homo sapien
ggccatcgattatgaagcttccattgctcactg

SEQ ID NO: 451781 - DNA, 33 bp, Homo sapien
aaattatctgagaatacgcttgtttttgtgtgg

SEQ ID NO: 451782 - DNA, 33 bp, Homo sapien
aaattatctgagaatatgcttgtttttgtgtgg

SEQ ID NO: 451783 - DNA, 33 bp, Homo sapien
gcctgaaaggagtgggaataaaccatcagggag

SEQ ID NO: 451784 - DNA, 33 bp, Homo sapien
gcctgaaaggagtgggcataaaccatcagggag

SEQ ID NO: 451785 - DNA, 33 bp, Homo sapien
tccctcccttgtccataaacctctctgctgctc

SEQ ID NO: 451786 - DNA, 33 bp, Homo sapien
tccctcccttgtccatgaacctctctgctgctc

SEQ ID NO: 451787 - DNA, 33 bp, Homo sapien
ggcagtttctggattgaaatatcagtcatgcat

SEQ ID NO: 451788 - DNA, 33 bp, Homo sapien
ggcagtttctggattggaatatcagtcatgcat

SEQ ID NO: 451789 - DNA, 33 bp, Homo sapien
tttttttttttttgcccagctgtccataaaaat

SEQ ID NO: 451790 - DNA, 33 bp, Homo sapien
tttttttttttttgcctagctgtccataaaaat

SEQ ID NO: 451791 - DNA, 33 bp, Homo sapien
aaatctttgagaacaacgtcgtccacttgatgt

SEQ ID NO: 451792 - DNA, 33 bp, Homo sapien
aaatctttgagaacaatgtcgtccacttgatgt

SEQ ID NO: 451793 - DNA, 33 bp, Homo sapien; identical to SEQ ID NO: 451791

SEQ ID NO: 451794 - DNA, 33 bp, Homo sapien; identical to SEQ ID NO: 451792

SEQ ID NO: 451795 - DNA, 33 bp, Homo sapien
gatgtaactcttggatcagatcccacttctgcc

SEQ ID NO: 451796 - DNA, 33 bp, Homo sapien
gatgtaactcttggatgagatcccacttctgcc

SEQ ID NO: 451797 - DNA, 33 bp, Homo sapien
gcttgcgacacttcacaggctatcgcatcgagc

SEQ ID NO: 451798 - DNA, 33 bp, Homo sapien
gcttgcgacacttcacgggctatcgcatcgagc

SEQ ID NO: 451799 - DNA, 33 bp, Homo sapien
ggtggtttccacttcaaaataatctgggatgat

SEQ ID NO: 451800 - DNA, 33 bp, Homo sapien
ggtggtttccacttcagaataatctgggatgat

SEQ ID NO: 451801 - DNA, 33 bp, Homo sapien
gacctcttgcttttaacaggctgatgcagtgag

SEQ ID NO: 451802 - DNA, 33 bp, Homo sapien
gacctcttgcttttaataggctgatgcagtgag

SEQ ID NO: 451803 - DNA, 33 bp, Homo sapien
ggtctgattcacatacaaattcacattcccaag

SEQ ID NO: 451804 - DNA, 33 bp, Homo sapien
ggtctgattcacatacgaattcacattcccaag

SEQ ID NO: 451805 - DNA, 33 bp, Homo sapien
gggagttagttacttacgtcaaaatgtagtgca

SEQ ID NO: 451806 - DNA, 33 bp, Homo sapien
gggagttagttacttatgtcaaaatgtagtgca

SEQ ID NO: 451807 - DNA, 33 bp, Homo sapien
ctgtgtacatgaggtacctagactgcacactcc

SEQ ID NO: 451808 - DNA, 33 bp, Homo sapien
ctgtgtacatgaggtatctagactgcacactcc

SEQ ID NO: 451809 - DNA, 33 bp, Homo sapien
gttgagtatgtgccaaacaagtggagaggatta

SEQ ID NO: 451810 - DNA, 33 bp, Homo sapien
gttgagtatgtgccaagcaagtggagaggatta

SEQ ID NO: 451811 - DNA, 33 bp, Homo sapien
taacagaggaagttgaagaagttttcatggcca

SEQ ID NO: 451812 - DNA, 33 bp, Homo sapien
taacagaggaagttgaggaagttttcatggcca

SEQ ID NO: 451813 - DNA, 33 bp, Homo sapien
attaggatggacaaccaggactaagagggaatg

SEQ ID NO: 451814 - DNA, 33 bp, Homo sapien
attaggatggacaaccgggactaagagggaatg

SEQ ID NO: 451815 - DNA, 33 bp, Homo sapien
ttcattttatgcatgccaaactctactcacaat

SEQ ID NO: 451816 - DNA, 33 bp, Homo sapien
ttcattttatgcatgctaaactctactcacaat

SEQ ID NO: 451817 - DNA, 33 bp, Homo sapien
gcatcacatcccacacagaacagcaaatgtcct

SEQ ID NO: 451818 - DNA, 33 bp, Homo sapien
gcatcacatcccacactgaacagcaaatgtcct

SEQ ID NO: 451819 - DNA, 33 bp, Homo sapien
tttccctcaccttaacaatggcctgagaaatat

SEQ ID NO: 451820 - DNA, 33 bp, Homo sapien
tttccctcaccttaactatggcctgagaaatat

SEQ ID NO: 451821 - DNA, 33 bp, Homo sapien
aagtctgtctggtatgaaaaggtgatttataga

SEQ ID NO: 451822 - DNA, 33 bp, Homo sapien
aagtctgtctggtatgcaaaggtgatttataga

SEQ ID NO: 451823 - DNA, 33 bp, Homo sapien
gtcactgtaccccagaacctaagtgacagagcc

SEQ ID NO: 451824 - DNA, 33 bp, Homo sapien
gtcactgtaccccagagcctaagtgacagagcc

SEQ ID NO: 451825 - DNA, 33 bp, Homo sapien
tgtatagtcactgaaacaagaaggcagtgttag

SEQ ID NO: 451826 - DNA, 33 bp, Homo sapien
tgtatagtcactgaaataagaaggcagtgttag

SEQ ID NO: 451827 - DNA, 33 bp, Homo sapien
ttggaatgcagaaatgaatggagaccctgtccc

SEQ ID NO: 451828 - DNA, 33 bp, Homo sapien
ttggaatgcagaaatggatggagaccctgtccc

SEQ ID NO: 451829 - DNA, 33 bp, Homo sapien
ggattaggtgactgtccctttatcacagcagga

SEQ ID NO: 451830 - DNA, 33 bp, Homo sapien
ggattaggtgactgtcgctttatcacagcagga

SEQ ID NO: 451831 - DNA, 33 bp, Homo sapien
ctctgtgccgcttacaaattgtcatacctattt

SEQ ID NO: 451832 - DNA, 33 bp, Homo sapien
ctctgtgccgcttacagattgtcatacctattt

SEQ ID NO: 451833 - DNA, 33 bp, Homo sapien
acccgcagaatcaggaagtaagctaaaagtcgt

SEQ ID NO: 451834 - DNA, 33 bp, Homo sapien
acccgcagaatcaggaggtaagctaaaagtcgt

SEQ ID NO: 451835 - DNA, 33 bp, Homo sapien
tttattttcccctctagaagttacgagagtctt

SEQ ID NO: 451836 - DNA, 33 bp, Homo sapien
tttattttcccctctataagttacgagagtctt

SEQ ID NO: 451837 - DNA, 33 bp, Homo sapien
agaacagacctttccacagcctagagggtagac

SEQ ID NO: 451838 - DNA, 33 bp, Homo sapien
agaacagacctttccatagcctagagggtagac

SEQ ID NO: 451839 - DNA, 33 bp, Homo sapien
gggaaatcatcaaagccgatggggctgaaatgg

SEQ ID NO: 451840 - DNA, 33 bp, Homo sapien
gggaaatcatcaaagcggatggggctgaaatgg

SEQ ID NO: 451841 - DNA, 33 bp, Homo sapien
cctgtgttttcctatgaaggtggaacgtgttta

SEQ ID NO: 451842 - DNA, 33 bp, Homo sapien
cctgtgttttcctatggaggtggaacgtgttta

SEQ ID NO: 451843 - DNA, 33 bp, Homo sapien
actcttccccaacatccatctagcccagcttgg

SEQ ID NO: 451844 - DNA, 33 bp, Homo sapien
actcttccccaacatctatctagcccagcttgg

SEQ ID NO: 451845 - DNA, 33 bp, Homo sapien
gtccctggagtaagcaaacttccttatacctat

SEQ ID NO: 451846 - DNA, 33 bp, Homo sapien
gtccctggagtaagcagacttccttatacctat

SEQ ID NO: 451847 - DNA, 33 bp, Homo sapien
gctcagtagtgacttagggatattcccaggtgc

SEQ ID NO: 451848 - DNA, 33 bp, Homo sapien
gctcagtagtgacttatggatattcccaggtgc

SEQ ID NO: 451849 - DNA, 33 bp, Homo sapien
aacagaggcgtgcagcaaagtaaacacgggaag

SEQ ID NO: 451850 - DNA, 33 bp, Homo sapien
aacagaggcgtgcagcgaagtaaacacgggaag

SEQ ID NO: 451851 - DNA, 33 bp, Homo sapien
gtttaaaaactgtagccaagttccaagaaagaa

SEQ ID NO: 451852 - DNA, 33 bp, Homo sapien
gtttaaaaactgtagctaagttccaagaaagaa

SEQ ID NO: 451853 - DNA, 33 bp, Homo sapien
aattaggaatcctaacagtgtccacctggtgag

SEQ ID NO: 451854 - DNA, 33 bp, Homo sapien
aattaggaatcctaaccgtgtccacctggtgag

SEQ ID NO: 451855 - DNA, 33 bp, Homo sapien
cacatcctatgccttacaccaaggatggccaat

SEQ ID NO: 451856 - DNA, 33 bp, Homo sapien
cacatcctatgccttataccaaggatggccaat

SEQ ID NO: 451857 - DNA, 33 bp, Homo sapien
agtccctgacataaaacggcgtagtgtttgtac

SEQ ID NO: 451858 - DNA, 33 bp, Homo sapien
agtccctgacataaaatggcgtagtgtttgtac

SEQ ID NO: 451859 - DNA, 33 bp, Homo sapien
gcaatggatttggggcaaagataccaggagagg

SEQ ID NO: 451860 - DNA, 33 bp, Homo sapien
gcaatggatttggggcgaagataccaggagagg

SEQ ID NO: 451861 - DNA, 33 bp, Homo sapien
agagaaaggcagatacccaactctggacattca

SEQ ID NO: 451862 - DNA, 33 bp, Homo sapien
agagaaaggcagatactcaactctggacattca

SEQ ID NO: 451863 - DNA, 33 bp, Homo sapien
aatcaatttaaaaaagcagttgcatccctactc

SEQ ID NO: 451864 - DNA, 33 bp, Homo sapien
aatcaatttaaaaaaggagttgcatccctactc

SEQ ID NO: 451865 - DNA, 33 bp, Homo sapien
gagagataagatagaccaggctgtggcgtgcgg

SEQ ID NO: 451866 - DNA, 33 bp, Homo sapien
gagagataagatagactaggctgtggcgtgcgg

SEQ ID NO: 451867 - DNA, 33 bp, Homo sapien
cctcccatttccctcaactcattacacactcaa

SEQ ID NO: 451868 - DNA, 33 bp, Homo sapien
cctcccatttccctcagctcattacacactcaa

SEQ ID NO: 451869 - DNA, 33 bp, Homo sapien
gtgtgtgtgttggagagagaatcttgctctatc

SEQ ID NO: 451870 - DNA, 33 bp, Homo sapien
gtgtgtgtgttggagatagaatcttgctctatc

SEQ ID NO: 451871 - DNA, 33 bp, Homo sapien
tgtcattggttgagcaatcattcttgtatcata

SEQ ID NO: 451872 - DNA, 33 bp, Homo sapien
tgtcattggttgagcattcattcttgtatcata

SEQ ID NO: 451873 - DNA, 33 bp, Homo sapien
gacagaatgacaaatacaatgactgggaggaga

SEQ ID NO: 451874 - DNA, 33 bp, Homo sapien
gacagaatgacaaatagaatgactgggaggaga

SEQ ID NO: 451875 - DNA, 33 bp, Homo sapien
aggaacaggagcagaaactgtaccaaaaagaaa

SEQ ID NO: 451876 - DNA, 33 bp, Homo sapien
aggaacaggagcagaagctgtaccaaaaagaaa

SEQ ID NO: 451877 - DNA, 33 bp, Homo sapien
catgcagttatgatcaaaacggaaatgtgtgag

SEQ ID NO: 451878 - DNA, 33 bp, Homo sapien
catgcagttatgatcagaacggaaatgtgtgag

SEQ ID NO: 451879 - DNA, 33 bp, Homo sapien
cctggcaggttcaaagcaaggctggccagtgtt

SEQ ID NO: 451880 - DNA, 33 bp, Homo sapien
cctggcaggttcaaagtaaggctggccagtgtt

SEQ ID NO: 451881 - DNA, 33 bp, Homo sapien
tcaagggttgaaactaactattgagtactatgc

SEQ ID NO: 451882 - DNA, 33 bp, Homo sapien
tcaagggttgaaactatctattgagtactatgc

SEQ ID NO: 451883 - DNA, 33 bp, Homo sapien
aagagagaaggaaccaaagaatctcttttcttt

SEQ ID NO: 451884 - DNA, 33 bp, Homo sapien
aagagagaaggaaccacagaatctcttttcttt

SEQ ID NO: 451885 - DNA, 33 bp, Homo sapien
agttacactctgtgtagggatacctctaatttg

SEQ ID NO: 451886 - DNA, 33 bp, Homo sapien
agttacactctgtgtatggatacctctaatttg

SEQ ID NO: 451887 - DNA, 33 bp, Homo sapien
aattgaatttagaaacaatagtaagttgggaag

SEQ ID NO: 451888 - DNA, 33 bp, Homo sapien
aattgaatttagaaaccatagtaagttgggaag

SEQ ID NO: 451889 - DNA, 33 bp, Homo sapien
gtgaaatggatagtgacggaccaggtagaatgt

SEQ ID NO: 451890 - DNA, 33 bp, Homo sapien
gtgaaatggatagtgatggaccaggtagaatgt

SEQ ID NO: 451891 - DNA, 33 bp, Homo sapien
tcgttcagcctctcacactgtaaacacatgccc

SEQ ID NO: 451892 - DNA, 33 bp, Homo sapien
tcgttcagcctctcacgctgtaaacacatgccc

SEQ ID NO: 451893 - DNA, 33 bp, Homo sapien
atattcagagtcaccgaaatggatcttagaacc

SEQ ID NO: 451894 - DNA, 33 bp, Homo sapien
atattcagagtcaccgcaatggatcttagaacc

SEQ ID NO: 451895 - DNA, 33 bp, Homo sapien
gagccgagatcaccctcactgttttccagcctg

SEQ ID NO: 451896 - DNA, 33 bp, Homo sapien
gagccgagatcacccttactgttttccagcctg

SEQ ID NO: 451897 - DNA, 33 bp, Homo sapien
ataaataaagctcaaccatcattcattaggttc

SEQ ID NO: 451898 - DNA, 33 bp, Homo sapien
ataaataaagctcaactatcattcattaggttc

SEQ ID NO: 451899 - DNA, 33 bp, Homo sapien
aacaggggctgcaaaccgctgtctacacccatc

SEQ ID NO: 451900 - DNA, 33 bp, Homo sapien
aacaggggctgcaaactgctgtctacacccatc

SEQ ID NO: 451901 - DNA, 33 bp, Homo sapien
ccgattctgttccatacggtgattataaaccaa

SEQ ID NO: 451902 - DNA, 33 bp, Homo sapien
ccgattctgttccatatggtgattataaaccaa

SEQ ID NO: 451903 - DNA, 33 bp, Homo sapien
ctcgaacagaattctaccatcgaagtggacgcg

SEQ ID NO: 451904 - DNA, 33 bp, Homo sapien
ctcgaacagaattctagcatcgaagtggacgcg

SEQ ID NO: 451905 - DNA, 33 bp, Homo sapien
agttagaagtccagcacatgctttaaggaagcc

SEQ ID NO: 451906 - DNA, 33 bp, Homo sapien
agttagaagtccagcagatgctttaaggaagcc

SEQ ID NO: 451907 - DNA, 33 bp, Homo sapien
cctccagggaacggaccgtaagctgcaacagct

SEQ ID NO: 451908 - DNA, 33 bp, Homo sapien
cctccagggaacggactgtaagctgcaacagct

SEQ ID NO: 451909 - DNA, 33 bp, Homo sapien
agcaggcggggcacacaggacttcgatggccgt

SEQ ID NO: 451910 - DNA, 33 bp, Homo sapien
agcaggcggggcacacgggacttcgatggccgt

SEQ ID NO: 451911 - DNA, 33 bp, Homo sapien
aggcctttcttgtgcccccttgtgttccatgct

SEQ ID NO: 451912 - DNA, 33 bp, Homo sapien
aggcctttcttgtgcctccttgtgttccatgct

SEQ ID NO: 451913 - DNA, 33 bp, Homo sapien
tgaaccataaggttgaaccaatctcgaccctgc

SEQ ID NO: 451914 - DNA, 33 bp, Homo sapien
tgaaccataaggttgagccaatctcgaccctgc

SEQ ID NO: 451915 - DNA, 33 bp, Homo sapien
gaaagcctttctgttccagtagtctggtcacta

SEQ ID NO: 451916 - DNA, 33 bp, Homo sapien
gaaagcctttctgttctagtagtctggtcacta

SEQ ID NO: 451917 - DNA, 33 bp, Homo sapien
tacattttcctacacaacctgggtgccgccaca

SEQ ID NO: 451918 - DNA, 33 bp, Homo sapien
tacattttcctacacatcctgggtgccgccaca

SEQ ID NO: 451919 - DNA, 33 bp, Homo sapien
agcaaaaccacaatgacatactacacttcacac

SEQ ID NO: 451920 - DNA, 33 bp, Homo sapien
agcaaaaccacaatgagatactacacttcacac

SEQ ID NO: 451921 - DNA, 33 bp, Homo sapien
agcagccccaatcatgcacgcggccccccaggt

SEQ ID NO: 451922 - DNA, 33 bp, Homo sapien
agcagccccaatcatgtacgcggccccccaggt

SEQ ID NO: 451923 - DNA, 33 bp, Homo sapien
acctgtccctcttgtacgtacatccacttgtgc

SEQ ID NO: 451924 - DNA, 33 bp, Homo sapien
acctgtccctcttgtatgtacatccacttgtgc

SEQ ID NO: 451925 - DNA, 33 bp, Homo sapien
cagatgaaccaataaacaccatgtggtccatct

SEQ ID NO: 451926 - DNA, 33 bp, Homo sapien
cagatgaaccaataaataccatgtggtccatct

SEQ ID NO: 451927 - DNA, 33 bp, Homo sapien
tctcagtgactgacaacagaggcatagtttaat

SEQ ID NO: 451928 - DNA, 33 bp, Homo sapien
tctcagtgactgacaatagaggcatagtttaat

SEQ ID NO: 451929 - DNA, 33 bp, Homo sapien
tgtattctacaacttcactaaatcacttactgg

SEQ ID NO: 451930 - DNA, 33 bp, Homo sapien
tgtattctacaacttcgctaaatcacttactgg

SEQ ID NO: 451931 - DNA, 33 bp, Homo sapien
attctgtggtcactacagcttttacgcctccca

SEQ ID NO: 451932 - DNA, 33 bp, Homo sapien
attctgtggtcactacggcttttacgcctccca

SEQ ID NO: 451933 - DNA, 33 bp, Homo sapien
tgtgtgagggaaactcaagttcatgttggacat

SEQ ID NO: 451934 - DNA, 33 bp, Homo sapien
tgtgtgagggaaactcgagttcatgttggacat

SEQ ID NO: 451935 - DNA, 33 bp, Homo sapien
cagcttagaatccaaacgtcataaaacagatac

SEQ ID NO: 451936 - DNA, 33 bp, Homo sapien
cagcttagaatccaaatgtcataaaacagatac

SEQ ID NO: 451937 - DNA, 33 bp, Homo sapien
ggagcttttagtctaactaggaagacagatgca

SEQ ID NO: 451938 - DNA, 33 bp, Homo sapien
ggagcttttagtctaagtaggaagacagatgca

SEQ ID NO: 451939 - DNA, 33 bp, Homo sapien
aatagtttgttcacaccggtttcacattaggca

SEQ ID NO: 451940 - DNA, 33 bp, Homo sapien
aatagtttgttcacactggtttcacattaggca

SEQ ID NO: 451941 - DNA, 33 bp, Homo sapien
caactctgccccagaaattaaaagctaggcctt

SEQ ID NO: 451942 - DNA, 33 bp, Homo sapien
caactctgccccagaagttaaaagctaggcctt

SEQ ID NO: 451943 - DNA, 33 bp, Homo sapien
cctggcctcgtaagcaagcctttacttcagaca

SEQ ID NO: 451944 - DNA, 33 bp, Homo sapien
cctggcctcgtaagcacgcctttacttcagaca

SEQ ID NO: 451945 - DNA, 33 bp, Homo sapien
tcctctgttccacaaaaggccaagttcacactc

SEQ ID NO: 451946 - DNA, 33 bp, Homo sapien
tcctctgttccacaaagggccaagttcacactc

SEQ ID NO: 451947 - DNA, 33 bp, Homo sapien
ttgttctttgtttccaatacaacgggccttttt

SEQ ID NO: 451948 - DNA, 33 bp, Homo sapien
ttgttctttgtttccagtacaacgggccttttt

SEQ ID NO: 451949 - DNA, 33 bp, Homo sapien
tttgtggagatgctgacggtagttgaggtgttg

SEQ ID NO: 451950 - DNA, 33 bp, Homo sapien
tttgtggagatgctgatggtagttgaggtgttg

SEQ ID NO: 451951 - DNA, 33 bp, Homo sapien
taaggtttccactaaacgcatattggtttcaga

SEQ ID NO: 451952 - DNA, 33 bp, Homo sapien
taaggtttccactaaatgcatattggtttcaga

SEQ ID NO: 451953 - DNA, 33 bp, Homo sapien
atacagatgctcttccgcttgcaatggggttat

SEQ ID NO: 451954 - DNA, 33 bp, Homo sapien
atacagatgctcttcctcttgcaatggggttat

SEQ ID NO: 451955 - DNA, 33 bp, Homo sapien
gctctggctgatttggaatttaatgatggttag

SEQ ID NO: 451956 - DNA, 33 bp, Homo sapien
gctctggctgatttgggatttaatgatggttag

SEQ ID NO: 451957 - DNA, 33 bp, Homo sapien
agggtgagccatcaaaccctagttaccagcaca

SEQ ID NO: 451958 - DNA, 33 bp, Homo sapien
agggtgagccatcaaatcctagttaccagcaca

SEQ ID NO: 451959 - DNA, 33 bp, Homo sapien
gtctccctgctaaccacgctagtgagtccagat

SEQ ID NO: 451960 - DNA, 33 bp, Homo sapien
gtctccctgctaaccatgctagtgagtccagat

SEQ ID NO: 451961 - DNA, 33 bp, Homo sapien
atggatggttgtaggcagagagaagatatgggc

SEQ ID NO: 451962 - DNA, 33 bp, Homo sapien
atggatggttgtaggcggagagaagatatgggc

SEQ ID NO: 451963 - DNA, 33 bp, Homo sapien
tgagttacttccatcaaggtgtacaggtactta

SEQ ID NO: 451964 - DNA, 33 bp, Homo sapien
tgagttacttccatcagggtgtacaggtactta

SEQ ID NO: 451965 - DNA, 33 bp, Homo sapien
caacacatgaattctgaaaagacacaaactttc

SEQ ID NO: 451966 - DNA, 33 bp, Homo sapien
caacacatgaattctggaaagacacaaactttc

SEQ ID NO: 451967 - DNA, 33 bp, Homo sapien
tgcatagaacaccgtgaaaggtctgtagtaggc

SEQ ID NO: 451968 - DNA, 33 bp, Homo sapien
tgcatagaacaccgtgcaaggtctgtagtaggc

SEQ ID NO: 451969 - DNA, 33 bp, Homo sapien
ttcagagcgacaaccaatacaccatatgccctt

SEQ ID NO: 451970 - DNA, 33 bp, Homo sapien
ttcagagcgacaaccagtacaccatatgccctt

SEQ ID NO: 451971 - DNA, 33 bp, Homo sapien
gctcggtggaaaatgaagatttgtggtttattt

SEQ ID NO: 451972 - DNA, 33 bp, Homo sapien
gctcggtggaaaatgatgatttgtggtttattt

SEQ ID NO: 451973 - DNA, 33 bp, Homo sapien
agaggcacaattcaccaagcagaggaagaaata

SEQ ID NO: 451974 - DNA, 33 bp, Homo sapien
agaggcacaattcacctagcagaggaagaaata

SEQ ID NO: 451975 - DNA, 33 bp, Homo sapien
gtaggtttgcatgtataagataacgccccaggg

SEQ ID NO: 451976 - DNA, 33 bp, Homo sapien
gtaggtttgcatgtatgagataacgccccaggg

SEQ ID NO: 451977 - DNA, 33 bp, Homo sapien
catgtgtgaatgctccagaaaaaaacatcaaat

SEQ ID NO: 451978 - DNA, 33 bp, Homo sapien
catgtgtgaatgctccggaaaaaaacatcaaat

SEQ ID NO: 451979 - DNA, 33 bp, Homo sapien
atctgtcatccaaaagactagtggaaagcatca

SEQ ID NO: 451980 - DNA, 33 bp, Homo sapien
atctgtcatccaaaaggctagtggaaagcatca

SEQ ID NO: 451981 - DNA, 33 bp, Homo sapien
ttgtgagatttatctacgttattaaatgtacta

SEQ ID NO: 451982 - DNA, 33 bp, Homo sapien
ttgtgagatttatctatgttattaaatgtacta

SEQ ID NO: 451983 - DNA, 33 bp, Homo sapien
gttctcaaaattcacacaaaatcaaatcttaca

SEQ ID NO: 451984 - DNA, 33 bp, Homo sapien
gttctcaaaattcacataaaatcaaatcttaca

SEQ ID NO: 451985 - DNA, 33 bp, Homo sapien
taacggccagctctccggagagaaaattcctga

SEQ ID NO: 451986 - DNA, 33 bp, Homo sapien
taacggccagctctcctgagagaaaattcctga

SEQ ID NO: 451987 - DNA, 33 bp, Homo sapien
agctggcctctcctcacgtgctcctgtgaatgc

SEQ ID NO: 451988 - DNA, 33 bp, Homo sapien
agctggcctctcctcatgtgctcctgtgaatgc

SEQ ID NO: 451989 - DNA, 33 bp, Homo sapien
gcagttttctgatataccaggtcctgagcctcc

SEQ ID NO: 451990 - DNA, 33 bp, Homo sapien
gcagttttctgatatagcaggtcctgagcctcc

SEQ ID NO: 451991 - DNA, 33 bp, Homo sapien
agtcctggcatcactccatggcatgatccaatt

SEQ ID NO: 451992 - DNA, 33 bp, Homo sapien
agtcctggcatcactctatggcatgatccaatt

SEQ ID NO: 451993 - DNA, 33 bp, Homo sapien
ttttccgttaccaatcgagtggtcctagaggaa

SEQ ID NO: 451994 - DNA, 33 bp, Homo sapien
ttttccgttaccaatctagtggtcctagaggaa

SEQ ID NO: 451995 - DNA, 33 bp, Homo sapien
aacactagaaaaatccaaatcaaggaccattca

SEQ ID NO: 451996 - DNA, 33 bp, Homo sapien
aacactagaaaaatccgaatcaaggaccattca

SEQ ID NO: 451997 - DNA, 33 bp, Homo sapien
ttgccaggaatccaggacaagaaaatgagaagg

SEQ ID NO: 451998 - DNA, 33 bp, Homo sapien
ttgccaggaatccaggccaagaaaatgagaagg

SEQ ID NO: 451999 - DNA, 33 bp, Homo sapien
aatttttccttagggagcggccactgttcgacc

SEQ ID NO: 452000 - DNA, 33 bp, Homo sapien
aatttttccttagggatcggccactgttcgacc

SEQ ID NO: 452001 - DNA, 33 bp, Homo sapien
agacttttaagctctgaaggtaagcggggcgct

SEQ ID NO: 452002 - DNA, 33 bp, Homo sapien
agacttttaagctctgcaggtaagcggggcgct

SEQ ID NO: 452003 - DNA, 33 bp, Homo sapien
accagccagttagagccaggagactgcaagctg

SEQ ID NO: 452004 - DNA, 33 bp, Homo sapien
accagccagttagagcgaggagactgcaagctg

SEQ ID NO: 452005 - DNA, 33 bp, Homo sapien
ccatgtctttgctagacagccctttttctttta

SEQ ID NO: 452006 - DNA, 33 bp, Homo sapien
ccatgtctttgctagatagccctttttctttta

SEQ ID NO: 452007 - DNA, 33 bp, Homo sapien
tgcttctgtcaggaaaacattgaatttgaagag

SEQ ID NO: 452008 - DNA, 33 bp, Homo sapien
tgcttctgtcaggaaagcattgaatttgaagag

SEQ ID NO: 452009 - DNA, 33 bp, Homo sapien
gacaattaacagtcgaaagtaattgctcttggc

SEQ ID NO: 452010 - DNA, 33 bp, Homo sapien
gacaattaacagtcgagagtaattgctcttggc

SEQ ID NO: 452011 - DNA, 33 bp, Homo sapien
cttggctgtctcagtacacaagcagtgtcatgt

SEQ ID NO: 452012 - DNA, 33 bp, Homo sapien
cttggctgtctcagtatacaagcagtgtcatgt

SEQ ID NO: 452013 - DNA, 33 bp, Homo sapien
ctcttgggtccgagcaatactcaagcctcagcc

SEQ ID NO: 452014 - DNA, 33 bp, Homo sapien
ctcttgggtccgagcagtactcaagcctcagcc

SEQ ID NO: 452015 - DNA, 33 bp, Homo sapien
cagaaaccgtgcggacaagcgaggtgctacgga

SEQ ID NO: 452016 - DNA, 33 bp, Homo sapien
cagaaaccgtgcggacgagcgaggtgctacgga

SEQ ID NO: 452017 - DNA, 33 bp, Homo sapien
tcacattggtgacggcaccaaacggcccaaaca

SEQ ID NO: 452018 - DNA, 33 bp, Homo sapien
tcacattggtgacggcgccaaacggcccaaaca

SEQ ID NO: 452019 - DNA, 33 bp, Homo sapien
taaccagcagggaagaatccactccctgagcct

SEQ ID NO: 452020 - DNA, 33 bp, Homo sapien
taaccagcagggaagagtccactccctgagcct

SEQ ID NO: 452021 - DNA, 33 bp, Homo sapien
gtcaggtcatgatcaacgcagtcaagaactaaa

SEQ ID NO: 452022 - DNA, 33 bp, Homo sapien
gtcaggtcatgatcaatgcagtcaagaactaaa

SEQ ID NO: 452023 - DNA, 33 bp, Homo sapien
tctccacctccctaacaaagctctctatggtat

SEQ ID NO: 452024 - DNA, 33 bp, Homo sapien
tctccacctccctaacgaagctctctatggtat

SEQ ID NO: 452025 - DNA, 33 bp, Homo sapien
ttgttttggccaatggaacctgcatggaagtga

SEQ ID NO: 452026 - DNA, 33 bp, Homo sapien
ttgttttggccaatgggacctgcatggaagtga

SEQ ID NO: 452027 - DNA, 33 bp, Homo sapien
ctacgaaaagacatgaagttggctgagggccaa

SEQ ID NO: 452028 - DNA, 33 bp, Homo sapien
ctacgaaaagacatgaggttggctgagggccaa

SEQ ID NO: 452029 - DNA, 33 bp, Homo sapien
aagggatctgaaagccaaaaatgtattaaacac

SEQ ID NO: 452030 - DNA, 33 bp, Homo sapien
aagggatctgaaagccgaaaatgtattaaacac

SEQ ID NO: 452031 - DNA, 33 bp, Homo sapien
atgctgcaaatgcccacgcacacaaatgcctct

SEQ ID NO: 452032 - DNA, 33 bp, Homo sapien
atgctgcaaatgcccatgcacacaaatgcctct

SEQ ID NO: 452033 - DNA, 33 bp, Homo sapien
tgggctggtatttggagattaggtctttgggag

SEQ ID NO: 452034 - DNA, 33 bp, Homo sapien
tgggctggtatttggatattaggtctttgggag

SEQ ID NO: 452035 - DNA, 33 bp, Homo sapien
agcctaacattgcaaactggaaagtctcaggga

SEQ ID NO: 452036 - DNA, 33 bp, Homo sapien
agcctaacattgcaaagtggaaagtctcaggga

SEQ ID NO: 452037 - DNA, 33 bp, Homo sapien
tgccggtctctgtccaacagcagtgaggctgtc

SEQ ID NO: 452038 - DNA, 33 bp, Homo sapien
tgccggtctctgtccagcagcagtgaggctgtc

SEQ ID NO: 452039 - DNA, 33 bp, Homo sapien
gctctggacacctatcaagtcctcaccagcagg

SEQ ID NO: 452040 - DNA, 33 bp, Homo sapien
gctctggacacctatcgagtcctcaccagcagg

SEQ ID NO: 452041 - DNA, 33 bp, Homo sapien
ctattctgatctattccatttgggctagcttag

SEQ ID NO: 452042 - DNA, 33 bp, Homo sapien
ctattctgatctattctatttgggctagcttag

SEQ ID NO: 452043 - DNA, 33 bp, Homo sapien
tctgcacccccaggacagaatgagtgtcgggag

SEQ ID NO: 452044 - DNA, 33 bp, Homo sapien
tctgcacccccaggacggaatgagtgtcgggag

SEQ ID NO: 452045 - DNA, 33 bp, Homo sapien
ggtgagagctcaggtccatgcagacagcctgac

SEQ ID NO: 452046 - DNA, 33 bp, Homo sapien
ggtgagagctcaggtcgatgcagacagcctgac

SEQ ID NO: 452047 - DNA, 33 bp, Homo sapien
tcagttaaggagttcccatctctttggctccct

SEQ ID NO: 452048 - DNA, 33 bp, Homo sapien
tcagttaaggagttcctatctctttggctccct

SEQ ID NO: 452049 - DNA, 33 bp, Homo sapien
cttggacattcacacacgcatacacctgaatag

SEQ ID NO: 452050 - DNA, 33 bp, Homo sapien
cttggacattcacacatgcatacacctgaatag

SEQ ID NO: 452051 - DNA, 33 bp, Homo sapien
tgatcaagtgactataaacacagagaatttaca

SEQ ID NO: 452052 - DNA, 33 bp, Homo sapien
tgatcaagtgactatatacacagagaatttaca

SEQ ID NO: 452053 - DNA, 33 bp, Homo sapien
aaagaaaataagtaaaatgattctccgcctggt

SEQ ID NO: 452054 - DNA, 33 bp, Homo sapien
aaagaaaataagtaaactgattctccgcctggt

SEQ ID NO: 452055 - DNA, 33 bp, Homo sapien
accaggtcttccacaaagtggcacataggcatg

SEQ ID NO: 452056 - DNA, 33 bp, Homo sapien
accaggtcttccacaaggtggcacataggcatg

SEQ ID NO: 452057 - DNA, 33 bp, Homo sapien
aggtgctggtctcttgcaagttggtcaggaaat

SEQ ID NO: 452058 - DNA, 33 bp, Homo sapien
aggtgctggtctcttggaagttggtcaggaaat

SEQ ID NO: 452059 - DNA, 33 bp, Homo sapien
cagggtgtcacatggaaaggtgacaatgagaca

SEQ ID NO: 452060 - DNA, 33 bp, Homo sapien
cagggtgtcacatggacaggtgacaatgagaca

SEQ ID NO: 452061 - DNA, 33 bp, Homo sapien
gtgcattgggcagggaacacattgattgcatag

SEQ ID NO: 452062 - DNA, 33 bp, Homo sapien
gtgcattgggcagggagcacattgattgcatag

SEQ ID NO: 452063 - DNA, 33 bp, Homo sapien
attgcacgctgagcccaagtgtggtggcttgtg

SEQ ID NO: 452064 - DNA, 33 bp, Homo sapien
attgcacgctgagcccgagtgtggtggcttgtg

SEQ ID NO: 452065 - DNA, 33 bp, Homo sapien
cgccactccattatcacgcaagctcagttatgc

SEQ ID NO: 452066 - DNA, 33 bp, Homo sapien
cgccactccattatcaggcaagctcagttatgc

SEQ ID NO: 452067 - DNA, 33 bp, Homo sapien
aacttgagtcctcaaacgtccaggaaggtttct

SEQ ID NO: 452068 - DNA, 33 bp, Homo sapien
aacttgagtcctcaaatgtccaggaaggtttct

SEQ ID NO: 452069 - DNA, 33 bp, Homo sapien
aagggcagcctgattaacagtgagaggtagaaa

SEQ ID NO: 452070 - DNA, 33 bp, Homo sapien
aagggcagcctgattagcagtgagaggtagaaa

SEQ ID NO: 452071 - DNA, 33 bp, Homo sapien
gtgtctcatgaagcaaagattataattattcca

SEQ ID NO: 452072 - DNA, 33 bp, Homo sapien
gtgtctcatgaagcaaggattataattattcca

SEQ ID NO: 452073 - DNA, 33 bp, Homo sapien
agtattaagccgttgacctctccaagaaataat

SEQ ID NO: 452074 - DNA, 33 bp, Homo sapien
agtattaagccgttgatctctccaagaaataat

SEQ ID NO: 452075 - DNA, 33 bp, Homo sapien
ggctcctctcaaaaagcagtttggtccctggtt

SEQ ID NO: 452076 - DNA, 33 bp, Homo sapien
ggctcctctcaaaaagtagtttggtccctggtt

SEQ ID NO: 452077 - DNA, 33 bp, Homo sapien
attctcatttcatcacagggttctgatggttcc

SEQ ID NO: 452078 - DNA, 33 bp, Homo sapien
attctcatttcatcacggggttctgatggttcc

SEQ ID NO: 452079 - DNA, 33 bp, Homo sapien
ggggtcttacattgtccaggatggcagggtcac

SEQ ID NO: 452080 - DNA, 33 bp, Homo sapien
ggggtcttacattgtctaggatggcagggtcac

SEQ ID NO: 452081 - DNA, 33 bp, Homo sapien
tacttgcttgctgtcacatacactaacgcccct

SEQ ID NO: 452082 - DNA, 33 bp, Homo sapien
tacttgcttgctgtcatatacactaacgcccct

SEQ ID NO: 452083 - DNA, 33 bp, Homo sapien
ttccttttcagtaagaatcatctcagtgtggca

SEQ ID NO: 452084 - DNA, 33 bp, Homo sapien
ttccttttcagtaagagtcatctcagtgtggca

SEQ ID NO: 452085 - DNA, 33 bp, Homo sapien
caggcattttcaccacacatggccaattatgag

SEQ ID NO: 452086 - DNA, 33 bp, Homo sapien
caggcattttcaccacgcatggccaattatgag

SEQ ID NO: 452087 - DNA, 33 bp, Homo sapien
caggatgcaggctgggaatgaaaacttcattgt

SEQ ID NO: 452088 - DNA, 33 bp, Homo sapien
caggatgcaggctggggatgaaaacttcattgt

SEQ ID NO: 452089 - DNA, 33 bp, Homo sapien
tgcttggcctggcgtgaaagacctaagacaacg

SEQ ID NO: 452090 - DNA, 33 bp, Homo sapien
tgcttggcctggcgtgcaagacctaagacaacg

SEQ ID NO: 452091 - DNA, 33 bp, Homo sapien
cagaaaccacaacaaccgtgacagctgcctact

SEQ ID NO: 452092 - DNA, 33 bp, Homo sapien
cagaaaccacaacaactgtgacagctgcctact

SEQ ID NO: 452093 - DNA, 33 bp, Homo sapien
ctccggtgtcagtttaaggtggagacatctggc

SEQ ID NO: 452094 - DNA, 33 bp, Homo sapien
ctccggtgtcagtttagggtggagacatctggc

SEQ ID NO: 452095 - DNA, 33 bp, Homo sapien
ggcatgagtcaccccacctcgtctctctcttcc

SEQ ID NO: 452096 - DNA, 33 bp, Homo sapien
ggcatgagtcaccccatctcgtctctctcttcc

SEQ ID NO: 452097 - DNA, 33 bp, Homo sapien
tcttctctagtccatgaatatgtatacgtacat

SEQ ID NO: 452098 - DNA, 33 bp, Homo sapien
tcttctctagtccatgtatatgtatacgtacat

SEQ ID NO: 452099 - DNA, 33 bp, Homo sapien
cttgtctactccaaaagaaagtccttcaccaaa

SEQ ID NO: 452100 - DNA, 33 bp, Homo sapien
cttgtctactccaaaataaagtccttcaccaaa

SEQ ID NO: 452101 - DNA, 33 bp, Homo sapien
tctttaactgaagagccgatctttattctggga

SEQ ID NO: 452102 - DNA, 33 bp, Homo sapien
tctttaactgaagagctgatctttattctggga

SEQ ID NO: 452103 - DNA, 33 bp, Homo sapien
tgttgccgaaattcaaatcccagttgcatggga

SEQ ID NO: 452104 - DNA, 33 bp, Homo sapien
tgttgccgaaattcaagtcccagttgcatggga

SEQ ID NO: 452105 - DNA, 33 bp, Homo sapien
gaaatgtcaggtaagacaggtgcgatgtaatga

SEQ ID NO: 452106 - DNA, 33 bp, Homo sapien
gaaatgtcaggtaagataggtgcgatgtaatga

SEQ ID NO: 452107 - DNA, 33 bp, Homo sapien
ttgctctgccacctaaccaaaactgaaaaaata

SEQ ID NO: 452108 - DNA, 33 bp, Homo sapien
ttgctctgccacctaatcaaaactgaaaaaata

SEQ ID NO: 452109 - DNA, 33 bp, Homo sapien
cccagtgatgactgccagaaacattttgttctg

SEQ ID NO: 452110 - DNA, 33 bp, Homo sapien
cccagtgatgactgccggaaacattttgttctg

SEQ ID NO: 452111 - DNA, 33 bp, Homo sapien
tggcttctaggtggcaaggctaaataaatacat

SEQ ID NO: 452112 - DNA, 33 bp, Homo sapien
tggcttctaggtggcagggctaaataaatacat

SEQ ID NO: 452113 - DNA, 33 bp, Homo sapien
gttcaaaaaagaaggcacagtgtaaagccagct

SEQ ID NO: 452114 - DNA, 33 bp, Homo sapien
gttcaaaaaagaaggcgcagtgtaaagccagct

SEQ ID NO: 452115 - DNA, 33 bp, Homo sapien
aagtcagagtttcttggaggttctgttttttgt

SEQ ID NO: 452116 - DNA, 33 bp, Homo sapien
aagtcagagtttcttgtaggttctgttttttgt

SEQ ID NO: 452117 - DNA, 33 bp, Homo sapien
tcacagtccctgaaacaatagaagcgagacgta

SEQ ID NO: 452118 - DNA, 33 bp, Homo sapien
tcacagtccctgaaacgatagaagcgagacgta

SEQ ID NO: 452119 - DNA, 33 bp, Homo sapien
cctagaactcaacgaacacctcttgaatggcag

SEQ ID NO: 452120 - DNA, 33 bp, Homo sapien
cctagaactcaacgaatacctcttgaatggcag

SEQ ID NO: 452121 - DNA, 33 bp, Homo sapien
gaggtccagtcatttgaaggaagataaaaattt

SEQ ID NO: 452122 - DNA, 33 bp, Homo sapien
gaggtccagtcatttggaggaagataaaaattt

SEQ ID NO: 452123 - DNA, 33 bp, Homo sapien
tcttacactgttactcgacactatccacgaggt

SEQ ID NO: 452124 - DNA, 33 bp, Homo sapien
tcttacactgttactctacactatccacgaggt

SEQ ID NO: 452125 - DNA, 33 bp, Homo sapien
atgctgtggacaaccgaaatgcaactgcactgg

SEQ ID NO: 452126 - DNA, 33 bp, Homo sapien
atgctgtggacaaccggaatgcaactgcactgg

SEQ ID NO: 452127 - DNA, 33 bp, Homo sapien
gcacccacacaaagaacgagtcccagaactatt

SEQ ID NO: 452128 - DNA, 33 bp, Homo sapien
gcacccacacaaagaatgagtcccagaactatt

SEQ ID NO: 452129 - DNA, 33 bp, Homo sapien
cagtggtgtaatcataactaactgtagccttga

SEQ ID NO: 452130 - DNA, 33 bp, Homo sapien
cagtggtgtaatcatagctaactgtagccttga

SEQ ID NO: 452131 - DNA, 33 bp, Homo sapien
tcctgtcctcctaagcaatgagaggccagcagg

SEQ ID NO: 452132 - DNA, 33 bp, Homo sapien
tcctgtcctcctaagcgatgagaggccagcagg

SEQ ID NO: 452133 - DNA, 33 bp, Homo sapien
aggattcaatgaaacaatatttctgaagtcctt

SEQ ID NO: 452134 - DNA, 33 bp, Homo sapien
aggattcaatgaaacagtatttctgaagtcctt

SEQ ID NO: 452135 - DNA, 33 bp, Homo sapien
cacctggccatgctaaccgctcaagcaaaggcc

SEQ ID NO: 452136 - DNA, 33 bp, Homo sapien
cacctggccatgctaagcgctcaagcaaaggcc

SEQ ID NO: 452137 - DNA, 33 bp, Homo sapien
gtgcgtttgtctctgaccgtgatgagtgtgtaa

SEQ ID NO: 452138 - DNA, 33 bp, Homo sapien
gtgcgtttgtctctgagcgtgatgagtgtgtaa

SEQ ID NO: 452139 - DNA, 33 bp, Homo sapien
atcagaaaaagtaatgcaggagccaggaactgt

SEQ ID NO: 452140 - DNA, 33 bp, Homo sapien
atcagaaaaagtaatgtaggagccaggaactgt

SEQ ID NO: 452141 - DNA, 33 bp, Homo sapien
gaccaactctgaagccaaaagacatctggacca

SEQ ID NO: 452142 - DNA, 33 bp, Homo sapien
gaccaactctgaagccgaaagacatctggacca

SEQ ID NO: 452143 - DNA, 33 bp, Homo sapien
tgaatgaatggataaacggatagatggtgagtt

SEQ ID NO: 452144 - DNA, 33 bp, Homo sapien
tgaatgaatggataaatggatagatggtgagtt

SEQ ID NO: 452145 - DNA, 33 bp, Homo sapien
ctgcctcttaaggccacgttccctggatgctgg

SEQ ID NO: 452146 - DNA, 33 bp, Homo sapien
ctgcctcttaaggccatgttccctggatgctgg

SEQ ID NO: 452147 - DNA, 33 bp, Homo sapien
catctcctaccctcaaaagaattgacatggcct

SEQ ID NO: 452148 - DNA, 33 bp, Homo sapien
catctcctaccctcaacagaattgacatggcct

SEQ ID NO: 452149 - DNA, 33 bp, Homo sapien
ttctcagtgtcagtacaagtccagatgagcccc

SEQ ID NO: 452150 - DNA, 33 bp, Homo sapien
ttctcagtgtcagtaccagtccagatgagcccc

SEQ ID NO: 452151 - DNA, 33 bp, Homo sapien
cttgccctgcaaataccatgactcctgagggtc

SEQ ID NO: 452152 - DNA, 33 bp, Homo sapien
cttgccctgcaaatactatgactcctgagggtc

SEQ ID NO: 452153 - DNA, 33 bp, Homo sapien
acttccacacaccaaccgagaatgctgctttgg

SEQ ID NO: 452154 - DNA, 33 bp, Homo sapien
acttccacacaccaactgagaatgctgctttgg

SEQ ID NO: 452155 - DNA, 33 bp, Homo sapien
aatttcccccaatcaaacaatctttacctacag

SEQ ID NO: 452156 - DNA, 33 bp, Homo sapien
aatttcccccaatcaatcaatctttacctacag

SEQ ID NO: 452157 - DNA, 33 bp, Homo sapien
ggtgaatcctggattacaatcttcttttcctgc

SEQ ID NO: 452158 - DNA, 33 bp, Homo sapien
ggtgaatcctggattagaatcttcttttcctgc

SEQ ID NO: 452159 - DNA, 33 bp, Homo sapien
tacttatgagacgccaagtatgtctgctgatga

SEQ ID NO: 452160 - DNA, 33 bp, Homo sapien
tacttatgagacgccaggtatgtctgctgatga

SEQ ID NO: 452161 - DNA, 33 bp, Homo sapien
agctctcctgtgcagacacctgtgcctacgaga

SEQ ID NO: 452162 - DNA, 33 bp, Homo sapien
agctctcctgtgcagatacctgtgcctacgaga

SEQ ID NO: 452163 - DNA, 33 bp, Homo sapien
ccaccactcccagaccaagatattcatacagta

SEQ ID NO: 452164 - DNA, 33 bp, Homo sapien
ccaccactcccagaccgagatattcatacagta

SEQ ID NO: 452165 - DNA, 33 bp, Homo sapien
gagttcaaacaaattacggaattatgggtaaca

SEQ ID NO: 452166 - DNA, 33 bp, Homo sapien
gagttcaaacaaattatggaattatgggtaaca

SEQ ID NO: 452167 - DNA, 33 bp, Homo sapien
ggcaagtcgtgtcaatcatctgaagtcgggggt

SEQ ID NO: 452168 - DNA, 33 bp, Homo sapien
ggcaagtcgtgtcaattatctgaagtcgggggt

SEQ ID NO: 452169 - DNA, 33 bp, Homo sapien
ctattgctgtctgcaaactacttcaaaatgcaa

SEQ ID NO: 452170 - DNA, 33 bp, Homo sapien
ctattgctgtctgcaacctacttcaaaatgcaa

SEQ ID NO: 452171 - DNA, 33 bp, Homo sapien
aagaaatctgaacatacgtactgtacttggaaa

SEQ ID NO: 452172 - DNA, 33 bp, Homo sapien
aagaaatctgaacatatgtactgtacttggaaa

SEQ ID NO: 452173 - DNA, 33 bp, Homo sapien
gggaaagaaaccaacagtatttggcataccaag

SEQ ID NO: 452174 - DNA, 33 bp, Homo sapien
gggaaagaaaccaacattatttggcataccaag

SEQ ID NO: 452175 - DNA, 33 bp, Homo sapien
gtgaacacttttgctgcagggtattccgcattt

SEQ ID NO: 452176 - DNA, 33 bp, Homo sapien
gtgaacacttttgctgtagggtattccgcattt

SEQ ID NO: 452177 - DNA, 33 bp, Homo sapien
tcctcctgaggataggccataaaagccattttg

SEQ ID NO: 452178 - DNA, 33 bp, Homo sapien
tcctcctgaggataggtcataaaagccattttg

SEQ ID NO: 452179 - DNA, 33 bp, Homo sapien
ccaagcaattaataaacgccacggaaatcagtc

SEQ ID NO: 452180 - DNA, 33 bp, Homo sapien
ccaagcaattaataaatgccacggaaatcagtc

SEQ ID NO: 452181 - DNA, 33 bp, Homo sapien
ttggctttcccttaaaactctcaggagcacatg

SEQ ID NO: 452182 - DNA, 33 bp, Homo sapien
ttggctttcccttaaacctctcaggagcacatg

SEQ ID NO: 452183 - DNA, 33 bp, Homo sapien
tgtttttatcagattcacagaaagaactaaagg

SEQ ID NO: 452184 - DNA, 33 bp, Homo sapien
tgtttttatcagattcccagaaagaactaaagg

SEQ ID NO: 452185 - DNA, 33 bp, Homo sapien
tgaagctcagccttcacgtcccgcttatctggg

SEQ ID NO: 452186 - DNA, 33 bp, Homo sapien
tgaagctcagccttcatgtcccgcttatctggg

SEQ ID NO: 452187 - DNA, 33 bp, Homo sapien
attcttcagttaggcaaaataagagaataaaag

SEQ ID NO: 452188 - DNA, 33 bp, Homo sapien
attcttcagttaggcataataagagaataaaag

SEQ ID NO: 452189 - DNA, 33 bp, Homo sapien
tctctcctctgattcccagcactcttggattct

SEQ ID NO: 452190 - DNA, 33 bp, Homo sapien
tctctcctctgattcctagcactcttggattct

SEQ ID NO: 452191 - DNA, 33 bp, Homo sapien
ggtggcatattatccacctcacgggtcctctac

SEQ ID NO: 452192 - DNA, 33 bp, Homo sapien
ggtggcatattatccatctcacgggtcctctac

SEQ ID NO: 452193 - DNA, 33 bp, Homo sapien
attccttctgcaaataggacttgagtgtttatt

SEQ ID NO: 452194 - DNA, 33 bp, Homo sapien
attccttctgcaaatatgacttgagtgtttatt

SEQ ID NO: 452195 - DNA, 33 bp, Homo sapien
aagtaaatagtaaataccaagagagtgcaaact

SEQ ID NO: 452196 - DNA, 33 bp, Homo sapien
aagtaaatagtaaatagcaagagagtgcaaact

SEQ ID NO: 452197 - DNA, 33 bp, Homo sapien
ccaggcctgagaaggacggagtagccaccagag

SEQ ID NO: 452198 - DNA, 33 bp, Homo sapien
ccaggcctgagaaggatggagtagccaccagag

SEQ ID NO: 452199 - DNA, 33 bp, Homo sapien
atgctgaccgtggtaccgatgatattgatgttg

SEQ ID NO: 452200 - DNA, 33 bp, Homo sapien
atgctgaccgtggtactgatgatattgatgttg

SEQ ID NO: 452201 - DNA, 33 bp, Homo sapien
catcatgaaccacaaacatcatcatcaccatca

SEQ ID NO: 452202 - DNA, 33 bp, Homo sapien
catcatgaaccacaaatatcatcatcaccatca

SEQ ID NO: 452203 - DNA, 33 bp, Homo sapien
acaggatcaaggtggaagaggaaacatttcata

SEQ ID NO: 452204 - DNA, 33 bp, Homo sapien
acaggatcaaggtggaggaggaaacatttcata

SEQ ID NO: 452205 - DNA, 33 bp, Homo sapien
atgttcttgtgaggttcaaaaagacagtgcatg

SEQ ID NO: 452206 - DNA, 33 bp, Homo sapien
atgttcttgtgaggtttaaaaagacagtgcatg

SEQ ID NO: 452207 - DNA, 33 bp, Homo sapien
atgtcctctaatagaacacacatccctgactct

SEQ ID NO: 452208 - DNA, 33 bp, Homo sapien
atgtcctctaatagaatacacatccctgactct

SEQ ID NO: 452209 - DNA, 33 bp, Homo sapien
tagtgctactactgaaatctccatgacagaaat

SEQ ID NO: 452210 - DNA, 33 bp, Homo sapien
tagtgctactactgaagtctccatgacagaaat

SEQ ID NO: 452211 - DNA, 33 bp, Homo sapien
agacagaggcaattcacgtttttgaaaatacag

SEQ ID NO: 452212 - DNA, 33 bp, Homo sapien
agacagaggcaattcaggtttttgaaaatacag

SEQ ID NO: 452213 - DNA, 33 bp, Homo sapien
actcagagatttccacagtcagtggtgacaact

SEQ ID NO: 452214 - DNA, 33 bp, Homo sapien
actcagagatttccacggtcagtggtgacaact

SEQ ID NO: 452215 - DNA, 33 bp, Homo sapien
gctgaaatactggccaccactgaagtcactaca

SEQ ID NO: 452216 - DNA, 33 bp, Homo sapien
gctgaaatactggccatcactgaagtcactaca

SEQ ID NO: 452217 - DNA, 33 bp, Homo sapien
tcacccggagaggagacgagtggctactctcag

SEQ ID NO: 452218 - DNA, 33 bp, Homo sapien
tcacccggagaggagatgagtggctactctcag

SEQ ID NO: 452219 - DNA, 33 bp, Homo sapien
ctttggtgacttcagacgtggctaatatttcag

SEQ ID NO: 452220 - DNA, 33 bp, Homo sapien
ctttggtgacttcagaggtggctaatatttcag

SEQ ID NO: 452221 - DNA, 33 bp, Homo sapien
ggatgggggaagtaggaaacttaatgatttttc

SEQ ID NO: 452222 - DNA, 33 bp, Homo sapien
ggatgggggaagtagggaacttaatgatttttc

SEQ ID NO: 452223 - DNA, 33 bp, Homo sapien
tcagtagtagcaccaacggacacttcagaaagg

SEQ ID NO: 452224 - DNA, 33 bp, Homo sapien
tcagtagtagcaccaatggacacttcagaaagg

SEQ ID NO: 452225 - DNA, 33 bp, Homo sapien
tgttgatctcctcagacgtcctggtgtccctta

SEQ ID NO: 452226 - DNA, 33 bp, Homo sapien
tgttgatctcctcagaggtcctggtgtccctta

SEQ ID NO: 452227 - DNA, 33 bp, Homo sapien
tccagtacaggggtcaactcttctagcaaaatt

SEQ ID NO: 452228 - DNA, 33 bp, Homo sapien
tccagtacaggggtcatctcttctagcaaaatt

SEQ ID NO: 452229 - DNA, 33 bp, Homo sapien
aggagtccagctttcccacggacacaagttttc

SEQ ID NO: 452230 - DNA, 33 bp, Homo sapien
aggagtccagctttccgacggacacaagttttc

SEQ ID NO: 452231 - DNA, 33 bp, Homo sapien
tgtttgtagtctcagaagaaccatgcactggca

SEQ ID NO: 452232 - DNA, 33 bp, Homo sapien
tgtttgtagtctcagaggaaccatgcactggca

SEQ ID NO: 452233 - DNA, 33 bp, Homo sapien
cctcacctgcaatgacaacaccttccctgattt

SEQ ID NO: 452234 - DNA, 33 bp, Homo sapien
cctcacctgcaatgaccacaccttccctgattt

SEQ ID NO: 452235 - DNA, 33 bp, Homo sapien
acagatatagagacaacgcatccttccataaac

SEQ ID NO: 452236 - DNA, 33 bp, Homo sapien
acagatatagagacaatgcatccttccataaac

SEQ ID NO: 452237 - DNA, 33 bp, Homo sapien
ttccctggtacctatcaatgctacaacctcgcc

SEQ ID NO: 452238 - DNA, 33 bp, Homo sapien
ttccctggtacctatccatgctacaacctcgcc

SEQ ID NO: 452239 - DNA, 33 bp, Homo sapien
ctgtgatgtatcctcaagacctttgctaaagag

SEQ ID NO: 452240 - DNA, 33 bp, Homo sapien
ctgtgatgtatcctcaggacctttgctaaagag

SEQ ID NO: 452241 - DNA, 33 bp, Homo sapien
gtaggagctgtggttacgtccaggatgctcact

SEQ ID NO: 452242 - DNA, 33 bp, Homo sapien
gtaggagctgtggttatgtccaggatgctcact

SEQ ID NO: 452243 - DNA, 33 bp, Homo sapien
aatgtaagtgcagtgaaaagtgacattgcccct

SEQ ID NO: 452244 - DNA, 33 bp, Homo sapien
aatgtaagtgcagtgacaagtgacattgcccct

SEQ ID NO: 452245 - DNA, 33 bp, Homo sapien
gggcttgagactctgagggccaatgtaagtgca

SEQ ID NO: 452246 - DNA, 33 bp, Homo sapien
gggcttgagactctgatggccaatgtaagtgca

SEQ ID NO: 452247 - DNA, 33 bp, Homo sapien
gagatgtgacagatgacgcagagcttgtttttc

SEQ ID NO: 452248 - DNA, 33 bp, Homo sapien
gagatgtgacagatgatgcagagcttgtttttc

SEQ ID NO: 452249 - DNA, 33 bp, Homo sapien
gaacaacagacaagtcaatctgtggatgaggct

SEQ ID NO: 452250 - DNA, 33 bp, Homo sapien
gaacaacagacaagtcgatctgtggatgaggct

SEQ ID NO: 452251 - DNA, 33 bp, Homo sapien
gaatggctgtggtgctgacccatgtctcggttt

SEQ ID NO: 452252 - DNA, 33 bp, Homo sapien
gaatggctgtggtgcttacccatgtctcggttt

SEQ ID NO: 452253 - DNA, 33 bp, Homo sapien
cattccagttgtctttaaaaccagttctggact

SEQ ID NO: 452254 - DNA, 33 bp, Homo sapien
cattccagttgtctttgaaaccagttctggact

SEQ ID NO: 452255 - DNA, 33 bp, Homo sapien
tgtgcccagcctagacagcattttttttttgaa

SEQ ID NO: 452256 - DNA, 33 bp, Homo sapien
tgtgcccagcctagaccgcattttttttttgaa

SEQ ID NO: 452257 - DNA, 33 bp, Homo sapien
gttccctcttcttctgaaatggtctggcttgag

SEQ ID NO: 452258 - DNA, 33 bp, Homo sapien
gttccctcttcttctgcaatggtctggcttgag

SEQ ID NO: 452259 - DNA, 33 bp, Homo sapien
ccacagtctaccttgacatttgagttttctgag

SEQ ID NO: 452260 - DNA, 33 bp, Homo sapien
ccacagtctaccttgatatttgagttttctgag

SEQ ID NO: 452261 - DNA, 33 bp, Homo sapien
ctggttcaatagttgacgctagaagtgagtgtg

SEQ ID NO: 452262 - DNA, 33 bp, Homo sapien
ctggttcaatagttgatgctagaagtgagtgtg

SEQ ID NO: 452263 - DNA, 33 bp, Homo sapien
ttctacaggcataaccccaggaccagacatcaa

SEQ ID NO: 452264 - DNA, 33 bp, Homo sapien
ttctacaggcataacctcaggaccagacatcaa

SEQ ID NO: 452265 - DNA, 33 bp, Homo sapien
tcacacttccatgactgacacagagaagagtga

SEQ ID NO: 452266 - DNA, 33 bp, Homo sapien
tcacacttccatgacttacacagagaagagtga

SEQ ID NO: 452267 - DNA, 33 bp, Homo sapien
gaacttcttctttccaatgccatgtttgtggat

SEQ ID NO: 452268 - DNA, 33 bp, Homo sapien
gaacttcttctttccagtgccatgtttgtggat

SEQ ID NO: 452269 - DNA, 33 bp, Homo sapien
cattgtgactttgggaataggagaagaaggaga

SEQ ID NO: 452270 - DNA, 33 bp, Homo sapien
cattgtgactttgggagtaggagaagaaggaga

SEQ ID NO: 452271 - DNA, 33 bp, Homo sapien
agaagataaactaaaaagattggccagcagggg

SEQ ID NO: 452272 - DNA, 33 bp, Homo sapien
agaagataaactaaaaggattggccagcagggg

SEQ ID NO: 452273 - DNA, 33 bp, Homo sapien
tctgctactttctggacaaataaggaaacctct

SEQ ID NO: 452274 - DNA, 33 bp, Homo sapien
tctgctactttctggataaataaggaaacctct

SEQ ID NO: 452275 - DNA, 33 bp, Homo sapien
tgaaatggtaaatgaacgagtcactatgcagag

SEQ ID NO: 452276 - DNA, 33 bp, Homo sapien
tgaaatggtaaatgaatgagtcactatgcagag

SEQ ID NO: 452277 - DNA, 33 bp, Homo sapien
tcttcctgaataggcacgtatattacagtggca

SEQ ID NO: 452278 - DNA, 33 bp, Homo sapien
tcttcctgaataggcatgtatattacagtggca

SEQ ID NO: 452279 - DNA, 33 bp, Homo sapien
tgctaggacaagtgcaccaaaacaggtctgaca

SEQ ID NO: 452280 - DNA, 33 bp, Homo sapien
tgctaggacaagtgcatcaaaacaggtctgaca

SEQ ID NO: 452281 - DNA, 33 bp, Homo sapien
atcagggtcactgggactcaagacctggcccct

SEQ ID NO: 452282 - DNA, 33 bp, Homo sapien
atcagggtcactgggattcaagacctggcccct

SEQ ID NO: 452283 - DNA, 33 bp, Homo sapien
tgacacccactacctcgcttgacattgtaggtg

SEQ ID NO: 452284 - DNA, 33 bp, Homo sapien
tgacacccactacctctcttgacattgtaggtg

SEQ ID NO: 452285 - DNA, 33 bp, Homo sapien
ggtcgtcgtggagctactaattggctaagcagc

SEQ ID NO: 452286 - DNA, 33 bp, Homo sapien
ggtcgtcgtggagctagtaattggctaagcagc

SEQ ID NO: 452287 - DNA, 33 bp, Homo sapien
gaaaatacaaaaacatgagcgcccgtaatccca

SEQ ID NO: 452288 - DNA, 33 bp, Homo sapien
gaaaatacaaaaacattagcgcccgtaatccca

SEQ ID NO: 452289 - DNA, 33 bp, Homo sapien
aaagttaacctgaaaaactgcttcaggactgtg

SEQ ID NO: 452290 - DNA, 33 bp, Homo sapien
aaagttaacctgaaaagctgcttcaggactgtg

SEQ ID NO: 452291 - DNA, 33 bp, Homo sapien
tttggttttatgaggcaatgcccagattatggg

SEQ ID NO: 452292 - DNA, 33 bp, Homo sapien
tttggttttatgaggccatgcccagattatggg

SEQ ID NO: 452293 - DNA, 33 bp, Homo sapien
agcaacatggaaagaactggagcatattataaa

SEQ ID NO: 452294 - DNA, 33 bp, Homo sapien
agcaacatggaaagaattggagcatattataaa

SEQ ID NO: 452295 - DNA, 33 bp, Homo sapien
tgccacacatgctaagaataaagctgttggatg

SEQ ID NO: 452296 - DNA, 33 bp, Homo sapien
tgccacacatgctaaggataaagctgttggatg

SEQ ID NO: 452297 - DNA, 33 bp, Homo sapien
aaaagtcatgaggcaaatgttcagataccacct

SEQ ID NO: 452298 - DNA, 33 bp, Homo sapien
aaaagtcatgaggcaagtgttcagataccacct

SEQ ID NO: 452299 - DNA, 33 bp, Homo sapien
cctgttctttaaacacccagctatgccatgatt

SEQ ID NO: 452300 - DNA, 33 bp, Homo sapien
cctgttctttaaacactcagctatgccatgatt

SEQ ID NO: 452301 - DNA, 33 bp, Homo sapien
agcgttttccagggcaagtattatgataggaca

SEQ ID NO: 452302 - DNA, 33 bp, Homo sapien
agcgttttccagggcaggtattatgataggaca

SEQ ID NO: 452303 - DNA, 33 bp, Homo sapien
aaaagatctttgcccactggaaatttcctgaag

SEQ ID NO: 452304 - DNA, 33 bp, Homo sapien
aaaagatctttgcccattggaaatttcctgaag

SEQ ID NO: 452305 - DNA, 33 bp, Homo sapien
atttacgtgaataacaatggtagaaatggttct

SEQ ID NO: 452306 - DNA, 33 bp, Homo sapien
atttacgtgaataacagtggtagaaatggttct

SEQ ID NO: 452307 - DNA, 33 bp, Homo sapien
aatcctgccagccttaactttaaaacttaatac

SEQ ID NO: 452308 - DNA, 33 bp, Homo sapien
aatcctgccagccttatctttaaaacttaatac

SEQ ID NO: 452309 - DNA, 33 bp, Homo sapien
cgcaggcctcgaaggtaaaggaagagcagaagt

SEQ ID NO: 452310 - DNA, 33 bp, Homo sapien
cgcaggcctcgaaggtgaaggaagagcagaagt

SEQ ID NO: 452311 - DNA, 33 bp, Homo sapien
attccacctgtctccaggactcagaatttcctg

SEQ ID NO: 452312 - DNA, 33 bp, Homo sapien
attccacctgtctccatgactcagaatttcctg

SEQ ID NO: 452313 - DNA, 33 bp, Homo sapien
tctgttttcatgatgagagagtacgtgcagtcc

SEQ ID NO: 452314 - DNA, 33 bp, Homo sapien
tctgttttcatgatgatagagtacgtgcagtcc

SEQ ID NO: 452315 - DNA, 33 bp, Homo sapien
gcatgatactgaacagaaatgcggtcatccttt

SEQ ID NO: 452316 - DNA, 33 bp, Homo sapien
gcatgatactgaacagtaatgcggtcatccttt

SEQ ID NO: 452317 - DNA, 33 bp, Homo sapien
tgttatctgacttgccaatattaaattttttac

SEQ ID NO: 452318 - DNA, 33 bp, Homo sapien
tgttatctgacttgccgatattaaattttttac

SEQ ID NO: 452319 - DNA, 33 bp, Homo sapien
catctgttgtcaacataagattaatttgcagat

SEQ ID NO: 452320 - DNA, 33 bp, Homo sapien
catctgttgtcaacatgagattaatttgcagat

SEQ ID NO: 452321 - DNA, 33 bp, Homo sapien
ggcacatggacaggaaaagcccaaagaggatgg

SEQ ID NO: 452322 - DNA, 33 bp, Homo sapien
ggcacatggacaggaacagcccaaagaggatgg

SEQ ID NO: 452323 - DNA, 33 bp, Homo sapien
ctattacactagttcacctaatactgtgataat

SEQ ID NO: 452324 - DNA, 33 bp, Homo sapien
ctattacactagttcatctaatactgtgataat

SEQ ID NO: 452325 - DNA, 33 bp, Homo sapien
tatacgtatataaatcaacattttcaacaaatt

SEQ ID NO: 452326 - DNA, 33 bp, Homo sapien
tatacgtatataaatcgacattttcaacaaatt

SEQ ID NO: 452327 - DNA, 33 bp, Homo sapien
ttccctttcagtacgcacaagagtgaaatccga

SEQ ID NO: 452328 - DNA, 33 bp, Homo sapien
ttccctttcagtacgcgcaagagtgaaatccga

SEQ ID NO: 452329 - DNA, 33 bp, Homo sapien
gaatgtctgcccagtgaattcctccaagaagta

SEQ ID NO: 452330 - DNA, 33 bp, Homo sapien
gaatgtctgcccagtgtattcctccaagaagta

SEQ ID NO: 452331 - DNA, 33 bp, Homo sapien
atcaaatacatatcccactttcattccctgctc

SEQ ID NO: 452332 - DNA, 33 bp, Homo sapien
atcaaatacatatcccgctttcattccctgctc

SEQ ID NO: 452333 - DNA, 33 bp, Homo sapien
gaaaagaggagagagaataagtactagccttca

SEQ ID NO: 452334 - DNA, 33 bp, Homo sapien
gaaaagaggagagagagtaagtactagccttca

SEQ ID NO: 452335 - DNA, 33 bp, Homo sapien
gtctctcaagtcccaaatactaagctctctgag

SEQ ID NO: 452336 - DNA, 33 bp, Homo sapien
gtctctcaagtcccaattactaagctctctgag

SEQ ID NO: 452337 - DNA, 33 bp, Homo sapien
ttcctatttcagaacccaacttcctagactaaa

SEQ ID NO: 452338 - DNA, 33 bp, Homo sapien
ttcctatttcagaacctaacttcctagactaaa

SEQ ID NO: 452339 - DNA, 33 bp, Homo sapien
gaaatgttcaatgtgcaagcttctataaaactc

SEQ ID NO: 452340 - DNA, 33 bp, Homo sapien
gaaatgttcaatgtgccagcttctataaaactc

SEQ ID NO: 452341 - DNA, 33 bp, Homo sapien
caggtagatgaaaacaagtcaaactcataaaaa

SEQ ID NO: 452342 - DNA, 33 bp, Homo sapien
caggtagatgaaaacacgtcaaactcataaaaa

SEQ ID NO: 452343 - DNA, 33 bp, Homo sapien
acacaagtaaatgcacactcaaatataggagct

SEQ ID NO: 452344 - DNA, 33 bp, Homo sapien
acacaagtaaatgcacgctcaaatataggagct

SEQ ID NO: 452345 - DNA, 33 bp, Homo sapien
cacttactgagctatgaaggtttgacaatgtgg

SEQ ID NO: 452346 - DNA, 33 bp, Homo sapien
cacttactgagctatgcaggtttgacaatgtgg

SEQ ID NO: 452347 - DNA, 33 bp, Homo sapien
caatgtttttggctagcacgtagaattgcaata

SEQ ID NO: 452348 - DNA, 33 bp, Homo sapien
caatgtttttggctagtacgtagaattgcaata

SEQ ID NO: 452349 - DNA, 33 bp, Homo sapien
gtagatagtatcagaagcaagttgtaggatacc

SEQ ID NO: 452350 - DNA, 33 bp, Homo sapien
gtagatagtatcagaatcaagttgtaggatacc

SEQ ID NO: 452351 - DNA, 33 bp, Homo sapien
aagtggaacaaccttacgtccccctagagatac

SEQ ID NO: 452352 - DNA, 33 bp, Homo sapien
aagtggaacaaccttatgtccccctagagatac

SEQ ID NO: 452353 - DNA, 33 bp, Homo sapien
gataaggagacacgtaacatatttatctttagc

SEQ ID NO: 452354 - DNA, 33 bp, Homo sapien
gataaggagacacgtaccatatttatctttagc

SEQ ID NO: 452355 - DNA, 33 bp, Homo sapien
tgtgttgaaacctttcactctgccttatacctt

SEQ ID NO: 452356 - DNA, 33 bp, Homo sapien
tgtgttgaaacctttcgctctgccttatacctt

SEQ ID NO: 452357 - DNA, 33 bp, Homo sapien
gtactggcataaaaacagagacaaatgtaacag

SEQ ID NO: 452358 - DNA, 33 bp, Homo sapien
gtactggcataaaaacggagacaaatgtaacag

SEQ ID NO: 452359 - DNA, 33 bp, Homo sapien
gtgtcttctactttcaccagtgttttagaattt

SEQ ID NO: 452360 - DNA, 33 bp, Homo sapien
gtgtcttctactttcatcagtgttttagaattt

SEQ ID NO: 452361 - DNA, 33 bp, Homo sapien
ctgcatagcaattgtaccttttggtttaagttg

SEQ ID NO: 452362 - DNA, 33 bp, Homo sapien
ctgcatagcaattgtatcttttggtttaagttg

SEQ ID NO: 452363 - DNA, 33 bp, Homo sapien; identical to SEQ ID NO: 452361

SEQ ID NO: 452364 - DNA, 33 bp, Homo sapien; identical to SEQ ID NO: 452362

SEQ ID NO: 452365 - DNA, 33 bp, Homo sapien
tccaatggcataaacacggtaagacttactagg

SEQ ID NO: 452366 - DNA, 33 bp, Homo sapien
tccaatggcataaacatggtaagacttactagg

SEQ ID NO: 452367 - DNA, 33 bp, Homo sapien
ggtatggtcatctttacatcccacaacttgtcc

SEQ ID NO: 452368 - DNA, 33 bp, Homo sapien
ggtatggtcatctttatatcccacaacttgtcc

SEQ ID NO: 452369 - DNA, 33 bp, Homo sapien
accttgaaaatctccaaaatgccttcagggtct

SEQ ID NO: 452370 - DNA, 33 bp, Homo sapien
accttgaaaatctccagaatgccttcagggtct

SEQ ID NO: 452371 - DNA, 33 bp, Homo sapien
agttgtgactgggacacggtatttgaggcaaag

SEQ ID NO: 452372 - DNA, 33 bp, Homo sapien
agttgtgactgggacatggtatttgaggcaaag

SEQ ID NO: 452373 - DNA, 33 bp, Homo sapien
taccagtgtttctacaatgaatgtggaaaggtt

SEQ ID NO: 452374 - DNA, 33 bp, Homo sapien
taccagtgtttctacagtgaatgtggaaaggtt

SEQ ID NO: 452375 - DNA, 33 bp, Homo sapien
ggtaacacagatgcaaatgagggtttaaaagcc

SEQ ID NO: 452376 - DNA, 33 bp, Homo sapien
ggtaacacagatgcaagtgagggtttaaaagcc

SEQ ID NO: 452377 - DNA, 33 bp, Homo sapien
tgctcgaccttgttgaaactttttgcatctgta

SEQ ID NO: 452378 - DNA, 33 bp, Homo sapien
tgctcgaccttgttgagactttttgcatctgta

SEQ ID NO: 452379 - DNA, 33 bp, Homo sapien
ctaaaaaatgataccaacgtatgatccagcaat

SEQ ID NO: 452380 - DNA, 33 bp, Homo sapien
ctaaaaaatgataccagcgtatgatccagcaat

SEQ ID NO: 452381 - DNA, 33 bp, Homo sapien
aattttagatatgtaaaatgagcctcgtggaat

SEQ ID NO: 452382 - DNA, 33 bp, Homo sapien
aattttagatatgtaagatgagcctcgtggaat

SEQ ID NO: 452383 - DNA, 33 bp, Homo sapien
aggtgagtgttcacaaaggaccgccctggtcaa

SEQ ID NO: 452384 - DNA, 33 bp, Homo sapien
aggtgagtgttcacaagggaccgccctggtcaa

SEQ ID NO: 452385 - DNA, 33 bp, Homo sapien
ccctttacagtagataccaatgacccctatttg

SEQ ID NO: 452386 - DNA, 33 bp, Homo sapien
ccctttacagtagatatcaatgacccctatttg

SEQ ID NO: 452387 - DNA, 33 bp, Homo sapien
tttaggcttttgattacgcaagtgtatgcgatt

SEQ ID NO: 452388 - DNA, 33 bp, Homo sapien
tttaggcttttgattatgcaagtgtatgcgatt

SEQ ID NO: 452389 - DNA, 33 bp, Homo sapien
cttattgctgagcccaaacatagcctttatccc

SEQ ID NO: 452390 - DNA, 33 bp, Homo sapien
cttattgctgagcccacacatagcctttatccc

SEQ ID NO: 452391 - DNA, 33 bp, Homo sapien
aaggaattctgactcacaggtcaaggtgtacgc

SEQ ID NO: 452392 - DNA, 33 bp, Homo sapien
aaggaattctgactcataggtcaaggtgtacgc

SEQ ID NO: 452393 - DNA, 33 bp, Homo sapien
taatttgtaaatcaggaatatgttgccaccaga

SEQ ID NO: 452394 - DNA, 33 bp, Homo sapien
taatttgtaaatcaggcatatgttgccaccaga

SEQ ID NO: 452395 - DNA, 33 bp, Homo sapien
ctccactagtttacaacctccctaagaacagcc

SEQ ID NO: 452396 - DNA, 33 bp, Homo sapien
ctccactagtttacaatctccctaagaacagcc

SEQ ID NO: 452397 - DNA, 33 bp, Homo sapien
ccactggggagtaaacaagaatctctctgcctg

SEQ ID NO: 452398 - DNA, 33 bp, Homo sapien
ccactggggagtaaaccagaatctctctgcctg

SEQ ID NO: 452399 - DNA, 33 bp, Homo sapien
gttacggtcacttggaaaattcaatttctcatg

SEQ ID NO: 452400 - DNA, 33 bp, Homo sapien
gttacggtcacttggagaattcaatttctcatg

SEQ ID NO: 452401 - DNA, 33 bp, Homo sapien
attatagctcctgacgcaattcagactactact

SEQ ID NO: 452402 - DNA, 33 bp, Homo sapien
attatagctcctgacgtaattcagactactact

SEQ ID NO: 452403 - DNA, 33 bp, Homo sapien
gctactttctgtggcactattgtggtgacattt

SEQ ID NO: 452404 - DNA, 33 bp, Homo sapien
gctactttctgtggcattattgtggtgacattt

SEQ ID NO: 452405 - DNA, 33 bp, Homo sapien
agactaacacagcttccaaacatactgaacttc

SEQ ID NO: 452406 - DNA, 33 bp, Homo sapien
agactaacacagcttctaaacatactgaacttc

SEQ ID NO: 452407 - DNA, 33 bp, Homo sapien
aacaggcctctctggcacacttcaacaactcag

SEQ ID NO: 452408 - DNA, 33 bp, Homo sapien
aacaggcctctctggcgcacttcaacaactcag

SEQ ID NO: 452409 - DNA, 33 bp, Homo sapien
aaccaaaagacagctaagttaagtattacttat

SEQ ID NO: 452410 - DNA, 33 bp, Homo sapien
aaccaaaagacagctaggttaagtattacttat

SEQ ID NO: 452411 - DNA, 33 bp, Homo sapien
ctgatcacatttcgtcactagcatgaaacagat

SEQ ID NO: 452412 - DNA, 33 bp, Homo sapien
ctgatcacatttcgtccctagcatgaaacagat

SEQ ID NO: 452413 - DNA, 33 bp, Homo sapien
cacacctaatcttcaacctgtttttgtaaatta

SEQ ID NO: 452414 - DNA, 33 bp, Homo sapien
cacacctaatcttcaagctgtttttgtaaatta

SEQ ID NO: 452415 - DNA, 33 bp, Homo sapien
tgtgtcccataagccacagtttgccaatgtaag

SEQ ID NO: 452416 - DNA, 33 bp, Homo sapien
tgtgtcccataagccatagtttgccaatgtaag

SEQ ID NO: 452417 - DNA, 33 bp, Homo sapien
caacctctgcctataaaagaatgtatttccaca

SEQ ID NO: 452418 - DNA, 33 bp, Homo sapien
caacctctgcctataacagaatgtatttccaca

SEQ ID NO: 452419 - DNA, 33 bp, Homo sapien
aagtctgctaccaatgacagtgaagtttgtgcc

SEQ ID NO: 452420 - DNA, 33 bp, Homo sapien
aagtctgctaccaatgtcagtgaagtttgtgcc

SEQ ID NO: 452421 - DNA, 33 bp, Homo sapien
ttacaactgcagtcataaagaaagtgctaattt

SEQ ID NO: 452422 - DNA, 33 bp, Homo sapien
ttacaactgcagtcatgaagaaagtgctaattt

SEQ ID NO: 452423 - DNA, 33 bp, Homo sapien
cctcctatgtggttggaactacaggaacacacc

SEQ ID NO: 452424 - DNA, 33 bp, Homo sapien
cctcctatgtggttgggactacaggaacacacc

SEQ ID NO: 452425 - DNA, 33 bp, Homo sapien
taaaacagacaaacaaataaaaggactcaagct

SEQ ID NO: 452426 - DNA, 33 bp, Homo sapien
taaaacagacaaacaagtaaaaggactcaagct

SEQ ID NO: 452427 - DNA, 33 bp, Homo sapien
ccagagcagtcctaaacgtgatgatgagctgtg

SEQ ID NO: 452428 - DNA, 33 bp, Homo sapien
ccagagcagtcctaaatgtgatgatgagctgtg

SEQ ID NO: 452429 - DNA, 33 bp, Homo sapien
ggtatatgtttccttacgtgtgaaatgagacta

SEQ ID NO: 452430 - DNA, 33 bp, Homo sapien
ggtatatgtttccttatgtgtgaaatgagacta

SEQ ID NO: 452431 - DNA, 33 bp, Homo sapien
ctagaacaggatatccgaaaaagagcaacagag

SEQ ID NO: 452432 - DNA, 33 bp, Homo sapien
ctagaacaggatatcctaaaaagagcaacagag

SEQ ID NO: 452433 - DNA, 33 bp, Homo sapien
tggagaggggcgcacacatgaaaacaccctgcg

SEQ ID NO: 452434 - DNA, 33 bp, Homo sapien
tggagaggggcgcacagatgaaaacaccctgcg

SEQ ID NO: 452435 - DNA, 33 bp, Homo sapien
ttcagaatgacagtgccatttttttaggcgatg

SEQ ID NO: 452436 - DNA, 33 bp, Homo sapien
ttcagaatgacagtgctatttttttaggcgatg

SEQ ID NO: 452437 - DNA, 33 bp, Homo sapien
aatcgcatgaaataaaagaatatttacacacac

SEQ ID NO: 452438 - DNA, 33 bp, Homo sapien
aatcgcatgaaataaaggaatatttacacacac

SEQ ID NO: 452439 - DNA, 33 bp, Homo sapien
acttagattactagtcaatttggagtatattgt

SEQ ID NO: 452440 - DNA, 33 bp, Homo sapien
acttagattactagtccatttggagtatattgt

SEQ ID NO: 452441 - DNA, 33 bp, Homo sapien
actggacacaactgagaaatgcctctacagaga

SEQ ID NO: 452442 - DNA, 33 bp, Homo sapien
actggacacaactgagcaatgcctctacagaga

SEQ ID NO: 452443 - DNA, 33 bp, Homo sapien
cttgcctctgatagccacctatgctgcttttct

SEQ ID NO: 452444 - DNA, 33 bp, Homo sapien
cttgcctctgatagccgcctatgctgcttttct

SEQ ID NO: 452445 - DNA, 33 bp, Homo sapien
gctggaggttaaaatcaattcagtaaagcaaga

SEQ ID NO: 452446 - DNA, 33 bp, Homo sapien
gctggaggttaaaatccattcagtaaagcaaga

SEQ ID NO: 452447 - DNA, 33 bp, Homo sapien
tctgccaaagttggtccaatgctctataaaata

SEQ ID NO: 452448 - DNA, 33 bp, Homo sapien
tctgccaaagttggtctaatgctctataaaata

SEQ ID NO: 452449 - DNA, 33 bp, Homo sapien
catttgtgtcttgataccctgtttaattgctat

SEQ ID NO: 452450 - DNA, 33 bp, Homo sapien
catttgtgtcttgatatcctgtttaattgctat

SEQ ID NO: 452451 - DNA, 33 bp, Homo sapien
ggtggcctgagctaagacagattttgtactgag

SEQ ID NO: 452452 - DNA, 33 bp, Homo sapien
ggtggcctgagctaaggcagattttgtactgag

SEQ ID NO: 452453 - DNA, 33 bp, Homo sapien
attattcttcctgaggaactgtaagggctgtga

SEQ ID NO: 452454 - DNA, 33 bp, Homo sapien
attattcttcctgagggactgtaagggctgtga

SEQ ID NO: 452455 - DNA, 33 bp, Homo sapien; identical to SEQ ID NO: 452453

SEQ ID NO: 452456 - DNA, 33 bp, Homo sapien; identical to SEQ ID NO: 452454

SEQ ID NO: 452457 - DNA, 33 bp, Homo sapien
taaggaaagcatcataaaaattggctgattaca

SEQ ID NO: 452458 - DNA, 33 bp, Homo sapien
taaggaaagcatcatataaattggctgattaca

SEQ ID NO: 452459 - DNA, 33 bp, Homo sapien
aatcagaagacacaagccctcaataagagaagg

SEQ ID NO: 452460 - DNA, 33 bp, Homo sapien
aatcagaagacacaaggcctcaataagagaagg

SEQ ID NO: 452461 - DNA, 33 bp, Homo sapien
caggtggtctcttatacggatgcatgtaacatt

SEQ ID NO: 452462 - DNA, 33 bp, Homo sapien
caggtggtctcttatatggatgcatgtaacatt

SEQ ID NO: 452463 - DNA, 33 bp, Homo sapien
catggcagagagaagccgagttcttgcacagaa

SEQ ID NO: 452464 - DNA, 33 bp, Homo sapien
catggcagagagaagctgagttcttgcacagaa

SEQ ID NO: 452465 - DNA, 33 bp, Homo sapien
gccagtgtagactgtggaaccagatggcctgtg

SEQ ID NO: 452466 - DNA, 33 bp, Homo sapien
gccagtgtagactgtgtaaccagatggcctgtg

SEQ ID NO: 452467 - DNA, 33 bp, Homo sapien
gccacgtccctttggaaagcttgagataatagc

SEQ ID NO: 452468 - DNA, 33 bp, Homo sapien
gccacgtccctttggagagcttgagataatagc

SEQ ID NO: 452469 - DNA, 33 bp, Homo sapien
caaaatgggagtgatagtagtgccttactgttg

SEQ ID NO: 452470 - DNA, 33 bp, Homo sapien
caaaatgggagtgatattagtgccttactgttg

SEQ ID NO: 452471 - DNA, 33 bp, Homo sapien
agatcctgaaaacagcagagccatttatccatt

SEQ ID NO: 452472 - DNA, 33 bp, Homo sapien
agatcctgaaaacagcggagccatttatccatt

SEQ ID NO: 452473 - DNA, 33 bp, Homo sapien
cctctcaaagcgctgacataataggtataagcc

SEQ ID NO: 452474 - DNA, 33 bp, Homo sapien
cctctcaaagcgctgagataataggtataagcc

SEQ ID NO: 452475 - DNA, 33 bp, Homo sapien
ggcacctttggtgagaagagttttggaaacgtt

SEQ ID NO: 452476 - DNA, 33 bp, Homo sapien
ggcacctttggtgagaggagttttggaaacgtt

SEQ ID NO: 452477 - DNA, 33 bp, Homo sapien
taaccctcagaatacccatatgcaacagacaga

SEQ ID NO: 452478 - DNA, 33 bp, Homo sapien
taaccctcagaatacctatatgcaacagacaga

SEQ ID NO: 452479 - DNA, 33 bp, Homo sapien
gctctggtcactaagacgatcacagttacaact

SEQ ID NO: 452480 - DNA, 33 bp, Homo sapien
gctctggtcactaagatgatcacagttacaact

SEQ ID NO: 452481 - DNA, 33 bp, Homo sapien
tagcatgggcaagagaacaataccctgtctcag

SEQ ID NO: 452482 - DNA, 33 bp, Homo sapien
tagcatgggcaagagagcaataccctgtctcag

SEQ ID NO: 452483 - DNA, 33 bp, Homo sapien
ctgtatggcaattgacggcctgttacacatctg

SEQ ID NO: 452484 - DNA, 33 bp, Homo sapien
ctgtatggcaattgactgcctgttacacatctg

SEQ ID NO: 452485 - DNA, 33 bp, Homo sapien
gctctggatagtgataaactgcaacattcccta

SEQ ID NO: 452486 - DNA, 33 bp, Homo sapien
gctctggatagtgatagactgcaacattcccta

SEQ ID NO: 452487 - DNA, 33 bp, Homo sapien
tggcactttccccatccagcactgtatcttgtg

SEQ ID NO: 452488 - DNA, 33 bp, Homo sapien
tggcactttccccatcgagcactgtatcttgtg

SEQ ID NO: 452489 - DNA, 33 bp, Homo sapien
ctgcctcttactaactaagtgatctaactaagt

SEQ ID NO: 452490 - DNA, 33 bp, Homo sapien
ctgcctcttactaactgagtgatctaactaagt

SEQ ID NO: 452491 - DNA, 33 bp, Homo sapien
atatacacaggcgtcactcatccactgacttta

SEQ ID NO: 452492 - DNA, 33 bp, Homo sapien
atatacacaggcgtcattcatccactgacttta

SEQ ID NO: 452493 - DNA, 33 bp, Homo sapien
agtaccagctcttcccacaacaagccaagtagg

SEQ ID NO: 452494 - DNA, 33 bp, Homo sapien
agtaccagctcttcccgcaacaagccaagtagg

SEQ ID NO: 452495 - DNA, 33 bp, Homo sapien
caatctcacaatcacacgctgcaacggtgcacg

SEQ ID NO: 452496 - DNA, 33 bp, Homo sapien
caatctcacaatcacaggctgcaacggtgcacg

SEQ ID NO: 452497 - DNA, 33 bp, Homo sapien
ctggcgcaggtttctacggctgagttcccaggc

SEQ ID NO: 452498 - DNA, 33 bp, Homo sapien
ctggcgcaggtttctatggctgagttcccaggc

SEQ ID NO: 452499 - DNA, 33 bp, Homo sapien
tgcacttcgtatcagactccttaatttcctcaa

SEQ ID NO: 452500 - DNA, 33 bp, Homo sapien
tgcacttcgtatcagattccttaatttcctcaa

SEQ ID NO: 452501 - DNA, 33 bp, Homo sapien
ttctctgctagccttaccgatataactcaaaca

SEQ ID NO: 452502 - DNA, 33 bp, Homo sapien
ttctctgctagccttatcgatataactcaaaca

SEQ ID NO: 452503 - DNA, 33 bp, Homo sapien
aagggcacagataaggcactaggcatagaatct

SEQ ID NO: 452504 - DNA, 33 bp, Homo sapien
aagggcacagataaggtactaggcatagaatct

SEQ ID NO: 452505 - DNA, 33 bp, Homo sapien
ccggtgggtcagcatccgagtgtagcctgggga

SEQ ID NO: 452506 - DNA, 33 bp, Homo sapien
ccggtgggtcagcatctgagtgtagcctgggga

SEQ ID NO: 452507 - DNA, 33 bp, Homo sapien
caactggatcatcatcaacaggcaggcagagga

SEQ ID NO: 452508 - DNA, 33 bp, Homo sapien
caactggatcatcatcgacaggcaggcagagga

SEQ ID NO: 452509 - DNA, 33 bp, Homo sapien
gatttttttttttagcacagaatatgcagacca

SEQ ID NO: 452510 - DNA, 33 bp, Homo sapien
gatttttttttttagcgcagaatatgcagacca

SEQ ID NO: 452511 - DNA, 33 bp, Homo sapien
caccaaagaattcggacggtacagccacaggca

SEQ ID NO: 452512 - DNA, 33 bp, Homo sapien
caccaaagaattcggatggtacagccacaggca

SEQ ID NO: 452513 - DNA, 33 bp, Homo sapien
aacaaggctttgaagacaaaacaggacagagca

SEQ ID NO: 452514 - DNA, 33 bp, Homo sapien
aacaaggctttgaagagaaaacaggacagagca

SEQ ID NO: 452515 - DNA, 33 bp, Homo sapien
gaaaatacacttaactaagactaactcatagac

SEQ ID NO: 452516 - DNA, 33 bp, Homo sapien
gaaaatacacttaactgagactaactcatagac

SEQ ID NO: 452517 - DNA, 33 bp, Homo sapien
aaaaaagatttagctgcagatttagtctcacag

SEQ ID NO: 452518 - DNA, 33 bp, Homo sapien
aaaaaagatttagctggagatttagtctcacag

SEQ ID NO: 452519 - DNA, 33 bp, Homo sapien
ggatcagtgtggaaacaatctgtggctttaggt

SEQ ID NO: 452520 - DNA, 33 bp, Homo sapien
ggatcagtgtggaaacgatctgtggctttaggt

SEQ ID NO: 452521 - DNA, 33 bp, Homo sapien
aggtgggcagaataccccacctgagcggcaggg

SEQ ID NO: 452522 - DNA, 33 bp, Homo sapien
aggtgggcagaatacctcacctgagcggcaggg

SEQ ID NO: 452523 - DNA, 33 bp, Homo sapien
agcaattcatagcaaacggagggtctgtgtgaa

SEQ ID NO: 452524 - DNA, 33 bp, Homo sapien
agcaattcatagcaaatggagggtctgtgtgaa

SEQ ID NO: 452525 - DNA, 33 bp, Homo sapien
agatgggtggaaccacagatgatatgtgactgt

SEQ ID NO: 452526 - DNA, 33 bp, Homo sapien
agatgggtggaaccacggatgatatgtgactgt

SEQ ID NO: 452527 - DNA, 33 bp, Homo sapien
taacctcatgagagacccctaacagagctgctc

SEQ ID NO: 452528 - DNA, 33 bp, Homo sapien
taacctcatgagagacgcctaacagagctgctc

SEQ ID NO: 452529 - DNA, 33 bp, Homo sapien
catcctttccttccaccaggacgacctgcacat

SEQ ID NO: 452530 - DNA, 33 bp, Homo sapien
catcctttccttccactaggacgacctgcacat

SEQ ID NO: 452531 - DNA, 33 bp, Homo sapien
cttgaaccagatagaaatgcaccctgcgcaccc

SEQ ID NO: 452532 - DNA, 33 bp, Homo sapien
cttgaaccagatagaagtgcaccctgcgcaccc

SEQ ID NO: 452533 - DNA, 33 bp, Homo sapien
gctggagcacaatgacaatatcatagctggaag

SEQ ID NO: 452534 - DNA, 33 bp, Homo sapien
gctggagcacaatgacgatatcatagctggaag

SEQ ID NO: 452535 - DNA, 33 bp, Homo sapien
gtggcaagaagtaataaaatgcctggcatggta

SEQ ID NO: 452536 - DNA, 33 bp, Homo sapien
gtggcaagaagtaatacaatgcctggcatggta

SEQ ID NO: 452537 - DNA, 33 bp, Homo sapien
gctgcaccgacagttcacgctcccgcaggcggc

SEQ ID NO: 452538 - DNA, 33 bp, Homo sapien
gctgcaccgacagttcgcgctcccgcaggcggc

SEQ ID NO: 452539 - DNA, 33 bp, Homo sapien
ggattctacctttcccactggaccatgaaggca

SEQ ID NO: 452540 - DNA, 33 bp, Homo sapien
ggattctacctttccccctggaccatgaaggca

SEQ ID NO: 452541 - DNA, 33 bp, Homo sapien
gtagaattatgccaacaagcctggctaggaagg

SEQ ID NO: 452542 - DNA, 33 bp, Homo sapien
gtagaattatgccaacgagcctggctaggaagg

SEQ ID NO: 452543 - DNA, 33 bp, Homo sapien
aaataattttatctaaagctgggtatggtggct

SEQ ID NO: 452544 - DNA, 33 bp, Homo sapien
aaataattttatctaaggctgggtatggtggct

SEQ ID NO: 452545 - DNA, 33 bp, Homo sapien
gggtgttgccatcaaaagatggttgtaatgttt

SEQ ID NO: 452546 - DNA, 33 bp, Homo sapien
gggtgttgccatcaaaggatggttgtaatgttt

SEQ ID NO: 452547 - DNA, 33 bp, Homo sapien
gggatggggctttcgcagagcctacttcctcct

SEQ ID NO: 452548 - DNA, 33 bp, Homo sapien
gggatggggctttcgcggagcctacttcctcct

SEQ ID NO: 452549 - DNA, 33 bp, Homo sapien
aagaggtaacaaagaccgtcctctgacccttct

SEQ ID NO: 452550 - DNA, 33 bp, Homo sapien
aagaggtaacaaagactgtcctctgacccttct

SEQ ID NO: 452551 - DNA, 33 bp, Homo sapien
accatctgtgcaagagaacaatctctctctctc

SEQ ID NO: 452552 - DNA, 33 bp, Homo sapien
accatctgtgcaagaggacaatctctctctctc

SEQ ID NO: 452553 - DNA, 33 bp, Homo sapien
tgaaaccgaattgtacacgcaggaatctatgtg

SEQ ID NO: 452554 - DNA, 33 bp, Homo sapien
tgaaaccgaattgtacccgcaggaatctatgtg

SEQ ID NO: 452555 - DNA, 33 bp, Homo sapien
gctcaaagctgacgcacgtctcggaaggattgt

SEQ ID NO: 452556 - DNA, 33 bp, Homo sapien
gctcaaagctgacgcaggtctcggaaggattgt

SEQ ID NO: 452557 - DNA, 33 bp, Homo sapien
aaagcaatgaagaagacgatgttggaggggtcc

SEQ ID NO: 452558 - DNA, 33 bp, Homo sapien
aaagcaatgaagaagatgatgttggaggggtcc

SEQ ID NO: 452559 - DNA, 33 bp, Homo sapien
aagctgcagtttaggacggtgagactctgttcc

SEQ ID NO: 452560 - DNA, 33 bp, Homo sapien
aagctgcagtttaggatggtgagactctgttcc

SEQ ID NO: 452561 - DNA, 33 bp, Homo sapien
ttttttttttagacgcagattggttctgtcacc

SEQ ID NO: 452562 - DNA, 33 bp, Homo sapien
ttttttttttagacgcggattggttctgtcacc

SEQ ID NO: 452563 - DNA, 33 bp, Homo sapien
gctgagttggagccaaaatccaggaaagctgaa

SEQ ID NO: 452564 - DNA, 33 bp, Homo sapien
gctgagttggagccaacatccaggaaagctgaa

SEQ ID NO: 452565 - DNA, 33 bp, Homo sapien
ggggccagcacgtctgcagccttttatgggcac

SEQ ID NO: 452566 - DNA, 33 bp, Homo sapien
ggggccagcacgtctggagccttttatgggcac

SEQ ID NO: 452567 - DNA, 33 bp, Homo sapien
atgtctctgaatcttcaacaacactcgttaatt

SEQ ID NO: 452568 - DNA, 33 bp, Homo sapien
atgtctctgaatcttcgacaacactcgttaatt

SEQ ID NO: 452569 - DNA, 33 bp, Homo sapien
gaaacactgaccttaacgagtgttggagaagat

SEQ ID NO: 452570 - DNA, 33 bp, Homo sapien
gaaacactgaccttaatgagtgttggagaagat

SEQ ID NO: 452571 - DNA, 33 bp, Homo sapien
gcaattctctgctttaccttgccaaattacagg

SEQ ID NO: 452572 - DNA, 33 bp, Homo sapien
gcaattctctgctttagcttgccaaattacagg

SEQ ID NO: 452573 - DNA, 33 bp, Homo sapien
tgtcattagtcaaaacagtaatgccgctaccac

SEQ ID NO: 452574 - DNA, 33 bp, Homo sapien
tgtcattagtcaaaacggtaatgccgctaccac

SEQ ID NO: 452575 - DNA, 33 bp, Homo sapien
gcttcctaattacataagaaactgtcattccca

SEQ ID NO: 452576 - DNA, 33 bp, Homo sapien
gcttcctaattacatatgaaactgtcattccca

SEQ ID NO: 452577 - DNA, 33 bp, Homo sapien
ataccatcggcattcaatcacttcctctttctg

SEQ ID NO: 452578 - DNA, 33 bp, Homo sapien
ataccatcggcattcagtcacttcctctttctg

SEQ ID NO: 452579 - DNA, 33 bp, Homo sapien
agatcggatctccccacagaagccccaagaaac

SEQ ID NO: 452580 - DNA, 33 bp, Homo sapien
agatcggatctccccatagaagccccaagaaac

SEQ ID NO: 452581 - DNA, 33 bp, Homo sapien
gtgcagtgctgctgtcaatgttgatgttaattt

SEQ ID NO: 452582 - DNA, 33 bp, Homo sapien
gtgcagtgctgctgtcgatgttgatgttaattt

SEQ ID NO: 452583 - DNA, 33 bp, Homo sapien
aaaaattaatcgggcacggtaactcgaatcttg

SEQ ID NO: 452584 - DNA, 33 bp, Homo sapien
aaaaattaatcgggcatggtaactcgaatcttg

SEQ ID NO: 452585 - DNA, 33 bp, Homo sapien
cgagcctgaggtgagaaaatctttgagccgggg

SEQ ID NO: 452586 - DNA, 33 bp, Homo sapien
cgagcctgaggtgagagaatctttgagccgggg

SEQ ID NO: 452587 - DNA, 33 bp, Homo sapien
caacgggccagaccacaggaaggacggtgtttg

SEQ ID NO: 452588 - DNA, 33 bp, Homo sapien
caacgggccagaccacgggaaggacggtgtttg

SEQ ID NO: 452589 - DNA, 33 bp, Homo sapien
gtgtcaataactggcaaaggaagtcgggaaatt

SEQ ID NO: 452590 - DNA, 33 bp, Homo sapien
gtgtcaataactggcagaggaagtcgggaaatt

SEQ ID NO: 452591 - DNA, 33 bp, Homo sapien
ctggcatggagttaaagcttcaaaaacagtaat

SEQ ID NO: 452592 - DNA, 33 bp, Homo sapien
ctggcatggagttaaatcttcaaaaacagtaat

SEQ ID NO: 452593 - DNA, 33 bp, Homo sapien
atgccaggtactgaagcaaccccttgatgttga

SEQ ID NO: 452594 - DNA, 33 bp, Homo sapien
atgccaggtactgaaggaaccccttgatgttga

SEQ ID NO: 452595 - DNA, 33 bp, Homo sapien
ggcctggctgaccagaaatttggaaacccgacg

SEQ ID NO: 452596 - DNA, 33 bp, Homo sapien
ggcctggctgaccagagatttggaaacccgacg

SEQ ID NO: 452597 - DNA, 33 bp, Homo sapien
attcacttgagagagaccaaattaggctctgaa

SEQ ID NO: 452598 - DNA, 33 bp, Homo sapien
attcacttgagagagagcaaattaggctctgaa

SEQ ID NO: 452599 - DNA, 33 bp, Homo sapien
ctggtcctgcgtgagactatctacaaaccttcc

SEQ ID NO: 452600 - DNA, 33 bp, Homo sapien
ctggtcctgcgtgagagtatctacaaaccttcc

SEQ ID NO: 452601 - DNA, 33 bp, Homo sapien
agggtgcaactgccaaaaactggtcctgcgtga

SEQ ID NO: 452602 - DNA, 33 bp, Homo sapien
agggtgcaactgccaagaactggtcctgcgtga

SEQ ID NO: 452603 - DNA, 33 bp, Homo sapien
ggggtgtatgtttccccgccaggacagagggca

SEQ ID NO: 452604 - DNA, 33 bp, Homo sapien
ggggtgtatgtttccctgccaggacagagggca

SEQ ID NO: 452605 - DNA, 33 bp, Homo sapien
gtgtttattattgcacagtgattacatgtcaag

SEQ ID NO: 452606 - DNA, 33 bp, Homo sapien
gtgtttattattgcacggtgattacatgtcaag

SEQ ID NO: 452607 - DNA, 33 bp, Homo sapien
aaatgactttgatgacacacgggttgttgtcgt

SEQ ID NO: 452608 - DNA, 33 bp, Homo sapien
aaatgactttgatgacgcacgggttgttgtcgt

SEQ ID NO: 452609 - DNA, 33 bp, Homo sapien
cccatttcatctggtacctaacaggtcttgtgc

SEQ ID NO: 452610 - DNA, 33 bp, Homo sapien
cccatttcatctggtatctaacaggtcttgtgc

SEQ ID NO: 452611 - DNA, 33 bp, Homo sapien
cccgatttgaatgaaaatgctgaaattataggc

SEQ ID NO: 452612 - DNA, 33 bp, Homo sapien
cccgatttgaatgaaagtgctgaaattataggc

SEQ ID NO: 452613 - DNA, 33 bp, Homo sapien
tcttagctacttggaaccccgaggtgcgaggat

SEQ ID NO: 452614 - DNA, 33 bp, Homo sapien
tcttagctacttggaatcccgaggtgcgaggat

SEQ ID NO: 452615 - DNA, 33 bp, Homo sapien
tacttgcgggtttttccagagagaggttctgcc

SEQ ID NO: 452616 - DNA, 33 bp, Homo sapien
tacttgcgggtttttctagagagaggttctgcc

SEQ ID NO: 452617 - DNA, 33 bp, Homo sapien
gagagatgctgaaaatcagaaagagctgtgggc

SEQ ID NO: 452618 - DNA, 33 bp, Homo sapien
gagagatgctgaaaatgagaaagagctgtgggc

SEQ ID NO: 452619 - DNA, 33 bp, Homo sapien
tactattacaaccatcactgttattattaccaa

SEQ ID NO: 452620 - DNA, 33 bp, Homo sapien
tactattacaaccatcgctgttattattaccaa

SEQ ID NO: 452621 - DNA, 33 bp, Homo sapien
ggggcttagcacgttacgtcatttgtaaccagt

SEQ ID NO: 452622 - DNA, 33 bp, Homo sapien
ggggcttagcacgttatgtcatttgtaaccagt

SEQ ID NO: 452623 - DNA, 33 bp, Homo sapien
cacactggtcgctaaacgctctgagaagtcctg

SEQ ID NO: 452624 - DNA, 33 bp, Homo sapien
cacactggtcgctaaaggctctgagaagtcctg

SEQ ID NO: 452625 - DNA, 33 bp, Homo sapien
tcaactctcagatgagaaaaacacgaagggccc

SEQ ID NO: 452626 - DNA, 33 bp, Homo sapien
tcaactctcagatgaggaaaacacgaagggccc

SEQ ID NO: 452627 - DNA, 33 bp, Homo sapien
cacttagcacacagcaaacatgcaatacatgtg

SEQ ID NO: 452628 - DNA, 33 bp, Homo sapien
cacttagcacacagcacacatgcaatacatgtg

SEQ ID NO: 452629 - DNA, 33 bp, Homo sapien
ccaggacaaaggccaacgtggcacagatccaga

SEQ ID NO: 452630 - DNA, 33 bp, Homo sapien
ccaggacaaaggccaatgtggcacagatccaga

SEQ ID NO: 452631 - DNA, 33 bp, Homo sapien
caatagctttattttagccagtagctgtggttt

SEQ ID NO: 452632 - DNA, 33 bp, Homo sapien
caatagctttattttatccagtagctgtggttt

SEQ ID NO: 452633 - DNA, 33 bp, Homo sapien
ttgtatcatctacacacacggtcccacctccca

SEQ ID NO: 452634 - DNA, 33 bp, Homo sapien
ttgtatcatctacacatacggtcccacctccca

SEQ ID NO: 452635 - DNA, 33 bp, Homo sapien
ctgtagcagaatgtgcaaatatccacacggagc

SEQ ID NO: 452636 - DNA, 33 bp, Homo sapien
ctgtagcagaatgtgcgaatatccacacggagc

SEQ ID NO: 452637 - DNA, 33 bp, Homo sapien
cagcaaacaagattcccgatagacgcgcccagg

SEQ ID NO: 452638 - DNA, 33 bp, Homo sapien
cagcaaacaagattcctgatagacgcgcccagg

SEQ ID NO: 452639 - DNA, 33 bp, Homo sapien
gttttgcaggtagttacaaattcctggaagatg

SEQ ID NO: 452640 - DNA, 33 bp, Homo sapien
gttttgcaggtagttataaattcctggaagatg

SEQ ID NO: 452641 - DNA, 33 bp, Homo sapien
gcctcagccagtgatacgcttttccctaccgtg

SEQ ID NO: 452642 - DNA, 33 bp, Homo sapien
gcctcagccagtgatatgcttttccctaccgtg

SEQ ID NO: 452643 - DNA, 33 bp, Homo sapien
tacttctaattagtaacgaaagtccacaatacc

SEQ ID NO: 452644 - DNA, 33 bp, Homo sapien
tacttctaattagtaatgaaagtccacaatacc

SEQ ID NO: 452645 - DNA, 33 bp, Homo sapien
caggagcaaaagatgacaaatataacctaaacg

SEQ ID NO: 452646 - DNA, 33 bp, Homo sapien
caggagcaaaagatgagaaatataacctaaacg

SEQ ID NO: 452647 - DNA, 33 bp, Homo sapien
ctgaggggtttaagtaaccagatgctgaagtgt

SEQ ID NO: 452648 - DNA, 33 bp, Homo sapien
ctgaggggtttaagtagccagatgctgaagtgt

SEQ ID NO: 452649 - DNA, 33 bp, Homo sapien
cgaagaccaaatgagaaacagatgtacaggcat

SEQ ID NO: 452650 - DNA, 33 bp, Homo sapien
cgaagaccaaatgagagacagatgtacaggcat

SEQ ID NO: 452651 - DNA, 33 bp, Homo sapien
gagggttctggagagcaaactaaaaaacaaaaa

SEQ ID NO: 452652 - DNA, 33 bp, Homo sapien
gagggttctggagagccaactaaaaaacaaaaa

SEQ ID NO: 452653 - DNA, 33 bp, Homo sapien
agattcccaggcaagaaaactgtacacgtatga

SEQ ID NO: 452654 - DNA, 33 bp, Homo sapien
agattcccaggcaagacaactgtacacgtatga

SEQ ID NO: 452655 - DNA, 33 bp, Homo sapien
agagcactgtgacaaaaggtgttatacatggca

SEQ ID NO: 452656 - DNA, 33 bp, Homo sapien
agagcactgtgacaaagggtgttatacatggca

SEQ ID NO: 452657 - DNA, 33 bp, Homo sapien
gtcgtgtaaaaggccagtccccgcctcgcagtg

SEQ ID NO: 452658 - DNA, 33 bp, Homo sapien
gtcgtgtaaaaggccattccccgcctcgcagtg

SEQ ID NO: 452659 - DNA, 33 bp, Homo sapien
ggcaagaacctgagcacggcaagaggcagatgc

SEQ ID NO: 452660 - DNA, 33 bp, Homo sapien
ggcaagaacctgagcatggcaagaggcagatgc

SEQ ID NO: 452661 - DNA, 33 bp, Homo sapien
cggtcgtgagtgacgacgacagtgaggaggaac

SEQ ID NO: 452662 - DNA, 33 bp, Homo sapien
cggtcgtgagtgacgatgacagtgaggaggaac

SEQ ID NO: 452663 - DNA, 33 bp, Homo sapien; identical to SEQ ID NO: 452661

SEQ ID NO: 452664 - DNA, 33 bp, Homo sapien; identical to SEQ ID NO: 452662

SEQ ID NO: 452665 - DNA, 33 bp, Homo sapien
ggagaatgacgtgaacccggaaagcagagcttg

SEQ ID NO: 452666 - DNA, 33 bp, Homo sapien
ggagaatgacgtgaactcggaaagcagagcttg

SEQ ID NO: 452667 - DNA, 33 bp, Homo sapien
agcttattgggaaatcactgtttggaaggtgct

SEQ ID NO: 452668 - DNA, 33 bp, Homo sapien
agcttattgggaaatccctgtttggaaggtgct

SEQ ID NO: 452669 - DNA, 33 bp, Homo sapien
caggctggaggacagacgggggttgccaggtgg

SEQ ID NO: 452670 - DNA, 33 bp, Homo sapien
caggctggaggacagatgggggttgccaggtgg

SEQ ID NO: 452671 - DNA, 33 bp, Homo sapien
ggggagttgcaggtcacaaaaacttcaaggagg

SEQ ID NO: 452672 - DNA, 33 bp, Homo sapien
ggggagttgcaggtcagaaaaacttcaaggagg

SEQ ID NO: 452673 - DNA, 33 bp, Homo sapien
tggagtcaacccagtaaaggcggccactgagga

SEQ ID NO: 452674 - DNA, 33 bp, Homo sapien
tggagtcaacccagtagaggcggccactgagga

SEQ ID NO: 452675 - DNA, 33 bp, Homo sapien
caagcatcgatgtcaacgggggcaaccggaaga

SEQ ID NO: 452676 - DNA, 33 bp, Homo sapien
caagcatcgatgtcaatgggggcaaccggaaga

SEQ ID NO: 452677 - DNA, 33 bp, Homo sapien
ggtgtgcgcctaatgacgaaagtctcaaatgac

SEQ ID NO: 452678 - DNA, 33 bp, Homo sapien
ggtgtgcgcctaatgatgaaagtctcaaatgac

SEQ ID NO: 452679 - DNA, 33 bp, Homo sapien
ctcccagcgcaaacttaaagagacagggctttg

SEQ ID NO: 452680 - DNA, 33 bp, Homo sapien
ctcccagcgcaaacttcaagagacagggctttg

SEQ ID NO: 452681 - DNA, 33 bp, Homo sapien
aggaaatgtgttattacgtaactgatgacagct

SEQ ID NO: 452682 - DNA, 33 bp, Homo sapien
aggaaatgtgttattatgtaactgatgacagct

SEQ ID NO: 452683 - DNA, 33 bp, Homo sapien
acaccggctggaggcacgtccttgtggttgggg

SEQ ID NO: 452684 - DNA, 33 bp, Homo sapien
acaccggctggaggcatgtccttgtggttgggg

SEQ ID NO: 452685 - DNA, 33 bp, Homo sapien
aactgatcgactcttaccatcatttatttttat

SEQ ID NO: 452686 - DNA, 33 bp, Homo sapien
aactgatcgactcttagcatcatttatttttat

SEQ ID NO: 452687 - DNA, 33 bp, Homo sapien
gaagtctgtgtttaggcatcactgggtcatcct

SEQ ID NO: 452688 - DNA, 33 bp, Homo sapien
gaagtctgtgtttaggtatcactgggtcatcct

SEQ ID NO: 452689 - DNA, 33 bp, Homo sapien
agcctaggcaacagaaagaaacgctgtctcaag

SEQ ID NO: 452690 - DNA, 33 bp, Homo sapien
agcctaggcaacagaatgaaacgctgtctcaag

SEQ ID NO: 452691 - DNA, 33 bp, Homo sapien
gcaacgtgttctccacacagtagagcagaggag

SEQ ID NO: 452692 - DNA, 33 bp, Homo sapien
gcaacgtgttctccacgcagtagagcagaggag

SEQ ID NO: 452693 - DNA, 33 bp, Homo sapien
gtaggactcgaacccacgtctgtcaacttcagg

SEQ ID NO: 452694 - DNA, 33 bp, Homo sapien
gtaggactcgaacccatgtctgtcaacttcagg

SEQ ID NO: 452695 - DNA, 33 bp, Homo sapien
tatgtcttgtatctggcattatagtatcataca

SEQ ID NO: 452696 - DNA, 33 bp, Homo sapien
tatgtcttgtatctggtattatagtatcataca

SEQ ID NO: 452697 - DNA, 33 bp, Homo sapien
gttgtacaattctgaaaataggaaaaaccattg

SEQ ID NO: 452698 - DNA, 33 bp, Homo sapien
gttgtacaattctgaatataggaaaaaccattg

SEQ ID NO: 452699 - DNA, 33 bp, Homo sapien
cactgtctcatctcctcaaaaagcagctccaca

SEQ ID NO: 452700 - DNA, 33 bp, Homo sapien
cactgtctcatctccttaaaaagcagctccaca

SEQ ID NO: 452701 - DNA, 33 bp, Homo sapien
tgggtacagagagatacgcttggctccagaccc

SEQ ID NO: 452702 - DNA, 33 bp, Homo sapien
tgggtacagagagatatgcttggctccagaccc

SEQ ID NO: 452703 - DNA, 33 bp, Homo sapien
tctccaacctcacagagaggacaggaagtgatc

SEQ ID NO: 452704 - DNA, 33 bp, Homo sapien
tctccaacctcacagataggacaggaagtgatc

SEQ ID NO: 452705 - DNA, 33 bp, Homo sapien
ccaccacactggcctaagttttttgaggaactg

SEQ ID NO: 452706 - DNA, 33 bp, Homo sapien
ccaccacactggcctacgttttttgaggaactg

SEQ ID NO: 452707 - DNA, 33 bp, Homo sapien
ccccagccatgttgaactgtgagtaaattaaac

SEQ ID NO: 452708 - DNA, 33 bp, Homo sapien
ccccagccatgttgaattgtgagtaaattaaac

SEQ ID NO: 452709 - DNA, 33 bp, Homo sapien
acccagtgcccgacacagagagggtgcttagaa

SEQ ID NO: 452710 - DNA, 33 bp, Homo sapien
acccagtgcccgacacggagagggtgcttagaa

SEQ ID NO: 452711 - DNA, 33 bp, Homo sapien
actgtcttcctgggcaaatctggtgtttcctta

SEQ ID NO: 452712 - DNA, 33 bp, Homo sapien
actgtcttcctgggcagatctggtgtttcctta

SEQ ID NO: 452713 - DNA, 33 bp, Homo sapien
ggctgaatcgaggtccaagaggaagcagcagga

SEQ ID NO: 452714 - DNA, 33 bp, Homo sapien
ggctgaatcgaggtccgagaggaagcagcagga

SEQ ID NO: 452715 - DNA, 33 bp, Homo sapien
cacagccaggtgttccacttggaggttcttagt

SEQ ID NO: 452716 - DNA, 33 bp, Homo sapien
cacagccaggtgttccgcttggaggttcttagt

SEQ ID NO: 452717 - DNA, 33 bp, Homo sapien
atgatcttagagaacacaggctggcttgtacct

SEQ ID NO: 452718 - DNA, 33 bp, Homo sapien
atgatcttagagaacataggctggcttgtacct

SEQ ID NO: 452719 - DNA, 33 bp, Homo sapien
cccacctgcttaatagaaacagggtaggagtat

SEQ ID NO: 452720 - DNA, 33 bp, Homo sapien
cccacctgcttaatagcaacagggtaggagtat

SEQ ID NO: 452721 - DNA, 33 bp, Homo sapien
gttatgaatggcaaaccggccccagagttaaat

SEQ ID NO: 452722 - DNA, 33 bp, Homo sapien
gttatgaatggcaaacgggccccagagttaaat

SEQ ID NO: 452723 - DNA, 33 bp, Homo sapien
ttctggagttggatcaatatttgaacagcaccc

SEQ ID NO: 452724 - DNA, 33 bp, Homo sapien
ttctggagttggatcagtatttgaacagcaccc

SEQ ID NO: 452725 - DNA, 33 bp, Homo sapien
gtgtcatgtgtccacccctaaaccaatcactgt

SEQ ID NO: 452726 - DNA, 33 bp, Homo sapien
gtgtcatgtgtccacctctaaaccaatcactgt

SEQ ID NO: 452727 - DNA, 33 bp, Homo sapien
ccctttctcttttgggaacgtggctgtagctct

SEQ ID NO: 452728 - DNA, 33 bp, Homo sapien
ccctttctcttttgggcacgtggctgtagctct

SEQ ID NO: 452729 - DNA, 33 bp, Homo sapien
gcaggcttgtcacatccatcatccgtacctcat

SEQ ID NO: 452730 - DNA, 33 bp, Homo sapien
gcaggcttgtcacatctatcatccgtacctcat

SEQ ID NO: 452731 - DNA, 33 bp, Homo sapien
tagaactcttacctcaatgagcttaaatgcaaa

SEQ ID NO: 452732 - DNA, 33 bp, Homo sapien
tagaactcttacctcagtgagcttaaatgcaaa

SEQ ID NO: 452733 - DNA, 33 bp, Homo sapien
atgtgagccacagcgacaggaactattaccaat

SEQ ID NO: 452734 - DNA, 33 bp, Homo sapien
atgtgagccacagcgataggaactattaccaat

SEQ ID NO: 452735 - DNA, 33 bp, Homo sapien
aggacagtaggagattaaaagtatgtaccctgt

SEQ ID NO: 452736 - DNA, 33 bp, Homo sapien
aggacagtaggagattcaaagtatgtaccctgt

SEQ ID NO: 452737 - DNA, 33 bp, Homo sapien
tctatgtacctttcccaaactccagaactgtgt

SEQ ID NO: 452738 - DNA, 33 bp, Homo sapien
tctatgtacctttccccaactccagaactgtgt

SEQ ID NO: 452739 - DNA, 33 bp, Homo sapien
aaccagaggcgcctgcagattctggaggggtct

SEQ ID NO: 452740 - DNA, 33 bp, Homo sapien
aaccagaggcgcctgcggattctggaggggtct

SEQ ID NO: 452741 - DNA, 33 bp, Homo sapien
ggggcgggattcgaacacgcagattcctggatc

SEQ ID NO: 452742 - DNA, 33 bp, Homo sapien
ggggcgggattcgaacgcgcagattcctggatc

SEQ ID NO: 452743 - DNA, 33 bp, Homo sapien
gagctgactgcagggaaaagtgacgctagggta

SEQ ID NO: 452744 - DNA, 33 bp, Homo sapien
gagctgactgcagggagaagtgacgctagggta

SEQ ID NO: 452745 - DNA, 33 bp, Homo sapien
ccatagtataatcaaccgttatcctactgatgg

SEQ ID NO: 452746 - DNA, 33 bp, Homo sapien
ccatagtataatcaacggttatcctactgatgg

SEQ ID NO: 452747 - DNA, 33 bp, Homo sapien
accaaaaaattgtaacagtaacacatacacctt

SEQ ID NO: 452748 - DNA, 33 bp, Homo sapien
accaaaaaattgtaacggtaacacatacacctt

SEQ ID NO: 452749 - DNA, 33 bp, Homo sapien
gcctatcaataaagcaataaggtcctctgtact

SEQ ID NO: 452750 - DNA, 33 bp, Homo sapien
gcctatcaataaagcagtaaggtcctctgtact

SEQ ID NO: 452751 - DNA, 33 bp, Homo sapien
gcagtctctggctggagccactgtagaatctgt

SEQ ID NO: 452752 - DNA, 33 bp, Homo sapien
gcagtctctggctggatccactgtagaatctgt

SEQ ID NO: 452753 - DNA, 33 bp, Homo sapien
ttgtaaagcggtaacaatcgcaagggtatacat

SEQ ID NO: 452754 - DNA, 33 bp, Homo sapien
ttgtaaagcggtaacagtcgcaagggtatacat

SEQ ID NO: 452755 - DNA, 33 bp, Homo sapien
gtaactccagtcacgacattatcaactctttgt

SEQ ID NO: 452756 - DNA, 33 bp, Homo sapien
gtaactccagtcacgatattatcaactctttgt

SEQ ID NO: 452757 - DNA, 33 bp, Homo sapien
ttttttaaaagactacacaggaagtacggatct

SEQ ID NO: 452758 - DNA, 33 bp, Homo sapien
ttttttaaaagactacccaggaagtacggatct

SEQ ID NO: 452759 - DNA, 33 bp, Homo sapien
tggaatatgacttgtcagaaaaatgagaagtac

SEQ ID NO: 452760 - DNA, 33 bp, Homo sapien
tggaatatgacttgtcggaaaaatgagaagtac

SEQ ID NO: 452761 - DNA, 33 bp, Homo sapien
tgacttcacagtgtctcaacaatttgccaaaat

SEQ ID NO: 452762 - DNA, 33 bp, Homo sapien
tgacttcacagtgtcttaacaatttgccaaaat

SEQ ID NO: 452763 - DNA, 33 bp, Homo sapien
tttatgtctacgaaaagcaacaggataacggaa

SEQ ID NO: 452764 - DNA, 33 bp, Homo sapien
tttatgtctacgaaaatcaacaggataacggaa

SEQ ID NO: 452765 - DNA, 33 bp, Homo sapien
gtttcagaaggtactgaaatagtggaaggcttt

SEQ ID NO: 452766 - DNA, 33 bp, Homo sapien
gtttcagaaggtactggaatagtggaaggcttt

SEQ ID NO: 452767 - DNA, 33 bp, Homo sapien
acactcataaacataacttaaggattgcaatgt

SEQ ID NO: 452768 - DNA, 33 bp, Homo sapien
acactcataaacataagttaaggattgcaatgt

SEQ ID NO: 452769 - DNA, 33 bp, Homo sapien
gtagaattaaaggtcaatcattccacattttgt

SEQ ID NO: 452770 - DNA, 33 bp, Homo sapien
gtagaattaaaggtcagtcattccacattttgt

SEQ ID NO: 452771 - DNA, 33 bp, Homo sapien
agtaatcactacaaaacgtaagaacaatgataa

SEQ ID NO: 452772 - DNA, 33 bp, Homo sapien
agtaatcactacaaaaggtaagaacaatgataa

SEQ ID NO: 452773 - DNA, 33 bp, Homo sapien
tcgagcagagaagcgacgtttgggttgtgtttt

SEQ ID NO: 452774 - DNA, 33 bp, Homo sapien
tcgagcagagaagcgatgtttgggttgtgtttt

SEQ ID NO: 452775 - DNA, 33 bp, Homo sapien
tttttgctcaggttacgcaatatgaagacaacc

SEQ ID NO: 452776 - DNA, 33 bp, Homo sapien
tttttgctcaggttactcaatatgaagacaacc

SEQ ID NO: 452777 - DNA, 33 bp, Homo sapien
atcagatgagtgtcagcaacatagaagccacat

SEQ ID NO: 452778 - DNA, 33 bp, Homo sapien
atcagatgagtgtcaggaacatagaagccacat

SEQ ID NO: 452779 - DNA, 33 bp, Homo sapien
cataagcttccccctcaacctgattcagcccta

SEQ ID NO: 452780 - DNA, 33 bp, Homo sapien
cataagcttccccctccacctgattcagcccta

SEQ ID NO: 452781 - DNA, 33 bp, Homo sapien
gaggaatatgcaatacccttagggctgaatcag

SEQ ID NO: 452782 - DNA, 33 bp, Homo sapien
gaggaatatgcaatactcttagggctgaatcag

SEQ ID NO: 452783 - DNA, 33 bp, Homo sapien
ctctctactttgccacaaagaatgtggaagtga

SEQ ID NO: 452784 - DNA, 33 bp, Homo sapien
ctctctactttgccactaagaatgtggaagtga

SEQ ID NO: 452785 - DNA, 33 bp, Homo sapien
agactgaatagctatgccacatttaactatatg

SEQ ID NO: 452786 - DNA, 33 bp, Homo sapien
agactgaatagctatgtcacatttaactatatg

SEQ ID NO: 452787 - DNA, 33 bp, Homo sapien
ctattgatgtttttccaattattgagcttttac

SEQ ID NO: 452788 - DNA, 33 bp, Homo sapien
ctattgatgtttttccgattattgagcttttac

SEQ ID NO: 452789 - DNA, 33 bp, Homo sapien
catgctgcccctcacaatattccagatggatta

SEQ ID NO: 452790 - DNA, 33 bp, Homo sapien
catgctgcccctcacagtattccagatggatta

SEQ ID NO: 452791 - DNA, 33 bp, Homo sapien
aagcctaaactcaaacgccattaaatatcatct

SEQ ID NO: 452792 - DNA, 33 bp, Homo sapien
aagcctaaactcaaactccattaaatatcatct

SEQ ID NO: 452793 - DNA, 33 bp, Homo sapien
ccttgatcatgtcagacagcctttcccaccaat

SEQ ID NO: 452794 - DNA, 33 bp, Homo sapien
ccttgatcatgtcagagagcctttcccaccaat

SEQ ID NO: 452795 - DNA, 33 bp, Homo sapien
taccaaattgcgtacaatcatggttttgtttcc

SEQ ID NO: 452796 - DNA, 33 bp, Homo sapien
taccaaattgcgtacattcatggttttgtttcc

SEQ ID NO: 452797 - DNA, 33 bp, Homo sapien
ctttttgaaatcattaaaggactcacactggaa

SEQ ID NO: 452798 - DNA, 33 bp, Homo sapien
ctttttgaaatcattacaggactcacactggaa

SEQ ID NO: 452799 - DNA, 33 bp, Homo sapien
ggaagccaattagaataaacactagcaggaaca

SEQ ID NO: 452800 - DNA, 33 bp, Homo sapien
ggaagccaattagaatcaacactagcaggaaca

SEQ ID NO: 452801 - DNA, 33 bp, Homo sapien
aacatttcacatgagacgaagcagagaaaaacc

SEQ ID NO: 452802 - DNA, 33 bp, Homo sapien
aacatttcacatgagaggaagcagagaaaaacc

SEQ ID NO: 452803 - DNA, 33 bp, Homo sapien
tattcacttgacactaaaagagacttggcagct

SEQ ID NO: 452804 - DNA, 33 bp, Homo sapien
tattcacttgacactacaagagacttggcagct

SEQ ID NO: 452805 - DNA, 33 bp, Homo sapien
caaaaaaattacacacaatggagatatttcata

SEQ ID NO: 452806 - DNA, 33 bp, Homo sapien
caaaaaaattacacacgatggagatatttcata

SEQ ID NO: 452807 - DNA, 33 bp, Homo sapien
taacattactagcaagacagttgtatcaatcat

SEQ ID NO: 452808 - DNA, 33 bp, Homo sapien
taacattactagcaaggcagttgtatcaatcat

SEQ ID NO: 452809 - DNA, 33 bp, Homo sapien
tcactgtcaactctaacgtagcaattaagagat

SEQ ID NO: 452810 - DNA, 33 bp, Homo sapien
tcactgtcaactctaatgtagcaattaagagat

SEQ ID NO: 452811 - DNA, 33 bp, Homo sapien
ttgaaagtttgctagacaaagaaagttttttca

SEQ ID NO: 452812 - DNA, 33 bp, Homo sapien
ttgaaagtttgctagagaaagaaagttttttca

SEQ ID NO: 452813 - DNA, 33 bp, Homo sapien
cccagaaagagttggacgtttctgtaagtaaga

SEQ ID NO: 452814 - DNA, 33 bp, Homo sapien
cccagaaagagttggatgtttctgtaagtaaga

SEQ ID NO: 452815 - DNA, 33 bp, Homo sapien; identical to SEQ ID NO: 452813

SEQ ID NO: 452816 - DNA, 33 bp, Homo sapien; identical to SEQ ID NO: 452814

SEQ ID NO: 452817 - DNA, 33 bp, Homo sapien
ctaaaagactttttaacgtaaggcatatcagtt

SEQ ID NO: 452818 - DNA, 33 bp, Homo sapien
ctaaaagactttttaatgtaaggcatatcagtt

SEQ ID NO: 452819 - DNA, 33 bp, Homo sapien
taaaaataaaaacataccttctggcctggtgag

SEQ ID NO: 452820 - DNA, 33 bp, Homo sapien
taaaaataaaaacatatcttctggcctggtgag

SEQ ID NO: 452821 - DNA, 33 bp, Homo sapien
tatttactcttagaaaatgacatcttagccagg

SEQ ID NO: 452822 - DNA, 33 bp, Homo sapien
tatttactcttagaaattgacatcttagccagg

SEQ ID NO: 452823 - DNA, 33 bp, Homo sapien
cctgaggtggcagtaacgagcaatgcagccacc

SEQ ID NO: 452824 - DNA, 33 bp, Homo sapien
cctgaggtggcagtaatgagcaatgcagccacc

SEQ ID NO: 452825 - DNA, 33 bp, Homo sapien
acttttaccccagttccagatgacagactgaac

SEQ ID NO: 452826 - DNA, 33 bp, Homo sapien
acttttaccccagttcgagatgacagactgaac

SEQ ID NO: 452827 - DNA, 33 bp, Homo sapien
taattctagaccttgaagccagcttgtcctgcg

SEQ ID NO: 452828 - DNA, 33 bp, Homo sapien
taattctagaccttgaggccagcttgtcctgcg

SEQ ID NO: 452829 - DNA, 33 bp, Homo sapien
aataggttttgcttcacaggcaactgctggtga

SEQ ID NO: 452830 - DNA, 33 bp, Homo sapien
aataggttttgcttcataggcaactgctggtga

SEQ ID NO: 452831 - DNA, 33 bp, Homo sapien
agaagctcggggcccacgttcactacaagcaag

SEQ ID NO: 452832 - DNA, 33 bp, Homo sapien
agaagctcggggcccatgttcactacaagcaag

SEQ ID NO: 452833 - DNA, 33 bp, Homo sapien; identical to SEQ ID NO: 452831

SEQ ID NO: 452834 - DNA, 33 bp, Homo sapien; identical to SEQ ID NO: 452832

SEQ ID NO: 452835 - DNA, 33 bp, Homo sapien
ctaaagcctgctccacaccaagcaatctgggca

SEQ ID NO: 452836 - DNA, 33 bp, Homo sapien
ctaaagcctgctccacgccaagcaatctgggca

SEQ ID NO: 452837 - DNA, 33 bp, Homo sapien
acagcttcaactcccagtaacattgtctgtgat

SEQ ID NO: 452838 - DNA, 33 bp, Homo sapien
acagcttcaactcccattaacattgtctgtgat

SEQ ID NO: 452839 - DNA, 33 bp, Homo sapien
tagtaagtattgataacaaatcacggtagcagc

SEQ ID NO: 452840 - DNA, 33 bp, Homo sapien
tagtaagtattgataagaaatcacggtagcagc

SEQ ID NO: 452841 - DNA, 33 bp, Homo sapien
tacaggtagatccaaacgcagcacttgtacgac

SEQ ID NO: 452842 - DNA, 33 bp, Homo sapien
tacaggtagatccaaatgcagcacttgtacgac

SEQ ID NO: 452843 - DNA, 33 bp, Homo sapien
catctctaactaacaggacaaaaattatctgga

SEQ ID NO: 452844 - DNA, 33 bp, Homo sapien
catctctaactaacagtacaaaaattatctgga

SEQ ID NO: 452845 - DNA, 33 bp, Homo sapien
gtatagagcagttaacaggaactatcatttagg

SEQ ID NO: 452846 - DNA, 33 bp, Homo sapien
gtatagagcagttaacgggaactatcatttagg

SEQ ID NO: 452847 - DNA, 33 bp, Homo sapien
ggggaaaccctgtacccctttgatggtcaaagt

SEQ ID NO: 452848 - DNA, 33 bp, Homo sapien
ggggaaaccctgtaccgctttgatggtcaaagt

SEQ ID NO: 452849 - DNA, 33 bp, Homo sapien; identical to SEQ ID NO: 452847

SEQ ID NO: 452850 - DNA, 33 bp, Homo sapien; identical to SEQ ID NO: 452848

SEQ ID NO: 452851 - DNA, 33 bp, Homo sapien
gaagttagcaggctaaatctttaaagaaaaact

SEQ ID NO: 452852 - DNA, 33 bp, Homo sapien
gaagttagcaggctaagtctttaaagaaaaact

SEQ ID NO: 452853 - DNA, 33 bp, Homo sapien
aaaccagcactcaggcaaaattttaattctctc

SEQ ID NO: 452854 - DNA, 33 bp, Homo sapien
aaaccagcactcaggccaaattttaattctctc

SEQ ID NO: 452855 - DNA, 33 bp, Homo sapien
aactccaagctcctaaatcaccagatggctttt

SEQ ID NO: 452856 - DNA, 33 bp, Homo sapien
aactccaagctcctaattcaccagatggctttt

SEQ ID NO: 452857 - DNA, 33 bp, Homo sapien
agtttcctgagcaagaagtagataatctttcag

SEQ ID NO: 452858 - DNA, 33 bp, Homo sapien
agtttcctgagcaagaggtagataatctttcag

SEQ ID NO: 452859 - DNA, 33 bp, Homo sapien
tagcacctgtcataacagagtcctatgaattaa

SEQ ID NO: 452860 - DNA, 33 bp, Homo sapien
tagcacctgtcataacggagtcctatgaattaa

SEQ ID NO: 452861 - DNA, 33 bp, Homo sapien; identical to SEQ ID NO: 452859

SEQ ID NO: 452862 - DNA, 33 bp, Homo sapien; identical to SEQ ID NO: 452860

SEQ ID NO: 452863 - DNA, 33 bp, Homo sapien
agctgcaggttttacacgactgtggtggatcca

SEQ ID NO: 452864 - DNA, 33 bp, Homo sapien
agctgcaggttttacatgactgtggtggatcca

SEQ ID NO: 452865 - DNA, 33 bp, Homo sapien
cataagcttgtatgccagccgggacggttggac

SEQ ID NO: 452866 - DNA, 33 bp, Homo sapien
cataagcttgtatgccggccgggacggttggac

SEQ ID NO: 452867 - DNA, 33 bp, Homo sapien
tataatcgaagccacacgagtctcggcaaaaca

SEQ ID NO: 452868 - DNA, 33 bp, Homo sapien
tataatcgaagccacaggagtctcggcaaaaca

SEQ ID NO: 452869 - DNA, 33 bp, Homo sapien
ctttcatgatatcaaacggaactagaatacact

SEQ ID NO: 452870 - DNA, 33 bp, Homo sapien
ctttcatgatatcaaatggaactagaatacact

SEQ ID NO: 452871 - DNA, 33 bp, Homo sapien
acgtggcaccatctaagtcaccatgggaagctt

SEQ ID NO: 452872 - DNA, 33 bp, Homo sapien
acgtggcaccatctaattcaccatgggaagctt

SEQ ID NO: 452873 - DNA, 33 bp, Homo sapien
acccacagttcacttacatttacccacttacta

SEQ ID NO: 452874 - DNA, 33 bp, Homo sapien
acccacagttcacttatatttacccacttacta

SEQ ID NO: 452875 - DNA, 33 bp, Homo sapien; identical to SEQ ID NO: 452873

SEQ ID NO: 452876 - DNA, 33 bp, Homo sapien; identical to SEQ ID NO: 452874

SEQ ID NO: 452877 - DNA, 33 bp, Homo sapien
aaattcaaatttactacgaaatgtcgatagagt

SEQ ID NO: 452878 - DNA, 33 bp, Homo sapien
aaattcaaatttactatgaaatgtcgatagagt

SEQ ID NO: 452879 - DNA, 33 bp, Homo sapien
aaaagaggctttggagacaatgtaatcagacag

SEQ ID NO: 452880 - DNA, 33 bp, Homo sapien
aaaagaggctttggaggcaatgtaatcagacag

SEQ ID NO: 452881 - DNA, 33 bp, Homo sapien
ctcctgctcttgggtacctatctgccttctcta

SEQ ID NO: 452882 - DNA, 33 bp, Homo sapien
ctcctgctcttgggtagctatctgccttctcta

SEQ ID NO: 452883 - DNA, 33 bp, Homo sapien
ttaatgcatttaaatagcttagaatttgtcttc

SEQ ID NO: 452884 - DNA, 33 bp, Homo sapien
ttaatgcatttaaatatcttagaatttgtcttc

SEQ ID NO: 452885 - DNA, 33 bp, Homo sapien
agtttcatgagacaaacaccctccactgtgtga

SEQ ID NO: 452886 - DNA, 33 bp, Homo sapien
agtttcatgagacaaataccctccactgtgtga

SEQ ID NO: 452887 - DNA, 33 bp, Homo sapien
gttgaaccattttacaatcctttggacagaaca

SEQ ID NO: 452888 - DNA, 33 bp, Homo sapien
gttgaaccattttacattcctttggacagaaca

SEQ ID NO: 452889 - DNA, 33 bp, Homo sapien
tgaaaagacccacaccagagagaaacactatga

SEQ ID NO: 452890 - DNA, 33 bp, Homo sapien
tgaaaagacccacaccggagagaaacactatga

SEQ ID NO: 452891 - DNA, 33 bp, Homo sapien; identical to SEQ ID NO: 452889

SEQ ID NO: 452892 - DNA, 33 bp, Homo sapien; identical to SEQ ID NO: 452890

SEQ ID NO: 452893 - DNA, 33 bp, Homo sapien
tgatatcgaaggctaccggaagaaatgaaggct

SEQ ID NO: 452894 - DNA, 33 bp, Homo sapien
tgatatcgaaggctactggaagaaatgaaggct

SEQ ID NO: 452895 - DNA, 33 bp, Homo sapien; identical to SEQ ID NO: 452893

SEQ ID NO: 452896 - DNA, 33 bp, Homo sapien; identical to SEQ ID NO: 452894

SEQ ID NO: 452897 - DNA, 33 bp, Homo sapien
agttggaggatgtcataatacaattcaccagtg

SEQ ID NO: 452898 - DNA, 33 bp, Homo sapien
agttggaggatgtcatgatacaattcaccagtg

SEQ ID NO: 452899 - DNA, 33 bp, Homo sapien
atatatatgaagttcaagaaagtttggcggaaa

SEQ ID NO: 452900 - DNA, 33 bp, Homo sapien
atatatatgaagttcaggaaagtttggcggaaa

SEQ ID NO: 452901 - DNA, 33 bp, Homo sapien
caaaggcaagcactaaagaaagattttaaaaaa

SEQ ID NO: 452902 - DNA, 33 bp, Homo sapien
caaaggcaagcactaaggaaagattttaaaaaa

SEQ ID NO: 452903 - DNA, 33 bp, Homo sapien
gtgagactgatatcaccgggcatctatacccta

SEQ ID NO: 452904 - DNA, 33 bp, Homo sapien
gtgagactgatatcactgggcatctatacccta

SEQ ID NO: 452905 - DNA, 33 bp, Homo sapien
ctctggtctgaacctcccaaagggttgattata

SEQ ID NO: 452906 - DNA, 33 bp, Homo sapien
ctctggtctgaacctctcaaagggttgattata

SEQ ID NO: 452907 - DNA, 33 bp, Homo sapien
tcacactggagcgaaacgctatgagtgtaagca

SEQ ID NO: 452908 - DNA, 33 bp, Homo sapien
tcacactggagcgaaatgctatgagtgtaagca

SEQ ID NO: 452909 - DNA, 33 bp, Homo sapien
aaacaattctgtctccaaacctgaccttcacag

SEQ ID NO: 452910 - DNA, 33 bp, Homo sapien
aaacaattctgtctccgaacctgaccttcacag

SEQ ID NO: 452911 - DNA, 33 bp, Homo sapien
agtgccctgtctaaaaatcgggagcaaatttca

SEQ ID NO: 452912 - DNA, 33 bp, Homo sapien
agtgccctgtctaaaattcgggagcaaatttca

SEQ ID NO: 452913 - DNA, 33 bp, Homo sapien
agctttagtagagggccattcagcaggagcaga

SEQ ID NO: 452914 - DNA, 33 bp, Homo sapien
agctttagtagagggcgattcagcaggagcaga

SEQ ID NO: 452915 - DNA, 33 bp, Homo sapien
caaaagtggaagataacgagaccatttcaggta

SEQ ID NO: 452916 - DNA, 33 bp, Homo sapien
caaaagtggaagataatgagaccatttcaggta

SEQ ID NO: 452917 - DNA, 33 bp, Homo sapien
tttgttgccaagaaaccgcattagtgtttttag

SEQ ID NO: 452918 - DNA, 33 bp, Homo sapien
tttgttgccaagaaactgcattagtgtttttag

SEQ ID NO: 452919 - DNA, 33 bp, Homo sapien
aatgcttgaaatttccagataagagcaaggtgg

SEQ ID NO: 452920 - DNA, 33 bp, Homo sapien
aatgcttgaaatttcctgataagagcaaggtgg

SEQ ID NO: 452921 - DNA, 33 bp, Homo sapien; identical to SEQ ID NO: 452919

SEQ ID NO: 452922 - DNA, 33 bp, Homo sapien; identical to SEQ ID NO: 452920

SEQ ID NO: 452923 - DNA, 33 bp, Homo sapien
tttgacatttttaacacgatttcagtacaatct

SEQ ID NO: 452924 - DNA, 33 bp, Homo sapien
tttgacatttttaacatgatttcagtacaatct

SEQ ID NO: 452925 - DNA, 33 bp, Homo sapien
caccaccaagaaagataatcagacactgctatt

SEQ ID NO: 452926 - DNA, 33 bp, Homo sapien
caccaccaagaaagatgatcagacactgctatt

SEQ ID NO: 452927 - DNA, 33 bp, Homo sapien
gcatcatggagggagaatacttggggggctaaa

SEQ ID NO: 452928 - DNA, 33 bp, Homo sapien
gcatcatggagggagagtacttggggggctaaa

SEQ ID NO: 452929 - DNA, 33 bp, Homo sapien
tagtgtctgatgttaacgttccagttggcctct

SEQ ID NO: 452930 - DNA, 33 bp, Homo sapien
tagtgtctgatgttaatgttccagttggcctct

SEQ ID NO: 452931 - DNA, 33 bp, Homo sapien
tcagacacatacgcaccgattttagagcagtat

SEQ ID NO: 452932 - DNA, 33 bp, Homo sapien
tcagacacatacgcactgattttagagcagtat

SEQ ID NO: 452933 - DNA, 33 bp, Homo sapien
gcatagttgtggcataacaaagaagttagttca

SEQ ID NO: 452934 - DNA, 33 bp, Homo sapien
gcatagttgtggcatagcaaagaagttagttca

SEQ ID NO: 452935 - DNA, 33 bp, Homo sapien
aagaccctgtatcaaacgaaacaacaactaccc

SEQ ID NO: 452936 - DNA, 33 bp, Homo sapien
aagaccctgtatcaaatgaaacaacaactaccc

SEQ ID NO: 452937 - DNA, 33 bp, Homo sapien
ttcacattgaagcaggacatgaagcttatagct

SEQ ID NO: 452938 - DNA, 33 bp, Homo sapien
ttcacattgaagcagggcatgaagcttatagct

SEQ ID NO: 452939 - DNA, 33 bp, Homo sapien
attcatgttgaacataccgcctttgtgggcttt

SEQ ID NO: 452940 - DNA, 33 bp, Homo sapien
attcatgttgaacatatcgcctttgtgggcttt

SEQ ID NO: 452941 - DNA, 33 bp, Homo sapien
aagctttataattcaaccaaatacctaccacac

SEQ ID NO: 452942 - DNA, 33 bp, Homo sapien
aagctttataattcaatcaaatacctaccacac

SEQ ID NO: 452943 - DNA, 33 bp, Homo sapien
caaagaccctgatgccaatatctttgaaagcct

SEQ ID NO: 452944 - DNA, 33 bp, Homo sapien
caaagaccctgatgcccatatctttgaaagcct

SEQ ID NO: 452945 - DNA, 33 bp, Homo sapien
tggaagctggaactaacggctaaaaaagaaagg

SEQ ID NO: 452946 - DNA, 33 bp, Homo sapien
tggaagctggaactaatggctaaaaaagaaagg

SEQ ID NO: 452947 - DNA, 33 bp, Homo sapien
aatctttaacacttgcaccttgtagaagctgta

SEQ ID NO: 452948 - DNA, 33 bp, Homo sapien
aatctttaacacttgcgccttgtagaagctgta

SEQ ID NO: 452949 - DNA, 33 bp, Homo sapien
tccacaagagccatccacaaagactggaagagg

SEQ ID NO: 452950 - DNA, 33 bp, Homo sapien
tccacaagagccatccgcaaagactggaagagg

SEQ ID NO: 452951 - DNA, 33 bp, Homo sapien
actaatattacgtgtaaaggtgactagatgtgt

SEQ ID NO: 452952 - DNA, 33 bp, Homo sapien
actaatattacgtgtagaggtgactagatgtgt

SEQ ID NO: 452953 - DNA, 33 bp, Homo sapien
actgtgagtggtttcacgtctttgaagggaagt

SEQ ID NO: 452954 - DNA, 33 bp, Homo sapien
actgtgagtggtttcatgtctttgaagggaagt

SEQ ID NO: 452955 - DNA, 33 bp, Homo sapien
tagtgatttttctactcaattgatcaattattg

SEQ ID NO: 452956 - DNA, 33 bp, Homo sapien
tagtgatttttctactgaattgatcaattattg

SEQ ID NO: 452957 - DNA, 33 bp, Homo sapien
acaaagagagctttgacctggatagaacttagg

SEQ ID NO: 452958 - DNA, 33 bp, Homo sapien
acaaagagagctttgatctggatagaacttagg

SEQ ID NO: 452959 - DNA, 33 bp, Homo sapien
ggctctgtgtcttctaagttttctagctcatca

SEQ ID NO: 452960 - DNA, 33 bp, Homo sapien
ggctctgtgtcttctaggttttctagctcatca

SEQ ID NO: 452961 - DNA, 33 bp, Homo sapien
tgaaagctttgttccagtataggatctttgagg

SEQ ID NO: 452962 - DNA, 33 bp, Homo sapien
tgaaagctttgttccattataggatctttgagg

SEQ ID NO: 452963 - DNA, 33 bp, Homo sapien
ttattttctgaagtccaactctttccaactttg

SEQ ID NO: 452964 - DNA, 33 bp, Homo sapien
ttattttctgaagtccgactctttccaactttg

SEQ ID NO: 452965 - DNA, 33 bp, Homo sapien
cacttcaggtctgacccggcataatctcagtga

SEQ ID NO: 452966 - DNA, 33 bp, Homo sapien
cacttcaggtctgacctggcataatctcagtga

SEQ ID NO: 452967 - DNA, 33 bp, Homo sapien
gggatcccaacaacccacttggtgcctacccca

SEQ ID NO: 452968 - DNA, 33 bp, Homo sapien
gggatcccaacaacccgcttggtgcctacccca

SEQ ID NO: 452969 - DNA, 33 bp, Homo sapien
aagaattagtgcaggaacaattacaaaagggac

SEQ ID NO: 452970 - DNA, 33 bp, Homo sapien
aagaattagtgcaggatcaattacaaaagggac

SEQ ID NO: 452971 - DNA, 33 bp, Homo sapien
gtgtcctgaacttttccccataatcacacagat

SEQ ID NO: 452972 - DNA, 33 bp, Homo sapien
gtgtcctgaacttttctccataatcacacagat

SEQ ID NO: 452973 - DNA, 33 bp, Homo sapien
acttgaagtgatcatactaaaaatgtagaaata

SEQ ID NO: 452974 - DNA, 33 bp, Homo sapien
acttgaagtgatcatagtaaaaatgtagaaata

SEQ ID NO: 452975 - DNA, 33 bp, Homo sapien
tatggcatagtacctaaagctaacaacacaatg

SEQ ID NO: 452976 - DNA, 33 bp, Homo sapien
tatggcatagtacctatagctaacaacacaatg

SEQ ID NO: 452977 - DNA, 33 bp, Homo sapien
agttacactttgagtacaatctgttgagtagga

SEQ ID NO: 452978 - DNA, 33 bp, Homo sapien
agttacactttgagtataatctgttgagtagga

SEQ ID NO: 452979 - DNA, 33 bp, Homo sapien
aaggaattatcaaaacggccaactccagttggc

SEQ ID NO: 452980 - DNA, 33 bp, Homo sapien
aaggaattatcaaaactgccaactccagttggc

SEQ ID NO: 452981 - DNA, 33 bp, Homo sapien
taaaaaagaatccttacatatgcagccaagtgt

SEQ ID NO: 452982 - DNA, 33 bp, Homo sapien
taaaaaagaatccttagatatgcagccaagtgt

SEQ ID NO: 452983 - DNA, 33 bp, Homo sapien
accaatacactgggtccgaatgacctagagttt

SEQ ID NO: 452984 - DNA, 33 bp, Homo sapien
accaatacactgggtcggaatgacctagagttt

SEQ ID NO: 452985 - DNA, 33 bp, Homo sapien
ataattagtagtacggcaataagtaaaataggt

SEQ ID NO: 452986 - DNA, 33 bp, Homo sapien
ataattagtagtacgggaataagtaaaataggt

SEQ ID NO: 452987 - DNA, 33 bp, Homo sapien
taattggaggcgccacacagtattaacatcaat

SEQ ID NO: 452988 - DNA, 33 bp, Homo sapien
taattggaggcgccacgcagtattaacatcaat

SEQ ID NO: 452989 - DNA, 33 bp, Homo sapien
atgcttggattaaagcgatgacgaattcaaaaa

SEQ ID NO: 452990 - DNA, 33 bp, Homo sapien
atgcttggattaaagctatgacgaattcaaaaa

SEQ ID NO: 452991 - DNA, 33 bp, Homo sapien
taatgacccagcaaacccatgcgtaccatctag

SEQ ID NO: 452992 - DNA, 33 bp, Homo sapien
taatgacccagcaaacgcatgcgtaccatctag

SEQ ID NO: 452993 - DNA, 33 bp, Homo sapien
gccacatcgttttgtcaacttttttgttttgtt

SEQ ID NO: 452994 - DNA, 33 bp, Homo sapien
gccacatcgttttgtcgacttttttgttttgtt

SEQ ID NO: 452995 - DNA, 33 bp, Homo sapien
tattcctctgcaaaagaagtcattttaacctgc

SEQ ID NO: 452996 - DNA, 33 bp, Homo sapien
tattcctctgcaaaagtagtcattttaacctgc

SEQ ID NO: 452997 - DNA, 33 bp, Homo sapien
atacatgttgcggagacgaaactacacaaataa

SEQ ID NO: 452998 - DNA, 33 bp, Homo sapien
atacatgttgcggagaggaaactacacaaataa

SEQ ID NO: 452999 - DNA, 33 bp, Homo sapien
ctcaggttacaagtacacaaacaagaggccggg

SEQ ID NO: 453000 - DNA, 33 bp, Homo sapien
ctcaggttacaagtacgcaaacaagaggccggg

SEQ ID NO: 453001 - DNA, 33 bp, Homo sapien
agccttttctaacccacgaaaggactcacactg

SEQ ID NO: 453002 - DNA, 33 bp, Homo sapien
agccttttctaacccatgaaaggactcacactg

SEQ ID NO: 453003 - DNA, 33 bp, Homo sapien
ttacttatgagccatacgagtttagacaagact

SEQ ID NO: 453004 - DNA, 33 bp, Homo sapien
ttacttatgagccatatgagtttagacaagact

SEQ ID NO: 453005 - DNA, 33 bp, Homo sapien
tgctggtgcccaatgacaattactgcaagtttg

SEQ ID NO: 453006 - DNA, 33 bp, Homo sapien
tgctggtgcccaatgagaattactgcaagtttg

SEQ ID NO: 453007 - DNA, 33 bp, Homo sapien
tgggctgaaccttctacgaaaaccttgacccag

SEQ ID NO: 453008 - DNA, 33 bp, Homo sapien
tgggctgaaccttctatgaaaaccttgacccag

SEQ ID NO: 453009 - DNA, 33 bp, Homo sapien
ggctggcggctttctacggggtctaggtgatca

SEQ ID NO: 453010 - DNA, 33 bp, Homo sapien
ggctggcggctttctatggggtctaggtgatca

SEQ ID NO: 453011 - DNA, 33 bp, Homo sapien
aagggtggaaactcaacgagagaaaggtgctcc

SEQ ID NO: 453012 - DNA, 33 bp, Homo sapien
aagggtggaaactcaatgagagaaaggtgctcc

SEQ ID NO: 453013 - DNA, 33 bp, Homo sapien
tgctccactgggggaaaggccactcagtcctct

SEQ ID NO: 453014 - DNA, 33 bp, Homo sapien
tgctccactgggggaagggccactcagtcctct

SEQ ID NO: 453015 - DNA, 33 bp, Homo sapien
aagcatataatgtgctcagaatagtgtctggca

SEQ ID NO: 453016 - DNA, 33 bp, Homo sapien
aagcatataatgtgctgagaatagtgtctggca

SEQ ID NO: 453017 - DNA, 33 bp, Homo sapien
tgctgcaagttacaagcacatgtgaagccactt

SEQ ID NO: 453018 - DNA, 33 bp, Homo sapien
tgctgcaagttacaagtacatgtgaagccactt

SEQ ID NO: 453019 - DNA, 33 bp, Homo sapien
gccataatcagtatccaagtcctgcagtttctc

SEQ ID NO: 453020 - DNA, 33 bp, Homo sapien
gccataatcagtatccgagtcctgcagtttctc

SEQ ID NO: 453021 - DNA, 33 bp, Homo sapien
gcattctagtgtgatacgtgtgacacaacgtgg

SEQ ID NO: 453022 - DNA, 33 bp, Homo sapien
gcattctagtgtgatatgtgtgacacaacgtgg

SEQ ID NO: 453023 - DNA, 33 bp, Homo sapien
ctacagtgaatgtcacccatagactgagacacg

SEQ ID NO: 453024 - DNA, 33 bp, Homo sapien
ctacagtgaatgtcacgcatagactgagacacg

SEQ ID NO: 453025 - DNA, 33 bp, Homo sapien
atagttcccttatccagccattggcatgatgtt

SEQ ID NO: 453026 - DNA, 33 bp, Homo sapien
atagttcccttatccatccattggcatgatgtt

SEQ ID NO: 453027 - DNA, 33 bp, Homo sapien
catgacaatctcatgacaaatgtctgctgaaca

SEQ ID NO: 453028 - DNA, 33 bp, Homo sapien
catgacaatctcatgataaatgtctgctgaaca

SEQ ID NO: 453029 - DNA, 33 bp, Homo sapien
atgaaggggcgctgatcaggagggtattccaga

SEQ ID NO: 453030 - DNA, 33 bp, Homo sapien
atgaaggggcgctgatgaggagggtattccaga

SEQ ID NO: 453031 - DNA, 33 bp, Homo sapien
ctggtctgagtgtccactgagtccgtttatttg

SEQ ID NO: 453032 - DNA, 33 bp, Homo sapien
ctggtctgagtgtccattgagtccgtttatttg

SEQ ID NO: 453033 - DNA, 33 bp, Homo sapien
acccagtgagacagaccgccaaataaacggact

SEQ ID NO: 453034 - DNA, 33 bp, Homo sapien
acccagtgagacagactgccaaataaacggact

SEQ ID NO: 453035 - DNA, 33 bp, Homo sapien
ctctggtttatttgaccggtttgacgtctgatc

SEQ ID NO: 453036 - DNA, 33 bp, Homo sapien
ctctggtttatttgactggtttgacgtctgatc

SEQ ID NO: 453037 - DNA, 33 bp, Homo sapien
gaccttgtggttagaccgatagacatctcagag

SEQ ID NO: 453038 - DNA, 33 bp, Homo sapien
gaccttgtggttagactgatagacatctcagag

SEQ ID NO: 453039 - DNA, 33 bp, Homo sapien
atgccttcactgaccacgtagttgccttagccc

SEQ ID NO: 453040 - DNA, 33 bp, Homo sapien
atgccttcactgaccatgtagttgccttagccc

SEQ ID NO: 453041 - DNA, 33 bp, Homo sapien
caccttctctgcctcacgacaccttaagtacaa

SEQ ID NO: 453042 - DNA, 33 bp, Homo sapien
caccttctctgcctcatgacaccttaagtacaa

SEQ ID NO: 453043 - DNA, 33 bp, Homo sapien
tcaccccaggcttctacaaaccagggcagggat

SEQ ID NO: 453044 - DNA, 33 bp, Homo sapien
tcaccccaggcttctataaaccagggcagggat

SEQ ID NO: 453045 - DNA, 33 bp, Homo sapien
tttggatatggcacaaagacaacaacccttccc

SEQ ID NO: 453046 - DNA, 33 bp, Homo sapien
tttggatatggcacaaggacaacaacccttccc

SEQ ID NO: 453047 - DNA, 33 bp, Homo sapien
ccatgctctgcttctcaacctgtgttttcacct

SEQ ID NO: 453048 - DNA, 33 bp, Homo sapien
ccatgctctgcttctcgacctgtgttttcacct

SEQ ID NO: 453049 - DNA, 33 bp, Homo sapien
gtcagccttttttatacgtatttgtgtcgtgtg

SEQ ID NO: 453050 - DNA, 33 bp, Homo sapien
gtcagccttttttatatgtatttgtgtcgtgtg

SEQ ID NO: 453051 - DNA, 33 bp, Homo sapien
atgagttcagagcccccacgtttgtccaggaaa

SEQ ID NO: 453052 - DNA, 33 bp, Homo sapien
atgagttcagagccccgacgtttgtccaggaaa

SEQ ID NO: 453053 - DNA, 33 bp, Homo sapien
ggattaaacaaatgcacggaagtgaccaagtac

SEQ ID NO: 453054 - DNA, 33 bp, Homo sapien
ggattaaacaaatgcatggaagtgaccaagtac

SEQ ID NO: 453055 - DNA, 33 bp, Homo sapien
taaaccagagcctcccaatggaaatccaaagta

SEQ ID NO: 453056 - DNA, 33 bp, Homo sapien
taaaccagagcctcccgatggaaatccaaagta

SEQ ID NO: 453057 - DNA, 33 bp, Homo sapien
gttactaagtggtagaataacctaagtcatgca

SEQ ID NO: 453058 - DNA, 33 bp, Homo sapien
gttactaagtggtagagtaacctaagtcatgca

SEQ ID NO: 453059 - DNA, 33 bp, Homo sapien
ccagccctgagttacaatcaatttgagggaaag

SEQ ID NO: 453060 - DNA, 33 bp, Homo sapien
ccagccctgagttacagtcaatttgagggaaag

SEQ ID NO: 453061 - DNA, 33 bp, Homo sapien
ggctgtttggctactgcaagggtcctgatgtcc

SEQ ID NO: 453062 - DNA, 33 bp, Homo sapien
ggctgtttggctactgtaagggtcctgatgtcc

SEQ ID NO: 453063 - DNA, 33 bp, Homo sapien
ggcacccaaatgcagacctcactggtggagggg

SEQ ID NO: 453064 - DNA, 33 bp, Homo sapien
ggcacccaaatgcagagctcactggtggagggg

SEQ ID NO: 453065 - DNA, 33 bp, Homo sapien
tgtcaggagcccagaaagaatgggtttcaagtc

SEQ ID NO: 453066 - DNA, 33 bp, Homo sapien
tgtcaggagcccagaaggaatgggtttcaagtc

SEQ ID NO: 453067 - DNA, 33 bp, Homo sapien
gtctcgggagccctcaaaaatgctggagagaca

SEQ ID NO: 453068 - DNA, 33 bp, Homo sapien
gtctcgggagccctcagaaatgctggagagaca

SEQ ID NO: 453069 - DNA, 33 bp, Homo sapien
gggctgccctgaagaccggattcggttgggaca

SEQ ID NO: 453070 - DNA, 33 bp, Homo sapien
gggctgccctgaagactggattcggttgggaca

SEQ ID NO: 453071 - DNA, 33 bp, Homo sapien
aacaattcatccccaccggctcagcaaccctcc

SEQ ID NO: 453072 - DNA, 33 bp, Homo sapien
aacaattcatccccactggctcagcaaccctcc

SEQ ID NO: 453073 - DNA, 33 bp, Homo sapien
gtccaactcctccaacacttatttctgaaagct

SEQ ID NO: 453074 - DNA, 33 bp, Homo sapien
gtccaactcctccaacgcttatttctgaaagct

SEQ ID NO: 453075 - DNA, 33 bp, Homo sapien
gcattctatggatctaaaactcccagatgggat

SEQ ID NO: 453076 - DNA, 33 bp, Homo sapien
gcattctatggatctacaactcccagatgggat

SEQ ID NO: 453077 - DNA, 33 bp, Homo sapien
tgatgtctacctgacaacttgaaggacctgctt

SEQ ID NO: 453078 - DNA, 33 bp, Homo sapien
tgatgtctacctgacaccttgaaggacctgctt

SEQ ID NO: 453079 - DNA, 33 bp, Homo sapien
gagtgttctgagcagaagagggacttgatccag

SEQ ID NO: 453080 - DNA, 33 bp, Homo sapien
gagtgttctgagcagaggagggacttgatccag

SEQ ID NO: 453081 - DNA, 33 bp, Homo sapien
cctctcaattccaggcactgcagggatctggga

SEQ ID NO: 453082 - DNA, 33 bp, Homo sapien
cctctcaattccaggcgctgcagggatctggga

SEQ ID NO: 453083 - DNA, 33 bp, Homo sapien
gtgaacaaagattccacgtgccttttaggacga

SEQ ID NO: 453084 - DNA, 33 bp, Homo sapien
gtgaacaaagattccatgtgccttttaggacga

SEQ ID NO: 453085 - DNA, 33 bp, Homo sapien
atttcattgtactgacactctttgggaactgta

SEQ ID NO: 453086 - DNA, 33 bp, Homo sapien
atttcattgtactgacgctctttgggaactgta

SEQ ID NO: 453087 - DNA, 33 bp, Homo sapien
aacttgcgtctgtcaacacctaatcctttgcct

SEQ ID NO: 453088 - DNA, 33 bp, Homo sapien
aacttgcgtctgtcaatacctaatcctttgcct

SEQ ID NO: 453089 - DNA, 33 bp, Homo sapien
acagcaaagggatacacggatattgagacttgg

SEQ ID NO: 453090 - DNA, 33 bp, Homo sapien
acagcaaagggatacatggatattgagacttgg

SEQ ID NO: 453091 - DNA, 33 bp, Homo sapien
ccctaatcatttaccacagtcctgttggtctca

SEQ ID NO: 453092 - DNA, 33 bp, Homo sapien
ccctaatcatttaccatagtcctgttggtctca

SEQ ID NO: 453093 - DNA, 33 bp, Homo sapien
gggtggttttgataaacgtgctggatggatgta

SEQ ID NO: 453094 - DNA, 33 bp, Homo sapien
gggtggttttgataaatgtgctggatggatgta

SEQ ID NO: 453095 - DNA, 33 bp, Homo sapien
taaaggggtaaagacaagaatcaagtcgggttc

SEQ ID NO: 453096 - DNA, 33 bp, Homo sapien
taaaggggtaaagacacgaatcaagtcgggttc

SEQ ID NO: 453097 - DNA, 33 bp, Homo sapien
cacagagttaagctcccgcatttggaggatgag

SEQ ID NO: 453098 - DNA, 33 bp, Homo sapien
cacagagttaagctcctgcatttggaggatgag

SEQ ID NO: 453099 - DNA, 33 bp, Homo sapien
ggtccgggatagaataaaacagtagagagtttg

SEQ ID NO: 453100 - DNA, 33 bp, Homo sapien
ggtccgggatagaatagaacagtagagagtttg

SEQ ID NO: 453101 - DNA, 33 bp, Homo sapien
ctgtagtttgtggatcactgccttagagatagt

SEQ ID NO: 453102 - DNA, 33 bp, Homo sapien
ctgtagtttgtggatcgctgccttagagatagt

SEQ ID NO: 453103 - DNA, 33 bp, Homo sapien
aatcacctttgacccacgccctttttcattcat

SEQ ID NO: 453104 - DNA, 33 bp, Homo sapien
aatcacctttgacccatgccctttttcattcat

SEQ ID NO: 453105 - DNA, 33 bp, Homo sapien
gtgggattgcaggatcaaagactaaatgcattt

SEQ ID NO: 453106 - DNA, 33 bp, Homo sapien
gtgggattgcaggatcgaagactaaatgcattt

SEQ ID NO: 453107 - DNA, 33 bp, Homo sapien
agcagaccacatactaaggggaaatattgaaaa

SEQ ID NO: 453108 - DNA, 33 bp, Homo sapien
agcagaccacatactacggggaaatattgaaaa

SEQ ID NO: 453109 - DNA, 33 bp, Homo sapien
gacaagaaatgctgaacaccagagggtctgtgg

SEQ ID NO: 453110 - DNA, 33 bp, Homo sapien
gacaagaaatgctgaataccagagggtctgtgg

SEQ ID NO: 453111 - DNA, 33 bp, Homo sapien
tttaactaaggagtgacggaaaactggcatctc

SEQ ID NO: 453112 - DNA, 33 bp, Homo sapien
tttaactaaggagtgatggaaaactggcatctc

SEQ ID NO: 453113 - DNA, 33 bp, Homo sapien
cccttcttgaaaaaacgatttcttcctcttctt

SEQ ID NO: 453114 - DNA, 33 bp, Homo sapien
cccttcttgaaaaaactatttcttcctcttctt

SEQ ID NO: 453115 - DNA, 33 bp, Homo sapien
gagatctttcgtgacccgagccagagctgctta

SEQ ID NO: 453116 - DNA, 33 bp, Homo sapien
gagatctttcgtgacctgagccagagctgctta

SEQ ID NO: 453117 - DNA, 33 bp, Homo sapien
agaagtaatcaccagtaacactgagcagttgtt

SEQ ID NO: 453118 - DNA, 33 bp, Homo sapien
agaagtaatcaccagtcacactgagcagttgtt

SEQ ID NO: 453119 - DNA, 33 bp, Homo sapien
acacctttaaatgtccaatctcacaagaactca

SEQ ID NO: 453120 - DNA, 33 bp, Homo sapien
acacctttaaatgtccgatctcacaagaactca

SEQ ID NO: 453121 - DNA, 33 bp, Homo sapien
gcatttgtcatagcaagtcgagaaaacaagacc

SEQ ID NO: 453122 - DNA, 33 bp, Homo sapien
gcatttgtcatagcaattcgagaaaacaagacc

SEQ ID NO: 453123 - DNA, 33 bp, Homo sapien
gggaaaatggccaagaagctcagtatggaacaa

SEQ ID NO: 453124 - DNA, 33 bp, Homo sapien
gggaaaatggccaagacgctcagtatggaacaa

SEQ ID NO: 453125 - DNA, 33 bp, Homo sapien
ctccttgagttagcgccgagtagaccccaaggc

SEQ ID NO: 453126 - DNA, 33 bp, Homo sapien
ctccttgagttagcgctgagtagaccccaaggc

SEQ ID NO: 453127 - DNA, 33 bp, Homo sapien
ccgggccgcatcattgaattttaaggctccatg

SEQ ID NO: 453128 - DNA, 33 bp, Homo sapien
ccgggccgcatcattggattttaaggctccatg

SEQ ID NO: 453129 - DNA, 33 bp, Homo sapien
aggttaggagctaatacgaaatgaacaagatag

SEQ ID NO: 453130 - DNA, 33 bp, Homo sapien
aggttaggagctaatatgaaatgaacaagatag

SEQ ID NO: 453131 - DNA, 33 bp, Homo sapien
tctgtgtttgataagaagtaagaaaatgaagca

SEQ ID NO: 453132 - DNA, 33 bp, Homo sapien
tctgtgtttgataagaggtaagaaaatgaagca

SEQ ID NO: 453133 - DNA, 33 bp, Homo sapien
agaacctgcatttaaaaagatcgccaggggatt

SEQ ID NO: 453134 - DNA, 33 bp, Homo sapien
agaacctgcatttaaagagatcgccaggggatt

SEQ ID NO: 453135 - DNA, 33 bp, Homo sapien
cttttctgcttttgtcgcattccaacattgctt

SEQ ID NO: 453136 - DNA, 33 bp, Homo sapien
cttttctgcttttgtctcattccaacattgctt

SEQ ID NO: 453137 - DNA, 33 bp, Homo sapien
gtgtggtccactcactaaatattatactcaaaa

SEQ ID NO: 453138 - DNA, 33 bp, Homo sapien
gtgtggtccactcactgaatattatactcaaaa

SEQ ID NO: 453139 - DNA, 33 bp, Homo sapien
caccaattctacttccaaaattagactttgaat

SEQ ID NO: 453140 - DNA, 33 bp, Homo sapien
caccaattctacttccgaaattagactttgaat

SEQ ID NO: 453141 - DNA, 33 bp, Homo sapien
tggaggtgatgctgtacctggttcagttgtttc

SEQ ID NO: 453142 - DNA, 33 bp, Homo sapien
tggaggtgatgctgtatctggttcagttgtttc

SEQ ID NO: 453143 - DNA, 33 bp, Homo sapien
ctttcctcttttcttcccaagctccagaagttg

SEQ ID NO: 453144 - DNA, 33 bp, Homo sapien
ctttcctcttttcttctcaagctccagaagttg

SEQ ID NO: 453145 - DNA, 33 bp, Homo sapien
atgaaagaaggtaaaaattaaacagtcaagagg

SEQ ID NO: 453146 - DNA, 33 bp, Homo sapien
atgaaagaaggtaaaagttaaacagtcaagagg

SEQ ID NO: 453147 - DNA, 33 bp, Homo sapien
ttctgctaactctggcggaactttagaaaccct

SEQ ID NO: 453148 - DNA, 33 bp, Homo sapien
ttctgctaactctggctgaactttagaaaccct

SEQ ID NO: 453149 - DNA, 33 bp, Homo sapien
cacctgaggaatctcactgaagagcagattggg

SEQ ID NO: 453150 - DNA, 33 bp, Homo sapien
cacctgaggaatctcattgaagagcagattggg

SEQ ID NO: 453151 - DNA, 33 bp, Homo sapien
cgaaatggcagccacaagatttagtgcaagctc

SEQ ID NO: 453152 - DNA, 33 bp, Homo sapien
cgaaatggcagccacatgatttagtgcaagctc

SEQ ID NO: 453153 - DNA, 33 bp, Homo sapien
cccacacccttaggaacgtacaggagagagacc

SEQ ID NO: 453154 - DNA, 33 bp, Homo sapien
cccacacccttaggaatgtacaggagagagacc

SEQ ID NO: 453155 - DNA, 33 bp, Homo sapien
atcaacatcctgaatagaccagtcacctgttct

SEQ ID NO: 453156 - DNA, 33 bp, Homo sapien
atcaacatcctgaatataccagtcacctgttct

SEQ ID NO: 453157 - DNA, 33 bp, Homo sapien
ctgtcaaaaattgtcacaatagcttcatcttgc

SEQ ID NO: 453158 - DNA, 33 bp, Homo sapien
ctgtcaaaaattgtcataatagcttcatcttgc

SEQ ID NO: 453159 - DNA, 33 bp, Homo sapien
aggaccaagagctaaccggttgacccagcctct

SEQ ID NO: 453160 - DNA, 33 bp, Homo sapien
aggaccaagagctaactggttgacccagcctct

SEQ ID NO: 453161 - DNA, 33 bp, Homo sapien
tgtgtatgtgactctaatacaatctatccattc

SEQ ID NO: 453162 - DNA, 33 bp, Homo sapien
tgtgtatgtgactctactacaatctatccattc

SEQ ID NO: 453163 - DNA, 33 bp, Homo sapien
ctgtcctgtgcattgcagattgtttagccttct

SEQ ID NO: 453164 - DNA, 33 bp, Homo sapien
ctgtcctgtgcattgcggattgtttagccttct

SEQ ID NO: 453165 - DNA, 33 bp, Homo sapien
aagtttgcctgactacaaagtttggtgtgctgg

SEQ ID NO: 453166 - DNA, 33 bp, Homo sapien
aagtttgcctgactacgaagtttggtgtgctgg

SEQ ID NO: 453167 - DNA, 33 bp, Homo sapien
aggaatgaatctctaacaccagaatcttaccta

SEQ ID NO: 453168 - DNA, 33 bp, Homo sapien
aggaatgaatctctaataccagaatcttaccta

SEQ ID NO: 453169 - DNA, 33 bp, Homo sapien
cctacatcatgacccgcagatgtctggatgatc

SEQ ID NO: 453170 - DNA, 33 bp, Homo sapien
cctacatcatgacccgtagatgtctggatgatc

SEQ ID NO: 453171 - DNA, 33 bp, Homo sapien
gacggaatgtggctgcaactttgggcattacat

SEQ ID NO: 453172 - DNA, 33 bp, Homo sapien
gacggaatgtggctgcgactttgggcattacat

SEQ ID NO: 453173 - DNA, 33 bp, Homo sapien
attttattgaggaagccgaagttgagagagggg

SEQ ID NO: 453174 - DNA, 33 bp, Homo sapien
attttattgaggaagctgaagttgagagagggg

SEQ ID NO: 453175 - DNA, 33 bp, Homo sapien
gcttgatcttaattcacccttatagcaacctgt

SEQ ID NO: 453176 - DNA, 33 bp, Homo sapien
gcttgatcttaattcatccttatagcaacctgt

SEQ ID NO: 453177 - DNA, 33 bp, Homo sapien
tctcttcctgaaataaaatagccaatttttctc

SEQ ID NO: 453178 - DNA, 33 bp, Homo sapien
tctcttcctgaaataacatagccaatttttctc

SEQ ID NO: 453179 - DNA, 33 bp, Homo sapien
acttttttcttctgcacaggaactggcaaagct

SEQ ID NO: 453180 - DNA, 33 bp, Homo sapien
acttttttcttctgcataggaactggcaaagct

SEQ ID NO: 453181 - DNA, 33 bp, Homo sapien
tgcctaaatattttgaagtagctaacagaatct

SEQ ID NO: 453182 - DNA, 33 bp, Homo sapien
tgcctaaatattttgaggtagctaacagaatct

SEQ ID NO: 453183 - DNA, 33 bp, Homo sapien
ctcattactgagaggaaaataccaagcccttca

SEQ ID NO: 453184 - DNA, 33 bp, Homo sapien
ctcattactgagaggacaataccaagcccttca

SEQ ID NO: 453185 - DNA, 33 bp, Homo sapien
gtattttttggtgacaaaataaggctcaggtag

SEQ ID NO: 453186 - DNA, 33 bp, Homo sapien
gtattttttggtgacacaataaggctcaggtag

SEQ ID NO: 453187 - DNA, 33 bp, Homo sapien
agcatggatgttagcacggtattattattcttt

SEQ ID NO: 453188 - DNA, 33 bp, Homo sapien
agcatggatgttagcatggtattattattcttt

SEQ ID NO: 453189 - DNA, 33 bp, Homo sapien
gactactcagatgatgaaaaactattgtatata

SEQ ID NO: 453190 - DNA, 33 bp, Homo sapien
gactactcagatgatggaaaactattgtatata

SEQ ID NO: 453191 - DNA, 33 bp, Homo sapien
aggttccggatggtgaagagctcattgattcac

SEQ ID NO: 453192 - DNA, 33 bp, Homo sapien
aggttccggatggtgaggagctcattgattcac

SEQ ID NO: 453193 - DNA, 33 bp, Homo sapien
ccaactcagtctcccaagtaactaagattacag

SEQ ID NO: 453194 - DNA, 33 bp, Homo sapien
ccaactcagtctcccaggtaactaagattacag

SEQ ID NO: 453195 - DNA, 33 bp, Homo sapien
atgtatgtgttttcaacgttcagaaaagagatg

SEQ ID NO: 453196 - DNA, 33 bp, Homo sapien
atgtatgtgttttcaatgttcagaaaagagatg

SEQ ID NO: 453197 - DNA, 33 bp, Homo sapien
gcaagtccaaagtagacgtaagcaagaggccag

SEQ ID NO: 453198 - DNA, 33 bp, Homo sapien
gcaagtccaaagtagatgtaagcaagaggccag

SEQ ID NO: 453199 - DNA, 33 bp, Homo sapien
actgtgtagatcataacgtgtaccccaaagacc

SEQ ID NO: 453200 - DNA, 33 bp, Homo sapien
actgtgtagatcataatgtgtaccccaaagacc

SEQ ID NO: 453201 - DNA, 33 bp, Homo sapien
gtgattcaaacgctaaggatacaggagctaaaa

SEQ ID NO: 453202 - DNA, 33 bp, Homo sapien
gtgattcaaacgctaatgatacaggagctaaaa

SEQ ID NO: 453203 - DNA, 33 bp, Homo sapien
tattaccccaggcgaacaatgccacttcactaa

SEQ ID NO: 453204 - DNA, 33 bp, Homo sapien
tattaccccaggcgaataatgccacttcactaa

SEQ ID NO: 453205 - DNA, 33 bp, Homo sapien
ccttgccagatttctccactcggtctattacca

SEQ ID NO: 453206 - DNA, 33 bp, Homo sapien
ccttgccagatttctctactcggtctattacca

SEQ ID NO: 453207 - DNA, 33 bp, Homo sapien
gaagtcacatgaccaaccccagtatcagtgtgg

SEQ ID NO: 453208 - DNA, 33 bp, Homo sapien
gaagtcacatgaccaagcccagtatcagtgtgg

SEQ ID NO: 453209 - DNA, 33 bp, Homo sapien
aaggctatattcagtaccaataacaaacaaatc

SEQ ID NO: 453210 - DNA, 33 bp, Homo sapien
aaggctatattcagtagcaataacaaacaaatc

SEQ ID NO: 453211 - DNA, 33 bp, Homo sapien
acaatcccatgtaacaaatgaggagatgaggcc

SEQ ID NO: 453212 - DNA, 33 bp, Homo sapien
acaatcccatgtaacagatgaggagatgaggcc

SEQ ID NO: 453213 - DNA, 33 bp, Homo sapien
agcatcaaccctgcaacggggacagtgctcgag

SEQ ID NO: 453214 - DNA, 33 bp, Homo sapien
agcatcaaccctgcaatggggacagtgctcgag

SEQ ID NO: 453215 - DNA, 33 bp, Homo sapien
cggaccataaaagtgacggcgatagtgttggac

SEQ ID NO: 453216 - DNA, 33 bp, Homo sapien
cggaccataaaagtgatggcgatagtgttggac

SEQ ID NO: 453217 - DNA, 33 bp, Homo sapien
ctctccaagctgcacacagaggagtagatgaag

SEQ ID NO: 453218 - DNA, 33 bp, Homo sapien
ctctccaagctgcacagagaggagtagatgaag

SEQ ID NO: 453219 - DNA, 33 bp, Homo sapien
ctggccctgccttctgaacaggtgaatggcttt

SEQ ID NO: 453220 - DNA, 33 bp, Homo sapien
ctggccctgccttctgcacaggtgaatggcttt

SEQ ID NO: 453221 - DNA, 33 bp, Homo sapien
ctattgtctatgtctgcaacagggttgaattca

SEQ ID NO: 453222 - DNA, 33 bp, Homo sapien
ctattgtctatgtctgtaacagggttgaattca

SEQ ID NO: 453223 - DNA, 33 bp, Homo sapien
gacgggtgttcatagcaatagggggcatccagg

SEQ ID NO: 453224 - DNA, 33 bp, Homo sapien
gacgggtgttcatagccatagggggcatccagg

SEQ ID NO: 453225 - DNA, 33 bp, Homo sapien
agctggaggagctcacaattttctgccaccccc

SEQ ID NO: 453226 - DNA, 33 bp, Homo sapien
agctggaggagctcacgattttctgccaccccc

SEQ ID NO: 453227 - DNA, 33 bp, Homo sapien
cacccagtccgtcggaactcagaatggcagggc

SEQ ID NO: 453228 - DNA, 33 bp, Homo sapien
cacccagtccgtcggagctcagaatggcagggc

SEQ ID NO: 453229 - DNA, 33 bp, Homo sapien
ggactctgccaactacaggatcaattccactct

SEQ ID NO: 453230 - DNA, 33 bp, Homo sapien
ggactctgccaactacgggatcaattccactct

SEQ ID NO: 453231 - DNA, 33 bp, Homo sapien
ttcatccgtagatggacgtgtgggctgtgtcca

SEQ ID NO: 453232 - DNA, 33 bp, Homo sapien
ttcatccgtagatggatgtgtgggctgtgtcca

SEQ ID NO: 453233 - DNA, 33 bp, Homo sapien
tttcatgtaagtgggacgattcaagatgtagcc

SEQ ID NO: 453234 - DNA, 33 bp, Homo sapien
tttcatgtaagtgggatgattcaagatgtagcc

SEQ ID NO: 453235 - DNA, 33 bp, Homo sapien
caaacttggtgttgtcccttttttctgttgtca

SEQ ID NO: 453236 - DNA, 33 bp, Homo sapien
caaacttggtgttgtctcttttttctgttgtca

SEQ ID NO: 453237 - DNA, 33 bp, Homo sapien
ctgtaagttgtgaaaactgatagcaatacaaaa

SEQ ID NO: 453238 - DNA, 33 bp, Homo sapien
ctgtaagttgtgaaaattgatagcaatacaaaa

SEQ ID NO: 453239 - DNA, 33 bp, Homo sapien
ggactaggtgggaatcacgtgtgtagaaggcta

SEQ ID NO: 453240 - DNA, 33 bp, Homo sapien
ggactaggtgggaatctcgtgtgtagaaggcta

SEQ ID NO: 453241 - DNA, 33 bp, Homo sapien
taacctctgttttccacgttggatgtgttttag

SEQ ID NO: 453242 - DNA, 33 bp, Homo sapien
taacctctgttttccatgttggatgtgttttag

SEQ ID NO: 453243 - DNA, 33 bp, Homo sapien
acacaaaataacctaacacatggatatagacat

SEQ ID NO: 453244 - DNA, 33 bp, Homo sapien
acacaaaataacctaatacatggatatagacat

SEQ ID NO: 453245 - DNA, 33 bp, Homo sapien
atcactggtcactgtcacccattctctgctttc

SEQ ID NO: 453246 - DNA, 33 bp, Homo sapien
atcactggtcactgtcgcccattctctgctttc

SEQ ID NO: 453247 - DNA, 33 bp, Homo sapien
agctagtagtccctttaaaaggaagtgacatca

SEQ ID NO: 453248 - DNA, 33 bp, Homo sapien
agctagtagtcccttttaaaggaagtgacatca

SEQ ID NO: 453249 - DNA, 33 bp, Homo sapien
agaagggacataagacaatggcctgaccccacc

SEQ ID NO: 453250 - DNA, 33 bp, Homo sapien
agaagggacataagaccatggcctgaccccacc

SEQ ID NO: 453251 - DNA, 33 bp, Homo sapien
atgtgtgctgcaaaaacgttgctttggtagatg

SEQ ID NO: 453252 - DNA, 33 bp, Homo sapien
atgtgtgctgcaaaaaggttgctttggtagatg

SEQ ID NO: 453253 - DNA, 33 bp, Homo sapien
cagcgcagatctggacaaagtactgttgggttt

SEQ ID NO: 453254 - DNA, 33 bp, Homo sapien
cagcgcagatctggacgaagtactgttgggttt

SEQ ID NO: 453255 - DNA, 33 bp, Homo sapien
aaagaaagggttctcacgctcaaatatatgggc

SEQ ID NO: 453256 - DNA, 33 bp, Homo sapien
aaagaaagggttctcatgctcaaatatatgggc

SEQ ID NO: 453257 - DNA, 33 bp, Homo sapien
aaaaagcaaagcatataaggtttatgaagcagc

SEQ ID NO: 453258 - DNA, 33 bp, Homo sapien
aaaaagcaaagcatatgaggtttatgaagcagc

SEQ ID NO: 453259 - DNA, 33 bp, Homo sapien
acgtaacataatgttcgccatttccatccacat

SEQ ID NO: 453260 - DNA, 33 bp, Homo sapien
acgtaacataatgttctccatttccatccacat

SEQ ID NO: 453261 - DNA, 33 bp, Homo sapien
tatgatggcacccaacggtagtgctgaagtgca

SEQ ID NO: 453262 - DNA, 33 bp, Homo sapien
tatgatggcacccaactgtagtgctgaagtgca

SEQ ID NO: 453263 - DNA, 33 bp, Homo sapien
ccctcaccgattactcaattactggccccgtga

SEQ ID NO: 453264 - DNA, 33 bp, Homo sapien
ccctcaccgattactcgattactggccccgtga

SEQ ID NO: 453265 - DNA, 33 bp, Homo sapien
tgctagcttttaaatacaggctgctttttcatt

SEQ ID NO: 453266 - DNA, 33 bp, Homo sapien
tgctagcttttaaatataggctgctttttcatt

SEQ ID NO: 453267 - DNA, 33 bp, Homo sapien
ttggggccacaattcaacctgctacaatcacaa

SEQ ID NO: 453268 - DNA, 33 bp, Homo sapien
ttggggccacaattcagcctgctacaatcacaa

SEQ ID NO: 453269 - DNA, 33 bp, Homo sapien
ctatagaaagcctgaacaagaatttgaacatct

SEQ ID NO: 453270 - DNA, 33 bp, Homo sapien
ctatagaaagcctgaagaagaatttgaacatct

SEQ ID NO: 453271 - DNA, 33 bp, Homo sapien
ctaaaggaggtgaccccgaagtcttataagctc

SEQ ID NO: 453272 - DNA, 33 bp, Homo sapien
ctaaaggaggtgacccggaagtcttataagctc

SEQ ID NO: 453273 - DNA, 33 bp, Homo sapien
gcaaccaaagagacaccgggaggcaatgacctc

SEQ ID NO: 453274 - DNA, 33 bp, Homo sapien
gcaaccaaagagacactgggaggcaatgacctc

SEQ ID NO: 453275 - DNA, 33 bp, Homo sapien
ctataaatgaggagcaccagatcgtcgtggtgg

SEQ ID NO: 453276 - DNA, 33 bp, Homo sapien
ctataaatgaggagcatcagatcgtcgtggtgg

SEQ ID NO: 453277 - DNA, 33 bp, Homo sapien
gccaacaaagaaaaaggcttccttcattgactt

SEQ ID NO: 453278 - DNA, 33 bp, Homo sapien
gccaacaaagaaaaagtcttccttcattgactt

SEQ ID NO: 453279 - DNA, 33 bp, Homo sapien
cctaaacccagaacgacatccaacctcattccg

SEQ ID NO: 453280 - DNA, 33 bp, Homo sapien
cctaaacccagaacgagatccaacctcattccg

SEQ ID NO: 453281 - DNA, 33 bp, Homo sapien
tcatcccgggtgacaacttctgggctagacgga

SEQ ID NO: 453282 - DNA, 33 bp, Homo sapien
tcatcccgggtgacaatttctgggctagacgga

SEQ ID NO: 453283 - DNA, 33 bp, Homo sapien
tgtgcacgttgcactcccttccaaatggaacct

SEQ ID NO: 453284 - DNA, 33 bp, Homo sapien
tgtgcacgttgcactctcttccaaatggaacct

SEQ ID NO: 453285 - DNA, 33 bp, Homo sapien
agtatgttaggcagacaaaagagtgagaggggc

SEQ ID NO: 453286 - DNA, 33 bp, Homo sapien
agtatgttaggcagacgaaagagtgagaggggc

SEQ ID NO: 453287 - DNA, 33 bp, Homo sapien
atctaagatgccagccagagaactaagatcaag

SEQ ID NO: 453288 - DNA, 33 bp, Homo sapien
atctaagatgccagccggagaactaagatcaag

SEQ ID NO: 453289 - DNA, 33 bp, Homo sapien
gagtgcagcacttaagaacctggagttgaggcc

SEQ ID NO: 453290 - DNA, 33 bp, Homo sapien
gagtgcagcacttaaggacctggagttgaggcc

SEQ ID NO: 453291 - DNA, 33 bp, Homo sapien
gagaagctggggctggacagatactgcttgctc

SEQ ID NO: 453292 - DNA, 33 bp, Homo sapien
gagaagctggggctgggcagatactgcttgctc

SEQ ID NO: 453293 - DNA, 33 bp, Homo sapien
cagggatgccactcaacgccctgcagtgcacag

SEQ ID NO: 453294 - DNA, 33 bp, Homo sapien
cagggatgccactcaatgccctgcagtgcacag

SEQ ID NO: 453295 - DNA, 33 bp, Homo sapien
gccgagactgtgtttacaaggcaacatacctgt

SEQ ID NO: 453296 - DNA, 33 bp, Homo sapien
gccgagactgtgtttataaggcaacatacctgt

SEQ ID NO: 453297 - DNA, 33 bp, Homo sapien
ggaaaagcaagaagcaaacaaccgggtcccttt

SEQ ID NO: 453298 - DNA, 33 bp, Homo sapien
ggaaaagcaagaagcagacaaccgggtcccttt

SEQ ID NO: 453299 - DNA, 33 bp, Homo sapien
ggaagaaaaactgcaaactccttactgtgaccc

SEQ ID NO: 453300 - DNA, 33 bp, Homo sapien
ggaagaaaaactgcaatctccttactgtgaccc

SEQ ID NO: 453301 - DNA, 33 bp, Homo sapien
tttgtaagatgtttaaataaacggtatatagaa

SEQ ID NO: 453302 - DNA, 33 bp, Homo sapien
tttgtaagatgtttaagtaaacggtatatagaa

SEQ ID NO: 453303 - DNA, 33 bp, Homo sapien
ggttggcgtccacaagcaatacctctcgttcca

SEQ ID NO: 453304 - DNA, 33 bp, Homo sapien
ggttggcgtccacaagtaatacctctcgttcca

SEQ ID NO: 453305 - DNA, 33 bp, Homo sapien
ctactacatcttgtaaatgagcctgttaattcc

SEQ ID NO: 453306 - DNA, 33 bp, Homo sapien
ctactacatcttgtaattgagcctgttaattcc

SEQ ID NO: 453307 - DNA, 33 bp, Homo sapien
acctctcgtcttgccaccacaggtagaagacag

SEQ ID NO: 453308 - DNA, 33 bp, Homo sapien
acctctcgtcttgccagcacaggtagaagacag

SEQ ID NO: 453309 - DNA, 33 bp, Homo sapien
gtgttgacatggggaaatggctgctgatatatt

SEQ ID NO: 453310 - DNA, 33 bp, Homo sapien
gtgttgacatggggaagtggctgctgatatatt

SEQ ID NO: 453311 - DNA, 33 bp, Homo sapien
acttcctgatgacctcgctacattagcttttat

SEQ ID NO: 453312 - DNA, 33 bp, Homo sapien
acttcctgatgacctctctacattagcttttat

SEQ ID NO: 453313 - DNA, 33 bp, Homo sapien
tttccacaatgttaaacgattttccttatttca

SEQ ID NO: 453314 - DNA, 33 bp, Homo sapien
tttccacaatgttaaatgattttccttatttca

SEQ ID NO: 453315 - DNA, 33 bp, Homo sapien
atgtacaagagggtagaactcctgtgtgcaatt

SEQ ID NO: 453316 - DNA, 33 bp, Homo sapien
atgtacaagagggtaggactcctgtgtgcaatt

SEQ ID NO: 453317 - DNA, 33 bp, Homo sapien
ctagtttgggaacatcaaaggcacatactcaca

SEQ ID NO: 453318 - DNA, 33 bp, Homo sapien
ctagtttgggaacatcgaaggcacatactcaca

SEQ ID NO: 453319 - DNA, 33 bp, Homo sapien
taatatagatggctaacgtagattgttaatgta

SEQ ID NO: 453320 - DNA, 33 bp, Homo sapien
taatatagatggctaatgtagattgttaatgta

SEQ ID NO: 453321 - DNA, 33 bp, Homo sapien
atgtagattgttaatacagactgctaatgtgat

SEQ ID NO: 453322 - DNA, 33 bp, Homo sapien
atgtagattgttaatatagactgctaatgtgat

SEQ ID NO: 453323 - DNA, 33 bp, Homo sapien
aaaaaagacaaggaaaatctagcaaatgtttac

SEQ ID NO: 453324 - DNA, 33 bp, Homo sapien
aaaaaagacaaggaaagtctagcaaatgtttac

SEQ ID NO: 453325 - DNA, 33 bp, Homo sapien
atatgagaaaagagataagacttggtagaccac

SEQ ID NO: 453326 - DNA, 33 bp, Homo sapien
atatgagaaaagagatgagacttggtagaccac

SEQ ID NO: 453327 - DNA, 33 bp, Homo sapien
gttatcttggtttttcactttcttcattgactt

SEQ ID NO: 453328 - DNA, 33 bp, Homo sapien
gttatcttggtttttcgctttcttcattgactt

SEQ ID NO: 453329 - DNA, 33 bp, Homo sapien
taattccttttcgtaaacaaattattgtggtat

SEQ ID NO: 453330 - DNA, 33 bp, Homo sapien
taattccttttcgtaaccaaattattgtggtat

SEQ ID NO: 453331 - DNA, 33 bp, Homo sapien
cccattctactttgaggaaaggagctggcattt

SEQ ID NO: 453332 - DNA, 33 bp, Homo sapien
cccattctactttgagtaaaggagctggcattt

SEQ ID NO: 453333 - DNA, 33 bp, Homo sapien
atctccagcagagtggccacaatcaaaaccctt

SEQ ID NO: 453334 - DNA, 33 bp, Homo sapien
atctccagcagagtggtcacaatcaaaaccctt

SEQ ID NO: 453335 - DNA, 33 bp, Homo sapien
ttttctgaaaccaaagcaaagtaggagaggagg

SEQ ID NO: 453336 - DNA, 33 bp, Homo sapien
ttttctgaaaccaaaggaaagtaggagaggagg

SEQ ID NO: 453337 - DNA, 33 bp, Homo sapien
gtgttggaaagtggtacgacagttgctcaagaa

SEQ ID NO: 453338 - DNA, 33 bp, Homo sapien
gtgttggaaagtggtatgacagttgctcaagaa

SEQ ID NO: 453339 - DNA, 33 bp, Homo sapien
gaatttgggcaaacccagactgttgctcaagac

SEQ ID NO: 453340 - DNA, 33 bp, Homo sapien
gaatttgggcaaaccctgactgttgctcaagac

SEQ ID NO: 453341 - DNA, 33 bp, Homo sapien
ggtggaaagctcgccaatatctgtgccagtgcc

SEQ ID NO: 453342 - DNA, 33 bp, Homo sapien
ggtggaaagctcgccattatctgtgccagtgcc

SEQ ID NO: 453343 - DNA, 33 bp, Homo sapien
cctctgactgcaggcactgccgtggcaccatag

SEQ ID NO: 453344 - DNA, 33 bp, Homo sapien
cctctgactgcaggcattgccgtggcaccatag

SEQ ID NO: 453345 - DNA, 33 bp, Homo sapien
cttacttggcacaaaaatgctccatgtcattgg

SEQ ID NO: 453346 - DNA, 33 bp, Homo sapien
cttacttggcacaaaactgctccatgtcattgg

SEQ ID NO: 453347 - DNA, 33 bp, Homo sapien
ttccaaataagacaacgcattgggtttgcacag

SEQ ID NO: 453348 - DNA, 33 bp, Homo sapien
ttccaaataagacaactcattgggtttgcacag

SEQ ID NO: 453349 - DNA, 33 bp, Homo sapien
aaaatgcttacttgtacgaacatgatctacatt

SEQ ID NO: 453350 - DNA, 33 bp, Homo sapien
aaaatgcttacttgtatgaacatgatctacatt

SEQ ID NO: 453351 - DNA, 33 bp, Homo sapien
gacctgaccgcaagtcacgcactcatacagttt

SEQ ID NO: 453352 - DNA, 33 bp, Homo sapien
gacctgaccgcaagtcgcgcactcatacagttt

SEQ ID NO: 453353 - DNA, 33 bp, Homo sapien
cagcaaatacctatgaatcagtaacaaagaggc

SEQ ID NO: 453354 - DNA, 33 bp, Homo sapien
cagcaaatacctatgactcagtaacaaagaggc

SEQ ID NO: 453355 - DNA, 33 bp, Homo sapien
gaggcagtgatttacaaacttaagagtcccagt

SEQ ID NO: 453356 - DNA, 33 bp, Homo sapien
gaggcagtgatttacagacttaagagtcccagt

SEQ ID NO: 453357 - DNA, 33 bp, Homo sapien
tatgcttaccctataccgtaatgtgtgcaatag

SEQ ID NO: 453358 - DNA, 33 bp, Homo sapien
tatgcttaccctatactgtaatgtgtgcaatag

SEQ ID NO: 453359 - DNA, 33 bp, Homo sapien
aatgatattttgtgtcacatgactgatatatga

SEQ ID NO: 453360 - DNA, 33 bp, Homo sapien
aatgatattttgtgtcccatgactgatatatga

SEQ ID NO: 453361 - DNA, 33 bp, Homo sapien
catgttggtgtgaagacgaaagaagacagtgtt

SEQ ID NO: 453362 - DNA, 33 bp, Homo sapien
catgttggtgtgaagatgaaagaagacagtgtt

SEQ ID NO: 453363 - DNA, 33 bp, Homo sapien
gttaagaggaagtaaaagtgttgcagtaaagta

SEQ ID NO: 453364 - DNA, 33 bp, Homo sapien
gttaagaggaagtaaatgtgttgcagtaaagta

SEQ ID NO: 453365 - DNA, 33 bp, Homo sapien
tccatcatcgccggtaccttgcactatctctac

SEQ ID NO: 453366 - DNA, 33 bp, Homo sapien
tccatcatcgccggtatcttgcactatctctac

SEQ ID NO: 453367 - DNA, 33 bp, Homo sapien
cctgaagcttaataagaaacatttaccatctat

SEQ ID NO: 453368 - DNA, 33 bp, Homo sapien
cctgaagcttaataaggaacatttaccatctat

SEQ ID NO: 453369 - DNA, 33 bp, Homo sapien
ggtggtgccctcaggactcctcgtgtgtcaatg

SEQ ID NO: 453370 - DNA, 33 bp, Homo sapien
ggtggtgccctcaggattcctcgtgtgtcaatg

SEQ ID NO: 453371 - DNA, 33 bp, Homo sapien
cacagtaataagaatgcagttttgcaaagaatt

SEQ ID NO: 453372 - DNA, 33 bp, Homo sapien
cacagtaataagaatggagttttgcaaagaatt

SEQ ID NO: 453373 - DNA, 33 bp, Homo sapien
aaaaaaaaaatctgaccgagacagcctgcatat

SEQ ID NO: 453374 - DNA, 33 bp, Homo sapien
aaaaaaaaaatctgactgagacagcctgcatat

SEQ ID NO: 453375 - DNA, 33 bp, Homo sapien
ggatacacttattatccagaaaatctggggact

SEQ ID NO: 453376 - DNA, 33 bp, Homo sapien
ggatacacttattatctagaaaatctggggact

SEQ ID NO: 453377 - DNA, 33 bp, Homo sapien
cgcctccatctacataagggagcttttttcttg

SEQ ID NO: 453378 - DNA, 33 bp, Homo sapien
cgcctccatctacataggggagcttttttcttg

SEQ ID NO: 453379 - DNA, 33 bp, Homo sapien
cctagctacctgaagaaaatctaataggcagtc

SEQ ID NO: 453380 - DNA, 33 bp, Homo sapien
cctagctacctgaagataatctaataggcagtc

SEQ ID NO: 453381 - DNA, 33 bp, Homo sapien
gatgagattgcacgtaaggaggaaactatctta

SEQ ID NO: 453382 - DNA, 33 bp, Homo sapien
gatgagattgcacgtatggaggaaactatctta

SEQ ID NO: 453383 - DNA, 33 bp, Homo sapien
ctggcatcctggatcacgagtgttctgaattcc

SEQ ID NO: 453384 - DNA, 33 bp, Homo sapien
ctggcatcctggatcatgagtgttctgaattcc

SEQ ID NO: 453385 - DNA, 33 bp, Homo sapien; identical to SEQ ID NO: 453383

SEQ ID NO: 453386 - DNA, 33 bp, Homo sapien; identical to SEQ ID NO: 453384

SEQ ID NO: 453387 - DNA, 33 bp, Homo sapien
tgtaggagctgtcacgacctgatgtagtatagg

SEQ ID NO: 453388 - DNA, 33 bp, Homo sapien
tgtaggagctgtcacgccctgatgtagtatagg

SEQ ID NO: 453389 - DNA, 33 bp, Homo sapien
tagtgagattcctttaaatccacctttggcatt

SEQ ID NO: 453390 - DNA, 33 bp, Homo sapien
tagtgagattcctttatatccacctttggcatt

SEQ ID NO: 453391 - DNA, 33 bp, Homo sapien
taattttgtgagataacgcagattttaattagc

SEQ ID NO: 453392 - DNA, 33 bp, Homo sapien
taattttgtgagataatgcagattttaattagc

SEQ ID NO: 453393 - DNA, 33 bp, Homo sapien
aatgatgcctcatccacgcttttcttcttatct

SEQ ID NO: 453394 - DNA, 33 bp, Homo sapien
aatgatgcctcatccatgcttttcttcttatct

SEQ ID NO: 453395 - DNA, 33 bp, Homo sapien
tggatagtcgcatggacggaatattttgtcctc

SEQ ID NO: 453396 - DNA, 33 bp, Homo sapien
tggatagtcgcatggatggaatattttgtcctc

SEQ ID NO: 453397 - DNA, 33 bp, Homo sapien
caggaaacaaagaggaagttcattgcaattcat

SEQ ID NO: 453398 - DNA, 33 bp, Homo sapien
caggaaacaaagaggatgttcattgcaattcat

SEQ ID NO: 453399 - DNA, 33 bp, Homo sapien
tttggaatatgtaactcaggatctctttgtctg

SEQ ID NO: 453400 - DNA, 33 bp, Homo sapien
tttggaatatgtaactgaggatctctttgtctg

SEQ ID NO: 453401 - DNA, 33 bp, Homo sapien
aatgaaaacattcagacgtcagaacatgaaagc

SEQ ID NO: 453402 - DNA, 33 bp, Homo sapien
aatgaaaacattcagatgtcagaacatgaaagc

SEQ ID NO: 453403 - DNA, 33 bp, Homo sapien
tgaatatccaacatgaaagaagagactatgaaa

SEQ ID NO: 453404 - DNA, 33 bp, Homo sapien
tgaatatccaacatgagagaagagactatgaaa

SEQ ID NO: 453405 - DNA, 33 bp, Homo sapien
acctgacgatggtctaacctccttagcactttt

SEQ ID NO: 453406 - DNA, 33 bp, Homo sapien
acctgacgatggtctagcctccttagcactttt

SEQ ID NO: 453407 - DNA, 33 bp, Homo sapien
catgaggtatgtggtacgattcttggtgaaaaa

SEQ ID NO: 453408 - DNA, 33 bp, Homo sapien
catgaggtatgtggtaggattcttggtgaaaaa

SEQ ID NO: 453409 - DNA, 33 bp, Homo sapien
gatgtccctgaattcaacaaagtatagaatgat

SEQ ID NO: 453410 - DNA, 33 bp, Homo sapien
gatgtccctgaattcagcaaagtatagaatgat

SEQ ID NO: 453411 - DNA, 33 bp, Homo sapien
ttctagggagctagaagattttgaaagaacgtg

SEQ ID NO: 453412 - DNA, 33 bp, Homo sapien
ttctagggagctagaatattttgaaagaacgtg

SEQ ID NO: 453413 - DNA, 33 bp, Homo sapien
gactcacaaaggaacccgaatttctaaccagca

SEQ ID NO: 453414 - DNA, 33 bp, Homo sapien
gactcacaaaggaacctgaatttctaaccagca

SEQ ID NO: 453415 - DNA, 33 bp, Homo sapien
ccaagggaaggatttgaaatcacagtctatgta

SEQ ID NO: 453416 - DNA, 33 bp, Homo sapien
ccaagggaaggatttggaatcacagtctatgta

SEQ ID NO: 453417 - DNA, 33 bp, Homo sapien
ttgtaatctaagtccaaatgaaatcaattgatt

SEQ ID NO: 453418 - DNA, 33 bp, Homo sapien
ttgtaatctaagtccagatgaaatcaattgatt

SEQ ID NO: 453419 - DNA, 33 bp, Homo sapien
ggaacaaagctggaggaaatgattggctctcag

SEQ ID NO: 453420 - DNA, 33 bp, Homo sapien
ggaacaaagctggaggcaatgattggctctcag

SEQ ID NO: 453421 - DNA, 33 bp, Homo sapien
atatatgaaattctaacgttttggcaaaagcaa

SEQ ID NO: 453422 - DNA, 33 bp, Homo sapien
atatatgaaattctaatgttttggcaaaagcaa

SEQ ID NO: 453423 - DNA, 33 bp, Homo sapien
tcctactctttgcaggaatgaatgtatttctgc

SEQ ID NO: 453424 - DNA, 33 bp, Homo sapien
tcctactctttgcagggatgaatgtatttctgc

SEQ ID NO: 453425 - DNA, 33 bp, Homo sapien
acatgaaagtgaaacacgggcatgaccgctgaa

SEQ ID NO: 453426 - DNA, 33 bp, Homo sapien
acatgaaagtgaaacatgggcatgaccgctgaa

SEQ ID NO: 453427 - DNA, 33 bp, Homo sapien
gcttgatactaggtgacctcaggtaaacattct

SEQ ID NO: 453428 - DNA, 33 bp, Homo sapien
gcttgatactaggtgatctcaggtaaacattct

SEQ ID NO: 453429 - DNA, 33 bp, Homo sapien
tggggtctcagacgcacctgtatggggtctcag

SEQ ID NO: 453430 - DNA, 33 bp, Homo sapien
tggggtctcagacgcatctgtatggggtctcag

SEQ ID NO: 453431 - DNA, 33 bp, Homo sapien
aacaccaacaggaaaactgtcaaaagtataaaa

SEQ ID NO: 453432 - DNA, 33 bp, Homo sapien
aacaccaacaggaaaattgtcaaaagtataaaa

SEQ ID NO: 453433 - DNA, 33 bp, Homo sapien
tatttactgtatcatcacttgctttatctcttt

SEQ ID NO: 453434 - DNA, 33 bp, Homo sapien
tatttactgtatcatcgcttgctttatctcttt

SEQ ID NO: 453435 - DNA, 33 bp, Homo sapien
gtttgcagccaaattaccaaagtgccaatgcaa

SEQ ID NO: 453436 - DNA, 33 bp, Homo sapien
gtttgcagccaaattagcaaagtgccaatgcaa

SEQ ID NO: 453437 - DNA, 33 bp, Homo sapien
agaaacctagtcagggaaggttcttcagttttt

SEQ ID NO: 453438 - DNA, 33 bp, Homo sapien
agaaacctagtcaggggaggttcttcagttttt

SEQ ID NO: 453439 - DNA, 33 bp, Homo sapien
gaatagaaacagagaacatttacccgaggtcac

SEQ ID NO: 453440 - DNA, 33 bp, Homo sapien
gaatagaaacagagaatatttacccgaggtcac

SEQ ID NO: 453441 - DNA, 33 bp, Homo sapien
aaacaaacccactccacgaaagcaaagcactca

SEQ ID NO: 453442 - DNA, 33 bp, Homo sapien
aaacaaacccactccatgaaagcaaagcactca

SEQ ID NO: 453443 - DNA, 33 bp, Homo sapien
acaatcccatcactcaagaggtaagcataggac

SEQ ID NO: 453444 - DNA, 33 bp, Homo sapien
acaatcccatcactcaggaggtaagcataggac

SEQ ID NO: 453445 - DNA, 33 bp, Homo sapien
aagttcctacagtgaaatatggagaagaataca

SEQ ID NO: 453446 - DNA, 33 bp, Homo sapien
aagttcctacagtgaagtatggagaagaataca

SEQ ID NO: 453447 - DNA, 33 bp, Homo sapien
ttgctgttgtttaatcagatcatggaagtggaa

SEQ ID NO: 453448 - DNA, 33 bp, Homo sapien
ttgctgttgtttaatccgatcatggaagtggaa

SEQ ID NO: 453449 - DNA, 33 bp, Homo sapien
aggctgataactgtacaaaggaaaggagcaact

SEQ ID NO: 453450 - DNA, 33 bp, Homo sapien
aggctgataactgtacgaaggaaaggagcaact

SEQ ID NO: 453451 - DNA, 33 bp, Homo sapien
tccttagaaccgggcacatcgcaacagacttac

SEQ ID NO: 453452 - DNA, 33 bp, Homo sapien
tccttagaaccgggcatatcgcaacagacttac

SEQ ID NO: 453453 - DNA, 33 bp, Homo sapien
taaacatgtggtattacactttgcttctgaatt

SEQ ID NO: 453454 - DNA, 33 bp, Homo sapien
taaacatgtggtattatactttgcttctgaatt

SEQ ID NO: 453455 - DNA, 33 bp, Homo sapien
agaagggatgctccaaaaagtgtagattttcct

SEQ ID NO: 453456 - DNA, 33 bp, Homo sapien
agaagggatgctccaagaagtgtagattttcct

SEQ ID NO: 453457 - DNA, 33 bp, Homo sapien
cgtctttctgagtcgaaccaatgtacacttaac

SEQ ID NO: 453458 - DNA, 33 bp, Homo sapien
cgtctttctgagtcgacccaatgtacacttaac

SEQ ID NO: 453459 - DNA, 33 bp, Homo sapien
tgccccacggtagagtaaaaaaatcacaagttg

SEQ ID NO: 453460 - DNA, 33 bp, Homo sapien
tgccccacggtagagtcaaaaaatcacaagttg

SEQ ID NO: 453461 - DNA, 33 bp, Homo sapien
aaaggaaatggcatcaatatgtcaaggagatat

SEQ ID NO: 453462 - DNA, 33 bp, Homo sapien
aaaggaaatggcatcagtatgtcaaggagatat

SEQ ID NO: 453463 - DNA, 33 bp, Homo sapien
cagagatgcatggggacaatgccgtgtgaaaac

SEQ ID NO: 453464 - DNA, 33 bp, Homo sapien
cagagatgcatggggagaatgccgtgtgaaaac

SEQ ID NO: 453465 - DNA, 33 bp, Homo sapien
tggtaaggaacttggaggccattctaaacctga

SEQ ID NO: 453466 - DNA, 33 bp, Homo sapien
tggtaaggaacttggatgccattctaaacctga

SEQ ID NO: 453467 - DNA, 33 bp, Homo sapien
aggggattcaagtcacagagggctgacaatttc

SEQ ID NO: 453468 - DNA, 33 bp, Homo sapien
aggggattcaagtcacggagggctgacaatttc

SEQ ID NO: 453469 - DNA, 33 bp, Homo sapien
aggcatccatcatcaacgtcttcctgcaatgga

SEQ ID NO: 453470 - DNA, 33 bp, Homo sapien
aggcatccatcatcaatgtcttcctgcaatgga

SEQ ID NO: 453471 - DNA, 33 bp, Homo sapien
ggtcttgtgtacataacgtttctgtagattttt

SEQ ID NO: 453472 - DNA, 33 bp, Homo sapien
ggtcttgtgtacataatgtttctgtagattttt

SEQ ID NO: 453473 - DNA, 33 bp, Homo sapien
aaaatgagagctaatcccagcccagcaatgaat

SEQ ID NO: 453474 - DNA, 33 bp, Homo sapien
aaaatgagagctaatctcagcccagcaatgaat

SEQ ID NO: 453475 - DNA, 33 bp, Homo sapien
tcatgagcatcaggagaatattatggtctgtat

SEQ ID NO: 453476 - DNA, 33 bp, Homo sapien
tcatgagcatcaggaggatattatggtctgtat

SEQ ID NO: 453477 - DNA, 33 bp, Homo sapien
gccacatagtgtgagactccattgacatgaaat

SEQ ID NO: 453478 - DNA, 33 bp, Homo sapien
gccacatagtgtgagattccattgacatgaaat

SEQ ID NO: 453479 - DNA, 33 bp, Homo sapien
aatcatctgctaatggacacataagttgattcc

SEQ ID NO: 453480 - DNA, 33 bp, Homo sapien
aatcatctgctaatgggcacataagttgattcc

SEQ ID NO: 453481 - DNA, 33 bp, Homo sapien
gcttaccgacatgcgacagagtgtgacctggac

SEQ ID NO: 453482 - DNA, 33 bp, Homo sapien
gcttaccgacatgcgagagagtgtgacctggac

SEQ ID NO: 453483 - DNA, 33 bp, Homo sapien
atatcctagagttttaggtggaagaaatacttg

SEQ ID NO: 453484 - DNA, 33 bp, Homo sapien
atatcctagagttttatgtggaagaaatacttg

SEQ ID NO: 453485 - DNA, 33 bp, Homo sapien
aatcctgggctaatccaaggctagttcttccca

SEQ ID NO: 453486 - DNA, 33 bp, Homo sapien
aatcctgggctaatccgaggctagttcttccca

SEQ ID NO: 453487 - DNA, 33 bp, Homo sapien
cttgtttttagagagccaagtgttagacatctt

SEQ ID NO: 453488 - DNA, 33 bp, Homo sapien
cttgtttttagagagcgaagtgttagacatctt

SEQ ID NO: 453489 - DNA, 33 bp, Homo sapien
tgccttgttcaccgaaatatgtctgggtcatct

SEQ ID NO: 453490 - DNA, 33 bp, Homo sapien
tgccttgttcaccgaattatgtctgggtcatct

SEQ ID NO: 453491 - DNA, 33 bp, Homo sapien
tccactgtgtagataacaccgacttcacttagt

SEQ ID NO: 453492 - DNA, 33 bp, Homo sapien
tccactgtgtagataataccgacttcacttagt

SEQ ID NO: 453493 - DNA, 33 bp, Homo sapien
tttctatctttattaacgcaaccgaagagacct

SEQ ID NO: 453494 - DNA, 33 bp, Homo sapien
tttctatctttattaatgcaaccgaagagacct

SEQ ID NO: 453495 - DNA, 33 bp, Homo sapien
gaataagcaatttccaaaggttccaaagtgtag

SEQ ID NO: 453496 - DNA, 33 bp, Homo sapien
gaataagcaatttccagaggttccaaagtgtag

SEQ ID NO: 453497 - DNA, 33 bp, Homo sapien
gtttgactcttttcaacaacagatggtacttta

SEQ ID NO: 453498 - DNA, 33 bp, Homo sapien
gtttgactcttttcaataacagatggtacttta

SEQ ID NO: 453499 - DNA, 33 bp, Homo sapien
aatatactcttttgtcgcttgtcttttattctt

SEQ ID NO: 453500 - DNA, 33 bp, Homo sapien
aatatactcttttgtctcttgtcttttattctt

SEQ ID NO: 453501 - DNA, 33 bp, Homo sapien
ctcttcttacccactccatgatcccaaagcaca

SEQ ID NO: 453502 - DNA, 33 bp, Homo sapien
ctcttcttacccactcgatgatcccaaagcaca

SEQ ID NO: 453503 - DNA, 33 bp, Homo sapien
gcatacggaacaaggacatgaaggcagccctgg

SEQ ID NO: 453504 - DNA, 33 bp, Homo sapien
gcatacggaacaaggatatgaaggcagccctgg

SEQ ID NO: 453505 - DNA, 33 bp, Homo sapien
ctagaactggagaaaaagatgaaggatttagat

SEQ ID NO: 453506 - DNA, 33 bp, Homo sapien
ctagaactggagaaaaggatgaaggatttagat

SEQ ID NO: 453507 - DNA, 33 bp, Homo sapien
cattttgtctttcaacaaatgggtctgtatgtg

SEQ ID NO: 453508 - DNA, 33 bp, Homo sapien
cattttgtctttcaacgaatgggtctgtatgtg

SEQ ID NO: 453509 - DNA, 33 bp, Homo sapien
aagagtgtattgataaccaggtttctacagtgg

SEQ ID NO: 453510 - DNA, 33 bp, Homo sapien
aagagtgtattgataagcaggtttctacagtgg

SEQ ID NO: 453511 - DNA, 33 bp, Homo sapien
ccacagtggacttaaaactgaaatcagattgtg

SEQ ID NO: 453512 - DNA, 33 bp, Homo sapien
ccacagtggacttaaagctgaaatcagattgtg

SEQ ID NO: 453513 - DNA, 33 bp, Homo sapien
ggcgtcagttgcaagacctctgagtgaagacac

SEQ ID NO: 453514 - DNA, 33 bp, Homo sapien
ggcgtcagttgcaagatctctgagtgaagacac

SEQ ID NO: 453515 - DNA, 33 bp, Homo sapien
gagacaaatagttggccctcaaactgatgaatg

SEQ ID NO: 453516 - DNA, 33 bp, Homo sapien
gagacaaatagttggctctcaaactgatgaatg

SEQ ID NO: 453517 - DNA, 33 bp, Homo sapien
ttctgatttctcaagacccacctataaggtagg

SEQ ID NO: 453518 - DNA, 33 bp, Homo sapien
ttctgatttctcaagatccacctataaggtagg

SEQ ID NO: 453519 - DNA, 33 bp, Homo sapien
cttgcccaagtaagacggaaagttcaatagaac

SEQ ID NO: 453520 - DNA, 33 bp, Homo sapien
cttgcccaagtaagactgaaagttcaatagaac

SEQ ID NO: 453521 - DNA, 33 bp, Homo sapien
gtctttgatgttactcacaggaaacgctgctgt

SEQ ID NO: 453522 - DNA, 33 bp, Homo sapien
gtctttgatgttactcgcaggaaacgctgctgt

SEQ ID NO: 453523 - DNA, 33 bp, Homo sapien
tcagcaagtggttcagaactaaactggttccca

SEQ ID NO: 453524 - DNA, 33 bp, Homo sapien
tcagcaagtggttcagtactaaactggttccca

SEQ ID NO: 453525 - DNA, 33 bp, Homo sapien
agcaagaaacgagaaaacttcagaaatggcttt

SEQ ID NO: 453526 - DNA, 33 bp, Homo sapien
agcaagaaacgagaaagcttcagaaatggcttt

SEQ ID NO: 453527 - DNA, 33 bp, Homo sapien
gtgtgtggaaggaagacggtaagtttgaatttc

SEQ ID NO: 453528 - DNA, 33 bp, Homo sapien
gtgtgtggaaggaagatggtaagtttgaatttc

SEQ ID NO: 453529 - DNA, 33 bp, Homo sapien
tgagagaaatcttcaaccagtggctaatgggac

SEQ ID NO: 453530 - DNA, 33 bp, Homo sapien
tgagagaaatcttcaatcagtggctaatgggac

SEQ ID NO: 453531 - DNA, 33 bp, Homo sapien
tcagcctcactcctaaagtcttgatattaatga

SEQ ID NO: 453532 - DNA, 33 bp, Homo sapien
tcagcctcactcctaaggtcttgatattaatga

SEQ ID NO: 453533 - DNA, 33 bp, Homo sapien
ttttcattgttgtgtagctattataggcctttg

SEQ ID NO: 453534 - DNA, 33 bp, Homo sapien
ttttcattgttgtgtatctattataggcctttg

SEQ ID NO: 453535 - DNA, 33 bp, Homo sapien
tttaaatttttaaagaggacatgacctaaagtg

SEQ ID NO: 453536 - DNA, 33 bp, Homo sapien
tttaaatttttaaagatgacatgacctaaagtg

SEQ ID NO: 453537 - DNA, 33 bp, Homo sapien
cgatctgttttttgccaactacaaagcatgggc

SEQ ID NO: 453538 - DNA, 33 bp, Homo sapien
cgatctgttttttgccgactacaaagcatgggc

SEQ ID NO: 453539 - DNA, 33 bp, Homo sapien
ctggtatttttcaagacgaccacggagctggag

SEQ ID NO: 453540 - DNA, 33 bp, Homo sapien
ctggtatttttcaagatgaccacggagctggag

SEQ ID NO: 453541 - DNA, 33 bp, Homo sapien
cacagggattttgaccagaagccatattacaaa

SEQ ID NO: 453542 - DNA, 33 bp, Homo sapien
cacagggattttgaccggaagccatattacaaa

SEQ ID NO: 453543 - DNA, 33 bp, Homo sapien
tgtgggactacaagaaaaggagctgcctgagtg

SEQ ID NO: 453544 - DNA, 33 bp, Homo sapien
tgtgggactacaagaagaggagctgcctgagtg

SEQ ID NO: 453545 - DNA, 33 bp, Homo sapien
atgtaatcatatgatacgtggtcttttttgtct

SEQ ID NO: 453546 - DNA, 33 bp, Homo sapien
atgtaatcatatgataggtggtcttttttgtct

SEQ ID NO: 453547 - DNA, 33 bp, Homo sapien
caggccatttggagcaaaagcaaaatgaagcta

SEQ ID NO: 453548 - DNA, 33 bp, Homo sapien
caggccatttggagcataagcaaaatgaagcta

SEQ ID NO: 453549 - DNA, 33 bp, Homo sapien
ggctgcagcttcttgccgagataagggtcaggg

SEQ ID NO: 453550 - DNA, 33 bp, Homo sapien
ggctgcagcttcttgcggagataagggtcaggg

SEQ ID NO: 453551 - DNA, 33 bp, Homo sapien
gactcagggcaaagcacggacaacctcgttgga

SEQ ID NO: 453552 - DNA, 33 bp, Homo sapien
gactcagggcaaagcatggacaacctcgttgga

SEQ ID NO: 453553 - DNA, 33 bp, Homo sapien
aagctgcctccagcataatctttttttctctct

SEQ ID NO: 453554 - DNA, 33 bp, Homo sapien
aagctgcctccagcatcatctttttttctctct

SEQ ID NO: 453555 - DNA, 33 bp, Homo sapien
aaacaagaaccatcaaagttgagtgcagtggct

SEQ ID NO: 453556 - DNA, 33 bp, Homo sapien
aaacaagaaccatcaaggttgagtgcagtggct

SEQ ID NO: 453557 - DNA, 33 bp, Homo sapien
ttcaccctttcatctccaaccgttactctcccc

SEQ ID NO: 453558 - DNA, 33 bp, Homo sapien
ttcaccctttcatctctaaccgttactctcccc

SEQ ID NO: 453559 - DNA, 33 bp, Homo sapien
tctgaacccactaaaagttcatcccagaatgat

SEQ ID NO: 453560 - DNA, 33 bp, Homo sapien
tctgaacccactaaaatttcatcccagaatgat

SEQ ID NO: 453561 - DNA, 33 bp, Homo sapien
gaagagaagcttgaaactgaagttaatgttgcc

SEQ ID NO: 453562 - DNA, 33 bp, Homo sapien
gaagagaagcttgaaagtgaagttaatgttgcc

SEQ ID NO: 453563 - DNA, 33 bp, Homo sapien
caccacttcagacgacaacagctaaggaagcaa

SEQ ID NO: 453564 - DNA, 33 bp, Homo sapien
caccacttcagacgactacagctaaggaagcaa

SEQ ID NO: 453565 - DNA, 33 bp, Homo sapien
ttattagcacagaagacgagaaagagacttcag

SEQ ID NO: 453566 - DNA, 33 bp, Homo sapien
ttattagcacagaagatgagaaagagacttcag

SEQ ID NO: 453567 - DNA, 33 bp, Homo sapien
cacctgcaattttccaactggtttctgcctctt

SEQ ID NO: 453568 - DNA, 33 bp, Homo sapien
cacctgcaattttccagctggtttctgcctctt

SEQ ID NO: 453569 - DNA, 33 bp, Homo sapien
ttgaactaagccaaaactataacaatctacttc

SEQ ID NO: 453570 - DNA, 33 bp, Homo sapien
ttgaactaagccaaaattataacaatctacttc

SEQ ID NO: 453571 - DNA, 33 bp, Homo sapien
aatcttaaaggagtaacacacagtccatgtagg

SEQ ID NO: 453572 - DNA, 33 bp, Homo sapien
aatcttaaaggagtaatacacagtccatgtagg

SEQ ID NO: 453573 - DNA, 33 bp, Homo sapien
ccttgtaagtcactacagaacaattatgtccac

SEQ ID NO: 453574 - DNA, 33 bp, Homo sapien
ccttgtaagtcactaccgaacaattatgtccac

SEQ ID NO: 453575 - DNA, 33 bp, Homo sapien
ctgtgcccagcctacaagtctcatttctgtaat

SEQ ID NO: 453576 - DNA, 33 bp, Homo sapien
ctgtgcccagcctacacgtctcatttctgtaat

SEQ ID NO: 453577 - DNA, 33 bp, Homo sapien
ctaggcttgtgtggcgaaccagtgcatgctctc

SEQ ID NO: 453578 - DNA, 33 bp, Homo sapien
ctaggcttgtgtggcggaccagtgcatgctctc

SEQ ID NO: 453579 - DNA, 33 bp, Homo sapien
ttggtgagtatgtgaaaaaatcaggacccttat

SEQ ID NO: 453580 - DNA, 33 bp, Homo sapien
ttggtgagtatgtgaagaaatcaggacccttat

SEQ ID NO: 453581 - DNA, 33 bp, Homo sapien
cagaatgaccagggcccatctagcttcagtggc

SEQ ID NO: 453582 - DNA, 33 bp, Homo sapien
cagaatgaccagggcctatctagcttcagtggc

SEQ ID NO: 453583 - DNA, 33 bp, Homo sapien
aggagttcaacattgccgagctatgatcatgcc

SEQ ID NO: 453584 - DNA, 33 bp, Homo sapien
aggagttcaacattgctgagctatgatcatgcc

SEQ ID NO: 453585 - DNA, 33 bp, Homo sapien
ccccgcacggtactgaccaccctaaaatatatc

SEQ ID NO: 453586 - DNA, 33 bp, Homo sapien
ccccgcacggtactgatcaccctaaaatatatc

SEQ ID NO: 453587 - DNA, 33 bp, Homo sapien
gaggcgaggatcttaacaggcaaataagcgagt

SEQ ID NO: 453588 - DNA, 33 bp, Homo sapien
gaggcgaggatcttaataggcaaataagcgagt

SEQ ID NO: 453589 - DNA, 33 bp, Homo sapien
gaattagacaaaactaccctgaaattcgcaagg

SEQ ID NO: 453590 - DNA, 33 bp, Homo sapien
gaattagacaaaactatcctgaaattcgcaagg

SEQ ID NO: 453591 - DNA, 33 bp, Homo sapien
ctgcaggtctcagtcacgggcacccggagaaga

SEQ ID NO: 453592 - DNA, 33 bp, Homo sapien
ctgcaggtctcagtcatgggcacccggagaaga

SEQ ID NO: 453593 - DNA, 33 bp, Homo sapien
tcctgagcttccactacgtgcccagcttttttc

SEQ ID NO: 453594 - DNA, 33 bp, Homo sapien
tcctgagcttccactatgtgcccagcttttttc

SEQ ID NO: 453595 - DNA, 33 bp, Homo sapien
tcctgacctcagagataatagctacatttatag

SEQ ID NO: 453596 - DNA, 33 bp, Homo sapien
tcctgacctcagagatcatagctacatttatag

SEQ ID NO: 453597 - DNA, 33 bp, Homo sapien
tgatggcagcaccaacagtaatgagagatatca

SEQ ID NO: 453598 - DNA, 33 bp, Homo sapien
tgatggcagcaccaacggtaatgagagatatca

SEQ ID NO: 453599 - DNA, 33 bp, Homo sapien
atttaatttaatgttcacttttgacttcaacag

SEQ ID NO: 453600 - DNA, 33 bp, Homo sapien
atttaatttaatgttcgcttttgacttcaacag

SEQ ID NO: 453601 - DNA, 33 bp, Homo sapien
ttgcagggagaaaggacggaactcaggggacca

SEQ ID NO: 453602 - DNA, 33 bp, Homo sapien
ttgcagggagaaaggatggaactcaggggacca

SEQ ID NO: 453603 - DNA, 33 bp, Homo sapien
ggaaaactggtgaggaacgtggacacagacttt

SEQ ID NO: 453604 - DNA, 33 bp, Homo sapien
ggaaaactggtgaggagcgtggacacagacttt

SEQ ID NO: 453605 - DNA, 33 bp, Homo sapien
agctcatctaaggcaaaggtcttccaaatggcc

SEQ ID NO: 453606 - DNA, 33 bp, Homo sapien
agctcatctaaggcaacggtcttccaaatggcc

SEQ ID NO: 453607 - DNA, 33 bp, Homo sapien
tccttcagtctttcccagctggctccagcctgg

SEQ ID NO: 453608 - DNA, 33 bp, Homo sapien
tccttcagtctttccctgctggctccagcctgg

SEQ ID NO: 453609 - DNA, 33 bp, Homo sapien
tcaaccctgtgtggtccaagcaaagaaacagaa

SEQ ID NO: 453610 - DNA, 33 bp, Homo sapien
tcaaccctgtgtggtctaagcaaagaaacagaa

SEQ ID NO: 453611 - DNA, 33 bp, Homo sapien
cccctgctccagagctaagcatatgaccttaaa

SEQ ID NO: 453612 - DNA, 33 bp, Homo sapien
cccctgctccagagctgagcatatgaccttaaa

SEQ ID NO: 453613 - DNA, 33 bp, Homo sapien
atgttctgcaacacctaagcatagctcaacgct

SEQ ID NO: 453614 - DNA, 33 bp, Homo sapien
atgttctgcaacacctgagcatagctcaacgct

SEQ ID NO: 453615 - DNA, 33 bp, Homo sapien
aggagtaggttatggacagaggactgatcaggg

SEQ ID NO: 453616 - DNA, 33 bp, Homo sapien
aggagtaggttatggagagaggactgatcaggg

SEQ ID NO: 453617 - DNA, 33 bp, Homo sapien
gaagtgtcttcttggaaaaaatgagtcagaatt

SEQ ID NO: 453618 - DNA, 33 bp, Homo sapien
gaagtgtcttcttggagaaaatgagtcagaatt

SEQ ID NO: 453619 - DNA, 33 bp, Homo sapien
cccaaactagaaggaaaaaattgtgcaaacact

SEQ ID NO: 453620 - DNA, 33 bp, Homo sapien
cccaaactagaaggaacaaattgtgcaaacact

SEQ ID NO: 453621 - DNA, 33 bp, Homo sapien
tttcctgatttgagaaatgccttcagagagaag

SEQ ID NO: 453622 - DNA, 33 bp, Homo sapien
tttcctgatttgagaagtgccttcagagagaag

SEQ ID NO: 453623 - DNA, 33 bp, Homo sapien
gagaatgtgttgcctgcattgcaagggtcagat

SEQ ID NO: 453624 - DNA, 33 bp, Homo sapien
gagaatgtgttgcctgtattgcaagggtcagat

SEQ ID NO: 453625 - DNA, 33 bp, Homo sapien
ggccagatgtaaggtcaagggcatgagaatgtg

SEQ ID NO: 453626 - DNA, 33 bp, Homo sapien
ggccagatgtaaggtcgagggcatgagaatgtg

SEQ ID NO: 453627 - DNA, 33 bp, Homo sapien
tatctattcctgcagaataactgatgtcagtag

SEQ ID NO: 453628 - DNA, 33 bp, Homo sapien
tatctattcctgcagattaactgatgtcagtag

SEQ ID NO: 453629 - DNA, 33 bp, Homo sapien
ctgtcacaaaattatacacttcttcaactgccc

SEQ ID NO: 453630 - DNA, 33 bp, Homo sapien
ctgtcacaaaattatagacttcttcaactgccc

SEQ ID NO: 453631 - DNA, 33 bp, Homo sapien
acctaaatgtccatcaactggatcaagaacatg

SEQ ID NO: 453632 - DNA, 33 bp, Homo sapien
acctaaatgtccatcagctggatcaagaacatg

SEQ ID NO: 453633 - DNA, 33 bp, Homo sapien
agaatgcacataccacaatggaattggagaaat

SEQ ID NO: 453634 - DNA, 33 bp, Homo sapien
agaatgcacataccacgatggaattggagaaat

SEQ ID NO: 453635 - DNA, 33 bp, Homo sapien
ggatgtagccttggaacttagatactgccccca

SEQ ID NO: 453636 - DNA, 33 bp, Homo sapien
ggatgtagccttggaagttagatactgccccca

SEQ ID NO: 453637 - DNA, 33 bp, Homo sapien
cttgggtgttgcagaacatgttggaccatgtag

SEQ ID NO: 453638 - DNA, 33 bp, Homo sapien
cttgggtgttgcagaatatgttggaccatgtag

SEQ ID NO: 453639 - DNA, 33 bp, Homo sapien
acaacactatagagcaatgatacaccctgacat

SEQ ID NO: 453640 - DNA, 33 bp, Homo sapien
acaacactatagagcagtgatacaccctgacat

SEQ ID NO: 453641 - DNA, 33 bp, Homo sapien
tctgaccacctactaagtgtcagagacatgagt

SEQ ID NO: 453642 - DNA, 33 bp, Homo sapien
tctgaccacctactaattgtcagagacatgagt

SEQ ID NO: 453643 - DNA, 33 bp, Homo sapien
gtaattccatctacccacgaggctaagacagga

SEQ ID NO: 453644 - DNA, 33 bp, Homo sapien
gtaattccatctacccgcgaggctaagacagga

SEQ ID NO: 453645 - DNA, 33 bp, Homo sapien
gtgggaggcagagagtaaagtgcgcttgcagga

SEQ ID NO: 453646 - DNA, 33 bp, Homo sapien
gtgggaggcagagagtgaagtgcgcttgcagga

SEQ ID NO: 453647 - DNA, 33 bp, Homo sapien
gagaattaacggcaaaaaccgcaatgacttttg

SEQ ID NO: 453648 - DNA, 33 bp, Homo sapien
gagaattaacggcaaataccgcaatgacttttg

SEQ ID NO: 453649 - DNA, 33 bp, Homo sapien
aggagaggacagtaagaacaaggtccgagctgc

SEQ ID NO: 453650 - DNA, 33 bp, Homo sapien
aggagaggacagtaaggacaaggtccgagctgc

SEQ ID NO: 453651 - DNA, 33 bp, Homo sapien
ccttccgcttcgacccagaaaacgcccagaaga

SEQ ID NO: 453652 - DNA, 33 bp, Homo sapien
ccttccgcttcgaccccgaaaacgcccagaaga

SEQ ID NO: 453653 - DNA, 33 bp, Homo sapien
tagatggcaccttgcacgtgtctttacatggtg

SEQ ID NO: 453654 - DNA, 33 bp, Homo sapien
tagatggcaccttgcatgtgtctttacatggtg

SEQ ID NO: 453655 - DNA, 33 bp, Homo sapien
aggatttaccacctgcagattaaagaggacata

SEQ ID NO: 453656 - DNA, 33 bp, Homo sapien
aggatttaccacctgcggattaaagaggacata

SEQ ID NO: 453657 - DNA, 33 bp, Homo sapien
aaaaagagagagagcccattgaatgccacttgc

SEQ ID NO: 453658 - DNA, 33 bp, Homo sapien
aaaaagagagagagcctattgaatgccacttgc

SEQ ID NO: 453659 - DNA, 33 bp, Homo sapien
ttagcttgagaggaaaaatttccttgttctggg

SEQ ID NO: 453660 - DNA, 33 bp, Homo sapien
ttagcttgagaggaaagatttccttgttctggg

SEQ ID NO: 453661 - DNA, 33 bp, Homo sapien
gtcctcattgttctaacctttgtgacaggcaag

SEQ ID NO: 453662 - DNA, 33 bp, Homo sapien
gtcctcattgttctaagctttgtgacaggcaag

SEQ ID NO: 453663 - DNA, 33 bp, Homo sapien
cagagatggacatcacagaaataacagtccaga

SEQ ID NO: 453664 - DNA, 33 bp, Homo sapien
cagagatggacatcacggaaataacagtccaga

SEQ ID NO: 453665 - DNA, 33 bp, Homo sapien
tctggagagaaagacacaggacccaattcatgc

SEQ ID NO: 453666 - DNA, 33 bp, Homo sapien
tctggagagaaagacataggacccaattcatgc

SEQ ID NO: 453667 - DNA, 33 bp, Homo sapien
cacctgaaatatgttacacccggttacatctgg

SEQ ID NO: 453668 - DNA, 33 bp, Homo sapien
cacctgaaatatgttatacccggttacatctgg

SEQ ID NO: 453669 - DNA, 33 bp, Homo sapien
gacactgcctaacatgacacgtaggagctatgt

SEQ ID NO: 453670 - DNA, 33 bp, Homo sapien
gacactgcctaacatggcacgtaggagctatgt

SEQ ID NO: 453671 - DNA, 33 bp, Homo sapien
atgcaattgttgtcatgaccctcttgagtttac

SEQ ID NO: 453672 - DNA, 33 bp, Homo sapien
atgcaattgttgtcattaccctcttgagtttac

SEQ ID NO: 453673 - DNA, 33 bp, Homo sapien
aaattctaaacacttcacaaaaccttcgcccca

SEQ ID NO: 453674 - DNA, 33 bp, Homo sapien
aaattctaaacacttcgcaaaaccttcgcccca

SEQ ID NO: 453675 - DNA, 33 bp, Homo sapien
ataccagtccttcaacaatcaggtataacaact

SEQ ID NO: 453676 - DNA, 33 bp, Homo sapien
ataccagtccttcaacgatcaggtataacaact

SEQ ID NO: 453677 - DNA, 33 bp, Homo sapien
tgcaggatggggatcaacatgaaatcgactctc

SEQ ID NO: 453678 - DNA, 33 bp, Homo sapien
tgcaggatggggatcagcatgaaatcgactctc

SEQ ID NO: 453679 - DNA, 33 bp, Homo sapien
tgtgctttgttctggaagccatattccatagac

SEQ ID NO: 453680 - DNA, 33 bp, Homo sapien
tgtgctttgttctggatgccatattccatagac

SEQ ID NO: 453681 - DNA, 33 bp, Homo sapien
agagtatttgctgaacaaggactggatggatga

SEQ ID NO: 453682 - DNA, 33 bp, Homo sapien
agagtatttgctgaacgaggactggatggatga

SEQ ID NO: 453683 - DNA, 33 bp, Homo sapien
catggctccaaaatagactaacatgttctgcaa

SEQ ID NO: 453684 - DNA, 33 bp, Homo sapien
catggctccaaaatagtctaacatgttctgcaa

SEQ ID NO: 453685 - DNA, 33 bp, Homo sapien
gcctccctgcatccaacgtcaactccatttagt

SEQ ID NO: 453686 - DNA, 33 bp, Homo sapien
gcctccctgcatccaatgtcaactccatttagt

SEQ ID NO: 453687 - DNA, 33 bp, Homo sapien
ctcctagggcgcaaacactgttccacatacaga

SEQ ID NO: 453688 - DNA, 33 bp, Homo sapien
ctcctagggcgcaaactctgttccacatacaga

SEQ ID NO: 453689 - DNA, 33 bp, Homo sapien
tggtgggaagaatcaacgacacatgaatatttt

SEQ ID NO: 453690 - DNA, 33 bp, Homo sapien
tggtgggaagaatcaatgacacatgaatatttt

SEQ ID NO: 453691 - DNA, 33 bp, Homo sapien
cgctgcgggcaggaaaggcaagagtttctgaag

SEQ ID NO: 453692 - DNA, 33 bp, Homo sapien
cgctgcgggcaggaaatgcaagagtttctgaag

SEQ ID NO: 453693 - DNA, 33 bp, Homo sapien
caatctctttaggctcccagaccttcagaaact

SEQ ID NO: 453694 - DNA, 33 bp, Homo sapien
caatctctttaggctcgcagaccttcagaaact

SEQ ID NO: 453695 - DNA, 33 bp, Homo sapien; identical to SEQ ID NO: 453693

SEQ ID NO: 453696 - DNA, 33 bp, Homo sapien; identical to SEQ ID NO: 453694

SEQ ID NO: 453697 - DNA, 33 bp, Homo sapien
ccactaagcaatagtaacagaatagacaaaaac

SEQ ID NO: 453698 - DNA, 33 bp, Homo sapien
ccactaagcaatagtagcagaatagacaaaaac

SEQ ID NO: 453699 - DNA, 33 bp, Homo sapien
ccctcacatgttgtcaccaattctctcagcaga

SEQ ID NO: 453700 - DNA, 33 bp, Homo sapien
ccctcacatgttgtcagcaattctctcagcaga

SEQ ID NO: 453701 - DNA, 33 bp, Homo sapien
aggctgtgctccttcacgtccgtaaatgggcgt

SEQ ID NO: 453702 - DNA, 33 bp, Homo sapien
aggctgtgctccttcatgtccgtaaatgggcgt

SEQ ID NO: 453703 - DNA, 33 bp, Homo sapien
aggaatggcggccatcaacattgccaacatgag

SEQ ID NO: 453704 - DNA, 33 bp, Homo sapien
aggaatggcggccatcgacattgccaacatgag

SEQ ID NO: 453705 - DNA, 33 bp, Homo sapien
ctctggatgccatcacccaggtctcttcaacaa

SEQ ID NO: 453706 - DNA, 33 bp, Homo sapien
ctctggatgccatcactcaggtctcttcaacaa

SEQ ID NO: 453707 - DNA, 33 bp, Homo sapien
agggaaagagatgggccgattagagtccagaag

SEQ ID NO: 453708 - DNA, 33 bp, Homo sapien
agggaaagagatgggctgattagagtccagaag

SEQ ID NO: 453709 - DNA, 33 bp, Homo sapien
tcacagactcgttagcaattgtaaacccttatg

SEQ ID NO: 453710 - DNA, 33 bp, Homo sapien
tcacagactcgttagcgattgtaaacccttatg

SEQ ID NO: 453711 - DNA, 33 bp, Homo sapien
caggtaagaacatcacagtcttgcattggtggc

SEQ ID NO: 453712 - DNA, 33 bp, Homo sapien
caggtaagaacatcacggtcttgcattggtggc

SEQ ID NO: 453713 - DNA, 33 bp, Homo sapien
ctgtgggctgcatgcaataaagtcatctctaaa

SEQ ID NO: 453714 - DNA, 33 bp, Homo sapien
ctgtgggctgcatgcagtaaagtcatctctaaa

SEQ ID NO: 453715 - DNA, 33 bp, Homo sapien
aattctgaaactgtgaagagcatgatattttat

SEQ ID NO: 453716 - DNA, 33 bp, Homo sapien
aattctgaaactgtgaggagcatgatattttat

SEQ ID NO: 453717 - DNA, 33 bp, Homo sapien
cagaacttggtatccaacctggctagcagggga

SEQ ID NO: 453718 - DNA, 33 bp, Homo sapien
cagaacttggtatccagcctggctagcagggga

SEQ ID NO: 453719 - DNA, 33 bp, Homo sapien
gagataataactatggaagtgaaagcagagtct

SEQ ID NO: 453720 - DNA, 33 bp, Homo sapien
gagataataactatggtagtgaaagcagagtct

SEQ ID NO: 453721 - DNA, 33 bp, Homo sapien
aaaaccatagatgacacaaaccaatgaaaacac

SEQ ID NO: 453722 - DNA, 33 bp, Homo sapien
aaaaccatagatgacataaaccaatgaaaacac

SEQ ID NO: 453723 - DNA, 33 bp, Homo sapien
tctgtagattgctttgaactatgatcattttca

SEQ ID NO: 453724 - DNA, 33 bp, Homo sapien
tctgtagattgctttgcactatgatcattttca

SEQ ID NO: 453725 - DNA, 33 bp, Homo sapien
aatctacagatttaacacaatgcctatgaaaat

SEQ ID NO: 453726 - DNA, 33 bp, Homo sapien
aatctacagatttaacgcaatgcctatgaaaat

SEQ ID NO: 453727 - DNA, 33 bp, Homo sapien
gatacacaaacagccacgaaacatatgaaaaaa

SEQ ID NO: 453728 - DNA, 33 bp, Homo sapien
gatacacaaacagccatgaaacatatgaaaaaa

SEQ ID NO: 453729 - DNA, 33 bp, Homo sapien
ttttccacagaggttacgttaattttcatagca

SEQ ID NO: 453730 - DNA, 33 bp, Homo sapien
ttttccacagaggttatgttaattttcatagca

SEQ ID NO: 453731 - DNA, 33 bp, Homo sapien
aggacacaaatacatacagagtgatataatgag

SEQ ID NO: 453732 - DNA, 33 bp, Homo sapien
aggacacaaatacatagagagtgatataatgag

SEQ ID NO: 453733 - DNA, 33 bp, Homo sapien
cacataaccttaattaactgtgagatctgaaat

SEQ ID NO: 453734 - DNA, 33 bp, Homo sapien
cacataaccttaattacctgtgagatctgaaat

SEQ ID NO: 453735 - DNA, 33 bp, Homo sapien
cttgcagattgccacaaatgaaagaattttctt

SEQ ID NO: 453736 - DNA, 33 bp, Homo sapien
cttgcagattgccacagatgaaagaattttctt

SEQ ID NO: 453737 - DNA, 33 bp, Homo sapien
aagtgcaattgttgaaccaaagaccatttgcat

SEQ ID NO: 453738 - DNA, 33 bp, Homo sapien
aagtgcaattgttgaatcaaagaccatttgcat

SEQ ID NO: 453739 - DNA, 33 bp, Homo sapien
acataggaaatcccacgggcaaaccttctttgt

SEQ ID NO: 453740 - DNA, 33 bp, Homo sapien
acataggaaatcccactggcaaaccttctttgt

SEQ ID NO: 453741 - DNA, 33 bp, Homo sapien
aaaataggataactaccatcatgacaacataca

SEQ ID NO: 453742 - DNA, 33 bp, Homo sapien
aaaataggataactacgatcatgacaacataca

SEQ ID NO: 453743 - DNA, 33 bp, Homo sapien
gtaagaactcactaacacgaaggctgcaccaag

SEQ ID NO: 453744 - DNA, 33 bp, Homo sapien
gtaagaactcactaacccgaaggctgcaccaag

SEQ ID NO: 453745 - DNA, 33 bp, Homo sapien
tctctatgtccctgaaagcaattcttttaactt

SEQ ID NO: 453746 - DNA, 33 bp, Homo sapien
tctctatgtccctgaatgcaattcttttaactt

SEQ ID NO: 453747 - DNA, 33 bp, Homo sapien
gtgccatgatacataccaagcccacgcccaggg

SEQ ID NO: 453748 - DNA, 33 bp, Homo sapien
gtgccatgatacatactaagcccacgcccaggg

SEQ ID NO: 453749 - DNA, 33 bp, Homo sapien
tgagtgttgtcatatacagaaatctttacacct

SEQ ID NO: 453750 - DNA, 33 bp, Homo sapien
tgagtgttgtcatatatagaaatctttacacct

SEQ ID NO: 453751 - DNA, 33 bp, Homo sapien
tttaatatgttagagcaagaaatcactattctt

SEQ ID NO: 453752 - DNA, 33 bp, Homo sapien
tttaatatgttagagcgagaaatcactattctt

SEQ ID NO: 453753 - DNA, 33 bp, Homo sapien
gagaaatcttaaaaaccgtgttcccagctgtga

SEQ ID NO: 453754 - DNA, 33 bp, Homo sapien
gagaaatcttaaaaactgtgttcccagctgtga

SEQ ID NO: 453755 - DNA, 33 bp, Homo sapien
atagagaacattttgactacagtatgaatgaat

SEQ ID NO: 453756 - DNA, 33 bp, Homo sapien
atagagaacattttgattacagtatgaatgaat

SEQ ID NO: 453757 - DNA, 33 bp, Homo sapien
gagattccaggacataataactggatgcaacat

SEQ ID NO: 453758 - DNA, 33 bp, Homo sapien
gagattccaggacatagtaactggatgcaacat

SEQ ID NO: 453759 - DNA, 33 bp, Homo sapien
ttcactgatagaggtacattgaaaggataagag

SEQ ID NO: 453760 - DNA, 33 bp, Homo sapien
ttcactgatagaggtatattgaaaggataagag

SEQ ID NO: 453761 - DNA, 33 bp, Homo sapien
agcccaatcattttcaatctaaggaacaaggag

SEQ ID NO: 453762 - DNA, 33 bp, Homo sapien
agcccaatcattttcagtctaaggaacaaggag

SEQ ID NO: 453763 - DNA, 33 bp, Homo sapien
tggcaccatttgtacaccaaacgtcagcaacat

SEQ ID NO: 453764 - DNA, 33 bp, Homo sapien
tggcaccatttgtacagcaaacgtcagcaacat

SEQ ID NO: 453765 - DNA, 33 bp, Homo sapien
ttacttattgtcgggaaccagcagcaactttca

SEQ ID NO: 453766 - DNA, 33 bp, Homo sapien
ttacttattgtcgggatccagcagcaactttca

SEQ ID NO: 453767 - DNA, 33 bp, Homo sapien
tcttaaattctactgcaaacgtgtgaaatgacg

SEQ ID NO: 453768 - DNA, 33 bp, Homo sapien
tcttaaattctactgcgaacgtgtgaaatgacg

SEQ ID NO: 453769 - DNA, 33 bp, Homo sapien
gatctcatgacaattccctgacttctctccaga

SEQ ID NO: 453770 - DNA, 33 bp, Homo sapien
gatctcatgacaattctctgacttctctccaga

SEQ ID NO: 453771 - DNA, 33 bp, Homo sapien
tcaaaggaaagagcctcaaacctacactacagc

SEQ ID NO: 453772 - DNA, 33 bp, Homo sapien
tcaaaggaaagagccttaaacctacactacagc

SEQ ID NO: 453773 - DNA, 33 bp, Homo sapien
actactgggcaaggtccagtgcaaaggagttcc

SEQ ID NO: 453774 - DNA, 33 bp, Homo sapien
actactgggcaaggtctagtgcaaaggagttcc

SEQ ID NO: 453775 - DNA, 33 bp, Homo sapien
taaaagtcaaacactacatagcagcagtaaacg

SEQ ID NO: 453776 - DNA, 33 bp, Homo sapien
taaaagtcaaacactatatagcagcagtaaacg

SEQ ID NO: 453777 - DNA, 33 bp, Homo sapien
gcaatcattaaccaaccgatcttcattcaactt

SEQ ID NO: 453778 - DNA, 33 bp, Homo sapien
gcaatcattaaccaactgatcttcattcaactt

SEQ ID NO: 453779 - DNA, 33 bp, Homo sapien
aatgctcaataaatacagccattattacctgct

SEQ ID NO: 453780 - DNA, 33 bp, Homo sapien
aatgctcaataaatacggccattattacctgct

SEQ ID NO: 453781 - DNA, 33 bp, Homo sapien
ggaactgcatcgggcacgcgttcgccatggcga

SEQ ID NO: 453782 - DNA, 33 bp, Homo sapien
ggaactgcatcgggcaggcgttcgccatggcga

SEQ ID NO: 453783 - DNA, 33 bp, Homo sapien
ataccacatggaaaatcagtttataatgagaat

SEQ ID NO: 453784 - DNA, 33 bp, Homo sapien
ataccacatggaaaatgagtttataatgagaat

SEQ ID NO: 453785 - DNA, 33 bp, Homo sapien
aacagaaaggtgctggaaacagaactggcattg

SEQ ID NO: 453786 - DNA, 33 bp, Homo sapien
aacagaaaggtgctgggaacagaactggcattg

SEQ ID NO: 453787 - DNA, 33 bp, Homo sapien
atctgacatttgacataaagctccattctatca

SEQ ID NO: 453788 - DNA, 33 bp, Homo sapien
atctgacatttgacatcaagctccattctatca

SEQ ID NO: 453789 - DNA, 33 bp, Homo sapien
ctcctctcagtttctcagaacccagtctctgcc

SEQ ID NO: 453790 - DNA, 33 bp, Homo sapien
ctcctctcagtttctcggaacccagtctctgcc

SEQ ID NO: 453791 - DNA, 33 bp, Homo sapien
tgaatgaactggaccaagatcagcaaagctgcc

SEQ ID NO: 453792 - DNA, 33 bp, Homo sapien
tgaatgaactggaccaggatcagcaaagctgcc

SEQ ID NO: 453793 - DNA, 33 bp, Homo sapien
ccacagcatacatgataagccctaaatgacaca

SEQ ID NO: 453794 - DNA, 33 bp, Homo sapien
ccacagcatacatgatgagccctaaatgacaca

SEQ ID NO: 453795 - DNA, 33 bp, Homo sapien
tcactcatccaccctacgctcactgctgtcctc

SEQ ID NO: 453796 - DNA, 33 bp, Homo sapien
tcactcatccaccctatgctcactgctgtcctc

SEQ ID NO: 453797 - DNA, 33 bp, Homo sapien
ggatgagtgacaggataaggtagaaggaactga

SEQ ID NO: 453798 - DNA, 33 bp, Homo sapien
ggatgagtgacaggatgaggtagaaggaactga

SEQ ID NO: 453799 - DNA, 33 bp, Homo sapien
agtttatgcagaccaaagtttctcagtcttggc

SEQ ID NO: 453800 - DNA, 33 bp, Homo sapien
agtttatgcagaccaaggtttctcagtcttggc

SEQ ID NO: 453801 - DNA, 33 bp, Homo sapien
ggactccagcctttgacgatgtggctttcaact

SEQ ID NO: 453802 - DNA, 33 bp, Homo sapien
ggactccagcctttgaggatgtggctttcaact

SEQ ID NO: 453803 - DNA, 33 bp, Homo sapien
ggacccaccaaggagacctgtatttgtgtttca

SEQ ID NO: 453804 - DNA, 33 bp, Homo sapien
ggacccaccaaggagagctgtatttgtgtttca

SEQ ID NO: 453805 - DNA, 33 bp, Homo sapien
ggtattcaggaaaagcagaccagcataaacgtc

SEQ ID NO: 453806 - DNA, 33 bp, Homo sapien
ggtattcaggaaaagccgaccagcataaacgtc

SEQ ID NO: 453807 - DNA, 33 bp, Homo sapien
ccaggttaaggatgtaaccctgacacagcctca

SEQ ID NO: 453808 - DNA, 33 bp, Homo sapien
ccaggttaaggatgtacccctgacacagcctca

SEQ ID NO: 453809 - DNA, 33 bp, Homo sapien
caggaccaagtgtgaaaaagtggcctctctctg

SEQ ID NO: 453810 - DNA, 33 bp, Homo sapien
caggaccaagtgtgaagaagtggcctctctctg

SEQ ID NO: 453811 - DNA, 33 bp, Homo sapien
aggccacagtcttcagaaaagctgaaagtcttc

SEQ ID NO: 453812 - DNA, 33 bp, Homo sapien
aggccacagtcttcaggaaagctgaaagtcttc

SEQ ID NO: 453813 - DNA, 33 bp, Homo sapien
atgcaagacaatgccaagaggtatagtgaatta

SEQ ID NO: 453814 - DNA, 33 bp, Homo sapien
atgcaagacaatgccaggaggtatagtgaatta

SEQ ID NO: 453815 - DNA, 33 bp, Homo sapien
ccaagagcacttttcacgctaagctgtgagaag

SEQ ID NO: 453816 - DNA, 33 bp, Homo sapien
ccaagagcacttttcatgctaagctgtgagaag

SEQ ID NO: 453817 - DNA, 33 bp, Homo sapien
ttggccacattaaaaccacaagtagctacctag

SEQ ID NO: 453818 - DNA, 33 bp, Homo sapien
ttggccacattaaaactacaagtagctacctag

SEQ ID NO: 453819 - DNA, 33 bp, Homo sapien
ctttatgctagaaacaaaactaacataagctaa

SEQ ID NO: 453820 - DNA, 33 bp, Homo sapien
ctttatgctagaaacataactaacataagctaa

SEQ ID NO: 453821 - DNA, 33 bp, Homo sapien
atcagtaaacagagtaaccaggaacagatgacc

SEQ ID NO: 453822 - DNA, 33 bp, Homo sapien
atcagtaaacagagtatccaggaacagatgacc

SEQ ID NO: 453823 - DNA, 33 bp, Homo sapien
aacagccattgtagagacacgccccagacatga

SEQ ID NO: 453824 - DNA, 33 bp, Homo sapien
aacagccattgtagagtcacgccccagacatga

SEQ ID NO: 453825 - DNA, 33 bp, Homo sapien
tgcctccagctgaacacgtgaccgatgtgcaga

SEQ ID NO: 453826 - DNA, 33 bp, Homo sapien
tgcctccagctgaacatgtgaccgatgtgcaga

SEQ ID NO: 453827 - DNA, 33 bp, Homo sapien
ggggtcaaggaaagggacccaagctggggtgga

SEQ ID NO: 453828 - DNA, 33 bp, Homo sapien
ggggtcaaggaaagggtcccaagctggggtgga

SEQ ID NO: 453829 - DNA, 33 bp, Homo sapien
atgccataagtgcaagaattgaaggacaatatg

SEQ ID NO: 453830 - DNA, 33 bp, Homo sapien
atgccataagtgcaaggattgaaggacaatatg

SEQ ID NO: 453831 - DNA, 33 bp, Homo sapien
caagtatactttctgacggcaaggaaataaagc

SEQ ID NO: 453832 - DNA, 33 bp, Homo sapien
caagtatactttctgatggcaaggaaataaagc

SEQ ID NO: 453833 - DNA, 33 bp, Homo sapien
agccaatatccatttgaaaagtgaagaaaaact

SEQ ID NO: 453834 - DNA, 33 bp, Homo sapien
agccaatatccatttgcaaagtgaagaaaaact

SEQ ID NO: 453835 - DNA, 33 bp, Homo sapien
ggggcaaaagtgagggaatctgactgtgcccat

SEQ ID NO: 453836 - DNA, 33 bp, Homo sapien
ggggcaaaagtgaggggatctgactgtgcccat

SEQ ID NO: 453837 - DNA, 33 bp, Homo sapien
tattagagaaaagcaaatcggcttaggcaaaga

SEQ ID NO: 453838 - DNA, 33 bp, Homo sapien
tattagagaaaagcaagtcggcttaggcaaaga

SEQ ID NO: 453839 - DNA, 33 bp, Homo sapien
aaagtcctcattattcaaaacaagaaaatatcc

SEQ ID NO: 453840 - DNA, 33 bp, Homo sapien
aaagtcctcattattcgaaacaagaaaatatcc

SEQ ID NO: 453841 - DNA, 33 bp, Homo sapien
aaggcacttctggttaccccggtcagccatcct

SEQ ID NO: 453842 - DNA, 33 bp, Homo sapien
aaggcacttctggttatcccggtcagccatcct

SEQ ID NO: 453843 - DNA, 33 bp, Homo sapien
cctttgagtctgtgctaacctaagcctggttga

SEQ ID NO: 453844 - DNA, 33 bp, Homo sapien
cctttgagtctgtgctgacctaagcctggttga

SEQ ID NO: 453845 - DNA, 33 bp, Homo sapien
agactgaatttacaacaccagtgtccctggttt

SEQ ID NO: 453846 - DNA, 33 bp, Homo sapien
agactgaatttacaactccagtgtccctggttt

SEQ ID NO: 453847 - DNA, 33 bp, Homo sapien
ccagtacacagtaaaagaactttgcatattgtc

SEQ ID NO: 453848 - DNA, 33 bp, Homo sapien
ccagtacacagtaaaataactttgcatattgtc

SEQ ID NO: 453849 - DNA, 33 bp, Homo sapien
gccaggtgctgattcaaagacctcaagatattt

SEQ ID NO: 453850 - DNA, 33 bp, Homo sapien
gccaggtgctgattcagagacctcaagatattt

SEQ ID NO: 453851 - DNA, 33 bp, Homo sapien
atttttcttcacagccaaaataaccagattgca

SEQ ID NO: 453852 - DNA, 33 bp, Homo sapien
atttttcttcacagccgaaataaccagattgca

SEQ ID NO: 453853 - DNA, 33 bp, Homo sapien
ttgcatccagttgctacgtccccgaatctctct

SEQ ID NO: 453854 - DNA, 33 bp, Homo sapien
ttgcatccagttgctatgtccccgaatctctct

SEQ ID NO: 453855 - DNA, 33 bp, Homo sapien
acagaatctcagagacagagagggtgcacaaga

SEQ ID NO: 453856 - DNA, 33 bp, Homo sapien
acagaatctcagagacggagagggtgcacaaga

SEQ ID NO: 453857 - DNA, 33 bp, Homo sapien
ccatggagaacaacagaaaaccttgaactcctg

SEQ ID NO: 453858 - DNA, 33 bp, Homo sapien
ccatggagaacaacaggaaaccttgaactcctg

SEQ ID NO: 453859 - DNA, 33 bp, Homo sapien
tagaaggtagatactgaatggcaatgggcctta

SEQ ID NO: 453860 - DNA, 33 bp, Homo sapien
tagaaggtagatactgtatggcaatgggcctta

SEQ ID NO: 453861 - DNA, 33 bp, Homo sapien
ctgcaggatccagttcaaattccatagtgcagc

SEQ ID NO: 453862 - DNA, 33 bp, Homo sapien
ctgcaggatccagttccaattccatagtgcagc

SEQ ID NO: 453863 - DNA, 33 bp, Homo sapien
ttatcagaacaatgccaagaaaagtgaccacta

SEQ ID NO: 453864 - DNA, 33 bp, Homo sapien
ttatcagaacaatgccgagaaaagtgaccacta

SEQ ID NO: 453865 - DNA, 33 bp, Homo sapien
accgtcaggcgatgaactccagggatttaatgt

SEQ ID NO: 453866 - DNA, 33 bp, Homo sapien
accgtcaggcgatgaattccagggatttaatgt

SEQ ID NO: 453867 - DNA, 33 bp, Homo sapien
cactgggagtggaggccaatcatgtcaaaggag

SEQ ID NO: 453868 - DNA, 33 bp, Homo sapien
cactgggagtggaggctaatcatgtcaaaggag

SEQ ID NO: 453869 - DNA, 33 bp, Homo sapien
agcaccataagcccacactccagcctatcagag

SEQ ID NO: 453870 - DNA, 33 bp, Homo sapien
agcaccataagcccacgctccagcctatcagag

SEQ ID NO: 453871 - DNA, 33 bp, Homo sapien
tctcggcggcaatgatcaaagttgctgctgttc

SEQ ID NO: 453872 - DNA, 33 bp, Homo sapien
tctcggcggcaatgatgaaagttgctgctgttc

SEQ ID NO: 453873 - DNA, 33 bp, Homo sapien
aatggtgctattaaaacgagggatcatgaaaca

SEQ ID NO: 453874 - DNA, 33 bp, Homo sapien
aatggtgctattaaaatgagggatcatgaaaca

SEQ ID NO: 453875 - DNA, 33 bp, Homo sapien
cttggaaaacattgccgcctatatgcacagccc

SEQ ID NO: 453876 - DNA, 33 bp, Homo sapien
cttggaaaacattgcctcctatatgcacagccc

SEQ ID NO: 453877 - DNA, 33 bp, Homo sapien
ttgaagttgtacagtgaaaatggtctttgattc

SEQ ID NO: 453878 - DNA, 33 bp, Homo sapien
ttgaagttgtacagtgcaaatggtctttgattc

SEQ ID NO: 453879 - DNA, 33 bp, Homo sapien
tcagatgctgatgcccaccttccatttcaacat

SEQ ID NO: 453880 - DNA, 33 bp, Homo sapien
tcagatgctgatgcccgccttccatttcaacat

SEQ ID NO: 453881 - DNA, 33 bp, Homo sapien
tctcagaatgtttacaaacagaccctgggttcc

SEQ ID NO: 453882 - DNA, 33 bp, Homo sapien
tctcagaatgtttacacacagaccctgggttcc

SEQ ID NO: 453883 - DNA, 33 bp, Homo sapien
catgcagttggtggagcatctggactgctattt

SEQ ID NO: 453884 - DNA, 33 bp, Homo sapien
catgcagttggtggaggatctggactgctattt

SEQ ID NO: 453885 - DNA, 33 bp, Homo sapien
actccacttttgccagcatgaaagccgacacca

SEQ ID NO: 453886 - DNA, 33 bp, Homo sapien
actccacttttgccagtatgaaagccgacacca

SEQ ID NO: 453887 - DNA, 33 bp, Homo sapien
tatgtcccagcctaccccgctttacaggggctg

SEQ ID NO: 453888 - DNA, 33 bp, Homo sapien
tatgtcccagcctacctcgctttacaggggctg

SEQ ID NO: 453889 - DNA, 33 bp, Homo sapien
tgccctcacccccgcaatcttgggagaactata

SEQ ID NO: 453890 - DNA, 33 bp, Homo sapien
tgccctcacccccgcagtcttgggagaactata

SEQ ID NO: 453891 - DNA, 33 bp, Homo sapien
cacagaggtgctgtaaatggttgtgcagaaagg

SEQ ID NO: 453892 - DNA, 33 bp, Homo sapien
cacagaggtgctgtaagtggttgtgcagaaagg

SEQ ID NO: 453893 - DNA, 33 bp, Homo sapien
tgggggtgaaatggagcagtcacaaggtgtctt

SEQ ID NO: 453894 - DNA, 33 bp, Homo sapien
tgggggtgaaatggaggagtcacaaggtgtctt

SEQ ID NO: 453895 - DNA, 33 bp, Homo sapien
agaggagggcaaggaccgatggatggacgacag

SEQ ID NO: 453896 - DNA, 33 bp, Homo sapien
agaggagggcaaggactgatggatggacgacag

SEQ ID NO: 453897 - DNA, 33 bp, Homo sapien
cactatttcttctaccactgtctactacaaact

SEQ ID NO: 453898 - DNA, 33 bp, Homo sapien
cactatttcttctaccgctgtctactacaaact

SEQ ID NO: 453899 - DNA, 33 bp, Homo sapien
caggcatcctttgtgccaggcatcccaagccct

SEQ ID NO: 453900 - DNA, 33 bp, Homo sapien
caggcatcctttgtgctaggcatcccaagccct

SEQ ID NO: 453901 - DNA, 33 bp, Homo sapien
gtgtccccattcacaaagcctccgctgaccggg

SEQ ID NO: 453902 - DNA, 33 bp, Homo sapien
gtgtccccattcacaaggcctccgctgaccggg

SEQ ID NO: 453903 - DNA, 33 bp, Homo sapien
actaaccaagtctctccgaatagacccttactg

SEQ ID NO: 453904 - DNA, 33 bp, Homo sapien
actaaccaagtctctctgaatagacccttactg

SEQ ID NO: 453905 - DNA, 33 bp, Homo sapien
agctgcagatgcttgcccaggaaggtggacaac

SEQ ID NO: 453906 - DNA, 33 bp, Homo sapien
agctgcagatgcttgcgcaggaaggtggacaac

SEQ ID NO: 453907 - DNA, 33 bp, Homo sapien
gtattaaatgatacctaaaacgtggttgaacac

SEQ ID NO: 453908 - DNA, 33 bp, Homo sapien
gtattaaatgatacctgaaacgtggttgaacac

SEQ ID NO: 453909 - DNA, 33 bp, Homo sapien
aattcctcgactcaaaacctgctctggggagaa

SEQ ID NO: 453910 - DNA, 33 bp, Homo sapien
aattcctcgactcaaaccctgctctggggagaa

SEQ ID NO: 453911 - DNA, 33 bp, Homo sapien
ctgcacatgggggtaacgtggatgtgctgggag

SEQ ID NO: 453912 - DNA, 33 bp, Homo sapien
ctgcacatgggggtaatgtggatgtgctgggag

SEQ ID NO: 453913 - DNA, 33 bp, Homo sapien
gagaaataagctactacgttgcttcagctatga

SEQ ID NO: 453914 - DNA, 33 bp, Homo sapien
gagaaataagctactatgttgcttcagctatga

SEQ ID NO: 453915 - DNA, 33 bp, Homo sapien
attgttcttgtttataagagcaaagctgtgaac

SEQ ID NO: 453916 - DNA, 33 bp, Homo sapien
attgttcttgtttataggagcaaagctgtgaac

SEQ ID NO: 453917 - DNA, 33 bp, Homo sapien
cttgtcatcttattaccctattgtaccccatga

SEQ ID NO: 453918 - DNA, 33 bp, Homo sapien
cttgtcatcttattactctattgtaccccatga

SEQ ID NO: 453919 - DNA, 33 bp, Homo sapien
gagagcaaatctgacagcatggactcatcaggg

SEQ ID NO: 453920 - DNA, 33 bp, Homo sapien
gagagcaaatctgacatcatggactcatcaggg

SEQ ID NO: 453921 - DNA, 33 bp, Homo sapien
agactgggtagcttcaataatagacatttattg

SEQ ID NO: 453922 - DNA, 33 bp, Homo sapien
agactgggtagcttcagtaatagacatttattg

SEQ ID NO: 453923 - DNA, 33 bp, Homo sapien
tcaggcctatggattacaaaccacagaccccat

SEQ ID NO: 453924 - DNA, 33 bp, Homo sapien
tcaggcctatggattagaaaccacagaccccat

SEQ ID NO: 453925 - DNA, 33 bp, Homo sapien
tctgggctctttccagacctggcaattcacacc

SEQ ID NO: 453926 - DNA, 33 bp, Homo sapien
tctgggctctttccagtcctggcaattcacacc

SEQ ID NO: 453927 - DNA, 33 bp, Homo sapien
ctgggtgggctttgacagggaagatcaggttaa

SEQ ID NO: 453928 - DNA, 33 bp, Homo sapien
ctgggtgggctttgacggggaagatcaggttaa

SEQ ID NO: 453929 - DNA, 33 bp, Homo sapien
gcccctcattcacaccagagttctcacttgagc

SEQ ID NO: 453930 - DNA, 33 bp, Homo sapien
gcccctcattcacaccggagttctcacttgagc

SEQ ID NO: 453931 - DNA, 33 bp, Homo sapien
gcccaggctgaattaacgccacttcttgattgg

SEQ ID NO: 453932 - DNA, 33 bp, Homo sapien
gcccaggctgaattaatgccacttcttgattgg

SEQ ID NO: 453933 - DNA, 33 bp, Homo sapien
tcagtcatatgggacaacaccaccattgcagct

SEQ ID NO: 453934 - DNA, 33 bp, Homo sapien
tcagtcatatgggacagcaccaccattgcagct

SEQ ID NO: 453935 - DNA, 33 bp, Homo sapien
ttctggagcccaaaaagagttgaaatgtcaggg

SEQ ID NO: 453936 - DNA, 33 bp, Homo sapien
ttctggagcccaaaaatagttgaaatgtcaggg

SEQ ID NO: 453937 - DNA, 33 bp, Homo sapien
gatagagtggaaggaacgccctggaaagccagc

SEQ ID NO: 453938 - DNA, 33 bp, Homo sapien
gatagagtggaaggaatgccctggaaagccagc

SEQ ID NO: 453939 - DNA, 33 bp, Homo sapien
aagctggtttctttgacggaagaggatgtctcc

SEQ ID NO: 453940 - DNA, 33 bp, Homo sapien
aagctggtttctttgagggaagaggatgtctcc

SEQ ID NO: 453941 - DNA, 33 bp, Homo sapien
tgaaagattggttggactaggtgttatatttgc

SEQ ID NO: 453942 - DNA, 33 bp, Homo sapien
tgaaagattggttggattaggtgttatatttgc

SEQ ID NO: 453943 - DNA, 33 bp, Homo sapien
ttttttacttggaagaactcctatttatccttc

SEQ ID NO: 453944 - DNA, 33 bp, Homo sapien
ttttttacttggaagagctcctatttatccttc

SEQ ID NO: 453945 - DNA, 33 bp, Homo sapien
tggagaactggccttacaatctggatagtgtgt

SEQ ID NO: 453946 - DNA, 33 bp, Homo sapien
tggagaactggccttataatctggatagtgtgt

SEQ ID NO: 453947 - DNA, 33 bp, Homo sapien
tggactcagttaactcaaaggaacacagtacca

SEQ ID NO: 453948 - DNA, 33 bp, Homo sapien
tggactcagttaactcgaaggaacacagtacca

SEQ ID NO: 453949 - DNA, 33 bp, Homo sapien
ttacagactcctgaaccctgggctcccctttga

SEQ ID NO: 453950 - DNA, 33 bp, Homo sapien
ttacagactcctgaacgctgggctcccctttga

SEQ ID NO: 453951 - DNA, 33 bp, Homo sapien
ggatggtcagcgccgcaatggccttctcagcat

SEQ ID NO: 453952 - DNA, 33 bp, Homo sapien
ggatggtcagcgccgcgatggccttctcagcat

SEQ ID NO: 453953 - DNA, 33 bp, Homo sapien
gcaaggtgcgttggcccggcaaaggctctgaga

SEQ ID NO: 453954 - DNA, 33 bp, Homo sapien
gcaaggtgcgttggcctggcaaaggctctgaga

SEQ ID NO: 453955 - DNA, 33 bp, Homo sapien
ggaatgtgcacaccggccaccaggaacaaatct

SEQ ID NO: 453956 - DNA, 33 bp, Homo sapien
ggaatgtgcacaccggtcaccaggaacaaatct

SEQ ID NO: 453957 - DNA, 33 bp, Homo sapien
ggccactgtcccgtcccggaaagtaagaaagcg

SEQ ID NO: 453958 - DNA, 33 bp, Homo sapien
ggccactgtcccgtcctggaaagtaagaaagcg

SEQ ID NO: 453959 - DNA, 33 bp, Homo sapien
acttgatggaccacacaatctcgctgttctcgg

SEQ ID NO: 453960 - DNA, 33 bp, Homo sapien
acttgatggaccacacgatctcgctgttctcgg

SEQ ID NO: 453961 - DNA, 33 bp, Homo sapien
agccttgcctgccatcaaggggaacggctgcct

SEQ ID NO: 453962 - DNA, 33 bp, Homo sapien
agccttgcctgccatcgaggggaacggctgcct

SEQ ID NO: 453963 - DNA, 33 bp, Homo sapien
gggtgtcagtcagctgcaatcaggaccctgctg

SEQ ID NO: 453964 - DNA, 33 bp, Homo sapien
gggtgtcagtcagctggaatcaggaccctgctg

SEQ ID NO: 453965 - DNA, 33 bp, Homo sapien
acatatttcctgaatacctacatggttgaacgt

SEQ ID NO: 453966 - DNA, 33 bp, Homo sapien
acatatttcctgaatagctacatggttgaacgt

SEQ ID NO: 453967 - DNA, 33 bp, Homo sapien
gaatggttacgtgaacaggcccattgcctatga

SEQ ID NO: 453968 - DNA, 33 bp, Homo sapien
gaatggttacgtgaacgggcccattgcctatga

SEQ ID NO: 453969 - DNA, 33 bp, Homo sapien
aaaaagaaataactcaataatgcaaattcagcc

SEQ ID NO: 453970 - DNA, 33 bp, Homo sapien
aaaaagaaataactcagtaatgcaaattcagcc

SEQ ID NO: 453971 - DNA, 33 bp, Homo sapien
tgcacagccttcttctaaaagctttgaatgaga

SEQ ID NO: 453972 - DNA, 33 bp, Homo sapien
tgcacagccttcttctgaaagctttgaatgaga

SEQ ID NO: 453973 - DNA, 33 bp, Homo sapien
cattcagcacgttcacaaggttgttcaaccacc

SEQ ID NO: 453974 - DNA, 33 bp, Homo sapien
cattcagcacgttcacgaggttgttcaaccacc

SEQ ID NO: 453975 - DNA, 33 bp, Homo sapien
gggattcttgccaaagactgactttcccttctc

SEQ ID NO: 453976 - DNA, 33 bp, Homo sapien
gggattcttgccaaaggctgactttcccttctc

SEQ ID NO: 453977 - DNA, 33 bp, Homo sapien
taaataaaatcctggcacaccaccagtgaccca

SEQ ID NO: 453978 - DNA, 33 bp, Homo sapien
taaataaaatcctggcgcaccaccagtgaccca

SEQ ID NO: 453979 - DNA, 33 bp, Homo sapien
gggcccttgggggctccatttggttcctaatgt

SEQ ID NO: 453980 - DNA, 33 bp, Homo sapien
gggcccttgggggctctatttggttcctaatgt

SEQ ID NO: 453981 - DNA, 33 bp, Homo sapien
cggcctaactctgtcacacgagagaaatcccac

SEQ ID NO: 453982 - DNA, 33 bp, Homo sapien
cggcctaactctgtcatacgagagaaatcccac

SEQ ID NO: 453983 - DNA, 33 bp, Homo sapien
ccaagtacgaagctgcaattggaatctgggagt

SEQ ID NO: 453984 - DNA, 33 bp, Homo sapien
ccaagtacgaagctgcgattggaatctgggagt

SEQ ID NO: 453985 - DNA, 33 bp, Homo sapien
tcctgcactgtgaatccctttaacatcttttaa

SEQ ID NO: 453986 - DNA, 33 bp, Homo sapien
tcctgcactgtgaatctctttaacatcttttaa

SEQ ID NO: 453987 - DNA, 33 bp, Homo sapien
gcatctttggtttgagaaggaggtaaaggaggg

SEQ ID NO: 453988 - DNA, 33 bp, Homo sapien
gcatctttggtttgaggaggaggtaaaggaggg

SEQ ID NO: 453989 - DNA, 33 bp, Homo sapien
cccatgacctctccaaaaagggagcaaaccaac

SEQ ID NO: 453990 - DNA, 33 bp, Homo sapien
cccatgacctctccaagaagggagcaaaccaac

SEQ ID NO: 453991 - DNA, 33 bp, Homo sapien
gcaactcccaattccaatgaagggccacagcct

SEQ ID NO: 453992 - DNA, 33 bp, Homo sapien
gcaactcccaattccagtgaagggccacagcct

SEQ ID NO: 453993 - DNA, 33 bp, Homo sapien
cagtgttgtgtcttcactacctctgtctagctc

SEQ ID NO: 453994 - DNA, 33 bp, Homo sapien
cagtgttgtgtcttcattacctctgtctagctc

SEQ ID NO: 453995 - DNA, 33 bp, Homo sapien
atgagcaacaagatccacaaccaagagaaacaa

SEQ ID NO: 453996 - DNA, 33 bp, Homo sapien
atgagcaacaagatccgcaaccaagagaaacaa

SEQ ID NO: 453997 - DNA, 33 bp, Homo sapien
agaagacgccatcttcacctctgcagtgtgtga

SEQ ID NO: 453998 - DNA, 33 bp, Homo sapien
agaagacgccatcttcgcctctgcagtgtgtga

SEQ ID NO: 453999 - DNA, 33 bp, Homo sapien
ggcaagtaggaagtagaatggcccagaccactt

SEQ ID NO: 454000 - DNA, 33 bp, Homo sapien
ggcaagtaggaagtaggatggcccagaccactt

SEQ ID NO: 454001 - DNA, 33 bp, Homo sapien
tatccttactggttgaacaacgctaatctgaaa

SEQ ID NO: 454002 - DNA, 33 bp, Homo sapien
tatccttactggttgagcaacgctaatctgaaa

SEQ ID NO: 454003 - DNA, 33 bp, Homo sapien
tgtcagtcctagtctaagaaaacagcctcgcca

SEQ ID NO: 454004 - DNA, 33 bp, Homo sapien
tgtcagtcctagtctaggaaaacagcctcgcca

SEQ ID NO: 454005 - DNA, 33 bp, Homo sapien
ctccgaggcagcgctcaacctgaagtgtcttag

SEQ ID NO: 454006 - DNA, 33 bp, Homo sapien
ctccgaggcagcgctcgacctgaagtgtcttag

SEQ ID NO: 454007 - DNA, 33 bp, Homo sapien
acccacccacaaggaactcgtgaaaaagtcatc

SEQ ID NO: 454008 - DNA, 33 bp, Homo sapien
acccacccacaaggaagtcgtgaaaaagtcatc

SEQ ID NO: 454009 - DNA, 33 bp, Homo sapien
aatctcttattataacagcaacagtcacgttgg

SEQ ID NO: 454010 - DNA, 33 bp, Homo sapien
aatctcttattataacggcaacagtcacgttgg

SEQ ID NO: 454011 - DNA, 33 bp, Homo sapien
acacccaggcagcgcacgtttttttcttttttt

SEQ ID NO: 454012 - DNA, 33 bp, Homo sapien
acacccaggcagcgcatgtttttttcttttttt

SEQ ID NO: 454013 - DNA, 33 bp, Homo sapien
cagcccagccgcctgggacatgaatgttgatgg

SEQ ID NO: 454014 - DNA, 33 bp, Homo sapien
cagcccagccgcctggtacatgaatgttgatgg

SEQ ID NO: 454015 - DNA, 33 bp, Homo sapien
ggtacacatgggccaacaggaatgtgaacatta

SEQ ID NO: 454016 - DNA, 33 bp, Homo sapien
ggtacacatgggccaataggaatgtgaacatta

SEQ ID NO: 454017 - DNA, 33 bp, Homo sapien
tccacatgagaacttaaaaaggcttccacgggc

SEQ ID NO: 454018 - DNA, 33 bp, Homo sapien
tccacatgagaacttagaaaggcttccacgggc

SEQ ID NO: 454019 - DNA, 33 bp, Homo sapien
ggatgttagcaaatcacgccacacatgtccctt

SEQ ID NO: 454020 - DNA, 33 bp, Homo sapien
ggatgttagcaaatcaggccacacatgtccctt

SEQ ID NO: 454021 - DNA, 33 bp, Homo sapien
gtggagcctgtcaccaacttcataaccagtgtc

SEQ ID NO: 454022 - DNA, 33 bp, Homo sapien
gtggagcctgtcaccagcttcataaccagtgtc

SEQ ID NO: 454023 - DNA, 33 bp, Homo sapien
gccactgggtcctgtcaacggcttctggaatcc

SEQ ID NO: 454024 - DNA, 33 bp, Homo sapien
gccactgggtcctgtcgacggcttctggaatcc

SEQ ID NO: 454025 - DNA, 33 bp, Homo sapien
ggtgaatggcagagtcaatggttccaactccat

SEQ ID NO: 454026 - DNA, 33 bp, Homo sapien
ggtgaatggcagagtcgatggttccaactccat

SEQ ID NO: 454027 - DNA, 33 bp, Homo sapien
acacctcctagcaacaaagcaagtgtaaagaaa

SEQ ID NO: 454028 - DNA, 33 bp, Homo sapien
acacctcctagcaacacagcaagtgtaaagaaa

SEQ ID NO: 454029 - DNA, 33 bp, Homo sapien
cacattttctctgtaacgggtgactgtttacta

SEQ ID NO: 454030 - DNA, 33 bp, Homo sapien
cacattttctctgtaatgggtgactgtttacta

SEQ ID NO: 454031 - DNA, 33 bp, Homo sapien
atccccttaagactccaaatagttacacaatca

SEQ ID NO: 454032 - DNA, 33 bp, Homo sapien
atccccttaagactccgaatagttacacaatca

SEQ ID NO: 454033 - DNA, 33 bp, Homo sapien
gactgagaatgtgctagcctttctgcctacctc

SEQ ID NO: 454034 - DNA, 33 bp, Homo sapien
gactgagaatgtgctatcctttctgcctacctc

SEQ ID NO: 454035 - DNA, 33 bp, Homo sapien
cctattttgttttgcaaagtaatgttctccagg

SEQ ID NO: 454036 - DNA, 33 bp, Homo sapien
cctattttgttttgcacagtaatgttctccagg

SEQ ID NO: 454037 - DNA, 33 bp, Homo sapien
ccaggatgtagctcccaaagcaatgcagcatgg

SEQ ID NO: 454038 - DNA, 33 bp, Homo sapien
ccaggatgtagctcccgaagcaatgcagcatgg

SEQ ID NO: 454039 - DNA, 33 bp, Homo sapien
cctggtagtaccactgaaccaaaagttctccac

SEQ ID NO: 454040 - DNA, 33 bp, Homo sapien
cctggtagtaccactggaccaaaagttctccac

SEQ ID NO: 454041 - DNA, 33 bp, Homo sapien
cacttagctccagatacgctcccaatgcacact

SEQ ID NO: 454042 - DNA, 33 bp, Homo sapien
cacttagctccagatatgctcccaatgcacact

SEQ ID NO: 454043 - DNA, 33 bp, Homo sapien
ttgcctctcccttctcacctaatgcaggaagac

SEQ ID NO: 454044 - DNA, 33 bp, Homo sapien
ttgcctctcccttctcgcctaatgcaggaagac

SEQ ID NO: 454045 - DNA, 33 bp, Homo sapien
catgttctttttgcaccgagccccgtagattct

SEQ ID NO: 454046 - DNA, 33 bp, Homo sapien
catgttctttttgcactgagccccgtagattct

SEQ ID NO: 454047 - DNA, 33 bp, Homo sapien
cagaccagaggttatacgaaggaaacaggtggt

SEQ ID NO: 454048 - DNA, 33 bp, Homo sapien
cagaccagaggttatatgaaggaaacaggtggt

SEQ ID NO: 454049 - DNA, 33 bp, Homo sapien
gtaactactaatagcccaccaatcacataaatt

SEQ ID NO: 454050 - DNA, 33 bp, Homo sapien
gtaactactaatagcctaccaatcacataaatt

SEQ ID NO: 454051 - DNA, 33 bp, Homo sapien
gaagtggtaactcaagaaaaataatgcagaaac

SEQ ID NO: 454052 - DNA, 33 bp, Homo sapien
gaagtggtaactcaaggaaaataatgcagaaac

SEQ ID NO: 454053 - DNA, 33 bp, Homo sapien
tcactagatcacatggaaattttgtgtttaact

SEQ ID NO: 454054 - DNA, 33 bp, Homo sapien
tcactagatcacatggcaattttgtgtttaact

SEQ ID NO: 454055 - DNA, 33 bp, Homo sapien
tgcaaaccatccttgaactatctgcttctcttt

SEQ ID NO: 454056 - DNA, 33 bp, Homo sapien
tgcaaaccatccttgagctatctgcttctcttt

SEQ ID NO: 454057 - DNA, 33 bp, Homo sapien
ggctcaatccaggcaacttagtctacatccctt

SEQ ID NO: 454058 - DNA, 33 bp, Homo sapien
ggctcaatccaggcaatttagtctacatccctt

SEQ ID NO: 454059 - DNA, 33 bp, Homo sapien
gaataacacagtggaacagacattgttttcaga

SEQ ID NO: 454060 - DNA, 33 bp, Homo sapien
gaataacacagtggaatagacattgttttcaga

SEQ ID NO: 454061 - DNA, 33 bp, Homo sapien
tcctttatctgcacaacgggaatgataacagaa

SEQ ID NO: 454062 - DNA, 33 bp, Homo sapien
tcctttatctgcacaatgggaatgataacagaa

SEQ ID NO: 454063 - DNA, 33 bp, Homo sapien
acgagactctgtctaaaaaaaagggcaaccagc

SEQ ID NO: 454064 - DNA, 33 bp, Homo sapien
acgagactctgtctaagaaaaagggcaaccagc

SEQ ID NO: 454065 - DNA, 33 bp, Homo sapien
actagaaaaactaagcaacagagaatactggcc

SEQ ID NO: 454066 - DNA, 33 bp, Homo sapien
actagaaaaactaagcgacagagaatactggcc

SEQ ID NO: 454067 - DNA, 33 bp, Homo sapien
tccatcaacagaatacagataaacagaatgtgg

SEQ ID NO: 454068 - DNA, 33 bp, Homo sapien
tccatcaacagaatacggataaacagaatgtgg

SEQ ID NO: 454069 - DNA, 33 bp, Homo sapien
gtgaggtcagatgatgcattactctttctgtgt

SEQ ID NO: 454070 - DNA, 33 bp, Homo sapien
gtgaggtcagatgatgtattactctttctgtgt

SEQ ID NO: 454071 - DNA, 33 bp, Homo sapien
ctcagacacaaccaagacgtccttcagcgggca

SEQ ID NO: 454072 - DNA, 33 bp, Homo sapien
ctcagacacaaccaaggcgtccttcagcgggca

SEQ ID NO: 454073 - DNA, 33 bp, Homo sapien
ctccaggatattgacaagaatacacgttactga

SEQ ID NO: 454074 - DNA, 33 bp, Homo sapien
ctccaggatattgacacgaatacacgttactga

SEQ ID NO: 454075 - DNA, 33 bp, Homo sapien
ccaggtctcttgactaagcattgtgttctgtcc

SEQ ID NO: 454076 - DNA, 33 bp, Homo sapien
ccaggtctcttgactaggcattgtgttctgtcc

SEQ ID NO: 454077 - DNA, 33 bp, Homo sapien
cactgctgatcggcacaggagtttttgtttgtt

SEQ ID NO: 454078 - DNA, 33 bp, Homo sapien
cactgctgatcggcacgggagtttttgtttgtt

SEQ ID NO: 454079 - DNA, 33 bp, Homo sapien
gtttgtttttaaaacaatctcatactgtcaccc

SEQ ID NO: 454080 - DNA, 33 bp, Homo sapien
gtttgtttttaaaacagtctcatactgtcaccc

SEQ ID NO: 454081 - DNA, 33 bp, Homo sapien
gggagaacggcctggacgagctttgggtatatt

SEQ ID NO: 454082 - DNA, 33 bp, Homo sapien
gggagaacggcctggatgagctttgggtatatt

SEQ ID NO: 454083 - DNA, 33 bp, Homo sapien
gtgatatgagtatcagaaaacataaatgcacca

SEQ ID NO: 454084 - DNA, 33 bp, Homo sapien
gtgatatgagtatcaggaaacataaatgcacca

SEQ ID NO: 454085 - DNA, 33 bp, Homo sapien
ggcctgtctactaaagacccacgtgctgttgtc

SEQ ID NO: 454086 - DNA, 33 bp, Homo sapien
ggcctgtctactaaagtcccacgtgctgttgtc

SEQ ID NO: 454087 - DNA, 33 bp, Homo sapien
catatgtataccatgacgacttgtgtgggtgca

SEQ ID NO: 454088 - DNA, 33 bp, Homo sapien
catatgtataccatgatgacttgtgtgggtgca

SEQ ID NO: 454089 - DNA, 33 bp, Homo sapien
cctgatgtgcaccctgaagcagccattggctct

SEQ ID NO: 454090 - DNA, 33 bp, Homo sapien
cctgatgtgcaccctgcagcagccattggctct

SEQ ID NO: 454091 - DNA, 33 bp, Homo sapien
caagttacatccttgaacagacacttttcaaag

SEQ ID NO: 454092 - DNA, 33 bp, Homo sapien
caagttacatccttgagcagacacttttcaaag

SEQ ID NO: 454093 - DNA, 33 bp, Homo sapien
ttctacttaagaatagaagaagcaaggtatcaa

SEQ ID NO: 454094 - DNA, 33 bp, Homo sapien
ttctacttaagaatagtagaagcaaggtatcaa

SEQ ID NO: 454095 - DNA, 33 bp, Homo sapien
ggaggctgagggtgccaatggaaacaagtgctg

SEQ ID NO: 454096 - DNA, 33 bp, Homo sapien
ggaggctgagggtgccgatggaaacaagtgctg

SEQ ID NO: 454097 - DNA, 33 bp, Homo sapien
tcctgaattcaacaaacgcagagaataattgat

SEQ ID NO: 454098 - DNA, 33 bp, Homo sapien
tcctgaattcaacaaaggcagagaataattgat

SEQ ID NO: 454099 - DNA, 33 bp, Homo sapien
ctgaagcatctccaaaagtcacacaaaaggaga

SEQ ID NO: 454100 - DNA, 33 bp, Homo sapien
ctgaagcatctccaaaggtcacacaaaaggaga

SEQ ID NO: 454101 - DNA, 33 bp, Homo sapien
gggggtcacggccagacgaagagaggtcacaca

SEQ ID NO: 454102 - DNA, 33 bp, Homo sapien
gggggtcacggccagatgaagagaggtcacaca

SEQ ID NO: 454103 - DNA, 33 bp, Homo sapien
acaaggaaactcatggccaacaggaggaagtgg

SEQ ID NO: 454104 - DNA, 33 bp, Homo sapien
acaaggaaactcatgggcaacaggaggaagtgg

SEQ ID NO: 454105 - DNA, 33 bp, Homo sapien
actgggtccaggaagaaagtgatcagctgctgg

SEQ ID NO: 454106 - DNA, 33 bp, Homo sapien
actgggtccaggaagacagtgatcagctgctgg

SEQ ID NO: 454107 - DNA, 33 bp, Homo sapien
gaggtgagtagtaggccgacaatcaaaacttca

SEQ ID NO: 454108 - DNA, 33 bp, Homo sapien
gaggtgagtagtaggctgacaatcaaaacttca

SEQ ID NO: 454109 - DNA, 33 bp, Homo sapien
caggatgattcaaggacattatgtttattttgc

SEQ ID NO: 454110 - DNA, 33 bp, Homo sapien
caggatgattcaaggatattatgtttattttgc

SEQ ID NO: 454111 - DNA, 33 bp, Homo sapien
gcccaggaagggtagcacctgaaaatcttacct

SEQ ID NO: 454112 - DNA, 33 bp, Homo sapien
gcccaggaagggtagctcctgaaaatcttacct

SEQ ID NO: 454113 - DNA, 33 bp, Homo sapien
tctggctgtgaatgtcaagtggcaaggcagtgg

SEQ ID NO: 454114 - DNA, 33 bp, Homo sapien
tctggctgtgaatgtcgagtggcaaggcagtgg

SEQ ID NO: 454115 - DNA, 33 bp, Homo sapien
cctctttgccaaatccaagggcatgaaggtcta

SEQ ID NO: 454116 - DNA, 33 bp, Homo sapien
cctctttgccaaatccgagggcatgaaggtcta

SEQ ID NO: 454117 - DNA, 33 bp, Homo sapien
cgactttgaaccaaggaccgaacttctctgagc

SEQ ID NO: 454118 - DNA, 33 bp, Homo sapien
cgactttgaaccaagggccgaacttctctgagc

SEQ ID NO: 454119 - DNA, 33 bp, Homo sapien
tttaaaaaaagatcaaatccattctcttccctg

SEQ ID NO: 454120 - DNA, 33 bp, Homo sapien
tttaaaaaaagatcaagtccattctcttccctg

SEQ ID NO: 454121 - DNA, 33 bp, Homo sapien
cagaaatggggtaacaatagagccacaggcagg

SEQ ID NO: 454122 - DNA, 33 bp, Homo sapien
cagaaatggggtaacagtagagccacaggcagg

SEQ ID NO: 454123 - DNA, 33 bp, Homo sapien
cctgggcatagagaaacgtgggcagagggtcca

SEQ ID NO: 454124 - DNA, 33 bp, Homo sapien
cctgggcatagagaaatgtgggcagagggtcca

SEQ ID NO: 454125 - DNA, 33 bp, Homo sapien
tggaagaaggcagatacgcggagttctgaggca

SEQ ID NO: 454126 - DNA, 33 bp, Homo sapien
tggaagaaggcagatatgcggagttctgaggca

SEQ ID NO: 454127 - DNA, 33 bp, Homo sapien
cccctgcagaagtgatcaaaaggacagtaaaga

SEQ ID NO: 454128 - DNA, 33 bp, Homo sapien
cccctgcagaagtgattaaaaggacagtaaaga

SEQ ID NO: 454129 - DNA, 33 bp, Homo sapien
ttttagttccaaatgaatcaagttttatatgtt

SEQ ID NO: 454130 - DNA, 33 bp, Homo sapien
ttttagttccaaatgagtcaagttttatatgtt

SEQ ID NO: 454131 - DNA, 33 bp, Homo sapien
gccccttcatagaaaacggaggcttcaattgca

SEQ ID NO: 454132 - DNA, 33 bp, Homo sapien
gccccttcatagaaaatggaggcttcaattgca

SEQ ID NO: 454133 - DNA, 33 bp, Homo sapien
aactcaaggacgtgacagcgaaaaaggaccttg

SEQ ID NO: 454134 - DNA, 33 bp, Homo sapien
aactcaaggacgtgacggcgaaaaaggaccttg

SEQ ID NO: 454135 - DNA, 33 bp, Homo sapien
gaacaaagatatggtcaaagtcacaatctcact

SEQ ID NO: 454136 - DNA, 33 bp, Homo sapien
gaacaaagatatggtcgaagtcacaatctcact

SEQ ID NO: 454137 - DNA, 33 bp, Homo sapien
gaccacttattcccaaattctaaacatcgcatg

SEQ ID NO: 454138 - DNA, 33 bp, Homo sapien
gaccacttattcccaagttctaaacatcgcatg

SEQ ID NO: 454139 - DNA, 33 bp, Homo sapien
tgcaagctttaggacaagggggattccagcaag

SEQ ID NO: 454140 - DNA, 33 bp, Homo sapien
tgcaagctttaggacaggggggattccagcaag

SEQ ID NO: 454141 - DNA, 33 bp, Homo sapien
ctcttgttcttgtgcccacccaataaacagcat

SEQ ID NO: 454142 - DNA, 33 bp, Homo sapien
ctcttgttcttgtgcctacccaataaacagcat

SEQ ID NO: 454143 - DNA, 33 bp, Homo sapien
ggccaaataagtacgaccacactttctccgcct

SEQ ID NO: 454144 - DNA, 33 bp, Homo sapien
ggccaaataagtacgatcacactttctccgcct

SEQ ID NO: 454145 - DNA, 33 bp, Homo sapien
cgggatggttatccacacaaacatctaggtcac

SEQ ID NO: 454146 - DNA, 33 bp, Homo sapien
cgggatggttatccacgcaaacatctaggtcac

SEQ ID NO: 454147 - DNA, 33 bp, Homo sapien
tgggaccccggtgtcaacaactatgcgatataa

SEQ ID NO: 454148 - DNA, 33 bp, Homo sapien
tgggaccccggtgtcagcaactatgcgatataa

SEQ ID NO: 454149 - DNA, 33 bp, Homo sapien
gcctgtctctccagcacagcagtcttttttttt

SEQ ID NO: 454150 - DNA, 33 bp, Homo sapien
gcctgtctctccagcatagcagtcttttttttt

SEQ ID NO: 454151 - DNA, 33 bp, Homo sapien
ggagccatttgtacctcaatgccataccttgga

SEQ ID NO: 454152 - DNA, 33 bp, Homo sapien
ggagccatttgtacctgaatgccataccttgga

SEQ ID NO: 454153 - DNA, 33 bp, Homo sapien
aggttaaattacacacacaggtcgagtttctgt

SEQ ID NO: 454154 - DNA, 33 bp, Homo sapien
aggttaaattacacacgcaggtcgagtttctgt

SEQ ID NO: 454155 - DNA, 33 bp, Homo sapien
tagccggtgcaaggagcctaccagaaggcagag

SEQ ID NO: 454156 - DNA, 33 bp, Homo sapien
tagccggtgcaaggagtctaccagaaggcagag

SEQ ID NO: 454157 - DNA, 33 bp, Homo sapien
ttgggtggagaaaggaaaatctaggtgagtgtt

SEQ ID NO: 454158 - DNA, 33 bp, Homo sapien
ttgggtggagaaaggagaatctaggtgagtgtt

SEQ ID NO: 454159 - DNA, 33 bp, Homo sapien
gaaaagaccctggcccaaatggttctggcagaa

SEQ ID NO: 454160 - DNA, 33 bp, Homo sapien
gaaaagaccctggcccgaatggttctggcagaa

SEQ ID NO: 454161 - DNA, 33 bp, Homo sapien
gggagacacagagagtaaagaatccagctggac

SEQ ID NO: 454162 - DNA, 33 bp, Homo sapien
gggagacacagagagtgaagaatccagctggac

SEQ ID NO: 454163 - DNA, 33 bp, Homo sapien
tagaaagaacttggaaactgataggctgaaact

SEQ ID NO: 454164 - DNA, 33 bp, Homo sapien
tagaaagaacttggaagctgataggctgaaact

SEQ ID NO: 454165 - DNA, 33 bp, Homo sapien
gggatgcctcacaggcagcagtgaacttgggag

SEQ ID NO: 454166 - DNA, 33 bp, Homo sapien
gggatgcctcacaggcggcagtgaacttgggag

SEQ ID NO: 454167 - DNA, 33 bp, Homo sapien
gggttctccaatctcacgctagaaagaatccag

SEQ ID NO: 454168 - DNA, 33 bp, Homo sapien
gggttctccaatctcatgctagaaagaatccag

SEQ ID NO: 454169 - DNA, 33 bp, Homo sapien
ggcagcttggtgctgtcaaaatggatggagcct

SEQ ID NO: 454170 - DNA, 33 bp, Homo sapien
ggcagcttggtgctgttaaaatggatggagcct

SEQ ID NO: 454171 - DNA, 33 bp, Homo sapien
gaacactgtgcattcacgaagcgctcatcggaa

SEQ ID NO: 454172 - DNA, 33 bp, Homo sapien
gaacactgtgcattcaggaagcgctcatcggaa

SEQ ID NO: 454173 - DNA, 33 bp, Homo sapien
ccagcaggcaacagaaaataccgtcggtcaccc

SEQ ID NO: 454174 - DNA, 33 bp, Homo sapien
ccagcaggcaacagaagataccgtcggtcaccc

SEQ ID NO: 454175 - DNA, 33 bp, Homo sapien
ggggaccaagccccgcaactgagactctcatgc

SEQ ID NO: 454176 - DNA, 33 bp, Homo sapien
ggggaccaagccccgccactgagactctcatgc

SEQ ID NO: 454177 - DNA, 33 bp, Homo sapien
acttcgcggtgtgttcaaggaatagtgagatgg

SEQ ID NO: 454178 - DNA, 33 bp, Homo sapien
acttcgcggtgtgttcgaggaatagtgagatgg

SEQ ID NO: 454179 - DNA, 33 bp, Homo sapien
ggtgtaataataataactctaaggtcaggcatt

SEQ ID NO: 454180 - DNA, 33 bp, Homo sapien
ggtgtaataataataattctaaggtcaggcatt

SEQ ID NO: 454181 - DNA, 33 bp, Homo sapien
taatagcccttccagaaactagtttagtgaaac

SEQ ID NO: 454182 - DNA, 33 bp, Homo sapien
taatagcccttccagagactagtttagtgaaac

SEQ ID NO: 454183 - DNA, 33 bp, Homo sapien
agccaaagtgtctttaaactggacactggtacc

SEQ ID NO: 454184 - DNA, 33 bp, Homo sapien
agccaaagtgtctttagactggacactggtacc

SEQ ID NO: 454185 - DNA, 33 bp, Homo sapien
tgtaaaagcttttgaaaatcagacaaacatcca

SEQ ID NO: 454186 - DNA, 33 bp, Homo sapien
tgtaaaagcttttgaagatcagacaaacatcca

SEQ ID NO: 454187 - DNA, 33 bp, Homo sapien
ctcataagaaaagagaacattggtcctgtgatc

SEQ ID NO: 454188 - DNA, 33 bp, Homo sapien
ctcataagaaaagagagcattggtcctgtgatc

SEQ ID NO: 454189 - DNA, 33 bp, Homo sapien
gtgagatggtgaatgacaagtggtggatacgtg

SEQ ID NO: 454190 - DNA, 33 bp, Homo sapien
gtgagatggtgaatgagaagtggtggatacgtg

SEQ ID NO: 454191 - DNA, 33 bp, Homo sapien
cattctgctgcagttggaaacatccccagatct

SEQ ID NO: 454192 - DNA, 33 bp, Homo sapien
cattctgctgcagttgtaaacatccccagatct

SEQ ID NO: 454193 - DNA, 33 bp, Homo sapien
agactctgcaaaatccactgcaccccctcgggc

SEQ ID NO: 454194 - DNA, 33 bp, Homo sapien
agactctgcaaaatccgctgcaccccctcgggc

SEQ ID NO: 454195 - DNA, 33 bp, Homo sapien
taaaatgagagaaaaaccaagtcctactgctac

SEQ ID NO: 454196 - DNA, 33 bp, Homo sapien
taaaatgagagaaaaatcaagtcctactgctac

SEQ ID NO: 454197 - DNA, 33 bp, Homo sapien
cacagaccagggagcacggggaaggactccaca

SEQ ID NO: 454198 - DNA, 33 bp, Homo sapien
cacagaccagggagcatggggaaggactccaca

SEQ ID NO: 454199 - DNA, 33 bp, Homo sapien
gtaataaataaataaaatacagggagactccaa

SEQ ID NO: 454200 - DNA, 33 bp, Homo sapien
gtaataaataaataaattacagggagactccaa

SEQ ID NO: 454201 - DNA, 33 bp, Homo sapien
agatgcaaaagacagaatcaactatgtaatagc

SEQ ID NO: 454202 - DNA, 33 bp, Homo sapien
agatgcaaaagacagactcaactatgtaatagc

SEQ ID NO: 454203 - DNA, 33 bp, Homo sapien
ctcccagggtagaacaaagagctccctgacacc

SEQ ID NO: 454204 - DNA, 33 bp, Homo sapien
ctcccagggtagaacagagagctccctgacacc

SEQ ID NO: 454205 - DNA, 33 bp, Homo sapien
tgggaggtcctgagaaagtgccatttgagctga

SEQ ID NO: 454206 - DNA, 33 bp, Homo sapien
tgggaggtcctgagaaggtgccatttgagctga

SEQ ID NO: 454207 - DNA, 33 bp, Homo sapien
gctcaactgagacctgaaaggattgagcccagc

SEQ ID NO: 454208 - DNA, 33 bp, Homo sapien
gctcaactgagacctggaaggattgagcccagc

SEQ ID NO: 454209 - DNA, 33 bp, Homo sapien
ttttgcctctccggaacgccccacttcccagct

SEQ ID NO: 454210 - DNA, 33 bp, Homo sapien
ttttgcctctccggaatgccccacttcccagct

SEQ ID NO: 454211 - DNA, 33 bp, Homo sapien
agagagagatgggacacaaattcaccacaatct

SEQ ID NO: 454212 - DNA, 33 bp, Homo sapien
agagagagatgggacataaattcaccacaatct

SEQ ID NO: 454213 - DNA, 33 bp, Homo sapien
aatgttcctggccggacgtacagcctgtgcaaa

SEQ ID NO: 454214 - DNA, 33 bp, Homo sapien
aatgttcctggccggaggtacagcctgtgcaaa

SEQ ID NO: 454215 - DNA, 33 bp, Homo sapien
cacaatctatgcacgtaacaaaattacacttgt

SEQ ID NO: 454216 - DNA, 33 bp, Homo sapien
cacaatctatgcacgtgacaaaattacacttgt

SEQ ID NO: 454217 - DNA, 33 bp, Homo sapien
tgattgcagatgtgaaatcaaaacgttgtttgt

SEQ ID NO: 454218 - DNA, 33 bp, Homo sapien
tgattgcagatgtgaagtcaaaacgttgtttgt

SEQ ID NO: 454219 - DNA, 33 bp, Homo sapien
gtctcagccatgtccaatctctgtcccatgtgt

SEQ ID NO: 454220 - DNA, 33 bp, Homo sapien
gtctcagccatgtccactctctgtcccatgtgt

SEQ ID NO: 454221 - DNA, 33 bp, Homo sapien
gacaccatggacttcaaacatcagagatcaata

SEQ ID NO: 454222 - DNA, 33 bp, Homo sapien
gacaccatggacttcagacatcagagatcaata

SEQ ID NO: 454223 - DNA, 33 bp, Homo sapien
ctgggtcagatgagaaaatgcccagtacatgtg

SEQ ID NO: 454224 - DNA, 33 bp, Homo sapien
ctgggtcagatgagaagatgcccagtacatgtg

SEQ ID NO: 454225 - DNA, 33 bp, Homo sapien
ggttgagttgggagaaaacatccaccacggagc

SEQ ID NO: 454226 - DNA, 33 bp, Homo sapien
ggttgagttgggagaagacatccaccacggagc

SEQ ID NO: 454227 - DNA, 33 bp, Homo sapien
taaaaatagaatcaacacaaaaattttgctcca

SEQ ID NO: 454228 - DNA, 33 bp, Homo sapien
taaaaatagaatcaacgcaaaaattttgctcca

SEQ ID NO: 454229 - DNA, 33 bp, Homo sapien
tatgaggaactagacactattgggaaatgtaca

SEQ ID NO: 454230 - DNA, 33 bp, Homo sapien
tatgaggaactagacattattgggaaatgtaca

SEQ ID NO: 454231 - DNA, 33 bp, Homo sapien
tgtaagataaagcagacactatgaggaactaga

SEQ ID NO: 454232 - DNA, 33 bp, Homo sapien
tgtaagataaagcagagactatgaggaactaga

SEQ ID NO: 454233 - DNA, 33 bp, Homo sapien
tctcttcttcggtagcagcaccgtaagtctggg

SEQ ID NO: 454234 - DNA, 33 bp, Homo sapien
tctcttcttcggtagcggcaccgtaagtctggg

SEQ ID NO: 454235 - DNA, 33 bp, Homo sapien
aggagttcaaagtggacggaacgctctttaacc

SEQ ID NO: 454236 - DNA, 33 bp, Homo sapien
aggagttcaaagtggatggaacgctctttaacc

SEQ ID NO: 454237 - DNA, 33 bp, Homo sapien
gcatctgagtgtccacaaggcccaggaagataa

SEQ ID NO: 454238 - DNA, 33 bp, Homo sapien
gcatctgagtgtccacgaggcccaggaagataa

SEQ ID NO: 454239 - DNA, 33 bp, Homo sapien
cttgctcatcttggaacgaatactgaaggggtg

SEQ ID NO: 454240 - DNA, 33 bp, Homo sapien
cttgctcatcttggaaggaatactgaaggggtg

SEQ ID NO: 454241 - DNA, 33 bp, Homo sapien
cgggtagttttttcacccttgtcctgctccctc

SEQ ID NO: 454242 - DNA, 33 bp, Homo sapien
cgggtagttttttcactcttgtcctgctccctc

SEQ ID NO: 454243 - DNA, 33 bp, Homo sapien
gagcctatacaccttccatcttgctctgcctct

SEQ ID NO: 454244 - DNA, 33 bp, Homo sapien
gagcctatacaccttctatcttgctctgcctct

SEQ ID NO: 454245 - DNA, 33 bp, Homo sapien
gaacaaggaactgccaacgttgattgcatttgg

SEQ ID NO: 454246 - DNA, 33 bp, Homo sapien
gaacaaggaactgccagcgttgattgcatttgg

SEQ ID NO: 454247 - DNA, 33 bp, Homo sapien
gtggagccagtgaagacagaattcccgtgaaga

SEQ ID NO: 454248 - DNA, 33 bp, Homo sapien
gtggagccagtgaagagagaattcccgtgaaga

SEQ ID NO: 454249 - DNA, 33 bp, Homo sapien
aacatcgtaatccactcactaggtcttggcagg

SEQ ID NO: 454250 - DNA, 33 bp, Homo sapien
aacatcgtaatccactgactaggtcttggcagg

SEQ ID NO: 454251 - DNA, 33 bp, Homo sapien
taaagaatgtgaacaaagtcaaatgaggtggct

SEQ ID NO: 454252 - DNA, 33 bp, Homo sapien
taaagaatgtgaacaaggtcaaatgaggtggct

SEQ ID NO: 454253 - DNA, 33 bp, Homo sapien
gggtgaacactaaaggacccgttctgtgcagtg

SEQ ID NO: 454254 - DNA, 33 bp, Homo sapien
gggtgaacactaaaggccccgttctgtgcagtg

SEQ ID NO: 454255 - DNA, 33 bp, Homo sapien
tgcagacctcaaggtggagcacacaagatcagg

SEQ ID NO: 454256 - DNA, 33 bp, Homo sapien
tgcagacctcaaggtgtagcacacaagatcagg

SEQ ID NO: 454257 - DNA, 33 bp, Homo sapien
aatatgaatatctgtaacttccaatgctttaga

SEQ ID NO: 454258 - DNA, 33 bp, Homo sapien
aatatgaatatctgtatcttccaatgctttaga

SEQ ID NO: 454259 - DNA, 33 bp, Homo sapien
atggttcttctgattccaggtttataagagtgt

SEQ ID NO: 454260 - DNA, 33 bp, Homo sapien
atggttcttctgattctaggtttataagagtgt

SEQ ID NO: 454261 - DNA, 33 bp, Homo sapien
caatatccaaagcttacaattgtagaatcatag

SEQ ID NO: 454262 - DNA, 33 bp, Homo sapien
caatatccaaagcttataattgtagaatcatag

SEQ ID NO: 454263 - DNA, 33 bp, Homo sapien
caccacagctgaccaccatttctgcttcttaag

SEQ ID NO: 454264 - DNA, 33 bp, Homo sapien
caccacagctgaccactatttctgcttcttaag

SEQ ID NO: 454265 - DNA, 33 bp, Homo sapien
tgtgtgactttaagcacgggacttgagcctcag

SEQ ID NO: 454266 - DNA, 33 bp, Homo sapien
tgtgtgactttaagcatgggacttgagcctcag

SEQ ID NO: 454267 - DNA, 33 bp, Homo sapien
tgataagtggcgggtacatggcacctcctagta

SEQ ID NO: 454268 - DNA, 33 bp, Homo sapien
tgataagtggcgggtatatggcacctcctagta

SEQ ID NO: 454269 - DNA, 33 bp, Homo sapien
ccactgttcagattcactcctgttccaagaatc

SEQ ID NO: 454270 - DNA, 33 bp, Homo sapien
ccactgttcagattcattcctgttccaagaatc

SEQ ID NO: 454271 - DNA, 33 bp, Homo sapien
tcgggacctagaaacccgggacaccaaagtcta

SEQ ID NO: 454272 - DNA, 33 bp, Homo sapien
tcgggacctagaaacctgggacaccaaagtcta

SEQ ID NO: 454273 - DNA, 33 bp, Homo sapien
aagcaccaagcacagcacccggcaacaaacaga

SEQ ID NO: 454274 - DNA, 33 bp, Homo sapien
aagcaccaagcacagcgcccggcaacaaacaga

SEQ ID NO: 454275 - DNA, 33 bp, Homo sapien
caggaggtaatcaaaggcctgtagatgcgagac

SEQ ID NO: 454276 - DNA, 33 bp, Homo sapien
caggaggtaatcaaagtcctgtagatgcgagac

SEQ ID NO: 454277 - DNA, 33 bp, Homo sapien
acacaggaaaatgcccaggagggtttgatgaat

SEQ ID NO: 454278 - DNA, 33 bp, Homo sapien
acacaggaaaatgcccgggagggtttgatgaat

SEQ ID NO: 454279 - DNA, 33 bp, Homo sapien
gcatggaggtgagagcaatgtggaccagacttt

SEQ ID NO: 454280 - DNA, 33 bp, Homo sapien
gcatggaggtgagagcgatgtggaccagacttt

SEQ ID NO: 454281 - DNA, 33 bp, Homo sapien
gcggtggtattcagaagcggaaccttttaagag

SEQ ID NO: 454282 - DNA, 33 bp, Homo sapien
gcggtggtattcagaatcggaaccttttaagag

SEQ ID NO: 454283 - DNA, 33 bp, Homo sapien
atctctgcgccatagaaccgtttgattctatcc

SEQ ID NO: 454284 - DNA, 33 bp, Homo sapien
atctctgcgccatagagccgtttgattctatcc

SEQ ID NO: 454285 - DNA, 33 bp, Homo sapien
ctgtggtcactagatggaggaaagggagtgagg

SEQ ID NO: 454286 - DNA, 33 bp, Homo sapien
ctgtggtcactagatgtaggaaagggagtgagg

SEQ ID NO: 454287 - DNA, 33 bp, Homo sapien
cggggcacaggaagacaaaaggatgccccaggc

SEQ ID NO: 454288 - DNA, 33 bp, Homo sapien
cggggcacaggaagacgaaaggatgccccaggc

SEQ ID NO: 454289 - DNA, 33 bp, Homo sapien
aatatcttacccttgccatcctgacactcactg

SEQ ID NO: 454290 - DNA, 33 bp, Homo sapien
aatatcttacccttgctatcctgacactcactg

SEQ ID NO: 454291 - DNA, 33 bp, Homo sapien
acattgctctgtaatcacacagggtgcttttca

SEQ ID NO: 454292 - DNA, 33 bp, Homo sapien
acattgctctgtaatcccacagggtgcttttca

SEQ ID NO: 454293 - DNA, 33 bp, Homo sapien
ggagggaatagactacagggaatcggcctccca

SEQ ID NO: 454294 - DNA, 33 bp, Homo sapien
ggagggaatagactacggggaatcggcctccca

SEQ ID NO: 454295 - DNA, 33 bp, Homo sapien
gctggaatctgacttacctggaccgctgtcctt

SEQ ID NO: 454296 - DNA, 33 bp, Homo sapien
gctggaatctgacttatctggaccgctgtcctt

SEQ ID NO: 454297 - DNA, 33 bp, Homo sapien
ctaaaatgccctttccacaaggacgccttctct

SEQ ID NO: 454298 - DNA, 33 bp, Homo sapien
ctaaaatgccctttccgcaaggacgccttctct

SEQ ID NO: 454299 - DNA, 33 bp, Homo sapien
gaaccatcacaaccgaactggctatttacgatg

SEQ ID NO: 454300 - DNA, 33 bp, Homo sapien
gaaccatcacaaccgacctggctatttacgatg

SEQ ID NO: 454301 - DNA, 33 bp, Homo sapien
aaagctaccttgtgtcacagcaaagatctaccg

SEQ ID NO: 454302 - DNA, 33 bp, Homo sapien
aaagctaccttgtgtcgcagcaaagatctaccg

SEQ ID NO: 454303 - DNA, 33 bp, Homo sapien; identical to SEQ ID NO: 454301

SEQ ID NO: 454304 - DNA, 33 bp, Homo sapien; identical to SEQ ID NO: 454302

SEQ ID NO: 454305 - DNA, 33 bp, Homo sapien
tgtttagtgtgtaccacgtattagctcatttaa

SEQ ID NO: 454306 - DNA, 33 bp, Homo sapien
tgtttagtgtgtaccaggtattagctcatttaa

SEQ ID NO: 454307 - DNA, 33 bp, Homo sapien
aggctcctggaattacagagtctttttttatct

SEQ ID NO: 454308 - DNA, 33 bp, Homo sapien
aggctcctggaattacggagtctttttttatct

SEQ ID NO: 454309 - DNA, 33 bp, Homo sapien
ttggagctcaataagcacatgatggttaagtga

SEQ ID NO: 454310 - DNA, 33 bp, Homo sapien
ttggagctcaataagcgcatgatggttaagtga

SEQ ID NO: 454311 - DNA, 33 bp, Homo sapien
ctgtgaaataaggcaaatgagggactctccagg

SEQ ID NO: 454312 - DNA, 33 bp, Homo sapien
ctgtgaaataaggcaagtgagggactctccagg

SEQ ID NO: 454313 - DNA, 33 bp, Homo sapien
agaatagctaccaaaacgtgaaaaaatccaagt

SEQ ID NO: 454314 - DNA, 33 bp, Homo sapien
agaatagctaccaaaatgtgaaaaaatccaagt

SEQ ID NO: 454315 - DNA, 33 bp, Homo sapien
cacagtggcagctggactcacgggggggcttcc

SEQ ID NO: 454316 - DNA, 33 bp, Homo sapien
cacagtggcagctggagtcacgggggggcttcc

SEQ ID NO: 454317 - DNA, 33 bp, Homo sapien
gcatgttcgctctctcacctggcagtactttgg

SEQ ID NO: 454318 - DNA, 33 bp, Homo sapien
gcatgttcgctctctcgcctggcagtactttgg

SEQ ID NO: 454319 - DNA, 33 bp, Homo sapien
aaagggggctgtgatacgcaattcatcttgcac

SEQ ID NO: 454320 - DNA, 33 bp, Homo sapien
aaagggggctgtgataggcaattcatcttgcac

SEQ ID NO: 454321 - DNA, 33 bp, Homo sapien
tagaaacaaatatctgcaagtgtagggtggaga

SEQ ID NO: 454322 - DNA, 33 bp, Homo sapien
tagaaacaaatatctggaagtgtagggtggaga

SEQ ID NO: 454323 - DNA, 33 bp, Homo sapien
cgcgctatgggcagaaagagtcctcggatcaga

SEQ ID NO: 454324 - DNA, 33 bp, Homo sapien
cgcgctatgggcagaaggagtcctcggatcaga

SEQ ID NO: 454325 - DNA, 33 bp, Homo sapien
attaaggccaattagcagcaaatgaagaaatac

SEQ ID NO: 454326 - DNA, 33 bp, Homo sapien
attaaggccaattagcggcaaatgaagaaatac

SEQ ID NO: 454327 - DNA, 33 bp, Homo sapien
tccagccatggatacaacttcacatttattgtc

SEQ ID NO: 454328 - DNA, 33 bp, Homo sapien
tccagccatggatacagcttcacatttattgtc

SEQ ID NO: 454329 - DNA, 33 bp, Homo sapien
taggcagcagaaatgccgaaataacacacaaca

SEQ ID NO: 454330 - DNA, 33 bp, Homo sapien
taggcagcagaaatgcggaaataacacacaaca

SEQ ID NO: 454331 - DNA, 33 bp, Homo sapien
catactgcatggttggaaacttcagagttctct

SEQ ID NO: 454332 - DNA, 33 bp, Homo sapien
catactgcatggttggtaacttcagagttctct

SEQ ID NO: 454333 - DNA, 33 bp, Homo sapien
catcctgcccacagacactgaaagcaatctgaa

SEQ ID NO: 454334 - DNA, 33 bp, Homo sapien
catcctgcccacagaccctgaaagcaatctgaa

SEQ ID NO: 454335 - DNA, 33 bp, Homo sapien
atgggtgacacagacacggggctactgagtcca

SEQ ID NO: 454336 - DNA, 33 bp, Homo sapien
atgggtgacacagacatggggctactgagtcca

SEQ ID NO: 454337 - DNA, 33 bp, Homo sapien
cagtccaggcaagacaaattcatcctgtaccct

SEQ ID NO: 454338 - DNA, 33 bp, Homo sapien
cagtccaggcaagacatattcatcctgtaccct

SEQ ID NO: 454339 - DNA, 33 bp, Homo sapien
gggaggccaaggatcaaagagagtgaggggaag

SEQ ID NO: 454340 - DNA, 33 bp, Homo sapien
gggaggccaaggatcagagagagtgaggggaag

SEQ ID NO: 454341 - DNA, 33 bp, Homo sapien
ttgctttaaacaataaatctctgcgctggggaa

SEQ ID NO: 454342 - DNA, 33 bp, Homo sapien
ttgctttaaacaataactctctgcgctggggaa

SEQ ID NO: 454343 - DNA, 33 bp, Homo sapien
ctttccgatttatcaacgtgatttttggtttct

SEQ ID NO: 454344 - DNA, 33 bp, Homo sapien
ctttccgatttatcaaggtgatttttggtttct

SEQ ID NO: 454345 - DNA, 33 bp, Homo sapien
gatatgaaggcacaaacaggtccctgaaagaac

SEQ ID NO: 454346 - DNA, 33 bp, Homo sapien
gatatgaaggcacaaataggtccctgaaagaac

SEQ ID NO: 454347 - DNA, 33 bp, Homo sapien
cccacacacaaggagaacatcccaggcgaggac

SEQ ID NO: 454348 - DNA, 33 bp, Homo sapien
cccacacacaaggagagcatcccaggcgaggac

SEQ ID NO: 454349 - DNA, 33 bp, Homo sapien
aaagtcaaagtggaacaggctatcagtgaacca

SEQ ID NO: 454350 - DNA, 33 bp, Homo sapien
aaagtcaaagtggaacgggctatcagtgaacca

SEQ ID NO: 454351 - DNA, 33 bp, Homo sapien
ggggggtgaaacaaacaggcgttctccagactc

SEQ ID NO: 454352 - DNA, 33 bp, Homo sapien
ggggggtgaaacaaacgggcgttctccagactc

SEQ ID NO: 454353 - DNA, 33 bp, Homo sapien
ctcaggaaccttgagcccattccacagggcagg

SEQ ID NO: 454354 - DNA, 33 bp, Homo sapien
ctcaggaaccttgagcgcattccacagggcagg

SEQ ID NO: 454355 - DNA, 33 bp, Homo sapien
gcacagctaggttcaaacccaggcccagagcct

SEQ ID NO: 454356 - DNA, 33 bp, Homo sapien
gcacagctaggttcaatcccaggcccagagcct

SEQ ID NO: 454357 - DNA, 33 bp, Homo sapien
gcagtgctggagagtcaaggtttggagcagtgt

SEQ ID NO: 454358 - DNA, 33 bp, Homo sapien
gcagtgctggagagtcgaggtttggagcagtgt

SEQ ID NO: 454359 - DNA, 33 bp, Homo sapien
cagaaggacggatagacggataaggcaagtttt

SEQ ID NO: 454360 - DNA, 33 bp, Homo sapien
cagaaggacggatagatggataaggcaagtttt

SEQ ID NO: 454361 - DNA, 33 bp, Homo sapien
tatagaagcaagaagcagacgagctgtccaggg

SEQ ID NO: 454362 - DNA, 33 bp, Homo sapien
tatagaagcaagaagcggacgagctgtccaggg

SEQ ID NO: 454363 - DNA, 33 bp, Homo sapien
catccaccgatgctctcactgtctccatagttt

SEQ ID NO: 454364 - DNA, 33 bp, Homo sapien
catccaccgatgctcttactgtctccatagttt

SEQ ID NO: 454365 - DNA, 33 bp, Homo sapien
tgaacgtgacagggatcagatgtacatggcaat

SEQ ID NO: 454366 - DNA, 33 bp, Homo sapien
tgaacgtgacagggatgagatgtacatggcaat

SEQ ID NO: 454367 - DNA, 33 bp, Homo sapien
ccatcacagaaaccccagctctctcccaggcta

SEQ ID NO: 454368 - DNA, 33 bp, Homo sapien
ccatcacagaaaccccggctctctcccaggcta

SEQ ID NO: 454369 - DNA, 33 bp, Homo sapien
gccggttcccactggaagctatgtcaggattga

SEQ ID NO: 454370 - DNA, 33 bp, Homo sapien
gccggttcccactggaggctatgtcaggattga

SEQ ID NO: 454371 - DNA, 33 bp, Homo sapien
ggccacccagaagagccgagtactggccacagg

SEQ ID NO: 454372 - DNA, 33 bp, Homo sapien
ggccacccagaagagctgagtactggccacagg

SEQ ID NO: 454373 - DNA, 33 bp, Homo sapien
gtggcaggggctagaaaggaacttgctgtggaa

SEQ ID NO: 454374 - DNA, 33 bp, Homo sapien
gtggcaggggctagaagggaacttgctgtggaa

SEQ ID NO: 454375 - DNA, 33 bp, Homo sapien
tgggtcagaatcctacacagcccctcaaagtct

SEQ ID NO: 454376 - DNA, 33 bp, Homo sapien
tgggtcagaatcctacgcagcccctcaaagtct

SEQ ID NO: 454377 - DNA, 33 bp, Homo sapien
caagctctgtgatgtaagacttattgtccatgt

SEQ ID NO: 454378 - DNA, 33 bp, Homo sapien
caagctctgtgatgtaggacttattgtccatgt

SEQ ID NO: 454379 - DNA, 33 bp, Homo sapien
gattctctctacccccaggatgaaaaccctctg

SEQ ID NO: 454380 - DNA, 33 bp, Homo sapien
gattctctctaccccccggatgaaaaccctctg

SEQ ID NO: 454381 - DNA, 33 bp, Homo sapien
ccgacgtagcagtttcaaccacattcttttccc

SEQ ID NO: 454382 - DNA, 33 bp, Homo sapien
ccgacgtagcagtttcgaccacattcttttccc

SEQ ID NO: 454383 - DNA, 33 bp, Homo sapien; identical to SEQ ID NO: 454381

SEQ ID NO: 454384 - DNA, 33 bp, Homo sapien; identical to SEQ ID NO: 454382

SEQ ID NO: 454385 - DNA, 33 bp, Homo sapien
gacctgaagctcgaaaaggattacaaggtattg

SEQ ID NO: 454386 - DNA, 33 bp, Homo sapien
gacctgaagctcgaaagggattacaaggtattg

SEQ ID NO: 454387 - DNA, 33 bp, Homo sapien
cgaaattcagtttagaagctctctcagaaagga

SEQ ID NO: 454388 - DNA, 33 bp, Homo sapien
cgaaattcagtttagaggctctctcagaaagga

SEQ ID NO: 454389 - DNA, 33 bp, Homo sapien
tttcctgattgtctccaagagagtagaagtctc

SEQ ID NO: 454390 - DNA, 33 bp, Homo sapien
tttcctgattgtctccgagagagtagaagtctc

SEQ ID NO: 454391 - DNA, 33 bp, Homo sapien
agcctggacgacagataaaacaacaaaaatcaa

SEQ ID NO: 454392 - DNA, 33 bp, Homo sapien
agcctggacgacagatgaaacaacaaaaatcaa

SEQ ID NO: 454393 - DNA, 33 bp, Homo sapien
cagtagggagccaggaaatgtcagaggattttc

SEQ ID NO: 454394 - DNA, 33 bp, Homo sapien
cagtagggagccaggagatgtcagaggattttc

SEQ ID NO: 454395 - DNA, 33 bp, Homo sapien
cttgaaaattgggtatcagttggcaagtaaggg

SEQ ID NO: 454396 - DNA, 33 bp, Homo sapien
cttgaaaattgggtatgagttggcaagtaaggg

SEQ ID NO: 454397 - DNA, 33 bp, Homo sapien
tcctgatctgctttcactctctgtagctttgcc

SEQ ID NO: 454398 - DNA, 33 bp, Homo sapien
tcctgatctgctttcattctctgtagctttgcc

SEQ ID NO: 454399 - DNA, 33 bp, Homo sapien
gaacgcgtgcttccaactcgaacttcagtcctg

SEQ ID NO: 454400 - DNA, 33 bp, Homo sapien
gaacgcgtgcttccaattcgaacttcagtcctg

SEQ ID NO: 454401 - DNA, 33 bp, Homo sapien
acggttaacaacatccaaaagacaaaacccacc

SEQ ID NO: 454402 - DNA, 33 bp, Homo sapien
acggttaacaacatccgaaagacaaaacccacc

SEQ ID NO: 454403 - DNA, 33 bp, Homo sapien
gtctgccacggctttgcagggccgagctcagcc

SEQ ID NO: 454404 - DNA, 33 bp, Homo sapien
gtctgccacggctttgtagggccgagctcagcc

SEQ ID NO: 454405 - DNA, 33 bp, Homo sapien
caggaatgggagccaacgtgcgcctgcagggtt

SEQ ID NO: 454406 - DNA, 33 bp, Homo sapien
caggaatgggagccaatgtgcgcctgcagggtt

SEQ ID NO: 454407 - DNA, 33 bp, Homo sapien
gctccttccttgctgcaacgtggccaggacact

SEQ ID NO: 454408 - DNA, 33 bp, Homo sapien
gctccttccttgctgcgacgtggccaggacact

SEQ ID NO: 454409 - DNA, 33 bp, Homo sapien
gacgtgccacacaagcagcatacattaacttcc

SEQ ID NO: 454410 - DNA, 33 bp, Homo sapien
gacgtgccacacaagcggcatacattaacttcc

SEQ ID NO: 454411 - DNA, 33 bp, Homo sapien
tttctgatccctgtgacgtatttctcaaagtct

SEQ ID NO: 454412 - DNA, 33 bp, Homo sapien
tttctgatccctgtgatgtatttctcaaagtct

SEQ ID NO: 454413 - DNA, 33 bp, Homo sapien
gtgggctcccctgtcaaactcagaggccaggat

SEQ ID NO: 454414 - DNA, 33 bp, Homo sapien
gtgggctcccctgtcagactcagaggccaggat

SEQ ID NO: 454415 - DNA, 33 bp, Homo sapien
agacacctgagaaacaacagcggctgcacccca

SEQ ID NO: 454416 - DNA, 33 bp, Homo sapien
agacacctgagaaacaccagcggctgcacccca

SEQ ID NO: 454417 - DNA, 33 bp, Homo sapien
ggctgtttcttctccaatacagtcacatttctt

SEQ ID NO: 454418 - DNA, 33 bp, Homo sapien
ggctgtttcttctccagtacagtcacatttctt

SEQ ID NO: 454419 - DNA, 33 bp, Homo sapien
agaccccaagcacaacaagatgctgttcacaga

SEQ ID NO: 454420 - DNA, 33 bp, Homo sapien
agaccccaagcacaacgagatgctgttcacaga

SEQ ID NO: 454421 - DNA, 33 bp, Homo sapien
tggttccacttagtcccaaattattaggttggt

SEQ ID NO: 454422 - DNA, 33 bp, Homo sapien
tggttccacttagtcctaaattattaggttggt

SEQ ID NO: 454423 - DNA, 33 bp, Homo sapien
tctcaagatgcattgaagagatgagacaccatg

SEQ ID NO: 454424 - DNA, 33 bp, Homo sapien
tctcaagatgcattgatgagatgagacaccatg

SEQ ID NO: 454425 - DNA, 33 bp, Homo sapien
gagtactccttgtttccactgtgagtcgcgtct

SEQ ID NO: 454426 - DNA, 33 bp, Homo sapien
gagtactccttgtttctactgtgagtcgcgtct

SEQ ID NO: 454427 - DNA, 33 bp, Homo sapien
accaggacagaaaggaaccctgtaaacacctgc

SEQ ID NO: 454428 - DNA, 33 bp, Homo sapien
accaggacagaaaggagccctgtaaacacctgc

SEQ ID NO: 454429 - DNA, 33 bp, Homo sapien
ggtgagatgggtctcaagccagatctctattcc

SEQ ID NO: 454430 - DNA, 33 bp, Homo sapien
ggtgagatgggtctcaggccagatctctattcc

SEQ ID NO: 454431 - DNA, 33 bp, Homo sapien
agctcctcctggcatcgctccatgcttctcata

SEQ ID NO: 454432 - DNA, 33 bp, Homo sapien
agctcctcctggcatctctccatgcttctcata

SEQ ID NO: 454433 - DNA, 33 bp, Homo sapien
aatgagaacaaggcagccccgaagactatcaag

SEQ ID NO: 454434 - DNA, 33 bp, Homo sapien
aatgagaacaaggcagtcccgaagactatcaag

SEQ ID NO: 454435 - DNA, 33 bp, Homo sapien
aggcaccaagattcacaatctatatgttcgtga

SEQ ID NO: 454436 - DNA, 33 bp, Homo sapien
aggcaccaagattcactatctatatgttcgtga

SEQ ID NO: 454437 - DNA, 33 bp, Homo sapien
gccaattggaaacataccaggattttagtagaa

SEQ ID NO: 454438 - DNA, 33 bp, Homo sapien
gccaattggaaacatatcaggattttagtagaa

SEQ ID NO: 454439 - DNA, 33 bp, Homo sapien
gccgaaccagagccgacgcgagaggaggagaaa

SEQ ID NO: 454440 - DNA, 33 bp, Homo sapien
gccgaaccagagccgatgcgagaggaggagaaa

SEQ ID NO: 454441 - DNA, 33 bp, Homo sapien
tttttgaaacggagtcaaaaggagttcaagcga

SEQ ID NO: 454442 - DNA, 33 bp, Homo sapien
tttttgaaacggagtccaaaggagttcaagcga

SEQ ID NO: 454443 - DNA, 33 bp, Homo sapien
caaagactcaaaagaaagcaatcatttgtctct

SEQ ID NO: 454444 - DNA, 33 bp, Homo sapien
caaagactcaaaagaacgcaatcatttgtctct

SEQ ID NO: 454445 - DNA, 33 bp, Homo sapien
cagattaatttcaacgaccatcacaatgttgaa

SEQ ID NO: 454446 - DNA, 33 bp, Homo sapien
cagattaatttcaacggccatcacaatgttgaa

SEQ ID NO: 454447 - DNA, 33 bp, Homo sapien
gctcagggaagctccaagatctatcctatggct

SEQ ID NO: 454448 - DNA, 33 bp, Homo sapien
gctcagggaagctccaggatctatcctatggct

SEQ ID NO: 454449 - DNA, 33 bp, Homo sapien
tcaggcaatttcaaacccaagcatcctataagc

SEQ ID NO: 454450 - DNA, 33 bp, Homo sapien
tcaggcaatttcaaacgcaagcatcctataagc

SEQ ID NO: 454451 - DNA, 33 bp, Homo sapien
gaaagaggacttctccagcccgatggttccctc

SEQ ID NO: 454452 - DNA, 33 bp, Homo sapien
gaaagaggacttctccggcccgatggttccctc

SEQ ID NO: 454453 - DNA, 33 bp, Homo sapien
acacaagcccactggacgtttggcctgacagtg

SEQ ID NO: 454454 - DNA, 33 bp, Homo sapien
acacaagcccactggatgtttggcctgacagtg

SEQ ID NO: 454455 - DNA, 33 bp, Homo sapien
actccaccttcgccaccggaagcaagtgctcag

SEQ ID NO: 454456 - DNA, 33 bp, Homo sapien
actccaccttcgccacgggaagcaagtgctcag

SEQ ID NO: 454457 - DNA, 33 bp, Homo sapien
cgtgaaccaccactccaatcttgtttcttgtaa

SEQ ID NO: 454458 - DNA, 33 bp, Homo sapien
cgtgaaccaccactccgatcttgtttcttgtaa

SEQ ID NO: 454459 - DNA, 33 bp, Homo sapien
tctggtgcctgctcacagtgaccttctccatgt

SEQ ID NO: 454460 - DNA, 33 bp, Homo sapien
tctggtgcctgctcacggtgaccttctccatgt

SEQ ID NO: 454461 - DNA, 33 bp, Homo sapien
tgtagttggatgtagacgcagaggctggatggg

SEQ ID NO: 454462 - DNA, 33 bp, Homo sapien
tgtagttggatgtagatgcagaggctggatggg

SEQ ID NO: 454463 - DNA, 33 bp, Homo sapien
agccgcagaaaatccacagatgcccgaaacaac

SEQ ID NO: 454464 - DNA, 33 bp, Homo sapien
agccgcagaaaatccatagatgcccgaaacaac

SEQ ID NO: 454465 - DNA, 33 bp, Homo sapien
tctcatttgaatgctcaatagccctttttgcct

SEQ ID NO: 454466 - DNA, 33 bp, Homo sapien
tctcatttgaatgctcgatagccctttttgcct

SEQ ID NO: 454467 - DNA, 33 bp, Homo sapien
gagaaatggtcgcacgaaggacagatggacatt

SEQ ID NO: 454468 - DNA, 33 bp, Homo sapien
gagaaatggtcgcacggaggacagatggacatt

SEQ ID NO: 454469 - DNA, 33 bp, Homo sapien
ggatccagggctccacacaatgttctcaggtcc

SEQ ID NO: 454470 - DNA, 33 bp, Homo sapien
ggatccagggctccacgcaatgttctcaggtcc

SEQ ID NO: 454471 - DNA, 33 bp, Homo sapien
cgtgacccaatgagcgacctttcctgggagttc

SEQ ID NO: 454472 - DNA, 33 bp, Homo sapien
cgtgacccaatgagcggcctttcctgggagttc

SEQ ID NO: 454473 - DNA, 33 bp, Homo sapien
gtcacgtgtccatctcaaaccaatcactaggaa

SEQ ID NO: 454474 - DNA, 33 bp, Homo sapien
gtcacgtgtccatctcgaaccaatcactaggaa

SEQ ID NO: 454475 - DNA, 33 bp, Homo sapien
ataaattaattgcacgaaaatcctcattacagg

SEQ ID NO: 454476 - DNA, 33 bp, Homo sapien
ataaattaattgcacgcaaatcctcattacagg

SEQ ID NO: 454477 - DNA, 33 bp, Homo sapien
cgtttttttgaaggcaaagtgtcatgatgatgg

SEQ ID NO: 454478 - DNA, 33 bp, Homo sapien
cgtttttttgaaggcagagtgtcatgatgatgg

SEQ ID NO: 454479 - DNA, 33 bp, Homo sapien
ctgactcttccccacactacccatccatcctgc

SEQ ID NO: 454480 - DNA, 33 bp, Homo sapien
ctgactcttccccacattacccatccatcctgc

SEQ ID NO: 454481 - DNA, 33 bp, Homo sapien
ctctctacaatatgaccgcaggtaggtgtcact

SEQ ID NO: 454482 - DNA, 33 bp, Homo sapien
ctctctacaatatgactgcaggtaggtgtcact

SEQ ID NO: 454483 - DNA, 33 bp, Homo sapien
agatgcagcagatgtacgacatgatcatgcagc

SEQ ID NO: 454484 - DNA, 33 bp, Homo sapien
agatgcagcagatgtatgacatgatcatgcagc

SEQ ID NO: 454485 - DNA, 33 bp, Homo sapien; identical to SEQ ID NO: 454483

SEQ ID NO: 454486 - DNA, 33 bp, Homo sapien; identical to SEQ ID NO: 454484

SEQ ID NO: 454487 - DNA, 33 bp, Homo sapien
gaatgcctggttctcacggttgttctggagggc

SEQ ID NO: 454488 - DNA, 33 bp, Homo sapien
gaatgcctggttctcatggttgttctggagggc

SEQ ID NO: 454489 - DNA, 33 bp, Homo sapien
gagagtgaagataaaacataaaatgccctgtga

SEQ ID NO: 454490 - DNA, 33 bp, Homo sapien
gagagtgaagataaaatataaaatgccctgtga

SEQ ID NO: 454491 - DNA, 33 bp, Homo sapien
agcgatgcctaagtccaagtcacgataaccaaa

SEQ ID NO: 454492 - DNA, 33 bp, Homo sapien
agcgatgcctaagtcccagtcacgataaccaaa

SEQ ID NO: 454493 - DNA, 33 bp, Homo sapien
acatcatggccccaaacggagaagggacacaaa

SEQ ID NO: 454494 - DNA, 33 bp, Homo sapien
acatcatggccccaaatggagaagggacacaaa

SEQ ID NO: 454495 - DNA, 33 bp, Homo sapien
ctctggggcttccacaagttgtcctgagaacag

SEQ ID NO: 454496 - DNA, 33 bp, Homo sapien
ctctggggcttccacaggttgtcctgagaacag

SEQ ID NO: 454497 - DNA, 33 bp, Homo sapien
gacgtcactagatcccacagttcgaagatgtta

SEQ ID NO: 454498 - DNA, 33 bp, Homo sapien
gacgtcactagatcccgcagttcgaagatgtta

SEQ ID NO: 454499 - DNA, 33 bp, Homo sapien
aaaaaaaaaaattagtcaccatgaggcgcgggt

SEQ ID NO: 454500 - DNA, 33 bp, Homo sapien
aaaaaaaaaaattagtgaccatgaggcgcgggt

SEQ ID NO: 454501 - DNA, 33 bp, Homo sapien
ttacttcttctcattagaaaaccatcatctgcg

SEQ ID NO: 454502 - DNA, 33 bp, Homo sapien
ttacttcttctcattataaaaccatcatctgcg

SEQ ID NO: 454503 - DNA, 33 bp, Homo sapien
cttagtcatccgatgccatacgtgggctcgcag

SEQ ID NO: 454504 - DNA, 33 bp, Homo sapien
cttagtcatccgatgctatacgtgggctcgcag

SEQ ID NO: 454505 - DNA, 33 bp, Homo sapien
acactaagtgataaaccgctctaaaagcccttc

SEQ ID NO: 454506 - DNA, 33 bp, Homo sapien
acactaagtgataaactgctctaaaagcccttc

SEQ ID NO: 454507 - DNA, 33 bp, Homo sapien
gtgccttcgacactgcgaggaatccctcctcag

SEQ ID NO: 454508 - DNA, 33 bp, Homo sapien
gtgccttcgacactgctaggaatccctcctcag

SEQ ID NO: 454509 - DNA, 33 bp, Homo sapien
ctcctactttctccagccacacttgagcaacaa

SEQ ID NO: 454510 - DNA, 33 bp, Homo sapien
ctcctactttctccagtcacacttgagcaacaa

SEQ ID NO: 454511 - DNA, 33 bp, Homo sapien
gtggttgtttcagagacgtgtcttaatcgctct

SEQ ID NO: 454512 - DNA, 33 bp, Homo sapien
gtggttgtttcagagatgtgtcttaatcgctct

SEQ ID NO: 454513 - DNA, 33 bp, Homo sapien
tattcctctaagtgcacgttaacctaaccctct

SEQ ID NO: 454514 - DNA, 33 bp, Homo sapien
tattcctctaagtgcatgttaacctaaccctct

SEQ ID NO: 454515 - DNA, 33 bp, Homo sapien
gtgtggtcagggtcccaagtcaaccacaaagtg

SEQ ID NO: 454516 - DNA, 33 bp, Homo sapien
gtgtggtcagggtcccgagtcaaccacaaagtg

SEQ ID NO: 454517 - DNA, 33 bp, Homo sapien
caaaatggggacctccacgagttgtcaggaccc

SEQ ID NO: 454518 - DNA, 33 bp, Homo sapien
caaaatggggacctccgcgagttgtcaggaccc

SEQ ID NO: 454519 - DNA, 33 bp, Homo sapien
atctgccaatccaagacctctctgccccgaggg

SEQ ID NO: 454520 - DNA, 33 bp, Homo sapien
atctgccaatccaagatctctctgccccgaggg

SEQ ID NO: 454521 - DNA, 33 bp, Homo sapien
gttgtagcttgccaaacagtgtcaacatcacct

SEQ ID NO: 454522 - DNA, 33 bp, Homo sapien
gttgtagcttgccaaatagtgtcaacatcacct

SEQ ID NO: 454523 - DNA, 33 bp, Homo sapien
tcctgaacaacacacacgtatatactcacactc

SEQ ID NO: 454524 - DNA, 33 bp, Homo sapien
tcctgaacaacacacatgtatatactcacactc

SEQ ID NO: 454525 - DNA, 33 bp, Homo sapien
cagtggctaagaaatacacaaatgttgcaagtc

SEQ ID NO: 454526 - DNA, 33 bp, Homo sapien
cagtggctaagaaatatacaaatgttgcaagtc

SEQ ID NO: 454527 - DNA, 33 bp, Homo sapien
agtctggctgggtgaaagtccaggctaggtctg

SEQ ID NO: 454528 - DNA, 33 bp, Homo sapien
agtctggctgggtgaaggtccaggctaggtctg

SEQ ID NO: 454529 - DNA, 33 bp, Homo sapien
agtggctggtgaattgaaatcatcaagaaatat

SEQ ID NO: 454530 - DNA, 33 bp, Homo sapien
agtggctggtgaattggaatcatcaagaaatat

SEQ ID NO: 454531 - DNA, 33 bp, Homo sapien
gtttgtaataccattgaatgttggaaaatagta

SEQ ID NO: 454532 - DNA, 33 bp, Homo sapien
gtttgtaataccattggatgttggaaaatagta

SEQ ID NO: 454533 - DNA, 33 bp, Homo sapien
tcaggcagatgtttcaagtttgccattgcttcc

SEQ ID NO: 454534 - DNA, 33 bp, Homo sapien
tcaggcagatgtttcaggtttgccattgcttcc

SEQ ID NO: 454535 - DNA, 33 bp, Homo sapien
ttttggattcagcttaaaagatgttaaagtgaa

SEQ ID NO: 454536 - DNA, 33 bp, Homo sapien
ttttggattcagcttacaagatgttaaagtgaa

SEQ ID NO: 454537 - DNA, 33 bp, Homo sapien
atgactactgattctaaatactggaacaaggaa

SEQ ID NO: 454538 - DNA, 33 bp, Homo sapien
atgactactgattctagatactggaacaaggaa

SEQ ID NO: 454539 - DNA, 33 bp, Homo sapien
ggatttaggaataaaaagacatctacggggtga

SEQ ID NO: 454540 - DNA, 33 bp, Homo sapien
ggatttaggaataaaaggacatctacggggtga

SEQ ID NO: 454541 - DNA, 33 bp, Homo sapien
gggaacccccaaatgcgccatgtcctgatgagg

SEQ ID NO: 454542 - DNA, 33 bp, Homo sapien
gggaacccccaaatgctccatgtcctgatgagg

SEQ ID NO: 454543 - DNA, 33 bp, Homo sapien
cagggctgctgccgaccggatcctctccttctc

SEQ ID NO: 454544 - DNA, 33 bp, Homo sapien
cagggctgctgccgactggatcctctccttctc

SEQ ID NO: 454545 - DNA, 33 bp, Homo sapien
gaaatgtatgtattcactcttagattacgttta

SEQ ID NO: 454546 - DNA, 33 bp, Homo sapien
gaaatgtatgtattcattcttagattacgttta

SEQ ID NO: 454547 - DNA, 33 bp, Homo sapien
gaagtcacagctcctaaaacactcttccctaga

SEQ ID NO: 454548 - DNA, 33 bp, Homo sapien
gaagtcacagctcctagaacactcttccctaga

SEQ ID NO: 454549 - DNA, 33 bp, Homo sapien
ctcgtgcgtattttgaccctgatttcaatcttc

SEQ ID NO: 454550 - DNA, 33 bp, Homo sapien
ctcgtgcgtattttgatcctgatttcaatcttc

SEQ ID NO: 454551 - DNA, 33 bp, Homo sapien
gcaatttggaagtcaacggaggccaaaatatgg

SEQ ID NO: 454552 - DNA, 33 bp, Homo sapien
gcaatttggaagtcaagggaggccaaaatatgg

SEQ ID NO: 454553 - DNA, 33 bp, Homo sapien
ctccggtggaatagacagggatggttttgaggg

SEQ ID NO: 454554 - DNA, 33 bp, Homo sapien
ctccggtggaatagacggggatggttttgaggg

SEQ ID NO: 454555 - DNA, 33 bp, Homo sapien
tgtgtggcagaaactccagtaaatcaaacaatg

SEQ ID NO: 454556 - DNA, 33 bp, Homo sapien
tgtgtggcagaaactctagtaaatcaaacaatg

SEQ ID NO: 454557 - DNA, 33 bp, Homo sapien
aattaatctctttaggaatactgaaaaagaaaa

SEQ ID NO: 454558 - DNA, 33 bp, Homo sapien
aattaatctctttagggatactgaaaaagaaaa

SEQ ID NO: 454559 - DNA, 33 bp, Homo sapien
ggtgagtggaggtaaacgggatgggaggtctaa

SEQ ID NO: 454560 - DNA, 33 bp, Homo sapien
ggtgagtggaggtaaatgggatgggaggtctaa

SEQ ID NO: 454561 - DNA, 33 bp, Homo sapien
aggcccagattgtgaacacggacccatatatcc

SEQ ID NO: 454562 - DNA, 33 bp, Homo sapien
aggcccagattgtgaagacggacccatatatcc

SEQ ID NO: 454563 - DNA, 33 bp, Homo sapien
gtaattggggccttgaacctgatccagctttga

SEQ ID NO: 454564 - DNA, 33 bp, Homo sapien
gtaattggggccttgagcctgatccagctttga

SEQ ID NO: 454565 - DNA, 33 bp, Homo sapien
tgagtgagtccattgaaaggaataacactatca

SEQ ID NO: 454566 - DNA, 33 bp, Homo sapien
tgagtgagtccattgagaggaataacactatca

SEQ ID NO: 454567 - DNA, 33 bp, Homo sapien
cgggagaccttgtgtacagccaccaccaaatcc

SEQ ID NO: 454568 - DNA, 33 bp, Homo sapien
cgggagaccttgtgtagagccaccaccaaatcc

SEQ ID NO: 454569 - DNA, 33 bp, Homo sapien
ttggcgcaggcttaatcatgaccccactgctga

SEQ ID NO: 454570 - DNA, 33 bp, Homo sapien
ttggcgcaggcttaattatgaccccactgctga

SEQ ID NO: 454571 - DNA, 33 bp, Homo sapien
ctgtgagcaagaggaaacttcagcccacctggg

SEQ ID NO: 454572 - DNA, 33 bp, Homo sapien
ctgtgagcaagaggaagcttcagcccacctggg

SEQ ID NO: 454573 - DNA, 33 bp, Homo sapien
gacatttctataaaaacactgtgccattttata

SEQ ID NO: 454574 - DNA, 33 bp, Homo sapien
gacatttctataaaaatactgtgccattttata

SEQ ID NO: 454575 - DNA, 33 bp, Homo sapien
ctcattttacatcaaggactacacaagtgacat

SEQ ID NO: 454576 - DNA, 33 bp, Homo sapien
ctcattttacatcaagtactacacaagtgacat

SEQ ID NO: 454577 - DNA, 33 bp, Homo sapien
gtctgtggcctgaggacggcatgtcccaggtcg

SEQ ID NO: 454578 - DNA, 33 bp, Homo sapien
gtctgtggcctgaggatggcatgtcccaggtcg

SEQ ID NO: 454579 - DNA, 33 bp, Homo sapien
acaatcttcaacccggaaatagtaaaatccact

SEQ ID NO: 454580 - DNA, 33 bp, Homo sapien
acaatcttcaacccgggaatagtaaaatccact

SEQ ID NO: 454581 - DNA, 33 bp, Homo sapien
caaggcaacaatattcacgggtcacattcccat

SEQ ID NO: 454582 - DNA, 33 bp, Homo sapien
caaggcaacaatattcgcgggtcacattcccat

SEQ ID NO: 454583 - DNA, 33 bp, Homo sapien
cctccaagtccattaaatcctcacaaggctggg

SEQ ID NO: 454584 - DNA, 33 bp, Homo sapien
cctccaagtccattaagtcctcacaaggctggg

SEQ ID NO: 454585 - DNA, 33 bp, Homo sapien
cgggcatggcctcgaaacctcctgacagcatgt

SEQ ID NO: 454586 - DNA, 33 bp, Homo sapien
cgggcatggcctcgaagcctcctgacagcatgt

SEQ ID NO: 454587 - DNA, 33 bp, Homo sapien
gagtcccagtatctccaaagagcttgatcacca

SEQ ID NO: 454588 - DNA, 33 bp, Homo sapien
gagtcccagtatctccgaagagcttgatcacca

SEQ ID NO: 454589 - DNA, 33 bp, Homo sapien
tgcacctggctgagaaatatctggttagatcct

SEQ ID NO: 454590 - DNA, 33 bp, Homo sapien
tgcacctggctgagaagtatctggttagatcct

SEQ ID NO: 454591 - DNA, 33 bp, Homo sapien
acttcctagcttaataccctcctcaatgcccag

SEQ ID NO: 454592 - DNA, 33 bp, Homo sapien
acttcctagcttaatatcctcctcaatgcccag

SEQ ID NO: 454593 - DNA, 33 bp, Homo sapien
gttctgaagctacctacccatgggctgagagca

SEQ ID NO: 454594 - DNA, 33 bp, Homo sapien
gttctgaagctacctatccatgggctgagagca

SEQ ID NO: 454595 - DNA, 33 bp, Homo sapien
gaaatttcttgttaccggcaagtgatcgcaggg

SEQ ID NO: 454596 - DNA, 33 bp, Homo sapien
gaaatttcttgttacctgcaagtgatcgcaggg

SEQ ID NO: 454597 - DNA, 33 bp, Homo sapien
gagaggttaaagaacacgcaggctccccgtctg

SEQ ID NO: 454598 - DNA, 33 bp, Homo sapien
gagaggttaaagaacaggcaggctccccgtctg

SEQ ID NO: 454599 - DNA, 33 bp, Homo sapien
acaatggagaaccatcacttttttctgaagaga

SEQ ID NO: 454600 - DNA, 33 bp, Homo sapien
acaatggagaaccatcgcttttttctgaagaga

SEQ ID NO: 454601 - DNA, 33 bp, Homo sapien
cccttttcaaacctgcaaaatcacactacataa

SEQ ID NO: 454602 - DNA, 33 bp, Homo sapien
cccttttcaaacctgcgaaatcacactacataa

SEQ ID NO: 454603 - DNA, 33 bp, Homo sapien
taagaaaagatccccacgttctcctgcacaatg

SEQ ID NO: 454604 - DNA, 33 bp, Homo sapien
taagaaaagatccccatgttctcctgcacaatg

SEQ ID NO: 454605 - DNA, 33 bp, Homo sapien
gtaaattgtcatatccacatttttcatatcttc

SEQ ID NO: 454606 - DNA, 33 bp, Homo sapien
gtaaattgtcatatccgcatttttcatatcttc

SEQ ID NO: 454607 - DNA, 33 bp, Homo sapien
tctcttacactgagacagaagcagaattaacca

SEQ ID NO: 454608 - DNA, 33 bp, Homo sapien
tctcttacactgagaccgaagcagaattaacca

SEQ ID NO: 454609 - DNA, 33 bp, Homo sapien
ttgaaagtctacactccatgcttcaggtggtcc

SEQ ID NO: 454610 - DNA, 33 bp, Homo sapien
ttgaaagtctacactctatgcttcaggtggtcc

SEQ ID NO: 454611 - DNA, 33 bp, Homo sapien
tatttttagacagaccaaatatccttacaggtt

SEQ ID NO: 454612 - DNA, 33 bp, Homo sapien
tatttttagacagaccgaatatccttacaggtt

SEQ ID NO: 454613 - DNA, 33 bp, Homo sapien
aggcatggagaacaagaaagttgagtttgagaa

SEQ ID NO: 454614 - DNA, 33 bp, Homo sapien
aggcatggagaacaagcaagttgagtttgagaa

SEQ ID NO: 454615 - DNA, 33 bp, Homo sapien
taccaactaactctaaaatctttatggcttgca

SEQ ID NO: 454616 - DNA, 33 bp, Homo sapien
taccaactaactctaagatctttatggcttgca

SEQ ID NO: 454617 - DNA, 33 bp, Homo sapien
gggtcccttacacttaacactcttgccataacc

SEQ ID NO: 454618 - DNA, 33 bp, Homo sapien
gggtcccttacacttagcactcttgccataacc

SEQ ID NO: 454619 - DNA, 33 bp, Homo sapien
ggtctctggaatggcacgacctctcccagactg

SEQ ID NO: 454620 - DNA, 33 bp, Homo sapien
ggtctctggaatggcatgacctctcccagactg

SEQ ID NO: 454621 - DNA, 33 bp, Homo sapien
ttctcaaaccttaatgcaccgtggagctgtcat

SEQ ID NO: 454622 - DNA, 33 bp, Homo sapien
ttctcaaaccttaatgtaccgtggagctgtcat

SEQ ID NO: 454623 - DNA, 33 bp, Homo sapien
tctcaatcaaaagtccagccctgttttgtaaat

SEQ ID NO: 454624 - DNA, 33 bp, Homo sapien
tctcaatcaaaagtccggccctgttttgtaaat

SEQ ID NO: 454625 - DNA, 33 bp, Homo sapien
aatgtacgtatcttacccagtcttatgaactca

SEQ ID NO: 454626 - DNA, 33 bp, Homo sapien
aatgtacgtatcttactcagtcttatgaactca

SEQ ID NO: 454627 - DNA, 33 bp, Homo sapien
ttgagagatcattcgagacttgtagaagtgaga

SEQ ID NO: 454628 - DNA, 33 bp, Homo sapien
ttgagagatcattcgatacttgtagaagtgaga

SEQ ID NO: 454629 - DNA, 33 bp, Homo sapien
aatgttgaattggagcacagtaacaaaaagtga

SEQ ID NO: 454630 - DNA, 33 bp, Homo sapien
aatgttgaattggagcgcagtaacaaaaagtga

SEQ ID NO: 454631 - DNA, 33 bp, Homo sapien
cctttgctgactggaacctcctgcagcacttcc

SEQ ID NO: 454632 - DNA, 33 bp, Homo sapien
cctttgctgactggaatctcctgcagcacttcc

SEQ ID NO: 454633 - DNA, 33 bp, Homo sapien; identical to SEQ ID NO: 454631

SEQ ID NO: 454634 - DNA, 33 bp, Homo sapien; identical to SEQ ID NO: 454632

SEQ ID NO: 454635 - DNA, 33 bp, Homo sapien
gtaagcaaacaccatccactccaggggatccct

SEQ ID NO: 454636 - DNA, 33 bp, Homo sapien
gtaagcaaacaccatcgactccaggggatccct

SEQ ID NO: 454637 - DNA, 33 bp, Homo sapien
gcccatcctgtatgggccatagatccagggcca

SEQ ID NO: 454638 - DNA, 33 bp, Homo sapien
gcccatcctgtatgggtcatagatccagggcca

SEQ ID NO: 454639 - DNA, 33 bp, Homo sapien
gagaagcatttaacctcacctagagccgaaatg

SEQ ID NO: 454640 - DNA, 33 bp, Homo sapien
gagaagcatttaaccttacctagagccgaaatg

SEQ ID NO: 454641 - DNA, 33 bp, Homo sapien
caactgcagaaatataaggtaagtttttcatgg

SEQ ID NO: 454642 - DNA, 33 bp, Homo sapien
caactgcagaaatatacggtaagtttttcatgg

SEQ ID NO: 454643 - DNA, 33 bp, Homo sapien
tcaccagtaggcttcaactttaagcattctatc

SEQ ID NO: 454644 - DNA, 33 bp, Homo sapien
tcaccagtaggcttcagctttaagcattctatc

SEQ ID NO: 454645 - DNA, 33 bp, Homo sapien
gagtcttggttcaccaatgaagaacaaaggcca

SEQ ID NO: 454646 - DNA, 33 bp, Homo sapien
gagtcttggttcaccattgaagaacaaaggcca

SEQ ID NO: 454647 - DNA, 33 bp, Homo sapien
cggaggctccaagtgcaataagagtaaccttgg

SEQ ID NO: 454648 - DNA, 33 bp, Homo sapien
cggaggctccaagtgcgataagagtaaccttgg

SEQ ID NO: 454649 - DNA, 33 bp, Homo sapien
aagaaacatgcaatgacaatttgggtcctgaca

SEQ ID NO: 454650 - DNA, 33 bp, Homo sapien
aagaaacatgcaatgataatttgggtcctgaca

SEQ ID NO: 454651 - DNA, 33 bp, Homo sapien
ccaaggaagtatgttacactcttcaaggttcct

SEQ ID NO: 454652 - DNA, 33 bp, Homo sapien
ccaaggaagtatgttagactcttcaaggttcct

SEQ ID NO: 454653 - DNA, 33 bp, Homo sapien
aactcagaaatgtaagaataccatggaagagca

SEQ ID NO: 454654 - DNA, 33 bp, Homo sapien
aactcagaaatgtaaggataccatggaagagca

SEQ ID NO: 454655 - DNA, 33 bp, Homo sapien
aaaatgacagacccacaagagtttcaacatttg

SEQ ID NO: 454656 - DNA, 33 bp, Homo sapien
aaaatgacagacccaccagagtttcaacatttg

SEQ ID NO: 454657 - DNA, 33 bp, Homo sapien
ttttcactttacatcaagccatgagcatttttg

SEQ ID NO: 454658 - DNA, 33 bp, Homo sapien
ttttcactttacatcaggccatgagcatttttg

SEQ ID NO: 454659 - DNA, 33 bp, Homo sapien
tatcaataccaggcaaataaaacctagatttac

SEQ ID NO: 454660 - DNA, 33 bp, Homo sapien
tatcaataccaggcaagtaaaacctagatttac

SEQ ID NO: 454661 - DNA, 33 bp, Homo sapien
gaggaatgtggcaaaacctttaagtggttctca

SEQ ID NO: 454662 - DNA, 33 bp, Homo sapien
gaggaatgtggcaaaatctttaagtggttctca

SEQ ID NO: 454663 - DNA, 33 bp, Homo sapien
aggtggtatgcctctaaaaacagtggttttaat

SEQ ID NO: 454664 - DNA, 33 bp, Homo sapien
aggtggtatgcctctagaaacagtggttttaat

SEQ ID NO: 454665 - DNA, 33 bp, Homo sapien
ctttcccatacctctgaaacctaaatctgaaac

SEQ ID NO: 454666 - DNA, 33 bp, Homo sapien
ctttcccatacctctgcaacctaaatctgaaac

SEQ ID NO: 454667 - DNA, 33 bp, Homo sapien
tactttgttagaaataggaattctcagtccaaa

SEQ ID NO: 454668 - DNA, 33 bp, Homo sapien
tactttgttagaaatatgaattctcagtccaaa

SEQ ID NO: 454669 - DNA, 33 bp, Homo sapien; identical to SEQ ID NO: 454667

SEQ ID NO: 454670 - DNA, 33 bp, Homo sapien; identical to SEQ ID NO: 454668

SEQ ID NO: 454671 - DNA, 33 bp, Homo sapien
atgactcatttgatccacatggaattttttact

SEQ ID NO: 454672 - DNA, 33 bp, Homo sapien
atgactcatttgatccgcatggaattttttact

SEQ ID NO: 454673 - DNA, 33 bp, Homo sapien
taaataaaacagcatacagatgaaaagccaaga

SEQ ID NO: 454674 - DNA, 33 bp, Homo sapien
taaataaaacagcatatagatgaaaagccaaga

SEQ ID NO: 454675 - DNA, 33 bp, Homo sapien
ccctacaaagctctgaagttgtgcacaggtggg

SEQ ID NO: 454676 - DNA, 33 bp, Homo sapien
ccctacaaagctctgacgttgtgcacaggtggg

SEQ ID NO: 454677 - DNA, 33 bp, Homo sapien
aattcacctggagaatcatgaggccatttgtgt

SEQ ID NO: 454678 - DNA, 33 bp, Homo sapien
aattcacctggagaatgatgaggccatttgtgt

SEQ ID NO: 454679 - DNA, 33 bp, Homo sapien
ctcaagacctcaattcaaaatttggagctacag

SEQ ID NO: 454680 - DNA, 33 bp, Homo sapien
ctcaagacctcaattcgaaatttggagctacag

SEQ ID NO: 454681 - DNA, 33 bp, Homo sapien
tataaagtttcttttccatctctgctgctttct

SEQ ID NO: 454682 - DNA, 33 bp, Homo sapien
tataaagtttcttttcgatctctgctgctttct

SEQ ID NO: 454683 - DNA, 33 bp, Homo sapien
catgtaaaaatgataccctttggctttggctta

SEQ ID NO: 454684 - DNA, 33 bp, Homo sapien
catgtaaaaatgatacgctttggctttggctta

SEQ ID NO: 454685 - DNA, 33 bp, Homo sapien
ctgcaatgtagatgaacagactgattttcgcta

SEQ ID NO: 454686 - DNA, 33 bp, Homo sapien
ctgcaatgtagatgaatagactgattttcgcta

SEQ ID NO: 454687 - DNA, 33 bp, Homo sapien
ttcactaattcttctgccacatatttccagtgc

SEQ ID NO: 454688 - DNA, 33 bp, Homo sapien
ttcactaattcttctgtcacatatttccagtgc

SEQ ID NO: 454689 - DNA, 33 bp, Homo sapien
gggaaactaaagggccactgttcttggctacag

SEQ ID NO: 454690 - DNA, 33 bp, Homo sapien
gggaaactaaagggccgctgttcttggctacag

SEQ ID NO: 454691 - DNA, 33 bp, Homo sapien
gctaaagattgagaagccttctagtcagaaggc

SEQ ID NO: 454692 - DNA, 33 bp, Homo sapien
gctaaagattgagaagtcttctagtcagaaggc

SEQ ID NO: 454693 - DNA, 33 bp, Homo sapien
cttctccactttgtatcagtggaaaacaggcca

SEQ ID NO: 454694 - DNA, 33 bp, Homo sapien
cttctccactttgtatgagtggaaaacaggcca

SEQ ID NO: 454695 - DNA, 33 bp, Homo sapien
aaggtactcgtttacaaccatgtagacaggcct

SEQ ID NO: 454696 - DNA, 33 bp, Homo sapien
aaggtactcgtttacagccatgtagacaggcct

SEQ ID NO: 454697 - DNA, 33 bp, Homo sapien
aaaagcagctttccacaaatgatttcctttgga

SEQ ID NO: 454698 - DNA, 33 bp, Homo sapien
aaaagcagctttccacgaatgatttcctttgga

SEQ ID NO: 454699 - DNA, 33 bp, Homo sapien
attagaacttgtaacacagctaactgaatagct

SEQ ID NO: 454700 - DNA, 33 bp, Homo sapien
attagaacttgtaacatagctaactgaatagct

SEQ ID NO: 454701 - DNA, 33 bp, Homo sapien
ctgtattcacacagaaataaatcagagtacagc

SEQ ID NO: 454702 - DNA, 33 bp, Homo sapien
ctgtattcacacagaagtaaatcagagtacagc

SEQ ID NO: 454703 - DNA, 33 bp, Homo sapien
ctcacagaactcagcaagaaactgtagttacct

SEQ ID NO: 454704 - DNA, 33 bp, Homo sapien
ctcacagaactcagcaggaaactgtagttacct

SEQ ID NO: 454705 - DNA, 33 bp, Homo sapien
agttaaaatgatattaagaaaaagctcagatta

SEQ ID NO: 454706 - DNA, 33 bp, Homo sapien
agttaaaatgatattaggaaaaagctcagatta

SEQ ID NO: 454707 - DNA, 33 bp, Homo sapien
tttttggtacccagatcagagtttctccagttt

SEQ ID NO: 454708 - DNA, 33 bp, Homo sapien
tttttggtacccagattagagtttctccagttt

SEQ ID NO: 454709 - DNA, 33 bp, Homo sapien
taattgaattgtgcatcgtatggttggcacaat

SEQ ID NO: 454710 - DNA, 33 bp, Homo sapien
taattgaattgtgcattgtatggttggcacaat

SEQ ID NO: 454711 - DNA, 33 bp, Homo sapien
attcagaagtcataacagcataaagtggcctaa

SEQ ID NO: 454712 - DNA, 33 bp, Homo sapien
attcagaagtcataacggcataaagtggcctaa

SEQ ID NO: 454713 - DNA, 33 bp, Homo sapien
agaactatattaaatcagaaagcagggaggtgg

SEQ ID NO: 454714 - DNA, 33 bp, Homo sapien
agaactatattaaatcggaaagcagggaggtgg

SEQ ID NO: 454715 - DNA, 33 bp, Homo sapien
aaaccaattccaaaaaagtattgcaacaaaagg

SEQ ID NO: 454716 - DNA, 33 bp, Homo sapien
aaaccaattccaaaaaggtattgcaacaaaagg

SEQ ID NO: 454717 - DNA, 33 bp, Homo sapien
ggtaaaaataagactacctccatgacaactcac

SEQ ID NO: 454718 - DNA, 33 bp, Homo sapien
ggtaaaaataagactatctccatgacaactcac

SEQ ID NO: 454719 - DNA, 33 bp, Homo sapien
acagattaacaggaaccgaagtaatcattggct

SEQ ID NO: 454720 - DNA, 33 bp, Homo sapien
acagattaacaggaactgaagtaatcattggct

SEQ ID NO: 454721 - DNA, 33 bp, Homo sapien; identical to SEQ ID NO: 454719

SEQ ID NO: 454722 - DNA, 33 bp, Homo sapien; identical to SEQ ID NO: 454720

SEQ ID NO: 454723 - DNA, 33 bp, Homo sapien
caggccttgtaaataaagtgacagtaaagctgt

SEQ ID NO: 454724 - DNA, 33 bp, Homo sapien
caggccttgtaaataaggtgacagtaaagctgt

SEQ ID NO: 454725 - DNA, 33 bp, Homo sapien
gcataaagctataactcacaaaacagctcaaga

SEQ ID NO: 454726 - DNA, 33 bp, Homo sapien
gcataaagctataactgacaaaacagctcaaga

SEQ ID NO: 454727 - DNA, 33 bp, Homo sapien
aataaaagcatcagaaataaagtaggtcaggtg

SEQ ID NO: 454728 - DNA, 33 bp, Homo sapien
aataaaagcatcagaagtaaagtaggtcaggtg

SEQ ID NO: 454729 - DNA, 33 bp, Homo sapien; identical to SEQ ID NO: 454727

SEQ ID NO: 454730 - DNA, 33 bp, Homo sapien; identical to SEQ ID NO: 454728

SEQ ID NO: 454731 - DNA, 33 bp, Homo sapien
tacataaaatccataaatactcaagaccaatta

SEQ ID NO: 454732 - DNA, 33 bp, Homo sapien
tacataaaatccataagtactcaagaccaatta

SEQ ID NO: 454733 - DNA, 33 bp, Homo sapien
cccaccaccagtttaacctagaggcagcccagc

SEQ ID NO: 454734 - DNA, 33 bp, Homo sapien
cccaccaccagtttaatctagaggcagcccagc

SEQ ID NO: 454735 - DNA, 33 bp, Homo sapien; identical to SEQ ID NO: 454733

SEQ ID NO: 454736 - DNA, 33 bp, Homo sapien; identical to SEQ ID NO: 454734

SEQ ID NO: 454737 - DNA, 33 bp, Homo sapien
agagagaaacagacaccgaggcctagttgaggg

SEQ ID NO: 454738 - DNA, 33 bp, Homo sapien
agagagaaacagacactgaggcctagttgaggg

SEQ ID NO: 454739 - DNA, 33 bp, Homo sapien
gaagctaggactacacacaggcattaccaagcc

SEQ ID NO: 454740 - DNA, 33 bp, Homo sapien
gaagctaggactacacgcaggcattaccaagcc

SEQ ID NO: 454741 - DNA, 33 bp, Homo sapien
agttagtggttaaagagtcacttggtggaatag

SEQ ID NO: 454742 - DNA, 33 bp, Homo sapien
agttagtggttaaagattcacttggtggaatag

SEQ ID NO: 454743 - DNA, 33 bp, Homo sapien
taactctgtagtgaaaataattcatcagagagc

SEQ ID NO: 454744 - DNA, 33 bp, Homo sapien
taactctgtagtgaaagtaattcatcagagagc

SEQ ID NO: 454745 - DNA, 33 bp, Homo sapien
cctttatttggttgccacacttgataaatataa

SEQ ID NO: 454746 - DNA, 33 bp, Homo sapien
cctttatttggttgccgcacttgataaatataa

SEQ ID NO: 454747 - DNA, 33 bp, Homo sapien
catagtctgaaatcaaatgtcttgactctagat

SEQ ID NO: 454748 - DNA, 33 bp, Homo sapien
catagtctgaaatcaattgtcttgactctagat

SEQ ID NO: 454749 - DNA, 33 bp, Homo sapien
cccttgactatcgtaacaattttaagtagttaa

SEQ ID NO: 454750 - DNA, 33 bp, Homo sapien
cccttgactatcgtaagaattttaagtagttaa

SEQ ID NO: 454751 - DNA, 33 bp, Homo sapien
tttctaatttagagaactgcatcttattccatg

SEQ ID NO: 454752 - DNA, 33 bp, Homo sapien
tttctaatttagagaagtgcatcttattccatg

SEQ ID NO: 454753 - DNA, 33 bp, Homo sapien
aagtagttaaatcaaaatcattagggaggaaaa

SEQ ID NO: 454754 - DNA, 33 bp, Homo sapien
aagtagttaaatcaaagtcattagggaggaaaa

SEQ ID NO: 454755 - DNA, 33 bp, Homo sapien
aaaataccgactcttgaacttactgaatatttg

SEQ ID NO: 454756 - DNA, 33 bp, Homo sapien
aaaataccgactcttgcacttactgaatatttg

SEQ ID NO: 454757 - DNA, 33 bp, Homo sapien
gcccaccatatgcagacccaattgcaaaaacat

SEQ ID NO: 454758 - DNA, 33 bp, Homo sapien
gcccaccatatgcagagccaattgcaaaaacat

SEQ ID NO: 454759 - DNA, 33 bp, Homo sapien
actggtctgaccaaaaatttaccagggtgtagt

SEQ ID NO: 454760 - DNA, 33 bp, Homo sapien
actggtctgaccaaaagtttaccagggtgtagt

SEQ ID NO: 454761 - DNA, 33 bp, Homo sapien
ctgtagatcttcccaccgaaacgcaaacagctt

SEQ ID NO: 454762 - DNA, 33 bp, Homo sapien
ctgtagatcttcccactgaaacgcaaacagctt

SEQ ID NO: 454763 - DNA, 33 bp, Homo sapien
ggcccaactgattagacgaaagcagtatccctt

SEQ ID NO: 454764 - DNA, 33 bp, Homo sapien
ggcccaactgattagatgaaagcagtatccctt

SEQ ID NO: 454765 - DNA, 33 bp, Homo sapien
tatcattgtccttacactcccctgggaagaaga

SEQ ID NO: 454766 - DNA, 33 bp, Homo sapien
tatcattgtccttacagtcccctgggaagaaga

SEQ ID NO: 454767 - DNA, 33 bp, Homo sapien
tggcacttggaatccacacatctgaaacttggt

SEQ ID NO: 454768 - DNA, 33 bp, Homo sapien
tggcacttggaatccagacatctgaaacttggt

SEQ ID NO: 454769 - DNA, 33 bp, Homo sapien
cttattattagagaccacatttcaccatattgg

SEQ ID NO: 454770 - DNA, 33 bp, Homo sapien
cttattattagagaccgcatttcaccatattgg

SEQ ID NO: 454771 - DNA, 33 bp, Homo sapien
taatccagtaacaaaactatggataccgtatga

SEQ ID NO: 454772 - DNA, 33 bp, Homo sapien
taatccagtaacaaaattatggataccgtatga

SEQ ID NO: 454773 - DNA, 33 bp, Homo sapien
ctaagttgctaaacaagtgggacatacagaatg

SEQ ID NO: 454774 - DNA, 33 bp, Homo sapien
ctaagttgctaaacaattgggacatacagaatg

SEQ ID NO: 454775 - DNA, 33 bp, Homo sapien
actctggggagaatccaaatcacaggccagaac

SEQ ID NO: 454776 - DNA, 33 bp, Homo sapien
actctggggagaatccgaatcacaggccagaac

SEQ ID NO: 454777 - DNA, 33 bp, Homo sapien
gatgttgtggatcttacgctgttcttttttctc

SEQ ID NO: 454778 - DNA, 33 bp, Homo sapien
gatgttgtggatcttatgctgttcttttttctc

SEQ ID NO: 454779 - DNA, 33 bp, Homo sapien
cagggtcactggaaataccctcacaatcacctg

SEQ ID NO: 454780 - DNA, 33 bp, Homo sapien
cagggtcactggaaattccctcacaatcacctg

SEQ ID NO: 454781 - DNA, 33 bp, Homo sapien
tctccagcttcattgacgttattgcaaaggaca

SEQ ID NO: 454782 - DNA, 33 bp, Homo sapien
tctccagcttcattgatgttattgcaaaggaca

SEQ ID NO: 454783 - DNA, 33 bp, Homo sapien
tctatttctctggtaactgttttcgtccatatc

SEQ ID NO: 454784 - DNA, 33 bp, Homo sapien
tctatttctctggtaattgttttcgtccatatc

SEQ ID NO: 454785 - DNA, 33 bp, Homo sapien
cagcaccaagtttataaccagtccgtgagcagt

SEQ ID NO: 454786 - DNA, 33 bp, Homo sapien
cagcaccaagtttatatccagtccgtgagcagt

SEQ ID NO: 454787 - DNA, 33 bp, Homo sapien
acaaacaaaagtttcaatataggcacaaaacat

SEQ ID NO: 454788 - DNA, 33 bp, Homo sapien
acaaacaaaagtttcagtataggcacaaaacat

SEQ ID NO: 454789 - DNA, 33 bp, Homo sapien
tttaatgacaggttgactaccagttaccttcta

SEQ ID NO: 454790 - DNA, 33 bp, Homo sapien
tttaatgacaggttgattaccagttaccttcta

SEQ ID NO: 454791 - DNA, 33 bp, Homo sapien
tgtctttatggctaaaatagggtctttatcata

SEQ ID NO: 454792 - DNA, 33 bp, Homo sapien
tgtctttatggctaaagtagggtctttatcata

SEQ ID NO: 454793 - DNA, 33 bp, Homo sapien
tcagatgacatctccacattctacccctgaagc

SEQ ID NO: 454794 - DNA, 33 bp, Homo sapien
tcagatgacatctccatattctacccctgaagc

SEQ ID NO: 454795 - DNA, 33 bp, Homo sapien
ttctttttgcttctcacacattaatctctttcc

SEQ ID NO: 454796 - DNA, 33 bp, Homo sapien
ttctttttgcttctcatacattaatctctttcc

SEQ ID NO: 454797 - DNA, 33 bp, Homo sapien
ctccattggcgtaggaacctctgagctgggtga

SEQ ID NO: 454798 - DNA, 33 bp, Homo sapien
ctccattggcgtaggaccctctgagctgggtga

SEQ ID NO: 454799 - DNA, 33 bp, Homo sapien; identical to SEQ ID NO: 454797

SEQ ID NO: 454800 - DNA, 33 bp, Homo sapien; identical to SEQ ID NO: 454798

SEQ ID NO: 454801 - DNA, 33 bp, Homo sapien
ttctgctacatcaactaactttgtcataatata

SEQ ID NO: 454802 - DNA, 33 bp, Homo sapien
ttctgctacatcaactcactttgtcataatata

SEQ ID NO: 454803 - DNA, 33 bp, Homo sapien
caggtctctggaatagcaggacctctgccagac

SEQ ID NO: 454804 - DNA, 33 bp, Homo sapien
caggtctctggaatagtaggacctctgccagac

SEQ ID NO: 454805 - DNA, 33 bp, Homo sapien
ctgtggctcgtgtaacggaaactgagtcagtga

SEQ ID NO: 454806 - DNA, 33 bp, Homo sapien
ctgtggctcgtgtaactgaaactgagtcagtga

SEQ ID NO: 454807 - DNA, 33 bp, Homo sapien
tagccttagattcaagccactaggttaaagctt

SEQ ID NO: 454808 - DNA, 33 bp, Homo sapien
tagccttagattcaagtcactaggttaaagctt

SEQ ID NO: 454809 - DNA, 33 bp, Homo sapien
tttgtagtgttctgacaagtgtgatgtggcatc

SEQ ID NO: 454810 - DNA, 33 bp, Homo sapien
tttgtagtgttctgaccagtgtgatgtggcatc

SEQ ID NO: 454811 - DNA, 33 bp, Homo sapien
tacttctatagaaggcagcatctcgtggatgga

SEQ ID NO: 454812 - DNA, 33 bp, Homo sapien
tacttctatagaaggcggcatctcgtggatgga

SEQ ID NO: 454813 - DNA, 33 bp, Homo sapien
gttctccatctttactaaggaccacagtttttc

SEQ ID NO: 454814 - DNA, 33 bp, Homo sapien
gttctccatctttactgaggaccacagtttttc

SEQ ID NO: 454815 - DNA, 33 bp, Homo sapien
aaatagaagtattgacaatggacacaatatagt

SEQ ID NO: 454816 - DNA, 33 bp, Homo sapien
aaatagaagtattgaccatggacacaatatagt

SEQ ID NO: 454817 - DNA, 33 bp, Homo sapien; identical to SEQ ID NO: 454815

SEQ ID NO: 454818 - DNA, 33 bp, Homo sapien; identical to SEQ ID NO: 454816

SEQ ID NO: 454819 - DNA, 33 bp, Homo sapien
tggggttatgagatgccctctgaatttgtagtg

SEQ ID NO: 454820 - DNA, 33 bp, Homo sapien
tggggttatgagatgctctctgaatttgtagtg

SEQ ID NO: 454821 - DNA, 33 bp, Homo sapien; identical to SEQ ID NO: 454819

SEQ ID NO: 454822 - DNA, 33 bp, Homo sapien; identical to SEQ ID NO: 454820

SEQ ID NO: 454823 - DNA, 33 bp, Homo sapien
cccagaatctgcctatcaaagcacaggcaactt

SEQ ID NO: 454824 - DNA, 33 bp, Homo sapien
cccagaatctgcctattaaagcacaggcaactt

SEQ ID NO: 454825 - DNA, 33 bp, Homo sapien
ttctcctcaagacacaatcaatgaactcagccc

SEQ ID NO: 454826 - DNA, 33 bp, Homo sapien
ttctcctcaagacacagtcaatgaactcagccc

SEQ ID NO: 454827 - DNA, 33 bp, Homo sapien
ctggttcttccgagcactccgctttcctaccga

SEQ ID NO: 454828 - DNA, 33 bp, Homo sapien
ctggttcttccgagcattccgctttcctaccga

SEQ ID NO: 454829 - DNA, 33 bp, Homo sapien
aacctgaactgcatgaataacctgacttagtgt

SEQ ID NO: 454830 - DNA, 33 bp, Homo sapien
aacctgaactgcatgagtaacctgacttagtgt

SEQ ID NO: 454831 - DNA, 33 bp, Homo sapien
gccacaaagctgttgacataataataaaaacaa

SEQ ID NO: 454832 - DNA, 33 bp, Homo sapien
gccacaaagctgttgagataataataaaaacaa

SEQ ID NO: 454833 - DNA, 33 bp, Homo sapien
gactttttcatgtagaacccttagagttgtaag

SEQ ID NO: 454834 - DNA, 33 bp, Homo sapien
gactttttcatgtagaccccttagagttgtaag

SEQ ID NO: 454835 - DNA, 33 bp, Homo sapien
atctcacaaagagactaaaaaagtgaggacgag

SEQ ID NO: 454836 - DNA, 33 bp, Homo sapien
atctcacaaagagactgaaaaagtgaggacgag

SEQ ID NO: 454837 - DNA, 33 bp, Homo sapien; identical to SEQ ID NO: 454835

SEQ ID NO: 454838 - DNA, 33 bp, Homo sapien; identical to SEQ ID NO: 454836

SEQ ID NO: 454839 - DNA, 33 bp, Homo sapien
atatttaacttttccactacattcggcctcaat

SEQ ID NO: 454840 - DNA, 33 bp, Homo sapien
atatttaacttttccagtacattcggcctcaat

SEQ ID NO: 454841 - DNA, 33 bp, Homo sapien
tatgggatgggcctgacgaactgcgagtaactg

SEQ ID NO: 454842 - DNA, 33 bp, Homo sapien
tatgggatgggcctgatgaactgcgagtaactg

SEQ ID NO: 454843 - DNA, 33 bp, Homo sapien
attttacactttgtgcagatccttaattttact

SEQ ID NO: 454844 - DNA, 33 bp, Homo sapien
attttacactttgtgcggatccttaattttact

SEQ ID NO: 454845 - DNA, 33 bp, Homo sapien
tgagtttgggaggttcaagcagccgtgagccat

SEQ ID NO: 454846 - DNA, 33 bp, Homo sapien
tgagtttgggaggttcgagcagccgtgagccat

SEQ ID NO: 454847 - DNA, 33 bp, Homo sapien
ataaaacaggaataaactaacagcatgaagtaa

SEQ ID NO: 454848 - DNA, 33 bp, Homo sapien
ataaaacaggaataaattaacagcatgaagtaa

SEQ ID NO: 454849 - DNA, 33 bp, Homo sapien
agtaactgaggaagaactggtatctctgtaaaa

SEQ ID NO: 454850 - DNA, 33 bp, Homo sapien
agtaactgaggaagaattggtatctctgtaaaa

SEQ ID NO: 454851 - DNA, 33 bp, Homo sapien
ttacattgcagcttgaagtttggagaacatgga

SEQ ID NO: 454852 - DNA, 33 bp, Homo sapien
ttacattgcagcttgaggtttggagaacatgga

SEQ ID NO: 454853 - DNA, 33 bp, Homo sapien
agataaaattaccatcaaaaattagctgagaga

SEQ ID NO: 454854 - DNA, 33 bp, Homo sapien
agataaaattaccatcgaaaattagctgagaga

SEQ ID NO: 454855 - DNA, 33 bp, Homo sapien
agtttgtgagagtgaacagtttcgcactgtgat

SEQ ID NO: 454856 - DNA, 33 bp, Homo sapien
agtttgtgagagtgaagagtttcgcactgtgat

SEQ ID NO: 454857 - DNA, 33 bp, Homo sapien
caggttctcaatatgaagaatgagtgggtgaca

SEQ ID NO: 454858 - DNA, 33 bp, Homo sapien
caggttctcaatatgaggaatgagtgggtgaca

SEQ ID NO: 454859 - DNA, 33 bp, Homo sapien
tgatgaatgagggagtgacagtaaacagttttc

SEQ ID NO: 454860 - DNA, 33 bp, Homo sapien
tgatgaatgagggagttacagtaaacagttttc

SEQ ID NO: 454861 - DNA, 33 bp, Homo sapien
agtgaccaggttcccaatatggtgaataagtgg

SEQ ID NO: 454862 - DNA, 33 bp, Homo sapien
agtgaccaggttcccactatggtgaataagtgg

SEQ ID NO: 454863 - DNA, 33 bp, Homo sapien
gatttgctcataattgaaatgctcagccattta

SEQ ID NO: 454864 - DNA, 33 bp, Homo sapien
gatttgctcataattgcaatgctcagccattta

SEQ ID NO: 454865 - DNA, 33 bp, Homo sapien
ttctctattgtattacccctccctaaagagttt

SEQ ID NO: 454866 - DNA, 33 bp, Homo sapien
ttctctattgtattactcctccctaaagagttt

SEQ ID NO: 454867 - DNA, 33 bp, Homo sapien
actacattcttgagtaaggtagataggttaaac

SEQ ID NO: 454868 - DNA, 33 bp, Homo sapien
actacattcttgagtacggtagataggttaaac

SEQ ID NO: 454869 - DNA, 33 bp, Homo sapien
atggttacagtgtgcaagttggtaacataatga

SEQ ID NO: 454870 - DNA, 33 bp, Homo sapien
atggttacagtgtgcaggttggtaacataatga

SEQ ID NO: 454871 - DNA, 33 bp, Homo sapien
agacccaagtgtgagaaagagctggccatgtgc

SEQ ID NO: 454872 - DNA, 33 bp, Homo sapien
agacccaagtgtgagacagagctggccatgtgc

SEQ ID NO: 454873 - DNA, 33 bp, Homo sapien
ccaaacttcgacatcaggcagtatacttatgtt

SEQ ID NO: 454874 - DNA, 33 bp, Homo sapien
ccaaacttcgacatcatgcagtatacttatgtt

SEQ ID NO: 454875 - DNA, 33 bp, Homo sapien
cagtgggctgtgtccacgtttgagggtgacaat

SEQ ID NO: 454876 - DNA, 33 bp, Homo sapien
cagtgggctgtgtccatgtttgagggtgacaat

SEQ ID NO: 454877 - DNA, 33 bp, Homo sapien
acagatgtggttgtgacatatatctttgcctag

SEQ ID NO: 454878 - DNA, 33 bp, Homo sapien
acagatgtggttgtgagatatatctttgcctag

SEQ ID NO: 454879 - DNA, 33 bp, Homo sapien
ctgggccaagccaacaaaagagattgtgacaat

SEQ ID NO: 454880 - DNA, 33 bp, Homo sapien
ctgggccaagccaacagaagagattgtgacaat

SEQ ID NO: 454881 - DNA, 33 bp, Homo sapien
caatagtgtattgttaccatctgttacctacaa

SEQ ID NO: 454882 - DNA, 33 bp, Homo sapien
caatagtgtattgttatcatctgttacctacaa

SEQ ID NO: 454883 - DNA, 33 bp, Homo sapien
ttagatcttcaattcaagttgtttttccaattg

SEQ ID NO: 454884 - DNA, 33 bp, Homo sapien
ttagatcttcaattcatgttgtttttccaattg

SEQ ID NO: 454885 - DNA, 33 bp, Homo sapien
gcatgaaaattgaaaggcaagagactcatcccc

SEQ ID NO: 454886 - DNA, 33 bp, Homo sapien
gcatgaaaattgaaagtcaagagactcatcccc

SEQ ID NO: 454887 - DNA, 33 bp, Homo sapien
cttgttgttgactttgcacttgtcctcagactc

SEQ ID NO: 454888 - DNA, 33 bp, Homo sapien
cttgttgttgactttggacttgtcctcagactc

SEQ ID NO: 454889 - DNA, 33 bp, Homo sapien
attgggcatggatacaagggggatgaaaaattg

SEQ ID NO: 454890 - DNA, 33 bp, Homo sapien
attgggcatggatacaggggggatgaaaaattg

SEQ ID NO: 454891 - DNA, 33 bp, Homo sapien
aatggctgaccatctcaattatgaactaataag

SEQ ID NO: 454892 - DNA, 33 bp, Homo sapien
aatggctgaccatctcgattatgaactaataag

SEQ ID NO: 454893 - DNA, 33 bp, Homo sapien
ataaggcctccaaaaaacgtgaatctgaacaga

SEQ ID NO: 454894 - DNA, 33 bp, Homo sapien
ataaggcctccaaaaagcgtgaatctgaacaga

SEQ ID NO: 454895 - DNA, 33 bp, Homo sapien
tcagtcattcctgcaaatcagaaccaattctct

SEQ ID NO: 454896 - DNA, 33 bp, Homo sapien
tcagtcattcctgcaagtcagaaccaattctct

SEQ ID NO: 454897 - DNA, 33 bp, Homo sapien
tttttctgaaagtagggacaaactcatattcca

SEQ ID NO: 454898 - DNA, 33 bp, Homo sapien
tttttctgaaagtaggtacaaactcatattcca

SEQ ID NO: 454899 - DNA, 33 bp, Homo sapien
tattttgcaacctttaacatttacgcttagaag

SEQ ID NO: 454900 - DNA, 33 bp, Homo sapien
tattttgcaacctttaccatttacgcttagaag

SEQ ID NO: 454901 - DNA, 33 bp, Homo sapien
gaatctctgaaaaaaacaggtatggaacaaatg

SEQ ID NO: 454902 - DNA, 33 bp, Homo sapien
gaatctctgaaaaaaataggtatggaacaaatg

SEQ ID NO: 454903 - DNA, 33 bp, Homo sapien
tataaatccagtaacaaagagtcataattgttg

SEQ ID NO: 454904 - DNA, 33 bp, Homo sapien
tataaatccagtaacagagagtcataattgttg

SEQ ID NO: 454905 - DNA, 33 bp, Homo sapien
atgttcacacacagaaactcttttgcaattaaa

SEQ ID NO: 454906 - DNA, 33 bp, Homo sapien
atgttcacacacagaatctcttttgcaattaaa

SEQ ID NO: 454907 - DNA, 33 bp, Homo sapien
aattgttcaatttaccgatcttgaagccagtag

SEQ ID NO: 454908 - DNA, 33 bp, Homo sapien
aattgttcaatttacctatcttgaagccagtag

SEQ ID NO: 454909 - DNA, 33 bp, Homo sapien
gttgagaatagacaatgaaagaacaaaagaaac

SEQ ID NO: 454910 - DNA, 33 bp, Homo sapien
gttgagaatagacaattaaagaacaaaagaaac

SEQ ID NO: 454911 - DNA, 33 bp, Homo sapien
ttgcttaagtagaaacccacacagtgacctgag

SEQ ID NO: 454912 - DNA, 33 bp, Homo sapien
ttgcttaagtagaaactcacacagtgacctgag

SEQ ID NO: 454913 - DNA, 33 bp, Homo sapien
agacagggttttcttacgttgtccatgctagtt

SEQ ID NO: 454914 - DNA, 33 bp, Homo sapien
agacagggttttcttatgttgtccatgctagtt

SEQ ID NO: 454915 - DNA, 33 bp, Homo sapien
agtaaaaatcctaaagcacattggcttctccca

SEQ ID NO: 454916 - DNA, 33 bp, Homo sapien
agtaaaaatcctaaagtacattggcttctccca

SEQ ID NO: 454917 - DNA, 33 bp, Homo sapien
aatactttttgacttcacataaaatgtcactga

SEQ ID NO: 454918 - DNA, 33 bp, Homo sapien
aatactttttgacttcgcataaaatgtcactga

SEQ ID NO: 454919 - DNA, 33 bp, Homo sapien
aacttgcctgttttacagctaagtaaggcctgg

SEQ ID NO: 454920 - DNA, 33 bp, Homo sapien
aacttgcctgttttaccgctaagtaaggcctgg

SEQ ID NO: 454921 - DNA, 33 bp, Homo sapien
cccaacagtcccattaacacttaagttttccct

SEQ ID NO: 454922 - DNA, 33 bp, Homo sapien
cccaacagtcccattagcacttaagttttccct

SEQ ID NO: 454923 - DNA, 33 bp, Homo sapien
taacaggtcattgaacaagatctaaaaagctta

SEQ ID NO: 454924 - DNA, 33 bp, Homo sapien
taacaggtcattgaacgagatctaaaaagctta

SEQ ID NO: 454925 - DNA, 33 bp, Homo sapien
actaggttagtaattaaagaatataggcaagat

SEQ ID NO: 454926 - DNA, 33 bp, Homo sapien
actaggttagtaattagagaatataggcaagat

SEQ ID NO: 454927 - DNA, 33 bp, Homo sapien
ctactgccaaaatataaagcaaaagccctataa

SEQ ID NO: 454928 - DNA, 33 bp, Homo sapien
ctactgccaaaatatagagcaaaagccctataa

SEQ ID NO: 454929 - DNA, 33 bp, Homo sapien
taacaaaatatcagccactaccagaaggagcag

SEQ ID NO: 454930 - DNA, 33 bp, Homo sapien
taacaaaatatcagccgctaccagaaggagcag

SEQ ID NO: 454931 - DNA, 33 bp, Homo sapien
tcctccacatacacagcatgaggaaattcctaa

SEQ ID NO: 454932 - DNA, 33 bp, Homo sapien
tcctccacatacacaggatgaggaaattcctaa

SEQ ID NO: 454933 - DNA, 33 bp, Homo sapien
cacatgctggaagcacagccctagagactttga

SEQ ID NO: 454934 - DNA, 33 bp, Homo sapien
cacatgctggaagcacggccctagagactttga

SEQ ID NO: 454935 - DNA, 33 bp, Homo sapien
acggtagtgacccaacactcggtggtcgaggct

SEQ ID NO: 454936 - DNA, 33 bp, Homo sapien
acggtagtgacccaacgctcggtggtcgaggct

SEQ ID NO: 454937 - DNA, 33 bp, Homo sapien
atcaatgagagcctgaagcttttctgtacagga

SEQ ID NO: 454938 - DNA, 33 bp, Homo sapien
atcaatgagagcctgaggcttttctgtacagga

SEQ ID NO: 454939 - DNA, 33 bp, Homo sapien
aggctagtttcatccaatgaggaatcttggggc

SEQ ID NO: 454940 - DNA, 33 bp, Homo sapien
aggctagtttcatccagtgaggaatcttggggc

SEQ ID NO: 454941 - DNA, 33 bp, Homo sapien
gcggcagtaaaaatggacaactatagctatgca

SEQ ID NO: 454942 - DNA, 33 bp, Homo sapien
gcggcagtaaaaatgggcaactatagctatgca

SEQ ID NO: 454943 - DNA, 33 bp, Homo sapien
tcagggtgtggaaaaaattatagagaaagatgc

SEQ ID NO: 454944 - DNA, 33 bp, Homo sapien
tcagggtgtggaaaaacttatagagaaagatgc

SEQ ID NO: 454945 - DNA, 33 bp, Homo sapien
agtctcgagtaaacaccattagtgggtaattaa

SEQ ID NO: 454946 - DNA, 33 bp, Homo sapien
agtctcgagtaaacactattagtgggtaattaa

SEQ ID NO: 454947 - DNA, 33 bp, Homo sapien
gccggtgaagtttacaagtatttattacagatt

SEQ ID NO: 454948 - DNA, 33 bp, Homo sapien
gccggtgaagtttacatgtatttattacagatt

SEQ ID NO: 454949 - DNA, 33 bp, Homo sapien
gctcattctgttagcacagcctcttagctgcag

SEQ ID NO: 454950 - DNA, 33 bp, Homo sapien
gctcattctgttagcatagcctcttagctgcag

SEQ ID NO: 454951 - DNA, 33 bp, Homo sapien
agtgatggatgaaagacgtacactgacacagat

SEQ ID NO: 454952 - DNA, 33 bp, Homo sapien
agtgatggatgaaagatgtacactgacacagat

SEQ ID NO: 454953 - DNA, 33 bp, Homo sapien
gcaatagccatggtcactgaaaacaaggctctg

SEQ ID NO: 454954 - DNA, 33 bp, Homo sapien
gcaatagccatggtcattgaaaacaaggctctg

SEQ ID NO: 454955 - DNA, 33 bp, Homo sapien
aggatcagaagaaaccagagaaactgctggaga

SEQ ID NO: 454956 - DNA, 33 bp, Homo sapien
aggatcagaagaaaccggagaaactgctggaga

SEQ ID NO: 454957 - DNA, 33 bp, Homo sapien
tagttgtttcactaatcaacattgattttcatt

SEQ ID NO: 454958 - DNA, 33 bp, Homo sapien
tagttgtttcactaatgaacattgattttcatt

SEQ ID NO: 454959 - DNA, 33 bp, Homo sapien
aagattgggacaggtaagtttttttaatattca

SEQ ID NO: 454960 - DNA, 33 bp, Homo sapien
aagattgggacaggtaggtttttttaatattca

SEQ ID NO: 454961 - DNA, 33 bp, Homo sapien
tttcagagcttgaagaatagcttgctgaaataa

SEQ ID NO: 454962 - DNA, 33 bp, Homo sapien
tttcagagcttgaagactagcttgctgaaataa

SEQ ID NO: 454963 - DNA, 33 bp, Homo sapien
ttttgtaggtctctaaaaatgtgcttgtttaat

SEQ ID NO: 454964 - DNA, 33 bp, Homo sapien
ttttgtaggtctctaagaatgtgcttgtttaat

SEQ ID NO: 454965 - DNA, 33 bp, Homo sapien
atttcctaactgaatacgtcatgtgcaaataag

SEQ ID NO: 454966 - DNA, 33 bp, Homo sapien
atttcctaactgaatatgtcatgtgcaaataag

SEQ ID NO: 454967 - DNA, 33 bp, Homo sapien
ccacaggtgcacacgaccatacttggttatttt

SEQ ID NO: 454968 - DNA, 33 bp, Homo sapien
ccacaggtgcacacgatcatacttggttatttt

SEQ ID NO: 454969 - DNA, 33 bp, Homo sapien
taagctattcatacacaaaataaaactgatgta

SEQ ID NO: 454970 - DNA, 33 bp, Homo sapien
taagctattcatacacgaaataaaactgatgta

SEQ ID NO: 454971 - DNA, 33 bp, Homo sapien
ctgtactccaatatcacaatttacaggtaagta

SEQ ID NO: 454972 - DNA, 33 bp, Homo sapien
ctgtactccaatatcagaatttacaggtaagta

SEQ ID NO: 454973 - DNA, 33 bp, Homo sapien
agcttaaagagccacaatctcaaaggggagctt

SEQ ID NO: 454974 - DNA, 33 bp, Homo sapien
agcttaaagagccacactctcaaaggggagctt

SEQ ID NO: 454975 - DNA, 33 bp, Homo sapien
tacaatagacaggaaactaattggctatgtgtt

SEQ ID NO: 454976 - DNA, 33 bp, Homo sapien
tacaatagacaggaaattaattggctatgtgtt

SEQ ID NO: 454977 - DNA, 33 bp, Homo sapien
taacatctgagtgcagcatttggttgctagtca

SEQ ID NO: 454978 - DNA, 33 bp, Homo sapien
taacatctgagtgcagtatttggttgctagtca

SEQ ID NO: 454979 - DNA, 33 bp, Homo sapien
caatcaggttcttccacaggctgcagggtagct

SEQ ID NO: 454980 - DNA, 33 bp, Homo sapien
caatcaggttcttccataggctgcagggtagct

SEQ ID NO: 454981 - DNA, 33 bp, Homo sapien
cacctggagaaggtgcaaacagacactagcata

SEQ ID NO: 454982 - DNA, 33 bp, Homo sapien
cacctggagaaggtgcgaacagacactagcata

SEQ ID NO: 454983 - DNA, 33 bp, Homo sapien
gtcagatttgtaaaaactcacgaacaccaaaag

SEQ ID NO: 454984 - DNA, 33 bp, Homo sapien
gtcagatttgtaaaaattcacgaacaccaaaag

SEQ ID NO: 454985 - DNA, 33 bp, Homo sapien
tttttgacactgttaacgaaaacaaagtataaa

SEQ ID NO: 454986 - DNA, 33 bp, Homo sapien
tttttgacactgttaatgaaaacaaagtataaa

SEQ ID NO: 454987 - DNA, 33 bp, Homo sapien
ttttctaattccataaaaagttgcatttatagt

SEQ ID NO: 454988 - DNA, 33 bp, Homo sapien
ttttctaattccataagaagttgcatttatagt

SEQ ID NO: 454989 - DNA, 33 bp, Homo sapien
caaagtctcaccatacaaaatcaacatacacaa

SEQ ID NO: 454990 - DNA, 33 bp, Homo sapien
caaagtctcaccatactaaatcaacatacacaa

SEQ ID NO: 454991 - DNA, 33 bp, Homo sapien
gatttctaagcctaaagaatgacttcagcaaag

SEQ ID NO: 454992 - DNA, 33 bp, Homo sapien
gatttctaagcctaaataatgacttcagcaaag

SEQ ID NO: 454993 - DNA, 33 bp, Homo sapien
cattgttgctctgttcaagacttctgtttcttt

SEQ ID NO: 454994 - DNA, 33 bp, Homo sapien
cattgttgctctgttcgagacttctgtttcttt

SEQ ID NO: 454995 - DNA, 33 bp, Homo sapien
tgtttagttaagaatgaagaaagtggtcatctg

SEQ ID NO: 454996 - DNA, 33 bp, Homo sapien
tgtttagttaagaatgtagaaagtggtcatctg

SEQ ID NO: 454997 - DNA, 33 bp, Homo sapien
atactaaatgtccaaaaagagaaattgtaagat

SEQ ID NO: 454998 - DNA, 33 bp, Homo sapien
atactaaatgtccaaagagagaaattgtaagat

SEQ ID NO: 454999 - DNA, 33 bp, Homo sapien
tgccccaagcttagaaaccctaaactacattgg

SEQ ID NO: 455000 - DNA, 33 bp, Homo sapien
tgccccaagcttagaagccctaaactacattgg

SEQ ID NO: 455001 - DNA, 33 bp, Homo sapien
ttattctatgtagtgacatgctttggttatttt

SEQ ID NO: 455002 - DNA, 33 bp, Homo sapien
ttattctatgtagtgatatgctttggttatttt

SEQ ID NO: 455003 - DNA, 33 bp, Homo sapien
tgtgctctcaagggtacgctacaggctgagtgc

SEQ ID NO: 455004 - DNA, 33 bp, Homo sapien
tgtgctctcaagggtatgctacaggctgagtgc

SEQ ID NO: 455005 - DNA, 33 bp, Homo sapien
attattgttagaaaagcaatgcagaaggctggg

SEQ ID NO: 455006 - DNA, 33 bp, Homo sapien
attattgttagaaaagtaatgcagaaggctggg

SEQ ID NO: 455007 - DNA, 33 bp, Homo sapien
aggtcaagagtgtggacgggcctgaagagacat

SEQ ID NO: 455008 - DNA, 33 bp, Homo sapien
aggtcaagagtgtggatgggcctgaagagacat

SEQ ID NO: 455009 - DNA, 33 bp, Homo sapien
taagaattacggatacactattgtagaaagtaa

SEQ ID NO: 455010 - DNA, 33 bp, Homo sapien
taagaattacggatactctattgtagaaagtaa

SEQ ID NO: 455011 - DNA, 33 bp, Homo sapien
cttgtaaagtaagttaagagcaatgaaccaata

SEQ ID NO: 455012 - DNA, 33 bp, Homo sapien
cttgtaaagtaagttaggagcaatgaaccaata

SEQ ID NO: 455013 - DNA, 33 bp, Homo sapien
attcctacctatgccacaagtaatctgttttct

SEQ ID NO: 455014 - DNA, 33 bp, Homo sapien
attcctacctatgccagaagtaatctgttttct

SEQ ID NO: 455015 - DNA, 33 bp, Homo sapien
caatctttggaatggaaaactaactggaggaca

SEQ ID NO: 455016 - DNA, 33 bp, Homo sapien
caatctttggaatggagaactaactggaggaca

SEQ ID NO: 455017 - DNA, 33 bp, Homo sapien
ttttctcccataggacaacctgaggtatggagt

SEQ ID NO: 455018 - DNA, 33 bp, Homo sapien
ttttctcccataggacgacctgaggtatggagt

SEQ ID NO: 455019 - DNA, 33 bp, Homo sapien
atgctggtaatgaggaacaaacacagtaataac

SEQ ID NO: 455020 - DNA, 33 bp, Homo sapien
atgctggtaatgaggagcaaacacagtaataac

SEQ ID NO: 455021 - DNA, 33 bp, Homo sapien
aaaaagaattcaaaaacagcattgcaacaggag

SEQ ID NO: 455022 - DNA, 33 bp, Homo sapien
aaaaagaattcaaaaagagcattgcaacaggag

SEQ ID NO: 455023 - DNA, 33 bp, Homo sapien
aaattttaaggaatgcaattttaggtagacaag

SEQ ID NO: 455024 - DNA, 33 bp, Homo sapien
aaattttaaggaatgctattttaggtagacaag

SEQ ID NO: 455025 - DNA, 33 bp, Homo sapien
ggccatcagccctgggccactgggaatcctctc

SEQ ID NO: 455026 - DNA, 33 bp, Homo sapien
ggccatcagccctgggtcactgggaatcctctc

SEQ ID NO: 455027 - DNA, 33 bp, Homo sapien
catctattttttgaatgaccatatgaagtggaa

SEQ ID NO: 455028 - DNA, 33 bp, Homo sapien
catctattttttgaattaccatatgaagtggaa

SEQ ID NO: 455029 - DNA, 33 bp, Homo sapien
caagggtctctgcaaaatatctctctcctatat

SEQ ID NO: 455030 - DNA, 33 bp, Homo sapien
caagggtctctgcaaagtatctctctcctatat

SEQ ID NO: 455031 - DNA, 33 bp, Homo sapien
agttttaatgtgaacaataaactggagatcttg

SEQ ID NO: 455032 - DNA, 33 bp, Homo sapien
agttttaatgtgaacagtaaactggagatcttg

SEQ ID NO: 455033 - DNA, 33 bp, Homo sapien
tgattggtgttcagcaaactacaactttttttg

SEQ ID NO: 455034 - DNA, 33 bp, Homo sapien
tgattggtgttcagcatactacaactttttttg

SEQ ID NO: 455035 - DNA, 33 bp, Homo sapien
gaaggatacagattggccactgaaagaaggatt

SEQ ID NO: 455036 - DNA, 33 bp, Homo sapien
gaaggatacagattggtcactgaaagaaggatt

SEQ ID NO: 455037 - DNA, 33 bp, Homo sapien
ggtgccatgatatgcaataccaacaatcctttt

SEQ ID NO: 455038 - DNA, 33 bp, Homo sapien
ggtgccatgatatgcagtaccaacaatcctttt

SEQ ID NO: 455039 - DNA, 33 bp, Homo sapien
cctggctgacatctgcgattcttaactgctcta

SEQ ID NO: 455040 - DNA, 33 bp, Homo sapien
cctggctgacatctgctattcttaactgctcta

SEQ ID NO: 455041 - DNA, 33 bp, Homo sapien
aggttttcttgtagacagaatgaaagcaaggaa

SEQ ID NO: 455042 - DNA, 33 bp, Homo sapien
aggttttcttgtagacggaatgaaagcaaggaa

SEQ ID NO: 455043 - DNA, 33 bp, Homo sapien
tggcatggacacattccacagttgctgggaaga

SEQ ID NO: 455044 - DNA, 33 bp, Homo sapien
tggcatggacacattctacagttgctgggaaga

SEQ ID NO: 455045 - DNA, 33 bp, Homo sapien
tcacccagagttacaaccaggccaggccaatca

SEQ ID NO: 455046 - DNA, 33 bp, Homo sapien
tcacccagagttacaatcaggccaggccaatca

SEQ ID NO: 455047 - DNA, 33 bp, Homo sapien
cagtgaatatggttcacgtggggaacaccactt

SEQ ID NO: 455048 - DNA, 33 bp, Homo sapien
cagtgaatatggttcatgtggggaacaccactt

SEQ ID NO: 455049 - DNA, 33 bp, Homo sapien
tttctaggcaacaaggaagaagccaactttgag

SEQ ID NO: 455050 - DNA, 33 bp, Homo sapien
tttctaggcaacaagggagaagccaactttgag

SEQ ID NO: 455051 - DNA, 33 bp, Homo sapien
tggggacttgggaaaaaaaatcggccagagcct

SEQ ID NO: 455052 - DNA, 33 bp, Homo sapien
tggggacttgggaaaagaaatcggccagagcct

SEQ ID NO: 455053 - DNA, 33 bp, Homo sapien
tctggttccaaggatacgtcacaatcattcctg

SEQ ID NO: 455054 - DNA, 33 bp, Homo sapien
tctggttccaaggatatgtcacaatcattcctg

SEQ ID NO: 455055 - DNA, 33 bp, Homo sapien
gggtgctgagctcagcactatgttacaatgctc

SEQ ID NO: 455056 - DNA, 33 bp, Homo sapien
gggtgctgagctcagcgctatgttacaatgctc

SEQ ID NO: 455057 - DNA, 33 bp, Homo sapien
atagagagtgtattaacaaggcccagcacacag

SEQ ID NO: 455058 - DNA, 33 bp, Homo sapien
atagagagtgtattaataaggcccagcacacag

SEQ ID NO: 455059 - DNA, 33 bp, Homo sapien
cttatgatgaatagaacagtcacacttgcttgg

SEQ ID NO: 455060 - DNA, 33 bp, Homo sapien
cttatgatgaatagaagagtcacacttgcttgg

SEQ ID NO: 455061 - DNA, 33 bp, Homo sapien
tgtatgttgagtctgaatacacaagtcacaatc

SEQ ID NO: 455062 - DNA, 33 bp, Homo sapien
tgtatgttgagtctgagtacacaagtcacaatc

SEQ ID NO: 455063 - DNA, 33 bp, Homo sapien
aagagaaagatcacctaacttaagagctgggcc

SEQ ID NO: 455064 - DNA, 33 bp, Homo sapien
aagagaaagatcacctgacttaagagctgggcc

SEQ ID NO: 455065 - DNA, 33 bp, Homo sapien
tacattcaaacgtttacatcttttgagagaata

SEQ ID NO: 455066 - DNA, 33 bp, Homo sapien
tacattcaaacgtttatatcttttgagagaata

SEQ ID NO: 455067 - DNA, 33 bp, Homo sapien
catctcaattacgagcaaataagttttggatgg

SEQ ID NO: 455068 - DNA, 33 bp, Homo sapien
catctcaattacgagcgaataagttttggatgg

SEQ ID NO: 455069 - DNA, 33 bp, Homo sapien; identical to SEQ ID NO: 455067

SEQ ID NO: 455070 - DNA, 33 bp, Homo sapien; identical to SEQ ID NO: 455068

SEQ ID NO: 455071 - DNA, 33 bp, Homo sapien
cttttcacctacatagcactctcccccaactaa

SEQ ID NO: 455072 - DNA, 33 bp, Homo sapien
cttttcacctacatagtactctcccccaactaa

SEQ ID NO: 455073 - DNA, 33 bp, Homo sapien
acaacaaaaaaagcccaaagagccaatgcaatc

SEQ ID NO: 455074 - DNA, 33 bp, Homo sapien
acaacaaaaaaagcccgaagagccaatgcaatc

SEQ ID NO: 455075 - DNA, 33 bp, Homo sapien
ctgatatttgcagtccaaagtacttacacagaa

SEQ ID NO: 455076 - DNA, 33 bp, Homo sapien
ctgatatttgcagtccgaagtacttacacagaa

SEQ ID NO: 455077 - DNA, 33 bp, Homo sapien
ctatgtttcaatctcaaatacattccactatat

SEQ ID NO: 455078 - DNA, 33 bp, Homo sapien
ctatgtttcaatctcagatacattccactatat

SEQ ID NO: 455079 - DNA, 33 bp, Homo sapien; identical to SEQ ID NO: 455077

SEQ ID NO: 455080 - DNA, 33 bp, Homo sapien; identical to SEQ ID NO: 455078

SEQ ID NO: 455081 - DNA, 33 bp, Homo sapien
atactgcttggatctgcagtgaacgatagttaa

SEQ ID NO: 455082 - DNA, 33 bp, Homo sapien
atactgcttggatctgtagtgaacgatagttaa

SEQ ID NO: 455083 - DNA, 33 bp, Homo sapien
accagttaaactccaacatttggcctctcagtg

SEQ ID NO: 455084 - DNA, 33 bp, Homo sapien
accagttaaactccaatatttggcctctcagtg

SEQ ID NO: 455085 - DNA, 33 bp, Homo sapien
gtgagagtgccgggtccgacatcctgagaaaag

SEQ ID NO: 455086 - DNA, 33 bp, Homo sapien
gtgagagtgccgggtctgacatcctgagaaaag

SEQ ID NO: 455087 - DNA, 33 bp, Homo sapien
gaagactagacgtagaactccagctgcagccgg

SEQ ID NO: 455088 - DNA, 33 bp, Homo sapien
gaagactagacgtagagctccagctgcagccgg

SEQ ID NO: 455089 - DNA, 33 bp, Homo sapien
tactggccaaaacacactgattggtacaagaat

SEQ ID NO: 455090 - DNA, 33 bp, Homo sapien
tactggccaaaacacattgattggtacaagaat

SEQ ID NO: 455091 - DNA, 33 bp, Homo sapien
aataccaacatagggaatcagagagaattgtga

SEQ ID NO: 455092 - DNA, 33 bp, Homo sapien
aataccaacatagggactcagagagaattgtga

SEQ ID NO: 455093 - DNA, 33 bp, Homo sapien
ggacaatctatactgacagcctcaattcttcct

SEQ ID NO: 455094 - DNA, 33 bp, Homo sapien
ggacaatctatactgagagcctcaattcttcct

SEQ ID NO: 455095 - DNA, 33 bp, Homo sapien
tagctcagcccacggaagggattgtgacatatc

SEQ ID NO: 455096 - DNA, 33 bp, Homo sapien
tagctcagcccacggatgggattgtgacatatc

SEQ ID NO: 455097 - DNA, 33 bp, Homo sapien
cattgtgacatttaggacccatcaactatctgg

SEQ ID NO: 455098 - DNA, 33 bp, Homo sapien
cattgtgacatttagggcccatcaactatctgg

SEQ ID NO: 455099 - DNA, 33 bp, Homo sapien
ccaggaagaaaaggagcatcacatcatctaggt

SEQ ID NO: 455100 - DNA, 33 bp, Homo sapien
ccaggaagaaaaggagtatcacatcatctaggt

SEQ ID NO: 455101 - DNA, 33 bp, Homo sapien
gtgtcatataacctcaaggctgtgcccagctta

SEQ ID NO: 455102 - DNA, 33 bp, Homo sapien
gtgtcatataacctcatggctgtgcccagctta

SEQ ID NO: 455103 - DNA, 33 bp, Homo sapien
ttcaaaacctaggttaagcaactcttttgcatg

SEQ ID NO: 455104 - DNA, 33 bp, Homo sapien
ttcaaaacctaggttaggcaactcttttgcatg

SEQ ID NO: 455105 - DNA, 33 bp, Homo sapien
tagggattctgacataccactgaacctagcacc

SEQ ID NO: 455106 - DNA, 33 bp, Homo sapien
tagggattctgacatatcactgaacctagcacc

SEQ ID NO: 455107 - DNA, 33 bp, Homo sapien
cattcaggagagtcaaatcccgtaggtgctgga

SEQ ID NO: 455108 - DNA, 33 bp, Homo sapien
cattcaggagagtcaagtcccgtaggtgctgga

SEQ ID NO: 455109 - DNA, 33 bp, Homo sapien
aggttcatttcatccaatgaggagtcctggggc

SEQ ID NO: 455110 - DNA, 33 bp, Homo sapien
aggttcatttcatccagtgaggagtcctggggc

SEQ ID NO: 455111 - DNA, 33 bp, Homo sapien; identical to SEQ ID NO: 455109

SEQ ID NO: 455112 - DNA, 33 bp, Homo sapien; identical to SEQ ID NO: 455110

SEQ ID NO: 455113 - DNA, 33 bp, Homo sapien
acgaaaggctctacccacatcaaaggtgttcct

SEQ ID NO: 455114 - DNA, 33 bp, Homo sapien
acgaaaggctctaccctcatcaaaggtgttcct

SEQ ID NO: 455115 - DNA, 33 bp, Homo sapien
tatgtaatcaggttaactgcaggtttatgattg

SEQ ID NO: 455116 - DNA, 33 bp, Homo sapien
tatgtaatcaggttaattgcaggtttatgattg

SEQ ID NO: 455117 - DNA, 33 bp, Homo sapien
gcattccatcctcatacacattatagaatcctt

SEQ ID NO: 455118 - DNA, 33 bp, Homo sapien
gcattccatcctcatagacattatagaatcctt

SEQ ID NO: 455119 - DNA, 33 bp, Homo sapien
ttttcattaagggacaacttgtgattatgtaaa

SEQ ID NO: 455120 - DNA, 33 bp, Homo sapien
ttttcattaagggacatcttgtgattatgtaaa

SEQ ID NO: 455121 - DNA, 33 bp, Homo sapien
cactaaccacaaatgaaagaagtgccaccatta

SEQ ID NO: 455122 - DNA, 33 bp, Homo sapien
cactaaccacaaatgagagaagtgccaccatta

SEQ ID NO: 455123 - DNA, 33 bp, Homo sapien
agatcaggagagcagacagaatgggacaaacag

SEQ ID NO: 455124 - DNA, 33 bp, Homo sapien
agatcaggagagcagagagaatgggacaaacag

SEQ ID NO: 455125 - DNA, 33 bp, Homo sapien
ccttaatttcactacccggtactcatgatgctg

SEQ ID NO: 455126 - DNA, 33 bp, Homo sapien
ccttaatttcactacctggtactcatgatgctg

SEQ ID NO: 455127 - DNA, 33 bp, Homo sapien
gaggcaaaagaacaaaccagaggggtattatac

SEQ ID NO: 455128 - DNA, 33 bp, Homo sapien
gaggcaaaagaacaaagcagaggggtattatac

SEQ ID NO: 455129 - DNA, 33 bp, Homo sapien
tcagttttttttatcaatagatctcagcttact

SEQ ID NO: 455130 - DNA, 33 bp, Homo sapien
tcagttttttttatcagtagatctcagcttact

SEQ ID NO: 455131 - DNA, 33 bp, Homo sapien
tttgtatacattgtaacccttgattgaaatttg

SEQ ID NO: 455132 - DNA, 33 bp, Homo sapien
tttgtatacattgtaatccttgattgaaatttg

SEQ ID NO: 455133 - DNA, 33 bp, Homo sapien
ttacttgtcgttaaaaagttggcaatttacttc

SEQ ID NO: 455134 - DNA, 33 bp, Homo sapien
ttacttgtcgttaaaacgttggcaatttacttc

SEQ ID NO: 455135 - DNA, 33 bp, Homo sapien
tcatactggagagaaaccgtacagatgtgaaga

SEQ ID NO: 455136 - DNA, 33 bp, Homo sapien
tcatactggagagaaagcgtacagatgtgaaga

SEQ ID NO: 455137 - DNA, 33 bp, Homo sapien
agcttagaaaacaccacagagttcatactaaaa

SEQ ID NO: 455138 - DNA, 33 bp, Homo sapien
agcttagaaaacaccagagagttcatactaaaa

SEQ ID NO: 455139 - DNA, 33 bp, Homo sapien
attcaggactcagaaaggtatggattttattca

SEQ ID NO: 455140 - DNA, 33 bp, Homo sapien
attcaggactcagaaatgtatggattttattca

SEQ ID NO: 455141 - DNA, 33 bp, Homo sapien
tggctattcttcacctaacttttaaaatagtat

SEQ ID NO: 455142 - DNA, 33 bp, Homo sapien
tggctattcttcacctgacttttaaaatagtat

SEQ ID NO: 455143 - DNA, 33 bp, Homo sapien
caaagaaaattagcagaaatcaaaggcagatgc

SEQ ID NO: 455144 - DNA, 33 bp, Homo sapien
caaagaaaattagcagcaatcaaaggcagatgc

SEQ ID NO: 455145 - DNA, 33 bp, Homo sapien
taaattgtgctctcctaaagtcaggtttcatgt

SEQ ID NO: 455146 - DNA, 33 bp, Homo sapien
taaattgtgctctcctgaagtcaggtttcatgt

SEQ ID NO: 455147 - DNA, 33 bp, Homo sapien
aacaaaaagtatggagaagaacttgcggatctg

SEQ ID NO: 455148 - DNA, 33 bp, Homo sapien
aacaaaaagtatggaggagaacttgcggatctg

SEQ ID NO: 455149 - DNA, 33 bp, Homo sapien
taagcttcatagttgacgtcattatattggggt

SEQ ID NO: 455150 - DNA, 33 bp, Homo sapien
taagcttcatagttgatgtcattatattggggt

SEQ ID NO: 455151 - DNA, 33 bp, Homo sapien
tttagattattttctacactcagcactctgatt

SEQ ID NO: 455152 - DNA, 33 bp, Homo sapien
tttagattattttctatactcagcactctgatt

SEQ ID NO: 455153 - DNA, 33 bp, Homo sapien
cataacaagtcttattaaagaatacgtagtggc

SEQ ID NO: 455154 - DNA, 33 bp, Homo sapien
cataacaagtcttattgaagaatacgtagtggc

SEQ ID NO: 455155 - DNA, 33 bp, Homo sapien
aagatctgaaaagcttcaagagccacactctca

SEQ ID NO: 455156 - DNA, 33 bp, Homo sapien
aagatctgaaaagcttgaagagccacactctca

SEQ ID NO: 455157 - DNA, 33 bp, Homo sapien
cagaagacacagagaactgagagcaaaacctgg

SEQ ID NO: 455158 - DNA, 33 bp, Homo sapien
cagaagacacagagaagtgagagcaaaacctgg

SEQ ID NO: 455159 - DNA, 33 bp, Homo sapien
tctctgtgataattataaggtatttgaagcaag

SEQ ID NO: 455160 - DNA, 33 bp, Homo sapien
tctctgtgataattatgaggtatttgaagcaag

SEQ ID NO: 455161 - DNA, 33 bp, Homo sapien
tgatggtttgattaggaagaaagagccattcta

SEQ ID NO: 455162 - DNA, 33 bp, Homo sapien
tgatggtttgattaggtagaaagagccattcta

SEQ ID NO: 455163 - DNA, 33 bp, Homo sapien
ggctccagtttcttacacattcacttattttct

SEQ ID NO: 455164 - DNA, 33 bp, Homo sapien
ggctccagtttcttacgcattcacttattttct

SEQ ID NO: 455165 - DNA, 33 bp, Homo sapien
ctcagtttgaagaaaacagctgtctacccactc

SEQ ID NO: 455166 - DNA, 33 bp, Homo sapien
ctcagtttgaagaaaatagctgtctacccactc

SEQ ID NO: 455167 - DNA, 33 bp, Homo sapien
tgagggggagggattacatgagctttgaagtta

SEQ ID NO: 455168 - DNA, 33 bp, Homo sapien
tgagggggagggattatatgagctttgaagtta

SEQ ID NO: 455169 - DNA, 33 bp, Homo sapien
atctgtcttttgaaaacgaaagctcttatcttt

SEQ ID NO: 455170 - DNA, 33 bp, Homo sapien
atctgtcttttgaaaatgaaagctcttatcttt

SEQ ID NO: 455171 - DNA, 33 bp, Homo sapien
tatctctgctatggaccggtttgtggtatgagt

SEQ ID NO: 455172 - DNA, 33 bp, Homo sapien
tatctctgctatggactggtttgtggtatgagt

SEQ ID NO: 455173 - DNA, 33 bp, Homo sapien
tgactctccttttctaactgaaacctgtagtag

SEQ ID NO: 455174 - DNA, 33 bp, Homo sapien
tgactctccttttctacctgaaacctgtagtag

SEQ ID NO: 455175 - DNA, 33 bp, Homo sapien
tacctagaatgaagacacgtgaagaactgtttt

SEQ ID NO: 455176 - DNA, 33 bp, Homo sapien
tacctagaatgaagacgcgtgaagaactgtttt

SEQ ID NO: 455177 - DNA, 33 bp, Homo sapien
cattgttatactcatacgcgcaaccagccaaca

SEQ ID NO: 455178 - DNA, 33 bp, Homo sapien
cattgttatactcatatgcgcaaccagccaaca

SEQ ID NO: 455179 - DNA, 33 bp, Homo sapien
ctaaaagctaacttaactctttgttgagggctc

SEQ ID NO: 455180 - DNA, 33 bp, Homo sapien
ctaaaagctaacttaagtctttgttgagggctc

SEQ ID NO: 455181 - DNA, 33 bp, Homo sapien
ccatcaaccattgtaactctgccttgagaaatt

SEQ ID NO: 455182 - DNA, 33 bp, Homo sapien
ccatcaaccattgtaattctgccttgagaaatt

SEQ ID NO: 455183 - DNA, 33 bp, Homo sapien
atgttgagtctaagtacgtgattcacagtctca

SEQ ID NO: 455184 - DNA, 33 bp, Homo sapien
atgttgagtctaagtatgtgattcacagtctca

SEQ ID NO: 455185 - DNA, 33 bp, Homo sapien
aagtgttaattttacagccactgtcttcaggag

SEQ ID NO: 455186 - DNA, 33 bp, Homo sapien
aagtgttaattttacatccactgtcttcaggag

SEQ ID NO: 455187 - DNA, 33 bp, Homo sapien
aacgagagattcctgaagattgcagtcaataaa

SEQ ID NO: 455188 - DNA, 33 bp, Homo sapien
aacgagagattcctgaggattgcagtcaataaa

SEQ ID NO: 455189 - DNA, 33 bp, Homo sapien
aaatgtgagaaggtcacgagatttggaaggggc

SEQ ID NO: 455190 - DNA, 33 bp, Homo sapien
aaatgtgagaaggtcatgagatttggaaggggc

SEQ ID NO: 455191 - DNA, 33 bp, Homo sapien
gggaggttcagtaaaaagattaacaattctgca

SEQ ID NO: 455192 - DNA, 33 bp, Homo sapien
gggaggttcagtaaaaggattaacaattctgca

SEQ ID NO: 455193 - DNA, 33 bp, Homo sapien
tgcatttgggattcagaacctctccagtgggct

SEQ ID NO: 455194 - DNA, 33 bp, Homo sapien
tgcatttgggattcaggacctctccagtgggct

SEQ ID NO: 455195 - DNA, 33 bp, Homo sapien
gggtcaacatctcttccattggtggattccaga

SEQ ID NO: 455196 - DNA, 33 bp, Homo sapien
gggtcaacatctcttcgattggtggattccaga

SEQ ID NO: 455197 - DNA, 33 bp, Homo sapien
ccactgccacagggtacgaaattaagaacttca

SEQ ID NO: 455198 - DNA, 33 bp, Homo sapien
ccactgccacagggtatgaaattaagaacttca

SEQ ID NO: 455199 - DNA, 33 bp, Homo sapien; identical to SEQ ID NO: 455197

SEQ ID NO: 455200 - DNA, 33 bp, Homo sapien; identical to SEQ ID NO: 455198

SEQ ID NO: 455201 - DNA, 33 bp, Homo sapien
aagtaactcttatgacagggttctatctacaga

SEQ ID NO: 455202 - DNA, 33 bp, Homo sapien
aagtaactcttatgactgggttctatctacaga

SEQ ID NO: 455203 - DNA, 33 bp, Homo sapien
agtcccatcacatagaagatatgacacttccgt

SEQ ID NO: 455204 - DNA, 33 bp, Homo sapien
agtcccatcacatagatgatatgacacttccgt

SEQ ID NO: 455205 - DNA, 33 bp, Homo sapien
gtggattgtgaaatatcacttggcttagcacct

SEQ ID NO: 455206 - DNA, 33 bp, Homo sapien
gtggattgtgaaatatgacttggcttagcacct

SEQ ID NO: 455207 - DNA, 33 bp, Homo sapien
caaccaacgcagtggacaagacctagtcatgag

SEQ ID NO: 455208 - DNA, 33 bp, Homo sapien
caaccaacgcagtggataagacctagtcatgag

SEQ ID NO: 455209 - DNA, 33 bp, Homo sapien
gttggtcacagaggtacgtcacaataccaataa

SEQ ID NO: 455210 - DNA, 33 bp, Homo sapien
gttggtcacagaggtatgtcacaataccaataa

SEQ ID NO: 455211 - DNA, 33 bp, Homo sapien
aagtatttgtatggtacgcatgaaagtcaaaat

SEQ ID NO: 455212 - DNA, 33 bp, Homo sapien
aagtatttgtatggtatgcatgaaagtcaaaat

SEQ ID NO: 455213 - DNA, 33 bp, Homo sapien
tacctggactcagccaataggagatatgttgac

SEQ ID NO: 455214 - DNA, 33 bp, Homo sapien
tacctggactcagccagtaggagatatgttgac

SEQ ID NO: 455215 - DNA, 33 bp, Homo sapien
tgaacataactcacagaagtagttgactctcat

SEQ ID NO: 455216 - DNA, 33 bp, Homo sapien
tgaacataactcacaggagtagttgactctcat

SEQ ID NO: 455217 - DNA, 33 bp, Homo sapien
aggtaaacactgtataagttcattttatcttta

SEQ ID NO: 455218 - DNA, 33 bp, Homo sapien
aggtaaacactgtataggttcattttatcttta

SEQ ID NO: 455219 - DNA, 33 bp, Homo sapien
atatctctcatgtttcaccttcaccacactatc

SEQ ID NO: 455220 - DNA, 33 bp, Homo sapien
atatctctcatgtttcgccttcaccacactatc

SEQ ID NO: 455221 - DNA, 33 bp, Homo sapien
agagccaatgttttcaagtttgtctctaagaga

SEQ ID NO: 455222 - DNA, 33 bp, Homo sapien
agagccaatgttttcaggtttgtctctaagaga

SEQ ID NO: 455223 - DNA, 33 bp, Homo sapien
taggaagccttgtcaacgctccctccaaaactt

SEQ ID NO: 455224 - DNA, 33 bp, Homo sapien
taggaagccttgtcaatgctccctccaaaactt

SEQ ID NO: 455225 - DNA, 33 bp, Homo sapien
atcactttcaggtacacgtatcaaatgtagatt

SEQ ID NO: 455226 - DNA, 33 bp, Homo sapien
atcactttcaggtacaggtatcaaatgtagatt

SEQ ID NO: 455227 - DNA, 33 bp, Homo sapien
tattaactgtacactacactatagacttaattt

SEQ ID NO: 455228 - DNA, 33 bp, Homo sapien
tattaactgtacactagactatagacttaattt

SEQ ID NO: 455229 - DNA, 33 bp, Homo sapien
agcagtccaagctccacctgggaagctcgagct

SEQ ID NO: 455230 - DNA, 33 bp, Homo sapien
agcagtccaagctccatctgggaagctcgagct

SEQ ID NO: 455231 - DNA, 33 bp, Homo sapien
gtaaaattgtgaaatacaacgtggtcaagcaca

SEQ ID NO: 455232 - DNA, 33 bp, Homo sapien
gtaaaattgtgaaatataacgtggtcaagcaca

SEQ ID NO: 455233 - DNA, 33 bp, Homo sapien
caaggtaaaagaagagactcacatcaaatagtt

SEQ ID NO: 455234 - DNA, 33 bp, Homo sapien
caaggtaaaagaagagtctcacatcaaatagtt

SEQ ID NO: 455235 - DNA, 33 bp, Homo sapien
aacctgcatttaaaaacacctggcaaagttcca

SEQ ID NO: 455236 - DNA, 33 bp, Homo sapien
aacctgcatttaaaaatacctggcaaagttcca

SEQ ID NO: 455237 - DNA, 33 bp, Homo sapien
gggcagaaccaagacactgactaagtgctgggt

SEQ ID NO: 455238 - DNA, 33 bp, Homo sapien
gggcagaaccaagacattgactaagtgctgggt

SEQ ID NO: 455239 - DNA, 33 bp, Homo sapien
atacttttgccttagcacttttcacagagggca

SEQ ID NO: 455240 - DNA, 33 bp, Homo sapien
atacttttgccttagcgcttttcacagagggca

SEQ ID NO: 455241 - DNA, 33 bp, Homo sapien
ttgcatgagagccacaatccagcttgagatttt

SEQ ID NO: 455242 - DNA, 33 bp, Homo sapien
ttgcatgagagccacagtccagcttgagatttt

SEQ ID NO: 455243 - DNA, 33 bp, Homo sapien
tggggcccaggtaaaagaaaaatatcacattac

SEQ ID NO: 455244 - DNA, 33 bp, Homo sapien
tggggcccaggtaaaataaaaatatcacattac

SEQ ID NO: 455245 - DNA, 33 bp, Homo sapien
agtgtatagttggctaagcctcaattttgtttc

SEQ ID NO: 455246 - DNA, 33 bp, Homo sapien
agtgtatagttggctacgcctcaattttgtttc

SEQ ID NO: 455247 - DNA, 33 bp, Homo sapien
tgacattcccaaatgccagttttccctaattca

SEQ ID NO: 455248 - DNA, 33 bp, Homo sapien
tgacattcccaaatgcgagttttccctaattca

SEQ ID NO: 455249 - DNA, 33 bp, Homo sapien
ctgtcacaatctttacaatgtagctttatcccg

SEQ ID NO: 455250 - DNA, 33 bp, Homo sapien
ctgtcacaatctttacgatgtagctttatcccg

SEQ ID NO: 455251 - DNA, 33 bp, Homo sapien
ttcttcctagttatcaatcacttgctacacttg

SEQ ID NO: 455252 - DNA, 33 bp, Homo sapien
ttcttcctagttatcattcacttgctacacttg

SEQ ID NO: 455253 - DNA, 33 bp, Homo sapien
atcctattatactgtaatacaacattgaacttt

SEQ ID NO: 455254 - DNA, 33 bp, Homo sapien
atcctattatactgtattacaacattgaacttt

SEQ ID NO: 455255 - DNA, 33 bp, Homo sapien
agctcattcaagcaacactttctccagttagat

SEQ ID NO: 455256 - DNA, 33 bp, Homo sapien
agctcattcaagcaacgctttctccagttagat

SEQ ID NO: 455257 - DNA, 33 bp, Homo sapien
ataacgttagttgggaatcaagcaacagaaaat

SEQ ID NO: 455258 - DNA, 33 bp, Homo sapien
ataacgttagttgggactcaagcaacagaaaat

SEQ ID NO: 455259 - DNA, 33 bp, Homo sapien
caaaaatgactcagaaaaatagctactggatag

SEQ ID NO: 455260 - DNA, 33 bp, Homo sapien
caaaaatgactcagaagaatagctactggatag

SEQ ID NO: 455261 - DNA, 33 bp, Homo sapien
aagataatgataagaacgatgactaatcttaac

SEQ ID NO: 455262 - DNA, 33 bp, Homo sapien
aagataatgataagaatgatgactaatcttaac

SEQ ID NO: 455263 - DNA, 33 bp, Homo sapien
gctggtttggtgagagacaaaattaaaagaacc

SEQ ID NO: 455264 - DNA, 33 bp, Homo sapien
gctggtttggtgagaggcaaaattaaaagaacc

SEQ ID NO: 455265 - DNA, 33 bp, Homo sapien
ctgaaatgctaagctgaaactagagtctaacat

SEQ ID NO: 455266 - DNA, 33 bp, Homo sapien
ctgaaatgctaagctggaactagagtctaacat

SEQ ID NO: 455267 - DNA, 33 bp, Homo sapien
ctttggagacctatacacagatgaatattatgt

SEQ ID NO: 455268 - DNA, 33 bp, Homo sapien
ctttggagacctatacgcagatgaatattatgt

SEQ ID NO: 455269 - DNA, 33 bp, Homo sapien
tgggtgctgctcctagcaatatgtcacaatttc

SEQ ID NO: 455270 - DNA, 33 bp, Homo sapien
tgggtgctgctcctagtaatatgtcacaatttc

SEQ ID NO: 455271 - DNA, 33 bp, Homo sapien
gaacccaccaataggaaagatgttgaccctcat

SEQ ID NO: 455272 - DNA, 33 bp, Homo sapien
gaacccaccaataggagagatgttgaccctcat

SEQ ID NO: 455273 - DNA, 33 bp, Homo sapien
tcagatgagattgtaacacgtgtgtgcacatcc

SEQ ID NO: 455274 - DNA, 33 bp, Homo sapien
tcagatgagattgtaatacgtgtgtgcacatcc

SEQ ID NO: 455275 - DNA, 33 bp, Homo sapien
cagataaaaacatgacacatccatggacccagc

SEQ ID NO: 455276 - DNA, 33 bp, Homo sapien
cagataaaaacatgacgcatccatggacccagc

SEQ ID NO: 455277 - DNA, 33 bp, Homo sapien
gaagagagtcacaccacgtaggtgctaagccaa

SEQ ID NO: 455278 - DNA, 33 bp, Homo sapien
gaagagagtcacaccatgtaggtgctaagccaa

SEQ ID NO: 455279 - DNA, 33 bp, Homo sapien
tcaaagaagattatgacgtatcttcagccccaa

SEQ ID NO: 455280 - DNA, 33 bp, Homo sapien
tcaaagaagattatgatgtatcttcagccccaa

SEQ ID NO: 455281 - DNA, 33 bp, Homo sapien
caagagctttataccacatacaagtgcatggta

SEQ ID NO: 455282 - DNA, 33 bp, Homo sapien
caagagctttataccatatacaagtgcatggta

SEQ ID NO: 455283 - DNA, 33 bp, Homo sapien
agacacaagacctcaccaatgggctgtttccag

SEQ ID NO: 455284 - DNA, 33 bp, Homo sapien
agacacaagacctcactaatgggctgtttccag

SEQ ID NO: 455285 - DNA, 33 bp, Homo sapien
aggtataagagtcaacacttcctatattttggg

SEQ ID NO: 455286 - DNA, 33 bp, Homo sapien
aggtataagagtcaacgcttcctatattttggg

SEQ ID NO: 455287 - DNA, 33 bp, Homo sapien
cttcagatttctaccaacacgttttcttcttaa

SEQ ID NO: 455288 - DNA, 33 bp, Homo sapien
cttcagatttctaccatcacgttttcttcttaa

SEQ ID NO: 455289 - DNA, 33 bp, Homo sapien
gctgcaaacaacctagaagtgcaaatgtttctt

SEQ ID NO: 455290 - DNA, 33 bp, Homo sapien
gctgcaaacaacctaggagtgcaaatgtttctt

SEQ ID NO: 455291 - DNA, 33 bp, Homo sapien
ctcctgttgtctgacaaaataagaaggagacag

SEQ ID NO: 455292 - DNA, 33 bp, Homo sapien
ctcctgttgtctgacagaataagaaggagacag

SEQ ID NO: 455293 - DNA, 33 bp, Homo sapien
atctgattgtctgaacagcaatgtgtctccaag

SEQ ID NO: 455294 - DNA, 33 bp, Homo sapien
atctgattgtctgaacggcaatgtgtctccaag

SEQ ID NO: 455295 - DNA, 33 bp, Homo sapien
ctgtggatttcaggcacgttaaagtatattcac

SEQ ID NO: 455296 - DNA, 33 bp, Homo sapien
ctgtggatttcaggcatgttaaagtatattcac

SEQ ID NO: 455297 - DNA, 33 bp, Homo sapien
ttctgctcacacaaaaaatagtggcccagcaca

SEQ ID NO: 455298 - DNA, 33 bp, Homo sapien
ttctgctcacacaaaagatagtggcccagcaca

SEQ ID NO: 455299 - DNA, 33 bp, Homo sapien
ggttacctgactcttaccttattcctgagcctt

SEQ ID NO: 455300 - DNA, 33 bp, Homo sapien
ggttacctgactcttatcttattcctgagcctt

SEQ ID NO: 455301 - DNA, 33 bp, Homo sapien
aggttcagaacctcaaaattggctgggttcatg

SEQ ID NO: 455302 - DNA, 33 bp, Homo sapien
aggttcagaacctcaacattggctgggttcatg

SEQ ID NO: 455303 - DNA, 33 bp, Homo sapien
tgcctggtcccttctagcggggaatattgtaca

SEQ ID NO: 455304 - DNA, 33 bp, Homo sapien
tgcctggtcccttctatcggggaatattgtaca

SEQ ID NO: 455305 - DNA, 33 bp, Homo sapien
agccgctgcgctcggccgaattagattttttaa

SEQ ID NO: 455306 - DNA, 33 bp, Homo sapien
agccgctgcgctcggctgaattagattttttaa

SEQ ID NO: 455307 - DNA, 33 bp, Homo sapien
cacaacgaaagacacacatacatttcccaagtg

SEQ ID NO: 455308 - DNA, 33 bp, Homo sapien
cacaacgaaagacacatatacatttcccaagtg

SEQ ID NO: 455309 - DNA, 33 bp, Homo sapien
gcatgaggtaattcataaaaatggcttgctatt

SEQ ID NO: 455310 - DNA, 33 bp, Homo sapien
gcatgaggtaattcatgaaaatggcttgctatt

SEQ ID NO: 455311 - DNA, 33 bp, Homo sapien
cacagctataagctacacatgtattcttagcaa

SEQ ID NO: 455312 - DNA, 33 bp, Homo sapien
cacagctataagctacgcatgtattcttagcaa

SEQ ID NO: 455313 - DNA, 33 bp, Homo sapien
agtcactagaggtcaacggagtcaatgatgtag

SEQ ID NO: 455314 - DNA, 33 bp, Homo sapien
agtcactagaggtcaatggagtcaatgatgtag

SEQ ID NO: 455315 - DNA, 33 bp, Homo sapien
atatcactggtcacagcatgcaggtaatttaac

SEQ ID NO: 455316 - DNA, 33 bp, Homo sapien
atatcactggtcacagtatgcaggtaatttaac

SEQ ID NO: 455317 - DNA, 33 bp, Homo sapien
gcttgacccaggtatacgtcacaatctcccctg

SEQ ID NO: 455318 - DNA, 33 bp, Homo sapien
gcttgacccaggtatatgtcacaatctcccctg

SEQ ID NO: 455319 - DNA, 33 bp, Homo sapien
tgattgtacctgtgccactaagtccacatatga

SEQ ID NO: 455320 - DNA, 33 bp, Homo sapien
tgattgtacctgtgccgctaagtccacatatga

SEQ ID NO: 455321 - DNA, 33 bp, Homo sapien
aagacctggcaatataccataatttccactgtg

SEQ ID NO: 455322 - DNA, 33 bp, Homo sapien
aagacctggcaatatatcataatttccactgtg

SEQ ID NO: 455323 - DNA, 33 bp, Homo sapien
gctggacgcagatatacgtggaaatcttcctgt

SEQ ID NO: 455324 - DNA, 33 bp, Homo sapien
gctggacgcagatatatgtggaaatcttcctgt

SEQ ID NO: 455325 - DNA, 33 bp, Homo sapien
cttacgtgtaaagaaacagagatgtggaaaaaa

SEQ ID NO: 455326 - DNA, 33 bp, Homo sapien
cttacgtgtaaagaaagagagatgtggaaaaaa

SEQ ID NO: 455327 - DNA, 33 bp, Homo sapien
tccattaataaggacacatttcagtacatttaa

SEQ ID NO: 455328 - DNA, 33 bp, Homo sapien
tccattaataaggacagatttcagtacatttaa

SEQ ID NO: 455329 - DNA, 33 bp, Homo sapien
aaaattccttctgacccattattgttttttcct

SEQ ID NO: 455330 - DNA, 33 bp, Homo sapien
aaaattccttctgaccgattattgttttttcct

SEQ ID NO: 455331 - DNA, 33 bp, Homo sapien
gggcacccggccatataagctgtcagtcagtcc

SEQ ID NO: 455332 - DNA, 33 bp, Homo sapien
gggcacccggccatatgagctgtcagtcagtcc

SEQ ID NO: 455333 - DNA, 33 bp, Homo sapien
attaaaaaataccaaacttctcatcaaaaccca

SEQ ID NO: 455334 - DNA, 33 bp, Homo sapien
attaaaaaataccaaagttctcatcaaaaccca

SEQ ID NO: 455335 - DNA, 33 bp, Homo sapien
ggtaagtactagggaaacttcataagtcatgag

SEQ ID NO: 455336 - DNA, 33 bp, Homo sapien
ggtaagtactagggaagcttcataagtcatgag

SEQ ID NO: 455337 - DNA, 33 bp, Homo sapien
aatctctacatacaataaagtacccaaaaatat

SEQ ID NO: 455338 - DNA, 33 bp, Homo sapien
aatctctacatacaatgaagtacccaaaaatat

SEQ ID NO: 455339 - DNA, 33 bp, Homo sapien
aattatatctgctgaacgatttggtgaccgaaa

SEQ ID NO: 455340 - DNA, 33 bp, Homo sapien
aattatatctgctgaatgatttggtgaccgaaa

SEQ ID NO: 455341 - DNA, 33 bp, Homo sapien
cctctaacctcaactacgcctcagtgtctgttg

SEQ ID NO: 455342 - DNA, 33 bp, Homo sapien
cctctaacctcaactatgcctcagtgtctgttg

SEQ ID NO: 455343 - DNA, 33 bp, Homo sapien
gatctaaataagacccccaaatagagtgaatct

SEQ ID NO: 455344 - DNA, 33 bp, Homo sapien
gatctaaataagaccctcaaatagagtgaatct

SEQ ID NO: 455345 - DNA, 33 bp, Homo sapien
acactgggagttggtactaagtgtttgataatt

SEQ ID NO: 455346 - DNA, 33 bp, Homo sapien
acactgggagttggtattaagtgtttgataatt

SEQ ID NO: 455347 - DNA, 33 bp, Homo sapien
gttattagccttctaaagtagacacagatttgt

SEQ ID NO: 455348 - DNA, 33 bp, Homo sapien
gttattagccttctaaggtagacacagatttgt

SEQ ID NO: 455349 - DNA, 33 bp, Homo sapien
gaagtagtgtacatcacacctgataagtagttt

SEQ ID NO: 455350 - DNA, 33 bp, Homo sapien
gaagtagtgtacatcatacctgataagtagttt

SEQ ID NO: 455351 - DNA, 33 bp, Homo sapien
ttccttttggaaggagaatcaaagtgttccatg

SEQ ID NO: 455352 - DNA, 33 bp, Homo sapien
ttccttttggaaggaggatcaaagtgttccatg

SEQ ID NO: 455353 - DNA, 33 bp, Homo sapien
ggggaataaatgataacgagatagcccaaaacc

SEQ ID NO: 455354 - DNA, 33 bp, Homo sapien
ggggaataaatgataatgagatagcccaaaacc

SEQ ID NO: 455355 - DNA, 33 bp, Homo sapien
caccatgaggtatgaccgacagctccctagcca

SEQ ID NO: 455356 - DNA, 33 bp, Homo sapien
caccatgaggtatgactgacagctccctagcca

SEQ ID NO: 455357 - DNA, 33 bp, Homo sapien
agcaagagcctggagacatggggtgactggaga

SEQ ID NO: 455358 - DNA, 33 bp, Homo sapien
agcaagagcctggagagatggggtgactggaga

SEQ ID NO: 455359 - DNA, 33 bp, Homo sapien
gcctcagacatttgtaccaccgttagtcctgcc

SEQ ID NO: 455360 - DNA, 33 bp, Homo sapien
gcctcagacatttgtagcaccgttagtcctgcc

SEQ ID NO: 455361 - DNA, 33 bp, Homo sapien
gcctgcaatttggccaggttagattatgtgtca

SEQ ID NO: 455362 - DNA, 33 bp, Homo sapien
gcctgcaatttggccatgttagattatgtgtca

SEQ ID NO: 455363 - DNA, 33 bp, Homo sapien
gatagagatgaaatgcagatcccaatacatgta

SEQ ID NO: 455364 - DNA, 33 bp, Homo sapien
gatagagatgaaatgcggatcccaatacatgta

SEQ ID NO: 455365 - DNA, 33 bp, Homo sapien; identical to SEQ ID NO: 455363

SEQ ID NO: 455366 - DNA, 33 bp, Homo sapien; identical to SEQ ID NO: 455364

SEQ ID NO: 455367 - DNA, 33 bp, Homo sapien
tcttatacatttactcaaagtgatcaaactgta

SEQ ID NO: 455368 - DNA, 33 bp, Homo sapien
tcttatacatttactcgaagtgatcaaactgta

SEQ ID NO: 455369 - DNA, 33 bp, Homo sapien
ctcctcattatacttacgtctcaaccactcctt

SEQ ID NO: 455370 - DNA, 33 bp, Homo sapien
ctcctcattatacttatgtctcaaccactcctt

SEQ ID NO: 455371 - DNA, 33 bp, Homo sapien
accaaccaccatcacaggaagccatcagtgcct

SEQ ID NO: 455372 - DNA, 33 bp, Homo sapien
accaaccaccatcacatgaagccatcagtgcct

SEQ ID NO: 455373 - DNA, 33 bp, Homo sapien
tttaaaaatatggtacacaggtatttcttgtat

SEQ ID NO: 455374 - DNA, 33 bp, Homo sapien
tttaaaaatatggtacgcaggtatttcttgtat

SEQ ID NO: 455375 - DNA, 33 bp, Homo sapien
acctcatcttccatcaacctcacctagctccct

SEQ ID NO: 455376 - DNA, 33 bp, Homo sapien
acctcatcttccatcagcctcacctagctccct

SEQ ID NO: 455377 - DNA, 33 bp, Homo sapien
agagatttgaaagacacgaaagcaaagaaaaga

SEQ ID NO: 455378 - DNA, 33 bp, Homo sapien
agagatttgaaagacatgaaagcaaagaaaaga

SEQ ID NO: 455379 - DNA, 33 bp, Homo sapien
tgaaaccaatagaaagacctttgtaataagcca

SEQ ID NO: 455380 - DNA, 33 bp, Homo sapien
tgaaaccaatagaaagtcctttgtaataagcca

SEQ ID NO: 455381 - DNA, 33 bp, Homo sapien
ttcataaactatgacacctgagcgaaaatgact

SEQ ID NO: 455382 - DNA, 33 bp, Homo sapien
ttcataaactatgacatctgagcgaaaatgact

SEQ ID NO: 455383 - DNA, 33 bp, Homo sapien
tcagggaggacttacaagacatggaagctgatt

SEQ ID NO: 455384 - DNA, 33 bp, Homo sapien
tcagggaggacttacaggacatggaagctgatt

SEQ ID NO: 455385 - DNA, 33 bp, Homo sapien
ttcaaccttcatggaacgggagcatataatata

SEQ ID NO: 455386 - DNA, 33 bp, Homo sapien
ttcaaccttcatggaatgggagcatataatata

SEQ ID NO: 455387 - DNA, 33 bp, Homo sapien; identical to SEQ ID NO: 455385

SEQ ID NO: 455388 - DNA, 33 bp, Homo sapien; identical to SEQ ID NO: 455386

SEQ ID NO: 455389 - DNA, 33 bp, Homo sapien
tctaacctttaagatacgtctcactttctccaa

SEQ ID NO: 455390 - DNA, 33 bp, Homo sapien
tctaacctttaagatatgtctcactttctccaa

SEQ ID NO: 455391 - DNA, 33 bp, Homo sapien; identical to SEQ ID NO: 455389

SEQ ID NO: 455392 - DNA, 33 bp, Homo sapien; identical to SEQ ID NO: 455390

SEQ ID NO: 455393 - DNA, 33 bp, Homo sapien
tatgcctgctcttaaaattattcccaaattacc

SEQ ID NO: 455394 - DNA, 33 bp, Homo sapien
tatgcctgctcttaaagttattcccaaattacc

SEQ ID NO: 455395 - DNA, 33 bp, Homo sapien
gaacattctaggcagaactttggtctaaatgca

SEQ ID NO: 455396 - DNA, 33 bp, Homo sapien
gaacattctaggcagagctttggtctaaatgca

SEQ ID NO: 455397 - DNA, 33 bp, Homo sapien; identical to SEQ ID NO: 455395

SEQ ID NO: 455398 - DNA, 33 bp, Homo sapien; identical to SEQ ID NO: 455396

SEQ ID NO: 455399 - DNA, 33 bp, Homo sapien
ctgctatggccctccaatgatggaaccaggctg

SEQ ID NO: 455400 - DNA, 33 bp, Homo sapien
ctgctatggccctccagtgatggaaccaggctg

SEQ ID NO: 455401 - DNA, 33 bp, Homo sapien
gctgcctctcagaatacccatttgctctctggc

SEQ ID NO: 455402 - DNA, 33 bp, Homo sapien
gctgcctctcagaatatccatttgctctctggc

SEQ ID NO: 455403 - DNA, 33 bp, Homo sapien
ccaaaaggatccccacaagatgttctggccctc

SEQ ID NO: 455404 - DNA, 33 bp, Homo sapien
ccaaaaggatccccacgagatgttctggccctc

SEQ ID NO: 455405 - DNA, 33 bp, Homo sapien
ggtggcagagagaacccaaacctccccaagccc

SEQ ID NO: 455406 - DNA, 33 bp, Homo sapien
ggtggcagagagaacctaaacctccccaagccc

SEQ ID NO: 455407 - DNA, 33 bp, Homo sapien
ctcaggagcttcagcaagtctttcgtggaagga

SEQ ID NO: 455408 - DNA, 33 bp, Homo sapien
ctcaggagcttcagcacgtctttcgtggaagga

SEQ ID NO: 455409 - DNA, 33 bp, Homo sapien
aaggaaaagcaatcccagaggtcatttctgttt

SEQ ID NO: 455410 - DNA, 33 bp, Homo sapien
aaggaaaagcaatcccggaggtcatttctgttt

SEQ ID NO: 455411 - DNA, 33 bp, Homo sapien
cctgccatgaagcctcaagaactattaatcatg

SEQ ID NO: 455412 - DNA, 33 bp, Homo sapien
cctgccatgaagcctcgagaactattaatcatg

SEQ ID NO: 455413 - DNA, 33 bp, Homo sapien
catgccatgtaccgaactggggctaaaataaaa

SEQ ID NO: 455414 - DNA, 33 bp, Homo sapien
catgccatgtaccgaattggggctaaaataaaa

SEQ ID NO: 455415 - DNA, 33 bp, Homo sapien
attttagaggattctacgttgtcatgtattaaa

SEQ ID NO: 455416 - DNA, 33 bp, Homo sapien
attttagaggattctatgttgtcatgtattaaa

SEQ ID NO: 455417 - DNA, 33 bp, Homo sapien
actgtgagctatatccacaagtgagactcagaa

SEQ ID NO: 455418 - DNA, 33 bp, Homo sapien
actgtgagctatatcctcaagtgagactcagaa

SEQ ID NO: 455419 - DNA, 33 bp, Homo sapien; identical to SEQ ID NO: 455417

SEQ ID NO: 455420 - DNA, 33 bp, Homo sapien; identical to SEQ ID NO: 455418

SEQ ID NO: 455421 - DNA, 33 bp, Homo sapien
tgtgacattaccacaaataggaaacagaagacc

SEQ ID NO: 455422 - DNA, 33 bp, Homo sapien
tgtgacattaccacaagtaggaaacagaagacc

SEQ ID NO: 455423 - DNA, 33 bp, Homo sapien
aagcaatatttcacaactaactctgtttacatg

SEQ ID NO: 455424 - DNA, 33 bp, Homo sapien
aagcaatatttcacaattaactctgtttacatg

SEQ ID NO: 455425 - DNA, 33 bp, Homo sapien
atgtgactctgctgcccgagttctgtcaaagga

SEQ ID NO: 455426 - DNA, 33 bp, Homo sapien
atgtgactctgctgcctgagttctgtcaaagga

SEQ ID NO: 455427 - DNA, 33 bp, Homo sapien
ttgctgggttcaggtaggattgtcatcattgca

SEQ ID NO: 455428 - DNA, 33 bp, Homo sapien
ttgctgggttcaggtatgattgtcatcattgca

SEQ ID NO: 455429 - DNA, 33 bp, Homo sapien
gggctcatcacctaagaaatgttattgttctcg

SEQ ID NO: 455430 - DNA, 33 bp, Homo sapien
gggctcatcacctaagtaatgttattgttctcg

SEQ ID NO: 455431 - DNA, 33 bp, Homo sapien
gcaattcccactgttcacaggacttagcaaaag

SEQ ID NO: 455432 - DNA, 33 bp, Homo sapien
gcaattcccactgttcgcaggacttagcaaaag

SEQ ID NO: 455433 - DNA, 33 bp, Homo sapien
cttactgtgaactggacgtgcatatgagggtca

SEQ ID NO: 455434 - DNA, 33 bp, Homo sapien
cttactgtgaactggatgtgcatatgagggtca

SEQ ID NO: 455435 - DNA, 33 bp, Homo sapien
tgaggcataccatagaaagccctcgagtggcac

SEQ ID NO: 455436 - DNA, 33 bp, Homo sapien
tgaggcataccatagacagccctcgagtggcac

SEQ ID NO: 455437 - DNA, 33 bp, Homo sapien; identical to SEQ ID NO: 455435

SEQ ID NO: 455438 - DNA, 33 bp, Homo sapien; identical to SEQ ID NO: 455436

SEQ ID NO: 455439 - DNA, 33 bp, Homo sapien
ataggaatgattttgacgctcttagttagactt

SEQ ID NO: 455440 - DNA, 33 bp, Homo sapien
ataggaatgattttgatgctcttagttagactt

SEQ ID NO: 455441 - DNA, 33 bp, Homo sapien
acttggacccaactcaaatgaggtctcttggct

SEQ ID NO: 455442 - DNA, 33 bp, Homo sapien
acttggacccaactcagatgaggtctcttggct

SEQ ID NO: 455443 - DNA, 33 bp, Homo sapien
ctctcaatattacacaaaagctttataggataa

SEQ ID NO: 455444 - DNA, 33 bp, Homo sapien
ctctcaatattacacagaagctttataggataa

SEQ ID NO: 455445 - DNA, 33 bp, Homo sapien
ttactttatccattgcactaagcctaaaataaa

SEQ ID NO: 455446 - DNA, 33 bp, Homo sapien
ttactttatccattgcgctaagcctaaaataaa

SEQ ID NO: 455447 - DNA, 33 bp, Homo sapien
ggttatagaaagttaccactcacatatcacata

SEQ ID NO: 455448 - DNA, 33 bp, Homo sapien
ggttatagaaagttacgactcacatatcacata

SEQ ID NO: 455449 - DNA, 33 bp, Homo sapien
agaatgaccatacagaaattgactcatacctat

SEQ ID NO: 455450 - DNA, 33 bp, Homo sapien
agaatgaccatacagagattgactcatacctat

SEQ ID NO: 455451 - DNA, 33 bp, Homo sapien
ctggtccttgccaataaaggtaactggaatata

SEQ ID NO: 455452 - DNA, 33 bp, Homo sapien
ctggtccttgccaatagaggtaactggaatata

SEQ ID NO: 455453 - DNA, 33 bp, Homo sapien
catgcgggagaagagactcaaaacacatggatg

SEQ ID NO: 455454 - DNA, 33 bp, Homo sapien
catgcgggagaagagagtcaaaacacatggatg

SEQ ID NO: 455455 - DNA, 33 bp, Homo sapien
aaataaaagaaagtcacataaccgaggtgagta

SEQ ID NO: 455456 - DNA, 33 bp, Homo sapien
aaataaaagaaagtcatataaccgaggtgagta

SEQ ID NO: 455457 - DNA, 33 bp, Homo sapien
agggcacaaatctgaacagagaaaaagattgat

SEQ ID NO: 455458 - DNA, 33 bp, Homo sapien
agggcacaaatctgaatagagaaaaagattgat

SEQ ID NO: 455459 - DNA, 33 bp, Homo sapien
aaatttggcaaaaacacattaaaattatacaac

SEQ ID NO: 455460 - DNA, 33 bp, Homo sapien
aaatttggcaaaaacagattaaaattatacaac

SEQ ID NO: 455461 - DNA, 33 bp, Homo sapien
tcatacctcaaaccaaccaataggagagacact

SEQ ID NO: 455462 - DNA, 33 bp, Homo sapien
tcatacctcaaaccaagcaataggagagacact

SEQ ID NO: 455463 - DNA, 33 bp, Homo sapien
tgtgtgcttggccctaatacgtcactctttgta

SEQ ID NO: 455464 - DNA, 33 bp, Homo sapien
tgtgtgcttggccctattacgtcactctttgta

SEQ ID NO: 455465 - DNA, 33 bp, Homo sapien
acctgagggctttatacggtatgcctgagagcc

SEQ ID NO: 455466 - DNA, 33 bp, Homo sapien
acctgagggctttatatggtatgcctgagagcc

SEQ ID NO: 455467 - DNA, 33 bp, Homo sapien
ttgggcaacaggtaaaatcttcgtctgttactt

SEQ ID NO: 455468 - DNA, 33 bp, Homo sapien
ttgggcaacaggtaaagtcttcgtctgttactt

SEQ ID NO: 455469 - DNA, 33 bp, Homo sapien
ttaacttctgaacccaactgacaggtgtaatga

SEQ ID NO: 455470 - DNA, 33 bp, Homo sapien
ttaacttctgaacccagctgacaggtgtaatga

SEQ ID NO: 455471 - DNA, 33 bp, Homo sapien
cagatccgatatatcactgaaatggtgagtcct

SEQ ID NO: 455472 - DNA, 33 bp, Homo sapien
cagatccgatatatcattgaaatggtgagtcct

SEQ ID NO: 455473 - DNA, 33 bp, Homo sapien
aaagagaatggttgggaagacactcacactgtc

SEQ ID NO: 455474 - DNA, 33 bp, Homo sapien
aaagagaatggttggggagacactcacactgtc

SEQ ID NO: 455475 - DNA, 33 bp, Homo sapien
ccttccaaaatacaaacattacaggagtgacac

SEQ ID NO: 455476 - DNA, 33 bp, Homo sapien
ccttccaaaatacaaagattacaggagtgacac

SEQ ID NO: 455477 - DNA, 33 bp, Homo sapien
cgtctctctgaatttaacatataagaaggaagc

SEQ ID NO: 455478 - DNA, 33 bp, Homo sapien
cgtctctctgaatttagcatataagaaggaagc

SEQ ID NO: 455479 - DNA, 33 bp, Homo sapien
ctctcttaggactataagacatatcggtgggct

SEQ ID NO: 455480 - DNA, 33 bp, Homo sapien
ctctcttaggactatatgacatatcggtgggct

SEQ ID NO: 455481 - DNA, 33 bp, Homo sapien
agggtcaaataattcaagcgctggacaaaggta

SEQ ID NO: 455482 - DNA, 33 bp, Homo sapien
agggtcaaataattcaggcgctggacaaaggta

SEQ ID NO: 455483 - DNA, 33 bp, Homo sapien
taactaaaaaactcaccacatttgaacttatgt

SEQ ID NO: 455484 - DNA, 33 bp, Homo sapien
taactaaaaaactcactacatttgaacttatgt

SEQ ID NO: 455485 - DNA, 33 bp, Homo sapien
agttagcatttttcataagttagtgctttaaga

SEQ ID NO: 455486 - DNA, 33 bp, Homo sapien
agttagcatttttcatcagttagtgctttaaga

SEQ ID NO: 455487 - DNA, 33 bp, Homo sapien
gtgaatattgacatatcagagaaaaaatttttg

SEQ ID NO: 455488 - DNA, 33 bp, Homo sapien
gtgaatattgacatatgagagaaaaaatttttg

SEQ ID NO: 455489 - DNA, 33 bp, Homo sapien
agcccttgtgatcctacagagaagtggaaaaga

SEQ ID NO: 455490 - DNA, 33 bp, Homo sapien
agcccttgtgatcctatagagaagtggaaaaga

SEQ ID NO: 455491 - DNA, 33 bp, Homo sapien
atcctctagccatcaaatcaggtttcttgctta

SEQ ID NO: 455492 - DNA, 33 bp, Homo sapien
atcctctagccatcaagtcaggtttcttgctta

SEQ ID NO: 455493 - DNA, 33 bp, Homo sapien
tgggctcaagctttaactaccatgtcagagtca

SEQ ID NO: 455494 - DNA, 33 bp, Homo sapien
tgggctcaagctttaattaccatgtcagagtca

SEQ ID NO: 455495 - DNA, 33 bp, Homo sapien
aataaaatagcactccaaagacaaaaacaactg

SEQ ID NO: 455496 - DNA, 33 bp, Homo sapien
aataaaatagcactccgaagacaaaaacaactg

SEQ ID NO: 455497 - DNA, 33 bp, Homo sapien
gctgggttgggtaaagacaatattaatatctca

SEQ ID NO: 455498 - DNA, 33 bp, Homo sapien
gctgggttgggtaaaggcaatattaatatctca

SEQ ID NO: 455499 - DNA, 33 bp, Homo sapien
tagctagtattttatcaaagatttttgcattca

SEQ ID NO: 455500 - DNA, 33 bp, Homo sapien
tagctagtattttatcgaagatttttgcattca

SEQ ID NO: 455501 - DNA, 33 bp, Homo sapien
gtagctcaattctacccgacatttaaagaattg

SEQ ID NO: 455502 - DNA, 33 bp, Homo sapien
gtagctcaattctacctgacatttaaagaattg

SEQ ID NO: 455503 - DNA, 33 bp, Homo sapien
aatggtctctgcccacaggaatattatgacata

SEQ ID NO: 455504 - DNA, 33 bp, Homo sapien
aatggtctctgcccacgggaatattatgacata

SEQ ID NO: 455505 - DNA, 33 bp, Homo sapien; identical to SEQ ID NO: 455503

SEQ ID NO: 455506 - DNA, 33 bp, Homo sapien; identical to SEQ ID NO: 455504

SEQ ID NO: 455507 - DNA, 33 bp, Homo sapien
gtgtatgtcacaattacagttgcagaacaatgt

SEQ ID NO: 455508 - DNA, 33 bp, Homo sapien
gtgtatgtcacaattatagttgcagaacaatgt

SEQ ID NO: 455509 - DNA, 33 bp, Homo sapien
tggtaccatggacccaagattatacctgtggct

SEQ ID NO: 455510 - DNA, 33 bp, Homo sapien
tggtaccatggacccatgattatacctgtggct

SEQ ID NO: 455511 - DNA, 33 bp, Homo sapien
aatgaaagaagagtcacatcacaattcccactg

SEQ ID NO: 455512 - DNA, 33 bp, Homo sapien
aatgaaagaagagtcatatcacaattcccactg

SEQ ID NO: 455513 - DNA, 33 bp, Homo sapien
tgtcttaatatctctcacaagcagaacttatga

SEQ ID NO: 455514 - DNA, 33 bp, Homo sapien
tgtcttaatatctctcgcaagcagaacttatga

SEQ ID NO: 455515 - DNA, 33 bp, Homo sapien
gccctcacaatcaaatgagcctggattacagaa

SEQ ID NO: 455516 - DNA, 33 bp, Homo sapien
gccctcacaatcaaattagcctggattacagaa

SEQ ID NO: 455517 - DNA, 33 bp, Homo sapien
accattcaacctagcaatccagttattgggtat

SEQ ID NO: 455518 - DNA, 33 bp, Homo sapien
accattcaacctagcactccagttattgggtat

SEQ ID NO: 455519 - DNA, 33 bp, Homo sapien
atcacatggggaaaaaccttggacaatacctgg

SEQ ID NO: 455520 - DNA, 33 bp, Homo sapien
atcacatggggaaaaatcttggacaatacctgg

SEQ ID NO: 455521 - DNA, 33 bp, Homo sapien
ccaaggagtttgatacgatactgggggcaacat

SEQ ID NO: 455522 - DNA, 33 bp, Homo sapien
ccaaggagtttgatactatactgggggcaacat

SEQ ID NO: 455523 - DNA, 33 bp, Homo sapien
ggcccagcaatgtcacagtaccttgagaagagg

SEQ ID NO: 455524 - DNA, 33 bp, Homo sapien
ggcccagcaatgtcacggtaccttgagaagagg

SEQ ID NO: 455525 - DNA, 33 bp, Homo sapien
gtatgcatctgctacccaccttagtgatttgac

SEQ ID NO: 455526 - DNA, 33 bp, Homo sapien
gtatgcatctgctacctaccttagtgatttgac

SEQ ID NO: 455527 - DNA, 33 bp, Homo sapien
gaaggagaaggggagacggagaaatagaaggag

SEQ ID NO: 455528 - DNA, 33 bp, Homo sapien
gaaggagaaggggagatggagaaatagaaggag

SEQ ID NO: 455529 - DNA, 33 bp, Homo sapien
acagagatcttgtgaaagtgttttggggtcaag

SEQ ID NO: 455530 - DNA, 33 bp, Homo sapien
acagagatcttgtgaacgtgttttggggtcaag

SEQ ID NO: 455531 - DNA, 33 bp, Homo sapien
aaagaatgtttatgaaaaaaagcagacagaaaa

SEQ ID NO: 455532 - DNA, 33 bp, Homo sapien
aaagaatgtttatgaagaaaagcagacagaaaa

SEQ ID NO: 455533 - DNA, 33 bp, Homo sapien
tccagtgtctactgaaattcagatgtccagtgt

SEQ ID NO: 455534 - DNA, 33 bp, Homo sapien
tccagtgtctactgaagttcagatgtccagtgt

SEQ ID NO: 455535 - DNA, 33 bp, Homo sapien
ggagtgaaagatcaagactacaaagtatccaga

SEQ ID NO: 455536 - DNA, 33 bp, Homo sapien
ggagtgaaagatcaaggctacaaagtatccaga

SEQ ID NO: 455537 - DNA, 33 bp, Homo sapien
acaaagtatccagagccataaccacaactatac

SEQ ID NO: 455538 - DNA, 33 bp, Homo sapien
acaaagtatccagagcgataaccacaactatac

SEQ ID NO: 455539 - DNA, 33 bp, Homo sapien
taaccctagaaatcgacgaagctgaattggatc

SEQ ID NO: 455540 - DNA, 33 bp, Homo sapien
taaccctagaaatcgatgaagctgaattggatc

SEQ ID NO: 455541 - DNA, 33 bp, Homo sapien
actgacaactaataaccgagtgtgcccagaatc

SEQ ID NO: 455542 - DNA, 33 bp, Homo sapien
actgacaactaataactgagtgtgcccagaatc

SEQ ID NO: 455543 - DNA, 33 bp, Homo sapien
gttctcactttttgaaatcatgtataggaaggc

SEQ ID NO: 455544 - DNA, 33 bp, Homo sapien
gttctcactttttgaagtcatgtataggaaggc

SEQ ID NO: 455545 - DNA, 33 bp, Homo sapien
aaagttttaaatcctcgatctatgtgaacaatt

SEQ ID NO: 455546 - DNA, 33 bp, Homo sapien
aaagttttaaatcctctatctatgtgaacaatt

SEQ ID NO: 455547 - DNA, 33 bp, Homo sapien
aaaaagctgaaaacacaatggcttgaatttggt

SEQ ID NO: 455548 - DNA, 33 bp, Homo sapien
aaaaagctgaaaacaccatggcttgaatttggt

SEQ ID NO: 455549 - DNA, 33 bp, Homo sapien
acctccactcaacagcaccttattctgcctgtt

SEQ ID NO: 455550 - DNA, 33 bp, Homo sapien
acctccactcaacagcgccttattctgcctgtt

SEQ ID NO: 455551 - DNA, 33 bp, Homo sapien
gtctagaattactagacgtgatatgaacacata

SEQ ID NO: 455552 - DNA, 33 bp, Homo sapien
gtctagaattactagaggtgatatgaacacata

SEQ ID NO: 455553 - DNA, 33 bp, Homo sapien
gtgggtttttttcatagtaaggagcaaccaaga

SEQ ID NO: 455554 - DNA, 33 bp, Homo sapien
gtgggtttttttcatattaaggagcaaccaaga

SEQ ID NO: 455555 - DNA, 33 bp, Homo sapien
acaaaaacaatcaaaactctcagtttaacttct

SEQ ID NO: 455556 - DNA, 33 bp, Homo sapien
acaaaaacaatcaaaagtctcagtttaacttct

SEQ ID NO: 455557 - DNA, 33 bp, Homo sapien
aagcctccagccagaaatcatctcattaacata

SEQ ID NO: 455558 - DNA, 33 bp, Homo sapien
aagcctccagccagaagtcatctcattaacata

SEQ ID NO: 455559 - DNA, 33 bp, Homo sapien
gggcacagccaaagcaaataactaacatcacct

SEQ ID NO: 455560 - DNA, 33 bp, Homo sapien
gggcacagccaaagcatataactaacatcacct

SEQ ID NO: 455561 - DNA, 33 bp, Homo sapien
cataattcaaaccataaaaatcaaagaggtaga

SEQ ID NO: 455562 - DNA, 33 bp, Homo sapien
cataattcaaaccatacaaatcaaagaggtaga

SEQ ID NO: 455563 - DNA, 33 bp, Homo sapien
ttagaatatgctaagagactgaaaaatgtcttt

SEQ ID NO: 455564 - DNA, 33 bp, Homo sapien
ttagaatatgctaagatactgaaaaatgtcttt

SEQ ID NO: 455565 - DNA, 33 bp, Homo sapien
ttgagaagggaacagcaaagagaagagagtcac

SEQ ID NO: 455566 - DNA, 33 bp, Homo sapien
ttgagaagggaacagcgaagagaagagagtcac

SEQ ID NO: 455567 - DNA, 33 bp, Homo sapien
tgtgatgtatctctgcaaccataaactagatta

SEQ ID NO: 455568 - DNA, 33 bp, Homo sapien
tgtgatgtatctctgcgaccataaactagatta

SEQ ID NO: 455569 - DNA, 33 bp, Homo sapien
gctaagcagtcaaagacagttacaccacctgct

SEQ ID NO: 455570 - DNA, 33 bp, Homo sapien
gctaagcagtcaaagagagttacaccacctgct

SEQ ID NO: 455571 - DNA, 33 bp, Homo sapien; identical to SEQ ID NO: 455569

SEQ ID NO: 455572 - DNA, 33 bp, Homo sapien; identical to SEQ ID NO: 455570

SEQ ID NO: 455573 - DNA, 33 bp, Homo sapien
ggtacttatgactcaacgaggaccttaggtcag

SEQ ID NO: 455574 - DNA, 33 bp, Homo sapien
ggtacttatgactcaatgaggaccttaggtcag

SEQ ID NO: 455575 - DNA, 33 bp, Homo sapien; identical to SEQ ID NO: 455573

SEQ ID NO: 455576 - DNA, 33 bp, Homo sapien; identical to SEQ ID NO: 455574

SEQ ID NO: 455577 - DNA, 33 bp, Homo sapien
acatcactgccacactaaataattctttactgc

SEQ ID NO: 455578 - DNA, 33 bp, Homo sapien
acatcactgccacactgaataattctttactgc

SEQ ID NO: 455579 - DNA, 33 bp, Homo sapien
cttagcttccaatttaaatgatggtattctcca

SEQ ID NO: 455580 - DNA, 33 bp, Homo sapien
cttagcttccaatttacatgatggtattctcca

SEQ ID NO: 455581 - DNA, 33 bp, Homo sapien
ggatggtggtgcctcactgagactggaatgctg

SEQ ID NO: 455582 - DNA, 33 bp, Homo sapien
ggatggtggtgcctcattgagactggaatgctg

SEQ ID NO: 455583 - DNA, 33 bp, Homo sapien; identical to SEQ ID NO: 455581

SEQ ID NO: 455584 - DNA, 33 bp, Homo sapien; identical to SEQ ID NO: 455582

SEQ ID NO: 455585 - DNA, 33 bp, Homo sapien
acttctctgcaagctaaaagtcccactctttct

SEQ ID NO: 455586 - DNA, 33 bp, Homo sapien
acttctctgcaagctagaagtcccactctttct

SEQ ID NO: 455587 - DNA, 33 bp, Homo sapien
tgagaaagtataccaacgtagacccagctatcc

SEQ ID NO: 455588 - DNA, 33 bp, Homo sapien
tgagaaagtataccaatgtagacccagctatcc

SEQ ID NO: 455589 - DNA, 33 bp, Homo sapien
ttttgcctacctctctaaactgcttgaagccac

SEQ ID NO: 455590 - DNA, 33 bp, Homo sapien
ttttgcctacctctctgaactgcttgaagccac

SEQ ID NO: 455591 - DNA, 33 bp, Homo sapien
acacacaatatataacaatcgcattagactaaa

SEQ ID NO: 455592 - DNA, 33 bp, Homo sapien
acacacaatatataacgatcgcattagactaaa

SEQ ID NO: 455593 - DNA, 33 bp, Homo sapien
ctactcagctacacagaattagaaaatcactca

SEQ ID NO: 455594 - DNA, 33 bp, Homo sapien
ctactcagctacacaggattagaaaatcactca

SEQ ID NO: 455595 - DNA, 33 bp, Homo sapien
aaaggctactcacttacacaagacaaaaccaac

SEQ ID NO: 455596 - DNA, 33 bp, Homo sapien
aaaggctactcacttagacaagacaaaaccaac

SEQ ID NO: 455597 - DNA, 33 bp, Homo sapien
cacatcttagatgaacaacaattgccacagcag

SEQ ID NO: 455598 - DNA, 33 bp, Homo sapien
cacatcttagatgaacgacaattgccacagcag

SEQ ID NO: 455599 - DNA, 33 bp, Homo sapien; identical to SEQ ID NO: 455597

SEQ ID NO: 455600 - DNA, 33 bp, Homo sapien; identical to SEQ ID NO: 455598

SEQ ID NO: 455601 - DNA, 33 bp, Homo sapien
attacctcagtagatgaagaaaaagcttttggt

SEQ ID NO: 455602 - DNA, 33 bp, Homo sapien
attacctcagtagatgcagaaaaagcttttggt

SEQ ID NO: 455603 - DNA, 33 bp, Homo sapien
cagactcctggattagaataaacctctgggtgt

SEQ ID NO: 455604 - DNA, 33 bp, Homo sapien
cagactcctggattagtataaacctctgggtgt

SEQ ID NO: 455605 - DNA, 33 bp, Homo sapien
ctatgctcatcacccaagtaatatgattccctt

SEQ ID NO: 455606 - DNA, 33 bp, Homo sapien
ctatgctcatcacccaggtaatatgattccctt

SEQ ID NO: 455607 - DNA, 33 bp, Homo sapien
tctcccatattgtataaagccctccagtgctcc

SEQ ID NO: 455608 - DNA, 33 bp, Homo sapien
tctcccatattgtatagagccctccagtgctcc

SEQ ID NO: 455609 - DNA, 33 bp, Homo sapien
cttctgcctaagccctaaatgcattgtgtgttg

SEQ ID NO: 455610 - DNA, 33 bp, Homo sapien
cttctgcctaagccctgaatgcattgtgtgttg

SEQ ID NO: 455611 - DNA, 33 bp, Homo sapien
ttccacacttgctgggaagaatgagaggcacct

SEQ ID NO: 455612 - DNA, 33 bp, Homo sapien
ttccacacttgctggggagaatgagaggcacct

SEQ ID NO: 455613 - DNA, 33 bp, Homo sapien
agaatgtgatacagtaagaagacctagctaaaa

SEQ ID NO: 455614 - DNA, 33 bp, Homo sapien
agaatgtgatacagtaggaagacctagctaaaa

SEQ ID NO: 455615 - DNA, 33 bp, Homo sapien
tgaatcttcgacatggcaagggaagagccatct

SEQ ID NO: 455616 - DNA, 33 bp, Homo sapien
tgaatcttcgacatggtaagggaagagccatct

SEQ ID NO: 455617 - DNA, 33 bp, Homo sapien
tctgagccctaacccgcaaactattcttttatg

SEQ ID NO: 455618 - DNA, 33 bp, Homo sapien
tctgagccctaacccggaaactattcttttatg

SEQ ID NO: 455619 - DNA, 33 bp, Homo sapien
atgcaggaccacaagaaatgaaaagctgtgttc

SEQ ID NO: 455620 - DNA, 33 bp, Homo sapien
atgcaggaccacaagatatgaaaagctgtgttc

SEQ ID NO: 455621 - DNA, 33 bp, Homo sapien
tttatacatcacaaagaaacaatgaggaccact

SEQ ID NO: 455622 - DNA, 33 bp, Homo sapien
tttatacatcacaaagcaacaatgaggaccact

SEQ ID NO: 455623 - DNA, 33 bp, Homo sapien
tccttccctgatttaacgaagcaaatagtctta

SEQ ID NO: 455624 - DNA, 33 bp, Homo sapien
tccttccctgatttaatgaagcaaatagtctta

SEQ ID NO: 455625 - DNA, 33 bp, Homo sapien
gataatttcatttccacgtgaggagatctttca

SEQ ID NO: 455626 - DNA, 33 bp, Homo sapien
gataatttcatttccatgtgaggagatctttca

SEQ ID NO: 455627 - DNA, 33 bp, Homo sapien
gtgaataggtctgcaacgaatgtgtgtgtgcat

SEQ ID NO: 455628 - DNA, 33 bp, Homo sapien
gtgaataggtctgcaatgaatgtgtgtgtgcat

SEQ ID NO: 455629 - DNA, 33 bp, Homo sapien
tgacaaaacagaagaggagactgacattaactg

SEQ ID NO: 455630 - DNA, 33 bp, Homo sapien
tgacaaaacagaagagtagactgacattaactg

SEQ ID NO: 455631 - DNA, 33 bp, Homo sapien
tgagcagtggatgagcaaggcttcatcaggatt

SEQ ID NO: 455632 - DNA, 33 bp, Homo sapien
tgagcagtggatgagcgaggcttcatcaggatt

SEQ ID NO: 455633 - DNA, 33 bp, Homo sapien
tgcccttttcatagaccggtgtttctgagccag

SEQ ID NO: 455634 - DNA, 33 bp, Homo sapien
tgcccttttcatagactggtgtttctgagccag

SEQ ID NO: 455635 - DNA, 33 bp, Homo sapien
ttttctgaagcagtaaacttttgtgatcctgat

SEQ ID NO: 455636 - DNA, 33 bp, Homo sapien
ttttctgaagcagtaatcttttgtgatcctgat

SEQ ID NO: 455637 - DNA, 33 bp, Homo sapien
acctcatcattgggtacctactcaaagaaaatt

SEQ ID NO: 455638 - DNA, 33 bp, Homo sapien
acctcatcattgggtatctactcaaagaaaatt

SEQ ID NO: 455639 - DNA, 33 bp, Homo sapien
gcgggaggatcacttacgttcggaaattcaaga

SEQ ID NO: 455640 - DNA, 33 bp, Homo sapien
gcgggaggatcacttatgttcggaaattcaaga

SEQ ID NO: 455641 - DNA, 33 bp, Homo sapien
ataaattttcatcaaaacatttgaaaggacaca

SEQ ID NO: 455642 - DNA, 33 bp, Homo sapien
ataaattttcatcaaagcatttgaaaggacaca

SEQ ID NO: 455643 - DNA, 33 bp, Homo sapien
tctctccagtgggcatcacattctctgtaccat

SEQ ID NO: 455644 - DNA, 33 bp, Homo sapien
tctctccagtgggcatgacattctctgtaccat

SEQ ID NO: 455645 - DNA, 33 bp, Homo sapien
cctggccaggcaaccaagtgatatgactctctg

SEQ ID NO: 455646 - DNA, 33 bp, Homo sapien
cctggccaggcaaccaggtgatatgactctctg

SEQ ID NO: 455647 - DNA, 33 bp, Homo sapien
agtcatgccgtggtaaagtttgatgcatcatgc

SEQ ID NO: 455648 - DNA, 33 bp, Homo sapien
agtcatgccgtggtaaggtttgatgcatcatgc

SEQ ID NO: 455649 - DNA, 33 bp, Homo sapien
ctacatgtacgatgcacgaagaaaagattgtag

SEQ ID NO: 455650 - DNA, 33 bp, Homo sapien
ctacatgtacgatgcatgaagaaaagattgtag

SEQ ID NO: 455651 - DNA, 33 bp, Homo sapien
tattgttatatatcacagagtctgacattaggg

SEQ ID NO: 455652 - DNA, 33 bp, Homo sapien
tattgttatatatcactgagtctgacattaggg

SEQ ID NO: 455653 - DNA, 33 bp, Homo sapien
cagaaagataaggagacacctatcacttaggcc

SEQ ID NO: 455654 - DNA, 33 bp, Homo sapien
cagaaagataaggagagacctatcacttaggcc

SEQ ID NO: 455655 - DNA, 33 bp, Homo sapien
ctgcacccttcctacacggaaagttgtggcata

SEQ ID NO: 455656 - DNA, 33 bp, Homo sapien
ctgcacccttcctacatggaaagttgtggcata

SEQ ID NO: 455657 - DNA, 33 bp, Homo sapien
tgaggaaagcaggcacagtgagtaatttaatga

SEQ ID NO: 455658 - DNA, 33 bp, Homo sapien
tgaggaaagcaggcacggtgagtaatttaatga

SEQ ID NO: 455659 - DNA, 33 bp, Homo sapien
aaaaaaggaaagaaaaatgtcatatcagctagg

SEQ ID NO: 455660 - DNA, 33 bp, Homo sapien
aaaaaaggaaagaaaagtgtcatatcagctagg

SEQ ID NO: 455661 - DNA, 33 bp, Homo sapien
ctgaccatgagggaccaaagttggaatgctaac

SEQ ID NO: 455662 - DNA, 33 bp, Homo sapien
ctgaccatgagggaccgaagttggaatgctaac

SEQ ID NO: 455663 - DNA, 33 bp, Homo sapien
agtgaaaagatgagaacgagaaaaactgaccat

SEQ ID NO: 455664 - DNA, 33 bp, Homo sapien
agtgaaaagatgagaatgagaaaaactgaccat

SEQ ID NO: 455665 - DNA, 33 bp, Homo sapien
gtaaataaagctttgccccccagtataaaagaa

SEQ ID NO: 455666 - DNA, 33 bp, Homo sapien
gtaaataaagctttgctccccagtataaaagaa

SEQ ID NO: 455667 - DNA, 33 bp, Homo sapien
agagtggacttaattaaggttgtctcaagattc

SEQ ID NO: 455668 - DNA, 33 bp, Homo sapien
agagtggacttaattacggttgtctcaagattc

SEQ ID NO: 455669 - DNA, 33 bp, Homo sapien
ggatattccacgtgtgacaaaactgttgaaatt

SEQ ID NO: 455670 - DNA, 33 bp, Homo sapien
ggatattccacgtgtggcaaaactgttgaaatt

SEQ ID NO: 455671 - DNA, 33 bp, Homo sapien
agagacatgccatcaaacctcctgtgggcaagg

SEQ ID NO: 455672 - DNA, 33 bp, Homo sapien
agagacatgccatcaagcctcctgtgggcaagg

SEQ ID NO: 455673 - DNA, 33 bp, Homo sapien
atcactggggccagcaactacgtgaagtgaccc

SEQ ID NO: 455674 - DNA, 33 bp, Homo sapien
atcactggggccagcacctacgtgaagtgaccc

SEQ ID NO: 455675 - DNA, 33 bp, Homo sapien
tcagctagggatatgtcacaattctctcctgaa

SEQ ID NO: 455676 - DNA, 33 bp, Homo sapien
tcagctagggatatgttacaattctctcctgaa

SEQ ID NO: 455677 - DNA, 33 bp, Homo sapien
tccttcctgtgaagggaattataaaatgtcata

SEQ ID NO: 455678 - DNA, 33 bp, Homo sapien
tccttcctgtgaaggggattataaaatgtcata

SEQ ID NO: 455679 - DNA, 33 bp, Homo sapien
cctaggccacctagggaagaaaaccacttagag

SEQ ID NO: 455680 - DNA, 33 bp, Homo sapien
cctaggccacctagggcagaaaaccacttagag

SEQ ID NO: 455681 - DNA, 33 bp, Homo sapien
gaaggttgtcatcacccgaaagctgttcagtaa

SEQ ID NO: 455682 - DNA, 33 bp, Homo sapien
gaaggttgtcatcaccggaaagctgttcagtaa

SEQ ID NO: 455683 - DNA, 33 bp, Homo sapien
acatagtttgctaaaccctacagtaatttgtaa

SEQ ID NO: 455684 - DNA, 33 bp, Homo sapien
acatagtttgctaaacgctacagtaatttgtaa

SEQ ID NO: 455685 - DNA, 33 bp, Homo sapien
tgattccatgaaggtgaaacccatagataaaaa

SEQ ID NO: 455686 - DNA, 33 bp, Homo sapien
tgattccatgaaggtggaacccatagataaaaa

SEQ ID NO: 455687 - DNA, 33 bp, Homo sapien
atatatagcatcaaaaatattcactcaatgtgg

SEQ ID NO: 455688 - DNA, 33 bp, Homo sapien
atatatagcatcaaaactattcactcaatgtgg

SEQ ID NO: 455689 - DNA, 33 bp, Homo sapien
atgaatgcatcagaagaaatgttctttgcagca

SEQ ID NO: 455690 - DNA, 33 bp, Homo sapien
atgaatgcatcagaagtaatgttctttgcagca

SEQ ID NO: 455691 - DNA, 33 bp, Homo sapien
aaaggttcgttgtgtacgagtgtagctttattt

SEQ ID NO: 455692 - DNA, 33 bp, Homo sapien
aaaggttcgttgtgtaggagtgtagctttattt

SEQ ID NO: 455693 - DNA, 33 bp, Homo sapien
aaactggatacacacaatcttccaaaattgagc

SEQ ID NO: 455694 - DNA, 33 bp, Homo sapien
aaactggatacacacagtcttccaaaattgagc

SEQ ID NO: 455695 - DNA, 33 bp, Homo sapien
aaatgacatggcattaaaaaagtgagaaaattg

SEQ ID NO: 455696 - DNA, 33 bp, Homo sapien
aaatgacatggcattacaaaagtgagaaaattg

SEQ ID NO: 455697 - DNA, 33 bp, Homo sapien
taaacctcaaaaatgcagaaagcaaatctatac

SEQ ID NO: 455698 - DNA, 33 bp, Homo sapien
taaacctcaaaaatgcggaaagcaaatctatac

SEQ ID NO: 455699 - DNA, 33 bp, Homo sapien
taacctcccttgtgcaacttacattcatccaca

SEQ ID NO: 455700 - DNA, 33 bp, Homo sapien
taacctcccttgtgcaccttacattcatccaca

SEQ ID NO: 455701 - DNA, 33 bp, Homo sapien
caacaaagctgacaaagagaaatacaggaataa

SEQ ID NO: 455702 - DNA, 33 bp, Homo sapien
caacaaagctgacaaatagaaatacaggaataa

SEQ ID NO: 455703 - DNA, 33 bp, Homo sapien
ctttagatgggctcaacctttaattttcatgtc

SEQ ID NO: 455704 - DNA, 33 bp, Homo sapien
ctttagatgggctcaagctttaattttcatgtc

SEQ ID NO: 455705 - DNA, 33 bp, Homo sapien
ttaaccattcctcacaccttgctacacataagg

SEQ ID NO: 455706 - DNA, 33 bp, Homo sapien
ttaaccattcctcacatcttgctacacataagg

SEQ ID NO: 455707 - DNA, 33 bp, Homo sapien
gctccgtaccaaacaaatgtgattcttcttcca

SEQ ID NO: 455708 - DNA, 33 bp, Homo sapien
gctccgtaccaaacaagtgtgattcttcttcca

SEQ ID NO: 455709 - DNA, 33 bp, Homo sapien
attcttcttccatcataagttctgctggcaagg

SEQ ID NO: 455710 - DNA, 33 bp, Homo sapien
attcttcttccatcatgagttctgctggcaagg

SEQ ID NO: 455711 - DNA, 33 bp, Homo sapien
gccacaggtacgatcacgggtccatagcagcag

SEQ ID NO: 455712 - DNA, 33 bp, Homo sapien
gccacaggtacgatcatgggtccatagcagcag

SEQ ID NO: 455713 - DNA, 33 bp, Homo sapien
ggaatttataaggtacacgtgagagtcgcaatc

SEQ ID NO: 455714 - DNA, 33 bp, Homo sapien
ggaatttataaggtacgcgtgagagtcgcaatc

SEQ ID NO: 455715 - DNA, 33 bp, Homo sapien
gtgtcacaaaaatcaccgagcagaaggcccagg

SEQ ID NO: 455716 - DNA, 33 bp, Homo sapien
gtgtcacaaaaatcactgagcagaaggcccagg

SEQ ID NO: 455717 - DNA, 33 bp, Homo sapien
aagcccaccgatgaggccataattctcatgcac

SEQ ID NO: 455718 - DNA, 33 bp, Homo sapien
aagcccaccgatgaggtcataattctcatgcac

SEQ ID NO: 455719 - DNA, 33 bp, Homo sapien
aatgcaggcagaagtagagggtttcatctccca

SEQ ID NO: 455720 - DNA, 33 bp, Homo sapien
aatgcaggcagaagtatagggtttcatctccca

SEQ ID NO: 455721 - DNA, 33 bp, Homo sapien
cgatgtcacaatgtcacctgaaggcaaaaccta

SEQ ID NO: 455722 - DNA, 33 bp, Homo sapien
cgatgtcacaatgtcatctgaaggcaaaaccta

SEQ ID NO: 455723 - DNA, 33 bp, Homo sapien
cagaactatcttgtcaggaagatgtgaaaaggt

SEQ ID NO: 455724 - DNA, 33 bp, Homo sapien
cagaactatcttgtcatgaagatgtgaaaaggt

SEQ ID NO: 455725 - DNA, 33 bp, Homo sapien
tggtgagaattctgcacggcatataagaagtcg

SEQ ID NO: 455726 - DNA, 33 bp, Homo sapien
tggtgagaattctgcatggcatataagaagtcg

SEQ ID NO: 455727 - DNA, 33 bp, Homo sapien
attgaggaacttgtacacacaaccagataacct

SEQ ID NO: 455728 - DNA, 33 bp, Homo sapien
attgaggaacttgtacgcacaaccagataacct

SEQ ID NO: 455729 - DNA, 33 bp, Homo sapien
ggatgcccccactgcactgacaatacgtagaca

SEQ ID NO: 455730 - DNA, 33 bp, Homo sapien
ggatgcccccactgcattgacaatacgtagaca

SEQ ID NO: 455731 - DNA, 33 bp, Homo sapien
gctttctcagtcctgacggggaaagccttgacc

SEQ ID NO: 455732 - DNA, 33 bp, Homo sapien
gctttctcagtcctgatggggaaagccttgacc

SEQ ID NO: 455733 - DNA, 33 bp, Homo sapien
aattacagaccagttcacataatgaatacttca

SEQ ID NO: 455734 - DNA, 33 bp, Homo sapien
aattacagaccagttcgcataatgaatacttca

SEQ ID NO: 455735 - DNA, 33 bp, Homo sapien
agcctgggtgaaaacaacaaaactccgtctcaa

SEQ ID NO: 455736 - DNA, 33 bp, Homo sapien
agcctgggtgaaaacagcaaaactccgtctcaa

SEQ ID NO: 455737 - DNA, 33 bp, Homo sapien
aaattttttttgtagcaatgcggtttttgcatg

SEQ ID NO: 455738 - DNA, 33 bp, Homo sapien
aaattttttttgtagcgatgcggtttttgcatg

SEQ ID NO: 455739 - DNA, 33 bp, Homo sapien
ttgtagtaatgtttggaattatgattatctgtt

SEQ ID NO: 455740 - DNA, 33 bp, Homo sapien
ttgtagtaatgtttggtattatgattatctgtt

SEQ ID NO: 455741 - DNA, 33 bp, Homo sapien
ctctcaagctggtttacacattgtgcctggagt

SEQ ID NO: 455742 - DNA, 33 bp, Homo sapien
ctctcaagctggtttatacattgtgcctggagt

SEQ ID NO: 455743 - DNA, 33 bp, Homo sapien
tttccattgataatgaactgcaggctcctgatt

SEQ ID NO: 455744 - DNA, 33 bp, Homo sapien
tttccattgataatgagctgcaggctcctgatt

SEQ ID NO: 455745 - DNA, 33 bp, Homo sapien
gaaatcagtataaagacgcagaaatacacagga

SEQ ID NO: 455746 - DNA, 33 bp, Homo sapien
gaaatcagtataaagatgcagaaatacacagga

SEQ ID NO: 455747 - DNA, 33 bp, Homo sapien
ggtgtggacatttacacagtgcatgagaaacct

SEQ ID NO: 455748 - DNA, 33 bp, Homo sapien
ggtgtggacatttacagagtgcatgagaaacct

SEQ ID NO: 455749 - DNA, 33 bp, Homo sapien
agaggtcatgttagtacgtgaactgactgacgg

SEQ ID NO: 455750 - DNA, 33 bp, Homo sapien
agaggtcatgttagtatgtgaactgactgacgg

SEQ ID NO: 455751 - DNA, 33 bp, Homo sapien
actcaaaatttcatcacaatagcaccccctgtc

SEQ ID NO: 455752 - DNA, 33 bp, Homo sapien
actcaaaatttcatcagaatagcaccccctgtc

SEQ ID NO: 455753 - DNA, 33 bp, Homo sapien
ctttggctgtttaatcacttctgacctaaggcc

SEQ ID NO: 455754 - DNA, 33 bp, Homo sapien
ctttggctgtttaatcgcttctgacctaaggcc

SEQ ID NO: 455755 - DNA, 33 bp, Homo sapien
gtctagtagaatgaaacgagtgatcttttagct

SEQ ID NO: 455756 - DNA, 33 bp, Homo sapien
gtctagtagaatgaaaggagtgatcttttagct

SEQ ID NO: 455757 - DNA, 33 bp, Homo sapien
tatgaatgcaaaaacactaactgtcaagcaagt

SEQ ID NO: 455758 - DNA, 33 bp, Homo sapien
tatgaatgcaaaaacattaactgtcaagcaagt

SEQ ID NO: 455759 - DNA, 33 bp, Homo sapien
gtccacagaacttttgcaggaatggatatgaat

SEQ ID NO: 455760 - DNA, 33 bp, Homo sapien
gtccacagaacttttgtaggaatggatatgaat

SEQ ID NO: 455761 - DNA, 33 bp, Homo sapien
tccatcaccatactgacgttactctcttctcct

SEQ ID NO: 455762 - DNA, 33 bp, Homo sapien
tccatcaccatactgatgttactctcttctcct

SEQ ID NO: 455763 - DNA, 33 bp, Homo sapien
tctttttctcaggctccacacatttgggtattg

SEQ ID NO: 455764 - DNA, 33 bp, Homo sapien
tctttttctcaggctctacacatttgggtattg

SEQ ID NO: 455765 - DNA, 33 bp, Homo sapien
ggttcaaggtgtgagaatcaacatagcaattgc

SEQ ID NO: 455766 - DNA, 33 bp, Homo sapien
ggttcaaggtgtgagactcaacatagcaattgc

SEQ ID NO: 455767 - DNA, 33 bp, Homo sapien
tatgaccttggcaaaacgaaaagactaaggatc

SEQ ID NO: 455768 - DNA, 33 bp, Homo sapien
tatgaccttggcaaaatgaaaagactaaggatc

SEQ ID NO: 455769 - DNA, 33 bp, Homo sapien
aaaagaacttcctgccacctgttataattgtaa

SEQ ID NO: 455770 - DNA, 33 bp, Homo sapien
aaaagaacttcctgccgcctgttataattgtaa

SEQ ID NO: 455771 - DNA, 33 bp, Homo sapien
tctgtgccttaaggaccgattcctgctgcagat

SEQ ID NO: 455772 - DNA, 33 bp, Homo sapien
tctgtgccttaaggactgattcctgctgcagat

SEQ ID NO: 455773 - DNA, 33 bp, Homo sapien
tgagactctacatataataagaactgctataat

SEQ ID NO: 455774 - DNA, 33 bp, Homo sapien
tgagactctacatatagtaagaactgctataat

SEQ ID NO: 455775 - DNA, 33 bp, Homo sapien
gagagatcaggatatacgctgtaaagttacttt

SEQ ID NO: 455776 - DNA, 33 bp, Homo sapien
gagagatcaggatatatgctgtaaagttacttt

SEQ ID NO: 455777 - DNA, 33 bp, Homo sapien
aggcattatcctcaaaacctaaagctgctctca

SEQ ID NO: 455778 - DNA, 33 bp, Homo sapien
aggcattatcctcaaagcctaaagctgctctca

SEQ ID NO: 455779 - DNA, 33 bp, Homo sapien
aggtgtttatgactcaatgaggtcctcaggtca

SEQ ID NO: 455780 - DNA, 33 bp, Homo sapien
aggtgtttatgactcagtgaggtcctcaggtca

SEQ ID NO: 455781 - DNA, 33 bp, Homo sapien
aataaatggctggtaacaaatgtggttgtcaga

SEQ ID NO: 455782 - DNA, 33 bp, Homo sapien
aataaatggctggtaataaatgtggttgtcaga

SEQ ID NO: 455783 - DNA, 33 bp, Homo sapien
atatcttgtttttaaaagacttgttggatgttt

SEQ ID NO: 455784 - DNA, 33 bp, Homo sapien
atatcttgtttttaaaggacttgttggatgttt

SEQ ID NO: 455785 - DNA, 33 bp, Homo sapien
cccatacttagaattaggtcatatgcaagaatt

SEQ ID NO: 455786 - DNA, 33 bp, Homo sapien
cccatacttagaattatgtcatatgcaagaatt

SEQ ID NO: 455787 - DNA, 33 bp, Homo sapien
ctgagtgtcacatttaaatgcagttgaaacttg

SEQ ID NO: 455788 - DNA, 33 bp, Homo sapien
ctgagtgtcacatttagatgcagttgaaacttg

SEQ ID NO: 455789 - DNA, 33 bp, Homo sapien
atgtcttctgtgtctaggtccaatcagcaaatg

SEQ ID NO: 455790 - DNA, 33 bp, Homo sapien
atgtcttctgtgtctatgtccaatcagcaaatg

SEQ ID NO: 455791 - DNA, 33 bp, Homo sapien
tggagccagcagtaggaaatgtgcatttgctga

SEQ ID NO: 455792 - DNA, 33 bp, Homo sapien
tggagccagcagtaggtaatgtgcatttgctga

SEQ ID NO: 455793 - DNA, 33 bp, Homo sapien
atgagtcaccatcacaactccgaacagaaattc

SEQ ID NO: 455794 - DNA, 33 bp, Homo sapien
atgagtcaccatcacatctccgaacagaaattc

SEQ ID NO: 455795 - DNA, 33 bp, Homo sapien
agaaggggccaggcaaaagagatgtatcacctg

SEQ ID NO: 455796 - DNA, 33 bp, Homo sapien
agaaggggccaggcaagagagatgtatcacctg

SEQ ID NO: 455797 - DNA, 33 bp, Homo sapien
agagtcacataatctaaaagctgggcctcgctg

SEQ ID NO: 455798 - DNA, 33 bp, Homo sapien
agagtcacataatctagaagctgggcctcgctg

SEQ ID NO: 455799 - DNA, 33 bp, Homo sapien
gaaactcaaagacgtaagtgactatgaagacac

SEQ ID NO: 455800 - DNA, 33 bp, Homo sapien
gaaactcaaagacgtatgtgactatgaagacac

SEQ ID NO: 455801 - DNA, 33 bp, Homo sapien
tatgtatgtatttgtaaaggctttattggaagg

SEQ ID NO: 455802 - DNA, 33 bp, Homo sapien
tatgtatgtatttgtataggctttattggaagg

SEQ ID NO: 455803 - DNA, 33 bp, Homo sapien
gacagttgtggccctaacttcccttggctaaca

SEQ ID NO: 455804 - DNA, 33 bp, Homo sapien
gacagttgtggccctaccttcccttggctaaca

SEQ ID NO: 455805 - DNA, 33 bp, Homo sapien
gttgtattactggagaaagtttttttgttgttg

SEQ ID NO: 455806 - DNA, 33 bp, Homo sapien
gttgtattactggagagagtttttttgttgttg

SEQ ID NO: 455807 - DNA, 33 bp, Homo sapien
tgaatagtagagtccacgactgtttcacctgtt

SEQ ID NO: 455808 - DNA, 33 bp, Homo sapien
tgaatagtagagtccatgactgtttcacctgtt

SEQ ID NO: 455809 - DNA, 33 bp, Homo sapien
tattattctagagccaataaatacatggttgaa

SEQ ID NO: 455810 - DNA, 33 bp, Homo sapien
tattattctagagccagtaaatacatggttgaa

SEQ ID NO: 455811 - DNA, 33 bp, Homo sapien
tacaggatgtcggccacaagcgtaggacttggt

SEQ ID NO: 455812 - DNA, 33 bp, Homo sapien
tacaggatgtcggccataagcgtaggacttggt

SEQ ID NO: 455813 - DNA, 33 bp, Homo sapien
ttacctaggtgttagaatcagtgatatgtctta

SEQ ID NO: 455814 - DNA, 33 bp, Homo sapien
ttacctaggtgttagactcagtgatatgtctta

SEQ ID NO: 455815 - DNA, 33 bp, Homo sapien
aagatatgtcacaaggccacttatgtgctgggc

SEQ ID NO: 455816 - DNA, 33 bp, Homo sapien
aagatatgtcacaaggtcacttatgtgctgggc

SEQ ID NO: 455817 - DNA, 33 bp, Homo sapien
ttttcagatcataggcacaatgttggctgtcat

SEQ ID NO: 455818 - DNA, 33 bp, Homo sapien
ttttcagatcataggcgcaatgttggctgtcat

SEQ ID NO: 455819 - DNA, 33 bp, Homo sapien
gtgacaatcttaacaactggcaaagtgtgcata

SEQ ID NO: 455820 - DNA, 33 bp, Homo sapien
gtgacaatcttaacaattggcaaagtgtgcata

SEQ ID NO: 455821 - DNA, 33 bp, Homo sapien
cacatgaatacaatccactggatgttctgaatc

SEQ ID NO: 455822 - DNA, 33 bp, Homo sapien
cacatgaatacaatccgctggatgttctgaatc

SEQ ID NO: 455823 - DNA, 33 bp, Homo sapien
gagtcaacacctcctgcatgttaaatccaagta

SEQ ID NO: 455824 - DNA, 33 bp, Homo sapien
gagtcaacacctcctgtatgttaaatccaagta

SEQ ID NO: 455825 - DNA, 33 bp, Homo sapien
attgtgatcttcagaactggcccagcctacaaa

SEQ ID NO: 455826 - DNA, 33 bp, Homo sapien
attgtgatcttcagaattggcccagcctacaaa

SEQ ID NO: 455827 - DNA, 33 bp, Homo sapien
ccagtaatatgtcacaatgaaccacgtgggcaa

SEQ ID NO: 455828 - DNA, 33 bp, Homo sapien
ccagtaatatgtcacagtgaaccacgtgggcaa

SEQ ID NO: 455829 - DNA, 33 bp, Homo sapien
gtgacaatgtctcttacaggcaaacacagggta

SEQ ID NO: 455830 - DNA, 33 bp, Homo sapien
gtgacaatgtctcttataggcaaacacagggta

SEQ ID NO: 455831 - DNA, 33 bp, Homo sapien
tattatgaatattggacgtatctctgggactga

SEQ ID NO: 455832 - DNA, 33 bp, Homo sapien
tattatgaatattggatgtatctctgggactga

SEQ ID NO: 455833 - DNA, 33 bp, Homo sapien
cattcattatcttggcaatttgacttttctgtt

SEQ ID NO: 455834 - DNA, 33 bp, Homo sapien
cattcattatcttggcgatttgacttttctgtt

SEQ ID NO: 455835 - DNA, 33 bp, Homo sapien
ctgttgtggcacaatagatcacattagacattg

SEQ ID NO: 455836 - DNA, 33 bp, Homo sapien
ctgttgtggcacaatatatcacattagacattg

SEQ ID NO: 455837 - DNA, 33 bp, Homo sapien
cagtgatatgtaacaacatgtaaaatatgaaag

SEQ ID NO: 455838 - DNA, 33 bp, Homo sapien
cagtgatatgtaacaatatgtaaaatatgaaag

SEQ ID NO: 455839 - DNA, 33 bp, Homo sapien
ggagctgcagaacctggatcacctgtcctgatt

SEQ ID NO: 455840 - DNA, 33 bp, Homo sapien
ggagctgcagaacctgtatcacctgtcctgatt

SEQ ID NO: 455841 - DNA, 33 bp, Homo sapien
agactcatatgaagccaatttttgaagagattt

SEQ ID NO: 455842 - DNA, 33 bp, Homo sapien
agactcatatgaagcctatttttgaagagattt

SEQ ID NO: 455843 - DNA, 33 bp, Homo sapien
tctacacctctctgtcaaagaattgtgatgaat

SEQ ID NO: 455844 - DNA, 33 bp, Homo sapien
tctacacctctctgtcgaagaattgtgatgaat

SEQ ID NO: 455845 - DNA, 33 bp, Homo sapien; identical to SEQ ID NO: 455843

SEQ ID NO: 455846 - DNA, 33 bp, Homo sapien; identical to SEQ ID NO: 455844

SEQ ID NO: 455847 - DNA, 33 bp, Homo sapien
gatttatgatgcataagaaagactctgggaatc

SEQ ID NO: 455848 - DNA, 33 bp, Homo sapien
gatttatgatgcataataaagactctgggaatc

SEQ ID NO: 455849 - DNA, 33 bp, Homo sapien; identical to SEQ ID NO: 455847

SEQ ID NO: 455850 - DNA, 33 bp, Homo sapien; identical to SEQ ID NO: 455848

SEQ ID NO: 455851 - DNA, 33 bp, Homo sapien
atttgactagtgttaaccactccacttctccag

SEQ ID NO: 455852 - DNA, 33 bp, Homo sapien
atttgactagtgttaatcactccacttctccag

SEQ ID NO: 455853 - DNA, 33 bp, Homo sapien
tcttgcttcatccatgacatacataatttttaa

SEQ ID NO: 455854 - DNA, 33 bp, Homo sapien
tcttgcttcatccatgccatacataatttttaa

SEQ ID NO: 455855 - DNA, 33 bp, Homo sapien
taccattcccatgataagttgttgtaagaagta

SEQ ID NO: 455856 - DNA, 33 bp, Homo sapien
taccattcccatgataggttgttgtaagaagta

SEQ ID NO: 455857 - DNA, 33 bp, Homo sapien
atgccatggttggcaacgtgaaagttttacaag

SEQ ID NO: 455858 - DNA, 33 bp, Homo sapien
atgccatggttggcaaggtgaaagttttacaag

SEQ ID NO: 455859 - DNA, 33 bp, Homo sapien
tatttattttgatgtaccttcttggactaagtt

SEQ ID NO: 455860 - DNA, 33 bp, Homo sapien
tatttattttgatgtatcttcttggactaagtt

SEQ ID NO: 455861 - DNA, 33 bp, Homo sapien
tcattatttttggcgaagggcccagagctatgt

SEQ ID NO: 455862 - DNA, 33 bp, Homo sapien
tcattatttttggcgaggggcccagagctatgt

SEQ ID NO: 455863 - DNA, 33 bp, Homo sapien
ataaatgttgggtgaaagaatatgtcacaatct

SEQ ID NO: 455864 - DNA, 33 bp, Homo sapien
ataaatgttgggtgaaggaatatgtcacaatct

SEQ ID NO: 455865 - DNA, 33 bp, Homo sapien
gggcccaatgttgagtcacaatatttcccatga

SEQ ID NO: 455866 - DNA, 33 bp, Homo sapien
gggcccaatgttgagttacaatatttcccatga

SEQ ID NO: 455867 - DNA, 33 bp, Homo sapien
attgccactttctcacacactatataaagccct

SEQ ID NO: 455868 - DNA, 33 bp, Homo sapien
attgccactttctcacgcactatataaagccct

SEQ ID NO: 455869 - DNA, 33 bp, Homo sapien; identical to SEQ ID NO: 455867

SEQ ID NO: 455870 - DNA, 33 bp, Homo sapien; identical to SEQ ID NO: 455868

SEQ ID NO: 455871 - DNA, 33 bp, Homo sapien
gaataagatacggtccacagaagggattgaagt

SEQ ID NO: 455872 - DNA, 33 bp, Homo sapien
gaataagatacggtccgcagaagggattgaagt

SEQ ID NO: 455873 - DNA, 33 bp, Homo sapien
cacctcatgtatcttaaatgtaagtacctgagt

SEQ ID NO: 455874 - DNA, 33 bp, Homo sapien
cacctcatgtatcttagatgtaagtacctgagt

SEQ ID NO: 455875 - DNA, 33 bp, Homo sapien
atagcccttttgtgcccagtctattactaaacc

SEQ ID NO: 455876 - DNA, 33 bp, Homo sapien
atagcccttttgtgccgagtctattactaaacc

SEQ ID NO: 455877 - DNA, 33 bp, Homo sapien
tttatggtgacaaaccaaatatcccaagatcaa

SEQ ID NO: 455878 - DNA, 33 bp, Homo sapien
tttatggtgacaaaccgaatatcccaagatcaa

SEQ ID NO: 455879 - DNA, 33 bp, Homo sapien
caaaaagagtgtacaaaacttgctgattcaata

SEQ ID NO: 455880 - DNA, 33 bp, Homo sapien
caaaaagagtgtacaagacttgctgattcaata

SEQ ID NO: 455881 - DNA, 33 bp, Homo sapien
tgtgtgcattaattgcccagagttaaagcttcc

SEQ ID NO: 455882 - DNA, 33 bp, Homo sapien
tgtgtgcattaattgcgcagagttaaagcttcc

SEQ ID NO: 455883 - DNA, 33 bp, Homo sapien
atcctgtgaccctctaaagttaccacaatttta

SEQ ID NO: 455884 - DNA, 33 bp, Homo sapien
atcctgtgaccctctacagttaccacaatttta

SEQ ID NO: 455885 - DNA, 33 bp, Homo sapien
atctgagtctgaagtaccccatttgatattagg

SEQ ID NO: 455886 - DNA, 33 bp, Homo sapien
atctgagtctgaagtatcccatttgatattagg

SEQ ID NO: 455887 - DNA, 33 bp, Homo sapien
gacatttccatttccacgatatgcctaaaagtg

SEQ ID NO: 455888 - DNA, 33 bp, Homo sapien
gacatttccatttccatgatatgcctaaaagtg

SEQ ID NO: 455889 - DNA, 33 bp, Homo sapien
aaatttggagaaatcgaaacactcttacactat

SEQ ID NO: 455890 - DNA, 33 bp, Homo sapien
aaatttggagaaatcggaacactcttacactat

SEQ ID NO: 455891 - DNA, 33 bp, Homo sapien
cagcagtctggaaacactgtctttttagaatct

SEQ ID NO: 455892 - DNA, 33 bp, Homo sapien
cagcagtctggaaacagtgtctttttagaatct

SEQ ID NO: 455893 - DNA, 33 bp, Homo sapien
aacataagcctcaaggaactctcaaatatccca

SEQ ID NO: 455894 - DNA, 33 bp, Homo sapien
aacataagcctcaaggcactctcaaatatccca

SEQ ID NO: 455895 - DNA, 33 bp, Homo sapien
tagaatctgcgaagagacatttggaaacccata

SEQ ID NO: 455896 - DNA, 33 bp, Homo sapien
tagaatctgcgaagaggcatttggaaacccata

SEQ ID NO: 455897 - DNA, 33 bp, Homo sapien
agatttgtttgtgctgaaggttgcgttgggacc

SEQ ID NO: 455898 - DNA, 33 bp, Homo sapien
agatttgtttgtgctgcaggttgcgttgggacc

SEQ ID NO: 455899 - DNA, 33 bp, Homo sapien
tagagaaacttcacgacattaggcattctaaag

SEQ ID NO: 455900 - DNA, 33 bp, Homo sapien
tagagaaacttcacgatattaggcattctaaag

SEQ ID NO: 455901 - DNA, 33 bp, Homo sapien; identical to SEQ ID NO: 455899

SEQ ID NO: 455902 - DNA, 33 bp, Homo sapien; identical to SEQ ID NO: 455900

SEQ ID NO: 455903 - DNA, 33 bp, Homo sapien
ggtttggctgaccacaaaaagtctaattataga

SEQ ID NO: 455904 - DNA, 33 bp, Homo sapien
ggtttggctgaccacagaaagtctaattataga

SEQ ID NO: 455905 - DNA, 33 bp, Homo sapien
gtccaacagctacataagatagggtttaataaa

SEQ ID NO: 455906 - DNA, 33 bp, Homo sapien
gtccaacagctacataggatagggtttaataaa

SEQ ID NO: 455907 - DNA, 33 bp, Homo sapien
tgcctggtgttggctaagagtctgttccattaa

SEQ ID NO: 455908 - DNA, 33 bp, Homo sapien
tgcctggtgttggctaggagtctgttccattaa

SEQ ID NO: 455909 - DNA, 33 bp, Homo sapien
actgcctggggtcaaccaggagtgtctctcatc

SEQ ID NO: 455910 - DNA, 33 bp, Homo sapien
actgcctggggtcaactaggagtgtctctcatc

SEQ ID NO: 455911 - DNA, 33 bp, Homo sapien
ttgtttacctattcaaacctcggcaatggtggg

SEQ ID NO: 455912 - DNA, 33 bp, Homo sapien
ttgtttacctattcaagcctcggcaatggtggg

SEQ ID NO: 455913 - DNA, 33 bp, Homo sapien
aagatgctttgtgacaagtggattcatctcaca

SEQ ID NO: 455914 - DNA, 33 bp, Homo sapien
aagatgctttgtgacaggtggattcatctcaca

SEQ ID NO: 455915 - DNA, 33 bp, Homo sapien
aggcatcctaatagtgaagacttccaaaggacc

SEQ ID NO: 455916 - DNA, 33 bp, Homo sapien
aggcatcctaatagtggagacttccaaaggacc

SEQ ID NO: 455917 - DNA, 33 bp, Homo sapien
gtctcttctattagaacatttggggtcgcccag

SEQ ID NO: 455918 - DNA, 33 bp, Homo sapien
gtctcttctattagaatatttggggtcgcccag

SEQ ID NO: 455919 - DNA, 33 bp, Homo sapien
aataggcaaccgcaggaatttcagtgaaagaga

SEQ ID NO: 455920 - DNA, 33 bp, Homo sapien
aataggcaaccgcaggcatttcagtgaaagaga

SEQ ID NO: 455921 - DNA, 33 bp, Homo sapien
ttttcatgggagagacacttgttcgaccccagg

SEQ ID NO: 455922 - DNA, 33 bp, Homo sapien
ttttcatgggagagactcttgttcgaccccagg

SEQ ID NO: 455923 - DNA, 33 bp, Homo sapien
acacactttgccaaacccaggcagtctaatgct

SEQ ID NO: 455924 - DNA, 33 bp, Homo sapien
acacactttgccaaactcaggcagtctaatgct

SEQ ID NO: 455925 - DNA, 33 bp, Homo sapien
ttctaatggaaaagacaccctgcttaccccagg

SEQ ID NO: 455926 - DNA, 33 bp, Homo sapien
ttctaatggaaaagactccctgcttaccccagg

SEQ ID NO: 455927 - DNA, 33 bp, Homo sapien; identical to SEQ ID NO: 455925

SEQ ID NO: 455928 - DNA, 33 bp, Homo sapien; identical to SEQ ID NO: 455926

SEQ ID NO: 455929 - DNA, 33 bp, Homo sapien
actcagagatgtggtccacgggcactaatttcc

SEQ ID NO: 455930 - DNA, 33 bp, Homo sapien
actcagagatgtggtctacgggcactaatttcc

SEQ ID NO: 455931 - DNA, 33 bp, Homo sapien
agaaaaggtacatagactaggaaggaagaaata

SEQ ID NO: 455932 - DNA, 33 bp, Homo sapien
agaaaaggtacatagattaggaaggaagaaata

SEQ ID NO: 455933 - DNA, 33 bp, Homo sapien
agtgaggagagtatgacactgcaaagtgcgcct

SEQ ID NO: 455934 - DNA, 33 bp, Homo sapien
agtgaggagagtatgatactgcaaagtgcgcct

SEQ ID NO: 455935 - DNA, 33 bp, Homo sapien
gagttgtggcttaagcactttgacatctaacac

SEQ ID NO: 455936 - DNA, 33 bp, Homo sapien
gagttgtggcttaagcgctttgacatctaacac

SEQ ID NO: 455937 - DNA, 33 bp, Homo sapien
agctgcctgccaactacgatggatgtagcaggg

SEQ ID NO: 455938 - DNA, 33 bp, Homo sapien
agctgcctgccaactaggatggatgtagcaggg

SEQ ID NO: 455939 - DNA, 33 bp, Homo sapien
tacagttaatagcatcccagattctcttcgtgg

SEQ ID NO: 455940 - DNA, 33 bp, Homo sapien
tacagttaatagcatctcagattctcttcgtgg

SEQ ID NO: 455941 - DNA, 33 bp, Homo sapien
ccctttgactcagcaaccttagtactgagtata

SEQ ID NO: 455942 - DNA, 33 bp, Homo sapien
ccctttgactcagcaatcttagtactgagtata

SEQ ID NO: 455943 - DNA, 33 bp, Homo sapien
aaagatccaatttctaacatctatatggaactc

SEQ ID NO: 455944 - DNA, 33 bp, Homo sapien
aaagatccaatttctagcatctatatggaactc

SEQ ID NO: 455945 - DNA, 33 bp, Homo sapien
cacagagcgaagggaacctaccctgtccaggga

SEQ ID NO: 455946 - DNA, 33 bp, Homo sapien
cacagagcgaagggaatctaccctgtccaggga

SEQ ID NO: 455947 - DNA, 33 bp, Homo sapien
caccttcagctgaaacacccaggtatttgcact

SEQ ID NO: 455948 - DNA, 33 bp, Homo sapien
caccttcagctgaaactcccaggtatttgcact

SEQ ID NO: 455949 - DNA, 33 bp, Homo sapien
tgacatatcactttacacatattagggtgacta

SEQ ID NO: 455950 - DNA, 33 bp, Homo sapien
tgacatatcactttacgcatattagggtgacta

SEQ ID NO: 455951 - DNA, 33 bp, Homo sapien
aagtattttggtgagaagttttgcattaatttt

SEQ ID NO: 455952 - DNA, 33 bp, Homo sapien
aagtattttggtgagaggttttgcattaatttt

SEQ ID NO: 455953 - DNA, 33 bp, Homo sapien
tagtgttttggactcaaccaagcctcaacatca

SEQ ID NO: 455954 - DNA, 33 bp, Homo sapien
tagtgttttggactcatccaagcctcaacatca

SEQ ID NO: 455955 - DNA, 33 bp, Homo sapien
ggattacaggcacctgacacaatacctgactaa

SEQ ID NO: 455956 - DNA, 33 bp, Homo sapien
ggattacaggcacctgccacaatacctgactaa

SEQ ID NO: 455957 - DNA, 33 bp, Homo sapien
gaatttcacttgtgtaagtcctggagtcaaaag

SEQ ID NO: 455958 - DNA, 33 bp, Homo sapien
gaatttcacttgtgtaggtcctggagtcaaaag

SEQ ID NO: 455959 - DNA, 33 bp, Homo sapien
tggactaagtgggaaagactcattcttaatgtg

SEQ ID NO: 455960 - DNA, 33 bp, Homo sapien
tggactaagtgggaaatactcattcttaatgtg

SEQ ID NO: 455961 - DNA, 33 bp, Homo sapien
tgagaaacacaaagtgacacagtggcattctta

SEQ ID NO: 455962 - DNA, 33 bp, Homo sapien
tgagaaacacaaagtggcacagtggcattctta

SEQ ID NO: 455963 - DNA, 33 bp, Homo sapien
gctacctggcgaatcaccctagaaatggtgtca

SEQ ID NO: 455964 - DNA, 33 bp, Homo sapien
gctacctggcgaatcatcctagaaatggtgtca

SEQ ID NO: 455965 - DNA, 33 bp, Homo sapien
agagtttcacagcaaaccctaggttcaatgtct

SEQ ID NO: 455966 - DNA, 33 bp, Homo sapien
agagtttcacagcaaatcctaggttcaatgtct

SEQ ID NO: 455967 - DNA, 33 bp, Homo sapien
agttcaaatacctcacccaatcttataaaccca

SEQ ID NO: 455968 - DNA, 33 bp, Homo sapien
agttcaaatacctcactcaatcttataaaccca

SEQ ID NO: 455969 - DNA, 33 bp, Homo sapien
aatttaaacaattggccattaacaacatctgaa

SEQ ID NO: 455970 - DNA, 33 bp, Homo sapien
aatttaaacaattggcgattaacaacatctgaa

SEQ ID NO: 455971 - DNA, 33 bp, Homo sapien
tccctcctccaactcccactccacgacaggacc

SEQ ID NO: 455972 - DNA, 33 bp, Homo sapien
tccctcctccaactcctactccacgacaggacc

SEQ ID NO: 455973 - DNA, 33 bp, Homo sapien
ctctaccattagaatgaatcaggttggccagat

SEQ ID NO: 455974 - DNA, 33 bp, Homo sapien
ctctaccattagaatgcatcaggttggccagat

SEQ ID NO: 455975 - DNA, 33 bp, Homo sapien
tatgctcatttgccaacatagaaattggcaata

SEQ ID NO: 455976 - DNA, 33 bp, Homo sapien
tatgctcatttgccaagatagaaattggcaata

SEQ ID NO: 455977 - DNA, 33 bp, Homo sapien
tcagtaacagctaatgaaggtaacttgggaatc

SEQ ID NO: 455978 - DNA, 33 bp, Homo sapien
tcagtaacagctaatggaggtaacttgggaatc

SEQ ID NO: 455979 - DNA, 33 bp, Homo sapien
tggcccctgaaatttgcaagcactgtttcagca

SEQ ID NO: 455980 - DNA, 33 bp, Homo sapien
tggcccctgaaatttggaagcactgtttcagca

SEQ ID NO: 455981 - DNA, 33 bp, Homo sapien
atattcaccaagctccagccctggcagtgagtg

SEQ ID NO: 455982 - DNA, 33 bp, Homo sapien
atattcaccaagctccggccctggcagtgagtg

SEQ ID NO: 455983 - DNA, 33 bp, Homo sapien
gggccccactcacctgcatagctgtgtgtatcc

SEQ ID NO: 455984 - DNA, 33 bp, Homo sapien
gggccccactcacctgtatagctgtgtgtatcc

SEQ ID NO: 455985 - DNA, 33 bp, Homo sapien
atccccaggatcagaacatcttccactccttcc

SEQ ID NO: 455986 - DNA, 33 bp, Homo sapien
atccccaggatcagaatatcttccactccttcc

SEQ ID NO: 455987 - DNA, 33 bp, Homo sapien
caaagacacctcctgaatcagatccttcctttc

SEQ ID NO: 455988 - DNA, 33 bp, Homo sapien
caaagacacctcctgagtcagatccttcctttc

SEQ ID NO: 455989 - DNA, 33 bp, Homo sapien
actgctccaacagtacaaagtatgcggtgtggg

SEQ ID NO: 455990 - DNA, 33 bp, Homo sapien
actgctccaacagtacgaagtatgcggtgtggg

SEQ ID NO: 455991 - DNA, 33 bp, Homo sapien
gactgacaggaaagtgaaatggtgcatcagaag

SEQ ID NO: 455992 - DNA, 33 bp, Homo sapien
gactgacaggaaagtggaatggtgcatcagaag

SEQ ID NO: 455993 - DNA, 33 bp, Homo sapien
ctcctttgttggattgcaagagatgtggtggtt

SEQ ID NO: 455994 - DNA, 33 bp, Homo sapien
ctcctttgttggattggaagagatgtggtggtt

SEQ ID NO: 455995 - DNA, 33 bp, Homo sapien
ccaatattcactaaacaaatacttctgagcatc

SEQ ID NO: 455996 - DNA, 33 bp, Homo sapien
ccaatattcactaaacgaatacttctgagcatc

SEQ ID NO: 455997 - DNA, 33 bp, Homo sapien
gcatcacgcaaactacaaccactggagctacga

SEQ ID NO: 455998 - DNA, 33 bp, Homo sapien
gcatcacgcaaactacgaccactggagctacga

SEQ ID NO: 455999 - DNA, 33 bp, Homo sapien
gaggctttgcaccaaaacttttatcactcccac

SEQ ID NO: 456000 - DNA, 33 bp, Homo sapien
gaggctttgcaccaaatcttttatcactcccac

SEQ ID NO: 456001 - DNA, 33 bp, Homo sapien
caaggtctgatatttcacaggttttgcatagaa

SEQ ID NO: 456002 - DNA, 33 bp, Homo sapien
caaggtctgatatttctcaggttttgcatagaa

SEQ ID NO: 456003 - DNA, 33 bp, Homo sapien
taacaaagtggtaccaatctggcatctaacact

SEQ ID NO: 456004 - DNA, 33 bp, Homo sapien
taacaaagtggtaccagtctggcatctaacact

SEQ ID NO: 456005 - DNA, 33 bp, Homo sapien
gttgctatctgaattgcatcttttcctgttact

SEQ ID NO: 456006 - DNA, 33 bp, Homo sapien
gttgctatctgaattgtatcttttcctgttact

SEQ ID NO: 456007 - DNA, 33 bp, Homo sapien
caagggttgttgtctcaccaaagttcacacttg

SEQ ID NO: 456008 - DNA, 33 bp, Homo sapien
caagggttgttgtctcgccaaagttcacacttg

SEQ ID NO: 456009 - DNA, 33 bp, Homo sapien
tccacgagctatcacactcatcaaccatcccca

SEQ ID NO: 456010 - DNA, 33 bp, Homo sapien
tccacgagctatcacagtcatcaaccatcccca

SEQ ID NO: 456011 - DNA, 33 bp, Homo sapien
caagaaaagcttgataaacctaatgaaaaccaa

SEQ ID NO: 456012 - DNA, 33 bp, Homo sapien
caagaaaagcttgatacacctaatgaaaaccaa

SEQ ID NO: 456013 - DNA, 33 bp, Homo sapien
cctgacatccagctcactcatgcacatcccttg

SEQ ID NO: 456014 - DNA, 33 bp, Homo sapien
cctgacatccagctcattcatgcacatcccttg

SEQ ID NO: 456015 - DNA, 33 bp, Homo sapien
ttcagcacctattgaccaggcactgcgttaggt

SEQ ID NO: 456016 - DNA, 33 bp, Homo sapien
ttcagcacctattgacgaggcactgcgttaggt

SEQ ID NO: 456017 - DNA, 33 bp, Homo sapien; identical to SEQ ID NO: 456015

SEQ ID NO: 456018 - DNA, 33 bp, Homo sapien; identical to SEQ ID NO: 456016

SEQ ID NO: 456019 - DNA, 33 bp, Homo sapien
aagtctgaagaactccaactctcttatctttga

SEQ ID NO: 456020 - DNA, 33 bp, Homo sapien
aagtctgaagaactcctactctcttatctttga

SEQ ID NO: 456021 - DNA, 33 bp, Homo sapien
aatgacaagtaaataaataatgctccaaccagt

SEQ ID NO: 456022 - DNA, 33 bp, Homo sapien
aatgacaagtaaataagtaatgctccaaccagt

SEQ ID NO: 456023 - DNA, 33 bp, Homo sapien
ggctcagctccataaagaaaactttgacataat

SEQ ID NO: 456024 - DNA, 33 bp, Homo sapien
ggctcagctccataaataaaactttgacataat

SEQ ID NO: 456025 - DNA, 33 bp, Homo sapien
ttttaggcatctgaccaagaggttggccagtca

SEQ ID NO: 456026 - DNA, 33 bp, Homo sapien
ttttaggcatctgaccgagaggttggccagtca

SEQ ID NO: 456027 - DNA, 33 bp, Homo sapien
caggacttctgttcacgaaggagactcactgtg

SEQ ID NO: 456028 - DNA, 33 bp, Homo sapien
caggacttctgttcactaaggagactcactgtg

SEQ ID NO: 456029 - DNA, 33 bp, Homo sapien
ctccttcaactctaggaactcagaagcctttta

SEQ ID NO: 456030 - DNA, 33 bp, Homo sapien
ctccttcaactctaggcactcagaagcctttta

SEQ ID NO: 456031 - DNA, 33 bp, Homo sapien
aaatcaaaatgtctcaagttaaaaagaaggcag

SEQ ID NO: 456032 - DNA, 33 bp, Homo sapien
aaatcaaaatgtctcatgttaaaaagaaggcag

SEQ ID NO: 456033 - DNA, 33 bp, Homo sapien
gtaataaaagacttcacaggacttgatgtgctg

SEQ ID NO: 456034 - DNA, 33 bp, Homo sapien
gtaataaaagacttcataggacttgatgtgctg

SEQ ID NO: 456035 - DNA, 33 bp, Homo sapien
ccaatccagctttccccccagcatcatctatct

SEQ ID NO: 456036 - DNA, 33 bp, Homo sapien
ccaatccagctttccctccagcatcatctatct

SEQ ID NO: 456037 - DNA, 33 bp, Homo sapien
tcatcatttggatatacgggactagagcatgaa

SEQ ID NO: 456038 - DNA, 33 bp, Homo sapien
tcatcatttggatatatgggactagagcatgaa

SEQ ID NO: 456039 - DNA, 33 bp, Homo sapien
accacatacttctttacatccagctttagtata

SEQ ID NO: 456040 - DNA, 33 bp, Homo sapien
accacatacttctttatatccagctttagtata

SEQ ID NO: 456041 - DNA, 33 bp, Homo sapien
tccttggtaactcaagacccacagattgctgct

SEQ ID NO: 456042 - DNA, 33 bp, Homo sapien
tccttggtaactcaagtcccacagattgctgct

SEQ ID NO: 456043 - DNA, 33 bp, Homo sapien
taagaaaatataaaggaacacctgttgctgtcg

SEQ ID NO: 456044 - DNA, 33 bp, Homo sapien
taagaaaatataaagggacacctgttgctgtcg

SEQ ID NO: 456045 - DNA, 33 bp, Homo sapien
catggccaatgctaggacataagggagggctgg

SEQ ID NO: 456046 - DNA, 33 bp, Homo sapien
catggccaatgctaggtcataagggagggctgg

SEQ ID NO: 456047 - DNA, 33 bp, Homo sapien
tcacccacagacagaacagaatgtgggggatga

SEQ ID NO: 456048 - DNA, 33 bp, Homo sapien
tcacccacagacagaagagaatgtgggggatga

SEQ ID NO: 456049 - DNA, 33 bp, Homo sapien
ggtggaactggaacgagtaaaacactaccatat

SEQ ID NO: 456050 - DNA, 33 bp, Homo sapien
ggtggaactggaacgattaaaacactaccatat

SEQ ID NO: 456051 - DNA, 33 bp, Homo sapien
agaggtaatattttccaaacttttttgatgagg

SEQ ID NO: 456052 - DNA, 33 bp, Homo sapien
agaggtaatattttccgaacttttttgatgagg

SEQ ID NO: 456053 - DNA, 33 bp, Homo sapien
gagaatcttgagtccaatgaaataacgttaata

SEQ ID NO: 456054 - DNA, 33 bp, Homo sapien
gagaatcttgagtccagtgaaataacgttaata

SEQ ID NO: 456055 - DNA, 33 bp, Homo sapien
gtggaaaagacaaagcaatttttcttacaagaa

SEQ ID NO: 456056 - DNA, 33 bp, Homo sapien
gtggaaaagacaaagcgatttttcttacaagaa

SEQ ID NO: 456057 - DNA, 33 bp, Homo sapien
tccccaactctaatcaaaccctggccatctcca

SEQ ID NO: 456058 - DNA, 33 bp, Homo sapien
tccccaactctaatcagaccctggccatctcca

SEQ ID NO: 456059 - DNA, 33 bp, Homo sapien
tgtgggcaagacaggacgggagaccagagctgc

SEQ ID NO: 456060 - DNA, 33 bp, Homo sapien
tgtgggcaagacaggatgggagaccagagctgc

SEQ ID NO: 456061 - DNA, 33 bp, Homo sapien
attgtagagatgacaactgacacagatatgtca

SEQ ID NO: 456062 - DNA, 33 bp, Homo sapien
attgtagagatgacaattgacacagatatgtca

SEQ ID NO: 456063 - DNA, 33 bp, Homo sapien
accttacactacacagaacaattaaatgtggtg

SEQ ID NO: 456064 - DNA, 33 bp, Homo sapien
accttacactacacaggacaattaaatgtggtg

SEQ ID NO: 456065 - DNA, 33 bp, Homo sapien
caaaacgcttgcagaaaagaaaagtggaaatcc

SEQ ID NO: 456066 - DNA, 33 bp, Homo sapien
caaaacgcttgcagaagagaaaagtggaaatcc

SEQ ID NO: 456067 - DNA, 33 bp, Homo sapien
gatttagggcccataaattaatccaagattatc

SEQ ID NO: 456068 - DNA, 33 bp, Homo sapien
gatttagggcccataagttaatccaagattatc

SEQ ID NO: 456069 - DNA, 33 bp, Homo sapien
gacagataaactctgacagagagtgcagaattt

SEQ ID NO: 456070 - DNA, 33 bp, Homo sapien
gacagataaactctgatagagagtgcagaattt

SEQ ID NO: 456071 - DNA, 33 bp, Homo sapien
taatgtgcttacttgccatttattacattactt

SEQ ID NO: 456072 - DNA, 33 bp, Homo sapien
taatgtgcttacttgcgatttattacattactt

SEQ ID NO: 456073 - DNA, 33 bp, Homo sapien
acaaggtcatatgttaccagcatggctgcagtt

SEQ ID NO: 456074 - DNA, 33 bp, Homo sapien
acaaggtcatatgttatcagcatggctgcagtt

SEQ ID NO: 456075 - DNA, 33 bp, Homo sapien
ttgaaggtggcctcagccatcagtgaggagcag

SEQ ID NO: 456076 - DNA, 33 bp, Homo sapien
ttgaaggtggcctcaggcatcagtgaggagcag

SEQ ID NO: 456077 - DNA, 33 bp, Homo sapien
taattgctgtcctcaccgggcctaccccaggtg

SEQ ID NO: 456078 - DNA, 33 bp, Homo sapien
taattgctgtcctcactgggcctaccccaggtg

SEQ ID NO: 456079 - DNA, 33 bp, Homo sapien
tcatattcgtcctcacaggatccaggccagttc

SEQ ID NO: 456080 - DNA, 33 bp, Homo sapien
tcatattcgtcctcacgggatccaggccagttc

SEQ ID NO: 456081 - DNA, 33 bp, Homo sapien
cctagcccaggtattcaaggtttcctcattggg

SEQ ID NO: 456082 - DNA, 33 bp, Homo sapien
cctagcccaggtattctaggtttcctcattggg

SEQ ID NO: 456083 - DNA, 33 bp, Homo sapien
cagcagtgaacacctgaactaggccgcattaga

SEQ ID NO: 456084 - DNA, 33 bp, Homo sapien
cagcagtgaacacctggactaggccgcattaga

SEQ ID NO: 456085 - DNA, 33 bp, Homo sapien
cattgggtcaacctcaagtgtttacagctgtcc

SEQ ID NO: 456086 - DNA, 33 bp, Homo sapien
cattgggtcaacctcacgtgtttacagctgtcc

SEQ ID NO: 456087 - DNA, 33 bp, Homo sapien
aggctaagccgtataacgacagctattaacacc

SEQ ID NO: 456088 - DNA, 33 bp, Homo sapien
aggctaagccgtataatgacagctattaacacc

SEQ ID NO: 456089 - DNA, 33 bp, Homo sapien
acttacgctaatcgggcatagccaagctattat

SEQ ID NO: 456090 - DNA, 33 bp, Homo sapien
acttacgctaatcgggtatagccaagctattat

SEQ ID NO: 456091 - DNA, 33 bp, Homo sapien
attccttcatcgatacaaagttggcactcttca

SEQ ID NO: 456092 - DNA, 33 bp, Homo sapien
attccttcatcgataccaagttggcactcttca

SEQ ID NO: 456093 - DNA, 33 bp, Homo sapien
gattttctaggaaaaaggtggagatttcttagg

SEQ ID NO: 456094 - DNA, 33 bp, Homo sapien
gattttctaggaaaaatgtggagatttcttagg

SEQ ID NO: 456095 - DNA, 33 bp, Homo sapien
agagttggagtgcaggcatacttgggagagtga

SEQ ID NO: 456096 - DNA, 33 bp, Homo sapien
agagttggagtgcaggtatacttgggagagtga

SEQ ID NO: 456097 - DNA, 33 bp, Homo sapien
cagagaaactgtcagaaagaccacccaagaaga

SEQ ID NO: 456098 - DNA, 33 bp, Homo sapien
cagagaaactgtcagagagaccacccaagaaga

SEQ ID NO: 456099 - DNA, 33 bp, Homo sapien
agtgttcatattttaccacaaggctgtaattac

SEQ ID NO: 456100 - DNA, 33 bp, Homo sapien
agtgttcatattttactacaaggctgtaattac

SEQ ID NO: 456101 - DNA, 33 bp, Homo sapien
tgattccctgattctgaattttaaccacgaaat

SEQ ID NO: 456102 - DNA, 33 bp, Homo sapien
tgattccctgattctggattttaaccacgaaat

SEQ ID NO: 456103 - DNA, 33 bp, Homo sapien
agtgtggaccagcttccattgttaatcccacat

SEQ ID NO: 456104 - DNA, 33 bp, Homo sapien
agtgtggaccagcttcgattgttaatcccacat

SEQ ID NO: 456105 - DNA, 33 bp, Homo sapien
ctaaggcagaagcaaaattctaagggcagggtg

SEQ ID NO: 456106 - DNA, 33 bp, Homo sapien
ctaaggcagaagcaaagttctaagggcagggtg

SEQ ID NO: 456107 - DNA, 33 bp, Homo sapien
caggagcacaaggaaccagagacaaatgtgtat

SEQ ID NO: 456108 - DNA, 33 bp, Homo sapien
caggagcacaaggaacgagagacaaatgtgtat

SEQ ID NO: 456109 - DNA, 33 bp, Homo sapien
ctcccaatgaagacccagcttgcacaggatgga

SEQ ID NO: 456110 - DNA, 33 bp, Homo sapien
ctcccaatgaagacccggcttgcacaggatgga

SEQ ID NO: 456111 - DNA, 33 bp, Homo sapien
attacagggttgtccaaacatcttgtgtgtctt

SEQ ID NO: 456112 - DNA, 33 bp, Homo sapien
attacagggttgtccagacatcttgtgtgtctt

SEQ ID NO: 456113 - DNA, 33 bp, Homo sapien
tgttgttgttgtgtcaccgttgttgttgcaaag

SEQ ID NO: 456114 - DNA, 33 bp, Homo sapien
tgttgttgttgtgtcatcgttgttgttgcaaag

SEQ ID NO: 456115 - DNA, 33 bp, Homo sapien
cataactaactgcttccaggacagtgcatccga

SEQ ID NO: 456116 - DNA, 33 bp, Homo sapien
cataactaactgcttctaggacagtgcatccga

SEQ ID NO: 456117 - DNA, 33 bp, Homo sapien
ttgggaaacctctgcaatcctccagatgtgagg

SEQ ID NO: 456118 - DNA, 33 bp, Homo sapien
ttgggaaacctctgcagtcctccagatgtgagg

SEQ ID NO: 456119 - DNA, 33 bp, Homo sapien
atgggaacatttgaataactaggaataaagatg

SEQ ID NO: 456120 - DNA, 33 bp, Homo sapien
atgggaacatttgaatgactaggaataaagatg

SEQ ID NO: 456121 - DNA, 33 bp, Homo sapien
tgaggatcatgcaccactaaaggcctggcacca

SEQ ID NO: 456122 - DNA, 33 bp, Homo sapien
tgaggatcatgcaccagtaaaggcctggcacca

SEQ ID NO: 456123 - DNA, 33 bp, Homo sapien
tggaatcaacctaagcgcacatcagtggtaagc

SEQ ID NO: 456124 - DNA, 33 bp, Homo sapien
tggaatcaacctaagctcacatcagtggtaagc

SEQ ID NO: 456125 - DNA, 33 bp, Homo sapien
atctgtcaatctaaaacttcttttccacttgta

SEQ ID NO: 456126 - DNA, 33 bp, Homo sapien
atctgtcaatctaaaatttcttttccacttgta

SEQ ID NO: 456127 - DNA, 33 bp, Homo sapien
ctgtttgcaaccttaagatgtgcaaaatgttaa

SEQ ID NO: 456128 - DNA, 33 bp, Homo sapien
ctgtttgcaaccttaatatgtgcaaaatgttaa

SEQ ID NO: 456129 - DNA, 33 bp, Homo sapien
tctgccaactgttctaataaaaaaaacaagcaa

SEQ ID NO: 456130 - DNA, 33 bp, Homo sapien
tctgccaactgttctagtaaaaaaaacaagcaa

SEQ ID NO: 456131 - DNA, 33 bp, Homo sapien
accacaaggtaggtagaagcagagtccgatggt

SEQ ID NO: 456132 - DNA, 33 bp, Homo sapien
accacaaggtaggtaggagcagagtccgatggt

SEQ ID NO: 456133 - DNA, 33 bp, Homo sapien
gctagactagaagtcacggtgctaagattcaaa

SEQ ID NO: 456134 - DNA, 33 bp, Homo sapien
gctagactagaagtcagggtgctaagattcaaa

SEQ ID NO: 456135 - DNA, 33 bp, Homo sapien
ccatatccatgctacaacaaccagactttggac

SEQ ID NO: 456136 - DNA, 33 bp, Homo sapien
ccatatccatgctacagcaaccagactttggac

SEQ ID NO: 456137 - DNA, 33 bp, Homo sapien
tggtttgaaggacagaagtaaaagtatctggaa

SEQ ID NO: 456138 - DNA, 33 bp, Homo sapien
tggtttgaaggacagatgtaaaagtatctggaa

SEQ ID NO: 456139 - DNA, 33 bp, Homo sapien
atccaggaggagatgcaactaagagtttgacac

SEQ ID NO: 456140 - DNA, 33 bp, Homo sapien
atccaggaggagatgccactaagagtttgacac

SEQ ID NO: 456141 - DNA, 33 bp, Homo sapien
ataaagcctctaactaacagacttcagagaaaa

SEQ ID NO: 456142 - DNA, 33 bp, Homo sapien
ataaagcctctaactagcagacttcagagaaaa

SEQ ID NO: 456143 - DNA, 33 bp, Homo sapien
acaattggttgaaaaagttaaactttgcctaga

SEQ ID NO: 456144 - DNA, 33 bp, Homo sapien
acaattggttgaaaaatttaaactttgcctaga

SEQ ID NO: 456145 - DNA, 33 bp, Homo sapien
caaggtgattgggttacaccttggtttactacg

SEQ ID NO: 456146 - DNA, 33 bp, Homo sapien
caaggtgattgggttataccttggtttactacg

SEQ ID NO: 456147 - DNA, 33 bp, Homo sapien
gcaagagatgagggaaaaagcaaactctacagc

SEQ ID NO: 456148 - DNA, 33 bp, Homo sapien
gcaagagatgagggaagaagcaaactctacagc

SEQ ID NO: 456149 - DNA, 33 bp, Homo sapien
aagttgtgcttactaacagcctgcagcttggag

SEQ ID NO: 456150 - DNA, 33 bp, Homo sapien
aagttgtgcttactaagagcctgcagcttggag

SEQ ID NO: 456151 - DNA, 33 bp, Homo sapien
catgatgcacagctggccattccttgaggctcc

SEQ ID NO: 456152 - DNA, 33 bp, Homo sapien
catgatgcacagctggtcattccttgaggctcc

SEQ ID NO: 456153 - DNA, 33 bp, Homo sapien
catgggtgtcatgtgacagttgttccactgagg

SEQ ID NO: 456154 - DNA, 33 bp, Homo sapien
catgggtgtcatgtgatagttgttccactgagg

SEQ ID NO: 456155 - DNA, 33 bp, Homo sapien
ccaacaccggacagaacagataaagtcacacca

SEQ ID NO: 456156 - DNA, 33 bp, Homo sapien
ccaacaccggacagaagagataaagtcacacca

SEQ ID NO: 456157 - DNA, 33 bp, Homo sapien
ttttaatcggagaaaaaaattctaaatctgcaa

SEQ ID NO: 456158 - DNA, 33 bp, Homo sapien
ttttaatcggagaaaagaattctaaatctgcaa

SEQ ID NO: 456159 - DNA, 33 bp, Homo sapien
tcttgggtaaggcatacatgaatgtgctttttt

SEQ ID NO: 456160 - DNA, 33 bp, Homo sapien
tcttgggtaaggcatatatgaatgtgctttttt

SEQ ID NO: 456161 - DNA, 33 bp, Homo sapien
attgaaggaggacatgaaagcattctctcccct

SEQ ID NO: 456162 - DNA, 33 bp, Homo sapien
attgaaggaggacatggaagcattctctcccct

SEQ ID NO: 456163 - DNA, 33 bp, Homo sapien
ggtacattcaatttcacaacttagagaagactt

SEQ ID NO: 456164 - DNA, 33 bp, Homo sapien
ggtacattcaatttcataacttagagaagactt

SEQ ID NO: 456165 - DNA, 33 bp, Homo sapien
tggatagaactcagtcacataaccacagcccac

SEQ ID NO: 456166 - DNA, 33 bp, Homo sapien
tggatagaactcagtcgcataaccacagcccac

SEQ ID NO: 456167 - DNA, 33 bp, Homo sapien
actggcaatttcatatcacttattttaatggat

SEQ ID NO: 456168 - DNA, 33 bp, Homo sapien
actggcaatttcatatgacttattttaatggat

SEQ ID NO: 456169 - DNA, 33 bp, Homo sapien
caagtatctgttgagaaaatatcccaagaccac

SEQ ID NO: 456170 - DNA, 33 bp, Homo sapien
caagtatctgttgagagaatatcccaagaccac

SEQ ID NO: 456171 - DNA, 33 bp, Homo sapien
tgcaactatctttgccacccactaggacatctg

SEQ ID NO: 456172 - DNA, 33 bp, Homo sapien
tgcaactatctttgccgcccactaggacatctg

SEQ ID NO: 456173 - DNA, 33 bp, Homo sapien
ggacattgcacacagtgaaacaatttatctaac

SEQ ID NO: 456174 - DNA, 33 bp, Homo sapien
ggacattgcacacagttaaacaatttatctaac

SEQ ID NO: 456175 - DNA, 33 bp, Homo sapien
gcagttaaattaacagaacctgatgacactctg

SEQ ID NO: 456176 - DNA, 33 bp, Homo sapien
gcagttaaattaacagtacctgatgacactctg

SEQ ID NO: 456177 - DNA, 33 bp, Homo sapien
aaactgtacctcaaaacaccctgggattaaaca

SEQ ID NO: 456178 - DNA, 33 bp, Homo sapien
aaactgtacctcaaaagaccctgggattaaaca

SEQ ID NO: 456179 - DNA, 33 bp, Homo sapien
cgagtaatcagtctcaccagaaaaatctgtaag

SEQ ID NO: 456180 - DNA, 33 bp, Homo sapien
cgagtaatcagtctcatcagaaaaatctgtaag

SEQ ID NO: 456181 - DNA, 33 bp, Homo sapien
gagaaaggagtgtgaaagaaatagatataacca

SEQ ID NO: 456182 - DNA, 33 bp, Homo sapien
gagaaaggagtgtgaaggaaatagatataacca

SEQ ID NO: 456183 - DNA, 33 bp, Homo sapien
caatctgagctaaaaaacggtgatagtgatttc

SEQ ID NO: 456184 - DNA, 33 bp, Homo sapien
caatctgagctaaaaagcggtgatagtgatttc

SEQ ID NO: 456185 - DNA, 33 bp, Homo sapien
aagtaaaaaatgagtaaagaaagtgctcaaata

SEQ ID NO: 456186 - DNA, 33 bp, Homo sapien
aagtaaaaaatgagtacagaaagtgctcaaata

SEQ ID NO: 456187 - DNA, 33 bp, Homo sapien
ttgggtacacttcacaacctgtgcaaaactgaa

SEQ ID NO: 456188 - DNA, 33 bp, Homo sapien
ttgggtacacttcacagcctgtgcaaaactgaa

SEQ ID NO: 456189 - DNA, 33 bp, Homo sapien
aaagaacaaataatgacggttcaaatgtgtttc

SEQ ID NO: 456190 - DNA, 33 bp, Homo sapien
aaagaacaaataatgatggttcaaatgtgtttc

SEQ ID NO: 456191 - DNA, 33 bp, Homo sapien
ttggtatgcaatatggcagtgtttgtcaaagaa

SEQ ID NO: 456192 - DNA, 33 bp, Homo sapien
ttggtatgcaatatgggagtgtttgtcaaagaa

SEQ ID NO: 456193 - DNA, 33 bp, Homo sapien
ttaatcagggccaggaatactcacgcaggaaat

SEQ ID NO: 456194 - DNA, 33 bp, Homo sapien
ttaatcagggccaggattactcacgcaggaaat

SEQ ID NO: 456195 - DNA, 33 bp, Homo sapien
tttctcttgcccctggaaactgccttaggcaaa

SEQ ID NO: 456196 - DNA, 33 bp, Homo sapien
tttctcttgcccctgggaactgccttaggcaaa

SEQ ID NO: 456197 - DNA, 33 bp, Homo sapien
gaataattcaaggccacgccaaaacccaggagg

SEQ ID NO: 456198 - DNA, 33 bp, Homo sapien
gaataattcaaggccatgccaaaacccaggagg

SEQ ID NO: 456199 - DNA, 33 bp, Homo sapien
atacatgaccattgggcacagtctagggcaagg

SEQ ID NO: 456200 - DNA, 33 bp, Homo sapien
atacatgaccattgggtacagtctagggcaagg

SEQ ID NO: 456201 - DNA, 33 bp, Homo sapien
tgccctgactgaatccaggaacaactggctggg

SEQ ID NO: 456202 - DNA, 33 bp, Homo sapien
tgccctgactgaatccgggaacaactggctggg

SEQ ID NO: 456203 - DNA, 33 bp, Homo sapien
aagaagaaagaccatagacttagagataggaga

SEQ ID NO: 456204 - DNA, 33 bp, Homo sapien
aagaagaaagaccatatacttagagataggaga

SEQ ID NO: 456205 - DNA, 33 bp, Homo sapien
agataaccagttaccacggggctctctagaagg

SEQ ID NO: 456206 - DNA, 33 bp, Homo sapien
agataaccagttaccatggggctctctagaagg

SEQ ID NO: 456207 - DNA, 33 bp, Homo sapien
tcctgctccatctcaacagggaaagagaaacta

SEQ ID NO: 456208 - DNA, 33 bp, Homo sapien
tcctgctccatctcaatagggaaagagaaacta

SEQ ID NO: 456209 - DNA, 33 bp, Homo sapien
ttctcagggtcttataaattcccaggaatgtga

SEQ ID NO: 456210 - DNA, 33 bp, Homo sapien
ttctcagggtcttatagattcccaggaatgtga

SEQ ID NO: 456211 - DNA, 33 bp, Homo sapien
atctctcctgggtatacggtagatgctcaggaa

SEQ ID NO: 456212 - DNA, 33 bp, Homo sapien
atctctcctgggtatatggtagatgctcaggaa

SEQ ID NO: 456213 - DNA, 33 bp, Homo sapien
gtctctagcatgaccaactcaataacccaccat

SEQ ID NO: 456214 - DNA, 33 bp, Homo sapien
gtctctagcatgaccagctcaataacccaccat

SEQ ID NO: 456215 - DNA, 33 bp, Homo sapien
agatatgttccttcgacacttgtctgttgaggg

SEQ ID NO: 456216 - DNA, 33 bp, Homo sapien
agatatgttccttcgatacttgtctgttgaggg

SEQ ID NO: 456217 - DNA, 33 bp, Homo sapien
tgatttctagccagcacgtggagaattggttca

SEQ ID NO: 456218 - DNA, 33 bp, Homo sapien
tgatttctagccagcatgtggagaattggttca

SEQ ID NO: 456219 - DNA, 33 bp, Homo sapien
acaaattctctctaaaacttctgcagtaaacac

SEQ ID NO: 456220 - DNA, 33 bp, Homo sapien
acaaattctctctaaatcttctgcagtaaacac

SEQ ID NO: 456221 - DNA, 33 bp, Homo sapien
gtgagagagaaaggaccagtataattacccagc

SEQ ID NO: 456222 - DNA, 33 bp, Homo sapien
gtgagagagaaaggactagtataattacccagc

SEQ ID NO: 456223 - DNA, 33 bp, Homo sapien
ttatcttttcaaaaaccgatctcttactttcat

SEQ ID NO: 456224 - DNA, 33 bp, Homo sapien
ttatcttttcaaaaactgatctcttactttcat

SEQ ID NO: 456225 - DNA, 33 bp, Homo sapien
ttgatacaatcagtggccataaatatacacatc

SEQ ID NO: 456226 - DNA, 33 bp, Homo sapien
ttgatacaatcagtggtcataaatatacacatc

SEQ ID NO: 456227 - DNA, 33 bp, Homo sapien
taaaatctcaaatcgcaatgtccctagcaatct

SEQ ID NO: 456228 - DNA, 33 bp, Homo sapien
taaaatctcaaatcgcgatgtccctagcaatct

SEQ ID NO: 456229 - DNA, 33 bp, Homo sapien
tcattctcatctctaggccatcacacttgctct

SEQ ID NO: 456230 - DNA, 33 bp, Homo sapien
tcattctcatctctagtccatcacacttgctct

SEQ ID NO: 456231 - DNA, 33 bp, Homo sapien
ctcactagtgcaccaccctctaagaaccttcac

SEQ ID NO: 456232 - DNA, 33 bp, Homo sapien
ctcactagtgcaccactctctaagaaccttcac

SEQ ID NO: 456233 - DNA, 33 bp, Homo sapien
ttgaacccctgggaagaacagctcgaaaaaaac

SEQ ID NO: 456234 - DNA, 33 bp, Homo sapien
ttgaacccctgggaaggacagctcgaaaaaaac

SEQ ID NO: 456235 - DNA, 33 bp, Homo sapien
gctgagctggtgagtaccaactgactaccaatt

SEQ ID NO: 456236 - DNA, 33 bp, Homo sapien
gctgagctggtgagtatcaactgactaccaatt

SEQ ID NO: 456237 - DNA, 33 bp, Homo sapien
cctgttacgttttctgcacagtcttttacatgc

SEQ ID NO: 456238 - DNA, 33 bp, Homo sapien
cctgttacgttttctggacagtcttttacatgc

SEQ ID NO: 456239 - DNA, 33 bp, Homo sapien
cacacccaacacagaggagagagaaccctcggc

SEQ ID NO: 456240 - DNA, 33 bp, Homo sapien
cacacccaacacagagtagagagaaccctcggc

SEQ ID NO: 456241 - DNA, 33 bp, Homo sapien
cacaaacacatcctcacaaacagccacagatgg

SEQ ID NO: 456242 - DNA, 33 bp, Homo sapien
cacaaacacatcctcataaacagccacagatgg

SEQ ID NO: 456243 - DNA, 33 bp, Homo sapien
ccctcatcttcacgtgaaccaaagcaggcgtca

SEQ ID NO: 456244 - DNA, 33 bp, Homo sapien
ccctcatcttcacgtggaccaaagcaggcgtca

SEQ ID NO: 456245 - DNA, 33 bp, Homo sapien
cattttcacagcagcaaaaggtcatcaggagat

SEQ ID NO: 456246 - DNA, 33 bp, Homo sapien
cattttcacagcagcagaaggtcatcaggagat

SEQ ID NO: 456247 - DNA, 33 bp, Homo sapien
tccatgtctctgaggaacaaggtctcacgtttc

SEQ ID NO: 456248 - DNA, 33 bp, Homo sapien
tccatgtctctgaggagcaaggtctcacgtttc

SEQ ID NO: 456249 - DNA, 33 bp, Homo sapien
ctgttctggtatgaaccgtaggaattatgcatg

SEQ ID NO: 456250 - DNA, 33 bp, Homo sapien
ctgttctggtatgaactgtaggaattatgcatg

SEQ ID NO: 456251 - DNA, 33 bp, Homo sapien
ccttgttgcagctttaccagcctttgcctgggc

SEQ ID NO: 456252 - DNA, 33 bp, Homo sapien
ccttgttgcagctttatcagcctttgcctgggc

SEQ ID NO: 456253 - DNA, 33 bp, Homo sapien
gtgaggtacaatcccaatgccatctatctgctc

SEQ ID NO: 456254 - DNA, 33 bp, Homo sapien
gtgaggtacaatcccagtgccatctatctgctc

SEQ ID NO: 456255 - DNA, 33 bp, Homo sapien
atgacctagacattaaagagacctaaaaggaag

SEQ ID NO: 456256 - DNA, 33 bp, Homo sapien
atgacctagacattaacgagacctaaaaggaag

SEQ ID NO: 456257 - DNA, 33 bp, Homo sapien
ggaaataccgaacctacaaatattcatgttttc

SEQ ID NO: 456258 - DNA, 33 bp, Homo sapien
ggaaataccgaacctagaaatattcatgttttc

SEQ ID NO: 456259 - DNA, 33 bp, Homo sapien
cagccagagaatgtgacgatgaggccaagtgac

SEQ ID NO: 456260 - DNA, 33 bp, Homo sapien
cagccagagaatgtgatgatgaggccaagtgac

SEQ ID NO: 456261 - DNA, 33 bp, Homo sapien
ttagactcaggattgactataatagtaaaattg

SEQ ID NO: 456262 - DNA, 33 bp, Homo sapien
ttagactcaggattgattataatagtaaaattg

SEQ ID NO: 456263 - DNA, 33 bp, Homo sapien
tgtcaataaaatatcacggaaaatgcacctgtg

SEQ ID NO: 456264 - DNA, 33 bp, Homo sapien
tgtcaataaaatatcatggaaaatgcacctgtg

SEQ ID NO: 456265 - DNA, 33 bp, Homo sapien
aaaatgcacctgtgataaagttaccagcatgtc

SEQ ID NO: 456266 - DNA, 33 bp, Homo sapien
aaaatgcacctgtgatgaagttaccagcatgtc

SEQ ID NO: 456267 - DNA, 33 bp, Homo sapien
ggctgtaagggaaagacgcgtgtttagaacagc

SEQ ID NO: 456268 - DNA, 33 bp, Homo sapien
ggctgtaagggaaagatgcgtgtttagaacagc

SEQ ID NO: 456269 - DNA, 33 bp, Homo sapien
catagtttaggatttaagcttgacaaaaccaag

SEQ ID NO: 456270 - DNA, 33 bp, Homo sapien
catagtttaggatttacgcttgacaaaaccaag

SEQ ID NO: 456271 - DNA, 33 bp, Homo sapien
aaaggtggaaacagcccaaattgatggaagaat

SEQ ID NO: 456272 - DNA, 33 bp, Homo sapien
aaaggtggaaacagccgaaattgatggaagaat

SEQ ID NO: 456273 - DNA, 33 bp, Homo sapien
atgtggtacacgaatacgacagaatattattca

SEQ ID NO: 456274 - DNA, 33 bp, Homo sapien
atgtggtacacgaatatgacagaatattattca

SEQ ID NO: 456275 - DNA, 33 bp, Homo sapien
acattgtcgtacaaccaccagtattacccatct

SEQ ID NO: 456276 - DNA, 33 bp, Homo sapien
acattgtcgtacaacctccagtattacccatct

SEQ ID NO: 456277 - DNA, 33 bp, Homo sapien
ggataacgcagagttacggtagttagtgcagaa

SEQ ID NO: 456278 - DNA, 33 bp, Homo sapien
ggataacgcagagttagggtagttagtgcagaa

SEQ ID NO: 456279 - DNA, 33 bp, Homo sapien
gaaaaaaccacaaagcaatgatttgaccacagg

SEQ ID NO: 456280 - DNA, 33 bp, Homo sapien
gaaaaaaccacaaagcgatgatttgaccacagg

SEQ ID NO: 456281 - DNA, 33 bp, Homo sapien
gtagttacgagttaggcagttgttaataagact

SEQ ID NO: 456282 - DNA, 33 bp, Homo sapien
gtagttacgagttaggtagttgttaataagact

SEQ ID NO: 456283 - DNA, 33 bp, Homo sapien
gagttcccccaagcaacttacatgctcatgaag

SEQ ID NO: 456284 - DNA, 33 bp, Homo sapien
gagttcccccaagcaatttacatgctcatgaag

SEQ ID NO: 456285 - DNA, 33 bp, Homo sapien
gcttcctgcatttataaacaaggaaatgaaggt

SEQ ID NO: 456286 - DNA, 33 bp, Homo sapien
gcttcctgcatttatagacaaggaaatgaaggt

SEQ ID NO: 456287 - DNA, 33 bp, Homo sapien
tcatctgccccaggtcaaacacagaaacttctg

SEQ ID NO: 456288 - DNA, 33 bp, Homo sapien
tcatctgccccaggtccaacacagaaacttctg

SEQ ID NO: 456289 - DNA, 33 bp, Homo sapien
tcccttcagggagaaacgcgaatggatgcgagg

SEQ ID NO: 456290 - DNA, 33 bp, Homo sapien
tcccttcagggagaaaggcgaatggatgcgagg

SEQ ID NO: 456291 - DNA, 33 bp, Homo sapien
attgattaactgcatagctggactcctgggtgc

SEQ ID NO: 456292 - DNA, 33 bp, Homo sapien
attgattaactgcatatctggactcctgggtgc

SEQ ID NO: 456293 - DNA, 33 bp, Homo sapien
ttgattgactgagggacacgaacagcttcggtc

SEQ ID NO: 456294 - DNA, 33 bp, Homo sapien
ttgattgactgagggagacgaacagcttcggtc

SEQ ID NO: 456295 - DNA, 33 bp, Homo sapien
tgcatacctcccttacacatcaaagccccagtt

SEQ ID NO: 456296 - DNA, 33 bp, Homo sapien
tgcatacctcccttacgcatcaaagccccagtt

SEQ ID NO: 456297 - DNA, 33 bp, Homo sapien
ctgacttgtctttgaacacaactggggctttga

SEQ ID NO: 456298 - DNA, 33 bp, Homo sapien
ctgacttgtctttgaatacaactggggctttga

SEQ ID NO: 456299 - DNA, 33 bp, Homo sapien
aaggtttatttgattcaaccaaagtgtgagatt

SEQ ID NO: 456300 - DNA, 33 bp, Homo sapien
aaggtttatttgattcgaccaaagtgtgagatt

SEQ ID NO: 456301 - DNA, 33 bp, Homo sapien
tttggctaactgcgcactgagtacttgagtact

SEQ ID NO: 456302 - DNA, 33 bp, Homo sapien
tttggctaactgcgcattgagtacttgagtact

SEQ ID NO: 456303 - DNA, 33 bp, Homo sapien
agagcgctcatgaaaactgagtaagtctaagca

SEQ ID NO: 456304 - DNA, 33 bp, Homo sapien
agagcgctcatgaaaattgagtaagtctaagca

SEQ ID NO: 456305 - DNA, 33 bp, Homo sapien
atcccaggaaagccaccgaaggcaaaggtccca

SEQ ID NO: 456306 - DNA, 33 bp, Homo sapien
atcccaggaaagccactgaaggcaaaggtccca

SEQ ID NO: 456307 - DNA, 33 bp, Homo sapien
caaacttttattgccacccatccttagtcacct

SEQ ID NO: 456308 - DNA, 33 bp, Homo sapien
caaacttttattgccatccatccttagtcacct

SEQ ID NO: 456309 - DNA, 33 bp, Homo sapien
taaaaagctgagcctacgacaaaagcttacagg

SEQ ID NO: 456310 - DNA, 33 bp, Homo sapien
taaaaagctgagcctatgacaaaagcttacagg

SEQ ID NO: 456311 - DNA, 33 bp, Homo sapien
cttagctttcacctataagcagatggcttggtg

SEQ ID NO: 456312 - DNA, 33 bp, Homo sapien
cttagctttcacctatcagcagatggcttggtg

SEQ ID NO: 456313 - DNA, 33 bp, Homo sapien
aagcagccaggaaggaaaagcaaaaagaagcgc

SEQ ID NO: 456314 - DNA, 33 bp, Homo sapien
aagcagccaggaaggagaagcaaaaagaagcgc

SEQ ID NO: 456315 - DNA, 33 bp, Homo sapien
ggccttgtgtataaggacactgatcccaatcat

SEQ ID NO: 456316 - DNA, 33 bp, Homo sapien
ggccttgtgtataagggcactgatcccaatcat

SEQ ID NO: 456317 - DNA, 33 bp, Homo sapien
tgtttccaaaggttggcaactgaaacagagaag

SEQ ID NO: 456318 - DNA, 33 bp, Homo sapien
tgtttccaaaggttggtaactgaaacagagaag

SEQ ID NO: 456319 - DNA, 33 bp, Homo sapien
tggatctcactctatcactgttatatgttacgt

SEQ ID NO: 456320 - DNA, 33 bp, Homo sapien
tggatctcactctatcgctgttatatgttacgt

SEQ ID NO: 456321 - DNA, 33 bp, Homo sapien
gcactttccttagtaacgtgaccaagtgcactt

SEQ ID NO: 456322 - DNA, 33 bp, Homo sapien
gcactttccttagtaatgtgaccaagtgcactt

SEQ ID NO: 456323 - DNA, 33 bp, Homo sapien
cttctggaacctccccaatttcagtgactgaat

SEQ ID NO: 456324 - DNA, 33 bp, Homo sapien
cttctggaacctccccgatttcagtgactgaat

SEQ ID NO: 456325 - DNA, 33 bp, Homo sapien
tggcctaggtttaaacagaaaatgccttcatac

SEQ ID NO: 456326 - DNA, 33 bp, Homo sapien
tggcctaggtttaaacggaaaatgccttcatac

SEQ ID NO: 456327 - DNA, 33 bp, Homo sapien
aaattggcttctgaaacctgaatgattcaagtt

SEQ ID NO: 456328 - DNA, 33 bp, Homo sapien
aaattggcttctgaaagctgaatgattcaagtt

SEQ ID NO: 456329 - DNA, 33 bp, Homo sapien
aaataaaatgaagagacatttgaaagttgcagc

SEQ ID NO: 456330 - DNA, 33 bp, Homo sapien
aaataaaatgaagagatatttgaaagttgcagc

SEQ ID NO: 456331 - DNA, 33 bp, Homo sapien
aacaggtttataaagacatcaacaatcagagaa

SEQ ID NO: 456332 - DNA, 33 bp, Homo sapien
aacaggtttataaagagatcaacaatcagagaa

SEQ ID NO: 456333 - DNA, 33 bp, Homo sapien
gtgttacctggaaaaaattaaagcagccattac

SEQ ID NO: 456334 - DNA, 33 bp, Homo sapien
gtgttacctggaaaaatttaaagcagccattac

SEQ ID NO: 456335 - DNA, 33 bp, Homo sapien
tttctggggaaactcacaagaagagaaataggg

SEQ ID NO: 456336 - DNA, 33 bp, Homo sapien
tttctggggaaactcataagaagagaaataggg

SEQ ID NO: 456337 - DNA, 33 bp, Homo sapien
tagcatgatcacatgacacaaggtcgatataaa

SEQ ID NO: 456338 - DNA, 33 bp, Homo sapien
tagcatgatcacatgatacaaggtcgatataaa

SEQ ID NO: 456339 - DNA, 33 bp, Homo sapien
tcgtgctgctcagcaacgaccattcctttcaga

SEQ ID NO: 456340 - DNA, 33 bp, Homo sapien
tcgtgctgctcagcaatgaccattcctttcaga

SEQ ID NO: 456341 - DNA, 33 bp, Homo sapien
tcttctatcctctaatcacccctactcaaatgc

SEQ ID NO: 456342 - DNA, 33 bp, Homo sapien
tcttctatcctctaatgacccctactcaaatgc

SEQ ID NO: 456343 - DNA, 33 bp, Homo sapien
atcaggttgtagcaacaggaaaattattagaat

SEQ ID NO: 456344 - DNA, 33 bp, Homo sapien
atcaggttgtagcaacgggaaaattattagaat

SEQ ID NO: 456345 - DNA, 33 bp, Homo sapien
cctagattccagaaggcatttgaacttccttaa

SEQ ID NO: 456346 - DNA, 33 bp, Homo sapien
cctagattccagaaggtatttgaacttccttaa

SEQ ID NO: 456347 - DNA, 33 bp, Homo sapien
tcattacatctactgaagcaaaaatggattcct

SEQ ID NO: 456348 - DNA, 33 bp, Homo sapien
tcattacatctactgaggcaaaaatggattcct

SEQ ID NO: 456349 - DNA, 33 bp, Homo sapien
ctgaagacacgcccgaagttctctgtcccgagg

SEQ ID NO: 456350 - DNA, 33 bp, Homo sapien
ctgaagacacgcccgacgttctctgtcccgagg

SEQ ID NO: 456351 - DNA, 33 bp, Homo sapien
gtctctccctttcgcacggcaaaaccagggatc

SEQ ID NO: 456352 - DNA, 33 bp, Homo sapien
gtctctccctttcgcatggcaaaaccagggatc

SEQ ID NO: 456353 - DNA, 33 bp, Homo sapien
agctctatcctaagataagccttaacatttaca

SEQ ID NO: 456354 - DNA, 33 bp, Homo sapien
agctctatcctaagatgagccttaacatttaca

SEQ ID NO: 456355 - DNA, 33 bp, Homo sapien
gtataaatgtataacaataattggctttgtaaa

SEQ ID NO: 456356 - DNA, 33 bp, Homo sapien
gtataaatgtataacagtaattggctttgtaaa

SEQ ID NO: 456357 - DNA, 33 bp, Homo sapien
tcattgacaggaaagcactgccatgagcaaact

SEQ ID NO: 456358 - DNA, 33 bp, Homo sapien
tcattgacaggaaagcgctgccatgagcaaact

SEQ ID NO: 456359 - DNA, 33 bp, Homo sapien
tggcctgaggtgagaaacttgcagcctgcaaat

SEQ ID NO: 456360 - DNA, 33 bp, Homo sapien
tggcctgaggtgagaagcttgcagcctgcaaat

SEQ ID NO: 456361 - DNA, 33 bp, Homo sapien
gctgctacactgagggcccataagacaagtatg

SEQ ID NO: 456362 - DNA, 33 bp, Homo sapien
gctgctacactgagggtccataagacaagtatg

SEQ ID NO: 456363 - DNA, 33 bp, Homo sapien
ctcacatttttttacacgtcaacctctctgaaa

SEQ ID NO: 456364 - DNA, 33 bp, Homo sapien
ctcacatttttttacatgtcaacctctctgaaa

SEQ ID NO: 456365 - DNA, 33 bp, Homo sapien
ctgagctgtcaaaatcacgaaccttttggtggt

SEQ ID NO: 456366 - DNA, 33 bp, Homo sapien
ctgagctgtcaaaatcgcgaaccttttggtggt

SEQ ID NO: 456367 - DNA, 33 bp, Homo sapien
tggagaccacaaatccagcctcgggtaacaaca

SEQ ID NO: 456368 - DNA, 33 bp, Homo sapien
tggagaccacaaatccggcctcgggtaacaaca

SEQ ID NO: 456369 - DNA, 33 bp, Homo sapien
gctcttgtctcgcttacgctctaggtttgcact

SEQ ID NO: 456370 - DNA, 33 bp, Homo sapien
gctcttgtctcgcttatgctctaggtttgcact

SEQ ID NO: 456371 - DNA, 33 bp, Homo sapien
agtgtggaatacagaacgtgtgaaagcagagaa

SEQ ID NO: 456372 - DNA, 33 bp, Homo sapien
agtgtggaatacagaatgtgtgaaagcagagaa

SEQ ID NO: 456373 - DNA, 33 bp, Homo sapien
accagtgagttcaggacagtccgatggtgaaca

SEQ ID NO: 456374 - DNA, 33 bp, Homo sapien
accagtgagttcaggatagtccgatggtgaaca

SEQ ID NO: 456375 - DNA, 33 bp, Homo sapien
agattttccagtactcaccataacttataccca

SEQ ID NO: 456376 - DNA, 33 bp, Homo sapien
agattttccagtactcgccataacttataccca

SEQ ID NO: 456377 - DNA, 33 bp, Homo sapien
taagacacttactacccgatcctttatgaaaaa

SEQ ID NO: 456378 - DNA, 33 bp, Homo sapien
taagacacttactacctgatcctttatgaaaaa

SEQ ID NO: 456379 - DNA, 33 bp, Homo sapien
taatctgtgggcttcacaattaaatgagatgaa

SEQ ID NO: 456380 - DNA, 33 bp, Homo sapien
taatctgtgggcttcataattaaatgagatgaa

SEQ ID NO: 456381 - DNA, 33 bp, Homo sapien
gagaaaaagacaaaagcccctgctgtggtgggg

SEQ ID NO: 456382 - DNA, 33 bp, Homo sapien
gagaaaaagacaaaagtccctgctgtggtgggg

SEQ ID NO: 456383 - DNA, 33 bp, Homo sapien
attcccagagtgatagaaactactagaaaagta

SEQ ID NO: 456384 - DNA, 33 bp, Homo sapien
attcccagagtgataggaactactagaaaagta

SEQ ID NO: 456385 - DNA, 33 bp, Homo sapien
ccaatggctttccactgaaagaaggttctggaa

SEQ ID NO: 456386 - DNA, 33 bp, Homo sapien
ccaatggctttccacttaaagaaggttctggaa

SEQ ID NO: 456387 - DNA, 33 bp, Homo sapien
ctggcaattccagcccaccgtggcttgtgaact

SEQ ID NO: 456388 - DNA, 33 bp, Homo sapien
ctggcaattccagcccgccgtggcttgtgaact

SEQ ID NO: 456389 - DNA, 33 bp, Homo sapien
cataaaagaccacctccgaaccacctgtgtcag

SEQ ID NO: 456390 - DNA, 33 bp, Homo sapien
cataaaagaccacctctgaaccacctgtgtcag

SEQ ID NO: 456391 - DNA, 33 bp, Homo sapien
taataccatagggagaccttgtacccactttaa

SEQ ID NO: 456392 - DNA, 33 bp, Homo sapien
taataccatagggagagcttgtacccactttaa

SEQ ID NO: 456393 - DNA, 33 bp, Homo sapien
gctagataggcaggaaagtgatctattcccaat

SEQ ID NO: 456394 - DNA, 33 bp, Homo sapien
gctagataggcaggaatgtgatctattcccaat

SEQ ID NO: 456395 - DNA, 33 bp, Homo sapien
aaataagggcagaacacatatggtaggaggtgg

SEQ ID NO: 456396 - DNA, 33 bp, Homo sapien
aaataagggcagaacatatatggtaggaggtgg

SEQ ID NO: 456397 - DNA, 33 bp, Homo sapien
caggttctaagaaaataatcagctaagtgtaca

SEQ ID NO: 456398 - DNA, 33 bp, Homo sapien
caggttctaagaaaatcatcagctaagtgtaca

SEQ ID NO: 456399 - DNA, 33 bp, Homo sapien
ggaattcaagtccaaaagtcctcagataatgac

SEQ ID NO: 456400 - DNA, 33 bp, Homo sapien
ggaattcaagtccaaaggtcctcagataatgac

SEQ ID NO: 456401 - DNA, 33 bp, Homo sapien
gaaaaaaacgacagaaagaataaagcaccagtg

SEQ ID NO: 456402 - DNA, 33 bp, Homo sapien
gaaaaaaacgacagaatgaataaagcaccagtg

SEQ ID NO: 456403 - DNA, 33 bp, Homo sapien
taaccttgtactggacaaccttactggcacttg

SEQ ID NO: 456404 - DNA, 33 bp, Homo sapien
taaccttgtactggaccaccttactggcacttg

SEQ ID NO: 456405 - DNA, 33 bp, Homo sapien
cttcaattcatccaaaatttctggccacaaagt

SEQ ID NO: 456406 - DNA, 33 bp, Homo sapien
cttcaattcatccaaagtttctggccacaaagt

SEQ ID NO: 456407 - DNA, 33 bp, Homo sapien
tcagacatatggaattaaacacttgacctgctt

SEQ ID NO: 456408 - DNA, 33 bp, Homo sapien
tcagacatatggaattgaacacttgacctgctt

SEQ ID NO: 456409 - DNA, 33 bp, Homo sapien
atgtacctgggaaaaacagacataagctacaac

SEQ ID NO: 456410 - DNA, 33 bp, Homo sapien
atgtacctgggaaaaagagacataagctacaac

SEQ ID NO: 456411 - DNA, 33 bp, Homo sapien
atggctattagcaaaaggaatatgttctaatac

SEQ ID NO: 456412 - DNA, 33 bp, Homo sapien
atggctattagcaaaatgaatatgttctaatac

SEQ ID NO: 456413 - DNA, 33 bp, Homo sapien
taatttgtacttagacactgagaagacattatt

SEQ ID NO: 456414 - DNA, 33 bp, Homo sapien
taatttgtacttagacgctgagaagacattatt

SEQ ID NO: 456415 - DNA, 33 bp, Homo sapien
ggtttccacatttctcactcttcagcctagtgt

SEQ ID NO: 456416 - DNA, 33 bp, Homo sapien
ggtttccacatttctctctcttcagcctagtgt

SEQ ID NO: 456417 - DNA, 33 bp, Homo sapien
tgtcaccatattgttaactggtttttatgtaga

SEQ ID NO: 456418 - DNA, 33 bp, Homo sapien
tgtcaccatattgttagctggtttttatgtaga

SEQ ID NO: 456419 - DNA, 33 bp, Homo sapien
aaataatctgtacaacaaactgccatgatgcat

SEQ ID NO: 456420 - DNA, 33 bp, Homo sapien
aaataatctgtacaacgaactgccatgatgcat

SEQ ID NO: 456421 - DNA, 33 bp, Homo sapien
atttcttctttgctcaggaagctttgtttagcc

SEQ ID NO: 456422 - DNA, 33 bp, Homo sapien
atttcttctttgctcatgaagctttgtttagcc

SEQ ID NO: 456423 - DNA, 33 bp, Homo sapien
gaattatgtagagacaaactctgtgaatcattg

SEQ ID NO: 456424 - DNA, 33 bp, Homo sapien
gaattatgtagagacagactctgtgaatcattg

SEQ ID NO: 456425 - DNA, 33 bp, Homo sapien
ggtgccttcccagttgcatatcattgggtatct

SEQ ID NO: 456426 - DNA, 33 bp, Homo sapien
ggtgccttcccagttgtatatcattgggtatct

SEQ ID NO: 456427 - DNA, 33 bp, Homo sapien
taaaggtagccagagaaaagggtcatatcacct

SEQ ID NO: 456428 - DNA, 33 bp, Homo sapien
taaaggtagccagagagaagggtcatatcacct

SEQ ID NO: 456429 - DNA, 33 bp, Homo sapien
cctctgcccttgcaaacgcaggcaccactgttg

SEQ ID NO: 456430 - DNA, 33 bp, Homo sapien
cctctgcccttgcaaatgcaggcaccactgttg

SEQ ID NO: 456431 - DNA, 33 bp, Homo sapien
gatgctcttgaggctgcaaaaaaacaagaactc

SEQ ID NO: 456432 - DNA, 33 bp, Homo sapien
gatgctcttgaggctgtaaaaaaacaagaactc

SEQ ID NO: 456433 - DNA, 33 bp, Homo sapien
agaagacctggtttaccacaacaaggtcatgta

SEQ ID NO: 456434 - DNA, 33 bp, Homo sapien
agaagacctggtttactacaacaaggtcatgta

SEQ ID NO: 456435 - DNA, 33 bp, Homo sapien
tgactatttttagtaacagccattgtaacagaa

SEQ ID NO: 456436 - DNA, 33 bp, Homo sapien
tgactatttttagtaatagccattgtaacagaa

SEQ ID NO: 456437 - DNA, 33 bp, Homo sapien
ctgtcattgtgacccaatctgtaccaactagct

SEQ ID NO: 456438 - DNA, 33 bp, Homo sapien
ctgtcattgtgacccagtctgtaccaactagct

SEQ ID NO: 456439 - DNA, 33 bp, Homo sapien
aaaagaaactggaaaccggtgtctagatctcaa

SEQ ID NO: 456440 - DNA, 33 bp, Homo sapien
aaaagaaactggaaactggtgtctagatctcaa

SEQ ID NO: 456441 - DNA, 33 bp, Homo sapien
atgttaagctgcaaggacaaatgatatcttact

SEQ ID NO: 456442 - DNA, 33 bp, Homo sapien
atgttaagctgcaagggcaaatgatatcttact

SEQ ID NO: 456443 - DNA, 33 bp, Homo sapien
atagaggcctcgtgacacccacaagcatggcct

SEQ ID NO: 456444 - DNA, 33 bp, Homo sapien
atagaggcctcgtgacgcccacaagcatggcct

SEQ ID NO: 456445 - DNA, 33 bp, Homo sapien
caggtctccaggtttcacttccttcagttcact

SEQ ID NO: 456446 - DNA, 33 bp, Homo sapien
caggtctccaggtttcgcttccttcagttcact

SEQ ID NO: 456447 - DNA, 33 bp, Homo sapien
aatccaaacatgtaaaacaccactcacattttc

SEQ ID NO: 456448 - DNA, 33 bp, Homo sapien
aatccaaacatgtaaaccaccactcacattttc

SEQ ID NO: 456449 - DNA, 33 bp, Homo sapien
catcctgaacccaaaccatctctccccaaatcc

SEQ ID NO: 456450 - DNA, 33 bp, Homo sapien
catcctgaacccaaacgatctctccccaaatcc

SEQ ID NO: 456451 - DNA, 33 bp, Homo sapien
tagaatgctaagagaaaccctcctcataccagt

SEQ ID NO: 456452 - DNA, 33 bp, Homo sapien
tagaatgctaagagaacccctcctcataccagt

SEQ ID NO: 456453 - DNA, 33 bp, Homo sapien
tctcaccagttttttcaccagtgtcttgtttcc

SEQ ID NO: 456454 - DNA, 33 bp, Homo sapien
tctcaccagttttttcgccagtgtcttgtttcc

SEQ ID NO: 456455 - DNA, 33 bp, Homo sapien
aatttctcagttttggcagatgtgccctgggaa

SEQ ID NO: 456456 - DNA, 33 bp, Homo sapien
aatttctcagttttggtagatgtgccctgggaa

SEQ ID NO: 456457 - DNA, 33 bp, Homo sapien
catgtagggaggatgacgagaaaaggaggagtg

SEQ ID NO: 456458 - DNA, 33 bp, Homo sapien
catgtagggaggatgaggagaaaaggaggagtg

SEQ ID NO: 456459 - DNA, 33 bp, Homo sapien
ggacgctcactgaataagtattgggcgactgac

SEQ ID NO: 456460 - DNA, 33 bp, Homo sapien
ggacgctcactgaatacgtattgggcgactgac

SEQ ID NO: 456461 - DNA, 33 bp, Homo sapien
accagaagcttaaggaagcccaaggaacagcat

SEQ ID NO: 456462 - DNA, 33 bp, Homo sapien
accagaagcttaaggaggcccaaggaacagcat

SEQ ID NO: 456463 - DNA, 33 bp, Homo sapien
gtaaatctcattgcacactttcagaggccatct

SEQ ID NO: 456464 - DNA, 33 bp, Homo sapien
gtaaatctcattgcacgctttcagaggccatct

SEQ ID NO: 456465 - DNA, 33 bp, Homo sapien
gaatttgtttcctttaaaatcaaaattcttcaa

SEQ ID NO: 456466 - DNA, 33 bp, Homo sapien
gaatttgtttcctttacaatcaaaattcttcaa

SEQ ID NO: 456467 - DNA, 33 bp, Homo sapien
gaagactgcaaagacacggagaaacagttactg

SEQ ID NO: 456468 - DNA, 33 bp, Homo sapien
gaagactgcaaagacatggagaaacagttactg

SEQ ID NO: 456469 - DNA, 33 bp, Homo sapien
ttaccaatggtggatcacaacaacgctgacttg

SEQ ID NO: 456470 - DNA, 33 bp, Homo sapien
ttaccaatggtggatcgcaacaacgctgacttg

SEQ ID NO: 456471 - DNA, 33 bp, Homo sapien
aacatttgttcttctacgaagggctctcagagg

SEQ ID NO: 456472 - DNA, 33 bp, Homo sapien
aacatttgttcttctatgaagggctctcagagg

SEQ ID NO: 456473 - DNA, 33 bp, Homo sapien
ctgcatagaaaatagaatatggagcttcctata

SEQ ID NO: 456474 - DNA, 33 bp, Homo sapien
ctgcatagaaaatagactatggagcttcctata

SEQ ID NO: 456475 - DNA, 33 bp, Homo sapien
aaagaaggcagcaaaacaagccttgaatggatg

SEQ ID NO: 456476 - DNA, 33 bp, Homo sapien
aaagaaggcagcaaaataagccttgaatggatg

SEQ ID NO: 456477 - DNA, 33 bp, Homo sapien
catttttctggaggcaccctgtccttacactat

SEQ ID NO: 456478 - DNA, 33 bp, Homo sapien
catttttctggaggcatcctgtccttacactat

SEQ ID NO: 456479 - DNA, 33 bp, Homo sapien
aaccccatgcttggaaagtgtgtggacacacag

SEQ ID NO: 456480 - DNA, 33 bp, Homo sapien
aaccccatgcttggaaggtgtgtggacacacag

SEQ ID NO: 456481 - DNA, 33 bp, Homo sapien
ccacgaaaccattcaccgagactgtggtgttgc

SEQ ID NO: 456482 - DNA, 33 bp, Homo sapien
ccacgaaaccattcactgagactgtggtgttgc

SEQ ID NO: 456483 - DNA, 33 bp, Homo sapien
agaagacacgctagacaaagggcgtccatccag

SEQ ID NO: 456484 - DNA, 33 bp, Homo sapien
agaagacacgctagacgaagggcgtccatccag

SEQ ID NO: 456485 - DNA, 33 bp, Homo sapien
agcttgccgacaactcagacatgtcaacccagc

SEQ ID NO: 456486 - DNA, 33 bp, Homo sapien
agcttgccgacaactcggacatgtcaacccagc

SEQ ID NO: 456487 - DNA, 33 bp, Homo sapien
cttcctcaaatcccagcatctcactgcctcact

SEQ ID NO: 456488 - DNA, 33 bp, Homo sapien
cttcctcaaatcccaggatctcactgcctcact

SEQ ID NO: 456489 - DNA, 33 bp, Homo sapien
atcccagtatgaaaccagcagactcattttaca

SEQ ID NO: 456490 - DNA, 33 bp, Homo sapien
atcccagtatgaaacctgcagactcattttaca

SEQ ID NO: 456491 - DNA, 33 bp, Homo sapien
gttcactcacttattacctattaatgtgtagat

SEQ ID NO: 456492 - DNA, 33 bp, Homo sapien
gttcactcacttattagctattaatgtgtagat

SEQ ID NO: 456493 - DNA, 33 bp, Homo sapien
ggatgcttgagtaaaaatctgaaagatgaatac

SEQ ID NO: 456494 - DNA, 33 bp, Homo sapien
ggatgcttgagtaaaactctgaaagatgaatac

SEQ ID NO: 456495 - DNA, 33 bp, Homo sapien
acattccttgtttgcaggagtagagtaatccct

SEQ ID NO: 456496 - DNA, 33 bp, Homo sapien
acattccttgtttgcatgagtagagtaatccct

SEQ ID NO: 456497 - DNA, 33 bp, Homo sapien
tttgttttctctttcccgagaggcagtccctgc

SEQ ID NO: 456498 - DNA, 33 bp, Homo sapien
tttgttttctctttcctgagaggcagtccctgc

SEQ ID NO: 456499 - DNA, 33 bp, Homo sapien
ataggggaaggtgagcaaatgagctgattagtg

SEQ ID NO: 456500 - DNA, 33 bp, Homo sapien
ataggggaaggtgagcgaatgagctgattagtg

SEQ ID NO: 456501 - DNA, 33 bp, Homo sapien
acaggtgtgagccactcaatgtaatttaaatag

SEQ ID NO: 456502 - DNA, 33 bp, Homo sapien
acaggtgtgagccacttaatgtaatttaaatag

SEQ ID NO: 456503 - DNA, 33 bp, Homo sapien
tcatgtttttaaatgaacaaggagcactgttat

SEQ ID NO: 456504 - DNA, 33 bp, Homo sapien
tcatgtttttaaatgagcaaggagcactgttat

SEQ ID NO: 456505 - DNA, 33 bp, Homo sapien
atcccagaaacaggtcacctgtccctgcctaac

SEQ ID NO: 456506 - DNA, 33 bp, Homo sapien
atcccagaaacaggtcgcctgtccctgcctaac

SEQ ID NO: 456507 - DNA, 33 bp, Homo sapien
ctagctacagattatgcacagatgatgcagcct

SEQ ID NO: 456508 - DNA, 33 bp, Homo sapien
ctagctacagattatggacagatgatgcagcct

SEQ ID NO: 456509 - DNA, 33 bp, Homo sapien
aaatgactgcatcaaagaatgaacgtattacaa

SEQ ID NO: 456510 - DNA, 33 bp, Homo sapien
aaatgactgcatcaaataatgaacgtattacaa

SEQ ID NO: 456511 - DNA, 33 bp, Homo sapien
ctttgtatcagaacaacttgtaatacgttcatt

SEQ ID NO: 456512 - DNA, 33 bp, Homo sapien
ctttgtatcagaacaatttgtaatacgttcatt

SEQ ID NO: 456513 - DNA, 33 bp, Homo sapien
atacagtaagcactataataggtacaggcaggg

SEQ ID NO: 456514 - DNA, 33 bp, Homo sapien
atacagtaagcactatgataggtacaggcaggg

SEQ ID NO: 456515 - DNA, 33 bp, Homo sapien
ggccatcaggggccaacgagggtcctggcactt

SEQ ID NO: 456516 - DNA, 33 bp, Homo sapien
ggccatcaggggccaatgagggtcctggcactt

SEQ ID NO: 456517 - DNA, 33 bp, Homo sapien
agaacatctggcaccaggctgaaccaatatgct

SEQ ID NO: 456518 - DNA, 33 bp, Homo sapien
agaacatctggcaccatgctgaaccaatatgct

SEQ ID NO: 456519 - DNA, 33 bp, Homo sapien
cccacatcttcatcacaaggtctgcttctggtt

SEQ ID NO: 456520 - DNA, 33 bp, Homo sapien
cccacatcttcatcacgaggtctgcttctggtt

SEQ ID NO: 456521 - DNA, 33 bp, Homo sapien
tatcgaacaatgaagccccttctctagtcatca

SEQ ID NO: 456522 - DNA, 33 bp, Homo sapien
tatcgaacaatgaagctccttctctagtcatca

SEQ ID NO: 456523 - DNA, 33 bp, Homo sapien
tttggagatggtcttggatatgtttaggttatt

SEQ ID NO: 456524 - DNA, 33 bp, Homo sapien
tttggagatggtcttgtatatgtttaggttatt

SEQ ID NO: 456525 - DNA, 33 bp, Homo sapien
tgcaagtagttgtaacaatgcctggagcataat

SEQ ID NO: 456526 - DNA, 33 bp, Homo sapien
tgcaagtagttgtaacgatgcctggagcataat

SEQ ID NO: 456527 - DNA, 33 bp, Homo sapien
agatattgagctagacgcttctctcaacatggc

SEQ ID NO: 456528 - DNA, 33 bp, Homo sapien
agatattgagctagactcttctctcaacatggc

SEQ ID NO: 456529 - DNA, 33 bp, Homo sapien
ggggcacaagtgtgaaacgctggggcaggggag

SEQ ID NO: 456530 - DNA, 33 bp, Homo sapien
ggggcacaagtgtgaagcgctggggcaggggag

SEQ ID NO: 456531 - DNA, 33 bp, Homo sapien
tagaaaaataggaatccaacatatcacacccat

SEQ ID NO: 456532 - DNA, 33 bp, Homo sapien
tagaaaaataggaatctaacatatcacacccat

SEQ ID NO: 456533 - DNA, 33 bp, Homo sapien
tgagggctgcttctgaagtgtgcaagaatggcc

SEQ ID NO: 456534 - DNA, 33 bp, Homo sapien
tgagggctgcttctgacgtgtgcaagaatggcc

SEQ ID NO: 456535 - DNA, 33 bp, Homo sapien
catgagatggcaatgaaggaggtggagccctaa

SEQ ID NO: 456536 - DNA, 33 bp, Homo sapien
catgagatggcaatgacggaggtggagccctaa

SEQ ID NO: 456537 - DNA, 33 bp, Homo sapien
gactggactctcagccactgtgctgcactagtc

SEQ ID NO: 456538 - DNA, 33 bp, Homo sapien
gactggactctcagccgctgtgctgcactagtc

SEQ ID NO: 456539 - DNA, 33 bp, Homo sapien
aagatacaggcatacaaaacaaggtaattcttt

SEQ ID NO: 456540 - DNA, 33 bp, Homo sapien
aagatacaggcatacagaacaaggtaattcttt

SEQ ID NO: 456541 - DNA, 33 bp, Homo sapien
atttatttagttggccactgtactgataaaggg

SEQ ID NO: 456542 - DNA, 33 bp, Homo sapien
atttatttagttggccgctgtactgataaaggg

SEQ ID NO: 456543 - DNA, 33 bp, Homo sapien
aacaataagacaaatacccagaaaataaaacta

SEQ ID NO: 456544 - DNA, 33 bp, Homo sapien
aacaataagacaaatatccagaaaataaaacta

SEQ ID NO: 456545 - DNA, 33 bp, Homo sapien
tactaacagaatacggaacatggcgctcattct

SEQ ID NO: 456546 - DNA, 33 bp, Homo sapien
tactaacagaatacggcacatggcgctcattct

SEQ ID NO: 456547 - DNA, 33 bp, Homo sapien
ggtgataagaaattaacgaaagtgcagagcgta

SEQ ID NO: 456548 - DNA, 33 bp, Homo sapien
ggtgataagaaattaatgaaagtgcagagcgta

SEQ ID NO: 456549 - DNA, 33 bp, Homo sapien
tgcctaagaaaagcacacctaagtacacatggg

SEQ ID NO: 456550 - DNA, 33 bp, Homo sapien
tgcctaagaaaagcacgcctaagtacacatggg

SEQ ID NO: 456551 - DNA, 33 bp, Homo sapien
ccaggattaaggaccagaagtgcatatatatat

SEQ ID NO: 456552 - DNA, 33 bp, Homo sapien
ccaggattaaggaccataagtgcatatatatat

SEQ ID NO: 456553 - DNA, 33 bp, Homo sapien
ccaacgctgaaatagacggtgctagtgtatgca

SEQ ID NO: 456554 - DNA, 33 bp, Homo sapien
ccaacgctgaaatagatggtgctagtgtatgca

SEQ ID NO: 456555 - DNA, 33 bp, Homo sapien
gagacaagccacttgaactttctaagcctccca

SEQ ID NO: 456556 - DNA, 33 bp, Homo sapien
gagacaagccacttgacctttctaagcctccca

SEQ ID NO: 456557 - DNA, 33 bp, Homo sapien
ttccaaacacgtccatcaacacaaggctccccc

SEQ ID NO: 456558 - DNA, 33 bp, Homo sapien
ttccaaacacgtccattaacacaaggctccccc

SEQ ID NO: 456559 - DNA, 33 bp, Homo sapien
catgtggcacaaaaccaatcttggcatccaatg

SEQ ID NO: 456560 - DNA, 33 bp, Homo sapien
catgtggcacaaaaccgatcttggcatccaatg

SEQ ID NO: 456561 - DNA, 33 bp, Homo sapien
ctgaactatccttttacggcaaatgtttgctta

SEQ ID NO: 456562 - DNA, 33 bp, Homo sapien
ctgaactatccttttatggcaaatgtttgctta

SEQ ID NO: 456563 - DNA, 33 bp, Homo sapien
tttgcatttttctgataactaattttgagtttt

SEQ ID NO: 456564 - DNA, 33 bp, Homo sapien
tttgcatttttctgatgactaattttgagtttt

SEQ ID NO: 456565 - DNA, 33 bp, Homo sapien
agtctagtagacccaaattctctgagttttaga

SEQ ID NO: 456566 - DNA, 33 bp, Homo sapien
agtctagtagacccaacttctctgagttttaga

SEQ ID NO: 456567 - DNA, 33 bp, Homo sapien
gattgaactgtacctgaagccagtccatattta

SEQ ID NO: 456568 - DNA, 33 bp, Homo sapien
gattgaactgtacctgcagccagtccatattta

SEQ ID NO: 456569 - DNA, 33 bp, Homo sapien
atagagaccaagagataaaggagaggaactgtg

SEQ ID NO: 456570 - DNA, 33 bp, Homo sapien
atagagaccaagagatcaaggagaggaactgtg

SEQ ID NO: 456571 - DNA, 33 bp, Homo sapien
tttattctaccttgaaatataaattccttgcaa

SEQ ID NO: 456572 - DNA, 33 bp, Homo sapien
tttattctaccttgaagtataaattccttgcaa

SEQ ID NO: 456573 - DNA, 33 bp, Homo sapien
atttggagttagcagaaaagaatgttttaagtt

SEQ ID NO: 456574 - DNA, 33 bp, Homo sapien
atttggagttagcagagaagaatgttttaagtt

SEQ ID NO: 456575 - DNA, 33 bp, Homo sapien
accccttgtctggcacagccttaggtcctgttt

SEQ ID NO: 456576 - DNA, 33 bp, Homo sapien
accccttgtctggcacggccttaggtcctgttt

SEQ ID NO: 456577 - DNA, 33 bp, Homo sapien
gtgctgtgagtggtgccacctacttaggaatca

SEQ ID NO: 456578 - DNA, 33 bp, Homo sapien
gtgctgtgagtggtgctacctacttaggaatca

SEQ ID NO: 456579 - DNA, 33 bp, Homo sapien
tttggcacaagggatacgtttttaggccctgag

SEQ ID NO: 456580 - DNA, 33 bp, Homo sapien
tttggcacaagggatatgtttttaggccctgag

SEQ ID NO: 456581 - DNA, 33 bp, Homo sapien
cgcattcccaggtcacagtagcgaaccagcccc

SEQ ID NO: 456582 - DNA, 33 bp, Homo sapien
cgcattcccaggtcacggtagcgaaccagcccc

SEQ ID NO: 456583 - DNA, 33 bp, Homo sapien
cattcttgcagcatgacaaagtgtgagatacac

SEQ ID NO: 456584 - DNA, 33 bp, Homo sapien
cattcttgcagcatgataaagtgtgagatacac

SEQ ID NO: 456585 - DNA, 33 bp, Homo sapien
ttgaagctcttgtccccgatcaatccctccatg

SEQ ID NO: 456586 - DNA, 33 bp, Homo sapien
ttgaagctcttgtccctgatcaatccctccatg

SEQ ID NO: 456587 - DNA, 33 bp, Homo sapien
tcaggcaggacttgcaaaaagtgaaatgattca

SEQ ID NO: 456588 - DNA, 33 bp, Homo sapien
tcaggcaggacttgcagaaagtgaaatgattca

SEQ ID NO: 456589 - DNA, 33 bp, Homo sapien
ctcacagggatgaatgcattgctcagaaacacg

SEQ ID NO: 456590 - DNA, 33 bp, Homo sapien
ctcacagggatgaatgtattgctcagaaacacg

SEQ ID NO: 456591 - DNA, 33 bp, Homo sapien
acacctatgccttcaaacagcagtctcagggaa

SEQ ID NO: 456592 - DNA, 33 bp, Homo sapien
acacctatgccttcaagcagcagtctcagggaa

SEQ ID NO: 456593 - DNA, 33 bp, Homo sapien
tgttgctgtcaaaatacgactattacattcccc

SEQ ID NO: 456594 - DNA, 33 bp, Homo sapien
tgttgctgtcaaaataggactattacattcccc

SEQ ID NO: 456595 - DNA, 33 bp, Homo sapien
aggtctcggtgcaggacgggcttgcttcggtca

SEQ ID NO: 456596 - DNA, 33 bp, Homo sapien
aggtctcggtgcaggatgggcttgcttcggtca

SEQ ID NO: 456597 - DNA, 33 bp, Homo sapien
gggagtgcagggaagaccaggctgacttctggc

SEQ ID NO: 456598 - DNA, 33 bp, Homo sapien
gggagtgcagggaagagcaggctgacttctggc

SEQ ID NO: 456599 - DNA, 33 bp, Homo sapien
agcaatgccaaatgacacgcagctagagtcaag

SEQ ID NO: 456600 - DNA, 33 bp, Homo sapien
agcaatgccaaatgacgcgcagctagagtcaag

SEQ ID NO: 456601 - DNA, 33 bp, Homo sapien
gatcacagcagattccaggaagttggtgccctt

SEQ ID NO: 456602 - DNA, 33 bp, Homo sapien
gatcacagcagattccgggaagttggtgccctt

SEQ ID NO: 456603 - DNA, 33 bp, Homo sapien
cacaaaggactcttcccaatctgatgctcatgt

SEQ ID NO: 456604 - DNA, 33 bp, Homo sapien
cacaaaggactcttcctaatctgatgctcatgt

SEQ ID NO: 456605 - DNA, 33 bp, Homo sapien
aatcacagaagaaagcaaagccgagtagcagag

SEQ ID NO: 456606 - DNA, 33 bp, Homo sapien
aatcacagaagaaagccaagccgagtagcagag

SEQ ID NO: 456607 - DNA, 33 bp, Homo sapien
gccaatagaaactcaaggttttgtaggaagctg

SEQ ID NO: 456608 - DNA, 33 bp, Homo sapien
gccaatagaaactcaatgttttgtaggaagctg

SEQ ID NO: 456609 - DNA, 33 bp, Homo sapien
tgtcccctggtgcagacgcagtgagttcatgcc

SEQ ID NO: 456610 - DNA, 33 bp, Homo sapien
tgtcccctggtgcagatgcagtgagttcatgcc

SEQ ID NO: 456611 - DNA, 33 bp, Homo sapien
ctgctgagagttacaaaaggagccattagcact

SEQ ID NO: 456612 - DNA, 33 bp, Homo sapien
ctgctgagagttacaacaggagccattagcact

SEQ ID NO: 456613 - DNA, 33 bp, Homo sapien
accaaaatgaaatcaacgttagagagtctgtgg

SEQ ID NO: 456614 - DNA, 33 bp, Homo sapien
accaaaatgaaatcaatgttagagagtctgtgg

SEQ ID NO: 456615 - DNA, 33 bp, Homo sapien
ttcaacgggactttgacgtttaaatctaccctt

SEQ ID NO: 456616 - DNA, 33 bp, Homo sapien
ttcaacgggactttgatgtttaaatctaccctt

SEQ ID NO: 456617 - DNA, 33 bp, Homo sapien
gttaagtttatgtcaacttaaggtcaaatatat

SEQ ID NO: 456618 - DNA, 33 bp, Homo sapien
gttaagtttatgtcaatttaaggtcaaatatat

SEQ ID NO: 456619 - DNA, 33 bp, Homo sapien
aaagcctgcgagagcaaactggcctttgcaccc

SEQ ID NO: 456620 - DNA, 33 bp, Homo sapien
aaagcctgcgagagcatactggcctttgcaccc

SEQ ID NO: 456621 - DNA, 33 bp, Homo sapien
gagttgtcccataacaaatgattggcattaagg

SEQ ID NO: 456622 - DNA, 33 bp, Homo sapien
gagttgtcccataacagatgattggcattaagg

SEQ ID NO: 456623 - DNA, 33 bp, Homo sapien
ttgaaagcatgccaagaattatgtaagtacttc

SEQ ID NO: 456624 - DNA, 33 bp, Homo sapien
ttgaaagcatgccaagcattatgtaagtacttc

SEQ ID NO: 456625 - DNA, 33 bp, Homo sapien
cattccggcatcaacaatgtcccctggccagac

SEQ ID NO: 456626 - DNA, 33 bp, Homo sapien
cattccggcatcaacagtgtcccctggccagac

SEQ ID NO: 456627 - DNA, 33 bp, Homo sapien
ggtaaatgggcctctgaagaaattccactgaga

SEQ ID NO: 456628 - DNA, 33 bp, Homo sapien
ggtaaatgggcctctgcagaaattccactgaga

SEQ ID NO: 456629 - DNA, 33 bp, Homo sapien
atgttgtatttgaggaacttatttctcactaac

SEQ ID NO: 456630 - DNA, 33 bp, Homo sapien
atgttgtatttgaggagcttatttctcactaac

SEQ ID NO: 456631 - DNA, 33 bp, Homo sapien
gctgcagaggctagcacgtctctcaagtctgga

SEQ ID NO: 456632 - DNA, 33 bp, Homo sapien
gctgcagaggctagcatgtctctcaagtctgga

SEQ ID NO: 456633 - DNA, 33 bp, Homo sapien
gcacaagagtggatgaaaaatttgcttcttgac

SEQ ID NO: 456634 - DNA, 33 bp, Homo sapien
gcacaagagtggatgacaaatttgcttcttgac

SEQ ID NO: 456635 - DNA, 33 bp, Homo sapien
gggctttcttggctcccatattgttgctgcaca

SEQ ID NO: 456636 - DNA, 33 bp, Homo sapien
gggctttcttggctcctatattgttgctgcaca

SEQ ID NO: 456637 - DNA, 33 bp, Homo sapien
aaaggatggagaaagacagagaagtgcagagac

SEQ ID NO: 456638 - DNA, 33 bp, Homo sapien
aaaggatggagaaagagagagaagtgcagagac

SEQ ID NO: 456639 - DNA, 33 bp, Homo sapien
actgttggctagagaaaggatagcatgaccttc

SEQ ID NO: 456640 - DNA, 33 bp, Homo sapien
actgttggctagagaagggatagcatgaccttc

SEQ ID NO: 456641 - DNA, 33 bp, Homo sapien
tcactgggtgtatgcccgaagtttccatgttta

SEQ ID NO: 456642 - DNA, 33 bp, Homo sapien
tcactgggtgtatgcctgaagtttccatgttta

SEQ ID NO: 456643 - DNA, 33 bp, Homo sapien
tttgtttgaactctagaattttgcaatttgtgc

SEQ ID NO: 456644 - DNA, 33 bp, Homo sapien
tttgtttgaactctagtattttgcaatttgtgc

SEQ ID NO: 456645 - DNA, 33 bp, Homo sapien
ttggctttctgttgaagacatcatttgtggaat

SEQ ID NO: 456646 - DNA, 33 bp, Homo sapien
ttggctttctgttgaatacatcatttgtggaat

SEQ ID NO: 456647 - DNA, 33 bp, Homo sapien
ggacagccagggaagacgatgttagaacacaca

SEQ ID NO: 456648 - DNA, 33 bp, Homo sapien
ggacagccagggaagatgatgttagaacacaca

SEQ ID NO: 456649 - DNA, 33 bp, Homo sapien
catttagttctgaataagggcttccatttgatc

SEQ ID NO: 456650 - DNA, 33 bp, Homo sapien
catttagttctgaataggggcttccatttgatc

SEQ ID NO: 456651 - DNA, 33 bp, Homo sapien
gcaggatttgaccttgcatagagagaggagttc

SEQ ID NO: 456652 - DNA, 33 bp, Homo sapien
gcaggatttgaccttgtatagagagaggagttc

SEQ ID NO: 456653 - DNA, 33 bp, Homo sapien
atggttaacattactacgatgagttccaaagga

SEQ ID NO: 456654 - DNA, 33 bp, Homo sapien
atggttaacattactatgatgagttccaaagga

SEQ ID NO: 456655 - DNA, 33 bp, Homo sapien
aaaacacaacaaaaaaacaatctgtgaaattag

SEQ ID NO: 456656 - DNA, 33 bp, Homo sapien
aaaacacaacaaaaaaccaatctgtgaaattag

SEQ ID NO: 456657 - DNA, 33 bp, Homo sapien
atattgtggtttgtacaccaatttagcttcagt

SEQ ID NO: 456658 - DNA, 33 bp, Homo sapien
atattgtggtttgtacgccaatttagcttcagt

SEQ ID NO: 456659 - DNA, 33 bp, Homo sapien
gtcactgagggcatgaacttttgaaataattga

SEQ ID NO: 456660 - DNA, 33 bp, Homo sapien
gtcactgagggcatgaccttttgaaataattga

SEQ ID NO: 456661 - DNA, 33 bp, Homo sapien
actatggaattttcccaagtagaaactagatcc

SEQ ID NO: 456662 - DNA, 33 bp, Homo sapien
actatggaattttccccagtagaaactagatcc

SEQ ID NO: 456663 - DNA, 33 bp, Homo sapien
cactgagctcttcgcaagggctattccacaccc

SEQ ID NO: 456664 - DNA, 33 bp, Homo sapien
cactgagctcttcgcaggggctattccacaccc

SEQ ID NO: 456665 - DNA, 33 bp, Homo sapien
gtagtggtgagaagaccaacttcccaaatatta

SEQ ID NO: 456666 - DNA, 33 bp, Homo sapien
gtagtggtgagaagactaacttcccaaatatta

SEQ ID NO: 456667 - DNA, 33 bp, Homo sapien
ttcatttctccatcaaaacagttcatcctagac

SEQ ID NO: 456668 - DNA, 33 bp, Homo sapien
ttcatttctccatcaacacagttcatcctagac

SEQ ID NO: 456669 - DNA, 33 bp, Homo sapien
ttcaggcttgagaacaagatgactgaaggtagg

SEQ ID NO: 456670 - DNA, 33 bp, Homo sapien
ttcaggcttgagaacaggatgactgaaggtagg

SEQ ID NO: 456671 - DNA, 33 bp, Homo sapien
tgggtgctaccttcataagtaccttgaaataca

SEQ ID NO: 456672 - DNA, 33 bp, Homo sapien
tgggtgctaccttcattagtaccttgaaataca

SEQ ID NO: 456673 - DNA, 33 bp, Homo sapien
aatcaatataactgccaaaaagctctgaattag

SEQ ID NO: 456674 - DNA, 33 bp, Homo sapien
aatcaatataactgccgaaaagctctgaattag

SEQ ID NO: 456675 - DNA, 33 bp, Homo sapien
gggagagggacagatcaaaagccttctagcaaa

SEQ ID NO: 456676 - DNA, 33 bp, Homo sapien
gggagagggacagatcgaaagccttctagcaaa

SEQ ID NO: 456677 - DNA, 33 bp, Homo sapien
attacaaacatttagccagtttctacttttacc

SEQ ID NO: 456678 - DNA, 33 bp, Homo sapien
attacaaacatttagcgagtttctacttttacc

SEQ ID NO: 456679 - DNA, 33 bp, Homo sapien
ggtcaacagtgaaatgaaggtctcgcttccctt

SEQ ID NO: 456680 - DNA, 33 bp, Homo sapien
ggtcaacagtgaaatgcaggtctcgcttccctt

SEQ ID NO: 456681 - DNA, 33 bp, Homo sapien
tgtccccatctaaatccgatgttcacttgtgat

SEQ ID NO: 456682 - DNA, 33 bp, Homo sapien
tgtccccatctaaatctgatgttcacttgtgat

SEQ ID NO: 456683 - DNA, 33 bp, Homo sapien
cattgcacaagcaatgacaattaacacctgctc

SEQ ID NO: 456684 - DNA, 33 bp, Homo sapien
cattgcacaagcaatggcaattaacacctgctc

SEQ ID NO: 456685 - DNA, 33 bp, Homo sapien
cagttaactgagagatcattaagcatcactctt

SEQ ID NO: 456686 - DNA, 33 bp, Homo sapien
cagttaactgagagattattaagcatcactctt

SEQ ID NO: 456687 - DNA, 33 bp, Homo sapien
aagatgcactcggtcacatttgtggaagctacg

SEQ ID NO: 456688 - DNA, 33 bp, Homo sapien
aagatgcactcggtcagatttgtggaagctacg

SEQ ID NO: 456689 - DNA, 33 bp, Homo sapien
ttgagaaactgcatgaacaaacaagatgatcaa

SEQ ID NO: 456690 - DNA, 33 bp, Homo sapien
ttgagaaactgcatgagcaaacaagatgatcaa

SEQ ID NO: 456691 - DNA, 33 bp, Homo sapien
gctttctgtagaagccaataggaatagtttaga

SEQ ID NO: 456692 - DNA, 33 bp, Homo sapien
gctttctgtagaagcccataggaatagtttaga

SEQ ID NO: 456693 - DNA, 33 bp, Homo sapien
agtgaaagaaggaagacgcaataggccacatag

SEQ ID NO: 456694 - DNA, 33 bp, Homo sapien
agtgaaagaaggaagatgcaataggccacatag

SEQ ID NO: 456695 - DNA, 33 bp, Homo sapien
ttttcagatagacaacggtgagtatgagtattt

SEQ ID NO: 456696 - DNA, 33 bp, Homo sapien
ttttcagatagacaactgtgagtatgagtattt

SEQ ID NO: 456697 - DNA, 33 bp, Homo sapien
aagcttcactgagtaccggctgtgtaacctcag

SEQ ID NO: 456698 - DNA, 33 bp, Homo sapien
aagcttcactgagtactggctgtgtaacctcag

SEQ ID NO: 456699 - DNA, 33 bp, Homo sapien
acattgagtctagcaacgcacacctcccaggac

SEQ ID NO: 456700 - DNA, 33 bp, Homo sapien
acattgagtctagcaatgcacacctcccaggac

SEQ ID NO: 456701 - DNA, 33 bp, Homo sapien
attcagatctatttggcacccagttatcactac

SEQ ID NO: 456702 - DNA, 33 bp, Homo sapien
attcagatctatttggtacccagttatcactac

SEQ ID NO: 456703 - DNA, 33 bp, Homo sapien
gtagattcaggaaaaacgtgtgggctgcggcat

SEQ ID NO: 456704 - DNA, 33 bp, Homo sapien
gtagattcaggaaaaatgtgtgggctgcggcat

SEQ ID NO: 456705 - DNA, 33 bp, Homo sapien
gtttgcattttatagacaaatctggtgctgctg

SEQ ID NO: 456706 - DNA, 33 bp, Homo sapien
gtttgcattttatagagaaatctggtgctgctg

SEQ ID NO: 456707 - DNA, 33 bp, Homo sapien
acaaaagacatcactgaatcaaaagaatacctg

SEQ ID NO: 456708 - DNA, 33 bp, Homo sapien
acaaaagacatcactgtatcaaaagaatacctg

SEQ ID NO: 456709 - DNA, 33 bp, Homo sapien
acatgccatcacttgtaaaatgtgatatcattt

SEQ ID NO: 456710 - DNA, 33 bp, Homo sapien
acatgccatcacttgtcaaatgtgatatcattt

SEQ ID NO: 456711 - DNA, 33 bp, Homo sapien
ctcacttaacaaaagcagcttctcctggtgttt

SEQ ID NO: 456712 - DNA, 33 bp, Homo sapien
ctcacttaacaaaagcggcttctcctggtgttt

SEQ ID NO: 456713 - DNA, 33 bp, Homo sapien
aatgcaatatttgtgaacgcgaatattagcctc

SEQ ID NO: 456714 - DNA, 33 bp, Homo sapien
aatgcaatatttgtgatcgcgaatattagcctc

SEQ ID NO: 456715 - DNA, 33 bp, Homo sapien
gtggcctcaatagggaaaatgaattagctgtga

SEQ ID NO: 456716 - DNA, 33 bp, Homo sapien
gtggcctcaatagggacaatgaattagctgtga

SEQ ID NO: 456717 - DNA, 33 bp, Homo sapien
atgatcttaatgcttacgtctctccaaaattcc

SEQ ID NO: 456718 - DNA, 33 bp, Homo sapien
atgatcttaatgcttatgtctctccaaaattcc

SEQ ID NO: 456719 - DNA, 33 bp, Homo sapien
gaagaaactgggagtcaaccgaggaccatcagg

SEQ ID NO: 456720 - DNA, 33 bp, Homo sapien
gaagaaactgggagtcgaccgaggaccatcagg

SEQ ID NO: 456721 - DNA, 33 bp, Homo sapien
ttggctctatggaaaactgcttggtgaggggac

SEQ ID NO: 456722 - DNA, 33 bp, Homo sapien
ttggctctatggaaaagtgcttggtgaggggac

SEQ ID NO: 456723 - DNA, 33 bp, Homo sapien
gtctcttaagccttcaaaattctccaatcacat

SEQ ID NO: 456724 - DNA, 33 bp, Homo sapien
gtctcttaagccttcagaattctccaatcacat

SEQ ID NO: 456725 - DNA, 33 bp, Homo sapien
atgaaccgcaactcagcattgctagacgaggct

SEQ ID NO: 456726 - DNA, 33 bp, Homo sapien
atgaaccgcaactcagtattgctagacgaggct

SEQ ID NO: 456727 - DNA, 33 bp, Homo sapien
atacctgccagccatacaggcactctgtgagca

SEQ ID NO: 456728 - DNA, 33 bp, Homo sapien
atacctgccagccatataggcactctgtgagca

SEQ ID NO: 456729 - DNA, 33 bp, Homo sapien
acatttcatttgcccacatgacatcaaatgacc

SEQ ID NO: 456730 - DNA, 33 bp, Homo sapien
acatttcatttgcccatatgacatcaaatgacc

SEQ ID NO: 456731 - DNA, 33 bp, Homo sapien
tctcccgccaggccacaagcaactgaaggcaag

SEQ ID NO: 456732 - DNA, 33 bp, Homo sapien
tctcccgccaggccacgagcaactgaaggcaag

SEQ ID NO: 456733 - DNA, 33 bp, Homo sapien
caggccctggctttggcaaagaaacatgaacag

SEQ ID NO: 456734 - DNA, 33 bp, Homo sapien
caggccctggctttgggaaagaaacatgaacag

SEQ ID NO: 456735 - DNA, 33 bp, Homo sapien
gtctggctttctcagactcctgagtttctgcac

SEQ ID NO: 456736 - DNA, 33 bp, Homo sapien
gtctggctttctcagattcctgagtttctgcac

SEQ ID NO: 456737 - DNA, 33 bp, Homo sapien
ggcacatgcttgactcacttctgtgacctctgc

SEQ ID NO: 456738 - DNA, 33 bp, Homo sapien
ggcacatgcttgactcgcttctgtgacctctgc

SEQ ID NO: 456739 - DNA, 33 bp, Homo sapien
gcaccagtggattgcacggggacaggcttgctt

SEQ ID NO: 456740 - DNA, 33 bp, Homo sapien
gcaccagtggattgcatggggacaggcttgctt

SEQ ID NO: 456741 - DNA, 33 bp, Homo sapien
accaatcaaatacaaaagtgtcacttccaagca

SEQ ID NO: 456742 - DNA, 33 bp, Homo sapien
accaatcaaatacaaaggtgtcacttccaagca

SEQ ID NO: 456743 - DNA, 33 bp, Homo sapien
gggaaagtctaacccacgctgtccttgagaact

SEQ ID NO: 456744 - DNA, 33 bp, Homo sapien
gggaaagtctaacccatgctgtccttgagaact

SEQ ID NO: 456745 - DNA, 33 bp, Homo sapien
tccttgccatggcagggaaatcttcaaaaatga

SEQ ID NO: 456746 - DNA, 33 bp, Homo sapien
tccttgccatggcaggtaaatcttcaaaaatga

SEQ ID NO: 456747 - DNA, 33 bp, Homo sapien
gccagagatcaacaaaaggccagagactggatc

SEQ ID NO: 456748 - DNA, 33 bp, Homo sapien
gccagagatcaacaaagggccagagactggatc

SEQ ID NO: 456749 - DNA, 33 bp, Homo sapien
aaatgttcagttttccagatagtctaatttcta

SEQ ID NO: 456750 - DNA, 33 bp, Homo sapien
aaatgttcagttttccggatagtctaatttcta

SEQ ID NO: 456751 - DNA, 33 bp, Homo sapien
ttcaaggtctggttcccaaaatttaccaatatc

SEQ ID NO: 456752 - DNA, 33 bp, Homo sapien
ttcaaggtctggttccgaaaatttaccaatatc

SEQ ID NO: 456753 - DNA, 33 bp, Homo sapien
cttcaagtcaggttaaatacaaacagctttgca

SEQ ID NO: 456754 - DNA, 33 bp, Homo sapien
cttcaagtcaggttaagtacaaacagctttgca

SEQ ID NO: 456755 - DNA, 33 bp, Homo sapien
aggaaggcagagttgccaaatgcctaactatat

SEQ ID NO: 456756 - DNA, 33 bp, Homo sapien
aggaaggcagagttgctaaatgcctaactatat

SEQ ID NO: 456757 - DNA, 33 bp, Homo sapien
aaaactatcaagccacaaagaaaaatagcaaga

SEQ ID NO: 456758 - DNA, 33 bp, Homo sapien
aaaactatcaagccacgaagaaaaatagcaaga

SEQ ID NO: 456759 - DNA, 33 bp, Homo sapien
tctgtggtatcagataaaatgtcttttctttca

SEQ ID NO: 456760 - DNA, 33 bp, Homo sapien
tctgtggtatcagatataatgtcttttctttca

SEQ ID NO: 456761 - DNA, 33 bp, Homo sapien
aaatgctaccccccaaagaaatggagaagaggg

SEQ ID NO: 456762 - DNA, 33 bp, Homo sapien
aaatgctaccccccaacgaaatggagaagaggg

SEQ ID NO: 456763 - DNA, 33 bp, Homo sapien
cagacgaggacattacaaggaaagtacaggcca

SEQ ID NO: 456764 - DNA, 33 bp, Homo sapien
cagacgaggacattaccaggaaagtacaggcca

SEQ ID NO: 456765 - DNA, 33 bp, Homo sapien
gtaagtctttattgaacgaatggagtcatattc

SEQ ID NO: 456766 - DNA, 33 bp, Homo sapien
gtaagtctttattgaatgaatggagtcatattc

SEQ ID NO: 456767 - DNA, 33 bp, Homo sapien
agataaataaacggtcgcttcttggcctcgtgg

SEQ ID NO: 456768 - DNA, 33 bp, Homo sapien
agataaataaacggtctcttcttggcctcgtgg

SEQ ID NO: 456769 - DNA, 33 bp, Homo sapien
agatcaagtgtaaagacaagtaaatggtagttg

SEQ ID NO: 456770 - DNA, 33 bp, Homo sapien
agatcaagtgtaaagataagtaaatggtagttg

SEQ ID NO: 456771 - DNA, 33 bp, Homo sapien
ggagtgtccctaacacaaagaaatactcagtgc

SEQ ID NO: 456772 - DNA, 33 bp, Homo sapien
ggagtgtccctaacacgaagaaatactcagtgc

SEQ ID NO: 456773 - DNA, 33 bp, Homo sapien
cgacgagatccactcgcaagtggaaatatgcac

SEQ ID NO: 456774 - DNA, 33 bp, Homo sapien
cgacgagatccactcggaagtggaaatatgcac

SEQ ID NO: 456775 - DNA, 33 bp, Homo sapien
catttatcataattacaagggaacagccattct

SEQ ID NO: 456776 - DNA, 33 bp, Homo sapien
catttatcataattactagggaacagccattct

SEQ ID NO: 456777 - DNA, 33 bp, Homo sapien
tgtagaacacacctccaagatggccgggagaca

SEQ ID NO: 456778 - DNA, 33 bp, Homo sapien
tgtagaacacacctccgagatggccgggagaca

SEQ ID NO: 456779 - DNA, 33 bp, Homo sapien
caggattaggacaggccagacaggaacaaacat

SEQ ID NO: 456780 - DNA, 33 bp, Homo sapien
caggattaggacaggctagacaggaacaaacat

SEQ ID NO: 456781 - DNA, 33 bp, Homo sapien
aattcaagaccgtcaaagtggagctagctgcta

SEQ ID NO: 456782 - DNA, 33 bp, Homo sapien
aattcaagaccgtcaaggtggagctagctgcta

SEQ ID NO: 456783 - DNA, 33 bp, Homo sapien
gtctcagcgccttgcacgtcccacaggtgaggt

SEQ ID NO: 456784 - DNA, 33 bp, Homo sapien
gtctcagcgccttgcaggtcccacaggtgaggt

SEQ ID NO: 456785 - DNA, 33 bp, Homo sapien
gttaccaaatgtgcccagattcctgctccctgg

SEQ ID NO: 456786 - DNA, 33 bp, Homo sapien
gttaccaaatgtgcccggattcctgctccctgg

SEQ ID NO: 456787 - DNA, 33 bp, Homo sapien
tggatctgtcattgcccatgaggacgagagagg

SEQ ID NO: 456788 - DNA, 33 bp, Homo sapien
tggatctgtcattgcctatgaggacgagagagg

SEQ ID NO: 456789 - DNA, 33 bp, Homo sapien
ccttggaaacagaagggccacgacagggcacac

SEQ ID NO: 456790 - DNA, 33 bp, Homo sapien
ccttggaaacagaaggtccacgacagggcacac

SEQ ID NO: 456791 - DNA, 33 bp, Homo sapien
ccccaccaactccatccgacacgggaatgtgtg

SEQ ID NO: 456792 - DNA, 33 bp, Homo sapien
ccccaccaactccatctgacacgggaatgtgtg

SEQ ID NO: 456793 - DNA, 33 bp, Homo sapien
tcatgcaggttctcgtaaattcattccttcact

SEQ ID NO: 456794 - DNA, 33 bp, Homo sapien
tcatgcaggttctcgttaattcattccttcact

SEQ ID NO: 456795 - DNA, 33 bp, Homo sapien
attctctccgtatttaagaagctgtgagtttgg

SEQ ID NO: 456796 - DNA, 33 bp, Homo sapien
attctctccgtatttaggaagctgtgagtttgg

SEQ ID NO: 456797 - DNA, 33 bp, Homo sapien
ttttcaaatagctgcaagaacgaattttgaatg

SEQ ID NO: 456798 - DNA, 33 bp, Homo sapien
ttttcaaatagctgcaggaacgaattttgaatg

SEQ ID NO: 456799 - DNA, 33 bp, Homo sapien
gcccttccctgttgcaagcatattcaaatgttt

SEQ ID NO: 456800 - DNA, 33 bp, Homo sapien
gcccttccctgttgcaggcatattcaaatgttt

SEQ ID NO: 456801 - DNA, 33 bp, Homo sapien
ggctggagctgaatgaagataattcccctccct

SEQ ID NO: 456802 - DNA, 33 bp, Homo sapien
ggctggagctgaatgaggataattcccctccct

SEQ ID NO: 456803 - DNA, 33 bp, Homo sapien
aaaataccagagactaagagagacttgtaaaca

SEQ ID NO: 456804 - DNA, 33 bp, Homo sapien
aaaataccagagactaggagagacttgtaaaca

SEQ ID NO: 456805 - DNA, 33 bp, Homo sapien
atcaggttgcccatacaccttgaagcctgtaac

SEQ ID NO: 456806 - DNA, 33 bp, Homo sapien
atcaggttgcccatacgccttgaagcctgtaac

SEQ ID NO: 456807 - DNA, 33 bp, Homo sapien
tggcatttgagctttaccttgaaggatggttag

SEQ ID NO: 456808 - DNA, 33 bp, Homo sapien
tggcatttgagctttatcttgaaggatggttag

SEQ ID NO: 456809 - DNA, 33 bp, Homo sapien
ctattcacagattgcacgatcgtttgacagttt

SEQ ID NO: 456810 - DNA, 33 bp, Homo sapien
ctattcacagattgcatgatcgtttgacagttt

SEQ ID NO: 456811 - DNA, 33 bp, Homo sapien
caccctcagcccgataactgtcattcctgcacc

SEQ ID NO: 456812 - DNA, 33 bp, Homo sapien
caccctcagcccgatacctgtcattcctgcacc

SEQ ID NO: 456813 - DNA, 33 bp, Homo sapien
agagtgtggcagaaaccatctggtataagtaag

SEQ ID NO: 456814 - DNA, 33 bp, Homo sapien
agagtgtggcagaaacgatctggtataagtaag

SEQ ID NO: 456815 - DNA, 33 bp, Homo sapien
tgtctagtcagtcagaaaacagataattcacac

SEQ ID NO: 456816 - DNA, 33 bp, Homo sapien
tgtctagtcagtcagacaacagataattcacac

SEQ ID NO: 456817 - DNA, 33 bp, Homo sapien
attggattgcacatggcatcaacttgcaccaaa

SEQ ID NO: 456818 - DNA, 33 bp, Homo sapien
attggattgcacatggtatcaacttgcaccaaa

SEQ ID NO: 456819 - DNA, 33 bp, Homo sapien
tgatgccaactctataacaaatcttattactgg

SEQ ID NO: 456820 - DNA, 33 bp, Homo sapien
tgatgccaactctatagcaaatcttattactgg

SEQ ID NO: 456821 - DNA, 33 bp, Homo sapien
ggcagaagattgcacaacctccctggaccctta

SEQ ID NO: 456822 - DNA, 33 bp, Homo sapien
ggcagaagattgcacagcctccctggaccctta

SEQ ID NO: 456823 - DNA, 33 bp, Homo sapien
aggatttgggcagaaactaactctgcgattgaa

SEQ ID NO: 456824 - DNA, 33 bp, Homo sapien
aggatttgggcagaaattaactctgcgattgaa

SEQ ID NO: 456825 - DNA, 33 bp, Homo sapien
ctctacaaaacgttagcactattggaaagatcc

SEQ ID NO: 456826 - DNA, 33 bp, Homo sapien
ctctacaaaacgttagtactattggaaagatcc

SEQ ID NO: 456827 - DNA, 33 bp, Homo sapien
tgtggaaagtggggcacactgaacaaaatcact

SEQ ID NO: 456828 - DNA, 33 bp, Homo sapien
tgtggaaagtggggcatactgaacaaaatcact

SEQ ID NO: 456829 - DNA, 33 bp, Homo sapien
tcgagtttcataggacactgtaggtaggctggc

SEQ ID NO: 456830 - DNA, 33 bp, Homo sapien
tcgagtttcataggacgctgtaggtaggctggc

SEQ ID NO: 456831 - DNA, 33 bp, Homo sapien
ccttcaacaaagcctgcaacacttagaaagttg

SEQ ID NO: 456832 - DNA, 33 bp, Homo sapien
ccttcaacaaagcctggaacacttagaaagttg

SEQ ID NO: 456833 - DNA, 33 bp, Homo sapien
agagagacatctggaacgaccactagttaattt

SEQ ID NO: 456834 - DNA, 33 bp, Homo sapien
agagagacatctggaatgaccactagttaattt

SEQ ID NO: 456835 - DNA, 33 bp, Homo sapien
atgacacagaaaagcacggtgaagtcttggggg

SEQ ID NO: 456836 - DNA, 33 bp, Homo sapien
atgacacagaaaagcatggtgaagtcttggggg

SEQ ID NO: 456837 - DNA, 33 bp, Homo sapien
tattttctgagagacgacattgtggaacaaatg

SEQ ID NO: 456838 - DNA, 33 bp, Homo sapien
tattttctgagagacggcattgtggaacaaatg

SEQ ID NO: 456839 - DNA, 33 bp, Homo sapien
ggtgcccctccccagaaagatgtgccctgagca

SEQ ID NO: 456840 - DNA, 33 bp, Homo sapien
ggtgcccctccccagagagatgtgccctgagca

SEQ ID NO: 456841 - DNA, 33 bp, Homo sapien
gcgtgctttctctctcaattgcaatttaaaaac

SEQ ID NO: 456842 - DNA, 33 bp, Homo sapien
gcgtgctttctctctcgattgcaatttaaaaac

SEQ ID NO: 456843 - DNA, 33 bp, Homo sapien
gggcctgaggctcttccataggtgcacagggga

SEQ ID NO: 456844 - DNA, 33 bp, Homo sapien
gggcctgaggctcttctataggtgcacagggga

SEQ ID NO: 456845 - DNA, 33 bp, Homo sapien
gccattgaggcagccacctggttttcccatctc

SEQ ID NO: 456846 - DNA, 33 bp, Homo sapien
gccattgaggcagccatctggttttcccatctc

SEQ ID NO: 456847 - DNA, 33 bp, Homo sapien
tgtggacccaaacttaaaggagccagggcaccc

SEQ ID NO: 456848 - DNA, 33 bp, Homo sapien
tgtggacccaaacttagaggagccagggcaccc

SEQ ID NO: 456849 - DNA, 33 bp, Homo sapien
agctaacatctttccacggattatccccccgga

SEQ ID NO: 456850 - DNA, 33 bp, Homo sapien
agctaacatctttccatggattatccccccgga

SEQ ID NO: 456851 - DNA, 33 bp, Homo sapien
aatacaatcacaattaactccatcatgctcaca

SEQ ID NO: 456852 - DNA, 33 bp, Homo sapien
aatacaatcacaattagctccatcatgctcaca

SEQ ID NO: 456853 - DNA, 33 bp, Homo sapien
tctgagttcttcccaactactagtccatcctgg

SEQ ID NO: 456854 - DNA, 33 bp, Homo sapien
tctgagttcttcccaagtactagtccatcctgg

SEQ ID NO: 456855 - DNA, 33 bp, Homo sapien
acactctccctgagaaacagaacctttgatgac

SEQ ID NO: 456856 - DNA, 33 bp, Homo sapien
acactctccctgagaagcagaacctttgatgac

SEQ ID NO: 456857 - DNA, 33 bp, Homo sapien
tttccacacacccgagactcagggaactccacc

SEQ ID NO: 456858 - DNA, 33 bp, Homo sapien
tttccacacacccgagcctcagggaactccacc

SEQ ID NO: 456859 - DNA, 33 bp, Homo sapien
tcctccatgaaggctacacgatcccacacaatt

SEQ ID NO: 456860 - DNA, 33 bp, Homo sapien
tcctccatgaaggctagacgatcccacacaatt

SEQ ID NO: 456861 - DNA, 33 bp, Homo sapien
caatcccaaccattacactatatgcctatgtaa

SEQ ID NO: 456862 - DNA, 33 bp, Homo sapien
caatcccaaccattacgctatatgcctatgtaa

SEQ ID NO: 456863 - DNA, 33 bp, Homo sapien
gggagttaatcggttacgcagataagagtatgt

SEQ ID NO: 456864 - DNA, 33 bp, Homo sapien
gggagttaatcggttatgcagataagagtatgt

SEQ ID NO: 456865 - DNA, 33 bp, Homo sapien
cttccctagtctggaagcctttgacagttctaa

SEQ ID NO: 456866 - DNA, 33 bp, Homo sapien
cttccctagtctggaatcctttgacagttctaa

SEQ ID NO: 456867 - DNA, 33 bp, Homo sapien
gatacagctaaagttcacatctctagccctgaa

SEQ ID NO: 456868 - DNA, 33 bp, Homo sapien
gatacagctaaagttcgcatctctagccctgaa

SEQ ID NO: 456869 - DNA, 33 bp, Homo sapien
agcagaatctttttgcaccatgcatgacattcc

SEQ ID NO: 456870 - DNA, 33 bp, Homo sapien
agcagaatctttttgcgccatgcatgacattcc

SEQ ID NO: 456871 - DNA, 33 bp, Homo sapien
ctacatctggacacagcacttttgccttgacca

SEQ ID NO: 456872 - DNA, 33 bp, Homo sapien
ctacatctggacacagtacttttgccttgacca

SEQ ID NO: 456873 - DNA, 33 bp, Homo sapien
agcaagtttcccaacactatccagagccagaat

SEQ ID NO: 456874 - DNA, 33 bp, Homo sapien
agcaagtttcccaacagtatccagagccagaat

SEQ ID NO: 456875 - DNA, 33 bp, Homo sapien
ctgcatggacacttaccagattcacttgaattt

SEQ ID NO: 456876 - DNA, 33 bp, Homo sapien
ctgcatggacacttactagattcacttgaattt

SEQ ID NO: 456877 - DNA, 33 bp, Homo sapien
gtattctcagtagttacaaaagtgttaagtcgg

SEQ ID NO: 456878 - DNA, 33 bp, Homo sapien
gtattctcagtagttataaaagtgttaagtcgg

SEQ ID NO: 456879 - DNA, 33 bp, Homo sapien
cagggaacattgaaagaattttttagctttgaa

SEQ ID NO: 456880 - DNA, 33 bp, Homo sapien
cagggaacattgaaagtattttttagctttgaa

SEQ ID NO: 456881 - DNA, 33 bp, Homo sapien
gggttgacctctgcacagaatcaggtttaaata

SEQ ID NO: 456882 - DNA, 33 bp, Homo sapien
gggttgacctctgcacggaatcaggtttaaata

SEQ ID NO: 456883 - DNA, 33 bp, Homo sapien
aattttcactgacaataaaggcttccatgttct

SEQ ID NO: 456884 - DNA, 33 bp, Homo sapien
aattttcactgacaatgaaggcttccatgttct

SEQ ID NO: 456885 - DNA, 33 bp, Homo sapien
tttttgagcttacatacgagatttttcttgaat

SEQ ID NO: 456886 - DNA, 33 bp, Homo sapien
tttttgagcttacatatgagatttttcttgaat

SEQ ID NO: 456887 - DNA, 33 bp, Homo sapien
aatacaacaaagtgtgaattgtagaatcaaaaa

SEQ ID NO: 456888 - DNA, 33 bp, Homo sapien
aatacaacaaagtgtggattgtagaatcaaaaa

SEQ ID NO: 456889 - DNA, 33 bp, Homo sapien
tttgtgaaagttccacaagaagtcaatgtttga

SEQ ID NO: 456890 - DNA, 33 bp, Homo sapien
tttgtgaaagttccacgagaagtcaatgtttga

SEQ ID NO: 456891 - DNA, 33 bp, Homo sapien
gagattcgtttttatcaagtgggtctcaataat

SEQ ID NO: 456892 - DNA, 33 bp, Homo sapien
gagattcgtttttatccagtgggtctcaataat

SEQ ID NO: 456893 - DNA, 33 bp, Homo sapien
cacacccagccaggtaagtttgtttgatcaagc

SEQ ID NO: 456894 - DNA, 33 bp, Homo sapien
cacacccagccaggtatgtttgtttgatcaagc

SEQ ID NO: 456895 - DNA, 33 bp, Homo sapien
catctgtgataatacaatacatatgtggacata

SEQ ID NO: 456896 - DNA, 33 bp, Homo sapien
catctgtgataatacagtacatatgtggacata

SEQ ID NO: 456897 - DNA, 33 bp, Homo sapien
gaaggtaaggaaatggaaagccgccctggctga

SEQ ID NO: 456898 - DNA, 33 bp, Homo sapien
gaaggtaaggaaatggtaagccgccctggctga

SEQ ID NO: 456899 - DNA, 33 bp, Homo sapien
gaaaaaagagtcagcacggcggattggaaatcc

SEQ ID NO: 456900 - DNA, 33 bp, Homo sapien
gaaaaaagagtcagcagggcggattggaaatcc

SEQ ID NO: 456901 - DNA, 33 bp, Homo sapien
actggggaaatctttacggtagaaacatttctt

SEQ ID NO: 456902 - DNA, 33 bp, Homo sapien
actggggaaatctttagggtagaaacatttctt

SEQ ID NO: 456903 - DNA, 33 bp, Homo sapien
accaagtgttcaaggtaaatatcactgacgtca

SEQ ID NO: 456904 - DNA, 33 bp, Homo sapien
accaagtgttcaaggtgaatatcactgacgtca

SEQ ID NO: 456905 - DNA, 33 bp, Homo sapien
tacctcccttctaagacggagacagtccctaca

SEQ ID NO: 456906 - DNA, 33 bp, Homo sapien
tacctcccttctaagatggagacagtccctaca

SEQ ID NO: 456907 - DNA, 33 bp, Homo sapien
ttctccacaagtgcacaggaatcactgaaaacc

SEQ ID NO: 456908 - DNA, 33 bp, Homo sapien
ttctccacaagtgcacgggaatcactgaaaacc

SEQ ID NO: 456909 - DNA, 33 bp, Homo sapien
caagcacccctagatacgtctttttgtccccat

SEQ ID NO: 456910 - DNA, 33 bp, Homo sapien
caagcacccctagatatgtctttttgtccccat

SEQ ID NO: 456911 - DNA, 33 bp, Homo sapien
aagctggatataaaccagaactaagctcaaagg

SEQ ID NO: 456912 - DNA, 33 bp, Homo sapien
aagctggatataaaccggaactaagctcaaagg

SEQ ID NO: 456913 - DNA, 33 bp, Homo sapien
ctcttcccaggcttcaacactgttcttttaaat

SEQ ID NO: 456914 - DNA, 33 bp, Homo sapien
ctcttcccaggcttcatcactgttcttttaaat

SEQ ID NO: 456915 - DNA, 33 bp, Homo sapien
tgattttgtatttgagaaaattgaggattatct

SEQ ID NO: 456916 - DNA, 33 bp, Homo sapien
tgattttgtatttgaggaaattgaggattatct

SEQ ID NO: 456917 - DNA, 33 bp, Homo sapien
ttcttgtctttctagtcaatgcaaacaaaagtg

SEQ ID NO: 456918 - DNA, 33 bp, Homo sapien
ttcttgtctttctagtgaatgcaaacaaaagtg

SEQ ID NO: 456919 - DNA, 33 bp, Homo sapien
agaaaacgtaagtgtacgcatgaacacagcaac

SEQ ID NO: 456920 - DNA, 33 bp, Homo sapien
agaaaacgtaagtgtatgcatgaacacagcaac

SEQ ID NO: 456921 - DNA, 33 bp, Homo sapien
tcaacatcgctaaacactaggaaaatgcagatc

SEQ ID NO: 456922 - DNA, 33 bp, Homo sapien
tcaacatcgctaaacattaggaaaatgcagatc

SEQ ID NO: 456923 - DNA, 33 bp, Homo sapien
ttgaaaatacaaatacaccctggtcctcttggg

SEQ ID NO: 456924 - DNA, 33 bp, Homo sapien
ttgaaaatacaaatactccctggtcctcttggg

SEQ ID NO: 456925 - DNA, 33 bp, Homo sapien
aggatggacacaatacaaatctaccgagttggg

SEQ ID NO: 456926 - DNA, 33 bp, Homo sapien
aggatggacacaatacgaatctaccgagttggg

SEQ ID NO: 456927 - DNA, 33 bp, Homo sapien
aatgtttgccgagtgaccccatgagcgagtgat

SEQ ID NO: 456928 - DNA, 33 bp, Homo sapien
aatgtttgccgagtgatcccatgagcgagtgat

SEQ ID NO: 456929 - DNA, 33 bp, Homo sapien
gatgtttgtgttggaaggttattctcttgagca

SEQ ID NO: 456930 - DNA, 33 bp, Homo sapien
gatgtttgtgttggaatgttattctcttgagca

SEQ ID NO: 456931 - DNA, 33 bp, Homo sapien
tgggcaccggtggaggccatgcagtgcctgggg

SEQ ID NO: 456932 - DNA, 33 bp, Homo sapien
tgggcaccggtggaggtcatgcagtgcctgggg

SEQ ID NO: 456933 - DNA, 33 bp, Homo sapien
gacaggagaccacttacagatggcccaggggac

SEQ ID NO: 456934 - DNA, 33 bp, Homo sapien
gacaggagaccacttagagatggcccaggggac

SEQ ID NO: 456935 - DNA, 33 bp, Homo sapien
agcatagcaaacagaactgacagcacccatcag

SEQ ID NO: 456936 - DNA, 33 bp, Homo sapien
agcatagcaaacagaagtgacagcacccatcag

SEQ ID NO: 456937 - DNA, 33 bp, Homo sapien
ccttgcatgggtatctcactttttttagagaca

SEQ ID NO: 456938 - DNA, 33 bp, Homo sapien
ccttgcatgggtatcttactttttttagagaca

SEQ ID NO: 456939 - DNA, 33 bp, Homo sapien
atgggatggcccccacaacacagagaagtccag

SEQ ID NO: 456940 - DNA, 33 bp, Homo sapien
atgggatggcccccacgacacagagaagtccag

SEQ ID NO: 456941 - DNA, 33 bp, Homo sapien
cccctaagagtttaagccccagtgcagtccctg

SEQ ID NO: 456942 - DNA, 33 bp, Homo sapien
cccctaagagtttaagtcccagtgcagtccctg

SEQ ID NO: 456943 - DNA, 33 bp, Homo sapien
cctggcagaatgatgccgacatactcaagacca

SEQ ID NO: 456944 - DNA, 33 bp, Homo sapien
cctggcagaatgatgctgacatactcaagacca

SEQ ID NO: 456945 - DNA, 33 bp, Homo sapien
gggacctcccataaacagaatcacagagtcacc

SEQ ID NO: 456946 - DNA, 33 bp, Homo sapien
gggacctcccataaacggaatcacagagtcacc

SEQ ID NO: 456947 - DNA, 33 bp, Homo sapien
gcgacagatttctatacgttttgtagagtagat

SEQ ID NO: 456948 - DNA, 33 bp, Homo sapien
gcgacagatttctatatgttttgtagagtagat

SEQ ID NO: 456949 - DNA, 33 bp, Homo sapien
tatcaggtatttgaataaccctgcaagactcag

SEQ ID NO: 456950 - DNA, 33 bp, Homo sapien
tatcaggtatttgaattaccctgcaagactcag

SEQ ID NO: 456951 - DNA, 33 bp, Homo sapien
gttttaactaggtggaagttcattctgtttgtt

SEQ ID NO: 456952 - DNA, 33 bp, Homo sapien
gttttaactaggtggatgttcattctgtttgtt

SEQ ID NO: 456953 - DNA, 33 bp, Homo sapien
agagagaaaagagaccaatgattgagaaaagaa

SEQ ID NO: 456954 - DNA, 33 bp, Homo sapien
agagagaaaagagaccgatgattgagaaaagaa

SEQ ID NO: 456955 - DNA, 33 bp, Homo sapien
tgttcacttttcttcacgcaggccccaaatatc

SEQ ID NO: 456956 - DNA, 33 bp, Homo sapien
tgttcacttttcttcaggcaggccccaaatatc

SEQ ID NO: 456957 - DNA, 33 bp, Homo sapien
tagcagtcagctttaagtgtggttatatcaact

SEQ ID NO: 456958 - DNA, 33 bp, Homo sapien
tagcagtcagctttaattgtggttatatcaact

SEQ ID NO: 456959 - DNA, 33 bp, Homo sapien
tctacctggcaggtaaacttgtggaacaaatga

SEQ ID NO: 456960 - DNA, 33 bp, Homo sapien
tctacctggcaggtaaccttgtggaacaaatga

SEQ ID NO: 456961 - DNA, 33 bp, Homo sapien
atgtatatgatgcccacacatatttttagactt

SEQ ID NO: 456962 - DNA, 33 bp, Homo sapien
atgtatatgatgcccatacatatttttagactt

SEQ ID NO: 456963 - DNA, 33 bp, Homo sapien
taagattagaaagcgacacattaacagaaatta

SEQ ID NO: 456964 - DNA, 33 bp, Homo sapien
taagattagaaagcgagacattaacagaaatta

SEQ ID NO: 456965 - DNA, 33 bp, Homo sapien
gctcacatgctaatgacgtttgtatccaaataa

SEQ ID NO: 456966 - DNA, 33 bp, Homo sapien
gctcacatgctaatgatgtttgtatccaaataa

SEQ ID NO: 456967 - DNA, 33 bp, Homo sapien
ctgctggaactcagaccgcgcgattcccgaaat

SEQ ID NO: 456968 - DNA, 33 bp, Homo sapien
ctgctggaactcagactgcgcgattcccgaaat

SEQ ID NO: 456969 - DNA, 33 bp, Homo sapien
accatatggtatttcaaagaacacaagttgaaa

SEQ ID NO: 456970 - DNA, 33 bp, Homo sapien
accatatggtatttcagagaacacaagttgaaa

SEQ ID NO: 456971 - DNA, 33 bp, Homo sapien
tttacttgtgagttagccctcaagacactgcac

SEQ ID NO: 456972 - DNA, 33 bp, Homo sapien
tttacttgtgagttaggcctcaagacactgcac

SEQ ID NO: 456973 - DNA, 33 bp, Homo sapien
ctagacaactgagaaaccattcccattttgcaa

SEQ ID NO: 456974 - DNA, 33 bp, Homo sapien
ctagacaactgagaaagcattcccattttgcaa

SEQ ID NO: 456975 - DNA, 33 bp, Homo sapien
tttccctctaagctccaagaggttagttaattc

SEQ ID NO: 456976 - DNA, 33 bp, Homo sapien
tttccctctaagctcccagaggttagttaattc

SEQ ID NO: 456977 - DNA, 33 bp, Homo sapien
tgctcagcaatggcagaccatgataagggttat

SEQ ID NO: 456978 - DNA, 33 bp, Homo sapien
tgctcagcaatggcagtccatgataagggttat

SEQ ID NO: 456979 - DNA, 33 bp, Homo sapien
caggtcaaaatgtatcagaggtgtgcctgcaac

SEQ ID NO: 456980 - DNA, 33 bp, Homo sapien
caggtcaaaatgtatcggaggtgtgcctgcaac

SEQ ID NO: 456981 - DNA, 33 bp, Homo sapien
cccaggaacctgagacacaacatcagaggtgaa

SEQ ID NO: 456982 - DNA, 33 bp, Homo sapien
cccaggaacctgagacccaacatcagaggtgaa

SEQ ID NO: 456983 - DNA, 33 bp, Homo sapien
tcctggtgccatgcacaagagaaaacattattt

SEQ ID NO: 456984 - DNA, 33 bp, Homo sapien
tcctggtgccatgcacgagagaaaacattattt

SEQ ID NO: 456985 - DNA, 33 bp, Homo sapien
tcactaactacaattacattttcttccctaagg

SEQ ID NO: 456986 - DNA, 33 bp, Homo sapien
tcactaactacaattagattttcttccctaagg

SEQ ID NO: 456987 - DNA, 33 bp, Homo sapien
gagtcaccttgaaaacagaatgcttggccatga

SEQ ID NO: 456988 - DNA, 33 bp, Homo sapien
gagtcaccttgaaaacggaatgcttggccatga

SEQ ID NO: 456989 - DNA, 33 bp, Homo sapien
atggttcgcgtgtgcaaattcagagggagttat

SEQ ID NO: 456990 - DNA, 33 bp, Homo sapien
atggttcgcgtgtgcacattcagagggagttat

SEQ ID NO: 456991 - DNA, 33 bp, Homo sapien
ctctgcctcagaaaaaaaatctacatatatatg

SEQ ID NO: 456992 - DNA, 33 bp, Homo sapien
ctctgcctcagaaaaataatctacatatatatg

SEQ ID NO: 456993 - DNA, 33 bp, Homo sapien
caatctacttcccagaacatagtcctgcctagc

SEQ ID NO: 456994 - DNA, 33 bp, Homo sapien
caatctacttcccagatcatagtcctgcctagc

SEQ ID NO: 456995 - DNA, 33 bp, Homo sapien
tgaagggatactacacaacactccaggctagat

SEQ ID NO: 456996 - DNA, 33 bp, Homo sapien
tgaagggatactacacgacactccaggctagat

SEQ ID NO: 456997 - DNA, 33 bp, Homo sapien
gtgttttgtagttttcaatgtacaaacttgctc

SEQ ID NO: 456998 - DNA, 33 bp, Homo sapien
gtgttttgtagttttcgatgtacaaacttgctc

SEQ ID NO: 456999 - DNA, 33 bp, Homo sapien
aatagggaaggccaataaagagatagtttaatc

SEQ ID NO: 457000 - DNA, 33 bp, Homo sapien
aatagggaaggccaatgaagagatagtttaatc

SEQ ID NO: 457001 - DNA, 33 bp, Homo sapien
gaagctattttgtatacattgtaggatagagca

SEQ ID NO: 457002 - DNA, 33 bp, Homo sapien
gaagctattttgtatatattgtaggatagagca

SEQ ID NO: 457003 - DNA, 33 bp, Homo sapien
attcccggacaaattcacaagggttccagtcca

SEQ ID NO: 457004 - DNA, 33 bp, Homo sapien
attcccggacaaattcgcaagggttccagtcca

SEQ ID NO: 457005 - DNA, 33 bp, Homo sapien
ctgagttttgaatttacatagctacttgcagtg

SEQ ID NO: 457006 - DNA, 33 bp, Homo sapien
ctgagttttgaatttatatagctacttgcagtg

SEQ ID NO: 457007 - DNA, 33 bp, Homo sapien
taggaggaatctggctaaaacataaaggtaaag

SEQ ID NO: 457008 - DNA, 33 bp, Homo sapien
taggaggaatctggctcaaacataaaggtaaag

SEQ ID NO: 457009 - DNA, 33 bp, Homo sapien
gtaaatgatgcttgggaaatgtgtttatacttg

SEQ ID NO: 457010 - DNA, 33 bp, Homo sapien
gtaaatgatgcttggggaatgtgtttatacttg

SEQ ID NO: 457011 - DNA, 33 bp, Homo sapien
aacacatatgcattcactatacgtaactcataa

SEQ ID NO: 457012 - DNA, 33 bp, Homo sapien
aacacatatgcattcattatacgtaactcataa

SEQ ID NO: 457013 - DNA, 33 bp, Homo sapien
ctcaaacagtaaaaaaaggaccaagagtacaaa

SEQ ID NO: 457014 - DNA, 33 bp, Homo sapien
ctcaaacagtaaaaaatggaccaagagtacaaa

SEQ ID NO: 457015 - DNA, 33 bp, Homo sapien
tctccataatttcaccaacttacaatgaggcca

SEQ ID NO: 457016 - DNA, 33 bp, Homo sapien
tctccataatttcacctacttacaatgaggcca

SEQ ID NO: 457017 - DNA, 33 bp, Homo sapien
gactcagtcattccccagcacacatacttttgt

SEQ ID NO: 457018 - DNA, 33 bp, Homo sapien
gactcagtcattccccggcacacatacttttgt

SEQ ID NO: 457019 - DNA, 33 bp, Homo sapien
tcgtggtgctgtgttaccttttattagtcttat

SEQ ID NO: 457020 - DNA, 33 bp, Homo sapien
tcgtggtgctgtgttatcttttattagtcttat

SEQ ID NO: 457021 - DNA, 33 bp, Homo sapien
aaataaaaagattaacaaaaattctggcatcaa

SEQ ID NO: 457022 - DNA, 33 bp, Homo sapien
aaataaaaagattaaccaaaattctggcatcaa

SEQ ID NO: 457023 - DNA, 33 bp, Homo sapien
ccacggggccgccaagcccattgtgctgaagtg

SEQ ID NO: 457024 - DNA, 33 bp, Homo sapien
ccacggggccgccaagtccattgtgctgaagtg

SEQ ID NO: 457025 - DNA, 33 bp, Homo sapien
gtcttctagcctcatgcagccaatcccagtgaa

SEQ ID NO: 457026 - DNA, 33 bp, Homo sapien
gtcttctagcctcatgtagccaatcccagtgaa

SEQ ID NO: 457027 - DNA, 33 bp, Homo sapien
cggtagccagtgtagacggattggccacagacc

SEQ ID NO: 457028 - DNA, 33 bp, Homo sapien
cggtagccagtgtagatggattggccacagacc

SEQ ID NO: 457029 - DNA, 33 bp, Homo sapien
cttggaagcttaaagcactctgtgagcattatc

SEQ ID NO: 457030 - DNA, 33 bp, Homo sapien
cttggaagcttaaagcgctctgtgagcattatc

SEQ ID NO: 457031 - DNA, 33 bp, Homo sapien
gtattatttatgtggtaaattccaggaggagtg

SEQ ID NO: 457032 - DNA, 33 bp, Homo sapien
gtattatttatgtggtgaattccaggaggagtg

SEQ ID NO: 457033 - DNA, 33 bp, Homo sapien
ctcccgactgtcttgaacccagcagcccagcag

SEQ ID NO: 457034 - DNA, 33 bp, Homo sapien
ctcccgactgtcttgagcccagcagcccagcag

SEQ ID NO: 457035 - DNA, 33 bp, Homo sapien
tgtctcatcaaatcctcaccaggcggtgtgcaa

SEQ ID NO: 457036 - DNA, 33 bp, Homo sapien
tgtctcatcaaatccttaccaggcggtgtgcaa

SEQ ID NO: 457037 - DNA, 33 bp, Homo sapien
cttttcttccaaagagaacttgccgcaagtggc

SEQ ID NO: 457038 - DNA, 33 bp, Homo sapien
cttttcttccaaagaggacttgccgcaagtggc

SEQ ID NO: 457039 - DNA, 33 bp, Homo sapien
aaaaggtggttccagcaaggcttgcaaaacaat

SEQ ID NO: 457040 - DNA, 33 bp, Homo sapien
aaaaggtggttccagcgaggcttgcaaaacaat

SEQ ID NO: 457041 - DNA, 33 bp, Homo sapien
caagcagagagaaccccgggcattatctgttaa

SEQ ID NO: 457042 - DNA, 33 bp, Homo sapien
caagcagagagaaccctgggcattatctgttaa

SEQ ID NO: 457043 - DNA, 33 bp, Homo sapien
tgctgcctaagctgacccagtggactcatgaga

SEQ ID NO: 457044 - DNA, 33 bp, Homo sapien
tgctgcctaagctgacgcagtggactcatgaga

SEQ ID NO: 457045 - DNA, 33 bp, Homo sapien
tgcttagcctaatataaatacagatggatgcac

SEQ ID NO: 457046 - DNA, 33 bp, Homo sapien
tgcttagcctaatatagatacagatggatgcac

SEQ ID NO: 457047 - DNA, 33 bp, Homo sapien
agcacacaggtatcagaaaatcgtgtttcagtg

SEQ ID NO: 457048 - DNA, 33 bp, Homo sapien
agcacacaggtatcagcaaatcgtgtttcagtg

SEQ ID NO: 457049 - DNA, 33 bp, Homo sapien
caaagtggttgtatgcactctcgactctgttgg

SEQ ID NO: 457050 - DNA, 33 bp, Homo sapien
caaagtggttgtatgcgctctcgactctgttgg

SEQ ID NO: 457051 - DNA, 33 bp, Homo sapien
ctgttggaggaacctcaccctgtctagatacat

SEQ ID NO: 457052 - DNA, 33 bp, Homo sapien
ctgttggaggaacctcgccctgtctagatacat

SEQ ID NO: 457053 - DNA, 33 bp, Homo sapien
atctgaactccagaaaccacctcaaggtggacg

SEQ ID NO: 457054 - DNA, 33 bp, Homo sapien
atctgaactccagaaatcacctcaaggtggacg

SEQ ID NO: 457055 - DNA, 33 bp, Homo sapien
taaaaggcaaagaatacggtctgattctctcct

SEQ ID NO: 457056 - DNA, 33 bp, Homo sapien
taaaaggcaaagaatatggtctgattctctcct

SEQ ID NO: 457057 - DNA, 33 bp, Homo sapien
ggccaagccacaatcacaagaagctgtgggcac

SEQ ID NO: 457058 - DNA, 33 bp, Homo sapien
ggccaagccacaatcagaagaagctgtgggcac

SEQ ID NO: 457059 - DNA, 33 bp, Homo sapien
gcccacaccctgagaacgtatacttaggtagag

SEQ ID NO: 457060 - DNA, 33 bp, Homo sapien
gcccacaccctgagaaggtatacttaggtagag

SEQ ID NO: 457061 - DNA, 33 bp, Homo sapien
aaactatttcagggacagagccaaaagctgaag

SEQ ID NO: 457062 - DNA, 33 bp, Homo sapien
aaactatttcagggacggagccaaaagctgaag

SEQ ID NO: 457063 - DNA, 33 bp, Homo sapien
aaacctaacagagcacaacttgcttttgactgg

SEQ ID NO: 457064 - DNA, 33 bp, Homo sapien
aaacctaacagagcaccacttgcttttgactgg

SEQ ID NO: 457065 - DNA, 33 bp, Homo sapien
cattgaaatacgttacaacattacaacaatagc

SEQ ID NO: 457066 - DNA, 33 bp, Homo sapien
cattgaaatacgttacgacattacaacaatagc

SEQ ID NO: 457067 - DNA, 33 bp, Homo sapien
tattctaggaagtccacattacagatgagaaaa

SEQ ID NO: 457068 - DNA, 33 bp, Homo sapien
tattctaggaagtccatattacagatgagaaaa

SEQ ID NO: 457069 - DNA, 33 bp, Homo sapien
gtgagaactgactgtcacacatagagactgctg

SEQ ID NO: 457070 - DNA, 33 bp, Homo sapien
gtgagaactgactgtcgcacatagagactgctg

SEQ ID NO: 457071 - DNA, 33 bp, Homo sapien
cccggggtgtgtaatgcagtgcctggcatgggg

SEQ ID NO: 457072 - DNA, 33 bp, Homo sapien
cccggggtgtgtaatgtagtgcctggcatgggg

SEQ ID NO: 457073 - DNA, 33 bp, Homo sapien
ctgccctcttgccaagcagaggagatgtaagaa

SEQ ID NO: 457074 - DNA, 33 bp, Homo sapien
ctgccctcttgccaagtagaggagatgtaagaa

SEQ ID NO: 457075 - DNA, 33 bp, Homo sapien
attccctaaacactaacacaactacgattcctc

SEQ ID NO: 457076 - DNA, 33 bp, Homo sapien
attccctaaacactaagacaactacgattcctc

SEQ ID NO: 457077 - DNA, 33 bp, Homo sapien
agtggctcccaagcaacgcctcggaaccccctc

SEQ ID NO: 457078 - DNA, 33 bp, Homo sapien
agtggctcccaagcaatgcctcggaaccccctc

SEQ ID NO: 457079 - DNA, 33 bp, Homo sapien
cacaccttccttattacgcatcagaaaggactg

SEQ ID NO: 457080 - DNA, 33 bp, Homo sapien
cacaccttccttattatgcatcagaaaggactg

SEQ ID NO: 457081 - DNA, 33 bp, Homo sapien
agaatgtactgaagaaaaaagataaatgacctc

SEQ ID NO: 457082 - DNA, 33 bp, Homo sapien
agaatgtactgaagaagaaagataaatgacctc

SEQ ID NO: 457083 - DNA, 33 bp, Homo sapien
tatgcattgtcagacagagaggtcatttatctt

SEQ ID NO: 457084 - DNA, 33 bp, Homo sapien
tatgcattgtcagacatagaggtcatttatctt

SEQ ID NO: 457085 - DNA, 33 bp, Homo sapien
tgcgttctccaaacaccaagcaaatcccaagcc

SEQ ID NO: 457086 - DNA, 33 bp, Homo sapien
tgcgttctccaaacactaagcaaatcccaagcc

SEQ ID NO: 457087 - DNA, 33 bp, Homo sapien
tgctacaacttcagaactggagggactcttaga

SEQ ID NO: 457088 - DNA, 33 bp, Homo sapien
tgctacaacttcagaattggagggactcttaga

SEQ ID NO: 457089 - DNA, 33 bp, Homo sapien
ttccaatatttggtgccgaaaggttttgcctcg

SEQ ID NO: 457090 - DNA, 33 bp, Homo sapien
ttccaatatttggtgctgaaaggttttgcctcg

SEQ ID NO: 457091 - DNA, 33 bp, Homo sapien
cagaattgggatggacaacaggttaatcagatt

SEQ ID NO: 457092 - DNA, 33 bp, Homo sapien
cagaattgggatggacgacaggttaatcagatt

SEQ ID NO: 457093 - DNA, 33 bp, Homo sapien
ttgtatgcatagtactcacctgccaaaacctca

SEQ ID NO: 457094 - DNA, 33 bp, Homo sapien
ttgtatgcatagtacttacctgccaaaacctca

SEQ ID NO: 457095 - DNA, 33 bp, Homo sapien
caaacaaaggcagatgcaaagtgaaaatgccct

SEQ ID NO: 457096 - DNA, 33 bp, Homo sapien
caaacaaaggcagatgtaaagtgaaaatgccct

SEQ ID NO: 457097 - DNA, 33 bp, Homo sapien
ctcctgctcctccgtcagaactgcccttccctc

SEQ ID NO: 457098 - DNA, 33 bp, Homo sapien
ctcctgctcctccgtcggaactgcccttccctc

SEQ ID NO: 457099 - DNA, 33 bp, Homo sapien
cccatgcttctgccataaggcgagctgggtgga

SEQ ID NO: 457100 - DNA, 33 bp, Homo sapien
cccatgcttctgccatgaggcgagctgggtgga

SEQ ID NO: 457101 - DNA, 33 bp, Homo sapien
tgtgaggagtatgacacggtgggttgatcatgg

SEQ ID NO: 457102 - DNA, 33 bp, Homo sapien
tgtgaggagtatgacatggtgggttgatcatgg

SEQ ID NO: 457103 - DNA, 33 bp, Homo sapien
ggtagcctgcacaagaagcccaaatccaatggt

SEQ ID NO: 457104 - DNA, 33 bp, Homo sapien
ggtagcctgcacaagaggcccaaatccaatggt

SEQ ID NO: 457105 - DNA, 33 bp, Homo sapien
aatttcactgcgtggaggtcatagggttctcca

SEQ ID NO: 457106 - DNA, 33 bp, Homo sapien
aatttcactgcgtggatgtcatagggttctcca

SEQ ID NO: 457107 - DNA, 33 bp, Homo sapien
ttatcagctcatatggaagaagatttcctcggg

SEQ ID NO: 457108 - DNA, 33 bp, Homo sapien
ttatcagctcatatgggagaagatttcctcggg

SEQ ID NO: 457109 - DNA, 33 bp, Homo sapien
cggacaatctccttgcaatgccatttttcatga

SEQ ID NO: 457110 - DNA, 33 bp, Homo sapien
cggacaatctccttgccatgccatttttcatga

SEQ ID NO: 457111 - DNA, 33 bp, Homo sapien
ggttttactatcagaacgaatcatggtgcagaa

SEQ ID NO: 457112 - DNA, 33 bp, Homo sapien
ggttttactatcagaatgaatcatggtgcagaa

SEQ ID NO: 457113 - DNA, 33 bp, Homo sapien
gatattggtttattagcaattgcacaggtgccg

SEQ ID NO: 457114 - DNA, 33 bp, Homo sapien
gatattggtttattagtaattgcacaggtgccg

SEQ ID NO: 457115 - DNA, 33 bp, Homo sapien
aaggaagggacgctggcagctagaggtctggag

SEQ ID NO: 457116 - DNA, 33 bp, Homo sapien
aaggaagggacgctggtagctagaggtctggag

SEQ ID NO: 457117 - DNA, 33 bp, Homo sapien
tctttcttgcaccgaacagcctgaaatccctaa

SEQ ID NO: 457118 - DNA, 33 bp, Homo sapien
tctttcttgcaccgaagagcctgaaatccctaa

SEQ ID NO: 457119 - DNA, 33 bp, Homo sapien
ggccactttgcagaaaatactaggcctggactc

SEQ ID NO: 457120 - DNA, 33 bp, Homo sapien
ggccactttgcagaaagtactaggcctggactc

SEQ ID NO: 457121 - DNA, 33 bp, Homo sapien
tcactttttgctgttaccttaaggccaagttgc

SEQ ID NO: 457122 - DNA, 33 bp, Homo sapien
tcactttttgctgttatcttaaggccaagttgc

SEQ ID NO: 457123 - DNA, 33 bp, Homo sapien
tctggtttccatccaacgcaggaagaagaatcc

SEQ ID NO: 457124 - DNA, 33 bp, Homo sapien
tctggtttccatccaatgcaggaagaagaatcc

SEQ ID NO: 457125 - DNA, 33 bp, Homo sapien
aaaaatgtggcccagaacattctgatgtcagct

SEQ ID NO: 457126 - DNA, 33 bp, Homo sapien
aaaaatgtggcccagagcattctgatgtcagct

SEQ ID NO: 457127 - DNA, 33 bp, Homo sapien
actcacctcactacagaagccaattctcacgct

SEQ ID NO: 457128 - DNA, 33 bp, Homo sapien
actcacctcactacagtagccaattctcacgct

SEQ ID NO: 457129 - DNA, 33 bp, Homo sapien
ccaggcctggttctccaatttccaagtagagtt

SEQ ID NO: 457130 - DNA, 33 bp, Homo sapien
ccaggcctggttctcctatttccaagtagagtt

SEQ ID NO: 457131 - DNA, 33 bp, Homo sapien
gggcagatgttcgtcaaagaatcacatgaacca

SEQ ID NO: 457132 - DNA, 33 bp, Homo sapien
gggcagatgttcgtcagagaatcacatgaacca

SEQ ID NO: 457133 - DNA, 33 bp, Homo sapien
actccttcagcttccacctctggaccaaaggca

SEQ ID NO: 457134 - DNA, 33 bp, Homo sapien
actccttcagcttccatctctggaccaaaggca

SEQ ID NO: 457135 - DNA, 33 bp, Homo sapien
aaatgacgatactaaacgctgctgaggatgcaa

SEQ ID NO: 457136 - DNA, 33 bp, Homo sapien
aaatgacgatactaaatgctgctgaggatgcaa

SEQ ID NO: 457137 - DNA, 33 bp, Homo sapien
gatctttcatgtcaggaatttggctgggaccat

SEQ ID NO: 457138 - DNA, 33 bp, Homo sapien
gatctttcatgtcagggatttggctgggaccat

SEQ ID NO: 457139 - DNA, 33 bp, Homo sapien
accataaagagagaaaggactgattggaaatag

SEQ ID NO: 457140 - DNA, 33 bp, Homo sapien
accataaagagagaaatgactgattggaaatag

SEQ ID NO: 457141 - DNA, 33 bp, Homo sapien
aataatgagctgatccacaaaaactcaaaatgg

SEQ ID NO: 457142 - DNA, 33 bp, Homo sapien
aataatgagctgatccgcaaaaactcaaaatgg

SEQ ID NO: 457143 - DNA, 33 bp, Homo sapien
cagaatctggcttaacgcttttaacaagttaat

SEQ ID NO: 457144 - DNA, 33 bp, Homo sapien
cagaatctggcttaactcttttaacaagttaat

SEQ ID NO: 457145 - DNA, 33 bp, Homo sapien
acttgacatctagtaacctttttcttgggcagt

SEQ ID NO: 457146 - DNA, 33 bp, Homo sapien
acttgacatctagtaatctttttcttgggcagt

SEQ ID NO: 457147 - DNA, 33 bp, Homo sapien
acctctcaatttgtcaaaggtcctagttttcgc

SEQ ID NO: 457148 - DNA, 33 bp, Homo sapien
acctctcaatttgtcagaggtcctagttttcgc

SEQ ID NO: 457149 - DNA, 33 bp, Homo sapien
gcatcaaatggttttgaaactgaggtcagacaa

SEQ ID NO: 457150 - DNA, 33 bp, Homo sapien
gcatcaaatggttttggaactgaggtcagacaa

SEQ ID NO: 457151 - DNA, 33 bp, Homo sapien
gccagccacagtggctaaaagagacttgtctgc

SEQ ID NO: 457152 - DNA, 33 bp, Homo sapien
gccagccacagtggctgaaagagacttgtctgc

SEQ ID NO: 457153 - DNA, 33 bp, Homo sapien
agggaaatggataaaacgtgagccctccttccc

SEQ ID NO: 457154 - DNA, 33 bp, Homo sapien
agggaaatggataaaatgtgagccctccttccc

SEQ ID NO: 457155 - DNA, 33 bp, Homo sapien
gtccaagtatttcctcaatttcctgctgttttt

SEQ ID NO: 457156 - DNA, 33 bp, Homo sapien
gtccaagtatttcctcgatttcctgctgttttt

SEQ ID NO: 457157 - DNA, 33 bp, Homo sapien
ccggatggtgtctgcaagctcatgcacaaggca

SEQ ID NO: 457158 - DNA, 33 bp, Homo sapien
ccggatggtgtctgcaggctcatgcacaaggca

SEQ ID NO: 457159 - DNA, 33 bp, Homo sapien
attcgtgatgatttcacattagtcaagtaggga

SEQ ID NO: 457160 - DNA, 33 bp, Homo sapien
attcgtgatgatttcatattagtcaagtaggga

SEQ ID NO: 457161 - DNA, 33 bp, Homo sapien
tggtctatgttgtccaatgctgcaaggaagtgc

SEQ ID NO: 457162 - DNA, 33 bp, Homo sapien
tggtctatgttgtccagtgctgcaaggaagtgc

SEQ ID NO: 457163 - DNA, 33 bp, Homo sapien
ggaagcaatgacatcaagttggggaaggagaag

SEQ ID NO: 457164 - DNA, 33 bp, Homo sapien
ggaagcaatgacatcacgttggggaaggagaag

SEQ ID NO: 457165 - DNA, 33 bp, Homo sapien
cccactgatcaacgaaagtataaaggtaatgtg

SEQ ID NO: 457166 - DNA, 33 bp, Homo sapien
cccactgatcaacgaatgtataaaggtaatgtg

SEQ ID NO: 457167 - DNA, 33 bp, Homo sapien
tgtttgctagggtccaataccaggaaatgtcaa

SEQ ID NO: 457168 - DNA, 33 bp, Homo sapien
tgtttgctagggtccactaccaggaaatgtcaa

SEQ ID NO: 457169 - DNA, 33 bp, Homo sapien
ctgtaccatgcaatgaccctgggccatcctgga

SEQ ID NO: 457170 - DNA, 33 bp, Homo sapien
ctgtaccatgcaatgatcctgggccatcctgga

SEQ ID NO: 457171 - DNA, 33 bp, Homo sapien
aggtcttggtgactcacattcctcttagccttg

SEQ ID NO: 457172 - DNA, 33 bp, Homo sapien
aggtcttggtgactcatattcctcttagccttg

SEQ ID NO: 457173 - DNA, 33 bp, Homo sapien
cattgtgtggtcctcaggagctctgtgcaagat

SEQ ID NO: 457174 - DNA, 33 bp, Homo sapien
cattgtgtggtcctcatgagctctgtgcaagat

SEQ ID NO: 457175 - DNA, 33 bp, Homo sapien
atataacatcctcatcagaaatggcgccccagg

SEQ ID NO: 457176 - DNA, 33 bp, Homo sapien
atataacatcctcatcggaaatggcgccccagg

SEQ ID NO: 457177 - DNA, 33 bp, Homo sapien
agaatctgttgaggaaactatgactcctttact

SEQ ID NO: 457178 - DNA, 33 bp, Homo sapien
agaatctgttgaggaagctatgactcctttact

SEQ ID NO: 457179 - DNA, 33 bp, Homo sapien
aaagggggccctagaactctctgttaagggacc

SEQ ID NO: 457180 - DNA, 33 bp, Homo sapien
aaagggggccctagaagtctctgttaagggacc

SEQ ID NO: 457181 - DNA, 33 bp, Homo sapien
tgctctgttgtaggccacttagaaattaaacca

SEQ ID NO: 457182 - DNA, 33 bp, Homo sapien
tgctctgttgtaggcctcttagaaattaaacca

SEQ ID NO: 457183 - DNA, 33 bp, Homo sapien
tttgattcttcgctatcataccaaattgcatcc

SEQ ID NO: 457184 - DNA, 33 bp, Homo sapien
tttgattcttcgctatgataccaaattgcatcc

SEQ ID NO: 457185 - DNA, 33 bp, Homo sapien
tggcgtcatactggacaaggactggctggcaac

SEQ ID NO: 457186 - DNA, 33 bp, Homo sapien
tggcgtcatactggacgaggactggctggcaac

SEQ ID NO: 457187 - DNA, 33 bp, Homo sapien
aggttttatccattgaggttacatgatcgagac

SEQ ID NO: 457188 - DNA, 33 bp, Homo sapien
aggttttatccattgatgttacatgatcgagac

SEQ ID NO: 457189 - DNA, 33 bp, Homo sapien
gcatgggtgcatggagaccaatcctgaaatgat

SEQ ID NO: 457190 - DNA, 33 bp, Homo sapien
gcatgggtgcatggaggccaatcctgaaatgat

SEQ ID NO: 457191 - DNA, 33 bp, Homo sapien
acccacacatgggagaacctcggtagggaaccc

SEQ ID NO: 457192 - DNA, 33 bp, Homo sapien
acccacacatgggagagcctcggtagggaaccc

SEQ ID NO: 457193 - DNA, 33 bp, Homo sapien
atcatagggacgcttacaaggccaacttctgcg

SEQ ID NO: 457194 - DNA, 33 bp, Homo sapien
atcatagggacgcttataaggccaacttctgcg

SEQ ID NO: 457195 - DNA, 33 bp, Homo sapien
gggagcgggtagtactcaaactgtattgtgcat

SEQ ID NO: 457196 - DNA, 33 bp, Homo sapien
gggagcgggtagtacttaaactgtattgtgcat

SEQ ID NO: 457197 - DNA, 33 bp, Homo sapien
ccatgatacatttccaactgtaatttatgaatg

SEQ ID NO: 457198 - DNA, 33 bp, Homo sapien
ccatgatacatttccatctgtaatttatgaatg

SEQ ID NO: 457199 - DNA, 33 bp, Homo sapien
ccccgacattcttctcactgttggaagcctcaa

SEQ ID NO: 457200 - DNA, 33 bp, Homo sapien
ccccgacattcttctctctgttggaagcctcaa

SEQ ID NO: 457201 - DNA, 33 bp, Homo sapien
gtcctctaaggtactacgtggagctcctcttgg

SEQ ID NO: 457202 - DNA, 33 bp, Homo sapien
gtcctctaaggtactatgtggagctcctcttgg

SEQ ID NO: 457203 - DNA, 33 bp, Homo sapien
gctcttatgcttgtggcaaaccagaacatatcc

SEQ ID NO: 457204 - DNA, 33 bp, Homo sapien
gctcttatgcttgtgggaaaccagaacatatcc

SEQ ID NO: 457205 - DNA, 33 bp, Homo sapien
tttaaagagataaaaacggcaattgtgcagaca

SEQ ID NO: 457206 - DNA, 33 bp, Homo sapien
tttaaagagataaaaatggcaattgtgcagaca

SEQ ID NO: 457207 - DNA, 33 bp, Homo sapien
tgaggttagaagaccccatagccattttttgat

SEQ ID NO: 457208 - DNA, 33 bp, Homo sapien
tgaggttagaagacccgatagccattttttgat

SEQ ID NO: 457209 - DNA, 33 bp, Homo sapien
ctctgagtgctgtcaccgtacatccaagcaagg

SEQ ID NO: 457210 - DNA, 33 bp, Homo sapien
ctctgagtgctgtcactgtacatccaagcaagg

SEQ ID NO: 457211 - DNA, 33 bp, Homo sapien
cagtgtccccatagaaggtaagccccacgagag

SEQ ID NO: 457212 - DNA, 33 bp, Homo sapien
cagtgtccccatagaatgtaagccccacgagag

SEQ ID NO: 457213 - DNA, 33 bp, Homo sapien
tcccctgtaagaagaacgctggattgaccggaa

SEQ ID NO: 457214 - DNA, 33 bp, Homo sapien
tcccctgtaagaagaatgctggattgaccggaa

SEQ ID NO: 457215 - DNA, 33 bp, Homo sapien
caaatcccaaacaaataaaaccaggcaaaagag

SEQ ID NO: 457216 - DNA, 33 bp, Homo sapien
caaatcccaaacaaatcaaaccaggcaaaagag

SEQ ID NO: 457217 - DNA, 33 bp, Homo sapien
gattatttattgtgcacgtttttttctccttca

SEQ ID NO: 457218 - DNA, 33 bp, Homo sapien
gattatttattgtgcatgtttttttctccttca

SEQ ID NO: 457219 - DNA, 33 bp, Homo sapien
aatagaacatggtggcagcacattctcactaac

SEQ ID NO: 457220 - DNA, 33 bp, Homo sapien
aatagaacatggtggccgcacattctcactaac

SEQ ID NO: 457221 - DNA, 33 bp, Homo sapien
gagaatagatctaacactggactgctttgaagg

SEQ ID NO: 457222 - DNA, 33 bp, Homo sapien
gagaatagatctaacattggactgctttgaagg

SEQ ID NO: 457223 - DNA, 33 bp, Homo sapien
gaggctttgttttataaatgggaaccacagaaa

SEQ ID NO: 457224 - DNA, 33 bp, Homo sapien
gaggctttgttttatagatgggaaccacagaaa

SEQ ID NO: 457225 - DNA, 33 bp, Homo sapien
aaacccacaaaatagcgcttgtctagaatcacc

SEQ ID NO: 457226 - DNA, 33 bp, Homo sapien
aaacccacaaaatagctcttgtctagaatcacc

SEQ ID NO: 457227 - DNA, 33 bp, Homo sapien
ggtagcaaatgctaagcatcacaaaagaggcaa

SEQ ID NO: 457228 - DNA, 33 bp, Homo sapien
ggtagcaaatgctaagtatcacaaaagaggcaa

SEQ ID NO: 457229 - DNA, 33 bp, Homo sapien
gagctgagggtaaaacaacatatataaaaagca

SEQ ID NO: 457230 - DNA, 33 bp, Homo sapien
gagctgagggtaaaacgacatatataaaaagca

SEQ ID NO: 457231 - DNA, 33 bp, Homo sapien
gggggcctcaggatgacggtggaaatgcctgct

SEQ ID NO: 457232 - DNA, 33 bp, Homo sapien
gggggcctcaggatgatggtggaaatgcctgct

SEQ ID NO: 457233 - DNA, 33 bp, Homo sapien
gcccttaggcaaatcaccaatgacccatgttca

SEQ ID NO: 457234 - DNA, 33 bp, Homo sapien
gcccttaggcaaatcatcaatgacccatgttca

SEQ ID NO: 457235 - DNA, 33 bp, Homo sapien
gcatagagtcaggtgaaagaggatgctgttcct

SEQ ID NO: 457236 - DNA, 33 bp, Homo sapien
gcatagagtcaggtgagagaggatgctgttcct

SEQ ID NO: 457237 - DNA, 33 bp, Homo sapien
caagagtgaggtctcacggaaatgcactcttgc

SEQ ID NO: 457238 - DNA, 33 bp, Homo sapien
caagagtgaggtctcatggaaatgcactcttgc

SEQ ID NO: 457239 - DNA, 33 bp, Homo sapien
cagctatcaccctgagccaccgaacttccttcc

SEQ ID NO: 457240 - DNA, 33 bp, Homo sapien
cagctatcaccctgagtcaccgaacttccttcc

SEQ ID NO: 457241 - DNA, 33 bp, Homo sapien
ttcattctgaggattaaacacccagaaaacacg

SEQ ID NO: 457242 - DNA, 33 bp, Homo sapien
ttcattctgaggattagacacccagaaaacacg

SEQ ID NO: 457243 - DNA, 33 bp, Homo sapien
gggagtccatcagtataaagtgggggtttcaaa

SEQ ID NO: 457244 - DNA, 33 bp, Homo sapien
gggagtccatcagtattaagtgggggtttcaaa

SEQ ID NO: 457245 - DNA, 33 bp, Homo sapien
ccctgctggttcaatcacttcctgttttccatt

SEQ ID NO: 457246 - DNA, 33 bp, Homo sapien
ccctgctggttcaatcgcttcctgttttccatt

SEQ ID NO: 457247 - DNA, 33 bp, Homo sapien
acctcaaagaaagtgcaatactggctgtttagt

SEQ ID NO: 457248 - DNA, 33 bp, Homo sapien
acctcaaagaaagtgcgatactggctgtttagt

SEQ ID NO: 457249 - DNA, 33 bp, Homo sapien
tctgagcttcaatgcaagaaagaggaaaatgca

SEQ ID NO: 457250 - DNA, 33 bp, Homo sapien
tctgagcttcaatgcaggaaagaggaaaatgca

SEQ ID NO: 457251 - DNA, 33 bp, Homo sapien
ataagatgggctgtaaagatgcacggaatttag

SEQ ID NO: 457252 - DNA, 33 bp, Homo sapien
ataagatgggctgtaaggatgcacggaatttag

SEQ ID NO: 457253 - DNA, 33 bp, Homo sapien
cacatcacagatttccaccaagcatttttttcc

SEQ ID NO: 457254 - DNA, 33 bp, Homo sapien
cacatcacagatttccgccaagcatttttttcc

SEQ ID NO: 457255 - DNA, 33 bp, Homo sapien
atcttcaacattgatgaacattagcatcttcct

SEQ ID NO: 457256 - DNA, 33 bp, Homo sapien
atcttcaacattgatggacattagcatcttcct

SEQ ID NO: 457257 - DNA, 33 bp, Homo sapien
gatccctaacttaccaatatatctctctctggc

SEQ ID NO: 457258 - DNA, 33 bp, Homo sapien
gatccctaacttaccagtatatctctctctggc

SEQ ID NO: 457259 - DNA, 33 bp, Homo sapien
aaaccatttaactgaaactgccaccccaaaatc

SEQ ID NO: 457260 - DNA, 33 bp, Homo sapien
aaaccatttaactgaacctgccaccccaaaatc

SEQ ID NO: 457261 - DNA, 33 bp, Homo sapien
gaaaccactcaatccactaaaaatatagttggc

SEQ ID NO: 457262 - DNA, 33 bp, Homo sapien
gaaaccactcaatccattaaaaatatagttggc

SEQ ID NO: 457263 - DNA, 33 bp, Homo sapien
gacataaactgcagacacgttcttggacagctg

SEQ ID NO: 457264 - DNA, 33 bp, Homo sapien
gacataaactgcagacgcgttcttggacagctg

SEQ ID NO: 457265 - DNA, 33 bp, Homo sapien
tgtttggctcaaacacgaggtagcaagacccag

SEQ ID NO: 457266 - DNA, 33 bp, Homo sapien
tgtttggctcaaacactaggtagcaagacccag

SEQ ID NO: 457267 - DNA, 33 bp, Homo sapien
tgttttctatcacagactatatgccagatgttc

SEQ ID NO: 457268 - DNA, 33 bp, Homo sapien
tgttttctatcacagattatatgccagatgttc

SEQ ID NO: 457269 - DNA, 33 bp, Homo sapien
ggtctgggccattgcccatgagttcatacatac

SEQ ID NO: 457270 - DNA, 33 bp, Homo sapien
ggtctgggccattgcctatgagttcatacatac

SEQ ID NO: 457271 - DNA, 33 bp, Homo sapien
agttcaaaaagcaccaatatttaacaggaacca

SEQ ID NO: 457272 - DNA, 33 bp, Homo sapien
agttcaaaaagcaccagtatttaacaggaacca

SEQ ID NO: 457273 - DNA, 33 bp, Homo sapien
gaacagagtaaaagaacgatccatggagtggga

SEQ ID NO: 457274 - DNA, 33 bp, Homo sapien
gaacagagtaaaagaatgatccatggagtggga

SEQ ID NO: 457275 - DNA, 33 bp, Homo sapien
tcaggataccaggatacggctctctgaagctcc

SEQ ID NO: 457276 - DNA, 33 bp, Homo sapien
tcaggataccaggatatggctctctgaagctcc

SEQ ID NO: 457277 - DNA, 33 bp, Homo sapien
aatcaaatacatatttgaaagctcaataggtag

SEQ ID NO: 457278 - DNA, 33 bp, Homo sapien
aatcaaatacatattttaaagctcaataggtag

SEQ ID NO: 457279 - DNA, 33 bp, Homo sapien
cccttgactgtcatacactgtggtcatatgaac

SEQ ID NO: 457280 - DNA, 33 bp, Homo sapien
cccttgactgtcataccctgtggtcatatgaac

SEQ ID NO: 457281 - DNA, 33 bp, Homo sapien
tccctttctttacctaggttagtctcgcctgcc

SEQ ID NO: 457282 - DNA, 33 bp, Homo sapien
tccctttctttacctatgttagtctcgcctgcc

SEQ ID NO: 457283 - DNA, 33 bp, Homo sapien
accacccccatgtgaccggtagaattctaagac

SEQ ID NO: 457284 - DNA, 33 bp, Homo sapien
accacccccatgtgactggtagaattctaagac

SEQ ID NO: 457285 - DNA, 33 bp, Homo sapien
tgtgtgtgggcgtgaacgggtaggtgtttatct

SEQ ID NO: 457286 - DNA, 33 bp, Homo sapien
tgtgtgtgggcgtgaatgggtaggtgtttatct

SEQ ID NO: 457287 - DNA, 33 bp, Homo sapien
tgtcatctgcacactcacgtttaaacctgcatt

SEQ ID NO: 457288 - DNA, 33 bp, Homo sapien
tgtcatctgcacactcgcgtttaaacctgcatt

SEQ ID NO: 457289 - DNA, 33 bp, Homo sapien
ctcaaaaagggccatcaatgagagtggcaggga

SEQ ID NO: 457290 - DNA, 33 bp, Homo sapien
ctcaaaaagggccatcgatgagagtggcaggga

SEQ ID NO: 457291 - DNA, 33 bp, Homo sapien
gcccttaccttggatccgagagccaaagatcat

SEQ ID NO: 457292 - DNA, 33 bp, Homo sapien
gcccttaccttggatctgagagccaaagatcat

SEQ ID NO: 457293 - DNA, 33 bp, Homo sapien
aaacaatgagacctccccacgtgctcctagaga

SEQ ID NO: 457294 - DNA, 33 bp, Homo sapien
aaacaatgagacctcctcacgtgctcctagaga

SEQ ID NO: 457295 - DNA, 33 bp, Homo sapien
ttgtgatagctcagaaatgggcaagttagaaga

SEQ ID NO: 457296 - DNA, 33 bp, Homo sapien
ttgtgatagctcagaactgggcaagttagaaga

SEQ ID NO: 457297 - DNA, 33 bp, Homo sapien
taatcaattgatgcaacgagtgattagcaagct

SEQ ID NO: 457298 - DNA, 33 bp, Homo sapien
taatcaattgatgcaatgagtgattagcaagct

SEQ ID NO: 457299 - DNA, 33 bp, Homo sapien
ccttttatcacctcaacaccctgcactacaatg

SEQ ID NO: 457300 - DNA, 33 bp, Homo sapien
ccttttatcacctcaataccctgcactacaatg

SEQ ID NO: 457301 - DNA, 33 bp, Homo sapien
tatttcctctgagtgacggaggccttttacttc

SEQ ID NO: 457302 - DNA, 33 bp, Homo sapien
tatttcctctgagtgagggaggccttttacttc

SEQ ID NO: 457303 - DNA, 33 bp, Homo sapien
ttaatcctgcagtgcaacaatgttgaccaagtc

SEQ ID NO: 457304 - DNA, 33 bp, Homo sapien
ttaatcctgcagtgcagcaatgttgaccaagtc

SEQ ID NO: 457305 - DNA, 33 bp, Homo sapien
caagagattgggcataaagcactaatgatcttg

SEQ ID NO: 457306 - DNA, 33 bp, Homo sapien
caagagattgggcatagagcactaatgatcttg

SEQ ID NO: 457307 - DNA, 33 bp, Homo sapien
gtgggcattttgggaagccctgtgtcattaaag

SEQ ID NO: 457308 - DNA, 33 bp, Homo sapien
gtgggcattttgggaatccctgtgtcattaaag

SEQ ID NO: 457309 - DNA, 33 bp, Homo sapien
aagataatttctccacggactgggtagggggtg

SEQ ID NO: 457310 - DNA, 33 bp, Homo sapien
aagataatttctccactgactgggtagggggtg

SEQ ID NO: 457311 - DNA, 33 bp, Homo sapien
tgagttgtgattagacaaaactctcttcctata

SEQ ID NO: 457312 - DNA, 33 bp, Homo sapien
tgagttgtgattagacgaaactctcttcctata

SEQ ID NO: 457313 - DNA, 33 bp, Homo sapien
catatcaaaataacaaactgtagagcaaaaggc

SEQ ID NO: 457314 - DNA, 33 bp, Homo sapien
catatcaaaataacaagctgtagagcaaaaggc

SEQ ID NO: 457315 - DNA, 33 bp, Homo sapien
gaaactagaataggaacagacatgcttccaggc

SEQ ID NO: 457316 - DNA, 33 bp, Homo sapien
gaaactagaataggaatagacatgcttccaggc

SEQ ID NO: 457317 - DNA, 33 bp, Homo sapien
gccagcaactgaagtaacagccaggctaagaga

SEQ ID NO: 457318 - DNA, 33 bp, Homo sapien
gccagcaactgaagtagcagccaggctaagaga

SEQ ID NO: 457319 - DNA, 33 bp, Homo sapien
ggaaggaggtgaagtcaacatgagagggcattt

SEQ ID NO: 457320 - DNA, 33 bp, Homo sapien
ggaaggaggtgaagtccacatgagagggcattt

SEQ ID NO: 457321 - DNA, 33 bp, Homo sapien
tcagcctctaatagtccctgaaagctccagcag

SEQ ID NO: 457322 - DNA, 33 bp, Homo sapien
tcagcctctaatagtctctgaaagctccagcag

SEQ ID NO: 457323 - DNA, 33 bp, Homo sapien
gggacctgactgtgagaagggaagtagtgtgta

SEQ ID NO: 457324 - DNA, 33 bp, Homo sapien
gggacctgactgtgaggagggaagtagtgtgta

SEQ ID NO: 457325 - DNA, 33 bp, Homo sapien
gagctagcctgtgaaaagttgtcatccactaga

SEQ ID NO: 457326 - DNA, 33 bp, Homo sapien
gagctagcctgtgaaaggttgtcatccactaga

SEQ ID NO: 457327 - DNA, 33 bp, Homo sapien
ccatcaaagaaaactacgtagagatgccagagc

SEQ ID NO: 457328 - DNA, 33 bp, Homo sapien
ccatcaaagaaaactatgtagagatgccagagc

SEQ ID NO: 457329 - DNA, 33 bp, Homo sapien
ttttgtgtgttcaggacgcagactggagtgggt

SEQ ID NO: 457330 - DNA, 33 bp, Homo sapien
ttttgtgtgttcaggatgcagactggagtgggt

SEQ ID NO: 457331 - DNA, 33 bp, Homo sapien
ttttctcattcctacacggaaagcacagagaca

SEQ ID NO: 457332 - DNA, 33 bp, Homo sapien
ttttctcattcctacatggaaagcacagagaca

SEQ ID NO: 457333 - DNA, 33 bp, Homo sapien
ggggcattctttcacaagatgtggtagagatag

SEQ ID NO: 457334 - DNA, 33 bp, Homo sapien
ggggcattctttcacaggatgtggtagagatag

SEQ ID NO: 457335 - DNA, 33 bp, Homo sapien
ttggttatctcagcaagttcctagggtgctagt

SEQ ID NO: 457336 - DNA, 33 bp, Homo sapien
ttggttatctcagcaatttcctagggtgctagt

SEQ ID NO: 457337 - DNA, 33 bp, Homo sapien
gagacacactggcaggaagttggcaggctgcac

SEQ ID NO: 457338 - DNA, 33 bp, Homo sapien
gagacacactggcagggagttggcaggctgcac

SEQ ID NO: 457339 - DNA, 33 bp, Homo sapien
ccacagccttaccctacagcttggcttgtctcg

SEQ ID NO: 457340 - DNA, 33 bp, Homo sapien
ccacagccttaccctatagcttggcttgtctcg

SEQ ID NO: 457341 - DNA, 33 bp, Homo sapien
gcaaggctcatcttaaatcaatctaacgagggg

SEQ ID NO: 457342 - DNA, 33 bp, Homo sapien
gcaaggctcatcttaactcaatctaacgagggg

SEQ ID NO: 457343 - DNA, 33 bp, Homo sapien
ctccgcgctgctccagacagtctgcagaatgct

SEQ ID NO: 457344 - DNA, 33 bp, Homo sapien
ctccgcgctgctccaggcagtctgcagaatgct

SEQ ID NO: 457345 - DNA, 33 bp, Homo sapien
gataacttgtgagagcaccccttctgtccctgc

SEQ ID NO: 457346 - DNA, 33 bp, Homo sapien
gataacttgtgagagcgccccttctgtccctgc

SEQ ID NO: 457347 - DNA, 33 bp, Homo sapien
cttcagttaagtgtgaacgaccggttaatagta

SEQ ID NO: 457348 - DNA, 33 bp, Homo sapien
cttcagttaagtgtgagcgaccggttaatagta

SEQ ID NO: 457349 - DNA, 33 bp, Homo sapien
agtcatatctaccttacaggatacagagagaat

SEQ ID NO: 457350 - DNA, 33 bp, Homo sapien
agtcatatctaccttataggatacagagagaat

SEQ ID NO: 457351 - DNA, 33 bp, Homo sapien
gaaatatgtggtaagacgcagaaatataatgcc

SEQ ID NO: 457352 - DNA, 33 bp, Homo sapien
gaaatatgtggtaagatgcagaaatataatgcc

SEQ ID NO: 457353 - DNA, 33 bp, Homo sapien
caaaggcctaaagccaagtggatcttgcacttt

SEQ ID NO: 457354 - DNA, 33 bp, Homo sapien
caaaggcctaaagccatgtggatcttgcacttt

SEQ ID NO: 457355 - DNA, 33 bp, Homo sapien
tgttgagtgtccgaggcagaactctgcggtctc

SEQ ID NO: 457356 - DNA, 33 bp, Homo sapien
tgttgagtgtccgaggtagaactctgcggtctc

SEQ ID NO: 457357 - DNA, 33 bp, Homo sapien
cccccaaatcctgacaaccatgttaccaaatga

SEQ ID NO: 457358 - DNA, 33 bp, Homo sapien
cccccaaatcctgacagccatgttaccaaatga

SEQ ID NO: 457359 - DNA, 33 bp, Homo sapien
catctctctttccaggacaaaagatgagatcgt

SEQ ID NO: 457360 - DNA, 33 bp, Homo sapien
catctctctttccagggcaaaagatgagatcgt

SEQ ID NO: 457361 - DNA, 33 bp, Homo sapien
atgtaatgatcacatgcattttctcgactcttc

SEQ ID NO: 457362 - DNA, 33 bp, Homo sapien
atgtaatgatcacatgtattttctcgactcttc

SEQ ID NO: 457363 - DNA, 33 bp, Homo sapien
tctgcttaactcatcacgctgctttaacagagc

SEQ ID NO: 457364 - DNA, 33 bp, Homo sapien
tctgcttaactcatcatgctgctttaacagagc

SEQ ID NO: 457365 - DNA, 33 bp, Homo sapien
ctgaacacttacaggacctggttctatattgac

SEQ ID NO: 457366 - DNA, 33 bp, Homo sapien
ctgaacacttacaggagctggttctatattgac

SEQ ID NO: 457367 - DNA, 33 bp, Homo sapien
tcagaacagcttcagcaacccctgcctaataaa

SEQ ID NO: 457368 - DNA, 33 bp, Homo sapien
tcagaacagcttcagcgacccctgcctaataaa

SEQ ID NO: 457369 - DNA, 33 bp, Homo sapien
tacttcttaatgactaagacagtggttaccagg

SEQ ID NO: 457370 - DNA, 33 bp, Homo sapien
tacttcttaatgactaggacagtggttaccagg

SEQ ID NO: 457371 - DNA, 33 bp, Homo sapien
cctgagtacttctgaacctcccctcagcccctg

SEQ ID NO: 457372 - DNA, 33 bp, Homo sapien
cctgagtacttctgaatctcccctcagcccctg

SEQ ID NO: 457373 - DNA, 33 bp, Homo sapien
gtttacaagatcaatacgcaaaaataaaatata

SEQ ID NO: 457374 - DNA, 33 bp, Homo sapien
gtttacaagatcaatatgcaaaaataaaatata

SEQ ID NO: 457375 - DNA, 33 bp, Homo sapien
gtctattcattgaaaccgtctaatgcattttgg

SEQ ID NO: 457376 - DNA, 33 bp, Homo sapien
gtctattcattgaaactgtctaatgcattttgg

SEQ ID NO: 457377 - DNA, 33 bp, Homo sapien
gccaggtgcagcttcacggtgtctctggatagt

SEQ ID NO: 457378 - DNA, 33 bp, Homo sapien
gccaggtgcagcttcatggtgtctctggatagt

SEQ ID NO: 457379 - DNA, 33 bp, Homo sapien
atacaacatattctcaccaatgccaggagctaa

SEQ ID NO: 457380 - DNA, 33 bp, Homo sapien
atacaacatattctcatcaatgccaggagctaa

SEQ ID NO: 457381 - DNA, 33 bp, Homo sapien
ggaatgggaacaagccaatgtggagagttttga

SEQ ID NO: 457382 - DNA, 33 bp, Homo sapien
ggaatgggaacaagccgatgtggagagttttga

SEQ ID NO: 457383 - DNA, 33 bp, Homo sapien
tgttaaatcttccaatcaacgttgtgtggactt

SEQ ID NO: 457384 - DNA, 33 bp, Homo sapien
tgttaaatcttccaatgaacgttgtgtggactt

SEQ ID NO: 457385 - DNA, 33 bp, Homo sapien
cagaaagaaatacaaactgcctggttcacttct

SEQ ID NO: 457386 - DNA, 33 bp, Homo sapien
cagaaagaaatacaaattgcctggttcacttct

SEQ ID NO: 457387 - DNA, 33 bp, Homo sapien
ttggttatgtgagcagcagaatttatagacatc

SEQ ID NO: 457388 - DNA, 33 bp, Homo sapien
ttggttatgtgagcagtagaatttatagacatc

SEQ ID NO: 457389 - DNA, 33 bp, Homo sapien
gctgtctggtcagtcacgagtctgccctcatct

SEQ ID NO: 457390 - DNA, 33 bp, Homo sapien
gctgtctggtcagtcatgagtctgccctcatct

SEQ ID NO: 457391 - DNA, 33 bp, Homo sapien
agactgattctgtccaatgaaatgtgatgtcca

SEQ ID NO: 457392 - DNA, 33 bp, Homo sapien
agactgattctgtccagtgaaatgtgatgtcca

SEQ ID NO: 457393 - DNA, 33 bp, Homo sapien
cagagttgttttcccaagcatccttctttggaa

SEQ ID NO: 457394 - DNA, 33 bp, Homo sapien
cagagttgttttcccaggcatccttctttggaa

SEQ ID NO: 457395 - DNA, 33 bp, Homo sapien
caagtttttgcagcagaatttttatatggaaca

SEQ ID NO: 457396 - DNA, 33 bp, Homo sapien
caagtttttgcagcaggatttttatatggaaca

SEQ ID NO: 457397 - DNA, 33 bp, Homo sapien
ccaggttgtattttgcaaagcacgtttcctgtt

SEQ ID NO: 457398 - DNA, 33 bp, Homo sapien
ccaggttgtattttgccaagcacgtttcctgtt

SEQ ID NO: 457399 - DNA, 33 bp, Homo sapien
caggactgaaggtaaaaacctgcacagcatcgt

SEQ ID NO: 457400 - DNA, 33 bp, Homo sapien
caggactgaaggtaaatacctgcacagcatcgt

SEQ ID NO: 457401 - DNA, 33 bp, Homo sapien
aaggggcaccagctagaccaagtgtgtgggcct

SEQ ID NO: 457402 - DNA, 33 bp, Homo sapien
aaggggcaccagctaggccaagtgtgtgggcct

SEQ ID NO: 457403 - DNA, 33 bp, Homo sapien
aaatcccaatgaacaacaaacatataaaaattg

SEQ ID NO: 457404 - DNA, 33 bp, Homo sapien
aaatcccaatgaacaataaacatataaaaattg

SEQ ID NO: 457405 - DNA, 33 bp, Homo sapien
caaaaattcaaaactacagtgatagagttcagt

SEQ ID NO: 457406 - DNA, 33 bp, Homo sapien
caaaaattcaaaactatagtgatagagttcagt

SEQ ID NO: 457407 - DNA, 33 bp, Homo sapien
agttgcgttaaagtcaccttctatgatcatgaa

SEQ ID NO: 457408 - DNA, 33 bp, Homo sapien
agttgcgttaaagtcatcttctatgatcatgaa

SEQ ID NO: 457409 - DNA, 33 bp, Homo sapien
ataagcaaatcccaaactttccaggaagaagtg

SEQ ID NO: 457410 - DNA, 33 bp, Homo sapien
ataagcaaatcccaaagtttccaggaagaagtg

SEQ ID NO: 457411 - DNA, 33 bp, Homo sapien
aagagctgtaatgaaacggtggcaaggaaccct

SEQ ID NO: 457412 - DNA, 33 bp, Homo sapien
aagagctgtaatgaaatggtggcaaggaaccct

SEQ ID NO: 457413 - DNA, 33 bp, Homo sapien
aactctaatatggctacgtttcagatgctattt

SEQ ID NO: 457414 - DNA, 33 bp, Homo sapien
aactctaatatggctatgtttcagatgctattt

SEQ ID NO: 457415 - DNA, 33 bp, Homo sapien
aattggacataaagaaagcatagattcaacttt

SEQ ID NO: 457416 - DNA, 33 bp, Homo sapien
aattggacataaagaacgcatagattcaacttt

SEQ ID NO: 457417 - DNA, 33 bp, Homo sapien
gactattactaggtcgaaggatcaagaaagtcc

SEQ ID NO: 457418 - DNA, 33 bp, Homo sapien
gactattactaggtcggaggatcaagaaagtcc

SEQ ID NO: 457419 - DNA, 33 bp, Homo sapien
ctgtttggtttgctgacaagtgaagatttgagt

SEQ ID NO: 457420 - DNA, 33 bp, Homo sapien
ctgtttggtttgctgataagtgaagatttgagt

SEQ ID NO: 457421 - DNA, 33 bp, Homo sapien
ctcagtgcagatcttccaggtgtccacaagaga

SEQ ID NO: 457422 - DNA, 33 bp, Homo sapien
ctcagtgcagatcttctaggtgtccacaagaga

SEQ ID NO: 457423 - DNA, 33 bp, Homo sapien
catatccttagcttaaccaggagagaaaccctc

SEQ ID NO: 457424 - DNA, 33 bp, Homo sapien
catatccttagcttaatcaggagagaaaccctc

SEQ ID NO: 457425 - DNA, 33 bp, Homo sapien
ggtgagcttcccagaacgaaaattgaagggggc

SEQ ID NO: 457426 - DNA, 33 bp, Homo sapien
ggtgagcttcccagaatgaaaattgaagggggc

SEQ ID NO: 457427 - DNA, 33 bp, Homo sapien
ccagaccagctggggcaaactcagaaggcaaga

SEQ ID NO: 457428 - DNA, 33 bp, Homo sapien
ccagaccagctggggcgaactcagaaggcaaga

SEQ ID NO: 457429 - DNA, 33 bp, Homo sapien
atgagtcttctaaggacgaaggaaagggccagg

SEQ ID NO: 457430 - DNA, 33 bp, Homo sapien
atgagtcttctaaggaggaaggaaagggccagg

SEQ ID NO: 457431 - DNA, 33 bp, Homo sapien
aacacatagaagaaaaactttgtccttagatta

SEQ ID NO: 457432 - DNA, 33 bp, Homo sapien
aacacatagaagaaaatctttgtccttagatta

SEQ ID NO: 457433 - DNA, 33 bp, Homo sapien
gctagctcaaaattcacgtgacttcccatttca

SEQ ID NO: 457434 - DNA, 33 bp, Homo sapien
gctagctcaaaattcatgtgacttcccatttca

SEQ ID NO: 457435 - DNA, 33 bp, Homo sapien
tgttactaaggcctcagaacatattggcagttg

SEQ ID NO: 457436 - DNA, 33 bp, Homo sapien
tgttactaaggcctcataacatattggcagttg

SEQ ID NO: 457437 - DNA, 33 bp, Homo sapien
catcctgaaaccatccccaactctggctcgtgg

SEQ ID NO: 457438 - DNA, 33 bp, Homo sapien
catcctgaaaccatcctcaactctggctcgtgg

SEQ ID NO: 457439 - DNA, 33 bp, Homo sapien
ttcttggtgatatggaggtacttttattatgtg

SEQ ID NO: 457440 - DNA, 33 bp, Homo sapien
ttcttggtgatatggatgtacttttattatgtg

SEQ ID NO: 457441 - DNA, 33 bp, Homo sapien
tgtaggaaatcataccactatcaggcatccaga

SEQ ID NO: 457442 - DNA, 33 bp, Homo sapien
tgtaggaaatcataccgctatcaggcatccaga

SEQ ID NO: 457443 - DNA, 33 bp, Homo sapien
gcatacatgaggttagacaagattaacccaaag

SEQ ID NO: 457444 - DNA, 33 bp, Homo sapien
gcatacatgaggttaggcaagattaacccaaag

SEQ ID NO: 457445 - DNA, 33 bp, Homo sapien
tgaacccaaagcctaacatgatcaccaaagggt

SEQ ID NO: 457446 - DNA, 33 bp, Homo sapien
tgaacccaaagcctaatatgatcaccaaagggt

SEQ ID NO: 457447 - DNA, 33 bp, Homo sapien
cctgtattatcaaccacgcaagatcacatcttg

SEQ ID NO: 457448 - DNA, 33 bp, Homo sapien
cctgtattatcaaccatgcaagatcacatcttg

SEQ ID NO: 457449 - DNA, 33 bp, Homo sapien
aatggcaaacaccataagctctgaagattgaag

SEQ ID NO: 457450 - DNA, 33 bp, Homo sapien
aatggcaaacaccataggctctgaagattgaag

SEQ ID NO: 457451 - DNA, 33 bp, Homo sapien
gaccacatctagaatacaataacttgacatctc

SEQ ID NO: 457452 - DNA, 33 bp, Homo sapien
gaccacatctagaatataataacttgacatctc

SEQ ID NO: 457453 - DNA, 33 bp, Homo sapien
cctctttggtaatcacactaaatcatgagacac

SEQ ID NO: 457454 - DNA, 33 bp, Homo sapien
cctctttggtaatcacgctaaatcatgagacac

SEQ ID NO: 457455 - DNA, 33 bp, Homo sapien
aaatacatatgtaagactctaattcacagagga

SEQ ID NO: 457456 - DNA, 33 bp, Homo sapien
aaatacatatgtaagattctaattcacagagga

SEQ ID NO: 457457 - DNA, 33 bp, Homo sapien
gaatctccagccataactgtgaatttatctatt

SEQ ID NO: 457458 - DNA, 33 bp, Homo sapien
gaatctccagccataattgtgaatttatctatt

SEQ ID NO: 457459 - DNA, 33 bp, Homo sapien
aagagtgtttttcttgaagtagcatatagttac

SEQ ID NO: 457460 - DNA, 33 bp, Homo sapien
aagagtgtttttcttgtagtagcatatagttac

SEQ ID NO: 457461 - DNA, 33 bp, Homo sapien
cagtggtggagaaaagaatccctttgaatgata

SEQ ID NO: 457462 - DNA, 33 bp, Homo sapien
cagtggtggagaaaagtatccctttgaatgata

SEQ ID NO: 457463 - DNA, 33 bp, Homo sapien
aaaactaaaactctgaagatagctggtcccaat

SEQ ID NO: 457464 - DNA, 33 bp, Homo sapien
aaaactaaaactctgaggatagctggtcccaat

SEQ ID NO: 457465 - DNA, 33 bp, Homo sapien
tagaatctgttttacacagaagcaaaatgaaac

SEQ ID NO: 457466 - DNA, 33 bp, Homo sapien
tagaatctgttttacatagaagcaaaatgaaac

SEQ ID NO: 457467 - DNA, 33 bp, Homo sapien
catattttatcttccacgaaaaattcttccagg

SEQ ID NO: 457468 - DNA, 33 bp, Homo sapien
catattttatcttccatgaaaaattcttccagg

SEQ ID NO: 457469 - DNA, 33 bp, Homo sapien
atttgagcatcccgaacggcattataggaagcc

SEQ ID NO: 457470 - DNA, 33 bp, Homo sapien
atttgagcatcccgaatggcattataggaagcc

SEQ ID NO: 457471 - DNA, 33 bp, Homo sapien
aaccaagcctactagacgatgtgcaagcaactg

SEQ ID NO: 457472 - DNA, 33 bp, Homo sapien
aaccaagcctactagatgatgtgcaagcaactg

SEQ ID NO: 457473 - DNA, 33 bp, Homo sapien
aatatggaagattgcccaaattgtgatttatcc

SEQ ID NO: 457474 - DNA, 33 bp, Homo sapien
aatatggaagattgcctaaattgtgatttatcc

SEQ ID NO: 457475 - DNA, 33 bp, Homo sapien
tttagttccttgcctagccaatgagaagggtga

SEQ ID NO: 457476 - DNA, 33 bp, Homo sapien
tttagttccttgcctatccaatgagaagggtga

SEQ ID NO: 457477 - DNA, 33 bp, Homo sapien
aggggcaggatagcccacccaacgcttgaaacg

SEQ ID NO: 457478 - DNA, 33 bp, Homo sapien
aggggcaggatagcccgcccaacgcttgaaacg

SEQ ID NO: 457479 - DNA, 33 bp, Homo sapien
ctccaagtcctcaaccagggaaatcgcccttct

SEQ ID NO: 457480 - DNA, 33 bp, Homo sapien
ctccaagtcctcaacccgggaaatcgcccttct

SEQ ID NO: 457481 - DNA, 33 bp, Homo sapien
tattttggtcccacaaaagacctgggatcttgg

SEQ ID NO: 457482 - DNA, 33 bp, Homo sapien
tattttggtcccacaagagacctgggatcttgg

SEQ ID NO: 457483 - DNA, 33 bp, Homo sapien
acactttatgtagtatcaccggactggctgtac

SEQ ID NO: 457484 - DNA, 33 bp, Homo sapien
acactttatgtagtattaccggactggctgtac

SEQ ID NO: 457485 - DNA, 33 bp, Homo sapien
cccatctgagacacacgggaatagaataaaatg

SEQ ID NO: 457486 - DNA, 33 bp, Homo sapien
cccatctgagacacactggaatagaataaaatg

SEQ ID NO: 457487 - DNA, 33 bp, Homo sapien
cagcactctctatttgccaaacaactcatttta

SEQ ID NO: 457488 - DNA, 33 bp, Homo sapien
cagcactctctatttgtcaaacaactcatttta

SEQ ID NO: 457489 - DNA, 33 bp, Homo sapien
tgggtaatatttgtaacgtccttcctcggctac

SEQ ID NO: 457490 - DNA, 33 bp, Homo sapien
tgggtaatatttgtaaggtccttcctcggctac

SEQ ID NO: 457491 - DNA, 33 bp, Homo sapien
ttggagagcttcctgacgttctggcctcctcct

SEQ ID NO: 457492 - DNA, 33 bp, Homo sapien
ttggagagcttcctgatgttctggcctcctcct

SEQ ID NO: 457493 - DNA, 33 bp, Homo sapien
agatttacatggaagacgaagcaactgattcac

SEQ ID NO: 457494 - DNA, 33 bp, Homo sapien
agatttacatggaagatgaagcaactgattcac

SEQ ID NO: 457495 - DNA, 33 bp, Homo sapien
ccagaagagatatacaatgatgctgataatttc

SEQ ID NO: 457496 - DNA, 33 bp, Homo sapien
ccagaagagatatacagtgatgctgataatttc

SEQ ID NO: 457497 - DNA, 33 bp, Homo sapien
agggtgtggaatgtaacaggcgcctagggacct

SEQ ID NO: 457498 - DNA, 33 bp, Homo sapien
agggtgtggaatgtaataggcgcctagggacct

SEQ ID NO: 457499 - DNA, 33 bp, Homo sapien
tactcacacctgttcacaagtggccagcccaag

SEQ ID NO: 457500 - DNA, 33 bp, Homo sapien
tactcacacctgttcataagtggccagcccaag

SEQ ID NO: 457501 - DNA, 33 bp, Homo sapien
ctgaccagaggcaccacgaggcgttcataacag

SEQ ID NO: 457502 - DNA, 33 bp, Homo sapien
ctgaccagaggcaccatgaggcgttcataacag

SEQ ID NO: 457503 - DNA, 33 bp, Homo sapien
tctggtcccaggtaataagcctctttcctccaa

SEQ ID NO: 457504 - DNA, 33 bp, Homo sapien
tctggtcccaggtaatgagcctctttcctccaa

SEQ ID NO: 457505 - DNA, 33 bp, Homo sapien
gtgaatggaccctaaacgggattctcatcttcc

SEQ ID NO: 457506 - DNA, 33 bp, Homo sapien
gtgaatggaccctaaatgggattctcatcttcc

SEQ ID NO: 457507 - DNA, 33 bp, Homo sapien
agaaataagcacagaaacacaaaagaaggatct

SEQ ID NO: 457508 - DNA, 33 bp, Homo sapien
agaaataagcacagaaccacaaaagaaggatct

SEQ ID NO: 457509 - DNA, 33 bp, Homo sapien
acaaaatatggtaggacatagcagctgaaacct

SEQ ID NO: 457510 - DNA, 33 bp, Homo sapien
acaaaatatggtaggatatagcagctgaaacct

SEQ ID NO: 457511 - DNA, 33 bp, Homo sapien
agcaccatttaaaaacactattttattgctgtg

SEQ ID NO: 457512 - DNA, 33 bp, Homo sapien
agcaccatttaaaaacgctattttattgctgtg

SEQ ID NO: 457513 - DNA, 33 bp, Homo sapien
caaccttttggttatcacacagcagcttttatg

SEQ ID NO: 457514 - DNA, 33 bp, Homo sapien
caaccttttggttatcgcacagcagcttttatg

SEQ ID NO: 457515 - DNA, 33 bp, Homo sapien
ccttgtgaaagaagtgaagtatttaacatttct

SEQ ID NO: 457516 - DNA, 33 bp, Homo sapien
ccttgtgaaagaagtggagtatttaacatttct

SEQ ID NO: 457517 - DNA, 33 bp, Homo sapien
aattaattctgttagacgtaattgctataatca

SEQ ID NO: 457518 - DNA, 33 bp, Homo sapien
aattaattctgttagatgtaattgctataatca

SEQ ID NO: 457519 - DNA, 33 bp, Homo sapien
tcctggtcacctcgctaagagaataaaggattg

SEQ ID NO: 457520 - DNA, 33 bp, Homo sapien
tcctggtcacctcgctgagagaataaaggattg

SEQ ID NO: 457521 - DNA, 33 bp, Homo sapien
agatacatcaaaaggtaaaagaatgtgtgaatc

SEQ ID NO: 457522 - DNA, 33 bp, Homo sapien
agatacatcaaaaggtgaaagaatgtgtgaatc

SEQ ID NO: 457523 - DNA, 33 bp, Homo sapien
atgaatattaacaaaaacagctgtgaatgaaca

SEQ ID NO: 457524 - DNA, 33 bp, Homo sapien
atgaatattaacaaaagcagctgtgaatgaaca

SEQ ID NO: 457525 - DNA, 33 bp, Homo sapien
tctgctcctggaccataagccagacagaaaaga

SEQ ID NO: 457526 - DNA, 33 bp, Homo sapien
tctgctcctggaccatgagccagacagaaaaga

SEQ ID NO: 457527 - DNA, 33 bp, Homo sapien
gagcatgaacttgtgaagagagacactaagcag

SEQ ID NO: 457528 - DNA, 33 bp, Homo sapien
gagcatgaacttgtgaggagagacactaagcag

SEQ ID NO: 457529 - DNA, 33 bp, Homo sapien
tgggctgtgttaaggaaagtcttgtactgcact

SEQ ID NO: 457530 - DNA, 33 bp, Homo sapien
tgggctgtgttaaggacagtcttgtactgcact

SEQ ID NO: 457531 - DNA, 33 bp, Homo sapien
gttcttccatgacttaagctaaatcttgctctt

SEQ ID NO: 457532 - DNA, 33 bp, Homo sapien
gttcttccatgacttatgctaaatcttgctctt

SEQ ID NO: 457533 - DNA, 33 bp, Homo sapien
agctccattgctaaaccgggctatatgttcaag

SEQ ID NO: 457534 - DNA, 33 bp, Homo sapien
agctccattgctaaactgggctatatgttcaag

SEQ ID NO: 457535 - DNA, 33 bp, Homo sapien
ttcatctgcttccagaacttgtgtctaatgcag

SEQ ID NO: 457536 - DNA, 33 bp, Homo sapien
ttcatctgcttccagagcttgtgtctaatgcag

SEQ ID NO: 457537 - DNA, 33 bp, Homo sapien
ctccacatttccctgccgaaagctctgagtgtt

SEQ ID NO: 457538 - DNA, 33 bp, Homo sapien
ctccacatttccctgctgaaagctctgagtgtt

SEQ ID NO: 457539 - DNA, 33 bp, Homo sapien
gacaggtctgtctccaaccctgcaagaatacca

SEQ ID NO: 457540 - DNA, 33 bp, Homo sapien
gacaggtctgtctccacccctgcaagaatacca

SEQ ID NO: 457541 - DNA, 33 bp, Homo sapien
cagcctatctgcagaaagttaaatgaggcccca

SEQ ID NO: 457542 - DNA, 33 bp, Homo sapien
cagcctatctgcagaaggttaaatgaggcccca

SEQ ID NO: 457543 - DNA, 33 bp, Homo sapien
gaatgtgccaaaggtaaatatgcttcttcaacg

SEQ ID NO: 457544 - DNA, 33 bp, Homo sapien
gaatgtgccaaaggtatatatgcttcttcaacg

SEQ ID NO: 457545 - DNA, 33 bp, Homo sapien
gagaacaagtatggcaaggaggacagtccctcg

SEQ ID NO: 457546 - DNA, 33 bp, Homo sapien
gagaacaagtatggcacggaggacagtccctcg

SEQ ID NO: 457547 - DNA, 33 bp, Homo sapien
ggtaggaacctgcaagaagacttcaagaggctg

SEQ ID NO: 457548 - DNA, 33 bp, Homo sapien
ggtaggaacctgcaaggagacttcaagaggctg

SEQ ID NO: 457549 - DNA, 33 bp, Homo sapien
gaacagcagaaacagaaagaaatgcagaaactt

SEQ ID NO: 457550 - DNA, 33 bp, Homo sapien
gaacagcagaaacagacagaaatgcagaaactt

SEQ ID NO: 457551 - DNA, 33 bp, Homo sapien
tgctctgttgactgggcagcaggaacagcagaa

SEQ ID NO: 457552 - DNA, 33 bp, Homo sapien
tgctctgttgactgggtagcaggaacagcagaa

SEQ ID NO: 457553 - DNA, 33 bp, Homo sapien
aaaaatataaaatccactgctgagcgctgcagc

SEQ ID NO: 457554 - DNA, 33 bp, Homo sapien
aaaaatataaaatccattgctgagcgctgcagc

SEQ ID NO: 457555 - DNA, 33 bp, Homo sapien
ccagaagagcacagcagaattttgttgtaagga

SEQ ID NO: 457556 - DNA, 33 bp, Homo sapien
ccagaagagcacagcataattttgttgtaagga

SEQ ID NO: 457557 - DNA, 33 bp, Homo sapien
aatcccttcatatcaaatgtaggctgagcctag

SEQ ID NO: 457558 - DNA, 33 bp, Homo sapien
aatcccttcatatcaagtgtaggctgagcctag

SEQ ID NO: 457559 - DNA, 33 bp, Homo sapien
atttgctattatgcaactcagtgagaggccatt

SEQ ID NO: 457560 - DNA, 33 bp, Homo sapien
atttgctattatgcaattcagtgagaggccatt

SEQ ID NO: 457561 - DNA, 33 bp, Homo sapien
aagttaagattttgtcccagaagtctcctctga

SEQ ID NO: 457562 - DNA, 33 bp, Homo sapien
aagttaagattttgtctcagaagtctcctctga

SEQ ID NO: 457563 - DNA, 33 bp, Homo sapien
tttgaatgaagaaggcaaatagggtgatttcac

SEQ ID NO: 457564 - DNA, 33 bp, Homo sapien
tttgaatgaagaaggcgaatagggtgatttcac

SEQ ID NO: 457565 - DNA, 33 bp, Homo sapien
aaatagcttacatatcacacaatggtctctttc

SEQ ID NO: 457566 - DNA, 33 bp, Homo sapien
aaatagcttacatatctcacaatggtctctttc

SEQ ID NO: 457567 - DNA, 33 bp, Homo sapien
tgtgggagctcctagaaccccaacaacctatta

SEQ ID NO: 457568 - DNA, 33 bp, Homo sapien
tgtgggagctcctagacccccaacaacctatta

SEQ ID NO: 457569 - DNA, 33 bp, Homo sapien
gtcaggctcctgcaaagaagaacttcacagaga

SEQ ID NO: 457570 - DNA, 33 bp, Homo sapien
gtcaggctcctgcaaataagaacttcacagaga

SEQ ID NO: 457571 - DNA, 33 bp, Homo sapien
tatgtctaaaaaaagacaagccatgttcacttg

SEQ ID NO: 457572 - DNA, 33 bp, Homo sapien
tatgtctaaaaaaagataagccatgttcacttg

SEQ ID NO: 457573 - DNA, 33 bp, Homo sapien
cagaactggagactcaagaatcagagtcaggtc

SEQ ID NO: 457574 - DNA, 33 bp, Homo sapien
cagaactggagactcaggaatcagagtcaggtc

SEQ ID NO: 457575 - DNA, 33 bp, Homo sapien
tgattgtgcagaggctcagagccaaaggtccag

SEQ ID NO: 457576 - DNA, 33 bp, Homo sapien
tgattgtgcagaggcttagagccaaaggtccag

SEQ ID NO: 457577 - DNA, 33 bp, Homo sapien
agctgtaattatagatcagcggcaagccaccca

SEQ ID NO: 457578 - DNA, 33 bp, Homo sapien
agctgtaattatagatgagcggcaagccaccca

SEQ ID NO: 457579 - DNA, 33 bp, Homo sapien
ttttaaggactcttcactctcaccctcatgtcc

SEQ ID NO: 457580 - DNA, 33 bp, Homo sapien
ttttaaggactcttcattctcaccctcatgtcc

SEQ ID NO: 457581 - DNA, 33 bp, Homo sapien
ttgcttattgcctgggcacatagtgaataccac

SEQ ID NO: 457582 - DNA, 33 bp, Homo sapien
ttgcttattgcctgggtacatagtgaataccac

SEQ ID NO: 457583 - DNA, 33 bp, Homo sapien
tgctcggcgttttctacgtaatatcttaggtaa

SEQ ID NO: 457584 - DNA, 33 bp, Homo sapien
tgctcggcgttttctatgtaatatcttaggtaa

SEQ ID NO: 457585 - DNA, 33 bp, Homo sapien
gccctgcccctttagaaaacagacatgttacaa

SEQ ID NO: 457586 - DNA, 33 bp, Homo sapien
gccctgcccctttagagaacagacatgttacaa

SEQ ID NO: 457587 - DNA, 33 bp, Homo sapien
tcactgggtctggataacttgcacagaaattga

SEQ ID NO: 457588 - DNA, 33 bp, Homo sapien
tcactgggtctggatatcttgcacagaaattga

SEQ ID NO: 457589 - DNA, 33 bp, Homo sapien
ccatttcacagatgacaaaggaagggaaggctt

SEQ ID NO: 457590 - DNA, 33 bp, Homo sapien
ccatttcacagatgacgaaggaagggaaggctt

SEQ ID NO: 457591 - DNA, 33 bp, Homo sapien
gaagctgcgctaataacacaaagtgacaaaaag

SEQ ID NO: 457592 - DNA, 33 bp, Homo sapien
gaagctgcgctaataatacaaagtgacaaaaag

SEQ ID NO: 457593 - DNA, 33 bp, Homo sapien
tatgaaagagggctcaccttcattactcatctg

SEQ ID NO: 457594 - DNA, 33 bp, Homo sapien
tatgaaagagggctcagcttcattactcatctg

SEQ ID NO: 457595 - DNA, 33 bp, Homo sapien
acgctgggaagagaatcaacgtccactttgttt

SEQ ID NO: 457596 - DNA, 33 bp, Homo sapien
acgctgggaagagaattaacgtccactttgttt

SEQ ID NO: 457597 - DNA, 33 bp, Homo sapien
ccttgatgggggcacaagtggtgaagctaggag

SEQ ID NO: 457598 - DNA, 33 bp, Homo sapien
ccttgatgggggcacacgtggtgaagctaggag

SEQ ID NO: 457599 - DNA, 33 bp, Homo sapien
tagtgatgtgtttttaaatgaagaggttagttt

SEQ ID NO: 457600 - DNA, 33 bp, Homo sapien
tagtgatgtgtttttagatgaagaggttagttt

SEQ ID NO: 457601 - DNA, 33 bp, Homo sapien
aggaaattcagacttacgtttcatgatggggag

SEQ ID NO: 457602 - DNA, 33 bp, Homo sapien
aggaaattcagacttatgtttcatgatggggag

SEQ ID NO: 457603 - DNA, 33 bp, Homo sapien
tgagaacttccatcacccatggtcttctaagat

SEQ ID NO: 457604 - DNA, 33 bp, Homo sapien
tgagaacttccatcacgcatggtcttctaagat

SEQ ID NO: 457605 - DNA, 33 bp, Homo sapien
ataggcaggttttcagccctggcccctcttcct

SEQ ID NO: 457606 - DNA, 33 bp, Homo sapien
ataggcaggttttcagtcctggcccctcttcct

SEQ ID NO: 457607 - DNA, 33 bp, Homo sapien
tcaacaacacctaataagggcaaagatgtgggg

SEQ ID NO: 457608 - DNA, 33 bp, Homo sapien
tcaacaacacctaatatgggcaaagatgtgggg

SEQ ID NO: 457609 - DNA, 33 bp, Homo sapien
acttcttcaaaattataaaatgctgctcatcaa

SEQ ID NO: 457610 - DNA, 33 bp, Homo sapien
acttcttcaaaattatgaaatgctgctcatcaa

SEQ ID NO: 457611 - DNA, 33 bp, Homo sapien
aaaatcttgtgcctaccattggttcacaaggag

SEQ ID NO: 457612 - DNA, 33 bp, Homo sapien
aaaatcttgtgcctactattggttcacaaggag

SEQ ID NO: 457613 - DNA, 33 bp, Homo sapien
caaaactccatctcaaagttattcaagtgccat

SEQ ID NO: 457614 - DNA, 33 bp, Homo sapien
caaaactccatctcaacgttattcaagtgccat

SEQ ID NO: 457615 - DNA, 33 bp, Homo sapien
cagctccattcttcccacggtccaacagagctg

SEQ ID NO: 457616 - DNA, 33 bp, Homo sapien
cagctccattcttcccgcggtccaacagagctg

SEQ ID NO: 457617 - DNA, 33 bp, Homo sapien
agaaaggacttccatcagatcaggtgataattc

SEQ ID NO: 457618 - DNA, 33 bp, Homo sapien
agaaaggacttccatcggatcaggtgataattc

SEQ ID NO: 457619 - DNA, 33 bp, Homo sapien
gagaaacttgagactaccactccccacgctcta

SEQ ID NO: 457620 - DNA, 33 bp, Homo sapien
gagaaacttgagactatcactccccacgctcta

SEQ ID NO: 457621 - DNA, 33 bp, Homo sapien
ggttgttctttctcgacagctgttccaagagtg

SEQ ID NO: 457622 - DNA, 33 bp, Homo sapien
ggttgttctttctcgatagctgttccaagagtg

SEQ ID NO: 457623 - DNA, 33 bp, Homo sapien
tgatgcttcattgttcaaattatctaagctatt

SEQ ID NO: 457624 - DNA, 33 bp, Homo sapien
tgatgcttcattgttccaattatctaagctatt

SEQ ID NO: 457625 - DNA, 33 bp, Homo sapien
aaaagtgttgtttatacagtagttagcaaaaac

SEQ ID NO: 457626 - DNA, 33 bp, Homo sapien
aaaagtgttgtttatagagtagttagcaaaaac

SEQ ID NO: 457627 - DNA, 33 bp, Homo sapien
ctctttgcattgggcaagaagggaaaagagagg

SEQ ID NO: 457628 - DNA, 33 bp, Homo sapien
ctctttgcattgggcaggaagggaaaagagagg

SEQ ID NO: 457629 - DNA, 33 bp, Homo sapien
gaaggacagcgcaagactctatctcaggaaaaa

SEQ ID NO: 457630 - DNA, 33 bp, Homo sapien
gaaggacagcgcaagattctatctcaggaaaaa

SEQ ID NO: 457631 - DNA, 33 bp, Homo sapien
aggagggctgcaggtaagagaggaggccagcag

SEQ ID NO: 457632 - DNA, 33 bp, Homo sapien
aggagggctgcaggtaggagaggaggccagcag

SEQ ID NO: 457633 - DNA, 33 bp, Homo sapien
ctgcctgcatctctcaagctaatgacacacaca

SEQ ID NO: 457634 - DNA, 33 bp, Homo sapien
ctgcctgcatctctcaggctaatgacacacaca

SEQ ID NO: 457635 - DNA, 33 bp, Homo sapien
ccaccaggtagcatcactgagaaaggagctccc

SEQ ID NO: 457636 - DNA, 33 bp, Homo sapien
ccaccaggtagcatcattgagaaaggagctccc

SEQ ID NO: 457637 - DNA, 33 bp, Homo sapien
gggtctgaccacaccaaaaacagcctctcaaaa

SEQ ID NO: 457638 - DNA, 33 bp, Homo sapien
gggtctgaccacaccagaaacagcctctcaaaa

SEQ ID NO: 457639 - DNA, 33 bp, Homo sapien
gattccaagttttcaaaagaagccaaaatccct

SEQ ID NO: 457640 - DNA, 33 bp, Homo sapien
gattccaagttttcaagagaagccaaaatccct

SEQ ID NO: 457641 - DNA, 33 bp, Homo sapien
agtaaatacaatacaaactacgttgcaagcctc

SEQ ID NO: 457642 - DNA, 33 bp, Homo sapien
agtaaatacaatacaagctacgttgcaagcctc

SEQ ID NO: 457643 - DNA, 33 bp, Homo sapien
acctggtgatcagggtcacagatcctctgccag

SEQ ID NO: 457644 - DNA, 33 bp, Homo sapien
acctggtgatcagggttacagatcctctgccag

SEQ ID NO: 457645 - DNA, 33 bp, Homo sapien
ccccaagcgcctggtgaacggtaacctccagtt

SEQ ID NO: 457646 - DNA, 33 bp, Homo sapien
ccccaagcgcctggtgcacggtaacctccagtt

SEQ ID NO: 457647 - DNA, 33 bp, Homo sapien
tctgagcttagagaaacgcttcccctgtcaggg

SEQ ID NO: 457648 - DNA, 33 bp, Homo sapien
tctgagcttagagaaatgcttcccctgtcaggg

SEQ ID NO: 457649 - DNA, 33 bp, Homo sapien
cgccctttgtctaccacggtgatgaatggttgt

SEQ ID NO: 457650 - DNA, 33 bp, Homo sapien
cgccctttgtctaccatggtgatgaatggttgt

SEQ ID NO: 457651 - DNA, 33 bp, Homo sapien
cagagggaagacacagaagcggggacatggtaa

SEQ ID NO: 457652 - DNA, 33 bp, Homo sapien
cagagggaagacacagcagcggggacatggtaa

SEQ ID NO: 457653 - DNA, 33 bp, Homo sapien
gctctatgggcatctccgacttccaacttgatt

SEQ ID NO: 457654 - DNA, 33 bp, Homo sapien
gctctatgggcatctcggacttccaacttgatt

SEQ ID NO: 457655 - DNA, 33 bp, Homo sapien
gtagaggaaaaagaacgaatgaatgtgatccac

SEQ ID NO: 457656 - DNA, 33 bp, Homo sapien
gtagaggaaaaagaactaatgaatgtgatccac

SEQ ID NO: 457657 - DNA, 33 bp, Homo sapien
atgcaatcaatcttcacgtctggagtacaaaga

SEQ ID NO: 457658 - DNA, 33 bp, Homo sapien
atgcaatcaatcttcatgtctggagtacaaaga

SEQ ID NO: 457659 - DNA, 33 bp, Homo sapien
ggatgactgactacagaaagcctgagggatgtg

SEQ ID NO: 457660 - DNA, 33 bp, Homo sapien
ggatgactgactacaggaagcctgagggatgtg

SEQ ID NO: 457661 - DNA, 33 bp, Homo sapien
atcccttagaaataaacagaacagcaactcacc

SEQ ID NO: 457662 - DNA, 33 bp, Homo sapien
atcccttagaaataaatagaacagcaactcacc

SEQ ID NO: 457663 - DNA, 33 bp, Homo sapien
ccaagaatgtacctgaaagcatttgtaaattag

SEQ ID NO: 457664 - DNA, 33 bp, Homo sapien
ccaagaatgtacctgacagcatttgtaaattag

SEQ ID NO: 457665 - DNA, 33 bp, Homo sapien
agtcaatgctgattctaactccatggccacctt

SEQ ID NO: 457666 - DNA, 33 bp, Homo sapien
agtcaatgctgattctgactccatggccacctt

SEQ ID NO: 457667 - DNA, 33 bp, Homo sapien
caattaaacacagtgacggaggcaaaatctcta

SEQ ID NO: 457668 - DNA, 33 bp, Homo sapien
caattaaacacagtgatggaggcaaaatctcta

SEQ ID NO: 457669 - DNA, 33 bp, Homo sapien
tggcttagaagaggaacagctggaacttggctg

SEQ ID NO: 457670 - DNA, 33 bp, Homo sapien
tggcttagaagaggaatagctggaacttggctg

SEQ ID NO: 457671 - DNA, 33 bp, Homo sapien
gaatattcatgtaaaccgactcaagcacattgc

SEQ ID NO: 457672 - DNA, 33 bp, Homo sapien
gaatattcatgtaaactgactcaagcacattgc

SEQ ID NO: 457673 - DNA, 33 bp, Homo sapien
ttagtctcagaccatcaagatccagattggttt

SEQ ID NO: 457674 - DNA, 33 bp, Homo sapien
ttagtctcagaccatcgagatccagattggttt

SEQ ID NO: 457675 - DNA, 33 bp, Homo sapien
ttgctggagatttgaccgacagtttataaggca

SEQ ID NO: 457676 - DNA, 33 bp, Homo sapien
ttgctggagatttgactgacagtttataaggca

SEQ ID NO: 457677 - DNA, 33 bp, Homo sapien
gtctgggctgtccaacactcattttcccctttc

SEQ ID NO: 457678 - DNA, 33 bp, Homo sapien
gtctgggctgtccaacgctcattttcccctttc

SEQ ID NO: 457679 - DNA, 33 bp, Homo sapien
gtaaagtttggagcaacgaaagatggttcctga

SEQ ID NO: 457680 - DNA, 33 bp, Homo sapien
gtaaagtttggagcaatgaaagatggttcctga

SEQ ID NO: 457681 - DNA, 33 bp, Homo sapien
tcttggagcatgaacaaagctcatgggaccccg

SEQ ID NO: 457682 - DNA, 33 bp, Homo sapien
tcttggagcatgaacagagctcatgggaccccg

SEQ ID NO: 457683 - DNA, 33 bp, Homo sapien
gccttctagaaatgaaatcttacgttcctctgg

SEQ ID NO: 457684 - DNA, 33 bp, Homo sapien
gccttctagaaatgaagtcttacgttcctctgg

SEQ ID NO: 457685 - DNA, 33 bp, Homo sapien
cccactgcacacacaaacatgaatatgcatgca

SEQ ID NO: 457686 - DNA, 33 bp, Homo sapien
cccactgcacacacaagcatgaatatgcatgca

SEQ ID NO: 457687 - DNA, 33 bp, Homo sapien
cttgcctttaatcctgacaccttggttgctggg

SEQ ID NO: 457688 - DNA, 33 bp, Homo sapien
cttgcctttaatcctggcaccttggttgctggg

SEQ ID NO: 457689 - DNA, 33 bp, Homo sapien
actacaagtataattcagaatctattgccaaaa

SEQ ID NO: 457690 - DNA, 33 bp, Homo sapien
actacaagtataattcggaatctattgccaaaa

SEQ ID NO: 457691 - DNA, 33 bp, Homo sapien
tccttcctgaaagatgccaccatttgatcctga

SEQ ID NO: 457692 - DNA, 33 bp, Homo sapien
tccttcctgaaagatggcaccatttgatcctga

SEQ ID NO: 457693 - DNA, 33 bp, Homo sapien
gcgcttacgctcagaaaatggttggcctggctt

SEQ ID NO: 457694 - DNA, 33 bp, Homo sapien
gcgcttacgctcagaacatggttggcctggctt

SEQ ID NO: 457695 - DNA, 33 bp, Homo sapien
acattcttcgtttttggattgtactgagattct

SEQ ID NO: 457696 - DNA, 33 bp, Homo sapien
acattcttcgtttttgtattgtactgagattct

SEQ ID NO: 457697 - DNA, 33 bp, Homo sapien
cagatatgtaactccccacaaaagaccttcaga

SEQ ID NO: 457698 - DNA, 33 bp, Homo sapien
cagatatgtaactccctacaaaagaccttcaga

SEQ ID NO: 457699 - DNA, 33 bp, Homo sapien
ggttctaagaccagcaggcattacgtatttctc

SEQ ID NO: 457700 - DNA, 33 bp, Homo sapien
ggttctaagaccagcatgcattacgtatttctc

SEQ ID NO: 457701 - DNA, 33 bp, Homo sapien
tctgatgcttcagccaagattggtaattaccac

SEQ ID NO: 457702 - DNA, 33 bp, Homo sapien
tctgatgcttcagccatgattggtaattaccac

SEQ ID NO: 457703 - DNA, 33 bp, Homo sapien
ttctgcaagggctgcacgagaaataaacaggaa

SEQ ID NO: 457704 - DNA, 33 bp, Homo sapien
ttctgcaagggctgcatgagaaataaacaggaa

SEQ ID NO: 457705 - DNA, 33 bp, Homo sapien
atattctattcatctaccatctgaactattgaa

SEQ ID NO: 457706 - DNA, 33 bp, Homo sapien
atattctattcatctatcatctgaactattgaa

SEQ ID NO: 457707 - DNA, 33 bp, Homo sapien
ggagagtgactcggtcaaagaaacattttgaaa

SEQ ID NO: 457708 - DNA, 33 bp, Homo sapien
ggagagtgactcggtcgaagaaacattttgaaa

SEQ ID NO: 457709 - DNA, 33 bp, Homo sapien
ggatgcaggctctaaacgccatggtcccatcaa

SEQ ID NO: 457710 - DNA, 33 bp, Homo sapien
ggatgcaggctctaaatgccatggtcccatcaa

SEQ ID NO: 457711 - DNA, 33 bp, Homo sapien
tgccacagtgagaataacctgcactgtctgtgt

SEQ ID NO: 457712 - DNA, 33 bp, Homo sapien
tgccacagtgagaatagcctgcactgtctgtgt

SEQ ID NO: 457713 - DNA, 33 bp, Homo sapien
cagtttcaggcaaagactacatcgtagcatttt

SEQ ID NO: 457714 - DNA, 33 bp, Homo sapien
cagtttcaggcaaagagtacatcgtagcatttt

SEQ ID NO: 457715 - DNA, 33 bp, Homo sapien
tgcaggaaaactcttccctatggaattccagca

SEQ ID NO: 457716 - DNA, 33 bp, Homo sapien
tgcaggaaaactcttctctatggaattccagca

SEQ ID NO: 457717 - DNA, 33 bp, Homo sapien
cagaggtcctgggcgacagtatggtctgcagca

SEQ ID NO: 457718 - DNA, 33 bp, Homo sapien
cagaggtcctgggcgatagtatggtctgcagca

SEQ ID NO: 457719 - DNA, 33 bp, Homo sapien
tactctggtatttccccagcagatggctaaaga

SEQ ID NO: 457720 - DNA, 33 bp, Homo sapien
tactctggtatttccctagcagatggctaaaga

SEQ ID NO: 457721 - DNA, 33 bp, Homo sapien
gaagtgtaggaacccacaactggccagagaccc

SEQ ID NO: 457722 - DNA, 33 bp, Homo sapien
gaagtgtaggaacccagaactggccagagaccc

SEQ ID NO: 457723 - DNA, 33 bp, Homo sapien
gccggaagagaagagaaattaccaactctaagg

SEQ ID NO: 457724 - DNA, 33 bp, Homo sapien
gccggaagagaagagacattaccaactctaagg

SEQ ID NO: 457725 - DNA, 33 bp, Homo sapien
gctgttgtgctctttccctagatcatttccacc

SEQ ID NO: 457726 - DNA, 33 bp, Homo sapien
gctgttgtgctctttctctagatcatttccacc

SEQ ID NO: 457727 - DNA, 33 bp, Homo sapien
attgagaatgaagggcaactggctccccaaatg

SEQ ID NO: 457728 - DNA, 33 bp, Homo sapien
attgagaatgaagggcgactggctccccaaatg

SEQ ID NO: 457729 - DNA, 33 bp, Homo sapien
actgtaatcaaaggcaccccatatggcaaagtc

SEQ ID NO: 457730 - DNA, 33 bp, Homo sapien
actgtaatcaaaggcatcccatatggcaaagtc

SEQ ID NO: 457731 - DNA, 33 bp, Homo sapien
tcggtgcattattataacttcgctaaaggagga

SEQ ID NO: 457732 - DNA, 33 bp, Homo sapien
tcggtgcattattatatcttcgctaaaggagga

SEQ ID NO: 457733 - DNA, 33 bp, Homo sapien
ttggcttggggtgaaacgtggacatgggagttc

SEQ ID NO: 457734 - DNA, 33 bp, Homo sapien
ttggcttggggtgaaaggtggacatgggagttc

SEQ ID NO: 457735 - DNA, 33 bp, Homo sapien
tcacacagcaatgagagtcagaggctggcccaa

SEQ ID NO: 457736 - DNA, 33 bp, Homo sapien
tcacacagcaatgagattcagaggctggcccaa

SEQ ID NO: 457737 - DNA, 33 bp, Homo sapien
cctcggaggaacctgcacatgaattccatcagt

SEQ ID NO: 457738 - DNA, 33 bp, Homo sapien
cctcggaggaacctgcgcatgaattccatcagt

SEQ ID NO: 457739 - DNA, 33 bp, Homo sapien
cagcttccagccaacacaccagatattctctcc

SEQ ID NO: 457740 - DNA, 33 bp, Homo sapien
cagcttccagccaacagaccagatattctctcc

SEQ ID NO: 457741 - DNA, 33 bp, Homo sapien
cctaaagccagctcctcagagtccaaaacctct

SEQ ID NO: 457742 - DNA, 33 bp, Homo sapien
cctaaagccagctcctgagagtccaaaacctct

SEQ ID NO: 457743 - DNA, 33 bp, Homo sapien
agccacaatgccattacgttttcccagaacgtg

SEQ ID NO: 457744 - DNA, 33 bp, Homo sapien
agccacaatgccattatgttttcccagaacgtg

SEQ ID NO: 457745 - DNA, 33 bp, Homo sapien
tgaaacaagccagatacaaatgaacaaggtatg

SEQ ID NO: 457746 - DNA, 33 bp, Homo sapien
tgaaacaagccagatagaaatgaacaaggtatg

SEQ ID NO: 457747 - DNA, 33 bp, Homo sapien
ggacattctgacaaaaacatggatggctcttga

SEQ ID NO: 457748 - DNA, 33 bp, Homo sapien
ggacattctgacaaaagcatggatggctcttga

SEQ ID NO: 457749 - DNA, 33 bp, Homo sapien
ctactgggcctagcacactgtttggcaacaaat

SEQ ID NO: 457750 - DNA, 33 bp, Homo sapien
ctactgggcctagcactctgtttggcaacaaat

SEQ ID NO: 457751 - DNA, 33 bp, Homo sapien
tttgggctgatgcagcaaattctgtcctgtgcc

SEQ ID NO: 457752 - DNA, 33 bp, Homo sapien
tttgggctgatgcagccaattctgtcctgtgcc

SEQ ID NO: 457753 - DNA, 33 bp, Homo sapien
atgaacacctatacacaaaattctccaaaattc

SEQ ID NO: 457754 - DNA, 33 bp, Homo sapien
atgaacacctatacacgaaattctccaaaattc

SEQ ID NO: 457755 - DNA, 33 bp, Homo sapien
ctttcttgtttgtaaagtacgttctccaaaacc

SEQ ID NO: 457756 - DNA, 33 bp, Homo sapien
ctttcttgtttgtaaattacgttctccaaaacc

SEQ ID NO: 457757 - DNA, 33 bp, Homo sapien
cagagcagtaaatcaacgaacaggagtgcccct

SEQ ID NO: 457758 - DNA, 33 bp, Homo sapien
cagagcagtaaatcaatgaacaggagtgcccct

SEQ ID NO: 457759 - DNA, 33 bp, Homo sapien
tgaacgacaggccaataacaaaggcaaaaccct

SEQ ID NO: 457760 - DNA, 33 bp, Homo sapien
tgaacgacaggccaatgacaaaggcaaaaccct

SEQ ID NO: 457761 - DNA, 33 bp, Homo sapien
ttgtagttttttctaacgcaatctgagatgatg

SEQ ID NO: 457762 - DNA, 33 bp, Homo sapien
ttgtagttttttctaatgcaatctgagatgatg

SEQ ID NO: 457763 - DNA, 33 bp, Homo sapien
gtgtgttctgacagtaacccatatggaactggg

SEQ ID NO: 457764 - DNA, 33 bp, Homo sapien
gtgtgttctgacagtatcccatatggaactggg

SEQ ID NO: 457765 - DNA, 33 bp, Homo sapien
ttgatttctgttctaaataagcaactctgccct

SEQ ID NO: 457766 - DNA, 33 bp, Homo sapien
ttgatttctgttctaagtaagcaactctgccct

SEQ ID NO: 457767 - DNA, 33 bp, Homo sapien
ctgtggccatatctccacatttcaagagaaccg

SEQ ID NO: 457768 - DNA, 33 bp, Homo sapien
ctgtggccatatctccgcatttcaagagaaccg

SEQ ID NO: 457769 - DNA, 33 bp, Homo sapien
gagcccctgtgtccaaaaaggcaaactgggcag

SEQ ID NO: 457770 - DNA, 33 bp, Homo sapien
gagcccctgtgtccaagaaggcaaactgggcag

SEQ ID NO: 457771 - DNA, 33 bp, Homo sapien
agaacatgaggacataagtgtgtacacccagaa

SEQ ID NO: 457772 - DNA, 33 bp, Homo sapien
agaacatgaggacatatgtgtgtacacccagaa

SEQ ID NO: 457773 - DNA, 33 bp, Homo sapien
atcttaaatcaacagcaactctctggtaaaaca

SEQ ID NO: 457774 - DNA, 33 bp, Homo sapien
atcttaaatcaacagcgactctctggtaaaaca

SEQ ID NO: 457775 - DNA, 33 bp, Homo sapien
ctgtggtatgttttcaactgccccattggctaa

SEQ ID NO: 457776 - DNA, 33 bp, Homo sapien
ctgtggtatgttttcagctgccccattggctaa

SEQ ID NO: 457777 - DNA, 33 bp, Homo sapien
taacagatcaggcagacaataaacatagataaa

SEQ ID NO: 457778 - DNA, 33 bp, Homo sapien
taacagatcaggcagataataaacatagataaa

SEQ ID NO: 457779 - DNA, 33 bp, Homo sapien
gtctgatccaacatggaatgtcacgatgtgatg

SEQ ID NO: 457780 - DNA, 33 bp, Homo sapien
gtctgatccaacatgggatgtcacgatgtgatg

SEQ ID NO: 457781 - DNA, 33 bp, Homo sapien
gcccatgggaaattcaaataagagtgaatcagg

SEQ ID NO: 457782 - DNA, 33 bp, Homo sapien
gcccatgggaaattcagataagagtgaatcagg

SEQ ID NO: 457783 - DNA, 33 bp, Homo sapien
atgagtctcccttcagacctcaaggtagtatca

SEQ ID NO: 457784 - DNA, 33 bp, Homo sapien
atgagtctcccttcaggcctcaaggtagtatca

SEQ ID NO: 457785 - DNA, 33 bp, Homo sapien
aggagttatcctctgacggaagattaatttctc

SEQ ID NO: 457786 - DNA, 33 bp, Homo sapien
aggagttatcctctgatggaagattaatttctc

SEQ ID NO: 457787 - DNA, 33 bp, Homo sapien
aaaggtggtaatgtgaaataactggagatattt

SEQ ID NO: 457788 - DNA, 33 bp, Homo sapien
aaaggtggtaatgtgacataactggagatattt

SEQ ID NO: 457789 - DNA, 33 bp, Homo sapien
ccaatgatcagagaaacgcaagacaaaagaggc

SEQ ID NO: 457790 - DNA, 33 bp, Homo sapien
ccaatgatcagagaaatgcaagacaaaagaggc

SEQ ID NO: 457791 - DNA, 33 bp, Homo sapien
tctcctgttagctgcacatctctttctccacct

SEQ ID NO: 457792 - DNA, 33 bp, Homo sapien
tctcctgttagctgcatatctctttctccacct

SEQ ID NO: 457793 - DNA, 33 bp, Homo sapien
tctgttcctgcattaactagcgtaggattctgg

SEQ ID NO: 457794 - DNA, 33 bp, Homo sapien
tctgttcctgcattaattagcgtaggattctgg

SEQ ID NO: 457795 - DNA, 33 bp, Homo sapien
aggtgccccatagagccaaacagagcagtgggc

SEQ ID NO: 457796 - DNA, 33 bp, Homo sapien
aggtgccccatagagcgaaacagagcagtgggc

SEQ ID NO: 457797 - DNA, 33 bp, Homo sapien
atagctttactcataagtaccaaaaactgggaa

SEQ ID NO: 457798 - DNA, 33 bp, Homo sapien
atagctttactcataattaccaaaaactgggaa

SEQ ID NO: 457799 - DNA, 33 bp, Homo sapien
aactgggtattaggtacgtggaaactgtctgta

SEQ ID NO: 457800 - DNA, 33 bp, Homo sapien
aactgggtattaggtatgtggaaactgtctgta

SEQ ID NO: 457801 - DNA, 33 bp, Homo sapien
ctcaccactcctaaccaacatagtactagaaat

SEQ ID NO: 457802 - DNA, 33 bp, Homo sapien
ctcaccactcctaaccgacatagtactagaaat

SEQ ID NO: 457803 - DNA, 33 bp, Homo sapien
ggccatataagatgtcaaaggatgagttataaa

SEQ ID NO: 457804 - DNA, 33 bp, Homo sapien
ggccatataagatgtcgaaggatgagttataaa

SEQ ID NO: 457805 - DNA, 33 bp, Homo sapien
caaaaaatcatagtaccacgtgcactttcacac

SEQ ID NO: 457806 - DNA, 33 bp, Homo sapien
caaaaaatcatagtactacgtgcactttcacac

SEQ ID NO: 457807 - DNA, 33 bp, Homo sapien
gaggaaaaatcattcaatcccccaaagagcaga

SEQ ID NO: 457808 - DNA, 33 bp, Homo sapien
gaggaaaaatcattcagtcccccaaagagcaga

SEQ ID NO: 457809 - DNA, 33 bp, Homo sapien
ggaggtgggtattcaacgccaactggaaaatgg

SEQ ID NO: 457810 - DNA, 33 bp, Homo sapien
ggaggtgggtattcaatgccaactggaaaatgg

SEQ ID NO: 457811 - DNA, 33 bp, Homo sapien
attcggcccatgaaaacgcaggatgaatgggct

SEQ ID NO: 457812 - DNA, 33 bp, Homo sapien
attcggcccatgaaaatgcaggatgaatgggct

SEQ ID NO: 457813 - DNA, 33 bp, Homo sapien
acttaacaacatcctaccaaacatataccactt

SEQ ID NO: 457814 - DNA, 33 bp, Homo sapien
acttaacaacatcctatcaaacatataccactt

SEQ ID NO: 457815 - DNA, 33 bp, Homo sapien
aactccttgtgcaaagaacccgcaggcaaggga

SEQ ID NO: 457816 - DNA, 33 bp, Homo sapien
aactccttgtgcaaaggacccgcaggcaaggga

SEQ ID NO: 457817 - DNA, 33 bp, Homo sapien
aggacctataaacctgaagaacacagagttgtg

SEQ ID NO: 457818 - DNA, 33 bp, Homo sapien
aggacctataaacctgcagaacacagagttgtg

SEQ ID NO: 457819 - DNA, 33 bp, Homo sapien
aaatagaccaatagagacattatgctgattact

SEQ ID NO: 457820 - DNA, 33 bp, Homo sapien
aaatagaccaatagaggcattatgctgattact

SEQ ID NO: 457821 - DNA, 33 bp, Homo sapien
tgtacctccagttgtacagtaaggccatgataa

SEQ ID NO: 457822 - DNA, 33 bp, Homo sapien
tgtacctccagttgtatagtaaggccatgataa

SEQ ID NO: 457823 - DNA, 33 bp, Homo sapien
gtttgaaagccttttgcatgagttcagctatgt

SEQ ID NO: 457824 - DNA, 33 bp, Homo sapien
gtttgaaagccttttggatgagttcagctatgt

SEQ ID NO: 457825 - DNA, 33 bp, Homo sapien
gatgtaaaaactttgaacacgtggatgtaatgg

SEQ ID NO: 457826 - DNA, 33 bp, Homo sapien
gatgtaaaaactttgaccacgtggatgtaatgg

SEQ ID NO: 457827 - DNA, 33 bp, Homo sapien
ataggccttgcacctaccttgttaaatttattc

SEQ ID NO: 457828 - DNA, 33 bp, Homo sapien
ataggccttgcacctatcttgttaaatttattc

SEQ ID NO: 457829 - DNA, 33 bp, Homo sapien
aaagcagatctggtgaaaacaatgctaaaaagt

SEQ ID NO: 457830 - DNA, 33 bp, Homo sapien
aaagcagatctggtgacaacaatgctaaaaagt

SEQ ID NO: 457831 - DNA, 33 bp, Homo sapien
agagtcctacctacaaagtgtcctggttatgga

SEQ ID NO: 457832 - DNA, 33 bp, Homo sapien
agagtcctacctacaacgtgtcctggttatgga

SEQ ID NO: 457833 - DNA, 33 bp, Homo sapien
tatcacaattctcccgaacctgatacattaacc

SEQ ID NO: 457834 - DNA, 33 bp, Homo sapien
tatcacaattctcccggacctgatacattaacc

SEQ ID NO: 457835 - DNA, 33 bp, Homo sapien
ggtaccactggactaaaactgccagtagggctg

SEQ ID NO: 457836 - DNA, 33 bp, Homo sapien
ggtaccactggactaagactgccagtagggctg

SEQ ID NO: 457837 - DNA, 33 bp, Homo sapien
tgttacagcagcagtcaaaaactaatacacagt

SEQ ID NO: 457838 - DNA, 33 bp, Homo sapien
tgttacagcagcagtcgaaaactaatacacagt

SEQ ID NO: 457839 - DNA, 33 bp, Homo sapien
gcagctggtctttgggccacatctattactcat

SEQ ID NO: 457840 - DNA, 33 bp, Homo sapien
gcagctggtctttgggtcacatctattactcat

SEQ ID NO: 457841 - DNA, 33 bp, Homo sapien
tgtactctcattcataacacttacgagtttgaa

SEQ ID NO: 457842 - DNA, 33 bp, Homo sapien
tgtactctcattcatagcacttacgagtttgaa

SEQ ID NO: 457843 - DNA, 33 bp, Homo sapien
aaaatctgttcttgccactgtacctccaggcaa

SEQ ID NO: 457844 - DNA, 33 bp, Homo sapien
aaaatctgttcttgccgctgtacctccaggcaa

SEQ ID NO: 457845 - DNA, 33 bp, Homo sapien
caaaaaaaatgaattgaaccaaaagtgcaggtg

SEQ ID NO: 457846 - DNA, 33 bp, Homo sapien
caaaaaaaatgaattggaccaaaagtgcaggtg

SEQ ID NO: 457847 - DNA, 33 bp, Homo sapien
acaatgcaatctgacaagtgtgatttatggaat

SEQ ID NO: 457848 - DNA, 33 bp, Homo sapien
acaatgcaatctgacatgtgtgatttatggaat

SEQ ID NO: 457849 - DNA, 33 bp, Homo sapien
agcagggccgtgggaccacatctgtcattagaa

SEQ ID NO: 457850 - DNA, 33 bp, Homo sapien
agcagggccgtgggacgacatctgtcattagaa

SEQ ID NO: 457851 - DNA, 33 bp, Homo sapien
tacattccatgcaccaagtactgaggggctaca

SEQ ID NO: 457852 - DNA, 33 bp, Homo sapien
tacattccatgcaccaggtactgaggggctaca

SEQ ID NO: 457853 - DNA, 33 bp, Homo sapien
atccatttctctcccacgtgactctgttggaca

SEQ ID NO: 457854 - DNA, 33 bp, Homo sapien
atccatttctctcccatgtgactctgttggaca

SEQ ID NO: 457855 - DNA, 33 bp, Homo sapien
cttcaaatgtgaagtaactccaagccacacgga

SEQ ID NO: 457856 - DNA, 33 bp, Homo sapien
cttcaaatgtgaagtatctccaagccacacgga

SEQ ID NO: 457857 - DNA, 33 bp, Homo sapien
tctttgggcatcagacaaaaacagtgcatggag

SEQ ID NO: 457858 - DNA, 33 bp, Homo sapien
tctttgggcatcagacgaaaacagtgcatggag

SEQ ID NO: 457859 - DNA, 33 bp, Homo sapien
aggccacttgtcacaaacagggcagaggagggg

SEQ ID NO: 457860 - DNA, 33 bp, Homo sapien
aggccacttgtcacaagcagggcagaggagggg

SEQ ID NO: 457861 - DNA, 33 bp, Homo sapien
gctaggcgggatatcaatcaggaggaaagaagc

SEQ ID NO: 457862 - DNA, 33 bp, Homo sapien
gctaggcgggatatcagtcaggaggaaagaagc

SEQ ID NO: 457863 - DNA, 33 bp, Homo sapien
attggttttcctgccacctatttcgctaggaga

SEQ ID NO: 457864 - DNA, 33 bp, Homo sapien
attggttttcctgccatctatttcgctaggaga

SEQ ID NO: 457865 - DNA, 33 bp, Homo sapien
ctttgtcatccatgagcctaaagattattggag

SEQ ID NO: 457866 - DNA, 33 bp, Homo sapien
ctttgtcatccatgagtctaaagattattggag

SEQ ID NO: 457867 - DNA, 33 bp, Homo sapien
agtagaaagggatttcacgtagacaatgtaatg

SEQ ID NO: 457868 - DNA, 33 bp, Homo sapien
agtagaaagggatttcgcgtagacaatgtaatg

SEQ ID NO: 457869 - DNA, 33 bp, Homo sapien
aatataatgtgtgaaacgggacagcactgaaac

SEQ ID NO: 457870 - DNA, 33 bp, Homo sapien
aatataatgtgtgaaatgggacagcactgaaac

SEQ ID NO: 457871 - DNA, 33 bp, Homo sapien
acacccactttaataccctgacatttctgttca

SEQ ID NO: 457872 - DNA, 33 bp, Homo sapien
acacccactttaatactctgacatttctgttca

SEQ ID NO: 457873 - DNA, 33 bp, Homo sapien
atagggacgtatgcctcactagcttcggtcatt

SEQ ID NO: 457874 - DNA, 33 bp, Homo sapien
atagggacgtatgccttactagcttcggtcatt

SEQ ID NO: 457875 - DNA, 33 bp, Homo sapien
cacacaaagttgcaagaatagcaccaagaattc

SEQ ID NO: 457876 - DNA, 33 bp, Homo sapien
cacacaaagttgcaagtatagcaccaagaattc

SEQ ID NO: 457877 - DNA, 33 bp, Homo sapien
cacaagattataaaacaatggcaccctttggag

SEQ ID NO: 457878 - DNA, 33 bp, Homo sapien
cacaagattataaaacgatggcaccctttggag

SEQ ID NO: 457879 - DNA, 33 bp, Homo sapien
aaaattacttggctgaagaaatagcaggaaaga

SEQ ID NO: 457880 - DNA, 33 bp, Homo sapien
aaaattacttggctgaggaaatagcaggaaaga

SEQ ID NO: 457881 - DNA, 33 bp, Homo sapien
gaagatgcaatctttcacatcaaagtagaattc

SEQ ID NO: 457882 - DNA, 33 bp, Homo sapien
gaagatgcaatctttcgcatcaaagtagaattc

SEQ ID NO: 457883 - DNA, 33 bp, Homo sapien
accaaatccagagtcacgtggacaaggggacgg

SEQ ID NO: 457884 - DNA, 33 bp, Homo sapien
accaaatccagagtcatgtggacaaggggacgg

SEQ ID NO: 457885 - DNA, 33 bp, Homo sapien
aatcctggctttcttgcatgagattgagcgaga

SEQ ID NO: 457886 - DNA, 33 bp, Homo sapien
aatcctggctttcttgtatgagattgagcgaga

SEQ ID NO: 457887 - DNA, 33 bp, Homo sapien
ctagacagtgcttgcaaagaacagacactcaac

SEQ ID NO: 457888 - DNA, 33 bp, Homo sapien
ctagacagtgcttgcagagaacagacactcaac

SEQ ID NO: 457889 - DNA, 33 bp, Homo sapien
caacattgcattattaactttttgtggtgagga

SEQ ID NO: 457890 - DNA, 33 bp, Homo sapien
caacattgcattattatctttttgtggtgagga

SEQ ID NO: 457891 - DNA, 33 bp, Homo sapien
gtaagttctaactccaatgcctttgtagacagg

SEQ ID NO: 457892 - DNA, 33 bp, Homo sapien
gtaagttctaactccactgcctttgtagacagg

SEQ ID NO: 457893 - DNA, 33 bp, Homo sapien
tgagtggtaggaccagaaagtctggctacacag

SEQ ID NO: 457894 - DNA, 33 bp, Homo sapien
tgagtggtaggaccaggaagtctggctacacag

SEQ ID NO: 457895 - DNA, 33 bp, Homo sapien
gtttaggctgcttatcgccaaaattagacaatg

SEQ ID NO: 457896 - DNA, 33 bp, Homo sapien
gtttaggctgcttatctccaaaattagacaatg

SEQ ID NO: 457897 - DNA, 33 bp, Homo sapien
ccctcactgaagttcaaaactgccttcggaagc

SEQ ID NO: 457898 - DNA, 33 bp, Homo sapien
ccctcactgaagttcataactgccttcggaagc

SEQ ID NO: 457899 - DNA, 33 bp, Homo sapien
ggccaaagtcacagaacagttttatgcatgagc

SEQ ID NO: 457900 - DNA, 33 bp, Homo sapien
ggccaaagtcacagaatagttttatgcatgagc

SEQ ID NO: 457901 - DNA, 33 bp, Homo sapien
ggtaagggtattcccaacttggtgaggaagcta

SEQ ID NO: 457902 - DNA, 33 bp, Homo sapien
ggtaagggtattcccagcttggtgaggaagcta

SEQ ID NO: 457903 - DNA, 33 bp, Homo sapien
agtttatgcctttatccgaccacaggaattcgt

SEQ ID NO: 457904 - DNA, 33 bp, Homo sapien
agtttatgcctttatctgaccacaggaattcgt

SEQ ID NO: 457905 - DNA, 33 bp, Homo sapien
aaattgtaatcgatgcccccacattttgggctg

SEQ ID NO: 457906 - DNA, 33 bp, Homo sapien
aaattgtaatcgatgctcccacattttgggctg

SEQ ID NO: 457907 - DNA, 33 bp, Homo sapien
acttcaacctctcagacatgctgaaacttaagc

SEQ ID NO: 457908 - DNA, 33 bp, Homo sapien
acttcaacctctcagatatgctgaaacttaagc

SEQ ID NO: 457909 - DNA, 33 bp, Homo sapien
ggacaaacccagttacagagcctagtacccgat

SEQ ID NO: 457910 - DNA, 33 bp, Homo sapien
ggacaaacccagttacggagcctagtacccgat

SEQ ID NO: 457911 - DNA, 33 bp, Homo sapien
catatcggggcacagaaagttttggatttcaga

SEQ ID NO: 457912 - DNA, 33 bp, Homo sapien
catatcggggcacagagagttttggatttcaga

SEQ ID NO: 457913 - DNA, 33 bp, Homo sapien
tcagaacatggtgggaaggagacccataagatc

SEQ ID NO: 457914 - DNA, 33 bp, Homo sapien
tcagaacatggtgggacggagacccataagatc

SEQ ID NO: 457915 - DNA, 33 bp, Homo sapien
ttttggtgacggggaactgaaacagatccaaca

SEQ ID NO: 457916 - DNA, 33 bp, Homo sapien
ttttggtgacggggaagtgaaacagatccaaca

SEQ ID NO: 457917 - DNA, 33 bp, Homo sapien
aacactcccagaccccacaaaaagtatgaaaga

SEQ ID NO: 457918 - DNA, 33 bp, Homo sapien
aacactcccagacccctcaaaaagtatgaaaga

SEQ ID NO: 457919 - DNA, 33 bp, Homo sapien
tctcaccacatagaaaaccaattactgagaaaa

SEQ ID NO: 457920 - DNA, 33 bp, Homo sapien
tctcaccacatagaaagccaattactgagaaaa

SEQ ID NO: 457921 - DNA, 33 bp, Homo sapien
gctaaatttggggccaagtatggtgaagcattc

SEQ ID NO: 457922 - DNA, 33 bp, Homo sapien
gctaaatttggggccaggtatggtgaagcattc

SEQ ID NO: 457923 - DNA, 33 bp, Homo sapien
gcccagtcaaagaggggagggaaaagtgtagat

SEQ ID NO: 457924 - DNA, 33 bp, Homo sapien
gcccagtcaaagagggtagggaaaagtgtagat

SEQ ID NO: 457925 - DNA, 33 bp, Homo sapien
agcactgggaaaaacaatgacttagaaaggtac

SEQ ID NO: 457926 - DNA, 33 bp, Homo sapien
agcactgggaaaaacattgacttagaaaggtac

SEQ ID NO: 457927 - DNA, 33 bp, Homo sapien
cacacaaggctgattccgaaatagggagaggcc

SEQ ID NO: 457928 - DNA, 33 bp, Homo sapien
cacacaaggctgattctgaaatagggagaggcc

SEQ ID NO: 457929 - DNA, 33 bp, Homo sapien
cttattacttttaagaaccagtctgttgtgatt

SEQ ID NO: 457930 - DNA, 33 bp, Homo sapien
cttattacttttaagatccagtctgttgtgatt

SEQ ID NO: 457931 - DNA, 33 bp, Homo sapien
cagactcgacccttgccagggaagtctgtgtcg

SEQ ID NO: 457932 - DNA, 33 bp, Homo sapien
cagactcgacccttgctagggaagtctgtgtcg

SEQ ID NO: 457933 - DNA, 33 bp, Homo sapien
gaatggcaacaaggaacagaagccagcctctac

SEQ ID NO: 457934 - DNA, 33 bp, Homo sapien
gaatggcaacaaggaagagaagccagcctctac

SEQ ID NO: 457935 - DNA, 33 bp, Homo sapien
tccttcctgtgcctccaagagaagatctccaat

SEQ ID NO: 457936 - DNA, 33 bp, Homo sapien
tccttcctgtgcctccgagagaagatctccaat

SEQ ID NO: 457937 - DNA, 33 bp, Homo sapien
ttactctgatgctgcccagtggagacacagcag

SEQ ID NO: 457938 - DNA, 33 bp, Homo sapien
ttactctgatgctgcctagtggagacacagcag

SEQ ID NO: 457939 - DNA, 33 bp, Homo sapien
ttagtctctctgagtccaattctcatcatctct

SEQ ID NO: 457940 - DNA, 33 bp, Homo sapien
ttagtctctctgagtcgaattctcatcatctct

SEQ ID NO: 457941 - DNA, 33 bp, Homo sapien
caattcgcaaaattaccctattcacgcatagca

SEQ ID NO: 457942 - DNA, 33 bp, Homo sapien
caattcgcaaaattactctattcacgcatagca

SEQ ID NO: 457943 - DNA, 33 bp, Homo sapien
ctcaaggagcttccaacctatttgcaaggcaga

SEQ ID NO: 457944 - DNA, 33 bp, Homo sapien
ctcaaggagcttccaatctatttgcaaggcaga

SEQ ID NO: 457945 - DNA, 33 bp, Homo sapien
ctttgctctttttgggcagcaccacgacaaact

SEQ ID NO: 457946 - DNA, 33 bp, Homo sapien
ctttgctctttttgggtagcaccacgacaaact

SEQ ID NO: 457947 - DNA, 33 bp, Homo sapien
gctcttactcaccttgaagtagtccgcagagct

SEQ ID NO: 457948 - DNA, 33 bp, Homo sapien
gctcttactcaccttggagtagtccgcagagct

SEQ ID NO: 457949 - DNA, 33 bp, Homo sapien
tctgcttgttgggctccaaaacactttcctccc

SEQ ID NO: 457950 - DNA, 33 bp, Homo sapien
tctgcttgttgggctctaaaacactttcctccc

SEQ ID NO: 457951 - DNA, 33 bp, Homo sapien
ttttacttacatttccagaaccagtgacatgga

SEQ ID NO: 457952 - DNA, 33 bp, Homo sapien
ttttacttacatttccggaaccagtgacatgga

SEQ ID NO: 457953 - DNA, 33 bp, Homo sapien
tccaggcatggcatccactgctgtagagaagtt

SEQ ID NO: 457954 - DNA, 33 bp, Homo sapien
tccaggcatggcatccgctgctgtagagaagtt

SEQ ID NO: 457955 - DNA, 33 bp, Homo sapien
ccaacacacctaatgcactggtggcactactgg

SEQ ID NO: 457956 - DNA, 33 bp, Homo sapien
ccaacacacctaatgcgctggtggcactactgg

SEQ ID NO: 457957 - DNA, 33 bp, Homo sapien
ctggggttgctatgaaatgaattctccccctcc

SEQ ID NO: 457958 - DNA, 33 bp, Homo sapien
ctggggttgctatgaactgaattctccccctcc

SEQ ID NO: 457959 - DNA, 33 bp, Homo sapien
aagccctaacttccaacgtgactgtctttggag

SEQ ID NO: 457960 - DNA, 33 bp, Homo sapien
aagccctaacttccaatgtgactgtctttggag

SEQ ID NO: 457961 - DNA, 33 bp, Homo sapien
tttgttgttgataaggaaatccataaacttgtg

SEQ ID NO: 457962 - DNA, 33 bp, Homo sapien
tttgttgttgataaggcaatccataaacttgtg

SEQ ID NO: 457963 - DNA, 33 bp, Homo sapien
atattcattttaccagaagaaaaccatggttca

SEQ ID NO: 457964 - DNA, 33 bp, Homo sapien
atattcattttaccaggagaaaaccatggttca

SEQ ID NO: 457965 - DNA, 33 bp, Homo sapien
gctgcctcttctgtgcactttctcctcgaaccc

SEQ ID NO: 457966 - DNA, 33 bp, Homo sapien
gctgcctcttctgtgcgctttctcctcgaaccc

SEQ ID NO: 457967 - DNA, 33 bp, Homo sapien
ctcacagacctacgaacgtccaagacaaagcag

SEQ ID NO: 457968 - DNA, 33 bp, Homo sapien
ctcacagacctacgaatgtccaagacaaagcag

SEQ ID NO: 457969 - DNA, 33 bp, Homo sapien
ggtcatgggctcaagacgctggctcagctccag

SEQ ID NO: 457970 - DNA, 33 bp, Homo sapien
ggtcatgggctcaagatgctggctcagctccag

SEQ ID NO: 457971 - DNA, 33 bp, Homo sapien
agcccctggctactccactctttcagctctgtg

SEQ ID NO: 457972 - DNA, 33 bp, Homo sapien
agcccctggctactccgctctttcagctctgtg

SEQ ID NO: 457973 - DNA, 33 bp, Homo sapien
tggtgctcacagaccacgccgtgtttctcagtg

SEQ ID NO: 457974 - DNA, 33 bp, Homo sapien
tggtgctcacagaccatgccgtgtttctcagtg

SEQ ID NO: 457975 - DNA, 33 bp, Homo sapien
tgaagtgtaatagtgaacatcaaagctcactgc

SEQ ID NO: 457976 - DNA, 33 bp, Homo sapien
tgaagtgtaatagtgatcatcaaagctcactgc

SEQ ID NO: 457977 - DNA, 33 bp, Homo sapien
gtgtgcacaaaaccaacattacaagccacacat

SEQ ID NO: 457978 - DNA, 33 bp, Homo sapien
gtgtgcacaaaaccaagattacaagccacacat

SEQ ID NO: 457979 - DNA, 33 bp, Homo sapien
gcttctcccttccaaacattgcagattttgccc

SEQ ID NO: 457980 - DNA, 33 bp, Homo sapien
gcttctcccttccaaatattgcagattttgccc

SEQ ID NO: 457981 - DNA, 33 bp, Homo sapien
ataaactacccaggacaaaagaggaatctccct

SEQ ID NO: 457982 - DNA, 33 bp, Homo sapien
ataaactacccaggacgaaagaggaatctccct

SEQ ID NO: 457983 - DNA, 33 bp, Homo sapien
ctttcatgtgttgttacgccaatgaattatctc

SEQ ID NO: 457984 - DNA, 33 bp, Homo sapien
ctttcatgtgttgttatgccaatgaattatctc

SEQ ID NO: 457985 - DNA, 33 bp, Homo sapien
actgcaaatcattcaccccagttcctcctgccc

SEQ ID NO: 457986 - DNA, 33 bp, Homo sapien
actgcaaatcattcactccagttcctcctgccc

SEQ ID NO: 457987 - DNA, 33 bp, Homo sapien
gggttgaggcaaaagagaagatatgggctcatg

SEQ ID NO: 457988 - DNA, 33 bp, Homo sapien
gggttgaggcaaaagataagatatgggctcatg

SEQ ID NO: 457989 - DNA, 33 bp, Homo sapien
cacccttctcgtggtaagagcctgattgtccca

SEQ ID NO: 457990 - DNA, 33 bp, Homo sapien
cacccttctcgtggtaggagcctgattgtccca

SEQ ID NO: 457991 - DNA, 33 bp, Homo sapien
aagggtaactatgggaagtgatggatttgttaa

SEQ ID NO: 457992 - DNA, 33 bp, Homo sapien
aagggtaactatgggatgtgatggatttgttaa

SEQ ID NO: 457993 - DNA, 33 bp, Homo sapien
tagcattcactccctcgagtttgttgtgggaat

SEQ ID NO: 457994 - DNA, 33 bp, Homo sapien
tagcattcactccctctagtttgttgtgggaat

SEQ ID NO: 457995 - DNA, 33 bp, Homo sapien
taaattatcttgagaccgaaatgaaagaaacgg

SEQ ID NO: 457996 - DNA, 33 bp, Homo sapien
taaattatcttgagactgaaatgaaagaaacgg

SEQ ID NO: 457997 - DNA, 33 bp, Homo sapien
tttgttgtcattgccacggaaaccttttattat

SEQ ID NO: 457998 - DNA, 33 bp, Homo sapien
tttgttgtcattgccagggaaaccttttattat

SEQ ID NO: 457999 - DNA, 33 bp, Homo sapien
ttacaaatccctgctcaaaattaagatgtcacg

SEQ ID NO: 458000 - DNA, 33 bp, Homo sapien
ttacaaatccctgctccaaattaagatgtcacg

SEQ ID NO: 458001 - DNA, 33 bp, Homo sapien
tacacatggaattaataacaagagagtgaagtc

SEQ ID NO: 458002 - DNA, 33 bp, Homo sapien
tacacatggaattaatgacaagagagtgaagtc

SEQ ID NO: 458003 - DNA, 33 bp, Homo sapien
gaccaggtaatgggaaagcagaatctgagctac

SEQ ID NO: 458004 - DNA, 33 bp, Homo sapien
gaccaggtaatgggaaggcagaatctgagctac

SEQ ID NO: 458005 - DNA, 33 bp, Homo sapien
tcttcagctccacaagcccagaaggcaggaagg

SEQ ID NO: 458006 - DNA, 33 bp, Homo sapien
tcttcagctccacaaggccagaaggcaggaagg

SEQ ID NO: 458007 - DNA, 33 bp, Homo sapien
ggctgacgggatggccaccacctgaaacactgc

SEQ ID NO: 458008 - DNA, 33 bp, Homo sapien
ggctgacgggatggccgccacctgaaacactgc

SEQ ID NO: 458009 - DNA, 33 bp, Homo sapien
tagcaaatcataatcacattcaacggacagttc

SEQ ID NO: 458010 - DNA, 33 bp, Homo sapien
tagcaaatcataatcatattcaacggacagttc

SEQ ID NO: 458011 - DNA, 33 bp, Homo sapien
aggtgaaacagtttgcacaagatcacaaatctc

SEQ ID NO: 458012 - DNA, 33 bp, Homo sapien
aggtgaaacagtttgcgcaagatcacaaatctc

SEQ ID NO: 458013 - DNA, 33 bp, Homo sapien
taaattcactttcactaagatcctctggctgca

SEQ ID NO: 458014 - DNA, 33 bp, Homo sapien
taaattcactttcactgagatcctctggctgca

SEQ ID NO: 458015 - DNA, 33 bp, Homo sapien
gaaaactaaaaacacaataagtctcaacagaga

SEQ ID NO: 458016 - DNA, 33 bp, Homo sapien
gaaaactaaaaacacagtaagtctcaacagaga

SEQ ID NO: 458017 - DNA, 33 bp, Homo sapien
taaaatttttaaaatgaacatcatgtatcagac

SEQ ID NO: 458018 - DNA, 33 bp, Homo sapien
taaaatttttaaaatggacatcatgtatcagac

SEQ ID NO: 458019 - DNA, 33 bp, Homo sapien
cagaaataaaagcaacccaaattgctgctttag

SEQ ID NO: 458020 - DNA, 33 bp, Homo sapien
cagaaataaaagcaactcaaattgctgctttag

SEQ ID NO: 458021 - DNA, 33 bp, Homo sapien
ttggccaagatttaagaataactcacagttttg

SEQ ID NO: 458022 - DNA, 33 bp, Homo sapien
ttggccaagatttaagtataactcacagttttg

SEQ ID NO: 458023 - DNA, 33 bp, Homo sapien
tataataaatctgtagccataatatagcacttc

SEQ ID NO: 458024 - DNA, 33 bp, Homo sapien
tataataaatctgtagtcataatatagcacttc

SEQ ID NO: 458025 - DNA, 33 bp, Homo sapien
acattactgtggagaaactgaatgctaggttga

SEQ ID NO: 458026 - DNA, 33 bp, Homo sapien
acattactgtggagaagctgaatgctaggttga

SEQ ID NO: 458027 - DNA, 33 bp, Homo sapien
aattaataactttacaatagcctctaagcgtcg

SEQ ID NO: 458028 - DNA, 33 bp, Homo sapien
aattaataactttacattagcctctaagcgtcg

SEQ ID NO: 458029 - DNA, 33 bp, Homo sapien
aagctcaatgagaatacggaatgtcttagacac

SEQ ID NO: 458030 - DNA, 33 bp, Homo sapien
aagctcaatgagaatatggaatgtcttagacac

SEQ ID NO: 458031 - DNA, 33 bp, Homo sapien
tcaaatagaaaactaacagtgagacagtgtatg

SEQ ID NO: 458032 - DNA, 33 bp, Homo sapien
tcaaatagaaaactaatagtgagacagtgtatg

SEQ ID NO: 458033 - DNA, 33 bp, Homo sapien
tttcctgtaactatcaatctgctgagagaatga

SEQ ID NO: 458034 - DNA, 33 bp, Homo sapien
tttcctgtaactatcagtctgctgagagaatga

SEQ ID NO: 458035 - DNA, 33 bp, Homo sapien
tggcatgaaacactgcaaatactaggccctgat

SEQ ID NO: 458036 - DNA, 33 bp, Homo sapien
tggcatgaaacactgcgaatactaggccctgat

SEQ ID NO: 458037 - DNA, 33 bp, Homo sapien
tgcaaagtgattttcacgagtaaaatattccct

SEQ ID NO: 458038 - DNA, 33 bp, Homo sapien
tgcaaagtgattttcatgagtaaaatattccct

SEQ ID NO: 458039 - DNA, 33 bp, Homo sapien
gacctttcctctctgcactccaagaatgacatt

SEQ ID NO: 458040 - DNA, 33 bp, Homo sapien
gacctttcctctctgcgctccaagaatgacatt

SEQ ID NO: 458041 - DNA, 33 bp, Homo sapien
tttctggacagaagggacacctaaaaggcttgt

SEQ ID NO: 458042 - DNA, 33 bp, Homo sapien
tttctggacagaaggggcacctaaaaggcttgt

SEQ ID NO: 458043 - DNA, 33 bp, Homo sapien
cactctccaagaactagaattacaggagtgagt

SEQ ID NO: 458044 - DNA, 33 bp, Homo sapien
cactctccaagaactataattacaggagtgagt

SEQ ID NO: 458045 - DNA, 33 bp, Homo sapien
agttctgtgtttataaaggtgtgggagagaagc

SEQ ID NO: 458046 - DNA, 33 bp, Homo sapien
agttctgtgtttataagggtgtgggagagaagc

SEQ ID NO: 458047 - DNA, 33 bp, Homo sapien
caaaccagccagacaactgaattgggtgctaca

SEQ ID NO: 458048 - DNA, 33 bp, Homo sapien
caaaccagccagacaagtgaattgggtgctaca

SEQ ID NO: 458049 - DNA, 33 bp, Homo sapien
ttccatattatttttccactgcatttgtttgtt

SEQ ID NO: 458050 - DNA, 33 bp, Homo sapien
ttccatattatttttctactgcatttgtttgtt

SEQ ID NO: 458051 - DNA, 33 bp, Homo sapien
acctcaggcgattagccgaccttaagtgagtca

SEQ ID NO: 458052 - DNA, 33 bp, Homo sapien
acctcaggcgattagctgaccttaagtgagtca

SEQ ID NO: 458053 - DNA, 33 bp, Homo sapien
acaccactcactgcaccagcattttccatctga

SEQ ID NO: 458054 - DNA, 33 bp, Homo sapien
acaccactcactgcacgagcattttccatctga

SEQ ID NO: 458055 - DNA, 33 bp, Homo sapien
gcggctctgctgatgaacccttgaaggtccaag

SEQ ID NO: 458056 - DNA, 33 bp, Homo sapien
gcggctctgctgatgaccccttgaaggtccaag

SEQ ID NO: 458057 - DNA, 33 bp, Homo sapien
cggcttactagatttacaccaatgtaggaaatt

SEQ ID NO: 458058 - DNA, 33 bp, Homo sapien
cggcttactagatttataccaatgtaggaaatt

SEQ ID NO: 458059 - DNA, 33 bp, Homo sapien
aagcactaacactaccacctcagtaaagctgtt

SEQ ID NO: 458060 - DNA, 33 bp, Homo sapien
aagcactaacactaccgcctcagtaaagctgtt

SEQ ID NO: 458061 - DNA, 33 bp, Homo sapien
tccatgttcttggaaacacttgtgtatgtacag

SEQ ID NO: 458062 - DNA, 33 bp, Homo sapien
tccatgttcttggaaatacttgtgtatgtacag

SEQ ID NO: 458063 - DNA, 33 bp, Homo sapien
tcaaaaaaatgaaagtaaaagtccttgagtcct

SEQ ID NO: 458064 - DNA, 33 bp, Homo sapien
tcaaaaaaatgaaagtcaaagtccttgagtcct

SEQ ID NO: 458065 - DNA, 33 bp, Homo sapien
actcctgagctccaacaatcctcttgcactggc

SEQ ID NO: 458066 - DNA, 33 bp, Homo sapien
actcctgagctccaacgatcctcttgcactggc

SEQ ID NO: 458067 - DNA, 33 bp, Homo sapien
aactatacacatttgtcaaaagtccaccataat

SEQ ID NO: 458068 - DNA, 33 bp, Homo sapien
aactatacacatttgttaaaagtccaccataat

SEQ ID NO: 458069 - DNA, 33 bp, Homo sapien
aaattctaatgcattcacataacctttttcaag

SEQ ID NO: 458070 - DNA, 33 bp, Homo sapien
aaattctaatgcattcgcataacctttttcaag

SEQ ID NO: 458071 - DNA, 33 bp, Homo sapien
ttgggtctcacctcaccgaccgggaatgtgtca

SEQ ID NO: 458072 - DNA, 33 bp, Homo sapien
ttgggtctcacctcactgaccgggaatgtgtca

SEQ ID NO: 458073 - DNA, 33 bp, Homo sapien
cctaggtgtttacccaacaacgtatatatccac

SEQ ID NO: 458074 - DNA, 33 bp, Homo sapien
cctaggtgtttacccaccaacgtatatatccac

SEQ ID NO: 458075 - DNA, 33 bp, Homo sapien
cctcacagctgaaaaacgtgtgagggaaaactt

SEQ ID NO: 458076 - DNA, 33 bp, Homo sapien
cctcacagctgaaaaatgtgtgagggaaaactt

SEQ ID NO: 458077 - DNA, 33 bp, Homo sapien
atgaagagtgaactcaactgagtaaaagcaaca

SEQ ID NO: 458078 - DNA, 33 bp, Homo sapien
atgaagagtgaactcacctgagtaaaagcaaca

SEQ ID NO: 458079 - DNA, 33 bp, Homo sapien
acactgtcagtgcagcagaccccgaattctgtc

SEQ ID NO: 458080 - DNA, 33 bp, Homo sapien
acactgtcagtgcagcggaccccgaattctgtc

SEQ ID NO: 458081 - DNA, 33 bp, Homo sapien
gcgtctttgcatgcacaatatcttaaacacaca

SEQ ID NO: 458082 - DNA, 33 bp, Homo sapien
gcgtctttgcatgcacgatatcttaaacacaca

SEQ ID NO: 458083 - DNA, 33 bp, Homo sapien
gtgcgtttgtgtattaaagagaggataggctaa

SEQ ID NO: 458084 - DNA, 33 bp, Homo sapien
gtgcgtttgtgtattagagagaggataggctaa

SEQ ID NO: 458085 - DNA, 33 bp, Homo sapien
gtgatggtttcatggaagtccactcttctctaa

SEQ ID NO: 458086 - DNA, 33 bp, Homo sapien
gtgatggtttcatggatgtccactcttctctaa

SEQ ID NO: 458087 - DNA, 33 bp, Homo sapien
tcgatcttctttcgaaatcatcttgcccctcag

SEQ ID NO: 458088 - DNA, 33 bp, Homo sapien
tcgatcttctttcgaagtcatcttgcccctcag

SEQ ID NO: 458089 - DNA, 33 bp, Homo sapien
aatggtggccggctcactctactactctatttc

SEQ ID NO: 458090 - DNA, 33 bp, Homo sapien
aatggtggccggctcattctactactctatttc

SEQ ID NO: 458091 - DNA, 33 bp, Homo sapien
ggtaacatcatgagtaaccgtctctacaaaaca

SEQ ID NO: 458092 - DNA, 33 bp, Homo sapien
ggtaacatcatgagtacccgtctctacaaaaca

SEQ ID NO: 458093 - DNA, 33 bp, Homo sapien
ggtcttgctttttggacgtgcctattaaataat

SEQ ID NO: 458094 - DNA, 33 bp, Homo sapien
ggtcttgctttttggatgtgcctattaaataat

SEQ ID NO: 458095 - DNA, 33 bp, Homo sapien
gggcatccttacacccaagatgcagagacaaac

SEQ ID NO: 458096 - DNA, 33 bp, Homo sapien
gggcatccttacaccccagatgcagagacaaac

SEQ ID NO: 458097 - DNA, 33 bp, Homo sapien
ctggcggtgtaatggacgttaacactgatttac

SEQ ID NO: 458098 - DNA, 33 bp, Homo sapien
ctggcggtgtaatggatgttaacactgatttac

SEQ ID NO: 458099 - DNA, 33 bp, Homo sapien
tacaattgtgtatgcacagaaaaaaagacaaat

SEQ ID NO: 458100 - DNA, 33 bp, Homo sapien
tacaattgtgtatgcatagaaaaaaagacaaat

SEQ ID NO: 458101 - DNA, 33 bp, Homo sapien
ctgccatctgtgagacaattaatgtgtgcaatt

SEQ ID NO: 458102 - DNA, 33 bp, Homo sapien
ctgccatctgtgagaccattaatgtgtgcaatt

SEQ ID NO: 458103 - DNA, 33 bp, Homo sapien
attcaaacaatacaaaagagcaaactgtgaatg

SEQ ID NO: 458104 - DNA, 33 bp, Homo sapien
attcaaacaatacaaaggagcaaactgtgaatg

SEQ ID NO: 458105 - DNA, 33 bp, Homo sapien
ctgtttagccacgatacgatggtgagctcatag

SEQ ID NO: 458106 - DNA, 33 bp, Homo sapien
ctgtttagccacgatatgatggtgagctcatag

SEQ ID NO: 458107 - DNA, 33 bp, Homo sapien
acagtgaaagggcttgaatttgcatgggggtgc

SEQ ID NO: 458108 - DNA, 33 bp, Homo sapien
acagtgaaagggcttggatttgcatgggggtgc

SEQ ID NO: 458109 - DNA, 33 bp, Homo sapien
agcttcaagtgctaacacaagctttatgaagtc

SEQ ID NO: 458110 - DNA, 33 bp, Homo sapien
agcttcaagtgctaacgcaagctttatgaagtc

SEQ ID NO: 458111 - DNA, 33 bp, Homo sapien
aggcactgttccaaataaaggaaactgaaaaga

SEQ ID NO: 458112 - DNA, 33 bp, Homo sapien
aggcactgttccaaatgaaggaaactgaaaaga

SEQ ID NO: 458113 - DNA, 33 bp, Homo sapien
gggagagtctgcgatacgcaacaaaaatgtcaa

SEQ ID NO: 458114 - DNA, 33 bp, Homo sapien
gggagagtctgcgatatgcaacaaaaatgtcaa

SEQ ID NO: 458115 - DNA, 33 bp, Homo sapien
gggaataaaatctccccctctcagaacctacct

SEQ ID NO: 458116 - DNA, 33 bp, Homo sapien
gggaataaaatctccctctctcagaacctacct

SEQ ID NO: 458117 - DNA, 33 bp, Homo sapien
ttgaaattggaaaggacgtggtttcaggtagcc

SEQ ID NO: 458118 - DNA, 33 bp, Homo sapien
ttgaaattggaaaggatgtggtttcaggtagcc

SEQ ID NO: 458119 - DNA, 33 bp, Homo sapien
aaaaggacctctgtccaacactgttctcaacct

SEQ ID NO: 458120 - DNA, 33 bp, Homo sapien
aaaaggacctctgtccgacactgttctcaacct

SEQ ID NO: 458121 - DNA, 33 bp, Homo sapien
tgatctcgaaacgtaacagctactgctcagcaa

SEQ ID NO: 458122 - DNA, 33 bp, Homo sapien
tgatctcgaaacgtaatagctactgctcagcaa

SEQ ID NO: 458123 - DNA, 33 bp, Homo sapien
acttgttgatcaaaagaattaaaggccacttaa

SEQ ID NO: 458124 - DNA, 33 bp, Homo sapien
acttgttgatcaaaaggattaaaggccacttaa

SEQ ID NO: 458125 - DNA, 33 bp, Homo sapien
gagagaaaggcactcaagtgattaaagtaacat

SEQ ID NO: 458126 - DNA, 33 bp, Homo sapien
gagagaaaggcactcaggtgattaaagtaacat

SEQ ID NO: 458127 - DNA, 33 bp, Homo sapien
atgagaaatgaatggacgagccagatgccaatt

SEQ ID NO: 458128 - DNA, 33 bp, Homo sapien
atgagaaatgaatggatgagccagatgccaatt

SEQ ID NO: 458129 - DNA, 33 bp, Homo sapien
aataatgtttattgatcaaaggtgagaaatgat

SEQ ID NO: 458130 - DNA, 33 bp, Homo sapien
aataatgtttattgattaaaggtgagaaatgat

SEQ ID NO: 458131 - DNA, 33 bp, Homo sapien
aaagatgagatggttaaagtgagttgaaaacaa

SEQ ID NO: 458132 - DNA, 33 bp, Homo sapien
aaagatgagatggttagagtgagttgaaaacaa

SEQ ID NO: 458133 - DNA, 33 bp, Homo sapien
aagcaagcagaacctgaaggagattcaaccctt

SEQ ID NO: 458134 - DNA, 33 bp, Homo sapien
aagcaagcagaacctggaggagattcaaccctt

SEQ ID NO: 458135 - DNA, 33 bp, Homo sapien
ccacattttttcctccagcagttatgatctcat

SEQ ID NO: 458136 - DNA, 33 bp, Homo sapien
ccacattttttcctccggcagttatgatctcat

SEQ ID NO: 458137 - DNA, 33 bp, Homo sapien
agatcaatgattctaccgatctgtctgtacatt

SEQ ID NO: 458138 - DNA, 33 bp, Homo sapien
agatcaatgattctactgatctgtctgtacatt

SEQ ID NO: 458139 - DNA, 33 bp, Homo sapien
gcaggggagagaagtcaaacacttgaaaaacag

SEQ ID NO: 458140 - DNA, 33 bp, Homo sapien
gcaggggagagaagtccaacacttgaaaaacag

SEQ ID NO: 458141 - DNA, 33 bp, Homo sapien
aattagatacagttgaacttttggggctgttga

SEQ ID NO: 458142 - DNA, 33 bp, Homo sapien
aattagatacagttgatcttttggggctgttga

SEQ ID NO: 458143 - DNA, 33 bp, Homo sapien
cttactgcaggttatacatcagtttaataagaa

SEQ ID NO: 458144 - DNA, 33 bp, Homo sapien
cttactgcaggttatatatcagtttaataagaa

SEQ ID NO: 458145 - DNA, 33 bp, Homo sapien
atgcatcttgttacctaaaaaaagatcagaaag

SEQ ID NO: 458146 - DNA, 33 bp, Homo sapien
atgcatcttgttacctgaaaaaagatcagaaag

SEQ ID NO: 458147 - DNA, 33 bp, Homo sapien
tactcttctaagtttaataaaaggagcctttat

SEQ ID NO: 458148 - DNA, 33 bp, Homo sapien
tactcttctaagtttagtaaaaggagcctttat

SEQ ID NO: 458149 - DNA, 33 bp, Homo sapien
tggaggagatggggtacgcacgtccacagaaga

SEQ ID NO: 458150 - DNA, 33 bp, Homo sapien
tggaggagatggggtatgcacgtccacagaaga

SEQ ID NO: 458151 - DNA, 33 bp, Homo sapien
ttgcactttgtttgaaaggaattagacagtatg

SEQ ID NO: 458152 - DNA, 33 bp, Homo sapien
ttgcactttgtttgaatggaattagacagtatg

SEQ ID NO: 458153 - DNA, 33 bp, Homo sapien
acagtcagtgtctccacgtggctagaaaagtat

SEQ ID NO: 458154 - DNA, 33 bp, Homo sapien
acagtcagtgtctccatgtggctagaaaagtat

SEQ ID NO: 458155 - DNA, 33 bp, Homo sapien
tagctttcctgagctcaaggggatgcgtgattg

SEQ ID NO: 458156 - DNA, 33 bp, Homo sapien
tagctttcctgagctcgaggggatgcgtgattg

SEQ ID NO: 458157 - DNA, 33 bp, Homo sapien
tgtatcagaaagcgccaatgcccaggcttatgt

SEQ ID NO: 458158 - DNA, 33 bp, Homo sapien
tgtatcagaaagcgccgatgcccaggcttatgt

SEQ ID NO: 458159 - DNA, 33 bp, Homo sapien
ggatccggtgacttctcaatcattagagcataa

SEQ ID NO: 458160 - DNA, 33 bp, Homo sapien
ggatccggtgacttcttaatcattagagcataa

SEQ ID NO: 458161 - DNA, 33 bp, Homo sapien
gtagagtgctgacacacgggtggactgtggaac

SEQ ID NO: 458162 - DNA, 33 bp, Homo sapien
gtagagtgctgacacatgggtggactgtggaac

SEQ ID NO: 458163 - DNA, 33 bp, Homo sapien
atcaactacaaaagccacccttcttctttctct

SEQ ID NO: 458164 - DNA, 33 bp, Homo sapien
atcaactacaaaagccgcccttcttctttctct

SEQ ID NO: 458165 - DNA, 33 bp, Homo sapien
ctcaaaacagaagaacactatcagcagggaaca

SEQ ID NO: 458166 - DNA, 33 bp, Homo sapien
ctcaaaacagaagaacgctatcagcagggaaca

SEQ ID NO: 458167 - DNA, 33 bp, Homo sapien
ccaacattttccagaaccatctggcagtgtccg

SEQ ID NO: 458168 - DNA, 33 bp, Homo sapien
ccaacattttccagaatcatctggcagtgtccg

SEQ ID NO: 458169 - DNA, 33 bp, Homo sapien
gtcctgctctttaaaccgtggtgcgaagtccac

SEQ ID NO: 458170 - DNA, 33 bp, Homo sapien
gtcctgctctttaaactgtggtgcgaagtccac

SEQ ID NO: 458171 - DNA, 33 bp, Homo sapien
aaaatctagcaaccccagataagtttggtctgg

SEQ ID NO: 458172 - DNA, 33 bp, Homo sapien
aaaatctagcaaccccggataagtttggtctgg

SEQ ID NO: 458173 - DNA, 33 bp, Homo sapien
aagagttgtcctggaaaaaatacagttgtagat

SEQ ID NO: 458174 - DNA, 33 bp, Homo sapien
aagagttgtcctggaagaaatacagttgtagat

SEQ ID NO: 458175 - DNA, 33 bp, Homo sapien
tgagatgaaagcccgccatttactttccttctt

SEQ ID NO: 458176 - DNA, 33 bp, Homo sapien
tgagatgaaagcccgctatttactttccttctt

SEQ ID NO: 458177 - DNA, 33 bp, Homo sapien
ggatacgatctaaaaacaggggactaagaacat

SEQ ID NO: 458178 - DNA, 33 bp, Homo sapien
ggatacgatctaaaaagaggggactaagaacat

SEQ ID NO: 458179 - DNA, 33 bp, Homo sapien
ttacttttgttagggaaccaatggatacgatct

SEQ ID NO: 458180 - DNA, 33 bp, Homo sapien
ttacttttgttagggacccaatggatacgatct

SEQ ID NO: 458181 - DNA, 33 bp, Homo sapien
tactccaaagtgaaccactaggtagctggctag

SEQ ID NO: 458182 - DNA, 33 bp, Homo sapien
tactccaaagtgaaccgctaggtagctggctag

SEQ ID NO: 458183 - DNA, 33 bp, Homo sapien
caggaatagtaaaaccagctcacccggaggaga

SEQ ID NO: 458184 - DNA, 33 bp, Homo sapien
caggaatagtaaaaccggctcacccggaggaga

SEQ ID NO: 458185 - DNA, 33 bp, Homo sapien
atgatttaaactaatacccaggttggacgtgac

SEQ ID NO: 458186 - DNA, 33 bp, Homo sapien
atgatttaaactaatatccaggttggacgtgac

SEQ ID NO: 458187 - DNA, 33 bp, Homo sapien
ggcccctcagagtcaaagcggaaatgtagggtg

SEQ ID NO: 458188 - DNA, 33 bp, Homo sapien
ggcccctcagagtcaaggcggaaatgtagggtg

SEQ ID NO: 458189 - DNA, 33 bp, Homo sapien
ctgaaccctggcactccctgtggtagcattaag

SEQ ID NO: 458190 - DNA, 33 bp, Homo sapien
ctgaaccctggcactctctgtggtagcattaag

SEQ ID NO: 458191 - DNA, 33 bp, Homo sapien
ttggcctggcagaaaacataacccaggaacgtg

SEQ ID NO: 458192 - DNA, 33 bp, Homo sapien
ttggcctggcagaaaatataacccaggaacgtg

SEQ ID NO: 458193 - DNA, 33 bp, Homo sapien
cctagaggacctgggaccaagctgctagaccac

SEQ ID NO: 458194 - DNA, 33 bp, Homo sapien
cctagaggacctgggatcaagctgctagaccac

SEQ ID NO: 458195 - DNA, 33 bp, Homo sapien
gaatgaaatctaacacgatttaaagcaatgcaa

SEQ ID NO: 458196 - DNA, 33 bp, Homo sapien
gaatgaaatctaacactatttaaagcaatgcaa

SEQ ID NO: 458197 - DNA, 33 bp, Homo sapien
agaagagaataaagataacacattttagtctaa

SEQ ID NO: 458198 - DNA, 33 bp, Homo sapien
agaagagaataaagatcacacattttagtctaa

SEQ ID NO: 458199 - DNA, 33 bp, Homo sapien
cctattcacttttgtaataagggggaaataatg

SEQ ID NO: 458200 - DNA, 33 bp, Homo sapien
cctattcacttttgtagtaagggggaaataatg

SEQ ID NO: 458201 - DNA, 33 bp, Homo sapien
gaaatgcagtcattaaatatgatgtgacacaag

SEQ ID NO: 458202 - DNA, 33 bp, Homo sapien
gaaatgcagtcattaagtatgatgtgacacaag

SEQ ID NO: 458203 - DNA, 33 bp, Homo sapien
attgcccagaaacagccattcactttgaccaat

SEQ ID NO: 458204 - DNA, 33 bp, Homo sapien
attgcccagaaacagcgattcactttgaccaat

SEQ ID NO: 458205 - DNA, 33 bp, Homo sapien
agtcaggctgtaacaacggtgtggccccaacag

SEQ ID NO: 458206 - DNA, 33 bp, Homo sapien
agtcaggctgtaacaatggtgtggccccaacag

SEQ ID NO: 458207 - DNA, 33 bp, Homo sapien
attttaaggaaacgcacacaagttggatttgtg

SEQ ID NO: 458208 - DNA, 33 bp, Homo sapien
attttaaggaaacgcagacaagttggatttgtg

SEQ ID NO: 458209 - DNA, 33 bp, Homo sapien
accacaaaatcagggaaagccaatggtaagaat

SEQ ID NO: 458210 - DNA, 33 bp, Homo sapien
accacaaaatcagggagagccaatggtaagaat

SEQ ID NO: 458211 - DNA, 33 bp, Homo sapien
ggcttggcctcctgaacttagaacgagctccgc

SEQ ID NO: 458212 - DNA, 33 bp, Homo sapien
ggcttggcctcctgaagttagaacgagctccgc

SEQ ID NO: 458213 - DNA, 33 bp, Homo sapien
ataaaaatataggaccacttcaaattttataaa

SEQ ID NO: 458214 - DNA, 33 bp, Homo sapien
ataaaaatataggaccgcttcaaattttataaa

SEQ ID NO: 458215 - DNA, 33 bp, Homo sapien
aggcaataaagactgtaaaacattgggacaata

SEQ ID NO: 458216 - DNA, 33 bp, Homo sapien
aggcaataaagactgttaaacattgggacaata

SEQ ID NO: 458217 - DNA, 33 bp, Homo sapien
tggtgggcattaaaagcccctgcatacttctga

SEQ ID NO: 458218 - DNA, 33 bp, Homo sapien
tggtgggcattaaaagtccctgcatacttctga

SEQ ID NO: 458219 - DNA, 33 bp, Homo sapien
tcatagtgtctgtacaaatagaccagcagcatt

SEQ ID NO: 458220 - DNA, 33 bp, Homo sapien
tcatagtgtctgtacatatagaccagcagcatt

SEQ ID NO: 458221 - DNA, 33 bp, Homo sapien
aaccttgttgacgacaaaacaacccttcttatt

SEQ ID NO: 458222 - DNA, 33 bp, Homo sapien
aaccttgttgacgacagaacaacccttcttatt

SEQ ID NO: 458223 - DNA, 33 bp, Homo sapien
ctgcccctggcatacacaaagagatctggaaat

SEQ ID NO: 458224 - DNA, 33 bp, Homo sapien
ctgcccctggcatacataaagagatctggaaat

SEQ ID NO: 458225 - DNA, 33 bp, Homo sapien
gaaaaacaggatttgacaacagatagatagata

SEQ ID NO: 458226 - DNA, 33 bp, Homo sapien
gaaaaacaggatttgagaacagatagatagata

SEQ ID NO: 458227 - DNA, 33 bp, Homo sapien; identical to SEQ ID NO: 458225

SEQ ID NO: 458228 - DNA, 33 bp, Homo sapien; identical to SEQ ID NO: 458226

SEQ ID NO: 458229 - DNA, 33 bp, Homo sapien
agagatttctctaccacgtctccagcttccttt

SEQ ID NO: 458230 - DNA, 33 bp, Homo sapien
agagatttctctaccatgtctccagcttccttt

SEQ ID NO: 458231 - DNA, 33 bp, Homo sapien; identical to SEQ ID NO: 458229

SEQ ID NO: 458232 - DNA, 33 bp, Homo sapien; identical to SEQ ID NO: 458230

SEQ ID NO: 458233 - DNA, 33 bp, Homo sapien
gaaacagaaaaatccaaattaaagtaacacacc

SEQ ID NO: 458234 - DNA, 33 bp, Homo sapien
gaaacagaaaaatccagattaaagtaacacacc

SEQ ID NO: 458235 - DNA, 33 bp, Homo sapien; identical to SEQ ID NO: 458233

SEQ ID NO: 458236 - DNA, 33 bp, Homo sapien; identical to SEQ ID NO: 458234

SEQ ID NO: 458237 - DNA, 33 bp, Homo sapien
aaaaaatcagatagcactgatggttctgtaact

SEQ ID NO: 458238 - DNA, 33 bp, Homo sapien
aaaaaatcagatagcattgatggttctgtaact

SEQ ID NO: 458239 - DNA, 33 bp, Homo sapien
accacgcccatcaaccactatctgattttagaa

SEQ ID NO: 458240 - DNA, 33 bp, Homo sapien
accacgcccatcaacccctatctgattttagaa

SEQ ID NO: 458241 - DNA, 33 bp, Homo sapien
caggcaggcattgtgacgttttttttgagacag

SEQ ID NO: 458242 - DNA, 33 bp, Homo sapien
caggcaggcattgtgatgttttttttgagacag

SEQ ID NO: 458243 - DNA, 33 bp, Homo sapien
agtaacttgttcaagacgacaaattttttttct

SEQ ID NO: 458244 - DNA, 33 bp, Homo sapien
agtaacttgttcaagatgacaaattttttttct

SEQ ID NO: 458245 - DNA, 33 bp, Homo sapien
ggcaggtccaagggcaacggctctgccagtccc

SEQ ID NO: 458246 - DNA, 33 bp, Homo sapien
ggcaggtccaagggcagcggctctgccagtccc

SEQ ID NO: 458247 - DNA, 33 bp, Homo sapien
gtggataaagagagagcaacagaaggaatccag

SEQ ID NO: 458248 - DNA, 33 bp, Homo sapien
gtggataaagagagagtaacagaaggaatccag

SEQ ID NO: 458249 - DNA, 33 bp, Homo sapien
gtgttttaatcagtcacagtggataaagagaga

SEQ ID NO: 458250 - DNA, 33 bp, Homo sapien
gtgttttaatcagtcagagtggataaagagaga

SEQ ID NO: 458251 - DNA, 33 bp, Homo sapien
tcccatgctgggcctcacttctttgttttgttt

SEQ ID NO: 458252 - DNA, 33 bp, Homo sapien
tcccatgctgggcctcgcttctttgttttgttt

SEQ ID NO: 458253 - DNA, 33 bp, Homo sapien
caaggcagatggccagacacccctcctgggctg

SEQ ID NO: 458254 - DNA, 33 bp, Homo sapien
caaggcagatggccaggcacccctcctgggctg

SEQ ID NO: 458255 - DNA, 33 bp, Homo sapien
actttaatattaaagcactgcctagccaaaata

SEQ ID NO: 458256 - DNA, 33 bp, Homo sapien
actttaatattaaagcgctgcctagccaaaata

SEQ ID NO: 458257 - DNA, 33 bp, Homo sapien
aactaaatcaacaaaacttcacaatagtagaag

SEQ ID NO: 458258 - DNA, 33 bp, Homo sapien
aactaaatcaacaaaatttcacaatagtagaag

SEQ ID NO: 458259 - DNA, 33 bp, Homo sapien
aaaaatcaagcatttgaattgaatgtcaacatt

SEQ ID NO: 458260 - DNA, 33 bp, Homo sapien
aaaaatcaagcatttgcattgaatgtcaacatt

SEQ ID NO: 458261 - DNA, 33 bp, Homo sapien
atacttgctcttttgtaaaatggaaatgggaga

SEQ ID NO: 458262 - DNA, 33 bp, Homo sapien
atacttgctcttttgtgaaatggaaatgggaga

SEQ ID NO: 458263 - DNA, 33 bp, Homo sapien
ttgaggatccggtggacggttctgtggttcgcg

SEQ ID NO: 458264 - DNA, 33 bp, Homo sapien
ttgaggatccggtggatggttctgtggttcgcg

SEQ ID NO: 458265 - DNA, 33 bp, Homo sapien
tcttcccagtgtaagacgagggaaaggtcacct

SEQ ID NO: 458266 - DNA, 33 bp, Homo sapien
tcttcccagtgtaagatgagggaaaggtcacct

SEQ ID NO: 458267 - DNA, 33 bp, Homo sapien
caccctgaggggtccaagaagggcccgaaaagc

SEQ ID NO: 458268 - DNA, 33 bp, Homo sapien
caccctgaggggtccaggaagggcccgaaaagc

SEQ ID NO: 458269 - DNA, 33 bp, Homo sapien
aggggagtttcgaaaccgtggagcctgtgtgac

SEQ ID NO: 458270 - DNA, 33 bp, Homo sapien
aggggagtttcgaaactgtggagcctgtgtgac

SEQ ID NO: 458271 - DNA, 33 bp, Homo sapien
tactccctggtttcacaatctcactgtcacctt

SEQ ID NO: 458272 - DNA, 33 bp, Homo sapien
tactccctggtttcacgatctcactgtcacctt

SEQ ID NO: 458273 - DNA, 33 bp, Homo sapien
ttgccattagcaacaacaagaaatggatcctgt

SEQ ID NO: 458274 - DNA, 33 bp, Homo sapien
ttgccattagcaacaataagaaatggatcctgt

SEQ ID NO: 458275 - DNA, 33 bp, Homo sapien
tatgcatttggcaaaaatatacagtaacacaaa

SEQ ID NO: 458276 - DNA, 33 bp, Homo sapien
tatgcatttggcaaaactatacagtaacacaaa

SEQ ID NO: 458277 - DNA, 33 bp, Homo sapien
tccatgtttctccaatgacatttgaaaagctca

SEQ ID NO: 458278 - DNA, 33 bp, Homo sapien
tccatgtttctccaattacatttgaaaagctca

SEQ ID NO: 458279 - DNA, 33 bp, Homo sapien
cttcaacactcttccacgctagctgcaatcgcc

SEQ ID NO: 458280 - DNA, 33 bp, Homo sapien
cttcaacactcttccatgctagctgcaatcgcc

SEQ ID NO: 458281 - DNA, 33 bp, Homo sapien
cacccctcagtcatacccctataaattaaatcc

SEQ ID NO: 458282 - DNA, 33 bp, Homo sapien
cacccctcagtcatactcctataaattaaatcc

SEQ ID NO: 458283 - DNA, 33 bp, Homo sapien
atcctgagtacaagtgcaaagccgccaaaggta

SEQ ID NO: 458284 - DNA, 33 bp, Homo sapien
atcctgagtacaagtggaaagccgccaaaggta

SEQ ID NO: 458285 - DNA, 33 bp, Homo sapien
ctttccgtgttcaaaacggaattcccgactttt

SEQ ID NO: 458286 - DNA, 33 bp, Homo sapien
ctttccgtgttcaaaatggaattcccgactttt

SEQ ID NO: 458287 - DNA, 33 bp, Homo sapien
tattcatcagggaagaccgagaggagcattctg

SEQ ID NO: 458288 - DNA, 33 bp, Homo sapien
tattcatcagggaagatcgagaggagcattctg

SEQ ID NO: 458289 - DNA, 33 bp, Homo sapien
tggaatcatcccaaaacgtaatcttgtgtccag

SEQ ID NO: 458290 - DNA, 33 bp, Homo sapien
tggaatcatcccaaaatgtaatcttgtgtccag

SEQ ID NO: 458291 - DNA, 33 bp, Homo sapien
gtccccgcttatgcaacggaggtgtcacagaag

SEQ ID NO: 458292 - DNA, 33 bp, Homo sapien
gtccccgcttatgcaatggaggtgtcacagaag

SEQ ID NO: 458293 - DNA, 33 bp, Homo sapien
ttctgtgtattggagtcaagaaagcatgacctg

SEQ ID NO: 458294 - DNA, 33 bp, Homo sapien
ttctgtgtattggagttaagaaagcatgacctg

SEQ ID NO: 458295 - DNA, 33 bp, Homo sapien
gccgcccagcagccgacggtaaacctggagtcc

SEQ ID NO: 458296 - DNA, 33 bp, Homo sapien
gccgcccagcagccgatggtaaacctggagtcc

SEQ ID NO: 458297 - DNA, 33 bp, Homo sapien
tgggcttctttagacccgactgaccccttgttg

SEQ ID NO: 458298 - DNA, 33 bp, Homo sapien
tgggcttctttagacctgactgaccccttgttg

SEQ ID NO: 458299 - DNA, 33 bp, Homo sapien
cagtttttcttctcacacagtcatgtatcagtt

SEQ ID NO: 458300 - DNA, 33 bp, Homo sapien
cagtttttcttctcacgcagtcatgtatcagtt

SEQ ID NO: 458301 - DNA, 33 bp, Homo sapien
catgaaaacaagatcaagagtgagaaatcaact

SEQ ID NO: 458302 - DNA, 33 bp, Homo sapien
catgaaaacaagatcaggagtgagaaatcaact

SEQ ID NO: 458303 - DNA, 33 bp, Homo sapien
agaagggagccagagacatgtgctgtgtgtgtc

SEQ ID NO: 458304 - DNA, 33 bp, Homo sapien
agaagggagccagagatatgtgctgtgtgtgtc

SEQ ID NO: 458305 - DNA, 33 bp, Homo sapien
ctcgatttttcccaaacgaagctagtatcaggt

SEQ ID NO: 458306 - DNA, 33 bp, Homo sapien
ctcgatttttcccaaaggaagctagtatcaggt

SEQ ID NO: 458307 - DNA, 33 bp, Homo sapien
aggacttcacatcaaactgttaatggtgggttc

SEQ ID NO: 458308 - DNA, 33 bp, Homo sapien
aggacttcacatcaaagtgttaatggtgggttc

SEQ ID NO: 458309 - DNA, 33 bp, Homo sapien
tatagaaattgaatcccataaagtcttatgtat

SEQ ID NO: 458310 - DNA, 33 bp, Homo sapien
tatagaaattgaatcctataaagtcttatgtat

SEQ ID NO: 458311 - DNA, 33 bp, Homo sapien
gaacagtgtctcttcaaagtttttttccccaag

SEQ ID NO: 458312 - DNA, 33 bp, Homo sapien
gaacagtgtctcttcatagtttttttccccaag

SEQ ID NO: 458313 - DNA, 33 bp, Homo sapien
ggttgtttctaggaacactaccatcaaagatat

SEQ ID NO: 458314 - DNA, 33 bp, Homo sapien
ggttgtttctaggaacgctaccatcaaagatat

SEQ ID NO: 458315 - DNA, 33 bp, Homo sapien
aggaggcacaaaataactgttttctagtgtgtc

SEQ ID NO: 458316 - DNA, 33 bp, Homo sapien
aggaggcacaaaataagtgttttctagtgtgtc

SEQ ID NO: 458317 - DNA, 33 bp, Homo sapien
tattcaatgaatacaacagcctacttcccaagt

SEQ ID NO: 458318 - DNA, 33 bp, Homo sapien
tattcaatgaatacaatagcctacttcccaagt

SEQ ID NO: 458319 - DNA, 33 bp, Homo sapien
gagctggtgcgtcctccgagctcacacgagctc

SEQ ID NO: 458320 - DNA, 33 bp, Homo sapien
gagctggtgcgtcctctgagctcacacgagctc

SEQ ID NO: 458321 - DNA, 33 bp, Homo sapien
tttccaccactttcagcataaaaccactcaaag

SEQ ID NO: 458322 - DNA, 33 bp, Homo sapien
tttccaccactttcaggataaaaccactcaaag

SEQ ID NO: 458323 - DNA, 33 bp, Homo sapien
ggtgatttggaactgaaattggcttttatttta

SEQ ID NO: 458324 - DNA, 33 bp, Homo sapien
ggtgatttggaactgagattggcttttatttta

SEQ ID NO: 458325 - DNA, 33 bp, Homo sapien
aagagtttaatacaaactgatttcttcctatgg

SEQ ID NO: 458326 - DNA, 33 bp, Homo sapien
aagagtttaatacaaattgatttcttcctatgg

SEQ ID NO: 458327 - DNA, 33 bp, Homo sapien
gccagccctgtacgtgaagggtgtctgagagac

SEQ ID NO: 458328 - DNA, 33 bp, Homo sapien
gccagccctgtacgtggagggtgtctgagagac

SEQ ID NO: 458329 - DNA, 33 bp, Homo sapien
ggacagaaaatccaaaagtcaataagcttgtga

SEQ ID NO: 458330 - DNA, 33 bp, Homo sapien
ggacagaaaatccaaacgtcaataagcttgtga

SEQ ID NO: 458331 - DNA, 33 bp, Homo sapien
ctgatgtcatgacccaaagtttgaacagcactt

SEQ ID NO: 458332 - DNA, 33 bp, Homo sapien
ctgatgtcatgacccacagtttgaacagcactt

SEQ ID NO: 458333 - DNA, 33 bp, Homo sapien
cacaaacaagagacaaaccgaaaacgcgtgggc

SEQ ID NO: 458334 - DNA, 33 bp, Homo sapien
cacaaacaagagacaagccgaaaacgcgtgggc

SEQ ID NO: 458335 - DNA, 33 bp, Homo sapien
aaagttagcactagaaaaatcaaatcaccaatt

SEQ ID NO: 458336 - DNA, 33 bp, Homo sapien
aaagttagcactagaacaatcaaatcaccaatt

SEQ ID NO: 458337 - DNA, 33 bp, Homo sapien
acgcccgcctaaaaaaagctgaaatgcttcaca

SEQ ID NO: 458338 - DNA, 33 bp, Homo sapien
acgcccgcctaaaaaaggctgaaatgcttcaca

SEQ ID NO: 458339 - DNA, 33 bp, Homo sapien
cttgactattcctttaaaaccaaacagaatctg

SEQ ID NO: 458340 - DNA, 33 bp, Homo sapien
cttgactattcctttacaaccaaacagaatctg

SEQ ID NO: 458341 - DNA, 33 bp, Homo sapien
aaagcctattatgaatcagccaacactggggag

SEQ ID NO: 458342 - DNA, 33 bp, Homo sapien
aaagcctattatgaattagccaacactggggag

SEQ ID NO: 458343 - DNA, 33 bp, Homo sapien
aaagcactcacacgagcaaagggaaaacatggt

SEQ ID NO: 458344 - DNA, 33 bp, Homo sapien
aaagcactcacacgaggaaagggaaaacatggt

SEQ ID NO: 458345 - DNA, 33 bp, Homo sapien
aatgtgtaacctggtcaatgaaggactagagat

SEQ ID NO: 458346 - DNA, 33 bp, Homo sapien
aatgtgtaacctggtcgatgaaggactagagat

SEQ ID NO: 458347 - DNA, 33 bp, Homo sapien
cattggctgtgtaagcaagtcccagctcacatt

SEQ ID NO: 458348 - DNA, 33 bp, Homo sapien
cattggctgtgtaagcgagtcccagctcacatt

SEQ ID NO: 458349 - DNA, 33 bp, Homo sapien
gagtttaggatcaatacggactagatattcatg

SEQ ID NO: 458350 - DNA, 33 bp, Homo sapien
gagtttaggatcaatatggactagatattcatg

SEQ ID NO: 458351 - DNA, 33 bp, Homo sapien
agctttggtgcaggtaagtcatctttagtaaag

SEQ ID NO: 458352 - DNA, 33 bp, Homo sapien
agctttggtgcaggtaggtcatctttagtaaag

SEQ ID NO: 458353 - DNA, 33 bp, Homo sapien
ggcccagagtgccctacggataattggttaagc

SEQ ID NO: 458354 - DNA, 33 bp, Homo sapien
ggcccagagtgccctatggataattggttaagc

SEQ ID NO: 458355 - DNA, 33 bp, Homo sapien
tctcctgctacagaccaaaaatcacaaaaagta

SEQ ID NO: 458356 - DNA, 33 bp, Homo sapien
tctcctgctacagacctaaaatcacaaaaagta

SEQ ID NO: 458357 - DNA, 33 bp, Homo sapien
aatttaacacagtctcacttaaaacccaagaag

SEQ ID NO: 458358 - DNA, 33 bp, Homo sapien
aatttaacacagtctcgcttaaaacccaagaag

SEQ ID NO: 458359 - DNA, 33 bp, Homo sapien
cacaatcagacacacacggaagaatccaaaaga

SEQ ID NO: 458360 - DNA, 33 bp, Homo sapien
cacaatcagacacacatggaagaatccaaaaga

SEQ ID NO: 458361 - DNA, 33 bp, Homo sapien
gcccgtcaattacagcagctgaatcagaaagcc

SEQ ID NO: 458362 - DNA, 33 bp, Homo sapien
gcccgtcaattacagcggctgaatcagaaagcc

SEQ ID NO: 458363 - DNA, 33 bp, Homo sapien
gccctgttacaaaagaagagatggctcagcgtg

SEQ ID NO: 458364 - DNA, 33 bp, Homo sapien
gccctgttacaaaagaggagatggctcagcgtg

SEQ ID NO: 458365 - DNA, 33 bp, Homo sapien
ctatggaatgaatgaaaaaacggatggtggtcc

SEQ ID NO: 458366 - DNA, 33 bp, Homo sapien
ctatggaatgaatgaataaacggatggtggtcc

SEQ ID NO: 458367 - DNA, 33 bp, Homo sapien
atgtggtcatgtttacaaactctcaccgacttc

SEQ ID NO: 458368 - DNA, 33 bp, Homo sapien
atgtggtcatgtttacgaactctcaccgacttc

SEQ ID NO: 458369 - DNA, 33 bp, Homo sapien
aaactcaagaatctaccctgaatgcatctctct

SEQ ID NO: 458370 - DNA, 33 bp, Homo sapien
aaactcaagaatctactctgaatgcatctctct

SEQ ID NO: 458371 - DNA, 33 bp, Homo sapien
cagggccataggatacagagtggggcatgagtg

SEQ ID NO: 458372 - DNA, 33 bp, Homo sapien
cagggccataggatacggagtggggcatgagtg

SEQ ID NO: 458373 - DNA, 33 bp, Homo sapien
cccagaaagtccaagagaattcattgcaaaaca

SEQ ID NO: 458374 - DNA, 33 bp, Homo sapien
cccagaaagtccaagataattcattgcaaaaca

SEQ ID NO: 458375 - DNA, 33 bp, Homo sapien
agaatctcaaatgatgccacaaggaccctgtcc

SEQ ID NO: 458376 - DNA, 33 bp, Homo sapien
agaatctcaaatgatgtcacaaggaccctgtcc

SEQ ID NO: 458377 - DNA, 33 bp, Homo sapien
tatacacagataatgacgaggcataacagacca

SEQ ID NO: 458378 - DNA, 33 bp, Homo sapien
tatacacagataatgatgaggcataacagacca

SEQ ID NO: 458379 - DNA, 33 bp, Homo sapien
tctcacatgaaccaaaatacttgcctcttctgc

SEQ ID NO: 458380 - DNA, 33 bp, Homo sapien
tctcacatgaaccaaagtacttgcctcttctgc

SEQ ID NO: 458381 - DNA, 33 bp, Homo sapien
tcggtaattaaacacgaaacagctgtcactctg

SEQ ID NO: 458382 - DNA, 33 bp, Homo sapien
tcggtaattaaacacggaacagctgtcactctg

SEQ ID NO: 458383 - DNA, 33 bp, Homo sapien
ctcagttgtctctgcgaataggtcttgcctgtt

SEQ ID NO: 458384 - DNA, 33 bp, Homo sapien
ctcagttgtctctgcgtataggtcttgcctgtt

SEQ ID NO: 458385 - DNA, 33 bp, Homo sapien
tgttcattcagcaaaagacctcatcccggaaca

SEQ ID NO: 458386 - DNA, 33 bp, Homo sapien
tgttcattcagcaaaatacctcatcccggaaca

SEQ ID NO: 458387 - DNA, 33 bp, Homo sapien
atctatgactaaggaacgtagtgagtaattttt

SEQ ID NO: 458388 - DNA, 33 bp, Homo sapien
atctatgactaaggaatgtagtgagtaattttt

SEQ ID NO: 458389 - DNA, 33 bp, Homo sapien
tgcaaaatgtagctgacgctttcactgagtttc

SEQ ID NO: 458390 - DNA, 33 bp, Homo sapien
tgcaaaatgtagctgatgctttcactgagtttc

SEQ ID NO: 458391 - DNA, 33 bp, Homo sapien
ggctgaggaacccactcagcatcaaagccacct

SEQ ID NO: 458392 - DNA, 33 bp, Homo sapien
ggctgaggaacccactgagcatcaaagccacct

SEQ ID NO: 458393 - DNA, 33 bp, Homo sapien
ccttaaactaaacgcgaaaataataggtggctt

SEQ ID NO: 458394 - DNA, 33 bp, Homo sapien
ccttaaactaaacgcgtaaataataggtggctt

SEQ ID NO: 458395 - DNA, 33 bp, Homo sapien
ctgcactcttctgtgacgtcatccaactccctt

SEQ ID NO: 458396 - DNA, 33 bp, Homo sapien
ctgcactcttctgtgatgtcatccaactccctt

SEQ ID NO: 458397 - DNA, 33 bp, Homo sapien
ttttaatacatttccacgtttgcgtactggcta

SEQ ID NO: 458398 - DNA, 33 bp, Homo sapien
ttttaatacatttccatgtttgcgtactggcta

SEQ ID NO: 458399 - DNA, 33 bp, Homo sapien
ttttctgtatgtcttacatgatttttgttgtat

SEQ ID NO: 458400 - DNA, 33 bp, Homo sapien
ttttctgtatgtcttatatgatttttgttgtat

SEQ ID NO: 458401 - DNA, 33 bp, Homo sapien
ttgttgaggagtcagacgccattctaattccca

SEQ ID NO: 458402 - DNA, 33 bp, Homo sapien
ttgttgaggagtcagatgccattctaattccca

SEQ ID NO: 458403 - DNA, 33 bp, Homo sapien
ttaccattctgctgagacacatggcggcctggc

SEQ ID NO: 458404 - DNA, 33 bp, Homo sapien
ttaccattctgctgaggcacatggcggcctggc

SEQ ID NO: 458405 - DNA, 33 bp, Homo sapien
tgctactaagagactaacacgtgcgttctttgg

SEQ ID NO: 458406 - DNA, 33 bp, Homo sapien
tgctactaagagactaccacgtgcgttctttgg

SEQ ID NO: 458407 - DNA, 33 bp, Homo sapien
accccttctagaaaacccggctgctacaggccc

SEQ ID NO: 458408 - DNA, 33 bp, Homo sapien
accccttctagaaaactcggctgctacaggccc

SEQ ID NO: 458409 - DNA, 33 bp, Homo sapien
ctatctgaatttcggacgtagtgacacttggcg

SEQ ID NO: 458410 - DNA, 33 bp, Homo sapien
ctatctgaatttcggatgtagtgacacttggcg

SEQ ID NO: 458411 - DNA, 33 bp, Homo sapien
gagacagttttcagacactgcattccaatggac

SEQ ID NO: 458412 - DNA, 33 bp, Homo sapien
gagacagttttcagaccctgcattccaatggac

SEQ ID NO: 458413 - DNA, 33 bp, Homo sapien
tctattgatgtaaaaccgccttttgcacctgct

SEQ ID NO: 458414 - DNA, 33 bp, Homo sapien
tctattgatgtaaaactgccttttgcacctgct

SEQ ID NO: 458415 - DNA, 33 bp, Homo sapien
aagaatgcaggtggtaacttgtgtttacatgag

SEQ ID NO: 458416 - DNA, 33 bp, Homo sapien
aagaatgcaggtggtaccttgtgtttacatgag

SEQ ID NO: 458417 - DNA, 33 bp, Homo sapien
gtcagggcaaatgcgaactttgatgcctgattc

SEQ ID NO: 458418 - DNA, 33 bp, Homo sapien
gtcagggcaaatgcgacctttgatgcctgattc

SEQ ID NO: 458419 - DNA, 33 bp, Homo sapien
aggctgccccgatgctaagaggctcctcctggc

SEQ ID NO: 458420 - DNA, 33 bp, Homo sapien
aggctgccccgatgctgagaggctcctcctggc

SEQ ID NO: 458421 - DNA, 33 bp, Homo sapien
aatgtaatatattcctcagaaagctgacaaagc

SEQ ID NO: 458422 - DNA, 33 bp, Homo sapien
aatgtaatatattccttagaaagctgacaaagc

SEQ ID NO: 458423 - DNA, 33 bp, Homo sapien
aatttattcatacaaaacttgttagcatccaac

SEQ ID NO: 458424 - DNA, 33 bp, Homo sapien
aatttattcatacaaatcttgttagcatccaac

SEQ ID NO: 458425 - DNA, 33 bp, Homo sapien
taattccgactgtcatgagagtccatttcaatt

SEQ ID NO: 458426 - DNA, 33 bp, Homo sapien
taattccgactgtcattagagtccatttcaatt

SEQ ID NO: 458427 - DNA, 33 bp, Homo sapien
cgagtttacgtatataaagcgatagagacgtaa

SEQ ID NO: 458428 - DNA, 33 bp, Homo sapien
cgagtttacgtatatagagcgatagagacgtaa

SEQ ID NO: 458429 - DNA, 33 bp, Homo sapien
ggtcagctctacgtaaaccttggtgattaatgt

SEQ ID NO: 458430 - DNA, 33 bp, Homo sapien
ggtcagctctacgtaagccttggtgattaatgt

SEQ ID NO: 458431 - DNA, 33 bp, Homo sapien
cactcagtgggcatccaggaaagtgatcagggc

SEQ ID NO: 458432 - DNA, 33 bp, Homo sapien
cactcagtgggcatccgggaaagtgatcagggc

SEQ ID NO: 458433 - DNA, 33 bp, Homo sapien
gagcagctaagtttcccgagtttttggatatga

SEQ ID NO: 458434 - DNA, 33 bp, Homo sapien
gagcagctaagtttcctgagtttttggatatga

SEQ ID NO: 458435 - DNA, 33 bp, Homo sapien
ttcccacttgtaaaagacatatgcaaataatta

SEQ ID NO: 458436 - DNA, 33 bp, Homo sapien
ttcccacttgtaaaagccatatgcaaataatta

SEQ ID NO: 458437 - DNA, 33 bp, Homo sapien
ggaagctaattttccacgatcattagtgatgga

SEQ ID NO: 458438 - DNA, 33 bp, Homo sapien
ggaagctaattttccatgatcattagtgatgga

SEQ ID NO: 458439 - DNA, 33 bp, Homo sapien
ctccaggctgcgtagacaagggagcctcacttt

SEQ ID NO: 458440 - DNA, 33 bp, Homo sapien
ctccaggctgcgtagagaagggagcctcacttt

SEQ ID NO: 458441 - DNA, 33 bp, Homo sapien
atgagggcatgtgaaacccaggatggtagaaaa

SEQ ID NO: 458442 - DNA, 33 bp, Homo sapien
atgagggcatgtgaaatccaggatggtagaaaa

SEQ ID NO: 458443 - DNA, 33 bp, Homo sapien
gcttgaagacaaatacacttttaaagacaaatg

SEQ ID NO: 458444 - DNA, 33 bp, Homo sapien
gcttgaagacaaatacccttttaaagacaaatg

SEQ ID NO: 458445 - DNA, 33 bp, Homo sapien
tgtcttgatgttggagactaccctaggtcaaac

SEQ ID NO: 458446 - DNA, 33 bp, Homo sapien
tgtcttgatgttggaggctaccctaggtcaaac

SEQ ID NO: 458447 - DNA, 33 bp, Homo sapien
ggaaagcaactgtcgcaagcccctgagtaagct

SEQ ID NO: 458448 - DNA, 33 bp, Homo sapien
ggaaagcaactgtcgcgagcccctgagtaagct

SEQ ID NO: 458449 - DNA, 33 bp, Homo sapien
gcgggttcaataacacacatatgcatacatgcc

SEQ ID NO: 458450 - DNA, 33 bp, Homo sapien
gcgggttcaataacacgcatatgcatacatgcc

SEQ ID NO: 458451 - DNA, 33 bp, Homo sapien
tccggcagggatttacacagcaacccctctgcc

SEQ ID NO: 458452 - DNA, 33 bp, Homo sapien
tccggcagggatttacgcagcaacccctctgcc

SEQ ID NO: 458453 - DNA, 33 bp, Homo sapien
aaaagtaaagttctcaatacgaggcctggccca

SEQ ID NO: 458454 - DNA, 33 bp, Homo sapien
aaaagtaaagttctcagtacgaggcctggccca

SEQ ID NO: 458455 - DNA, 33 bp, Homo sapien
ggcttatggtgtctgaaatgcttggcagggtgt

SEQ ID NO: 458456 - DNA, 33 bp, Homo sapien
ggcttatggtgtctgagatgcttggcagggtgt

SEQ ID NO: 458457 - DNA, 33 bp, Homo sapien
tgcatgagatgcctcacgattacctcgggtctg

SEQ ID NO: 458458 - DNA, 33 bp, Homo sapien
tgcatgagatgcctcaggattacctcgggtctg

SEQ ID NO: 458459 - DNA, 33 bp, Homo sapien
tttttatcactatagcactaccctttctaaaca

SEQ ID NO: 458460 - DNA, 33 bp, Homo sapien
tttttatcactatagcgctaccctttctaaaca

SEQ ID NO: 458461 - DNA, 33 bp, Homo sapien
caatgccataacctcacactgttcagtagattt

SEQ ID NO: 458462 - DNA, 33 bp, Homo sapien
caatgccataacctcatactgttcagtagattt

SEQ ID NO: 458463 - DNA, 33 bp, Homo sapien
cacccacagaatcacactaggtcttgggatgac

SEQ ID NO: 458464 - DNA, 33 bp, Homo sapien
cacccacagaatcacattaggtcttgggatgac

SEQ ID NO: 458465 - DNA, 33 bp, Homo sapien
agaaaaagatgacatcagaggaaacagaaataa

SEQ ID NO: 458466 - DNA, 33 bp, Homo sapien
agaaaaagatgacatcggaggaaacagaaataa

SEQ ID NO: 458467 - DNA, 33 bp, Homo sapien
taactagggctcatcaagcatctgaggacagcc

SEQ ID NO: 458468 - DNA, 33 bp, Homo sapien
taactagggctcatcaggcatctgaggacagcc

SEQ ID NO: 458469 - DNA, 33 bp, Homo sapien
gcctgatgacaagaccacaggaatgctgggtgt

SEQ ID NO: 458470 - DNA, 33 bp, Homo sapien
gcctgatgacaagaccccaggaatgctgggtgt

SEQ ID NO: 458471 - DNA, 33 bp, Homo sapien
acagggaccacgctaaactcattctttggtctt

SEQ ID NO: 458472 - DNA, 33 bp, Homo sapien
acagggaccacgctaagctcattctttggtctt

SEQ ID NO: 458473 - DNA, 33 bp, Homo sapien
ccagcttctttaccacagcctgctttatcagca

SEQ ID NO: 458474 - DNA, 33 bp, Homo sapien
ccagcttctttaccacggcctgctttatcagca

SEQ ID NO: 458475 - DNA, 33 bp, Homo sapien
gatcacagatcaacgacggaagtttgtagagct

SEQ ID NO: 458476 - DNA, 33 bp, Homo sapien
gatcacagatcaacgatggaagtttgtagagct

SEQ ID NO: 458477 - DNA, 33 bp, Homo sapien
ccacagaacagtatgcacacttgctaaaaatct

SEQ ID NO: 458478 - DNA, 33 bp, Homo sapien
ccacagaacagtatgcgcacttgctaaaaatct

SEQ ID NO: 458479 - DNA, 33 bp, Homo sapien
gtttgctcctgtgaaccagtttgagtttctcca

SEQ ID NO: 458480 - DNA, 33 bp, Homo sapien
gtttgctcctgtgaactagtttgagtttctcca

SEQ ID NO: 458481 - DNA, 33 bp, Homo sapien
catcggtttgcagaaccgtgtcatggaaaccac

SEQ ID NO: 458482 - DNA, 33 bp, Homo sapien
catcggtttgcagaactgtgtcatggaaaccac

SEQ ID NO: 458483 - DNA, 33 bp, Homo sapien
ctgaacctcctgaaacagagagctgaaacagag

SEQ ID NO: 458484 - DNA, 33 bp, Homo sapien
ctgaacctcctgaaacggagagctgaaacagag

SEQ ID NO: 458485 - DNA, 33 bp, Homo sapien
gcccccacaagatgccaataagttcagaaacca

SEQ ID NO: 458486 - DNA, 33 bp, Homo sapien
gcccccacaagatgccgataagttcagaaacca

SEQ ID NO: 458487 - DNA, 33 bp, Homo sapien
aggaggacccggggaaagtaaggtgtgaaatct

SEQ ID NO: 458488 - DNA, 33 bp, Homo sapien
aggaggacccggggaatgtaaggtgtgaaatct

SEQ ID NO: 458489 - DNA, 33 bp, Homo sapien
acaggctggaataaaacgcagccttgcagtcag

SEQ ID NO: 458490 - DNA, 33 bp, Homo sapien
acaggctggaataaaatgcagccttgcagtcag

SEQ ID NO: 458491 - DNA, 33 bp, Homo sapien
aacagaatcactaaacaaaacaagtgcggtcag

SEQ ID NO: 458492 - DNA, 33 bp, Homo sapien
aacagaatcactaaacgaaacaagtgcggtcag

SEQ ID NO: 458493 - DNA, 33 bp, Homo sapien
ttttaccaatgaaacacgttcagcaaggtcaag

SEQ ID NO: 458494 - DNA, 33 bp, Homo sapien
ttttaccaatgaaacaggttcagcaaggtcaag

SEQ ID NO: 458495 - DNA, 33 bp, Homo sapien
ttgggcaatggaagtgaacgtggagtggacagc

SEQ ID NO: 458496 - DNA, 33 bp, Homo sapien
ttgggcaatggaagtggacgtggagtggacagc

SEQ ID NO: 458497 - DNA, 33 bp, Homo sapien
gtaggaggttttgcgacagcagagaaggaattg

SEQ ID NO: 458498 - DNA, 33 bp, Homo sapien
gtaggaggttttgcgatagcagagaaggaattg

SEQ ID NO: 458499 - DNA, 33 bp, Homo sapien
ccaattttaatccaaccagaatcaaatcctgca

SEQ ID NO: 458500 - DNA, 33 bp, Homo sapien
ccaattttaatccaacgagaatcaaatcctgca

SEQ ID NO: 458501 - DNA, 33 bp, Homo sapien
aatatttcagaacaaaccagattttcctggtat

SEQ ID NO: 458502 - DNA, 33 bp, Homo sapien
aatatttcagaacaaatcagattttcctggtat

SEQ ID NO: 458503 - DNA, 33 bp, Homo sapien
cgacaaaaccagagaaagcttattcctcctagt

SEQ ID NO: 458504 - DNA, 33 bp, Homo sapien
cgacaaaaccagagaaggcttattcctcctagt

SEQ ID NO: 458505 - DNA, 33 bp, Homo sapien
gaggtggccagttcacactgcagcaggtgggac

SEQ ID NO: 458506 - DNA, 33 bp, Homo sapien
gaggtggccagttcacgctgcagcaggtgggac

SEQ ID NO: 458507 - DNA, 33 bp, Homo sapien
cccagggaaggttgaaagtcagaaaagaagagc

SEQ ID NO: 458508 - DNA, 33 bp, Homo sapien
cccagggaaggttgaaggtcagaaaagaagagc

SEQ ID NO: 458509 - DNA, 33 bp, Homo sapien
atagatcatttagagacacttgacatttttact

SEQ ID NO: 458510 - DNA, 33 bp, Homo sapien
atagatcatttagagagacttgacatttttact

SEQ ID NO: 458511 - DNA, 33 bp, Homo sapien
ggctgctgccagggaaaccaacctcatcctccc

SEQ ID NO: 458512 - DNA, 33 bp, Homo sapien
ggctgctgccagggaatccaacctcatcctccc

SEQ ID NO: 458513 - DNA, 33 bp, Homo sapien
cacccagaatttaaaccgaagtgccctacctac

SEQ ID NO: 458514 - DNA, 33 bp, Homo sapien
cacccagaatttaaactgaagtgccctacctac

SEQ ID NO: 458515 - DNA, 33 bp, Homo sapien
attctcaaaagcataaatgatctctcaaaatga

SEQ ID NO: 458516 - DNA, 33 bp, Homo sapien
attctcaaaagcataagtgatctctcaaaatga

SEQ ID NO: 458517 - DNA, 33 bp, Homo sapien
caaaaagattaaacaaaaaagatgatcgataat

SEQ ID NO: 458518 - DNA, 33 bp, Homo sapien
caaaaagattaaacaagaaagatgatcgataat

SEQ ID NO: 458519 - DNA, 33 bp, Homo sapien
cgagacacaatggagaagacccccagtccccag

SEQ ID NO: 458520 - DNA, 33 bp, Homo sapien
cgagacacaatggagacgacccccagtccccag

SEQ ID NO: 458521 - DNA, 33 bp, Homo sapien
accccagaggtacttcaagactcaaggttaaaa

SEQ ID NO: 458522 - DNA, 33 bp, Homo sapien
accccagaggtacttcgagactcaaggttaaaa

SEQ ID NO: 458523 - DNA, 33 bp, Homo sapien
gtctcagtggagcgcaagcaaacctctagccct

SEQ ID NO: 458524 - DNA, 33 bp, Homo sapien
gtctcagtggagcgcaggcaaacctctagccct

SEQ ID NO: 458525 - DNA, 33 bp, Homo sapien
aggcattcaatgataaagacacagcctgatttt

SEQ ID NO: 458526 - DNA, 33 bp, Homo sapien
aggcattcaatgataaggacacagcctgatttt

SEQ ID NO: 458527 - DNA, 33 bp, Homo sapien
ttagcctgacggggtacggctacagtggccttt

SEQ ID NO: 458528 - DNA, 33 bp, Homo sapien
ttagcctgacggggtatggctacagtggccttt

SEQ ID NO: 458529 - DNA, 33 bp, Homo sapien
agagagaagagaagaccgctcattggtgtctta

SEQ ID NO: 458530 - DNA, 33 bp, Homo sapien
agagagaagagaagacggctcattggtgtctta

SEQ ID NO: 458531 - DNA, 33 bp, Homo sapien
aataccttgctccagccaaagaagccattttac

SEQ ID NO: 458532 - DNA, 33 bp, Homo sapien
aataccttgctccagcgaaagaagccattttac

SEQ ID NO: 458533 - DNA, 33 bp, Homo sapien
cattcttagagctggccgaaatgtcaccagcac

SEQ ID NO: 458534 - DNA, 33 bp, Homo sapien
cattcttagagctggctgaaatgtcaccagcac

SEQ ID NO: 458535 - DNA, 33 bp, Homo sapien
ccaggaacctgaccaccgagcgacttgctcttc

SEQ ID NO: 458536 - DNA, 33 bp, Homo sapien
ccaggaacctgaccactgagcgacttgctcttc

SEQ ID NO: 458537 - DNA, 33 bp, Homo sapien
gaatccacctggtcccaacttctaaattctgcc

SEQ ID NO: 458538 - DNA, 33 bp, Homo sapien
gaatccacctggtcccgacttctaaattctgcc

SEQ ID NO: 458539 - DNA, 33 bp, Homo sapien
actgtctcagaatataacctcatttggaaataa

SEQ ID NO: 458540 - DNA, 33 bp, Homo sapien
actgtctcagaatatagcctcatttggaaataa

SEQ ID NO: 458541 - DNA, 33 bp, Homo sapien
gccttcgatgggcaacaaggtcccacttttccc

SEQ ID NO: 458542 - DNA, 33 bp, Homo sapien
gccttcgatgggcaacgaggtcccacttttccc

SEQ ID NO: 458543 - DNA, 33 bp, Homo sapien
ataacgaggcctcagaaaggttagcctgtctcc

SEQ ID NO: 458544 - DNA, 33 bp, Homo sapien
ataacgaggcctcagagaggttagcctgtctcc

SEQ ID NO: 458545 - DNA, 33 bp, Homo sapien
cagttatggtacattgaaggattacagtttaag

SEQ ID NO: 458546 - DNA, 33 bp, Homo sapien
cagttatggtacattgcaggattacagtttaag

SEQ ID NO: 458547 - DNA, 33 bp, Homo sapien
acaggtcggggctgaaatagtagacaggccttt

SEQ ID NO: 458548 - DNA, 33 bp, Homo sapien
acaggtcggggctgaagtagtagacaggccttt

SEQ ID NO: 458549 - DNA, 33 bp, Homo sapien
gaggaggaaacctggcaagggatgaagtgagat

SEQ ID NO: 458550 - DNA, 33 bp, Homo sapien
gaggaggaaacctggcgagggatgaagtgagat

SEQ ID NO: 458551 - DNA, 33 bp, Homo sapien
tggtggcaggtgattcccaggtgggctgtcctc

SEQ ID NO: 458552 - DNA, 33 bp, Homo sapien
tggtggcaggtgattctcaggtgggctgtcctc

SEQ ID NO: 458553 - DNA, 33 bp, Homo sapien
ctgactttctcatatccctccattctgttatgt

SEQ ID NO: 458554 - DNA, 33 bp, Homo sapien
ctgactttctcatatctctccattctgttatgt

SEQ ID NO: 458555 - DNA, 33 bp, Homo sapien
ttcctggaggttcaaactcttaaaattgtcctt

SEQ ID NO: 458556 - DNA, 33 bp, Homo sapien
ttcctggaggttcaaagtcttaaaattgtcctt

SEQ ID NO: 458557 - DNA, 33 bp, Homo sapien
atcaaagaaatgtaaaggtaaggcacctgggct

SEQ ID NO: 458558 - DNA, 33 bp, Homo sapien
atcaaagaaatgtaaatgtaaggcacctgggct

SEQ ID NO: 458559 - DNA, 33 bp, Homo sapien
agtttgagggctcagaaacacaacatgaaaggc

SEQ ID NO: 458560 - DNA, 33 bp, Homo sapien
agtttgagggctcagagacacaacatgaaaggc

SEQ ID NO: 458561 - DNA, 33 bp, Homo sapien
ctcttccaaccaaaggccctcctccaggctgtg

SEQ ID NO: 458562 - DNA, 33 bp, Homo sapien
ctcttccaaccaaaggtcctcctccaggctgtg

SEQ ID NO: 458563 - DNA, 33 bp, Homo sapien
ctggttcaaatgcctccgacatacatactattc

SEQ ID NO: 458564 - DNA, 33 bp, Homo sapien
ctggttcaaatgcctctgacatacatactattc

SEQ ID NO: 458565 - DNA, 33 bp, Homo sapien
acattgccaagtgtaaggacgtttactttctgt

SEQ ID NO: 458566 - DNA, 33 bp, Homo sapien
acattgccaagtgtaatgacgtttactttctgt

SEQ ID NO: 458567 - DNA, 33 bp, Homo sapien
tttctaacattttgcacaattatgttcttttcc

SEQ ID NO: 458568 - DNA, 33 bp, Homo sapien
tttctaacattttgcagaattatgttcttttcc

SEQ ID NO: 458569 - DNA, 33 bp, Homo sapien
gttagaaattctactagcgagactgcacaagta

SEQ ID NO: 458570 - DNA, 33 bp, Homo sapien
gttagaaattctactatcgagactgcacaagta

SEQ ID NO: 458571 - DNA, 33 bp, Homo sapien
tttttaggcagaaaaagaattaactcctaaagc

SEQ ID NO: 458572 - DNA, 33 bp, Homo sapien
tttttaggcagaaaaataattaactcctaaagc

SEQ ID NO: 458573 - DNA, 33 bp, Homo sapien
cttccagattttgggacagattgaattttttat

SEQ ID NO: 458574 - DNA, 33 bp, Homo sapien
cttccagattttgggatagattgaattttttat

SEQ ID NO: 458575 - DNA, 33 bp, Homo sapien
cctcacctggttccacaatgctcacaccatcca

SEQ ID NO: 458576 - DNA, 33 bp, Homo sapien
cctcacctggttccacgatgctcacaccatcca

SEQ ID NO: 458577 - DNA, 33 bp, Homo sapien
cttgtttaaaaagaaggatgactgggctaggag

SEQ ID NO: 458578 - DNA, 33 bp, Homo sapien
cttgtttaaaaagaagtatgactgggctaggag

SEQ ID NO: 458579 - DNA, 33 bp, Homo sapien
aaggaaaccaggagaaggtgtatcctcaaaccc

SEQ ID NO: 458580 - DNA, 33 bp, Homo sapien
aaggaaaccaggagaatgtgtatcctcaaaccc

SEQ ID NO: 458581 - DNA, 33 bp, Homo sapien
gctatagcaaatcatcacatgtctaaaaaatgt

SEQ ID NO: 458582 - DNA, 33 bp, Homo sapien
gctatagcaaatcatcgcatgtctaaaaaatgt

SEQ ID NO: 458583 - DNA, 33 bp, Homo sapien
gtaaccatgaaaacaaacatcgtgcctagttaa

SEQ ID NO: 458584 - DNA, 33 bp, Homo sapien
gtaaccatgaaaacaatcatcgtgcctagttaa

SEQ ID NO: 458585 - DNA, 33 bp, Homo sapien
taatcactcttgaataacccggctaataccatt

SEQ ID NO: 458586 - DNA, 33 bp, Homo sapien
taatcactcttgaatatcccggctaataccatt

SEQ ID NO: 458587 - DNA, 33 bp, Homo sapien
cactcatgatataaaaagccctctggagcattc

SEQ ID NO: 458588 - DNA, 33 bp, Homo sapien
cactcatgatataaaaggccctctggagcattc

SEQ ID NO: 458589 - DNA, 33 bp, Homo sapien
atattatgttactcaaacttttccttactcatt

SEQ ID NO: 458590 - DNA, 33 bp, Homo sapien
atattatgttactcaagcttttccttactcatt

SEQ ID NO: 458591 - DNA, 33 bp, Homo sapien
agaatatcaaacacaacggagctattttaaaag

SEQ ID NO: 458592 - DNA, 33 bp, Homo sapien
agaatatcaaacacaatggagctattttaaaag

SEQ ID NO: 458593 - DNA, 33 bp, Homo sapien
ttgagtggaatttttacgctatcctgaggctac

SEQ ID NO: 458594 - DNA, 33 bp, Homo sapien
ttgagtggaatttttatgctatcctgaggctac

SEQ ID NO: 458595 - DNA, 33 bp, Homo sapien
gatctccctctatcaccgaggctggaacgcagt

SEQ ID NO: 458596 - DNA, 33 bp, Homo sapien
gatctccctctatcacggaggctggaacgcagt

SEQ ID NO: 458597 - DNA, 33 bp, Homo sapien
gtttactgtttgctgaaccatggtccataaacg

SEQ ID NO: 458598 - DNA, 33 bp, Homo sapien
gtttactgtttgctgacccatggtccataaacg

SEQ ID NO: 458599 - DNA, 33 bp, Homo sapien
taagtggtagaactaaaatttgaacatgggctt

SEQ ID NO: 458600 - DNA, 33 bp, Homo sapien
taagtggtagaactaacatttgaacatgggctt

SEQ ID NO: 458601 - DNA, 33 bp, Homo sapien
tgactggaggtgctaactggggaagaattggtg

SEQ ID NO: 458602 - DNA, 33 bp, Homo sapien
tgactggaggtgctaattggggaagaattggtg

SEQ ID NO: 458603 - DNA, 33 bp, Homo sapien
tttagcagaagcttccacagatttcagcaaact

SEQ ID NO: 458604 - DNA, 33 bp, Homo sapien
tttagcagaagcttccgcagatttcagcaaact

SEQ ID NO: 458605 - DNA, 33 bp, Homo sapien
gatttccctataaacaaataatgcaccatgaac

SEQ ID NO: 458606 - DNA, 33 bp, Homo sapien
gatttccctataaacagataatgcaccatgaac

SEQ ID NO: 458607 - DNA, 33 bp, Homo sapien
ccccaccttagtttccaaaatgctgagattaca

SEQ ID NO: 458608 - DNA, 33 bp, Homo sapien
ccccaccttagtttcccaaatgctgagattaca

SEQ ID NO: 458609 - DNA, 33 bp, Homo sapien
taaataaataattagggccagtattatgctgaa

SEQ ID NO: 458610 - DNA, 33 bp, Homo sapien
taaataaataattaggtccagtattatgctgaa

SEQ ID NO: 458611 - DNA, 33 bp, Homo sapien
ttgctgtacctttaaacgaaacccacagagaaa

SEQ ID NO: 458612 - DNA, 33 bp, Homo sapien
ttgctgtacctttaaatgaaacccacagagaaa

SEQ ID NO: 458613 - DNA, 33 bp, Homo sapien
gtgaactaaaggaatccgagaacttctagacac

SEQ ID NO: 458614 - DNA, 33 bp, Homo sapien
gtgaactaaaggaatctgagaacttctagacac

SEQ ID NO: 458615 - DNA, 33 bp, Homo sapien
gagattaaggcctgtacgctttggaatgtttaa

SEQ ID NO: 458616 - DNA, 33 bp, Homo sapien
gagattaaggcctgtatgctttggaatgtttaa

SEQ ID NO: 458617 - DNA, 33 bp, Homo sapien
ctgagaaatgaccaccaaatttagcaaatcaga

SEQ ID NO: 458618 - DNA, 33 bp, Homo sapien
ctgagaaatgaccaccgaatttagcaaatcaga

SEQ ID NO: 458619 - DNA, 33 bp, Homo sapien
agagtgtttaacaaaacgaagagaagtctgaga

SEQ ID NO: 458620 - DNA, 33 bp, Homo sapien
agagtgtttaacaaaatgaagagaagtctgaga

SEQ ID NO: 458621 - DNA, 33 bp, Homo sapien
tcactgttatctgaggaactgatacggtaggct

SEQ ID NO: 458622 - DNA, 33 bp, Homo sapien
tcactgttatctgagggactgatacggtaggct

SEQ ID NO: 458623 - DNA, 33 bp, Homo sapien
gtggagatagaagccaacctgcagactcccttc

SEQ ID NO: 458624 - DNA, 33 bp, Homo sapien
gtggagatagaagccagcctgcagactcccttc

SEQ ID NO: 458625 - DNA, 33 bp, Homo sapien
acaggccaagtacatacagatattttaaagttc

SEQ ID NO: 458626 - DNA, 33 bp, Homo sapien
acaggccaagtacatagagatattttaaagttc

SEQ ID NO: 458627 - DNA, 33 bp, Homo sapien
catcttctagcacggaataattaaattcaagtt

SEQ ID NO: 458628 - DNA, 33 bp, Homo sapien
catcttctagcacggagtaattaaattcaagtt

SEQ ID NO: 458629 - DNA, 33 bp, Homo sapien
aatactggctccttagaaggtttattacaaagc

SEQ ID NO: 458630 - DNA, 33 bp, Homo sapien
aatactggctccttaggaggtttattacaaagc

SEQ ID NO: 458631 - DNA, 33 bp, Homo sapien
ctttacaaaaataagactcgacagtccagctct

SEQ ID NO: 458632 - DNA, 33 bp, Homo sapien
ctttacaaaaataagattcgacagtccagctct

SEQ ID NO: 458633 - DNA, 33 bp, Homo sapien
agcaccacctcttctacaacgcagtactcttgc

SEQ ID NO: 458634 - DNA, 33 bp, Homo sapien
agcaccacctcttctataacgcagtactcttgc

SEQ ID NO: 458635 - DNA, 33 bp, Homo sapien
ctccacctgggctgaaataatctgttcttcctt

SEQ ID NO: 458636 - DNA, 33 bp, Homo sapien
ctccacctgggctgaagtaatctgttcttcctt

SEQ ID NO: 458637 - DNA, 33 bp, Homo sapien
ataaaaattagcaacccatgtctttcttgggga

SEQ ID NO: 458638 - DNA, 33 bp, Homo sapien
ataaaaattagcaacctatgtctttcttgggga

SEQ ID NO: 458639 - DNA, 33 bp, Homo sapien
aataacttcttccaataatcataaacttctact

SEQ ID NO: 458640 - DNA, 33 bp, Homo sapien
aataacttcttccaatcatcataaacttctact

SEQ ID NO: 458641 - DNA, 33 bp, Homo sapien
cataggccaaaacttacataaaccatgatttcc

SEQ ID NO: 458642 - DNA, 33 bp, Homo sapien
cataggccaaaacttatataaaccatgatttcc

SEQ ID NO: 458643 - DNA, 33 bp, Homo sapien
ggaacataatgaaaggaatcttttaaatggaag

SEQ ID NO: 458644 - DNA, 33 bp, Homo sapien
ggaacataatgaaaggcatcttttaaatggaag

SEQ ID NO: 458645 - DNA, 33 bp, Homo sapien
ctgtgcctgggtggctcaatctcctcatgtcac

SEQ ID NO: 458646 - DNA, 33 bp, Homo sapien
ctgtgcctgggtggcttaatctcctcatgtcac

SEQ ID NO: 458647 - DNA, 33 bp, Homo sapien
tcgtgctcttggaaccagatttacagaatgtct

SEQ ID NO: 458648 - DNA, 33 bp, Homo sapien
tcgtgctcttggaaccggatttacagaatgtct

SEQ ID NO: 458649 - DNA, 33 bp, Homo sapien
ctgcagcttttctgacaataggaatgtgaagcc

SEQ ID NO: 458650 - DNA, 33 bp, Homo sapien
ctgcagcttttctgaccataggaatgtgaagcc

SEQ ID NO: 458651 - DNA, 33 bp, Homo sapien
ttccagatcatttcaagaaagtgaatatcgcaa

SEQ ID NO: 458652 - DNA, 33 bp, Homo sapien
ttccagatcatttcaataaagtgaatatcgcaa

SEQ ID NO: 458653 - DNA, 33 bp, Homo sapien
gtgaggactgtgcaagacggcttgggttcaagg

SEQ ID NO: 458654 - DNA, 33 bp, Homo sapien
gtgaggactgtgcaaggcggcttgggttcaagg

SEQ ID NO: 458655 - DNA, 33 bp, Homo sapien
gagttttcatagctcaatataggataacatggg

SEQ ID NO: 458656 - DNA, 33 bp, Homo sapien
gagttttcatagctcagtataggataacatggg

SEQ ID NO: 458657 - DNA, 33 bp, Homo sapien
caacataatttgcaaaagttctccacagattaa

SEQ ID NO: 458658 - DNA, 33 bp, Homo sapien
caacataatttgcaaaggttctccacagattaa

SEQ ID NO: 458659 - DNA, 33 bp, Homo sapien
tgatacctacaacagcagaatactgtgactctt

SEQ ID NO: 458660 - DNA, 33 bp, Homo sapien
tgatacctacaacagcggaatactgtgactctt

SEQ ID NO: 458661 - DNA, 33 bp, Homo sapien
gaaggagtgggaggaagagtttgtgtccctgag

SEQ ID NO: 458662 - DNA, 33 bp, Homo sapien
gaaggagtgggaggaatagtttgtgtccctgag

SEQ ID NO: 458663 - DNA, 33 bp, Homo sapien
ttgccctccagagggaacaacaaccgacatcac

SEQ ID NO: 458664 - DNA, 33 bp, Homo sapien
ttgccctccagagggagcaacaaccgacatcac

SEQ ID NO: 458665 - DNA, 33 bp, Homo sapien
gacatccaagaaccaacctttctttcctcttgg

SEQ ID NO: 458666 - DNA, 33 bp, Homo sapien
gacatccaagaaccaagctttctttcctcttgg

SEQ ID NO: 458667 - DNA, 33 bp, Homo sapien
gtttccagagcctgaacacctgactacttggtc

SEQ ID NO: 458668 - DNA, 33 bp, Homo sapien
gtttccagagcctgaatacctgactacttggtc

SEQ ID NO: 458669 - DNA, 33 bp, Homo sapien
tgctagtatagaaataactgtgtatattatcgc

SEQ ID NO: 458670 - DNA, 33 bp, Homo sapien
tgctagtatagaaatacctgtgtatattatcgc

SEQ ID NO: 458671 - DNA, 33 bp, Homo sapien
aagccactttaagacaataccatctaagactta

SEQ ID NO: 458672 - DNA, 33 bp, Homo sapien
aagccactttaagacagtaccatctaagactta

SEQ ID NO: 458673 - DNA, 33 bp, Homo sapien
tccaccattctgcttcaataaagctgggaaagg

SEQ ID NO: 458674 - DNA, 33 bp, Homo sapien
tccaccattctgcttccataaagctgggaaagg

SEQ ID NO: 458675 - DNA, 33 bp, Homo sapien
acattcgtgaatgttgaaatgaatgtgacacgc

SEQ ID NO: 458676 - DNA, 33 bp, Homo sapien
acattcgtgaatgttggaatgaatgtgacacgc

SEQ ID NO: 458677 - DNA, 33 bp, Homo sapien
acactgtttcaactaacaagacataactgggat

SEQ ID NO: 458678 - DNA, 33 bp, Homo sapien
acactgtttcaactaataagacataactgggat

SEQ ID NO: 458679 - DNA, 33 bp, Homo sapien
agtcaggcctgggagacggaagaaggggttatc

SEQ ID NO: 458680 - DNA, 33 bp, Homo sapien
agtcaggcctgggagatggaagaaggggttatc

SEQ ID NO: 458681 - DNA, 33 bp, Homo sapien
tgtagaccaaagtgaaagagtttggaattgacc

SEQ ID NO: 458682 - DNA, 33 bp, Homo sapien
tgtagaccaaagtgaaggagtttggaattgacc

SEQ ID NO: 458683 - DNA, 33 bp, Homo sapien
gtgtgttcatgagacccaaaaagtcatagtcaa

SEQ ID NO: 458684 - DNA, 33 bp, Homo sapien
gtgtgttcatgagacctaaaaagtcatagtcaa

SEQ ID NO: 458685 - DNA, 33 bp, Homo sapien
tcaaatatccagcaggccctgatgtgtctctgc

SEQ ID NO: 458686 - DNA, 33 bp, Homo sapien
tcaaatatccagcaggtcctgatgtgtctctgc

SEQ ID NO: 458687 - DNA, 33 bp, Homo sapien
atggaggcgaaattgcccttaactttccaatca

SEQ ID NO: 458688 - DNA, 33 bp, Homo sapien
atggaggcgaaattgctcttaactttccaatca

SEQ ID NO: 458689 - DNA, 33 bp, Homo sapien
tgtttacctcgacagcacatatagttttaatga

SEQ ID NO: 458690 - DNA, 33 bp, Homo sapien
tgtttacctcgacagcgcatatagttttaatga

SEQ ID NO: 458691 - DNA, 33 bp, Homo sapien
ggtagcttaagggaaaaaaattgctatatgtgc

SEQ ID NO: 458692 - DNA, 33 bp, Homo sapien
ggtagcttaagggaaagaaattgctatatgtgc

SEQ ID NO: 458693 - DNA, 33 bp, Homo sapien
acttaatccatcaataataactgagcatcctta

SEQ ID NO: 458694 - DNA, 33 bp, Homo sapien
acttaatccatcaatactaactgagcatcctta

SEQ ID NO: 458695 - DNA, 33 bp, Homo sapien
gctattttacagaggacggctttagtgtctctt

SEQ ID NO: 458696 - DNA, 33 bp, Homo sapien
gctattttacagaggagggctttagtgtctctt

SEQ ID NO: 458697 - DNA, 33 bp, Homo sapien
accagctgctgatacaatgatggcaccacagat

SEQ ID NO: 458698 - DNA, 33 bp, Homo sapien
accagctgctgatacagtgatggcaccacagat

SEQ ID NO: 458699 - DNA, 33 bp, Homo sapien
acgctgaagccactgaaattcctgaccagtttc

SEQ ID NO: 458700 - DNA, 33 bp, Homo sapien
acgctgaagccactgagattcctgaccagtttc

SEQ ID NO: 458701 - DNA, 33 bp, Homo sapien
tgtatgcttgttttaaagagcaataaatccatg

SEQ ID NO: 458702 - DNA, 33 bp, Homo sapien
tgtatgcttgttttaaggagcaataaatccatg

SEQ ID NO: 458703 - DNA, 33 bp, Homo sapien
agtttttacccttgtcaaatttccagcaccagt

SEQ ID NO: 458704 - DNA, 33 bp, Homo sapien
agtttttacccttgtcgaatttccagcaccagt

SEQ ID NO: 458705 - DNA, 33 bp, Homo sapien
agcaataagagaccatgactttgttatgataga

SEQ ID NO: 458706 - DNA, 33 bp, Homo sapien
agcaataagagaccattactttgttatgataga

SEQ ID NO: 458707 - DNA, 33 bp, Homo sapien
gttgttcttccattaaccttctgatgtgtagca

SEQ ID NO: 458708 - DNA, 33 bp, Homo sapien
gttgttcttccattaatcttctgatgtgtagca

SEQ ID NO: 458709 - DNA, 33 bp, Homo sapien
ctgcaactgtttaatgcagtagtatcaattctg

SEQ ID NO: 458710 - DNA, 33 bp, Homo sapien
ctgcaactgtttaatgtagtagtatcaattctg

SEQ ID NO: 458711 - DNA, 33 bp, Homo sapien; identical to SEQ ID NO: 458709

SEQ ID NO: 458712 - DNA, 33 bp, Homo sapien; identical to SEQ ID NO: 458710

SEQ ID NO: 458713 - DNA, 33 bp, Homo sapien
ttactctattcatgacaaagtaaggcaaattat

SEQ ID NO: 458714 - DNA, 33 bp, Homo sapien
ttactctattcatgacgaagtaaggcaaattat

SEQ ID NO: 458715 - DNA, 33 bp, Homo sapien
tattgagaggaatttccaagcacatctgtgagc

SEQ ID NO: 458716 - DNA, 33 bp, Homo sapien
tattgagaggaatttctaagcacatctgtgagc

SEQ ID NO: 458717 - DNA, 33 bp, Homo sapien
accaggtacttcataaatgtttagaagatgaac

SEQ ID NO: 458718 - DNA, 33 bp, Homo sapien
accaggtacttcataagtgtttagaagatgaac

SEQ ID NO: 458719 - DNA, 33 bp, Homo sapien
atgttagccaaatctacaagagcaaaatatata

SEQ ID NO: 458720 - DNA, 33 bp, Homo sapien
atgttagccaaatctataagagcaaaatatata

SEQ ID NO: 458721 - DNA, 33 bp, Homo sapien
tctctgcattaattcaactctccctcttccaac

SEQ ID NO: 458722 - DNA, 33 bp, Homo sapien
tctctgcattaattcagctctccctcttccaac

SEQ ID NO: 458723 - DNA, 33 bp, Homo sapien
tgacataaacaagagaaatttattcgctcacaa

SEQ ID NO: 458724 - DNA, 33 bp, Homo sapien
tgacataaacaagagacatttattcgctcacaa

SEQ ID NO: 458725 - DNA, 33 bp, Homo sapien
gccttagtcttaaaaaatcctgggagcccagtc

SEQ ID NO: 458726 - DNA, 33 bp, Homo sapien
gccttagtcttaaaaactcctgggagcccagtc

SEQ ID NO: 458727 - DNA, 33 bp, Homo sapien
tctggtcatttagccacagaaacataaaagacc

SEQ ID NO: 458728 - DNA, 33 bp, Homo sapien
tctggtcatttagccagagaaacataaaagacc

SEQ ID NO: 458729 - DNA, 33 bp, Homo sapien
ctctgttaagatgaagaagaaaatgaaccttag

SEQ ID NO: 458730 - DNA, 33 bp, Homo sapien
ctctgttaagatgaaggagaaaatgaaccttag

SEQ ID NO: 458731 - DNA, 33 bp, Homo sapien
acacaccaagtgggaacggtgaaaattgaagac

SEQ ID NO: 458732 - DNA, 33 bp, Homo sapien
acacaccaagtgggaatggtgaaaattgaagac

SEQ ID NO: 458733 - DNA, 33 bp, Homo sapien
ctctgcatctgagagaaacaagaagtgatggga

SEQ ID NO: 458734 - DNA, 33 bp, Homo sapien
ctctgcatctgagagagacaagaagtgatggga

SEQ ID NO: 458735 - DNA, 33 bp, Homo sapien
ccttcctaagcctagaaatgctctaaaccttca

SEQ ID NO: 458736 - DNA, 33 bp, Homo sapien
ccttcctaagcctagagatgctctaaaccttca

SEQ ID NO: 458737 - DNA, 33 bp, Homo sapien
catgggaggtttcgctaaattctgacctcctct

SEQ ID NO: 458738 - DNA, 33 bp, Homo sapien
catgggaggtttcgctgaattctgacctcctct

SEQ ID NO: 458739 - DNA, 33 bp, Homo sapien
gttctatgtcacaataaaaagatgattagaggt

SEQ ID NO: 458740 - DNA, 33 bp, Homo sapien
gttctatgtcacaatagaaagatgattagaggt

SEQ ID NO: 458741 - DNA, 33 bp, Homo sapien
gataaatctgccttaactggtatcattattctt

SEQ ID NO: 458742 - DNA, 33 bp, Homo sapien
gataaatctgccttaattggtatcattattctt

SEQ ID NO: 458743 - DNA, 33 bp, Homo sapien
caaggctagcaaaagcaaaatatctaaagggag

SEQ ID NO: 458744 - DNA, 33 bp, Homo sapien
caaggctagcaaaagcgaaatatctaaagggag

SEQ ID NO: 458745 - DNA, 33 bp, Homo sapien
tgaagttaggaagcaacatctctactgtagtgg

SEQ ID NO: 458746 - DNA, 33 bp, Homo sapien
tgaagttaggaagcaatatctctactgtagtgg

SEQ ID NO: 458747 - DNA, 33 bp, Homo sapien
tgcagcataaatccaacgtttctttgtcaattt

SEQ ID NO: 458748 - DNA, 33 bp, Homo sapien
tgcagcataaatccaatgtttctttgtcaattt

SEQ ID NO: 458749 - DNA, 33 bp, Homo sapien
gttgcttaggttgttaacatcattggtcaaggc

SEQ ID NO: 458750 - DNA, 33 bp, Homo sapien
gttgcttaggttgttagcatcattggtcaaggc

SEQ ID NO: 458751 - DNA, 33 bp, Homo sapien
ttgccccatctccatcactgctggaacatctca

SEQ ID NO: 458752 - DNA, 33 bp, Homo sapien
ttgccccatctccatcgctgctggaacatctca

SEQ ID NO: 458753 - DNA, 33 bp, Homo sapien
ctgcacacttgggtgaagcactttcagctctga

SEQ ID NO: 458754 - DNA, 33 bp, Homo sapien
ctgcacacttgggtgaggcactttcagctctga

SEQ ID NO: 458755 - DNA, 33 bp, Homo sapien
ctaagtgagtttgtctaaatgtttgcctgtgcg

SEQ ID NO: 458756 - DNA, 33 bp, Homo sapien
ctaagtgagtttgtctgaatgtttgcctgtgcg

SEQ ID NO: 458757 - DNA, 33 bp, Homo sapien
gggagatgtctcctcacgtgccttctgggacca

SEQ ID NO: 458758 - DNA, 33 bp, Homo sapien
gggagatgtctcctcatgtgccttctgggacca

SEQ ID NO: 458759 - DNA, 33 bp, Homo sapien
ggtagcaaaaccatccactaaaataacagaaaa

SEQ ID NO: 458760 - DNA, 33 bp, Homo sapien
ggtagcaaaaccatccgctaaaataacagaaaa

SEQ ID NO: 458761 - DNA, 33 bp, Homo sapien
gtctgaagtactgatacagtcgcttccctccta

SEQ ID NO: 458762 - DNA, 33 bp, Homo sapien
gtctgaagtactgatatagtcgcttccctccta

SEQ ID NO: 458763 - DNA, 33 bp, Homo sapien
gctacattacccagaaggatgtgcttcatatgt

SEQ ID NO: 458764 - DNA, 33 bp, Homo sapien
gctacattacccagaatgatgtgcttcatatgt

SEQ ID NO: 458765 - DNA, 33 bp, Homo sapien
ctaggaagaagcatcaaaagacttccatgagag

SEQ ID NO: 458766 - DNA, 33 bp, Homo sapien
ctaggaagaagcatcagaagacttccatgagag

SEQ ID NO: 458767 - DNA, 33 bp, Homo sapien
tcggattgagttttcacgtttgaaacatatgtt

SEQ ID NO: 458768 - DNA, 33 bp, Homo sapien
tcggattgagttttcaggtttgaaacatatgtt

SEQ ID NO: 458769 - DNA, 33 bp, Homo sapien
ggcctgagaaagctcccaaggatcaaatgtgga

SEQ ID NO: 458770 - DNA, 33 bp, Homo sapien
ggcctgagaaagctccgaaggatcaaatgtgga

SEQ ID NO: 458771 - DNA, 33 bp, Homo sapien
gccaatttgccattgaaacagttcttcagcttt

SEQ ID NO: 458772 - DNA, 33 bp, Homo sapien
gccaatttgccattgatacagttcttcagcttt

SEQ ID NO: 458773 - DNA, 33 bp, Homo sapien
cagaaccattttgctaggggtaaatattttagc

SEQ ID NO: 458774 - DNA, 33 bp, Homo sapien
cagaaccattttgctatgggtaaatattttagc

SEQ ID NO: 458775 - DNA, 33 bp, Homo sapien
agggcatgacaggtggaaacaaaagagataaag

SEQ ID NO: 458776 - DNA, 33 bp, Homo sapien
agggcatgacaggtggcaacaaaagagataaag

SEQ ID NO: 458777 - DNA, 33 bp, Homo sapien
cagtgggacagaaggacaacttctcatcactcc

SEQ ID NO: 458778 - DNA, 33 bp, Homo sapien
cagtgggacagaaggataacttctcatcactcc

SEQ ID NO: 458779 - DNA, 33 bp, Homo sapien
atctgctatttgtctcccaaggagggttatgca

SEQ ID NO: 458780 - DNA, 33 bp, Homo sapien
atctgctatttgtctctcaaggagggttatgca

SEQ ID NO: 458781 - DNA, 33 bp, Homo sapien
gttgtgtaaccttgaacaaatgggttcagtatc

SEQ ID NO: 458782 - DNA, 33 bp, Homo sapien
gttgtgtaaccttgaataaatgggttcagtatc

SEQ ID NO: 458783 - DNA, 33 bp, Homo sapien
tcagagcaggcttagcaagatgtgatttttgaa

SEQ ID NO: 458784 - DNA, 33 bp, Homo sapien
tcagagcaggcttagcgagatgtgatttttgaa

SEQ ID NO: 458785 - DNA, 33 bp, Homo sapien
agttttcactttaggccgatctctggcacataa

SEQ ID NO: 458786 - DNA, 33 bp, Homo sapien
agttttcactttaggctgatctctggcacataa

SEQ ID NO: 458787 - DNA, 33 bp, Homo sapien
tgaaatgataggtatacgtaaaggttagtggta

SEQ ID NO: 458788 - DNA, 33 bp, Homo sapien
tgaaatgataggtatatgtaaaggttagtggta

SEQ ID NO: 458789 - DNA, 33 bp, Homo sapien
agacatacattgcccaatcaacataagaagtgt

SEQ ID NO: 458790 - DNA, 33 bp, Homo sapien
agacatacattgcccagtcaacataagaagtgt

SEQ ID NO: 458791 - DNA, 33 bp, Homo sapien
tgatgctctccgagcactgaaagacaggaccca

SEQ ID NO: 458792 - DNA, 33 bp, Homo sapien
tgatgctctccgagcagtgaaagacaggaccca

SEQ ID NO: 458793 - DNA, 33 bp, Homo sapien
gtcttgcagaaacaagccggcagtcccagccaa

SEQ ID NO: 458794 - DNA, 33 bp, Homo sapien
gtcttgcagaaacaagtcggcagtcccagccaa

SEQ ID NO: 458795 - DNA, 33 bp, Homo sapien
tttgacgaggctcagagacgcctataccataat

SEQ ID NO: 458796 - DNA, 33 bp, Homo sapien
tttgacgaggctcagatacgcctataccataat

SEQ ID NO: 458797 - DNA, 33 bp, Homo sapien
ttgtatctggtaagtacgatcttgctgacactg

SEQ ID NO: 458798 - DNA, 33 bp, Homo sapien
ttgtatctggtaagtatgatcttgctgacactg

SEQ ID NO: 458799 - DNA, 33 bp, Homo sapien
aggaagaagactgagcacttttgtttgtatctg

SEQ ID NO: 458800 - DNA, 33 bp, Homo sapien
aggaagaagactgagcccttttgtttgtatctg

SEQ ID NO: 458801 - DNA, 33 bp, Homo sapien
tgttcataggctttccacaattccctctgtaca

SEQ ID NO: 458802 - DNA, 33 bp, Homo sapien
tgttcataggctttccgcaattccctctgtaca

SEQ ID NO: 458803 - DNA, 33 bp, Homo sapien
caacctcagtcattaaccacacacagatgtttg

SEQ ID NO: 458804 - DNA, 33 bp, Homo sapien
caacctcagtcattaatcacacacagatgtttg

SEQ ID NO: 458805 - DNA, 33 bp, Homo sapien
tgagatagatgttgaccaaacccattttctctc

SEQ ID NO: 458806 - DNA, 33 bp, Homo sapien
tgagatagatgttgactaaacccattttctctc

SEQ ID NO: 458807 - DNA, 33 bp, Homo sapien
ctccttgatgatgttcagaaactcctatactgc

SEQ ID NO: 458808 - DNA, 33 bp, Homo sapien
ctccttgatgatgttccgaaactcctatactgc

SEQ ID NO: 458809 - DNA, 33 bp, Homo sapien
caggacttcctgtctcactttgtggcggtcatt

SEQ ID NO: 458810 - DNA, 33 bp, Homo sapien
caggacttcctgtctcgctttgtggcggtcatt

SEQ ID NO: 458811 - DNA, 33 bp, Homo sapien
gagacacaggtgctaaaactacacccagtgaaa

SEQ ID NO: 458812 - DNA, 33 bp, Homo sapien
gagacacaggtgctaacactacacccagtgaaa

SEQ ID NO: 458813 - DNA, 33 bp, Homo sapien
ggtgaaaggagaattacaagtagggcttctcgt

SEQ ID NO: 458814 - DNA, 33 bp, Homo sapien
ggtgaaaggagaattataagtagggcttctcgt

SEQ ID NO: 458815 - DNA, 33 bp, Homo sapien
tggattctggctgaaacggacaacttaccaata

SEQ ID NO: 458816 - DNA, 33 bp, Homo sapien
tggattctggctgaaatggacaacttaccaata

SEQ ID NO: 458817 - DNA, 33 bp, Homo sapien
gacgatatgaaattgacgataattagggcagag

SEQ ID NO: 458818 - DNA, 33 bp, Homo sapien
gacgatatgaaattgatgataattagggcagag

SEQ ID NO: 458819 - DNA, 33 bp, Homo sapien
agccaatggtcttcgaactcaaccgcatgtttg

SEQ ID NO: 458820 - DNA, 33 bp, Homo sapien
agccaatggtcttcgatctcaaccgcatgtttg

SEQ ID NO: 458821 - DNA, 33 bp, Homo sapien
ataagtagcagcaaaaatgtcagcagagcttac

SEQ ID NO: 458822 - DNA, 33 bp, Homo sapien
ataagtagcagcaaaagtgtcagcagagcttac

SEQ ID NO: 458823 - DNA, 33 bp, Homo sapien
ctgtcacccccagatcaccaggtctgcaggctc

SEQ ID NO: 458824 - DNA, 33 bp, Homo sapien
ctgtcacccccagatcgccaggtctgcaggctc

SEQ ID NO: 458825 - DNA, 33 bp, Homo sapien
ggatccctggaggaaacagtgtgtggtaaccct

SEQ ID NO: 458826 - DNA, 33 bp, Homo sapien
ggatccctggaggaaagagtgtgtggtaaccct

SEQ ID NO: 458827 - DNA, 33 bp, Homo sapien
ttacccattggtgtggacactcttactcttgcc

SEQ ID NO: 458828 - DNA, 33 bp, Homo sapien
ttacccattggtgtggccactcttactcttgcc

SEQ ID NO: 458829 - DNA, 33 bp, Homo sapien
accatattaagagaacaaacaaaaagtcatatg

SEQ ID NO: 458830 - DNA, 33 bp, Homo sapien
accatattaagagaaccaacaaaaagtcatatg

SEQ ID NO: 458831 - DNA, 33 bp, Homo sapien
tacacagaaaactacaaaagagtagctgcaaac

SEQ ID NO: 458832 - DNA, 33 bp, Homo sapien
tacacagaaaactacagaagagtagctgcaaac

SEQ ID NO: 458833 - DNA, 33 bp, Homo sapien
gaggttatcacacaggacaattatttggaatgg

SEQ ID NO: 458834 - DNA, 33 bp, Homo sapien
gaggttatcacacagggcaattatttggaatgg

SEQ ID NO: 458835 - DNA, 33 bp, Homo sapien
ggccatgctttgagaactgtaagaactgatcag

SEQ ID NO: 458836 - DNA, 33 bp, Homo sapien
ggccatgctttgagaattgtaagaactgatcag

SEQ ID NO: 458837 - DNA, 33 bp, Homo sapien
ggtggaaaaaggctgacacttgggtaagaaata

SEQ ID NO: 458838 - DNA, 33 bp, Homo sapien
ggtggaaaaaggctgagacttgggtaagaaata

SEQ ID NO: 458839 - DNA, 33 bp, Homo sapien
aaaaatgagggttcagaccttgtaattatgtaa

SEQ ID NO: 458840 - DNA, 33 bp, Homo sapien
aaaaatgagggttcaggccttgtaattatgtaa

SEQ ID NO: 458841 - DNA, 33 bp, Homo sapien
ttattctcaagaagtacacgtttattcagttta

SEQ ID NO: 458842 - DNA, 33 bp, Homo sapien
ttattctcaagaagtatacgtttattcagttta

SEQ ID NO: 458843 - DNA, 33 bp, Homo sapien
ctagactggttggctacctggggagacccttgg

SEQ ID NO: 458844 - DNA, 33 bp, Homo sapien
ctagactggttggctagctggggagacccttgg

SEQ ID NO: 458845 - DNA, 33 bp, Homo sapien
ctacagtctcaggaaacttgctggaggctggaa

SEQ ID NO: 458846 - DNA, 33 bp, Homo sapien
ctacagtctcaggaaatttgctggaggctggaa

SEQ ID NO: 458847 - DNA, 33 bp, Homo sapien
gttgttttattgaccaagtagacttaagaaagc

SEQ ID NO: 458848 - DNA, 33 bp, Homo sapien
gttgttttattgaccaggtagacttaagaaagc

SEQ ID NO: 458849 - DNA, 33 bp, Homo sapien
aaaaaacgctgataaaatctacagtaagagaat

SEQ ID NO: 458850 - DNA, 33 bp, Homo sapien
aaaaaacgctgataaactctacagtaagagaat

SEQ ID NO: 458851 - DNA, 33 bp, Homo sapien
cccatgatagactacaagacaggaagctccgta

SEQ ID NO: 458852 - DNA, 33 bp, Homo sapien
cccatgatagactacaggacaggaagctccgta

SEQ ID NO: 458853 - DNA, 33 bp, Homo sapien
tgtgccaggaattccaatcactgatgtggttac

SEQ ID NO: 458854 - DNA, 33 bp, Homo sapien
tgtgccaggaattccagtcactgatgtggttac

SEQ ID NO: 458855 - DNA, 33 bp, Homo sapien
ctcacatttaattgcacgtagattaaggggcag

SEQ ID NO: 458856 - DNA, 33 bp, Homo sapien
ctcacatttaattgcatgtagattaaggggcag

SEQ ID NO: 458857 - DNA, 33 bp, Homo sapien
tgaaaataaataaatacctggttgatcttgcta

SEQ ID NO: 458858 - DNA, 33 bp, Homo sapien
tgaaaataaataaatatctggttgatcttgcta

SEQ ID NO: 458859 - DNA, 33 bp, Homo sapien
gtatacaccttgcaaccgctactgagatcaaga

SEQ ID NO: 458860 - DNA, 33 bp, Homo sapien
gtatacaccttgcaactgctactgagatcaaga

SEQ ID NO: 458861 - DNA, 33 bp, Homo sapien
ttatgacagatgatacacgcagaaaagggacta

SEQ ID NO: 458862 - DNA, 33 bp, Homo sapien
ttatgacagatgatacccgcagaaaagggacta

SEQ ID NO: 458863 - DNA, 33 bp, Homo sapien
ctacgatgcttgcagcagctaaggactccagac

SEQ ID NO: 458864 - DNA, 33 bp, Homo sapien
ctacgatgcttgcagcggctaaggactccagac

SEQ ID NO: 458865 - DNA, 33 bp, Homo sapien
ccaatttctttagtaacagtcagcaaaagcctt

SEQ ID NO: 458866 - DNA, 33 bp, Homo sapien
ccaatttctttagtaagagtcagcaaaagcctt

SEQ ID NO: 458867 - DNA, 33 bp, Homo sapien
tggttattgagcattcactatgtgcctagagtt

SEQ ID NO: 458868 - DNA, 33 bp, Homo sapien
tggttattgagcattcgctatgtgcctagagtt

SEQ ID NO: 458869 - DNA, 33 bp, Homo sapien
atatttattgaacagcaactttccactcagttg

SEQ ID NO: 458870 - DNA, 33 bp, Homo sapien
atatttattgaacagcgactttccactcagttg

SEQ ID NO: 458871 - DNA, 33 bp, Homo sapien
gccgcctctacctctccgagaactggatctgct

SEQ ID NO: 458872 - DNA, 33 bp, Homo sapien
gccgcctctacctctctgagaactggatctgct

SEQ ID NO: 458873 - DNA, 33 bp, Homo sapien
ctttggtagacgaagacgggcggatcgtggtgc

SEQ ID NO: 458874 - DNA, 33 bp, Homo sapien
ctttggtagacgaagatgggcggatcgtggtgc

SEQ ID NO: 458875 - DNA, 33 bp, Homo sapien
cactgagcgtgttggccgaaatgattagttcag

SEQ ID NO: 458876 - DNA, 33 bp, Homo sapien
cactgagcgtgttggctgaaatgattagttcag

SEQ ID NO: 458877 - DNA, 33 bp, Homo sapien
agacccccacgcgtaacacctttggctctctgg

SEQ ID NO: 458878 - DNA, 33 bp, Homo sapien
agacccccacgcgtaatacctttggctctctgg

SEQ ID NO: 458879 - DNA, 33 bp, Homo sapien
aataaataaaagccaaccccttcactagggatt

SEQ ID NO: 458880 - DNA, 33 bp, Homo sapien
aataaataaaagccaatcccttcactagggatt

SEQ ID NO: 458881 - DNA, 33 bp, Homo sapien
aggctttgagcaatgcagcagtttgccccagac

SEQ ID NO: 458882 - DNA, 33 bp, Homo sapien
aggctttgagcaatgcggcagtttgccccagac

SEQ ID NO: 458883 - DNA, 33 bp, Homo sapien
aggagagttagaagggaccactgaatttatatc

SEQ ID NO: 458884 - DNA, 33 bp, Homo sapien
aggagagttagaagggtccactgaatttatatc

SEQ ID NO: 458885 - DNA, 33 bp, Homo sapien
tgatgatcatgaagtactaatagcgagtagtat

SEQ ID NO: 458886 - DNA, 33 bp, Homo sapien
tgatgatcatgaagtagtaatagcgagtagtat

SEQ ID NO: 458887 - DNA, 33 bp, Homo sapien
tattatgattttctgccaggtggaagtcaaatg

SEQ ID NO: 458888 - DNA, 33 bp, Homo sapien
tattatgattttctgctaggtggaagtcaaatg

SEQ ID NO: 458889 - DNA, 33 bp, Homo sapien
ttcagagtctcccaaacggtggcatcagaggca

SEQ ID NO: 458890 - DNA, 33 bp, Homo sapien
ttcagagtctcccaaatggtggcatcagaggca

SEQ ID NO: 458891 - DNA, 33 bp, Homo sapien
taggtgcccctgatgacgggatgctctttaaat

SEQ ID NO: 458892 - DNA, 33 bp, Homo sapien
taggtgcccctgatgatgggatgctctttaaat

SEQ ID NO: 458893 - DNA, 33 bp, Homo sapien
atcactgcagaaaaagacccaggcaacaacaac

SEQ ID NO: 458894 - DNA, 33 bp, Homo sapien
atcactgcagaaaaagtcccaggcaacaacaac

SEQ ID NO: 458895 - DNA, 33 bp, Homo sapien
ttgcccctaagctccaaaaagttggtttgtcct

SEQ ID NO: 458896 - DNA, 33 bp, Homo sapien
ttgcccctaagctccataaagttggtttgtcct

SEQ ID NO: 458897 - DNA, 33 bp, Homo sapien
gggtgaagcttgtcaacgtctgccctagaacat

SEQ ID NO: 458898 - DNA, 33 bp, Homo sapien
gggtgaagcttgtcaatgtctgccctagaacat

SEQ ID NO: 458899 - DNA, 33 bp, Homo sapien
gcctgggatgcagttacgtgctccttccctttc

SEQ ID NO: 458900 - DNA, 33 bp, Homo sapien
gcctgggatgcagttatgtgctccttccctttc

SEQ ID NO: 458901 - DNA, 33 bp, Homo sapien
aacatgtaactgcaaagtcaagccaacgttgta

SEQ ID NO: 458902 - DNA, 33 bp, Homo sapien
aacatgtaactgcaaattcaagccaacgttgta

SEQ ID NO: 458903 - DNA, 33 bp, Homo sapien
tattggggattaggtcccatttggagtgagtct

SEQ ID NO: 458904 - DNA, 33 bp, Homo sapien
tattggggattaggtctcatttggagtgagtct

SEQ ID NO: 458905 - DNA, 33 bp, Homo sapien
gaagcatgggactggacgttgttttgcagaggc

SEQ ID NO: 458906 - DNA, 33 bp, Homo sapien
gaagcatgggactggatgttgttttgcagaggc

SEQ ID NO: 458907 - DNA, 33 bp, Homo sapien
atgaggacatagtggacgacgtcggggattgct

SEQ ID NO: 458908 - DNA, 33 bp, Homo sapien
atgaggacatagtggatgacgtcggggattgct

SEQ ID NO: 458909 - DNA, 33 bp, Homo sapien
ttcggccacacacatgcagttgttctgagccct

SEQ ID NO: 458910 - DNA, 33 bp, Homo sapien
ttcggccacacacatggagttgttctgagccct

SEQ ID NO: 458911 - DNA, 33 bp, Homo sapien
gtacatttctcccaccacctctggctgaactcc

SEQ ID NO: 458912 - DNA, 33 bp, Homo sapien
gtacatttctcccaccgcctctggctgaactcc

SEQ ID NO: 458913 - DNA, 33 bp, Homo sapien
tggtttcaagcctgaaagcaaggacaatgccca

SEQ ID NO: 458914 - DNA, 33 bp, Homo sapien
tggtttcaagcctgaaggcaaggacaatgccca

SEQ ID NO: 458915 - DNA, 33 bp, Homo sapien
tctgggagtggcctacgctacaacactttccag

SEQ ID NO: 458916 - DNA, 33 bp, Homo sapien
tctgggagtggcctactctacaacactttccag

SEQ ID NO: 458917 - DNA, 33 bp, Homo sapien
tacctagctgtcactcaatatccctacttggga

SEQ ID NO: 458918 - DNA, 33 bp, Homo sapien
tacctagctgtcactcgatatccctacttggga

SEQ ID NO: 458919 - DNA, 33 bp, Homo sapien
tgtggtggtttgtatggatatgcagctaataga

SEQ ID NO: 458920 - DNA, 33 bp, Homo sapien
tgtggtggtttgtatgtatatgcagctaataga

SEQ ID NO: 458921 - DNA, 33 bp, Homo sapien
cctggtgcaaagtcagaatcaacacatacatgt

SEQ ID NO: 458922 - DNA, 33 bp, Homo sapien
cctggtgcaaagtcaggatcaacacatacatgt

SEQ ID NO: 458923 - DNA, 33 bp, Homo sapien
atgtgggacagtacacacagagtgttgccaatc

SEQ ID NO: 458924 - DNA, 33 bp, Homo sapien
atgtgggacagtacacgcagagtgttgccaatc

SEQ ID NO: 458925 - DNA, 33 bp, Homo sapien
ggggctcagtcacataaacgtaattgaccacac

SEQ ID NO: 458926 - DNA, 33 bp, Homo sapien
ggggctcagtcacatagacgtaattgaccacac

SEQ ID NO: 458927 - DNA, 33 bp, Homo sapien
tgacgtggtagcacacaacatggctttaggccc

SEQ ID NO: 458928 - DNA, 33 bp, Homo sapien
tgacgtggtagcacacgacatggctttaggccc

SEQ ID NO: 458929 - DNA, 33 bp, Homo sapien
cgaattagaggccctcacagaagacttggaaga

SEQ ID NO: 458930 - DNA, 33 bp, Homo sapien
cgaattagaggccctcgcagaagacttggaaga

SEQ ID NO: 458931 - DNA, 33 bp, Homo sapien
tcatcaccacccaggacagaactgcctatttgt

SEQ ID NO: 458932 - DNA, 33 bp, Homo sapien
tcatcaccacccaggatagaactgcctatttgt

SEQ ID NO: 458933 - DNA, 33 bp, Homo sapien
gccaacagactttaccaaagcaatcattggagg

SEQ ID NO: 458934 - DNA, 33 bp, Homo sapien
gccaacagactttaccgaagcaatcattggagg

SEQ ID NO: 458935 - DNA, 33 bp, Homo sapien
tctcttagacactctacgcagctgagtgttggg

SEQ ID NO: 458936 - DNA, 33 bp, Homo sapien
tctcttagacactctatgcagctgagtgttggg

SEQ ID NO: 458937 - DNA, 33 bp, Homo sapien
acatggctacactgccccagagaaaggactcac

SEQ ID NO: 458938 - DNA, 33 bp, Homo sapien
acatggctacactgcctcagagaaaggactcac

SEQ ID NO: 458939 - DNA, 33 bp, Homo sapien
atttacccacttgttacaaagaatccaaatcag

SEQ ID NO: 458940 - DNA, 33 bp, Homo sapien
atttacccacttgttataaagaatccaaatcag

SEQ ID NO: 458941 - DNA, 33 bp, Homo sapien
gctagaagttctagccaactcatcacgtgtttg

SEQ ID NO: 458942 - DNA, 33 bp, Homo sapien
gctagaagttctagcccactcatcacgtgtttg

SEQ ID NO: 458943 - DNA, 33 bp, Homo sapien
gtaataacatggaaaacaaaacaaagctactaa

SEQ ID NO: 458944 - DNA, 33 bp, Homo sapien
gtaataacatggaaaataaaacaaagctactaa

SEQ ID NO: 458945 - DNA, 33 bp, Homo sapien
attagcacttcggagcacctatagtcgccatga

SEQ ID NO: 458946 - DNA, 33 bp, Homo sapien
attagcacttcggagcgcctatagtcgccatga

SEQ ID NO: 458947 - DNA, 33 bp, Homo sapien
agcaagaggaagtatacggttgtgatgctttgc

SEQ ID NO: 458948 - DNA, 33 bp, Homo sapien
agcaagaggaagtatatggttgtgatgctttgc

SEQ ID NO: 458949 - DNA, 33 bp, Homo sapien
tgggtaaagatgagtaacttgccatccaggatc

SEQ ID NO: 458950 - DNA, 33 bp, Homo sapien
tgggtaaagatgagtaccttgccatccaggatc

SEQ ID NO: 458951 - DNA, 33 bp, Homo sapien
taggcaatggaatgaaacttgatccactgtgct

SEQ ID NO: 458952 - DNA, 33 bp, Homo sapien
taggcaatggaatgaaccttgatccactgtgct

SEQ ID NO: 458953 - DNA, 33 bp, Homo sapien
cactgtgcttccaggaatacaattcagttcgtg

SEQ ID NO: 458954 - DNA, 33 bp, Homo sapien
cactgtgcttccaggagtacaattcagttcgtg

SEQ ID NO: 458955 - DNA, 33 bp, Homo sapien
atagtgcagctgtgaacactggtgtacaaatat

SEQ ID NO: 458956 - DNA, 33 bp, Homo sapien
atagtgcagctgtgaatactggtgtacaaatat

SEQ ID NO: 458957 - DNA, 33 bp, Homo sapien
caccattactgctctacactgaagagctgtgca

SEQ ID NO: 458958 - DNA, 33 bp, Homo sapien
caccattactgctctatactgaagagctgtgca

SEQ ID NO: 458959 - DNA, 33 bp, Homo sapien
acatcctctccagagcaagcttacttcttacac

SEQ ID NO: 458960 - DNA, 33 bp, Homo sapien
acatcctctccagagcgagcttacttcttacac

SEQ ID NO: 458961 - DNA, 33 bp, Homo sapien
atctacagtccgatgaatacattttatacgatg

SEQ ID NO: 458962 - DNA, 33 bp, Homo sapien
atctacagtccgatgagtacattttatacgatg

SEQ ID NO: 458963 - DNA, 33 bp, Homo sapien
acactgggaaaacaccacgtgcggatcgggcac

SEQ ID NO: 458964 - DNA, 33 bp, Homo sapien
acactgggaaaacaccgcgtgcggatcgggcac

SEQ ID NO: 458965 - DNA, 33 bp, Homo sapien
aagaactgaaccagaaaacagctgtagaggatt

SEQ ID NO: 458966 - DNA, 33 bp, Homo sapien
aagaactgaaccagaagacagctgtagaggatt

SEQ ID NO: 458967 - DNA, 33 bp, Homo sapien
ggcttctcttgaaaacgaacacgcaggcagatg

SEQ ID NO: 458968 - DNA, 33 bp, Homo sapien
ggcttctcttgaaaactaacacgcaggcagatg

SEQ ID NO: 458969 - DNA, 33 bp, Homo sapien
tttgtaccaaaatacgaaattgtattacagcac

SEQ ID NO: 458970 - DNA, 33 bp, Homo sapien
tttgtaccaaaatacgcaattgtattacagcac

SEQ ID NO: 458971 - DNA, 33 bp, Homo sapien
ctgccactggattacaaaaatagtactggtagg

SEQ ID NO: 458972 - DNA, 33 bp, Homo sapien
ctgccactggattacacaaatagtactggtagg

SEQ ID NO: 458973 - DNA, 33 bp, Homo sapien
ctgggagccactgtgacgctactgtgtatgctt

SEQ ID NO: 458974 - DNA, 33 bp, Homo sapien
ctgggagccactgtgatgctactgtgtatgctt

SEQ ID NO: 458975 - DNA, 33 bp, Homo sapien
gcttcatttagtatgcaccggaacaacaggaaa

SEQ ID NO: 458976 - DNA, 33 bp, Homo sapien
gcttcatttagtatgcgccggaacaacaggaaa

SEQ ID NO: 458977 - DNA, 33 bp, Homo sapien
taaagtttgggaaacaatgagggaatttgacac

SEQ ID NO: 458978 - DNA, 33 bp, Homo sapien
taaagtttgggaaacagtgagggaatttgacac

SEQ ID NO: 458979 - DNA, 33 bp, Homo sapien
taaaagtgagctgtcactattccagacattgtc

SEQ ID NO: 458980 - DNA, 33 bp, Homo sapien
taaaagtgagctgtcattattccagacattgtc

SEQ ID NO: 458981 - DNA, 33 bp, Homo sapien
gcatgatccctaaaaaaatcaatccaacttcat

SEQ ID NO: 458982 - DNA, 33 bp, Homo sapien
gcatgatccctaaaaacatcaatccaacttcat

SEQ ID NO: 458983 - DNA, 33 bp, Homo sapien
gttgtaacaccggtaaaagagagccagggaggt

SEQ ID NO: 458984 - DNA, 33 bp, Homo sapien
gttgtaacaccggtaagagagagccagggaggt

SEQ ID NO: 458985 - DNA, 33 bp, Homo sapien
cttgcctccaggagccaggccattgtccctcct

SEQ ID NO: 458986 - DNA, 33 bp, Homo sapien
cttgcctccaggagccgggccattgtccctcct

SEQ ID NO: 458987 - DNA, 33 bp, Homo sapien
aattgtttaacttacaacctgactccctggcag

SEQ ID NO: 458988 - DNA, 33 bp, Homo sapien
aattgtttaacttacatcctgactccctggcag

SEQ ID NO: 458989 - DNA, 33 bp, Homo sapien
aggaagagggtgacaacggcccctgcttgctct

SEQ ID NO: 458990 - DNA, 33 bp, Homo sapien
aggaagagggtgacaatggcccctgcttgctct

SEQ ID NO: 458991 - DNA, 33 bp, Homo sapien
caagggtttttaaggcaagataccctggaggga

SEQ ID NO: 458992 - DNA, 33 bp, Homo sapien
caagggtttttaaggccagataccctggaggga

SEQ ID NO: 458993 - DNA, 33 bp, Homo sapien
ctcctatcagctcccccagcaggccaagtctgt

SEQ ID NO: 458994 - DNA, 33 bp, Homo sapien
ctcctatcagctcccctagcaggccaagtctgt

SEQ ID NO: 458995 - DNA, 33 bp, Homo sapien
agtgagagacagagacagattcacagagcagag

SEQ ID NO: 458996 - DNA, 33 bp, Homo sapien
agtgagagacagagacggattcacagagcagag

SEQ ID NO: 458997 - DNA, 33 bp, Homo sapien
tgcttttcggtaggcacataatccacagatcca

SEQ ID NO: 458998 - DNA, 33 bp, Homo sapien
tgcttttcggtaggcatataatccacagatcca

SEQ ID NO: 458999 - DNA, 33 bp, Homo sapien
tcctggctcatttttacggcttcttagtattgc

SEQ ID NO: 459000 - DNA, 33 bp, Homo sapien
tcctggctcatttttatggcttcttagtattgc

SEQ ID NO: 459001 - DNA, 33 bp, Homo sapien
gatgtggaccatgagcaatgttatcctgtggaa

SEQ ID NO: 459002 - DNA, 33 bp, Homo sapien
gatgtggaccatgagcgatgttatcctgtggaa

SEQ ID NO: 459003 - DNA, 33 bp, Homo sapien
gcctgtggagtcactcaaacacacacaatgccc

SEQ ID NO: 459004 - DNA, 33 bp, Homo sapien
gcctgtggagtcactcgaacacacacaatgccc

SEQ ID NO: 459005 - DNA, 33 bp, Homo sapien
gtttgtttcagttggccatttaagtttagtagt

SEQ ID NO: 459006 - DNA, 33 bp, Homo sapien
gtttgtttcagttggctatttaagtttagtagt

SEQ ID NO: 459007 - DNA, 33 bp, Homo sapien
cttaaagtttgaagcccgcatttgtcttatctg

SEQ ID NO: 459008 - DNA, 33 bp, Homo sapien
cttaaagtttgaagcctgcatttgtcttatctg

SEQ ID NO: 459009 - DNA, 33 bp, Homo sapien
accccataactctgctaacaagagaaaatattg

SEQ ID NO: 459010 - DNA, 33 bp, Homo sapien
accccataactctgctgacaagagaaaatattg

SEQ ID NO: 459011 - DNA, 33 bp, Homo sapien
gtggcctatttctagccctccactgtgctgaat

SEQ ID NO: 459012 - DNA, 33 bp, Homo sapien
gtggcctatttctagctctccactgtgctgaat

SEQ ID NO: 459013 - DNA, 33 bp, Homo sapien
taacctatgacagataacatatcacctgctggc

SEQ ID NO: 459014 - DNA, 33 bp, Homo sapien
taacctatgacagatagcatatcacctgctggc

SEQ ID NO: 459015 - DNA, 33 bp, Homo sapien
gtttttaccaagaagacgatgagatatgccaga

SEQ ID NO: 459016 - DNA, 33 bp, Homo sapien
gtttttaccaagaagatgatgagatatgccaga

SEQ ID NO: 459017 - DNA, 33 bp, Homo sapien
caattcaccagggagaaagaactacaaggagaa

SEQ ID NO: 459018 - DNA, 33 bp, Homo sapien
caattcaccagggagacagaactacaaggagaa

SEQ ID NO: 459019 - DNA, 33 bp, Homo sapien
aacccagacttggcaagctcagtccatctagag

SEQ ID NO: 459020 - DNA, 33 bp, Homo sapien
aacccagacttggcaatctcagtccatctagag

SEQ ID NO: 459021 - DNA, 33 bp, Homo sapien
ggcttctgaatactccacagcactggagagtct

SEQ ID NO: 459022 - DNA, 33 bp, Homo sapien
ggcttctgaatactccgcagcactggagagtct

SEQ ID NO: 459023 - DNA, 33 bp, Homo sapien
ctagtgtcttgagaacaatcttaagtaatagaa

SEQ ID NO: 459024 - DNA, 33 bp, Homo sapien
ctagtgtcttgagaaccatcttaagtaatagaa

SEQ ID NO: 459025 - DNA, 33 bp, Homo sapien
aggacttccaggggccaccaaagaagttgggtc

SEQ ID NO: 459026 - DNA, 33 bp, Homo sapien
aggacttccaggggccgccaaagaagttgggtc

SEQ ID NO: 459027 - DNA, 33 bp, Homo sapien
ttctctcttgttgccaccaaatttatttgtgtc

SEQ ID NO: 459028 - DNA, 33 bp, Homo sapien
ttctctcttgttgccatcaaatttatttgtgtc

SEQ ID NO: 459029 - DNA, 33 bp, Homo sapien
ctgtgcccagccggacgcatctttttaaattaa

SEQ ID NO: 459030 - DNA, 33 bp, Homo sapien
ctgtgcccagccggactcatctttttaaattaa

SEQ ID NO: 459031 - DNA, 33 bp, Homo sapien
tcttatctcagaagccaaatctgtccaagaact

SEQ ID NO: 459032 - DNA, 33 bp, Homo sapien
tcttatctcagaagccgaatctgtccaagaact

SEQ ID NO: 459033 - DNA, 33 bp, Homo sapien
aggtgacaagccttaacagtcctgtctgcagag

SEQ ID NO: 459034 - DNA, 33 bp, Homo sapien
aggtgacaagccttaatagtcctgtctgcagag

SEQ ID NO: 459035 - DNA, 33 bp, Homo sapien
ccgctcctggcccggacgctctctttttaccgt

SEQ ID NO: 459036 - DNA, 33 bp, Homo sapien
ccgctcctggcccggatgctctctttttaccgt

SEQ ID NO: 459037 - DNA, 33 bp, Homo sapien
aaaaaggaacgtcagagaacttaagattaaccc

SEQ ID NO: 459038 - DNA, 33 bp, Homo sapien
aaaaaggaacgtcagataacttaagattaaccc

SEQ ID NO: 459039 - DNA, 33 bp, Homo sapien
gtgaagattgtgcactcacaaactaggtgatag

SEQ ID NO: 459040 - DNA, 33 bp, Homo sapien
gtgaagattgtgcacttacaaactaggtgatag

SEQ ID NO: 459041 - DNA, 33 bp, Homo sapien
gaaaagaaaaagcctgaattctaagagaggaat

SEQ ID NO: 459042 - DNA, 33 bp, Homo sapien
gaaaagaaaaagcctgcattctaagagaggaat

SEQ ID NO: 459043 - DNA, 33 bp, Homo sapien
aagcattcatttcaccaccaaccaggcatccac

SEQ ID NO: 459044 - DNA, 33 bp, Homo sapien
aagcattcatttcaccgccaaccaggcatccac

SEQ ID NO: 459045 - DNA, 33 bp, Homo sapien
gggtcagagatggtcccactaagtgcaggtatg

SEQ ID NO: 459046 - DNA, 33 bp, Homo sapien
gggtcagagatggtcctactaagtgcaggtatg

SEQ ID NO: 459047 - DNA, 33 bp, Homo sapien
gttccaggctttggcgcagcagatgctttgggc

SEQ ID NO: 459048 - DNA, 33 bp, Homo sapien
gttccaggctttggcgtagcagatgctttgggc

SEQ ID NO: 459049 - DNA, 33 bp, Homo sapien
atgatcattgccctcacagatgttgaagaagag

SEQ ID NO: 459050 - DNA, 33 bp, Homo sapien
atgatcattgccctcatagatgttgaagaagag

SEQ ID NO: 459051 - DNA, 33 bp, Homo sapien
cactctctctcatagccctgatcttgtttttct

SEQ ID NO: 459052 - DNA, 33 bp, Homo sapien
cactctctctcatagcgctgatcttgtttttct

SEQ ID NO: 459053 - DNA, 33 bp, Homo sapien
gtttctgctctttctaacgcgtgatagcggcgc

SEQ ID NO: 459054 - DNA, 33 bp, Homo sapien
gtttctgctctttctaccgcgtgatagcggcgc

SEQ ID NO: 459055 - DNA, 33 bp, Homo sapien
aaaacaaggacacttgcaaccttgccggggacg

SEQ ID NO: 459056 - DNA, 33 bp, Homo sapien
aaaacaaggacacttggaaccttgccggggacg

SEQ ID NO: 459057 - DNA, 33 bp, Homo sapien
acagagtatgatacacagtactctctaagcttc

SEQ ID NO: 459058 - DNA, 33 bp, Homo sapien
acagagtatgatacacggtactctctaagcttc

SEQ ID NO: 459059 - DNA, 33 bp, Homo sapien
catcatctggcccaacgagctcttctcagatac

SEQ ID NO: 459060 - DNA, 33 bp, Homo sapien
catcatctggcccaactagctcttctcagatac

SEQ ID NO: 459061 - DNA, 33 bp, Homo sapien
tttcattgacacccataacgaacattggtgcat

SEQ ID NO: 459062 - DNA, 33 bp, Homo sapien
tttcattgacacccatgacgaacattggtgcat

SEQ ID NO: 459063 - DNA, 33 bp, Homo sapien
accttttccctgcctcactccaggttttagtga

SEQ ID NO: 459064 - DNA, 33 bp, Homo sapien
accttttccctgcctcgctccaggttttagtga

SEQ ID NO: 459065 - DNA, 33 bp, Homo sapien
agttggtaattttgcaacctacacttgtctcaa

SEQ ID NO: 459066 - DNA, 33 bp, Homo sapien
agttggtaattttgcatcctacacttgtctcaa

SEQ ID NO: 459067 - DNA, 33 bp, Homo sapien
acctactttgacccacagtatcctgatttccat

SEQ ID NO: 459068 - DNA, 33 bp, Homo sapien
acctactttgacccacggtatcctgatttccat

SEQ ID NO: 459069 - DNA, 33 bp, Homo sapien
tgcttagacacacggtaaaataataaatgaccc

SEQ ID NO: 459070 - DNA, 33 bp, Homo sapien
tgcttagacacacggtgaaataataaatgaccc

SEQ ID NO: 459071 - DNA, 33 bp, Homo sapien
aagaaacagggagctacgtgaaggccaatggca

SEQ ID NO: 459072 - DNA, 33 bp, Homo sapien
aagaaacagggagctatgtgaaggccaatggca

SEQ ID NO: 459073 - DNA, 33 bp, Homo sapien
agctgtggttttttgacagaccatggtagctca

SEQ ID NO: 459074 - DNA, 33 bp, Homo sapien
agctgtggttttttgatagaccatggtagctca

SEQ ID NO: 459075 - DNA, 33 bp, Homo sapien
ctcttgaggggatctcaatggctgttaacaaac

SEQ ID NO: 459076 - DNA, 33 bp, Homo sapien
ctcttgaggggatctcgatggctgttaacaaac

SEQ ID NO: 459077 - DNA, 33 bp, Homo sapien
tgtgaacagggaactaacggtcagatgtgcggt

SEQ ID NO: 459078 - DNA, 33 bp, Homo sapien
tgtgaacagggaactagcggtcagatgtgcggt

SEQ ID NO: 459079 - DNA, 33 bp, Homo sapien
caagagacagatggagacggacaaggagatgag

SEQ ID NO: 459080 - DNA, 33 bp, Homo sapien
caagagacagatggagtcggacaaggagatgag

SEQ ID NO: 459081 - DNA, 33 bp, Homo sapien
aaagtaggcacataccactggcacttattatgg

SEQ ID NO: 459082 - DNA, 33 bp, Homo sapien
aaagtaggcacataccgctggcacttattatgg

SEQ ID NO: 459083 - DNA, 33 bp, Homo sapien
agtcatttactgtgtacctaatatacgccaggc

SEQ ID NO: 459084 - DNA, 33 bp, Homo sapien
agtcatttactgtgtatctaatatacgccaggc

SEQ ID NO: 459085 - DNA, 33 bp, Homo sapien
gtcttgctctgttgcccagtggtacgatcacgg

SEQ ID NO: 459086 - DNA, 33 bp, Homo sapien
gtcttgctctgttgcctagtggtacgatcacgg

SEQ ID NO: 459087 - DNA, 33 bp, Homo sapien
gtgcattctggaggtaaagggggtggtctctcc

SEQ ID NO: 459088 - DNA, 33 bp, Homo sapien
gtgcattctggaggtagagggggtggtctctcc

SEQ ID NO: 459089 - DNA, 33 bp, Homo sapien
cagatacgaagagaacaagaacctcagtgtctt

SEQ ID NO: 459090 - DNA, 33 bp, Homo sapien
cagatacgaagagaaccagaacctcagtgtctt

SEQ ID NO: 459091 - DNA, 33 bp, Homo sapien
aaccatctccttacccaaatcttgagaggaaac

SEQ ID NO: 459092 - DNA, 33 bp, Homo sapien
aaccatctccttacccgaatcttgagaggaaac

SEQ ID NO: 459093 - DNA, 33 bp, Homo sapien
gcgctcaggagctccaaggacaagaacatctgt

SEQ ID NO: 459094 - DNA, 33 bp, Homo sapien
gcgctcaggagctccagggacaagaacatctgt

SEQ ID NO: 459095 - DNA, 33 bp, Homo sapien
ctgggcttaacacccaataaagaactttgctga

SEQ ID NO: 459096 - DNA, 33 bp, Homo sapien
ctgggcttaacacccagtaaagaactttgctga

SEQ ID NO: 459097 - DNA, 33 bp, Homo sapien
gctgtgattacaggccagacgtaccatgcccag

SEQ ID NO: 459098 - DNA, 33 bp, Homo sapien
gctgtgattacaggccggacgtaccatgcccag

SEQ ID NO: 459099 - DNA, 33 bp, Homo sapien
aaatctaaaaatgagcaatatcagttaggtact

SEQ ID NO: 459100 - DNA, 33 bp, Homo sapien
aaatctaaaaatgagcgatatcagttaggtact

SEQ ID NO: 459101 - DNA, 33 bp, Homo sapien
tttctcacctatctgaagcacacaacctggatt

SEQ ID NO: 459102 - DNA, 33 bp, Homo sapien
tttctcacctatctgaggcacacaacctggatt

SEQ ID NO: 459103 - DNA, 33 bp, Homo sapien
atggcccggcctggaaaataagagtctccattc

SEQ ID NO: 459104 - DNA, 33 bp, Homo sapien
atggcccggcctggaagataagagtctccattc

SEQ ID NO: 459105 - DNA, 33 bp, Homo sapien
ggatgggattggcatcaacagtgcagactatgt

SEQ ID NO: 459106 - DNA, 33 bp, Homo sapien
ggatgggattggcatcgacagtgcagactatgt

SEQ ID NO: 459107 - DNA, 33 bp, Homo sapien
caccagatgctcccaccatccgtgccctccagg

SEQ ID NO: 459108 - DNA, 33 bp, Homo sapien
caccagatgctcccactatccgtgccctccagg

SEQ ID NO: 459109 - DNA, 33 bp, Homo sapien
tcagcccccagcttcaccctcgatgctggactt

SEQ ID NO: 459110 - DNA, 33 bp, Homo sapien
tcagcccccagcttcatcctcgatgctggactt

SEQ ID NO: 459111 - DNA, 33 bp, Homo sapien
aattattatgttattgcaaaatagtacataggc

SEQ ID NO: 459112 - DNA, 33 bp, Homo sapien
aattattatgttattggaaaatagtacataggc

SEQ ID NO: 459113 - DNA, 33 bp, Homo sapien
ggtcaggagaggagaagatgggtcaaagcctgg

SEQ ID NO: 459114 - DNA, 33 bp, Homo sapien
ggtcaggagaggagaatatgggtcaaagcctgg

SEQ ID NO: 459115 - DNA, 33 bp, Homo sapien
gcgcatttgggagctgaaaggatgtgagcacct

SEQ ID NO: 459116 - DNA, 33 bp, Homo sapien
gcgcatttgggagctggaaggatgtgagcacct

SEQ ID NO: 459117 - DNA, 33 bp, Homo sapien
cagaacataggatcgacggcggggggagtagga

SEQ ID NO: 459118 - DNA, 33 bp, Homo sapien
cagaacataggatcgatggcggggggagtagga

SEQ ID NO: 459119 - DNA, 33 bp, Homo sapien
catgtgagctcgggccacctccagcgatggtcc

SEQ ID NO: 459120 - DNA, 33 bp, Homo sapien
catgtgagctcgggccgcctccagcgatggtcc

SEQ ID NO: 459121 - DNA, 33 bp, Homo sapien
accaagtgaggcaaaaaaaggaaatcatggact

SEQ ID NO: 459122 - DNA, 33 bp, Homo sapien
accaagtgaggcaaaataaggaaatcatggact

SEQ ID NO: 459123 - DNA, 33 bp, Homo sapien
gaatctgttaaatccacgaacaaatattcagat

SEQ ID NO: 459124 - DNA, 33 bp, Homo sapien
gaatctgttaaatccatgaacaaatattcagat

SEQ ID NO: 459125 - DNA, 33 bp, Homo sapien
aatgtgaagaaatctgaaaatgtggtcgaggac

SEQ ID NO: 459126 - DNA, 33 bp, Homo sapien
aatgtgaagaaatctggaaatgtggtcgaggac

SEQ ID NO: 459127 - DNA, 33 bp, Homo sapien
catagcctttatcttacatgttcctgaaagtgc

SEQ ID NO: 459128 - DNA, 33 bp, Homo sapien
catagcctttatcttatatgttcctgaaagtgc

SEQ ID NO: 459129 - DNA, 33 bp, Homo sapien
ttatctgacagaagtgcattccctcttgaaagt

SEQ ID NO: 459130 - DNA, 33 bp, Homo sapien
ttatctgacagaagtgtattccctcttgaaagt

SEQ ID NO: 459131 - DNA, 33 bp, Homo sapien
atgataagcaagtacacgaaaaagataatttca

SEQ ID NO: 459132 - DNA, 33 bp, Homo sapien
atgataagcaagtacatgaaaaagataatttca

SEQ ID NO: 459133 - DNA, 33 bp, Homo sapien
gagagtggatagaagcactaggctgtggctttc

SEQ ID NO: 459134 - DNA, 33 bp, Homo sapien
gagagtggatagaagcgctaggctgtggctttc

SEQ ID NO: 459135 - DNA, 33 bp, Homo sapien
aaattctcacaaccacaataagagctaggtact

SEQ ID NO: 459136 - DNA, 33 bp, Homo sapien
aaattctcacaaccacgataagagctaggtact

SEQ ID NO: 459137 - DNA, 33 bp, Homo sapien
caaaatctgcacaccccagctgctgaggtcctg

SEQ ID NO: 459138 - DNA, 33 bp, Homo sapien
caaaatctgcacaccctagctgctgaggtcctg

SEQ ID NO: 459139 - DNA, 33 bp, Homo sapien
gaagagcagaaagtgccgatttttttctgtgaa

SEQ ID NO: 459140 - DNA, 33 bp, Homo sapien
gaagagcagaaagtgctgatttttttctgtgaa

SEQ ID NO: 459141 - DNA, 33 bp, Homo sapien
cactctccagagaaggaactgtcaccatgccca

SEQ ID NO: 459142 - DNA, 33 bp, Homo sapien
cactctccagagaagggactgtcaccatgccca

SEQ ID NO: 459143 - DNA, 33 bp, Homo sapien
tttctagtggggagacagcatcaagtgagagac

SEQ ID NO: 459144 - DNA, 33 bp, Homo sapien
tttctagtggggagacggcatcaagtgagagac

SEQ ID NO: 459145 - DNA, 33 bp, Homo sapien
tataaatagacacgtacagggttgggcctccta

SEQ ID NO: 459146 - DNA, 33 bp, Homo sapien
tataaatagacacgtagagggttgggcctccta

SEQ ID NO: 459147 - DNA, 33 bp, Homo sapien
gggcagggctgccctggaacagaccaagtgcac

SEQ ID NO: 459148 - DNA, 33 bp, Homo sapien
gggcagggctgccctgtaacagaccaagtgcac

SEQ ID NO: 459149 - DNA, 33 bp, Homo sapien
ataggaatggcctttacctccggatgaagcgtc

SEQ ID NO: 459150 - DNA, 33 bp, Homo sapien
ataggaatggcctttatctccggatgaagcgtc

SEQ ID NO: 459151 - DNA, 33 bp, Homo sapien
tagatataaccatcataaagaaaagttctggcc

SEQ ID NO: 459152 - DNA, 33 bp, Homo sapien
tagatataaccatcattaagaaaagttctggcc

SEQ ID NO: 459153 - DNA, 33 bp, Homo sapien
aaaaatctcctcttaactcttgactcttagtcc

SEQ ID NO: 459154 - DNA, 33 bp, Homo sapien
aaaaatctcctcttaattcttgactcttagtcc

SEQ ID NO: 459155 - DNA, 33 bp, Homo sapien
tacctcaagaaggatacacgtgacacgcgtaaa

SEQ ID NO: 459156 - DNA, 33 bp, Homo sapien
tacctcaagaaggatatacgtgacacgcgtaaa

SEQ ID NO: 459157 - DNA, 33 bp, Homo sapien
taaagtaagggaaaaccggtatagagagggcta

SEQ ID NO: 459158 - DNA, 33 bp, Homo sapien
taaagtaagggaaaactggtatagagagggcta

SEQ ID NO: 459159 - DNA, 33 bp, Homo sapien
atcttctatatccttacccccagctttcaacca

SEQ ID NO: 459160 - DNA, 33 bp, Homo sapien
atcttctatatccttatccccagctttcaacca

SEQ ID NO: 459161 - DNA, 33 bp, Homo sapien
cgctcttcctggaccgaccacgcagccatcact

SEQ ID NO: 459162 - DNA, 33 bp, Homo sapien
cgctcttcctggaccggccacgcagccatcact

SEQ ID NO: 459163 - DNA, 33 bp, Homo sapien
acacacagacgcaccccccccaacacacaaaca

SEQ ID NO: 459164 - DNA, 33 bp, Homo sapien
acacacagacgcaccctccccaacacacaaaca

SEQ ID NO: 459165 - DNA, 33 bp, Homo sapien
tttacctacttttaccagaagtacaatgactat

SEQ ID NO: 459166 - DNA, 33 bp, Homo sapien
tttacctacttttacctgaagtacaatgactat

SEQ ID NO: 459167 - DNA, 33 bp, Homo sapien
cttcaagacattcaaaaagcatttacagcatca

SEQ ID NO: 459168 - DNA, 33 bp, Homo sapien
cttcaagacattcaaagagcatttacagcatca

SEQ ID NO: 459169 - DNA, 33 bp, Homo sapien
ggtttcattttgcaaacaataggatatgcatga

SEQ ID NO: 459170 - DNA, 33 bp, Homo sapien
ggtttcattttgcaaagaataggatatgcatga

SEQ ID NO: 459171 - DNA, 33 bp, Homo sapien
gtcaggatgaaagcccaagtggagtgacttgat

SEQ ID NO: 459172 - DNA, 33 bp, Homo sapien
gtcaggatgaaagcccgagtggagtgacttgat

SEQ ID NO: 459173 - DNA, 33 bp, Homo sapien
ctatgaaactttgaagaaggaagattgtggttt

SEQ ID NO: 459174 - DNA, 33 bp, Homo sapien
ctatgaaactttgaaggaggaagattgtggttt

SEQ ID NO: 459175 - DNA, 33 bp, Homo sapien
taacctatttaaagaacgctttccactatgcaa

SEQ ID NO: 459176 - DNA, 33 bp, Homo sapien
taacctatttaaagaatgctttccactatgcaa

SEQ ID NO: 459177 - DNA, 33 bp, Homo sapien
gtaacttggtaactaccatttagtctctgattg

SEQ ID NO: 459178 - DNA, 33 bp, Homo sapien
gtaacttggtaactactatttagtctctgattg

SEQ ID NO: 459179 - DNA, 33 bp, Homo sapien
atgtgaaaagctacataaaggaaaaaggggagt

SEQ ID NO: 459180 - DNA, 33 bp, Homo sapien
atgtgaaaagctacattaaggaaaaaggggagt

SEQ ID NO: 459181 - DNA, 33 bp, Homo sapien
ttttttactgggtataaaatgcgacaaaaagag

SEQ ID NO: 459182 - DNA, 33 bp, Homo sapien
ttttttactgggtatataatgcgacaaaaagag

SEQ ID NO: 459183 - DNA, 33 bp, Homo sapien
aaagacattaaaagccaccagagagaagagcag

SEQ ID NO: 459184 - DNA, 33 bp, Homo sapien
aaagacattaaaagccgccagagagaagagcag

SEQ ID NO: 459185 - DNA, 33 bp, Homo sapien
gtttaaaaaacaaaagcaatgatgtcagtaata

SEQ ID NO: 459186 - DNA, 33 bp, Homo sapien
gtttaaaaaacaaaagtaatgatgtcagtaata

SEQ ID NO: 459187 - DNA, 33 bp, Homo sapien
tctttgtatagatctaagagtgttacacagctg

SEQ ID NO: 459188 - DNA, 33 bp, Homo sapien
tctttgtatagatctaggagtgttacacagctg

SEQ ID NO: 459189 - DNA, 33 bp, Homo sapien
ataagcacaagtgcacacttaccgaggaggcag

SEQ ID NO: 459190 - DNA, 33 bp, Homo sapien
ataagcacaagtgcacgcttaccgaggaggcag

SEQ ID NO: 459191 - DNA, 33 bp, Homo sapien
cacctgtaccgggtcacagtcacgatcacacat

SEQ ID NO: 459192 - DNA, 33 bp, Homo sapien
cacctgtaccgggtcatagtcacgatcacacat

SEQ ID NO: 459193 - DNA, 33 bp, Homo sapien
ctttagatacctaaataacatttccagactgtc

SEQ ID NO: 459194 - DNA, 33 bp, Homo sapien
ctttagatacctaaatgacatttccagactgtc

SEQ ID NO: 459195 - DNA, 33 bp, Homo sapien
gtttttccatttgctcacatgtaggtcaaagcc

SEQ ID NO: 459196 - DNA, 33 bp, Homo sapien
gtttttccatttgctcccatgtaggtcaaagcc

SEQ ID NO: 459197 - DNA, 33 bp, Homo sapien
tttgtaatgggatataacaaatcaaaggatcaa

SEQ ID NO: 459198 - DNA, 33 bp, Homo sapien
tttgtaatgggatatagcaaatcaaaggatcaa

SEQ ID NO: 459199 - DNA, 33 bp, Homo sapien
cttcccaaaaatagtcccacctcacaaaaagtc

SEQ ID NO: 459200 - DNA, 33 bp, Homo sapien
cttcccaaaaatagtctcacctcacaaaaagtc

SEQ ID NO: 459201 - DNA, 33 bp, Homo sapien
tatgttactaaggaataaaattagcaagaattg

SEQ ID NO: 459202 - DNA, 33 bp, Homo sapien
tatgttactaaggaatgaaattagcaagaattg

SEQ ID NO: 459203 - DNA, 33 bp, Homo sapien
aatgtaaggagtgtggaaagttctttagactta

SEQ ID NO: 459204 - DNA, 33 bp, Homo sapien
aatgtaaggagtgtgggaagttctttagactta

SEQ ID NO: 459205 - DNA, 33 bp, Homo sapien
gtgagaaggtttttagaattagttcacagctca

SEQ ID NO: 459206 - DNA, 33 bp, Homo sapien
gtgagaaggtttttaggattagttcacagctca

SEQ ID NO: 459207 - DNA, 33 bp, Homo sapien
tttttaaggtcagtcaactagcaataaattcag

SEQ ID NO: 459208 - DNA, 33 bp, Homo sapien
tttttaaggtcagtcagctagcaataaattcag

SEQ ID NO: 459209 - DNA, 33 bp, Homo sapien
aataggcctcaaaacaatgtatatggcaggaga

SEQ ID NO: 459210 - DNA, 33 bp, Homo sapien
aataggcctcaaaacagtgtatatggcaggaga

SEQ ID NO: 459211 - DNA, 33 bp, Homo sapien
caacatcaaccaccacacgtgaaaacgagcaag

SEQ ID NO: 459212 - DNA, 33 bp, Homo sapien
caacatcaaccaccacgcgtgaaaacgagcaag

SEQ ID NO: 459213 - DNA, 33 bp, Homo sapien
atttgcctaaatttcaataagtgtcagacttat

SEQ ID NO: 459214 - DNA, 33 bp, Homo sapien
atttgcctaaatttcagtaagtgtcagacttat

SEQ ID NO: 459215 - DNA, 33 bp, Homo sapien
tgtcataatatccccactgcctatctccatata

SEQ ID NO: 459216 - DNA, 33 bp, Homo sapien
tgtcataatatccccattgcctatctccatata

SEQ ID NO: 459217 - DNA, 33 bp, Homo sapien
tatctccacgatgcccagatgtctggctctgac

SEQ ID NO: 459218 - DNA, 33 bp, Homo sapien
tatctccacgatgcccggatgtctggctctgac

SEQ ID NO: 459219 - DNA, 33 bp, Homo sapien
gtcaaaacacaaccaacagataatgttaacatg

SEQ ID NO: 459220 - DNA, 33 bp, Homo sapien
gtcaaaacacaaccaatagataatgttaacatg

SEQ ID NO: 459221 - DNA, 33 bp, Homo sapien
acatcacttccttacaaacgatgtttttactaa

SEQ ID NO: 459222 - DNA, 33 bp, Homo sapien
acatcacttccttacagacgatgtttttactaa

SEQ ID NO: 459223 - DNA, 33 bp, Homo sapien
acttggggatttcacaataatttcttggacaat

SEQ ID NO: 459224 - DNA, 33 bp, Homo sapien
acttggggatttcacagtaatttcttggacaat

SEQ ID NO: 459225 - DNA, 33 bp, Homo sapien
atgttgcaattagtaaactgtagctgggactac

SEQ ID NO: 459226 - DNA, 33 bp, Homo sapien
atgttgcaattagtaagctgtagctgggactac

SEQ ID NO: 459227 - DNA, 33 bp, Homo sapien
taaaaaatggttaaaacggtaagctctctgtta

SEQ ID NO: 459228 - DNA, 33 bp, Homo sapien
taaaaaatggttaaaatggtaagctctctgtta

SEQ ID NO: 459229 - DNA, 33 bp, Homo sapien
ggctgtttttgcatcacggtacctgaaacccca

SEQ ID NO: 459230 - DNA, 33 bp, Homo sapien
ggctgtttttgcatcatggtacctgaaacccca

SEQ ID NO: 459231 - DNA, 33 bp, Homo sapien
aaccactgtacctggccaagtccacctgttctg

SEQ ID NO: 459232 - DNA, 33 bp, Homo sapien
aaccactgtacctggctaagtccacctgttctg

SEQ ID NO: 459233 - DNA, 33 bp, Homo sapien
tgatacttacttgagacgttaataatctaaacc

SEQ ID NO: 459234 - DNA, 33 bp, Homo sapien
tgatacttacttgagatgttaataatctaaacc

SEQ ID NO: 459235 - DNA, 33 bp, Homo sapien
caaggagaaaaagagaaagaaatcaacaacaaa

SEQ ID NO: 459236 - DNA, 33 bp, Homo sapien
caaggagaaaaagagagagaaatcaacaacaaa

SEQ ID NO: 459237 - DNA, 33 bp, Homo sapien
ctctgggggtagaaaaacatgtgttccaaatag

SEQ ID NO: 459238 - DNA, 33 bp, Homo sapien
ctctgggggtagaaaatcatgtgttccaaatag

SEQ ID NO: 459239 - DNA, 33 bp, Homo sapien
atattatgcagctattaaaggaaatgaagtaaa

SEQ ID NO: 459240 - DNA, 33 bp, Homo sapien
atattatgcagctattcaaggaaatgaagtaaa

SEQ ID NO: 459241 - DNA, 33 bp, Homo sapien
cctgtgtcttaccccagataacagagctgccag

SEQ ID NO: 459242 - DNA, 33 bp, Homo sapien
cctgtgtcttaccccatataacagagctgccag

SEQ ID NO: 459243 - DNA, 33 bp, Homo sapien
tctcggcggaagtagccccgaacggtagaaccg

SEQ ID NO: 459244 - DNA, 33 bp, Homo sapien
tctcggcggaagtagctccgaacggtagaaccg

SEQ ID NO: 459245 - DNA, 33 bp, Homo sapien
ggatgaaacactgaccagacaattcaatctgta

SEQ ID NO: 459246 - DNA, 33 bp, Homo sapien
ggatgaaacactgaccggacaattcaatctgta

SEQ ID NO: 459247 - DNA, 33 bp, Homo sapien
tcaaaatcgtggatggaataagattgtgcgcga

SEQ ID NO: 459248 - DNA, 33 bp, Homo sapien
tcaaaatcgtggatgggataagattgtgcgcga

SEQ ID NO: 459249 - DNA, 33 bp, Homo sapien
tttatttgtgatctaaaatctggtcagtctata

SEQ ID NO: 459250 - DNA, 33 bp, Homo sapien
tttatttgtgatctaacatctggtcagtctata

SEQ ID NO: 459251 - DNA, 33 bp, Homo sapien
gtgatcatttctgataaccagctccagctccag

SEQ ID NO: 459252 - DNA, 33 bp, Homo sapien
gtgatcatttctgatacccagctccagctccag

SEQ ID NO: 459253 - DNA, 33 bp, Homo sapien
gcagacctaccagacacctatcctgctggcatc

SEQ ID NO: 459254 - DNA, 33 bp, Homo sapien
gcagacctaccagacatctatcctgctggcatc

SEQ ID NO: 459255 - DNA, 33 bp, Homo sapien
ggtattttgcttctcaagtattttgctgtagaa

SEQ ID NO: 459256 - DNA, 33 bp, Homo sapien
ggtattttgcttctcaggtattttgctgtagaa

SEQ ID NO: 459257 - DNA, 33 bp, Homo sapien
ttgaatgcttgtttaacctctgtctgctacaat

SEQ ID NO: 459258 - DNA, 33 bp, Homo sapien
ttgaatgcttgtttaatctctgtctgctacaat

SEQ ID NO: 459259 - DNA, 33 bp, Homo sapien
ggctgagtcttagaaaacttcaatctttaggga

SEQ ID NO: 459260 - DNA, 33 bp, Homo sapien
ggctgagtcttagaaagcttcaatctttaggga

SEQ ID NO: 459261 - DNA, 33 bp, Homo sapien
taaactcttctgtttcaccatcacgttgttggt

SEQ ID NO: 459262 - DNA, 33 bp, Homo sapien
taaactcttctgtttctccatcacgttgttggt

SEQ ID NO: 459263 - DNA, 33 bp, Homo sapien
tgcaccatgcgtgagagattctaattatataca

SEQ ID NO: 459264 - DNA, 33 bp, Homo sapien
tgcaccatgcgtgagatattctaattatataca

SEQ ID NO: 459265 - DNA, 33 bp, Homo sapien
aaagtgagaccaaataccacaccaggtgctgaa

SEQ ID NO: 459266 - DNA, 33 bp, Homo sapien
aaagtgagaccaaatatcacaccaggtgctgaa

SEQ ID NO: 459267 - DNA, 33 bp, Homo sapien
ccacttttgttctttcactacagattgcattgg

SEQ ID NO: 459268 - DNA, 33 bp, Homo sapien
ccacttttgttctttcgctacagattgcattgg

SEQ ID NO: 459269 - DNA, 33 bp, Homo sapien
agaatatgtaaaaacactcctaagtgactatta

SEQ ID NO: 459270 - DNA, 33 bp, Homo sapien
agaatatgtaaaaacattcctaagtgactatta

SEQ ID NO: 459271 - DNA, 33 bp, Homo sapien
gaaaaagatagacaaccgactaagtttagccaa

SEQ ID NO: 459272 - DNA, 33 bp, Homo sapien
gaaaaagatagacaactgactaagtttagccaa

SEQ ID NO: 459273 - DNA, 33 bp, Homo sapien
aactccatgaaaacaaagacttatttttgtctg

SEQ ID NO: 459274 - DNA, 33 bp, Homo sapien
aactccatgaaaacaaggacttatttttgtctg

SEQ ID NO: 459275 - DNA, 33 bp, Homo sapien
agatgggacattagtacaggcaggaagtgaaga

SEQ ID NO: 459276 - DNA, 33 bp, Homo sapien
agatgggacattagtataggcaggaagtgaaga

SEQ ID NO: 459277 - DNA, 33 bp, Homo sapien
ttctaaggaagaaaacccaaaagacatcttaaa

SEQ ID NO: 459278 - DNA, 33 bp, Homo sapien
ttctaaggaagaaaactcaaaagacatcttaaa

SEQ ID NO: 459279 - DNA, 33 bp, Homo sapien
tccctaaccgtacatacgcgaaatcatacagct

SEQ ID NO: 459280 - DNA, 33 bp, Homo sapien
tccctaaccgtacatatgcgaaatcatacagct

SEQ ID NO: 459281 - DNA, 33 bp, Homo sapien
ggaaatgaataaagcaaaactggatggaaagag

SEQ ID NO: 459282 - DNA, 33 bp, Homo sapien
ggaaatgaataaagcagaactggatggaaagag

SEQ ID NO: 459283 - DNA, 33 bp, Homo sapien
attatttccaaaaccaaaaaacataataagagc

SEQ ID NO: 459284 - DNA, 33 bp, Homo sapien
attatttccaaaaccagaaaacataataagagc

SEQ ID NO: 459285 - DNA, 33 bp, Homo sapien
aaataatggtaccacaatcacctgttaatgaat

SEQ ID NO: 459286 - DNA, 33 bp, Homo sapien
aaataatggtaccacagtcacctgttaatgaat

SEQ ID NO: 459287 - DNA, 33 bp, Homo sapien
gtattcggccttctataaggtggctagctggtt

SEQ ID NO: 459288 - DNA, 33 bp, Homo sapien
gtattcggccttctatcaggtggctagctggtt

SEQ ID NO: 459289 - DNA, 33 bp, Homo sapien
caggaccattgtgatgaaacaactcattatgct

SEQ ID NO: 459290 - DNA, 33 bp, Homo sapien
caggaccattgtgatgcaacaactcattatgct

SEQ ID NO: 459291 - DNA, 33 bp, Homo sapien
cctctcttatggtaacaaatcagagaactggtt

SEQ ID NO: 459292 - DNA, 33 bp, Homo sapien
cctctcttatggtaacgaatcagagaactggtt

SEQ ID NO: 459293 - DNA, 33 bp, Homo sapien
ctgtcatcctcacaaaaaaatgcaggtgacctt

SEQ ID NO: 459294 - DNA, 33 bp, Homo sapien
ctgtcatcctcacaaagaaatgcaggtgacctt

SEQ ID NO: 459295 - DNA, 33 bp, Homo sapien
ctctaccatttttaaccgcgtaactttgaggcg

SEQ ID NO: 459296 - DNA, 33 bp, Homo sapien
ctctaccatttttaactgcgtaactttgaggcg

SEQ ID NO: 459297 - DNA, 33 bp, Homo sapien
cagctttgttctttaacgagagtatttagtcat

SEQ ID NO: 459298 - DNA, 33 bp, Homo sapien
cagctttgttctttaatgagagtatttagtcat

SEQ ID NO: 459299 - DNA, 33 bp, Homo sapien
tggtgaaccaagaaagccgtaaatacatggata

SEQ ID NO: 459300 - DNA, 33 bp, Homo sapien
tggtgaaccaagaaagtcgtaaatacatggata

SEQ ID NO: 459301 - DNA, 33 bp, Homo sapien
caaaattctcttatccaaaaatacgaatcaaat

SEQ ID NO: 459302 - DNA, 33 bp, Homo sapien
caaaattctcttatccgaaaatacgaatcaaat

SEQ ID NO: 459303 - DNA, 33 bp, Homo sapien
cttaaagtgcttaaagaacaatgattgtccttg

SEQ ID NO: 459304 - DNA, 33 bp, Homo sapien
cttaaagtgcttaaagtacaatgattgtccttg

SEQ ID NO: 459305 - DNA, 33 bp, Homo sapien
aaatctcagagagaaaaaaaacacagactctgt

SEQ ID NO: 459306 - DNA, 33 bp, Homo sapien
aaatctcagagagaaagaaaacacagactctgt

SEQ ID NO: 459307 - DNA, 33 bp, Homo sapien
ctccttgttccttagccaccagaactgatggag

SEQ ID NO: 459308 - DNA, 33 bp, Homo sapien
ctccttgttccttagctaccagaactgatggag

SEQ ID NO: 459309 - DNA, 33 bp, Homo sapien
tggaatactatttggcaatataaaagaatgagg

SEQ ID NO: 459310 - DNA, 33 bp, Homo sapien
tggaatactatttggctatataaaagaatgagg

SEQ ID NO: 459311 - DNA, 33 bp, Homo sapien
cagggaaaactgacaacgggccgcaagacccag

SEQ ID NO: 459312 - DNA, 33 bp, Homo sapien
cagggaaaactgacaatgggccgcaagacccag

SEQ ID NO: 459313 - DNA, 33 bp, Homo sapien
ggcttgttctccggcacaggccctctcctggtt

SEQ ID NO: 459314 - DNA, 33 bp, Homo sapien
ggcttgttctccggcataggccctctcctggtt

SEQ ID NO: 459315 - DNA, 33 bp, Homo sapien
attttctgttttttaacggcagcctttctaatg

SEQ ID NO: 459316 - DNA, 33 bp, Homo sapien
attttctgttttttaatggcagcctttctaatg

SEQ ID NO: 459317 - DNA, 33 bp, Homo sapien
agcacagacattaagaaaaccaggtagcaacag

SEQ ID NO: 459318 - DNA, 33 bp, Homo sapien
agcacagacattaagacaaccaggtagcaacag

SEQ ID NO: 459319 - DNA, 33 bp, Homo sapien
tgacctccctgtcaacgccacataaaagcatag

SEQ ID NO: 459320 - DNA, 33 bp, Homo sapien
tgacctccctgtcaactccacataaaagcatag

SEQ ID NO: 459321 - DNA, 33 bp, Homo sapien
gaatatgcaaagaccaactttttcacttatcag

SEQ ID NO: 459322 - DNA, 33 bp, Homo sapien
gaatatgcaaagaccatctttttcacttatcag

SEQ ID NO: 459323 - DNA, 33 bp, Homo sapien
gtgattttccaacctacatgataactttattcc

SEQ ID NO: 459324 - DNA, 33 bp, Homo sapien
gtgattttccaacctagatgataactttattcc

SEQ ID NO: 459325 - DNA, 33 bp, Homo sapien
ctggtaatcttcacaagaatagttttggcagaa

SEQ ID NO: 459326 - DNA, 33 bp, Homo sapien
ctggtaatcttcacaataatagttttggcagaa

SEQ ID NO: 459327 - DNA, 33 bp, Homo sapien
agataaagaaaatcatgatctgaatctgaatca

SEQ ID NO: 459328 - DNA, 33 bp, Homo sapien
agataaagaaaatcattatctgaatctgaatca

SEQ ID NO: 459329 - DNA, 33 bp, Homo sapien
ttttaatccttcctatcaactgattcagattca

SEQ ID NO: 459330 - DNA, 33 bp, Homo sapien
ttttaatccttcctattaactgattcagattca

SEQ ID NO: 459331 - DNA, 33 bp, Homo sapien
aaataacagacatacacgagtttgtttcaaata

SEQ ID NO: 459332 - DNA, 33 bp, Homo sapien
aaataacagacatacatgagtttgtttcaaata

SEQ ID NO: 459333 - DNA, 33 bp, Homo sapien
aagaaaatcagaaggaatatttcaggcaaggga

SEQ ID NO: 459334 - DNA, 33 bp, Homo sapien
aagaaaatcagaaggagtatttcaggcaaggga

SEQ ID NO: 459335 - DNA, 33 bp, Homo sapien
gatacatataacaaaaagatcaactagtagagc

SEQ ID NO: 459336 - DNA, 33 bp, Homo sapien
gatacatataacaaaatgatcaactagtagagc

SEQ ID NO: 459337 - DNA, 33 bp, Homo sapien
tttgagatggactttcacctcaccataacctct

SEQ ID NO: 459338 - DNA, 33 bp, Homo sapien
tttgagatggactttcgcctcaccataacctct

SEQ ID NO: 459339 - DNA, 33 bp, Homo sapien
cagaatcagtatgatgacaaaggtttctattct

SEQ ID NO: 459340 - DNA, 33 bp, Homo sapien
cagaatcagtatgatggcaaaggtttctattct

SEQ ID NO: 459341 - DNA, 33 bp, Homo sapien
aacaaacgaatgaacgaatgaataataacaata

SEQ ID NO: 459342 - DNA, 33 bp, Homo sapien
aacaaacgaatgaacggatgaataataacaata

SEQ ID NO: 459343 - DNA, 33 bp, Homo sapien
tagactggccccagacaccacccagcaactgtg

SEQ ID NO: 459344 - DNA, 33 bp, Homo sapien
tagactggccccagacgccacccagcaactgtg

SEQ ID NO: 459345 - DNA, 33 bp, Homo sapien
tttttcaacactatgcagagtgagataagccag

SEQ ID NO: 459346 - DNA, 33 bp, Homo sapien
tttttcaacactatgcggagtgagataagccag

SEQ ID NO: 459347 - DNA, 33 bp, Homo sapien
agagcaatggaattaacgtggatgacatcataa

SEQ ID NO: 459348 - DNA, 33 bp, Homo sapien
agagcaatggaattaatgtggatgacatcataa

SEQ ID NO: 459349 - DNA, 33 bp, Homo sapien
caaatacctaccagaacggataacttgagagat

SEQ ID NO: 459350 - DNA, 33 bp, Homo sapien
caaatacctaccagaatggataacttgagagat

SEQ ID NO: 459351 - DNA, 33 bp, Homo sapien
cacacacgcccgtaagacatagagacctacagc

SEQ ID NO: 459352 - DNA, 33 bp, Homo sapien
cacacacgcccgtaaggcatagagacctacagc

SEQ ID NO: 459353 - DNA, 33 bp, Homo sapien
atttcctagaaggtaagaggccagccaccttcg

SEQ ID NO: 459354 - DNA, 33 bp, Homo sapien
atttcctagaaggtaataggccagccaccttcg

SEQ ID NO: 459355 - DNA, 33 bp, Homo sapien
agtggttcagatttacaagggtaactcaggtga

SEQ ID NO: 459356 - DNA, 33 bp, Homo sapien
agtggttcagatttacgagggtaactcaggtga

SEQ ID NO: 459357 - DNA, 33 bp, Homo sapien
cacttgcactcattgccgactcaacaaatcatc

SEQ ID NO: 459358 - DNA, 33 bp, Homo sapien
cacttgcactcattgctgactcaacaaatcatc

SEQ ID NO: 459359 - DNA, 33 bp, Homo sapien
gctgtcagggccagaaagagtgatatcccagta

SEQ ID NO: 459360 - DNA, 33 bp, Homo sapien
gctgtcagggccagaaggagtgatatcccagta

SEQ ID NO: 459361 - DNA, 33 bp, Homo sapien
gaaatttctgctgatacgaggaagggaaatgct

SEQ ID NO: 459362 - DNA, 33 bp, Homo sapien
gaaatttctgctgatatgaggaagggaaatgct

SEQ ID NO: 459363 - DNA, 33 bp, Homo sapien
aagacggaactaaacacactgagccgggcttcc

SEQ ID NO: 459364 - DNA, 33 bp, Homo sapien
aagacggaactaaacagactgagccgggcttcc

SEQ ID NO: 459365 - DNA, 33 bp, Homo sapien
caaaggccctgagtacaaatatgataacatggt

SEQ ID NO: 459366 - DNA, 33 bp, Homo sapien
caaaggccctgagtacgaatatgataacatggt

SEQ ID NO: 459367 - DNA, 33 bp, Homo sapien
aaacatccaggatccaaatggctattgggagtg

SEQ ID NO: 459368 - DNA, 33 bp, Homo sapien
aaacatccaggatccacatggctattgggagtg

SEQ ID NO: 459369 - DNA, 33 bp, Homo sapien
gactggactccagaaaactctctccaaaccaac

SEQ ID NO: 459370 - DNA, 33 bp, Homo sapien
gactggactccagaaatctctctccaaaccaac

SEQ ID NO: 459371 - DNA, 33 bp, Homo sapien
aaataaagttcctaaacttgcgagattattctg

SEQ ID NO: 459372 - DNA, 33 bp, Homo sapien
aaataaagttcctaaagttgcgagattattctg

SEQ ID NO: 459373 - DNA, 33 bp, Homo sapien
tcttgtcagagcaaagactcccacataaaagga

SEQ ID NO: 459374 - DNA, 33 bp, Homo sapien
tcttgtcagagcaaaggctcccacataaaagga

SEQ ID NO: 459375 - DNA, 33 bp, Homo sapien
aatgtgtgtttaaaagactttggatgatcttta

SEQ ID NO: 459376 - DNA, 33 bp, Homo sapien
aatgtgtgtttaaaaggctttggatgatcttta

SEQ ID NO: 459377 - DNA, 33 bp, Homo sapien
atgttgataattgtcaagaagcaaaatgaaata

SEQ ID NO: 459378 - DNA, 33 bp, Homo sapien
atgttgataattgtcaggaagcaaaatgaaata

SEQ ID NO: 459379 - DNA, 33 bp, Homo sapien
aagagagcgccccgggaaacacaggcaggccgt

SEQ ID NO: 459380 - DNA, 33 bp, Homo sapien
aagagagcgccccggggaacacaggcaggccgt

SEQ ID NO: 459381 - DNA, 33 bp, Homo sapien
tcataactgttcaaaacgaagctttactttctt

SEQ ID NO: 459382 - DNA, 33 bp, Homo sapien
tcataactgttcaaaatgaagctttactttctt

SEQ ID NO: 459383 - DNA, 33 bp, Homo sapien
gaaagaagtgtgattacagtttatatatgcagt

SEQ ID NO: 459384 - DNA, 33 bp, Homo sapien
gaaagaagtgtgattagagtttatatatgcagt

SEQ ID NO: 459385 - DNA, 33 bp, Homo sapien
tacaagattatgaaataaccaccacgctgttac

SEQ ID NO: 459386 - DNA, 33 bp, Homo sapien
tacaagattatgaaatcaccaccacgctgttac

SEQ ID NO: 459387 - DNA, 33 bp, Homo sapien
aattacactataatgacgataatgtattcagga

SEQ ID NO: 459388 - DNA, 33 bp, Homo sapien
aattacactataatgatgataatgtattcagga

SEQ ID NO: 459389 - DNA, 33 bp, Homo sapien
agctttggcaacatccacaagttttaatatgta

SEQ ID NO: 459390 - DNA, 33 bp, Homo sapien
agctttggcaacatccgcaagttttaatatgta

SEQ ID NO: 459391 - DNA, 33 bp, Homo sapien
gggcaaagttcacttacgattatgcaaagtagg

SEQ ID NO: 459392 - DNA, 33 bp, Homo sapien
gggcaaagttcacttatgattatgcaaagtagg

SEQ ID NO: 459393 - DNA, 33 bp, Homo sapien
ggcttcttaaaacacaacttgctaggtctcact

SEQ ID NO: 459394 - DNA, 33 bp, Homo sapien
ggcttcttaaaacacagcttgctaggtctcact

SEQ ID NO: 459395 - DNA, 33 bp, Homo sapien
gggataccatcaagtaaaggtaacaataaaatt

SEQ ID NO: 459396 - DNA, 33 bp, Homo sapien
gggataccatcaagtagaggtaacaataaaatt

SEQ ID NO: 459397 - DNA, 33 bp, Homo sapien
gcggccaggcactcggcccaggtacgcgggggc

SEQ ID NO: 459398 - DNA, 33 bp, Homo sapien
gcggccaggcactcggtccaggtacgcgggggc

SEQ ID NO: 459399 - DNA, 33 bp, Homo sapien
gacccattgataattgcaggatgctttcagact

SEQ ID NO: 459400 - DNA, 33 bp, Homo sapien
gacccattgataattgtaggatgctttcagact

SEQ ID NO: 459401 - DNA, 33 bp, Homo sapien
ctttcaccttaataacaatcaaccactgcatcc

SEQ ID NO: 459402 - DNA, 33 bp, Homo sapien
ctttcaccttaataacgatcaaccactgcatcc

SEQ ID NO: 459403 - DNA, 33 bp, Homo sapien; identical to SEQ ID NO: 459401

SEQ ID NO: 459404 - DNA, 33 bp, Homo sapien; identical to SEQ ID NO: 459402

SEQ ID NO: 459405 - DNA, 33 bp, Homo sapien
cagggaaggcccacgcagagaggtagcatagca

SEQ ID NO: 459406 - DNA, 33 bp, Homo sapien
cagggaaggcccacgcggagaggtagcatagca

SEQ ID NO: 459407 - DNA, 33 bp, Homo sapien
ccctcttccatcgtcaacgtatctgaaatcaga

SEQ ID NO: 459408 - DNA, 33 bp, Homo sapien
ccctcttccatcgtcatcgtatctgaaatcaga

SEQ ID NO: 459409 - DNA, 33 bp, Homo sapien
atttgaaaaaaagaagaagctatggaaactcat

SEQ ID NO: 459410 - DNA, 33 bp, Homo sapien
atttgaaaaaaagaagcagctatggaaactcat

SEQ ID NO: 459411 - DNA, 33 bp, Homo sapien
ggcgcgtaatttcatacacacgaccagaaggaa

SEQ ID NO: 459412 - DNA, 33 bp, Homo sapien
ggcgcgtaatttcatatacacgaccagaaggaa

SEQ ID NO: 459413 - DNA, 33 bp, Homo sapien
tgcgccgccttcttcaggtggaaccaaaaggtc

SEQ ID NO: 459414 - DNA, 33 bp, Homo sapien
tgcgccgccttcttcatgtggaaccaaaaggtc

SEQ ID NO: 459415 - DNA, 33 bp, Homo sapien
ttctccgttgcctttggaatatgtagtccaagc

SEQ ID NO: 459416 - DNA, 33 bp, Homo sapien
ttctccgttgcctttgtaatatgtagtccaagc

SEQ ID NO: 459417 - DNA, 33 bp, Homo sapien
ggtccacgagcaattaccatacctaagcctaga

SEQ ID NO: 459418 - DNA, 33 bp, Homo sapien
ggtccacgagcaattagcatacctaagcctaga

SEQ ID NO: 459419 - DNA, 33 bp, Homo sapien
ggcagagaaaggacaaattgccattgaagtcta

SEQ ID NO: 459420 - DNA, 33 bp, Homo sapien
ggcagagaaaggacaagttgccattgaagtcta

SEQ ID NO: 459421 - DNA, 33 bp, Homo sapien; identical to SEQ ID NO: 459419

SEQ ID NO: 459422 - DNA, 33 bp, Homo sapien; identical to SEQ ID NO: 459420

SEQ ID NO: 459423 - DNA, 33 bp, Homo sapien
attccaggtctaaagcccaagtctaaataattt

SEQ ID NO: 459424 - DNA, 33 bp, Homo sapien
attccaggtctaaagctcaagtctaaataattt

SEQ ID NO: 459425 - DNA, 33 bp, Homo sapien
tctaagaccctgtacccagaggctgcagctcca

SEQ ID NO: 459426 - DNA, 33 bp, Homo sapien
tctaagaccctgtaccgagaggctgcagctcca

SEQ ID NO: 459427 - DNA, 33 bp, Homo sapien
tgctcaataagatgataagtagatttctcataa

SEQ ID NO: 459428 - DNA, 33 bp, Homo sapien
tgctcaataagatgatcagtagatttctcataa

SEQ ID NO: 459429 - DNA, 33 bp, Homo sapien
tgtgtcatggattacccggagatgtaagcttaa

SEQ ID NO: 459430 - DNA, 33 bp, Homo sapien
tgtgtcatggattacctggagatgtaagcttaa

SEQ ID NO: 459431 - DNA, 33 bp, Homo sapien
gctctaccatcttttagaaccctctgtccatat

SEQ ID NO: 459432 - DNA, 33 bp, Homo sapien
gctctaccatcttttataaccctctgtccatat

SEQ ID NO: 459433 - DNA, 33 bp, Homo sapien
ttagtcgtcttacagaacttagagtacatcaga

SEQ ID NO: 459434 - DNA, 33 bp, Homo sapien
ttagtcgtcttacagaccttagagtacatcaga

SEQ ID NO: 459435 - DNA, 33 bp, Homo sapien
gcttaagcagaacaaaagagtatacaataagtc

SEQ ID NO: 459436 - DNA, 33 bp, Homo sapien
gcttaagcagaacaaaggagtatacaataagtc

SEQ ID NO: 459437 - DNA, 33 bp, Homo sapien
aaaatgacattccttacgtactgatttggaact

SEQ ID NO: 459438 - DNA, 33 bp, Homo sapien
aaaatgacattccttatgtactgatttggaact

SEQ ID NO: 459439 - DNA, 33 bp, Homo sapien
tctgcctcaccaaaataatacagtggccagaaa

SEQ ID NO: 459440 - DNA, 33 bp, Homo sapien
tctgcctcaccaaaatgatacagtggccagaaa

SEQ ID NO: 459441 - DNA, 33 bp, Homo sapien
gccccagaaatgcttcgcttctatgactttgtt

SEQ ID NO: 459442 - DNA, 33 bp, Homo sapien
gccccagaaatgcttctcttctatgactttgtt

SEQ ID NO: 459443 - DNA, 33 bp, Homo sapien
gttcctctaccagagaagcacagatccagaaag

SEQ ID NO: 459444 - DNA, 33 bp, Homo sapien
gttcctctaccagagacgcacagatccagaaag

SEQ ID NO: 459445 - DNA, 33 bp, Homo sapien
gactggagatttccagaaagtgaagatgaaaat

SEQ ID NO: 459446 - DNA, 33 bp, Homo sapien
gactggagatttccaggaagtgaagatgaaaat

SEQ ID NO: 459447 - DNA, 33 bp, Homo sapien
actgaagtggaatgtacacgtatttttgaaaaa

SEQ ID NO: 459448 - DNA, 33 bp, Homo sapien
actgaagtggaatgtatacgtatttttgaaaaa

SEQ ID NO: 459449 - DNA, 33 bp, Homo sapien
atccttgaagtgacaaaagaacaaatgccatcc

SEQ ID NO: 459450 - DNA, 33 bp, Homo sapien
atccttgaagtgacaagagaacaaatgccatcc

SEQ ID NO: 459451 - DNA, 33 bp, Homo sapien
gggtagttcacggatacgtggattggaatggat

SEQ ID NO: 459452 - DNA, 33 bp, Homo sapien
gggtagttcacggatatgtggattggaatggat

SEQ ID NO: 459453 - DNA, 33 bp, Homo sapien
acaatactgtgcctcacgttgtagaagaagaga

SEQ ID NO: 459454 - DNA, 33 bp, Homo sapien
acaatactgtgcctcatgttgtagaagaagaga

SEQ ID NO: 459455 - DNA, 33 bp, Homo sapien
aacaggtcacttcgatcactggcaaagcagagt

SEQ ID NO: 459456 - DNA, 33 bp, Homo sapien
aacaggtcacttcgattactggcaaagcagagt

SEQ ID NO: 459457 - DNA, 33 bp, Homo sapien
agtggcacatagaatccgagtccagttatggcc

SEQ ID NO: 459458 - DNA, 33 bp, Homo sapien
agtggcacatagaatctgagtccagttatggcc

SEQ ID NO: 459459 - DNA, 33 bp, Homo sapien
ctaattaaccatgaccaaaaggagggtcatggc

SEQ ID NO: 459460 - DNA, 33 bp, Homo sapien
ctaattaaccatgaccgaaaggagggtcatggc

SEQ ID NO: 459461 - DNA, 33 bp, Homo sapien
tcaggctggggttaccaaagattcacgcctatg

SEQ ID NO: 459462 - DNA, 33 bp, Homo sapien
tcaggctggggttaccgaagattcacgcctatg

SEQ ID NO: 459463 - DNA, 33 bp, Homo sapien
tgcttctaaaaagtagcccatctttaccatttg

SEQ ID NO: 459464 - DNA, 33 bp, Homo sapien
tgcttctaaaaagtagtccatctttaccatttg

SEQ ID NO: 459465 - DNA, 33 bp, Homo sapien
catggcagactcatagccattctggactcatca

SEQ ID NO: 459466 - DNA, 33 bp, Homo sapien
catggcagactcataggcattctggactcatca

SEQ ID NO: 459467 - DNA, 33 bp, Homo sapien
catagataatcttatgaaacctctcaacaacca

SEQ ID NO: 459468 - DNA, 33 bp, Homo sapien
catagataatcttatggaacctctcaacaacca

SEQ ID NO: 459469 - DNA, 33 bp, Homo sapien
gtgaataatgcatggcgctccgacctccccgtg

SEQ ID NO: 459470 - DNA, 33 bp, Homo sapien
gtgaataatgcatggctctccgacctccccgtg

SEQ ID NO: 459471 - DNA, 33 bp, Homo sapien
agagctttagagttaaaatacagctctggagtc

SEQ ID NO: 459472 - DNA, 33 bp, Homo sapien
agagctttagagttaagatacagctctggagtc

SEQ ID NO: 459473 - DNA, 33 bp, Homo sapien
atgctgtctctgtttacccaccacttctgtggc

SEQ ID NO: 459474 - DNA, 33 bp, Homo sapien
atgctgtctctgtttatccaccacttctgtggc

SEQ ID NO: 459475 - DNA, 33 bp, Homo sapien
gcaatgatctggtcaaggtctgcaaataatcct

SEQ ID NO: 459476 - DNA, 33 bp, Homo sapien
gcaatgatctggtcaatgtctgcaaataatcct

SEQ ID NO: 459477 - DNA, 33 bp, Homo sapien
cgtacatccaatgatcaagccctgtaagctctt

SEQ ID NO: 459478 - DNA, 33 bp, Homo sapien
cgtacatccaatgatcgagccctgtaagctctt

SEQ ID NO: 459479 - DNA, 33 bp, Homo sapien
taaatttgtgaagctgcataactatcaccacaa

SEQ ID NO: 459480 - DNA, 33 bp, Homo sapien
taaatttgtgaagctgtataactatcaccacaa

SEQ ID NO: 459481 - DNA, 33 bp, Homo sapien
atttgcaaactacataactgatgagtgttatcc

SEQ ID NO: 459482 - DNA, 33 bp, Homo sapien
atttgcaaactacatatctgatgagtgttatcc

SEQ ID NO: 459483 - DNA, 33 bp, Homo sapien
aaaacttttatacttcaaaaggcatgactaaaa

SEQ ID NO: 459484 - DNA, 33 bp, Homo sapien
aaaacttttatacttccaaaggcatgactaaaa

SEQ ID NO: 459485 - DNA, 33 bp, Homo sapien
gcagtatttgttttcaacaaccttatgagatgg

SEQ ID NO: 459486 - DNA, 33 bp, Homo sapien
gcagtatttgttttcatcaaccttatgagatgg

SEQ ID NO: 459487 - DNA, 33 bp, Homo sapien
aaacagccggactcccaacataaagtgctggaa

SEQ ID NO: 459488 - DNA, 33 bp, Homo sapien
aaacagccggactcccgacataaagtgctggaa

SEQ ID NO: 459489 - DNA, 33 bp, Homo sapien
ccacgtgctgggagttcaaatccagttctgtcg

SEQ ID NO: 459490 - DNA, 33 bp, Homo sapien
ccacgtgctgggagttgaaatccagttctgtcg

SEQ ID NO: 459491 - DNA, 33 bp, Homo sapien
ttaacatttcaactcacgtaaccttcacaactg

SEQ ID NO: 459492 - DNA, 33 bp, Homo sapien
ttaacatttcaactcatgtaaccttcacaactg

SEQ ID NO: 459493 - DNA, 33 bp, Homo sapien
ccatcacactgactaaaacaattttcttcgtaa

SEQ ID NO: 459494 - DNA, 33 bp, Homo sapien
ccatcacactgactaagacaattttcttcgtaa

SEQ ID NO: 459495 - DNA, 33 bp, Homo sapien
aactaaaccaggataaagtgaagtgagtggtag

SEQ ID NO: 459496 - DNA, 33 bp, Homo sapien
aactaaaccaggataaggtgaagtgagtggtag

SEQ ID NO: 459497 - DNA, 33 bp, Homo sapien
agctgtctgccctagaaaagctccagaaagcag

SEQ ID NO: 459498 - DNA, 33 bp, Homo sapien
agctgtctgccctagagaagctccagaaagcag

SEQ ID NO: 459499 - DNA, 33 bp, Homo sapien
ggctggtgtggagaaacagaagtcgaatgcaag

SEQ ID NO: 459500 - DNA, 33 bp, Homo sapien
ggctggtgtggagaaagagaagtcgaatgcaag

SEQ ID NO: 459501 - DNA, 33 bp, Homo sapien
gctgcaggtaacaagacgtctggtgactcctgg

SEQ ID NO: 459502 - DNA, 33 bp, Homo sapien
gctgcaggtaacaagatgtctggtgactcctgg

SEQ ID NO: 459503 - DNA, 33 bp, Homo sapien
tccctgatggtgcccaagccgagtttctctttc

SEQ ID NO: 459504 - DNA, 33 bp, Homo sapien
tccctgatggtgcccaggccgagtttctctttc

SEQ ID NO: 459505 - DNA, 33 bp, Homo sapien
cagcacagaggaattacagaaatgttgaagtca

SEQ ID NO: 459506 - DNA, 33 bp, Homo sapien
cagcacagaggaattatagaaatgttgaagtca

SEQ ID NO: 459507 - DNA, 33 bp, Homo sapien
ctttgctgtaagcttcactctcctttctagacc

SEQ ID NO: 459508 - DNA, 33 bp, Homo sapien
ctttgctgtaagcttcgctctcctttctagacc

SEQ ID NO: 459509 - DNA, 33 bp, Homo sapien
tcagtcaaaagtatacgaagctaggcacagtgg

SEQ ID NO: 459510 - DNA, 33 bp, Homo sapien
tcagtcaaaagtatactaagctaggcacagtgg

SEQ ID NO: 459511 - DNA, 33 bp, Homo sapien
ttcattatttggaacaatgccacacaggcagca

SEQ ID NO: 459512 - DNA, 33 bp, Homo sapien
ttcattatttggaacagtgccacacaggcagca

SEQ ID NO: 459513 - DNA, 33 bp, Homo sapien
tagagcgagagagatacgtatgtgtgtgtgtgt

SEQ ID NO: 459514 - DNA, 33 bp, Homo sapien
tagagcgagagagatatgtatgtgtgtgtgtgt

SEQ ID NO: 459515 - DNA, 33 bp, Homo sapien
ctgcagcttgattgaaggagggcttatttctcg

SEQ ID NO: 459516 - DNA, 33 bp, Homo sapien
ctgcagcttgattgaatgagggcttatttctcg

SEQ ID NO: 459517 - DNA, 33 bp, Homo sapien
agatggtagaaacggccccttgatgaatctcta

SEQ ID NO: 459518 - DNA, 33 bp, Homo sapien
agatggtagaaacggctccttgatgaatctcta

SEQ ID NO: 459519 - DNA, 33 bp, Homo sapien
agagcacagctttccggaatccagctgacctgg

SEQ ID NO: 459520 - DNA, 33 bp, Homo sapien
agagcacagctttccgtaatccagctgacctgg

SEQ ID NO: 459521 - DNA, 33 bp, Homo sapien
aattcaacatttttgacatctggattccaaaca

SEQ ID NO: 459522 - DNA, 33 bp, Homo sapien
aattcaacatttttgatatctggattccaaaca

SEQ ID NO: 459523 - DNA, 33 bp, Homo sapien
gaggtgttgaaatcaccaggagagccgtgtgga

SEQ ID NO: 459524 - DNA, 33 bp, Homo sapien
gaggtgttgaaatcacgaggagagccgtgtgga

SEQ ID NO: 459525 - DNA, 33 bp, Homo sapien
gagaaagacgaaaagaagaaacccaagagtctc

SEQ ID NO: 459526 - DNA, 33 bp, Homo sapien
gagaaagacgaaaagatgaaacccaagagtctc

SEQ ID NO: 459527 - DNA, 33 bp, Homo sapien
ttgggaaaacagaatccactctaggtattttag

SEQ ID NO: 459528 - DNA, 33 bp, Homo sapien
ttgggaaaacagaatctactctaggtattttag

SEQ ID NO: 459529 - DNA, 33 bp, Homo sapien
gttaactaatccattacccaaacagccaaccag

SEQ ID NO: 459530 - DNA, 33 bp, Homo sapien
gttaactaatccattatccaaacagccaaccag

SEQ ID NO: 459531 - DNA, 33 bp, Homo sapien
agagccaatgagggaaagacagtgcaccccacc

SEQ ID NO: 459532 - DNA, 33 bp, Homo sapien
agagccaatgagggaaggacagtgcaccccacc

SEQ ID NO: 459533 - DNA, 33 bp, Homo sapien
ttcagagttaagcccaatctctcttccctactg

SEQ ID NO: 459534 - DNA, 33 bp, Homo sapien
ttcagagttaagcccactctctcttccctactg

SEQ ID NO: 459535 - DNA, 33 bp, Homo sapien
cctggattaaatgtcaactgtagctagtgagga

SEQ ID NO: 459536 - DNA, 33 bp, Homo sapien
cctggattaaatgtcagctgtagctagtgagga

SEQ ID NO: 459537 - DNA, 33 bp, Homo sapien
tcatctctgtaaagtgcaatctgacaatctgac

SEQ ID NO: 459538 - DNA, 33 bp, Homo sapien
tcatctctgtaaagtgtaatctgacaatctgac

SEQ ID NO: 459539 - DNA, 33 bp, Homo sapien
gttgactggctagtgacccttcatgccccagga

SEQ ID NO: 459540 - DNA, 33 bp, Homo sapien
gttgactggctagtgatccttcatgccccagga

SEQ ID NO: 459541 - DNA, 33 bp, Homo sapien
ataaaaacaagatgaacgtaaccagccatggct

SEQ ID NO: 459542 - DNA, 33 bp, Homo sapien
ataaaaacaagatgaatgtaaccagccatggct

SEQ ID NO: 459543 - DNA, 33 bp, Homo sapien
gtgccctggtggctacactcctcgaggaaggac

SEQ ID NO: 459544 - DNA, 33 bp, Homo sapien
gtgccctggtggctacgctcctcgaggaaggac

SEQ ID NO: 459545 - DNA, 33 bp, Homo sapien
acaataacaatatgaacgtctatcagagcctgt

SEQ ID NO: 459546 - DNA, 33 bp, Homo sapien
acaataacaatatgaatgtctatcagagcctgt

SEQ ID NO: 459547 - DNA, 33 bp, Homo sapien
agaaaagaaaagcaggaattggcgagccagcag

SEQ ID NO: 459548 - DNA, 33 bp, Homo sapien
agaaaagaaaagcaggcattggcgagccagcag

SEQ ID NO: 459549 - DNA, 33 bp, Homo sapien
gaaagaaatgactctacacaatgacctgagtca

SEQ ID NO: 459550 - DNA, 33 bp, Homo sapien
gaaagaaatgactctagacaatgacctgagtca

SEQ ID NO: 459551 - DNA, 33 bp, Homo sapien
ctcctgcccatctcgacagggaactatggctta

SEQ ID NO: 459552 - DNA, 33 bp, Homo sapien
ctcctgcccatctcgagagggaactatggctta

SEQ ID NO: 459553 - DNA, 33 bp, Homo sapien
agtcttcccttttctacagataggcgtctatac

SEQ ID NO: 459554 - DNA, 33 bp, Homo sapien
agtcttcccttttctatagataggcgtctatac

SEQ ID NO: 459555 - DNA, 33 bp, Homo sapien
tgcttattgcgtacagcctgcttggagaagaag

SEQ ID NO: 459556 - DNA, 33 bp, Homo sapien
tgcttattgcgtacaggctgcttggagaagaag

SEQ ID NO: 459557 - DNA, 33 bp, Homo sapien
aggaaacacacaggtacggatgcctccttctgc

SEQ ID NO: 459558 - DNA, 33 bp, Homo sapien
aggaaacacacaggtatggatgcctccttctgc

SEQ ID NO: 459559 - DNA, 33 bp, Homo sapien
acatgcccgatgagataaacattgatgaattgt

SEQ ID NO: 459560 - DNA, 33 bp, Homo sapien
acatgcccgatgagatcaacattgatgaattgt

SEQ ID NO: 459561 - DNA, 33 bp, Homo sapien
accttgagtcccatgacctcattgcaaggttag

SEQ ID NO: 459562 - DNA, 33 bp, Homo sapien
accttgagtcccatgatctcattgcaaggttag

SEQ ID NO: 459563 - DNA, 33 bp, Homo sapien
agaatcaggaatggcaaatgcggaggccttcag

SEQ ID NO: 459564 - DNA, 33 bp, Homo sapien
agaatcaggaatggcacatgcggaggccttcag

SEQ ID NO: 459565 - DNA, 33 bp, Homo sapien
cctgacactcatcaccagacatacattcatctg

SEQ ID NO: 459566 - DNA, 33 bp, Homo sapien
cctgacactcatcaccggacatacattcatctg

SEQ ID NO: 459567 - DNA, 33 bp, Homo sapien
tttaccttgtgcaaatcatggaccattttcaga

SEQ ID NO: 459568 - DNA, 33 bp, Homo sapien
tttaccttgtgcaaattatggaccattttcaga

SEQ ID NO: 459569 - DNA, 33 bp, Homo sapien
ggaagacagtttttccacagaccagggtggtgg

SEQ ID NO: 459570 - DNA, 33 bp, Homo sapien
ggaagacagtttttccgcagaccagggtggtgg

SEQ ID NO: 459571 - DNA, 33 bp, Homo sapien
tgccctcacccctcaacgtgcttgctgcaaaca

SEQ ID NO: 459572 - DNA, 33 bp, Homo sapien
tgccctcacccctcaatgtgcttgctgcaaaca

SEQ ID NO: 459573 - DNA, 33 bp, Homo sapien
cctcctcgaggtgggcaaagatcacagccggca

SEQ ID NO: 459574 - DNA, 33 bp, Homo sapien
cctcctcgaggtgggcgaagatcacagccggca

SEQ ID NO: 459575 - DNA, 33 bp, Homo sapien
ctgagctcccataggaaaagatgcccaaccaaa

SEQ ID NO: 459576 - DNA, 33 bp, Homo sapien
ctgagctcccataggagaagatgcccaaccaaa

SEQ ID NO: 459577 - DNA, 33 bp, Homo sapien
catggctcacacctgaccaaggatattcaagtc

SEQ ID NO: 459578 - DNA, 33 bp, Homo sapien
catggctcacacctgatcaaggatattcaagtc

SEQ ID NO: 459579 - DNA, 33 bp, Homo sapien
ccacctatgcaagtcacaggacagccaagttct

SEQ ID NO: 459580 - DNA, 33 bp, Homo sapien
ccacctatgcaagtcagaggacagccaagttct

SEQ ID NO: 459581 - DNA, 33 bp, Homo sapien
gtccacaatctgcatccacagtgacagggaaat

SEQ ID NO: 459582 - DNA, 33 bp, Homo sapien
gtccacaatctgcatctacagtgacagggaaat

SEQ ID NO: 459583 - DNA, 33 bp, Homo sapien
tccaggatgggctccacgttcagctccaggatg

SEQ ID NO: 459584 - DNA, 33 bp, Homo sapien
tccaggatgggctccatgttcagctccaggatg

SEQ ID NO: 459585 - DNA, 33 bp, Homo sapien
tggcctggccatatcaacgtggtattttgttta

SEQ ID NO: 459586 - DNA, 33 bp, Homo sapien
tggcctggccatatcatcgtggtattttgttta

SEQ ID NO: 459587 - DNA, 33 bp, Homo sapien
tctcgtaggccttctcaatgcacccagcgatct

SEQ ID NO: 459588 - DNA, 33 bp, Homo sapien
tctcgtaggccttctcgatgcacccagcgatct

SEQ ID NO: 459589 - DNA, 33 bp, Homo sapien; identical to SEQ ID NO: 459587

SEQ ID NO: 459590 - DNA, 33 bp, Homo sapien; identical to SEQ ID NO: 459588

SEQ ID NO: 459591 - DNA, 33 bp, Homo sapien
cgccttgacctcactaaatctgctttccactgg

SEQ ID NO: 459592 - DNA, 33 bp, Homo sapien
cgccttgacctcactacatctgctttccactgg

SEQ ID NO: 459593 - DNA, 33 bp, Homo sapien
cctctccaattctgcacggtcccctgcccacca

SEQ ID NO: 459594 - DNA, 33 bp, Homo sapien
cctctccaattctgcatggtcccctgcccacca

SEQ ID NO: 459595 - DNA, 33 bp, Homo sapien
aggagcaaggacttcaggtggtaccaggacccc

SEQ ID NO: 459596 - DNA, 33 bp, Homo sapien
aggagcaaggacttcatgtggtaccaggacccc

SEQ ID NO: 459597 - DNA, 33 bp, Homo sapien
taagtcacattcaagacgcaggtgctacaggag

SEQ ID NO: 459598 - DNA, 33 bp, Homo sapien
taagtcacattcaagatgcaggtgctacaggag

SEQ ID NO: 459599 - DNA, 33 bp, Homo sapien
aagtccaaactcagaaccttaaatgacagactc

SEQ ID NO: 459600 - DNA, 33 bp, Homo sapien
aagtccaaactcagaatcttaaatgacagactc

SEQ ID NO: 459601 - DNA, 33 bp, Homo sapien
agaaaggaaactctgccgaggactctgttgccc

SEQ ID NO: 459602 - DNA, 33 bp, Homo sapien
agaaaggaaactctgctgaggactctgttgccc

SEQ ID NO: 459603 - DNA, 33 bp, Homo sapien
gggtctcctattgtgacgcctcttattttcctc

SEQ ID NO: 459604 - DNA, 33 bp, Homo sapien
gggtctcctattgtgatgcctcttattttcctc

SEQ ID NO: 459605 - DNA, 33 bp, Homo sapien
gtgggagattaaggaaaggacatccatctgggt

SEQ ID NO: 459606 - DNA, 33 bp, Homo sapien
gtgggagattaaggaagggacatccatctgggt

SEQ ID NO: 459607 - DNA, 33 bp, Homo sapien
cacagaaccaatgataacaagagaaaagggaca

SEQ ID NO: 459608 - DNA, 33 bp, Homo sapien
cacagaaccaatgataccaagagaaaagggaca

SEQ ID NO: 459609 - DNA, 33 bp, Homo sapien
caaagacaccctgcacagggcagccgttgatgc

SEQ ID NO: 459610 - DNA, 33 bp, Homo sapien
caaagacaccctgcacggggcagccgttgatgc

SEQ ID NO: 459611 - DNA, 33 bp, Homo sapien
tgacgccggcgcagacaacactggtggaccgtc

SEQ ID NO: 459612 - DNA, 33 bp, Homo sapien
tgacgccggcgcagacgacactggtggaccgtc

SEQ ID NO: 459613 - DNA, 33 bp, Homo sapien; identical to SEQ ID NO: 459611

SEQ ID NO: 459614 - DNA, 33 bp, Homo sapien; identical to SEQ ID NO: 459612

SEQ ID NO: 459615 - DNA, 33 bp, Homo sapien
cccaatttctcatccagctatctgtctcattag

SEQ ID NO: 459616 - DNA, 33 bp, Homo sapien
cccaatttctcatccatctatctgtctcattag

SEQ ID NO: 459617 - DNA, 33 bp, Homo sapien
tgttctctgtgaggtcaatcatacagccaacga

SEQ ID NO: 459618 - DNA, 33 bp, Homo sapien
tgttctctgtgaggtcgatcatacagccaacga

SEQ ID NO: 459619 - DNA, 33 bp, Homo sapien
cttttcggcctctgtccatctgggctgggagac

SEQ ID NO: 459620 - DNA, 33 bp, Homo sapien
cttttcggcctctgtcgatctgggctgggagac

SEQ ID NO: 459621 - DNA, 33 bp, Homo sapien
atttattgcagattaactcagtgccatgtattc

SEQ ID NO: 459622 - DNA, 33 bp, Homo sapien
atttattgcagattaattcagtgccatgtattc

SEQ ID NO: 459623 - DNA, 33 bp, Homo sapien
acacttcacatcccaaaaccaagttctcaagaa

SEQ ID NO: 459624 - DNA, 33 bp, Homo sapien
acacttcacatcccaagaccaagttctcaagaa

SEQ ID NO: 459625 - DNA, 33 bp, Homo sapien
cccttcccaggagaaacagatggagaagcagag

SEQ ID NO: 459626 - DNA, 33 bp, Homo sapien
cccttcccaggagaaagagatggagaagcagag

SEQ ID NO: 459627 - DNA, 33 bp, Homo sapien
tatctatttgattaggccatgaatttaggcgag

SEQ ID NO: 459628 - DNA, 33 bp, Homo sapien
tatctatttgattaggtcatgaatttaggcgag

SEQ ID NO: 459629 - DNA, 33 bp, Homo sapien
caggtctcaatgtaaaaaggatttcctcggctg

SEQ ID NO: 459630 - DNA, 33 bp, Homo sapien
caggtctcaatgtaaacaggatttcctcggctg

SEQ ID NO: 459631 - DNA, 33 bp, Homo sapien
ggcacctttgagcaaactagaaaaaaaggcgtc

SEQ ID NO: 459632 - DNA, 33 bp, Homo sapien
ggcacctttgagcaaattagaaaaaaaggcgtc

SEQ ID NO: 459633 - DNA, 33 bp, Homo sapien
tgtcgggaccttaggcccagaatgcagagcttt

SEQ ID NO: 459634 - DNA, 33 bp, Homo sapien
tgtcgggaccttaggcgcagaatgcagagcttt

SEQ ID NO: 459635 - DNA, 33 bp, Homo sapien
tgctggtcacgagttacgcattgctaaattaat

SEQ ID NO: 459636 - DNA, 33 bp, Homo sapien
tgctggtcacgagttaggcattgctaaattaat

SEQ ID NO: 459637 - DNA, 33 bp, Homo sapien
gaactatagcagtgaacgggcagacacggtccc

SEQ ID NO: 459638 - DNA, 33 bp, Homo sapien
gaactatagcagtgaatgggcagacacggtccc

SEQ ID NO: 459639 - DNA, 33 bp, Homo sapien
ccagcctaaccaccataatgaaagcccacatct

SEQ ID NO: 459640 - DNA, 33 bp, Homo sapien
ccagcctaaccaccatgatgaaagcccacatct

SEQ ID NO: 459641 - DNA, 33 bp, Homo sapien
gacagcgtgagaaaaagcttactggatcccagt

SEQ ID NO: 459642 - DNA, 33 bp, Homo sapien
gacagcgtgagaaaaatcttactggatcccagt

SEQ ID NO: 459643 - DNA, 33 bp, Homo sapien
agctattcagaaaacccgaacgagcaagtgata

SEQ ID NO: 459644 - DNA, 33 bp, Homo sapien
agctattcagaaaacctgaacgagcaagtgata

SEQ ID NO: 459645 - DNA, 33 bp, Homo sapien
tgcgctgtgagtcttacatttttatggtcaaag

SEQ ID NO: 459646 - DNA, 33 bp, Homo sapien
tgcgctgtgagtcttatatttttatggtcaaag

SEQ ID NO: 459647 - DNA, 33 bp, Homo sapien
ctaagcacctcagactcaatcagcctgtatgcc

SEQ ID NO: 459648 - DNA, 33 bp, Homo sapien
ctaagcacctcagactgaatcagcctgtatgcc

SEQ ID NO: 459649 - DNA, 33 bp, Homo sapien
tgtctatcaatagcccagagctccctgttgctg

SEQ ID NO: 459650 - DNA, 33 bp, Homo sapien
tgtctatcaatagcccggagctccctgttgctg

SEQ ID NO: 459651 - DNA, 33 bp, Homo sapien
ttctctccaggtcaccactgatcgcaatcgcgc

SEQ ID NO: 459652 - DNA, 33 bp, Homo sapien
ttctctccaggtcaccgctgatcgcaatcgcgc

SEQ ID NO: 459653 - DNA, 33 bp, Homo sapien
cactggcgagccagtcgctacagggaggtgtga

SEQ ID NO: 459654 - DNA, 33 bp, Homo sapien
cactggcgagccagtctctacagggaggtgtga

SEQ ID NO: 459655 - DNA, 33 bp, Homo sapien
gttaactgaccccataccaaatcggttcccgga

SEQ ID NO: 459656 - DNA, 33 bp, Homo sapien
gttaactgaccccatatcaaatcggttcccgga

SEQ ID NO: 459657 - DNA, 33 bp, Homo sapien
cttagagcacactgcaagaggtagattctgata

SEQ ID NO: 459658 - DNA, 33 bp, Homo sapien
cttagagcacactgcaggaggtagattctgata

SEQ ID NO: 459659 - DNA, 33 bp, Homo sapien
catcttacagggaaggaaacagacttaagtagg

SEQ ID NO: 459660 - DNA, 33 bp, Homo sapien
catcttacagggaagggaacagacttaagtagg

SEQ ID NO: 459661 - DNA, 33 bp, Homo sapien
aatgcaggatttcctcaagtctctctttgagct

SEQ ID NO: 459662 - DNA, 33 bp, Homo sapien
aatgcaggatttcctcgagtctctctttgagct

SEQ ID NO: 459663 - DNA, 33 bp, Homo sapien
gggacagggagtgcacagccaaaggtcagtgcc

SEQ ID NO: 459664 - DNA, 33 bp, Homo sapien
gggacagggagtgcacggccaaaggtcagtgcc

SEQ ID NO: 459665 - DNA, 33 bp, Homo sapien
attggaaggaagtggacagattcacaataaaca

SEQ ID NO: 459666 - DNA, 33 bp, Homo sapien
attggaaggaagtggagagattcacaataaaca

SEQ ID NO: 459667 - DNA, 33 bp, Homo sapien
ccgtccaggaatggacaatttcgcttccctgca

SEQ ID NO: 459668 - DNA, 33 bp, Homo sapien
ccgtccaggaatggacgatttcgcttccctgca

SEQ ID NO: 459669 - DNA, 33 bp, Homo sapien
aaaacatccgtaacttagcaaaataaaaagctg

SEQ ID NO: 459670 - DNA, 33 bp, Homo sapien
aaaacatccgtaacttggcaaaataaaaagctg

SEQ ID NO: 459671 - DNA, 33 bp, Homo sapien
gaattttgtttgttgacgttcccaagtacgttt

SEQ ID NO: 459672 - DNA, 33 bp, Homo sapien
gaattttgtttgttgatgttcccaagtacgttt

SEQ ID NO: 459673 - DNA, 33 bp, Homo sapien
aatgcctgataggaacaattgcggaagactctc

SEQ ID NO: 459674 - DNA, 33 bp, Homo sapien
aatgcctgataggaacgattgcggaagactctc

SEQ ID NO: 459675 - DNA, 33 bp, Homo sapien
taagctataagtttcccgctaattactacattg

SEQ ID NO: 459676 - DNA, 33 bp, Homo sapien
taagctataagtttcctgctaattactacattg

SEQ ID NO: 459677 - DNA, 33 bp, Homo sapien
aggaaaaactaatttaagaagcttgagagtgga

SEQ ID NO: 459678 - DNA, 33 bp, Homo sapien
aggaaaaactaatttatgaagcttgagagtgga

SEQ ID NO: 459679 - DNA, 33 bp, Homo sapien
tgtttgtctaaattcacggaaatgtacactttt

SEQ ID NO: 459680 - DNA, 33 bp, Homo sapien
tgtttgtctaaattcatggaaatgtacactttt

SEQ ID NO: 459681 - DNA, 33 bp, Homo sapien
catgggcacggacagaaaggatagcagggtgtc

SEQ ID NO: 459682 - DNA, 33 bp, Homo sapien
catgggcacggacagagaggatagcagggtgtc

SEQ ID NO: 459683 - DNA, 33 bp, Homo sapien
tgccttaagtgattggccaaatggttgcagtca

SEQ ID NO: 459684 - DNA, 33 bp, Homo sapien
tgccttaagtgattggtcaaatggttgcagtca

SEQ ID NO: 459685 - DNA, 33 bp, Homo sapien
ctgagaagccaagcccagcgggaactctagacc

SEQ ID NO: 459686 - DNA, 33 bp, Homo sapien
ctgagaagccaagcccggcgggaactctagacc

SEQ ID NO: 459687 - DNA, 33 bp, Homo sapien
cactgcctggcacacaagagagtctctcatgct

SEQ ID NO: 459688 - DNA, 33 bp, Homo sapien
cactgcctggcacacaggagagtctctcatgct

SEQ ID NO: 459689 - DNA, 33 bp, Homo sapien
caaatgaaataagagcgaactcattcaagcagg

SEQ ID NO: 459690 - DNA, 33 bp, Homo sapien
caaatgaaataagagctaactcattcaagcagg

SEQ ID NO: 459691 - DNA, 33 bp, Homo sapien
aactgatattttaaaaacactcgacacagccaa

SEQ ID NO: 459692 - DNA, 33 bp, Homo sapien
aactgatattttaaaaccactcgacacagccaa

SEQ ID NO: 459693 - DNA, 33 bp, Homo sapien
aacggaacttaaaagaatcatgtgacccaggaa

SEQ ID NO: 459694 - DNA, 33 bp, Homo sapien
aacggaacttaaaagagtcatgtgacccaggaa

SEQ ID NO: 459695 - DNA, 33 bp, Homo sapien
tgggctgcaggatgtccgaagccatgtccatca

SEQ ID NO: 459696 - DNA, 33 bp, Homo sapien
tgggctgcaggatgtctgaagccatgtccatca

SEQ ID NO: 459697 - DNA, 33 bp, Homo sapien
gagttgaatagttgcacgaaagcatgttattat

SEQ ID NO: 459698 - DNA, 33 bp, Homo sapien
gagttgaatagttgcatgaaagcatgttattat

SEQ ID NO: 459699 - DNA, 33 bp, Homo sapien
actatttcctactatacgcagaggaaactggcc

SEQ ID NO: 459700 - DNA, 33 bp, Homo sapien
actatttcctactatatgcagaggaaactggcc

SEQ ID NO: 459701 - DNA, 33 bp, Homo sapien
accagccacccaattacggaacacatcacaccc

SEQ ID NO: 459702 - DNA, 33 bp, Homo sapien
accagccacccaattatggaacacatcacaccc

SEQ ID NO: 459703 - DNA, 33 bp, Homo sapien
atccaattctcaatcaactgggccctgagtgga

SEQ ID NO: 459704 - DNA, 33 bp, Homo sapien
atccaattctcaatcatctgggccctgagtgga

SEQ ID NO: 459705 - DNA, 33 bp, Homo sapien
gaattggagaactcacactgcgaaaagaaaacc

SEQ ID NO: 459706 - DNA, 33 bp, Homo sapien
gaattggagaactcacgctgcgaaaagaaaacc

SEQ ID NO: 459707 - DNA, 33 bp, Homo sapien
gccatcttggaccgggaacaaggcggcacttcg

SEQ ID NO: 459708 - DNA, 33 bp, Homo sapien
gccatcttggaccggggacaaggcggcacttcg

SEQ ID NO: 459709 - DNA, 33 bp, Homo sapien
ccactctcgcccgcacacaggaagaactgggaa

SEQ ID NO: 459710 - DNA, 33 bp, Homo sapien
ccactctcgcccgcacgcaggaagaactgggaa

SEQ ID NO: 459711 - DNA, 33 bp, Homo sapien
acccactcagagcgaggctaaatttacggaggg

SEQ ID NO: 459712 - DNA, 33 bp, Homo sapien
acccactcagagcgagtctaaatttacggaggg

SEQ ID NO: 459713 - DNA, 33 bp, Homo sapien
ttctggcttaaatcaaaggaaatacctctatag

SEQ ID NO: 459714 - DNA, 33 bp, Homo sapien
ttctggcttaaatcaacggaaatacctctatag

SEQ ID NO: 459715 - DNA, 33 bp, Homo sapien
aggtgctagcctgacccgaacaggagatgctga

SEQ ID NO: 459716 - DNA, 33 bp, Homo sapien
aggtgctagcctgacctgaacaggagatgctga

SEQ ID NO: 459717 - DNA, 33 bp, Homo sapien
aactgaatgagcagcaaagagaggtgagaacca

SEQ ID NO: 459718 - DNA, 33 bp, Homo sapien
aactgaatgagcagcagagagaggtgagaacca

SEQ ID NO: 459719 - DNA, 33 bp, Homo sapien
tcatcttgtttaatggacaaaactctcctttga

SEQ ID NO: 459720 - DNA, 33 bp, Homo sapien
tcatcttgtttaatgggcaaaactctcctttga

SEQ ID NO: 459721 - DNA, 33 bp, Homo sapien
agtggtgaactgaaaaagcgtgtcagataggaa

SEQ ID NO: 459722 - DNA, 33 bp, Homo sapien
agtggtgaactgaaaacgcgtgtcagataggaa

SEQ ID NO: 459723 - DNA, 33 bp, Homo sapien
tcatgttagcagggacaaaaacagtctttgtgc

SEQ ID NO: 459724 - DNA, 33 bp, Homo sapien
tcatgttagcagggacgaaaacagtctttgtgc

SEQ ID NO: 459725 - DNA, 33 bp, Homo sapien
gggagggaggagtgaactggtagagcacagagg

SEQ ID NO: 459726 - DNA, 33 bp, Homo sapien
gggagggaggagtgaattggtagagcacagagg

SEQ ID NO: 459727 - DNA, 33 bp, Homo sapien
cgttttttcagagaaaccagagtgggcagaacc

SEQ ID NO: 459728 - DNA, 33 bp, Homo sapien
cgttttttcagagaaatcagagtgggcagaacc

SEQ ID NO: 459729 - DNA, 33 bp, Homo sapien
cccttccccatgaatcaaggtgggtttgcttgt

SEQ ID NO: 459730 - DNA, 33 bp, Homo sapien
cccttccccatgaatcgaggtgggtttgcttgt

SEQ ID NO: 459731 - DNA, 33 bp, Homo sapien
cagtagacaaatgaaccagagaaaaggcacaca

SEQ ID NO: 459732 - DNA, 33 bp, Homo sapien
cagtagacaaatgaactagagaaaaggcacaca

SEQ ID NO: 459733 - DNA, 33 bp, Homo sapien
tcacagctcggtggtcactactgcagagcaggg

SEQ ID NO: 459734 - DNA, 33 bp, Homo sapien
tcacagctcggtggtcgctactgcagagcaggg

SEQ ID NO: 459735 - DNA, 33 bp, Homo sapien
accaaagacacacaaactgaaaatcagaagttg

SEQ ID NO: 459736 - DNA, 33 bp, Homo sapien
accaaagacacacaaagtgaaaatcagaagttg

SEQ ID NO: 459737 - DNA, 33 bp, Homo sapien
ctggtctcctacctcaatctggcttaatccttt

SEQ ID NO: 459738 - DNA, 33 bp, Homo sapien
ctggtctcctacctcagtctggcttaatccttt

SEQ ID NO: 459739 - DNA, 33 bp, Homo sapien
aggatattgataagacactcccatgataaggca

SEQ ID NO: 459740 - DNA, 33 bp, Homo sapien
aggatattgataagacgctcccatgataaggca

SEQ ID NO: 459741 - DNA, 33 bp, Homo sapien
gcctgtgccctgggcagtaccaggcagctccat

SEQ ID NO: 459742 - DNA, 33 bp, Homo sapien
gcctgtgccctgggcattaccaggcagctccat

SEQ ID NO: 459743 - DNA, 33 bp, Homo sapien
ccctgttgagcaaggacggtggccattgtcagt

SEQ ID NO: 459744 - DNA, 33 bp, Homo sapien
ccctgttgagcaaggatggtggccattgtcagt

SEQ ID NO: 459745 - DNA, 33 bp, Homo sapien
gaggccagctgaccacagtgaaatcttacattg

SEQ ID NO: 459746 - DNA, 33 bp, Homo sapien
gaggccagctgaccacggtgaaatcttacattg

SEQ ID NO: 459747 - DNA, 33 bp, Homo sapien
caccttagagttggtggaatagggcacatggga

SEQ ID NO: 459748 - DNA, 33 bp, Homo sapien
caccttagagttggtgtaatagggcacatggga

SEQ ID NO: 459749 - DNA, 33 bp, Homo sapien
cgtttctctgctctgcaatctctatctagtttt

SEQ ID NO: 459750 - DNA, 33 bp, Homo sapien
cgtttctctgctctgcgatctctatctagtttt

SEQ ID NO: 459751 - DNA, 33 bp, Homo sapien
tcggccacggtacctacagcataacgtgcagtg

SEQ ID NO: 459752 - DNA, 33 bp, Homo sapien
tcggccacggtacctagagcataacgtgcagtg

SEQ ID NO: 459753 - DNA, 33 bp, Homo sapien
agtaaaaataacgtcacactgtggtatgaccgt

SEQ ID NO: 459754 - DNA, 33 bp, Homo sapien
agtaaaaataacgtcagactgtggtatgaccgt

SEQ ID NO: 459755 - DNA, 33 bp, Homo sapien
ctaagttttcagtaataagatgtgaatattttc

SEQ ID NO: 459756 - DNA, 33 bp, Homo sapien
ctaagttttcagtaatgagatgtgaatattttc

SEQ ID NO: 459757 - DNA, 33 bp, Homo sapien
tgagtgaaagagttaaacctgtatatttctatt

SEQ ID NO: 459758 - DNA, 33 bp, Homo sapien
tgagtgaaagagttaatcctgtatatttctatt

SEQ ID NO: 459759 - DNA, 33 bp, Homo sapien
taaaatttatggagaacttcaaagagctttagt

SEQ ID NO: 459760 - DNA, 33 bp, Homo sapien
taaaatttatggagaagttcaaagagctttagt

SEQ ID NO: 459761 - DNA, 33 bp, Homo sapien
gaggaagaataataaccgcaagaaacagtgtcc

SEQ ID NO: 459762 - DNA, 33 bp, Homo sapien
gaggaagaataataactgcaagaaacagtgtcc

SEQ ID NO: 459763 - DNA, 33 bp, Homo sapien
gcttcaaattcttaaacgttagcacccaagtca

SEQ ID NO: 459764 - DNA, 33 bp, Homo sapien
gcttcaaattcttaaatgttagcacccaagtca

SEQ ID NO: 459765 - DNA, 33 bp, Homo sapien
actaggtactgtttcacgtgctttatttatatt

SEQ ID NO: 459766 - DNA, 33 bp, Homo sapien
actaggtactgtttcaggtgctttatttatatt

SEQ ID NO: 459767 - DNA, 33 bp, Homo sapien
gagagatgccctacaccaacccgcgagggcctg

SEQ ID NO: 459768 - DNA, 33 bp, Homo sapien
gagagatgccctacactaacccgcgagggcctg

SEQ ID NO: 459769 - DNA, 33 bp, Homo sapien
cggtatgttcattggacggatgtaggaacagag

SEQ ID NO: 459770 - DNA, 33 bp, Homo sapien
cggtatgttcattggatggatgtaggaacagag

SEQ ID NO: 459771 - DNA, 33 bp, Homo sapien
agaactatactgattcaaacctctcaggaggga

SEQ ID NO: 459772 - DNA, 33 bp, Homo sapien
agaactatactgattcgaacctctcaggaggga

SEQ ID NO: 459773 - DNA, 33 bp, Homo sapien
gacggaaaccatcgaaagcaccaagttcaacat

SEQ ID NO: 459774 - DNA, 33 bp, Homo sapien
gacggaaaccatcgaacgcaccaagttcaacat

SEQ ID NO: 459775 - DNA, 33 bp, Homo sapien
gtgctttctgaaaattaaaacacgggaaaagag

SEQ ID NO: 459776 - DNA, 33 bp, Homo sapien
gtgctttctgaaaattgaaacacgggaaaagag

SEQ ID NO: 459777 - DNA, 33 bp, Homo sapien
cctgtagaaaaactaccacaacatgcacgccaa

SEQ ID NO: 459778 - DNA, 33 bp, Homo sapien
cctgtagaaaaactacgacaacatgcacgccaa

SEQ ID NO: 459779 - DNA, 33 bp, Homo sapien
tgcctcacagttgcccaaacagcgctgcctcct

SEQ ID NO: 459780 - DNA, 33 bp, Homo sapien
tgcctcacagttgcccgaacagcgctgcctcct

SEQ ID NO: 459781 - DNA, 33 bp, Homo sapien
tgataaaaacagatccagcttagtcaagtgttg

SEQ ID NO: 459782 - DNA, 33 bp, Homo sapien
tgataaaaacagatccggcttagtcaagtgttg

SEQ ID NO: 459783 - DNA, 33 bp, Homo sapien
cattgttctgaagatgacaaggaaacctttagg

SEQ ID NO: 459784 - DNA, 33 bp, Homo sapien
cattgttctgaagatggcaaggaaacctttagg

SEQ ID NO: 459785 - DNA, 33 bp, Homo sapien
tctggagtaatcaggcagaaatcaataaacaaa

SEQ ID NO: 459786 - DNA, 33 bp, Homo sapien
tctggagtaatcaggcggaaatcaataaacaaa

SEQ ID NO: 459787 - DNA, 33 bp, Homo sapien
aggctctgctcaagaactgaggtgtgacgaagg

SEQ ID NO: 459788 - DNA, 33 bp, Homo sapien
aggctctgctcaagaattgaggtgtgacgaagg

SEQ ID NO: 459789 - DNA, 33 bp, Homo sapien
cgagtaacataagatacgcacagggtccaggga

SEQ ID NO: 459790 - DNA, 33 bp, Homo sapien
cgagtaacataagatatgcacagggtccaggga

SEQ ID NO: 459791 - DNA, 33 bp, Homo sapien
cataagtatacccaaaagaattttgatcaaggt

SEQ ID NO: 459792 - DNA, 33 bp, Homo sapien
cataagtatacccaaatgaattttgatcaaggt

SEQ ID NO: 459793 - DNA, 33 bp, Homo sapien
aactaaaaggtgaaaacattccaagtgtctatt

SEQ ID NO: 459794 - DNA, 33 bp, Homo sapien
aactaaaaggtgaaaatattccaagtgtctatt

SEQ ID NO: 459795 - DNA, 33 bp, Homo sapien
tatggtggtcagttcccacacaggctgacagtt

SEQ ID NO: 459796 - DNA, 33 bp, Homo sapien
tatggtggtcagttcctacacaggctgacagtt

SEQ ID NO: 459797 - DNA, 33 bp, Homo sapien
catctgatagtcccagcatagcttttgaatcac

SEQ ID NO: 459798 - DNA, 33 bp, Homo sapien
catctgatagtcccagtatagcttttgaatcac

SEQ ID NO: 459799 - DNA, 33 bp, Homo sapien
tcccttgggaggcttacatttcaatgactagac

SEQ ID NO: 459800 - DNA, 33 bp, Homo sapien
tcccttgggaggcttatatttcaatgactagac

SEQ ID NO: 459801 - DNA, 33 bp, Homo sapien
gagaaagttcgatgtcaagagatgccagaaaaa

SEQ ID NO: 459802 - DNA, 33 bp, Homo sapien
gagaaagttcgatgtccagagatgccagaaaaa

SEQ ID NO: 459803 - DNA, 33 bp, Homo sapien
gacaaagttggaaggaaaatatatatgcattca

SEQ ID NO: 459804 - DNA, 33 bp, Homo sapien
gacaaagttggaaggagaatatatatgcattca

SEQ ID NO: 459805 - DNA, 33 bp, Homo sapien
ctgtgagatctggtggaacaaaaacaaggtgag

SEQ ID NO: 459806 - DNA, 33 bp, Homo sapien
ctgtgagatctggtgggacaaaaacaaggtgag

SEQ ID NO: 459807 - DNA, 33 bp, Homo sapien
tacaaagccctgcacacgaagcctctcaagttc

SEQ ID NO: 459808 - DNA, 33 bp, Homo sapien
tacaaagccctgcacatgaagcctctcaagttc

SEQ ID NO: 459809 - DNA, 33 bp, Homo sapien
tgcagggctttgtatacgggccacaggaccggt

SEQ ID NO: 459810 - DNA, 33 bp, Homo sapien
tgcagggctttgtatatgggccacaggaccggt

SEQ ID NO: 459811 - DNA, 33 bp, Homo sapien
aaactttatctccttccagcacaccggtcctgt

SEQ ID NO: 459812 - DNA, 33 bp, Homo sapien
aaactttatctccttctagcacaccggtcctgt

SEQ ID NO: 459813 - DNA, 33 bp, Homo sapien
gtgggtggtgtgcaaacggaatgaagagcgtcc

SEQ ID NO: 459814 - DNA, 33 bp, Homo sapien
gtgggtggtgtgcaaagggaatgaagagcgtcc

SEQ ID NO: 459815 - DNA, 33 bp, Homo sapien
catctcccaatccatcaacataccccatccctc

SEQ ID NO: 459816 - DNA, 33 bp, Homo sapien
catctcccaatccatcgacataccccatccctc

SEQ ID NO: 459817 - DNA, 33 bp, Homo sapien
catgaaggcaagacctgaagtcatctggatcac

SEQ ID NO: 459818 - DNA, 33 bp, Homo sapien
catgaaggcaagaccttaagtcatctggatcac

SEQ ID NO: 459819 - DNA, 33 bp, Homo sapien
atattcacaggctggacattgtagatttgcata

SEQ ID NO: 459820 - DNA, 33 bp, Homo sapien
atattcacaggctggatattgtagatttgcata

SEQ ID NO: 459821 - DNA, 33 bp, Homo sapien
ttactgccatctgccgcaagttggcaaatatgc

SEQ ID NO: 459822 - DNA, 33 bp, Homo sapien
ttactgccatctgccggaagttggcaaatatgc

SEQ ID NO: 459823 - DNA, 33 bp, Homo sapien
acactgctgcagaaagccattccctgcagaaaa

SEQ ID NO: 459824 - DNA, 33 bp, Homo sapien
acactgctgcagaaaggcattccctgcagaaaa

SEQ ID NO: 459825 - DNA, 33 bp, Homo sapien
atgaaatccatgtaagcctggacgtggtggctc

SEQ ID NO: 459826 - DNA, 33 bp, Homo sapien
atgaaatccatgtaaggctggacgtggtggctc

SEQ ID NO: 459827 - DNA, 33 bp, Homo sapien
catttctaacccctagaatctcagtaacctctc

SEQ ID NO: 459828 - DNA, 33 bp, Homo sapien
catttctaacccctagtatctcagtaacctctc

SEQ ID NO: 459829 - DNA, 33 bp, Homo sapien
agcatcattaggattaagtggcttttggctggg

SEQ ID NO: 459830 - DNA, 33 bp, Homo sapien
agcatcattaggattaggtggcttttggctggg

SEQ ID NO: 459831 - DNA, 33 bp, Homo sapien
agaattcatctatctacggtgctgcttcatttt

SEQ ID NO: 459832 - DNA, 33 bp, Homo sapien
agaattcatctatctatggtgctgcttcatttt

SEQ ID NO: 459833 - DNA, 33 bp, Homo sapien
agtgttggacacaataaaataggcacttctagg

SEQ ID NO: 459834 - DNA, 33 bp, Homo sapien
agtgttggacacaatacaataggcacttctagg

SEQ ID NO: 459835 - DNA, 33 bp, Homo sapien
tcctcaaaaaggtcaccatgtgatccagcaaca

SEQ ID NO: 459836 - DNA, 33 bp, Homo sapien
tcctcaaaaaggtcactatgtgatccagcaaca

SEQ ID NO: 459837 - DNA, 33 bp, Homo sapien
tttccaaccttcctgaacttttcaaatgggtaa

SEQ ID NO: 459838 - DNA, 33 bp, Homo sapien
tttccaaccttcctgatcttttcaaatgggtaa

SEQ ID NO: 459839 - DNA, 33 bp, Homo sapien
ccatccttaaagggcacaccttcagattttcct

SEQ ID NO: 459840 - DNA, 33 bp, Homo sapien
ccatccttaaagggcataccttcagattttcct

SEQ ID NO: 459841 - DNA, 33 bp, Homo sapien
ttgaagttgaatagcacgatgtctccagttttt

SEQ ID NO: 459842 - DNA, 33 bp, Homo sapien
ttgaagttgaatagcatgatgtctccagttttt

SEQ ID NO: 459843 - DNA, 33 bp, Homo sapien
actttggatctacaaaatgctttgggaattatg

SEQ ID NO: 459844 - DNA, 33 bp, Homo sapien
actttggatctacaaattgctttgggaattatg

SEQ ID NO: 459845 - DNA, 33 bp, Homo sapien
acatgaaaaagttacaaggatctcaacttagca

SEQ ID NO: 459846 - DNA, 33 bp, Homo sapien
acatgaaaaagttacacggatctcaacttagca

SEQ ID NO: 459847 - DNA, 33 bp, Homo sapien
tgaaagatgctcgccactatgcttgtctgttac

SEQ ID NO: 459848 - DNA, 33 bp, Homo sapien
tgaaagatgctcgccattatgcttgtctgttac

SEQ ID NO: 459849 - DNA, 33 bp, Homo sapien
caatcagagggacatcaatcatccctttcaagt

SEQ ID NO: 459850 - DNA, 33 bp, Homo sapien
caatcagagggacatcgatcatccctttcaagt

SEQ ID NO: 459851 - DNA, 33 bp, Homo sapien
tgagggcaaagcatacaaagtgttgggcaggcc

SEQ ID NO: 459852 - DNA, 33 bp, Homo sapien
tgagggcaaagcatacgaagtgttgggcaggcc

SEQ ID NO: 459853 - DNA, 33 bp, Homo sapien
cattatcttcacagaacatggttgaagtagatg

SEQ ID NO: 459854 - DNA, 33 bp, Homo sapien
cattatcttcacagaatatggttgaagtagatg

SEQ ID NO: 459855 - DNA, 33 bp, Homo sapien
ctcctgtttcttggacggaatgatgataggctt

SEQ ID NO: 459856 - DNA, 33 bp, Homo sapien
ctcctgtttcttggactgaatgatgataggctt

SEQ ID NO: 459857 - DNA, 33 bp, Homo sapien
ctacaacctgaaagtaaaatgggtcaccaatag

SEQ ID NO: 459858 - DNA, 33 bp, Homo sapien
ctacaacctgaaagtagaatgggtcaccaatag

SEQ ID NO: 459859 - DNA, 33 bp, Homo sapien
tcaatcctttctatacacttggtcattaaaagt

SEQ ID NO: 459860 - DNA, 33 bp, Homo sapien
tcaatcctttctatacgcttggtcattaaaagt

SEQ ID NO: 459861 - DNA, 33 bp, Homo sapien
cctgtcgggatgactaccaaatcctggaaaatt

SEQ ID NO: 459862 - DNA, 33 bp, Homo sapien
cctgtcgggatgactatcaaatcctggaaaatt

SEQ ID NO: 459863 - DNA, 33 bp, Homo sapien
tatggctataatcccaccaattttggaggcaaa

SEQ ID NO: 459864 - DNA, 33 bp, Homo sapien
tatggctataatcccatcaattttggaggcaaa

SEQ ID NO: 459865 - DNA, 33 bp, Homo sapien
tggaaattattggcaacggaaggtaatccttct

SEQ ID NO: 459866 - DNA, 33 bp, Homo sapien
tggaaattattggcaatggaaggtaatccttct

SEQ ID NO: 459867 - DNA, 33 bp, Homo sapien
cacacagagccacaccactcactgagtcacaca

SEQ ID NO: 459868 - DNA, 33 bp, Homo sapien
cacacagagccacacctctcactgagtcacaca

SEQ ID NO: 459869 - DNA, 33 bp, Homo sapien; identical to SEQ ID NO: 459867

SEQ ID NO: 459870 - DNA, 33 bp, Homo sapien; identical to SEQ ID NO: 459868

SEQ ID NO: 459871 - DNA, 33 bp, Homo sapien
aggtgattcagtctctaaaaccacagtctccaa

SEQ ID NO: 459872 - DNA, 33 bp, Homo sapien
aggtgattcagtctctgaaaccacagtctccaa

SEQ ID NO: 459873 - DNA, 33 bp, Homo sapien
agtttttaaggtgtaacgtgtggagcaatgtat

SEQ ID NO: 459874 - DNA, 33 bp, Homo sapien
agtttttaaggtgtaatgtgtggagcaatgtat

SEQ ID NO: 459875 - DNA, 33 bp, Homo sapien; identical to SEQ ID NO: 459873

SEQ ID NO: 459876 - DNA, 33 bp, Homo sapien; identical to SEQ ID NO: 459874

SEQ ID NO: 459877 - DNA, 33 bp, Homo sapien
caaatacatcattgctcaaaacacagtaggtta

SEQ ID NO: 459878 - DNA, 33 bp, Homo sapien
caaatacatcattgctgaaaacacagtaggtta

SEQ ID NO: 459879 - DNA, 33 bp, Homo sapien
gtccttggtaactcacaatctccaagatcccta

SEQ ID NO: 459880 - DNA, 33 bp, Homo sapien
gtccttggtaactcactatctccaagatcccta

SEQ ID NO: 459881 - DNA, 33 bp, Homo sapien
ataatcaaagggacaccgatcgactcttctatg

SEQ ID NO: 459882 - DNA, 33 bp, Homo sapien
ataatcaaagggacactgatcgactcttctatg

SEQ ID NO: 459883 - DNA, 33 bp, Homo sapien
gaaatcccagcctaaaagatctctcaaataacg

SEQ ID NO: 459884 - DNA, 33 bp, Homo sapien
gaaatcccagcctaaatgatctctcaaataacg

SEQ ID NO: 459885 - DNA, 33 bp, Homo sapien
agtgataagttgtagtaacatcatagacaccat

SEQ ID NO: 459886 - DNA, 33 bp, Homo sapien
agtgataagttgtagtcacatcatagacaccat

SEQ ID NO: 459887 - DNA, 33 bp, Homo sapien
tctgtcttttaatctcaaggctctcttccagct

SEQ ID NO: 459888 - DNA, 33 bp, Homo sapien
tctgtcttttaatctctaggctctcttccagct

SEQ ID NO: 459889 - DNA, 33 bp, Homo sapien
ttagattacctccaatcacttccctggcccaca

SEQ ID NO: 459890 - DNA, 33 bp, Homo sapien
ttagattacctccaatgacttccctggcccaca

SEQ ID NO: 459891 - DNA, 33 bp, Homo sapien
agtactgagagaaagactacattttggactgat

SEQ ID NO: 459892 - DNA, 33 bp, Homo sapien
agtactgagagaaagagtacattttggactgat

SEQ ID NO: 459893 - DNA, 33 bp, Homo sapien
ataatttccctcaaaaaatccctttgtcatgtt

SEQ ID NO: 459894 - DNA, 33 bp, Homo sapien
ataatttccctcaaaatatccctttgtcatgtt

SEQ ID NO: 459895 - DNA, 33 bp, Homo sapien
agccaggatctgcaaactctccagacccacaat

SEQ ID NO: 459896 - DNA, 33 bp, Homo sapien
agccaggatctgcaaagtctccagacccacaat

SEQ ID NO: 459897 - DNA, 33 bp, Homo sapien
catatgccaaacacacaactgttcatgattgca

SEQ ID NO: 459898 - DNA, 33 bp, Homo sapien
catatgccaaacacacgactgttcatgattgca

SEQ ID NO: 459899 - DNA, 33 bp, Homo sapien
gccagagggttagtgcaaggccatgttcattga

SEQ ID NO: 459900 - DNA, 33 bp, Homo sapien
gccagagggttagtgcgaggccatgttcattga

SEQ ID NO: 459901 - DNA, 33 bp, Homo sapien; identical to SEQ ID NO: 459899

SEQ ID NO: 459902 - DNA, 33 bp, Homo sapien; identical to SEQ ID NO: 459900

SEQ ID NO: 459903 - DNA, 33 bp, Homo sapien
tcagggagatatctctcaagacttgcagcatct

SEQ ID NO: 459904 - DNA, 33 bp, Homo sapien
tcagggagatatctctgaagacttgcagcatct

SEQ ID NO: 459905 - DNA, 33 bp, Homo sapien
gggaaatattggagcccagtgttttccttaaag

SEQ ID NO: 459906 - DNA, 33 bp, Homo sapien
gggaaatattggagcctagtgttttccttaaag

SEQ ID NO: 459907 - DNA, 33 bp, Homo sapien
ttcctgaccactatgaacacagagtagcagctg

SEQ ID NO: 459908 - DNA, 33 bp, Homo sapien
ttcctgaccactatgagcacagagtagcagctg

SEQ ID NO: 459909 - DNA, 33 bp, Homo sapien
tgctcatgcactggtacggctgtgttcacactc

SEQ ID NO: 459910 - DNA, 33 bp, Homo sapien
tgctcatgcactggtatggctgtgttcacactc

SEQ ID NO: 459911 - DNA, 33 bp, Homo sapien
tttttctatgtttatacgctgttaaagataata

SEQ ID NO: 459912 - DNA, 33 bp, Homo sapien
tttttctatgtttataggctgttaaagataata

SEQ ID NO: 459913 - DNA, 33 bp, Homo sapien
gaaaagttggcaatgaaaaaagggttgattaga

SEQ ID NO: 459914 - DNA, 33 bp, Homo sapien
gaaaagttggcaatgacaaaagggttgattaga

SEQ ID NO: 459915 - DNA, 33 bp, Homo sapien
aatgcacagataaagacgatggagtgaggatga

SEQ ID NO: 459916 - DNA, 33 bp, Homo sapien
aatgcacagataaagatgatggagtgaggatga

SEQ ID NO: 459917 - DNA, 33 bp, Homo sapien
gcacaggttaggagaacgcacaccttcctggta

SEQ ID NO: 459918 - DNA, 33 bp, Homo sapien
gcacaggttaggagaatgcacaccttcctggta

SEQ ID NO: 459919 - DNA, 33 bp, Homo sapien
tctgcacttggacataaaaaagcatctcaagtt

SEQ ID NO: 459920 - DNA, 33 bp, Homo sapien
tctgcacttggacatacaaaagcatctcaagtt

SEQ ID NO: 459921 - DNA, 33 bp, Homo sapien
tgcatattgctaaacacaatggtcagttatcag

SEQ ID NO: 459922 - DNA, 33 bp, Homo sapien
tgcatattgctaaacataatggtcagttatcag

SEQ ID NO: 459923 - DNA, 33 bp, Homo sapien
ggcaggttaagtaagaagagacctgataactga

SEQ ID NO: 459924 - DNA, 33 bp, Homo sapien
ggcaggttaagtaagatgagacctgataactga

SEQ ID NO: 459925 - DNA, 33 bp, Homo sapien
gtgtgctgtgcaagtaaagattcagaggtgaat

SEQ ID NO: 459926 - DNA, 33 bp, Homo sapien
gtgtgctgtgcaagtacagattcagaggtgaat

SEQ ID NO: 459927 - DNA, 33 bp, Homo sapien
tgttctgagctcacaaacagtacatctctttcc

SEQ ID NO: 459928 - DNA, 33 bp, Homo sapien
tgttctgagctcacaagcagtacatctctttcc

SEQ ID NO: 459929 - DNA, 33 bp, Homo sapien
gaagattttactatcactagcttaagtgtgggg

SEQ ID NO: 459930 - DNA, 33 bp, Homo sapien
gaagattttactatcattagcttaagtgtgggg

SEQ ID NO: 459931 - DNA, 33 bp, Homo sapien
gagtacaaggacggtcaccagaggctgggaagg

SEQ ID NO: 459932 - DNA, 33 bp, Homo sapien
gagtacaaggacggtctccagaggctgggaagg

SEQ ID NO: 459933 - DNA, 33 bp, Homo sapien
ctaaggatccgtttccaaagcgctggaattgcg

SEQ ID NO: 459934 - DNA, 33 bp, Homo sapien
ctaaggatccgtttccgaagcgctggaattgcg

SEQ ID NO: 459935 - DNA, 33 bp, Homo sapien
acttcagtgcttaggactagagaggattatccc

SEQ ID NO: 459936 - DNA, 33 bp, Homo sapien
acttcagtgcttaggagtagagaggattatccc

SEQ ID NO: 459937 - DNA, 33 bp, Homo sapien
atctaattgcattaaacggcctcacaactctga

SEQ ID NO: 459938 - DNA, 33 bp, Homo sapien
atctaattgcattaaatggcctcacaactctga

SEQ ID NO: 459939 - DNA, 33 bp, Homo sapien
catgcagaaaagttcacgagtgattagtgtaac

SEQ ID NO: 459940 - DNA, 33 bp, Homo sapien
catgcagaaaagttcatgagtgattagtgtaac

SEQ ID NO: 459941 - DNA, 33 bp, Homo sapien
gcactgctgatttgggaccatttagctgcagtc

SEQ ID NO: 459942 - DNA, 33 bp, Homo sapien
gcactgctgatttggggccatttagctgcagtc

SEQ ID NO: 459943 - DNA, 33 bp, Homo sapien
aagatacagttttatcacatatttttgtatgct

SEQ ID NO: 459944 - DNA, 33 bp, Homo sapien
aagatacagttttatcgcatatttttgtatgct

SEQ ID NO: 459945 - DNA, 33 bp, Homo sapien
gcatgatccaacagaaaagtaacacgagccata

SEQ ID NO: 459946 - DNA, 33 bp, Homo sapien
gcatgatccaacagaagagtaacacgagccata

SEQ ID NO: 459947 - DNA, 33 bp, Homo sapien
gaagttgagggttggaagactagagagtgggaa

SEQ ID NO: 459948 - DNA, 33 bp, Homo sapien
gaagttgagggttggaggactagagagtgggaa

SEQ ID NO: 459949 - DNA, 33 bp, Homo sapien
tctgaccattaccaagaaaataggacaaaaatc

SEQ ID NO: 459950 - DNA, 33 bp, Homo sapien
tctgaccattaccaagtaaataggacaaaaatc

SEQ ID NO: 459951 - DNA, 33 bp, Homo sapien
ggaacaaatacagacagcaaccaaatacatgat

SEQ ID NO: 459952 - DNA, 33 bp, Homo sapien
ggaacaaatacagacatcaaccaaatacatgat

SEQ ID NO: 459953 - DNA, 33 bp, Homo sapien
acatccaccattgctaaggagaaaggagcagca

SEQ ID NO: 459954 - DNA, 33 bp, Homo sapien
acatccaccattgctagggagaaaggagcagca

SEQ ID NO: 459955 - DNA, 33 bp, Homo sapien
aaaaatggacatgataacaatagtcattagatg

SEQ ID NO: 459956 - DNA, 33 bp, Homo sapien
aaaaatggacatgatagcaatagtcattagatg

SEQ ID NO: 459957 - DNA, 33 bp, Homo sapien
tgttcagaaagcacacaatccatcagatggtga

SEQ ID NO: 459958 - DNA, 33 bp, Homo sapien
tgttcagaaagcacacgatccatcagatggtga

SEQ ID NO: 459959 - DNA, 33 bp, Homo sapien
gcctgtactaggaaaacagaccctttgggccat

SEQ ID NO: 459960 - DNA, 33 bp, Homo sapien
gcctgtactaggaaaagagaccctttgggccat

SEQ ID NO: 459961 - DNA, 33 bp, Homo sapien
aagacaactgctgttacgagaagttaccgaaaa

SEQ ID NO: 459962 - DNA, 33 bp, Homo sapien
aagacaactgctgttatgagaagttaccgaaaa

SEQ ID NO: 459963 - DNA, 33 bp, Homo sapien
cctaaggaaacaagaccgggaagatgaggggag

SEQ ID NO: 459964 - DNA, 33 bp, Homo sapien
cctaaggaaacaagactgggaagatgaggggag

SEQ ID NO: 459965 - DNA, 33 bp, Homo sapien
aagtgcatgcaaattacatgcatttgttttttg

SEQ ID NO: 459966 - DNA, 33 bp, Homo sapien
aagtgcatgcaaattatatgcatttgttttttg

SEQ ID NO: 459967 - DNA, 33 bp, Homo sapien
aatctccctgtctcaaaagccttagcttaatca

SEQ ID NO: 459968 - DNA, 33 bp, Homo sapien
aatctccctgtctcaagagccttagcttaatca

SEQ ID NO: 459969 - DNA, 33 bp, Homo sapien
tgacagcaaaattaaacagaaagcactggctat

SEQ ID NO: 459970 - DNA, 33 bp, Homo sapien
tgacagcaaaattaaatagaaagcactggctat

SEQ ID NO: 459971 - DNA, 33 bp, Homo sapien
ggattttctagctacagggactaataaattcaa

SEQ ID NO: 459972 - DNA, 33 bp, Homo sapien
ggattttctagctacatggactaataaattcaa

SEQ ID NO: 459973 - DNA, 33 bp, Homo sapien
atgaatcgagactctacgggttgcaagtgactt

SEQ ID NO: 459974 - DNA, 33 bp, Homo sapien
atgaatcgagactctatgggttgcaagtgactt

SEQ ID NO: 459975 - DNA, 33 bp, Homo sapien
aaatacaaatccagagactaaaccgcagagacc

SEQ ID NO: 459976 - DNA, 33 bp, Homo sapien
aaatacaaatccagaggctaaaccgcagagacc

SEQ ID NO: 459977 - DNA, 33 bp, Homo sapien
tagttttctcagggtgaatgtcagagaccctcg

SEQ ID NO: 459978 - DNA, 33 bp, Homo sapien
tagttttctcagggtggatgtcagagaccctcg

SEQ ID NO: 459979 - DNA, 33 bp, Homo sapien
gctggtataacacatgaaaatcttgtctttgtg

SEQ ID NO: 459980 - DNA, 33 bp, Homo sapien
gctggtataacacatggaaatcttgtctttgtg

SEQ ID NO: 459981 - DNA, 33 bp, Homo sapien; identical to SEQ ID NO: 459979

SEQ ID NO: 459982 - DNA, 33 bp, Homo sapien; identical to SEQ ID NO: 459980

SEQ ID NO: 459983 - DNA, 33 bp, Homo sapien
caccaaagcaaacataagaagtagctcccactc

SEQ ID NO: 459984 - DNA, 33 bp, Homo sapien
caccaaagcaaacataggaagtagctcccactc

SEQ ID NO: 459985 - DNA, 33 bp, Homo sapien
aatcagttggtgaaaggaggtgttcttcagccc

SEQ ID NO: 459986 - DNA, 33 bp, Homo sapien
aatcagttggtgaaagtaggtgttcttcagccc

SEQ ID NO: 459987 - DNA, 33 bp, Homo sapien
gcaaatgaaatagaccagaataataatgcaagg

SEQ ID NO: 459988 - DNA, 33 bp, Homo sapien
gcaaatgaaatagaccggaataataatgcaagg

SEQ ID NO: 459989 - DNA, 33 bp, Homo sapien
ttctttgtggagcctgcacgtttataatctgtt

SEQ ID NO: 459990 - DNA, 33 bp, Homo sapien
ttctttgtggagcctggacgtttataatctgtt

SEQ ID NO: 459991 - DNA, 33 bp, Homo sapien
tgactctccaaagcacaaacaccaaagcaatgg

SEQ ID NO: 459992 - DNA, 33 bp, Homo sapien
tgactctccaaagcaccaacaccaaagcaatgg

SEQ ID NO: 459993 - DNA, 33 bp, Homo sapien
tgctgggttatatcccgccgatcattgtccctc

SEQ ID NO: 459994 - DNA, 33 bp, Homo sapien
tgctgggttatatccctccgatcattgtccctc

SEQ ID NO: 459995 - DNA, 33 bp, Homo sapien
aactgctcactatcaccgggtgaaatgagtctt

SEQ ID NO: 459996 - DNA, 33 bp, Homo sapien
aactgctcactatcactgggtgaaatgagtctt

SEQ ID NO: 459997 - DNA, 33 bp, Homo sapien
catatccatcattgtgcaaagttctactggaca

SEQ ID NO: 459998 - DNA, 33 bp, Homo sapien
catatccatcattgtggaaagttctactggaca

SEQ ID NO: 459999 - DNA, 33 bp, Homo sapien
aggccataccacactacattagttacaacagct

SEQ ID NO: 460000 - DNA, 33 bp, Homo sapien
aggccataccacactatattagttacaacagct

SEQ ID NO: 460001 - DNA, 33 bp, Homo sapien
aagcttattacccctcaagtggccaaactggag

SEQ ID NO: 460002 - DNA, 33 bp, Homo sapien
aagcttattacccctcgagtggccaaactggag

SEQ ID NO: 460003 - DNA, 33 bp, Homo sapien
gggtaagctggtaaccaccgtaagtccattgta

SEQ ID NO: 460004 - DNA, 33 bp, Homo sapien
gggtaagctggtaaccgccgtaagtccattgta

SEQ ID NO: 460005 - DNA, 33 bp, Homo sapien
aaatttaggtgtgaataaaaaccatttggtaag

SEQ ID NO: 460006 - DNA, 33 bp, Homo sapien
aaatttaggtgtgaatcaaaaccatttggtaag

SEQ ID NO: 460007 - DNA, 33 bp, Homo sapien
cttcttgaatcagtgacagtttgtgtaaagaat

SEQ ID NO: 460008 - DNA, 33 bp, Homo sapien
cttcttgaatcagtgatagtttgtgtaaagaat

SEQ ID NO: 460009 - DNA, 33 bp, Homo sapien
caggtacagcatgtaacagtattagcaatagta

SEQ ID NO: 460010 - DNA, 33 bp, Homo sapien
caggtacagcatgtaatagtattagcaatagta

SEQ ID NO: 460011 - DNA, 33 bp, Homo sapien
aaaacagacacagagaacagaaagtgccttggc

SEQ ID NO: 460012 - DNA, 33 bp, Homo sapien
aaaacagacacagagagcagaaagtgccttggc

SEQ ID NO: 460013 - DNA, 33 bp, Homo sapien
taggttatttatctgaccttccaataattcgag

SEQ ID NO: 460014 - DNA, 33 bp, Homo sapien
taggttatttatctgatcttccaataattcgag

SEQ ID NO: 460015 - DNA, 33 bp, Homo sapien
atattttttccctcacaggtacaagtggcaagt

SEQ ID NO: 460016 - DNA, 33 bp, Homo sapien
atattttttccctcaccggtacaagtggcaagt

SEQ ID NO: 460017 - DNA, 33 bp, Homo sapien
ccagattcaattaataggttttccagttcagag

SEQ ID NO: 460018 - DNA, 33 bp, Homo sapien
ccagattcaattaatatgttttccagttcagag

SEQ ID NO: 460019 - DNA, 33 bp, Homo sapien
tgtgctcaaagattccagctcagatcaggaaat

SEQ ID NO: 460020 - DNA, 33 bp, Homo sapien
tgtgctcaaagattccggctcagatcaggaaat

SEQ ID NO: 460021 - DNA, 33 bp, Homo sapien
aggatatatttaacaaacaggaagctctccata

SEQ ID NO: 460022 - DNA, 33 bp, Homo sapien
aggatatatttaacaatcaggaagctctccata

SEQ ID NO: 460023 - DNA, 33 bp, Homo sapien
ggcctaagtcagtcccccttcaaaatctttatg

SEQ ID NO: 460024 - DNA, 33 bp, Homo sapien
ggcctaagtcagtcccgcttcaaaatctttatg

SEQ ID NO: 460025 - DNA, 33 bp, Homo sapien
taactgcatatacctacctctaaggctattgga

SEQ ID NO: 460026 - DNA, 33 bp, Homo sapien
taactgcatatacctatctctaaggctattgga

SEQ ID NO: 460027 - DNA, 33 bp, Homo sapien
acaagaactagttcgcacacattttctcctgct

SEQ ID NO: 460028 - DNA, 33 bp, Homo sapien
acaagaactagttcgcgcacattttctcctgct

SEQ ID NO: 460029 - DNA, 33 bp, Homo sapien
attctcttattgttgcactttacagaggcacag

SEQ ID NO: 460030 - DNA, 33 bp, Homo sapien
attctcttattgttgcgctttacagaggcacag

SEQ ID NO: 460031 - DNA, 33 bp, Homo sapien
tcactgtgcagactcaatgagaacctccatata

SEQ ID NO: 460032 - DNA, 33 bp, Homo sapien
tcactgtgcagactcagtgagaacctccatata

SEQ ID NO: 460033 - DNA, 33 bp, Homo sapien
aaagtcttggccagaactgtcttatttctgttg

SEQ ID NO: 460034 - DNA, 33 bp, Homo sapien
aaagtcttggccagaagtgtcttatttctgttg

SEQ ID NO: 460035 - DNA, 33 bp, Homo sapien
gtctctcctatttgacggggagacctatgacgg

SEQ ID NO: 460036 - DNA, 33 bp, Homo sapien
gtctctcctatttgactgggagacctatgacgg

SEQ ID NO: 460037 - DNA, 33 bp, Homo sapien
tccactcaatccttgcaatccgacctccacgtg

SEQ ID NO: 460038 - DNA, 33 bp, Homo sapien
tccactcaatccttgccatccgacctccacgtg

SEQ ID NO: 460039 - DNA, 33 bp, Homo sapien
atctccacattgttcaaagaatgaaagtgtggc

SEQ ID NO: 460040 - DNA, 33 bp, Homo sapien
atctccacattgttcagagaatgaaagtgtggc

SEQ ID NO: 460041 - DNA, 33 bp, Homo sapien
taagtaccaacctggaaggggcgcgctgggagc

SEQ ID NO: 460042 - DNA, 33 bp, Homo sapien
taagtaccaacctggatggggcgcgctgggagc

SEQ ID NO: 460043 - DNA, 33 bp, Homo sapien
ctggttccagaatttacgctctaacccagtgct

SEQ ID NO: 460044 - DNA, 33 bp, Homo sapien
ctggttccagaatttatgctctaacccagtgct

SEQ ID NO: 460045 - DNA, 33 bp, Homo sapien
cagcacagtcaattcacgtttctccctgctcac

SEQ ID NO: 460046 - DNA, 33 bp, Homo sapien
cagcacagtcaattcatgtttctccctgctcac

SEQ ID NO: 460047 - DNA, 33 bp, Homo sapien
tcaattgcgtagacaccggcttcctcactgttt

SEQ ID NO: 460048 - DNA, 33 bp, Homo sapien
tcaattgcgtagacactggcttcctcactgttt

SEQ ID NO: 460049 - DNA, 33 bp, Homo sapien
gagctgaagaaaatccagcagaaacccttcatc

SEQ ID NO: 460050 - DNA, 33 bp, Homo sapien
gagctgaagaaaatccggcagaaacccttcatc

SEQ ID NO: 460051 - DNA, 33 bp, Homo sapien
catatgtagataaaggcaacttagcacaatgtt

SEQ ID NO: 460052 - DNA, 33 bp, Homo sapien
catatgtagataaagggaacttagcacaatgtt

SEQ ID NO: 460053 - DNA, 33 bp, Homo sapien
gagatcttatataggaagtacttagactagcat

SEQ ID NO: 460054 - DNA, 33 bp, Homo sapien
gagatcttatataggaggtacttagactagcat

SEQ ID NO: 460055 - DNA, 33 bp, Homo sapien
actgatgaaaacatacactcatggaaacttaca

SEQ ID NO: 460056 - DNA, 33 bp, Homo sapien
actgatgaaaacatacgctcatggaaacttaca

SEQ ID NO: 460057 - DNA, 33 bp, Homo sapien
gaacagtgataaagaaaataggcatacggctgg

SEQ ID NO: 460058 - DNA, 33 bp, Homo sapien
gaacagtgataaagaagataggcatacggctgg

SEQ ID NO: 460059 - DNA, 33 bp, Homo sapien
acctggtggaggcagacgacctgttgcagaagc

SEQ ID NO: 460060 - DNA, 33 bp, Homo sapien
acctggtggaggcagatgacctgttgcagaagc

SEQ ID NO: 460061 - DNA, 33 bp, Homo sapien
ccccacccaaagactacgctcttgactctgtgc

SEQ ID NO: 460062 - DNA, 33 bp, Homo sapien
ccccacccaaagactatgctcttgactctgtgc

SEQ ID NO: 460063 - DNA, 33 bp, Homo sapien
actcaaggtatgtcaaatggaggggatttaata

SEQ ID NO: 460064 - DNA, 33 bp, Homo sapien
actcaaggtatgtcaagtggaggggatttaata

SEQ ID NO: 460065 - DNA, 33 bp, Homo sapien
acaggggctgttaagcaaaaaatagctgcaaat

SEQ ID NO: 460066 - DNA, 33 bp, Homo sapien
acaggggctgttaagccaaaaatagctgcaaat

SEQ ID NO: 460067 - DNA, 33 bp, Homo sapien
ccttccccagatctctcaagtcctgtgtccctt

SEQ ID NO: 460068 - DNA, 33 bp, Homo sapien
ccttccccagatctctgaagtcctgtgtccctt

SEQ ID NO: 460069 - DNA, 33 bp, Homo sapien
ttctgattggtagaaggaacagagtagggaaat

SEQ ID NO: 460070 - DNA, 33 bp, Homo sapien
ttctgattggtagaagtaacagagtagggaaat

SEQ ID NO: 460071 - DNA, 33 bp, Homo sapien
tatcttctctaattcccgctggaatcttcactt

SEQ ID NO: 460072 - DNA, 33 bp, Homo sapien
tatcttctctaattcctgctggaatcttcactt

SEQ ID NO: 460073 - DNA, 33 bp, Homo sapien
gtcccgcagacgttgacgagtgcagcgaggagg

SEQ ID NO: 460074 - DNA, 33 bp, Homo sapien
gtcccgcagacgttgatgagtgcagcgaggagg

SEQ ID NO: 460075 - DNA, 33 bp, Homo sapien
attatatttgaaagctcagactttcggaccttt

SEQ ID NO: 460076 - DNA, 33 bp, Homo sapien
attatatttgaaagctgagactttcggaccttt

SEQ ID NO: 460077 - DNA, 33 bp, Homo sapien
agcctccatatcacccacttcaatcaccttcac

SEQ ID NO: 460078 - DNA, 33 bp, Homo sapien
agcctccatatcacccgcttcaatcaccttcac

SEQ ID NO: 460079 - DNA, 33 bp, Homo sapien
ggtaactttctgaaaccctttgtagagtcggcg

SEQ ID NO: 460080 - DNA, 33 bp, Homo sapien
ggtaactttctgaaacgctttgtagagtcggcg

SEQ ID NO: 460081 - DNA, 33 bp, Homo sapien
tcctcatcaaacgagcaattttacaagttttga

SEQ ID NO: 460082 - DNA, 33 bp, Homo sapien
tcctcatcaaacgagccattttacaagttttga

SEQ ID NO: 460083 - DNA, 33 bp, Homo sapien
ttctaaggtgatcctacggctctaagatgatcc

SEQ ID NO: 460084 - DNA, 33 bp, Homo sapien
ttctaaggtgatcctatggctctaagatgatcc

SEQ ID NO: 460085 - DNA, 33 bp, Homo sapien
atgagagcagagatacacctgtgccagcaaggc

SEQ ID NO: 460086 - DNA, 33 bp, Homo sapien
atgagagcagagatacgcctgtgccagcaaggc

SEQ ID NO: 460087 - DNA, 33 bp, Homo sapien
ctgggctgggggcagcagattcaaggtgagcaa

SEQ ID NO: 460088 - DNA, 33 bp, Homo sapien
ctgggctgggggcagcggattcaaggtgagcaa

SEQ ID NO: 460089 - DNA, 33 bp, Homo sapien
acaggtgaccacagacactcgctggatacagac

SEQ ID NO: 460090 - DNA, 33 bp, Homo sapien
acaggtgaccacagacgctcgctggatacagac

SEQ ID NO: 460091 - DNA, 33 bp, Homo sapien
cgctcatcttgagtaccgccagcaggttctgga

SEQ ID NO: 460092 - DNA, 33 bp, Homo sapien
cgctcatcttgagtactgccagcaggttctgga

SEQ ID NO: 460093 - DNA, 33 bp, Homo sapien
acagatctacacactgcagggtttaaacgatgg

SEQ ID NO: 460094 - DNA, 33 bp, Homo sapien
acagatctacacactggagggtttaaacgatgg

SEQ ID NO: 460095 - DNA, 33 bp, Homo sapien
agagagacatagatacaaagaaagtgatgacag

SEQ ID NO: 460096 - DNA, 33 bp, Homo sapien
agagagacatagatacgaagaaagtgatgacag

SEQ ID NO: 460097 - DNA, 33 bp, Homo sapien
ctgccatgagagggaacgaaaggggacctgcag

SEQ ID NO: 460098 - DNA, 33 bp, Homo sapien
ctgccatgagagggaatgaaaggggacctgcag

SEQ ID NO: 460099 - DNA, 33 bp, Homo sapien
aaatctcgtgccatcccgcttcgtcccacctgg

SEQ ID NO: 460100 - DNA, 33 bp, Homo sapien
aaatctcgtgccatcctgcttcgtcccacctgg

SEQ ID NO: 460101 - DNA, 33 bp, Homo sapien
ggatgaagagtctaggcacagctacacttgtat

SEQ ID NO: 460102 - DNA, 33 bp, Homo sapien
ggatgaagagtctaggtacagctacacttgtat

SEQ ID NO: 460103 - DNA, 33 bp, Homo sapien
ggacagcgaccaaagacgtgaaaggaggaggct

SEQ ID NO: 460104 - DNA, 33 bp, Homo sapien
ggacagcgaccaaagatgtgaaaggaggaggct

SEQ ID NO: 460105 - DNA, 33 bp, Homo sapien
acgacttcactcaacaatggtgaacagcccctc

SEQ ID NO: 460106 - DNA, 33 bp, Homo sapien
acgacttcactcaacactggtgaacagcccctc

SEQ ID NO: 460107 - DNA, 33 bp, Homo sapien
aggaatgtcaatattaaaagcagtgaagataca

SEQ ID NO: 460108 - DNA, 33 bp, Homo sapien
aggaatgtcaatattagaagcagtgaagataca

SEQ ID NO: 460109 - DNA, 33 bp, Homo sapien
catacttttgtagggacaaggtatgcagtgatt

SEQ ID NO: 460110 - DNA, 33 bp, Homo sapien
catacttttgtagggataaggtatgcagtgatt

SEQ ID NO: 460111 - DNA, 33 bp, Homo sapien
caggagaacaaggcagccctttgattaccagaa

SEQ ID NO: 460112 - DNA, 33 bp, Homo sapien
caggagaacaaggcagtcctttgattaccagaa

SEQ ID NO: 460113 - DNA, 33 bp, Homo sapien
cacagagagaaaaacacacgaatggaaagatag

SEQ ID NO: 460114 - DNA, 33 bp, Homo sapien
cacagagagaaaaacagacgaatggaaagatag

SEQ ID NO: 460115 - DNA, 33 bp, Homo sapien
acaacccacaccaaaaagtttgcaagggccaac

SEQ ID NO: 460116 - DNA, 33 bp, Homo sapien
acaacccacaccaaaaggtttgcaagggccaac

SEQ ID NO: 460117 - DNA, 33 bp, Homo sapien
ccccaaccacatagaaagtgggcaccagaggca

SEQ ID NO: 460118 - DNA, 33 bp, Homo sapien
ccccaaccacatagaaggtgggcaccagaggca

SEQ ID NO: 460119 - DNA, 33 bp, Homo sapien
ggccaagtaaattggactcaaaggtgctagggg

SEQ ID NO: 460120 - DNA, 33 bp, Homo sapien
ggccaagtaaattggattcaaaggtgctagggg

SEQ ID NO: 460121 - DNA, 33 bp, Homo sapien
aatcacaggcacagagcacaggaatgccagggg

SEQ ID NO: 460122 - DNA, 33 bp, Homo sapien
aatcacaggcacagaggacaggaatgccagggg

SEQ ID NO: 460123 - DNA, 33 bp, Homo sapien
acacactatgcagcaacgcaacaacgttggcag

SEQ ID NO: 460124 - DNA, 33 bp, Homo sapien
acacactatgcagcaatgcaacaacgttggcag

SEQ ID NO: 460125 - DNA, 33 bp, Homo sapien
ggatctaagaacaggtaaatgtccaccacatgt

SEQ ID NO: 460126 - DNA, 33 bp, Homo sapien
ggatctaagaacaggtgaatgtccaccacatgt

SEQ ID NO: 460127 - DNA, 33 bp, Homo sapien
ttaatcctctatactaactctcatacccactta

SEQ ID NO: 460128 - DNA, 33 bp, Homo sapien
ttaatcctctatactagctctcatacccactta

SEQ ID NO: 460129 - DNA, 33 bp, Homo sapien
tgagtcactctgagcaacctttctgaatgaatg

SEQ ID NO: 460130 - DNA, 33 bp, Homo sapien
tgagtcactctgagcatcctttctgaatgaatg

SEQ ID NO: 460131 - DNA, 33 bp, Homo sapien
agtgggatagagagaaagagatttgtgctccag

SEQ ID NO: 460132 - DNA, 33 bp, Homo sapien
agtgggatagagagaaggagatttgtgctccag

SEQ ID NO: 460133 - DNA, 33 bp, Homo sapien
tctatgtgaatctggccataggattagttgctt

SEQ ID NO: 460134 - DNA, 33 bp, Homo sapien
tctatgtgaatctggctataggattagttgctt

SEQ ID NO: 460135 - DNA, 33 bp, Homo sapien
ccagattcacatagaaacttatgacttctaaaa

SEQ ID NO: 460136 - DNA, 33 bp, Homo sapien
ccagattcacatagaaccttatgacttctaaaa

SEQ ID NO: 460137 - DNA, 33 bp, Homo sapien
tgcatctccaaaataagggacctggattcgata

SEQ ID NO: 460138 - DNA, 33 bp, Homo sapien
tgcatctccaaaataatggacctggattcgata

SEQ ID NO: 460139 - DNA, 33 bp, Homo sapien
ccccacaacatcatccaggacactcagtttcga

SEQ ID NO: 460140 - DNA, 33 bp, Homo sapien
ccccacaacatcatccgggacactcagtttcga

SEQ ID NO: 460141 - DNA, 33 bp, Homo sapien
tcagaacttctctctaggctcgctggtgccact

SEQ ID NO: 460142 - DNA, 33 bp, Homo sapien
tcagaacttctctctatgctcgctggtgccact

SEQ ID NO: 460143 - DNA, 33 bp, Homo sapien
ctcaataaacttgctacgctcaacagacttgag

SEQ ID NO: 460144 - DNA, 33 bp, Homo sapien
ctcaataaacttgctatgctcaacagacttgag

SEQ ID NO: 460145 - DNA, 33 bp, Homo sapien
ggtgtgagtagtagccaggcagcaaacagtggt

SEQ ID NO: 460146 - DNA, 33 bp, Homo sapien
ggtgtgagtagtagcctggcagcaaacagtggt

SEQ ID NO: 460147 - DNA, 33 bp, Homo sapien
tgttggcgcaggatcacgttaaccaggtcgtgc

SEQ ID NO: 460148 - DNA, 33 bp, Homo sapien
tgttggcgcaggatcatgttaaccaggtcgtgc

SEQ ID NO: 460149 - DNA, 33 bp, Homo sapien
tctgattcaaaatcgcactggaggttctatcta

SEQ ID NO: 460150 - DNA, 33 bp, Homo sapien
tctgattcaaaatcgcgctggaggttctatcta

SEQ ID NO: 460151 - DNA, 33 bp, Homo sapien
aatggtgattaaggaccagagcttgctataaaa

SEQ ID NO: 460152 - DNA, 33 bp, Homo sapien
aatggtgattaaggactagagcttgctataaaa

SEQ ID NO: 460153 - DNA, 33 bp, Homo sapien
agggaagaaaggataaaagataatgctttcatg

SEQ ID NO: 460154 - DNA, 33 bp, Homo sapien
agggaagaaaggataagagataatgctttcatg

SEQ ID NO: 460155 - DNA, 33 bp, Homo sapien
ggctggtgggaacaaaaatatctatcagggcat

SEQ ID NO: 460156 - DNA, 33 bp, Homo sapien
ggctggtgggaacaaagatatctatcagggcat

SEQ ID NO: 460157 - DNA, 33 bp, Homo sapien
agtaaatgtatttgacaaactcttgtgtaccag

SEQ ID NO: 460158 - DNA, 33 bp, Homo sapien
agtaaatgtatttgaccaactcttgtgtaccag

SEQ ID NO: 460159 - DNA, 33 bp, Homo sapien
catgtggattagacacaggcaatgcattatctg

SEQ ID NO: 460160 - DNA, 33 bp, Homo sapien
catgtggattagacacgggcaatgcattatctg

SEQ ID NO: 460161 - DNA, 33 bp, Homo sapien
atttcacttaatgtaacatggtccaggttcacc

SEQ ID NO: 460162 - DNA, 33 bp, Homo sapien
atttcacttaatgtaatatggtccaggttcacc

SEQ ID NO: 460163 - DNA, 33 bp, Homo sapien
ctgaagacccgggcatcagcccctcctgcctac

SEQ ID NO: 460164 - DNA, 33 bp, Homo sapien
ctgaagacccgggcattagcccctcctgcctac

SEQ ID NO: 460165 - DNA, 33 bp, Homo sapien
ggtctccaggatactacatgttaccaggccaac

SEQ ID NO: 460166 - DNA, 33 bp, Homo sapien
ggtctccaggatactatatgttaccaggccaac

SEQ ID NO: 460167 - DNA, 33 bp, Homo sapien
gcttaatggaacatcacgcaattttagatctcc

SEQ ID NO: 460168 - DNA, 33 bp, Homo sapien
gcttaatggaacatcatgcaattttagatctcc

SEQ ID NO: 460169 - DNA, 33 bp, Homo sapien
atgagtcatggaatacagagcttttagtaatgg

SEQ ID NO: 460170 - DNA, 33 bp, Homo sapien
atgagtcatggaatacggagcttttagtaatgg

SEQ ID NO: 460171 - DNA, 33 bp, Homo sapien
ctcattggcacagcaaaatctatttgattcgtg

SEQ ID NO: 460172 - DNA, 33 bp, Homo sapien
ctcattggcacagcaagatctatttgattcgtg

SEQ ID NO: 460173 - DNA, 33 bp, Homo sapien
aggtttaaatgctggtcaaagacatcctacaca

SEQ ID NO: 460174 - DNA, 33 bp, Homo sapien
aggtttaaatgctggttaaagacatcctacaca

SEQ ID NO: 460175 - DNA, 33 bp, Homo sapien
atatttccaggttaataaataaggagacatttt

SEQ ID NO: 460176 - DNA, 33 bp, Homo sapien
atatttccaggttaatcaataaggagacatttt

SEQ ID NO: 460177 - DNA, 33 bp, Homo sapien
agggcaggtactatccccaacttgagaaaaaca

SEQ ID NO: 460178 - DNA, 33 bp, Homo sapien
agggcaggtactatcctcaacttgagaaaaaca

SEQ ID NO: 460179 - DNA, 33 bp, Homo sapien
tgaattgggcagcacaaggaaccagtaaaggtt

SEQ ID NO: 460180 - DNA, 33 bp, Homo sapien
tgaattgggcagcacacggaaccagtaaaggtt

SEQ ID NO: 460181 - DNA, 33 bp, Homo sapien
acagagtataatgaccaatttctggttctgtgt

SEQ ID NO: 460182 - DNA, 33 bp, Homo sapien
acagagtataatgacccatttctggttctgtgt

SEQ ID NO: 460183 - DNA, 33 bp, Homo sapien
tcactgattggagccaaattgtctggatgttga

SEQ ID NO: 460184 - DNA, 33 bp, Homo sapien
tcactgattggagccagattgtctggatgttga

SEQ ID NO: 460185 - DNA, 33 bp, Homo sapien
agatgccgtcatccacaaaatacagagactggt

SEQ ID NO: 460186 - DNA, 33 bp, Homo sapien
agatgccgtcatccacgaaatacagagactggt

SEQ ID NO: 460187 - DNA, 33 bp, Homo sapien
taagggccttcgatgcacgttatcaccaacccc

SEQ ID NO: 460188 - DNA, 33 bp, Homo sapien
taagggccttcgatgcgcgttatcaccaacccc

SEQ ID NO: 460189 - DNA, 33 bp, Homo sapien
ctctctcacctgggcacatgttcccatccccaa

SEQ ID NO: 460190 - DNA, 33 bp, Homo sapien
ctctctcacctgggcatatgttcccatccccaa

SEQ ID NO: 460191 - DNA, 33 bp, Homo sapien
catctacacaaatgtcacagattagcccactgg

SEQ ID NO: 460192 - DNA, 33 bp, Homo sapien
catctacacaaatgtcccagattagcccactgg

SEQ ID NO: 460193 - DNA, 33 bp, Homo sapien; identical to SEQ ID NO: 460191

SEQ ID NO: 460194 - DNA, 33 bp, Homo sapien; identical to SEQ ID NO: 460192

SEQ ID NO: 460195 - DNA, 33 bp, Homo sapien
ttaacatctttcgtacaccagcattttcatgtc

SEQ ID NO: 460196 - DNA, 33 bp, Homo sapien
ttaacatctttcgtacgccagcattttcatgtc

SEQ ID NO: 460197 - DNA, 33 bp, Homo sapien
caactcttgtgtgccaagtctagtacacacatg

SEQ ID NO: 460198 - DNA, 33 bp, Homo sapien
caactcttgtgtgccaggtctagtacacacatg

SEQ ID NO: 460199 - DNA, 33 bp, Homo sapien
agaaataactggctcacagaatagatgttactt

SEQ ID NO: 460200 - DNA, 33 bp, Homo sapien
agaaataactggctcatagaatagatgttactt

SEQ ID NO: 460201 - DNA, 33 bp, Homo sapien
tgtcttggataagggaagaaaatggtgcagttc

SEQ ID NO: 460202 - DNA, 33 bp, Homo sapien
tgtcttggataagggaggaaaatggtgcagttc

SEQ ID NO: 460203 - DNA, 33 bp, Homo sapien
tggacatttacttcccaaaggctgtgttctctc

SEQ ID NO: 460204 - DNA, 33 bp, Homo sapien
tggacatttacttcccgaaggctgtgttctctc

SEQ ID NO: 460205 - DNA, 33 bp, Homo sapien
aatgttgatgccattaggttttgtgaactagtg

SEQ ID NO: 460206 - DNA, 33 bp, Homo sapien
aatgttgatgccattatgttttgtgaactagtg

SEQ ID NO: 460207 - DNA, 33 bp, Homo sapien
ttacagagacaaacacaagagacacagacctgc

SEQ ID NO: 460208 - DNA, 33 bp, Homo sapien
ttacagagacaaacacgagagacacagacctgc

SEQ ID NO: 460209 - DNA, 33 bp, Homo sapien
agattttagaaatgtgaattcttggactcttaa

SEQ ID NO: 460210 - DNA, 33 bp, Homo sapien
agattttagaaatgtggattcttggactcttaa

SEQ ID NO: 460211 - DNA, 33 bp, Homo sapien
cctggtcacaaatacaaagactgaaactcagac

SEQ ID NO: 460212 - DNA, 33 bp, Homo sapien
cctggtcacaaatacagagactgaaactcagac

SEQ ID NO: 460213 - DNA, 33 bp, Homo sapien
caattggcactcatgtaacatcggacgaggcac

SEQ ID NO: 460214 - DNA, 33 bp, Homo sapien
caattggcactcatgttacatcggacgaggcac

SEQ ID NO: 460215 - DNA, 33 bp, Homo sapien
tgattcaaaggatacacaggtaatgactcagtg

SEQ ID NO: 460216 - DNA, 33 bp, Homo sapien
tgattcaaaggatacataggtaatgactcagtg

SEQ ID NO: 460217 - DNA, 33 bp, Homo sapien
aatttctgaggatacccctgaagccccatcctt

SEQ ID NO: 460218 - DNA, 33 bp, Homo sapien
aatttctgaggataccgctgaagccccatcctt

SEQ ID NO: 460219 - DNA, 33 bp, Homo sapien
ttcagacagcacagaaaagtacaggataaaaca

SEQ ID NO: 460220 - DNA, 33 bp, Homo sapien
ttcagacagcacagaagagtacaggataaaaca

SEQ ID NO: 460221 - DNA, 33 bp, Homo sapien
tgagctatcactgcaaaatgtcaggcactgtgc

SEQ ID NO: 460222 - DNA, 33 bp, Homo sapien
tgagctatcactgcaagatgtcaggcactgtgc

SEQ ID NO: 460223 - DNA, 33 bp, Homo sapien
tagcagtgacagaacacaaggtcagattggctg

SEQ ID NO: 460224 - DNA, 33 bp, Homo sapien
tagcagtgacagaacataaggtcagattggctg

SEQ ID NO: 460225 - DNA, 33 bp, Homo sapien
actgttttgtgtaggaacctcattcctatgtga

SEQ ID NO: 460226 - DNA, 33 bp, Homo sapien
actgttttgtgtaggatcctcattcctatgtga

SEQ ID NO: 460227 - DNA, 33 bp, Homo sapien
gactccattcctaaaaccaaagcagaacgtggc

SEQ ID NO: 460228 - DNA, 33 bp, Homo sapien
gactccattcctaaaagcaaagcagaacgtggc

SEQ ID NO: 460229 - DNA, 33 bp, Homo sapien
gacctggccaaagatgcagcccccatttccaat

SEQ ID NO: 460230 - DNA, 33 bp, Homo sapien
gacctggccaaagatgtagcccccatttccaat

SEQ ID NO: 460231 - DNA, 33 bp, Homo sapien
ctgaaatgccacttctaacatctactaaattct

SEQ ID NO: 460232 - DNA, 33 bp, Homo sapien
ctgaaatgccacttctgacatctactaaattct

SEQ ID NO: 460233 - DNA, 33 bp, Homo sapien
gtcctctgtcaggcccaagcgaagtgcctgaca

SEQ ID NO: 460234 - DNA, 33 bp, Homo sapien
gtcctctgtcaggcccgagcgaagtgcctgaca

SEQ ID NO: 460235 - DNA, 33 bp, Homo sapien
ctagatggtccctgaaagatagaagaacacaaa

SEQ ID NO: 460236 - DNA, 33 bp, Homo sapien
ctagatggtccctgaaggatagaagaacacaaa

SEQ ID NO: 460237 - DNA, 33 bp, Homo sapien
aaaaagaaaatgcaccaagtactaactaaatcc

SEQ ID NO: 460238 - DNA, 33 bp, Homo sapien
aaaaagaaaatgcaccgagtactaactaaatcc

SEQ ID NO: 460239 - DNA, 33 bp, Homo sapien
agaaaccgctggcccccatgatctgcccgatca

SEQ ID NO: 460240 - DNA, 33 bp, Homo sapien
agaaaccgctggcccctatgatctgcccgatca

SEQ ID NO: 460241 - DNA, 33 bp, Homo sapien
caaccctgtgaggtaactgtattatctccattt

SEQ ID NO: 460242 - DNA, 33 bp, Homo sapien
caaccctgtgaggtaagtgtattatctccattt

SEQ ID NO: 460243 - DNA, 33 bp, Homo sapien
acactgcacctgagccaatgaggaaaactctct

SEQ ID NO: 460244 - DNA, 33 bp, Homo sapien
acactgcacctgagccgatgaggaaaactctct

SEQ ID NO: 460245 - DNA, 33 bp, Homo sapien
cagaacacacgaattccctgtcttgatattcga

SEQ ID NO: 460246 - DNA, 33 bp, Homo sapien
cagaacacacgaattctctgtcttgatattcga

SEQ ID NO: 460247 - DNA, 33 bp, Homo sapien
tagggccaggaaggcacatcttaaccctttgtc

SEQ ID NO: 460248 - DNA, 33 bp, Homo sapien
tagggccaggaaggcatatcttaaccctttgtc

SEQ ID NO: 460249 - DNA, 33 bp, Homo sapien
aagcctgattccaaggccctgtatcagtccctt

SEQ ID NO: 460250 - DNA, 33 bp, Homo sapien
aagcctgattccaaggtcctgtatcagtccctt

SEQ ID NO: 460251 - DNA, 33 bp, Homo sapien
catgttgatgccatcgccaagtcctgatcaggt

SEQ ID NO: 460252 - DNA, 33 bp, Homo sapien
catgttgatgccatcgtcaagtcctgatcaggt

SEQ ID NO: 460253 - DNA, 33 bp, Homo sapien
cttcttgtatgcacagaatctgatttggttggt

SEQ ID NO: 460254 - DNA, 33 bp, Homo sapien
cttcttgtatgcacagcatctgatttggttggt

SEQ ID NO: 460255 - DNA, 33 bp, Homo sapien
gttggcttctaatgcaacaacaatttttattgt

SEQ ID NO: 460256 - DNA, 33 bp, Homo sapien
gttggcttctaatgcagcaacaatttttattgt

SEQ ID NO: 460257 - DNA, 33 bp, Homo sapien
tggtgtggattttacaaaaagtgacgtgaagtg

SEQ ID NO: 460258 - DNA, 33 bp, Homo sapien
tggtgtggattttacagaaagtgacgtgaagtg

SEQ ID NO: 460259 - DNA, 33 bp, Homo sapien
ttgccataaaatctgcactaatttacattccca

SEQ ID NO: 460260 - DNA, 33 bp, Homo sapien
ttgccataaaatctgcgctaatttacattccca

SEQ ID NO: 460261 - DNA, 33 bp, Homo sapien
tggcagatggcaggaaagtaatgcaaacgtcat

SEQ ID NO: 460262 - DNA, 33 bp, Homo sapien
tggcagatggcaggaaggtaatgcaaacgtcat

SEQ ID NO: 460263 - DNA, 33 bp, Homo sapien
ctgaaattaaaggaaacgtgcaggactcatcaa

SEQ ID NO: 460264 - DNA, 33 bp, Homo sapien
ctgaaattaaaggaaatgtgcaggactcatcaa

SEQ ID NO: 460265 - DNA, 33 bp, Homo sapien
atgtgccttccattcccagggatgtcatgattc

SEQ ID NO: 460266 - DNA, 33 bp, Homo sapien
atgtgccttccattcctagggatgtcatgattc

SEQ ID NO: 460267 - DNA, 33 bp, Homo sapien
tatagaagccaaagcaatgacgtatgctcaccc

SEQ ID NO: 460268 - DNA, 33 bp, Homo sapien
tatagaagccaaagcagtgacgtatgctcaccc

SEQ ID NO: 460269 - DNA, 33 bp, Homo sapien
tgacgatgtttaactcaacaattaaattccgaa

SEQ ID NO: 460270 - DNA, 33 bp, Homo sapien
tgacgatgtttaactcgacaattaaattccgaa

SEQ ID NO: 460271 - DNA, 33 bp, Homo sapien
ttgcactcacaaaggacgtgtctctcacagtac

SEQ ID NO: 460272 - DNA, 33 bp, Homo sapien
ttgcactcacaaaggatgtgtctctcacagtac

SEQ ID NO: 460273 - DNA, 33 bp, Homo sapien
agtgacacgccacagaataacgggtctgtgact

SEQ ID NO: 460274 - DNA, 33 bp, Homo sapien
agtgacacgccacagagtaacgggtctgtgact

SEQ ID NO: 460275 - DNA, 33 bp, Homo sapien
tgcctactgcacatcaagttgtctcataaagct

SEQ ID NO: 460276 - DNA, 33 bp, Homo sapien
tgcctactgcacatcacgttgtctcataaagct

SEQ ID NO: 460277 - DNA, 33 bp, Homo sapien
tttctgtttatgttcaaatttgtagacttttgt

SEQ ID NO: 460278 - DNA, 33 bp, Homo sapien
tttctgtttatgttcatatttgtagacttttgt

SEQ ID NO: 460279 - DNA, 33 bp, Homo sapien
cagatggggctgaccaagttcatgtggtcagag

SEQ ID NO: 460280 - DNA, 33 bp, Homo sapien
cagatggggctgaccaggttcatgtggtcagag

SEQ ID NO: 460281 - DNA, 33 bp, Homo sapien
tgttggtgacattctggatcagcagacatgtat

SEQ ID NO: 460282 - DNA, 33 bp, Homo sapien
tgttggtgacattctgtatcagcagacatgtat

SEQ ID NO: 460283 - DNA, 33 bp, Homo sapien
tagtcggcacaatagactacctcttctgtttag

SEQ ID NO: 460284 - DNA, 33 bp, Homo sapien
tagtcggcacaatagagtacctcttctgtttag

SEQ ID NO: 460285 - DNA, 33 bp, Homo sapien
agcaacattgacctcaccatgtttaacgcgcac

SEQ ID NO: 460286 - DNA, 33 bp, Homo sapien
agcaacattgacctcatcatgtttaacgcgcac

SEQ ID NO: 460287 - DNA, 33 bp, Homo sapien
tcagaaaacacacgaaaccatttcatgtccaga

SEQ ID NO: 460288 - DNA, 33 bp, Homo sapien
tcagaaaacacacgaagccatttcatgtccaga

SEQ ID NO: 460289 - DNA, 33 bp, Homo sapien
aattggtaaaaggcagaaaaatctcaagtgttc

SEQ ID NO: 460290 - DNA, 33 bp, Homo sapien
aattggtaaaaggcaggaaaatctcaagtgttc

SEQ ID NO: 460291 - DNA, 33 bp, Homo sapien; identical to SEQ ID NO: 460289

SEQ ID NO: 460292 - DNA, 33 bp, Homo sapien; identical to SEQ ID NO: 460290

SEQ ID NO: 460293 - DNA, 33 bp, Homo sapien
agttaagtgacagaaccagtagtgagtcccagg

SEQ ID NO: 460294 - DNA, 33 bp, Homo sapien
agttaagtgacagaacgagtagtgagtcccagg

SEQ ID NO: 460295 - DNA, 33 bp, Homo sapien
ataattgtttataggcaagaatcaagaaccatc

SEQ ID NO: 460296 - DNA, 33 bp, Homo sapien
ataattgtttataggccagaatcaagaaccatc

SEQ ID NO: 460297 - DNA, 33 bp, Homo sapien
ttcctgaccttctatacatgtacagttgccttt

SEQ ID NO: 460298 - DNA, 33 bp, Homo sapien
ttcctgaccttctatatatgtacagttgccttt

SEQ ID NO: 460299 - DNA, 33 bp, Homo sapien
ctatgaatggaaaaaacggaggagaaaatgtgg

SEQ ID NO: 460300 - DNA, 33 bp, Homo sapien
ctatgaatggaaaaaagggaggagaaaatgtgg

SEQ ID NO: 460301 - DNA, 33 bp, Homo sapien
cattagtggcagcaacagaaggaggaaagagat

SEQ ID NO: 460302 - DNA, 33 bp, Homo sapien
cattagtggcagcaaccgaaggaggaaagagat

SEQ ID NO: 460303 - DNA, 33 bp, Homo sapien
acagaaaaccaaacacacttgttttcactcata

SEQ ID NO: 460304 - DNA, 33 bp, Homo sapien
acagaaaaccaaacacgcttgttttcactcata

SEQ ID NO: 460305 - DNA, 33 bp, Homo sapien
gatggtcttttcaacaaatgatattgggacagc

SEQ ID NO: 460306 - DNA, 33 bp, Homo sapien
gatggtcttttcaacagatgatattgggacagc

SEQ ID NO: 460307 - DNA, 33 bp, Homo sapien
ctgaggacatcacttacggctttattctctttg

SEQ ID NO: 460308 - DNA, 33 bp, Homo sapien
ctgaggacatcacttatggctttattctctttg

SEQ ID NO: 460309 - DNA, 33 bp, Homo sapien
tgtgcagtcagcaaaacggaggaaatcccaaca

SEQ ID NO: 460310 - DNA, 33 bp, Homo sapien
tgtgcagtcagcaaaatggaggaaatcccaaca

SEQ ID NO: 460311 - DNA, 33 bp, Homo sapien
ggaaactccatgagcacaggggccacgtctgtc

SEQ ID NO: 460312 - DNA, 33 bp, Homo sapien
ggaaactccatgagcataggggccacgtctgtc

SEQ ID NO: 460313 - DNA, 33 bp, Homo sapien
acagaaatagaggtcagtaattcgaggatcaaa

SEQ ID NO: 460314 - DNA, 33 bp, Homo sapien
acagaaatagaggtcattaattcgaggatcaaa

SEQ ID NO: 460315 - DNA, 33 bp, Homo sapien
aatagaaaaagggaaaccgcattactattcaga

SEQ ID NO: 460316 - DNA, 33 bp, Homo sapien
aatagaaaaagggaaatcgcattactattcaga

SEQ ID NO: 460317 - DNA, 33 bp, Homo sapien
cacagctttatcgagcaaggttaagctccctag

SEQ ID NO: 460318 - DNA, 33 bp, Homo sapien
cacagctttatcgagcgaggttaagctccctag

SEQ ID NO: 460319 - DNA, 33 bp, Homo sapien
gataaagctgtgttcccagaatgtcgctcctgt

SEQ ID NO: 460320 - DNA, 33 bp, Homo sapien
gataaagctgtgttcctagaatgtcgctcctgt

SEQ ID NO: 460321 - DNA, 33 bp, Homo sapien
taacttggctactggcagcaataattccatagt

SEQ ID NO: 460322 - DNA, 33 bp, Homo sapien
taacttggctactggccgcaataattccatagt

SEQ ID NO: 460323 - DNA, 33 bp, Homo sapien
gttataaaaacagtcaactggatatgcttctga

SEQ ID NO: 460324 - DNA, 33 bp, Homo sapien
gttataaaaacagtcacctggatatgcttctga

SEQ ID NO: 460325 - DNA, 33 bp, Homo sapien
cctctgcgacattgaacggcgtggattcaatag

SEQ ID NO: 460326 - DNA, 33 bp, Homo sapien
cctctgcgacattgaatggcgtggattcaatag

SEQ ID NO: 460327 - DNA, 33 bp, Homo sapien; identical to SEQ ID NO: 460325

SEQ ID NO: 460328 - DNA, 33 bp, Homo sapien; identical to SEQ ID NO: 460326

SEQ ID NO: 460329 - DNA, 33 bp, Homo sapien
gttgtttgtgagttaacctcaaaatatttacaa

SEQ ID NO: 460330 - DNA, 33 bp, Homo sapien
gttgtttgtgagttaatctcaaaatatttacaa

SEQ ID NO: 460331 - DNA, 33 bp, Homo sapien
tttcttccctttttcaagagagaactcctgagc

SEQ ID NO: 460332 - DNA, 33 bp, Homo sapien
tttcttccctttttcatgagagaactcctgagc

SEQ ID NO: 460333 - DNA, 33 bp, Homo sapien
gacaagatagatctgacactctgttaagttacc

SEQ ID NO: 460334 - DNA, 33 bp, Homo sapien
gacaagatagatctgatactctgttaagttacc

SEQ ID NO: 460335 - DNA, 33 bp, Homo sapien
cattccctggccacaaatgaggtatgctaggga

SEQ ID NO: 460336 - DNA, 33 bp, Homo sapien
cattccctggccacaattgaggtatgctaggga

SEQ ID NO: 460337 - DNA, 33 bp, Homo sapien
tgctttagtcccacaacactgttttcatgtgag

SEQ ID NO: 460338 - DNA, 33 bp, Homo sapien
tgctttagtcccacaatactgttttcatgtgag

SEQ ID NO: 460339 - DNA, 33 bp, Homo sapien
gaaaccacttttgcaaagattaagatggcgaga

SEQ ID NO: 460340 - DNA, 33 bp, Homo sapien
gaaaccacttttgcaaggattaagatggcgaga

SEQ ID NO: 460341 - DNA, 33 bp, Homo sapien
gcggggcaattaacaccgaggcctagcttctct

SEQ ID NO: 460342 - DNA, 33 bp, Homo sapien
gcggggcaattaacactgaggcctagcttctct

SEQ ID NO: 460343 - DNA, 33 bp, Homo sapien
aaccagcgctggggtcagaaatctgaactgtaa

SEQ ID NO: 460344 - DNA, 33 bp, Homo sapien
aaccagcgctggggtcggaaatctgaactgtaa

SEQ ID NO: 460345 - DNA, 33 bp, Homo sapien
ctactgtacggttccacgaatacgaggtcccta

SEQ ID NO: 460346 - DNA, 33 bp, Homo sapien
ctactgtacggttccatgaatacgaggtcccta

SEQ ID NO: 460347 - DNA, 33 bp, Homo sapien
atgagacagtgagtcaataaaaggtatagtaga

SEQ ID NO: 460348 - DNA, 33 bp, Homo sapien
atgagacagtgagtcagtaaaaggtatagtaga

SEQ ID NO: 460349 - DNA, 33 bp, Homo sapien
tgaggaaaggctttaggaacccacatctgtcct

SEQ ID NO: 460350 - DNA, 33 bp, Homo sapien
tgaggaaaggctttagtaacccacatctgtcct

SEQ ID NO: 460351 - DNA, 33 bp, Homo sapien
aggagggacagagaaccgccggcccaggtatgt

SEQ ID NO: 460352 - DNA, 33 bp, Homo sapien
aggagggacagagaactgccggcccaggtatgt

SEQ ID NO: 460353 - DNA, 33 bp, Homo sapien
ccaagatctgtgaatacggcacatggtcaaaga

SEQ ID NO: 460354 - DNA, 33 bp, Homo sapien
ccaagatctgtgaatatggcacatggtcaaaga

SEQ ID NO: 460355 - DNA, 33 bp, Homo sapien
gctgatgtccatgaacgattgaagggctggtga

SEQ ID NO: 460356 - DNA, 33 bp, Homo sapien
gctgatgtccatgaactattgaagggctggtga

SEQ ID NO: 460357 - DNA, 33 bp, Homo sapien
ggcaaaggttgttgacacccctggcagggctga

SEQ ID NO: 460358 - DNA, 33 bp, Homo sapien
ggcaaaggttgttgacgcccctggcagggctga

SEQ ID NO: 460359 - DNA, 33 bp, Homo sapien
agattgtaccaatgtcactttcctggttttgac

SEQ ID NO: 460360 - DNA, 33 bp, Homo sapien
agattgtaccaatgtcgctttcctggttttgac

SEQ ID NO: 460361 - DNA, 33 bp, Homo sapien
gttctggaaactctgcactgcaatttggctaaa

SEQ ID NO: 460362 - DNA, 33 bp, Homo sapien
gttctggaaactctgcgctgcaatttggctaaa

SEQ ID NO: 460363 - DNA, 33 bp, Homo sapien
attttcactgttgtatgacatcctactgtgcta

SEQ ID NO: 460364 - DNA, 33 bp, Homo sapien
attttcactgttgtattacatcctactgtgcta

SEQ ID NO: 460365 - DNA, 33 bp, Homo sapien
gtcagaagagcaagcaaaacgaaattgatcaaa

SEQ ID NO: 460366 - DNA, 33 bp, Homo sapien
gtcagaagagcaagcataacgaaattgatcaaa

SEQ ID NO: 460367 - DNA, 33 bp, Homo sapien
tgccaaactgataaaaaggattcactgaataac

SEQ ID NO: 460368 - DNA, 33 bp, Homo sapien
tgccaaactgataaaatggattcactgaataac

SEQ ID NO: 460369 - DNA, 33 bp, Homo sapien
atttacagaatcatggaatcctgggatgtaaac

SEQ ID NO: 460370 - DNA, 33 bp, Homo sapien
atttacagaatcatgggatcctgggatgtaaac

SEQ ID NO: 460371 - DNA, 33 bp, Homo sapien
aggttttcctatgtacggaatggttcaaggaga

SEQ ID NO: 460372 - DNA, 33 bp, Homo sapien
aggttttcctatgtactgaatggttcaaggaga

SEQ ID NO: 460373 - DNA, 33 bp, Homo sapien
gagagattacagataacagactgtgagcactgt

SEQ ID NO: 460374 - DNA, 33 bp, Homo sapien
gagagattacagataatagactgtgagcactgt

SEQ ID NO: 460375 - DNA, 33 bp, Homo sapien
aatgacagctgacacaaaagagacacttagtat

SEQ ID NO: 460376 - DNA, 33 bp, Homo sapien
aatgacagctgacacagaagagacacttagtat

SEQ ID NO: 460377 - DNA, 33 bp, Homo sapien
gggacttgagcagcagccgctcgtcctggcgct

SEQ ID NO: 460378 - DNA, 33 bp, Homo sapien
gggacttgagcagcagtcgctcgtcctggcgct

SEQ ID NO: 460379 - DNA, 33 bp, Homo sapien
ggtatcattctctgagcagcaggtgcttgtaat

SEQ ID NO: 460380 - DNA, 33 bp, Homo sapien
ggtatcattctctgagtagcaggtgcttgtaat

SEQ ID NO: 460381 - DNA, 33 bp, Homo sapien
ttctgttgtctgtgataagtaacccgaaatgac

SEQ ID NO: 460382 - DNA, 33 bp, Homo sapien
ttctgttgtctgtgatgagtaacccgaaatgac

SEQ ID NO: 460383 - DNA, 33 bp, Homo sapien
atatgcacaaacactgcagctggtgacctgtgt

SEQ ID NO: 460384 - DNA, 33 bp, Homo sapien
atatgcacaaacactgtagctggtgacctgtgt

SEQ ID NO: 460385 - DNA, 33 bp, Homo sapien
ggctggtgggatcattcaagtagtggagaaaga

SEQ ID NO: 460386 - DNA, 33 bp, Homo sapien
ggctggtgggatcattgaagtagtggagaaaga

SEQ ID NO: 460387 - DNA, 33 bp, Homo sapien
ggcctttgttggcccacggtcagtgcctagcga

SEQ ID NO: 460388 - DNA, 33 bp, Homo sapien
ggcctttgttggcccatggtcagtgcctagcga

SEQ ID NO: 460389 - DNA, 33 bp, Homo sapien
ggctgaagtgatgcatgactaaggacgaaggga

SEQ ID NO: 460390 - DNA, 33 bp, Homo sapien
ggctgaagtgatgcattactaaggacgaaggga

SEQ ID NO: 460391 - DNA, 33 bp, Homo sapien
aaaatgcttgcttacaaccctacgacaaagaag

SEQ ID NO: 460392 - DNA, 33 bp, Homo sapien
aaaatgcttgcttacagccctacgacaaagaag

SEQ ID NO: 460393 - DNA, 33 bp, Homo sapien
ccggcccagttccaggaaagtggattgaaaaca

SEQ ID NO: 460394 - DNA, 33 bp, Homo sapien
ccggcccagttccagggaagtggattgaaaaca

SEQ ID NO: 460395 - DNA, 33 bp, Homo sapien
aggggtagtggcactcaccacgatatgtgggcc

SEQ ID NO: 460396 - DNA, 33 bp, Homo sapien
aggggtagtggcactctccacgatatgtgggcc

SEQ ID NO: 460397 - DNA, 33 bp, Homo sapien
tcagaagatgcttatacctgcaagttgggcgta

SEQ ID NO: 460398 - DNA, 33 bp, Homo sapien
tcagaagatgcttatatctgcaagttgggcgta

SEQ ID NO: 460399 - DNA, 33 bp, Homo sapien
aaggggtgctattgcccaaaggagacagtgggt

SEQ ID NO: 460400 - DNA, 33 bp, Homo sapien
aaggggtgctattgcctaaaggagacagtgggt

SEQ ID NO: 460401 - DNA, 33 bp, Homo sapien
ctttctctctcacccaacgtccaatctgtcaac

SEQ ID NO: 460402 - DNA, 33 bp, Homo sapien
ctttctctctcacccagcgtccaatctgtcaac

SEQ ID NO: 460403 - DNA, 33 bp, Homo sapien
tcggggaaggcggcacggacgcccaggcctctg

SEQ ID NO: 460404 - DNA, 33 bp, Homo sapien
tcggggaaggcggcactgacgcccaggcctctg

SEQ ID NO: 460405 - DNA, 33 bp, Homo sapien
atacaacagagaaaaacaccctgggaagataga

SEQ ID NO: 460406 - DNA, 33 bp, Homo sapien
atacaacagagaaaaataccctgggaagataga

SEQ ID NO: 460407 - DNA, 33 bp, Homo sapien
tcctaagacaatcaagaatgatggtttatagac

SEQ ID NO: 460408 - DNA, 33 bp, Homo sapien
tcctaagacaatcaaggatgatggtttatagac

SEQ ID NO: 460409 - DNA, 33 bp, Homo sapien
gtggccatgcagagaactattggtgtagagcag

SEQ ID NO: 460410 - DNA, 33 bp, Homo sapien
gtggccatgcagagaagtattggtgtagagcag

SEQ ID NO: 460411 - DNA, 33 bp, Homo sapien
catggatcaaactcaaaggaatgactagtcatc

SEQ ID NO: 460412 - DNA, 33 bp, Homo sapien
catggatcaaactcaagggaatgactagtcatc

SEQ ID NO: 460413 - DNA, 33 bp, Homo sapien
aactcagggctatatacccacccctttcaacaa

SEQ ID NO: 460414 - DNA, 33 bp, Homo sapien
aactcagggctatatatccacccctttcaacaa

SEQ ID NO: 460415 - DNA, 33 bp, Homo sapien
aggaataaaacaaggcagatttcagactggatt

SEQ ID NO: 460416 - DNA, 33 bp, Homo sapien
aggaataaaacaaggcggatttcagactggatt

SEQ ID NO: 460417 - DNA, 33 bp, Homo sapien
tactaagctaggtattaaagagaatatgaacat

SEQ ID NO: 460418 - DNA, 33 bp, Homo sapien
tactaagctaggtattgaagagaatatgaacat

SEQ ID NO: 460419 - DNA, 33 bp, Homo sapien
gcttttaaaaagctcaagtgattacattaggtc

SEQ ID NO: 460420 - DNA, 33 bp, Homo sapien
gcttttaaaaagctcatgtgattacattaggtc

SEQ ID NO: 460421 - DNA, 33 bp, Homo sapien
ttccccagttattccaacgtgcagccacatttc

SEQ ID NO: 460422 - DNA, 33 bp, Homo sapien
ttccccagttattccagcgtgcagccacatttc

SEQ ID NO: 460423 - DNA, 33 bp, Homo sapien
gcttagagtggtaaaaagcttacctaaagtcag

SEQ ID NO: 460424 - DNA, 33 bp, Homo sapien
gcttagagtggtaaaaggcttacctaaagtcag

SEQ ID NO: 460425 - DNA, 33 bp, Homo sapien
aacctcaggaaacacaactagagtttgaccaaa

SEQ ID NO: 460426 - DNA, 33 bp, Homo sapien
aacctcaggaaacacagctagagtttgaccaaa

SEQ ID NO: 460427 - DNA, 33 bp, Homo sapien; identical to SEQ ID NO: 460425

SEQ ID NO: 460428 - DNA, 33 bp, Homo sapien; identical to SEQ ID NO: 460426

SEQ ID NO: 460429 - DNA, 33 bp, Homo sapien
gacagacccatagccaagacacaatagaggtca

SEQ ID NO: 460430 - DNA, 33 bp, Homo sapien
gacagacccatagccaggacacaatagaggtca

SEQ ID NO: 460431 - DNA, 33 bp, Homo sapien
tgaaaacacgacctcaataaacaagctaaataa

SEQ ID NO: 460432 - DNA, 33 bp, Homo sapien
tgaaaacacgacctcactaaacaagctaaataa

SEQ ID NO: 460433 - DNA, 33 bp, Homo sapien
cttggttacacgccacgctagtccactggcttt

SEQ ID NO: 460434 - DNA, 33 bp, Homo sapien
cttggttacacgccactctagtccactggcttt

SEQ ID NO: 460435 - DNA, 33 bp, Homo sapien
cagagccctgggcagacatggacaacagcctcc

SEQ ID NO: 460436 - DNA, 33 bp, Homo sapien
cagagccctgggcagagatggacaacagcctcc

SEQ ID NO: 460437 - DNA, 33 bp, Homo sapien
aagacaaaagttaacacagctcaagaagagaca

SEQ ID NO: 460438 - DNA, 33 bp, Homo sapien
aagacaaaagttaacagagctcaagaagagaca

SEQ ID NO: 460439 - DNA, 33 bp, Homo sapien
actggctggaacaggacgtcacattttgtattt

SEQ ID NO: 460440 - DNA, 33 bp, Homo sapien
actggctggaacaggatgtcacattttgtattt

SEQ ID NO: 460441 - DNA, 33 bp, Homo sapien
gaccctgaacttacaagggagtcacctaagtcc

SEQ ID NO: 460442 - DNA, 33 bp, Homo sapien
gaccctgaacttacaatggagtcacctaagtcc

SEQ ID NO: 460443 - DNA, 33 bp, Homo sapien
aactcggtgagtctaacaccagagaccatgtaa

SEQ ID NO: 460444 - DNA, 33 bp, Homo sapien
aactcggtgagtctaagaccagagaccatgtaa

SEQ ID NO: 460445 - DNA, 33 bp, Homo sapien
gacctctttgtataaaaaatgtgggctgtcttg

SEQ ID NO: 460446 - DNA, 33 bp, Homo sapien
gacctctttgtataaataatgtgggctgtcttg

SEQ ID NO: 460447 - DNA, 33 bp, Homo sapien
ttaaatacgacctcaaaaaatgggaagacattt

SEQ ID NO: 460448 - DNA, 33 bp, Homo sapien
ttaaatacgacctcaataaatgggaagacattt

SEQ ID NO: 460449 - DNA, 33 bp, Homo sapien
ggtggagagacagagcaagggagaaggagagat

SEQ ID NO: 460450 - DNA, 33 bp, Homo sapien
ggtggagagacagagcgagggagaaggagagat

SEQ ID NO: 460451 - DNA, 33 bp, Homo sapien
aggggagcactggcaacaggttttcaggtgaag

SEQ ID NO: 460452 - DNA, 33 bp, Homo sapien
aggggagcactggcaataggttttcaggtgaag

SEQ ID NO: 460453 - DNA, 33 bp, Homo sapien
gagtcacaaggaaggacgcaggaacatatgaat

SEQ ID NO: 460454 - DNA, 33 bp, Homo sapien
gagtcacaaggaaggatgcaggaacatatgaat

SEQ ID NO: 460455 - DNA, 33 bp, Homo sapien; identical to SEQ ID NO: 460453

SEQ ID NO: 460456 - DNA, 33 bp, Homo sapien; identical to SEQ ID NO: 460454

SEQ ID NO: 460457 - DNA, 33 bp, Homo sapien
ctcaagtcagtcactacgaaacatctcaggaaa

SEQ ID NO: 460458 - DNA, 33 bp, Homo sapien
ctcaagtcagtcactatgaaacatctcaggaaa

SEQ ID NO: 460459 - DNA, 33 bp, Homo sapien
gtgaaagagatctaaccgaatcaaccccatctt

SEQ ID NO: 460460 - DNA, 33 bp, Homo sapien
gtgaaagagatctaactgaatcaaccccatctt

SEQ ID NO: 460461 - DNA, 33 bp, Homo sapien
agggcatgagctccagaaatggtgagggtgccc

SEQ ID NO: 460462 - DNA, 33 bp, Homo sapien
agggcatgagctccaggaatggtgagggtgccc

SEQ ID NO: 460463 - DNA, 33 bp, Homo sapien
caggggcatctggaccaagtgtgaagctccctc

SEQ ID NO: 460464 - DNA, 33 bp, Homo sapien
caggggcatctggaccgagtgtgaagctccctc

SEQ ID NO: 460465 - DNA, 33 bp, Homo sapien
gcagattacagtattacacatggagctccccaa

SEQ ID NO: 460466 - DNA, 33 bp, Homo sapien
gcagattacagtattatacatggagctccccaa

SEQ ID NO: 460467 - DNA, 33 bp, Homo sapien
aaactccaaatggtgcggcacacaatggaacca

SEQ ID NO: 460468 - DNA, 33 bp, Homo sapien
aaactccaaatggtgctgcacacaatggaacca

SEQ ID NO: 460469 - DNA, 33 bp, Homo sapien
aatactcatattcaaactctatactctaaacca

SEQ ID NO: 460470 - DNA, 33 bp, Homo sapien
aatactcatattcaaattctatactctaaacca

SEQ ID NO: 460471 - DNA, 33 bp, Homo sapien
gccaggggagttgagaaattacagcaggtctta

SEQ ID NO: 460472 - DNA, 33 bp, Homo sapien
gccaggggagttgagagattacagcaggtctta

SEQ ID NO: 460473 - DNA, 33 bp, Homo sapien
ctgatgactgaactgaactccggacttgactct

SEQ ID NO: 460474 - DNA, 33 bp, Homo sapien
ctgatgactgaactgacctccggacttgactct

SEQ ID NO: 460475 - DNA, 33 bp, Homo sapien
aataaataataaagacagcaagggttttagcca

SEQ ID NO: 460476 - DNA, 33 bp, Homo sapien
aataaataataaagacggcaagggttttagcca

SEQ ID NO: 460477 - DNA, 33 bp, Homo sapien
tctaaaatttgcctaaatctcttcttctgcctt

SEQ ID NO: 460478 - DNA, 33 bp, Homo sapien
tctaaaatttgcctaagtctcttcttctgcctt

SEQ ID NO: 460479 - DNA, 33 bp, Homo sapien
aaatcataaatcacaaataaaagccaattacat

SEQ ID NO: 460480 - DNA, 33 bp, Homo sapien
aaatcataaatcacaactaaaagccaattacat

SEQ ID NO: 460481 - DNA, 33 bp, Homo sapien
gacaaatgggatagaactgagagcctagaaata

SEQ ID NO: 460482 - DNA, 33 bp, Homo sapien
gacaaatgggatagaattgagagcctagaaata

SEQ ID NO: 460483 - DNA, 33 bp, Homo sapien
ctatacttctgggaaccgtaattgaaacattta

SEQ ID NO: 460484 - DNA, 33 bp, Homo sapien
ctatacttctgggaactgtaattgaaacattta

SEQ ID NO: 460485 - DNA, 33 bp, Homo sapien
tgtcaggaagctagaactctctagaaagtgacc

SEQ ID NO: 460486 - DNA, 33 bp, Homo sapien
tgtcaggaagctagaagtctctagaaagtgacc

SEQ ID NO: 460487 - DNA, 33 bp, Homo sapien
caggaaagtcgtattgaaccggaattggtaaga

SEQ ID NO: 460488 - DNA, 33 bp, Homo sapien
caggaaagtcgtattggaccggaattggtaaga

SEQ ID NO: 460489 - DNA, 33 bp, Homo sapien
cttgactctggtcttccctgtgttatttctgct

SEQ ID NO: 460490 - DNA, 33 bp, Homo sapien
cttgactctggtcttctctgtgttatttctgct

SEQ ID NO: 460491 - DNA, 33 bp, Homo sapien; identical to SEQ ID NO: 460489

SEQ ID NO: 460492 - DNA, 33 bp, Homo sapien; identical to SEQ ID NO: 460490

SEQ ID NO: 460493 - DNA, 33 bp, Homo sapien
atagtggtgatggtaagttaacatggtgtatgt

SEQ ID NO: 460494 - DNA, 33 bp, Homo sapien
atagtggtgatggtaatttaacatggtgtatgt

SEQ ID NO: 460495 - DNA, 33 bp, Homo sapien
tataaagaactagctaaaactcaataacaaaag

SEQ ID NO: 460496 - DNA, 33 bp, Homo sapien
tataaagaactagctacaactcaataacaaaag

SEQ ID NO: 460497 - DNA, 33 bp, Homo sapien
tggtgaacatttccacagtgctacgcattaggt

SEQ ID NO: 460498 - DNA, 33 bp, Homo sapien
tggtgaacatttccacggtgctacgcattaggt

SEQ ID NO: 460499 - DNA, 33 bp, Homo sapien
tggcttcctattctcaagaggtttgtaaaattt

SEQ ID NO: 460500 - DNA, 33 bp, Homo sapien
tggcttcctattctcaggaggtttgtaaaattt

SEQ ID NO: 460501 - DNA, 33 bp, Homo sapien
ccactgagatgcatccaagatgagattagacat

SEQ ID NO: 460502 - DNA, 33 bp, Homo sapien
ccactgagatgcatccgagatgagattagacat

SEQ ID NO: 460503 - DNA, 33 bp, Homo sapien
ttcagtcttggttgcacgttaaatgagcctggg

SEQ ID NO: 460504 - DNA, 33 bp, Homo sapien
ttcagtcttggttgcatgttaaatgagcctggg

SEQ ID NO: 460505 - DNA, 33 bp, Homo sapien
gcaaactttagggacactcatcattacgtctca

SEQ ID NO: 460506 - DNA, 33 bp, Homo sapien
gcaaactttagggacattcatcattacgtctca

SEQ ID NO: 460507 - DNA, 33 bp, Homo sapien
aaaacaaatgagtaaaagttggatcctcagcaa

SEQ ID NO: 460508 - DNA, 33 bp, Homo sapien
aaaacaaatgagtaaaggttggatcctcagcaa

SEQ ID NO: 460509 - DNA, 33 bp, Homo sapien
ctgaatatccacagaagtctttccataacttca

SEQ ID NO: 460510 - DNA, 33 bp, Homo sapien
ctgaatatccacagaattctttccataacttca

SEQ ID NO: 460511 - DNA, 33 bp, Homo sapien
gaagtactagaaataccggaatttgtgagattt

SEQ ID NO: 460512 - DNA, 33 bp, Homo sapien
gaagtactagaaatactggaatttgtgagattt

SEQ ID NO: 460513 - DNA, 33 bp, Homo sapien
agccaagcaggtgcaacccgttacacatatggt

SEQ ID NO: 460514 - DNA, 33 bp, Homo sapien
agccaagcaggtgcaatccgttacacatatggt

SEQ ID NO: 460515 - DNA, 33 bp, Homo sapien
gctcacttaaagttacaattcgtatgtccttct

SEQ ID NO: 460516 - DNA, 33 bp, Homo sapien
gctcacttaaagttacgattcgtatgtccttct

SEQ ID NO: 460517 - DNA, 33 bp, Homo sapien
tagtgaaagccatatccagaggggtcaccgcct

SEQ ID NO: 460518 - DNA, 33 bp, Homo sapien
tagtgaaagccatatcgagaggggtcaccgcct

SEQ ID NO: 460519 - DNA, 33 bp, Homo sapien
atctccaggggtatacactagcctatttgataa

SEQ ID NO: 460520 - DNA, 33 bp, Homo sapien
atctccaggggtatacgctagcctatttgataa

SEQ ID NO: 460521 - DNA, 33 bp, Homo sapien; identical to SEQ ID NO: 460519

SEQ ID NO: 460522 - DNA, 33 bp, Homo sapien; identical to SEQ ID NO: 460520

SEQ ID NO: 460523 - DNA, 33 bp, Homo sapien
tgttatgtaattcaccaaggctaaggcatttgt

SEQ ID NO: 460524 - DNA, 33 bp, Homo sapien
tgttatgtaattcacccaggctaaggcatttgt

SEQ ID NO: 460525 - DNA, 33 bp, Homo sapien
aatttttaagtcttcccagatgctactaatgtg

SEQ ID NO: 460526 - DNA, 33 bp, Homo sapien
aatttttaagtcttcctagatgctactaatgtg

SEQ ID NO: 460527 - DNA, 33 bp, Homo sapien
tgaaagatacagaaacaaagaagcaaggtttct

SEQ ID NO: 460528 - DNA, 33 bp, Homo sapien
tgaaagatacagaaacgaagaagcaaggtttct

SEQ ID NO: 460529 - DNA, 33 bp, Homo sapien
gccaagtcatgcagtacctctaattttagtttt

SEQ ID NO: 460530 - DNA, 33 bp, Homo sapien
gccaagtcatgcagtatctctaattttagtttt

SEQ ID NO: 460531 - DNA, 33 bp, Homo sapien
tgagtccatgtagaaagagaaaccaccattgca

SEQ ID NO: 460532 - DNA, 33 bp, Homo sapien
tgagtccatgtagaaatagaaaccaccattgca

SEQ ID NO: 460533 - DNA, 33 bp, Homo sapien
ggtccctgcagttcacaagtccaacctggtctg

SEQ ID NO: 460534 - DNA, 33 bp, Homo sapien
ggtccctgcagttcacgagtccaacctggtctg

SEQ ID NO: 460535 - DNA, 33 bp, Homo sapien
ctgtctaggatagactaaaagccagatgagaat

SEQ ID NO: 460536 - DNA, 33 bp, Homo sapien
ctgtctaggatagactgaaagccagatgagaat

SEQ ID NO: 460537 - DNA, 33 bp, Homo sapien
cacttcaatatcctggaacagtcattctaccca

SEQ ID NO: 460538 - DNA, 33 bp, Homo sapien
cacttcaatatcctgggacagtcattctaccca

SEQ ID NO: 460539 - DNA, 33 bp, Homo sapien
ctacaacatcaagaaactgtatcagttggagaa

SEQ ID NO: 460540 - DNA, 33 bp, Homo sapien
ctacaacatcaagaaattgtatcagttggagaa

SEQ ID NO: 460541 - DNA, 33 bp, Homo sapien
tctctgaaataaataaatgctttgatgtgcata

SEQ ID NO: 460542 - DNA, 33 bp, Homo sapien
tctctgaaataaataagtgctttgatgtgcata

SEQ ID NO: 460543 - DNA, 33 bp, Homo sapien
cacgttacaggttggcaagagatgatgccactc

SEQ ID NO: 460544 - DNA, 33 bp, Homo sapien
cacgttacaggttggcgagagatgatgccactc

SEQ ID NO: 460545 - DNA, 33 bp, Homo sapien
ctacagtcaaacaaagcaggtcagatcatttct

SEQ ID NO: 460546 - DNA, 33 bp, Homo sapien
ctacagtcaaacaaagtaggtcagatcatttct

SEQ ID NO: 460547 - DNA, 33 bp, Homo sapien
cccataactctagaacggagttccatcagtgcc

SEQ ID NO: 460548 - DNA, 33 bp, Homo sapien
cccataactctagaactgagttccatcagtgcc

SEQ ID NO: 460549 - DNA, 33 bp, Homo sapien
gatggttcaatttcaacttacataatacctgag

SEQ ID NO: 460550 - DNA, 33 bp, Homo sapien
gatggttcaatttcaagttacataatacctgag

SEQ ID NO: 460551 - DNA, 33 bp, Homo sapien; identical to SEQ ID NO: 460549

SEQ ID NO: 460552 - DNA, 33 bp, Homo sapien; identical to SEQ ID NO: 460550

SEQ ID NO: 460553 - DNA, 33 bp, Homo sapien
gatttggaacatagacactcttacatttgttag

SEQ ID NO: 460554 - DNA, 33 bp, Homo sapien
gatttggaacatagacgctcttacatttgttag

SEQ ID NO: 460555 - DNA, 33 bp, Homo sapien; identical to SEQ ID NO: 460553

SEQ ID NO: 460556 - DNA, 33 bp, Homo sapien; identical to SEQ ID NO: 460554

SEQ ID NO: 460557 - DNA, 33 bp, Homo sapien
gattcccaattgtgaaaagactcattatattgg

SEQ ID NO: 460558 - DNA, 33 bp, Homo sapien
gattcccaattgtgaacagactcattatattgg

SEQ ID NO: 460559 - DNA, 33 bp, Homo sapien; identical to SEQ ID NO: 460557

SEQ ID NO: 460560 - DNA, 33 bp, Homo sapien; identical to SEQ ID NO: 460558

SEQ ID NO: 460561 - DNA, 33 bp, Homo sapien
caccacacgagggagaataccagtatgactatc

SEQ ID NO: 460562 - DNA, 33 bp, Homo sapien
caccacacgagggagactaccagtatgactatc

SEQ ID NO: 460563 - DNA, 33 bp, Homo sapien
agggagtgagaataggcaagtatagaagtggaa

SEQ ID NO: 460564 - DNA, 33 bp, Homo sapien
agggagtgagaatagggaagtatagaagtggaa

SEQ ID NO: 460565 - DNA, 33 bp, Homo sapien
attagttccagtttaaaggtctggagagggacc

SEQ ID NO: 460566 - DNA, 33 bp, Homo sapien
attagttccagtttaagggtctggagagggacc

SEQ ID NO: 460567 - DNA, 33 bp, Homo sapien
aggcttcacagagggacgagaaggagagtcctc

SEQ ID NO: 460568 - DNA, 33 bp, Homo sapien
aggcttcacagagggatgagaaggagagtcctc

SEQ ID NO: 460569 - DNA, 33 bp, Homo sapien
aagtcatcatgaaacacctgcaaaacactgccc

SEQ ID NO: 460570 - DNA, 33 bp, Homo sapien
aagtcatcatgaaacagctgcaaaacactgccc

SEQ ID NO: 460571 - DNA, 33 bp, Homo sapien
gaagagaagttttgggaatattttctttcactg

SEQ ID NO: 460572 - DNA, 33 bp, Homo sapien
gaagagaagttttgggtatattttctttcactg

SEQ ID NO: 460573 - DNA, 33 bp, Homo sapien
acaaactcaaaagtcaacaactcattaaaatcc

SEQ ID NO: 460574 - DNA, 33 bp, Homo sapien
acaaactcaaaagtcagcaactcattaaaatcc

SEQ ID NO: 460575 - DNA, 33 bp, Homo sapien
atgtaggtgtagttctcactcttaggttcacag

SEQ ID NO: 460576 - DNA, 33 bp, Homo sapien
atgtaggtgtagttcttactcttaggttcacag

SEQ ID NO: 460577 - DNA, 33 bp, Homo sapien; identical to SEQ ID NO: 460575

SEQ ID NO: 460578 - DNA, 33 bp, Homo sapien; identical to SEQ ID NO: 460576

SEQ ID NO: 460579 - DNA, 33 bp, Homo sapien; identical to SEQ ID NO: 460575

SEQ ID NO: 460580 - DNA, 33 bp, Homo sapien; identical to SEQ ID NO: 460576

SEQ ID NO: 460581 - DNA, 33 bp, Homo sapien
atcccaactcctgcaaactactattctactctc

SEQ ID NO: 460582 - DNA, 33 bp, Homo sapien
atcccaactcctgcaatctactattctactctc

SEQ ID NO: 460583 - DNA, 33 bp, Homo sapien
atgtgtgacctcatgtaaagtgtgcagatccac

SEQ ID NO: 460584 - DNA, 33 bp, Homo sapien
atgtgtgacctcatgtgaagtgtgcagatccac

SEQ ID NO: 460585 - DNA, 33 bp, Homo sapien
ctcaaaaagctaatcacagaattctcatttgaa

SEQ ID NO: 460586 - DNA, 33 bp, Homo sapien
ctcaaaaagctaatcatagaattctcatttgaa

SEQ ID NO: 460587 - DNA, 33 bp, Homo sapien
tttctcacattccaaaaccttcaaaaatatctg

SEQ ID NO: 460588 - DNA, 33 bp, Homo sapien
tttctcacattccaaatccttcaaaaatatctg

SEQ ID NO: 460589 - DNA, 33 bp, Homo sapien
aagtagccaaaggaaacaggttcgctgatcagg

SEQ ID NO: 460590 - DNA, 33 bp, Homo sapien
aagtagccaaaggaaataggttcgctgatcagg

SEQ ID NO: 460591 - DNA, 33 bp, Homo sapien
cattggtggtaagaaaatgccttttattttaaa

SEQ ID NO: 460592 - DNA, 33 bp, Homo sapien
cattggtggtaagaaagtgccttttattttaaa

SEQ ID NO: 460593 - DNA, 33 bp, Homo sapien
tggtgaccaccaggtacaagtcacatttgcata

SEQ ID NO: 460594 - DNA, 33 bp, Homo sapien
tggtgaccaccaggtagaagtcacatttgcata

SEQ ID NO: 460595 - DNA, 33 bp, Homo sapien
cccattaaggaagagggccaacaaagtcttttc

SEQ ID NO: 460596 - DNA, 33 bp, Homo sapien
cccattaaggaagaggtccaacaaagtcttttc

SEQ ID NO: 460597 - DNA, 33 bp, Homo sapien
atttaaatggctactcccaaacacaaagcaaaa

SEQ ID NO: 460598 - DNA, 33 bp, Homo sapien
atttaaatggctactctcaaacacaaagcaaaa

SEQ ID NO: 460599 - DNA, 33 bp, Homo sapien
gatgagcccttggtaaacattcctttcagttct

SEQ ID NO: 460600 - DNA, 33 bp, Homo sapien
gatgagcccttggtaatcattcctttcagttct

SEQ ID NO: 460601 - DNA, 33 bp, Homo sapien
attaaaatctttctccaactacagaccaccatt

SEQ ID NO: 460602 - DNA, 33 bp, Homo sapien
attaaaatctttctccgactacagaccaccatt

SEQ ID NO: 460603 - DNA, 33 bp, Homo sapien
aggagctctcacataacgaatgaagaacttgaa

SEQ ID NO: 460604 - DNA, 33 bp, Homo sapien
aggagctctcacataatgaatgaagaacttgaa

SEQ ID NO: 460605 - DNA, 33 bp, Homo sapien; identical to SEQ ID NO: 460603

SEQ ID NO: 460606 - DNA, 33 bp, Homo sapien; identical to SEQ ID NO: 460604

SEQ ID NO: 460607 - DNA, 33 bp, Homo sapien
agaatcagtattactgccacgttttacaatgta

SEQ ID NO: 460608 - DNA, 33 bp, Homo sapien
agaatcagtattactgtcacgttttacaatgta

SEQ ID NO: 460609 - DNA, 33 bp, Homo sapien; identical to SEQ ID NO: 460607

SEQ ID NO: 460610 - DNA, 33 bp, Homo sapien; identical to SEQ ID NO: 460608

SEQ ID NO: 460611 - DNA, 33 bp, Homo sapien
cagtataagggccttcacagacggagaaagagg

SEQ ID NO: 460612 - DNA, 33 bp, Homo sapien
cagtataagggccttcgcagacggagaaagagg

SEQ ID NO: 460613 - DNA, 33 bp, Homo sapien
tggggtcagaaaacctcaactctaattgaggaa

SEQ ID NO: 460614 - DNA, 33 bp, Homo sapien
tggggtcagaaaacctgaactctaattgaggaa

SEQ ID NO: 460615 - DNA, 33 bp, Homo sapien
ggctttgagtctatccaagacagtttagaggaa

SEQ ID NO: 460616 - DNA, 33 bp, Homo sapien
ggctttgagtctatcctagacagtttagaggaa

SEQ ID NO: 460617 - DNA, 33 bp, Homo sapien; identical to SEQ ID NO: 460615

SEQ ID NO: 460618 - DNA, 33 bp, Homo sapien; identical to SEQ ID NO: 460616

SEQ ID NO: 460619 - DNA, 33 bp, Homo sapien
caaagaccatccttgactaggagggagtttatt

SEQ ID NO: 460620 - DNA, 33 bp, Homo sapien
caaagaccatccttgagtaggagggagtttatt

SEQ ID NO: 460621 - DNA, 33 bp, Homo sapien
ccagaagggacaggatcaaaacaggaaaatcac

SEQ ID NO: 460622 - DNA, 33 bp, Homo sapien
ccagaagggacaggattaaaacaggaaaatcac

SEQ ID NO: 460623 - DNA, 33 bp, Homo sapien
cctgtcttccctcccaacttcacgagagacagc

SEQ ID NO: 460624 - DNA, 33 bp, Homo sapien
cctgtcttccctcccagcttcacgagagacagc

SEQ ID NO: 460625 - DNA, 33 bp, Homo sapien
ttatctcccaaaaatgccacctccaaatttcat

SEQ ID NO: 460626 - DNA, 33 bp, Homo sapien
ttatctcccaaaaatgtcacctccaaatttcat

SEQ ID NO: 460627 - DNA, 33 bp, Homo sapien
cttctttgctatattaggctatttgtgacaaaa

SEQ ID NO: 460628 - DNA, 33 bp, Homo sapien
cttctttgctatattatgctatttgtgacaaaa

SEQ ID NO: 460629 - DNA, 33 bp, Homo sapien
gtcaagtctgatttccccgtacaggatgaaagg

SEQ ID NO: 460630 - DNA, 33 bp, Homo sapien
gtcaagtctgatttcctcgtacaggatgaaagg

SEQ ID NO: 460631 - DNA, 33 bp, Homo sapien
aatcgtgggggaaatgaagttagcaggaagggc

SEQ ID NO: 460632 - DNA, 33 bp, Homo sapien
aatcgtgggggaaatggagttagcaggaagggc

SEQ ID NO: 460633 - DNA, 33 bp, Homo sapien
taccattaatggtcaaagtgaaccattacaaag

SEQ ID NO: 460634 - DNA, 33 bp, Homo sapien
taccattaatggtcaacgtgaaccattacaaag

SEQ ID NO: 460635 - DNA, 33 bp, Homo sapien
gggatcttggggatggaaagagtctggtctgac

SEQ ID NO: 460636 - DNA, 33 bp, Homo sapien
gggatcttggggatgggaagagtctggtctgac

SEQ ID NO: 460637 - DNA, 33 bp, Homo sapien
ctgggaatatacccaagaaaaatgattgcatgt

SEQ ID NO: 460638 - DNA, 33 bp, Homo sapien
ctgggaatatacccaataaaaatgattgcatgt

SEQ ID NO: 460639 - DNA, 33 bp, Homo sapien
agctctctacagccaaatcctctggaaaaccca

SEQ ID NO: 460640 - DNA, 33 bp, Homo sapien
agctctctacagccaagtcctctggaaaaccca

SEQ ID NO: 460641 - DNA, 33 bp, Homo sapien
agggctctgtgaaggaagaagttggtccccttt

SEQ ID NO: 460642 - DNA, 33 bp, Homo sapien
agggctctgtgaaggaggaagttggtccccttt

SEQ ID NO: 460643 - DNA, 33 bp, Homo sapien
cctatgatctggaagccccctcctttcttccag

SEQ ID NO: 460644 - DNA, 33 bp, Homo sapien
cctatgatctggaagctccctcctttcttccag

SEQ ID NO: 460645 - DNA, 33 bp, Homo sapien
tcaagtctcagttctcaagaaagcctgtcagga

SEQ ID NO: 460646 - DNA, 33 bp, Homo sapien
tcaagtctcagttctccagaaagcctgtcagga

SEQ ID NO: 460647 - DNA, 33 bp, Homo sapien
aacagaggaggagtaacgctgtggttgggcatt

SEQ ID NO: 460648 - DNA, 33 bp, Homo sapien
aacagaggaggagtaatgctgtggttgggcatt

SEQ ID NO: 460649 - DNA, 33 bp, Homo sapien
cagagatttacactccactttcaaagttatgta

SEQ ID NO: 460650 - DNA, 33 bp, Homo sapien
cagagatttacactccgctttcaaagttatgta

SEQ ID NO: 460651 - DNA, 33 bp, Homo sapien
actctttggtgcttcacggtgtcattccaaccc

SEQ ID NO: 460652 - DNA, 33 bp, Homo sapien
actctttggtgcttcatggtgtcattccaaccc

SEQ ID NO: 460653 - DNA, 33 bp, Homo sapien
gattttgggatgttagaaagttggaactctttt

SEQ ID NO: 460654 - DNA, 33 bp, Homo sapien
gattttgggatgttaggaagttggaactctttt

SEQ ID NO: 460655 - DNA, 33 bp, Homo sapien
taaatgtgaccataaacgaatgtaaagttatga

SEQ ID NO: 460656 - DNA, 33 bp, Homo sapien
taaatgtgaccataaatgaatgtaaagttatga

SEQ ID NO: 460657 - DNA, 33 bp, Homo sapien
gttggaccagatcaacaccctctcacatgagta

SEQ ID NO: 460658 - DNA, 33 bp, Homo sapien
gttggaccagatcaacgccctctcacatgagta

SEQ ID NO: 460659 - DNA, 33 bp, Homo sapien
aggatccagtcattgacccctgcccttgaaggc

SEQ ID NO: 460660 - DNA, 33 bp, Homo sapien
aggatccagtcattgagccctgcccttgaaggc

SEQ ID NO: 460661 - DNA, 33 bp, Homo sapien
tccaagcccttttcacacattagctctttgggc

SEQ ID NO: 460662 - DNA, 33 bp, Homo sapien
tccaagcccttttcacgcattagctctttgggc

SEQ ID NO: 460663 - DNA, 33 bp, Homo sapien
agtctgggtccctgcacgacctcataaggagaa

SEQ ID NO: 460664 - DNA, 33 bp, Homo sapien
agtctgggtccctgcatgacctcataaggagaa

SEQ ID NO: 460665 - DNA, 33 bp, Homo sapien
tctgggatcagcaccacgacaaactaccaacat

SEQ ID NO: 460666 - DNA, 33 bp, Homo sapien
tctgggatcagcaccatgacaaactaccaacat

SEQ ID NO: 460667 - DNA, 33 bp, Homo sapien
cttgggtttttcaatgcagattgctaacatgaa

SEQ ID NO: 460668 - DNA, 33 bp, Homo sapien
cttgggtttttcaatggagattgctaacatgaa

SEQ ID NO: 460669 - DNA, 33 bp, Homo sapien
agatggttgaagaacactgtcaatatgctaaaa

SEQ ID NO: 460670 - DNA, 33 bp, Homo sapien
agatggttgaagaacattgtcaatatgctaaaa

SEQ ID NO: 460671 - DNA, 33 bp, Homo sapien
tcttgtggagctttcacgttagtagggaaagac

SEQ ID NO: 460672 - DNA, 33 bp, Homo sapien
tcttgtggagctttcatgttagtagggaaagac

SEQ ID NO: 460673 - DNA, 33 bp, Homo sapien
tgcccttccacacccaaaagacctcattcctgg

SEQ ID NO: 460674 - DNA, 33 bp, Homo sapien
tgcccttccacacccagaagacctcattcctgg

SEQ ID NO: 460675 - DNA, 33 bp, Homo sapien
ttttctgcttggacagcattcatattttgtctg

SEQ ID NO: 460676 - DNA, 33 bp, Homo sapien
ttttctgcttggacagtattcatattttgtctg

SEQ ID NO: 460677 - DNA, 33 bp, Homo sapien
accatctagccctttacaggagaagtttgccaa

SEQ ID NO: 460678 - DNA, 33 bp, Homo sapien
accatctagccctttataggagaagtttgccaa

SEQ ID NO: 460679 - DNA, 33 bp, Homo sapien
tcctggtgaatgctccaaagtttccaacccaga

SEQ ID NO: 460680 - DNA, 33 bp, Homo sapien
tcctggtgaatgctccgaagtttccaacccaga

SEQ ID NO: 460681 - DNA, 33 bp, Homo sapien
ggtgtgccaaggaggccagagctgtagggatga

SEQ ID NO: 460682 - DNA, 33 bp, Homo sapien
ggtgtgccaaggaggcgagagctgtagggatga

SEQ ID NO: 460683 - DNA, 33 bp, Homo sapien
tatgggctgttccccaatctatccacctggtga

SEQ ID NO: 460684 - DNA, 33 bp, Homo sapien
tatgggctgttccccactctatccacctggtga

SEQ ID NO: 460685 - DNA, 33 bp, Homo sapien
ctttgggaaaggagacagatagaagataacctg

SEQ ID NO: 460686 - DNA, 33 bp, Homo sapien
ctttgggaaaggagacggatagaagataacctg

SEQ ID NO: 460687 - DNA, 33 bp, Homo sapien
cacacactgaacactaaccttctagtcttctcc

SEQ ID NO: 460688 - DNA, 33 bp, Homo sapien
cacacactgaacactagccttctagtcttctcc

SEQ ID NO: 460689 - DNA, 33 bp, Homo sapien
ttgattaaaaatcggccaaatccggacgtggtg

SEQ ID NO: 460690 - DNA, 33 bp, Homo sapien
ttgattaaaaatcggctaaatccggacgtggtg

SEQ ID NO: 460691 - DNA, 33 bp, Homo sapien
tccacatggccctagaaacatttctttcctttt

SEQ ID NO: 460692 - DNA, 33 bp, Homo sapien
tccacatggccctagatacatttctttcctttt

SEQ ID NO: 460693 - DNA, 33 bp, Homo sapien
ccctccactacaccctcagactctgctccacac

SEQ ID NO: 460694 - DNA, 33 bp, Homo sapien
ccctccactacaccctgagactctgctccacac

SEQ ID NO: 460695 - DNA, 33 bp, Homo sapien
tatccagttgactacacagggcatccttattct

SEQ ID NO: 460696 - DNA, 33 bp, Homo sapien
tatccagttgactacatagggcatccttattct

SEQ ID NO: 460697 - DNA, 33 bp, Homo sapien
aaaatgaaaacacaaagtctcaccattgccaac

SEQ ID NO: 460698 - DNA, 33 bp, Homo sapien
aaaatgaaaacacaaattctcaccattgccaac

SEQ ID NO: 460699 - DNA, 33 bp, Homo sapien
acaaaaatacaggaatcagccaggtgaactggc

SEQ ID NO: 460700 - DNA, 33 bp, Homo sapien
acaaaaatacaggaattagccaggtgaactggc

SEQ ID NO: 460701 - DNA, 33 bp, Homo sapien
tacagacgtgagtaccacacctggccagggctc

SEQ ID NO: 460702 - DNA, 33 bp, Homo sapien
tacagacgtgagtaccgcacctggccagggctc

SEQ ID NO: 460703 - DNA, 33 bp, Homo sapien
cccatggctatacctcaaacacctgtcctaaac

SEQ ID NO: 460704 - DNA, 33 bp, Homo sapien
cccatggctatacctctaacacctgtcctaaac

SEQ ID NO: 460705 - DNA, 33 bp, Homo sapien
agagcaaaaggattaaagagctagaagacagaa

SEQ ID NO: 460706 - DNA, 33 bp, Homo sapien
agagcaaaaggattaaggagctagaagacagaa

SEQ ID NO: 460707 - DNA, 33 bp, Homo sapien
gcagattggcaagtgcactccgggaaaaagcca

SEQ ID NO: 460708 - DNA, 33 bp, Homo sapien
gcagattggcaagtgcgctccgggaaaaagcca

SEQ ID NO: 460709 - DNA, 33 bp, Homo sapien
cttaagcacatctcaccgagacgggaagcccac

SEQ ID NO: 460710 - DNA, 33 bp, Homo sapien
cttaagcacatctcactgagacgggaagcccac

SEQ ID NO: 460711 - DNA, 33 bp, Homo sapien
cagttagtggggtggaagtagaacgtggacaac

SEQ ID NO: 460712 - DNA, 33 bp, Homo sapien
cagttagtggggtggaggtagaacgtggacaac

SEQ ID NO: 460713 - DNA, 33 bp, Homo sapien
acctcttgcagggtgaaaaatcttgaggagaga

SEQ ID NO: 460714 - DNA, 33 bp, Homo sapien
acctcttgcagggtgagaaatcttgaggagaga

SEQ ID NO: 460715 - DNA, 33 bp, Homo sapien
ttcagtatataaaatgccaggtatgattataac

SEQ ID NO: 460716 - DNA, 33 bp, Homo sapien
ttcagtatataaaatgtcaggtatgattataac

SEQ ID NO: 460717 - DNA, 33 bp, Homo sapien
gaagctcaatctaaccaatgtggagaggccaca

SEQ ID NO: 460718 - DNA, 33 bp, Homo sapien
gaagctcaatctaaccgatgtggagaggccaca

SEQ ID NO: 460719 - DNA, 33 bp, Homo sapien
tatcacgtgccggtacactatgttctacagctg

SEQ ID NO: 460720 - DNA, 33 bp, Homo sapien
tatcacgtgccggtacgctatgttctacagctg

SEQ ID NO: 460721 - DNA, 33 bp, Homo sapien
ctggatttcatctcaccgctaagcctgaatgca

SEQ ID NO: 460722 - DNA, 33 bp, Homo sapien
ctggatttcatctcactgctaagcctgaatgca

SEQ ID NO: 460723 - DNA, 33 bp, Homo sapien
agcattatcgtaggaaatgtggacaccctggga

SEQ ID NO: 460724 - DNA, 33 bp, Homo sapien
agcattatcgtaggaagtgtggacaccctggga

SEQ ID NO: 460725 - DNA, 33 bp, Homo sapien
acgttctctttaaatggatctgagcctgggcag

SEQ ID NO: 460726 - DNA, 33 bp, Homo sapien
acgttctctttaaatgtatctgagcctgggcag

SEQ ID NO: 460727 - DNA, 33 bp, Homo sapien
aacagaaatgtgggacacggaatttttgcacac

SEQ ID NO: 460728 - DNA, 33 bp, Homo sapien
aacagaaatgtgggacgcggaatttttgcacac

SEQ ID NO: 460729 - DNA, 33 bp, Homo sapien
catttctaagcaagagcagatgaggtttacgag

SEQ ID NO: 460730 - DNA, 33 bp, Homo sapien
catttctaagcaagagtagatgaggtttacgag

SEQ ID NO: 460731 - DNA, 33 bp, Homo sapien
aagttctgtttcttaaatcaaaagtaggctttt

SEQ ID NO: 460732 - DNA, 33 bp, Homo sapien
aagttctgtttcttaagtcaaaagtaggctttt

SEQ ID NO: 460733 - DNA, 33 bp, Homo sapien
acaagcacctcctaaacctcatctttgtctcta

SEQ ID NO: 460734 - DNA, 33 bp, Homo sapien
acaagcacctcctaaatctcatctttgtctcta

SEQ ID NO: 460735 - DNA, 33 bp, Homo sapien
tggaagtaggtgacaactggggccagcttctga

SEQ ID NO: 460736 - DNA, 33 bp, Homo sapien
tggaagtaggtgacaattggggccagcttctga

SEQ ID NO: 460737 - DNA, 33 bp, Homo sapien
ttatataacatctcaaatagaataaacactgga

SEQ ID NO: 460738 - DNA, 33 bp, Homo sapien
ttatataacatctcaagtagaataaacactgga

SEQ ID NO: 460739 - DNA, 33 bp, Homo sapien
gtgcttttcctattcactacaggatctccagcc

SEQ ID NO: 460740 - DNA, 33 bp, Homo sapien
gtgcttttcctattcattacaggatctccagcc

SEQ ID NO: 460741 - DNA, 33 bp, Homo sapien
tagcaggtgctcattaaatatttctagcatgga

SEQ ID NO: 460742 - DNA, 33 bp, Homo sapien
tagcaggtgctcattagatatttctagcatgga

SEQ ID NO: 460743 - DNA, 33 bp, Homo sapien
accttcagaaattaccacctgccaattcctgca

SEQ ID NO: 460744 - DNA, 33 bp, Homo sapien
accttcagaaattaccgcctgccaattcctgca

SEQ ID NO: 460745 - DNA, 33 bp, Homo sapien
aggggggtgtatcctccgacacaacataacaca

SEQ ID NO: 460746 - DNA, 33 bp, Homo sapien
aggggggtgtatcctctgacacaacataacaca

SEQ ID NO: 460747 - DNA, 33 bp, Homo sapien
agaccacatttgcaataaaatccaaaatctggc

SEQ ID NO: 460748 - DNA, 33 bp, Homo sapien
agaccacatttgcaatgaaatccaaaatctggc

SEQ ID NO: 460749 - DNA, 33 bp, Homo sapien
cattgtgtggatacaccgcattctatttattca

SEQ ID NO: 460750 - DNA, 33 bp, Homo sapien
cattgtgtggatacactgcattctatttattca

SEQ ID NO: 460751 - DNA, 33 bp, Homo sapien
aactaatcaagttaccaccgctactgagtaccc

SEQ ID NO: 460752 - DNA, 33 bp, Homo sapien
aactaatcaagttaccgccgctactgagtaccc

SEQ ID NO: 460753 - DNA, 33 bp, Homo sapien
tagtaaatgtgacatagagaggtttgaaaaaca

SEQ ID NO: 460754 - DNA, 33 bp, Homo sapien
tagtaaatgtgacatatagaggtttgaaaaaca

SEQ ID NO: 460755 - DNA, 33 bp, Homo sapien
tgcatcatcatcaaaacttagaggatgcaggat

SEQ ID NO: 460756 - DNA, 33 bp, Homo sapien
tgcatcatcatcaaaatttagaggatgcaggat

SEQ ID NO: 460757 - DNA, 33 bp, Homo sapien
ctttgcttctaggtcacgagaacattttctttc

SEQ ID NO: 460758 - DNA, 33 bp, Homo sapien
ctttgcttctaggtcatgagaacattttctttc

SEQ ID NO: 460759 - DNA, 33 bp, Homo sapien
caggactgaattgtcgaatcccaggtccagatt

SEQ ID NO: 460760 - DNA, 33 bp, Homo sapien
caggactgaattgtcggatcccaggtccagatt

SEQ ID NO: 460761 - DNA, 33 bp, Homo sapien
cttaggaaattcctggaaagaaccacttaactc

SEQ ID NO: 460762 - DNA, 33 bp, Homo sapien
cttaggaaattcctgggaagaaccacttaactc

SEQ ID NO: 460763 - DNA, 33 bp, Homo sapien
tgacttcttcttgtaaactatggagacttgaag

SEQ ID NO: 460764 - DNA, 33 bp, Homo sapien
tgacttcttcttgtaatctatggagacttgaag

SEQ ID NO: 460765 - DNA, 33 bp, Homo sapien
ataagtaatccatggaaagtcatgttggaaatt

SEQ ID NO: 460766 - DNA, 33 bp, Homo sapien
ataagtaatccatggacagtcatgttggaaatt

SEQ ID NO: 460767 - DNA, 33 bp, Homo sapien
ttttatgtaggaagatcagcaattaaagtattt

SEQ ID NO: 460768 - DNA, 33 bp, Homo sapien
ttttatgtaggaagattagcaattaaagtattt

SEQ ID NO: 460769 - DNA, 33 bp, Homo sapien
cctttgccattttccactgattagaagcaagtc

SEQ ID NO: 460770 - DNA, 33 bp, Homo sapien
cctttgccattttccagtgattagaagcaagtc

SEQ ID NO: 460771 - DNA, 33 bp, Homo sapien
gacatgaagataggtacgacaggcagatgttag

SEQ ID NO: 460772 - DNA, 33 bp, Homo sapien
gacatgaagataggtatgacaggcagatgttag

SEQ ID NO: 460773 - DNA, 33 bp, Homo sapien
acattggacaccaagacaagagatgctaaagtt

SEQ ID NO: 460774 - DNA, 33 bp, Homo sapien
acattggacaccaagataagagatgctaaagtt

SEQ ID NO: 460775 - DNA, 33 bp, Homo sapien
aaaacttctatgaacaccctttacaagtctttg

SEQ ID NO: 460776 - DNA, 33 bp, Homo sapien
aaaacttctatgaacatcctttacaagtctttg

SEQ ID NO: 460777 - DNA, 33 bp, Homo sapien
atgcagctgaacaggtcacagagagatcaaggc

SEQ ID NO: 460778 - DNA, 33 bp, Homo sapien
atgcagctgaacaggtgacagagagatcaaggc

SEQ ID NO: 460779 - DNA, 33 bp, Homo sapien
atataagttagtcatacggcctgattttcccat

SEQ ID NO: 460780 - DNA, 33 bp, Homo sapien
atataagttagtcatatggcctgattttcccat

SEQ ID NO: 460781 - DNA, 33 bp, Homo sapien
aatcctctgatgaaggaaagtccttgtcaccct

SEQ ID NO: 460782 - DNA, 33 bp, Homo sapien
aatcctctgatgaagggaagtccttgtcaccct

SEQ ID NO: 460783 - DNA, 33 bp, Homo sapien
ccctataaatgcgagaagtgtggtaaggccttc

SEQ ID NO: 460784 - DNA, 33 bp, Homo sapien
ccctataaatgcgagaggtgtggtaaggccttc

SEQ ID NO: 460785 - DNA, 33 bp, Homo sapien
acagctcacaccttaacattcattgtagaatcc

SEQ ID NO: 460786 - DNA, 33 bp, Homo sapien
acagctcacaccttaatattcattgtagaatcc

SEQ ID NO: 460787 - DNA, 33 bp, Homo sapien
tatgtgtttaactgtaataaagttgaatatggt

SEQ ID NO: 460788 - DNA, 33 bp, Homo sapien
tatgtgtttaactgtagtaaagttgaatatggt

SEQ ID NO: 460789 - DNA, 33 bp, Homo sapien
cttgggggaaggataacacagggaaaaattgaa

SEQ ID NO: 460790 - DNA, 33 bp, Homo sapien
cttgggggaaggataagacagggaaaaattgaa

SEQ ID NO: 460791 - DNA, 33 bp, Homo sapien
ttcaccgtgttaggtacgatggtctcagtctcc

SEQ ID NO: 460792 - DNA, 33 bp, Homo sapien
ttcaccgtgttaggtaggatggtctcagtctcc

SEQ ID NO: 460793 - DNA, 33 bp, Homo sapien
agcattactcataaccccaaactgcaaacaagc

SEQ ID NO: 460794 - DNA, 33 bp, Homo sapien
agcattactcataaccgcaaactgcaaacaagc

SEQ ID NO: 460795 - DNA, 33 bp, Homo sapien
aagtcaattcaaaagcagcaaaggaagcatctg

SEQ ID NO: 460796 - DNA, 33 bp, Homo sapien
aagtcaattcaaaagccgcaaaggaagcatctg

SEQ ID NO: 460797 - DNA, 33 bp, Homo sapien
agaagggtggcactaaataggcaaaggggacag

SEQ ID NO: 460798 - DNA, 33 bp, Homo sapien
agaagggtggcactaagtaggcaaaggggacag

SEQ ID NO: 460799 - DNA, 33 bp, Homo sapien
agagaaaccattcaaacgtgggcaatgtgggaa

SEQ ID NO: 460800 - DNA, 33 bp, Homo sapien
agagaaaccattcaaatgtgggcaatgtgggaa

SEQ ID NO: 460801 - DNA, 33 bp, Homo sapien; identical to SEQ ID NO: 460799

SEQ ID NO: 460802 - DNA, 33 bp, Homo sapien; identical to SEQ ID NO: 460800

SEQ ID NO: 460803 - DNA, 33 bp, Homo sapien
atgattcacagcttcaagaacatcagagaatcc

SEQ ID NO: 460804 - DNA, 33 bp, Homo sapien
atgattcacagcttcaggaacatcagagaatcc

SEQ ID NO: 460805 - DNA, 33 bp, Homo sapien; identical to SEQ ID NO: 460803

SEQ ID NO: 460806 - DNA, 33 bp, Homo sapien; identical to SEQ ID NO: 460804

SEQ ID NO: 460807 - DNA, 33 bp, Homo sapien
tcacacaggagaaaaaccattcagatgtgatac

SEQ ID NO: 460808 - DNA, 33 bp, Homo sapien
tcacacaggagaaaaagcattcagatgtgatac

SEQ ID NO: 460809 - DNA, 33 bp, Homo sapien; identical to SEQ ID NO: 460807

SEQ ID NO: 460810 - DNA, 33 bp, Homo sapien; identical to SEQ ID NO: 460808

SEQ ID NO: 460811 - DNA, 33 bp, Homo sapien
ttaaagaccaagaaaaaagtccacagtggagat

SEQ ID NO: 460812 - DNA, 33 bp, Homo sapien
ttaaagaccaagaaaagagtccacagtggagat

SEQ ID NO: 460813 - DNA, 33 bp, Homo sapien
atcatcctgtgaccaacttgaggacccagacac

SEQ ID NO: 460814 - DNA, 33 bp, Homo sapien
atcatcctgtgaccaatttgaggacccagacac

SEQ ID NO: 460815 - DNA, 33 bp, Homo sapien
acttatcttggatgagccaaaatgttttcaggt

SEQ ID NO: 460816 - DNA, 33 bp, Homo sapien
acttatcttggatgagtcaaaatgttttcaggt

SEQ ID NO: 460817 - DNA, 33 bp, Homo sapien
acccatgaatccaagacgtgaaggtgctaactg

SEQ ID NO: 460818 - DNA, 33 bp, Homo sapien
acccatgaatccaagatgtgaaggtgctaactg

SEQ ID NO: 460819 - DNA, 33 bp, Homo sapien
ttttgcaactcttctacagctttgaaatgatat

SEQ ID NO: 460820 - DNA, 33 bp, Homo sapien
ttttgcaactcttctatagctttgaaatgatat

SEQ ID NO: 460821 - DNA, 33 bp, Homo sapien
tagtaagcagtttaaccaaagcagtagaaagcc

SEQ ID NO: 460822 - DNA, 33 bp, Homo sapien
tagtaagcagtttaacgaaagcagtagaaagcc

SEQ ID NO: 460823 - DNA, 33 bp, Homo sapien
tgaggagtaaatgtagcaacagaacacaagtga

SEQ ID NO: 460824 - DNA, 33 bp, Homo sapien
tgaggagtaaatgtagtaacagaacacaagtga

SEQ ID NO: 460825 - DNA, 33 bp, Homo sapien
taggtatccacgtggcaaacatttctgccccag

SEQ ID NO: 460826 - DNA, 33 bp, Homo sapien
taggtatccacgtggctaacatttctgccccag

SEQ ID NO: 460827 - DNA, 33 bp, Homo sapien
ccaaacagataggaacaaaggacactaaaaggc

SEQ ID NO: 460828 - DNA, 33 bp, Homo sapien
ccaaacagataggaacgaaggacactaaaaggc

SEQ ID NO: 460829 - DNA, 33 bp, Homo sapien
tataacctgctcttggccatgataaagagaagc

SEQ ID NO: 460830 - DNA, 33 bp, Homo sapien
tataacctgctcttggtcatgataaagagaagc

SEQ ID NO: 460831 - DNA, 33 bp, Homo sapien
tattttccattatcaaacctgtaaagagcatca

SEQ ID NO: 460832 - DNA, 33 bp, Homo sapien
tattttccattatcaatcctgtaaagagcatca

SEQ ID NO: 460833 - DNA, 33 bp, Homo sapien
gtaacaacagtaaaaaagattccagctaatgtt

SEQ ID NO: 460834 - DNA, 33 bp, Homo sapien
gtaacaacagtaaaaatgattccagctaatgtt

SEQ ID NO: 460835 - DNA, 33 bp, Homo sapien
acccttaggatgtacaatgatgcattctggctt

SEQ ID NO: 460836 - DNA, 33 bp, Homo sapien
acccttaggatgtacagtgatgcattctggctt

SEQ ID NO: 460837 - DNA, 33 bp, Homo sapien
tttctccctaactcaaaacattatcttccctag

SEQ ID NO: 460838 - DNA, 33 bp, Homo sapien
tttctccctaactcaagacattatcttccctag

SEQ ID NO: 460839 - DNA, 33 bp, Homo sapien
cattgtcaggatatagacagaatgagtgggaaa

SEQ ID NO: 460840 - DNA, 33 bp, Homo sapien
cattgtcaggatataggcagaatgagtgggaaa

SEQ ID NO: 460841 - DNA, 33 bp, Homo sapien
acagacccagagtgcaaggacctgggaagcaga

SEQ ID NO: 460842 - DNA, 33 bp, Homo sapien
acagacccagagtgcacggacctgggaagcaga

SEQ ID NO: 460843 - DNA, 33 bp, Homo sapien
tgatgatggttactccactttacaaagttccta

SEQ ID NO: 460844 - DNA, 33 bp, Homo sapien
tgatgatggttactccgctttacaaagttccta

SEQ ID NO: 460845 - DNA, 33 bp, Homo sapien
aaatgcaaagtcaacaaaaaagagacaaaggaa

SEQ ID NO: 460846 - DNA, 33 bp, Homo sapien
aaatgcaaagtcaacacaaaagagacaaaggaa

SEQ ID NO: 460847 - DNA, 33 bp, Homo sapien
tggagttccttatgtcaagagtgctctatacac

SEQ ID NO: 460848 - DNA, 33 bp, Homo sapien
tggagttccttatgtcgagagtgctctatacac

SEQ ID NO: 460849 - DNA, 33 bp, Homo sapien
ccccagcaacaatgagcaattcagtctcaacct

SEQ ID NO: 460850 - DNA, 33 bp, Homo sapien
ccccagcaacaatgaggaattcagtctcaacct

SEQ ID NO: 460851 - DNA, 33 bp, Homo sapien
cagcaagggagattaaagctacagatgccattg

SEQ ID NO: 460852 - DNA, 33 bp, Homo sapien
cagcaagggagattaaggctacagatgccattg

SEQ ID NO: 460853 - DNA, 33 bp, Homo sapien
ttcagtgttaccacaacggttggctttctccag

SEQ ID NO: 460854 - DNA, 33 bp, Homo sapien
ttcagtgttaccacaatggttggctttctccag

SEQ ID NO: 460855 - DNA, 33 bp, Homo sapien
atgttgactagaggtgaaaaagtggagcaaatt

SEQ ID NO: 460856 - DNA, 33 bp, Homo sapien
atgttgactagaggtggaaaagtggagcaaatt

SEQ ID NO: 460857 - DNA, 33 bp, Homo sapien
tattttctatttttggaaatgatagctagcaca

SEQ ID NO: 460858 - DNA, 33 bp, Homo sapien
tattttctatttttgggaatgatagctagcaca

SEQ ID NO: 460859 - DNA, 33 bp, Homo sapien
aaaggaactgaaagcaagtaatggaataaatat

SEQ ID NO: 460860 - DNA, 33 bp, Homo sapien
aaaggaactgaaagcaggtaatggaataaatat

SEQ ID NO: 460861 - DNA, 33 bp, Homo sapien
ggtcctggtttgagtcaacatggtcaatccata

SEQ ID NO: 460862 - DNA, 33 bp, Homo sapien
ggtcctggtttgagtcgacatggtcaatccata

SEQ ID NO: 460863 - DNA, 33 bp, Homo sapien
aatattcaaggagctaaatagagtgactgttga

SEQ ID NO: 460864 - DNA, 33 bp, Homo sapien
aatattcaaggagctagatagagtgactgttga

SEQ ID NO: 460865 - DNA, 33 bp, Homo sapien
tcagaagtccaacgacaaagaagtcttgtggtc

SEQ ID NO: 460866 - DNA, 33 bp, Homo sapien
tcagaagtccaacgacgaagaagtcttgtggtc

SEQ ID NO: 460867 - DNA, 33 bp, Homo sapien
atctttgctggattatgataacctccttccagc

SEQ ID NO: 460868 - DNA, 33 bp, Homo sapien
atctttgctggattattataacctccttccagc

SEQ ID NO: 460869 - DNA, 33 bp, Homo sapien
ctgttgctggtacccaatgaccacgaacttaga

SEQ ID NO: 460870 - DNA, 33 bp, Homo sapien
ctgttgctggtacccagtgaccacgaacttaga

SEQ ID NO: 460871 - DNA, 33 bp, Homo sapien
cagaactcactggatgcatttattctcacagtt

SEQ ID NO: 460872 - DNA, 33 bp, Homo sapien
cagaactcactggatgtatttattctcacagtt

SEQ ID NO: 460873 - DNA, 33 bp, Homo sapien
actgcctcctacaacaacaaacgtatgcaatct

SEQ ID NO: 460874 - DNA, 33 bp, Homo sapien
actgcctcctacaacatcaaacgtatgcaatct

SEQ ID NO: 460875 - DNA, 33 bp, Homo sapien
tcttgataacactgaacaaaggcttcacttgtc

SEQ ID NO: 460876 - DNA, 33 bp, Homo sapien
tcttgataacactgaagaaaggcttcacttgtc

SEQ ID NO: 460877 - DNA, 33 bp, Homo sapien
tgagagctatttatcaccaagtcttgagacctg

SEQ ID NO: 460878 - DNA, 33 bp, Homo sapien
tgagagctatttatcatcaagtcttgagacctg

SEQ ID NO: 460879 - DNA, 33 bp, Homo sapien
tgctctgaagtcagagcattatttgtggctcta

SEQ ID NO: 460880 - DNA, 33 bp, Homo sapien
tgctctgaagtcagagtattatttgtggctcta

SEQ ID NO: 460881 - DNA, 33 bp, Homo sapien
aaagacatatttttacggccagcaataaagagg

SEQ ID NO: 460882 - DNA, 33 bp, Homo sapien
aaagacatatttttactgccagcaataaagagg

SEQ ID NO: 460883 - DNA, 33 bp, Homo sapien
aggtatttagtctgcaatgatcaactttcccaa

SEQ ID NO: 460884 - DNA, 33 bp, Homo sapien
aggtatttagtctgcactgatcaactttcccaa

SEQ ID NO: 460885 - DNA, 33 bp, Homo sapien
tgtctcattgaaaacaaatagcagaaaaaatat

SEQ ID NO: 460886 - DNA, 33 bp, Homo sapien
tgtctcattgaaaacagatagcagaaaaaatat

SEQ ID NO: 460887 - DNA, 33 bp, Homo sapien
atatacaaagttttgacgatgttatggcttctc

SEQ ID NO: 460888 - DNA, 33 bp, Homo sapien
atatacaaagttttgatgatgttatggcttctc

SEQ ID NO: 460889 - DNA, 33 bp, Homo sapien
ccaaagtggagagaaaacatctaaatgtgagga

SEQ ID NO: 460890 - DNA, 33 bp, Homo sapien
ccaaagtggagagaaatcatctaaatgtgagga

SEQ ID NO: 460891 - DNA, 33 bp, Homo sapien
tgtttctcccaaccacactgaatattaaatacc

SEQ ID NO: 460892 - DNA, 33 bp, Homo sapien
tgtttctcccaaccacgctgaatattaaatacc

SEQ ID NO: 460893 - DNA, 33 bp, Homo sapien
agaggaaggatgataacctgtaataatccccac

SEQ ID NO: 460894 - DNA, 33 bp, Homo sapien
agaggaaggatgataatctgtaataatccccac

SEQ ID NO: 460895 - DNA, 33 bp, Homo sapien
ggaatcgctgaagatcaaaatgttaaaaatata

SEQ ID NO: 460896 - DNA, 33 bp, Homo sapien
ggaatcgctgaagatccaaatgttaaaaatata

SEQ ID NO: 460897 - DNA, 33 bp, Homo sapien
ttttacctcttcagtaaacataataccatgaaa

SEQ ID NO: 460898 - DNA, 33 bp, Homo sapien
ttttacctcttcagtagacataataccatgaaa

SEQ ID NO: 460899 - DNA, 33 bp, Homo sapien
tttcctcaaaaatcaactctgaaaactttctgc

SEQ ID NO: 460900 - DNA, 33 bp, Homo sapien
tttcctcaaaaatcaattctgaaaactttctgc

SEQ ID NO: 460901 - DNA, 33 bp, Homo sapien
ttaaatttatttcacaactcactaaagggctac

SEQ ID NO: 460902 - DNA, 33 bp, Homo sapien
ttaaatttatttcacagctcactaaagggctac

SEQ ID NO: 460903 - DNA, 33 bp, Homo sapien
caatgtcagctcaccaatgagggctgctttatt

SEQ ID NO: 460904 - DNA, 33 bp, Homo sapien
caatgtcagctcaccagtgagggctgctttatt

SEQ ID NO: 460905 - DNA, 33 bp, Homo sapien
gatatgtggctcttagaaaaagtaaaagaatgt

SEQ ID NO: 460906 - DNA, 33 bp, Homo sapien
gatatgtggctcttaggaaaagtaaaagaatgt

SEQ ID NO: 460907 - DNA, 33 bp, Homo sapien
ctcttggttgtatatccaggagtggaatgctga

SEQ ID NO: 460908 - DNA, 33 bp, Homo sapien
ctcttggttgtatatctaggagtggaatgctga

SEQ ID NO: 460909 - DNA, 33 bp, Homo sapien
gctttaacaagtcgcaaaaacaggaattttcca

SEQ ID NO: 460910 - DNA, 33 bp, Homo sapien
gctttaacaagtcgcacaaacaggaattttcca

SEQ ID NO: 460911 - DNA, 33 bp, Homo sapien
gattttcctctccaaacattttcccagttcact

SEQ ID NO: 460912 - DNA, 33 bp, Homo sapien
gattttcctctccaaagattttcccagttcact

SEQ ID NO: 460913 - DNA, 33 bp, Homo sapien
gattccttggaactgaagatttatctctaacca

SEQ ID NO: 460914 - DNA, 33 bp, Homo sapien
gattccttggaactgatgatttatctctaacca

SEQ ID NO: 460915 - DNA, 33 bp, Homo sapien
tcctctgggtaagatccagcagtcgcagttcct

SEQ ID NO: 460916 - DNA, 33 bp, Homo sapien
tcctctgggtaagatcgagcagtcgcagttcct

SEQ ID NO: 460917 - DNA, 33 bp, Homo sapien
ctttgctcttgaagacaaaaggttttctaatcc

SEQ ID NO: 460918 - DNA, 33 bp, Homo sapien
ctttgctcttgaagacgaaaggttttctaatcc

SEQ ID NO: 460919 - DNA, 33 bp, Homo sapien
ttctgtctttcagagacaacgggagtattggat

SEQ ID NO: 460920 - DNA, 33 bp, Homo sapien
ttctgtctttcagagagaacgggagtattggat

SEQ ID NO: 460921 - DNA, 33 bp, Homo sapien
tcatcaaaatatgtaacggtcggtctcttttaa

SEQ ID NO: 460922 - DNA, 33 bp, Homo sapien
tcatcaaaatatgtaatggtcggtctcttttaa

SEQ ID NO: 460923 - DNA, 33 bp, Homo sapien
agaacttgtagaatgcaactaaggcagcattta

SEQ ID NO: 460924 - DNA, 33 bp, Homo sapien
agaacttgtagaatgccactaaggcagcattta

SEQ ID NO: 460925 - DNA, 33 bp, Homo sapien
gactctttgttggagccctctttcggtgcttag

SEQ ID NO: 460926 - DNA, 33 bp, Homo sapien
gactctttgttggagcgctctttcggtgcttag

SEQ ID NO: 460927 - DNA, 33 bp, Homo sapien
gatcaatggataccagcagaagctactaagtgg

SEQ ID NO: 460928 - DNA, 33 bp, Homo sapien
gatcaatggataccaggagaagctactaagtgg

SEQ ID NO: 460929 - DNA, 33 bp, Homo sapien
tgtgtttcagtcttaaaatggtatgttactctt

SEQ ID NO: 460930 - DNA, 33 bp, Homo sapien
tgtgtttcagtcttaatatggtatgttactctt

SEQ ID NO: 460931 - DNA, 33 bp, Homo sapien
tcagctctgctcactacatgtaccagggccact

SEQ ID NO: 460932 - DNA, 33 bp, Homo sapien
tcagctctgctcactatatgtaccagggccact

SEQ ID NO: 460933 - DNA, 33 bp, Homo sapien
attagagaaggagacacgattaagagacaggct

SEQ ID NO: 460934 - DNA, 33 bp, Homo sapien
attagagaaggagacatgattaagagacaggct

SEQ ID NO: 460935 - DNA, 33 bp, Homo sapien
tctcagtcttcaaatgcatcttaaaagttttct

SEQ ID NO: 460936 - DNA, 33 bp, Homo sapien
tctcagtcttcaaatgtatcttaaaagttttct

SEQ ID NO: 460937 - DNA, 33 bp, Homo sapien
atttgactgatagcaccaaatttgataagaaat

SEQ ID NO: 460938 - DNA, 33 bp, Homo sapien
atttgactgatagcactaaatttgataagaaat

SEQ ID NO: 460939 - DNA, 33 bp, Homo sapien
gtagtagtgttcaataataaatacacctaagta

SEQ ID NO: 460940 - DNA, 33 bp, Homo sapien
gtagtagtgttcaatagtaaatacacctaagta

SEQ ID NO: 460941 - DNA, 33 bp, Homo sapien
aacctctcaggtttaacaatttactgaaacaac

SEQ ID NO: 460942 - DNA, 33 bp, Homo sapien
aacctctcaggtttaataatttactgaaacaac

SEQ ID NO: 460943 - DNA, 33 bp, Homo sapien
gagggtggcatggaaacccttgaacttgcagtt

SEQ ID NO: 460944 - DNA, 33 bp, Homo sapien
gagggtggcatggaaatccttgaacttgcagtt

SEQ ID NO: 460945 - DNA, 33 bp, Homo sapien
ttgctactctcataaactgcttgtgggagtgga

SEQ ID NO: 460946 - DNA, 33 bp, Homo sapien
ttgctactctcataaagtgcttgtgggagtgga

SEQ ID NO: 460947 - DNA, 33 bp, Homo sapien
cttaccatagtcctaactgcagtatcacataaa

SEQ ID NO: 460948 - DNA, 33 bp, Homo sapien
cttaccatagtcctaattgcagtatcacataaa

SEQ ID NO: 460949 - DNA, 33 bp, Homo sapien
agaggatgttcttaaaactggaaaaatatagtt

SEQ ID NO: 460950 - DNA, 33 bp, Homo sapien
agaggatgttcttaaatctggaaaaatatagtt

SEQ ID NO: 460951 - DNA, 33 bp, Homo sapien
aggattgctatgaagacgtaataaattctcaac

SEQ ID NO: 460952 - DNA, 33 bp, Homo sapien
aggattgctatgaagatgtaataaattctcaac

SEQ ID NO: 460953 - DNA, 33 bp, Homo sapien
gggcaccctgccaggagagccaagtggtagcta

SEQ ID NO: 460954 - DNA, 33 bp, Homo sapien
gggcaccctgccaggatagccaagtggtagcta

SEQ ID NO: 460955 - DNA, 33 bp, Homo sapien
gactacagtgtgcagaaaggattgcaaaccaca

SEQ ID NO: 460956 - DNA, 33 bp, Homo sapien
gactacagtgtgcagagaggattgcaaaccaca

SEQ ID NO: 460957 - DNA, 33 bp, Homo sapien
gagctgtcactaagagaaaggagcagtaacatg

SEQ ID NO: 460958 - DNA, 33 bp, Homo sapien
gagctgtcactaagaggaaggagcagtaacatg

SEQ ID NO: 460959 - DNA, 33 bp, Homo sapien
acactgtattatttccccctaaacactcccatg

SEQ ID NO: 460960 - DNA, 33 bp, Homo sapien
acactgtattatttcctcctaaacactcccatg

SEQ ID NO: 460961 - DNA, 33 bp, Homo sapien
taaagatcaagaacaaatggacatgggtgttca

SEQ ID NO: 460962 - DNA, 33 bp, Homo sapien
taaagatcaagaacaagtggacatgggtgttca

SEQ ID NO: 460963 - DNA, 33 bp, Homo sapien
gatatttcaattcatgacatctattttgggggg

SEQ ID NO: 460964 - DNA, 33 bp, Homo sapien
gatatttcaattcatggcatctattttgggggg

SEQ ID NO: 460965 - DNA, 33 bp, Homo sapien
ttagaggtacagagatcagagaccagataactt

SEQ ID NO: 460966 - DNA, 33 bp, Homo sapien
ttagaggtacagagatgagagaccagataactt

SEQ ID NO: 460967 - DNA, 33 bp, Homo sapien; identical to SEQ ID NO: 460965

SEQ ID NO: 460968 - DNA, 33 bp, Homo sapien; identical to SEQ ID NO: 460966

SEQ ID NO: 460969 - DNA, 33 bp, Homo sapien
taattttgctgtttcccacgttcttcataacgt

SEQ ID NO: 460970 - DNA, 33 bp, Homo sapien
taattttgctgtttcctacgttcttcataacgt

SEQ ID NO: 460971 - DNA, 33 bp, Homo sapien; identical to SEQ ID NO: 460969

SEQ ID NO: 460972 - DNA, 33 bp, Homo sapien; identical to SEQ ID NO: 460970

SEQ ID NO: 460973 - DNA, 33 bp, Homo sapien
aaaaccaatctccaaaactcattttatcttgca

SEQ ID NO: 460974 - DNA, 33 bp, Homo sapien
aaaaccaatctccaaagctcattttatcttgca

SEQ ID NO: 460975 - DNA, 33 bp, Homo sapien; identical to SEQ ID NO: 460973

SEQ ID NO: 460976 - DNA, 33 bp, Homo sapien; identical to SEQ ID NO: 460974

SEQ ID NO: 460977 - DNA, 33 bp, Homo sapien
tccttttccttccaatcattatgtctcaacatt

SEQ ID NO: 460978 - DNA, 33 bp, Homo sapien
tccttttccttccaatgattatgtctcaacatt

SEQ ID NO: 460979 - DNA, 33 bp, Homo sapien
aggatggctcaaatccgagttcttcttataagc

SEQ ID NO: 460980 - DNA, 33 bp, Homo sapien
aggatggctcaaatcctagttcttcttataagc

SEQ ID NO: 460981 - DNA, 33 bp, Homo sapien
aaaccatatcaatggacgaaacaactgagtcac

SEQ ID NO: 460982 - DNA, 33 bp, Homo sapien
aaaccatatcaatggatgaaacaactgagtcac

SEQ ID NO: 460983 - DNA, 33 bp, Homo sapien
tggatagagtaacacactgaaagacaccaaaag

SEQ ID NO: 460984 - DNA, 33 bp, Homo sapien
tggatagagtaacacattgaaagacaccaaaag

SEQ ID NO: 460985 - DNA, 33 bp, Homo sapien
tattgacttgttgcagaaaccaagtttggtgtc

SEQ ID NO: 460986 - DNA, 33 bp, Homo sapien
tattgacttgttgcaggaaccaagtttggtgtc

SEQ ID NO: 460987 - DNA, 33 bp, Homo sapien
atatttctaaacagcaatctaacttaccacact

SEQ ID NO: 460988 - DNA, 33 bp, Homo sapien
atatttctaaacagcagtctaacttaccacact

SEQ ID NO: 460989 - DNA, 33 bp, Homo sapien; identical to SEQ ID NO: 460987

SEQ ID NO: 460990 - DNA, 33 bp, Homo sapien; identical to SEQ ID NO: 460988

SEQ ID NO: 460991 - DNA, 33 bp, Homo sapien
attttggtagccagaacaagttacactgccaag

SEQ ID NO: 460992 - DNA, 33 bp, Homo sapien
attttggtagccagaataagttacactgccaag

SEQ ID NO: 460993 - DNA, 33 bp, Homo sapien
aaggcccaggtttagaactggcacattatcact

SEQ ID NO: 460994 - DNA, 33 bp, Homo sapien
aaggcccaggtttagatctggcacattatcact

SEQ ID NO: 460995 - DNA, 33 bp, Homo sapien
actcctcattctgtctcaaactctctccctgac

SEQ ID NO: 460996 - DNA, 33 bp, Homo sapien
actcctcattctgtctgaaactctctccctgac

SEQ ID NO: 460997 - DNA, 33 bp, Homo sapien
ctagtcatttgctgtacgtcttatttacaatac

SEQ ID NO: 460998 - DNA, 33 bp, Homo sapien
ctagtcatttgctgtatgtcttatttacaatac

SEQ ID NO: 460999 - DNA, 33 bp, Homo sapien
gcaactgacatccccccgagtaagtaatcagaa

SEQ ID NO: 461000 - DNA, 33 bp, Homo sapien
gcaactgacatccccctgagtaagtaatcagaa

SEQ ID NO: 461001 - DNA, 33 bp, Homo sapien
gaccttgtaggccccagtccagcattcagatga

SEQ ID NO: 461002 - DNA, 33 bp, Homo sapien
gaccttgtaggccccattccagcattcagatga

SEQ ID NO: 461003 - DNA, 33 bp, Homo sapien
gatgtagcctctgagaatatttacatcactcat

SEQ ID NO: 461004 - DNA, 33 bp, Homo sapien
gatgtagcctctgagagtatttacatcactcat

SEQ ID NO: 461005 - DNA, 33 bp, Homo sapien
catatgcctgaacttacctaaaaaatttcctac

SEQ ID NO: 461006 - DNA, 33 bp, Homo sapien
catatgcctgaacttatctaaaaaatttcctac

SEQ ID NO: 461007 - DNA, 33 bp, Homo sapien
ctatgatgtaaatgtcggaatattgctggccca

SEQ ID NO: 461008 - DNA, 33 bp, Homo sapien
ctatgatgtaaatgtctgaatattgctggccca

SEQ ID NO: 461009 - DNA, 33 bp, Homo sapien
gctaaattctcagtaaggcacagggcccctcag

SEQ ID NO: 461010 - DNA, 33 bp, Homo sapien
gctaaattctcagtaatgcacagggcccctcag

SEQ ID NO: 461011 - DNA, 33 bp, Homo sapien
tatagaaatcaggataaagattagagccatctt

SEQ ID NO: 461012 - DNA, 33 bp, Homo sapien
tatagaaatcaggatatagattagagccatctt

SEQ ID NO: 461013 - DNA, 33 bp, Homo sapien
acacagtagatattcactatggctgctgatttc

SEQ ID NO: 461014 - DNA, 33 bp, Homo sapien
acacagtagatattcattatggctgctgatttc

SEQ ID NO: 461015 - DNA, 33 bp, Homo sapien
ctatcaggtgaacatacgtggcagctgtggaaa

SEQ ID NO: 461016 - DNA, 33 bp, Homo sapien
ctatcaggtgaacatatgtggcagctgtggaaa

SEQ ID NO: 461017 - DNA, 33 bp, Homo sapien
tcatctgtgacatgggaataatagctaacatac

SEQ ID NO: 461018 - DNA, 33 bp, Homo sapien
tcatctgtgacatggggataatagctaacatac

SEQ ID NO: 461019 - DNA, 33 bp, Homo sapien
tttaagatatgtctacggaaataccttgcctac

SEQ ID NO: 461020 - DNA, 33 bp, Homo sapien
tttaagatatgtctactgaaataccttgcctac

SEQ ID NO: 461021 - DNA, 33 bp, Homo sapien
gaagctgtaacattccggcactgctggtaggaa

SEQ ID NO: 461022 - DNA, 33 bp, Homo sapien
gaagctgtaacattcctgcactgctggtaggaa

SEQ ID NO: 461023 - DNA, 33 bp, Homo sapien
catctcctaatcaagaaaccaatttttacataa

SEQ ID NO: 461024 - DNA, 33 bp, Homo sapien
catctcctaatcaagacaccaatttttacataa

SEQ ID NO: 461025 - DNA, 33 bp, Homo sapien; identical to SEQ ID NO: 461023

SEQ ID NO: 461026 - DNA, 33 bp, Homo sapien; identical to SEQ ID NO: 461024

SEQ ID NO: 461027 - DNA, 33 bp, Homo sapien
ccattcgtggaattcacagggagtctcgccaga

SEQ ID NO: 461028 - DNA, 33 bp, Homo sapien
ccattcgtggaattcatagggagtctcgccaga

SEQ ID NO: 461029 - DNA, 33 bp, Homo sapien
cagtggacttgaagaacggagcttgaactaaag

SEQ ID NO: 461030 - DNA, 33 bp, Homo sapien
cagtggacttgaagaatggagcttgaactaaag

SEQ ID NO: 461031 - DNA, 33 bp, Homo sapien; identical to SEQ ID NO: 461029

SEQ ID NO: 461032 - DNA, 33 bp, Homo sapien; identical to SEQ ID NO: 461030

SEQ ID NO: 461033 - DNA, 33 bp, Homo sapien
aagaacagagctatacacaaaatcctttccaca

SEQ ID NO: 461034 - DNA, 33 bp, Homo sapien
aagaacagagctatacgcaaaatcctttccaca

SEQ ID NO: 461035 - DNA, 33 bp, Homo sapien; identical to SEQ ID NO: 461033

SEQ ID NO: 461036 - DNA, 33 bp, Homo sapien; identical to SEQ ID NO: 461034

SEQ ID NO: 461037 - DNA, 33 bp, Homo sapien
ggtaaagacttcagtcagaattcagatcttcgt

SEQ ID NO: 461038 - DNA, 33 bp, Homo sapien
ggtaaagacttcagtcggaattcagatcttcgt

SEQ ID NO: 461039 - DNA, 33 bp, Homo sapien; identical to SEQ ID NO: 461037

SEQ ID NO: 461040 - DNA, 33 bp, Homo sapien; identical to SEQ ID NO: 461038

SEQ ID NO: 461041 - DNA, 33 bp, Homo sapien
cagatcttcgtgttcacctcagagtccacacag

SEQ ID NO: 461042 - DNA, 33 bp, Homo sapien
cagatcttcgtgttcatctcagagtccacacag

SEQ ID NO: 461043 - DNA, 33 bp, Homo sapien
gacacccatgtaacaaccagaaactcagggacc

SEQ ID NO: 461044 - DNA, 33 bp, Homo sapien
gacacccatgtaacaagcagaaactcagggacc

SEQ ID NO: 461045 - DNA, 33 bp, Homo sapien
aaagcatttttgcaagcataatttagacggtca

SEQ ID NO: 461046 - DNA, 33 bp, Homo sapien
aaagcatttttgcaagtataatttagacggtca

SEQ ID NO: 461047 - DNA, 33 bp, Homo sapien
aatccattttattttcaatgaggaatgttccta

SEQ ID NO: 461048 - DNA, 33 bp, Homo sapien
aatccattttattttccatgaggaatgttccta

SEQ ID NO: 461049 - DNA, 33 bp, Homo sapien
tgaaagaaagcaatataagacatcttagtcaaa

SEQ ID NO: 461050 - DNA, 33 bp, Homo sapien
tgaaagaaagcaatatgagacatcttagtcaaa

SEQ ID NO: 461051 - DNA, 33 bp, Homo sapien
tacaacagagcattaaaatggaactattgtaat

SEQ ID NO: 461052 - DNA, 33 bp, Homo sapien
tacaacagagcattaagatggaactattgtaat

SEQ ID NO: 461053 - DNA, 33 bp, Homo sapien
ttttattgttacaaaacatgagtttcaagggca

SEQ ID NO: 461054 - DNA, 33 bp, Homo sapien
ttttattgttacaaaagatgagtttcaagggca

SEQ ID NO: 461055 - DNA, 33 bp, Homo sapien
aaatggaatacagcataaccaatgccagaatca

SEQ ID NO: 461056 - DNA, 33 bp, Homo sapien
aaatggaatacagcatgaccaatgccagaatca

SEQ ID NO: 461057 - DNA, 33 bp, Homo sapien
actgctatgctgtgaacgccctggaaagaggcc

SEQ ID NO: 461058 - DNA, 33 bp, Homo sapien
actgctatgctgtgaatgccctggaaagaggcc

SEQ ID NO: 461059 - DNA, 33 bp, Homo sapien
tcagaaattgtgtgacaaaataaacattggcta

SEQ ID NO: 461060 - DNA, 33 bp, Homo sapien
tcagaaattgtgtgacgaaataaacattggcta

SEQ ID NO: 461061 - DNA, 33 bp, Homo sapien
cagggaggtacagatacggcaagaaagaacatt

SEQ ID NO: 461062 - DNA, 33 bp, Homo sapien
cagggaggtacagatatggcaagaaagaacatt

SEQ ID NO: 461063 - DNA, 33 bp, Homo sapien
caaggatagcaacaacccattctgaaaactctt

SEQ ID NO: 461064 - DNA, 33 bp, Homo sapien
caaggatagcaacaacgcattctgaaaactctt

SEQ ID NO: 461065 - DNA, 33 bp, Homo sapien
aaccttggtcctctaactctagatccacgggct

SEQ ID NO: 461066 - DNA, 33 bp, Homo sapien
aaccttggtcctctaattctagatccacgggct

SEQ ID NO: 461067 - DNA, 33 bp, Homo sapien
gaagtgagaaaacatgcagtagaatggaatgga

SEQ ID NO: 461068 - DNA, 33 bp, Homo sapien
gaagtgagaaaacatggagtagaatggaatgga

SEQ ID NO: 461069 - DNA, 33 bp, Homo sapien
cctcctagaatgtctcaattagcaaccttttgc

SEQ ID NO: 461070 - DNA, 33 bp, Homo sapien
cctcctagaatgtctcgattagcaaccttttgc

SEQ ID NO: 461071 - DNA, 33 bp, Homo sapien
tccagcggaatgacaccgggccctatgcctgtg

SEQ ID NO: 461072 - DNA, 33 bp, Homo sapien
tccagcggaatgacacggggccctatgcctgtg

SEQ ID NO: 461073 - DNA, 33 bp, Homo sapien
tgtcatgtatatgtgaacttgtttgttgtgtag

SEQ ID NO: 461074 - DNA, 33 bp, Homo sapien
tgtcatgtatatgtgatcttgtttgttgtgtag

SEQ ID NO: 461075 - DNA, 33 bp, Homo sapien
tgtgagactgaacgagacactaagcaagtgagt

SEQ ID NO: 461076 - DNA, 33 bp, Homo sapien
tgtgagactgaacgaggcactaagcaagtgagt

SEQ ID NO: 461077 - DNA, 33 bp, Homo sapien
gccaacccacttgatgccacccaaagtgaggat

SEQ ID NO: 461078 - DNA, 33 bp, Homo sapien
gccaacccacttgatgtcacccaaagtgaggat

SEQ ID NO: 461079 - DNA, 33 bp, Homo sapien
agtcagcttttgcattaaaaaattcacagttca

SEQ ID NO: 461080 - DNA, 33 bp, Homo sapien
agtcagcttttgcattcaaaaattcacagttca

SEQ ID NO: 461081 - DNA, 33 bp, Homo sapien
tctggaaaatatgaaaacttgctcaaccctacc

SEQ ID NO: 461082 - DNA, 33 bp, Homo sapien
tctggaaaatatgaaaccttgctcaaccctacc

SEQ ID NO: 461083 - DNA, 33 bp, Homo sapien
gttccatctttgaaacccattaaccttcttttc

SEQ ID NO: 461084 - DNA, 33 bp, Homo sapien
gttccatctttgaaactcattaaccttcttttc

SEQ ID NO: 461085 - DNA, 33 bp, Homo sapien
cagagaattgagaagaccaggccagagggaaga

SEQ ID NO: 461086 - DNA, 33 bp, Homo sapien
cagagaattgagaagatcaggccagagggaaga

SEQ ID NO: 461087 - DNA, 33 bp, Homo sapien
tagaagggtgactggaagagtgaacaattgggt

SEQ ID NO: 461088 - DNA, 33 bp, Homo sapien
tagaagggtgactggacgagtgaacaattgggt

SEQ ID NO: 461089 - DNA, 33 bp, Homo sapien
tataaattactgcatacgtattttcctttataa

SEQ ID NO: 461090 - DNA, 33 bp, Homo sapien
tataaattactgcatatgtattttcctttataa

SEQ ID NO: 461091 - DNA, 33 bp, Homo sapien
aataaataaataaaagaaacagaagcactagga

SEQ ID NO: 461092 - DNA, 33 bp, Homo sapien
aataaataaataaaaggaacagaagcactagga

SEQ ID NO: 461093 - DNA, 33 bp, Homo sapien
accacgagggcttcacggagcctggatcccagg

SEQ ID NO: 461094 - DNA, 33 bp, Homo sapien
accacgagggcttcactgagcctggatcccagg

SEQ ID NO: 461095 - DNA, 33 bp, Homo sapien
aaacagcaaagccaacactggtgtttccaaggt

SEQ ID NO: 461096 - DNA, 33 bp, Homo sapien
aaacagcaaagccaacgctggtgtttccaaggt

SEQ ID NO: 461097 - DNA, 33 bp, Homo sapien
aagtgtatgtttctcacggttttttttgttgca

SEQ ID NO: 461098 - DNA, 33 bp, Homo sapien
aagtgtatgtttctcatggttttttttgttgca

SEQ ID NO: 461099 - DNA, 33 bp, Homo sapien
acggatccacaagatgaataattgtcttgccaa

SEQ ID NO: 461100 - DNA, 33 bp, Homo sapien
acggatccacaagatgcataattgtcttgccaa

SEQ ID NO: 461101 - DNA, 33 bp, Homo sapien
ttcactttttttttgccccatgtacatataaac

SEQ ID NO: 461102 - DNA, 33 bp, Homo sapien
ttcactttttttttgctccatgtacatataaac

SEQ ID NO: 461103 - DNA, 33 bp, Homo sapien
caaagagcaaattggaaatgcttcaaagtacaa

SEQ ID NO: 461104 - DNA, 33 bp, Homo sapien
caaagagcaaattggagatgcttcaaagtacaa

SEQ ID NO: 461105 - DNA, 33 bp, Homo sapien
ctctgtggaaggatgacgataacttctacctca

SEQ ID NO: 461106 - DNA, 33 bp, Homo sapien
ctctgtggaaggatgatgataacttctacctca

SEQ ID NO: 461107 - DNA, 33 bp, Homo sapien
ctgcattgtccttccaactgtcttgggcaggtg

SEQ ID NO: 461108 - DNA, 33 bp, Homo sapien
ctgcattgtccttccagctgtcttgggcaggtg

SEQ ID NO: 461109 - DNA, 33 bp, Homo sapien
tctgtttgcctgcacacaatggaaagccacaca

SEQ ID NO: 461110 - DNA, 33 bp, Homo sapien
tctgtttgcctgcacataatggaaagccacaca

SEQ ID NO: 461111 - DNA, 33 bp, Homo sapien
acagggcaggagaaatgatgactgatggtacag

SEQ ID NO: 461112 - DNA, 33 bp, Homo sapien
acagggcaggagaaattatgactgatggtacag

SEQ ID NO: 461113 - DNA, 33 bp, Homo sapien
gaagagacggtgaagcggacccctgcaggacga

SEQ ID NO: 461114 - DNA, 33 bp, Homo sapien
gaagagacggtgaagctgacccctgcaggacga

SEQ ID NO: 461115 - DNA, 33 bp, Homo sapien
accgtgcccgacctcaatcaaagttcttttggg

SEQ ID NO: 461116 - DNA, 33 bp, Homo sapien
accgtgcccgacctcagtcaaagttcttttggg

SEQ ID NO: 461117 - DNA, 33 bp, Homo sapien
aggccttcagaccaaccataaaaaaggcacttt

SEQ ID NO: 461118 - DNA, 33 bp, Homo sapien
aggccttcagaccaactataaaaaaggcacttt

SEQ ID NO: 461119 - DNA, 33 bp, Homo sapien
accctctcctcactcaatcgtaagtttcatgag

SEQ ID NO: 461120 - DNA, 33 bp, Homo sapien
accctctcctcactcagtcgtaagtttcatgag

SEQ ID NO: 461121 - DNA, 33 bp, Homo sapien
caagggaacaacccaacgtaaccagactccctt

SEQ ID NO: 461122 - DNA, 33 bp, Homo sapien
caagggaacaacccaatgtaaccagactccctt

SEQ ID NO: 461123 - DNA, 33 bp, Homo sapien
ctaagaggaaacttcaatctctgggctgagtcc

SEQ ID NO: 461124 - DNA, 33 bp, Homo sapien
ctaagaggaaacttcagtctctgggctgagtcc

SEQ ID NO: 461125 - DNA, 33 bp, Homo sapien
tatgtgtcaagtgaataaatgagaggaccaaat

SEQ ID NO: 461126 - DNA, 33 bp, Homo sapien
tatgtgtcaagtgaatgaatgagaggaccaaat

SEQ ID NO: 461127 - DNA, 33 bp, Homo sapien
atctgtgtgattacataaagagcctgccagggc

SEQ ID NO: 461128 - DNA, 33 bp, Homo sapien
atctgtgtgattacatgaagagcctgccagggc

SEQ ID NO: 461129 - DNA, 33 bp, Homo sapien
ttttaaagatacaggcagaaatagctataaaat

SEQ ID NO: 461130 - DNA, 33 bp, Homo sapien
ttttaaagatacaggcggaaatagctataaaat

SEQ ID NO: 461131 - DNA, 33 bp, Homo sapien
atagctgtgttcttataacctgcatcctgatgg

SEQ ID NO: 461132 - DNA, 33 bp, Homo sapien
atagctgtgttcttatgacctgcatcctgatgg

SEQ ID NO: 461133 - DNA, 33 bp, Homo sapien
cccatcaaattagaaccgcattgtctcacacat

SEQ ID NO: 461134 - DNA, 33 bp, Homo sapien
cccatcaaattagaactgcattgtctcacacat

SEQ ID NO: 461135 - DNA, 33 bp, Homo sapien
agaggcaggatgaaaaattcaggggtctccaga

SEQ ID NO: 461136 - DNA, 33 bp, Homo sapien
agaggcaggatgaaaatttcaggggtctccaga

SEQ ID NO: 461137 - DNA, 33 bp, Homo sapien
atagtttcagacattacgtccctttgcctctaa

SEQ ID NO: 461138 - DNA, 33 bp, Homo sapien
atagtttcagacattatgtccctttgcctctaa

SEQ ID NO: 461139 - DNA, 33 bp, Homo sapien
gacaccctcctcctaccagaatggagactcaca

SEQ ID NO: 461140 - DNA, 33 bp, Homo sapien
gacaccctcctcctacgagaatggagactcaca

SEQ ID NO: 461141 - DNA, 33 bp, Homo sapien
tattccgacatgtataccacatgaaatattgga

SEQ ID NO: 461142 - DNA, 33 bp, Homo sapien
tattccgacatgtatagcacatgaaatattgga

SEQ ID NO: 461143 - DNA, 33 bp, Homo sapien
gagtatctaccagttccacggtcaggctactgc

SEQ ID NO: 461144 - DNA, 33 bp, Homo sapien
gagtatctaccagttctacggtcaggctactgc

SEQ ID NO: 461145 - DNA, 33 bp, Homo sapien
gcgaatgaactgaaaagcattcttagaagcctg

SEQ ID NO: 461146 - DNA, 33 bp, Homo sapien
gcgaatgaactgaaaatcattcttagaagcctg

SEQ ID NO: 461147 - DNA, 33 bp, Homo sapien
aagagctcatgggccacgttaaggcgctcagat

SEQ ID NO: 461148 - DNA, 33 bp, Homo sapien
aagagctcatgggccatgttaaggcgctcagat

SEQ ID NO: 461149 - DNA, 33 bp, Homo sapien
caaactacttgacccaagctactgatccccaca

SEQ ID NO: 461150 - DNA, 33 bp, Homo sapien
caaactacttgacccacgctactgatccccaca

SEQ ID NO: 461151 - DNA, 33 bp, Homo sapien
ggggagtgaaataccgacacagggatgaggctg

SEQ ID NO: 461152 - DNA, 33 bp, Homo sapien
ggggagtgaaataccgtcacagggatgaggctg

SEQ ID NO: 461153 - DNA, 33 bp, Homo sapien
tggtttcatgtgttaccggaaagggaagtgttt

SEQ ID NO: 461154 - DNA, 33 bp, Homo sapien
tggtttcatgtgttactggaaagggaagtgttt

SEQ ID NO: 461155 - DNA, 33 bp, Homo sapien
tcctttgtattatggaaaacggctgtggtttca

SEQ ID NO: 461156 - DNA, 33 bp, Homo sapien
tcctttgtattatggacaacggctgtggtttca

SEQ ID NO: 461157 - DNA, 33 bp, Homo sapien
actggtgcagaagtaaagaacaaaacagccaaa

SEQ ID NO: 461158 - DNA, 33 bp, Homo sapien
actggtgcagaagtaaggaacaaaacagccaaa

SEQ ID NO: 461159 - DNA, 33 bp, Homo sapien
ctctgggtaacattaccaggtgtgagtataggc

SEQ ID NO: 461160 - DNA, 33 bp, Homo sapien
ctctgggtaacattacgaggtgtgagtataggc

SEQ ID NO: 461161 - DNA, 33 bp, Homo sapien
gagggacacaggaacgcagacttggacctcagt

SEQ ID NO: 461162 - DNA, 33 bp, Homo sapien
gagggacacaggaacgtagacttggacctcagt

SEQ ID NO: 461163 - DNA, 33 bp, Homo sapien
cccaggtgccaccaataaaaatcctacagaaaa

SEQ ID NO: 461164 - DNA, 33 bp, Homo sapien
cccaggtgccaccaatgaaaatcctacagaaaa

SEQ ID NO: 461165 - DNA, 33 bp, Homo sapien
ctcgggtagaccacaccaggaaaagtgtagcat

SEQ ID NO: 461166 - DNA, 33 bp, Homo sapien
ctcgggtagaccacactaggaaaagtgtagcat

SEQ ID NO: 461167 - DNA, 33 bp, Homo sapien
gaggggcgtggttcgaagccgtacagtggccgg

SEQ ID NO: 461168 - DNA, 33 bp, Homo sapien
gaggggcgtggttcgaggccgtacagtggccgg

SEQ ID NO: 461169 - DNA, 33 bp, Homo sapien
tgcagagctctgaccaagaaggcccagcagcca

SEQ ID NO: 461170 - DNA, 33 bp, Homo sapien
tgcagagctctgaccaggaaggcccagcagcca

SEQ ID NO: 461171 - DNA, 33 bp, Homo sapien
gtggcaagtacgcagacggaaacccagtctgtg

SEQ ID NO: 461172 - DNA, 33 bp, Homo sapien
gtggcaagtacgcagatggaaacccagtctgtg

SEQ ID NO: 461173 - DNA, 33 bp, Homo sapien
ttgtttaagccactgacggatgctctaggtttg

SEQ ID NO: 461174 - DNA, 33 bp, Homo sapien
ttgtttaagccactgatggatgctctaggtttg

SEQ ID NO: 461175 - DNA, 33 bp, Homo sapien
tgagggatacatcgagaaagaaaatgtggtctc

SEQ ID NO: 461176 - DNA, 33 bp, Homo sapien
tgagggatacatcgaggaagaaaatgtggtctc

SEQ ID NO: 461177 - DNA, 33 bp, Homo sapien
gtcagaaggcatggtacatggacgtgactctgc

SEQ ID NO: 461178 - DNA, 33 bp, Homo sapien
gtcagaaggcatggtatatggacgtgactctgc

SEQ ID NO: 461179 - DNA, 33 bp, Homo sapien
gaatccccagagcttcaaagagtcagattcgcc

SEQ ID NO: 461180 - DNA, 33 bp, Homo sapien
gaatccccagagcttcgaagagtcagattcgcc

SEQ ID NO: 461181 - DNA, 33 bp, Homo sapien
caagctgcagacgtccaaagcgaacagcagaca

SEQ ID NO: 461182 - DNA, 33 bp, Homo sapien
caagctgcagacgtccgaagcgaacagcagaca

SEQ ID NO: 461183 - DNA, 33 bp, Homo sapien
aagcctcctatcactactaacctttcagcgcat

SEQ ID NO: 461184 - DNA, 33 bp, Homo sapien
aagcctcctatcactagtaacctttcagcgcat

SEQ ID NO: 461185 - DNA, 33 bp, Homo sapien
ggacagaggatcagaaccattcaagctgccggg

SEQ ID NO: 461186 - DNA, 33 bp, Homo sapien
ggacagaggatcagaatcattcaagctgccggg

SEQ ID NO: 461187 - DNA, 33 bp, Homo sapien
tcagcaaatggggctgcagttgtggttacagtg

SEQ ID NO: 461188 - DNA, 33 bp, Homo sapien
tcagcaaatggggctggagttgtggttacagtg

SEQ ID NO: 461189 - DNA, 33 bp, Homo sapien
taaatgaggtagtatacgtaagtgcttgccatt

SEQ ID NO: 461190 - DNA, 33 bp, Homo sapien
taaatgaggtagtatatgtaagtgcttgccatt

SEQ ID NO: 461191 - DNA, 33 bp, Homo sapien
cgtttccacttcctaacggccctgagaaataga

SEQ ID NO: 461192 - DNA, 33 bp, Homo sapien
cgtttccacttcctaatggccctgagaaataga

SEQ ID NO: 461193 - DNA, 33 bp, Homo sapien
gcaaccacagaatgacacccgtggaggccccag

SEQ ID NO: 461194 - DNA, 33 bp, Homo sapien
gcaaccacagaatgacgcccgtggaggccccag

SEQ ID NO: 461195 - DNA, 33 bp, Homo sapien
tcactcactcgccacacgaccctgggagttagt

SEQ ID NO: 461196 - DNA, 33 bp, Homo sapien
tcactcactcgccacatgaccctgggagttagt

SEQ ID NO: 461197 - DNA, 33 bp, Homo sapien
tcaacccccaacagtaagaaaggcccagttcct

SEQ ID NO: 461198 - DNA, 33 bp, Homo sapien
tcaacccccaacagtaggaaaggcccagttcct

SEQ ID NO: 461199 - DNA, 33 bp, Homo sapien
tgtgtggttggggtcaatatatccctgtagcct

SEQ ID NO: 461200 - DNA, 33 bp, Homo sapien
tgtgtggttggggtcagtatatccctgtagcct

SEQ ID NO: 461201 - DNA, 33 bp, Homo sapien
aaggagcaactatgtaacaaaggctggagccaa

SEQ ID NO: 461202 - DNA, 33 bp, Homo sapien
aaggagcaactatgtatcaaaggctggagccaa

SEQ ID NO: 461203 - DNA, 33 bp, Homo sapien
ggacgcttgaggaagccgctcgactgtgagaat

SEQ ID NO: 461204 - DNA, 33 bp, Homo sapien
ggacgcttgaggaagctgctcgactgtgagaat

SEQ ID NO: 461205 - DNA, 33 bp, Homo sapien
gaggctcctactgctcaaggaagcgggagggaa

SEQ ID NO: 461206 - DNA, 33 bp, Homo sapien
gaggctcctactgctcgaggaagcgggagggaa

SEQ ID NO: 461207 - DNA, 33 bp, Homo sapien
gtagtcacaaacaatacggaacaccctgaatga

SEQ ID NO: 461208 - DNA, 33 bp, Homo sapien
gtagtcacaaacaatagggaacaccctgaatga

SEQ ID NO: 461209 - DNA, 33 bp, Homo sapien
gcttgcagtcctagaagaagagctccggcacca

SEQ ID NO: 461210 - DNA, 33 bp, Homo sapien
gcttgcagtcctagaataagagctccggcacca

SEQ ID NO: 461211 - DNA, 33 bp, Homo sapien
gaccttgtctccaaaactagatggcatttggag

SEQ ID NO: 461212 - DNA, 33 bp, Homo sapien
gaccttgtctccaaaattagatggcatttggag

SEQ ID NO: 461213 - DNA, 33 bp, Homo sapien
aaggatttggagaaagccacaaagatcccaggt

SEQ ID NO: 461214 - DNA, 33 bp, Homo sapien
aaggatttggagaaaggcacaaagatcccaggt

SEQ ID NO: 461215 - DNA, 33 bp, Homo sapien
gactgagacatacagcagaaggtgtggaatgcg

SEQ ID NO: 461216 - DNA, 33 bp, Homo sapien
gactgagacatacagcggaaggtgtggaatgcg

SEQ ID NO: 461217 - DNA, 33 bp, Homo sapien
ccctggtctgccaagccatggatttatcttatt

SEQ ID NO: 461218 - DNA, 33 bp, Homo sapien
ccctggtctgccaagctatggatttatcttatt

SEQ ID NO: 461219 - DNA, 33 bp, Homo sapien
agttctgctcaagagacagtggaacagttaaat

SEQ ID NO: 461220 - DNA, 33 bp, Homo sapien
agttctgctcaagagatagtggaacagttaaat

SEQ ID NO: 461221 - DNA, 33 bp, Homo sapien
tctagatcccttagtaaaatgttgggtctgcca

SEQ ID NO: 461222 - DNA, 33 bp, Homo sapien
tctagatcccttagtagaatgttgggtctgcca

SEQ ID NO: 461223 - DNA, 33 bp, Homo sapien
tcttcttagttacttcacactacctagcagtct

SEQ ID NO: 461224 - DNA, 33 bp, Homo sapien
tcttcttagttacttcgcactacctagcagtct

SEQ ID NO: 461225 - DNA, 33 bp, Homo sapien
caggtcacaggaaagacactgaagaatgtggaa

SEQ ID NO: 461226 - DNA, 33 bp, Homo sapien
caggtcacaggaaagatactgaagaatgtggaa

SEQ ID NO: 461227 - DNA, 33 bp, Homo sapien
ggtaggtcaggaatgaaaaacattctccaatgt

SEQ ID NO: 461228 - DNA, 33 bp, Homo sapien
ggtaggtcaggaatgataaacattctccaatgt

SEQ ID NO: 461229 - DNA, 33 bp, Homo sapien
gcaattctacacttacaaagtcacatgccattt

SEQ ID NO: 461230 - DNA, 33 bp, Homo sapien
gcaattctacacttaccaagtcacatgccattt

SEQ ID NO: 461231 - DNA, 33 bp, Homo sapien
cggggatcatgtcgtcaatggactggcctttct

SEQ ID NO: 461232 - DNA, 33 bp, Homo sapien
cggggatcatgtcgtcgatggactggcctttct

SEQ ID NO: 461233 - DNA, 33 bp, Homo sapien
accttctagactcccacaagaaaagtaaattaa

SEQ ID NO: 461234 - DNA, 33 bp, Homo sapien
accttctagactcccagaagaaaagtaaattaa

SEQ ID NO: 461235 - DNA, 33 bp, Homo sapien
agggacagcctcacgcaacccaggatgctgtgt

SEQ ID NO: 461236 - DNA, 33 bp, Homo sapien
agggacagcctcacgcgacccaggatgctgtgt

SEQ ID NO: 461237 - DNA, 33 bp, Homo sapien
gacttcccatatgacactacaatagagacagtg

SEQ ID NO: 461238 - DNA, 33 bp, Homo sapien
gacttcccatatgacagtacaatagagacagtg

SEQ ID NO: 461239 - DNA, 33 bp, Homo sapien
tttttggttccatttgaaaatccacttgctcca

SEQ ID NO: 461240 - DNA, 33 bp, Homo sapien
tttttggttccatttggaaatccacttgctcca

SEQ ID NO: 461241 - DNA, 33 bp, Homo sapien
tgatccaggtgaaagaacatgaggtgttggcag

SEQ ID NO: 461242 - DNA, 33 bp, Homo sapien
tgatccaggtgaaagaccatgaggtgttggcag

SEQ ID NO: 461243 - DNA, 33 bp, Homo sapien
atcccacagagtcccacggataccacgtccaca

SEQ ID NO: 461244 - DNA, 33 bp, Homo sapien
atcccacagagtcccatggataccacgtccaca

SEQ ID NO: 461245 - DNA, 33 bp, Homo sapien
aagtttcagggcccaagattctcaaatcacagg

SEQ ID NO: 461246 - DNA, 33 bp, Homo sapien
aagtttcagggcccaatattctcaaatcacagg

SEQ ID NO: 461247 - DNA, 33 bp, Homo sapien
tgagcctctagaagacacagtcctgtccccgac

SEQ ID NO: 461248 - DNA, 33 bp, Homo sapien
tgagcctctagaagacgcagtcctgtccccgac

SEQ ID NO: 461249 - DNA, 33 bp, Homo sapien
gaaagaaaaacagcaaaatgccacagtggagcc

SEQ ID NO: 461250 - DNA, 33 bp, Homo sapien
gaaagaaaaacagcaagatgccacagtggagcc

SEQ ID NO: 461251 - DNA, 33 bp, Homo sapien
agggaaaacaatcgacaggtgatgagcattggc

SEQ ID NO: 461252 - DNA, 33 bp, Homo sapien
agggaaaacaatcgacgggtgatgagcattggc

SEQ ID NO: 461253 - DNA, 33 bp, Homo sapien
tcctgtaaacagcccccggcagagtctgtgaag

SEQ ID NO: 461254 - DNA, 33 bp, Homo sapien
tcctgtaaacagcccctggcagagtctgtgaag

SEQ ID NO: 461255 - DNA, 33 bp, Homo sapien
tgatgagtacacctaaaagcccagatttcacca

SEQ ID NO: 461256 - DNA, 33 bp, Homo sapien
tgatgagtacacctaacagcccagatttcacca

SEQ ID NO: 461257 - DNA, 33 bp, Homo sapien
atgcagctctttaaaagaatgaattaaggccag

SEQ ID NO: 461258 - DNA, 33 bp, Homo sapien
atgcagctctttaaaataatgaattaaggccag

SEQ ID NO: 461259 - DNA, 33 bp, Homo sapien
gcagagctcaatgtgacccctggaataggaggc

SEQ ID NO: 461260 - DNA, 33 bp, Homo sapien
gcagagctcaatgtgatccctggaataggaggc

SEQ ID NO: 461261 - DNA, 33 bp, Homo sapien
atccaaacatacagggaagtttagtgtccattc

SEQ ID NO: 461262 - DNA, 33 bp, Homo sapien
atccaaacatacaggggagtttagtgtccattc

SEQ ID NO: 461263 - DNA, 33 bp, Homo sapien
tccatgtgaattctagaatcagtttgtcagttt

SEQ ID NO: 461264 - DNA, 33 bp, Homo sapien
tccatgtgaattctagtatcagtttgtcagttt

SEQ ID NO: 461265 - DNA, 33 bp, Homo sapien
ctcattatgtggtacagtacttcactgtttttt

SEQ ID NO: 461266 - DNA, 33 bp, Homo sapien
ctcattatgtggtacattacttcactgtttttt

SEQ ID NO: 461267 - DNA, 33 bp, Homo sapien
aattctgtgtaccttgcaatttggggagagggg

SEQ ID NO: 461268 - DNA, 33 bp, Homo sapien
aattctgtgtaccttgtaatttggggagagggg

SEQ ID NO: 461269 - DNA, 33 bp, Homo sapien
ttctcaaaagacaacccgggtcctgatttcaac

SEQ ID NO: 461270 - DNA, 33 bp, Homo sapien
ttctcaaaagacaacctgggtcctgatttcaac

SEQ ID NO: 461271 - DNA, 33 bp, Homo sapien
aattaatgaatactgaaaggtcttgggatagct

SEQ ID NO: 461272 - DNA, 33 bp, Homo sapien
aattaatgaatactgagaggtcttgggatagct

SEQ ID NO: 461273 - DNA, 33 bp, Homo sapien
gcattatacagtccacgatggtgctaaaaatat

SEQ ID NO: 461274 - DNA, 33 bp, Homo sapien
gcattatacagtccactatggtgctaaaaatat

SEQ ID NO: 461275 - DNA, 33 bp, Homo sapien
gccaggacccatcgatgaacttgtccctcctgg

SEQ ID NO: 461276 - DNA, 33 bp, Homo sapien
gccaggacccatcgattaacttgtccctcctgg

SEQ ID NO: 461277 - DNA, 33 bp, Homo sapien
aatcttagtgtctcagaacaagacctctcagat

SEQ ID NO: 461278 - DNA, 33 bp, Homo sapien
aatcttagtgtctcagtacaagacctctcagat

SEQ ID NO: 461279 - DNA, 33 bp, Homo sapien
tctgctgggcaactaacattcattcgttcattc

SEQ ID NO: 461280 - DNA, 33 bp, Homo sapien
tctgctgggcaactaatattcattcgttcattc

SEQ ID NO: 461281 - DNA, 33 bp, Homo sapien
ttgtgtggatttaaacaaggttttgtgtgtaca

SEQ ID NO: 461282 - DNA, 33 bp, Homo sapien
ttgtgtggatttaaacgaggttttgtgtgtaca

SEQ ID NO: 461283 - DNA, 33 bp, Homo sapien
aattagaacagaaagaaaatgaaactgctataa

SEQ ID NO: 461284 - DNA, 33 bp, Homo sapien
aattagaacagaaagataatgaaactgctataa

SEQ ID NO: 461285 - DNA, 33 bp, Homo sapien
tgtaaggcggaaagccacacgttagatctgagg

SEQ ID NO: 461286 - DNA, 33 bp, Homo sapien
tgtaaggcggaaagccgcacgttagatctgagg

SEQ ID NO: 461287 - DNA, 33 bp, Homo sapien
tgggactaaaaggaaggacagatcctggtacct

SEQ ID NO: 461288 - DNA, 33 bp, Homo sapien
tgggactaaaaggaagtacagatcctggtacct

SEQ ID NO: 461289 - DNA, 33 bp, Homo sapien
aaatgtggtggttgatcagttctatgagactat

SEQ ID NO: 461290 - DNA, 33 bp, Homo sapien
aaatgtggtggttgattagttctatgagactat

SEQ ID NO: 461291 - DNA, 33 bp, Homo sapien
gtttcagcagcaactcaatgtctcgcttgctga

SEQ ID NO: 461292 - DNA, 33 bp, Homo sapien
gtttcagcagcaactcgatgtctcgcttgctga

SEQ ID NO: 461293 - DNA, 33 bp, Homo sapien
ccttacagagctttcacgagaactagaagagca

SEQ ID NO: 461294 - DNA, 33 bp, Homo sapien
ccttacagagctttcatgagaactagaagagca

SEQ ID NO: 461295 - DNA, 33 bp, Homo sapien
ttccttcaacgaacatcagctgggcgtctccgg

SEQ ID NO: 461296 - DNA, 33 bp, Homo sapien
ttccttcaacgaacattagctgggcgtctccgg

SEQ ID NO: 461297 - DNA, 33 bp, Homo sapien
tcccctttcttccgccacggtcatgcagggctc

SEQ ID NO: 461298 - DNA, 33 bp, Homo sapien
tcccctttcttccgccgcggtcatgcagggctc

SEQ ID NO: 461299 - DNA, 33 bp, Homo sapien
tcagtccggctgagaaatgtgttcgttagcatc

SEQ ID NO: 461300 - DNA, 33 bp, Homo sapien
tcagtccggctgagaagtgtgttcgttagcatc

SEQ ID NO: 461301 - DNA, 33 bp, Homo sapien
tggtatggctacctctcaacgaattccctctcc

SEQ ID NO: 461302 - DNA, 33 bp, Homo sapien
tggtatggctacctcttaacgaattccctctcc

SEQ ID NO: 461303 - DNA, 33 bp, Homo sapien
ctcaacatctattccactctcctagcgcacctt

SEQ ID NO: 461304 - DNA, 33 bp, Homo sapien
ctcaacatctattccattctcctagcgcacctt

SEQ ID NO: 461305 - DNA, 33 bp, Homo sapien
aggtctctacacatgacaggagccaggtcatta

SEQ ID NO: 461306 - DNA, 33 bp, Homo sapien
aggtctctacacatgagaggagccaggtcatta

SEQ ID NO: 461307 - DNA, 33 bp, Homo sapien
gtggcaattgcaatcaaagctatcacatggcat

SEQ ID NO: 461308 - DNA, 33 bp, Homo sapien
gtggcaattgcaatcagagctatcacatggcat

SEQ ID NO: 461309 - DNA, 33 bp, Homo sapien
gaaacccatgttttcaaaagtctcccaatgttt

SEQ ID NO: 461310 - DNA, 33 bp, Homo sapien
gaaacccatgttttcacaagtctcccaatgttt

SEQ ID NO: 461311 - DNA, 33 bp, Homo sapien
ccactgcgctcgaccacaaacgtcactcttagt

SEQ ID NO: 461312 - DNA, 33 bp, Homo sapien
ccactgcgctcgaccataaacgtcactcttagt

SEQ ID NO: 461313 - DNA, 33 bp, Homo sapien
gtcctctcactgatacaagccagaccttgtctc

SEQ ID NO: 461314 - DNA, 33 bp, Homo sapien
gtcctctcactgatacgagccagaccttgtctc

SEQ ID NO: 461315 - DNA, 33 bp, Homo sapien
ctcatgccaccttctacaattttgcccctttta

SEQ ID NO: 461316 - DNA, 33 bp, Homo sapien
ctcatgccaccttctagaattttgcccctttta

SEQ ID NO: 461317 - DNA, 33 bp, Homo sapien
cttgtgggtggcttgacggtccctgtatcagac

SEQ ID NO: 461318 - DNA, 33 bp, Homo sapien
cttgtgggtggcttgatggtccctgtatcagac

SEQ ID NO: 461319 - DNA, 33 bp, Homo sapien
agactgatgctcacaacggggactcctgggaat

SEQ ID NO: 461320 - DNA, 33 bp, Homo sapien
agactgatgctcacaatggggactcctgggaat

SEQ ID NO: 461321 - DNA, 33 bp, Homo sapien
aagtatccgagaagtagctatgaaccacataaa

SEQ ID NO: 461322 - DNA, 33 bp, Homo sapien
aagtatccgagaagtatctatgaaccacataaa

SEQ ID NO: 461323 - DNA, 33 bp, Homo sapien
tggtaaaatatagagacgtccttggaatgcagc

SEQ ID NO: 461324 - DNA, 33 bp, Homo sapien
tggtaaaatatagagatgtccttggaatgcagc

SEQ ID NO: 461325 - DNA, 33 bp, Homo sapien
agacacaccaggtataagttttaaatagaggaa

SEQ ID NO: 461326 - DNA, 33 bp, Homo sapien
agacacaccaggtatatgttttaaatagaggaa

SEQ ID NO: 461327 - DNA, 33 bp, Homo sapien
agccagaaggctgtcaacagaaggaccccacag

SEQ ID NO: 461328 - DNA, 33 bp, Homo sapien
agccagaaggctgtcatcagaaggaccccacag

SEQ ID NO: 461329 - DNA, 33 bp, Homo sapien
cccactgctgtcatcaatattaccattaagtga

SEQ ID NO: 461330 - DNA, 33 bp, Homo sapien
cccactgctgtcatcagtattaccattaagtga

SEQ ID NO: 461331 - DNA, 33 bp, Homo sapien
ttatagcaatgcaaaaatggcttaatacactgg

SEQ ID NO: 461332 - DNA, 33 bp, Homo sapien
ttatagcaatgcaaaagtggcttaatacactgg

SEQ ID NO: 461333 - DNA, 33 bp, Homo sapien
gatgagcctgatcccaaaagaattagccccaaa

SEQ ID NO: 461334 - DNA, 33 bp, Homo sapien
gatgagcctgatcccagaagaattagccccaaa

SEQ ID NO: 461335 - DNA, 33 bp, Homo sapien
acgggacaaaaactcaaggagaaataagagctg

SEQ ID NO: 461336 - DNA, 33 bp, Homo sapien
acgggacaaaaactcagggagaaataagagctg

SEQ ID NO: 461337 - DNA, 33 bp, Homo sapien
gttcaccacctgaaaacagtggcctcatttggt

SEQ ID NO: 461338 - DNA, 33 bp, Homo sapien
gttcaccacctgaaaatagtggcctcatttggt

SEQ ID NO: 461339 - DNA, 33 bp, Homo sapien
tagcagtgatgggacaatcctctgagacccaag

SEQ ID NO: 461340 - DNA, 33 bp, Homo sapien
tagcagtgatgggacagtcctctgagacccaag

SEQ ID NO: 461341 - DNA, 33 bp, Homo sapien
atgcgtacaccacatgaaatattatctccttcg

SEQ ID NO: 461342 - DNA, 33 bp, Homo sapien
atgcgtacaccacatgcaatattatctccttcg

SEQ ID NO: 461343 - DNA, 33 bp, Homo sapien
tagttacattttcaggaaatcaaaaattacatg

SEQ ID NO: 461344 - DNA, 33 bp, Homo sapien
tagttacattttcagggaatcaaaaattacatg

SEQ ID NO: 461345 - DNA, 33 bp, Homo sapien
ctacagtgggaaacaccggattggatggtagct

SEQ ID NO: 461346 - DNA, 33 bp, Homo sapien
ctacagtgggaaacactggattggatggtagct

SEQ ID NO: 461347 - DNA, 33 bp, Homo sapien
ttttgctcattcttcaatcttttttagccctta

SEQ ID NO: 461348 - DNA, 33 bp, Homo sapien
ttttgctcattcttcattcttttttagccctta

SEQ ID NO: 461349 - DNA, 33 bp, Homo sapien
ttaggtctaaaaagaaacatttatcatctattc

SEQ ID NO: 461350 - DNA, 33 bp, Homo sapien
ttaggtctaaaaagaagcatttatcatctattc

SEQ ID NO: 461351 - DNA, 33 bp, Homo sapien
gatggagtttactgtaggtacattatgcctcaa

SEQ ID NO: 461352 - DNA, 33 bp, Homo sapien
gatggagtttactgtatgtacattatgcctcaa

SEQ ID NO: 461353 - DNA, 33 bp, Homo sapien
ttctaggtgcttcgtacgctgagactgggtgtg

SEQ ID NO: 461354 - DNA, 33 bp, Homo sapien
ttctaggtgcttcgtatgctgagactgggtgtg

SEQ ID NO: 461355 - DNA, 33 bp, Homo sapien
gccaggagtcataataccatcaggtttcaaata

SEQ ID NO: 461356 - DNA, 33 bp, Homo sapien
gccaggagtcataatatcatcaggtttcaaata

SEQ ID NO: 461357 - DNA, 33 bp, Homo sapien
cactaagagcccccaactagacatgaggaggct

SEQ ID NO: 461358 - DNA, 33 bp, Homo sapien
cactaagagcccccaattagacatgaggaggct

SEQ ID NO: 461359 - DNA, 33 bp, Homo sapien
gaaaataagtgtgtgcacgaacagaacaaatgg

SEQ ID NO: 461360 - DNA, 33 bp, Homo sapien
gaaaataagtgtgtgcgcgaacagaacaaatgg

SEQ ID NO: 461361 - DNA, 33 bp, Homo sapien
aggagaacatctgatgcaagaggttggtttgtg

SEQ ID NO: 461362 - DNA, 33 bp, Homo sapien
aggagaacatctgatggaagaggttggtttgtg

SEQ ID NO: 461363 - DNA, 33 bp, Homo sapien
taatcttcatcatatgcaatgttgagttttttt

SEQ ID NO: 461364 - DNA, 33 bp, Homo sapien
taatcttcatcatatgtaatgttgagttttttt

SEQ ID NO: 461365 - DNA, 33 bp, Homo sapien
atggctttctaataaagggcacctagctgagat

SEQ ID NO: 461366 - DNA, 33 bp, Homo sapien
atggctttctaataaatggcacctagctgagat

SEQ ID NO: 461367 - DNA, 33 bp, Homo sapien
catcccataggactcacgcttacctctctcatt

SEQ ID NO: 461368 - DNA, 33 bp, Homo sapien
catcccataggactcatgcttacctctctcatt

SEQ ID NO: 461369 - DNA, 33 bp, Homo sapien
atgatgtcagagactcaagaatgcgcggctggt

SEQ ID NO: 461370 - DNA, 33 bp, Homo sapien
atgatgtcagagactcgagaatgcgcggctggt

SEQ ID NO: 461371 - DNA, 33 bp, Homo sapien
caaggctggacttaaaattctaggctctgactg

SEQ ID NO: 461372 - DNA, 33 bp, Homo sapien
caaggctggacttaaacttctaggctctgactg

SEQ ID NO: 461373 - DNA, 33 bp, Homo sapien
ttctctgccagataccaggacacaacttaatca

SEQ ID NO: 461374 - DNA, 33 bp, Homo sapien
ttctctgccagataccgggacacaacttaatca

SEQ ID NO: 461375 - DNA, 33 bp, Homo sapien
aagatgtgcaggagaccatggccagcaacactg

SEQ ID NO: 461376 - DNA, 33 bp, Homo sapien
aagatgtgcaggagactatggccagcaacactg

SEQ ID NO: 461377 - DNA, 33 bp, Homo sapien
gcaacaaaaactcagaactgtgcatgaacccag

SEQ ID NO: 461378 - DNA, 33 bp, Homo sapien
gcaacaaaaactcagacctgtgcatgaacccag

SEQ ID NO: 461379 - DNA, 33 bp, Homo sapien
tctcaaagtctaacgacgaaccaccaacagggg

SEQ ID NO: 461380 - DNA, 33 bp, Homo sapien
tctcaaagtctaacgatgaaccaccaacagggg

SEQ ID NO: 461381 - DNA, 33 bp, Homo sapien
aactgtgtaccataaacagaatttactgcatga

SEQ ID NO: 461382 - DNA, 33 bp, Homo sapien
aactgtgtaccataaagagaatttactgcatga

SEQ ID NO: 461383 - DNA, 33 bp, Homo sapien
ccccttccttaccctcacactaagaacagtggc

SEQ ID NO: 461384 - DNA, 33 bp, Homo sapien
ccccttccttaccctctcactaagaacagtggc

SEQ ID NO: 461385 - DNA, 33 bp, Homo sapien
tgagaggctggtgaggaccagaactagaaagag

SEQ ID NO: 461386 - DNA, 33 bp, Homo sapien
tgagaggctggtgaggcccagaactagaaagag

SEQ ID NO: 461387 - DNA, 33 bp, Homo sapien
accatagtttgatcacacccaaattcttctcca

SEQ ID NO: 461388 - DNA, 33 bp, Homo sapien
accatagtttgatcacgcccaaattcttctcca

SEQ ID NO: 461389 - DNA, 33 bp, Homo sapien
tcacatccatcactcacctgtacttgtgtaaat

SEQ ID NO: 461390 - DNA, 33 bp, Homo sapien
tcacatccatcactcatctgtacttgtgtaaat

SEQ ID NO: 461391 - DNA, 33 bp, Homo sapien
cgagcgctggatgaaacagtggttgtgactatt

SEQ ID NO: 461392 - DNA, 33 bp, Homo sapien
cgagcgctggatgaaatagtggttgtgactatt

SEQ ID NO: 461393 - DNA, 33 bp, Homo sapien
aacagttgttctggtaagtttgggcagctcgtt

SEQ ID NO: 461394 - DNA, 33 bp, Homo sapien
aacagttgttctggtacgtttgggcagctcgtt

SEQ ID NO: 461395 - DNA, 33 bp, Homo sapien
gtgcaaccttgttactcagcagttactgagagg

SEQ ID NO: 461396 - DNA, 33 bp, Homo sapien
gtgcaaccttgttacttagcagttactgagagg

SEQ ID NO: 461397 - DNA, 33 bp, Homo sapien
cagtctggaaggcaccacagtggcaagtgcgag

SEQ ID NO: 461398 - DNA, 33 bp, Homo sapien
cagtctggaaggcaccgcagtggcaagtgcgag

SEQ ID NO: 461399 - DNA, 33 bp, Homo sapien
gtgagggggctttgtacacatccaggcaagagt

SEQ ID NO: 461400 - DNA, 33 bp, Homo sapien
gtgagggggctttgtatacatccaggcaagagt

SEQ ID NO: 461401 - DNA, 33 bp, Homo sapien
gtgtggccacgaattcccctgagtccagtgagg

SEQ ID NO: 461402 - DNA, 33 bp, Homo sapien
gtgtggccacgaattctcctgagtccagtgagg

SEQ ID NO: 461403 - DNA, 33 bp, Homo sapien
aaatatcttccgctacccgggagaccccgcggg

SEQ ID NO: 461404 - DNA, 33 bp, Homo sapien
aaatatcttccgctactcgggagaccccgcggg

SEQ ID NO: 461405 - DNA, 33 bp, Homo sapien
tgggacaactgccaacagagtgtcgtaggcgcg

SEQ ID NO: 461406 - DNA, 33 bp, Homo sapien
tgggacaactgccaacggagtgtcgtaggcgcg

SEQ ID NO: 461407 - DNA, 33 bp, Homo sapien
cgtttctaattttgtacagctggaatgtctaac

SEQ ID NO: 461408 - DNA, 33 bp, Homo sapien
cgtttctaattttgtatagctggaatgtctaac

SEQ ID NO: 461409 - DNA, 33 bp, Homo sapien
tacatatagatgaatgaaatagagttgacagtc

SEQ ID NO: 461410 - DNA, 33 bp, Homo sapien
tacatatagatgaatgcaatagagttgacagtc

SEQ ID NO: 461411 - DNA, 33 bp, Homo sapien
ctactatgtgtagtaaatagtctatcaggtgga

SEQ ID NO: 461412 - DNA, 33 bp, Homo sapien
ctactatgtgtagtaagtagtctatcaggtgga

SEQ ID NO: 461413 - DNA, 33 bp, Homo sapien
gtaacaaaccaaccctcacttagtgtcataaag

SEQ ID NO: 461414 - DNA, 33 bp, Homo sapien
gtaacaaaccaaccctgacttagtgtcataaag

SEQ ID NO: 461415 - DNA, 33 bp, Homo sapien
acttactattacctggacattttttccagcctc

SEQ ID NO: 461416 - DNA, 33 bp, Homo sapien
acttactattacctgggcattttttccagcctc

SEQ ID NO: 461417 - DNA, 33 bp, Homo sapien
gagcagatctgtctggaaggcatattctcaatc

SEQ ID NO: 461418 - DNA, 33 bp, Homo sapien
gagcagatctgtctggcaggcatattctcaatc

SEQ ID NO: 461419 - DNA, 33 bp, Homo sapien
ctgggtgtcatgacataataatttgcaggtgtc

SEQ ID NO: 461420 - DNA, 33 bp, Homo sapien
ctgggtgtcatgacatgataatttgcaggtgtc

SEQ ID NO: 461421 - DNA, 33 bp, Homo sapien
gaatttggctacagcaacagtatggtggacctc

SEQ ID NO: 461422 - DNA, 33 bp, Homo sapien
gaatttggctacagcagcagtatggtggacctc

SEQ ID NO: 461423 - DNA, 33 bp, Homo sapien; identical to SEQ ID NO: 461421

SEQ ID NO: 461424 - DNA, 33 bp, Homo sapien; identical to SEQ ID NO: 461422

SEQ ID NO: 461425 - DNA, 33 bp, Homo sapien
tttccaccacatcacccagttggactttcctgg

SEQ ID NO: 461426 - DNA, 33 bp, Homo sapien
tttccaccacatcacctagttggactttcctgg

SEQ ID NO: 461427 - DNA, 33 bp, Homo sapien
agtggggaagccagggaagacgaactgagagga

SEQ ID NO: 461428 - DNA, 33 bp, Homo sapien
agtggggaagccagggcagacgaactgagagga

SEQ ID NO: 461429 - DNA, 33 bp, Homo sapien
aggcttggctagacaagggattcctgaatgtct

SEQ ID NO: 461430 - DNA, 33 bp, Homo sapien
aggcttggctagacaatggattcctgaatgtct

SEQ ID NO: 461431 - DNA, 33 bp, Homo sapien
aatgctaaaatttacacagaaccacgaaagacc

SEQ ID NO: 461432 - DNA, 33 bp, Homo sapien
aatgctaaaatttacatagaaccacgaaagacc

SEQ ID NO: 461433 - DNA, 33 bp, Homo sapien
gccctacctcgttcacaatccacgtgggtgatt

SEQ ID NO: 461434 - DNA, 33 bp, Homo sapien
gccctacctcgttcacgatccacgtgggtgatt

SEQ ID NO: 461435 - DNA, 33 bp, Homo sapien
tttagcagaaagtgaaacaagttaagagaaggg

SEQ ID NO: 461436 - DNA, 33 bp, Homo sapien
tttagcagaaagtgaaccaagttaagagaaggg

SEQ ID NO: 461437 - DNA, 33 bp, Homo sapien
catgcccacgatgtctcacctcttttgagcctc

SEQ ID NO: 461438 - DNA, 33 bp, Homo sapien
catgcccacgatgtctgacctcttttgagcctc

SEQ ID NO: 461439 - DNA, 33 bp, Homo sapien
cttctcacccccttaacgactcctgttttcaca

SEQ ID NO: 461440 - DNA, 33 bp, Homo sapien
cttctcacccccttaatgactcctgttttcaca

SEQ ID NO: 461441 - DNA, 33 bp, Homo sapien
gaggttcccataaaaaccgagtggtgcgttggg

SEQ ID NO: 461442 - DNA, 33 bp, Homo sapien
gaggttcccataaaaatcgagtggtgcgttggg

SEQ ID NO: 461443 - DNA, 33 bp, Homo sapien
tcttgtcctgaccttgaagagcctccatgtgac

SEQ ID NO: 461444 - DNA, 33 bp, Homo sapien
tcttgtcctgaccttgcagagcctccatgtgac

SEQ ID NO: 461445 - DNA, 33 bp, Homo sapien
gtttctgcaattatacaggaagtaggaaaaaca

SEQ ID NO: 461446 - DNA, 33 bp, Homo sapien
gtttctgcaattataccggaagtaggaaaaaca

SEQ ID NO: 461447 - DNA, 33 bp, Homo sapien
gagctgctggaatgaactgaccagacaggacat

SEQ ID NO: 461448 - DNA, 33 bp, Homo sapien
gagctgctggaatgaattgaccagacaggacat

SEQ ID NO: 461449 - DNA, 33 bp, Homo sapien
cattcctcaattatagaattccaggagatagtg

SEQ ID NO: 461450 - DNA, 33 bp, Homo sapien
cattcctcaattataggattccaggagatagtg

SEQ ID NO: 461451 - DNA, 33 bp, Homo sapien
actcctgaatgctactcacagagcaggcatttc

SEQ ID NO: 461452 - DNA, 33 bp, Homo sapien
actcctgaatgctactgacagagcaggcatttc

SEQ ID NO: 461453 - DNA, 33 bp, Homo sapien
atcatgacaaagactgcatatgctgagacctca

SEQ ID NO: 461454 - DNA, 33 bp, Homo sapien
atcatgacaaagactgtatatgctgagacctca

SEQ ID NO: 461455 - DNA, 33 bp, Homo sapien
tttcacaaacctagaagtctaatatttgaacac

SEQ ID NO: 461456 - DNA, 33 bp, Homo sapien
tttcacaaacctagaattctaatatttgaacac

SEQ ID NO: 461457 - DNA, 33 bp, Homo sapien
acttagacacttactcactacatgatcttacgc

SEQ ID NO: 461458 - DNA, 33 bp, Homo sapien
acttagacacttactcgctacatgatcttacgc

SEQ ID NO: 461459 - DNA, 33 bp, Homo sapien
ataaagaagccagagacggtaaatactgtatag

SEQ ID NO: 461460 - DNA, 33 bp, Homo sapien
ataaagaagccagagatggtaaatactgtatag

SEQ ID NO: 461461 - DNA, 33 bp, Homo sapien
gactcctccaaaattacgtggaccgtacggagt

SEQ ID NO: 461462 - DNA, 33 bp, Homo sapien
gactcctccaaaattatgtggaccgtacggagt

SEQ ID NO: 461463 - DNA, 33 bp, Homo sapien
cagcaggacccagacagtagaatttaggtgtga

SEQ ID NO: 461464 - DNA, 33 bp, Homo sapien
cagcaggacccagacattagaatttaggtgtga

SEQ ID NO: 461465 - DNA, 33 bp, Homo sapien
cagatgaaatgagatcacattgaaaggatgtgg

SEQ ID NO: 461466 - DNA, 33 bp, Homo sapien
cagatgaaatgagatcgcattgaaaggatgtgg

SEQ ID NO: 461467 - DNA, 33 bp, Homo sapien
acatttcaggctttcacgcttgctcaaagattg

SEQ ID NO: 461468 - DNA, 33 bp, Homo sapien
acatttcaggctttcatgcttgctcaaagattg

SEQ ID NO: 461469 - DNA, 33 bp, Homo sapien
tatgcattagtcttaaatgagcagagggatgac

SEQ ID NO: 461470 - DNA, 33 bp, Homo sapien
tatgcattagtcttaagtgagcagagggatgac

SEQ ID NO: 461471 - DNA, 33 bp, Homo sapien
acacaattttattctcaatgaaatctgaaatgg

SEQ ID NO: 461472 - DNA, 33 bp, Homo sapien
acacaattttattctcgatgaaatctgaaatgg

SEQ ID NO: 461473 - DNA, 33 bp, Homo sapien
catctctttgcatcgaactttgcttttgtttct

SEQ ID NO: 461474 - DNA, 33 bp, Homo sapien
catctctttgcatcgatctttgcttttgtttct

SEQ ID NO: 461475 - DNA, 33 bp, Homo sapien; identical to SEQ ID NO: 461473

SEQ ID NO: 461476 - DNA, 33 bp, Homo sapien; identical to SEQ ID NO: 461474

SEQ ID NO: 461477 - DNA, 33 bp, Homo sapien
ctgagatcagaaggacaagtggagccgggcatg

SEQ ID NO: 461478 - DNA, 33 bp, Homo sapien
ctgagatcagaaggacgagtggagccgggcatg

SEQ ID NO: 461479 - DNA, 33 bp, Homo sapien
tgttgacttctctggccgactttacagtttcca

SEQ ID NO: 461480 - DNA, 33 bp, Homo sapien
tgttgacttctctggctgactttacagtttcca

SEQ ID NO: 461481 - DNA, 33 bp, Homo sapien
aaatcctaaagcttgcagaagttctttcagctg

SEQ ID NO: 461482 - DNA, 33 bp, Homo sapien
aaatcctaaagcttgcggaagttctttcagctg

SEQ ID NO: 461483 - DNA, 33 bp, Homo sapien
gacaatttgagcgccaaaataattaagtatggt

SEQ ID NO: 461484 - DNA, 33 bp, Homo sapien
gacaatttgagcgccacaataattaagtatggt

SEQ ID NO: 461485 - DNA, 33 bp, Homo sapien
gctgccttccaggaccaagtgtggcctctgact

SEQ ID NO: 461486 - DNA, 33 bp, Homo sapien
gctgccttccaggaccgagtgtggcctctgact

SEQ ID NO: 461487 - DNA, 33 bp, Homo sapien
ctcacaattcgttcaactattcaatacaaccct

SEQ ID NO: 461488 - DNA, 33 bp, Homo sapien
ctcacaattcgttcaattattcaatacaaccct

SEQ ID NO: 461489 - DNA, 33 bp, Homo sapien
gagtttcttattagagaacagattggagaaaaa

SEQ ID NO: 461490 - DNA, 33 bp, Homo sapien
gagtttcttattagaggacagattggagaaaaa

SEQ ID NO: 461491 - DNA, 33 bp, Homo sapien
aaatgggatcacttcaccttcacctgcttaaaa

SEQ ID NO: 461492 - DNA, 33 bp, Homo sapien
aaatgggatcacttcatcttcacctgcttaaaa

SEQ ID NO: 461493 - DNA, 33 bp, Homo sapien
tatttaataaacaagcaaatggtggatggggac

SEQ ID NO: 461494 - DNA, 33 bp, Homo sapien
tatttaataaacaagcgaatggtggatggggac

SEQ ID NO: 461495 - DNA, 33 bp, Homo sapien
cctaactctgctaaacacaactttaaacgtgta

SEQ ID NO: 461496 - DNA, 33 bp, Homo sapien
cctaactctgctaaacgcaactttaaacgtgta

SEQ ID NO: 461497 - DNA, 33 bp, Homo sapien
caatatatctcatttagcgccaaacataatttt

SEQ ID NO: 461498 - DNA, 33 bp, Homo sapien
caatatatctcatttatcgccaaacataatttt

SEQ ID NO: 461499 - DNA, 33 bp, Homo sapien
ggtggtagtaacagccaatcttccttctctgtg

SEQ ID NO: 461500 - DNA, 33 bp, Homo sapien
ggtggtagtaacagccgatcttccttctctgtg

SEQ ID NO: 461501 - DNA, 33 bp, Homo sapien
gaggttccgaggcgcccgatgaaagttgttgat

SEQ ID NO: 461502 - DNA, 33 bp, Homo sapien
gaggttccgaggcgccggatgaaagttgttgat

SEQ ID NO: 461503 - DNA, 33 bp, Homo sapien
gcacaccaaggttgccacaatcatagtggtggt

SEQ ID NO: 461504 - DNA, 33 bp, Homo sapien
gcacaccaaggttgccgcaatcatagtggtggt

SEQ ID NO: 461505 - DNA, 33 bp, Homo sapien
ccagagcctggaaaccacctatgttcactctag

SEQ ID NO: 461506 - DNA, 33 bp, Homo sapien
ccagagcctggaaaccgcctatgttcactctag

SEQ ID NO: 461507 - DNA, 33 bp, Homo sapien
gaacatggtgagtctcaaaggggaatgggagca

SEQ ID NO: 461508 - DNA, 33 bp, Homo sapien
gaacatggtgagtctcgaaggggaatgggagca

SEQ ID NO: 461509 - DNA, 33 bp, Homo sapien
gctcatggacttcatccacaatcaggacctcat

SEQ ID NO: 461510 - DNA, 33 bp, Homo sapien
gctcatggacttcatctacaatcaggacctcat

SEQ ID NO: 461511 - DNA, 33 bp, Homo sapien
actgcttccccttcccagacagtggtcagacca

SEQ ID NO: 461512 - DNA, 33 bp, Homo sapien
actgcttccccttcccggacagtggtcagacca

SEQ ID NO: 461513 - DNA, 33 bp, Homo sapien
acccatgctcagagcaatcggggcatctgtggt

SEQ ID NO: 461514 - DNA, 33 bp, Homo sapien
acccatgctcagagcattcggggcatctgtggt

SEQ ID NO: 461515 - DNA, 33 bp, Homo sapien
ccctctgcactgggacaggaccacagggctaag

SEQ ID NO: 461516 - DNA, 33 bp, Homo sapien
ccctctgcactgggacgggaccacagggctaag

SEQ ID NO: 461517 - DNA, 33 bp, Homo sapien
aatacacacaaaaaaacggaatgactgacagac

SEQ ID NO: 461518 - DNA, 33 bp, Homo sapien
aatacacacaaaaaaatggaatgactgacagac

SEQ ID NO: 461519 - DNA, 33 bp, Homo sapien
aacacaggatcctgccaaaatgaggtgggtgga

SEQ ID NO: 461520 - DNA, 33 bp, Homo sapien
aacacaggatcctgccgaaatgaggtgggtgga

SEQ ID NO: 461521 - DNA, 33 bp, Homo sapien
ctgctattaccgcatcactatgtcagttgaggc

SEQ ID NO: 461522 - DNA, 33 bp, Homo sapien
ctgctattaccgcatcgctatgtcagttgaggc

SEQ ID NO: 461523 - DNA, 33 bp, Homo sapien
ggactgaaggcgtacacggaattgtggttgcaa

SEQ ID NO: 461524 - DNA, 33 bp, Homo sapien
ggactgaaggcgtacatggaattgtggttgcaa

SEQ ID NO: 461525 - DNA, 33 bp, Homo sapien
ctcaggtattgcctaaagtctcacagcctccac

SEQ ID NO: 461526 - DNA, 33 bp, Homo sapien
ctcaggtattgcctaaggtctcacagcctccac

SEQ ID NO: 461527 - DNA, 33 bp, Homo sapien
caagtgctgatgctaactgattttctcagcatc

SEQ ID NO: 461528 - DNA, 33 bp, Homo sapien
caagtgctgatgctaattgattttctcagcatc

SEQ ID NO: 461529 - DNA, 33 bp, Homo sapien
ccatgaaacggtcggcaatgatggacactccca

SEQ ID NO: 461530 - DNA, 33 bp, Homo sapien
ccatgaaacggtcggcgatgatggacactccca

SEQ ID NO: 461531 - DNA, 33 bp, Homo sapien
ttagagacagagccccagagagactccgaacag

SEQ ID NO: 461532 - DNA, 33 bp, Homo sapien
ttagagacagagccccggagagactccgaacag

SEQ ID NO: 461533 - DNA, 33 bp, Homo sapien
gggttaaaccccagcaaaaagtgagcttagttc

SEQ ID NO: 461534 - DNA, 33 bp, Homo sapien
gggttaaaccccagcagaaagtgagcttagttc

SEQ ID NO: 461535 - DNA, 33 bp, Homo sapien
caaactggtcactgccaggcaggagaagctggt

SEQ ID NO: 461536 - DNA, 33 bp, Homo sapien
caaactggtcactgccgggcaggagaagctggt

SEQ ID NO: 461537 - DNA, 33 bp, Homo sapien
catgatggaaagttctcaaaggcagactggata

SEQ ID NO: 461538 - DNA, 33 bp, Homo sapien
catgatggaaagttcttaaaggcagactggata

SEQ ID NO: 461539 - DNA, 33 bp, Homo sapien
accgcggggtgcaggggaagaaggaggcaagcc

SEQ ID NO: 461540 - DNA, 33 bp, Homo sapien
accgcggggtgcagggtaagaaggaggcaagcc

SEQ ID NO: 461541 - DNA, 33 bp, Homo sapien
gtttaaggacagctgaacggaggaacccgggat

SEQ ID NO: 461542 - DNA, 33 bp, Homo sapien
gtttaaggacagctgagcggaggaacccgggat

SEQ ID NO: 461543 - DNA, 33 bp, Homo sapien
ggcatgtgtctacgtccacaccacagccatcca

SEQ ID NO: 461544 - DNA, 33 bp, Homo sapien
ggcatgtgtctacgtctacaccacagccatcca

SEQ ID NO: 461545 - DNA, 33 bp, Homo sapien
tccttcctctgtaaaactgcatctggggactct

SEQ ID NO: 461546 - DNA, 33 bp, Homo sapien
tccttcctctgtaaaattgcatctggggactct

SEQ ID NO: 461547 - DNA, 33 bp, Homo sapien
cacaaaccttgcccatcagtcggaatcaatttc

SEQ ID NO: 461548 - DNA, 33 bp, Homo sapien
cacaaaccttgcccattagtcggaatcaatttc

SEQ ID NO: 461549 - DNA, 33 bp, Homo sapien
tgtattattgtatcaacgtttcatttcctgttt

SEQ ID NO: 461550 - DNA, 33 bp, Homo sapien
tgtattattgtatcaatgtttcatttcctgttt

SEQ ID NO: 461551 - DNA, 33 bp, Homo sapien
aaggaggtcatcagacacaaggaggtcacctga

SEQ ID NO: 461552 - DNA, 33 bp, Homo sapien
aaggaggtcatcagacgcaaggaggtcacctga

SEQ ID NO: 461553 - DNA, 33 bp, Homo sapien
ggggaaaggccatagcaacttgggtatctaatc

SEQ ID NO: 461554 - DNA, 33 bp, Homo sapien
ggggaaaggccatagcgacttgggtatctaatc

SEQ ID NO: 461555 - DNA, 33 bp, Homo sapien
aaagtaggagatcaccacgcacgttctagggag

SEQ ID NO: 461556 - DNA, 33 bp, Homo sapien
aaagtaggagatcaccgcgcacgttctagggag

SEQ ID NO: 461557 - DNA, 33 bp, Homo sapien
aagcgctgtctctgagcagttcttttgcacagg

SEQ ID NO: 461558 - DNA, 33 bp, Homo sapien
aagcgctgtctctgagtagttcttttgcacagg

SEQ ID NO: 461559 - DNA, 33 bp, Homo sapien
agtcatataacacgaccaaagtctttgcaccat

SEQ ID NO: 461560 - DNA, 33 bp, Homo sapien
agtcatataacacgacgaaagtctttgcaccat

SEQ ID NO: 461561 - DNA, 33 bp, Homo sapien
cttgcgcgtctctctcactgcttattcttcata

SEQ ID NO: 461562 - DNA, 33 bp, Homo sapien
cttgcgcgtctctctcgctgcttattcttcata

SEQ ID NO: 461563 - DNA, 33 bp, Homo sapien
agggacggggagacgggaacaggaaaacaggga

SEQ ID NO: 461564 - DNA, 33 bp, Homo sapien
agggacggggagacggtaacaggaaaacaggga

SEQ ID NO: 461565 - DNA, 33 bp, Homo sapien
ccttccatacctgaaacagttttttacctggat

SEQ ID NO: 461566 - DNA, 33 bp, Homo sapien
ccttccatacctgaaatagttttttacctggat

SEQ ID NO: 461567 - DNA, 33 bp, Homo sapien
tttatcatactctacacggtccttttcaccatt

SEQ ID NO: 461568 - DNA, 33 bp, Homo sapien
tttatcatactctacatggtccttttcaccatt

SEQ ID NO: 461569 - DNA, 33 bp, Homo sapien
ggaggagggtccagaacggcaaggtgctccgtc

SEQ ID NO: 461570 - DNA, 33 bp, Homo sapien
ggaggagggtccagaatggcaaggtgctccgtc

SEQ ID NO: 461571 - DNA, 33 bp, Homo sapien
tgtgtctgcaagcacacgcgatctggtgctagt

SEQ ID NO: 461572 - DNA, 33 bp, Homo sapien
tgtgtctgcaagcacatgcgatctggtgctagt

SEQ ID NO: 461573 - DNA, 33 bp, Homo sapien
gctgagactgtctggaaggaccctgccagctcc

SEQ ID NO: 461574 - DNA, 33 bp, Homo sapien
gctgagactgtctggacggaccctgccagctcc

SEQ ID NO: 461575 - DNA, 33 bp, Homo sapien
caggccaggcatagagaagattttgttcaatgc

SEQ ID NO: 461576 - DNA, 33 bp, Homo sapien
caggccaggcatagaggagattttgttcaatgc

SEQ ID NO: 461577 - DNA, 33 bp, Homo sapien
gattccctggcagccaaagtatgactaagttca

SEQ ID NO: 461578 - DNA, 33 bp, Homo sapien
gattccctggcagccagagtatgactaagttca

SEQ ID NO: 461579 - DNA, 33 bp, Homo sapien
gtaacaatagctaacactcagatgccagacgca

SEQ ID NO: 461580 - DNA, 33 bp, Homo sapien
gtaacaatagctaacagtcagatgccagacgca

SEQ ID NO: 461581 - DNA, 33 bp, Homo sapien
tgctgtcacctatgaacggggacaggacggcca

SEQ ID NO: 461582 - DNA, 33 bp, Homo sapien
tgctgtcacctatgaatggggacaggacggcca

SEQ ID NO: 461583 - DNA, 33 bp, Homo sapien
aagattcacttccagggacttaactacagacac

SEQ ID NO: 461584 - DNA, 33 bp, Homo sapien
aagattcacttccaggtacttaactacagacac

SEQ ID NO: 461585 - DNA, 33 bp, Homo sapien
cacagtctgtcatacacgtcgcaaacatttccc

SEQ ID NO: 461586 - DNA, 33 bp, Homo sapien
cacagtctgtcatacatgtcgcaaacatttccc

SEQ ID NO: 461587 - DNA, 33 bp, Homo sapien
tgtctccctctatctcccgtctctccttcctta

SEQ ID NO: 461588 - DNA, 33 bp, Homo sapien
tgtctccctctatctctcgtctctccttcctta

SEQ ID NO: 461589 - DNA, 33 bp, Homo sapien
gttcgaaattgacacacactcgtctcagcccca

SEQ ID NO: 461590 - DNA, 33 bp, Homo sapien
gttcgaaattgacacatactcgtctcagcccca

SEQ ID NO: 461591 - DNA, 33 bp, Homo sapien
caattcaagtgcttctaaaacacaggctgagac

SEQ ID NO: 461592 - DNA, 33 bp, Homo sapien
caattcaagtgcttctgaaacacaggctgagac

SEQ ID NO: 461593 - DNA, 33 bp, Homo sapien
caaaactcttgattgacaccttgtttcccgtct

SEQ ID NO: 461594 - DNA, 33 bp, Homo sapien
caaaactcttgattgataccttgtttcccgtct

SEQ ID NO: 461595 - DNA, 33 bp, Homo sapien
ttccttttgggaaaaccgcatcacacctcctct

SEQ ID NO: 461596 - DNA, 33 bp, Homo sapien
ttccttttgggaaaactgcatcacacctcctct

SEQ ID NO: 461597 - DNA, 33 bp, Homo sapien
aagaacaagatttaaacgcagactcggccgggt

SEQ ID NO: 461598 - DNA, 33 bp, Homo sapien
aagaacaagatttaaatgcagactcggccgggt

SEQ ID NO: 461599 - DNA, 33 bp, Homo sapien
aggaaactgaggctgaaagaggtttcgtcaatt

SEQ ID NO: 461600 - DNA, 33 bp, Homo sapien
aggaaactgaggctgagagaggtttcgtcaatt

SEQ ID NO: 461601 - DNA, 33 bp, Homo sapien
gaacatcttcaggctcaaaagtgtgacttaccc

SEQ ID NO: 461602 - DNA, 33 bp, Homo sapien
gaacatcttcaggctcgaaagtgtgacttaccc

SEQ ID NO: 461603 - DNA, 33 bp, Homo sapien
gcaataagacaaaaaaagctgacagcatgccat

SEQ ID NO: 461604 - DNA, 33 bp, Homo sapien
gcaataagacaaaaaaggctgacagcatgccat

SEQ ID NO: 461605 - DNA, 33 bp, Homo sapien
gtatatatgattggacagataaataaaatgtgt

SEQ ID NO: 461606 - DNA, 33 bp, Homo sapien
gtatatatgattggactgataaataaaatgtgt

SEQ ID NO: 461607 - DNA, 33 bp, Homo sapien
catacagacatacaaacatacaattataggcac

SEQ ID NO: 461608 - DNA, 33 bp, Homo sapien
catacagacatacaaatatacaattataggcac

SEQ ID NO: 461609 - DNA, 33 bp, Homo sapien
cagtgtgtggggaagaagaggacagataaggtg

SEQ ID NO: 461610 - DNA, 33 bp, Homo sapien
cagtgtgtggggaagaggaggacagataaggtg

SEQ ID NO: 461611 - DNA, 33 bp, Homo sapien
gtacaagggagttggtaaaatatcagaaagaga

SEQ ID NO: 461612 - DNA, 33 bp, Homo sapien
gtacaagggagttggtgaaatatcagaaagaga

SEQ ID NO: 461613 - DNA, 33 bp, Homo sapien
aaatgaaataagccagaacaaatattgtatgag

SEQ ID NO: 461614 - DNA, 33 bp, Homo sapien
aaatgaaataagccaggacaaatattgtatgag

SEQ ID NO: 461615 - DNA, 33 bp, Homo sapien
gcgggagagcttcctaagagatggtaaaattcc

SEQ ID NO: 461616 - DNA, 33 bp, Homo sapien
gcgggagagcttcctaggagatggtaaaattcc

SEQ ID NO: 461617 - DNA, 33 bp, Homo sapien
acttgacccatttgtcgaaggtacaatgaactg

SEQ ID NO: 461618 - DNA, 33 bp, Homo sapien
acttgacccatttgtctaaggtacaatgaactg

SEQ ID NO: 461619 - DNA, 33 bp, Homo sapien
aaagctaacttccagaaatctagcattaggaga

SEQ ID NO: 461620 - DNA, 33 bp, Homo sapien
aaagctaacttccagacatctagcattaggaga

SEQ ID NO: 461621 - DNA, 33 bp, Homo sapien
acacacagtaagacgaagtgtgtacagagccca

SEQ ID NO: 461622 - DNA, 33 bp, Homo sapien
acacacagtaagacgaggtgtgtacagagccca

SEQ ID NO: 461623 - DNA, 33 bp, Homo sapien
cagtgtttgaaaggcactgatcaaacacgtctt

SEQ ID NO: 461624 - DNA, 33 bp, Homo sapien
cagtgtttgaaaggcattgatcaaacacgtctt

SEQ ID NO: 461625 - DNA, 33 bp, Homo sapien
gcaaatgaacagatccaccaaattcgaacggcc

SEQ ID NO: 461626 - DNA, 33 bp, Homo sapien
gcaaatgaacagatcccccaaattcgaacggcc

SEQ ID NO: 461627 - DNA, 33 bp, Homo sapien
aggagtcctctgccaacgggtgctagcgctcaa

SEQ ID NO: 461628 - DNA, 33 bp, Homo sapien
aggagtcctctgccaatgggtgctagcgctcaa

SEQ ID NO: 461629 - DNA, 33 bp, Homo sapien
tcattgtaacacaatgaaagctgatgacatggc

SEQ ID NO: 461630 - DNA, 33 bp, Homo sapien
tcattgtaacacaatggaagctgatgacatggc

SEQ ID NO: 461631 - DNA, 33 bp, Homo sapien
tagaagagcagctacaaaaggagtcggttgact

SEQ ID NO: 461632 - DNA, 33 bp, Homo sapien
tagaagagcagctacagaaggagtcggttgact

SEQ ID NO: 461633 - DNA, 33 bp, Homo sapien
tttagataaatgaatagagtttgacaacagtct

SEQ ID NO: 461634 - DNA, 33 bp, Homo sapien
tttagataaatgaatatagtttgacaacagtct

SEQ ID NO: 461635 - DNA, 33 bp, Homo sapien
ctattaataggacaggaaagtaaattctgctca

SEQ ID NO: 461636 - DNA, 33 bp, Homo sapien
ctattaataggacagggaagtaaattctgctca

SEQ ID NO: 461637 - DNA, 33 bp, Homo sapien
atagaaaattcttcacaatggttacctcggatg

SEQ ID NO: 461638 - DNA, 33 bp, Homo sapien
atagaaaattcttcaccatggttacctcggatg

SEQ ID NO: 461639 - DNA, 33 bp, Homo sapien
attacaagagaaataaacaagccaagtacacgc

SEQ ID NO: 461640 - DNA, 33 bp, Homo sapien
attacaagagaaataagcaagccaagtacacgc

SEQ ID NO: 461641 - DNA, 33 bp, Homo sapien
ccctacactagccagacgtcttccaacatttct

SEQ ID NO: 461642 - DNA, 33 bp, Homo sapien
ccctacactagccagatgtcttccaacatttct

SEQ ID NO: 461643 - DNA, 33 bp, Homo sapien
tttaagtcacagaaaaattgagtagtaggtata

SEQ ID NO: 461644 - DNA, 33 bp, Homo sapien
tttaagtcacagaaaagttgagtagtaggtata

SEQ ID NO: 461645 - DNA, 33 bp, Homo sapien
agagaaagagagatgacggaaagaggtaaaaat

SEQ ID NO: 461646 - DNA, 33 bp, Homo sapien
agagaaagagagatgatggaaagaggtaaaaat

SEQ ID NO: 461647 - DNA, 33 bp, Homo sapien
cagatgtgggaactcacagacatccaggactca

SEQ ID NO: 461648 - DNA, 33 bp, Homo sapien
cagatgtgggaactcatagacatccaggactca

SEQ ID NO: 461649 - DNA, 33 bp, Homo sapien
aaggagacagatatgaagcgaagaaaccagaaa

SEQ ID NO: 461650 - DNA, 33 bp, Homo sapien
aaggagacagatatgaggcgaagaaaccagaaa

SEQ ID NO: 461651 - DNA, 33 bp, Homo sapien
ttctggagctcctgaagctatccgcttttcctg

SEQ ID NO: 461652 - DNA, 33 bp, Homo sapien
ttctggagctcctgaatctatccgcttttcctg

SEQ ID NO: 461653 - DNA, 33 bp, Homo sapien
aggctatataattccaatgaacagaaccttcag

SEQ ID NO: 461654 - DNA, 33 bp, Homo sapien
aggctatataattccagtgaacagaaccttcag

SEQ ID NO: 461655 - DNA, 33 bp, Homo sapien
ccactaaaagactgtaaggtaagcatggaaaca

SEQ ID NO: 461656 - DNA, 33 bp, Homo sapien
ccactaaaagactgtagggtaagcatggaaaca

SEQ ID NO: 461657 - DNA, 33 bp, Homo sapien
gagtggggaagaatcacgatgaattagcaaagg

SEQ ID NO: 461658 - DNA, 33 bp, Homo sapien
gagtggggaagaatcatgatgaattagcaaagg

SEQ ID NO: 461659 - DNA, 33 bp, Homo sapien
agaattaagatttttacgcaagagtaagcatgc

SEQ ID NO: 461660 - DNA, 33 bp, Homo sapien
agaattaagatttttatgcaagagtaagcatgc

SEQ ID NO: 461661 - DNA, 33 bp, Homo sapien
tggacttgggatgaaaaattaggttaactacta

SEQ ID NO: 461662 - DNA, 33 bp, Homo sapien
tggacttgggatgaaagattaggttaactacta

SEQ ID NO: 461663 - DNA, 33 bp, Homo sapien
ggttatgaattaatgacgtattaatgacagagt

SEQ ID NO: 461664 - DNA, 33 bp, Homo sapien
ggttatgaattaatgatgtattaatgacagagt

SEQ ID NO: 461665 - DNA, 33 bp, Homo sapien
ttttaactgcactaacaaaggatcaaaggagaa

SEQ ID NO: 461666 - DNA, 33 bp, Homo sapien
ttttaactgcactaacgaaggatcaaaggagaa

SEQ ID NO: 461667 - DNA, 33 bp, Homo sapien
aacttcttacaactacaaccaagaccacacctg

SEQ ID NO: 461668 - DNA, 33 bp, Homo sapien
aacttcttacaactacgaccaagaccacacctg

SEQ ID NO: 461669 - DNA, 33 bp, Homo sapien
agggtagaaaattcaccacaagactgcctcaac

SEQ ID NO: 461670 - DNA, 33 bp, Homo sapien
agggtagaaaattcactacaagactgcctcaac

SEQ ID NO: 461671 - DNA, 33 bp, Homo sapien
caatagaatcttctgcaaggatggaaatatggt

SEQ ID NO: 461672 - DNA, 33 bp, Homo sapien
caatagaatcttctgcgaggatggaaatatggt

SEQ ID NO: 461673 - DNA, 33 bp, Homo sapien
agaaatattccagacccgcgctgtttattatgg

SEQ ID NO: 461674 - DNA, 33 bp, Homo sapien
agaaatattccagacctgcgctgtttattatgg

SEQ ID NO: 461675 - DNA, 33 bp, Homo sapien
atagaatcttctgcgacgatagaaatattccag

SEQ ID NO: 461676 - DNA, 33 bp, Homo sapien
atagaatcttctgcgaggatagaaatattccag

SEQ ID NO: 461677 - DNA, 33 bp, Homo sapien
gtatttggcctcaacaatctcatattttagaac

SEQ ID NO: 461678 - DNA, 33 bp, Homo sapien
gtatttggcctcaacagtctcatattttagaac

SEQ ID NO: 461679 - DNA, 33 bp, Homo sapien
tatttcctaatctcaacctctttcctcagctcc

SEQ ID NO: 461680 - DNA, 33 bp, Homo sapien
tatttcctaatctcaagctctttcctcagctcc

SEQ ID NO: 461681 - DNA, 33 bp, Homo sapien
tccacgtggcctcaggcatgttggtgaccctcg

SEQ ID NO: 461682 - DNA, 33 bp, Homo sapien
tccacgtggcctcaggtatgttggtgaccctcg

SEQ ID NO: 461683 - DNA, 33 bp, Homo sapien
tgaaccctggaaggaacgcaggttgcacctgac

SEQ ID NO: 461684 - DNA, 33 bp, Homo sapien
tgaaccctggaaggaatgcaggttgcacctgac

SEQ ID NO: 461685 - DNA, 33 bp, Homo sapien
tcccagtatggaaacacagtagaggctggttgg

SEQ ID NO: 461686 - DNA, 33 bp, Homo sapien
tcccagtatggaaacatagtagaggctggttgg

SEQ ID NO: 461687 - DNA, 33 bp, Homo sapien
atgatggatagacttgcatatcagacaaataat

SEQ ID NO: 461688 - DNA, 33 bp, Homo sapien
atgatggatagacttggatatcagacaaataat

SEQ ID NO: 461689 - DNA, 33 bp, Homo sapien
agccactgagcccggccagaattttggattttt

SEQ ID NO: 461690 - DNA, 33 bp, Homo sapien
agccactgagcccggcgagaattttggattttt

SEQ ID NO: 461691 - DNA, 33 bp, Homo sapien
tgagtatattggatcactgaataagtgaaaagg

SEQ ID NO: 461692 - DNA, 33 bp, Homo sapien
tgagtatattggatcattgaataagtgaaaagg

SEQ ID NO: 461693 - DNA, 33 bp, Homo sapien
ccatggtctcagaaggaaataggcaataaactc

SEQ ID NO: 461694 - DNA, 33 bp, Homo sapien
ccatggtctcagaaggcaataggcaataaactc

SEQ ID NO: 461695 - DNA, 33 bp, Homo sapien
ggattcgtggcatctccagagtttattgcctat

SEQ ID NO: 461696 - DNA, 33 bp, Homo sapien
ggattcgtggcatctctagagtttattgcctat

SEQ ID NO: 461697 - DNA, 33 bp, Homo sapien
cctctcccctggctaactcctagttatgttcct

SEQ ID NO: 461698 - DNA, 33 bp, Homo sapien
cctctcccctggctaattcctagttatgttcct

SEQ ID NO: 461699 - DNA, 33 bp, Homo sapien
caagtggttcgtaccagatgaccactttgcatt

SEQ ID NO: 461700 - DNA, 33 bp, Homo sapien
caagtggttcgtaccatatgaccactttgcatt

SEQ ID NO: 461701 - DNA, 33 bp, Homo sapien
tctactgaccaagggccgccaaactattgccag

SEQ ID NO: 461702 - DNA, 33 bp, Homo sapien
tctactgaccaagggctgccaaactattgccag

SEQ ID NO: 461703 - DNA, 33 bp, Homo sapien
acatactcacaggctccagggattaggataggg

SEQ ID NO: 461704 - DNA, 33 bp, Homo sapien
acatactcacaggctctagggattaggataggg

SEQ ID NO: 461705 - DNA, 33 bp, Homo sapien
ctagttatagaaaatacagattacctgcagcga

SEQ ID NO: 461706 - DNA, 33 bp, Homo sapien
ctagttatagaaaatatagattacctgcagcga

SEQ ID NO: 461707 - DNA, 33 bp, Homo sapien
aaagtaactttggtaacatgacaaaacatggtt

SEQ ID NO: 461708 - DNA, 33 bp, Homo sapien
aaagtaactttggtaatatgacaaaacatggtt

SEQ ID NO: 461709 - DNA, 33 bp, Homo sapien
ggcaccaaatgaatcacacatgtaatgttccta

SEQ ID NO: 461710 - DNA, 33 bp, Homo sapien
ggcaccaaatgaatcatacatgtaatgttccta

SEQ ID NO: 461711 - DNA, 33 bp, Homo sapien
agagagaaagcttagcagacccactggagaagt

SEQ ID NO: 461712 - DNA, 33 bp, Homo sapien
agagagaaagcttagccgacccactggagaagt

SEQ ID NO: 461713 - DNA, 33 bp, Homo sapien
caacctccaaatggctaactaaaggtgtgagat

SEQ ID NO: 461714 - DNA, 33 bp, Homo sapien
caacctccaaatggctgactaaaggtgtgagat

SEQ ID NO: 461715 - DNA, 33 bp, Homo sapien
gtgggtgagtcacgcacccttcccacgacttgg

SEQ ID NO: 461716 - DNA, 33 bp, Homo sapien
gtgggtgagtcacgcatccttcccacgacttgg

SEQ ID NO: 461717 - DNA, 33 bp, Homo sapien
ggcacagaggcagaaaacgaggcacagagaggt

SEQ ID NO: 461718 - DNA, 33 bp, Homo sapien
ggcacagaggcagaaaccgaggcacagagaggt

SEQ ID NO: 461719 - DNA, 33 bp, Homo sapien
taaacaagacagataaagtccttgtcctcacga

SEQ ID NO: 461720 - DNA, 33 bp, Homo sapien
taaacaagacagataaggtccttgtcctcacga

SEQ ID NO: 461721 - DNA, 33 bp, Homo sapien
ccttgcagctaggggaaggtcaagctctggtcc

SEQ ID NO: 461722 - DNA, 33 bp, Homo sapien
ccttgcagctaggggacggtcaagctctggtcc

SEQ ID NO: 461723 - DNA, 33 bp, Homo sapien
aatgctggcagctctccagacattccagtttct

SEQ ID NO: 461724 - DNA, 33 bp, Homo sapien
aatgctggcagctctcgagacattccagtttct

SEQ ID NO: 461725 - DNA, 33 bp, Homo sapien
ccttctccataggtccaattatcacccaaatgc

SEQ ID NO: 461726 - DNA, 33 bp, Homo sapien
ccttctccataggtccgattatcacccaaatgc

SEQ ID NO: 461727 - DNA, 33 bp, Homo sapien
ggacactaccctacccaatatttgcagccattg

SEQ ID NO: 461728 - DNA, 33 bp, Homo sapien
ggacactaccctacccgatatttgcagccattg

SEQ ID NO: 461729 - DNA, 33 bp, Homo sapien
aacaacaaaaacccgaagtgttaggataggctg

SEQ ID NO: 461730 - DNA, 33 bp, Homo sapien
aacaacaaaaacccgatgtgttaggataggctg

SEQ ID NO: 461731 - DNA, 33 bp, Homo sapien
gctcctttgaacttgaccgttctgcagttatat

SEQ ID NO: 461732 - DNA, 33 bp, Homo sapien
gctcctttgaacttgatcgttctgcagttatat

SEQ ID NO: 461733 - DNA, 33 bp, Homo sapien
ctgcaatgtgcagtacagctaaacccccacgcc

SEQ ID NO: 461734 - DNA, 33 bp, Homo sapien
ctgcaatgtgcagtacggctaaacccccacgcc

SEQ ID NO: 461735 - DNA, 33 bp, Homo sapien
ctcatgaggctctccacagtatagttagtagtt

SEQ ID NO: 461736 - DNA, 33 bp, Homo sapien
ctcatgaggctctccatagtatagttagtagtt

SEQ ID NO: 461737 - DNA, 33 bp, Homo sapien
cctcgaccttgatgtacgtagaccctctcctca

SEQ ID NO: 461738 - DNA, 33 bp, Homo sapien
cctcgaccttgatgtatgtagaccctctcctca

SEQ ID NO: 461739 - DNA, 33 bp, Homo sapien
agtcagggagagaactaagcctggcgcccgccc

SEQ ID NO: 461740 - DNA, 33 bp, Homo sapien
agtcagggagagaactgagcctggcgcccgccc

SEQ ID NO: 461741 - DNA, 33 bp, Homo sapien
ttttctggtctgaaataaaatgtggagataaca

SEQ ID NO: 461742 - DNA, 33 bp, Homo sapien
ttttctggtctgaaatgaaatgtggagataaca

SEQ ID NO: 461743 - DNA, 33 bp, Homo sapien
ggacagtattgaggaccggctaggaatcccagc

SEQ ID NO: 461744 - DNA, 33 bp, Homo sapien
ggacagtattgaggactggctaggaatcccagc

SEQ ID NO: 461745 - DNA, 33 bp, Homo sapien
acgggctttccctgacccaatgctccaaatcct

SEQ ID NO: 461746 - DNA, 33 bp, Homo sapien
acgggctttccctgacgcaatgctccaaatcct

SEQ ID NO: 461747 - DNA, 33 bp, Homo sapien
tttaaggcagagtagacgcgcctgcaggcttcc

SEQ ID NO: 461748 - DNA, 33 bp, Homo sapien
tttaaggcagagtagatgcgcctgcaggcttcc

SEQ ID NO: 461749 - DNA, 33 bp, Homo sapien
aagaatgtttgggaaccgcaactttatggtaaa

SEQ ID NO: 461750 - DNA, 33 bp, Homo sapien
aagaatgtttgggaactgcaactttatggtaaa

SEQ ID NO: 461751 - DNA, 33 bp, Homo sapien
ccatccccaatcctgcactctacacgccagcac

SEQ ID NO: 461752 - DNA, 33 bp, Homo sapien
ccatccccaatcctgcgctctacacgccagcac

SEQ ID NO: 461753 - DNA, 33 bp, Homo sapien
gaagataacacgtgtacgctgctcagaactggg

SEQ ID NO: 461754 - DNA, 33 bp, Homo sapien
gaagataacacgtgtatgctgctcagaactggg

SEQ ID NO: 461755 - DNA, 33 bp, Homo sapien
gagatgatgataatgacagcacctaccgcacag

SEQ ID NO: 461756 - DNA, 33 bp, Homo sapien
gagatgatgataatgatagcacctaccgcacag

SEQ ID NO: 461757 - DNA, 33 bp, Homo sapien
cgctggtctacataaactagctcttgggcagtt

SEQ ID NO: 461758 - DNA, 33 bp, Homo sapien
cgctggtctacataaattagctcttgggcagtt

SEQ ID NO: 461759 - DNA, 33 bp, Homo sapien
cgataggttgtggcaacggaaaaaatgtggatg

SEQ ID NO: 461760 - DNA, 33 bp, Homo sapien
cgataggttgtggcaatggaaaaaatgtggatg

SEQ ID NO: 461761 - DNA, 33 bp, Homo sapien
aggtcaaaacacagacccaggagccaaccgtgg

SEQ ID NO: 461762 - DNA, 33 bp, Homo sapien
aggtcaaaacacagacgcaggagccaaccgtgg

SEQ ID NO: 461763 - DNA, 33 bp, Homo sapien
tgtaaacaacctaatggagctagtggcttctgg

SEQ ID NO: 461764 - DNA, 33 bp, Homo sapien
tgtaaacaacctaatgtagctagtggcttctgg

SEQ ID NO: 461765 - DNA, 33 bp, Homo sapien
acacacatttacatagccccgccttcatcaaat

SEQ ID NO: 461766 - DNA, 33 bp, Homo sapien
acacacatttacatagtcccgccttcatcaaat

SEQ ID NO: 461767 - DNA, 33 bp, Homo sapien
aggtcgaactttaggaaccaggaaagcctccac

SEQ ID NO: 461768 - DNA, 33 bp, Homo sapien
aggtcgaactttaggagccaggaaagcctccac

SEQ ID NO: 461769 - DNA, 33 bp, Homo sapien
gcaatcgctaagagataaggtcgaactttagga

SEQ ID NO: 461770 - DNA, 33 bp, Homo sapien
gcaatcgctaagagatgaggtcgaactttagga

SEQ ID NO: 461771 - DNA, 33 bp, Homo sapien
aaaattccactgtcctcacgatcacaatcatga

SEQ ID NO: 461772 - DNA, 33 bp, Homo sapien
aaaattccactgtccttacgatcacaatcatga

SEQ ID NO: 461773 - DNA, 33 bp, Homo sapien
tgctcgatgatctccaagacaatgaggttctta

SEQ ID NO: 461774 - DNA, 33 bp, Homo sapien
tgctcgatgatctccaggacaatgaggttctta

SEQ ID NO: 461775 - DNA, 33 bp, Homo sapien
tgaatcctgtaagtgaacgattctcaaagtctg

SEQ ID NO: 461776 - DNA, 33 bp, Homo sapien
tgaatcctgtaagtgagcgattctcaaagtctg

SEQ ID NO: 461777 - DNA, 33 bp, Homo sapien
gctccttgtgtctgtaacttaatttgtggacat

SEQ ID NO: 461778 - DNA, 33 bp, Homo sapien
gctccttgtgtctgtagcttaatttgtggacat

SEQ ID NO: 461779 - DNA, 33 bp, Homo sapien
gagacaaggagttccaaacctggatttattgct

SEQ ID NO: 461780 - DNA, 33 bp, Homo sapien
gagacaaggagttccagacctggatttattgct

SEQ ID NO: 461781 - DNA, 33 bp, Homo sapien
gaccacaaagagcagacagtctacaccagtggt

SEQ ID NO: 461782 - DNA, 33 bp, Homo sapien
gaccacaaagagcagagagtctacaccagtggt

SEQ ID NO: 461783 - DNA, 33 bp, Homo sapien
tccttgtcttgggtaacacagcatgaaaaattt

SEQ ID NO: 461784 - DNA, 33 bp, Homo sapien
tccttgtcttgggtaatacagcatgaaaaattt

SEQ ID NO: 461785 - DNA, 33 bp, Homo sapien
atgctctgtttgaataactacaatgatgcagaa

SEQ ID NO: 461786 - DNA, 33 bp, Homo sapien
atgctctgtttgaatacctacaatgatgcagaa

SEQ ID NO: 461787 - DNA, 33 bp, Homo sapien
taaaaaattgtgtttacgatgttgagcttctgt

SEQ ID NO: 461788 - DNA, 33 bp, Homo sapien
taaaaaattgtgtttatgatgttgagcttctgt

SEQ ID NO: 461789 - DNA, 33 bp, Homo sapien
aacaaaatgggatggaaaaacctcattgtttca

SEQ ID NO: 461790 - DNA, 33 bp, Homo sapien
aacaaaatgggatggagaaacctcattgtttca

SEQ ID NO: 461791 - DNA, 33 bp, Homo sapien
ggatgcacgctctttcgcctctgcatctttgga

SEQ ID NO: 461792 - DNA, 33 bp, Homo sapien
ggatgcacgctctttctcctctgcatctttgga

SEQ ID NO: 461793 - DNA, 33 bp, Homo sapien
ttaaattgattgctcccattggtatcatacgat

SEQ ID NO: 461794 - DNA, 33 bp, Homo sapien
ttaaattgattgctccgattggtatcatacgat

SEQ ID NO: 461795 - DNA, 33 bp, Homo sapien
ctagagaacctatacacaaaaaggcaatgagca

SEQ ID NO: 461796 - DNA, 33 bp, Homo sapien
ctagagaacctatacagaaaaaggcaatgagca

SEQ ID NO: 461797 - DNA, 33 bp, Homo sapien
tcaggaacagcacggaacaataatggctctgcc

SEQ ID NO: 461798 - DNA, 33 bp, Homo sapien
tcaggaacagcacggatcaataatggctctgcc

SEQ ID NO: 461799 - DNA, 33 bp, Homo sapien
aatgtgagatgtcacaaagggtctcagaaacac

SEQ ID NO: 461800 - DNA, 33 bp, Homo sapien
aatgtgagatgtcacagagggtctcagaaacac

SEQ ID NO: 461801 - DNA, 33 bp, Homo sapien
ataccctggaaaacaacaacagaatttttacta

SEQ ID NO: 461802 - DNA, 33 bp, Homo sapien
ataccctggaaaacaagaacagaatttttacta

SEQ ID NO: 461803 - DNA, 33 bp, Homo sapien
tctctgtttcccactacatgctgctctttccat

SEQ ID NO: 461804 - DNA, 33 bp, Homo sapien
tctctgtttcccactatatgctgctctttccat

SEQ ID NO: 461805 - DNA, 33 bp, Homo sapien
cattagactacaaggaccacggaaactgttggt

SEQ ID NO: 461806 - DNA, 33 bp, Homo sapien
cattagactacaaggatcacggaaactgttggt

SEQ ID NO: 461807 - DNA, 33 bp, Homo sapien
tcctgattcatagaggacagacttcttgttctg

SEQ ID NO: 461808 - DNA, 33 bp, Homo sapien
tcctgattcatagagggcagacttcttgttctg

SEQ ID NO: 461809 - DNA, 33 bp, Homo sapien
ctgctctgatctgggcaccatgctatgggattg

SEQ ID NO: 461810 - DNA, 33 bp, Homo sapien
ctgctctgatctgggcgccatgctatgggattg

SEQ ID NO: 461811 - DNA, 33 bp, Homo sapien
acattaagtaatggtacgatatgctaacatcaa

SEQ ID NO: 461812 - DNA, 33 bp, Homo sapien
acattaagtaatggtatgatatgctaacatcaa

SEQ ID NO: 461813 - DNA, 33 bp, Homo sapien
cctcaattgtatttataaagagtgccacagtga

SEQ ID NO: 461814 - DNA, 33 bp, Homo sapien
cctcaattgtatttatgaagagtgccacagtga

SEQ ID NO: 461815 - DNA, 33 bp, Homo sapien
tggcctagtttgacaacagtcttgcaaatatcc

SEQ ID NO: 461816 - DNA, 33 bp, Homo sapien
tggcctagtttgacaatagtcttgcaaatatcc

SEQ ID NO: 461817 - DNA, 33 bp, Homo sapien
tgatggatttctacagaatttttgtcactaagt

SEQ ID NO: 461818 - DNA, 33 bp, Homo sapien
tgatggatttctacaggatttttgtcactaagt

SEQ ID NO: 461819 - DNA, 33 bp, Homo sapien
tcatgttctggcgtcacaatttgttccaatgtt

SEQ ID NO: 461820 - DNA, 33 bp, Homo sapien
tcatgttctggcgtcagaatttgttccaatgtt

SEQ ID NO: 461821 - DNA, 33 bp, Homo sapien
gcaatgtgagatcctcaattcgatcttggagaa

SEQ ID NO: 461822 - DNA, 33 bp, Homo sapien
gcaatgtgagatcctcgattcgatcttggagaa

SEQ ID NO: 461823 - DNA, 33 bp, Homo sapien
tctcactattgttatacagtcacgtcattttga

SEQ ID NO: 461824 - DNA, 33 bp, Homo sapien
tctcactattgttatatagtcacgtcattttga

SEQ ID NO: 461825 - DNA, 33 bp, Homo sapien
ttctgggcagatacatcaggctcttgctgtgac

SEQ ID NO: 461826 - DNA, 33 bp, Homo sapien
ttctgggcagatacattaggctcttgctgtgac

SEQ ID NO: 461827 - DNA, 33 bp, Homo sapien
tagagatttacagatcaaaacaagaattctggg

SEQ ID NO: 461828 - DNA, 33 bp, Homo sapien
tagagatttacagatcgaaacaagaattctggg

SEQ ID NO: 461829 - DNA, 33 bp, Homo sapien
tggacacactgtaatcacacaaacaaaattgta

SEQ ID NO: 461830 - DNA, 33 bp, Homo sapien
tggacacactgtaatcgcacaaacaaaattgta

SEQ ID NO: 461831 - DNA, 33 bp, Homo sapien
taacaccatcttggaaaaaagccctacaatttt

SEQ ID NO: 461832 - DNA, 33 bp, Homo sapien
taacaccatcttggaacaaagccctacaatttt

SEQ ID NO: 461833 - DNA, 33 bp, Homo sapien
caagcatctttaaacacacaagtaggtttacca

SEQ ID NO: 461834 - DNA, 33 bp, Homo sapien
caagcatctttaaacagacaagtaggtttacca

SEQ ID NO: 461835 - DNA, 33 bp, Homo sapien
agaagatcttcgtaggaaaaacaccaagagttg

SEQ ID NO: 461836 - DNA, 33 bp, Homo sapien
agaagatcttcgtagggaaaacaccaagagttg

SEQ ID NO: 461837 - DNA, 33 bp, Homo sapien
ccaccacgacatttcaaagttaataaagtgatc

SEQ ID NO: 461838 - DNA, 33 bp, Homo sapien
ccaccacgacatttcagagttaataaagtgatc

SEQ ID NO: 461839 - DNA, 33 bp, Homo sapien
ccaccctcaccataaacatccaagtgtggtttg

SEQ ID NO: 461840 - DNA, 33 bp, Homo sapien
ccaccctcaccataaatatccaagtgtggtttg

SEQ ID NO: 461841 - DNA, 33 bp, Homo sapien
gagactgggatgcagaagagattcaaaggccgg

SEQ ID NO: 461842 - DNA, 33 bp, Homo sapien
gagactgggatgcagaggagattcaaaggccgg

SEQ ID NO: 461843 - DNA, 33 bp, Homo sapien
aatcccagtagtttgggaggccgagagaagagg

SEQ ID NO: 461844 - DNA, 33 bp, Homo sapien
aatcccagtagtttggtaggccgagagaagagg

SEQ ID NO: 461845 - DNA, 33 bp, Homo sapien
taattgtacctataaagtcacaacgctgtaatc

SEQ ID NO: 461846 - DNA, 33 bp, Homo sapien
taattgtacctataaattcacaacgctgtaatc

SEQ ID NO: 461847 - DNA, 33 bp, Homo sapien
ggttccagggaggtaacgcaggtaaaatgaata

SEQ ID NO: 461848 - DNA, 33 bp, Homo sapien
ggttccagggaggtaatgcaggtaaaatgaata

SEQ ID NO: 461849 - DNA, 33 bp, Homo sapien
gagtcaggtcgaggacaagaaagcacattgatc

SEQ ID NO: 461850 - DNA, 33 bp, Homo sapien
gagtcaggtcgaggacgagaaagcacattgatc

SEQ ID NO: 461851 - DNA, 33 bp, Homo sapien
caccccgttccttcaccgactcctcacacgcca

SEQ ID NO: 461852 - DNA, 33 bp, Homo sapien
caccccgttccttcactgactcctcacacgcca

SEQ ID NO: 461853 - DNA, 33 bp, Homo sapien
ggctgagagatcctaccggacagggatttgtgt

SEQ ID NO: 461854 - DNA, 33 bp, Homo sapien
ggctgagagatcctactggacagggatttgtgt

SEQ ID NO: 461855 - DNA, 33 bp, Homo sapien
cggaaggactgagtaaatgcaggacggggagag

SEQ ID NO: 461856 - DNA, 33 bp, Homo sapien
cggaaggactgagtaagtgcaggacggggagag

SEQ ID NO: 461857 - DNA, 33 bp, Homo sapien
ttcaatcgtattctcacgtcatttgttctgaga

SEQ ID NO: 461858 - DNA, 33 bp, Homo sapien
ttcaatcgtattctcatgtcatttgttctgaga

SEQ ID NO: 461859 - DNA, 33 bp, Homo sapien
acaacagaaatgtatccccccacagttgtagag

SEQ ID NO: 461860 - DNA, 33 bp, Homo sapien
acaacagaaatgtatcgccccacagttgtagag

SEQ ID NO: 461861 - DNA, 33 bp, Homo sapien
gggaaaaaaataatgcaagtgaatgatcagtta

SEQ ID NO: 461862 - DNA, 33 bp, Homo sapien
gggaaaaaaataatgcgagtgaatgatcagtta

SEQ ID NO: 461863 - DNA, 33 bp, Homo sapien
ccctagagggtagattaaaccgcctaacttaca

SEQ ID NO: 461864 - DNA, 33 bp, Homo sapien
ccctagagggtagattgaaccgcctaacttaca

SEQ ID NO: 461865 - DNA, 33 bp, Homo sapien
ggtagacttgtaagtaaaatgatacggtatatg

SEQ ID NO: 461866 - DNA, 33 bp, Homo sapien
ggtagacttgtaagtacaatgatacggtatatg

SEQ ID NO: 461867 - DNA, 33 bp, Homo sapien
aatggcattttatgacagaatactttcctaacc

SEQ ID NO: 461868 - DNA, 33 bp, Homo sapien
aatggcattttatgacggaatactttcctaacc

SEQ ID NO: 461869 - DNA, 33 bp, Homo sapien
agccacggcccgagtgacaaaccacagtcttct

SEQ ID NO: 461870 - DNA, 33 bp, Homo sapien
agccacggcccgagtgccaaaccacagtcttct

SEQ ID NO: 461871 - DNA, 33 bp, Homo sapien
acatgcagggttgtcaagggtgagatagagtca

SEQ ID NO: 461872 - DNA, 33 bp, Homo sapien
acatgcagggttgtcaggggtgagatagagtca

SEQ ID NO: 461873 - DNA, 33 bp, Homo sapien
ccccagcaaggagtcacatttctcccaccagtg

SEQ ID NO: 461874 - DNA, 33 bp, Homo sapien
ccccagcaaggagtcagatttctcccaccagtg

SEQ ID NO: 461875 - DNA, 33 bp, Homo sapien
catgagggctaccctacagcatcctgtttacag

SEQ ID NO: 461876 - DNA, 33 bp, Homo sapien
catgagggctaccctagagcatcctgtttacag

SEQ ID NO: 461877 - DNA, 33 bp, Homo sapien
gtggtcctttcactacccacttcctgaggttct

SEQ ID NO: 461878 - DNA, 33 bp, Homo sapien
gtggtcctttcactactcacttcctgaggttct

SEQ ID NO: 461879 - DNA, 33 bp, Homo sapien
ttcctccactcaaatcaagcgatatcagcacgc

SEQ ID NO: 461880 - DNA, 33 bp, Homo sapien
ttcctccactcaaatcgagcgatatcagcacgc

SEQ ID NO: 461881 - DNA, 33 bp, Homo sapien
atccatagaaacagaacggagattggtggttac

SEQ ID NO: 461882 - DNA, 33 bp, Homo sapien
atccatagaaacagaatggagattggtggttac

SEQ ID NO: 461883 - DNA, 33 bp, Homo sapien
gcattgaacacacttacctctaggacaaatatc

SEQ ID NO: 461884 - DNA, 33 bp, Homo sapien
gcattgaacacacttatctctaggacaaatatc

SEQ ID NO: 461885 - DNA, 33 bp, Homo sapien
gacaaatatctggacaaagaattgcttggtcag

SEQ ID NO: 461886 - DNA, 33 bp, Homo sapien
gacaaatatctggacatagaattgcttggtcag

SEQ ID NO: 461887 - DNA, 33 bp, Homo sapien
caagaaggtaaagagaaggaaggttatgaaacc

SEQ ID NO: 461888 - DNA, 33 bp, Homo sapien
caagaaggtaaagagatggaaggttatgaaacc

SEQ ID NO: 461889 - DNA, 33 bp, Homo sapien
cccttagcaccttgagcaaccaggctgtgagtt

SEQ ID NO: 461890 - DNA, 33 bp, Homo sapien
cccttagcaccttgaggaaccaggctgtgagtt

SEQ ID NO: 461891 - DNA, 33 bp, Homo sapien
ccttggaccttcaaaaaccaaagagatcaggga

SEQ ID NO: 461892 - DNA, 33 bp, Homo sapien
ccttggaccttcaaaagccaaagagatcaggga

SEQ ID NO: 461893 - DNA, 33 bp, Homo sapien
cattgattggcacacaaattggcagatactaac

SEQ ID NO: 461894 - DNA, 33 bp, Homo sapien
cattgattggcacacagattggcagatactaac

SEQ ID NO: 461895 - DNA, 33 bp, Homo sapien
acacccatcccgaagaacggctatgtacaagga

SEQ ID NO: 461896 - DNA, 33 bp, Homo sapien
acacccatcccgaagaccggctatgtacaagga

SEQ ID NO: 461897 - DNA, 33 bp, Homo sapien
ccaatccccaaaaaggacatctccaaaaagatc

SEQ ID NO: 461898 - DNA, 33 bp, Homo sapien
ccaatccccaaaaagggcatctccaaaaagatc

SEQ ID NO: 461899 - DNA, 33 bp, Homo sapien
ggaattggagacctagaagccggaagagtaagc

SEQ ID NO: 461900 - DNA, 33 bp, Homo sapien
ggaattggagacctaggagccggaagagtaagc

SEQ ID NO: 461901 - DNA, 33 bp, Homo sapien
gggtcctcagttctagaaatctggtatgtgttt

SEQ ID NO: 461902 - DNA, 33 bp, Homo sapien
gggtcctcagttctaggaatctggtatgtgttt

SEQ ID NO: 461903 - DNA, 33 bp, Homo sapien
gggttttctgtattcccgctttttcatatttac

SEQ ID NO: 461904 - DNA, 33 bp, Homo sapien
gggttttctgtattcctgctttttcatatttac

SEQ ID NO: 461905 - DNA, 33 bp, Homo sapien
gctgtcccattggtaactgatctctgaattagt

SEQ ID NO: 461906 - DNA, 33 bp, Homo sapien
gctgtcccattggtaattgatctctgaattagt

SEQ ID NO: 461907 - DNA, 33 bp, Homo sapien
tagttttaacagcatgcacctggtctctacaac

SEQ ID NO: 461908 - DNA, 33 bp, Homo sapien
tagttttaacagcatggacctggtctctacaac

SEQ ID NO: 461909 - DNA, 33 bp, Homo sapien
gcgaactcactcatgactacgagaacagcatgg

SEQ ID NO: 461910 - DNA, 33 bp, Homo sapien
gcgaactcactcatgattacgagaacagcatgg

SEQ ID NO: 461911 - DNA, 33 bp, Homo sapien
aaaaaagaaaggtttcacagaggaggcgaccct

SEQ ID NO: 461912 - DNA, 33 bp, Homo sapien
aaaaaagaaaggtttcgcagaggaggcgaccct

SEQ ID NO: 461913 - DNA, 33 bp, Homo sapien
tgtgtggattgcaggccgaccacgtgtattatt

SEQ ID NO: 461914 - DNA, 33 bp, Homo sapien
tgtgtggattgcaggctgaccacgtgtattatt

SEQ ID NO: 461915 - DNA, 33 bp, Homo sapien
tcagtgacacttacaaaaaaaagagacagaaaa

SEQ ID NO: 461916 - DNA, 33 bp, Homo sapien
tcagtgacacttacaagaaaaagagacagaaaa

SEQ ID NO: 461917 - DNA, 33 bp, Homo sapien
aaatatctcctaaagcacttcaattatggacat

SEQ ID NO: 461918 - DNA, 33 bp, Homo sapien
aaatatctcctaaagcgcttcaattatggacat

SEQ ID NO: 461919 - DNA, 33 bp, Homo sapien
tgggacggtagctcagaatatccacagctgact

SEQ ID NO: 461920 - DNA, 33 bp, Homo sapien
tgggacggtagctcagcatatccacagctgact

SEQ ID NO: 461921 - DNA, 33 bp, Homo sapien
aacaaaacaaaacgagaatgcaattgacgcttg

SEQ ID NO: 461922 - DNA, 33 bp, Homo sapien
aacaaaacaaaacgaggatgcaattgacgcttg

SEQ ID NO: 461923 - DNA, 33 bp, Homo sapien
cccaaattgcctacacaccgcagctaggaattc

SEQ ID NO: 461924 - DNA, 33 bp, Homo sapien
cccaaattgcctacacgccgcagctaggaattc

SEQ ID NO: 461925 - DNA, 33 bp, Homo sapien
cctgggtgcccgagaaagtctgagctaggatca

SEQ ID NO: 461926 - DNA, 33 bp, Homo sapien
cctgggtgcccgagaaggtctgagctaggatca

SEQ ID NO: 461927 - DNA, 33 bp, Homo sapien
ttttttttgaaaagcactgagcccagcaaagtg

SEQ ID NO: 461928 - DNA, 33 bp, Homo sapien
ttttttttgaaaagcattgagcccagcaaagtg

SEQ ID NO: 461929 - DNA, 33 bp, Homo sapien
taaactacaattcccaataggctttgcaatagg

SEQ ID NO: 461930 - DNA, 33 bp, Homo sapien
taaactacaattcccagtaggctttgcaatagg

SEQ ID NO: 461931 - DNA, 33 bp, Homo sapien
tagcagggagcttagggacagggggactccatt

SEQ ID NO: 461932 - DNA, 33 bp, Homo sapien
tagcagggagcttaggtacagggggactccatt

SEQ ID NO: 461933 - DNA, 33 bp, Homo sapien
acctgtgaggtcacagaaggtgcagaacctgag

SEQ ID NO: 461934 - DNA, 33 bp, Homo sapien
acctgtgaggtcacaggaggtgcagaacctgag

SEQ ID NO: 461935 - DNA, 33 bp, Homo sapien
tctttacctctttaccaagtctcacaagatccc

SEQ ID NO: 461936 - DNA, 33 bp, Homo sapien
tctttacctctttacctagtctcacaagatccc

SEQ ID NO: 461937 - DNA, 33 bp, Homo sapien
gagtgggataaagaccaagagacaaggccgggc

SEQ ID NO: 461938 - DNA, 33 bp, Homo sapien
gagtgggataaagaccgagagacaaggccgggc

SEQ ID NO: 461939 - DNA, 33 bp, Homo sapien
ttcttcaattttcaaaacaaactgatccttcaa

SEQ ID NO: 461940 - DNA, 33 bp, Homo sapien
ttcttcaattttcaaatcaaactgatccttcaa

SEQ ID NO: 461941 - DNA, 33 bp, Homo sapien
cactctgctaaatcacactgcccactttacttc

SEQ ID NO: 461942 - DNA, 33 bp, Homo sapien
cactctgctaaatcactctgcccactttacttc

SEQ ID NO: 461943 - DNA, 33 bp, Homo sapien
ccacttcttccgcgaactggccgaggagaagcg

SEQ ID NO: 461944 - DNA, 33 bp, Homo sapien
ccacttcttccgcgaattggccgaggagaagcg

SEQ ID NO: 461945 - DNA, 33 bp, Homo sapien; identical to SEQ ID NO: 461943

SEQ ID NO: 461946 - DNA, 33 bp, Homo sapien; identical to SEQ ID NO: 461944

SEQ ID NO: 461947 - DNA, 33 bp, Homo sapien
agttcaacgtggacaaagaagcaggggagaggc

SEQ ID NO: 461948 - DNA, 33 bp, Homo sapien
agttcaacgtggacaaggaagcaggggagaggc

SEQ ID NO: 461949 - DNA, 33 bp, Homo sapien
ggccgttgcgccaagaggattttgaaagttgga

SEQ ID NO: 461950 - DNA, 33 bp, Homo sapien
ggccgttgcgccaagatgattttgaaagttgga

SEQ ID NO: 461951 - DNA, 33 bp, Homo sapien
ctgtcaacatgggaagactcggtatattcttgt

SEQ ID NO: 461952 - DNA, 33 bp, Homo sapien
ctgtcaacatgggaagcctcggtatattcttgt

SEQ ID NO: 461953 - DNA, 33 bp, Homo sapien
gtgaaggagcggcccaacttggagatcttgccc

SEQ ID NO: 461954 - DNA, 33 bp, Homo sapien
gtgaaggagcggcccagcttggagatcttgccc

SEQ ID NO: 461955 - DNA, 33 bp, Homo sapien; identical to SEQ ID NO: 461953

SEQ ID NO: 461956 - DNA, 33 bp, Homo sapien; identical to SEQ ID NO: 461954

SEQ ID NO: 461957 - DNA, 33 bp, Homo sapien
attctaggatgaaatcagaaccctggaagcccc

SEQ ID NO: 461958 - DNA, 33 bp, Homo sapien
attctaggatgaaatcggaaccctggaagcccc

SEQ ID NO: 461959 - DNA, 33 bp, Homo sapien
ggagatggggttcaaacgggaaatcttacttgg

SEQ ID NO: 461960 - DNA, 33 bp, Homo sapien
ggagatggggttcaaatgggaaatcttacttgg

SEQ ID NO: 461961 - DNA, 33 bp, Homo sapien
ttccaccatgtctcaacgaaacttaacaccaca

SEQ ID NO: 461962 - DNA, 33 bp, Homo sapien
ttccaccatgtctcaatgaaacttaacaccaca

SEQ ID NO: 461963 - DNA, 33 bp, Homo sapien
gagaaaagctggcacacagtcggaagttacaag

SEQ ID NO: 461964 - DNA, 33 bp, Homo sapien
gagaaaagctggcacatagtcggaagttacaag

SEQ ID NO: 461965 - DNA, 33 bp, Homo sapien
ggctccagcacataataaccctgactcctgccg

SEQ ID NO: 461966 - DNA, 33 bp, Homo sapien
ggctccagcacataatgaccctgactcctgccg

SEQ ID NO: 461967 - DNA, 33 bp, Homo sapien
aatgtcaggggcaagcaaatattaagacggcct

SEQ ID NO: 461968 - DNA, 33 bp, Homo sapien
aatgtcaggggcaagcgaatattaagacggcct

SEQ ID NO: 461969 - DNA, 33 bp, Homo sapien
tctttagcaactgcaaatggaaacagtatggca

SEQ ID NO: 461970 - DNA, 33 bp, Homo sapien
tctttagcaactgcaagtggaaacagtatggca

SEQ ID NO: 461971 - DNA, 33 bp, Homo sapien
ggcaggtgccctataagaagaatcattcctttt

SEQ ID NO: 461972 - DNA, 33 bp, Homo sapien
ggcaggtgccctataataagaatcattcctttt

SEQ ID NO: 461973 - DNA, 33 bp, Homo sapien
ttgcaacatagtggccaaactggactgtgatct

SEQ ID NO: 461974 - DNA, 33 bp, Homo sapien
ttgcaacatagtggccgaactggactgtgatct

SEQ ID NO: 461975 - DNA, 33 bp, Homo sapien
agaaaccggaacaacaacactggagtcgccggg

SEQ ID NO: 461976 - DNA, 33 bp, Homo sapien
agaaaccggaacaacagcactggagtcgccggg

SEQ ID NO: 461977 - DNA, 33 bp, Homo sapien
tgtcccagtcagcagaccatacgtcccggagcc

SEQ ID NO: 461978 - DNA, 33 bp, Homo sapien
tgtcccagtcagcagagcatacgtcccggagcc

SEQ ID NO: 461979 - DNA, 33 bp, Homo sapien
tccaccagtaccaactaagtgacttcaggcaag

SEQ ID NO: 461980 - DNA, 33 bp, Homo sapien
tccaccagtaccaactgagtgacttcaggcaag

SEQ ID NO: 461981 - DNA, 33 bp, Homo sapien
caggctaactttggagcccaactttaacctgac

SEQ ID NO: 461982 - DNA, 33 bp, Homo sapien
caggctaactttggagtccaactttaacctgac

SEQ ID NO: 461983 - DNA, 33 bp, Homo sapien
aatgtacgggggttccaatttcttcacatccat

SEQ ID NO: 461984 - DNA, 33 bp, Homo sapien
aatgtacgggggttccgatttcttcacatccat

SEQ ID NO: 461985 - DNA, 33 bp, Homo sapien
gttagcttcgactggacggcagctgatacaata

SEQ ID NO: 461986 - DNA, 33 bp, Homo sapien
gttagcttcgactggatggcagctgatacaata

SEQ ID NO: 461987 - DNA, 33 bp, Homo sapien
aaacagagaaattcataaaagcaacttcattag

SEQ ID NO: 461988 - DNA, 33 bp, Homo sapien
aaacagagaaattcatgaaagcaacttcattag

SEQ ID NO: 461989 - DNA, 33 bp, Homo sapien
gatgataaaggaaacaaggtaagatatcacaat

SEQ ID NO: 461990 - DNA, 33 bp, Homo sapien
gatgataaaggaaacacggtaagatatcacaat

SEQ ID NO: 461991 - DNA, 33 bp, Homo sapien
agaaaggatgttattacgaatggaaaggtctga

SEQ ID NO: 461992 - DNA, 33 bp, Homo sapien
agaaaggatgttattatgaatggaaaggtctga

SEQ ID NO: 461993 - DNA, 33 bp, Homo sapien
acgagggatgttgtccacgttgaggttatcagg

SEQ ID NO: 461994 - DNA, 33 bp, Homo sapien
acgagggatgttgtccgcgttgaggttatcagg

SEQ ID NO: 461995 - DNA, 33 bp, Homo sapien
ctcccagccttgaaacgccttccttaagctcag

SEQ ID NO: 461996 - DNA, 33 bp, Homo sapien
ctcccagccttgaaactccttccttaagctcag

SEQ ID NO: 461997 - DNA, 33 bp, Homo sapien
catgagtgtttttctcaccacttctgttcaata

SEQ ID NO: 461998 - DNA, 33 bp, Homo sapien
catgagtgtttttctcgccacttctgttcaata

SEQ ID NO: 461999 - DNA, 33 bp, Homo sapien
gggaatacagcatattaaaacctgtggaggctg

SEQ ID NO: 462000 - DNA, 33 bp, Homo sapien
gggaatacagcatattgaaacctgtggaggctg

SEQ ID NO: 462001 - DNA, 33 bp, Homo sapien
atgatttattgtaaagcaaatgccccaaccatc

SEQ ID NO: 462002 - DNA, 33 bp, Homo sapien
atgatttattgtaaagtaaatgccccaaccatc

SEQ ID NO: 462003 - DNA, 33 bp, Homo sapien
tagtcatgagggccctaactcattgacatagca

SEQ ID NO: 462004 - DNA, 33 bp, Homo sapien
tagtcatgagggccctgactcattgacatagca

SEQ ID NO: 462005 - DNA, 33 bp, Homo sapien
cttgcaacaacaaaaactgacagataagtggga

SEQ ID NO: 462006 - DNA, 33 bp, Homo sapien
cttgcaacaacaaaaattgacagataagtggga

SEQ ID NO: 462007 - DNA, 33 bp, Homo sapien
ataaatacgtgttgaaagattgaatgattccca

SEQ ID NO: 462008 - DNA, 33 bp, Homo sapien
ataaatacgtgttgaaggattgaatgattccca

SEQ ID NO: 462009 - DNA, 33 bp, Homo sapien
gcaagactccatgtcaataaatacatacataca

SEQ ID NO: 462010 - DNA, 33 bp, Homo sapien
gcaagactccatgtcagtaaatacatacataca

SEQ ID NO: 462011 - DNA, 33 bp, Homo sapien
gactgattcctatgacaacctggtttccttgtg

SEQ ID NO: 462012 - DNA, 33 bp, Homo sapien
gactgattcctatgacgacctggtttccttgtg

SEQ ID NO: 462013 - DNA, 33 bp, Homo sapien
cccaaagagcttgataaatccatatgataccca

SEQ ID NO: 462014 - DNA, 33 bp, Homo sapien
cccaaagagcttgatacatccatatgataccca

SEQ ID NO: 462015 - DNA, 33 bp, Homo sapien
aatttcactcactgcaaagaatcctggaagagt

SEQ ID NO: 462016 - DNA, 33 bp, Homo sapien
aatttcactcactgcagagaatcctggaagagt

SEQ ID NO: 462017 - DNA, 33 bp, Homo sapien
gattattattatgctactagacagttcatgtaa

SEQ ID NO: 462018 - DNA, 33 bp, Homo sapien
gattattattatgctagtagacagttcatgtaa

SEQ ID NO: 462019 - DNA, 33 bp, Homo sapien
tctgcagtaacctgagacagctctgtaggttct

SEQ ID NO: 462020 - DNA, 33 bp, Homo sapien
tctgcagtaacctgagccagctctgtaggttct

SEQ ID NO: 462021 - DNA, 33 bp, Homo sapien
ttgggttctcatttaactctcccagtatctctg

SEQ ID NO: 462022 - DNA, 33 bp, Homo sapien
ttgggttctcatttaattctcccagtatctctg

SEQ ID NO: 462023 - DNA, 33 bp, Homo sapien
acccagataagtgtacaagatctgtggaacatc

SEQ ID NO: 462024 - DNA, 33 bp, Homo sapien
acccagataagtgtacgagatctgtggaacatc

SEQ ID NO: 462025 - DNA, 33 bp, Homo sapien
acagcccaggtcaagagagtagacagtttcagc

SEQ ID NO: 462026 - DNA, 33 bp, Homo sapien
acagcccaggtcaagatagtagacagtttcagc

SEQ ID NO: 462027 - DNA, 33 bp, Homo sapien
gccttcccaaaggatacaggctggggctgacag

SEQ ID NO: 462028 - DNA, 33 bp, Homo sapien
gccttcccaaaggatataggctggggctgacag

SEQ ID NO: 462029 - DNA, 33 bp, Homo sapien
agagacacatattcccaacggatttgacgatgg

SEQ ID NO: 462030 - DNA, 33 bp, Homo sapien
agagacacatattccccacggatttgacgatgg

SEQ ID NO: 462031 - DNA, 33 bp, Homo sapien
tgtcgataacgcgataccagcttgtgaatgaac

SEQ ID NO: 462032 - DNA, 33 bp, Homo sapien
tgtcgataacgcgatagcagcttgtgaatgaac

SEQ ID NO: 462033 - DNA, 33 bp, Homo sapien
ttcctgtaattacttacggcccctcacaatacc

SEQ ID NO: 462034 - DNA, 33 bp, Homo sapien
ttcctgtaattacttatggcccctcacaatacc

SEQ ID NO: 462035 - DNA, 33 bp, Homo sapien
ttctgccgtttttctgaagataacaggatcgtc

SEQ ID NO: 462036 - DNA, 33 bp, Homo sapien
ttctgccgtttttctgtagataacaggatcgtc

SEQ ID NO: 462037 - DNA, 33 bp, Homo sapien
agttctccggtcttcaagggtaattctgtggaa

SEQ ID NO: 462038 - DNA, 33 bp, Homo sapien
agttctccggtcttcaggggtaattctgtggaa

SEQ ID NO: 462039 - DNA, 33 bp, Homo sapien
aatatctctacctgaaatgcttggaaccagatt

SEQ ID NO: 462040 - DNA, 33 bp, Homo sapien
aatatctctacctgaagtgcttggaaccagatt

SEQ ID NO: 462041 - DNA, 33 bp, Homo sapien
agccacagtgagtgaacagatattcggtcaaca

SEQ ID NO: 462042 - DNA, 33 bp, Homo sapien
agccacagtgagtgaagagatattcggtcaaca

SEQ ID NO: 462043 - DNA, 33 bp, Homo sapien
tatctgacttttgtaactgctacctgtttttgt

SEQ ID NO: 462044 - DNA, 33 bp, Homo sapien
tatctgacttttgtaattgctacctgtttttgt

SEQ ID NO: 462045 - DNA, 33 bp, Homo sapien
tatatgttaggtaaatcatatcccactaatgct

SEQ ID NO: 462046 - DNA, 33 bp, Homo sapien
tatatgttaggtaaattatatcccactaatgct

SEQ ID NO: 462047 - DNA, 33 bp, Homo sapien
ggagcctggtccccacaatggcccctctccctg

SEQ ID NO: 462048 - DNA, 33 bp, Homo sapien
ggagcctggtccccacgatggcccctctccctg

SEQ ID NO: 462049 - DNA, 33 bp, Homo sapien
cataagaggcacctgaaacccagaaaaaaggaa

SEQ ID NO: 462050 - DNA, 33 bp, Homo sapien
cataagaggcacctgagacccagaaaaaaggaa

SEQ ID NO: 462051 - DNA, 33 bp, Homo sapien
ttaaaaacgttacaaaatattcaattgtctgtt

SEQ ID NO: 462052 - DNA, 33 bp, Homo sapien
ttaaaaacgttacaaagtattcaattgtctgtt

SEQ ID NO: 462053 - DNA, 33 bp, Homo sapien
ccgaggttccagggtcccaactgtctactaacc

SEQ ID NO: 462054 - DNA, 33 bp, Homo sapien
ccgaggttccagggtctcaactgtctactaacc

SEQ ID NO: 462055 - DNA, 33 bp, Homo sapien
gttaggtcttaaaggcacccaggaatatgcatt

SEQ ID NO: 462056 - DNA, 33 bp, Homo sapien
gttaggtcttaaaggcgcccaggaatatgcatt

SEQ ID NO: 462057 - DNA, 33 bp, Homo sapien
tagctggaaggaaaaactgtcccctcaatagaa

SEQ ID NO: 462058 - DNA, 33 bp, Homo sapien
tagctggaaggaaaaagtgtcccctcaatagaa

SEQ ID NO: 462059 - DNA, 33 bp, Homo sapien
aatgaagtacactgggaaggtgttgcgggctgt

SEQ ID NO: 462060 - DNA, 33 bp, Homo sapien
aatgaagtacactgggcaggtgttgcgggctgt

SEQ ID NO: 462061 - DNA, 33 bp, Homo sapien
ttcagctcttggtcgaaacgagatttctcgaag

SEQ ID NO: 462062 - DNA, 33 bp, Homo sapien
ttcagctcttggtcgagacgagatttctcgaag

SEQ ID NO: 462063 - DNA, 33 bp, Homo sapien
ttatataggtacagcacgttttattaattacag

SEQ ID NO: 462064 - DNA, 33 bp, Homo sapien
ttatataggtacagcaggttttattaattacag

SEQ ID NO: 462065 - DNA, 33 bp, Homo sapien
agttgagtatcagttggaggagaaatgatcact

SEQ ID NO: 462066 - DNA, 33 bp, Homo sapien
agttgagtatcagttgtaggagaaatgatcact

SEQ ID NO: 462067 - DNA, 33 bp, Homo sapien
tcactcaattgtacttcaaatgatttaaatata

SEQ ID NO: 462068 - DNA, 33 bp, Homo sapien
tcactcaattgtacttgaaatgatttaaatata

SEQ ID NO: 462069 - DNA, 33 bp, Homo sapien
cctagaggctgggaggccaaaggagacaaggct

SEQ ID NO: 462070 - DNA, 33 bp, Homo sapien
cctagaggctgggaggtcaaaggagacaaggct

SEQ ID NO: 462071 - DNA, 33 bp, Homo sapien
agttagtacttccggccgcaaatcacgtagttt

SEQ ID NO: 462072 - DNA, 33 bp, Homo sapien
agttagtacttccggctgcaaatcacgtagttt

SEQ ID NO: 462073 - DNA, 33 bp, Homo sapien
catcatctgtaaaaccaggtaatagtgcacaca

SEQ ID NO: 462074 - DNA, 33 bp, Homo sapien
catcatctgtaaaaccgggtaatagtgcacaca

SEQ ID NO: 462075 - DNA, 33 bp, Homo sapien
cctgtttctggatttcccgatggcctgagcatc

SEQ ID NO: 462076 - DNA, 33 bp, Homo sapien
cctgtttctggatttctcgatggcctgagcatc

SEQ ID NO: 462077 - DNA, 33 bp, Homo sapien
gatcgtgagtcataaaaggcctgcaaatttcat

SEQ ID NO: 462078 - DNA, 33 bp, Homo sapien
gatcgtgagtcataaagggcctgcaaatttcat

SEQ ID NO: 462079 - DNA, 33 bp, Homo sapien
cgacccgttctagagaaggagcgggtgaaacca

SEQ ID NO: 462080 - DNA, 33 bp, Homo sapien
cgacccgttctagagacggagcgggtgaaacca

SEQ ID NO: 462081 - DNA, 33 bp, Homo sapien
aaaggacccgaatctccagcaggtcaagttaca

SEQ ID NO: 462082 - DNA, 33 bp, Homo sapien
aaaggacccgaatctctagcaggtcaagttaca

SEQ ID NO: 462083 - DNA, 33 bp, Homo sapien
attttttcatgacacccatgactatgctttgga

SEQ ID NO: 462084 - DNA, 33 bp, Homo sapien
attttttcatgacacctatgactatgctttgga

SEQ ID NO: 462085 - DNA, 33 bp, Homo sapien
tacgagctctgatcccagaattaccacatttgc

SEQ ID NO: 462086 - DNA, 33 bp, Homo sapien
tacgagctctgatcccggaattaccacatttgc

SEQ ID NO: 462087 - DNA, 33 bp, Homo sapien
cccctagagtttcccaaaggaactacacaccat

SEQ ID NO: 462088 - DNA, 33 bp, Homo sapien
cccctagagtttcccagaggaactacacaccat

SEQ ID NO: 462089 - DNA, 33 bp, Homo sapien
atttatcagtgtccaacttagtggctttagtac

SEQ ID NO: 462090 - DNA, 33 bp, Homo sapien
atttatcagtgtccaatttagtggctttagtac

SEQ ID NO: 462091 - DNA, 33 bp, Homo sapien
atgtgacgggcatagacattgactaaggccaaa

SEQ ID NO: 462092 - DNA, 33 bp, Homo sapien
atgtgacgggcatagatattgactaaggccaaa

SEQ ID NO: 462093 - DNA, 33 bp, Homo sapien
attttcttgctttttcaagtctcttatgtccct

SEQ ID NO: 462094 - DNA, 33 bp, Homo sapien
attttcttgctttttccagtctcttatgtccct

SEQ ID NO: 462095 - DNA, 33 bp, Homo sapien
gatttcagaaacagtgcacgtcaggaaccacag

SEQ ID NO: 462096 - DNA, 33 bp, Homo sapien
gatttcagaaacagtgtacgtcaggaaccacag

SEQ ID NO: 462097 - DNA, 33 bp, Homo sapien
agttggatgtgaccaccgcaaacaccatattag

SEQ ID NO: 462098 - DNA, 33 bp, Homo sapien
agttggatgtgaccactgcaaacaccatattag

SEQ ID NO: 462099 - DNA, 33 bp, Homo sapien
taggctgtaccatttacgactgtgtaagcacat

SEQ ID NO: 462100 - DNA, 33 bp, Homo sapien
taggctgtaccatttatgactgtgtaagcacat

SEQ ID NO: 462101 - DNA, 33 bp, Homo sapien
tctgattagcctttccaaactgaggtgatcaga

SEQ ID NO: 462102 - DNA, 33 bp, Homo sapien
tctgattagcctttcccaactgaggtgatcaga

SEQ ID NO: 462103 - DNA, 33 bp, Homo sapien
aagtacttcttacatacagtgactcatgtctca

SEQ ID NO: 462104 - DNA, 33 bp, Homo sapien
aagtacttcttacatatagtgactcatgtctca

SEQ ID NO: 462105 - DNA, 33 bp, Homo sapien
ctcctcacccccagcccatagtctgttagccca

SEQ ID NO: 462106 - DNA, 33 bp, Homo sapien
ctcctcacccccagcctatagtctgttagccca

SEQ ID NO: 462107 - DNA, 33 bp, Homo sapien
cactaaggacagggaaacatgagggactcaacg

SEQ ID NO: 462108 - DNA, 33 bp, Homo sapien
cactaaggacagggaagcatgagggactcaacg

SEQ ID NO: 462109 - DNA, 33 bp, Homo sapien
aacattcagcaccaaagccggtggacagcggaa

SEQ ID NO: 462110 - DNA, 33 bp, Homo sapien
aacattcagcaccaaatccggtggacagcggaa

SEQ ID NO: 462111 - DNA, 33 bp, Homo sapien
acgcttaatttagacaacgctttgtgtaagcac

SEQ ID NO: 462112 - DNA, 33 bp, Homo sapien
acgcttaatttagacagcgctttgtgtaagcac

SEQ ID NO: 462113 - DNA, 33 bp, Homo sapien
tttgggaccgcagagacatgcttcttatacaag

SEQ ID NO: 462114 - DNA, 33 bp, Homo sapien
tttgggaccgcagagagatgcttcttatacaag

SEQ ID NO: 462115 - DNA, 33 bp, Homo sapien
cagggaaaagccatacagattggaggttaggag

SEQ ID NO: 462116 - DNA, 33 bp, Homo sapien
cagggaaaagccatacggattggaggttaggag

SEQ ID NO: 462117 - DNA, 33 bp, Homo sapien
tcacagtctagtgggaagggccaatagtgaatc

SEQ ID NO: 462118 - DNA, 33 bp, Homo sapien
tcacagtctagtgggaggggccaatagtgaatc

SEQ ID NO: 462119 - DNA, 33 bp, Homo sapien
gttcattcattcatccccattaaatattcatca

SEQ ID NO: 462120 - DNA, 33 bp, Homo sapien
gttcattcattcatccgcattaaatattcatca

SEQ ID NO: 462121 - DNA, 33 bp, Homo sapien
gggggtgggggccggaagtgtcaatgactaaag

SEQ ID NO: 462122 - DNA, 33 bp, Homo sapien
gggggtgggggccggatgtgtcaatgactaaag

SEQ ID NO: 462123 - DNA, 33 bp, Homo sapien
gctgacatccagggccaactgaaggctcctccc

SEQ ID NO: 462124 - DNA, 33 bp, Homo sapien
gctgacatccagggccgactgaaggctcctccc

SEQ ID NO: 462125 - DNA, 33 bp, Homo sapien
caaactaggtcaaaaccacgagaaggcaggaag

SEQ ID NO: 462126 - DNA, 33 bp, Homo sapien
caaactaggtcaaaactacgagaaggcaggaag

SEQ ID NO: 462127 - DNA, 33 bp, Homo sapien
cccagccatgcctggaatcacaacaggaagaag

SEQ ID NO: 462128 - DNA, 33 bp, Homo sapien
cccagccatgcctggagtcacaacaggaagaag

SEQ ID NO: 462129 - DNA, 33 bp, Homo sapien
agaagcaaaagttctcactcaaactggtaagtg

SEQ ID NO: 462130 - DNA, 33 bp, Homo sapien
agaagcaaaagttctcgctcaaactggtaagtg

SEQ ID NO: 462131 - DNA, 33 bp, Homo sapien
tgtcgcttgacctttcaaatgacagcatgaccc

SEQ ID NO: 462132 - DNA, 33 bp, Homo sapien
tgtcgcttgacctttcgaatgacagcatgaccc

SEQ ID NO: 462133 - DNA, 33 bp, Homo sapien
aatctgaaatgcaaaacgctccaaaatctgaaa

SEQ ID NO: 462134 - DNA, 33 bp, Homo sapien
aatctgaaatgcaaaatgctccaaaatctgaaa

SEQ ID NO: 462135 - DNA, 33 bp, Homo sapien
atgttccccaaatatcaatatgctcccctatac

SEQ ID NO: 462136 - DNA, 33 bp, Homo sapien
atgttccccaaatatcgatatgctcccctatac

SEQ ID NO: 462137 - DNA, 33 bp, Homo sapien
gatattgacagctcgccccctggtttcctttgg

SEQ ID NO: 462138 - DNA, 33 bp, Homo sapien
gatattgacagctcgctccctggtttcctttgg

SEQ ID NO: 462139 - DNA, 33 bp, Homo sapien
ttcatctctcaggcaaatctagacatccagcca

SEQ ID NO: 462140 - DNA, 33 bp, Homo sapien
ttcatctctcaggcaagtctagacatccagcca

SEQ ID NO: 462141 - DNA, 33 bp, Homo sapien
tcagaagaggaaatgcaactccagcagggcgcc

SEQ ID NO: 462142 - DNA, 33 bp, Homo sapien
tcagaagaggaaatgcgactccagcagggcgcc

SEQ ID NO: 462143 - DNA, 33 bp, Homo sapien
agaaagcctcccttccacccatggctgactcgc

SEQ ID NO: 462144 - DNA, 33 bp, Homo sapien
agaaagcctcccttccgcccatggctgactcgc

SEQ ID NO: 462145 - DNA, 33 bp, Homo sapien
atggtggctcccaggcaatcttttttaaaggaa

SEQ ID NO: 462146 - DNA, 33 bp, Homo sapien
atggtggctcccaggcgatcttttttaaaggaa

SEQ ID NO: 462147 - DNA, 33 bp, Homo sapien
agataacacacggtggaaactatcatttgatag

SEQ ID NO: 462148 - DNA, 33 bp, Homo sapien
agataacacacggtgggaactatcatttgatag

SEQ ID NO: 462149 - DNA, 33 bp, Homo sapien
tttttcctttagtgacaagtgacaagagatact

SEQ ID NO: 462150 - DNA, 33 bp, Homo sapien
tttttcctttagtgacgagtgacaagagatact

SEQ ID NO: 462151 - DNA, 33 bp, Homo sapien
tttttttttttataaactgagctgatagggccg

SEQ ID NO: 462152 - DNA, 33 bp, Homo sapien
tttttttttttataaagtgagctgatagggccg

SEQ ID NO: 462153 - DNA, 33 bp, Homo sapien
cacacccggctgtttgaattctttgtagacaca

SEQ ID NO: 462154 - DNA, 33 bp, Homo sapien
cacacccggctgtttgtattctttgtagacaca

SEQ ID NO: 462155 - DNA, 33 bp, Homo sapien
caaggcctctctcccccgaggtgtctcccttgg

SEQ ID NO: 462156 - DNA, 33 bp, Homo sapien
caaggcctctctcccctgaggtgtctcccttgg

SEQ ID NO: 462157 - DNA, 33 bp, Homo sapien
actatcggtcggaggacgcaagaaagcaggaga

SEQ ID NO: 462158 - DNA, 33 bp, Homo sapien
actatcggtcggaggatgcaagaaagcaggaga

SEQ ID NO: 462159 - DNA, 33 bp, Homo sapien
cacttccaagtaatcagcttgctttgtcctggg

SEQ ID NO: 462160 - DNA, 33 bp, Homo sapien
cacttccaagtaatcatcttgctttgtcctggg

SEQ ID NO: 462161 - DNA, 33 bp, Homo sapien
ttgaagctaacctggacaaaattgaaaaaaatt

SEQ ID NO: 462162 - DNA, 33 bp, Homo sapien
ttgaagctaacctggataaaattgaaaaaaatt

SEQ ID NO: 462163 - DNA, 33 bp, Homo sapien
tcaaatctgcagactaacccctggccccgcaga

SEQ ID NO: 462164 - DNA, 33 bp, Homo sapien
tcaaatctgcagactaccccctggccccgcaga

SEQ ID NO: 462165 - DNA, 33 bp, Homo sapien
agggaacccttaacacactttgaaccttgggaa

SEQ ID NO: 462166 - DNA, 33 bp, Homo sapien
agggaacccttaacacgctttgaaccttgggaa

SEQ ID NO: 462167 - DNA, 33 bp, Homo sapien
tctgttcatgtacttacgcattaatcgattctt

SEQ ID NO: 462168 - DNA, 33 bp, Homo sapien
tctgttcatgtacttatgcattaatcgattctt

SEQ ID NO: 462169 - DNA, 33 bp, Homo sapien
ggctggacacatttagcagatcagcagtaagtg

SEQ ID NO: 462170 - DNA, 33 bp, Homo sapien
ggctggacacatttagtagatcagcagtaagtg

SEQ ID NO: 462171 - DNA, 33 bp, Homo sapien
catctgataagctcacactcttccataatcagt

SEQ ID NO: 462172 - DNA, 33 bp, Homo sapien
catctgataagctcacgctcttccataatcagt

SEQ ID NO: 462173 - DNA, 33 bp, Homo sapien
gatataattcacgtcacaccattcacctattta

SEQ ID NO: 462174 - DNA, 33 bp, Homo sapien
gatataattcacgtcataccattcacctattta

SEQ ID NO: 462175 - DNA, 33 bp, Homo sapien
gcgccaccctgtggacagcgacgaggtagattc

SEQ ID NO: 462176 - DNA, 33 bp, Homo sapien
gcgccaccctgtggacggcgacgaggtagattc

SEQ ID NO: 462177 - DNA, 33 bp, Homo sapien
ccatgatccagagagaaaggtggacacctcagt

SEQ ID NO: 462178 - DNA, 33 bp, Homo sapien
ccatgatccagagagagaggtggacacctcagt

SEQ ID NO: 462179 - DNA, 33 bp, Homo sapien
aagccaactgcaagagaccattttaaaggccat

SEQ ID NO: 462180 - DNA, 33 bp, Homo sapien
aagccaactgcaagaggccattttaaaggccat

SEQ ID NO: 462181 - DNA, 33 bp, Homo sapien
ttgctgggccagatgcactgtgggtctgtaagg

SEQ ID NO: 462182 - DNA, 33 bp, Homo sapien
ttgctgggccagatgcgctgtgggtctgtaagg

SEQ ID NO: 462183 - DNA, 33 bp, Homo sapien
cagtccacagaccttaggccagttgtcccccaa

SEQ ID NO: 462184 - DNA, 33 bp, Homo sapien
cagtccacagaccttatgccagttgtcccccaa

SEQ ID NO: 462185 - DNA, 33 bp, Homo sapien
atgaaacattcgagataagacctagatggttcg

SEQ ID NO: 462186 - DNA, 33 bp, Homo sapien
atgaaacattcgagatgagacctagatggttcg

SEQ ID NO: 462187 - DNA, 33 bp, Homo sapien
cagcacagtagatgctcaatacattaagtcata

SEQ ID NO: 462188 - DNA, 33 bp, Homo sapien
cagcacagtagatgcttaatacattaagtcata

SEQ ID NO: 462189 - DNA, 33 bp, Homo sapien
tattccaggcagagaacagtttgtacaaaggcc

SEQ ID NO: 462190 - DNA, 33 bp, Homo sapien
tattccaggcagagaagagtttgtacaaaggcc

SEQ ID NO: 462191 - DNA, 33 bp, Homo sapien
tcaaatggcctaaacaaaagtcctcctactccc

SEQ ID NO: 462192 - DNA, 33 bp, Homo sapien
tcaaatggcctaaacagaagtcctcctactccc

SEQ ID NO: 462193 - DNA, 33 bp, Homo sapien
taattctcataagcaacctctggggtactgaag

SEQ ID NO: 462194 - DNA, 33 bp, Homo sapien
taattctcataagcaatctctggggtactgaag

SEQ ID NO: 462195 - DNA, 33 bp, Homo sapien
acttctgctgattcacagggtacctcaggcaag

SEQ ID NO: 462196 - DNA, 33 bp, Homo sapien
acttctgctgattcacggggtacctcaggcaag

SEQ ID NO: 462197 - DNA, 33 bp, Homo sapien
ctcacgctcttgccgacgtcatccttgctgctc

SEQ ID NO: 462198 - DNA, 33 bp, Homo sapien
ctcacgctcttgccgatgtcatccttgctgctc

SEQ ID NO: 462199 - DNA, 33 bp, Homo sapien
tgtgtgtctatatggacgcaaatgtttgctgaa

SEQ ID NO: 462200 - DNA, 33 bp, Homo sapien
tgtgtgtctatatggatgcaaatgtttgctgaa

SEQ ID NO: 462201 - DNA, 33 bp, Homo sapien
agtttgccaagaagacaacagagtgatgggatt

SEQ ID NO: 462202 - DNA, 33 bp, Homo sapien
agtttgccaagaagacgacagagtgatgggatt

SEQ ID NO: 462203 - DNA, 33 bp, Homo sapien
tggtctggagctcctacgctaaaagcaatccac

SEQ ID NO: 462204 - DNA, 33 bp, Homo sapien
tggtctggagctcctatgctaaaagcaatccac

SEQ ID NO: 462205 - DNA, 33 bp, Homo sapien
cagatcacaacgtggacatagggatactcattg

SEQ ID NO: 462206 - DNA, 33 bp, Homo sapien
cagatcacaacgtggatatagggatactcattg

SEQ ID NO: 462207 - DNA, 33 bp, Homo sapien
atactatctttcctgccaatgggtatcgcaaaa

SEQ ID NO: 462208 - DNA, 33 bp, Homo sapien
atactatctttcctgctaatgggtatcgcaaaa

SEQ ID NO: 462209 - DNA, 33 bp, Homo sapien
cacatgaagtatatacacaaagcaatatcacag

SEQ ID NO: 462210 - DNA, 33 bp, Homo sapien
cacatgaagtatatacgcaaagcaatatcacag

SEQ ID NO: 462211 - DNA, 33 bp, Homo sapien
aaattcacaaataagacagaaagatcgggtgca

SEQ ID NO: 462212 - DNA, 33 bp, Homo sapien
aaattcacaaataagagagaaagatcgggtgca

SEQ ID NO: 462213 - DNA, 33 bp, Homo sapien
acttggtgatatttgcggaatgattcgtctact

SEQ ID NO: 462214 - DNA, 33 bp, Homo sapien
acttggtgatatttgctgaatgattcgtctact

SEQ ID NO: 462215 - DNA, 33 bp, Homo sapien
gcgcatcacctgggcggcacccgcggtactgcg

SEQ ID NO: 462216 - DNA, 33 bp, Homo sapien
gcgcatcacctgggcgtcacccgcggtactgcg

SEQ ID NO: 462217 - DNA, 33 bp, Homo sapien
gtcaagagacaagattaaaatggatacaggccc

SEQ ID NO: 462218 - DNA, 33 bp, Homo sapien
gtcaagagacaagattgaaatggatacaggccc

SEQ ID NO: 462219 - DNA, 33 bp, Homo sapien
aagcttttaaaacctaggtcacatcgtgctggt

SEQ ID NO: 462220 - DNA, 33 bp, Homo sapien
aagcttttaaaacctatgtcacatcgtgctggt

SEQ ID NO: 462221 - DNA, 33 bp, Homo sapien
ttaatgcatcattctacaaggagagctaagaaa

SEQ ID NO: 462222 - DNA, 33 bp, Homo sapien
ttaatgcatcattctataaggagagctaagaaa

SEQ ID NO: 462223 - DNA, 33 bp, Homo sapien
ttatttagatctgccacgtgtccctgtaatatt

SEQ ID NO: 462224 - DNA, 33 bp, Homo sapien
ttatttagatctgccatgtgtccctgtaatatt

SEQ ID NO: 462225 - DNA, 33 bp, Homo sapien
ccttccctatcagtacacaaagagcttcctcat

SEQ ID NO: 462226 - DNA, 33 bp, Homo sapien
ccttccctatcagtacgcaaagagcttcctcat

SEQ ID NO: 462227 - DNA, 33 bp, Homo sapien
gagatcctgtctcaataaagagagaaagtaata

SEQ ID NO: 462228 - DNA, 33 bp, Homo sapien
gagatcctgtctcaatgaagagagaaagtaata

SEQ ID NO: 462229 - DNA, 33 bp, Homo sapien
tgacagacatgcaacacggatgaatcttgaaag

SEQ ID NO: 462230 - DNA, 33 bp, Homo sapien
tgacagacatgcaacagggatgaatcttgaaag

SEQ ID NO: 462231 - DNA, 33 bp, Homo sapien
ctttgcttttttgcaacagaacacacccctcca

SEQ ID NO: 462232 - DNA, 33 bp, Homo sapien
ctttgcttttttgcaatagaacacacccctcca

SEQ ID NO: 462233 - DNA, 33 bp, Homo sapien
cctgcctcttcccagccgcatctaggatctgcc

SEQ ID NO: 462234 - DNA, 33 bp, Homo sapien
cctgcctcttcccagctgcatctaggatctgcc

SEQ ID NO: 462235 - DNA, 33 bp, Homo sapien
gaaaggccacctgtcaccctcgtggctgtgtga

SEQ ID NO: 462236 - DNA, 33 bp, Homo sapien
gaaaggccacctgtcatcctcgtggctgtgtga

SEQ ID NO: 462237 - DNA, 33 bp, Homo sapien
ctacatcccaccaagaactattgccaggaagcc

SEQ ID NO: 462238 - DNA, 33 bp, Homo sapien
ctacatcccaccaagagctattgccaggaagcc

SEQ ID NO: 462239 - DNA, 33 bp, Homo sapien
gcaatggtcaaaaagaatccaactgtgcaggct

SEQ ID NO: 462240 - DNA, 33 bp, Homo sapien
gcaatggtcaaaaagagtccaactgtgcaggct

SEQ ID NO: 462241 - DNA, 33 bp, Homo sapien
ggccagaaatcagagactagacagacctgaagg

SEQ ID NO: 462242 - DNA, 33 bp, Homo sapien
ggccagaaatcagagattagacagacctgaagg

SEQ ID NO: 462243 - DNA, 33 bp, Homo sapien
aacacaggggttcgaacggtggaagcaggacca

SEQ ID NO: 462244 - DNA, 33 bp, Homo sapien
aacacaggggttcgaatggtggaagcaggacca

SEQ ID NO: 462245 - DNA, 33 bp, Homo sapien
ttgcttgtctttgtccccgagaaagagccgatg

SEQ ID NO: 462246 - DNA, 33 bp, Homo sapien
ttgcttgtctttgtcctcgagaaagagccgatg

SEQ ID NO: 462247 - DNA, 33 bp, Homo sapien
aggcagggcccagagacaagtggtgacaggcgg

SEQ ID NO: 462248 - DNA, 33 bp, Homo sapien
aggcagggcccagagagaagtggtgacaggcgg

SEQ ID NO: 462249 - DNA, 33 bp, Homo sapien
ttcctggatacctccccgcatctgtccttcaac

SEQ ID NO: 462250 - DNA, 33 bp, Homo sapien
ttcctggatacctccctgcatctgtccttcaac

SEQ ID NO: 462251 - DNA, 33 bp, Homo sapien
ctttaatgatctcagacgtgcacacgaaggtaa

SEQ ID NO: 462252 - DNA, 33 bp, Homo sapien
ctttaatgatctcagatgtgcacacgaaggtaa

SEQ ID NO: 462253 - DNA, 33 bp, Homo sapien
tcaacgcgattcgtaacgcttcctaattcgtag

SEQ ID NO: 462254 - DNA, 33 bp, Homo sapien
tcaacgcgattcgtaatgcttcctaattcgtag

SEQ ID NO: 462255 - DNA, 33 bp, Homo sapien
ccagggcctggcactgaagcattggtagcggca

SEQ ID NO: 462256 - DNA, 33 bp, Homo sapien
ccagggcctggcactggagcattggtagcggca

SEQ ID NO: 462257 - DNA, 33 bp, Homo sapien
tgagagaaaacagatcagatcagcgtccttcct

SEQ ID NO: 462258 - DNA, 33 bp, Homo sapien
tgagagaaaacagatcggatcagcgtccttcct

SEQ ID NO: 462259 - DNA, 33 bp, Homo sapien
gcacagagtaggccagaaccgatggtgatacca

SEQ ID NO: 462260 - DNA, 33 bp, Homo sapien
gcacagagtaggccaggaccgatggtgatacca

SEQ ID NO: 462261 - DNA, 33 bp, Homo sapien
tcacaagcgtggcatcaatcctgcaaccatgcg

SEQ ID NO: 462262 - DNA, 33 bp, Homo sapien
tcacaagcgtggcatcgatcctgcaaccatgcg

SEQ ID NO: 462263 - DNA, 33 bp, Homo sapien
ggggccttccttgtcccgctgatttagagacac

SEQ ID NO: 462264 - DNA, 33 bp, Homo sapien
ggggccttccttgtcctgctgatttagagacac

SEQ ID NO: 462265 - DNA, 33 bp, Homo sapien
gttttaagcttctaccaaatgctagagagagtg

SEQ ID NO: 462266 - DNA, 33 bp, Homo sapien
gttttaagcttctaccgaatgctagagagagtg

SEQ ID NO: 462267 - DNA, 33 bp, Homo sapien
actccaaacgagggcagagagacaagtgacaaa

SEQ ID NO: 462268 - DNA, 33 bp, Homo sapien
actccaaacgagggcatagagacaagtgacaaa

SEQ ID NO: 462269 - DNA, 33 bp, Homo sapien
ccttgcacttctatatcacggagatagcttctt

SEQ ID NO: 462270 - DNA, 33 bp, Homo sapien
ccttgcacttctatattacggagatagcttctt

SEQ ID NO: 462271 - DNA, 33 bp, Homo sapien
ctctctgtcttatctacactccatgccacttaa

SEQ ID NO: 462272 - DNA, 33 bp, Homo sapien
ctctctgtcttatctatactccatgccacttaa

SEQ ID NO: 462273 - DNA, 33 bp, Homo sapien
acaagccttgacccaccaggcatccgatcagag

SEQ ID NO: 462274 - DNA, 33 bp, Homo sapien
acaagccttgacccacgaggcatccgatcagag

SEQ ID NO: 462275 - DNA, 33 bp, Homo sapien
gaagatatcccgctaaaagagagacatgccaaa

SEQ ID NO: 462276 - DNA, 33 bp, Homo sapien
gaagatatcccgctaagagagagacatgccaaa

SEQ ID NO: 462277 - DNA, 33 bp, Homo sapien
aattggatgcctggaaatatggatcttccctac

SEQ ID NO: 462278 - DNA, 33 bp, Homo sapien
aattggatgcctggaactatggatcttccctac

SEQ ID NO: 462279 - DNA, 33 bp, Homo sapien
ttcccctccaaatcccaaactcataagagctat

SEQ ID NO: 462280 - DNA, 33 bp, Homo sapien
ttcccctccaaatcccgaactcataagagctat

SEQ ID NO: 462281 - DNA, 33 bp, Homo sapien
tgtcgtctcctttgacaatagcgacagtaccct

SEQ ID NO: 462282 - DNA, 33 bp, Homo sapien
tgtcgtctcctttgaccatagcgacagtaccct

SEQ ID NO: 462283 - DNA, 33 bp, Homo sapien
aactgtcatcagttaaaggagttatgacagagt

SEQ ID NO: 462284 - DNA, 33 bp, Homo sapien
aactgtcatcagttaagggagttatgacagagt

SEQ ID NO: 462285 - DNA, 33 bp, Homo sapien
catataacacaactaccgcatatagccacaatt

SEQ ID NO: 462286 - DNA, 33 bp, Homo sapien
catataacacaactactgcatatagccacaatt

SEQ ID NO: 462287 - DNA, 33 bp, Homo sapien
agggctcccagggctcagagaatagccattgcc

SEQ ID NO: 462288 - DNA, 33 bp, Homo sapien
agggctcccagggctcggagaatagccattgcc

SEQ ID NO: 462289 - DNA, 33 bp, Homo sapien
cttttgcacaaatgccacctcttcagagaggtc

SEQ ID NO: 462290 - DNA, 33 bp, Homo sapien
cttttgcacaaatgccgcctcttcagagaggtc

SEQ ID NO: 462291 - DNA, 33 bp, Homo sapien
cccctctgggaaataacagatactcatcattgt

SEQ ID NO: 462292 - DNA, 33 bp, Homo sapien
cccctctgggaaataatagatactcatcattgt

SEQ ID NO: 462293 - DNA, 33 bp, Homo sapien
actcaggttctcccagaagataagtggctgagg

SEQ ID NO: 462294 - DNA, 33 bp, Homo sapien
actcaggttctcccaggagataagtggctgagg

SEQ ID NO: 462295 - DNA, 33 bp, Homo sapien
ccagcatcgcctggcacatgggagccctttgaa

SEQ ID NO: 462296 - DNA, 33 bp, Homo sapien
ccagcatcgcctggcatatgggagccctttgaa

SEQ ID NO: 462297 - DNA, 33 bp, Homo sapien
gtttttgctttttggaaggttactgtatacatc

SEQ ID NO: 462298 - DNA, 33 bp, Homo sapien
gtttttgctttttggagggttactgtatacatc

SEQ ID NO: 462299 - DNA, 33 bp, Homo sapien
cccataactcactctacgtatctctttcattcc

SEQ ID NO: 462300 - DNA, 33 bp, Homo sapien
cccataactcactctatgtatctctttcattcc

SEQ ID NO: 462301 - DNA, 33 bp, Homo sapien
atagcagtattaataacgagacctaacaatgct

SEQ ID NO: 462302 - DNA, 33 bp, Homo sapien
atagcagtattaataatgagacctaacaatgct

SEQ ID NO: 462303 - DNA, 33 bp, Homo sapien
ggatcacttgaagccaatagttgaagagtagcc

SEQ ID NO: 462304 - DNA, 33 bp, Homo sapien
ggatcacttgaagccagtagttgaagagtagcc

SEQ ID NO: 462305 - DNA, 33 bp, Homo sapien
cgaggcaaaagaaaaaagtcatgcaatccagaa

SEQ ID NO: 462306 - DNA, 33 bp, Homo sapien
cgaggcaaaagaaaaatgtcatgcaatccagaa

SEQ ID NO: 462307 - DNA, 33 bp, Homo sapien
ggacattgcaaaacacccttctaaataacatct

SEQ ID NO: 462308 - DNA, 33 bp, Homo sapien
ggacattgcaaaacactcttctaaataacatct

SEQ ID NO: 462309 - DNA, 33 bp, Homo sapien
tcacttggcagaaccacgactctaacccagtgg

SEQ ID NO: 462310 - DNA, 33 bp, Homo sapien
tcacttggcagaaccatgactctaacccagtgg

SEQ ID NO: 462311 - DNA, 33 bp, Homo sapien
acacagaagccacacaaagcaaaagcagaccca

SEQ ID NO: 462312 - DNA, 33 bp, Homo sapien
acacagaagccacacacagcaaaagcagaccca

SEQ ID NO: 462313 - DNA, 33 bp, Homo sapien
ccatgttcaagggtaccggaagagaagggtgtc

SEQ ID NO: 462314 - DNA, 33 bp, Homo sapien
ccatgttcaagggtactggaagagaagggtgtc

SEQ ID NO: 462315 - DNA, 33 bp, Homo sapien
gccaatcacagtaccccagctgcagaccctgca

SEQ ID NO: 462316 - DNA, 33 bp, Homo sapien
gccaatcacagtaccctagctgcagaccctgca

SEQ ID NO: 462317 - DNA, 33 bp, Homo sapien
atctcggaaacaggtaaacctctcttctgctgg

SEQ ID NO: 462318 - DNA, 33 bp, Homo sapien
atctcggaaacaggtatacctctcttctgctgg

SEQ ID NO: 462319 - DNA, 33 bp, Homo sapien
ttgtttgggagggacactggattttgtaatgct

SEQ ID NO: 462320 - DNA, 33 bp, Homo sapien
ttgtttgggagggacattggattttgtaatgct

SEQ ID NO: 462321 - DNA, 33 bp, Homo sapien
ttcttgctcccagttaggggtgctcaacgtcct

SEQ ID NO: 462322 - DNA, 33 bp, Homo sapien
ttcttgctcccagttatgggtgctcaacgtcct

SEQ ID NO: 462323 - DNA, 33 bp, Homo sapien
cagggacctggctaagaaaaggacagtatttgc

SEQ ID NO: 462324 - DNA, 33 bp, Homo sapien
cagggacctggctaaggaaaggacagtatttgc

SEQ ID NO: 462325 - DNA, 33 bp, Homo sapien
cacctggatttagtcacagggacatacgtgtga

SEQ ID NO: 462326 - DNA, 33 bp, Homo sapien
cacctggatttagtcatagggacatacgtgtga

SEQ ID NO: 462327 - DNA, 33 bp, Homo sapien
tggatcagcagtccgacataacaaagataatat

SEQ ID NO: 462328 - DNA, 33 bp, Homo sapien
tggatcagcagtccgagataacaaagataatat

SEQ ID NO: 462329 - DNA, 33 bp, Homo sapien
cctttgtctctgacccagagttgttgtgtgttc

SEQ ID NO: 462330 - DNA, 33 bp, Homo sapien
cctttgtctctgacccggagttgttgtgtgttc

SEQ ID NO: 462331 - DNA, 33 bp, Homo sapien
ttgagccacactatatcagctagatttctagag

SEQ ID NO: 462332 - DNA, 33 bp, Homo sapien
ttgagccacactatattagctagatttctagag

SEQ ID NO: 462333 - DNA, 33 bp, Homo sapien
atcccaaactcatccgaagcacaattttacccc

SEQ ID NO: 462334 - DNA, 33 bp, Homo sapien
atcccaaactcatccggagcacaattttacccc

SEQ ID NO: 462335 - DNA, 33 bp, Homo sapien
gatcttgctttgtttccctggttggccttgaac

SEQ ID NO: 462336 - DNA, 33 bp, Homo sapien
gatcttgctttgtttctctggttggccttgaac

SEQ ID NO: 462337 - DNA, 33 bp, Homo sapien
tggggctatcccaagaaggaggaattcagaaat

SEQ ID NO: 462338 - DNA, 33 bp, Homo sapien
tggggctatcccaagacggaggaattcagaaat

SEQ ID NO: 462339 - DNA, 33 bp, Homo sapien
ttcttcacctcttttacattctgctactcatgc

SEQ ID NO: 462340 - DNA, 33 bp, Homo sapien
ttcttcacctcttttatattctgctactcatgc

SEQ ID NO: 462341 - DNA, 33 bp, Homo sapien
tttcacatatacaaaaactaactcaagatgcat

SEQ ID NO: 462342 - DNA, 33 bp, Homo sapien
tttcacatatacaaaagctaactcaagatgcat

SEQ ID NO: 462343 - DNA, 33 bp, Homo sapien
ggagcttttataaaaaattttggattcgacttt

SEQ ID NO: 462344 - DNA, 33 bp, Homo sapien
ggagcttttataaaaatttttggattcgacttt

SEQ ID NO: 462345 - DNA, 33 bp, Homo sapien
agatttcaagggagtcaccaagatcatcctcag

SEQ ID NO: 462346 - DNA, 33 bp, Homo sapien
agatttcaagggagtcgccaagatcatcctcag

SEQ ID NO: 462347 - DNA, 33 bp, Homo sapien
tcttataagaaggtaccagcaaacttgtccagt

SEQ ID NO: 462348 - DNA, 33 bp, Homo sapien
tcttataagaaggtactagcaaacttgtccagt

SEQ ID NO: 462349 - DNA, 33 bp, Homo sapien
aatcttggttaggcacagtgaagccagatgtgg

SEQ ID NO: 462350 - DNA, 33 bp, Homo sapien
aatcttggttaggcacggtgaagccagatgtgg

SEQ ID NO: 462351 - DNA, 33 bp, Homo sapien
cacccatgtcccctcgaaattctgagcactccc

SEQ ID NO: 462352 - DNA, 33 bp, Homo sapien
cacccatgtcccctcggaattctgagcactccc

SEQ ID NO: 462353 - DNA, 33 bp, Homo sapien
ttatctggccaaaggaaatcaaacacaaccaca

SEQ ID NO: 462354 - DNA, 33 bp, Homo sapien
ttatctggccaaaggagatcaaacacaaccaca

SEQ ID NO: 462355 - DNA, 33 bp, Homo sapien
cccaggagttattcaaaggtgagccctttactt

SEQ ID NO: 462356 - DNA, 33 bp, Homo sapien
cccaggagttattcaagggtgagccctttactt

SEQ ID NO: 462357 - DNA, 33 bp, Homo sapien
accaatggtgtgaaaagaaggcaaataaaacaa

SEQ ID NO: 462358 - DNA, 33 bp, Homo sapien
accaatggtgtgaaaataaggcaaataaaacaa

SEQ ID NO: 462359 - DNA, 33 bp, Homo sapien
tagtgacattttagaccagattgaagaaaaatg

SEQ ID NO: 462360 - DNA, 33 bp, Homo sapien
tagtgacattttagactagattgaagaaaaatg

SEQ ID NO: 462361 - DNA, 33 bp, Homo sapien
tgtgttacaactgcacagatcccattgaaccat

SEQ ID NO: 462362 - DNA, 33 bp, Homo sapien
tgtgttacaactgcacggatcccattgaaccat

SEQ ID NO: 462363 - DNA, 33 bp, Homo sapien
cctcatgctcagtacaacagggcaggtctagca

SEQ ID NO: 462364 - DNA, 33 bp, Homo sapien
cctcatgctcagtacaccagggcaggtctagca

SEQ ID NO: 462365 - DNA, 33 bp, Homo sapien
acaaagcctaagtcagacaccatgttggacaca

SEQ ID NO: 462366 - DNA, 33 bp, Homo sapien
acaaagcctaagtcagccaccatgttggacaca

SEQ ID NO: 462367 - DNA, 33 bp, Homo sapien
aagagtgtgtgtagccaagcgtgatgtcacatg

SEQ ID NO: 462368 - DNA, 33 bp, Homo sapien
aagagtgtgtgtagccgagcgtgatgtcacatg

SEQ ID NO: 462369 - DNA, 33 bp, Homo sapien
ggtggagaagggagacagctaaagaatcccaga

SEQ ID NO: 462370 - DNA, 33 bp, Homo sapien
ggtggagaagggagacggctaaagaatcccaga

SEQ ID NO: 462371 - DNA, 33 bp, Homo sapien
aaggacccgatcctaccgctatgagcctagact

SEQ ID NO: 462372 - DNA, 33 bp, Homo sapien
aaggacccgatcctactgctatgagcctagact

SEQ ID NO: 462373 - DNA, 33 bp, Homo sapien
tgtaggctggatacgaacctggggaaatttgct

SEQ ID NO: 462374 - DNA, 33 bp, Homo sapien
tgtaggctggatacgaccctggggaaatttgct

SEQ ID NO: 462375 - DNA, 33 bp, Homo sapien
cccactatggcctgcacaattagatcttaattg

SEQ ID NO: 462376 - DNA, 33 bp, Homo sapien
cccactatggcctgcataattagatcttaattg

SEQ ID NO: 462377 - DNA, 33 bp, Homo sapien
ctgaaaggagaggagaaagccttatcgtttctg

SEQ ID NO: 462378 - DNA, 33 bp, Homo sapien
ctgaaaggagaggagagagccttatcgtttctg

SEQ ID NO: 462379 - DNA, 33 bp, Homo sapien
tttgaatggatcacgaacattaaaaggtcaaga

SEQ ID NO: 462380 - DNA, 33 bp, Homo sapien
tttgaatggatcacgagcattaaaaggtcaaga

SEQ ID NO: 462381 - DNA, 33 bp, Homo sapien
agccacacctgctgacacttttcgccctcagtc

SEQ ID NO: 462382 - DNA, 33 bp, Homo sapien
agccacacctgctgacgcttttcgccctcagtc

SEQ ID NO: 462383 - DNA, 33 bp, Homo sapien
ctctctgaaatgtacaaaattgtggctcacacc

SEQ ID NO: 462384 - DNA, 33 bp, Homo sapien
ctctctgaaatgtacagaattgtggctcacacc

SEQ ID NO: 462385 - DNA, 33 bp, Homo sapien
gcggtggctgattctcacttgaatacatacctc

SEQ ID NO: 462386 - DNA, 33 bp, Homo sapien
gcggtggctgattctcgcttgaatacatacctc

SEQ ID NO: 462387 - DNA, 33 bp, Homo sapien
gagtaagaatatcacccaatgccagttaagtaa

SEQ ID NO: 462388 - DNA, 33 bp, Homo sapien
gagtaagaatatcacctaatgccagttaagtaa

SEQ ID NO: 462389 - DNA, 33 bp, Homo sapien
ttggattccagctgtactaaagaccactgaaag

SEQ ID NO: 462390 - DNA, 33 bp, Homo sapien
ttggattccagctgtattaaagaccactgaaag

SEQ ID NO: 462391 - DNA, 33 bp, Homo sapien
gaagacacttggtcaacgtacaccgagaccctt

SEQ ID NO: 462392 - DNA, 33 bp, Homo sapien
gaagacacttggtcaatgtacaccgagaccctt

SEQ ID NO: 462393 - DNA, 33 bp, Homo sapien
gagacatggaggagcacgtgggtagctagcatt

SEQ ID NO: 462394 - DNA, 33 bp, Homo sapien
gagacatggaggagcatgtgggtagctagcatt

SEQ ID NO: 462395 - DNA, 33 bp, Homo sapien
ccacaaatccaaatccaattctaacttgattcc

SEQ ID NO: 462396 - DNA, 33 bp, Homo sapien
ccacaaatccaaatccgattctaacttgattcc

SEQ ID NO: 462397 - DNA, 33 bp, Homo sapien
ggagttggagaactacaattgacagtttcacca

SEQ ID NO: 462398 - DNA, 33 bp, Homo sapien
ggagttggagaactacgattgacagtttcacca

SEQ ID NO: 462399 - DNA, 33 bp, Homo sapien
ctccaactccacccacccactgaggcggagaaa

SEQ ID NO: 462400 - DNA, 33 bp, Homo sapien
ctccaactccacccactcactgaggcggagaaa

SEQ ID NO: 462401 - DNA, 33 bp, Homo sapien
tactttaatgtctccaatggaacataagcctga

SEQ ID NO: 462402 - DNA, 33 bp, Homo sapien
tactttaatgtctccagtggaacataagcctga

SEQ ID NO: 462403 - DNA, 33 bp, Homo sapien
atcagaagtttaatgccatgcttgaaagacttc

SEQ ID NO: 462404 - DNA, 33 bp, Homo sapien
atcagaagtttaatgctatgcttgaaagacttc

SEQ ID NO: 462405 - DNA, 33 bp, Homo sapien
atgactggtccctaaagacaatgctttcttccc

SEQ ID NO: 462406 - DNA, 33 bp, Homo sapien
atgactggtccctaaatacaatgctttcttccc

SEQ ID NO: 462407 - DNA, 33 bp, Homo sapien
ctattcagacaatttacagcatcacggaaccta

SEQ ID NO: 462408 - DNA, 33 bp, Homo sapien
ctattcagacaatttagagcatcacggaaccta

SEQ ID NO: 462409 - DNA, 33 bp, Homo sapien
gtgaccatcttcctgcaaatctctttcctttta

SEQ ID NO: 462410 - DNA, 33 bp, Homo sapien
gtgaccatcttcctgcgaatctctttcctttta

SEQ ID NO: 462411 - DNA, 33 bp, Homo sapien
cagagaagccaggaagccggtcatcacccagcc

SEQ ID NO: 462412 - DNA, 33 bp, Homo sapien
cagagaagccaggaagtcggtcatcacccagcc

SEQ ID NO: 462413 - DNA, 33 bp, Homo sapien
actgtttggcctgtccgcgtcgctgctatctct

SEQ ID NO: 462414 - DNA, 33 bp, Homo sapien
actgtttggcctgtcctcgtcgctgctatctct

SEQ ID NO: 462415 - DNA, 33 bp, Homo sapien
ggaaaggatacaatacacctgacccagctgctc

SEQ ID NO: 462416 - DNA, 33 bp, Homo sapien
ggaaaggatacaatacgcctgacccagctgctc

SEQ ID NO: 462417 - DNA, 33 bp, Homo sapien
caaaataagaatgtgaaggatgaatgttaatta

SEQ ID NO: 462418 - DNA, 33 bp, Homo sapien
caaaataagaatgtgagggatgaatgttaatta

SEQ ID NO: 462419 - DNA, 33 bp, Homo sapien
gagctgctgtttaggaactggagtaagaagctg

SEQ ID NO: 462420 - DNA, 33 bp, Homo sapien
gagctgctgtttaggagctggagtaagaagctg

SEQ ID NO: 462421 - DNA, 33 bp, Homo sapien
ttggccaagacttagcagatgtaacaggtgcat

SEQ ID NO: 462422 - DNA, 33 bp, Homo sapien
ttggccaagacttagcggatgtaacaggtgcat

SEQ ID NO: 462423 - DNA, 33 bp, Homo sapien
atatgccgagctgtaaacaatccagccattctg

SEQ ID NO: 462424 - DNA, 33 bp, Homo sapien
atatgccgagctgtaaccaatccagccattctg

SEQ ID NO: 462425 - DNA, 33 bp, Homo sapien
gttactggtggagacaaggtaccaggagggagt

SEQ ID NO: 462426 - DNA, 33 bp, Homo sapien
gttactggtggagacagggtaccaggagggagt

SEQ ID NO: 462427 - DNA, 33 bp, Homo sapien
acccagggcaataatccgacccttaccccaaac

SEQ ID NO: 462428 - DNA, 33 bp, Homo sapien
acccagggcaataatctgacccttaccccaaac

SEQ ID NO: 462429 - DNA, 33 bp, Homo sapien
gctgtcaagtagaaaaagtaatagttcatctct

SEQ ID NO: 462430 - DNA, 33 bp, Homo sapien
gctgtcaagtagaaaaggtaatagttcatctct

SEQ ID NO: 462431 - DNA, 33 bp, Homo sapien
atcctgcatttcaaaccgtgcagcacagcaggt

SEQ ID NO: 462432 - DNA, 33 bp, Homo sapien
atcctgcatttcaaacggtgcagcacagcaggt

SEQ ID NO: 462433 - DNA, 33 bp, Homo sapien
cctaactgcaaaccacggagctaatccaactgc

SEQ ID NO: 462434 - DNA, 33 bp, Homo sapien
cctaactgcaaaccactgagctaatccaactgc

SEQ ID NO: 462435 - DNA, 33 bp, Homo sapien
atcctgtgctcaccgacaacttctgtccctaac

SEQ ID NO: 462436 - DNA, 33 bp, Homo sapien
atcctgtgctcaccgataacttctgtccctaac

SEQ ID NO: 462437 - DNA, 33 bp, Homo sapien
aggtaggtggcaagaccgacctttctaattttt

SEQ ID NO: 462438 - DNA, 33 bp, Homo sapien
aggtaggtggcaagactgacctttctaattttt

SEQ ID NO: 462439 - DNA, 33 bp, Homo sapien
atcaggattctagatcaaacctggattatgact

SEQ ID NO: 462440 - DNA, 33 bp, Homo sapien
atcaggattctagatcgaacctggattatgact

SEQ ID NO: 462441 - DNA, 33 bp, Homo sapien
gccagaatgcaaaccacactctagaatcttgga

SEQ ID NO: 462442 - DNA, 33 bp, Homo sapien
gccagaatgcaaaccagactctagaatcttgga

SEQ ID NO: 462443 - DNA, 33 bp, Homo sapien
ctgctttcagaacctaggctgagttcgagattt

SEQ ID NO: 462444 - DNA, 33 bp, Homo sapien
ctgctttcagaacctatgctgagttcgagattt

SEQ ID NO: 462445 - DNA, 33 bp, Homo sapien
tgtattttgcaccagaccttataaacacctctc

SEQ ID NO: 462446 - DNA, 33 bp, Homo sapien
tgtattttgcaccagatcttataaacacctctc

SEQ ID NO: 462447 - DNA, 33 bp, Homo sapien
tggagagctctcaaccacctcacgaaatgttca

SEQ ID NO: 462448 - DNA, 33 bp, Homo sapien
tggagagctctcaaccgcctcacgaaatgttca

SEQ ID NO: 462449 - DNA, 33 bp, Homo sapien
tcgctcaagaatcacaaggtgttcagccccctc

SEQ ID NO: 462450 - DNA, 33 bp, Homo sapien
tcgctcaagaatcacacggtgttcagccccctc

SEQ ID NO: 462451 - DNA, 33 bp, Homo sapien
gatgagggaataataaatgctcccagaagagag

SEQ ID NO: 462452 - DNA, 33 bp, Homo sapien
gatgagggaataataagtgctcccagaagagag

SEQ ID NO: 462453 - DNA, 33 bp, Homo sapien
cttaaatgctataaaagggaaacagtgcataga

SEQ ID NO: 462454 - DNA, 33 bp, Homo sapien
cttaaatgctataaaatggaaacagtgcataga

SEQ ID NO: 462455 - DNA, 33 bp, Homo sapien
gtcatttctctgcaaactccccaggtgagctca

SEQ ID NO: 462456 - DNA, 33 bp, Homo sapien
gtcatttctctgcaaagtccccaggtgagctca

SEQ ID NO: 462457 - DNA, 33 bp, Homo sapien
aacagaacactggggacgccgcaacacctcctc

SEQ ID NO: 462458 - DNA, 33 bp, Homo sapien
aacagaacactggggatgccgcaacacctcctc

SEQ ID NO: 462459 - DNA, 33 bp, Homo sapien
ggcttggaagggaggaaattcggaagaaaaggg

SEQ ID NO: 462460 - DNA, 33 bp, Homo sapien
ggcttggaagggaggagattcggaagaaaaggg

SEQ ID NO: 462461 - DNA, 33 bp, Homo sapien
tggggacccacataccaagaattgcaccctgag

SEQ ID NO: 462462 - DNA, 33 bp, Homo sapien
tggggacccacataccgagaattgcaccctgag

SEQ ID NO: 462463 - DNA, 33 bp, Homo sapien; identical to SEQ ID NO: 462461

SEQ ID NO: 462464 - DNA, 33 bp, Homo sapien; identical to SEQ ID NO: 462462

SEQ ID NO: 462465 - DNA, 33 bp, Homo sapien
ctgtgccaggagctctaacgggatgtgactcct

SEQ ID NO: 462466 - DNA, 33 bp, Homo sapien
ctgtgccaggagctctgacgggatgtgactcct

SEQ ID NO: 462467 - DNA, 33 bp, Homo sapien
acagacatataagtaccagttgccaccagaatc

SEQ ID NO: 462468 - DNA, 33 bp, Homo sapien
acagacatataagtactagttgccaccagaatc

SEQ ID NO: 462469 - DNA, 33 bp, Homo sapien
gtgagctacctatggaaaagcccatggtttcat

SEQ ID NO: 462470 - DNA, 33 bp, Homo sapien
gtgagctacctatggagaagcccatggtttcat

SEQ ID NO: 462471 - DNA, 33 bp, Homo sapien
ggccacgggtgaaggaaaaaccagtgcccatga

SEQ ID NO: 462472 - DNA, 33 bp, Homo sapien
ggccacgggtgaaggagaaaccagtgcccatga

SEQ ID NO: 462473 - DNA, 33 bp, Homo sapien
agacttaaggaagccaaagaatctgtagaaagg

SEQ ID NO: 462474 - DNA, 33 bp, Homo sapien
agacttaaggaagccacagaatctgtagaaagg

SEQ ID NO: 462475 - DNA, 33 bp, Homo sapien
gtgcaggtttgttacacacataaactctggtca

SEQ ID NO: 462476 - DNA, 33 bp, Homo sapien
gtgcaggtttgttacatacataaactctggtca

SEQ ID NO: 462477 - DNA, 33 bp, Homo sapien
catctcaggtccataaaaaacacgggagagtcc

SEQ ID NO: 462478 - DNA, 33 bp, Homo sapien
catctcaggtccataagaaacacgggagagtcc

SEQ ID NO: 462479 - DNA, 33 bp, Homo sapien
gtaggtttttctctcacgtttggagacgaggga

SEQ ID NO: 462480 - DNA, 33 bp, Homo sapien
gtaggtttttctctcatgtttggagacgaggga

SEQ ID NO: 462481 - DNA, 33 bp, Homo sapien
cagggttggagacctccagagaaggaaggtgag

SEQ ID NO: 462482 - DNA, 33 bp, Homo sapien
cagggttggagacctctagagaaggaaggtgag

SEQ ID NO: 462483 - DNA, 33 bp, Homo sapien
tttggaagccagatatcagagtgaagagaagtt

SEQ ID NO: 462484 - DNA, 33 bp, Homo sapien
tttggaagccagatatgagagtgaagagaagtt

SEQ ID NO: 462485 - DNA, 33 bp, Homo sapien
cacggtccctccaggcaaaggagaagtcagaag

SEQ ID NO: 462486 - DNA, 33 bp, Homo sapien
cacggtccctccaggcgaaggagaagtcagaag

SEQ ID NO: 462487 - DNA, 33 bp, Homo sapien
ctccccaaaggaaccccccatagtgctggtctc

SEQ ID NO: 462488 - DNA, 33 bp, Homo sapien
ctccccaaaggaaccctccatagtgctggtctc

SEQ ID NO: 462489 - DNA, 33 bp, Homo sapien
atgtttcagcgacatcactaaaataagaaacat

SEQ ID NO: 462490 - DNA, 33 bp, Homo sapien
atgtttcagcgacatctctaaaataagaaacat

SEQ ID NO: 462491 - DNA, 33 bp, Homo sapien
ggagagtccctggatacaatggctccttcccgg

SEQ ID NO: 462492 - DNA, 33 bp, Homo sapien
ggagagtccctggatataatggctccttcccgg

SEQ ID NO: 462493 - DNA, 33 bp, Homo sapien
caccagctccggggaacgtcactcgacaggtga

SEQ ID NO: 462494 - DNA, 33 bp, Homo sapien
caccagctccggggaatgtcactcgacaggtga

SEQ ID NO: 462495 - DNA, 33 bp, Homo sapien
ccagcacgatattggaaggtgagacgtccacaa

SEQ ID NO: 462496 - DNA, 33 bp, Homo sapien
ccagcacgatattggagggtgagacgtccacaa

SEQ ID NO: 462497 - DNA, 33 bp, Homo sapien
agctacctctctattaataaggatgaatgaaga

SEQ ID NO: 462498 - DNA, 33 bp, Homo sapien
agctacctctctattagtaaggatgaatgaaga

SEQ ID NO: 462499 - DNA, 33 bp, Homo sapien
gcttctgcccacactgaaccaaatggcagcatg

SEQ ID NO: 462500 - DNA, 33 bp, Homo sapien
gcttctgcccacactgcaccaaatggcagcatg

SEQ ID NO: 462501 - DNA, 33 bp, Homo sapien
gctggactaaacacccaatggatctaggtgagg

SEQ ID NO: 462502 - DNA, 33 bp, Homo sapien
gctggactaaacaccccatggatctaggtgagg

SEQ ID NO: 462503 - DNA, 33 bp, Homo sapien
tggcatctctggcccacgagggtcaatctgtgt

SEQ ID NO: 462504 - DNA, 33 bp, Homo sapien
tggcatctctggcccatgagggtcaatctgtgt

SEQ ID NO: 462505 - DNA, 33 bp, Homo sapien
gccactggagagtccccggatataatggctcct

SEQ ID NO: 462506 - DNA, 33 bp, Homo sapien
gccactggagagtccctggatataatggctcct

SEQ ID NO: 462507 - DNA, 33 bp, Homo sapien
ctctttcatttgctaactgtatgatgtcacaca

SEQ ID NO: 462508 - DNA, 33 bp, Homo sapien
ctctttcatttgctaagtgtatgatgtcacaca

SEQ ID NO: 462509 - DNA, 33 bp, Homo sapien
tgtctaaattgagatggcagaaagaagctcaca

SEQ ID NO: 462510 - DNA, 33 bp, Homo sapien
tgtctaaattgagatgtcagaaagaagctcaca

SEQ ID NO: 462511 - DNA, 33 bp, Homo sapien
gttaggtgctgactcacgagagtgaaaaccaaa

SEQ ID NO: 462512 - DNA, 33 bp, Homo sapien
gttaggtgctgactcatgagagtgaaaaccaaa

SEQ ID NO: 462513 - DNA, 33 bp, Homo sapien
catgaatccagaagtgacaaaccacctagtggg

SEQ ID NO: 462514 - DNA, 33 bp, Homo sapien
catgaatccagaagtgccaaaccacctagtggg

SEQ ID NO: 462515 - DNA, 33 bp, Homo sapien
gaaagtcaaacgcatgaaagcaaagtatagaat

SEQ ID NO: 462516 - DNA, 33 bp, Homo sapien
gaaagtcaaacgcatggaagcaaagtatagaat

SEQ ID NO: 462517 - DNA, 33 bp, Homo sapien
ctcaccaccaaaaaaacggtaactgtgaagtgc

SEQ ID NO: 462518 - DNA, 33 bp, Homo sapien
ctcaccaccaaaaaaatggtaactgtgaagtgc

SEQ ID NO: 462519 - DNA, 33 bp, Homo sapien
tctgatcactgctctaaccataggtaagcactg

SEQ ID NO: 462520 - DNA, 33 bp, Homo sapien
tctgatcactgctctatccataggtaagcactg

SEQ ID NO: 462521 - DNA, 33 bp, Homo sapien
atattgtgtccaactacggaagagttcccctac

SEQ ID NO: 462522 - DNA, 33 bp, Homo sapien
atattgtgtccaactatggaagagttcccctac

SEQ ID NO: 462523 - DNA, 33 bp, Homo sapien
gtgtccgaggttgctacgcctcactgttattta

SEQ ID NO: 462524 - DNA, 33 bp, Homo sapien
gtgtccgaggttgctatgcctcactgttattta

SEQ ID NO: 462525 - DNA, 33 bp, Homo sapien
tctggagaatcataaacggtaaataacagtgag

SEQ ID NO: 462526 - DNA, 33 bp, Homo sapien
tctggagaatcataaatggtaaataacagtgag

SEQ ID NO: 462527 - DNA, 33 bp, Homo sapien
cccagcattgtcgagcacaaagattaggagata

SEQ ID NO: 462528 - DNA, 33 bp, Homo sapien
cccagcattgtcgagcgcaaagattaggagata

SEQ ID NO: 462529 - DNA, 33 bp, Homo sapien
ggggctgtgcactacaatcccttgtgcatttga

SEQ ID NO: 462530 - DNA, 33 bp, Homo sapien
ggggctgtgcactacattcccttgtgcatttga

SEQ ID NO: 462531 - DNA, 33 bp, Homo sapien
atgttcaatatcatccaataagtggtttggaaa

SEQ ID NO: 462532 - DNA, 33 bp, Homo sapien
atgttcaatatcatccgataagtggtttggaaa

SEQ ID NO: 462533 - DNA, 33 bp, Homo sapien
ggtttaatggtttttcacaaatagatttccttt

SEQ ID NO: 462534 - DNA, 33 bp, Homo sapien
ggtttaatggtttttcgcaaatagatttccttt

SEQ ID NO: 462535 - DNA, 33 bp, Homo sapien
tcttctccagagctaacccaaaagccagagctc

SEQ ID NO: 462536 - DNA, 33 bp, Homo sapien
tcttctccagagctaatccaaaagccagagctc

SEQ ID NO: 462537 - DNA, 33 bp, Homo sapien
tttcctgtctgaaaacacttgctctacaaaaac

SEQ ID NO: 462538 - DNA, 33 bp, Homo sapien
tttcctgtctgaaaacgcttgctctacaaaaac

SEQ ID NO: 462539 - DNA, 33 bp, Homo sapien
cagagctgctggaggaaacagaagtacccaaaa

SEQ ID NO: 462540 - DNA, 33 bp, Homo sapien
cagagctgctggaggagacagaagtacccaaaa

SEQ ID NO: 462541 - DNA, 33 bp, Homo sapien
agatgctacatttgccaaaacaaagccccacag

SEQ ID NO: 462542 - DNA, 33 bp, Homo sapien
agatgctacatttgccgaaacaaagccccacag

SEQ ID NO: 462543 - DNA, 33 bp, Homo sapien
gcatgataatgggaccaattccacagggtctct

SEQ ID NO: 462544 - DNA, 33 bp, Homo sapien
gcatgataatgggaccgattccacagggtctct

SEQ ID NO: 462545 - DNA, 33 bp, Homo sapien
gagcctgatgtgatcccgatgggccttgctcct

SEQ ID NO: 462546 - DNA, 33 bp, Homo sapien
gagcctgatgtgatcctgatgggccttgctcct

SEQ ID NO: 462547 - DNA, 33 bp, Homo sapien
ttaaatgtatacagcacagtcaactgattagag

SEQ ID NO: 462548 - DNA, 33 bp, Homo sapien
ttaaatgtatacagcatagtcaactgattagag

SEQ ID NO: 462549 - DNA, 33 bp, Homo sapien
agaaaaggatgaggagactcagagaggataagg

SEQ ID NO: 462550 - DNA, 33 bp, Homo sapien
agaaaaggatgaggagtctcagagaggataagg

SEQ ID NO: 462551 - DNA, 33 bp, Homo sapien
atctcaaagtgggtaaccatacctgaccttgtc

SEQ ID NO: 462552 - DNA, 33 bp, Homo sapien
atctcaaagtgggtaatcatacctgaccttgtc

SEQ ID NO: 462553 - DNA, 33 bp, Homo sapien
agagaatttgtccataacatcactctgtcttct

SEQ ID NO: 462554 - DNA, 33 bp, Homo sapien
agagaatttgtccatagcatcactctgtcttct

SEQ ID NO: 462555 - DNA, 33 bp, Homo sapien
cccaccagcccttttacgtggatctccaccacc

SEQ ID NO: 462556 - DNA, 33 bp, Homo sapien
cccaccagcccttttatgtggatctccaccacc

SEQ ID NO: 462557 - DNA, 33 bp, Homo sapien
ttcctgattgagaggcagaagagaagcaggaac

SEQ ID NO: 462558 - DNA, 33 bp, Homo sapien
ttcctgattgagaggcggaagagaagcaggaac

SEQ ID NO: 462559 - DNA, 33 bp, Homo sapien
aagccatgaggcaatccgagggaacagtgttcc

SEQ ID NO: 462560 - DNA, 33 bp, Homo sapien
aagccatgaggcaatctgagggaacagtgttcc

SEQ ID NO: 462561 - DNA, 33 bp, Homo sapien
cctccagggacatccacagaagccttgctaggg

SEQ ID NO: 462562 - DNA, 33 bp, Homo sapien
cctccagggacatccagagaagccttgctaggg

SEQ ID NO: 462563 - DNA, 33 bp, Homo sapien
gccatcgcaagccccaatatattcagccaaatg

SEQ ID NO: 462564 - DNA, 33 bp, Homo sapien
gccatcgcaagccccagtatattcagccaaatg

SEQ ID NO: 462565 - DNA, 33 bp, Homo sapien
tcgcctgaggtcaaaagtttaagagcagcgtgt

SEQ ID NO: 462566 - DNA, 33 bp, Homo sapien
tcgcctgaggtcaaaattttaagagcagcgtgt

SEQ ID NO: 462567 - DNA, 33 bp, Homo sapien
ggaggagatcttgttccaatgtgtggcgaaaag

SEQ ID NO: 462568 - DNA, 33 bp, Homo sapien
ggaggagatcttgttctaatgtgtggcgaaaag

SEQ ID NO: 462569 - DNA, 33 bp, Homo sapien
gatgaacaaggaagagcacatgaatttacatac

SEQ ID NO: 462570 - DNA, 33 bp, Homo sapien
gatgaacaaggaagagtacatgaatttacatac

SEQ ID NO: 462571 - DNA, 33 bp, Homo sapien
actttgggtgctaataacgtatcaatggaggtt

SEQ ID NO: 462572 - DNA, 33 bp, Homo sapien
actttgggtgctaataccgtatcaatggaggtt

SEQ ID NO: 462573 - DNA, 33 bp, Homo sapien
ttctgttagtttcaacaggaaaataatgcattc

SEQ ID NO: 462574 - DNA, 33 bp, Homo sapien
ttctgttagtttcaacgggaaaataatgcattc

SEQ ID NO: 462575 - DNA, 33 bp, Homo sapien
attagagtttacataacagccgagctgagaaaa

SEQ ID NO: 462576 - DNA, 33 bp, Homo sapien
attagagtttacataatagccgagctgagaaaa

SEQ ID NO: 462577 - DNA, 33 bp, Homo sapien
tctatccttgattgagaagctggttacacaggg

SEQ ID NO: 462578 - DNA, 33 bp, Homo sapien
tctatccttgattgaggagctggttacacaggg

SEQ ID NO: 462579 - DNA, 33 bp, Homo sapien
gtaaggaatgaggttaagaaaggacacacgaat

SEQ ID NO: 462580 - DNA, 33 bp, Homo sapien
gtaaggaatgaggttatgaaaggacacacgaat

SEQ ID NO: 462581 - DNA, 33 bp, Homo sapien
taccaaatacaggttaaaatctccccagttctc

SEQ ID NO: 462582 - DNA, 33 bp, Homo sapien
taccaaatacaggttataatctccccagttctc

SEQ ID NO: 462583 - DNA, 33 bp, Homo sapien
ggtggagataggagaacgagcaaggcatgaggg

SEQ ID NO: 462584 - DNA, 33 bp, Homo sapien
ggtggagataggagaatgagcaaggcatgaggg

SEQ ID NO: 462585 - DNA, 33 bp, Homo sapien
ctctcaacctctgggtaaaatctcccagttctc

SEQ ID NO: 462586 - DNA, 33 bp, Homo sapien
ctctcaacctctgggtgaaatctcccagttctc

SEQ ID NO: 462587 - DNA, 33 bp, Homo sapien
aattctcatattcaggaaagagcagagaagagg

SEQ ID NO: 462588 - DNA, 33 bp, Homo sapien
aattctcatattcagggaagagcagagaagagg

SEQ ID NO: 462589 - DNA, 33 bp, Homo sapien
gaagatgatgcagaaggacaggaagaccagggc

SEQ ID NO: 462590 - DNA, 33 bp, Homo sapien
gaagatgatgcagaagtacaggaagaccagggc

SEQ ID NO: 462591 - DNA, 33 bp, Homo sapien
tccaaaagaatataccacagaactattggtgaa

SEQ ID NO: 462592 - DNA, 33 bp, Homo sapien
tccaaaagaatatacctcagaactattggtgaa

SEQ ID NO: 462593 - DNA, 33 bp, Homo sapien
ctggaacagaaagacaaggagttcccatcactt

SEQ ID NO: 462594 - DNA, 33 bp, Homo sapien
ctggaacagaaagacacggagttcccatcactt

SEQ ID NO: 462595 - DNA, 33 bp, Homo sapien
ccctggtcatggtcacaccggccccaggcaagg

SEQ ID NO: 462596 - DNA, 33 bp, Homo sapien
ccctggtcatggtcacgccggccccaggcaagg

SEQ ID NO: 462597 - DNA, 33 bp, Homo sapien
tgcaagaggatacccacggtcgattcctcctcc

SEQ ID NO: 462598 - DNA, 33 bp, Homo sapien
tgcaagaggatacccagggtcgattcctcctcc

SEQ ID NO: 462599 - DNA, 33 bp, Homo sapien
cagttcctcctgaagacgccccagcctcacttt

SEQ ID NO: 462600 - DNA, 33 bp, Homo sapien
cagttcctcctgaagatgccccagcctcacttt

SEQ ID NO: 462601 - DNA, 33 bp, Homo sapien
ggaatttggatttacacggagcctgttgccact

SEQ ID NO: 462602 - DNA, 33 bp, Homo sapien
ggaatttggatttacatggagcctgttgccact

SEQ ID NO: 462603 - DNA, 33 bp, Homo sapien
ggggacaatatcttgccgagtttactccactca

SEQ ID NO: 462604 - DNA, 33 bp, Homo sapien
ggggacaatatcttgctgagtttactccactca

SEQ ID NO: 462605 - DNA, 33 bp, Homo sapien
cattgctgtttcctcaatgacctctaaattggg

SEQ ID NO: 462606 - DNA, 33 bp, Homo sapien
cattgctgtttcctcactgacctctaaattggg

SEQ ID NO: 462607 - DNA, 33 bp, Homo sapien
gtttgtggccactggaacatctgaggctggaag

SEQ ID NO: 462608 - DNA, 33 bp, Homo sapien
gtttgtggccactggagcatctgaggctggaag

SEQ ID NO: 462609 - DNA, 33 bp, Homo sapien
aaaaaggcctctcacaagaaggtgtaaacggag

SEQ ID NO: 462610 - DNA, 33 bp, Homo sapien
aaaaaggcctctcacaggaaggtgtaaacggag

SEQ ID NO: 462611 - DNA, 33 bp, Homo sapien
ggcctgtgggacaatagcaagcattctgacaca

SEQ ID NO: 462612 - DNA, 33 bp, Homo sapien
ggcctgtgggacaatatcaagcattctgacaca

SEQ ID NO: 462613 - DNA, 33 bp, Homo sapien
aaaaatttcataacacaatcagaagtattaaca

SEQ ID NO: 462614 - DNA, 33 bp, Homo sapien
aaaaatttcataacaccatcagaagtattaaca

SEQ ID NO: 462615 - DNA, 33 bp, Homo sapien
accattcccaagacacacagtcatcaggttctc

SEQ ID NO: 462616 - DNA, 33 bp, Homo sapien
accattcccaagacacgcagtcatcaggttctc

SEQ ID NO: 462617 - DNA, 33 bp, Homo sapien
agtcgtgcactttgaagtactttgttatggcag

SEQ ID NO: 462618 - DNA, 33 bp, Homo sapien
agtcgtgcactttgaattactttgttatggcag

SEQ ID NO: 462619 - DNA, 33 bp, Homo sapien
ttctgggcctcaaagccgagcctgagacttgag

SEQ ID NO: 462620 - DNA, 33 bp, Homo sapien
ttctgggcctcaaagctgagcctgagacttgag

SEQ ID NO: 462621 - DNA, 33 bp, Homo sapien
acagaaggcccaatgaaccccgggcagatcccc

SEQ ID NO: 462622 - DNA, 33 bp, Homo sapien
acagaaggcccaatgatccccgggcagatcccc

SEQ ID NO: 462623 - DNA, 33 bp, Homo sapien
tgatgccacgaaattggagtccatccacacagt

SEQ ID NO: 462624 - DNA, 33 bp, Homo sapien
tgatgccacgaaattgtagtccatccacacagt

SEQ ID NO: 462625 - DNA, 33 bp, Homo sapien
gtgacccttttctgcacgagaaccttccatgac

SEQ ID NO: 462626 - DNA, 33 bp, Homo sapien
gtgacccttttctgcatgagaaccttccatgac

SEQ ID NO: 462627 - DNA, 33 bp, Homo sapien
ctagctatattccaaaagacatatggaccagtt

SEQ ID NO: 462628 - DNA, 33 bp, Homo sapien
ctagctatattccaaatgacatatggaccagtt

SEQ ID NO: 462629 - DNA, 33 bp, Homo sapien
aattggcaaaactgaaaagtgactgtcaagaag

SEQ ID NO: 462630 - DNA, 33 bp, Homo sapien
aattggcaaaactgaacagtgactgtcaagaag

SEQ ID NO: 462631 - DNA, 33 bp, Homo sapien
ccctgtcagtcctgaagaaccaatccctgcgtt

SEQ ID NO: 462632 - DNA, 33 bp, Homo sapien
ccctgtcagtcctgaataaccaatccctgcgtt

SEQ ID NO: 462633 - DNA, 33 bp, Homo sapien
aggccatttctagtcacagttgtctttgcactg

SEQ ID NO: 462634 - DNA, 33 bp, Homo sapien
aggccatttctagtcatagttgtctttgcactg

SEQ ID NO: 462635 - DNA, 33 bp, Homo sapien
agggaagaggatagaaatgtgcataatcatgtg

SEQ ID NO: 462636 - DNA, 33 bp, Homo sapien
agggaagaggatagaagtgtgcataatcatgtg

SEQ ID NO: 462637 - DNA, 33 bp, Homo sapien
agctcacacagaaaccaaagaaaggtctgtgag

SEQ ID NO: 462638 - DNA, 33 bp, Homo sapien
agctcacacagaaacccaagaaaggtctgtgag

SEQ ID NO: 462639 - DNA, 33 bp, Homo sapien
tcatgtaaccacaagccagatagttttcaggaa

SEQ ID NO: 462640 - DNA, 33 bp, Homo sapien
tcatgtaaccacaagctagatagttttcaggaa

SEQ ID NO: 462641 - DNA, 33 bp, Homo sapien
gcacactgttgagcacccaatttgtcgctgttc

SEQ ID NO: 462642 - DNA, 33 bp, Homo sapien
gcacactgttgagcactcaatttgtcgctgttc

SEQ ID NO: 462643 - DNA, 33 bp, Homo sapien
acttgacagagaaaaaaagaattcccaggtgat

SEQ ID NO: 462644 - DNA, 33 bp, Homo sapien
acttgacagagaaaaacagaattcccaggtgat

SEQ ID NO: 462645 - DNA, 33 bp, Homo sapien
cctactcatcctactacatctgggtgtctagac

SEQ ID NO: 462646 - DNA, 33 bp, Homo sapien
cctactcatcctactagatctgggtgtctagac

SEQ ID NO: 462647 - DNA, 33 bp, Homo sapien
cctgttggctttaacaacttagtttcctcccta

SEQ ID NO: 462648 - DNA, 33 bp, Homo sapien
cctgttggctttaacaccttagtttcctcccta

SEQ ID NO: 462649 - DNA, 33 bp, Homo sapien
gtactgagaggaaagaaaaaatagtatgagaca

SEQ ID NO: 462650 - DNA, 33 bp, Homo sapien
gtactgagaggaaagagaaaatagtatgagaca

SEQ ID NO: 462651 - DNA, 33 bp, Homo sapien
tatggagataattttaagctctgggtcacatta

SEQ ID NO: 462652 - DNA, 33 bp, Homo sapien
tatggagataattttaggctctgggtcacatta

SEQ ID NO: 462653 - DNA, 33 bp, Homo sapien
gtaaatatgccctgaaaaaggataatgtgaccc

SEQ ID NO: 462654 - DNA, 33 bp, Homo sapien
gtaaatatgccctgaagaaggataatgtgaccc

SEQ ID NO: 462655 - DNA, 33 bp, Homo sapien
ctcagatatgggacacaggaacacctaagctct

SEQ ID NO: 462656 - DNA, 33 bp, Homo sapien
ctcagatatgggacacgggaacacctaagctct

SEQ ID NO: 462657 - DNA, 33 bp, Homo sapien
taaatttttctcatgacggctaaaagaacagaa

SEQ ID NO: 462658 - DNA, 33 bp, Homo sapien
taaatttttctcatgatggctaaaagaacagaa

SEQ ID NO: 462659 - DNA, 33 bp, Homo sapien
ggttgttgtgaacattaaagaaatcaacacatg

SEQ ID NO: 462660 - DNA, 33 bp, Homo sapien
ggttgttgtgaacatttaagaaatcaacacatg

SEQ ID NO: 462661 - DNA, 33 bp, Homo sapien
gacacaggagtcaatacgtaagtcaagtaggtt

SEQ ID NO: 462662 - DNA, 33 bp, Homo sapien
gacacaggagtcaataggtaagtcaagtaggtt

SEQ ID NO: 462663 - DNA, 33 bp, Homo sapien
ggtccctggagtttgacgtcctgcattcaggtt

SEQ ID NO: 462664 - DNA, 33 bp, Homo sapien
ggtccctggagtttgatgtcctgcattcaggtt

SEQ ID NO: 462665 - DNA, 33 bp, Homo sapien
tttaggtgatgctaaaagaaagctcgtgtgtgt

SEQ ID NO: 462666 - DNA, 33 bp, Homo sapien
tttaggtgatgctaaaggaaagctcgtgtgtgt

SEQ ID NO: 462667 - DNA, 33 bp, Homo sapien
cttatccttgtctcaccgtactaacacacacga

SEQ ID NO: 462668 - DNA, 33 bp, Homo sapien
cttatccttgtctcactgtactaacacacacga

SEQ ID NO: 462669 - DNA, 33 bp, Homo sapien
ggagagactgaatctcagaaacacagagctaag

SEQ ID NO: 462670 - DNA, 33 bp, Homo sapien
ggagagactgaatctcggaaacacagagctaag

SEQ ID NO: 462671 - DNA, 33 bp, Homo sapien
aagctatctcttccaacgaaaattacccaaaca

SEQ ID NO: 462672 - DNA, 33 bp, Homo sapien
aagctatctcttccaatgaaaattacccaaaca

SEQ ID NO: 462673 - DNA, 33 bp, Homo sapien
taacttttttgtctaccagctcagtctattact

SEQ ID NO: 462674 - DNA, 33 bp, Homo sapien
taacttttttgtctactagctcagtctattact

SEQ ID NO: 462675 - DNA, 33 bp, Homo sapien
aagcaaacttaaccaacataaaagactctcacg

SEQ ID NO: 462676 - DNA, 33 bp, Homo sapien
aagcaaacttaaccaatataaaagactctcacg

SEQ ID NO: 462677 - DNA, 33 bp, Homo sapien
ctgacaagagagaaaagaatttacagtcaaaac

SEQ ID NO: 462678 - DNA, 33 bp, Homo sapien
ctgacaagagagaaaataatttacagtcaaaac

SEQ ID NO: 462679 - DNA, 33 bp, Homo sapien
taagcactctgattcaatagaagaggaagtttc

SEQ ID NO: 462680 - DNA, 33 bp, Homo sapien
taagcactctgattcagtagaagaggaagtttc

SEQ ID NO: 462681 - DNA, 33 bp, Homo sapien
attaataaccagaatacgtaaggagctcaaaca

SEQ ID NO: 462682 - DNA, 33 bp, Homo sapien
attaataaccagaatatgtaaggagctcaaaca

SEQ ID NO: 462683 - DNA, 33 bp, Homo sapien
aaggaaatcagtatacagaagagatatctgcac

SEQ ID NO: 462684 - DNA, 33 bp, Homo sapien
aaggaaatcagtatacggaagagatatctgcac

SEQ ID NO: 462685 - DNA, 33 bp, Homo sapien
tctggtagcaactatcagaaaattaaacttaag

SEQ ID NO: 462686 - DNA, 33 bp, Homo sapien
tctggtagcaactatcggaaaattaaacttaag

SEQ ID NO: 462687 - DNA, 33 bp, Homo sapien
caatttcagctagacgaatttttatttaatggc

SEQ ID NO: 462688 - DNA, 33 bp, Homo sapien
caatttcagctagacgcatttttatttaatggc

SEQ ID NO: 462689 - DNA, 33 bp, Homo sapien
gctcgctctgtacaaacaattgtgaagctcttt

SEQ ID NO: 462690 - DNA, 33 bp, Homo sapien
gctcgctctgtacaaataattgtgaagctcttt

SEQ ID NO: 462691 - DNA, 33 bp, Homo sapien
agaagaggaggatggaaatgatgaaagaggaga

SEQ ID NO: 462692 - DNA, 33 bp, Homo sapien
agaagaggaggatggagatgatgaaagaggaga

SEQ ID NO: 462693 - DNA, 33 bp, Homo sapien
agaatgtcaatagtgacaaattgtaaaaccctt

SEQ ID NO: 462694 - DNA, 33 bp, Homo sapien
agaatgtcaatagtgataaattgtaaaaccctt

SEQ ID NO: 462695 - DNA, 33 bp, Homo sapien
gcctcaaaatatataaatccaaagttgtcagaa

SEQ ID NO: 462696 - DNA, 33 bp, Homo sapien
gcctcaaaatatataagtccaaagttgtcagaa

SEQ ID NO: 462697 - DNA, 33 bp, Homo sapien
agcagtccaaatgtaggccagaaagaggaaaaa

SEQ ID NO: 462698 - DNA, 33 bp, Homo sapien
agcagtccaaatgtagtccagaaagaggaaaaa

SEQ ID NO: 462699 - DNA, 33 bp, Homo sapien
tattggaatgtgcaaactgagtaaagggttcta

SEQ ID NO: 462700 - DNA, 33 bp, Homo sapien
tattggaatgtgcaaattgagtaaagggttcta

SEQ ID NO: 462701 - DNA, 33 bp, Homo sapien
taagagagacacaaaacggttatcaatttaggc

SEQ ID NO: 462702 - DNA, 33 bp, Homo sapien
taagagagacacaaaatggttatcaatttaggc

SEQ ID NO: 462703 - DNA, 33 bp, Homo sapien
ttcatgtaagatatcacagtgaaattgaagtgg

SEQ ID NO: 462704 - DNA, 33 bp, Homo sapien
ttcatgtaagatatcagagtgaaattgaagtgg

SEQ ID NO: 462705 - DNA, 33 bp, Homo sapien
tagcaggaatgacttccctctgcagtaatagta

SEQ ID NO: 462706 - DNA, 33 bp, Homo sapien
tagcaggaatgacttctctctgcagtaatagta

SEQ ID NO: 462707 - DNA, 33 bp, Homo sapien
ttttgaagtagaagacaaaggattttcaaaatt

SEQ ID NO: 462708 - DNA, 33 bp, Homo sapien
ttttgaagtagaagacgaaggattttcaaaatt

SEQ ID NO: 462709 - DNA, 33 bp, Homo sapien
acttcctacaagtccaacaggggcaaattacca

SEQ ID NO: 462710 - DNA, 33 bp, Homo sapien
acttcctacaagtccaccaggggcaaattacca

SEQ ID NO: 462711 - DNA, 33 bp, Homo sapien
caaagggccaaattacaagacaaatgaggttcc

SEQ ID NO: 462712 - DNA, 33 bp, Homo sapien
caaagggccaaattacgagacaaatgaggttcc

SEQ ID NO: 462713 - DNA, 33 bp, Homo sapien
aagccagtttattctacagcgcagggctctgta

SEQ ID NO: 462714 - DNA, 33 bp, Homo sapien
aagccagtttattctatagcgcagggctctgta

SEQ ID NO: 462715 - DNA, 33 bp, Homo sapien
tggagtgaaatgttccaaacaggccaagtggcc

SEQ ID NO: 462716 - DNA, 33 bp, Homo sapien
tggagtgaaatgttccgaacaggccaagtggcc

SEQ ID NO: 462717 - DNA, 33 bp, Homo sapien
ccttccctgatgctgcagagaaaatgaagaagg

SEQ ID NO: 462718 - DNA, 33 bp, Homo sapien
ccttccctgatgctgcggagaaaatgaagaagg

SEQ ID NO: 462719 - DNA, 33 bp, Homo sapien
ctcactgagaaagtgacgtttgaataaaaactt

SEQ ID NO: 462720 - DNA, 33 bp, Homo sapien
ctcactgagaaagtgatgtttgaataaaaactt

SEQ ID NO: 462721 - DNA, 33 bp, Homo sapien
gccaggtccactgaaagacccagaggaaacttg

SEQ ID NO: 462722 - DNA, 33 bp, Homo sapien
gccaggtccactgaaatacccagaggaaacttg

SEQ ID NO: 462723 - DNA, 33 bp, Homo sapien
agtgaagttcaggggacagtgatttctgcaaag

SEQ ID NO: 462724 - DNA, 33 bp, Homo sapien
agtgaagttcaggggagagtgatttctgcaaag

SEQ ID NO: 462725 - DNA, 33 bp, Homo sapien
agtgaggttggaaaaaagatatggatgacgatt

SEQ ID NO: 462726 - DNA, 33 bp, Homo sapien
agtgaggttggaaaaaggatatggatgacgatt

SEQ ID NO: 462727 - DNA, 33 bp, Homo sapien
ctaaagagaggataaaggtggccgttgccatgt

SEQ ID NO: 462728 - DNA, 33 bp, Homo sapien
ctaaagagaggataaatgtggccgttgccatgt

SEQ ID NO: 462729 - DNA, 33 bp, Homo sapien
gttaccttggtgcaacagttctgaagaaaatgg

SEQ ID NO: 462730 - DNA, 33 bp, Homo sapien
gttaccttggtgcaacggttctgaagaaaatgg

SEQ ID NO: 462731 - DNA, 33 bp, Homo sapien
gtttcaggctcattcagattataaagtttagtc

SEQ ID NO: 462732 - DNA, 33 bp, Homo sapien
gtttcaggctcattcatattataaagtttagtc

SEQ ID NO: 462733 - DNA, 33 bp, Homo sapien
gaggtcactctcgtggccatcttgattttggtg

SEQ ID NO: 462734 - DNA, 33 bp, Homo sapien
gaggtcactctcgtggtcatcttgattttggtg

SEQ ID NO: 462735 - DNA, 33 bp, Homo sapien
aatctgaacatatctcacctcagatctaaaatt

SEQ ID NO: 462736 - DNA, 33 bp, Homo sapien
aatctgaacatatctcgcctcagatctaaaatt

SEQ ID NO: 462737 - DNA, 33 bp, Homo sapien
gttccaatgacaccaacaaattgctagaatggc

SEQ ID NO: 462738 - DNA, 33 bp, Homo sapien
gttccaatgacaccaataaattgctagaatggc

SEQ ID NO: 462739 - DNA, 33 bp, Homo sapien
ctcctgatttctcaaaagttcagatacattagt

SEQ ID NO: 462740 - DNA, 33 bp, Homo sapien
ctcctgatttctcaaacgttcagatacattagt

SEQ ID NO: 462741 - DNA, 33 bp, Homo sapien
ggaatagagagacagcaataaggaacaactgat

SEQ ID NO: 462742 - DNA, 33 bp, Homo sapien
ggaatagagagacagcgataaggaacaactgat

SEQ ID NO: 462743 - DNA, 33 bp, Homo sapien
aaaaatgcaacatccaaatgaccaatcaggttt

SEQ ID NO: 462744 - DNA, 33 bp, Homo sapien
aaaaatgcaacatccagatgaccaatcaggttt

SEQ ID NO: 462745 - DNA, 33 bp, Homo sapien
ctgcaaagcagaatgcccaggtacagcctatct

SEQ ID NO: 462746 - DNA, 33 bp, Homo sapien
ctgcaaagcagaatgctcaggtacagcctatct

SEQ ID NO: 462747 - DNA, 33 bp, Homo sapien
aaatatgaatattcagaatgagccaggtgcagg

SEQ ID NO: 462748 - DNA, 33 bp, Homo sapien
aaatatgaatattcaggatgagccaggtgcagg

SEQ ID NO: 462749 - DNA, 33 bp, Homo sapien
aagtctggaagccatcagaaggtattgcgaata

SEQ ID NO: 462750 - DNA, 33 bp, Homo sapien
aagtctggaagccatcggaaggtattgcgaata

SEQ ID NO: 462751 - DNA, 33 bp, Homo sapien
cgtcttactcattctacctacagaacatgctga

SEQ ID NO: 462752 - DNA, 33 bp, Homo sapien
cgtcttactcattctatctacagaacatgctga

SEQ ID NO: 462753 - DNA, 33 bp, Homo sapien
gcaatcctaaggtcaaccggctctgtatgccat

SEQ ID NO: 462754 - DNA, 33 bp, Homo sapien
gcaatcctaaggtcaatcggctctgtatgccat

SEQ ID NO: 462755 - DNA, 33 bp, Homo sapien
ctgacatggttacttacgttacttcttttgtaa

SEQ ID NO: 462756 - DNA, 33 bp, Homo sapien
ctgacatggttacttatgttacttcttttgtaa

SEQ ID NO: 462757 - DNA, 33 bp, Homo sapien
tgtggaagccatagaacagtgctgagaagaata

SEQ ID NO: 462758 - DNA, 33 bp, Homo sapien
tgtggaagccatagaagagtgctgagaagaata

SEQ ID NO: 462759 - DNA, 33 bp, Homo sapien
tataatcctttattgccagacgtcatgtggcca

SEQ ID NO: 462760 - DNA, 33 bp, Homo sapien
tataatcctttattgctagacgtcatgtggcca

SEQ ID NO: 462761 - DNA, 33 bp, Homo sapien
accagcctgtataacacagtgagttcttgtctc

SEQ ID NO: 462762 - DNA, 33 bp, Homo sapien
accagcctgtataacatagtgagttcttgtctc

SEQ ID NO: 462763 - DNA, 33 bp, Homo sapien
aagatctctcaccaaaactcatcccacactggc

SEQ ID NO: 462764 - DNA, 33 bp, Homo sapien
aagatctctcaccaaatctcatcccacactggc

SEQ ID NO: 462765 - DNA, 33 bp, Homo sapien
taaatacagatacagaaaaaggcaatgagaacc

SEQ ID NO: 462766 - DNA, 33 bp, Homo sapien
taaatacagatacagagaaaggcaatgagaacc

SEQ ID NO: 462767 - DNA, 33 bp, Homo sapien
gggtttgaggaattcaaggtggcccaaattcat

SEQ ID NO: 462768 - DNA, 33 bp, Homo sapien
gggtttgaggaattcacggtggcccaaattcat

SEQ ID NO: 462769 - DNA, 33 bp, Homo sapien
agaaaggaaacaatgaaatgagccttatgattg

SEQ ID NO: 462770 - DNA, 33 bp, Homo sapien
agaaaggaaacaatgagatgagccttatgattg

SEQ ID NO: 462771 - DNA, 33 bp, Homo sapien
ggacagctttccatgacagaaaggaaacaatga

SEQ ID NO: 462772 - DNA, 33 bp, Homo sapien
ggacagctttccatgagagaaaggaaacaatga

SEQ ID NO: 462773 - DNA, 33 bp, Homo sapien
attccgtactcataataaagtatgttagtttct

SEQ ID NO: 462774 - DNA, 33 bp, Homo sapien
attccgtactcataatgaagtatgttagtttct

SEQ ID NO: 462775 - DNA, 33 bp, Homo sapien
tccccccttttttagaatcagagtcttattctg

SEQ ID NO: 462776 - DNA, 33 bp, Homo sapien
tccccccttttttagagtcagagtcttattctg

SEQ ID NO: 462777 - DNA, 33 bp, Homo sapien
atcttctactctggataacaaaacctaaatgag

SEQ ID NO: 462778 - DNA, 33 bp, Homo sapien
atcttctactctggattacaaaacctaaatgag

SEQ ID NO: 462779 - DNA, 33 bp, Homo sapien
tttccaggaggaaagacaatcacagtttctaac

SEQ ID NO: 462780 - DNA, 33 bp, Homo sapien
tttccaggaggaaagagaatcacagtttctaac

SEQ ID NO: 462781 - DNA, 33 bp, Homo sapien
gcattgccgtcacttaccttttctttcttattt

SEQ ID NO: 462782 - DNA, 33 bp, Homo sapien
gcattgccgtcacttatcttttctttcttattt

SEQ ID NO: 462783 - DNA, 33 bp, Homo sapien
gtctctgccggctaaacggtcttgtctgcatct

SEQ ID NO: 462784 - DNA, 33 bp, Homo sapien
gtctctgccggctaaatggtcttgtctgcatct

SEQ ID NO: 462785 - DNA, 33 bp, Homo sapien
ggaaaatccttccacaacaagtcacagcttaag

SEQ ID NO: 462786 - DNA, 33 bp, Homo sapien
ggaaaatccttccacagcaagtcacagcttaag

SEQ ID NO: 462787 - DNA, 33 bp, Homo sapien
tctcatgttagcaagaagatttaatggctgcat

SEQ ID NO: 462788 - DNA, 33 bp, Homo sapien
tctcatgttagcaagaggatttaatggctgcat

SEQ ID NO: 462789 - DNA, 33 bp, Homo sapien
aagcaagagagttcaaatgaaggaaggaggagg

SEQ ID NO: 462790 - DNA, 33 bp, Homo sapien
aagcaagagagttcaagtgaaggaaggaggagg

SEQ ID NO: 462791 - DNA, 33 bp, Homo sapien
ttattatcactccaaacgctgcagtttaaagtc

SEQ ID NO: 462792 - DNA, 33 bp, Homo sapien
ttattatcactccaaatgctgcagtttaaagtc

SEQ ID NO: 462793 - DNA, 33 bp, Homo sapien
agtaggagaattgctcaaatgtgggagaatcgc

SEQ ID NO: 462794 - DNA, 33 bp, Homo sapien
agtaggagaattgctcgaatgtgggagaatcgc

SEQ ID NO: 462795 - DNA, 33 bp, Homo sapien
cctctatcgaaaaatcaaaaactcaagtaaaaa

SEQ ID NO: 462796 - DNA, 33 bp, Homo sapien
cctctatcgaaaaatccaaaactcaagtaaaaa

SEQ ID NO: 462797 - DNA, 33 bp, Homo sapien
tgtatgtctctttcaaatgatataggcatatgc

SEQ ID NO: 462798 - DNA, 33 bp, Homo sapien
tgtatgtctctttcaactgatataggcatatgc

SEQ ID NO: 462799 - DNA, 33 bp, Homo sapien
ccagtggcttagtaaacggagtcacattaaatg

SEQ ID NO: 462800 - DNA, 33 bp, Homo sapien
ccagtggcttagtaaatggagtcacattaaatg

SEQ ID NO: 462801 - DNA, 33 bp, Homo sapien
ttagacgcccccaatagacagactattttcttt

SEQ ID NO: 462802 - DNA, 33 bp, Homo sapien
ttagacgcccccaatatacagactattttcttt

SEQ ID NO: 462803 - DNA, 33 bp, Homo sapien
taaatatttctgagtacggagtgaatttagaag

SEQ ID NO: 462804 - DNA, 33 bp, Homo sapien
taaatatttctgagtatggagtgaatttagaag

SEQ ID NO: 462805 - DNA, 33 bp, Homo sapien
aagcaagattgtgatacgtttgacttacatgaa

SEQ ID NO: 462806 - DNA, 33 bp, Homo sapien
aagcaagattgtgatatgtttgacttacatgaa

SEQ ID NO: 462807 - DNA, 33 bp, Homo sapien
ttaattccaaaacctgaatcagaaacctccgta

SEQ ID NO: 462808 - DNA, 33 bp, Homo sapien
ttaattccaaaacctggatcagaaacctccgta

SEQ ID NO: 462809 - DNA, 33 bp, Homo sapien
cccaaacaaaacctgaaccataaaccgattcgc

SEQ ID NO: 462810 - DNA, 33 bp, Homo sapien
cccaaacaaaacctgagccataaaccgattcgc

SEQ ID NO: 462811 - DNA, 33 bp, Homo sapien
tatcgcaggggaactacaagaggtccgtgatag

SEQ ID NO: 462812 - DNA, 33 bp, Homo sapien
tatcgcaggggaactataagaggtccgtgatag

SEQ ID NO: 462813 - DNA, 33 bp, Homo sapien
gttaagaaggagatcacgttatactacgtgtgc

SEQ ID NO: 462814 - DNA, 33 bp, Homo sapien
gttaagaaggagatcatgttatactacgtgtgc

SEQ ID NO: 462815 - DNA, 33 bp, Homo sapien
atgtctttaaaaaccacgtgtgcccatgtactg

SEQ ID NO: 462816 - DNA, 33 bp, Homo sapien
atgtctttaaaaaccatgtgtgcccatgtactg

SEQ ID NO: 462817 - DNA, 33 bp, Homo sapien
caggagtgggctgataaaactttgccgtggcag

SEQ ID NO: 462818 - DNA, 33 bp, Homo sapien
caggagtgggctgatacaactttgccgtggcag

SEQ ID NO: 462819 - DNA, 33 bp, Homo sapien
gttgacaatctatatcaatttgacagctttcta

SEQ ID NO: 462820 - DNA, 33 bp, Homo sapien
gttgacaatctatatcgatttgacagctttcta

SEQ ID NO: 462821 - DNA, 33 bp, Homo sapien
cttataccaaaacctaacaatctgtcaaactcc

SEQ ID NO: 462822 - DNA, 33 bp, Homo sapien
cttataccaaaacctagcaatctgtcaaactcc

SEQ ID NO: 462823 - DNA, 33 bp, Homo sapien
agatctgtgaaaagtcaatttctgctgtttaaa

SEQ ID NO: 462824 - DNA, 33 bp, Homo sapien
agatctgtgaaaagtccatttctgctgtttaaa

SEQ ID NO: 462825 - DNA, 33 bp, Homo sapien
tctgtgtggctataacaaaataagagagactaa

SEQ ID NO: 462826 - DNA, 33 bp, Homo sapien
tctgtgtggctataacgaaataagagagactaa

SEQ ID NO: 462827 - DNA, 33 bp, Homo sapien
cctccatattgtttaaagtacccaaattgattc

SEQ ID NO: 462828 - DNA, 33 bp, Homo sapien
cctccatattgtttaaggtacccaaattgattc

SEQ ID NO: 462829 - DNA, 33 bp, Homo sapien
ctggagttagcaactacaggaaagaagcaattg

SEQ ID NO: 462830 - DNA, 33 bp, Homo sapien
ctggagttagcaactataggaaagaagcaattg

SEQ ID NO: 462831 - DNA, 33 bp, Homo sapien
cctcttccctgttacacctcctttgttcccact

SEQ ID NO: 462832 - DNA, 33 bp, Homo sapien
cctcttccctgttacatctcctttgttcccact

SEQ ID NO: 462833 - DNA, 33 bp, Homo sapien
aatataactgtatttgaatatatggcatctaca

SEQ ID NO: 462834 - DNA, 33 bp, Homo sapien
aatataactgtatttggatatatggcatctaca

SEQ ID NO: 462835 - DNA, 33 bp, Homo sapien
ggtgtttgatgaaaaactgaagcagaaagttta

SEQ ID NO: 462836 - DNA, 33 bp, Homo sapien
ggtgtttgatgaaaaattgaagcagaaagttta

SEQ ID NO: 462837 - DNA, 33 bp, Homo sapien
aacaaaatacaggaagaagataagctgtaggtc

SEQ ID NO: 462838 - DNA, 33 bp, Homo sapien
aacaaaatacaggaagcagataagctgtaggtc

SEQ ID NO: 462839 - DNA, 33 bp, Homo sapien
atatgcggagacctgacagatgtaaaggatgta

SEQ ID NO: 462840 - DNA, 33 bp, Homo sapien
atatgcggagacctgagagatgtaaaggatgta

SEQ ID NO: 462841 - DNA, 33 bp, Homo sapien
atgcctagtgagttccaatgcctggggaaagcc

SEQ ID NO: 462842 - DNA, 33 bp, Homo sapien
atgcctagtgagttccgatgcctggggaaagcc

SEQ ID NO: 462843 - DNA, 33 bp, Homo sapien
gaaaacttacagatacaatgaaggctgctttga

SEQ ID NO: 462844 - DNA, 33 bp, Homo sapien
gaaaacttacagatacgatgaaggctgctttga

SEQ ID NO: 462845 - DNA, 33 bp, Homo sapien
ggttggacagtttaaaaagtggttgcttctgtt

SEQ ID NO: 462846 - DNA, 33 bp, Homo sapien
ggttggacagtttaaagagtggttgcttctgtt

SEQ ID NO: 462847 - DNA, 33 bp, Homo sapien
atgcagtaaaggaaaactgagcaaagaatgaaa

SEQ ID NO: 462848 - DNA, 33 bp, Homo sapien
atgcagtaaaggaaaattgagcaaagaatgaaa

SEQ ID NO: 462849 - DNA, 33 bp, Homo sapien
gcagctctgggttccacgccctcaggaccaatg

SEQ ID NO: 462850 - DNA, 33 bp, Homo sapien
gcagctctgggttccatgccctcaggaccaatg

SEQ ID NO: 462851 - DNA, 33 bp, Homo sapien
acataaaaatatgtacacttcaaaaacttgcaa

SEQ ID NO: 462852 - DNA, 33 bp, Homo sapien
acataaaaatatgtacgcttcaaaaacttgcaa

SEQ ID NO: 462853 - DNA, 33 bp, Homo sapien
aggcaaaagagatagcaagagcggtggggggtt

SEQ ID NO: 462854 - DNA, 33 bp, Homo sapien
aggcaaaagagatagcgagagcggtggggggtt

SEQ ID NO: 462855 - DNA, 33 bp, Homo sapien
tcccagcagtttaggaaacagaggcggaaggat

SEQ ID NO: 462856 - DNA, 33 bp, Homo sapien
tcccagcagtttaggagacagaggcggaaggat

SEQ ID NO: 462857 - DNA, 33 bp, Homo sapien
aactttggaagactaacacaagggtcagcagac

SEQ ID NO: 462858 - DNA, 33 bp, Homo sapien
aactttggaagactaatacaagggtcagcagac

SEQ ID NO: 462859 - DNA, 33 bp, Homo sapien
tggaaagtgacgatcaaagaggtaaagacacct

SEQ ID NO: 462860 - DNA, 33 bp, Homo sapien
tggaaagtgacgatcagagaggtaaagacacct

SEQ ID NO: 462861 - DNA, 33 bp, Homo sapien
tctagcgggtgtgaaacactgactgagtgattc

SEQ ID NO: 462862 - DNA, 33 bp, Homo sapien
tctagcgggtgtgaaatactgactgagtgattc

SEQ ID NO: 462863 - DNA, 33 bp, Homo sapien
tcacacagcaaataagcagtagaacccaacctg

SEQ ID NO: 462864 - DNA, 33 bp, Homo sapien
tcacacagcaaataagtagtagaacccaacctg

SEQ ID NO: 462865 - DNA, 33 bp, Homo sapien
taggttactgcaggaaatagttctcaaaggatg

SEQ ID NO: 462866 - DNA, 33 bp, Homo sapien
taggttactgcaggaagtagttctcaaaggatg

SEQ ID NO: 462867 - DNA, 33 bp, Homo sapien
atttatctctgtgaagccctgtttgaagtaata

SEQ ID NO: 462868 - DNA, 33 bp, Homo sapien
atttatctctgtgaagtcctgtttgaagtaata

SEQ ID NO: 462869 - DNA, 33 bp, Homo sapien
ttcaaccactccaagaggtaggttccactactg

SEQ ID NO: 462870 - DNA, 33 bp, Homo sapien
ttcaaccactccaagatgtaggttccactactg

SEQ ID NO: 462871 - DNA, 33 bp, Homo sapien
gccaaagagagaaaaaaggacttactatgtgct

SEQ ID NO: 462872 - DNA, 33 bp, Homo sapien
gccaaagagagaaaaagggacttactatgtgct

SEQ ID NO: 462873 - DNA, 33 bp, Homo sapien
tcttctcatttgtaaagaattcatactgtaaag

SEQ ID NO: 462874 - DNA, 33 bp, Homo sapien
tcttctcatttgtaaataattcatactgtaaag

SEQ ID NO: 462875 - DNA, 33 bp, Homo sapien
catatttaaatcgcccaatagaatggaatcaag

SEQ ID NO: 462876 - DNA, 33 bp, Homo sapien
catatttaaatcgcccgatagaatggaatcaag

SEQ ID NO: 462877 - DNA, 33 bp, Homo sapien
aggaccaggatgtggacgtcaaatactttgccc

SEQ ID NO: 462878 - DNA, 33 bp, Homo sapien
aggaccaggatgtggatgtcaaatactttgccc

SEQ ID NO: 462879 - DNA, 33 bp, Homo sapien
cagatcagccctatcacggaggcttggtccaga

SEQ ID NO: 462880 - DNA, 33 bp, Homo sapien
cagatcagccctatcatggaggcttggtccaga

SEQ ID NO: 462881 - DNA, 33 bp, Homo sapien
gtggccatgggggagactattgagacagggcag

SEQ ID NO: 462882 - DNA, 33 bp, Homo sapien
gtggccatgggggagattattgagacagggcag

SEQ ID NO: 462883 - DNA, 33 bp, Homo sapien
tgtgctggtatctcccaagagtctgcatgtcag

SEQ ID NO: 462884 - DNA, 33 bp, Homo sapien
tgtgctggtatctcccgagagtctgcatgtcag

SEQ ID NO: 462885 - DNA, 33 bp, Homo sapien
gatgaggcagtacagccgatatttgggttacat

SEQ ID NO: 462886 - DNA, 33 bp, Homo sapien
gatgaggcagtacagctgatatttgggttacat

SEQ ID NO: 462887 - DNA, 33 bp, Homo sapien
tttgtgctacctagtcaatggcattttgttatg

SEQ ID NO: 462888 - DNA, 33 bp, Homo sapien
tttgtgctacctagtccatggcattttgttatg

SEQ ID NO: 462889 - DNA, 33 bp, Homo sapien
aataatgggagatgtacgcccagattctgcttt

SEQ ID NO: 462890 - DNA, 33 bp, Homo sapien
aataatgggagatgtatgcccagattctgcttt

SEQ ID NO: 462891 - DNA, 33 bp, Homo sapien
actgattggttttagacgcagaacttcctgttg

SEQ ID NO: 462892 - DNA, 33 bp, Homo sapien
actgattggttttagatgcagaacttcctgttg

SEQ ID NO: 462893 - DNA, 33 bp, Homo sapien
gttgctgtctttggacaaatcgttaacttttct

SEQ ID NO: 462894 - DNA, 33 bp, Homo sapien
gttgctgtctttggacgaatcgttaacttttct

SEQ ID NO: 462895 - DNA, 33 bp, Homo sapien
atcagaaatcaggaagcaagatccaaaacatct

SEQ ID NO: 462896 - DNA, 33 bp, Homo sapien
atcagaaatcaggaaggaagatccaaaacatct

SEQ ID NO: 462897 - DNA, 33 bp, Homo sapien
ttataaatcacagttcactggaatttcacaaaa

SEQ ID NO: 462898 - DNA, 33 bp, Homo sapien
ttataaatcacagttccctggaatttcacaaaa

SEQ ID NO: 462899 - DNA, 33 bp, Homo sapien
ctgtcactgctgaggtcacaatagtaaagtata

SEQ ID NO: 462900 - DNA, 33 bp, Homo sapien
ctgtcactgctgaggtgacaatagtaaagtata

SEQ ID NO: 462901 - DNA, 33 bp, Homo sapien
ccctaataaaaaatcaaaacgtatggccaggcg

SEQ ID NO: 462902 - DNA, 33 bp, Homo sapien
ccctaataaaaaatcataacgtatggccaggcg

SEQ ID NO: 462903 - DNA, 33 bp, Homo sapien
atgttagttgtgtgtacgatattgagcctagaa

SEQ ID NO: 462904 - DNA, 33 bp, Homo sapien
atgttagttgtgtgtatgatattgagcctagaa

SEQ ID NO: 462905 - DNA, 33 bp, Homo sapien
tttcatgaaaagacacaagacagtgacatttgg

SEQ ID NO: 462906 - DNA, 33 bp, Homo sapien
tttcatgaaaagacacgagacagtgacatttgg

SEQ ID NO: 462907 - DNA, 33 bp, Homo sapien
gtgcaaggaagttaggaaataacacacagtgaa

SEQ ID NO: 462908 - DNA, 33 bp, Homo sapien
gtgcaaggaagttagggaataacacacagtgaa

SEQ ID NO: 462909 - DNA, 33 bp, Homo sapien
ttcctgttgtcctctccctgcagtcatggaagc

SEQ ID NO: 462910 - DNA, 33 bp, Homo sapien
ttcctgttgtcctctcgctgcagtcatggaagc

SEQ ID NO: 462911 - DNA, 33 bp, Homo sapien
tcatgtttagatatgaaaatgaacatatttaaa

SEQ ID NO: 462912 - DNA, 33 bp, Homo sapien
tcatgtttagatatgataatgaacatatttaaa

SEQ ID NO: 462913 - DNA, 33 bp, Homo sapien
ttggaagcaaatcctacgtgataccgagggatg

SEQ ID NO: 462914 - DNA, 33 bp, Homo sapien
ttggaagcaaatcctatgtgataccgagggatg

SEQ ID NO: 462915 - DNA, 33 bp, Homo sapien
aaacactgcacatttacgctgcactaacttcac

SEQ ID NO: 462916 - DNA, 33 bp, Homo sapien
aaacactgcacatttaggctgcactaacttcac

SEQ ID NO: 462917 - DNA, 33 bp, Homo sapien
taactgagtaaagttaagttcatggacaaaaat

SEQ ID NO: 462918 - DNA, 33 bp, Homo sapien
taactgagtaaagttacgttcatggacaaaaat

SEQ ID NO: 462919 - DNA, 33 bp, Homo sapien
ctattcatgatctgcccatttcctgtactggga

SEQ ID NO: 462920 - DNA, 33 bp, Homo sapien
ctattcatgatctgcctatttcctgtactggga

SEQ ID NO: 462921 - DNA, 33 bp, Homo sapien
ttcctcatgaaccaataaacataacgaagtgtt

SEQ ID NO: 462922 - DNA, 33 bp, Homo sapien
ttcctcatgaaccaatgaacataacgaagtgtt

SEQ ID NO: 462923 - DNA, 33 bp, Homo sapien
gccatggttagaagcacagaattgtcagcacca

SEQ ID NO: 462924 - DNA, 33 bp, Homo sapien
gccatggttagaagcatagaattgtcagcacca

SEQ ID NO: 462925 - DNA, 33 bp, Homo sapien
gactttaggacacaggaatttttatgggaagag

SEQ ID NO: 462926 - DNA, 33 bp, Homo sapien
gactttaggacacagggatttttatgggaagag

SEQ ID NO: 462927 - DNA, 33 bp, Homo sapien
caatggcaggtataaacgttttattgtaaatat

SEQ ID NO: 462928 - DNA, 33 bp, Homo sapien
caatggcaggtataaaggttttattgtaaatat

SEQ ID NO: 462929 - DNA, 33 bp, Homo sapien
tctttgtaccataatacgttaggctaagtaatg

SEQ ID NO: 462930 - DNA, 33 bp, Homo sapien
tctttgtaccataatatgttaggctaagtaatg

SEQ ID NO: 462931 - DNA, 33 bp, Homo sapien
tataagtggcatcacgaagtggcaccctgaaca

SEQ ID NO: 462932 - DNA, 33 bp, Homo sapien
tataagtggcatcacggagtggcaccctgaaca

SEQ ID NO: 462933 - DNA, 33 bp, Homo sapien
gaactttacaactgcaaataatgtttcttcaat

SEQ ID NO: 462934 - DNA, 33 bp, Homo sapien
gaactttacaactgcacataatgtttcttcaat

SEQ ID NO: 462935 - DNA, 33 bp, Homo sapien
cctttgtttagattcaatctgggcttcccagct

SEQ ID NO: 462936 - DNA, 33 bp, Homo sapien
cctttgtttagattcagtctgggcttcccagct

SEQ ID NO: 462937 - DNA, 33 bp, Homo sapien
ctccatttcagtatgccgaccaaaataattccc

SEQ ID NO: 462938 - DNA, 33 bp, Homo sapien
ctccatttcagtatgctgaccaaaataattccc

SEQ ID NO: 462939 - DNA, 33 bp, Homo sapien
tgttttaaagattgaaaaatggaacgaaaaggc

SEQ ID NO: 462940 - DNA, 33 bp, Homo sapien
tgttttaaagattgaagaatggaacgaaaaggc

SEQ ID NO: 462941 - DNA, 33 bp, Homo sapien
agcctcccaaaatgtacccagatggaggcatca

SEQ ID NO: 462942 - DNA, 33 bp, Homo sapien
agcctcccaaaatgtatccagatggaggcatca

SEQ ID NO: 462943 - DNA, 33 bp, Homo sapien
atagtttcatcttttcaccctcgagtggtgttg

SEQ ID NO: 462944 - DNA, 33 bp, Homo sapien
atagtttcatcttttcgccctcgagtggtgttg

SEQ ID NO: 462945 - DNA, 33 bp, Homo sapien
agtagctactaagtcacgtacaacaaaggaaaa

SEQ ID NO: 462946 - DNA, 33 bp, Homo sapien
agtagctactaagtcaggtacaacaaaggaaaa

SEQ ID NO: 462947 - DNA, 33 bp, Homo sapien
gatgggtagtaagtcccgaacactctctaaaag

SEQ ID NO: 462948 - DNA, 33 bp, Homo sapien
gatgggtagtaagtcctgaacactctctaaaag

SEQ ID NO: 462949 - DNA, 33 bp, Homo sapien
ctccaatgttgtgctacgtgtgaattctaacta

SEQ ID NO: 462950 - DNA, 33 bp, Homo sapien
ctccaatgttgtgctaggtgtgaattctaacta

SEQ ID NO: 462951 - DNA, 33 bp, Homo sapien
aggtaagattaaacaacgctggtagaaaggatg

SEQ ID NO: 462952 - DNA, 33 bp, Homo sapien
aggtaagattaaacaatgctggtagaaaggatg

SEQ ID NO: 462953 - DNA, 33 bp, Homo sapien
ctacccatactggaaacttagttacaattcaca

SEQ ID NO: 462954 - DNA, 33 bp, Homo sapien
ctacccatactggaaagttagttacaattcaca

SEQ ID NO: 462955 - DNA, 33 bp, Homo sapien
tgtgccttaaatgagaagaaatcgatctgatgt

SEQ ID NO: 462956 - DNA, 33 bp, Homo sapien
tgtgccttaaatgagaggaaatcgatctgatgt

SEQ ID NO: 462957 - DNA, 33 bp, Homo sapien
caatgctaaccacaaaaagaaaatctatccgac

SEQ ID NO: 462958 - DNA, 33 bp, Homo sapien
caatgctaaccacaaagagaaaatctatccgac

SEQ ID NO: 462959 - DNA, 33 bp, Homo sapien
gagcagagttgtgaagaagacctttctgtacct

SEQ ID NO: 462960 - DNA, 33 bp, Homo sapien
gagcagagttgtgaagtagacctttctgtacct

SEQ ID NO: 462961 - DNA, 33 bp, Homo sapien
aaagctagtccatttacatgtgcactgacctcc

SEQ ID NO: 462962 - DNA, 33 bp, Homo sapien
aaagctagtccatttatatgtgcactgacctcc

SEQ ID NO: 462963 - DNA, 33 bp, Homo sapien
tgtgggtacagtgaaaatcccaaagcagtgcaa

SEQ ID NO: 462964 - DNA, 33 bp, Homo sapien
tgtgggtacagtgaaagtcccaaagcagtgcaa

SEQ ID NO: 462965 - DNA, 33 bp, Homo sapien
ataaaacgtatctcaggcaacttttgtggggaa

SEQ ID NO: 462966 - DNA, 33 bp, Homo sapien
ataaaacgtatctcagtcaacttttgtggggaa

SEQ ID NO: 462967 - DNA, 33 bp, Homo sapien
acaacagccatatttaggtagcccgtaaatttt

SEQ ID NO: 462968 - DNA, 33 bp, Homo sapien
acaacagccatatttatgtagcccgtaaatttt

SEQ ID NO: 462969 - DNA, 33 bp, Homo sapien
taaatagaagccgtaaacgacaacctcggtgag

SEQ ID NO: 462970 - DNA, 33 bp, Homo sapien
taaatagaagccgtaaccgacaacctcggtgag

SEQ ID NO: 462971 - DNA, 33 bp, Homo sapien
tgaagcgagcactgcgacaaatccacattaaag

SEQ ID NO: 462972 - DNA, 33 bp, Homo sapien
tgaagcgagcactgcgccaaatccacattaaag

SEQ ID NO: 462973 - DNA, 33 bp, Homo sapien
ccttacaaatgcaacacatgtggtaaaatgttt

SEQ ID NO: 462974 - DNA, 33 bp, Homo sapien
ccttacaaatgcaacatatgtggtaaaatgttt

SEQ ID NO: 462975 - DNA, 33 bp, Homo sapien
gaaagagtccttacaaactgtgtacggaaagct

SEQ ID NO: 462976 - DNA, 33 bp, Homo sapien
gaaagagtccttacaagctgtgtacggaaagct

SEQ ID NO: 462977 - DNA, 33 bp, Homo sapien
gcacagaagtactgcacccttgtcaagaaaaga

SEQ ID NO: 462978 - DNA, 33 bp, Homo sapien
gcacagaagtactgcatccttgtcaagaaaaga

SEQ ID NO: 462979 - DNA, 33 bp, Homo sapien
tgctaccacgtaatcaatacctaacaacaatta

SEQ ID NO: 462980 - DNA, 33 bp, Homo sapien
tgctaccacgtaatcagtacctaacaacaatta

SEQ ID NO: 462981 - DNA, 33 bp, Homo sapien
taggtggcagggggacaaaatggaatctgtgag

SEQ ID NO: 462982 - DNA, 33 bp, Homo sapien
taggtggcagggggacgaaatggaatctgtgag

SEQ ID NO: 462983 - DNA, 33 bp, Homo sapien
caacttggtacctccactgaattaaagatttaa

SEQ ID NO: 462984 - DNA, 33 bp, Homo sapien
caacttggtacctccattgaattaaagatttaa

SEQ ID NO: 462985 - DNA, 33 bp, Homo sapien
ccaagttgatataagacggtcaactaaaatctc

SEQ ID NO: 462986 - DNA, 33 bp, Homo sapien
ccaagttgatataagatggtcaactaaaatctc

SEQ ID NO: 462987 - DNA, 33 bp, Homo sapien
attcctattcccaccaaaggatattacagggaa

SEQ ID NO: 462988 - DNA, 33 bp, Homo sapien
attcctattcccaccagaggatattacagggaa

SEQ ID NO: 462989 - DNA, 33 bp, Homo sapien
gatttttgtatgtcaacggtgcatcctgagacc

SEQ ID NO: 462990 - DNA, 33 bp, Homo sapien
gatttttgtatgtcaatggtgcatcctgagacc

SEQ ID NO: 462991 - DNA, 33 bp, Homo sapien
acaaagtagatttacaaataaccatcaactgca

SEQ ID NO: 462992 - DNA, 33 bp, Homo sapien
acaaagtagatttacatataaccatcaactgca

SEQ ID NO: 462993 - DNA, 33 bp, Homo sapien
gtcaataatttcgatacgtagagtgaatttcaa

SEQ ID NO: 462994 - DNA, 33 bp, Homo sapien
gtcaataatttcgatatgtagagtgaatttcaa

SEQ ID NO: 462995 - DNA, 33 bp, Homo sapien
aagtttatcgcagagacgtttgaggttaattca

SEQ ID NO: 462996 - DNA, 33 bp, Homo sapien
aagtttatcgcagagatgtttgaggttaattca

SEQ ID NO: 462997 - DNA, 33 bp, Homo sapien
ttttaagcaggtaaaccggacgaaaagcgtcta

SEQ ID NO: 462998 - DNA, 33 bp, Homo sapien
ttttaagcaggtaaacgggacgaaaagcgtcta

SEQ ID NO: 462999 - DNA, 33 bp, Homo sapien
gccgctctgcaaggaacagttgggggaatttca

SEQ ID NO: 463000 - DNA, 33 bp, Homo sapien
gccgctctgcaaggaatagttgggggaatttca

SEQ ID NO: 463001 - DNA, 33 bp, Homo sapien
ctcactattgcaatgggagcacaaagaggaaga

SEQ ID NO: 463002 - DNA, 33 bp, Homo sapien
ctcactattgcaatggtagcacaaagaggaaga

SEQ ID NO: 463003 - DNA, 33 bp, Homo sapien
aaataagatgtaaaaaggtatgaggttaagggt

SEQ ID NO: 463004 - DNA, 33 bp, Homo sapien
aaataagatgtaaaaatgtatgaggttaagggt

SEQ ID NO: 463005 - DNA, 33 bp, Homo sapien
ctgcccaacatggtgaaaaccctaatggtgcat

SEQ ID NO: 463006 - DNA, 33 bp, Homo sapien
ctgcccaacatggtgagaaccctaatggtgcat

SEQ ID NO: 463007 - DNA, 33 bp, Homo sapien
tgatgtggcaggcctcaacaaagcctgtgtctt

SEQ ID NO: 463008 - DNA, 33 bp, Homo sapien
tgatgtggcaggcctcgacaaagcctgtgtctt

SEQ ID NO: 463009 - DNA, 33 bp, Homo sapien
ccaccttacaagttatcacagagtccattctgg

SEQ ID NO: 463010 - DNA, 33 bp, Homo sapien
ccaccttacaagttattacagagtccattctgg

SEQ ID NO: 463011 - DNA, 33 bp, Homo sapien
ttattttatgaaaggcaaggcttgaatgcacac

SEQ ID NO: 463012 - DNA, 33 bp, Homo sapien
ttattttatgaaaggcgaggcttgaatgcacac

SEQ ID NO: 463013 - DNA, 33 bp, Homo sapien
tcagcagctagtaaaaaagcaattggatgcagg

SEQ ID NO: 463014 - DNA, 33 bp, Homo sapien
tcagcagctagtaaaagagcaattggatgcagg

SEQ ID NO: 463015 - DNA, 33 bp, Homo sapien
cctaacccgatatgagaaactggaaaaacagat

SEQ ID NO: 463016 - DNA, 33 bp, Homo sapien
cctaacccgatatgagtaactggaaaaacagat

SEQ ID NO: 463017 - DNA, 33 bp, Homo sapien
tgtatttcagttcttacagtgtgtgctgatttt

SEQ ID NO: 463018 - DNA, 33 bp, Homo sapien
tgtatttcagttcttatagtgtgtgctgatttt

SEQ ID NO: 463019 - DNA, 33 bp, Homo sapien
cacatggtgtgttttgaacatttttctgggagt

SEQ ID NO: 463020 - DNA, 33 bp, Homo sapien
cacatggtgtgttttgcacatttttctgggagt

SEQ ID NO: 463021 - DNA, 33 bp, Homo sapien
cagagaggacaaagtcaaatggctttcaaagaa

SEQ ID NO: 463022 - DNA, 33 bp, Homo sapien
cagagaggacaaagtcgaatggctttcaaagaa

SEQ ID NO: 463023 - DNA, 33 bp, Homo sapien
ggttgaatgaggtttcaatggtttagttctact

SEQ ID NO: 463024 - DNA, 33 bp, Homo sapien
ggttgaatgaggtttccatggtttagttctact

SEQ ID NO: 463025 - DNA, 33 bp, Homo sapien
tctgcacttaattgcaaacgtattggtgtttat

SEQ ID NO: 463026 - DNA, 33 bp, Homo sapien
tctgcacttaattgcagacgtattggtgtttat

SEQ ID NO: 463027 - DNA, 33 bp, Homo sapien; identical to SEQ ID NO: 463025

SEQ ID NO: 463028 - DNA, 33 bp, Homo sapien; identical to SEQ ID NO: 463026

SEQ ID NO: 463029 - DNA, 33 bp, Homo sapien
gcagttcatcagtgaactcatactggagagaaa

SEQ ID NO: 463030 - DNA, 33 bp, Homo sapien
gcagttcatcagtgaagtcatactggagagaaa

SEQ ID NO: 463031 - DNA, 33 bp, Homo sapien
gaagtaaaggctttgcaacactcatcacacttg

SEQ ID NO: 463032 - DNA, 33 bp, Homo sapien
gaagtaaaggctttgccacactcatcacacttg

SEQ ID NO: 463033 - DNA, 33 bp, Homo sapien
caactgaagatccacgaaagaagtgaaaatacc

SEQ ID NO: 463034 - DNA, 33 bp, Homo sapien
caactgaagatccacggaagaagtgaaaatacc

SEQ ID NO: 463035 - DNA, 33 bp, Homo sapien
gtcataaaattacctaaatccacgcagaacagg

SEQ ID NO: 463036 - DNA, 33 bp, Homo sapien
gtcataaaattacctatatccacgcagaacagg

SEQ ID NO: 463037 - DNA, 33 bp, Homo sapien
gtgagaaagggctatgcatagaatgatggaggg

SEQ ID NO: 463038 - DNA, 33 bp, Homo sapien
gtgagaaagggctatgtatagaatgatggaggg

SEQ ID NO: 463039 - DNA, 33 bp, Homo sapien; identical to SEQ ID NO: 463037

SEQ ID NO: 463040 - DNA, 33 bp, Homo sapien; identical to SEQ ID NO: 463038

SEQ ID NO: 463041 - DNA, 33 bp, Homo sapien
cacaaacacatctctaactactgtgccagggga

SEQ ID NO: 463042 - DNA, 33 bp, Homo sapien
cacaaacacatctctacctactgtgccagggga

SEQ ID NO: 463043 - DNA, 33 bp, Homo sapien
cgacaaaaataaaaaacttgactggtagcacag

SEQ ID NO: 463044 - DNA, 33 bp, Homo sapien
cgacaaaaataaaaaagttgactggtagcacag

SEQ ID NO: 463045 - DNA, 33 bp, Homo sapien
cagggagcctgcatcacattttttatgttttta

SEQ ID NO: 463046 - DNA, 33 bp, Homo sapien
cagggagcctgcatcatattttttatgttttta

SEQ ID NO: 463047 - DNA, 33 bp, Homo sapien
tattttcctagatccacctgtaatgtcttcttt

SEQ ID NO: 463048 - DNA, 33 bp, Homo sapien
tattttcctagatccatctgtaatgtcttcttt

SEQ ID NO: 463049 - DNA, 33 bp, Homo sapien
ccagtatgaactcttacggcatgaaaggcatga

SEQ ID NO: 463050 - DNA, 33 bp, Homo sapien
ccagtatgaactcttatggcatgaaaggcatga

SEQ ID NO: 463051 - DNA, 33 bp, Homo sapien
aaaattttcagacatcaatcatatcttgcagtt

SEQ ID NO: 463052 - DNA, 33 bp, Homo sapien
aaaattttcagacatcgatcatatcttgcagtt

SEQ ID NO: 463053 - DNA, 33 bp, Homo sapien
gaacacagcctaaaccaatgtctgctctgtacg

SEQ ID NO: 463054 - DNA, 33 bp, Homo sapien
gaacacagcctaaaccgatgtctgctctgtacg

SEQ ID NO: 463055 - DNA, 33 bp, Homo sapien
gtgtaatggaaagcacgaaatcagttccaaaat

SEQ ID NO: 463056 - DNA, 33 bp, Homo sapien
gtgtaatggaaagcactaaatcagttccaaaat

SEQ ID NO: 463057 - DNA, 33 bp, Homo sapien
gaaaagaaaagaactaagtgtaatggaaagcac

SEQ ID NO: 463058 - DNA, 33 bp, Homo sapien
gaaaagaaaagaactaggtgtaatggaaagcac

SEQ ID NO: 463059 - DNA, 33 bp, Homo sapien
actggatacatcccccacaactacacatggtta

SEQ ID NO: 463060 - DNA, 33 bp, Homo sapien
actggatacatcccccccaactacacatggtta

SEQ ID NO: 463061 - DNA, 33 bp, Homo sapien
tcggtcacaagtcatcccttacacgccatcata

SEQ ID NO: 463062 - DNA, 33 bp, Homo sapien
tcggtcacaagtcatctcttacacgccatcata

SEQ ID NO: 463063 - DNA, 33 bp, Homo sapien
tctcctgaatgggttaaatgatgtcttcttaaa

SEQ ID NO: 463064 - DNA, 33 bp, Homo sapien
tctcctgaatgggttacatgatgtcttcttaaa

SEQ ID NO: 463065 - DNA, 33 bp, Homo sapien
cagtaagcctgaatgacgtcctccctaagagga

SEQ ID NO: 463066 - DNA, 33 bp, Homo sapien
cagtaagcctgaatgatgtcctccctaagagga

SEQ ID NO: 463067 - DNA, 33 bp, Homo sapien
ttttctcattttgtgtcaaggtaatgactcctc

SEQ ID NO: 463068 - DNA, 33 bp, Homo sapien
ttttctcattttgtgtgaaggtaatgactcctc

SEQ ID NO: 463069 - DNA, 33 bp, Homo sapien; identical to SEQ ID NO: 463067

SEQ ID NO: 463070 - DNA, 33 bp, Homo sapien; identical to SEQ ID NO: 463068

SEQ ID NO: 463071 - DNA, 33 bp, Homo sapien
cctataggcttctttaaggtgtgcttttttctc

SEQ ID NO: 463072 - DNA, 33 bp, Homo sapien
cctataggcttctttagggtgtgcttttttctc

SEQ ID NO: 463073 - DNA, 33 bp, Homo sapien
aatcttgagcttggacaaaagtggaactaattt

SEQ ID NO: 463074 - DNA, 33 bp, Homo sapien
aatcttgagcttggacgaaagtggaactaattt

SEQ ID NO: 463075 - DNA, 33 bp, Homo sapien
gatatggttttcatcaatcttattaagggagct

SEQ ID NO: 463076 - DNA, 33 bp, Homo sapien
gatatggttttcatcagtcttattaagggagct

SEQ ID NO: 463077 - DNA, 33 bp, Homo sapien
tcccatcttgggagaaaacatggatggataagt

SEQ ID NO: 463078 - DNA, 33 bp, Homo sapien
tcccatcttgggagaatacatggatggataagt

SEQ ID NO: 463079 - DNA, 33 bp, Homo sapien
ctggcccgaatgttcgcattggctaaaagccac

SEQ ID NO: 463080 - DNA, 33 bp, Homo sapien
ctggcccgaatgttcgtattggctaaaagccac

SEQ ID NO: 463081 - DNA, 33 bp, Homo sapien
ccaattaagtccagacagtaaatcatactgaaa

SEQ ID NO: 463082 - DNA, 33 bp, Homo sapien
ccaattaagtccagacggtaaatcatactgaaa

SEQ ID NO: 463083 - DNA, 33 bp, Homo sapien
ctttagaaatcaatcccgaatgtgaaaaatgaa

SEQ ID NO: 463084 - DNA, 33 bp, Homo sapien
ctttagaaatcaatcctgaatgtgaaaaatgaa

SEQ ID NO: 463085 - DNA, 33 bp, Homo sapien
tcactgaggctcacaacgggagacatttcacca

SEQ ID NO: 463086 - DNA, 33 bp, Homo sapien
tcactgaggctcacaatgggagacatttcacca

SEQ ID NO: 463087 - DNA, 33 bp, Homo sapien
gttagagtctctacagaaaatctaatcaagcta

SEQ ID NO: 463088 - DNA, 33 bp, Homo sapien
gttagagtctctacagcaaatctaatcaagcta

SEQ ID NO: 463089 - DNA, 33 bp, Homo sapien
gacaagacctccttcaccatgcgtttggaagag

SEQ ID NO: 463090 - DNA, 33 bp, Homo sapien
gacaagacctccttcatcatgcgtttggaagag

SEQ ID NO: 463091 - DNA, 33 bp, Homo sapien
acggctttgaatgaaaagtctgaatctaaaaac

SEQ ID NO: 463092 - DNA, 33 bp, Homo sapien
acggctttgaatgaaaggtctgaatctaaaaac

SEQ ID NO: 463093 - DNA, 33 bp, Homo sapien
acgtacttccggaaacagccgaacttgacagca

SEQ ID NO: 463094 - DNA, 33 bp, Homo sapien
acgtacttccggaaacggccgaacttgacagca

SEQ ID NO: 463095 - DNA, 33 bp, Homo sapien
gtcttggaattttctacaggaggaagaccaagg

SEQ ID NO: 463096 - DNA, 33 bp, Homo sapien
gtcttggaattttctagaggaggaagaccaagg

SEQ ID NO: 463097 - DNA, 33 bp, Homo sapien
gagactctatcacaaaaaagtacagagtccagc

SEQ ID NO: 463098 - DNA, 33 bp, Homo sapien
gagactctatcacaaacaagtacagagtccagc

SEQ ID NO: 463099 - DNA, 33 bp, Homo sapien
aatagttcaaaatgcaatgagtatagcaaacca

SEQ ID NO: 463100 - DNA, 33 bp, Homo sapien
aatagttcaaaatgcactgagtatagcaaacca

SEQ ID NO: 463101 - DNA, 33 bp, Homo sapien
aggtttttaatcaacaatcaactcttgcacgcc

SEQ ID NO: 463102 - DNA, 33 bp, Homo sapien
aggtttttaatcaacagtcaactcttgcacgcc

SEQ ID NO: 463103 - DNA, 33 bp, Homo sapien
aacaaaccttatggcacactttaaagatatcca

SEQ ID NO: 463104 - DNA, 33 bp, Homo sapien
aacaaaccttatggcagactttaaagatatcca

SEQ ID NO: 463105 - DNA, 33 bp, Homo sapien
ctcagctcaatgcaaaacttggcctcctgggtt

SEQ ID NO: 463106 - DNA, 33 bp, Homo sapien
ctcagctcaatgcaaaccttggcctcctgggtt

SEQ ID NO: 463107 - DNA, 33 bp, Homo sapien
gaatttcatactgaaaatgtgtcttgatcactt

SEQ ID NO: 463108 - DNA, 33 bp, Homo sapien
gaatttcatactgaaagtgtgtcttgatcactt

SEQ ID NO: 463109 - DNA, 33 bp, Homo sapien
attatctgaaaggccgaatctgcaggaacatcc

SEQ ID NO: 463110 - DNA, 33 bp, Homo sapien
attatctgaaaggccgcatctgcaggaacatcc

SEQ ID NO: 463111 - DNA, 33 bp, Homo sapien
gagacattttgtatccaatttcttaatgcattt

SEQ ID NO: 463112 - DNA, 33 bp, Homo sapien
gagacattttgtatccgatttcttaatgcattt

SEQ ID NO: 463113 - DNA, 33 bp, Homo sapien
tgacatgaccttctgtaaagaaaatcacaaaga

SEQ ID NO: 463114 - DNA, 33 bp, Homo sapien
tgacatgaccttctgtgaagaaaatcacaaaga

SEQ ID NO: 463115 - DNA, 33 bp, Homo sapien; identical to SEQ ID NO: 463113

SEQ ID NO: 463116 - DNA, 33 bp, Homo sapien; identical to SEQ ID NO: 463114

SEQ ID NO: 463117 - DNA, 33 bp, Homo sapien
gcaagacctttggtcacaattcatccctcttca

SEQ ID NO: 463118 - DNA, 33 bp, Homo sapien
gcaagacctttggtcataattcatccctcttca

SEQ ID NO: 463119 - DNA, 33 bp, Homo sapien
cacagggacattgcacagacaagcaagtcatca

SEQ ID NO: 463120 - DNA, 33 bp, Homo sapien
cacagggacattgcaccgacaagcaagtcatca

SEQ ID NO: 463121 - DNA, 33 bp, Homo sapien
gcatgagtggaaaaaccgttaaacaggatccta

SEQ ID NO: 463122 - DNA, 33 bp, Homo sapien
gcatgagtggaaaaactgttaaacaggatccta

SEQ ID NO: 463123 - DNA, 33 bp, Homo sapien
ctaagccacagagcgacattttctcccactctc

SEQ ID NO: 463124 - DNA, 33 bp, Homo sapien
ctaagccacagagcgatattttctcccactctc

SEQ ID NO: 463125 - DNA, 33 bp, Homo sapien
aagaacattttgaacaaataccgtagttgcaaa

SEQ ID NO: 463126 - DNA, 33 bp, Homo sapien
aagaacattttgaacacataccgtagttgcaaa

SEQ ID NO: 463127 - DNA, 33 bp, Homo sapien
tgctcaaatcaatcacaaccgtttcatgtgaaa

SEQ ID NO: 463128 - DNA, 33 bp, Homo sapien
tgctcaaatcaatcacgaccgtttcatgtgaaa

SEQ ID NO: 463129 - DNA, 33 bp, Homo sapien
tctagtgtgaattacaatatgctgtgccaggtg

SEQ ID NO: 463130 - DNA, 33 bp, Homo sapien
tctagtgtgaattacagtatgctgtgccaggtg

SEQ ID NO: 463131 - DNA, 33 bp, Homo sapien; identical to SEQ ID NO: 463129

SEQ ID NO: 463132 - DNA, 33 bp, Homo sapien; identical to SEQ ID NO: 463130

SEQ ID NO: 463133 - DNA, 33 bp, Homo sapien
gtgatgtatgtggcaaagactttaatcagaagc

SEQ ID NO: 463134 - DNA, 33 bp, Homo sapien
gtgatgtatgtggcaaggactttaatcagaagc

SEQ ID NO: 463135 - DNA, 33 bp, Homo sapien
ttgttatgagtgtggcaagaccttcagtcagac

SEQ ID NO: 463136 - DNA, 33 bp, Homo sapien
ttgttatgagtgtggcgagaccttcagtcagac

SEQ ID NO: 463137 - DNA, 33 bp, Homo sapien
gccacactcataacaactgtaaggtttcttacc

SEQ ID NO: 463138 - DNA, 33 bp, Homo sapien
gccacactcataacaattgtaaggtttcttacc

SEQ ID NO: 463139 - DNA, 33 bp, Homo sapien
ccctagatccattacaccttgagtcaatacagc

SEQ ID NO: 463140 - DNA, 33 bp, Homo sapien
ccctagatccattacatcttgagtcaatacagc

SEQ ID NO: 463141 - DNA, 33 bp, Homo sapien
tgttctagttattttcccgttgacatctgaatt

SEQ ID NO: 463142 - DNA, 33 bp, Homo sapien
tgttctagttattttcgcgttgacatctgaatt

SEQ ID NO: 463143 - DNA, 33 bp, Homo sapien
tacaagttatgaatgacgtctgaaaaatttgcc

SEQ ID NO: 463144 - DNA, 33 bp, Homo sapien
tacaagttatgaatgatgtctgaaaaatttgcc

SEQ ID NO: 463145 - DNA, 33 bp, Homo sapien
ttgaaagacataggaaaattcatactggagagg

SEQ ID NO: 463146 - DNA, 33 bp, Homo sapien
ttgaaagacataggaagattcatactggagagg

SEQ ID NO: 463147 - DNA, 33 bp, Homo sapien
tcaaccaggcacagtaatacaggagaagtgatc

SEQ ID NO: 463148 - DNA, 33 bp, Homo sapien
tcaaccaggcacagtattacaggagaagtgatc

SEQ ID NO: 463149 - DNA, 33 bp, Homo sapien
ataggagggtcatcaccgcagaaaacaatgaca

SEQ ID NO: 463150 - DNA, 33 bp, Homo sapien
ataggagggtcatcactgcagaaaacaatgaca

SEQ ID NO: 463151 - DNA, 33 bp, Homo sapien
agcactggtatcaatacgaaaatcaatgtcttt

SEQ ID NO: 463152 - DNA, 33 bp, Homo sapien
agcactggtatcaatatgaaaatcaatgtcttt

SEQ ID NO: 463153 - DNA, 33 bp, Homo sapien
gaaggtgtaatcctgacggtcaataggacaagg

SEQ ID NO: 463154 - DNA, 33 bp, Homo sapien
gaaggtgtaatcctgagggtcaataggacaagg

SEQ ID NO: 463155 - DNA, 33 bp, Homo sapien
acagagattctttacaaatgcacatgtacccct

SEQ ID NO: 463156 - DNA, 33 bp, Homo sapien
acagagattctttacagatgcacatgtacccct

SEQ ID NO: 463157 - DNA, 33 bp, Homo sapien; identical to SEQ ID NO: 463155

SEQ ID NO: 463158 - DNA, 33 bp, Homo sapien; identical to SEQ ID NO: 463156

SEQ ID NO: 463159 - DNA, 33 bp, Homo sapien
gaaaaggttatggggacgatgcccaaaagaaat

SEQ ID NO: 463160 - DNA, 33 bp, Homo sapien
gaaaaggttatggggatgatgcccaaaagaaat

SEQ ID NO: 463161 - DNA, 33 bp, Homo sapien
tatcatgacgaaacaccgacagggcacaaacat

SEQ ID NO: 463162 - DNA, 33 bp, Homo sapien
tatcatgacgaaacactgacagggcacaaacat

SEQ ID NO: 463163 - DNA, 33 bp, Homo sapien
aatgtgtgataagaaacgctgaaacagtctcct

SEQ ID NO: 463164 - DNA, 33 bp, Homo sapien
aatgtgtgataagaaatgctgaaacagtctcct

SEQ ID NO: 463165 - DNA, 33 bp, Homo sapien
ggggtctaagacttctcacttggcaatgacatt

SEQ ID NO: 463166 - DNA, 33 bp, Homo sapien
ggggtctaagacttctgacttggcaatgacatt

SEQ ID NO: 463167 - DNA, 33 bp, Homo sapien; identical to SEQ ID NO: 463165

SEQ ID NO: 463168 - DNA, 33 bp, Homo sapien; identical to SEQ ID NO: 463166

SEQ ID NO: 463169 - DNA, 33 bp, Homo sapien
ccagaagtacactgtcaccctcatctgagaggt

SEQ ID NO: 463170 - DNA, 33 bp, Homo sapien
ccagaagtacactgtcgccctcatctgagaggt

SEQ ID NO: 463171 - DNA, 33 bp, Homo sapien
agaccagaaaagctcagagtgacactgacccct

SEQ ID NO: 463172 - DNA, 33 bp, Homo sapien
agaccagaaaagctcatagtgacactgacccct

SEQ ID NO: 463173 - DNA, 33 bp, Homo sapien
tctggtcttctccctcacctgtatattacaggt

SEQ ID NO: 463174 - DNA, 33 bp, Homo sapien
tctggtcttctccctcgcctgtatattacaggt

SEQ ID NO: 463175 - DNA, 33 bp, Homo sapien
ttggggatataaaagacggtcctggaatatttt

SEQ ID NO: 463176 - DNA, 33 bp, Homo sapien
ttggggatataaaagatggtcctggaatatttt

SEQ ID NO: 463177 - DNA, 33 bp, Homo sapien
catacccaagactctacgagcatgatgagtgag

SEQ ID NO: 463178 - DNA, 33 bp, Homo sapien
catacccaagactctaggagcatgatgagtgag

SEQ ID NO: 463179 - DNA, 33 bp, Homo sapien
tctgaatttcaatggccaagaatagtccaacag

SEQ ID NO: 463180 - DNA, 33 bp, Homo sapien
tctgaatttcaatggctaagaatagtccaacag

SEQ ID NO: 463181 - DNA, 33 bp, Homo sapien
tcttaacttactcaaaccttaggcttccctgtt

SEQ ID NO: 463182 - DNA, 33 bp, Homo sapien
tcttaacttactcaaatcttaggcttccctgtt

SEQ ID NO: 463183 - DNA, 33 bp, Homo sapien
ccttgatgagacaaaccgtgggaatttggagtt

SEQ ID NO: 463184 - DNA, 33 bp, Homo sapien
ccttgatgagacaaactgtgggaatttggagtt

SEQ ID NO: 463185 - DNA, 33 bp, Homo sapien
aacagttacacagacccctgaatttagagattt

SEQ ID NO: 463186 - DNA, 33 bp, Homo sapien
aacagttacacagacctctgaatttagagattt

SEQ ID NO: 463187 - DNA, 33 bp, Homo sapien
acactgaaaacacatagcaggccaatgctgtgt

SEQ ID NO: 463188 - DNA, 33 bp, Homo sapien
acactgaaaacacatatcaggccaatgctgtgt

SEQ ID NO: 463189 - DNA, 33 bp, Homo sapien
ccacaaaccaggtgaaagtattgcaggaggcag

SEQ ID NO: 463190 - DNA, 33 bp, Homo sapien
ccacaaaccaggtgaatgtattgcaggaggcag

SEQ ID NO: 463191 - DNA, 33 bp, Homo sapien
acgtctactgccgacaacagcgcaaatggtcag

SEQ ID NO: 463192 - DNA, 33 bp, Homo sapien
acgtctactgccgacagcagcgcaaatggtcag

SEQ ID NO: 463193 - DNA, 33 bp, Homo sapien
agagacaaataatgaaatggttcgatggagtgt

SEQ ID NO: 463194 - DNA, 33 bp, Homo sapien
agagacaaataatgaagtggttcgatggagtgt

SEQ ID NO: 463195 - DNA, 33 bp, Homo sapien; identical to SEQ ID NO: 463193

SEQ ID NO: 463196 - DNA, 33 bp, Homo sapien; identical to SEQ ID NO: 463194

SEQ ID NO: 463197 - DNA, 33 bp, Homo sapien
cgatcattcctatggccgcacccatccctgcca

SEQ ID NO: 463198 - DNA, 33 bp, Homo sapien
cgatcattcctatggctgcacccatccctgcca

SEQ ID NO: 463199 - DNA, 33 bp, Homo sapien
cttgaggagggaaatactagggtaggcaggtag

SEQ ID NO: 463200 - DNA, 33 bp, Homo sapien
cttgaggagggaaatattagggtaggcaggtag

SEQ ID NO: 463201 - DNA, 33 bp, Homo sapien
gatgggttattagagaagtgctgactgtctgtg

SEQ ID NO: 463202 - DNA, 33 bp, Homo sapien
gatgggttattagagacgtgctgactgtctgtg

SEQ ID NO: 463203 - DNA, 33 bp, Homo sapien
gtttggctaattaggcagaatgtctatgtctag

SEQ ID NO: 463204 - DNA, 33 bp, Homo sapien
gtttggctaattaggcggaatgtctatgtctag

SEQ ID NO: 463205 - DNA, 33 bp, Homo sapien
actttggcctaagcaaagaatttatgaagacct

SEQ ID NO: 463206 - DNA, 33 bp, Homo sapien
actttggcctaagcaaggaatttatgaagacct

SEQ ID NO: 463207 - DNA, 33 bp, Homo sapien
ggggcttgctgttggcacccgaagtgggactga

SEQ ID NO: 463208 - DNA, 33 bp, Homo sapien
ggggcttgctgttggcgcccgaagtgggactga

SEQ ID NO: 463209 - DNA, 33 bp, Homo sapien
ggttgcattatccccgcattttcataatataaa

SEQ ID NO: 463210 - DNA, 33 bp, Homo sapien
ggttgcattatccccggattttcataatataaa

SEQ ID NO: 463211 - DNA, 33 bp, Homo sapien
agtttggagtcggaaacccaatgactcacttgt

SEQ ID NO: 463212 - DNA, 33 bp, Homo sapien
agtttggagtcggaaatccaatgactcacttgt

SEQ ID NO: 463213 - DNA, 33 bp, Homo sapien
caagtgaaactcaaaaataatgaacttgccctg

SEQ ID NO: 463214 - DNA, 33 bp, Homo sapien
caagtgaaactcaaaactaatgaacttgccctg

SEQ ID NO: 463215 - DNA, 33 bp, Homo sapien
tggattcagtgccgagcctcaaaggccaaggta

SEQ ID NO: 463216 - DNA, 33 bp, Homo sapien
tggattcagtgccgagtctcaaaggccaaggta

SEQ ID NO: 463217 - DNA, 33 bp, Homo sapien
tggacacaagcgatgcagcaggaatggacacaa

SEQ ID NO: 463218 - DNA, 33 bp, Homo sapien
tggacacaagcgatgcggcaggaatggacacaa

SEQ ID NO: 463219 - DNA, 33 bp, Homo sapien
cacattcataccatctaaaattcctactgatgg

SEQ ID NO: 463220 - DNA, 33 bp, Homo sapien
cacattcataccatctcaaattcctactgatgg

SEQ ID NO: 463221 - DNA, 33 bp, Homo sapien
tgtgtgagttttaacacatttgggcttgcattt

SEQ ID NO: 463222 - DNA, 33 bp, Homo sapien
tgtgtgagttttaacatatttgggcttgcattt

SEQ ID NO: 463223 - DNA, 33 bp, Homo sapien
catgcagattttcctccgacatgcccattactc

SEQ ID NO: 463224 - DNA, 33 bp, Homo sapien
catgcagattttcctctgacatgcccattactc

SEQ ID NO: 463225 - DNA, 33 bp, Homo sapien
acaagcatgcgtgggacaggtgtacacatcatt

SEQ ID NO: 463226 - DNA, 33 bp, Homo sapien
acaagcatgcgtgggagaggtgtacacatcatt

SEQ ID NO: 463227 - DNA, 33 bp, Homo sapien
aggtacacattgaaacaatctaaaattacctac

SEQ ID NO: 463228 - DNA, 33 bp, Homo sapien
aggtacacattgaaacgatctaaaattacctac

SEQ ID NO: 463229 - DNA, 33 bp, Homo sapien
tctaactggtgtgagacgtaagccttattttat

SEQ ID NO: 463230 - DNA, 33 bp, Homo sapien
tctaactggtgtgagatgtaagccttattttat

SEQ ID NO: 463231 - DNA, 33 bp, Homo sapien
taagtcaacaaataaaacacctaatgatacaac

SEQ ID NO: 463232 - DNA, 33 bp, Homo sapien
taagtcaacaaataaagcacctaatgatacaac

SEQ ID NO: 463233 - DNA, 33 bp, Homo sapien
ccaagctcctgaagaaaaaagactctgcctttt

SEQ ID NO: 463234 - DNA, 33 bp, Homo sapien
ccaagctcctgaagaagaaagactctgcctttt

SEQ ID NO: 463235 - DNA, 33 bp, Homo sapien
gccattctgacaactacgtgatattttatgctg

SEQ ID NO: 463236 - DNA, 33 bp, Homo sapien
gccattctgacaactatgtgatattttatgctg

SEQ ID NO: 463237 - DNA, 33 bp, Homo sapien
aaaatttatttgagcaagttatgtctgtttaat

SEQ ID NO: 463238 - DNA, 33 bp, Homo sapien
aaaatttatttgagcaggttatgtctgtttaat

SEQ ID NO: 463239 - DNA, 33 bp, Homo sapien
tgtttgtaaactaaatcaagtacaattcatgca

SEQ ID NO: 463240 - DNA, 33 bp, Homo sapien
tgtttgtaaactaaattaagtacaattcatgca

SEQ ID NO: 463241 - DNA, 33 bp, Homo sapien
ctgtcttaaggcctgcaatctcaactcaggagg

SEQ ID NO: 463242 - DNA, 33 bp, Homo sapien
ctgtcttaaggcctgcgatctcaactcaggagg

SEQ ID NO: 463243 - DNA, 33 bp, Homo sapien
ctagttgagggttcccacttcagataccagccc

SEQ ID NO: 463244 - DNA, 33 bp, Homo sapien
ctagttgagggttccctcttcagataccagccc

SEQ ID NO: 463245 - DNA, 33 bp, Homo sapien
ccaacacgcagttcttcaacaaacactacctga

SEQ ID NO: 463246 - DNA, 33 bp, Homo sapien
ccaacacgcagttcttgaacaaacactacctga

SEQ ID NO: 463247 - DNA, 33 bp, Homo sapien
gttcattacttgattacgagagtgggaaaaaca

SEQ ID NO: 463248 - DNA, 33 bp, Homo sapien
gttcattacttgattatgagagtgggaaaaaca

SEQ ID NO: 463249 - DNA, 33 bp, Homo sapien
atgtggccgctaaacaatccctcttgcctaaca

SEQ ID NO: 463250 - DNA, 33 bp, Homo sapien
atgtggccgctaaacagtccctcttgcctaaca

SEQ ID NO: 463251 - DNA, 33 bp, Homo sapien
ttagggaacatggtaaaatacgaacatcgaact

SEQ ID NO: 463252 - DNA, 33 bp, Homo sapien
ttagggaacatggtaagatacgaacatcgaact

SEQ ID NO: 463253 - DNA, 33 bp, Homo sapien
ataacaaaaacatcaaatggttgggaatgcatc

SEQ ID NO: 463254 - DNA, 33 bp, Homo sapien
ataacaaaaacatcaagtggttgggaatgcatc

SEQ ID NO: 463255 - DNA, 33 bp, Homo sapien
catgggagtgtgaaagcataaactactacacgt

SEQ ID NO: 463256 - DNA, 33 bp, Homo sapien
catgggagtgtgaaaggataaactactacacgt

SEQ ID NO: 463257 - DNA, 33 bp, Homo sapien
tttcattaccaattatcagaaacaacttcaagt

SEQ ID NO: 463258 - DNA, 33 bp, Homo sapien
tttcattaccaattatgagaaacaacttcaagt

SEQ ID NO: 463259 - DNA, 33 bp, Homo sapien
acaataaaattgccgacgttcatccaagggtgc

SEQ ID NO: 463260 - DNA, 33 bp, Homo sapien
acaataaaattgccgatgttcatccaagggtgc

SEQ ID NO: 463261 - DNA, 33 bp, Homo sapien
atgacaattactatgaagatttgacagctaagg

SEQ ID NO: 463262 - DNA, 33 bp, Homo sapien
atgacaattactatgaggatttgacagctaagg

SEQ ID NO: 463263 - DNA, 33 bp, Homo sapien
tgtatagtataacccccctaaagcaaatgctaa

SEQ ID NO: 463264 - DNA, 33 bp, Homo sapien
tgtatagtataaccccgctaaagcaaatgctaa

SEQ ID NO: 463265 - DNA, 33 bp, Homo sapien
catacgacttcatgtaaagcatcagatccttac

SEQ ID NO: 463266 - DNA, 33 bp, Homo sapien
catacgacttcatgtagagcatcagatccttac

SEQ ID NO: 463267 - DNA, 33 bp, Homo sapien
tacaagatgaccatgaaacaagaagagtagggt

SEQ ID NO: 463268 - DNA, 33 bp, Homo sapien
tacaagatgaccatgagacaagaagagtagggt

SEQ ID NO: 463269 - DNA, 33 bp, Homo sapien
aacagaagacattcagaatggaaaccatacaaa

SEQ ID NO: 463270 - DNA, 33 bp, Homo sapien
aacagaagacattcaggatggaaaccatacaaa

SEQ ID NO: 463271 - DNA, 33 bp, Homo sapien
gctttctactctatccaggaacttagggagacc

SEQ ID NO: 463272 - DNA, 33 bp, Homo sapien
gctttctactctatccgggaacttagggagacc

SEQ ID NO: 463273 - DNA, 33 bp, Homo sapien
tcagtagacttctggtcaacaatgggttatcag

SEQ ID NO: 463274 - DNA, 33 bp, Homo sapien
tcagtagacttctggttaacaatgggttatcag

SEQ ID NO: 463275 - DNA, 33 bp, Homo sapien
gagaagagttggggtaaagattgttcctacaga

SEQ ID NO: 463276 - DNA, 33 bp, Homo sapien
gagaagagttggggtagagattgttcctacaga

SEQ ID NO: 463277 - DNA, 33 bp, Homo sapien
acatgtacatcgagaacggaatgattaagttaa

SEQ ID NO: 463278 - DNA, 33 bp, Homo sapien
acatgtacatcgagaatggaatgattaagttaa

SEQ ID NO: 463279 - DNA, 33 bp, Homo sapien
gctagtgaatgatccacaaccacctgcaaaaat

SEQ ID NO: 463280 - DNA, 33 bp, Homo sapien
gctagtgaatgatccataaccacctgcaaaaat

SEQ ID NO: 463281 - DNA, 33 bp, Homo sapien
catggctatgtaaataacacatgaaatagactt

SEQ ID NO: 463282 - DNA, 33 bp, Homo sapien
catggctatgtaaatatcacatgaaatagactt

SEQ ID NO: 463283 - DNA, 33 bp, Homo sapien
gatttgaggatctagacgagtagatggtagact

SEQ ID NO: 463284 - DNA, 33 bp, Homo sapien
gatttgaggatctagatgagtagatggtagact

SEQ ID NO: 463285 - DNA, 33 bp, Homo sapien
gttatgttaagttccacgtaggcaaaagagact

SEQ ID NO: 463286 - DNA, 33 bp, Homo sapien
gttatgttaagttccatgtaggcaaaagagact

SEQ ID NO: 463287 - DNA, 33 bp, Homo sapien
ctgggcagcatttgggaattagggctggagtga

SEQ ID NO: 463288 - DNA, 33 bp, Homo sapien
ctgggcagcatttggggattagggctggagtga

SEQ ID NO: 463289 - DNA, 33 bp, Homo sapien
ggaatttttaaaagcccatgtcagatggggaga

SEQ ID NO: 463290 - DNA, 33 bp, Homo sapien
ggaatttttaaaagcctatgtcagatggggaga

SEQ ID NO: 463291 - DNA, 33 bp, Homo sapien
taaaatgttcatacataagcccaggctgtttca

SEQ ID NO: 463292 - DNA, 33 bp, Homo sapien
taaaatgttcatacatgagcccaggctgtttca

SEQ ID NO: 463293 - DNA, 33 bp, Homo sapien
agattccaacgtgcaaccaagttgagagtcagt

SEQ ID NO: 463294 - DNA, 33 bp, Homo sapien
agattccaacgtgcaagcaagttgagagtcagt

SEQ ID NO: 463295 - DNA, 33 bp, Homo sapien
ctcaaaacacctgtaaaacgtgtcatagttcag

SEQ ID NO: 463296 - DNA, 33 bp, Homo sapien
ctcaaaacacctgtaagacgtgtcatagttcag

SEQ ID NO: 463297 - DNA, 33 bp, Homo sapien
atactgtgtgaccctacgcaaaaataaaatctc

SEQ ID NO: 463298 - DNA, 33 bp, Homo sapien
atactgtgtgaccctaggcaaaaataaaatctc

SEQ ID NO: 463299 - DNA, 33 bp, Homo sapien
aggacatctaagcagacccgcgcttccagagca

SEQ ID NO: 463300 - DNA, 33 bp, Homo sapien
aggacatctaagcagatccgcgcttccagagca

SEQ ID NO: 463301 - DNA, 33 bp, Homo sapien
gagtggtgcaaagtggaaagaagtatacaggct

SEQ ID NO: 463302 - DNA, 33 bp, Homo sapien
gagtggtgcaaagtgggaagaagtatacaggct

SEQ ID NO: 463303 - DNA, 33 bp, Homo sapien
aggaaagctctaaccacgaaaaaagcgaggctc

SEQ ID NO: 463304 - DNA, 33 bp, Homo sapien
aggaaagctctaaccatgaaaaaagcgaggctc

SEQ ID NO: 463305 - DNA, 33 bp, Homo sapien
gggtcctggttgacctaaactctgcagaaagag

SEQ ID NO: 463306 - DNA, 33 bp, Homo sapien
gggtcctggttgacctcaactctgcagaaagag

SEQ ID NO: 463307 - DNA, 33 bp, Homo sapien
gcagatcaggcagggacgaggtcttctaacatt

SEQ ID NO: 463308 - DNA, 33 bp, Homo sapien
gcagatcaggcagggatgaggtcttctaacatt

SEQ ID NO: 463309 - DNA, 33 bp, Homo sapien
aaaggtggaataactgcaattggggggcttctg

SEQ ID NO: 463310 - DNA, 33 bp, Homo sapien
aaaggtggaataactggaattggggggcttctg

SEQ ID NO: 463311 - DNA, 33 bp, Homo sapien
agaaagcaaaaagttgaaaagaagcagaactaa

SEQ ID NO: 463312 - DNA, 33 bp, Homo sapien
agaaagcaaaaagttggaaagaagcagaactaa

SEQ ID NO: 463313 - DNA, 33 bp, Homo sapien
gttatttaatcaaatactagtatggaatgaggc

SEQ ID NO: 463314 - DNA, 33 bp, Homo sapien
gttatttaatcaaatattagtatggaatgaggc

SEQ ID NO: 463315 - DNA, 33 bp, Homo sapien
agttttaatgcaaagaccctttttggagcaggt

SEQ ID NO: 463316 - DNA, 33 bp, Homo sapien
agttttaatgcaaagagcctttttggagcaggt

SEQ ID NO: 463317 - DNA, 33 bp, Homo sapien
ccatttgcaaactttcgaaatcagtgtcctaag

SEQ ID NO: 463318 - DNA, 33 bp, Homo sapien
ccatttgcaaactttctaaatcagtgtcctaag

SEQ ID NO: 463319 - DNA, 33 bp, Homo sapien
caagttgattggtgacagagtcatacacttcaa

SEQ ID NO: 463320 - DNA, 33 bp, Homo sapien
caagttgattggtgacggagtcatacacttcaa

SEQ ID NO: 463321 - DNA, 33 bp, Homo sapien
ggtatgtaagggatgacgtccggctgaaggtct

SEQ ID NO: 463322 - DNA, 33 bp, Homo sapien
ggtatgtaagggatgatgtccggctgaaggtct

SEQ ID NO: 463323 - DNA, 33 bp, Homo sapien
aagctttcagattcaaatcaaaccttgatagtc

SEQ ID NO: 463324 - DNA, 33 bp, Homo sapien
aagctttcagattcaagtcaaaccttgatagtc

SEQ ID NO: 463325 - DNA, 33 bp, Homo sapien
tctaatgtaaactaacagcttcatgttcttcct

SEQ ID NO: 463326 - DNA, 33 bp, Homo sapien
tctaatgtaaactaacggcttcatgttcttcct

SEQ ID NO: 463327 - DNA, 33 bp, Homo sapien
tgctggaatccacgtacgttggtgacttaaatc

SEQ ID NO: 463328 - DNA, 33 bp, Homo sapien
tgctggaatccacgtaggttggtgacttaaatc

SEQ ID NO: 463329 - DNA, 33 bp, Homo sapien
tttgtgcacttctaaccccgactacccgatgac

SEQ ID NO: 463330 - DNA, 33 bp, Homo sapien
tttgtgcacttctaactccgactacccgatgac

SEQ ID NO: 463331 - DNA, 33 bp, Homo sapien
catgcaccagtagtagcagaattaaaaccagaa

SEQ ID NO: 463332 - DNA, 33 bp, Homo sapien
catgcaccagtagtagtagaattaaaaccagaa

SEQ ID NO: 463333 - DNA, 33 bp, Homo sapien
ccctgcaacttggagacgaggggctagaccaga

SEQ ID NO: 463334 - DNA, 33 bp, Homo sapien
ccctgcaacttggagatgaggggctagaccaga

SEQ ID NO: 463335 - DNA, 33 bp, Homo sapien
agactccatcataaacaaacaaacaaaagaagt

SEQ ID NO: 463336 - DNA, 33 bp, Homo sapien
agactccatcataaactaacaaacaaaagaagt

SEQ ID NO: 463337 - DNA, 33 bp, Homo sapien
aaaaagttgacaggtagtacagaacgatatgat

SEQ ID NO: 463338 - DNA, 33 bp, Homo sapien
aaaaagttgacaggtattacagaacgatatgat

SEQ ID NO: 463339 - DNA, 33 bp, Homo sapien; identical to SEQ ID NO: 463337

SEQ ID NO: 463340 - DNA, 33 bp, Homo sapien; identical to SEQ ID NO: 463338

SEQ ID NO: 463341 - DNA, 33 bp, Homo sapien
aaggaagcatcgtggacagacttcacaacttga

SEQ ID NO: 463342 - DNA, 33 bp, Homo sapien
aaggaagcatcgtggatagacttcacaacttga

SEQ ID NO: 463343 - DNA, 33 bp, Homo sapien
gaaaattcatactgaacagaatccttacaagtg

SEQ ID NO: 463344 - DNA, 33 bp, Homo sapien
gaaaattcatactgaagagaatccttacaagtg

SEQ ID NO: 463345 - DNA, 33 bp, Homo sapien
gtggcagatttttcagacattgttcataccttg

SEQ ID NO: 463346 - DNA, 33 bp, Homo sapien
gtggcagatttttcaggcattgttcataccttg

SEQ ID NO: 463347 - DNA, 33 bp, Homo sapien; identical to SEQ ID NO: 463345

SEQ ID NO: 463348 - DNA, 33 bp, Homo sapien; identical to SEQ ID NO: 463346

SEQ ID NO: 463349 - DNA, 33 bp, Homo sapien
gaaaaggttatggagacgatgcccaaaagaaat

SEQ ID NO: 463350 - DNA, 33 bp, Homo sapien
gaaaaggttatggagatgatgcccaaaagaaat

SEQ ID NO: 463351 - DNA, 33 bp, Homo sapien
cgagctcccccaagaaagagttcctggtccttt

SEQ ID NO: 463352 - DNA, 33 bp, Homo sapien
cgagctcccccaagaaggagttcctggtccttt

SEQ ID NO: 463353 - DNA, 33 bp, Homo sapien; identical to SEQ ID NO: 463351

SEQ ID NO: 463354 - DNA, 33 bp, Homo sapien; identical to SEQ ID NO: 463352

SEQ ID NO: 463355 - DNA, 33 bp, Homo sapien
tgtcggattttaggagcctcactacagagggca

SEQ ID NO: 463356 - DNA, 33 bp, Homo sapien
tgtcggattttaggaggctcactacagagggca

SEQ ID NO: 463357 - DNA, 33 bp, Homo sapien
agctacctgggcacaaaataagtcataaaggta

SEQ ID NO: 463358 - DNA, 33 bp, Homo sapien
agctacctgggcacaagataagtcataaaggta

SEQ ID NO: 463359 - DNA, 33 bp, Homo sapien
aagcataataaaacacagctgggaagacaaaat

SEQ ID NO: 463360 - DNA, 33 bp, Homo sapien
aagcataataaaacacggctgggaagacaaaat

SEQ ID NO: 463361 - DNA, 33 bp, Homo sapien
acactcagtacacttgaagggtttctctccact

SEQ ID NO: 463362 - DNA, 33 bp, Homo sapien
acactcagtacacttgtagggtttctctccact

SEQ ID NO: 463363 - DNA, 33 bp, Homo sapien
taaggtttctctccacgatgaagtctatgatga

SEQ ID NO: 463364 - DNA, 33 bp, Homo sapien
taaggtttctctccactatgaagtctatgatga

SEQ ID NO: 463365 - DNA, 33 bp, Homo sapien
tttgagataattgttccaaatgcaatgagtaga

SEQ ID NO: 463366 - DNA, 33 bp, Homo sapien
tttgagataattgttctaaatgcaatgagtaga

SEQ ID NO: 463367 - DNA, 33 bp, Homo sapien
atgggatttgcaagaaagtctaaggtagttttc

SEQ ID NO: 463368 - DNA, 33 bp, Homo sapien
atgggatttgcaagaatgtctaaggtagttttc

SEQ ID NO: 463369 - DNA, 33 bp, Homo sapien; identical to SEQ ID NO: 463367

SEQ ID NO: 463370 - DNA, 33 bp, Homo sapien; identical to SEQ ID NO: 463368

SEQ ID NO: 463371 - DNA, 33 bp, Homo sapien
cacttacaaatgagaacgtggcatttgggtttg

SEQ ID NO: 463372 - DNA, 33 bp, Homo sapien
cacttacaaatgagaatgtggcatttgggtttg

SEQ ID NO: 463373 - DNA, 33 bp, Homo sapien
gatctcttcttgacagcctccaggaatgatctc

SEQ ID NO: 463374 - DNA, 33 bp, Homo sapien
gatctcttcttgacagtctccaggaatgatctc

SEQ ID NO: 463375 - DNA, 33 bp, Homo sapien
tggaaatagattcataacccccagtgatttcat

SEQ ID NO: 463376 - DNA, 33 bp, Homo sapien
tggaaatagattcatagcccccagtgatttcat

SEQ ID NO: 463377 - DNA, 33 bp, Homo sapien
gagttcaccattctgactatatcgttcaagtta

SEQ ID NO: 463378 - DNA, 33 bp, Homo sapien
gagttcaccattctgagtatatcgttcaagtta

SEQ ID NO: 463379 - DNA, 33 bp, Homo sapien
tcatccatgtcataatcaaggccaaaaacctca

SEQ ID NO: 463380 - DNA, 33 bp, Homo sapien
tcatccatgtcataatgaaggccaaaaacctca

SEQ ID NO: 463381 - DNA, 33 bp, Homo sapien
aagttgtaagcaattagaactgtaggcccctag

SEQ ID NO: 463382 - DNA, 33 bp, Homo sapien
aagttgtaagcaattataactgtaggcccctag

SEQ ID NO: 463383 - DNA, 33 bp, Homo sapien
aagaagaagtgttatacgtcctaaagtaaggtt

SEQ ID NO: 463384 - DNA, 33 bp, Homo sapien
aagaagaagtgttatatgtcctaaagtaaggtt

SEQ ID NO: 463385 - DNA, 33 bp, Homo sapien
ttagtttgtgaaagaaatccaacccagccatgg

SEQ ID NO: 463386 - DNA, 33 bp, Homo sapien
ttagtttgtgaaagaactccaacccagccatgg

SEQ ID NO: 463387 - DNA, 33 bp, Homo sapien
catttccatgattatacgtacaagtaacaaatc

SEQ ID NO: 463388 - DNA, 33 bp, Homo sapien
catttccatgattatatgtacaagtaacaaatc

SEQ ID NO: 463389 - DNA, 33 bp, Homo sapien
ctaattctgctgattcaaataaattcatgctta

SEQ ID NO: 463390 - DNA, 33 bp, Homo sapien
ctaattctgctgattccaataaattcatgctta

SEQ ID NO: 463391 - DNA, 33 bp, Homo sapien
cttcaacattgtgtacaactatagctacttcct

SEQ ID NO: 463392 - DNA, 33 bp, Homo sapien
cttcaacattgtgtacgactatagctacttcct

SEQ ID NO: 463393 - DNA, 33 bp, Homo sapien
gccctcaggttaaggacaacagttctaggccat

SEQ ID NO: 463394 - DNA, 33 bp, Homo sapien
gccctcaggttaaggataacagttctaggccat

SEQ ID NO: 463395 - DNA, 33 bp, Homo sapien
tggaatttgtaggcaactgaagcatttccttca

SEQ ID NO: 463396 - DNA, 33 bp, Homo sapien
tggaatttgtaggcaattgaagcatttccttca

SEQ ID NO: 463397 - DNA, 33 bp, Homo sapien
gccacatttattgagcacatttttgtaccatac

SEQ ID NO: 463398 - DNA, 33 bp, Homo sapien
gccacatttattgagcgcatttttgtaccatac

SEQ ID NO: 463399 - DNA, 33 bp, Homo sapien
acaaagtaccatagaccggtggctgaaaccaca

SEQ ID NO: 463400 - DNA, 33 bp, Homo sapien
acaaagtaccatagactggtggctgaaaccaca

SEQ ID NO: 463401 - DNA, 33 bp, Homo sapien
ttgtgaccccttcttccatcatcaaagctgcaa

SEQ ID NO: 463402 - DNA, 33 bp, Homo sapien
ttgtgaccccttcttctatcatcaaagctgcaa

SEQ ID NO: 463403 - DNA, 33 bp, Homo sapien
cactcatggacactcaataggccacactcccga

SEQ ID NO: 463404 - DNA, 33 bp, Homo sapien
cactcatggacactcagtaggccacactcccga

SEQ ID NO: 463405 - DNA, 33 bp, Homo sapien
gccttcaccttccaacagtgtggtacctgcctg

SEQ ID NO: 463406 - DNA, 33 bp, Homo sapien
gccttcaccttccaaccgtgtggtacctgcctg

SEQ ID NO: 463407 - DNA, 33 bp, Homo sapien
gcacaggctgcattagcaaataccctccagggc

SEQ ID NO: 463408 - DNA, 33 bp, Homo sapien
gcacaggctgcattagtaaataccctccagggc

SEQ ID NO: 463409 - DNA, 33 bp, Homo sapien
ttttaggtggagtcaaacacagatatctttggt

SEQ ID NO: 463410 - DNA, 33 bp, Homo sapien
ttttaggtggagtcaagcacagatatctttggt

SEQ ID NO: 463411 - DNA, 33 bp, Homo sapien
ggtatgactgcatgaaatattaactaagataat

SEQ ID NO: 463412 - DNA, 33 bp, Homo sapien
ggtatgactgcatgaactattaactaagataat

SEQ ID NO: 463413 - DNA, 33 bp, Homo sapien
tccctagagtaacaccaaccaccaatagcaatt

SEQ ID NO: 463414 - DNA, 33 bp, Homo sapien
tccctagagtaacaccgaccaccaatagcaatt

SEQ ID NO: 463415 - DNA, 33 bp, Homo sapien
caggtgagcgccatcaaccccttctaagttttc

SEQ ID NO: 463416 - DNA, 33 bp, Homo sapien
caggtgagcgccatcacccccttctaagttttc

SEQ ID NO: 463417 - DNA, 33 bp, Homo sapien
ctattcaataaatgccactgggataaccggcta

SEQ ID NO: 463418 - DNA, 33 bp, Homo sapien
ctattcaataaatgccgctgggataaccggcta

SEQ ID NO: 463419 - DNA, 33 bp, Homo sapien
gtagctcccacgtatccgaggtttcatctaccc

SEQ ID NO: 463420 - DNA, 33 bp, Homo sapien
gtagctcccacgtatctgaggtttcatctaccc

SEQ ID NO: 463421 - DNA, 33 bp, Homo sapien
aagaaagaaaacttacaaattactgctggactt

SEQ ID NO: 463422 - DNA, 33 bp, Homo sapien
aagaaagaaaacttacgaattactgctggactt

SEQ ID NO: 463423 - DNA, 33 bp, Homo sapien
gtcaatggctgaggacaggctccttttctgcgg

SEQ ID NO: 463424 - DNA, 33 bp, Homo sapien
gtcaatggctgaggacgggctccttttctgcgg

SEQ ID NO: 463425 - DNA, 33 bp, Homo sapien
tgcctgaacaataacaggtatgaaaggaacaga

SEQ ID NO: 463426 - DNA, 33 bp, Homo sapien
tgcctgaacaataacatgtatgaaaggaacaga

SEQ ID NO: 463427 - DNA, 33 bp, Homo sapien
ggatgaaatttggcacagaaatgtcccagtctt

SEQ ID NO: 463428 - DNA, 33 bp, Homo sapien
ggatgaaatttggcacggaaatgtcccagtctt

SEQ ID NO: 463429 - DNA, 33 bp, Homo sapien
cttcctgcagttcaaaactactttcttctttag

SEQ ID NO: 463430 - DNA, 33 bp, Homo sapien
cttcctgcagttcaaagctactttcttctttag

SEQ ID NO: 463431 - DNA, 33 bp, Homo sapien
ggctcttcaggctgataaagcactgggcagaga

SEQ ID NO: 463432 - DNA, 33 bp, Homo sapien
ggctcttcaggctgattaagcactgggcagaga

SEQ ID NO: 463433 - DNA, 33 bp, Homo sapien
accattagtccaaagacgctaaacccaaggact

SEQ ID NO: 463434 - DNA, 33 bp, Homo sapien
accattagtccaaagatgctaaacccaaggact

SEQ ID NO: 463435 - DNA, 33 bp, Homo sapien
ccaaccttgatttcaacttaggaccaaccagag

SEQ ID NO: 463436 - DNA, 33 bp, Homo sapien
ccaaccttgatttcaatttaggaccaaccagag

SEQ ID NO: 463437 - DNA, 33 bp, Homo sapien
tttgctttggcgccatcatgaaaaaatgttaat

SEQ ID NO: 463438 - DNA, 33 bp, Homo sapien
tttgctttggcgccatgatgaaaaaatgttaat

SEQ ID NO: 463439 - DNA, 33 bp, Homo sapien
tcctccactgggccaacatccttgcatctattc

SEQ ID NO: 463440 - DNA, 33 bp, Homo sapien
tcctccactgggccaatatccttgcatctattc

SEQ ID NO: 463441 - DNA, 33 bp, Homo sapien
gtgaggggagatcacagactgtcagagccttcc

SEQ ID NO: 463442 - DNA, 33 bp, Homo sapien
gtgaggggagatcacatactgtcagagccttcc

SEQ ID NO: 463443 - DNA, 33 bp, Homo sapien
tctgcaaagatattacaaagatcagcatcaact

SEQ ID NO: 463444 - DNA, 33 bp, Homo sapien
tctgcaaagatattacgaagatcagcatcaact

SEQ ID NO: 463445 - DNA, 33 bp, Homo sapien
cgcagtcctcacaggaacatccaaaatgaaatc

SEQ ID NO: 463446 - DNA, 33 bp, Homo sapien
cgcagtcctcacaggagcatccaaaatgaaatc

SEQ ID NO: 463447 - DNA, 33 bp, Homo sapien
caaagagaaaaagcaacgcctactacatatacc

SEQ ID NO: 463448 - DNA, 33 bp, Homo sapien
caaagagaaaaagcaatgcctactacatatacc

SEQ ID NO: 463449 - DNA, 33 bp, Homo sapien
gtgacactcaaattcacgacggtcccgtattta

SEQ ID NO: 463450 - DNA, 33 bp, Homo sapien
gtgacactcaaattcatgacggtcccgtattta

SEQ ID NO: 463451 - DNA, 33 bp, Homo sapien
gtttgagaaaaacaacactgaagctgatgccga

SEQ ID NO: 463452 - DNA, 33 bp, Homo sapien
gtttgagaaaaacaacgctgaagctgatgccga

SEQ ID NO: 463453 - DNA, 33 bp, Homo sapien
gcaaatgtattaccacaatcggcatcagcttca

SEQ ID NO: 463454 - DNA, 33 bp, Homo sapien
gcaaatgtattaccacgatcggcatcagcttca

SEQ ID NO: 463455 - DNA, 33 bp, Homo sapien
aataatttccgtggaccaaaaggtgttaatggc

SEQ ID NO: 463456 - DNA, 33 bp, Homo sapien
aataatttccgtggactaaaaggtgttaatggc

SEQ ID NO: 463457 - DNA, 33 bp, Homo sapien
taatacatttgtagagcatgcttatcatcagac

SEQ ID NO: 463458 - DNA, 33 bp, Homo sapien
taatacatttgtagaggatgcttatcatcagac

SEQ ID NO: 463459 - DNA, 33 bp, Homo sapien
gagcctgcttatcatcagacttggacgacggtg

SEQ ID NO: 463460 - DNA, 33 bp, Homo sapien
gagcctgcttatcatcggacttggacgacggtg

SEQ ID NO: 463461 - DNA, 33 bp, Homo sapien
ccagttccttgcttcaaagaatctgcaagttag

SEQ ID NO: 463462 - DNA, 33 bp, Homo sapien
ccagttccttgcttcagagaatctgcaagttag

SEQ ID NO: 463463 - DNA, 33 bp, Homo sapien
tcaagactaacagggccgaaatagcaaaacctc

SEQ ID NO: 463464 - DNA, 33 bp, Homo sapien
tcaagactaacagggctgaaatagcaaaacctc

SEQ ID NO: 463465 - DNA, 33 bp, Homo sapien
gctactcgggatcaaaagtgtgatcagcacatg

SEQ ID NO: 463466 - DNA, 33 bp, Homo sapien
gctactcgggatcaaaggtgtgatcagcacatg

SEQ ID NO: 463467 - DNA, 33 bp, Homo sapien
atgaggccacatattacctatgtcatctactgg

SEQ ID NO: 463468 - DNA, 33 bp, Homo sapien
atgaggccacatattagctatgtcatctactgg

SEQ ID NO: 463469 - DNA, 33 bp, Homo sapien
gccccctaattgcatacaccagtgcataacgta

SEQ ID NO: 463470 - DNA, 33 bp, Homo sapien
gccccctaattgcatataccagtgcataacgta

SEQ ID NO: 463471 - DNA, 33 bp, Homo sapien
atgccactgagccacaatcagccctctgtgtcc

SEQ ID NO: 463472 - DNA, 33 bp, Homo sapien
atgccactgagccacagtcagccctctgtgtcc

SEQ ID NO: 463473 - DNA, 33 bp, Homo sapien
tggggataactgaaaacgagtgcttgaaagagt

SEQ ID NO: 463474 - DNA, 33 bp, Homo sapien
tggggataactgaaaaggagtgcttgaaagagt

SEQ ID NO: 463475 - DNA, 33 bp, Homo sapien
ggctctccataaataccggggagacataggaca

SEQ ID NO: 463476 - DNA, 33 bp, Homo sapien
ggctctccataaatactggggagacataggaca

SEQ ID NO: 463477 - DNA, 33 bp, Homo sapien
ctgtttttcatacaccagaaaggatgcctttac

SEQ ID NO: 463478 - DNA, 33 bp, Homo sapien
ctgtttttcatacaccggaaaggatgcctttac

SEQ ID NO: 463479 - DNA, 33 bp, Homo sapien
aggcccttccactgaactctctctaggcctcac

SEQ ID NO: 463480 - DNA, 33 bp, Homo sapien
aggcccttccactgaattctctctaggcctcac

SEQ ID NO: 463481 - DNA, 33 bp, Homo sapien
ttctctgatgtaagtggactggacttctgtgct

SEQ ID NO: 463482 - DNA, 33 bp, Homo sapien
ttctctgatgtaagtgtactggacttctgtgct

SEQ ID NO: 463483 - DNA, 33 bp, Homo sapien
ctttttgtctctaggccactatttttccatttg

SEQ ID NO: 463484 - DNA, 33 bp, Homo sapien
ctttttgtctctaggctactatttttccatttg

SEQ ID NO: 463485 - DNA, 33 bp, Homo sapien
atgaatgtaaagcatccgacccactgcctggac

SEQ ID NO: 463486 - DNA, 33 bp, Homo sapien
atgaatgtaaagcatctgacccactgcctggac

SEQ ID NO: 463487 - DNA, 33 bp, Homo sapien
gcggataagtattgtcaacacaagagactccca

SEQ ID NO: 463488 - DNA, 33 bp, Homo sapien
gcggataagtattgtcgacacaagagactccca

SEQ ID NO: 463489 - DNA, 33 bp, Homo sapien
agccagggtttcccaacctcaacgttctcaaca

SEQ ID NO: 463490 - DNA, 33 bp, Homo sapien
agccagggtttcccaatctcaacgttctcaaca

SEQ ID NO: 463491 - DNA, 33 bp, Homo sapien
ttccatacctccctgacacgccacgccacggct

SEQ ID NO: 463492 - DNA, 33 bp, Homo sapien
ttccatacctccctgatacgccacgccacggct

SEQ ID NO: 463493 - DNA, 33 bp, Homo sapien
aattaagttaaagcgaagtcatcagaaggaacc

SEQ ID NO: 463494 - DNA, 33 bp, Homo sapien
aattaagttaaagcgaggtcatcagaaggaacc

SEQ ID NO: 463495 - DNA, 33 bp, Homo sapien
acaattatcagttaaacgcactgttgagggctg

SEQ ID NO: 463496 - DNA, 33 bp, Homo sapien
acaattatcagttaaatgcactgttgagggctg

SEQ ID NO: 463497 - DNA, 33 bp, Homo sapien
gttcaggaaagccttccgaagaagatgacgaac

SEQ ID NO: 463498 - DNA, 33 bp, Homo sapien
gttcaggaaagccttctgaagaagatgacgaac

SEQ ID NO: 463499 - DNA, 33 bp, Homo sapien
cccacactttctttacacattcattcattgatg

SEQ ID NO: 463500 - DNA, 33 bp, Homo sapien
cccacactttctttacgcattcattcattgatg

SEQ ID NO: 463501 - DNA, 33 bp, Homo sapien
gaggggctttagttaacacggatgtgctgtgtt

SEQ ID NO: 463502 - DNA, 33 bp, Homo sapien
gaggggctttagttaatacggatgtgctgtgtt

SEQ ID NO: 463503 - DNA, 33 bp, Homo sapien
caatctactctcttagaaaggctcaagaacaca

SEQ ID NO: 463504 - DNA, 33 bp, Homo sapien
caatctactctcttaggaaggctcaagaacaca

SEQ ID NO: 463505 - DNA, 33 bp, Homo sapien
acacacaccggattcacggggaagaagttatca

SEQ ID NO: 463506 - DNA, 33 bp, Homo sapien
acacacaccggattcatggggaagaagttatca

SEQ ID NO: 463507 - DNA, 33 bp, Homo sapien
gaaatttcttcctcggcacacaattaattactt

SEQ ID NO: 463508 - DNA, 33 bp, Homo sapien
gaaatttcttcctcggtacacaattaattactt

SEQ ID NO: 463509 - DNA, 33 bp, Homo sapien
cctcatttacggaagacagtatcgaggtggggg

SEQ ID NO: 463510 - DNA, 33 bp, Homo sapien
cctcatttacggaagagagtatcgaggtggggg

SEQ ID NO: 463511 - DNA, 33 bp, Homo sapien
agccaaacagggacccaaagacagtggctgaag

SEQ ID NO: 463512 - DNA, 33 bp, Homo sapien
agccaaacagggacccgaagacagtggctgaag

SEQ ID NO: 463513 - DNA, 33 bp, Homo sapien
agaccctgctctgtccaactgtggcgagttacc

SEQ ID NO: 463514 - DNA, 33 bp, Homo sapien
agaccctgctctgtccgactgtggcgagttacc

SEQ ID NO: 463515 - DNA, 33 bp, Homo sapien
gaacaaaaacagaggccgagatatgaagacaga

SEQ ID NO: 463516 - DNA, 33 bp, Homo sapien
gaacaaaaacagaggcggagatatgaagacaga

SEQ ID NO: 463517 - DNA, 33 bp, Homo sapien
ggcaggggctcagtgccgaaactattttttttg

SEQ ID NO: 463518 - DNA, 33 bp, Homo sapien
ggcaggggctcagtgcggaaactattttttttg

SEQ ID NO: 463519 - DNA, 33 bp, Homo sapien
aaccccattgtcagtgaactgtaccacccagcc

SEQ ID NO: 463520 - DNA, 33 bp, Homo sapien
aaccccattgtcagtggactgtaccacccagcc

SEQ ID NO: 463521 - DNA, 33 bp, Homo sapien
gtcctttagcaaccaaactcagtatattcagag

SEQ ID NO: 463522 - DNA, 33 bp, Homo sapien
gtcctttagcaaccaagctcagtatattcagag

SEQ ID NO: 463523 - DNA, 33 bp, Homo sapien
tgaatataactacacaatggtcatgtctgcaca

SEQ ID NO: 463524 - DNA, 33 bp, Homo sapien
tgaatataactacacagtggtcatgtctgcaca

SEQ ID NO: 463525 - DNA, 33 bp, Homo sapien
aggcttactttactaactgtggtgaaatacaca

SEQ ID NO: 463526 - DNA, 33 bp, Homo sapien
aggcttactttactaattgtggtgaaatacaca

SEQ ID NO: 463527 - DNA, 33 bp, Homo sapien
tcaacagcacaataaaccttacaccttcaacaa

SEQ ID NO: 463528 - DNA, 33 bp, Homo sapien
tcaacagcacaataaatcttacaccttcaacaa

SEQ ID NO: 463529 - DNA, 33 bp, Homo sapien
gaaaatgagtttgggaccatttacctctttgga

SEQ ID NO: 463530 - DNA, 33 bp, Homo sapien
gaaaatgagtttgggatcatttacctctttgga

SEQ ID NO: 463531 - DNA, 33 bp, Homo sapien
cttgcccaacatcaaccgcatcacaagctttga

SEQ ID NO: 463532 - DNA, 33 bp, Homo sapien
cttgcccaacatcaactgcatcacaagctttga

SEQ ID NO: 463533 - DNA, 33 bp, Homo sapien
cctgcaggggctcgtccatcagaggatcatgtg

SEQ ID NO: 463534 - DNA, 33 bp, Homo sapien
cctgcaggggctcgtctatcagaggatcatgtg

SEQ ID NO: 463535 - DNA, 33 bp, Homo sapien
gaacaagggctgcaggccagactcccgggctcc

SEQ ID NO: 463536 - DNA, 33 bp, Homo sapien
gaacaagggctgcaggtcagactcccgggctcc

SEQ ID NO: 463537 - DNA, 33 bp, Homo sapien
tgacacagcagggtcacgttctctcctgaggcc

SEQ ID NO: 463538 - DNA, 33 bp, Homo sapien
tgacacagcagggtcatgttctctcctgaggcc

SEQ ID NO: 463539 - DNA, 33 bp, Homo sapien
agggcctggaaccccccactgtggagctgctgt

SEQ ID NO: 463540 - DNA, 33 bp, Homo sapien
agggcctggaacccccgactgtggagctgctgt

SEQ ID NO: 463541 - DNA, 33 bp, Homo sapien
tttccttgctctttcaaattcttagtagaaatg

SEQ ID NO: 463542 - DNA, 33 bp, Homo sapien
tttccttgctctttcagattcttagtagaaatg

SEQ ID NO: 463543 - DNA, 33 bp, Homo sapien
gtttgtaggatgtaaaataagagagtgagagag

SEQ ID NO: 463544 - DNA, 33 bp, Homo sapien
gtttgtaggatgtaaagtaagagagtgagagag

SEQ ID NO: 463545 - DNA, 33 bp, Homo sapien
cccatctcgccgaataccaaatcttcccctgcc

SEQ ID NO: 463546 - DNA, 33 bp, Homo sapien
cccatctcgccgaatagcaaatcttcccctgcc

SEQ ID NO: 463547 - DNA, 33 bp, Homo sapien
gctcacggcattaaccaagtcatcagcggatcc

SEQ ID NO: 463548 - DNA, 33 bp, Homo sapien
gctcacggcattaacccagtcatcagcggatcc

SEQ ID NO: 463549 - DNA, 33 bp, Homo sapien; identical to SEQ ID NO: 463547

SEQ ID NO: 463550 - DNA, 33 bp, Homo sapien; identical to SEQ ID NO: 463548

SEQ ID NO: 463551 - DNA, 33 bp, Homo sapien
agctggggttaggagacctaaggatccgctgat

SEQ ID NO: 463552 - DNA, 33 bp, Homo sapien
agctggggttaggagatctaaggatccgctgat

SEQ ID NO: 463553 - DNA, 33 bp, Homo sapien; identical to SEQ ID NO: 463551

SEQ ID NO: 463554 - DNA, 33 bp, Homo sapien; identical to SEQ ID NO: 463552

SEQ ID NO: 463555 - DNA, 33 bp, Homo sapien
aatatagagccataaaatacccaaaatagccaa

SEQ ID NO: 463556 - DNA, 33 bp, Homo sapien
aatatagagccataaagtacccaaaatagccaa

SEQ ID NO: 463557 - DNA, 33 bp, Homo sapien
attcttccaggcctcacgacgtggcttttacgg

SEQ ID NO: 463558 - DNA, 33 bp, Homo sapien
attcttccaggcctcatgacgtggcttttacgg

SEQ ID NO: 463559 - DNA, 33 bp, Homo sapien
cctcatctctataaaacgttcagctactcacct

SEQ ID NO: 463560 - DNA, 33 bp, Homo sapien
cctcatctctataaaatgttcagctactcacct

SEQ ID NO: 463561 - DNA, 33 bp, Homo sapien
attagagcatggtataaatttggaatgataatg

SEQ ID NO: 463562 - DNA, 33 bp, Homo sapien
attagagcatggtatacatttggaatgataatg

SEQ ID NO: 463563 - DNA, 33 bp, Homo sapien
ctgagctgttgctctacactaccctgtcgtgcc

SEQ ID NO: 463564 - DNA, 33 bp, Homo sapien
ctgagctgttgctctatactaccctgtcgtgcc

SEQ ID NO: 463565 - DNA, 33 bp, Homo sapien
aggtaatcatgtctgagcacaaattttgggtct

SEQ ID NO: 463566 - DNA, 33 bp, Homo sapien
aggtaatcatgtctgatcacaaattttgggtct

SEQ ID NO: 463567 - DNA, 33 bp, Homo sapien
caaatgggcaaggtcaaagtgaggagcagaggc

SEQ ID NO: 463568 - DNA, 33 bp, Homo sapien
caaatgggcaaggtcagagtgaggagcagaggc

SEQ ID NO: 463569 - DNA, 33 bp, Homo sapien
acagagtggggcacaccatcctctaatggacga

SEQ ID NO: 463570 - DNA, 33 bp, Homo sapien
acagagtggggcacacgatcctctaatggacga

SEQ ID NO: 463571 - DNA, 33 bp, Homo sapien
tttggtttgaggtggaaacttcaggaaagcccc

SEQ ID NO: 463572 - DNA, 33 bp, Homo sapien
tttggtttgaggtggagacttcaggaaagcccc

SEQ ID NO: 463573 - DNA, 33 bp, Homo sapien
aggagagaaggaggcaccgtgttaaatggggct

SEQ ID NO: 463574 - DNA, 33 bp, Homo sapien
aggagagaaggaggcatcgtgttaaatggggct

SEQ ID NO: 463575 - DNA, 33 bp, Homo sapien; identical to SEQ ID NO: 463573

SEQ ID NO: 463576 - DNA, 33 bp, Homo sapien; identical to SEQ ID NO: 463574

SEQ ID NO: 463577 - DNA, 33 bp, Homo sapien
cactctgctttgagggaaaatcttgtctttatt

SEQ ID NO: 463578 - DNA, 33 bp, Homo sapien
cactctgctttgaggggaaatcttgtctttatt

SEQ ID NO: 463579 - DNA, 33 bp, Homo sapien; identical to SEQ ID NO: 463577

SEQ ID NO: 463580 - DNA, 33 bp, Homo sapien; identical to SEQ ID NO: 463578

SEQ ID NO: 463581 - DNA, 33 bp, Homo sapien
tccactctcagggctcagagacattctgcatgt

SEQ ID NO: 463582 - DNA, 33 bp, Homo sapien
tccactctcagggctcggagacattctgcatgt

SEQ ID NO: 463583 - DNA, 33 bp, Homo sapien
cctctaatttcctgataaaatgtatacaaacca

SEQ ID NO: 463584 - DNA, 33 bp, Homo sapien
cctctaatttcctgatgaaatgtatacaaacca

SEQ ID NO: 463585 - DNA, 33 bp, Homo sapien
gaaatactacagtgaaaaaaatctcccattgtt

SEQ ID NO: 463586 - DNA, 33 bp, Homo sapien
gaaatactacagtgaacaaaatctcccattgtt

SEQ ID NO: 463587 - DNA, 33 bp, Homo sapien
tctacaataaaaccatcaatctcaaatcattgg

SEQ ID NO: 463588 - DNA, 33 bp, Homo sapien
tctacaataaaaccatgaatctcaaatcattgg

SEQ ID NO: 463589 - DNA, 33 bp, Homo sapien
ttgaaggctacagacaagaggttaggacgccat

SEQ ID NO: 463590 - DNA, 33 bp, Homo sapien
ttgaaggctacagacaggaggttaggacgccat

SEQ ID NO: 463591 - DNA, 33 bp, Homo sapien
ctcaggggctcctgaaagtcagaatcacaaaca

SEQ ID NO: 463592 - DNA, 33 bp, Homo sapien
ctcaggggctcctgaatgtcagaatcacaaaca

SEQ ID NO: 463593 - DNA, 33 bp, Homo sapien
gggactcagacaccacaccagattgagaactag

SEQ ID NO: 463594 - DNA, 33 bp, Homo sapien
gggactcagacaccacgccagattgagaactag

SEQ ID NO: 463595 - DNA, 33 bp, Homo sapien
cctctcactcgctgtccccgtcatcccttcctg

SEQ ID NO: 463596 - DNA, 33 bp, Homo sapien
cctctcactcgctgtctccgtcatcccttcctg

SEQ ID NO: 463597 - DNA, 33 bp, Homo sapien
gagaggttgctgagacagtcggagagacagcgg

SEQ ID NO: 463598 - DNA, 33 bp, Homo sapien
gagaggttgctgagaccgtcggagagacagcgg

SEQ ID NO: 463599 - DNA, 33 bp, Homo sapien
gtgtggtcggaactcaacgactccctgaagctc

SEQ ID NO: 463600 - DNA, 33 bp, Homo sapien
gtgtggtcggaactcagcgactccctgaagctc

SEQ ID NO: 463601 - DNA, 33 bp, Homo sapien
gggtcagagtaactgcactttcatctcccacgg

SEQ ID NO: 463602 - DNA, 33 bp, Homo sapien
gggtcagagtaactgcgctttcatctcccacgg

SEQ ID NO: 463603 - DNA, 33 bp, Homo sapien
ggacagattagatagacgcagccaaagtgaggg

SEQ ID NO: 463604 - DNA, 33 bp, Homo sapien
ggacagattagatagatgcagccaaagtgaggg

SEQ ID NO: 463605 - DNA, 33 bp, Homo sapien
ctaaatgtctgctctacggattcttctttgaat

SEQ ID NO: 463606 - DNA, 33 bp, Homo sapien
ctaaatgtctgctctatggattcttctttgaat

SEQ ID NO: 463607 - DNA, 33 bp, Homo sapien
tacaggtgtgcaagaacgagttaatctcacagc

SEQ ID NO: 463608 - DNA, 33 bp, Homo sapien
tacaggtgtgcaagaaggagttaatctcacagc

SEQ ID NO: 463609 - DNA, 33 bp, Homo sapien
tcgggaggtctggaaaattccctgctcaagcct

SEQ ID NO: 463610 - DNA, 33 bp, Homo sapien
tcgggaggtctggaaagttccctgctcaagcct

SEQ ID NO: 463611 - DNA, 33 bp, Homo sapien; identical to SEQ ID NO: 463609

SEQ ID NO: 463612 - DNA, 33 bp, Homo sapien; identical to SEQ ID NO: 463610

SEQ ID NO: 463613 - DNA, 33 bp, Homo sapien
aaatgcaagatgtgtacactaagaactacaaaa

SEQ ID NO: 463614 - DNA, 33 bp, Homo sapien
aaatgcaagatgtgtagactaagaactacaaaa

SEQ ID NO: 463615 - DNA, 33 bp, Homo sapien
gatttatcaggggctgaattactctccttcaag

SEQ ID NO: 463616 - DNA, 33 bp, Homo sapien
gatttatcaggggctggattactctccttcaag

SEQ ID NO: 463617 - DNA, 33 bp, Homo sapien
gatcaaacgggtatcacaaatccaaaattccaa

SEQ ID NO: 463618 - DNA, 33 bp, Homo sapien
gatcaaacgggtatcagaaatccaaaattccaa

SEQ ID NO: 463619 - DNA, 33 bp, Homo sapien
tataaaaaaactcaaactggatatcaacagata

SEQ ID NO: 463620 - DNA, 33 bp, Homo sapien
tataaaaaaactcaaattggatatcaacagata

SEQ ID NO: 463621 - DNA, 33 bp, Homo sapien
ctctgaggggaaacataaaaagacgttccaggg

SEQ ID NO: 463622 - DNA, 33 bp, Homo sapien
ctctgaggggaaacatgaaaagacgttccaggg

SEQ ID NO: 463623 - DNA, 33 bp, Homo sapien
tgtggaaccgcatgaaacgtaagttggcagagc

SEQ ID NO: 463624 - DNA, 33 bp, Homo sapien
tgtggaaccgcatgaagcgtaagttggcagagc

SEQ ID NO: 463625 - DNA, 33 bp, Homo sapien
cccttccttgtggactcaaaagcaggctaagta

SEQ ID NO: 463626 - DNA, 33 bp, Homo sapien
cccttccttgtggactgaaaagcaggctaagta

SEQ ID NO: 463627 - DNA, 33 bp, Homo sapien
tcaagggtttgacacggatcttgagtgccctct

SEQ ID NO: 463628 - DNA, 33 bp, Homo sapien
tcaagggtttgacacgtatcttgagtgccctct

SEQ ID NO: 463629 - DNA, 33 bp, Homo sapien
gtcatgtccaatatgacgttgtggactctgcac

SEQ ID NO: 463630 - DNA, 33 bp, Homo sapien
gtcatgtccaatatgatgttgtggactctgcac

SEQ ID NO: 463631 - DNA, 33 bp, Homo sapien
agaggagaaatcaattcaagaatcatcatgtac

SEQ ID NO: 463632 - DNA, 33 bp, Homo sapien
agaggagaaatcaattgaagaatcatcatgtac

SEQ ID NO: 463633 - DNA, 33 bp, Homo sapien
ctacagcaatagtcctaaataatgtcctcctta

SEQ ID NO: 463634 - DNA, 33 bp, Homo sapien
ctacagcaatagtcctgaataatgtcctcctta

SEQ ID NO: 463635 - DNA, 33 bp, Homo sapien
ggtgtctagatataggaccagatatattgggaa

SEQ ID NO: 463636 - DNA, 33 bp, Homo sapien
ggtgtctagatatagggccagatatattgggaa

SEQ ID NO: 463637 - DNA, 33 bp, Homo sapien
ccctcagatggtaccaaaaatatagacaattga

SEQ ID NO: 463638 - DNA, 33 bp, Homo sapien
ccctcagatggtaccagaaatatagacaattga

SEQ ID NO: 463639 - DNA, 33 bp, Homo sapien
ctctcacctgtgtcctcaatgcctcctcctgac

SEQ ID NO: 463640 - DNA, 33 bp, Homo sapien
ctctcacctgtgtccttaatgcctcctcctgac

SEQ ID NO: 463641 - DNA, 33 bp, Homo sapien
attttctgagaagtggaaaaaacaacagaatct

SEQ ID NO: 463642 - DNA, 33 bp, Homo sapien
attttctgagaagtgggaaaaacaacagaatct

SEQ ID NO: 463643 - DNA, 33 bp, Homo sapien
gttgaaaaatacaagaatctctggaggatcaga

SEQ ID NO: 463644 - DNA, 33 bp, Homo sapien
gttgaaaaatacaagactctctggaggatcaga

SEQ ID NO: 463645 - DNA, 33 bp, Homo sapien
gagatgaagtgtattccatatctgagtcatcta

SEQ ID NO: 463646 - DNA, 33 bp, Homo sapien
gagatgaagtgtattctatatctgagtcatcta

SEQ ID NO: 463647 - DNA, 33 bp, Homo sapien
tggggttgttgaaccacgtgaactgcaggtgct

SEQ ID NO: 463648 - DNA, 33 bp, Homo sapien
tggggttgttgaaccaggtgaactgcaggtgct

SEQ ID NO: 463649 - DNA, 33 bp, Homo sapien
agtccagaaacagaacaagagactcctctgcca

SEQ ID NO: 463650 - DNA, 33 bp, Homo sapien
agtccagaaacagaaccagagactcctctgcca

SEQ ID NO: 463651 - DNA, 33 bp, Homo sapien
aggactgtgatgcagccgagctcctatcaccac

SEQ ID NO: 463652 - DNA, 33 bp, Homo sapien
aggactgtgatgcagctgagctcctatcaccac

SEQ ID NO: 463653 - DNA, 33 bp, Homo sapien
taaatataagtcacgaaggttgcttttatttta

SEQ ID NO: 463654 - DNA, 33 bp, Homo sapien
taaatataagtcacgatggttgcttttatttta

SEQ ID NO: 463655 - DNA, 33 bp, Homo sapien
taggaatacaggtaaacaggtaggcagatagat

SEQ ID NO: 463656 - DNA, 33 bp, Homo sapien
taggaatacaggtaaataggtaggcagatagat

SEQ ID NO: 463657 - DNA, 33 bp, Homo sapien
ttgagtcatagctaaaatgtggtttcagataaa

SEQ ID NO: 463658 - DNA, 33 bp, Homo sapien
ttgagtcatagctaaagtgtggtttcagataaa

SEQ ID NO: 463659 - DNA, 33 bp, Homo sapien
tgaattcattgttacaatctgaggatccccata

SEQ ID NO: 463660 - DNA, 33 bp, Homo sapien
tgaattcattgttacagtctgaggatccccata

SEQ ID NO: 463661 - DNA, 33 bp, Homo sapien
acatattaaagatgtacaccttgacgactttat

SEQ ID NO: 463662 - DNA, 33 bp, Homo sapien
acatattaaagatgtataccttgacgactttat

SEQ ID NO: 463663 - DNA, 33 bp, Homo sapien
agaagatgtatctttcaacaatattgcaaaggg

SEQ ID NO: 463664 - DNA, 33 bp, Homo sapien
agaagatgtatctttcgacaatattgcaaaggg

SEQ ID NO: 463665 - DNA, 33 bp, Homo sapien
aagcagaaaatttctacgtcaagtgaacaaaag

SEQ ID NO: 463666 - DNA, 33 bp, Homo sapien
aagcagaaaatttctatgtcaagtgaacaaaag

SEQ ID NO: 463667 - DNA, 33 bp, Homo sapien
gaccagcagaaagtagaacgagtcatttaagaa

SEQ ID NO: 463668 - DNA, 33 bp, Homo sapien
gaccagcagaaagtaggacgagtcatttaagaa

SEQ ID NO: 463669 - DNA, 33 bp, Homo sapien
tgtgcatacaagagaccccaggaattcaaggct

SEQ ID NO: 463670 - DNA, 33 bp, Homo sapien
tgtgcatacaagagactccaggaattcaaggct

SEQ ID NO: 463671 - DNA, 33 bp, Homo sapien
gaggaaaggtatcacaggttaatggtccttcat

SEQ ID NO: 463672 - DNA, 33 bp, Homo sapien
gaggaaaggtatcacatgttaatggtccttcat

SEQ ID NO: 463673 - DNA, 33 bp, Homo sapien
ttgctaacaccactaccggtgcaaatgcgcaca

SEQ ID NO: 463674 - DNA, 33 bp, Homo sapien
ttgctaacaccactactggtgcaaatgcgcaca

SEQ ID NO: 463675 - DNA, 33 bp, Homo sapien
ggacttagctgtaaacactttgtcaatgcctat

SEQ ID NO: 463676 - DNA, 33 bp, Homo sapien
ggacttagctgtaaacgctttgtcaatgcctat

SEQ ID NO: 463677 - DNA, 33 bp, Homo sapien
gctcactacctgggtcaacggattcattcgttc

SEQ ID NO: 463678 - DNA, 33 bp, Homo sapien
gctcactacctgggtctacggattcattcgttc

SEQ ID NO: 463679 - DNA, 33 bp, Homo sapien
tgcatgacacagatgcactttatcactgctgga

SEQ ID NO: 463680 - DNA, 33 bp, Homo sapien
tgcatgacacagatgcgctttatcactgctgga

SEQ ID NO: 463681 - DNA, 33 bp, Homo sapien; identical to SEQ ID NO: 463679

SEQ ID NO: 463682 - DNA, 33 bp, Homo sapien; identical to SEQ ID NO: 463680

SEQ ID NO: 463683 - DNA, 33 bp, Homo sapien
cccctcctgctttgacaaggtttatcactagat

SEQ ID NO: 463684 - DNA, 33 bp, Homo sapien
cccctcctgctttgacgaggtttatcactagat

SEQ ID NO: 463685 - DNA, 33 bp, Homo sapien
catcccacaaatgctacagttttgacccccgtt

SEQ ID NO: 463686 - DNA, 33 bp, Homo sapien
catcccacaaatgctatagttttgacccccgtt

SEQ ID NO: 463687 - DNA, 33 bp, Homo sapien
aatgtatggaatgaaaactataggtaacaatac

SEQ ID NO: 463688 - DNA, 33 bp, Homo sapien
aatgtatggaatgaaagctataggtaacaatac

SEQ ID NO: 463689 - DNA, 33 bp, Homo sapien
cccattgatggaggaacggattaagataacata

SEQ ID NO: 463690 - DNA, 33 bp, Homo sapien
cccattgatggaggaatggattaagataacata

SEQ ID NO: 463691 - DNA, 33 bp, Homo sapien
aataaaaacaaatccaaatcaatgacatttcta

SEQ ID NO: 463692 - DNA, 33 bp, Homo sapien
aataaaaacaaatccatatcaatgacatttcta

SEQ ID NO: 463693 - DNA, 33 bp, Homo sapien
ctgcctgcctgtttgcagagacccagctacatg

SEQ ID NO: 463694 - DNA, 33 bp, Homo sapien
ctgcctgcctgtttgcggagacccagctacatg

SEQ ID NO: 463695 - DNA, 33 bp, Homo sapien
tggcccattcttaaggccagcaattaagctcca

SEQ ID NO: 463696 - DNA, 33 bp, Homo sapien
tggcccattcttaaggtcagcaattaagctcca

SEQ ID NO: 463697 - DNA, 33 bp, Homo sapien
acctaaagtctggcaaccccacgccaggtccta

SEQ ID NO: 463698 - DNA, 33 bp, Homo sapien
acctaaagtctggcaatcccacgccaggtccta

SEQ ID NO: 463699 - DNA, 33 bp, Homo sapien
gcgtactggcccaccaagcattcgactggcgtg

SEQ ID NO: 463700 - DNA, 33 bp, Homo sapien
gcgtactggcccaccaggcattcgactggcgtg

SEQ ID NO: 463701 - DNA, 33 bp, Homo sapien
gctccttgatcagaagaaaagtgtccattgggc

SEQ ID NO: 463702 - DNA, 33 bp, Homo sapien
gctccttgatcagaaggaaagtgtccattgggc

SEQ ID NO: 463703 - DNA, 33 bp, Homo sapien
tcagtggctccgttcaagccctgctgccaggag

SEQ ID NO: 463704 - DNA, 33 bp, Homo sapien
tcagtggctccgttcatgccctgctgccaggag

SEQ ID NO: 463705 - DNA, 33 bp, Homo sapien
gagaagcctggacggaaagggccacgtgatcct

SEQ ID NO: 463706 - DNA, 33 bp, Homo sapien
gagaagcctggacggagagggccacgtgatcct

SEQ ID NO: 463707 - DNA, 33 bp, Homo sapien
gaaaagcttaggacttcaagaactttctgttgg

SEQ ID NO: 463708 - DNA, 33 bp, Homo sapien
gaaaagcttaggactttaagaactttctgttgg

SEQ ID NO: 463709 - DNA, 33 bp, Homo sapien
tttttaatgtgaggtaagattcctaataagtga

SEQ ID NO: 463710 - DNA, 33 bp, Homo sapien
tttttaatgtgaggtaggattcctaataagtga

SEQ ID NO: 463711 - DNA, 33 bp, Homo sapien
gagacagagatagcaaaaggcagatgtaggttt

SEQ ID NO: 463712 - DNA, 33 bp, Homo sapien
gagacagagatagcaagaggcagatgtaggttt

SEQ ID NO: 463713 - DNA, 33 bp, Homo sapien
agtagagtatcctggaaactcaggaaagagttg

SEQ ID NO: 463714 - DNA, 33 bp, Homo sapien
agtagagtatcctggagactcaggaaagagttg

SEQ ID NO: 463715 - DNA, 33 bp, Homo sapien
agtgcattcggctccccggaacccataagaaag

SEQ ID NO: 463716 - DNA, 33 bp, Homo sapien
agtgcattcggctccctggaacccataagaaag

SEQ ID NO: 463717 - DNA, 33 bp, Homo sapien
tggtaaataatggagacgagaaaatacctgtga

SEQ ID NO: 463718 - DNA, 33 bp, Homo sapien
tggtaaataatggagatgagaaaatacctgtga

SEQ ID NO: 463719 - DNA, 33 bp, Homo sapien
tggttaatttctagacaagttaagacaggaggg

SEQ ID NO: 463720 - DNA, 33 bp, Homo sapien
tggttaatttctagaccagttaagacaggaggg

SEQ ID NO: 463721 - DNA, 33 bp, Homo sapien
tggcatttgaagtcacaacccaatggtatgcta

SEQ ID NO: 463722 - DNA, 33 bp, Homo sapien
tggcatttgaagtcacgacccaatggtatgcta

SEQ ID NO: 463723 - DNA, 33 bp, Homo sapien
tgtttaagactgttaactgagtcacagacagaa

SEQ ID NO: 463724 - DNA, 33 bp, Homo sapien
tgtttaagactgttaagtgagtcacagacagaa

SEQ ID NO: 463725 - DNA, 33 bp, Homo sapien
tagtgaatgaaccgggaaacatttatttgaagg

SEQ ID NO: 463726 - DNA, 33 bp, Homo sapien
tagtgaatgaaccggggaacatttatttgaagg

SEQ ID NO: 463727 - DNA, 33 bp, Homo sapien
ccttactgtggagtccaacaacaggattctaac

SEQ ID NO: 463728 - DNA, 33 bp, Homo sapien
ccttactgtggagtccgacaacaggattctaac

SEQ ID NO: 463729 - DNA, 33 bp, Homo sapien
aaaagagtcccattgaagaaaccatgagggcag

SEQ ID NO: 463730 - DNA, 33 bp, Homo sapien
aaaagagtcccattgacgaaaccatgagggcag

SEQ ID NO: 463731 - DNA, 33 bp, Homo sapien
catctttggatggaaactggagtctcagagaca

SEQ ID NO: 463732 - DNA, 33 bp, Homo sapien
catctttggatggaaattggagtctcagagaca

SEQ ID NO: 463733 - DNA, 33 bp, Homo sapien
cttcccctataacataaatagtcacagactcca

SEQ ID NO: 463734 - DNA, 33 bp, Homo sapien
cttcccctataacatacatagtcacagactcca

SEQ ID NO: 463735 - DNA, 33 bp, Homo sapien
atggatagatagacaactgatagatacatagat

SEQ ID NO: 463736 - DNA, 33 bp, Homo sapien
atggatagatagacaagtgatagatacatagat

SEQ ID NO: 463737 - DNA, 33 bp, Homo sapien; identical to SEQ ID NO: 463735

SEQ ID NO: 463738 - DNA, 33 bp, Homo sapien; identical to SEQ ID NO: 463736

SEQ ID NO: 463739 - DNA, 33 bp, Homo sapien; identical to SEQ ID NO: 463735

SEQ ID NO: 463740 - DNA, 33 bp, Homo sapien; identical to SEQ ID NO: 463736

SEQ ID NO: 463741 - DNA, 33 bp, Homo sapien
taaaagaatccaaaaacggaaaacatatctaga

SEQ ID NO: 463742 - DNA, 33 bp, Homo sapien
taaaagaatccaaaaagggaaaacatatctaga

SEQ ID NO: 463743 - DNA, 33 bp, Homo sapien
atgctcaagcctcttaaatgaaatggcacagag

SEQ ID NO: 463744 - DNA, 33 bp, Homo sapien
atgctcaagcctcttatatgaaatggcacagag

SEQ ID NO: 463745 - DNA, 33 bp, Homo sapien
cgaaaccaatcacccacgaatagtgaaggatga

SEQ ID NO: 463746 - DNA, 33 bp, Homo sapien
cgaaaccaatcacccaggaatagtgaaggatga

SEQ ID NO: 463747 - DNA, 33 bp, Homo sapien
tccatcagtcgcatgaagcaagacctggcaggg

SEQ ID NO: 463748 - DNA, 33 bp, Homo sapien
tccatcagtcgcatgacgcaagacctggcaggg

SEQ ID NO: 463749 - DNA, 33 bp, Homo sapien
gtacagacctcaccaaattagtctctctccata

SEQ ID NO: 463750 - DNA, 33 bp, Homo sapien
gtacagacctcaccaagttagtctctctccata

SEQ ID NO: 463751 - DNA, 33 bp, Homo sapien; identical to SEQ ID NO: 463749

SEQ ID NO: 463752 - DNA, 33 bp, Homo sapien; identical to SEQ ID NO: 463750

SEQ ID NO: 463753 - DNA, 33 bp, Homo sapien; identical to SEQ ID NO: 463749

SEQ ID NO: 463754 - DNA, 33 bp, Homo sapien; identical to SEQ ID NO: 463750

SEQ ID NO: 463755 - DNA, 33 bp, Homo sapien
aatagtgggactcagacggactacaatggccac

SEQ ID NO: 463756 - DNA, 33 bp, Homo sapien
aatagtgggactcagatggactacaatggccac

SEQ ID NO: 463757 - DNA, 33 bp, Homo sapien
agttctctctgtttcacggccaggagtagacag

SEQ ID NO: 463758 - DNA, 33 bp, Homo sapien
agttctctctgtttcatggccaggagtagacag

SEQ ID NO: 463759 - DNA, 33 bp, Homo sapien
agtgtacaggagggaacgtctcactgagacctc

SEQ ID NO: 463760 - DNA, 33 bp, Homo sapien
agtgtacaggagggaatgtctcactgagacctc

SEQ ID NO: 463761 - DNA, 33 bp, Homo sapien
ttcctcccttgactgactcaccacttgaacctc

SEQ ID NO: 463762 - DNA, 33 bp, Homo sapien
ttcctcccttgactgattcaccacttgaacctc

SEQ ID NO: 463763 - DNA, 33 bp, Homo sapien
gattagttacaccaaacaacacaaagtagacat

SEQ ID NO: 463764 - DNA, 33 bp, Homo sapien
gattagttacaccaaagaacacaaagtagacat

SEQ ID NO: 463765 - DNA, 33 bp, Homo sapien; identical to SEQ ID NO: 463763

SEQ ID NO: 463766 - DNA, 33 bp, Homo sapien; identical to SEQ ID NO: 463764

SEQ ID NO: 463767 - DNA, 33 bp, Homo sapien
gtgctctctgtctctccacagtcgtcttgtcat

SEQ ID NO: 463768 - DNA, 33 bp, Homo sapien
gtgctctctgtctctctacagtcgtcttgtcat

SEQ ID NO: 463769 - DNA, 33 bp, Homo sapien
gaatgaaagatggacaaaagatgtgtttgtgag

SEQ ID NO: 463770 - DNA, 33 bp, Homo sapien
gaatgaaagatggacacaagatgtgtttgtgag

SEQ ID NO: 463771 - DNA, 33 bp, Homo sapien
atacagtcatccctcactattcgtgggtgattg

SEQ ID NO: 463772 - DNA, 33 bp, Homo sapien
atacagtcatccctcattattcgtgggtgattg

SEQ ID NO: 463773 - DNA, 33 bp, Homo sapien
aaaagagattgaaccaagctgctaagagccggg

SEQ ID NO: 463774 - DNA, 33 bp, Homo sapien
aaaagagattgaaccaggctgctaagagccggg

SEQ ID NO: 463775 - DNA, 33 bp, Homo sapien
ttatccattaggcaatcagcctaaaacctcttc

SEQ ID NO: 463776 - DNA, 33 bp, Homo sapien
ttatccattaggcaatgagcctaaaacctcttc

SEQ ID NO: 463777 - DNA, 33 bp, Homo sapien
ccgagatcacaaagagcagcacatttcacacgg

SEQ ID NO: 463778 - DNA, 33 bp, Homo sapien
ccgagatcacaaagagtagcacatttcacacgg

SEQ ID NO: 463779 - DNA, 33 bp, Homo sapien
aaaagactgatgtccaagcaaaaggaacttcat

SEQ ID NO: 463780 - DNA, 33 bp, Homo sapien
aaaagactgatgtccaggcaaaaggaacttcat

SEQ ID NO: 463781 - DNA, 33 bp, Homo sapien
gtttcaaatttctcctcaatttcgaagagcgtc

SEQ ID NO: 463782 - DNA, 33 bp, Homo sapien
gtttcaaatttctccttaatttcgaagagcgtc

SEQ ID NO: 463783 - DNA, 33 bp, Homo sapien
agagaataaatttgaccggcatgaggcaccaga

SEQ ID NO: 463784 - DNA, 33 bp, Homo sapien
agagaataaatttgactggcatgaggcaccaga

SEQ ID NO: 463785 - DNA, 33 bp, Homo sapien
gacaaaggcagggttacgagtccacggaaactc

SEQ ID NO: 463786 - DNA, 33 bp, Homo sapien
gacaaaggcagggttatgagtccacggaaactc

SEQ ID NO: 463787 - DNA, 33 bp, Homo sapien
cagcagagtccgacccagatgttttcactccca

SEQ ID NO: 463788 - DNA, 33 bp, Homo sapien
cagcagagtccgacccggatgttttcactccca

SEQ ID NO: 463789 - DNA, 33 bp, Homo sapien
ccgtgcaccagcctgactatctattttttaaat

SEQ ID NO: 463790 - DNA, 33 bp, Homo sapien
ccgtgcaccagcctgattatctattttttaaat

SEQ ID NO: 463791 - DNA, 33 bp, Homo sapien
aaaagctcaatgcaaacgggtggattacctggt

SEQ ID NO: 463792 - DNA, 33 bp, Homo sapien
aaaagctcaatgcaaatgggtggattacctggt

SEQ ID NO: 463793 - DNA, 33 bp, Homo sapien
ccaacctgctcagtgacgtccacatgctagggt

SEQ ID NO: 463794 - DNA, 33 bp, Homo sapien
ccaacctgctcagtgatgtccacatgctagggt

SEQ ID NO: 463795 - DNA, 33 bp, Homo sapien
gtgggtctcacggtcaaggctctccccagcacc

SEQ ID NO: 463796 - DNA, 33 bp, Homo sapien
gtgggtctcacggtcacggctctccccagcacc

SEQ ID NO: 463797 - DNA, 33 bp, Homo sapien
ctccacacaatgtgaggattaatcactccaagt

SEQ ID NO: 463798 - DNA, 33 bp, Homo sapien
ctccacacaatgtgagtattaatcactccaagt

SEQ ID NO: 463799 - DNA, 33 bp, Homo sapien
agaagacaaagaaatcaatgcaagaaccagcac

SEQ ID NO: 463800 - DNA, 33 bp, Homo sapien
agaagacaaagaaatcgatgcaagaaccagcac

SEQ ID NO: 463801 - DNA, 33 bp, Homo sapien
gccaggtgtgataggcaacagaacaggaaatac

SEQ ID NO: 463802 - DNA, 33 bp, Homo sapien
gccaggtgtgataggcgacagaacaggaaatac

SEQ ID NO: 463803 - DNA, 33 bp, Homo sapien
agatggtgtcttcggcacagatgggcttcaacc

SEQ ID NO: 463804 - DNA, 33 bp, Homo sapien
agatggtgtcttcggcgcagatgggcttcaacc

SEQ ID NO: 463805 - DNA, 33 bp, Homo sapien
tggaatcctaataacaatatctgcagcttaacc

SEQ ID NO: 463806 - DNA, 33 bp, Homo sapien
tggaatcctaataacagtatctgcagcttaacc

SEQ ID NO: 463807 - DNA, 33 bp, Homo sapien
ttcctggaggaggacaagagggcctatttcctg

SEQ ID NO: 463808 - DNA, 33 bp, Homo sapien
ttcctggaggaggacaggagggcctatttcctg

SEQ ID NO: 463809 - DNA, 33 bp, Homo sapien
tctcgttagcgaggccaaaggagtagtagcctg

SEQ ID NO: 463810 - DNA, 33 bp, Homo sapien
tctcgttagcgaggccgaaggagtagtagcctg

SEQ ID NO: 463811 - DNA, 33 bp, Homo sapien
gaagttggagaagtaaaaaggattctcagctgg

SEQ ID NO: 463812 - DNA, 33 bp, Homo sapien
gaagttggagaagtaagaaggattctcagctgg

SEQ ID NO: 463813 - DNA, 33 bp, Homo sapien
ctaagatactttgtaaatcaaaagacatatgga

SEQ ID NO: 463814 - DNA, 33 bp, Homo sapien
ctaagatactttgtaagtcaaaagacatatgga

SEQ ID NO: 463815 - DNA, 33 bp, Homo sapien
cacagatattcgcagccgagaattttcgggtaa

SEQ ID NO: 463816 - DNA, 33 bp, Homo sapien
cacagatattcgcagctgagaattttcgggtaa

SEQ ID NO: 463817 - DNA, 33 bp, Homo sapien
tgagatgctatcagaaaacagaggaaaaataat

SEQ ID NO: 463818 - DNA, 33 bp, Homo sapien
tgagatgctatcagaagacagaggaaaaataat

SEQ ID NO: 463819 - DNA, 33 bp, Homo sapien
cgtctcattcacaaacaaagtcttcacaactgg

SEQ ID NO: 463820 - DNA, 33 bp, Homo sapien
cgtctcattcacaaacgaagtcttcacaactgg

SEQ ID NO: 463821 - DNA, 33 bp, Homo sapien
caaattaatggataccaggagttagggatggca

SEQ ID NO: 463822 - DNA, 33 bp, Homo sapien
caaattaatggataccgggagttagggatggca

SEQ ID NO: 463823 - DNA, 33 bp, Homo sapien
acgtaattagagtacaacataaaaaccaggaat

SEQ ID NO: 463824 - DNA, 33 bp, Homo sapien
acgtaattagagtacagcataaaaaccaggaat

SEQ ID NO: 463825 - DNA, 33 bp, Homo sapien
tctttttccagtttcccctaatggttacatctt

SEQ ID NO: 463826 - DNA, 33 bp, Homo sapien
tctttttccagtttcctctaatggttacatctt

SEQ ID NO: 463827 - DNA, 33 bp, Homo sapien
tgcttcactctgagacacagggaatgttagaca

SEQ ID NO: 463828 - DNA, 33 bp, Homo sapien
tgcttcactctgagacgcagggaatgttagaca

SEQ ID NO: 463829 - DNA, 33 bp, Homo sapien
accgctgatcaatgcaatcagtgactcagaaac

SEQ ID NO: 463830 - DNA, 33 bp, Homo sapien
accgctgatcaatgcattcagtgactcagaaac

SEQ ID NO: 463831 - DNA, 33 bp, Homo sapien
catgcagctcccgtccacctttttcaacctcag

SEQ ID NO: 463832 - DNA, 33 bp, Homo sapien
catgcagctcccgtccgcctttttcaacctcag

SEQ ID NO: 463833 - DNA, 33 bp, Homo sapien
ctgggcatgtcgaatgaattatttcctgatttc

SEQ ID NO: 463834 - DNA, 33 bp, Homo sapien
ctgggcatgtcgaatgcattatttcctgatttc

SEQ ID NO: 463835 - DNA, 33 bp, Homo sapien
cccagccatgaatacactggaataactcatgca

SEQ ID NO: 463836 - DNA, 33 bp, Homo sapien
cccagccatgaatacagtggaataactcatgca

SEQ ID NO: 463837 - DNA, 33 bp, Homo sapien
tttgcacttattgaacaagtggtttcatgctta

SEQ ID NO: 463838 - DNA, 33 bp, Homo sapien
tttgcacttattgaacgagtggtttcatgctta

SEQ ID NO: 463839 - DNA, 33 bp, Homo sapien
gcatccttcccacctacatgtgtcaccggatca

SEQ ID NO: 463840 - DNA, 33 bp, Homo sapien
gcatccttcccacctatatgtgtcaccggatca

SEQ ID NO: 463841 - DNA, 33 bp, Homo sapien
gacagggtccctgataaaccggagtgctccaga

SEQ ID NO: 463842 - DNA, 33 bp, Homo sapien
gacagggtccctgatacaccggagtgctccaga

SEQ ID NO: 463843 - DNA, 33 bp, Homo sapien
atcacaccaacaaccacgtgcgtgagcttgctg

SEQ ID NO: 463844 - DNA, 33 bp, Homo sapien
atcacaccaacaaccatgtgcgtgagcttgctg

SEQ ID NO: 463845 - DNA, 33 bp, Homo sapien
acacacaaacctattagaaacaagactagaaag

SEQ ID NO: 463846 - DNA, 33 bp, Homo sapien
acacacaaacctattataaacaagactagaaag

SEQ ID NO: 463847 - DNA, 33 bp, Homo sapien
aagacagaactaaacaactttgatctgcaccag

SEQ ID NO: 463848 - DNA, 33 bp, Homo sapien
aagacagaactaaacacctttgatctgcaccag

SEQ ID NO: 463849 - DNA, 33 bp, Homo sapien
ctgcacgagattcccaaggctgctgtacgcatt

SEQ ID NO: 463850 - DNA, 33 bp, Homo sapien
ctgcacgagattcccatggctgctgtacgcatt

SEQ ID NO: 463851 - DNA, 33 bp, Homo sapien
gaggaggatgcacttacgtggttttaagccact

SEQ ID NO: 463852 - DNA, 33 bp, Homo sapien
gaggaggatgcacttatgtggttttaagccact

SEQ ID NO: 463853 - DNA, 33 bp, Homo sapien
tcccacagaggctaacactggcaacaagatagt

SEQ ID NO: 463854 - DNA, 33 bp, Homo sapien
tcccacagaggctaacgctggcaacaagatagt

SEQ ID NO: 463855 - DNA, 33 bp, Homo sapien
gggtacccacaggctactagatccttgtttctg

SEQ ID NO: 463856 - DNA, 33 bp, Homo sapien
gggtacccacaggctattagatccttgtttctg

SEQ ID NO: 463857 - DNA, 33 bp, Homo sapien
ttgagtaaaatagatacgatccttgtctgaagc

SEQ ID NO: 463858 - DNA, 33 bp, Homo sapien
ttgagtaaaatagatatgatccttgtctgaagc

SEQ ID NO: 463859 - DNA, 33 bp, Homo sapien
atatggccatagtaaccggaatgattgctgtag

SEQ ID NO: 463860 - DNA, 33 bp, Homo sapien
atatggccatagtaactggaatgattgctgtag

SEQ ID NO: 463861 - DNA, 33 bp, Homo sapien
cagtgggaccacggagacaaatcaagacacagc

SEQ ID NO: 463862 - DNA, 33 bp, Homo sapien
cagtgggaccacggaggcaaatcaagacacagc

SEQ ID NO: 463863 - DNA, 33 bp, Homo sapien
aagatacagctgccagaatgttcaaacaagctg

SEQ ID NO: 463864 - DNA, 33 bp, Homo sapien
aagatacagctgccaggatgttcaaacaagctg

SEQ ID NO: 463865 - DNA, 33 bp, Homo sapien
atctctgctagaaatacgagttagccaagtgtg

SEQ ID NO: 463866 - DNA, 33 bp, Homo sapien
atctctgctagaaatatgagttagccaagtgtg

SEQ ID NO: 463867 - DNA, 33 bp, Homo sapien
gacagcaagatggaacagactggcccaactcac

SEQ ID NO: 463868 - DNA, 33 bp, Homo sapien
gacagcaagatggaacggactggcccaactcac

SEQ ID NO: 463869 - DNA, 33 bp, Homo sapien
gcctattctgaaaggcaatttttgtcaataaac

SEQ ID NO: 463870 - DNA, 33 bp, Homo sapien
gcctattctgaaaggcgatttttgtcaataaac

SEQ ID NO: 463871 - DNA, 33 bp, Homo sapien
taggtgtacatcgctacgcccggctaactttta

SEQ ID NO: 463872 - DNA, 33 bp, Homo sapien
taggtgtacatcgctatgcccggctaactttta

SEQ ID NO: 463873 - DNA, 33 bp, Homo sapien
aaaacctttaccacagaaagacaagagcaaaag

SEQ ID NO: 463874 - DNA, 33 bp, Homo sapien
aaaacctttaccacaggaagacaagagcaaaag

SEQ ID NO: 463875 - DNA, 33 bp, Homo sapien
ctaaatttgcaaattacagcagtgataggaaac

SEQ ID NO: 463876 - DNA, 33 bp, Homo sapien
ctaaatttgcaaattatagcagtgataggaaac

SEQ ID NO: 463877 - DNA, 33 bp, Homo sapien
aggttgtcctggattacctgtggggaagggcaa

SEQ ID NO: 463878 - DNA, 33 bp, Homo sapien
aggttgtcctggattatctgtggggaagggcaa

SEQ ID NO: 463879 - DNA, 33 bp, Homo sapien
cagtaccgaggccttaccagtctcttcccggct

SEQ ID NO: 463880 - DNA, 33 bp, Homo sapien
cagtaccgaggccttagcagtctcttcccggct

SEQ ID NO: 463881 - DNA, 33 bp, Homo sapien
cctcccccattccagaaatttggaccgaccctg

SEQ ID NO: 463882 - DNA, 33 bp, Homo sapien
cctcccccattccagatatttggaccgaccctg

SEQ ID NO: 463883 - DNA, 33 bp, Homo sapien
ggctgaggccggcggaactcttgaagtcaggag

SEQ ID NO: 463884 - DNA, 33 bp, Homo sapien
ggctgaggccggcggagctcttgaagtcaggag

SEQ ID NO: 463885 - DNA, 33 bp, Homo sapien
gagaacaacagtggaacattatttggtcataaa

SEQ ID NO: 463886 - DNA, 33 bp, Homo sapien
gagaacaacagtggaatattatttggtcataaa

SEQ ID NO: 463887 - DNA, 33 bp, Homo sapien
gaccaaaacgtaaaaaagctgacataacttagg

SEQ ID NO: 463888 - DNA, 33 bp, Homo sapien
gaccaaaacgtaaaaaggctgacataacttagg

SEQ ID NO: 463889 - DNA, 33 bp, Homo sapien
aactctctgagcagcaaattaagtggagaatga

SEQ ID NO: 463890 - DNA, 33 bp, Homo sapien
aactctctgagcagcagattaagtggagaatga

SEQ ID NO: 463891 - DNA, 33 bp, Homo sapien
tcatgaaggtgatgaaagctacaaatatgtttt

SEQ ID NO: 463892 - DNA, 33 bp, Homo sapien
tcatgaaggtgatgaaggctacaaatatgtttt

SEQ ID NO: 463893 - DNA, 33 bp, Homo sapien
tccacatgtgagaatcaccttcctgccttcaag

SEQ ID NO: 463894 - DNA, 33 bp, Homo sapien
tccacatgtgagaatccccttcctgccttcaag

SEQ ID NO: 463895 - DNA, 33 bp, Homo sapien
cctgtcacacacacaaaaaagaatgaacctagt

SEQ ID NO: 463896 - DNA, 33 bp, Homo sapien
cctgtcacacacacaagaaagaatgaacctagt

SEQ ID NO: 463897 - DNA, 33 bp, Homo sapien
gagagtgaagttgaaagcgacattctcataaaa

SEQ ID NO: 463898 - DNA, 33 bp, Homo sapien
gagagtgaagttgaaatcgacattctcataaaa

SEQ ID NO: 463899 - DNA, 33 bp, Homo sapien
agttgatgatacagaaaggaagggagatgccac

SEQ ID NO: 463900 - DNA, 33 bp, Homo sapien
agttgatgatacagaagggaagggagatgccac

SEQ ID NO: 463901 - DNA, 33 bp, Homo sapien
ccccgttactattgcaatcctaatatcctgaaa

SEQ ID NO: 463902 - DNA, 33 bp, Homo sapien
ccccgttactattgcattcctaatatcctgaaa

SEQ ID NO: 463903 - DNA, 33 bp, Homo sapien
aagtgttggtcagacccaagaccccaggcagcc

SEQ ID NO: 463904 - DNA, 33 bp, Homo sapien
aagtgttggtcagacctaagaccccaggcagcc

SEQ ID NO: 463905 - DNA, 33 bp, Homo sapien
tgacctgtaggcctagaaaaggaggagtaagaa

SEQ ID NO: 463906 - DNA, 33 bp, Homo sapien
tgacctgtaggcctaggaaaggaggagtaagaa

SEQ ID NO: 463907 - DNA, 33 bp, Homo sapien
ctaccagtcatgtaagaaagccgggggcaaaag

SEQ ID NO: 463908 - DNA, 33 bp, Homo sapien
ctaccagtcatgtaaggaagccgggggcaaaag

SEQ ID NO: 463909 - DNA, 33 bp, Homo sapien
tctgtcttttatcagaaatccgaagttcacagc

SEQ ID NO: 463910 - DNA, 33 bp, Homo sapien
tctgtcttttatcagacatccgaagttcacagc

SEQ ID NO: 463911 - DNA, 33 bp, Homo sapien
gccaagggtgctgcccaaatcctgcagcgtacg

SEQ ID NO: 463912 - DNA, 33 bp, Homo sapien
gccaagggtgctgcccgaatcctgcagcgtacg

SEQ ID NO: 463913 - DNA, 33 bp, Homo sapien
aacatctttttgcacaacacttggtgcattcct

SEQ ID NO: 463914 - DNA, 33 bp, Homo sapien
aacatctttttgcacaccacttggtgcattcct

SEQ ID NO: 463915 - DNA, 33 bp, Homo sapien
gtgtgggtcacaacaactcctagggacagccga

SEQ ID NO: 463916 - DNA, 33 bp, Homo sapien
gtgtgggtcacaacaattcctagggacagccga

SEQ ID NO: 463917 - DNA, 33 bp, Homo sapien
aaatgatggatacacaaaccctctgacctcaaa

SEQ ID NO: 463918 - DNA, 33 bp, Homo sapien
aaatgatggatacacagaccctctgacctcaaa

SEQ ID NO: 463919 - DNA, 33 bp, Homo sapien
gctgggcggcttccccaactctaattctttggg

SEQ ID NO: 463920 - DNA, 33 bp, Homo sapien
gctgggcggcttccccgactctaattctttggg

SEQ ID NO: 463921 - DNA, 33 bp, Homo sapien
gcaggatttcagggaacgagcgattatttgtag

SEQ ID NO: 463922 - DNA, 33 bp, Homo sapien
gcaggatttcagggaaggagcgattatttgtag

SEQ ID NO: 463923 - DNA, 33 bp, Homo sapien
tgtctaatgtagttcccgccactgccagctggg

SEQ ID NO: 463924 - DNA, 33 bp, Homo sapien
tgtctaatgtagttcctgccactgccagctggg

SEQ ID NO: 463925 - DNA, 33 bp, Homo sapien
ttccacagccgggacacggttaatccaggactt

SEQ ID NO: 463926 - DNA, 33 bp, Homo sapien
ttccacagccgggacatggttaatccaggactt

SEQ ID NO: 463927 - DNA, 33 bp, Homo sapien
gcctgcaggacggggacgaactagatccaaatc

SEQ ID NO: 463928 - DNA, 33 bp, Homo sapien
gcctgcaggacggggatgaactagatccaaatc

SEQ ID NO: 463929 - DNA, 33 bp, Homo sapien
ttggtaaagacaggcgaactctcactgtgttgc

SEQ ID NO: 463930 - DNA, 33 bp, Homo sapien
ttggtaaagacaggcggactctcactgtgttgc

SEQ ID NO: 463931 - DNA, 33 bp, Homo sapien
ccatacaggcttcagacggagtatggtcttgct

SEQ ID NO: 463932 - DNA, 33 bp, Homo sapien
ccatacaggcttcagatggagtatggtcttgct

SEQ ID NO: 463933 - DNA, 33 bp, Homo sapien
atttactgaatatctactacgggccagcctgca

SEQ ID NO: 463934 - DNA, 33 bp, Homo sapien
atttactgaatatctattacgggccagcctgca

SEQ ID NO: 463935 - DNA, 33 bp, Homo sapien
atataagacacacagacaaaaaatgcacaatac

SEQ ID NO: 463936 - DNA, 33 bp, Homo sapien
atataagacacacagagaaaaaatgcacaatac

SEQ ID NO: 463937 - DNA, 33 bp, Homo sapien
ctagttcttaatcggacgatcattttataatta

SEQ ID NO: 463938 - DNA, 33 bp, Homo sapien
ctagttcttaatcggatgatcattttataatta

SEQ ID NO: 463939 - DNA, 33 bp, Homo sapien
aagcctgaccataggaccttgactccaacagcg

SEQ ID NO: 463940 - DNA, 33 bp, Homo sapien
aagcctgaccataggatcttgactccaacagcg

SEQ ID NO: 463941 - DNA, 33 bp, Homo sapien
tgcagtgaggtaggcaagagactccatcctggt

SEQ ID NO: 463942 - DNA, 33 bp, Homo sapien
tgcagtgaggtaggcaggagactccatcctggt

SEQ ID NO: 463943 - DNA, 33 bp, Homo sapien
gagttgcacagcaagcagataaacggatctgga

SEQ ID NO: 463944 - DNA, 33 bp, Homo sapien
gagttgcacagcaagcggataaacggatctgga

SEQ ID NO: 463945 - DNA, 33 bp, Homo sapien
tggatgaacctttaaaacattatgctaacttag

SEQ ID NO: 463946 - DNA, 33 bp, Homo sapien
tggatgaacctttaaagcattatgctaacttag

SEQ ID NO: 463947 - DNA, 33 bp, Homo sapien
gggtgcactctggggaacgcccgtttcagtgtc

SEQ ID NO: 463948 - DNA, 33 bp, Homo sapien
gggtgcactctggggagcgcccgtttcagtgtc

SEQ ID NO: 463949 - DNA, 33 bp, Homo sapien
atccctgtgtcgtagaactgccgtgcatggagg

SEQ ID NO: 463950 - DNA, 33 bp, Homo sapien
atccctgtgtcgtagacctgccgtgcatggagg

SEQ ID NO: 463951 - DNA, 33 bp, Homo sapien
aggagatcgtggaggacgtgcgggacgagtgca

SEQ ID NO: 463952 - DNA, 33 bp, Homo sapien
aggagatcgtggaggatgtgcgggacgagtgca

SEQ ID NO: 463953 - DNA, 33 bp, Homo sapien
ctggtgacgagaaacaagagagtcaagcaaatg

SEQ ID NO: 463954 - DNA, 33 bp, Homo sapien
ctggtgacgagaaacaggagagtcaagcaaatg

SEQ ID NO: 463955 - DNA, 33 bp, Homo sapien
gtcttggcagacagaaatcagacacggtgctgt

SEQ ID NO: 463956 - DNA, 33 bp, Homo sapien
gtcttggcagacagaagtcagacacggtgctgt

SEQ ID NO: 463957 - DNA, 33 bp, Homo sapien
gtagtcgtctcacaaacgctttccttggccaca

SEQ ID NO: 463958 - DNA, 33 bp, Homo sapien
gtagtcgtctcacaaaggctttccttggccaca

SEQ ID NO: 463959 - DNA, 33 bp, Homo sapien
atctccacagtagcaaacattcagagcagttat

SEQ ID NO: 463960 - DNA, 33 bp, Homo sapien
atctccacagtagcaagcattcagagcagttat

SEQ ID NO: 463961 - DNA, 33 bp, Homo sapien
cagaagcctgtgcaaacgttcatccacaaatgc

SEQ ID NO: 463962 - DNA, 33 bp, Homo sapien
cagaagcctgtgcaaatgttcatccacaaatgc

SEQ ID NO: 463963 - DNA, 33 bp, Homo sapien
ccaccaagcctggcaacgattccctaaacacac

SEQ ID NO: 463964 - DNA, 33 bp, Homo sapien
ccaccaagcctggcaatgattccctaaacacac

SEQ ID NO: 463965 - DNA, 33 bp, Homo sapien
ggatctcattgcatgacgctattttttttttaa

SEQ ID NO: 463966 - DNA, 33 bp, Homo sapien
ggatctcattgcatgatgctattttttttttaa

SEQ ID NO: 463967 - DNA, 33 bp, Homo sapien
agaatacaagtttctcaagacaggccagacagt

SEQ ID NO: 463968 - DNA, 33 bp, Homo sapien
agaatacaagtttctcgagacaggccagacagt

SEQ ID NO: 463969 - DNA, 33 bp, Homo sapien
ggcacacaaagagaacagaatgtctacaagtca

SEQ ID NO: 463970 - DNA, 33 bp, Homo sapien
ggcacacaaagagaaccgaatgtctacaagtca

SEQ ID NO: 463971 - DNA, 33 bp, Homo sapien
acagttcagtactttaagggtcttctgtgtttg

SEQ ID NO: 463972 - DNA, 33 bp, Homo sapien
acagttcagtactttaggggtcttctgtgtttg

SEQ ID NO: 463973 - DNA, 33 bp, Homo sapien
attctctaattctgaacggaagaactcctctcc

SEQ ID NO: 463974 - DNA, 33 bp, Homo sapien
attctctaattctgaatggaagaactcctctcc

SEQ ID NO: 463975 - DNA, 33 bp, Homo sapien
acaatgagagaaaggaagacagtttcctttgga

SEQ ID NO: 463976 - DNA, 33 bp, Homo sapien
acaatgagagaaaggatgacagtttcctttgga

SEQ ID NO: 463977 - DNA, 33 bp, Homo sapien
cagggcagaggtcccaatatcctccagaaatac

SEQ ID NO: 463978 - DNA, 33 bp, Homo sapien
cagggcagaggtcccattatcctccagaaatac

SEQ ID NO: 463979 - DNA, 33 bp, Homo sapien
aggaaatgaaaagcaaagtttgtttaaattact

SEQ ID NO: 463980 - DNA, 33 bp, Homo sapien
aggaaatgaaaagcaacgtttgtttaaattact

SEQ ID NO: 463981 - DNA, 33 bp, Homo sapien
tattctaccataaaaaagaaggcaattctggca

SEQ ID NO: 463982 - DNA, 33 bp, Homo sapien
tattctaccataaaaaggaaggcaattctggca

SEQ ID NO: 463983 - DNA, 33 bp, Homo sapien
agatgtgctgtgagccaaatacactcctctttg

SEQ ID NO: 463984 - DNA, 33 bp, Homo sapien
agatgtgctgtgagccgaatacactcctctttg

SEQ ID NO: 463985 - DNA, 33 bp, Homo sapien
ccttgagtaggtatcccctcacctatggaggcc

SEQ ID NO: 463986 - DNA, 33 bp, Homo sapien
ccttgagtaggtatcctctcacctatggaggcc

SEQ ID NO: 463987 - DNA, 33 bp, Homo sapien
aagagcaggggagatacggaaatgaatgccagt

SEQ ID NO: 463988 - DNA, 33 bp, Homo sapien
aagagcaggggagatagggaaatgaatgccagt

SEQ ID NO: 463989 - DNA, 33 bp, Homo sapien
ggtgtatttaaggacacgattccccgttcacaa

SEQ ID NO: 463990 - DNA, 33 bp, Homo sapien
ggtgtatttaaggacatgattccccgttcacaa

SEQ ID NO: 463991 - DNA, 33 bp, Homo sapien
gcctttggtttttcccaaaccttgattattcct

SEQ ID NO: 463992 - DNA, 33 bp, Homo sapien
gcctttggtttttccctaaccttgattattcct

SEQ ID NO: 463993 - DNA, 33 bp, Homo sapien
tttcattgaggaaaaaaaagttgtcctagagtc

SEQ ID NO: 463994 - DNA, 33 bp, Homo sapien
tttcattgaggaaaaagaagttgtcctagagtc

SEQ ID NO: 463995 - DNA, 33 bp, Homo sapien
atctgttttcttgttacgcagttccttatatac

SEQ ID NO: 463996 - DNA, 33 bp, Homo sapien
atctgttttcttgttatgcagttccttatatac

SEQ ID NO: 463997 - DNA, 33 bp, Homo sapien
ttgttttccactgggaacagtctatgtaagtac

SEQ ID NO: 463998 - DNA, 33 bp, Homo sapien
ttgttttccactgggagcagtctatgtaagtac

SEQ ID NO: 463999 - DNA, 33 bp, Homo sapien
ctccatggtgacccttcaaatgtcagtagcagg

SEQ ID NO: 464000 - DNA, 33 bp, Homo sapien
ctccatggtgaccctttaaatgtcagtagcagg

SEQ ID NO: 464001 - DNA, 33 bp, Homo sapien
tacactgtaaaataacaatccgtggggactctt

SEQ ID NO: 464002 - DNA, 33 bp, Homo sapien
tacactgtaaaataacgatccgtggggactctt

SEQ ID NO: 464003 - DNA, 33 bp, Homo sapien
ccttgttctctgtgtcaaagcatttgctgtaaa

SEQ ID NO: 464004 - DNA, 33 bp, Homo sapien
ccttgttctctgtgtcgaagcatttgctgtaaa

SEQ ID NO: 464005 - DNA, 33 bp, Homo sapien
agggaagaagtaggcacattaagcttgcagacc

SEQ ID NO: 464006 - DNA, 33 bp, Homo sapien
agggaagaagtaggcatattaagcttgcagacc

SEQ ID NO: 464007 - DNA, 33 bp, Homo sapien
tgtgggatgattactccccgaagtccagcttag

SEQ ID NO: 464008 - DNA, 33 bp, Homo sapien
tgtgggatgattactctccgaagtccagcttag

SEQ ID NO: 464009 - DNA, 33 bp, Homo sapien
gagagttaacatgacacgtccgaaactgccatc

SEQ ID NO: 464010 - DNA, 33 bp, Homo sapien
gagagttaacatgacaggtccgaaactgccatc

SEQ ID NO: 464011 - DNA, 33 bp, Homo sapien
acattcccagagctgaaaagagtggctcacatg

SEQ ID NO: 464012 - DNA, 33 bp, Homo sapien
acattcccagagctgataagagtggctcacatg

SEQ ID NO: 464013 - DNA, 33 bp, Homo sapien
tgatcttccacagcagacaatacctcgtgtgtg

SEQ ID NO: 464014 - DNA, 33 bp, Homo sapien
tgatcttccacagcagccaatacctcgtgtgtg

SEQ ID NO: 464015 - DNA, 33 bp, Homo sapien
tcgtgtgtgttttttaccacttgctgctggggg

SEQ ID NO: 464016 - DNA, 33 bp, Homo sapien
tcgtgtgtgttttttatcacttgctgctggggg

SEQ ID NO: 464017 - DNA, 33 bp, Homo sapien
acaccaaccttttgtaaactcatctgaccacac

SEQ ID NO: 464018 - DNA, 33 bp, Homo sapien
acaccaaccttttgtacactcatctgaccacac

SEQ ID NO: 464019 - DNA, 33 bp, Homo sapien
tgctgcacacactacacgcaattttatctgtca

SEQ ID NO: 464020 - DNA, 33 bp, Homo sapien
tgctgcacacactacatgcaattttatctgtca

SEQ ID NO: 464021 - DNA, 33 bp, Homo sapien
tttcatctcccaggtactaagaataggacccca

SEQ ID NO: 464022 - DNA, 33 bp, Homo sapien
tttcatctcccaggtattaagaataggacccca

SEQ ID NO: 464023 - DNA, 33 bp, Homo sapien
aggtgctggtgttcaggagcactataggttgaa

SEQ ID NO: 464024 - DNA, 33 bp, Homo sapien
aggtgctggtgttcagtagcactataggttgaa

SEQ ID NO: 464025 - DNA, 33 bp, Homo sapien
ttggtgatcctaaggacatattcttgaagctgt

SEQ ID NO: 464026 - DNA, 33 bp, Homo sapien
ttggtgatcctaaggatatattcttgaagctgt

SEQ ID NO: 464027 - DNA, 33 bp, Homo sapien
taatgtacagatcttaaacttaatggacttttt

SEQ ID NO: 464028 - DNA, 33 bp, Homo sapien
taatgtacagatcttacacttaatggacttttt

SEQ ID NO: 464029 - DNA, 33 bp, Homo sapien
atttccatgttcggtccacttgtgaaaacaaat

SEQ ID NO: 464030 - DNA, 33 bp, Homo sapien
atttccatgttcggtctacttgtgaaaacaaat

SEQ ID NO: 464031 - DNA, 33 bp, Homo sapien
gccaaaacattggtgacaaatctagatgctgca

SEQ ID NO: 464032 - DNA, 33 bp, Homo sapien
gccaaaacattggtgagaaatctagatgctgca

SEQ ID NO: 464033 - DNA, 33 bp, Homo sapien
tgtcagttaattttgacgcatgcccagatttga

SEQ ID NO: 464034 - DNA, 33 bp, Homo sapien
tgtcagttaattttgatgcatgcccagatttga

SEQ ID NO: 464035 - DNA, 33 bp, Homo sapien
cttgtggtccttgaataatcactgtacgtggct

SEQ ID NO: 464036 - DNA, 33 bp, Homo sapien
cttgtggtccttgaatgatcactgtacgtggct

SEQ ID NO: 464037 - DNA, 33 bp, Homo sapien
tgcagcagaaatagaacgtgtacaggaacctat

SEQ ID NO: 464038 - DNA, 33 bp, Homo sapien
tgcagcagaaatagaatgtgtacaggaacctat

SEQ ID NO: 464039 - DNA, 33 bp, Homo sapien
ttttggacttgtaaccaggagtagacttgctag

SEQ ID NO: 464040 - DNA, 33 bp, Homo sapien
ttttggacttgtaacccggagtagacttgctag

SEQ ID NO: 464041 - DNA, 33 bp, Homo sapien
aaatattcacaaagtacgtctcgtatataactt

SEQ ID NO: 464042 - DNA, 33 bp, Homo sapien
aaatattcacaaagtatgtctcgtatataactt

SEQ ID NO: 464043 - DNA, 33 bp, Homo sapien
gttgtccagaaataaacgtggaattggcaagtc

SEQ ID NO: 464044 - DNA, 33 bp, Homo sapien
gttgtccagaaataaatgtggaattggcaagtc

SEQ ID NO: 464045 - DNA, 33 bp, Homo sapien
tctagttcaggatttaccacgtatatactgtct

SEQ ID NO: 464046 - DNA, 33 bp, Homo sapien
tctagttcaggatttatcacgtatatactgtct

SEQ ID NO: 464047 - DNA, 33 bp, Homo sapien
tgagatgagccagaaaagagatggtgaaaagac

SEQ ID NO: 464048 - DNA, 33 bp, Homo sapien
tgagatgagccagaaaggagatggtgaaaagac

SEQ ID NO: 464049 - DNA, 33 bp, Homo sapien
agtaagaccctgcagcagctcaacctgaccttg

SEQ ID NO: 464050 - DNA, 33 bp, Homo sapien
agtaagaccctgcagctgctcaacctgaccttg

SEQ ID NO: 464051 - DNA, 33 bp, Homo sapien
cttcctcagccgtcagaagtgcctgggtttcct

SEQ ID NO: 464052 - DNA, 33 bp, Homo sapien
cttcctcagccgtcagcagtgcctgggtttcct

SEQ ID NO: 464053 - DNA, 33 bp, Homo sapien
agatacaaatcattgacactctgagttgtgaga

SEQ ID NO: 464054 - DNA, 33 bp, Homo sapien
agatacaaatcattgatactctgagttgtgaga

SEQ ID NO: 464055 - DNA, 33 bp, Homo sapien
ggagagcatctgacaaatgcttgcaagcgggtg

SEQ ID NO: 464056 - DNA, 33 bp, Homo sapien
ggagagcatctgacaagtgcttgcaagcgggtg

SEQ ID NO: 464057 - DNA, 33 bp, Homo sapien
agctccctggacgacaaggtctttctttttagc

SEQ ID NO: 464058 - DNA, 33 bp, Homo sapien
agctccctggacgacatggtctttctttttagc

SEQ ID NO: 464059 - DNA, 33 bp, Homo sapien
accaagttgattatcccggagaaccacagactc

SEQ ID NO: 464060 - DNA, 33 bp, Homo sapien
accaagttgattatcctggagaaccacagactc

SEQ ID NO: 464061 - DNA, 33 bp, Homo sapien
acagtggtggacgcacaaagagattctttaggt

SEQ ID NO: 464062 - DNA, 33 bp, Homo sapien
acagtggtggacgcacgaagagattctttaggt

SEQ ID NO: 464063 - DNA, 33 bp, Homo sapien
ctcatcaatgatggaccaaacaaagaaaatgtg

SEQ ID NO: 464064 - DNA, 33 bp, Homo sapien
ctcatcaatgatggactaaacaaagaaaatgtg

SEQ ID NO: 464065 - DNA, 33 bp, Homo sapien
tattaggatccagtagacgctgcagttcctcat

SEQ ID NO: 464066 - DNA, 33 bp, Homo sapien
tattaggatccagtaggcgctgcagttcctcat

SEQ ID NO: 464067 - DNA, 33 bp, Homo sapien
ctgaaatttattcttaacattcttctccccact

SEQ ID NO: 464068 - DNA, 33 bp, Homo sapien
ctgaaatttattcttaccattcttctccccact

SEQ ID NO: 464069 - DNA, 33 bp, Homo sapien
caatacaaaagctgctaacacaagtaaacagtg

SEQ ID NO: 464070 - DNA, 33 bp, Homo sapien
caatacaaaagctgctgacacaagtaaacagtg

SEQ ID NO: 464071 - DNA, 33 bp, Homo sapien
ccatctccctagacagacaatagacataacgca

SEQ ID NO: 464072 - DNA, 33 bp, Homo sapien
ccatctccctagacaggcaatagacataacgca

SEQ ID NO: 464073 - DNA, 33 bp, Homo sapien
tggaggaagtgcaggacacagcttgctaaccag

SEQ ID NO: 464074 - DNA, 33 bp, Homo sapien
tggaggaagtgcaggatacagcttgctaaccag

SEQ ID NO: 464075 - DNA, 33 bp, Homo sapien
agatgcatatcccacaacactggtcaagtacag

SEQ ID NO: 464076 - DNA, 33 bp, Homo sapien
agatgcatatcccacagcactggtcaagtacag

SEQ ID NO: 464077 - DNA, 33 bp, Homo sapien
ccagccatgcaggggacgataaaagctcagcag

SEQ ID NO: 464078 - DNA, 33 bp, Homo sapien
ccagccatgcaggggatgataaaagctcagcag

SEQ ID NO: 464079 - DNA, 33 bp, Homo sapien
ggcagatgtaaagcagaaaactagggaatgaga

SEQ ID NO: 464080 - DNA, 33 bp, Homo sapien
ggcagatgtaaagcaggaaactagggaatgaga

SEQ ID NO: 464081 - DNA, 33 bp, Homo sapien
aagatacacaaagcccaaacttgtatgactccg

SEQ ID NO: 464082 - DNA, 33 bp, Homo sapien
aagatacacaaagcccgaacttgtatgactccg

SEQ ID NO: 464083 - DNA, 33 bp, Homo sapien
aaccttacctagactccagatcactggctttca

SEQ ID NO: 464084 - DNA, 33 bp, Homo sapien
aaccttacctagactcgagatcactggctttca

SEQ ID NO: 464085 - DNA, 33 bp, Homo sapien
ccgcacctggccgacaacacagtatttttaaga

SEQ ID NO: 464086 - DNA, 33 bp, Homo sapien
ccgcacctggccgacagcacagtatttttaaga

SEQ ID NO: 464087 - DNA, 33 bp, Homo sapien
tgtcgtcttaagccaccaaattcatggtaaatt

SEQ ID NO: 464088 - DNA, 33 bp, Homo sapien
tgtcgtcttaagccacgaaattcatggtaaatt

SEQ ID NO: 464089 - DNA, 33 bp, Homo sapien
gctggaggcttgtacactggggtcatgaaagac

SEQ ID NO: 464090 - DNA, 33 bp, Homo sapien
gctggaggcttgtacattggggtcatgaaagac

SEQ ID NO: 464091 - DNA, 33 bp, Homo sapien
tgtctgttgttactaacccacccagtgtatggt

SEQ ID NO: 464092 - DNA, 33 bp, Homo sapien
tgtctgttgttactaagccacccagtgtatggt

SEQ ID NO: 464093 - DNA, 33 bp, Homo sapien
gtatttgcatagaacccatacacatcctcccac

SEQ ID NO: 464094 - DNA, 33 bp, Homo sapien
gtatttgcatagaacctatacacatcctcccac

SEQ ID NO: 464095 - DNA, 33 bp, Homo sapien
cagttgctaaggcaagccagattttaagttacc

SEQ ID NO: 464096 - DNA, 33 bp, Homo sapien
cagttgctaaggcaaggcagattttaagttacc

SEQ ID NO: 464097 - DNA, 33 bp, Homo sapien
aggtggcatttggacacgactgtgtgagattgt

SEQ ID NO: 464098 - DNA, 33 bp, Homo sapien
aggtggcatttggacatgactgtgtgagattgt

SEQ ID NO: 464099 - DNA, 33 bp, Homo sapien
tagaaatataccggacaaacacagaggtggcat

SEQ ID NO: 464100 - DNA, 33 bp, Homo sapien
tagaaatataccggacgaacacagaggtggcat

SEQ ID NO: 464101 - DNA, 33 bp, Homo sapien
gcttcctctgggactcactatcaggcgctggat

SEQ ID NO: 464102 - DNA, 33 bp, Homo sapien
gcttcctctgggactcgctatcaggcgctggat

SEQ ID NO: 464103 - DNA, 33 bp, Homo sapien
tgcaaatattgacaccacttcaggcaaaaagca

SEQ ID NO: 464104 - DNA, 33 bp, Homo sapien
tgcaaatattgacaccgcttcaggcaaaaagca

SEQ ID NO: 464105 - DNA, 33 bp, Homo sapien
acctgaaattgcatgacgtataaagaaaaggac

SEQ ID NO: 464106 - DNA, 33 bp, Homo sapien
acctgaaattgcatgatgtataaagaaaaggac

SEQ ID NO: 464107 - DNA, 33 bp, Homo sapien
ttttgtaagtctccaccgggtttcctgtgcaaa

SEQ ID NO: 464108 - DNA, 33 bp, Homo sapien
ttttgtaagtctccactgggtttcctgtgcaaa

SEQ ID NO: 464109 - DNA, 33 bp, Homo sapien
agccatctttttacaacgtaatgatcaggtatc

SEQ ID NO: 464110 - DNA, 33 bp, Homo sapien
agccatctttttacaatgtaatgatcaggtatc

SEQ ID NO: 464111 - DNA, 33 bp, Homo sapien
tctgaaaaggacgagagacttacctaaataccc

SEQ ID NO: 464112 - DNA, 33 bp, Homo sapien
tctgaaaaggacgagatacttacctaaataccc

SEQ ID NO: 464113 - DNA, 33 bp, Homo sapien
tggtaacaaatgtaacgatgaaatcccacacaa

SEQ ID NO: 464114 - DNA, 33 bp, Homo sapien
tggtaacaaatgtaactatgaaatcccacacaa

SEQ ID NO: 464115 - DNA, 33 bp, Homo sapien
ttttgaagtcttagccgcaaaatatttgccttg

SEQ ID NO: 464116 - DNA, 33 bp, Homo sapien
ttttgaagtcttagcctcaaaatatttgccttg

SEQ ID NO: 464117 - DNA, 33 bp, Homo sapien
aaatcgagaatgccaacgtggaatgtctggcac

SEQ ID NO: 464118 - DNA, 33 bp, Homo sapien
aaatcgagaatgccaatgtggaatgtctggcac

SEQ ID NO: 464119 - DNA, 33 bp, Homo sapien
aatgtgtaatgcatagaaagtggctaagaacct

SEQ ID NO: 464120 - DNA, 33 bp, Homo sapien
aatgtgtaatgcataggaagtggctaagaacct

SEQ ID NO: 464121 - DNA, 33 bp, Homo sapien
ggttttataagttaccaaatggtggcttagagc

SEQ ID NO: 464122 - DNA, 33 bp, Homo sapien
ggttttataagttaccgaatggtggcttagagc

SEQ ID NO: 464123 - DNA, 33 bp, Homo sapien
gacatttttagattccacgtgtcagatcctctg

SEQ ID NO: 464124 - DNA, 33 bp, Homo sapien
gacatttttagattcctcgtgtcagatcctctg

SEQ ID NO: 464125 - DNA, 33 bp, Homo sapien
ggaaccctgaagtataaacgtgataattaaatc

SEQ ID NO: 464126 - DNA, 33 bp, Homo sapien
ggaaccctgaagtatagacgtgataattaaatc

SEQ ID NO: 464127 - DNA, 33 bp, Homo sapien
attttgtagattgttaagaagcttttgaggcct

SEQ ID NO: 464128 - DNA, 33 bp, Homo sapien
attttgtagattgttacgaagcttttgaggcct

SEQ ID NO: 464129 - DNA, 33 bp, Homo sapien
ttggctaatcagctaaaacaggagctagctgtt

SEQ ID NO: 464130 - DNA, 33 bp, Homo sapien
ttggctaatcagctaagacaggagctagctgtt

SEQ ID NO: 464131 - DNA, 33 bp, Homo sapien; identical to SEQ ID NO: 464129

SEQ ID NO: 464132 - DNA, 33 bp, Homo sapien; identical to SEQ ID NO: 464130

SEQ ID NO: 464133 - DNA, 33 bp, Homo sapien
ggaaagaagatcgtgacgctcattccccagcat

SEQ ID NO: 464134 - DNA, 33 bp, Homo sapien
ggaaagaagatcgtgatgctcattccccagcat

SEQ ID NO: 464135 - DNA, 33 bp, Homo sapien
actgtgcttgcggaaaggagacacatttgagaa

SEQ ID NO: 464136 - DNA, 33 bp, Homo sapien
actgtgcttgcggaaatgagacacatttgagaa

SEQ ID NO: 464137 - DNA, 33 bp, Homo sapien
agtgcctgtagcaaggaaacataacaaggaaca

SEQ ID NO: 464138 - DNA, 33 bp, Homo sapien
agtgcctgtagcaagggaacataacaaggaaca

SEQ ID NO: 464139 - DNA, 33 bp, Homo sapien
ttaagacgggtgttcactcaatgctccccagtt

SEQ ID NO: 464140 - DNA, 33 bp, Homo sapien
ttaagacgggtgttcattcaatgctccccagtt

SEQ ID NO: 464141 - DNA, 33 bp, Homo sapien
gaattgcgggttcttacgggagttctgggctta

SEQ ID NO: 464142 - DNA, 33 bp, Homo sapien
gaattgcgggttcttatgggagttctgggctta

SEQ ID NO: 464143 - DNA, 33 bp, Homo sapien
aggctgtttttcgtgaagttttcctggttccgt

SEQ ID NO: 464144 - DNA, 33 bp, Homo sapien
aggctgtttttcgtgacgttttcctggttccgt

SEQ ID NO: 464145 - DNA, 33 bp, Homo sapien
cagccgcctggatggactacatttactcaggga

SEQ ID NO: 464146 - DNA, 33 bp, Homo sapien
cagccgcctggatggattacatttactcaggga

SEQ ID NO: 464147 - DNA, 33 bp, Homo sapien
tagctcctctgaagaccgtaagcctctttggct

SEQ ID NO: 464148 - DNA, 33 bp, Homo sapien
tagctcctctgaagactgtaagcctctttggct

SEQ ID NO: 464149 - DNA, 33 bp, Homo sapien
gggttctaagcactgcccaacatgggacctggg

SEQ ID NO: 464150 - DNA, 33 bp, Homo sapien
gggttctaagcactgcgcaacatgggacctggg

SEQ ID NO: 464151 - DNA, 33 bp, Homo sapien
gtttctctgtgtatcaaggacttcgaagcaatt

SEQ ID NO: 464152 - DNA, 33 bp, Homo sapien
gtttctctgtgtatcacggacttcgaagcaatt

SEQ ID NO: 464153 - DNA, 33 bp, Homo sapien
cctactccaaacctacagagtcagaatctgcat

SEQ ID NO: 464154 - DNA, 33 bp, Homo sapien
cctactccaaacctacggagtcagaatctgcat

SEQ ID NO: 464155 - DNA, 33 bp, Homo sapien
agtcacatcggggaaactgtacaaatccgcacc

SEQ ID NO: 464156 - DNA, 33 bp, Homo sapien
agtcacatcggggaaattgtacaaatccgcacc

SEQ ID NO: 464157 - DNA, 33 bp, Homo sapien
aatcccatactccgagccgctcgttcagcccaa

SEQ ID NO: 464158 - DNA, 33 bp, Homo sapien
aatcccatactccgagtcgctcgttcagcccaa

SEQ ID NO: 464159 - DNA, 33 bp, Homo sapien
tgaccgtatttggagacgaagcttttaactggt

SEQ ID NO: 464160 - DNA, 33 bp, Homo sapien
tgaccgtatttggagatgaagcttttaactggt

SEQ ID NO: 464161 - DNA, 33 bp, Homo sapien
tttgggtcacctgttacgtcaatactcttgtgt

SEQ ID NO: 464162 - DNA, 33 bp, Homo sapien
tttgggtcacctgttatgtcaatactcttgtgt

SEQ ID NO: 464163 - DNA, 33 bp, Homo sapien
attaggcctgatggaaagtagggaaggaggcat

SEQ ID NO: 464164 - DNA, 33 bp, Homo sapien
attaggcctgatggaacgtagggaaggaggcat

SEQ ID NO: 464165 - DNA, 33 bp, Homo sapien; identical to SEQ ID NO: 464163

SEQ ID NO: 464166 - DNA, 33 bp, Homo sapien; identical to SEQ ID NO: 464164

SEQ ID NO: 464167 - DNA, 33 bp, Homo sapien
tcttagtcaaggtgaacggtgtgcagagctgca

SEQ ID NO: 464168 - DNA, 33 bp, Homo sapien
tcttagtcaaggtgaatggtgtgcagagctgca

SEQ ID NO: 464169 - DNA, 33 bp, Homo sapien; identical to SEQ ID NO: 464167

SEQ ID NO: 464170 - DNA, 33 bp, Homo sapien; identical to SEQ ID NO: 464168

SEQ ID NO: 464171 - DNA, 33 bp, Homo sapien
ttgccttttgaagctacgtttagaaccaaattt

SEQ ID NO: 464172 - DNA, 33 bp, Homo sapien
ttgccttttgaagctatgtttagaaccaaattt

SEQ ID NO: 464173 - DNA, 33 bp, Homo sapien
caattctgggagtatacagcacacaggaccccc

SEQ ID NO: 464174 - DNA, 33 bp, Homo sapien
caattctgggagtatatagcacacaggaccccc

SEQ ID NO: 464175 - DNA, 33 bp, Homo sapien
ctgtacaccataaatacgtatctttcttgtttt

SEQ ID NO: 464176 - DNA, 33 bp, Homo sapien
ctgtacaccataaatatgtatctttcttgtttt

SEQ ID NO: 464177 - DNA, 33 bp, Homo sapien
ttgcaggatagaaacaatgtaaaatgggtaaat

SEQ ID NO: 464178 - DNA, 33 bp, Homo sapien
ttgcaggatagaaacactgtaaaatgggtaaat

SEQ ID NO: 464179 - DNA, 33 bp, Homo sapien
atttttaccctcttcaagtgaacaatttcatgg

SEQ ID NO: 464180 - DNA, 33 bp, Homo sapien
atttttaccctcttcaggtgaacaatttcatgg

SEQ ID NO: 464181 - DNA, 33 bp, Homo sapien
tgaacaggtaaaatcaaaatgctcatgttctct

SEQ ID NO: 464182 - DNA, 33 bp, Homo sapien
tgaacaggtaaaatcacaatgctcatgttctct

SEQ ID NO: 464183 - DNA, 33 bp, Homo sapien
aatggacctgggtgaggcaggataggtagtcaa

SEQ ID NO: 464184 - DNA, 33 bp, Homo sapien
aatggacctgggtgagtcaggataggtagtcaa

SEQ ID NO: 464185 - DNA, 33 bp, Homo sapien
gatattacagctgtgcaccataagggcaaatgg

SEQ ID NO: 464186 - DNA, 33 bp, Homo sapien
gatattacagctgtgcgccataagggcaaatgg

SEQ ID NO: 464187 - DNA, 33 bp, Homo sapien; identical to SEQ ID NO: 464185

SEQ ID NO: 464188 - DNA, 33 bp, Homo sapien; identical to SEQ ID NO: 464186

SEQ ID NO: 464189 - DNA, 33 bp, Homo sapien
ggttccctggttctcaaccccctgactgaggcc

SEQ ID NO: 464190 - DNA, 33 bp, Homo sapien
ggttccctggttctcagccccctgactgaggcc

SEQ ID NO: 464191 - DNA, 33 bp, Homo sapien
aaagcctttcacatatgaatgtcagtatattga

SEQ ID NO: 464192 - DNA, 33 bp, Homo sapien
aaagcctttcacatattaatgtcagtatattga

SEQ ID NO: 464193 - DNA, 33 bp, Homo sapien
accttgccggccgcacaccacttgttaaaaagc

SEQ ID NO: 464194 - DNA, 33 bp, Homo sapien
accttgccggccgcactccacttgttaaaaagc

SEQ ID NO: 464195 - DNA, 33 bp, Homo sapien
atgaaattgtgcacttcaagatggtaaaaatga

SEQ ID NO: 464196 - DNA, 33 bp, Homo sapien
atgaaattgtgcacttgaagatggtaaaaatga

SEQ ID NO: 464197 - DNA, 33 bp, Homo sapien
ccttcatcataattacacacaaagatagagaaa

SEQ ID NO: 464198 - DNA, 33 bp, Homo sapien
ccttcatcataattacgcacaaagatagagaaa

SEQ ID NO: 464199 - DNA, 33 bp, Homo sapien
aatgattgggagtttcaaaagagaatctgcatt

SEQ ID NO: 464200 - DNA, 33 bp, Homo sapien
aatgattgggagtttcgaaagagaatctgcatt

SEQ ID NO: 464201 - DNA, 33 bp, Homo sapien
acattccagaagcccaatgctaaatgttgagta

SEQ ID NO: 464202 - DNA, 33 bp, Homo sapien
acattccagaagcccactgctaaatgttgagta

SEQ ID NO: 464203 - DNA, 33 bp, Homo sapien
aatatttcacttttccaaaagccagagctttgg

SEQ ID NO: 464204 - DNA, 33 bp, Homo sapien
aatatttcacttttccgaaagccagagctttgg

SEQ ID NO: 464205 - DNA, 33 bp, Homo sapien
ctgaggaaacagctcacaggattgagtgatggg

SEQ ID NO: 464206 - DNA, 33 bp, Homo sapien
ctgaggaaacagctcataggattgagtgatggg

SEQ ID NO: 464207 - DNA, 33 bp, Homo sapien
cgccgagcagatctcacgtggacacagattcag

SEQ ID NO: 464208 - DNA, 33 bp, Homo sapien
cgccgagcagatctcaggtggacacagattcag

SEQ ID NO: 464209 - DNA, 33 bp, Homo sapien
tgtattgggaagccccactagcattcgctctgc

SEQ ID NO: 464210 - DNA, 33 bp, Homo sapien
tgtattgggaagccccgctagcattcgctctgc

SEQ ID NO: 464211 - DNA, 33 bp, Homo sapien
acctttatacctcagtcaagtgcagatgaataa

SEQ ID NO: 464212 - DNA, 33 bp, Homo sapien
acctttatacctcagttaagtgcagatgaataa

SEQ ID NO: 464213 - DNA, 33 bp, Homo sapien
aagccaaaagatggtaccaaacatactgtatgc

SEQ ID NO: 464214 - DNA, 33 bp, Homo sapien
aagccaaaagatggtagcaaacatactgtatgc

SEQ ID NO: 464215 - DNA, 33 bp, Homo sapien
aagtaaacctccttccaaacactagagctagtc

SEQ ID NO: 464216 - DNA, 33 bp, Homo sapien
aagtaaacctccttcccaacactagagctagtc

SEQ ID NO: 464217 - DNA, 33 bp, Homo sapien
gcatccagctgagtcactgaatgtagccagaca

SEQ ID NO: 464218 - DNA, 33 bp, Homo sapien
gcatccagctgagtcattgaatgtagccagaca

SEQ ID NO: 464219 - DNA, 33 bp, Homo sapien
gccatgtctcaccaaacgcaggtgtccataaca

SEQ ID NO: 464220 - DNA, 33 bp, Homo sapien
gccatgtctcaccaaatgcaggtgtccataaca

SEQ ID NO: 464221 - DNA, 33 bp, Homo sapien
gaatgaaaaaaagcgaatatgtttggcttcttt

SEQ ID NO: 464222 - DNA, 33 bp, Homo sapien
gaatgaaaaaaagcgagtatgtttggcttcttt

SEQ ID NO: 464223 - DNA, 33 bp, Homo sapien
caacactcattaatagcacattttaaaaatgca

SEQ ID NO: 464224 - DNA, 33 bp, Homo sapien
caacactcattaataggacattttaaaaatgca

SEQ ID NO: 464225 - DNA, 33 bp, Homo sapien
tggccctaccatgcaccctgactgaacctgttc

SEQ ID NO: 464226 - DNA, 33 bp, Homo sapien
tggccctaccatgcactctgactgaacctgttc

SEQ ID NO: 464227 - DNA, 33 bp, Homo sapien
gccctttgtcttagaaaatcttccctgcaggtt

SEQ ID NO: 464228 - DNA, 33 bp, Homo sapien
gccctttgtcttagaagatcttccctgcaggtt

SEQ ID NO: 464229 - DNA, 33 bp, Homo sapien
catttttacataaacaataggtccaaggaagca

SEQ ID NO: 464230 - DNA, 33 bp, Homo sapien
catttttacataaacactaggtccaaggaagca

SEQ ID NO: 464231 - DNA, 33 bp, Homo sapien
aacgagtcactggatgaatggaaccttattagg

SEQ ID NO: 464232 - DNA, 33 bp, Homo sapien
aacgagtcactggatggatggaaccttattagg

SEQ ID NO: 464233 - DNA, 33 bp, Homo sapien
ctggctgtggaaaaaaagataactaggcttttg

SEQ ID NO: 464234 - DNA, 33 bp, Homo sapien
ctggctgtggaaaaaacgataactaggcttttg

SEQ ID NO: 464235 - DNA, 33 bp, Homo sapien
agtaaacaaagttatacactgacttgcaaaaat

SEQ ID NO: 464236 - DNA, 33 bp, Homo sapien
agtaaacaaagttatatactgacttgcaaaaat

SEQ ID NO: 464237 - DNA, 33 bp, Homo sapien
tcagtatggcctttgccgaacatccaatatgaa

SEQ ID NO: 464238 - DNA, 33 bp, Homo sapien
tcagtatggcctttgctgaacatccaatatgaa

SEQ ID NO: 464239 - DNA, 33 bp, Homo sapien
aggcctaaaaacaacactaggcagtattaatat

SEQ ID NO: 464240 - DNA, 33 bp, Homo sapien
aggcctaaaaacaacagtaggcagtattaatat

SEQ ID NO: 464241 - DNA, 33 bp, Homo sapien
aaatataatacagaaacagtaagttcacactac

SEQ ID NO: 464242 - DNA, 33 bp, Homo sapien
aaatataatacagaaatagtaagttcacactac

SEQ ID NO: 464243 - DNA, 33 bp, Homo sapien
gcctattaggatataactgagttccaagcagtt

SEQ ID NO: 464244 - DNA, 33 bp, Homo sapien
gcctattaggatataattgagttccaagcagtt

SEQ ID NO: 464245 - DNA, 33 bp, Homo sapien
cacagtgcaaaaagaaaacacgtgcattatttt

SEQ ID NO: 464246 - DNA, 33 bp, Homo sapien
cacagtgcaaaaagaagacacgtgcattatttt

SEQ ID NO: 464247 - DNA, 33 bp, Homo sapien
cagcccagacagctcccgatttaatctcctaac

SEQ ID NO: 464248 - DNA, 33 bp, Homo sapien
cagcccagacagctcctgatttaatctcctaac

SEQ ID NO: 464249 - DNA, 33 bp, Homo sapien
actttgtaatgaaaaaagtacagcaggacacag

SEQ ID NO: 464250 - DNA, 33 bp, Homo sapien
actttgtaatgaaaaaggtacagcaggacacag

SEQ ID NO: 464251 - DNA, 33 bp, Homo sapien
gttcagagttaggtaacggatatgttttgatac

SEQ ID NO: 464252 - DNA, 33 bp, Homo sapien
gttcagagttaggtaatggatatgttttgatac

SEQ ID NO: 464253 - DNA, 33 bp, Homo sapien
catgccggccacatcaggctaaggggaatactt

SEQ ID NO: 464254 - DNA, 33 bp, Homo sapien
catgccggccacatcatgctaaggggaatactt

SEQ ID NO: 464255 - DNA, 33 bp, Homo sapien
ttgccttctggctttacctcttgtcctccaccg

SEQ ID NO: 464256 - DNA, 33 bp, Homo sapien
ttgccttctggctttatctcttgtcctccaccg

SEQ ID NO: 464257 - DNA, 33 bp, Homo sapien
gagggcaatttggcaacgtctttaagaccgaag

SEQ ID NO: 464258 - DNA, 33 bp, Homo sapien
gagggcaatttggcaatgtctttaagaccgaag

SEQ ID NO: 464259 - DNA, 33 bp, Homo sapien
ggtagtaataatgaaaatcttagcattggccct

SEQ ID NO: 464260 - DNA, 33 bp, Homo sapien
ggtagtaataatgaaattcttagcattggccct

SEQ ID NO: 464261 - DNA, 33 bp, Homo sapien
acatctccatcaggaagatcctttgttcctgac

SEQ ID NO: 464262 - DNA, 33 bp, Homo sapien
acatctccatcaggaatatcctttgttcctgac

SEQ ID NO: 464263 - DNA, 33 bp, Homo sapien
ccacactcattttctacatattgttcatcatgt

SEQ ID NO: 464264 - DNA, 33 bp, Homo sapien
ccacactcattttctagatattgttcatcatgt

SEQ ID NO: 464265 - DNA, 33 bp, Homo sapien
cggcatttaaacagtccatttgcctctgaagag

SEQ ID NO: 464266 - DNA, 33 bp, Homo sapien
cggcatttaaacagtctatttgcctctgaagag

SEQ ID NO: 464267 - DNA, 33 bp, Homo sapien
aactcgacctccttagaatgagctggagcagtg

SEQ ID NO: 464268 - DNA, 33 bp, Homo sapien
aactcgacctccttagcatgagctggagcagtg

SEQ ID NO: 464269 - DNA, 33 bp, Homo sapien
tcaattttcttattgaccaaagtgttcagagct

SEQ ID NO: 464270 - DNA, 33 bp, Homo sapien
tcaattttcttattgatcaaagtgttcagagct

SEQ ID NO: 464271 - DNA, 33 bp, Homo sapien
cggtaaaatgaatcagcctgacagtaagtaagc

SEQ ID NO: 464272 - DNA, 33 bp, Homo sapien
cggtaaaatgaatcagtctgacagtaagtaagc

SEQ ID NO: 464273 - DNA, 33 bp, Homo sapien
aacttctagtcatggcaaatgatcgcaggagag

SEQ ID NO: 464274 - DNA, 33 bp, Homo sapien
aacttctagtcatggcgaatgatcgcaggagag

SEQ ID NO: 464275 - DNA, 33 bp, Homo sapien
actctacccattaaacaacttcccatcttccca

SEQ ID NO: 464276 - DNA, 33 bp, Homo sapien
actctacccattaaacgacttcccatcttccca

SEQ ID NO: 464277 - DNA, 33 bp, Homo sapien
tattccctcctaatcaagtgtacaacgttggac

SEQ ID NO: 464278 - DNA, 33 bp, Homo sapien
tattccctcctaatcaggtgtacaacgttggac

SEQ ID NO: 464279 - DNA, 33 bp, Homo sapien
gataaaccaagaaacgaaatcagcaacctcatg

SEQ ID NO: 464280 - DNA, 33 bp, Homo sapien
gataaaccaagaaacggaatcagcaacctcatg

SEQ ID NO: 464281 - DNA, 33 bp, Homo sapien
acgctggtaagtggacagctctagatggttact

SEQ ID NO: 464282 - DNA, 33 bp, Homo sapien
acgctggtaagtggaccgctctagatggttact

SEQ ID NO: 464283 - DNA, 33 bp, Homo sapien
aatcttcatgtgacaaaaaagtaaaatgtgaga

SEQ ID NO: 464284 - DNA, 33 bp, Homo sapien
aatcttcatgtgacaataaagtaaaatgtgaga

SEQ ID NO: 464285 - DNA, 33 bp, Homo sapien
ggctacaccatccatcaaggtttgtataagtac

SEQ ID NO: 464286 - DNA, 33 bp, Homo sapien
ggctacaccatccatcgaggtttgtataagtac

SEQ ID NO: 464287 - DNA, 33 bp, Homo sapien
cacctggactatttcaatcattacacaggtgtc

SEQ ID NO: 464288 - DNA, 33 bp, Homo sapien
cacctggactatttcagtcattacacaggtgtc

SEQ ID NO: 464289 - DNA, 33 bp, Homo sapien
gtctttgacagttgtccaactagaaataaagtc

SEQ ID NO: 464290 - DNA, 33 bp, Homo sapien
gtctttgacagttgtctaactagaaataaagtc

SEQ ID NO: 464291 - DNA, 33 bp, Homo sapien
tgcatacagtatcttacgccatgaaaaaggttt

SEQ ID NO: 464292 - DNA, 33 bp, Homo sapien
tgcatacagtatcttatgccatgaaaaaggttt

SEQ ID NO: 464293 - DNA, 33 bp, Homo sapien
gtgactctaactagacacttttcctgttttcgt

SEQ ID NO: 464294 - DNA, 33 bp, Homo sapien
gtgactctaactagacgcttttcctgttttcgt

SEQ ID NO: 464295 - DNA, 33 bp, Homo sapien
gaggaacacggcagacccttctgctatacatgg

SEQ ID NO: 464296 - DNA, 33 bp, Homo sapien
gaggaacacggcagactcttctgctatacatgg

SEQ ID NO: 464297 - DNA, 33 bp, Homo sapien
accaaatatggaaggaaaaggcaagaaatgagc

SEQ ID NO: 464298 - DNA, 33 bp, Homo sapien
accaaatatggaaggagaaggcaagaaatgagc

SEQ ID NO: 464299 - DNA, 33 bp, Homo sapien
actgtatattagtgagaatgcagcctttttggt

SEQ ID NO: 464300 - DNA, 33 bp, Homo sapien
actgtatattagtgaggatgcagcctttttggt

SEQ ID NO: 464301 - DNA, 33 bp, Homo sapien
tttaattttatgagggcaatacaactgtcacat

SEQ ID NO: 464302 - DNA, 33 bp, Homo sapien
tttaattttatgagggtaatacaactgtcacat

SEQ ID NO: 464303 - DNA, 33 bp, Homo sapien
gtcctacttgataatacgttccttttttctaca

SEQ ID NO: 464304 - DNA, 33 bp, Homo sapien
gtcctacttgataataggttccttttttctaca

SEQ ID NO: 464305 - DNA, 33 bp, Homo sapien
ttcagcatggtgaaaggcaccaaaaacttgtaa

SEQ ID NO: 464306 - DNA, 33 bp, Homo sapien
ttcagcatggtgaaagtcaccaaaaacttgtaa

SEQ ID NO: 464307 - DNA, 33 bp, Homo sapien
agttatttgctcaacaatgatgcttactgaatg

SEQ ID NO: 464308 - DNA, 33 bp, Homo sapien
agttatttgctcaacagtgatgcttactgaatg

SEQ ID NO: 464309 - DNA, 33 bp, Homo sapien
acatctgtgaaagtcactgaaccctaaaatgac

SEQ ID NO: 464310 - DNA, 33 bp, Homo sapien
acatctgtgaaagtcagtgaaccctaaaatgac

SEQ ID NO: 464311 - DNA, 33 bp, Homo sapien
ttattgaaacccacaagcagaggtacatgtttt

SEQ ID NO: 464312 - DNA, 33 bp, Homo sapien
ttattgaaacccacaatcagaggtacatgtttt

SEQ ID NO: 464313 - DNA, 33 bp, Homo sapien
attcagcataagagaactcatactggagagaga

SEQ ID NO: 464314 - DNA, 33 bp, Homo sapien
attcagcataagagaattcatactggagagaga

SEQ ID NO: 464315 - DNA, 33 bp, Homo sapien
ttggccacgtccatcaaaaacatatggtagggt

SEQ ID NO: 464316 - DNA, 33 bp, Homo sapien
ttggccacgtccatcagaaacatatggtagggt

SEQ ID NO: 464317 - DNA, 33 bp, Homo sapien
gactgtccctgtttgggcactgtattaatagtg

SEQ ID NO: 464318 - DNA, 33 bp, Homo sapien
gactgtccctgtttggtcactgtattaatagtg

SEQ ID NO: 464319 - DNA, 33 bp, Homo sapien
caagcaaatgccaatgccatgtttgctgtacag

SEQ ID NO: 464320 - DNA, 33 bp, Homo sapien
caagcaaatgccaatgtcatgtttgctgtacag

SEQ ID NO: 464321 - DNA, 33 bp, Homo sapien
cctgtgtctcctaagaatccagagagctagttt

SEQ ID NO: 464322 - DNA, 33 bp, Homo sapien
cctgtgtctcctaagagtccagagagctagttt

SEQ ID NO: 464323 - DNA, 33 bp, Homo sapien
catgtattcatttgaccaatatttattaagtgc

SEQ ID NO: 464324 - DNA, 33 bp, Homo sapien
catgtattcatttgacgaatatttattaagtgc

SEQ ID NO: 464325 - DNA, 33 bp, Homo sapien
aaggttataaagatcacagctttggtcctgggc

SEQ ID NO: 464326 - DNA, 33 bp, Homo sapien
aaggttataaagatcatagctttggtcctgggc

SEQ ID NO: 464327 - DNA, 33 bp, Homo sapien
tctgttttaagttaataatgactgaatcaatat

SEQ ID NO: 464328 - DNA, 33 bp, Homo sapien
tctgttttaagttaatgatgactgaatcaatat

SEQ ID NO: 464329 - DNA, 33 bp, Homo sapien
tcttgtatcaagaatacatagtggtctggctct

SEQ ID NO: 464330 - DNA, 33 bp, Homo sapien
tcttgtatcaagaatagatagtggtctggctct

SEQ ID NO: 464331 - DNA, 33 bp, Homo sapien
gaggcatggaactgaggccaatgtggtttatga

SEQ ID NO: 464332 - DNA, 33 bp, Homo sapien
gaggcatggaactgagtccaatgtggtttatga

SEQ ID NO: 464333 - DNA, 33 bp, Homo sapien
gctgggtgagagaggaagtcttccggaaggcct

SEQ ID NO: 464334 - DNA, 33 bp, Homo sapien
gctgggtgagagaggaggtcttccggaaggcct

SEQ ID NO: 464335 - DNA, 33 bp, Homo sapien
aatgagtaataataacaaggttcattctatgta

SEQ ID NO: 464336 - DNA, 33 bp, Homo sapien
aatgagtaataataaccaggttcattctatgta

SEQ ID NO: 464337 - DNA, 33 bp, Homo sapien
gggatgacatcattcactcattgcacgtctatt

SEQ ID NO: 464338 - DNA, 33 bp, Homo sapien
gggatgacatcattcattcattgcacgtctatt

SEQ ID NO: 464339 - DNA, 33 bp, Homo sapien
aggaaaccatgctaacaatctcacaaggctcat

SEQ ID NO: 464340 - DNA, 33 bp, Homo sapien
aggaaaccatgctaacgatctcacaaggctcat

SEQ ID NO: 464341 - DNA, 33 bp, Homo sapien
atttccagacctgtggaacgtaaaaggtgaagg

SEQ ID NO: 464342 - DNA, 33 bp, Homo sapien
atttccagacctgtgggacgtaaaaggtgaagg

SEQ ID NO: 464343 - DNA, 33 bp, Homo sapien
tactggtagaactgaaatccagtctccgtctta

SEQ ID NO: 464344 - DNA, 33 bp, Homo sapien
tactggtagaactgaagtccagtctccgtctta

SEQ ID NO: 464345 - DNA, 33 bp, Homo sapien
agttggcccaattttacgcatggattatgagga

SEQ ID NO: 464346 - DNA, 33 bp, Homo sapien
agttggcccaattttatgcatggattatgagga

SEQ ID NO: 464347 - DNA, 33 bp, Homo sapien
agccaacagtacttgccgatgtcttgaatgtgg

SEQ ID NO: 464348 - DNA, 33 bp, Homo sapien
agccaacagtacttgctgatgtcttgaatgtgg

SEQ ID NO: 464349 - DNA, 33 bp, Homo sapien
gacctaatttcattgacgacagaagtatccact

SEQ ID NO: 464350 - DNA, 33 bp, Homo sapien
gacctaatttcattgatgacagaagtatccact

SEQ ID NO: 464351 - DNA, 33 bp, Homo sapien
tagaaggggatgtaagacagcatccaacctttc

SEQ ID NO: 464352 - DNA, 33 bp, Homo sapien
tagaaggggatgtaaggcagcatccaacctttc

SEQ ID NO: 464353 - DNA, 33 bp, Homo sapien
acataaagtaatgtggaatctcacaatcaatgg

SEQ ID NO: 464354 - DNA, 33 bp, Homo sapien
acataaagtaatgtggtatctcacaatcaatgg

SEQ ID NO: 464355 - DNA, 33 bp, Homo sapien
ttggtggtagaggccaggtgggcactaaacatt

SEQ ID NO: 464356 - DNA, 33 bp, Homo sapien
ttggtggtagaggccatgtgggcactaaacatt

SEQ ID NO: 464357 - DNA, 33 bp, Homo sapien
tatatctcccaggccactagttctcaaaatatt

SEQ ID NO: 464358 - DNA, 33 bp, Homo sapien
tatatctcccaggccattagttctcaaaatatt

SEQ ID NO: 464359 - DNA, 33 bp, Homo sapien
agtctagtctgattccgacatttgagaagttgt

SEQ ID NO: 464360 - DNA, 33 bp, Homo sapien
agtctagtctgattcctacatttgagaagttgt

SEQ ID NO: 464361 - DNA, 33 bp, Homo sapien
agaaccaatgtagaaaacatgaatccctgcagc

SEQ ID NO: 464362 - DNA, 33 bp, Homo sapien
agaaccaatgtagaaaccatgaatccctgcagc

SEQ ID NO: 464363 - DNA, 33 bp, Homo sapien
caggactccggggggaatcaagatttggaatgc

SEQ ID NO: 464364 - DNA, 33 bp, Homo sapien
caggactccggggggattcaagatttggaatgc

SEQ ID NO: 464365 - DNA, 33 bp, Homo sapien
caattgtcagctttgcaccttcagaaaacccac

SEQ ID NO: 464366 - DNA, 33 bp, Homo sapien
caattgtcagctttgcgccttcagaaaacccac

SEQ ID NO: 464367 - DNA, 33 bp, Homo sapien
agtcacttggaaagtaagacgtgatgttggaga

SEQ ID NO: 464368 - DNA, 33 bp, Homo sapien
agtcacttggaaagtaggacgtgatgttggaga

SEQ ID NO: 464369 - DNA, 33 bp, Homo sapien
gctaggggaatcaagaacctttcagtgttccaa

SEQ ID NO: 464370 - DNA, 33 bp, Homo sapien
gctaggggaatcaagaccctttcagtgttccaa

SEQ ID NO: 464371 - DNA, 33 bp, Homo sapien
ttttgcacttgtaaaccaggtaaatagttccct

SEQ ID NO: 464372 - DNA, 33 bp, Homo sapien
ttttgcacttgtaaactaggtaaatagttccct

SEQ ID NO: 464373 - DNA, 33 bp, Homo sapien
ggtcacctttgcacaaattagcatcaacaatct

SEQ ID NO: 464374 - DNA, 33 bp, Homo sapien
ggtcacctttgcacaagttagcatcaacaatct

SEQ ID NO: 464375 - DNA, 33 bp, Homo sapien
cagtctctggaaaccaccactctactttctacc

SEQ ID NO: 464376 - DNA, 33 bp, Homo sapien
cagtctctggaaaccatcactctactttctacc

SEQ ID NO: 464377 - DNA, 33 bp, Homo sapien
aagaaactgtgaaatacccacatcactttttaa

SEQ ID NO: 464378 - DNA, 33 bp, Homo sapien
aagaaactgtgaaatatccacatcactttttaa

SEQ ID NO: 464379 - DNA, 33 bp, Homo sapien
cccgtgcctggctttcaagcatcgagcagctga

SEQ ID NO: 464380 - DNA, 33 bp, Homo sapien
cccgtgcctggctttcgagcatcgagcagctga

SEQ ID NO: 464381 - DNA, 33 bp, Homo sapien
cctttgtatttctagacgggatgcagcccgatc

SEQ ID NO: 464382 - DNA, 33 bp, Homo sapien
cctttgtatttctagatgggatgcagcccgatc

SEQ ID NO: 464383 - DNA, 33 bp, Homo sapien
aggataagcaggctgacgacaggctcatttagg

SEQ ID NO: 464384 - DNA, 33 bp, Homo sapien
aggataagcaggctgatgacaggctcatttagg

SEQ ID NO: 464385 - DNA, 33 bp, Homo sapien
ttggtaggactgcaacggactcctaaaacttct

SEQ ID NO: 464386 - DNA, 33 bp, Homo sapien
ttggtaggactgcaactgactcctaaaacttct

SEQ ID NO: 464387 - DNA, 33 bp, Homo sapien
cagccatttcatctgcaccaacactttggaacc

SEQ ID NO: 464388 - DNA, 33 bp, Homo sapien
cagccatttcatctgcgccaacactttggaacc

SEQ ID NO: 464389 - DNA, 33 bp, Homo sapien
aaatgtggtggacctcactgaggacaggaaacc

SEQ ID NO: 464390 - DNA, 33 bp, Homo sapien
aaatgtggtggacctcgctgaggacaggaaacc

SEQ ID NO: 464391 - DNA, 33 bp, Homo sapien
ggttctcaaactcagacgtgcagaagagttgcc

SEQ ID NO: 464392 - DNA, 33 bp, Homo sapien
ggttctcaaactcagatgtgcagaagagttgcc

SEQ ID NO: 464393 - DNA, 33 bp, Homo sapien
ttacaaagatgtaaaacaatgcgcctcttctca

SEQ ID NO: 464394 - DNA, 33 bp, Homo sapien
ttacaaagatgtaaaataatgcgcctcttctca

SEQ ID NO: 464395 - DNA, 33 bp, Homo sapien
atgctcaatccagggaaaaaagaaattgacaaa

SEQ ID NO: 464396 - DNA, 33 bp, Homo sapien
atgctcaatccagggagaaaagaaattgacaaa

SEQ ID NO: 464397 - DNA, 33 bp, Homo sapien
actggagtagcagggaagtgaacaaccagtaac

SEQ ID NO: 464398 - DNA, 33 bp, Homo sapien
actggagtagcagggaggtgaacaaccagtaac

SEQ ID NO: 464399 - DNA, 33 bp, Homo sapien
aatttcacctctgacccaaccaatcagcagcaa

SEQ ID NO: 464400 - DNA, 33 bp, Homo sapien
aatttcacctctgacctaaccaatcagcagcaa

SEQ ID NO: 464401 - DNA, 33 bp, Homo sapien
taatttgaataaatcccagcttccttttgctac

SEQ ID NO: 464402 - DNA, 33 bp, Homo sapien
taatttgaataaatcctagcttccttttgctac

SEQ ID NO: 464403 - DNA, 33 bp, Homo sapien
tgcagtggatggtaaccaggacccaaaatagga

SEQ ID NO: 464404 - DNA, 33 bp, Homo sapien
tgcagtggatggtaactaggacccaaaatagga

SEQ ID NO: 464405 - DNA, 33 bp, Homo sapien
ctgtgcctctgggttccagggatctgtgtctat

SEQ ID NO: 464406 - DNA, 33 bp, Homo sapien
ctgtgcctctgggttctagggatctgtgtctat

SEQ ID NO: 464407 - DNA, 33 bp, Homo sapien
ctcttgctagcatttgaaaatgttatgttattg

SEQ ID NO: 464408 - DNA, 33 bp, Homo sapien
ctcttgctagcatttggaaatgttatgttattg

SEQ ID NO: 464409 - DNA, 33 bp, Homo sapien
catccgcagtggtataaaacactagaactcatc

SEQ ID NO: 464410 - DNA, 33 bp, Homo sapien
catccgcagtggtatagaacactagaactcatc

SEQ ID NO: 464411 - DNA, 33 bp, Homo sapien
gctaaacaaattcctccctgtgctgctgttaac

SEQ ID NO: 464412 - DNA, 33 bp, Homo sapien
gctaaacaaattcctctctgtgctgctgttaac

SEQ ID NO: 464413 - DNA, 33 bp, Homo sapien
ttggctgttacggaacaaatgaaggtatataaa

SEQ ID NO: 464414 - DNA, 33 bp, Homo sapien
ttggctgttacggaacgaatgaaggtatataaa

SEQ ID NO: 464415 - DNA, 33 bp, Homo sapien
gagaggccatgttttaaacgaagccagggaaga

SEQ ID NO: 464416 - DNA, 33 bp, Homo sapien
gagaggccatgttttagacgaagccagggaaga

SEQ ID NO: 464417 - DNA, 33 bp, Homo sapien
tcctttgactttacaccgcaatgatttcacctg

SEQ ID NO: 464418 - DNA, 33 bp, Homo sapien
tcctttgactttacactgcaatgatttcacctg

SEQ ID NO: 464419 - DNA, 33 bp, Homo sapien
tgggcatggtgtgcacagcaggaagagggttct

SEQ ID NO: 464420 - DNA, 33 bp, Homo sapien
tgggcatggtgtgcacggcaggaagagggttct

SEQ ID NO: 464421 - DNA, 33 bp, Homo sapien
tatggggagacatttgcatctttgaggtccaga

SEQ ID NO: 464422 - DNA, 33 bp, Homo sapien
tatggggagacatttggatctttgaggtccaga

SEQ ID NO: 464423 - DNA, 33 bp, Homo sapien
caaagttccacgtaccaagtggctgaaacaaca

SEQ ID NO: 464424 - DNA, 33 bp, Homo sapien
caaagttccacgtaccgagtggctgaaacaaca

SEQ ID NO: 464425 - DNA, 33 bp, Homo sapien
ctcaatctttaatgtgcattctaccccactctg

SEQ ID NO: 464426 - DNA, 33 bp, Homo sapien
ctcaatctttaatgtggattctaccccactctg

SEQ ID NO: 464427 - DNA, 33 bp, Homo sapien
gctgaataatagcccacgttccgtttgcccatc

SEQ ID NO: 464428 - DNA, 33 bp, Homo sapien
gctgaataatagcccatgttccgtttgcccatc

SEQ ID NO: 464429 - DNA, 33 bp, Homo sapien
tgtttcttcatttgtccatgcattaaccattga

SEQ ID NO: 464430 - DNA, 33 bp, Homo sapien
tgtttcttcatttgtctatgcattaaccattga

SEQ ID NO: 464431 - DNA, 33 bp, Homo sapien
ccattaaataattacaagctgcgtgagagagct

SEQ ID NO: 464432 - DNA, 33 bp, Homo sapien
ccattaaataattacaggctgcgtgagagagct

SEQ ID NO: 464433 - DNA, 33 bp, Homo sapien
aaaaaaaattgcacaaacacacggatataggga

SEQ ID NO: 464434 - DNA, 33 bp, Homo sapien
aaaaaaaattgcacaatcacacggatataggga

SEQ ID NO: 464435 - DNA, 33 bp, Homo sapien
tgaggggttcagggacaggagatgttggtccaa

SEQ ID NO: 464436 - DNA, 33 bp, Homo sapien
tgaggggttcagggacgggagatgttggtccaa

SEQ ID NO: 464437 - DNA, 33 bp, Homo sapien
ttaggaagaggcttacagaggtgcacagtcatc

SEQ ID NO: 464438 - DNA, 33 bp, Homo sapien
ttaggaagaggcttacggaggtgcacagtcatc

SEQ ID NO: 464439 - DNA, 33 bp, Homo sapien
tgttactttgagtcgacagcctcattcacgaca

SEQ ID NO: 464440 - DNA, 33 bp, Homo sapien
tgttactttgagtcgatagcctcattcacgaca

SEQ ID NO: 464441 - DNA, 33 bp, Homo sapien
gtttgttacggaagtacattgtgtgtcgtgggg

SEQ ID NO: 464442 - DNA, 33 bp, Homo sapien
gtttgttacggaagtatattgtgtgtcgtgggg

SEQ ID NO: 464443 - DNA, 33 bp, Homo sapien
tcagaagtgcttaaaggatatgaacagatattt

SEQ ID NO: 464444 - DNA, 33 bp, Homo sapien
tcagaagtgcttaaagtatatgaacagatattt

SEQ ID NO: 464445 - DNA, 33 bp, Homo sapien
ggatccgtgcttgatacgtgttaatgattttga

SEQ ID NO: 464446 - DNA, 33 bp, Homo sapien
ggatccgtgcttgatatgtgttaatgattttga

SEQ ID NO: 464447 - DNA, 33 bp, Homo sapien
cttcattaagatgaaaataagagaagacgcgat

SEQ ID NO: 464448 - DNA, 33 bp, Homo sapien
cttcattaagatgaaagtaagagaagacgcgat

SEQ ID NO: 464449 - DNA, 33 bp, Homo sapien
agaggttcatgggaagcaggtggacgtagaaga

SEQ ID NO: 464450 - DNA, 33 bp, Homo sapien
agaggttcatgggaagtaggtggacgtagaaga

SEQ ID NO: 464451 - DNA, 33 bp, Homo sapien
gtgagatttgcattcacgatgtcatacgcaagg

SEQ ID NO: 464452 - DNA, 33 bp, Homo sapien
gtgagatttgcattcatgatgtcatacgcaagg

SEQ ID NO: 464453 - DNA, 33 bp, Homo sapien
tatgtttgcagattcagaaagtgcaaggtgcag

SEQ ID NO: 464454 - DNA, 33 bp, Homo sapien
tatgtttgcagattcataaagtgcaaggtgcag

SEQ ID NO: 464455 - DNA, 33 bp, Homo sapien
caggtatgcccaaataaatgccaaatatgatat

SEQ ID NO: 464456 - DNA, 33 bp, Homo sapien
caggtatgcccaaatagatgccaaatatgatat

SEQ ID NO: 464457 - DNA, 33 bp, Homo sapien
aaaaatatcttcatgacgttggaataggcaaat

SEQ ID NO: 464458 - DNA, 33 bp, Homo sapien
aaaaatatcttcatgatgttggaataggcaaat

SEQ ID NO: 464459 - DNA, 33 bp, Homo sapien
tgcacacagagatgaacgggcgaggcttctcac

SEQ ID NO: 464460 - DNA, 33 bp, Homo sapien
tgcacacagagatgaatgggcgaggcttctcac

SEQ ID NO: 464461 - DNA, 33 bp, Homo sapien
cctggccaatatggtgaatccccgtctagaata

SEQ ID NO: 464462 - DNA, 33 bp, Homo sapien
cctggccaatatggtgcatccccgtctagaata

SEQ ID NO: 464463 - DNA, 33 bp, Homo sapien
ggatgttccacaataaagaactcacctaacgag

SEQ ID NO: 464464 - DNA, 33 bp, Homo sapien
ggatgttccacaataacgaactcacctaacgag

SEQ ID NO: 464465 - DNA, 33 bp, Homo sapien
cagccactctgcgggaaaaagtatgaagcaaag

SEQ ID NO: 464466 - DNA, 33 bp, Homo sapien
cagccactctgcgggagaaagtatgaagcaaag

SEQ ID NO: 464467 - DNA, 33 bp, Homo sapien
tatgaataatagaaagacactcctctcacctct

SEQ ID NO: 464468 - DNA, 33 bp, Homo sapien
tatgaataatagaaagtcactcctctcacctct

SEQ ID NO: 464469 - DNA, 33 bp, Homo sapien
cttctttctgttgccacatcaggtgtcactacc

SEQ ID NO: 464470 - DNA, 33 bp, Homo sapien
cttctttctgttgccatatcaggtgtcactacc

SEQ ID NO: 464471 - DNA, 33 bp, Homo sapien
caagcacagctcctggcacaaagtgaggctctg

SEQ ID NO: 464472 - DNA, 33 bp, Homo sapien
caagcacagctcctggtacaaagtgaggctctg

SEQ ID NO: 464473 - DNA, 33 bp, Homo sapien
acctactgataccagacattgtgctgaagcgtt

SEQ ID NO: 464474 - DNA, 33 bp, Homo sapien
acctactgataccagatattgtgctgaagcgtt

SEQ ID NO: 464475 - DNA, 33 bp, Homo sapien
aatgtgtctcccttaacggtctccactggccac

SEQ ID NO: 464476 - DNA, 33 bp, Homo sapien
aatgtgtctcccttaatggtctccactggccac

SEQ ID NO: 464477 - DNA, 33 bp, Homo sapien
ttatcctgaagacagcaaagttttaactagagg

SEQ ID NO: 464478 - DNA, 33 bp, Homo sapien
ttatcctgaagacagcgaagttttaactagagg

SEQ ID NO: 464479 - DNA, 33 bp, Homo sapien
agatggcgttaagtcacgcttgaatcgccgggt

SEQ ID NO: 464480 - DNA, 33 bp, Homo sapien
agatggcgttaagtcatgcttgaatcgccgggt

SEQ ID NO: 464481 - DNA, 33 bp, Homo sapien
aaaaagaacaaaaaaaattgctattctggccct

SEQ ID NO: 464482 - DNA, 33 bp, Homo sapien
aaaaagaacaaaaaaagttgctattctggccct

SEQ ID NO: 464483 - DNA, 33 bp, Homo sapien
gaatatgcactaaagaaaaatgctgtggatgca

SEQ ID NO: 464484 - DNA, 33 bp, Homo sapien
gaatatgcactaaagacaaatgctgtggatgca

SEQ ID NO: 464485 - DNA, 33 bp, Homo sapien
tcaaggagagacttccaaatcaaattaatttca

SEQ ID NO: 464486 - DNA, 33 bp, Homo sapien
tcaaggagagacttccgaatcaaattaatttca

SEQ ID NO: 464487 - DNA, 33 bp, Homo sapien
cttttgtgggctagagaaattgtaggtttgtgc

SEQ ID NO: 464488 - DNA, 33 bp, Homo sapien
cttttgtgggctagaggaattgtaggtttgtgc

SEQ ID NO: 464489 - DNA, 33 bp, Homo sapien
gcaagttaaaaagtaacgcaaactggccgggca

SEQ ID NO: 464490 - DNA, 33 bp, Homo sapien
gcaagttaaaaagtaatgcaaactggccgggca

SEQ ID NO: 464491 - DNA, 33 bp, Homo sapien
cttagctgacatggggccacactgaagtcttgt

SEQ ID NO: 464492 - DNA, 33 bp, Homo sapien
cttagctgacatgggggcacactgaagtcttgt

SEQ ID NO: 464493 - DNA, 33 bp, Homo sapien
tttcagggcataacatcagggttatatgcaaaa

SEQ ID NO: 464494 - DNA, 33 bp, Homo sapien
tttcagggcataacattagggttatatgcaaaa

SEQ ID NO: 464495 - DNA, 33 bp, Homo sapien
actatgaaaaaagaaacgtaggccggtcacagc

SEQ ID NO: 464496 - DNA, 33 bp, Homo sapien
actatgaaaaaagaaatgtaggccggtcacagc

SEQ ID NO: 464497 - DNA, 33 bp, Homo sapien
gtgagaactgtggaaacgcctacaagcagaagt

SEQ ID NO: 464498 - DNA, 33 bp, Homo sapien
gtgagaactgtggaaatgcctacaagcagaagt

SEQ ID NO: 464499 - DNA, 33 bp, Homo sapien
cagaaaattagttggcaataatccatccaaatt

SEQ ID NO: 464500 - DNA, 33 bp, Homo sapien
cagaaaattagttggcgataatccatccaaatt

SEQ ID NO: 464501 - DNA, 33 bp, Homo sapien
tgtgagtgtgtgcgtacaagtatatatgaactg

SEQ ID NO: 464502 - DNA, 33 bp, Homo sapien
tgtgagtgtgtgcgtataagtatatatgaactg

SEQ ID NO: 464503 - DNA, 33 bp, Homo sapien
ctaacaacctcaaagactcaattgcactcctcc

SEQ ID NO: 464504 - DNA, 33 bp, Homo sapien
ctaacaacctcaaagagtcaattgcactcctcc

SEQ ID NO: 464505 - DNA, 33 bp, Homo sapien
agtccatcatttttcaagattgtgagccagggt

SEQ ID NO: 464506 - DNA, 33 bp, Homo sapien
agtccatcatttttcaggattgtgagccagggt

SEQ ID NO: 464507 - DNA, 33 bp, Homo sapien
attatttagcgttgacaatgccaacagatcaga

SEQ ID NO: 464508 - DNA, 33 bp, Homo sapien
attatttagcgttgacgatgccaacagatcaga

SEQ ID NO: 464509 - DNA, 33 bp, Homo sapien
ttgaccagataatttacgctaacaatatgattc

SEQ ID NO: 464510 - DNA, 33 bp, Homo sapien
ttgaccagataatttatgctaacaatatgattc

SEQ ID NO: 464511 - DNA, 33 bp, Homo sapien
atttattaatagtaggccccagtacttttctga

SEQ ID NO: 464512 - DNA, 33 bp, Homo sapien
atttattaatagtaggtcccagtacttttctga

SEQ ID NO: 464513 - DNA, 33 bp, Homo sapien
aggcttccccgaactaccagaaaagcagcaagg

SEQ ID NO: 464514 - DNA, 33 bp, Homo sapien
aggcttccccgaactagcagaaaagcagcaagg

SEQ ID NO: 464515 - DNA, 33 bp, Homo sapien
tgtgacttgctggaaacactgcaaagttcacct

SEQ ID NO: 464516 - DNA, 33 bp, Homo sapien
tgtgacttgctggaaagactgcaaagttcacct

SEQ ID NO: 464517 - DNA, 33 bp, Homo sapien
tacatctcgccatccacgagttattgccattgt

SEQ ID NO: 464518 - DNA, 33 bp, Homo sapien
tacatctcgccatccatgagttattgccattgt

SEQ ID NO: 464519 - DNA, 33 bp, Homo sapien
aatgtgtaaggactgccgattaaacaatagaag

SEQ ID NO: 464520 - DNA, 33 bp, Homo sapien
aatgtgtaaggactgctgattaaacaatagaag

SEQ ID NO: 464521 - DNA, 33 bp, Homo sapien
taagtcccacttgtcacgagagaatgtgagaaa

SEQ ID NO: 464522 - DNA, 33 bp, Homo sapien
taagtcccacttgtcatgagagaatgtgagaaa

SEQ ID NO: 464523 - DNA, 33 bp, Homo sapien
ggacctccatactgctaaatctctgacttgaag

SEQ ID NO: 464524 - DNA, 33 bp, Homo sapien
ggacctccatactgctgaatctctgacttgaag

SEQ ID NO: 464525 - DNA, 33 bp, Homo sapien
aattccatagcatcaacaatgcagaaaataaga

SEQ ID NO: 464526 - DNA, 33 bp, Homo sapien
aattccatagcatcaagaatgcagaaaataaga

SEQ ID NO: 464527 - DNA, 33 bp, Homo sapien
agttaactgattcttaaagattgcaaatgactc

SEQ ID NO: 464528 - DNA, 33 bp, Homo sapien
agttaactgattcttagagattgcaaatgactc

SEQ ID NO: 464529 - DNA, 33 bp, Homo sapien
atgattcacattaggggactctggatttgttag

SEQ ID NO: 464530 - DNA, 33 bp, Homo sapien
atgattcacattagggtactctggatttgttag

SEQ ID NO: 464531 - DNA, 33 bp, Homo sapien
aacaataacctgaaaacactagaaaaagacaca

SEQ ID NO: 464532 - DNA, 33 bp, Homo sapien
aacaataacctgaaaatactagaaaaagacaca

SEQ ID NO: 464533 - DNA, 33 bp, Homo sapien
atccagaaattcaatacaaccctgagaaacaat

SEQ ID NO: 464534 - DNA, 33 bp, Homo sapien
atccagaaattcaatataaccctgagaaacaat

SEQ ID NO: 464535 - DNA, 33 bp, Homo sapien
gtggacctttcagaaagtttacaagctggaaga

SEQ ID NO: 464536 - DNA, 33 bp, Homo sapien
gtggacctttcagaaattttacaagctggaaga

SEQ ID NO: 464537 - DNA, 33 bp, Homo sapien
ttctggcaactctaaaagtctccaaacgactgc

SEQ ID NO: 464538 - DNA, 33 bp, Homo sapien
ttctggcaactctaaaggtctccaaacgactgc

SEQ ID NO: 464539 - DNA, 33 bp, Homo sapien
tgcgcccgctttgtgcgcatttttctctgggga

SEQ ID NO: 464540 - DNA, 33 bp, Homo sapien
tgcgcccgctttgtgctcatttttctctgggga

SEQ ID NO: 464541 - DNA, 33 bp, Homo sapien
ctgtcctttgttcaaaccagagctgatctacca

SEQ ID NO: 464542 - DNA, 33 bp, Homo sapien
ctgtcctttgttcaaagcagagctgatctacca

SEQ ID NO: 464543 - DNA, 33 bp, Homo sapien
gtcacaaaacttaaaacaagagcgcttcaagga

SEQ ID NO: 464544 - DNA, 33 bp, Homo sapien
gtcacaaaacttaaaagaagagcgcttcaagga

SEQ ID NO: 464545 - DNA, 33 bp, Homo sapien
tatgcaaccacagcttaaaaaatttccagttat

SEQ ID NO: 464546 - DNA, 33 bp, Homo sapien
tatgcaaccacagctttaaaaatttccagttat

SEQ ID NO: 464547 - DNA, 33 bp, Homo sapien
acagtggagttaaaaactatgaagagcaattag

SEQ ID NO: 464548 - DNA, 33 bp, Homo sapien
acagtggagttaaaaattatgaagagcaattag

SEQ ID NO: 464549 - DNA, 33 bp, Homo sapien
gccagagtggtggcagaagaggttagagaatgt

SEQ ID NO: 464550 - DNA, 33 bp, Homo sapien
gccagagtggtggcagcagaggttagagaatgt

SEQ ID NO: 464551 - DNA, 33 bp, Homo sapien
gacttttaccacactcaagacacctcggccagc

SEQ ID NO: 464552 - DNA, 33 bp, Homo sapien
gacttttaccacactcgagacacctcggccagc

SEQ ID NO: 464553 - DNA, 33 bp, Homo sapien
acaactctgccatgataagtacagctgagtcca

SEQ ID NO: 464554 - DNA, 33 bp, Homo sapien
acaactctgccatgatgagtacagctgagtcca

SEQ ID NO: 464555 - DNA, 33 bp, Homo sapien
tcccttctttgtttccaagagtaggtgctgtgg

SEQ ID NO: 464556 - DNA, 33 bp, Homo sapien
tcccttctttgtttcccagagtaggtgctgtgg

SEQ ID NO: 464557 - DNA, 33 bp, Homo sapien
gaatcttctcctacacagcccacgtgtgcacag

SEQ ID NO: 464558 - DNA, 33 bp, Homo sapien
gaatcttctcctacacggcccacgtgtgcacag

SEQ ID NO: 464559 - DNA, 33 bp, Homo sapien
agggcatagttggtgcaaaaatctcctgtgctt

SEQ ID NO: 464560 - DNA, 33 bp, Homo sapien
agggcatagttggtgcgaaaatctcctgtgctt

SEQ ID NO: 464561 - DNA, 33 bp, Homo sapien
aatactgaaatactacgcagcaatacaaatgag

SEQ ID NO: 464562 - DNA, 33 bp, Homo sapien
aatactgaaatactactcagcaatacaaatgag

SEQ ID NO: 464563 - DNA, 33 bp, Homo sapien
cttgctcaaactctaccgtaaccttgctttttc

SEQ ID NO: 464564 - DNA, 33 bp, Homo sapien
cttgctcaaactctactgtaaccttgctttttc

SEQ ID NO: 464565 - DNA, 33 bp, Homo sapien
aagccagggattagaaatcagagtaaaaatgac

SEQ ID NO: 464566 - DNA, 33 bp, Homo sapien
aagccagggattagaagtcagagtaaaaatgac

SEQ ID NO: 464567 - DNA, 33 bp, Homo sapien
aaatgaaaaggctcacaggatagaacatagaaa

SEQ ID NO: 464568 - DNA, 33 bp, Homo sapien
aaatgaaaaggctcacgggatagaacatagaaa

SEQ ID NO: 464569 - DNA, 33 bp, Homo sapien
tcttttctaccaactgacaaagagccatggtgt

SEQ ID NO: 464570 - DNA, 33 bp, Homo sapien
tcttttctaccaactggcaaagagccatggtgt

SEQ ID NO: 464571 - DNA, 33 bp, Homo sapien
agtttaatagagcataggaagaacgaggtttgg

SEQ ID NO: 464572 - DNA, 33 bp, Homo sapien
agtttaatagagcatatgaagaacgaggtttgg

SEQ ID NO: 464573 - DNA, 33 bp, Homo sapien
tttacatttcccttgcaatccagatcccatatg

SEQ ID NO: 464574 - DNA, 33 bp, Homo sapien
tttacatttcccttgcgatccagatcccatatg

SEQ ID NO: 464575 - DNA, 33 bp, Homo sapien
tagaaagcccagaaaacctagctaacccgaatc

SEQ ID NO: 464576 - DNA, 33 bp, Homo sapien
tagaaagcccagaaaatctagctaacccgaatc

SEQ ID NO: 464577 - DNA, 33 bp, Homo sapien
tttggatgtaagattccatttctggttgaggtc

SEQ ID NO: 464578 - DNA, 33 bp, Homo sapien
tttggatgtaagattctatttctggttgaggtc

SEQ ID NO: 464579 - DNA, 33 bp, Homo sapien
tgctgttcaagaagcaactgaatcaaactgtgc

SEQ ID NO: 464580 - DNA, 33 bp, Homo sapien
tgctgttcaagaagcacctgaatcaaactgtgc

SEQ ID NO: 464581 - DNA, 33 bp, Homo sapien
ttgctccagtatgaacactccaatgtttaatga

SEQ ID NO: 464582 - DNA, 33 bp, Homo sapien
ttgctccagtatgaacgctccaatgtttaatga

SEQ ID NO: 464583 - DNA, 33 bp, Homo sapien
acaaaagacatctccaatgattgcacagcacag

SEQ ID NO: 464584 - DNA, 33 bp, Homo sapien
acaaaagacatctccattgattgcacagcacag

SEQ ID NO: 464585 - DNA, 33 bp, Homo sapien
gaaggtttgcactgaaccagaactgtttcccac

SEQ ID NO: 464586 - DNA, 33 bp, Homo sapien
gaaggtttgcactgaagcagaactgtttcccac

SEQ ID NO: 464587 - DNA, 33 bp, Homo sapien
tctcatgaaacactaaatacaggccaatgctgg

SEQ ID NO: 464588 - DNA, 33 bp, Homo sapien
tctcatgaaacactaagtacaggccaatgctgg

SEQ ID NO: 464589 - DNA, 33 bp, Homo sapien
cctttagtgtctgaaaagatcagagcgctttat

SEQ ID NO: 464590 - DNA, 33 bp, Homo sapien
cctttagtgtctgaaaggatcagagcgctttat

SEQ ID NO: 464591 - DNA, 33 bp, Homo sapien
tgacattcacaaaaatgaacatgtagttgtaca

SEQ ID NO: 464592 - DNA, 33 bp, Homo sapien
tgacattcacaaaaattaacatgtagttgtaca

SEQ ID NO: 464593 - DNA, 33 bp, Homo sapien
acatctattagaagagcagattctggattaatc

SEQ ID NO: 464594 - DNA, 33 bp, Homo sapien
acatctattagaagagtagattctggattaatc

SEQ ID NO: 464595 - DNA, 33 bp, Homo sapien
ccactcctgtcatggactcatctctcctcactc

SEQ ID NO: 464596 - DNA, 33 bp, Homo sapien
ccactcctgtcatggattcatctctcctcactc

SEQ ID NO: 464597 - DNA, 33 bp, Homo sapien
accacaaccactaccccctacatcacctcatgt

SEQ ID NO: 464598 - DNA, 33 bp, Homo sapien
accacaaccactaccctctacatcacctcatgt

SEQ ID NO: 464599 - DNA, 33 bp, Homo sapien
tcccactgagcaacaacaggcaggtaggcagat

SEQ ID NO: 464600 - DNA, 33 bp, Homo sapien
tcccactgagcaacaataggcaggtaggcagat

SEQ ID NO: 464601 - DNA, 33 bp, Homo sapien
ggctgcagataaactcaactctgtccatcttag

SEQ ID NO: 464602 - DNA, 33 bp, Homo sapien
ggctgcagataaactctactctgtccatcttag

SEQ ID NO: 464603 - DNA, 33 bp, Homo sapien
gtgtgagaaccttacccagagaggccagaagtg

SEQ ID NO: 464604 - DNA, 33 bp, Homo sapien
gtgtgagaaccttaccgagagaggccagaagtg

SEQ ID NO: 464605 - DNA, 33 bp, Homo sapien
gtcttgcaggaacaacacagtcaaacagcaatc

SEQ ID NO: 464606 - DNA, 33 bp, Homo sapien
gtcttgcaggaacaacccagtcaaacagcaatc

SEQ ID NO: 464607 - DNA, 33 bp, Homo sapien
atcagctatttggttgcagttggttttttctgg

SEQ ID NO: 464608 - DNA, 33 bp, Homo sapien
atcagctatttggttgtagttggttttttctgg

SEQ ID NO: 464609 - DNA, 33 bp, Homo sapien
tataaactgtcagtaaggtgaagaaatggaaaa

SEQ ID NO: 464610 - DNA, 33 bp, Homo sapien
tataaactgtcagtaatgtgaagaaatggaaaa

SEQ ID NO: 464611 - DNA, 33 bp, Homo sapien
ttcatatagtccagaagtctttgaacctttgtc

SEQ ID NO: 464612 - DNA, 33 bp, Homo sapien
ttcatatagtccagaattctttgaacctttgtc

SEQ ID NO: 464613 - DNA, 33 bp, Homo sapien
tacgtttgtatgtcctaaagtcataaagatttt

SEQ ID NO: 464614 - DNA, 33 bp, Homo sapien
tacgtttgtatgtcctgaagtcataaagatttt

SEQ ID NO: 464615 - DNA, 33 bp, Homo sapien
gtgttcagcctcagaaagtagtcatctgtaggg

SEQ ID NO: 464616 - DNA, 33 bp, Homo sapien
gtgttcagcctcagaaggtagtcatctgtaggg

SEQ ID NO: 464617 - DNA, 33 bp, Homo sapien
tgaaggcctttcgacactgactacactcatagg

SEQ ID NO: 464618 - DNA, 33 bp, Homo sapien
tgaaggcctttcgacattgactacactcatagg

SEQ ID NO: 464619 - DNA, 33 bp, Homo sapien
gggtcaacacaagttacagggtattgtaggtga

SEQ ID NO: 464620 - DNA, 33 bp, Homo sapien
gggtcaacacaagttatagggtattgtaggtga

SEQ ID NO: 464621 - DNA, 33 bp, Homo sapien
tggccttgtgttgtcgcataggatcagaacctg

SEQ ID NO: 464622 - DNA, 33 bp, Homo sapien
tggccttgtgttgtcggataggatcagaacctg

SEQ ID NO: 464623 - DNA, 33 bp, Homo sapien
aagaactcttaatgcacgaatctactctttagc

SEQ ID NO: 464624 - DNA, 33 bp, Homo sapien
aagaactcttaatgcatgaatctactctttagc

SEQ ID NO: 464625 - DNA, 33 bp, Homo sapien
ggcaaatgcagttctcaataacacactggcatt

SEQ ID NO: 464626 - DNA, 33 bp, Homo sapien
ggcaaatgcagttctcgataacacactggcatt

SEQ ID NO: 464627 - DNA, 33 bp, Homo sapien
acagttctgcagcctcacatcttggtgcagtgt

SEQ ID NO: 464628 - DNA, 33 bp, Homo sapien
acagttctgcagcctcgcatcttggtgcagtgt

SEQ ID NO: 464629 - DNA, 33 bp, Homo sapien
gtgtcccattcctgaccgacattttgcacctga

SEQ ID NO: 464630 - DNA, 33 bp, Homo sapien
gtgtcccattcctgactgacattttgcacctga

SEQ ID NO: 464631 - DNA, 33 bp, Homo sapien
tgatacagtttacaccacccagaaaagaaatca

SEQ ID NO: 464632 - DNA, 33 bp, Homo sapien
tgatacagtttacaccccccagaaaagaaatca

SEQ ID NO: 464633 - DNA, 33 bp, Homo sapien
atagtccactaacttcgattactgttcacccag

SEQ ID NO: 464634 - DNA, 33 bp, Homo sapien
atagtccactaacttctattactgttcacccag

SEQ ID NO: 464635 - DNA, 33 bp, Homo sapien
cagagttgccacatcacatcaaacatggctccc

SEQ ID NO: 464636 - DNA, 33 bp, Homo sapien
cagagttgccacatcagatcaaacatggctccc

SEQ ID NO: 464637 - DNA, 33 bp, Homo sapien
aatcattcgtttggtacgtgtgtaatggggctt

SEQ ID NO: 464638 - DNA, 33 bp, Homo sapien
aatcattcgtttggtatgtgtgtaatggggctt

SEQ ID NO: 464639 - DNA, 33 bp, Homo sapien
caaaacccatataacaaccagctagagtaaatc

SEQ ID NO: 464640 - DNA, 33 bp, Homo sapien
caaaacccatataacatccagctagagtaaatc

SEQ ID NO: 464641 - DNA, 33 bp, Homo sapien
gaggggacagtatgctcacagaatatagatttt

SEQ ID NO: 464642 - DNA, 33 bp, Homo sapien
gaggggacagtatgctgacagaatatagatttt

SEQ ID NO: 464643 - DNA, 33 bp, Homo sapien
tttccattctttcacacgttcaggaaggaaaac

SEQ ID NO: 464644 - DNA, 33 bp, Homo sapien
tttccattctttcacatgttcaggaaggaaaac

SEQ ID NO: 464645 - DNA, 33 bp, Homo sapien
agggaacagatgtgaaatattggttagtgctta

SEQ ID NO: 464646 - DNA, 33 bp, Homo sapien
agggaacagatgtgaattattggttagtgctta

SEQ ID NO: 464647 - DNA, 33 bp, Homo sapien
taactcattcaaaacccacactcactgggcacc

SEQ ID NO: 464648 - DNA, 33 bp, Homo sapien
taactcattcaaaacctacactcactgggcacc

SEQ ID NO: 464649 - DNA, 33 bp, Homo sapien
gggagactataaatgcaaagcacagaagccatt

SEQ ID NO: 464650 - DNA, 33 bp, Homo sapien
gggagactataaatgcgaagcacagaagccatt

SEQ ID NO: 464651 - DNA, 33 bp, Homo sapien
tattgcatgttgattacacctcagtgaacctat

SEQ ID NO: 464652 - DNA, 33 bp, Homo sapien
tattgcatgttgattatacctcagtgaacctat

SEQ ID NO: 464653 - DNA, 33 bp, Homo sapien
tgtatagaatattacaacctttaacttcacact

SEQ ID NO: 464654 - DNA, 33 bp, Homo sapien
tgtatagaatattacaccctttaacttcacact

SEQ ID NO: 464655 - DNA, 33 bp, Homo sapien
tctcagttgattacctaaaagtatgaattttta

SEQ ID NO: 464656 - DNA, 33 bp, Homo sapien
tctcagttgattacctgaaagtatgaattttta

SEQ ID NO: 464657 - DNA, 33 bp, Homo sapien
gtaaaaaacaaagcaacgtgagacaagcagttc

SEQ ID NO: 464658 - DNA, 33 bp, Homo sapien
gtaaaaaacaaagcaatgtgagacaagcagttc

SEQ ID NO: 464659 - DNA, 33 bp, Homo sapien
tgcctcagtgacaacaatataatggaaaaatac

SEQ ID NO: 464660 - DNA, 33 bp, Homo sapien
tgcctcagtgacaacagtataatggaaaaatac

SEQ ID NO: 464661 - DNA, 33 bp, Homo sapien
gctttggcctaatctgaatttgaattattgccc

SEQ ID NO: 464662 - DNA, 33 bp, Homo sapien
gctttggcctaatctgtatttgaattattgccc

SEQ ID NO: 464663 - DNA, 33 bp, Homo sapien
ggatgtgcacctcaagaacattgctgcataggc

SEQ ID NO: 464664 - DNA, 33 bp, Homo sapien
ggatgtgcacctcaaggacattgctgcataggc

SEQ ID NO: 464665 - DNA, 33 bp, Homo sapien
gtttcattgattaccaatatttgctgcccactg

SEQ ID NO: 464666 - DNA, 33 bp, Homo sapien
gtttcattgattaccagtatttgctgcccactg

SEQ ID NO: 464667 - DNA, 33 bp, Homo sapien
tacttgggcctcgcaaagatattttaagtatca

SEQ ID NO: 464668 - DNA, 33 bp, Homo sapien
tacttgggcctcgcaaggatattttaagtatca

SEQ ID NO: 464669 - DNA, 33 bp, Homo sapien
cttcaaaaaaggaacaacattcatccggttcta

SEQ ID NO: 464670 - DNA, 33 bp, Homo sapien
cttcaaaaaaggaacagcattcatccggttcta

SEQ ID NO: 464671 - DNA, 33 bp, Homo sapien
aaaaaacaatgaaaaacgtagacaatgtgagta

SEQ ID NO: 464672 - DNA, 33 bp, Homo sapien
aaaaaacaatgaaaaatgtagacaatgtgagta

SEQ ID NO: 464673 - DNA, 33 bp, Homo sapien
atttgatccagctcagcatctactcaaaaggaa

SEQ ID NO: 464674 - DNA, 33 bp, Homo sapien
atttgatccagctcagtatctactcaaaaggaa

SEQ ID NO: 464675 - DNA, 33 bp, Homo sapien
gtagaagtcagacccgaaatggttccctgagaa

SEQ ID NO: 464676 - DNA, 33 bp, Homo sapien
gtagaagtcagacccggaatggttccctgagaa

SEQ ID NO: 464677 - DNA, 33 bp, Homo sapien
caatgttccttaaaaaagtaatccttagaaagc

SEQ ID NO: 464678 - DNA, 33 bp, Homo sapien
caatgttccttaaaaaggtaatccttagaaagc

SEQ ID NO: 464679 - DNA, 33 bp, Homo sapien
cagcaaattttggcaaacaatgaaggctgttgc

SEQ ID NO: 464680 - DNA, 33 bp, Homo sapien
cagcaaattttggcaagcaatgaaggctgttgc

SEQ ID NO: 464681 - DNA, 33 bp, Homo sapien
atcccttgtagtgtgccgcaatctcctcaactc

SEQ ID NO: 464682 - DNA, 33 bp, Homo sapien
atcccttgtagtgtgctgcaatctcctcaactc

SEQ ID NO: 464683 - DNA, 33 bp, Homo sapien
cagagcatttttgtagcaggagtgtcagaggtc

SEQ ID NO: 464684 - DNA, 33 bp, Homo sapien
cagagcatttttgtagtaggagtgtcagaggtc

SEQ ID NO: 464685 - DNA, 33 bp, Homo sapien
gtcaaaaacgggggcccatagagagcgcctcag

SEQ ID NO: 464686 - DNA, 33 bp, Homo sapien
gtcaaaaacgggggcctatagagagcgcctcag

SEQ ID NO: 464687 - DNA, 33 bp, Homo sapien
atttacctggcaacataacgagccatatgctgt

SEQ ID NO: 464688 - DNA, 33 bp, Homo sapien
atttacctggcaacatgacgagccatatgctgt

SEQ ID NO: 464689 - DNA, 33 bp, Homo sapien
catctggattgagtaaacggacttcttggatac

SEQ ID NO: 464690 - DNA, 33 bp, Homo sapien
catctggattgagtaaccggacttcttggatac

SEQ ID NO: 464691 - DNA, 33 bp, Homo sapien
atggaattatttgcacaaacagggagttgggtt

SEQ ID NO: 464692 - DNA, 33 bp, Homo sapien
atggaattatttgcacgaacagggagttgggtt

SEQ ID NO: 464693 - DNA, 33 bp, Homo sapien
tggttgccagaaataagaacacttctattaatc

SEQ ID NO: 464694 - DNA, 33 bp, Homo sapien
tggttgccagaaataataacacttctattaatc

SEQ ID NO: 464695 - DNA, 33 bp, Homo sapien
ttactttgctgtatgacggagtactttccattt

SEQ ID NO: 464696 - DNA, 33 bp, Homo sapien
ttactttgctgtatgatggagtactttccattt

SEQ ID NO: 464697 - DNA, 33 bp, Homo sapien
agtttgtacttcctcacagttctcacatatgga

SEQ ID NO: 464698 - DNA, 33 bp, Homo sapien
agtttgtacttcctcagagttctcacatatgga

SEQ ID NO: 464699 - DNA, 33 bp, Homo sapien; identical to SEQ ID NO: 464697

SEQ ID NO: 464700 - DNA, 33 bp, Homo sapien; identical to SEQ ID NO: 464698

SEQ ID NO: 464701 - DNA, 33 bp, Homo sapien
cctggttaacaatgtgaaacttcggctctacta

SEQ ID NO: 464702 - DNA, 33 bp, Homo sapien
cctggttaacaatgtgcaacttcggctctacta

SEQ ID NO: 464703 - DNA, 33 bp, Homo sapien; identical to SEQ ID NO: 464701

SEQ ID NO: 464704 - DNA, 33 bp, Homo sapien; identical to SEQ ID NO: 464702

SEQ ID NO: 464705 - DNA, 33 bp, Homo sapien
aaaatatctccagcaccaatcttagcttttgca

SEQ ID NO: 464706 - DNA, 33 bp, Homo sapien
aaaatatctccagcacgaatcttagcttttgca

SEQ ID NO: 464707 - DNA, 33 bp, Homo sapien
ttgtgggagtactttccaatggtatccgctgat

SEQ ID NO: 464708 - DNA, 33 bp, Homo sapien
ttgtgggagtactttctaatggtatccgctgat

SEQ ID NO: 464709 - DNA, 33 bp, Homo sapien
cacccattagctttcaaatattggatgtctcca

SEQ ID NO: 464710 - DNA, 33 bp, Homo sapien
cacccattagctttcatatattggatgtctcca

SEQ ID NO: 464711 - DNA, 33 bp, Homo sapien
gagtatctagtcaacaaataaggaccacaaagt

SEQ ID NO: 464712 - DNA, 33 bp, Homo sapien
gagtatctagtcaacatataaggaccacaaagt

SEQ ID NO: 464713 - DNA, 33 bp, Homo sapien
ccacatctcctaaatcacgatcctgggccagta

SEQ ID NO: 464714 - DNA, 33 bp, Homo sapien
ccacatctcctaaatcgcgatcctgggccagta

SEQ ID NO: 464715 - DNA, 33 bp, Homo sapien
tctcagaagaccaagagactcggctaagctatc

SEQ ID NO: 464716 - DNA, 33 bp, Homo sapien
tctcagaagaccaagatactcggctaagctatc

SEQ ID NO: 464717 - DNA, 33 bp, Homo sapien
gtggcactggcagagacattcttggggttggtg

SEQ ID NO: 464718 - DNA, 33 bp, Homo sapien
gtggcactggcagagatattcttggggttggtg

SEQ ID NO: 464719 - DNA, 33 bp, Homo sapien
gacctcttggatgcccaatccccaatggtctgt

SEQ ID NO: 464720 - DNA, 33 bp, Homo sapien
gacctcttggatgcccgatccccaatggtctgt

SEQ ID NO: 464721 - DNA, 33 bp, Homo sapien
tgcttcctgaggttaccggtgtacccgtgtgtg

SEQ ID NO: 464722 - DNA, 33 bp, Homo sapien
tgcttcctgaggttactggtgtacccgtgtgtg

SEQ ID NO: 464723 - DNA, 33 bp, Homo sapien
atttcctttcatctacaggataaaatactgata

SEQ ID NO: 464724 - DNA, 33 bp, Homo sapien
atttcctttcatctacgggataaaatactgata

SEQ ID NO: 464725 - DNA, 33 bp, Homo sapien
atgcacagcctggacactattgatttcagtggt

SEQ ID NO: 464726 - DNA, 33 bp, Homo sapien
atgcacagcctggacagtattgatttcagtggt

SEQ ID NO: 464727 - DNA, 33 bp, Homo sapien
ggtgagaaatcttgaaagcaaagcattgatccc

SEQ ID NO: 464728 - DNA, 33 bp, Homo sapien
ggtgagaaatcttgaaggcaaagcattgatccc

SEQ ID NO: 464729 - DNA, 33 bp, Homo sapien
tttactgtccatattaccaaaaacactagtata

SEQ ID NO: 464730 - DNA, 33 bp, Homo sapien
tttactgtccatattatcaaaaacactagtata

SEQ ID NO: 464731 - DNA, 33 bp, Homo sapien
tgaaaaggaagaccaggataagaatgtgcaaga

SEQ ID NO: 464732 - DNA, 33 bp, Homo sapien
tgaaaaggaagaccagtataagaatgtgcaaga

SEQ ID NO: 464733 - DNA, 33 bp, Homo sapien
tttacaaagcatctcacctgtctccttgatcac

SEQ ID NO: 464734 - DNA, 33 bp, Homo sapien
tttacaaagcatctcagctgtctccttgatcac

SEQ ID NO: 464735 - DNA, 33 bp, Homo sapien
gctttgttctgctcacggaagtaccagaagtgg

SEQ ID NO: 464736 - DNA, 33 bp, Homo sapien
gctttgttctgctcactgaagtaccagaagtgg

SEQ ID NO: 464737 - DNA, 33 bp, Homo sapien
tgttttaaagtcaccactgcctgaggtgatggc

SEQ ID NO: 464738 - DNA, 33 bp, Homo sapien
tgttttaaagtcaccattgcctgaggtgatggc

SEQ ID NO: 464739 - DNA, 33 bp, Homo sapien
catcttaatttatgacaatgtagtttggattaa

SEQ ID NO: 464740 - DNA, 33 bp, Homo sapien
catcttaatttatgacgatgtagtttggattaa

SEQ ID NO: 464741 - DNA, 33 bp, Homo sapien
tccctaagagtatataacaaatatgaggtcttg

SEQ ID NO: 464742 - DNA, 33 bp, Homo sapien
tccctaagagtatataccaaatatgaggtcttg

SEQ ID NO: 464743 - DNA, 33 bp, Homo sapien
gattgcttgtaactaaagtgcttttaatggcag

SEQ ID NO: 464744 - DNA, 33 bp, Homo sapien
gattgcttgtaactaatgtgcttttaatggcag

SEQ ID NO: 464745 - DNA, 33 bp, Homo sapien
ccgcaagacacccgctcaacagacacgtgtgca

SEQ ID NO: 464746 - DNA, 33 bp, Homo sapien
ccgcaagacacccgctgaacagacacgtgtgca

SEQ ID NO: 464747 - DNA, 33 bp, Homo sapien
gagaaggcgagggtgcactgtaccttgcaggag

SEQ ID NO: 464748 - DNA, 33 bp, Homo sapien
gagaaggcgagggtgcgctgtaccttgcaggag

SEQ ID NO: 464749 - DNA, 33 bp, Homo sapien
tcagcgcgaaaacgcaaaatgcaaaccgtactt

SEQ ID NO: 464750 - DNA, 33 bp, Homo sapien
tcagcgcgaaaacgcagaatgcaaaccgtactt

SEQ ID NO: 464751 - DNA, 33 bp, Homo sapien
cagctcataaaggtagcatagacccacagaaag

SEQ ID NO: 464752 - DNA, 33 bp, Homo sapien
cagctcataaaggtagtatagacccacagaaag

SEQ ID NO: 464753 - DNA, 33 bp, Homo sapien
ctaccacgtcctcaaacgtcacttgctcctgaa

SEQ ID NO: 464754 - DNA, 33 bp, Homo sapien
ctaccacgtcctcaaatgtcacttgctcctgaa

SEQ ID NO: 464755 - DNA, 33 bp, Homo sapien
cctcgctcagccagcacgaaaggacgcacactg

SEQ ID NO: 464756 - DNA, 33 bp, Homo sapien
cctcgctcagccagcatgaaaggacgcacactg

SEQ ID NO: 464757 - DNA, 33 bp, Homo sapien
aaggcttgtgtatgaacgtacgtttctcatgtg

SEQ ID NO: 464758 - DNA, 33 bp, Homo sapien
aaggcttgtgtatgaatgtacgtttctcatgtg

SEQ ID NO: 464759 - DNA, 33 bp, Homo sapien
agacagtcagtatccacagtgattccataaaga

SEQ ID NO: 464760 - DNA, 33 bp, Homo sapien
agacagtcagtatccatagtgattccataaaga

SEQ ID NO: 464761 - DNA, 33 bp, Homo sapien
gaaatgtcgctatggtcaactctgagatgtgat

SEQ ID NO: 464762 - DNA, 33 bp, Homo sapien
gaaatgtcgctatggtgaactctgagatgtgat

SEQ ID NO: 464763 - DNA, 33 bp, Homo sapien
gattctgaaacagacccggaagcctcaagtgag

SEQ ID NO: 464764 - DNA, 33 bp, Homo sapien
gattctgaaacagacctggaagcctcaagtgag

SEQ ID NO: 464765 - DNA, 33 bp, Homo sapien
tcctgcctcactcagacacggtggtgggagaat

SEQ ID NO: 464766 - DNA, 33 bp, Homo sapien
tcctgcctcactcagatacggtggtgggagaat

SEQ ID NO: 464767 - DNA, 33 bp, Homo sapien
cctgccttctttcttacagcctgtgtcagccat

SEQ ID NO: 464768 - DNA, 33 bp, Homo sapien
cctgccttctttcttatagcctgtgtcagccat

SEQ ID NO: 464769 - DNA, 33 bp, Homo sapien
taacattgacatatccaatgcagtacaaaatgg

SEQ ID NO: 464770 - DNA, 33 bp, Homo sapien
taacattgacatatccgatgcagtacaaaatgg

SEQ ID NO: 464771 - DNA, 33 bp, Homo sapien
tgttatcttggaatcaatgaaataagagtaata

SEQ ID NO: 464772 - DNA, 33 bp, Homo sapien
tgttatcttggaatcagtgaaataagagtaata

SEQ ID NO: 464773 - DNA, 33 bp, Homo sapien
cactgaggaaggtcgcgacagtagacaacagtt

SEQ ID NO: 464774 - DNA, 33 bp, Homo sapien
cactgaggaaggtcgctacagtagacaacagtt

SEQ ID NO: 464775 - DNA, 33 bp, Homo sapien
gttggaagaaatgccacgtagtgttttcacaac

SEQ ID NO: 464776 - DNA, 33 bp, Homo sapien
gttggaagaaatgccaggtagtgttttcacaac

SEQ ID NO: 464777 - DNA, 33 bp, Homo sapien
atgtccttatgaacacaatggaagtatctctgg

SEQ ID NO: 464778 - DNA, 33 bp, Homo sapien
atgtccttatgaacacgatggaagtatctctgg

SEQ ID NO: 464779 - DNA, 33 bp, Homo sapien
gaaacactctttctaacagcccgagactagaca

SEQ ID NO: 464780 - DNA, 33 bp, Homo sapien
gaaacactctttctaatagcccgagactagaca

SEQ ID NO: 464781 - DNA, 33 bp, Homo sapien
tgcccatcacccactccgagattcaccaattaa

SEQ ID NO: 464782 - DNA, 33 bp, Homo sapien
tgcccatcacccactctgagattcaccaattaa

SEQ ID NO: 464783 - DNA, 33 bp, Homo sapien
gctgttaaaaaacaaccatggagttaccaactg

SEQ ID NO: 464784 - DNA, 33 bp, Homo sapien
gctgttaaaaaacaactatggagttaccaactg

SEQ ID NO: 464785 - DNA, 33 bp, Homo sapien
atgctttatgtgctacaagactttgcaaccttc

SEQ ID NO: 464786 - DNA, 33 bp, Homo sapien
atgctttatgtgctacgagactttgcaaccttc

SEQ ID NO: 464787 - DNA, 33 bp, Homo sapien
ccacctcacagagtagacattctggtatgggaa

SEQ ID NO: 464788 - DNA, 33 bp, Homo sapien
ccacctcacagagtaggcattctggtatgggaa

SEQ ID NO: 464789 - DNA, 33 bp, Homo sapien
agtggactgtcaggaacgcccaggctgggcact

SEQ ID NO: 464790 - DNA, 33 bp, Homo sapien
agtggactgtcaggaatgcccaggctgggcact

SEQ ID NO: 464791 - DNA, 33 bp, Homo sapien
tgcgtttgagtatagcccacatacagaaaagtg

SEQ ID NO: 464792 - DNA, 33 bp, Homo sapien
tgcgtttgagtatagctcacatacagaaaagtg

SEQ ID NO: 464793 - DNA, 33 bp, Homo sapien
gagaacaggaagcctgcagaaaatttgggatga

SEQ ID NO: 464794 - DNA, 33 bp, Homo sapien
gagaacaggaagcctgtagaaaatttgggatga

SEQ ID NO: 464795 - DNA, 33 bp, Homo sapien
ctcaaagtgatatgtaccttattccaccactag

SEQ ID NO: 464796 - DNA, 33 bp, Homo sapien
ctcaaagtgatatgtatcttattccaccactag

SEQ ID NO: 464797 - DNA, 33 bp, Homo sapien
tcccttgttttcacagcatggccacagaccatg

SEQ ID NO: 464798 - DNA, 33 bp, Homo sapien
tcccttgttttcacaggatggccacagaccatg

SEQ ID NO: 464799 - DNA, 33 bp, Homo sapien
gaagggaagatgcacacgtacagttaaaagaaa

SEQ ID NO: 464800 - DNA, 33 bp, Homo sapien
gaagggaagatgcacatgtacagttaaaagaaa

SEQ ID NO: 464801 - DNA, 33 bp, Homo sapien
ttactgagctcactacacagtccaagaaggcct

SEQ ID NO: 464802 - DNA, 33 bp, Homo sapien
ttactgagctcactacgcagtccaagaaggcct

SEQ ID NO: 464803 - DNA, 33 bp, Homo sapien
gaaattcagaagctgacggttagtgatctcgac

SEQ ID NO: 464804 - DNA, 33 bp, Homo sapien
gaaattcagaagctgagggttagtgatctcgac

SEQ ID NO: 464805 - DNA, 33 bp, Homo sapien
ggtgagggatacaagtcacctcaaacaattggc

SEQ ID NO: 464806 - DNA, 33 bp, Homo sapien
ggtgagggatacaagtgacctcaaacaattggc

SEQ ID NO: 464807 - DNA, 33 bp, Homo sapien
ctgagattgaggggcaacttcacccatagctgc

SEQ ID NO: 464808 - DNA, 33 bp, Homo sapien
ctgagattgaggggcagcttcacccatagctgc

SEQ ID NO: 464809 - DNA, 33 bp, Homo sapien
cttttctctcaatttcacaatctgtctctctgg

SEQ ID NO: 464810 - DNA, 33 bp, Homo sapien
cttttctctcaatttcgcaatctgtctctctgg

SEQ ID NO: 464811 - DNA, 33 bp, Homo sapien
acacttcctgatgccaacttcttcagccaaatg

SEQ ID NO: 464812 - DNA, 33 bp, Homo sapien
acacttcctgatgccagcttcttcagccaaatg

SEQ ID NO: 464813 - DNA, 33 bp, Homo sapien
aaagctttggtttacaccaggaatatcaaattt

SEQ ID NO: 464814 - DNA, 33 bp, Homo sapien
aaagctttggtttacagcaggaatatcaaattt

SEQ ID NO: 464815 - DNA, 33 bp, Homo sapien
gacgtttgagctcagacctgaatgggaaaggcg

SEQ ID NO: 464816 - DNA, 33 bp, Homo sapien
gacgtttgagctcagagctgaatgggaaaggcg

SEQ ID NO: 464817 - DNA, 33 bp, Homo sapien
ctggcatacttgtagaactttttaaccagagtt

SEQ ID NO: 464818 - DNA, 33 bp, Homo sapien
ctggcatacttgtagacctttttaaccagagtt

SEQ ID NO: 464819 - DNA, 33 bp, Homo sapien
aattatagcagacatcactttcaatttgctcca

SEQ ID NO: 464820 - DNA, 33 bp, Homo sapien
aattatagcagacatcgctttcaatttgctcca

SEQ ID NO: 464821 - DNA, 33 bp, Homo sapien
tgcacttgggcaaaaacgagagtcatccaaaaa

SEQ ID NO: 464822 - DNA, 33 bp, Homo sapien
tgcacttgggcaaaaatgagagtcatccaaaaa

SEQ ID NO: 464823 - DNA, 33 bp, Homo sapien
ttagcactgccttgtacggtccccatcaaatat

SEQ ID NO: 464824 - DNA, 33 bp, Homo sapien
ttagcactgccttgtatggtccccatcaaatat

SEQ ID NO: 464825 - DNA, 33 bp, Homo sapien
gagctatcctaacacaataagagaggaaaagca

SEQ ID NO: 464826 - DNA, 33 bp, Homo sapien
gagctatcctaacacagtaagagaggaaaagca

SEQ ID NO: 464827 - DNA, 33 bp, Homo sapien
tctgtgagattcagggaaagcaaattgatgcag

SEQ ID NO: 464828 - DNA, 33 bp, Homo sapien
tctgtgagattcagggcaagcaaattgatgcag

SEQ ID NO: 464829 - DNA, 33 bp, Homo sapien
gatcagggactgtaaccggaaaatagagaaaag

SEQ ID NO: 464830 - DNA, 33 bp, Homo sapien
gatcagggactgtaactggaaaatagagaaaag

SEQ ID NO: 464831 - DNA, 33 bp, Homo sapien
caggaggtaggctcgaagtttgggatttctttc

SEQ ID NO: 464832 - DNA, 33 bp, Homo sapien
caggaggtaggctcgaggtttgggatttctttc

SEQ ID NO: 464833 - DNA, 33 bp, Homo sapien
agcgagttaaaaatacaccacactttgagacga

SEQ ID NO: 464834 - DNA, 33 bp, Homo sapien
agcgagttaaaaatacgccacactttgagacga

SEQ ID NO: 464835 - DNA, 33 bp, Homo sapien
cagacatggcctcttccagtctccccactactg

SEQ ID NO: 464836 - DNA, 33 bp, Homo sapien
cagacatggcctcttctagtctccccactactg

SEQ ID NO: 464837 - DNA, 33 bp, Homo sapien
agtactctgtatcaaacgatcaacatgaataca

SEQ ID NO: 464838 - DNA, 33 bp, Homo sapien
agtactctgtatcaaatgatcaacatgaataca

SEQ ID NO: 464839 - DNA, 33 bp, Homo sapien
gcagagcttgaggaaggataattattgttgttt

SEQ ID NO: 464840 - DNA, 33 bp, Homo sapien
gcagagcttgaggaagtataattattgttgttt

SEQ ID NO: 464841 - DNA, 33 bp, Homo sapien
gggccatgaggcaaggaatagaaggtctgtacc

SEQ ID NO: 464842 - DNA, 33 bp, Homo sapien
gggccatgaggcaaggtatagaaggtctgtacc

SEQ ID NO: 464843 - DNA, 33 bp, Homo sapien
tgcaggctttgaagacaggcaaagggccatgag

SEQ ID NO: 464844 - DNA, 33 bp, Homo sapien
tgcaggctttgaagacgggcaaagggccatgag

SEQ ID NO: 464845 - DNA, 33 bp, Homo sapien
aacagggcaggcctgaaaccagcattcttagga

SEQ ID NO: 464846 - DNA, 33 bp, Homo sapien
aacagggcaggcctgagaccagcattcttagga

SEQ ID NO: 464847 - DNA, 33 bp, Homo sapien
aggatggtgagagaggaaatgacctggaaccta

SEQ ID NO: 464848 - DNA, 33 bp, Homo sapien
aggatggtgagagagggaatgacctggaaccta

SEQ ID NO: 464849 - DNA, 33 bp, Homo sapien
agggctcctgttttacaagaaaaatgcttcttt

SEQ ID NO: 464850 - DNA, 33 bp, Homo sapien
agggctcctgttttacgagaaaaatgcttcttt

SEQ ID NO: 464851 - DNA, 33 bp, Homo sapien
ttttgcttagtatttacgggcacacgttttaga

SEQ ID NO: 464852 - DNA, 33 bp, Homo sapien
ttttgcttagtatttatgggcacacgttttaga

SEQ ID NO: 464853 - DNA, 33 bp, Homo sapien
gttgctatgagccagaagttcttttttttgttt

SEQ ID NO: 464854 - DNA, 33 bp, Homo sapien
gttgctatgagccagaggttcttttttttgttt

SEQ ID NO: 464855 - DNA, 33 bp, Homo sapien
taaaaagtacatcatggataaactagctaatga

SEQ ID NO: 464856 - DNA, 33 bp, Homo sapien
taaaaagtacatcatgtataaactagctaatga

SEQ ID NO: 464857 - DNA, 33 bp, Homo sapien
aaaactataatggtaacagaatggcttttttta

SEQ ID NO: 464858 - DNA, 33 bp, Homo sapien
aaaactataatggtaatagaatggcttttttta

SEQ ID NO: 464859 - DNA, 33 bp, Homo sapien
tttttacagacgtacacgtgctcagcttagtga

SEQ ID NO: 464860 - DNA, 33 bp, Homo sapien
tttttacagacgtacatgtgctcagcttagtga

SEQ ID NO: 464861 - DNA, 33 bp, Homo sapien
cagtgaatttgttttcccttatagtcaggaaga

SEQ ID NO: 464862 - DNA, 33 bp, Homo sapien
cagtgaatttgttttctcttatagtcaggaaga

SEQ ID NO: 464863 - DNA, 33 bp, Homo sapien
cgggtgcagtgagaagcagcagaggagaccagg

SEQ ID NO: 464864 - DNA, 33 bp, Homo sapien
cgggtgcagtgagaaggagcagaggagaccagg

SEQ ID NO: 464865 - DNA, 33 bp, Homo sapien
ttcctgcaagtatccaactctgagattctgcaa

SEQ ID NO: 464866 - DNA, 33 bp, Homo sapien
ttcctgcaagtatccagctctgagattctgcaa

SEQ ID NO: 464867 - DNA, 33 bp, Homo sapien
aagggacagaaagagaataacaagctacaacag

SEQ ID NO: 464868 - DNA, 33 bp, Homo sapien
aagggacagaaagagagtaacaagctacaacag

SEQ ID NO: 464869 - DNA, 33 bp, Homo sapien
taggtttctggccaaaagttgaaaggagggatg

SEQ ID NO: 464870 - DNA, 33 bp, Homo sapien
taggtttctggccaaaggttgaaaggagggatg

SEQ ID NO: 464871 - DNA, 33 bp, Homo sapien
agggcatcgtgtccctaagaaatggaaacttcc

SEQ ID NO: 464872 - DNA, 33 bp, Homo sapien
agggcatcgtgtccctcagaaatggaaacttcc

SEQ ID NO: 464873 - DNA, 33 bp, Homo sapien
tggcacaatcaacccaaaggtttcgattcttga

SEQ ID NO: 464874 - DNA, 33 bp, Homo sapien
tggcacaatcaacccagaggtttcgattcttga

SEQ ID NO: 464875 - DNA, 33 bp, Homo sapien
gtaattcaaaccacaacctcgcgatttacatgg

SEQ ID NO: 464876 - DNA, 33 bp, Homo sapien
gtaattcaaaccacaatctcgcgatttacatgg

SEQ ID NO: 464877 - DNA, 33 bp, Homo sapien
atctgtctttcacctacaacccctgggcccaag

SEQ ID NO: 464878 - DNA, 33 bp, Homo sapien
atctgtctttcacctagaacccctgggcccaag

SEQ ID NO: 464879 - DNA, 33 bp, Homo sapien
tcaagcactagaaaaactactcagctgtcagca

SEQ ID NO: 464880 - DNA, 33 bp, Homo sapien
tcaagcactagaaaaattactcagctgtcagca

SEQ ID NO: 464881 - DNA, 33 bp, Homo sapien
ttgttcctactccgtacggttttacacataccc

SEQ ID NO: 464882 - DNA, 33 bp, Homo sapien
ttgttcctactccgtatggttttacacataccc

SEQ ID NO: 464883 - DNA, 33 bp, Homo sapien
gtgaagggcattcacgcagggctttcactatgc

SEQ ID NO: 464884 - DNA, 33 bp, Homo sapien
gtgaagggcattcacgtagggctttcactatgc

SEQ ID NO: 464885 - DNA, 33 bp, Homo sapien
agggttctagagagaaaggggatatgagcctga

SEQ ID NO: 464886 - DNA, 33 bp, Homo sapien
agggttctagagagaagggggatatgagcctga

SEQ ID NO: 464887 - DNA, 33 bp, Homo sapien
gctgaggacatgttaaagagaggcaaacattgc

SEQ ID NO: 464888 - DNA, 33 bp, Homo sapien
gctgaggacatgttaaggagaggcaaacattgc

SEQ ID NO: 464889 - DNA, 33 bp, Homo sapien
cggggcatggccagaaaactggaattgagctga

SEQ ID NO: 464890 - DNA, 33 bp, Homo sapien
cggggcatggccagaagactggaattgagctga

SEQ ID NO: 464891 - DNA, 33 bp, Homo sapien
ctgggagccttccctgaatgttcattttttgca

SEQ ID NO: 464892 - DNA, 33 bp, Homo sapien
ctgggagccttccctggatgttcattttttgca

SEQ ID NO: 464893 - DNA, 33 bp, Homo sapien
aagtgaccgagctgaacgtgaccagctgtgaag

SEQ ID NO: 464894 - DNA, 33 bp, Homo sapien
aagtgaccgagctgaatgtgaccagctgtgaag

SEQ ID NO: 464895 - DNA, 33 bp, Homo sapien
gtctcaaacagccgcacgggcaggaagagtgct

SEQ ID NO: 464896 - DNA, 33 bp, Homo sapien
gtctcaaacagccgcatgggcaggaagagtgct

SEQ ID NO: 464897 - DNA, 33 bp, Homo sapien
aagagctccactctccccaaccatctgagaact

SEQ ID NO: 464898 - DNA, 33 bp, Homo sapien
aagagctccactctcctcaaccatctgagaact

SEQ ID NO: 464899 - DNA, 33 bp, Homo sapien
gagcctcctgagcagaaagtaggtctaggacaa

SEQ ID NO: 464900 - DNA, 33 bp, Homo sapien
gagcctcctgagcagagagtaggtctaggacaa

SEQ ID NO: 464901 - DNA, 33 bp, Homo sapien
tcccagctgcttgaaccatggctaaaaggagcc

SEQ ID NO: 464902 - DNA, 33 bp, Homo sapien
tcccagctgcttgaactatggctaaaaggagcc

SEQ ID NO: 464903 - DNA, 33 bp, Homo sapien
cctcaggaagcttgcaatcatgatggaacatga

SEQ ID NO: 464904 - DNA, 33 bp, Homo sapien
cctcaggaagcttgcagtcatgatggaacatga

SEQ ID NO: 464905 - DNA, 33 bp, Homo sapien
caaactgagggacaacaggggcacaagcagacg

SEQ ID NO: 464906 - DNA, 33 bp, Homo sapien
caaactgagggacaacgggggcacaagcagacg

SEQ ID NO: 464907 - DNA, 33 bp, Homo sapien
cctggtgggaactctcccctcttcgccaagtcg

SEQ ID NO: 464908 - DNA, 33 bp, Homo sapien
cctggtgggaactctctcctcttcgccaagtcg

SEQ ID NO: 464909 - DNA, 33 bp, Homo sapien
gaaagtcggtgggagaagtcatctgtcattagg

SEQ ID NO: 464910 - DNA, 33 bp, Homo sapien
gaaagtcggtgggagatgtcatctgtcattagg

SEQ ID NO: 464911 - DNA, 33 bp, Homo sapien
gaccagtgactctcacaaaaagcagcctttgtt

SEQ ID NO: 464912 - DNA, 33 bp, Homo sapien
gaccagtgactctcacgaaaagcagcctttgtt

SEQ ID NO: 464913 - DNA, 33 bp, Homo sapien
tgactccaatggggacagcaccaggttcaagag

SEQ ID NO: 464914 - DNA, 33 bp, Homo sapien
tgactccaatggggacggcaccaggttcaagag

SEQ ID NO: 464915 - DNA, 33 bp, Homo sapien
actgtgtgggtgtccaagcttctgtccatgcgg

SEQ ID NO: 464916 - DNA, 33 bp, Homo sapien
actgtgtgggtgtccaggcttctgtccatgcgg

SEQ ID NO: 464917 - DNA, 33 bp, Homo sapien
gagagcgcaccaacaaacaacacgaggcggtgt

SEQ ID NO: 464918 - DNA, 33 bp, Homo sapien
gagagcgcaccaacaagcaacacgaggcggtgt

SEQ ID NO: 464919 - DNA, 33 bp, Homo sapien
tcaaacacactggtccaacataccaaccaaatc

SEQ ID NO: 464920 - DNA, 33 bp, Homo sapien
tcaaacacactggtcccacataccaaccaaatc

SEQ ID NO: 464921 - DNA, 33 bp, Homo sapien
tctccagagcccaagaagcaaagcgcagaatgt

SEQ ID NO: 464922 - DNA, 33 bp, Homo sapien
tctccagagcccaagaggcaaagcgcagaatgt

SEQ ID NO: 464923 - DNA, 33 bp, Homo sapien
tgaggtcccactgaaacttcatctcgccatgtg

SEQ ID NO: 464924 - DNA, 33 bp, Homo sapien
tgaggtcccactgaaatttcatctcgccatgtg

SEQ ID NO: 464925 - DNA, 33 bp, Homo sapien
gatgcagggggcggcaaggttcgtgacagaata

SEQ ID NO: 464926 - DNA, 33 bp, Homo sapien
gatgcagggggcggcagggttcgtgacagaata

SEQ ID NO: 464927 - DNA, 33 bp, Homo sapien
gatggctagggcaaaacaggcaatggcactggg

SEQ ID NO: 464928 - DNA, 33 bp, Homo sapien
gatggctagggcaaaataggcaatggcactggg

SEQ ID NO: 464929 - DNA, 33 bp, Homo sapien
gaaagaacaacaggagacagctaaaaagatgaa

SEQ ID NO: 464930 - DNA, 33 bp, Homo sapien
gaaagaacaacaggaggcagctaaaaagatgaa

SEQ ID NO: 464931 - DNA, 33 bp, Homo sapien
cgtttccggtgcttccactatgaggaggccaca

SEQ ID NO: 464932 - DNA, 33 bp, Homo sapien
cgtttccggtgcttccgctatgaggaggccaca

SEQ ID NO: 464933 - DNA, 33 bp, Homo sapien
acgcagcgtgcaagaacccagcgttaatgcgca

SEQ ID NO: 464934 - DNA, 33 bp, Homo sapien
acgcagcgtgcaagaatccagcgttaatgcgca

SEQ ID NO: 464935 - DNA, 33 bp, Homo sapien
tatttagccatagaaacgaacaagctatcaact

SEQ ID NO: 464936 - DNA, 33 bp, Homo sapien
tatttagccatagaaaggaacaagctatcaact

SEQ ID NO: 464937 - DNA, 33 bp, Homo sapien
ctgatcactttaccacaatttgccccagcccaa

SEQ ID NO: 464938 - DNA, 33 bp, Homo sapien
ctgatcactttaccacgatttgccccagcccaa

SEQ ID NO: 464939 - DNA, 33 bp, Homo sapien
gtttactttgaagtaccggaaagttcagcacag

SEQ ID NO: 464940 - DNA, 33 bp, Homo sapien
gtttactttgaagtactggaaagttcagcacag

SEQ ID NO: 464941 - DNA, 33 bp, Homo sapien
tctccccttcagatcacatttcaactttaatga

SEQ ID NO: 464942 - DNA, 33 bp, Homo sapien
tctccccttcagatcatatttcaactttaatga

SEQ ID NO: 464943 - DNA, 33 bp, Homo sapien
gtaacagctgaaactccaagaggtgtcttcctt

SEQ ID NO: 464944 - DNA, 33 bp, Homo sapien
gtaacagctgaaactctaagaggtgtcttcctt

SEQ ID NO: 464945 - DNA, 33 bp, Homo sapien
aatagcaacatgtggtcaacggttaccatatta

SEQ ID NO: 464946 - DNA, 33 bp, Homo sapien
aatagcaacatgtggttaacggttaccatatta

SEQ ID NO: 464947 - DNA, 33 bp, Homo sapien
gggtttgattcaaaaggaacctgacatctttct

SEQ ID NO: 464948 - DNA, 33 bp, Homo sapien
gggtttgattcaaaagtaacctgacatctttct

SEQ ID NO: 464949 - DNA, 33 bp, Homo sapien
ctgtaataaattaccacgtactttgtcacttaa

SEQ ID NO: 464950 - DNA, 33 bp, Homo sapien
ctgtaataaattaccatgtactttgtcacttaa

SEQ ID NO: 464951 - DNA, 33 bp, Homo sapien
aattaaaatggctggcaaggagtttcctcacac

SEQ ID NO: 464952 - DNA, 33 bp, Homo sapien
aattaaaatggctggcgaggagtttcctcacac

SEQ ID NO: 464953 - DNA, 33 bp, Homo sapien
tggaattgtgagtccaatcaacctcttttttct

SEQ ID NO: 464954 - DNA, 33 bp, Homo sapien
tggaattgtgagtccattcaacctcttttttct

SEQ ID NO: 464955 - DNA, 33 bp, Homo sapien
gaaacttaagccacaaaatagcaattaacattc

SEQ ID NO: 464956 - DNA, 33 bp, Homo sapien
gaaacttaagccacaacatagcaattaacattc

SEQ ID NO: 464957 - DNA, 33 bp, Homo sapien
gattcttgaaactaaactatccgtaagtgtcaa

SEQ ID NO: 464958 - DNA, 33 bp, Homo sapien
gattcttgaaactaaagtatccgtaagtgtcaa

SEQ ID NO: 464959 - DNA, 33 bp, Homo sapien; identical to SEQ ID NO: 464957

SEQ ID NO: 464960 - DNA, 33 bp, Homo sapien; identical to SEQ ID NO: 464958

SEQ ID NO: 464961 - DNA, 33 bp, Homo sapien
ttaattataagctgccgcctttccctgaaaacc

SEQ ID NO: 464962 - DNA, 33 bp, Homo sapien
ttaattataagctgcctcctttccctgaaaacc

SEQ ID NO: 464963 - DNA, 33 bp, Homo sapien
cactgaagtataagtacattttttgtcacactc

SEQ ID NO: 464964 - DNA, 33 bp, Homo sapien
cactgaagtataagtatattttttgtcacactc

SEQ ID NO: 464965 - DNA, 33 bp, Homo sapien
atttagtagatgtagacagactcctaacttctc

SEQ ID NO: 464966 - DNA, 33 bp, Homo sapien
atttagtagatgtagatagactcctaacttctc

SEQ ID NO: 464967 - DNA, 33 bp, Homo sapien
ataattggaaaaaggacaccctcattcaataaa

SEQ ID NO: 464968 - DNA, 33 bp, Homo sapien
ataattggaaaaaggataccctcattcaataaa

SEQ ID NO: 464969 - DNA, 33 bp, Homo sapien
tatcttcaaatgaaaaccaggagaagtaggcag

SEQ ID NO: 464970 - DNA, 33 bp, Homo sapien
tatcttcaaatgaaaatcaggagaagtaggcag

SEQ ID NO: 464971 - DNA, 33 bp, Homo sapien
gaactctgaagtcttacgtttcctgcaagttgc

SEQ ID NO: 464972 - DNA, 33 bp, Homo sapien
gaactctgaagtcttaggtttcctgcaagttgc

SEQ ID NO: 464973 - DNA, 33 bp, Homo sapien
ttgctcagttggacacgacaatggataatattt

SEQ ID NO: 464974 - DNA, 33 bp, Homo sapien
ttgctcagttggacactacaatggataatattt

SEQ ID NO: 464975 - DNA, 33 bp, Homo sapien
taaatggtatcaagaccaaccctgtgccattgt

SEQ ID NO: 464976 - DNA, 33 bp, Homo sapien
taaatggtatcaagacgaaccctgtgccattgt

SEQ ID NO: 464977 - DNA, 33 bp, Homo sapien
aacccaaccacaacataaaagtagccagtgtaa

SEQ ID NO: 464978 - DNA, 33 bp, Homo sapien
aacccaaccacaacatcaaagtagccagtgtaa

SEQ ID NO: 464979 - DNA, 33 bp, Homo sapien
ttcctattgttccatacggggctgcattctgcg

SEQ ID NO: 464980 - DNA, 33 bp, Homo sapien
ttcctattgttccatatggggctgcattctgcg

SEQ ID NO: 464981 - DNA, 33 bp, Homo sapien
ttgaattagtatgaatcaaaggtggggaaaagt

SEQ ID NO: 464982 - DNA, 33 bp, Homo sapien
ttgaattagtatgaattaaaggtggggaaaagt

SEQ ID NO: 464983 - DNA, 33 bp, Homo sapien
tttgtgcatagctgtccaactattggttttttt

SEQ ID NO: 464984 - DNA, 33 bp, Homo sapien
tttgtgcatagctgtctaactattggttttttt

SEQ ID NO: 464985 - DNA, 33 bp, Homo sapien
ttcaggttttatagtccagaggtctaacactgc

SEQ ID NO: 464986 - DNA, 33 bp, Homo sapien
ttcaggttttatagtctagaggtctaacactgc

SEQ ID NO: 464987 - DNA, 33 bp, Homo sapien; identical to SEQ ID NO: 464985

SEQ ID NO: 464988 - DNA, 33 bp, Homo sapien; identical to SEQ ID NO: 464986

SEQ ID NO: 464989 - DNA, 33 bp, Homo sapien
taaatttctcccacgaactctatgtatatgttt

SEQ ID NO: 464990 - DNA, 33 bp, Homo sapien
taaatttctcccacgacctctatgtatatgttt

SEQ ID NO: 464991 - DNA, 33 bp, Homo sapien; identical to SEQ ID NO: 464989

SEQ ID NO: 464992 - DNA, 33 bp, Homo sapien; identical to SEQ ID NO: 464990

SEQ ID NO: 464993 - DNA, 33 bp, Homo sapien
tcttttagaggtttcccatcgctgaggtcatct

SEQ ID NO: 464994 - DNA, 33 bp, Homo sapien
tcttttagaggtttcctatcgctgaggtcatct

SEQ ID NO: 464995 - DNA, 33 bp, Homo sapien
taagtgaatgatgatacaaaactcttatttctt

SEQ ID NO: 464996 - DNA, 33 bp, Homo sapien
taagtgaatgatgatataaaactcttatttctt

SEQ ID NO: 464997 - DNA, 33 bp, Homo sapien
gacatgaacatttgtacagtgcttccaagtgag

SEQ ID NO: 464998 - DNA, 33 bp, Homo sapien
gacatgaacatttgtatagtgcttccaagtgag

SEQ ID NO: 464999 - DNA, 33 bp, Homo sapien; identical to SEQ ID NO: 464997

SEQ ID NO: 465000 - DNA, 33 bp, Homo sapien; identical to SEQ ID NO: 464998

SEQ ID NO: 465001 - DNA, 33 bp, Homo sapien
ttattcttcttgcataaaatgtagtgactccac

SEQ ID NO: 465002 - DNA, 33 bp, Homo sapien
ttattcttcttgcatataatgtagtgactccac

SEQ ID NO: 465003 - DNA, 33 bp, Homo sapien; identical to SEQ ID NO: 465001

SEQ ID NO: 465004 - DNA, 33 bp, Homo sapien; identical to SEQ ID NO: 465002

SEQ ID NO: 465005 - DNA, 33 bp, Homo sapien
cttaaaatggctacacggcaggatagaaagtgt

SEQ ID NO: 465006 - DNA, 33 bp, Homo sapien
cttaaaatggctacactgcaggatagaaagtgt

SEQ ID NO: 465007 - DNA, 33 bp, Homo sapien
ttcgctgttggttaaacttctgggatacaaatg

SEQ ID NO: 465008 - DNA, 33 bp, Homo sapien
ttcgctgttggttaaatttctgggatacaaatg

SEQ ID NO: 465009 - DNA, 33 bp, Homo sapien
taaatcgccttctgaaaattcgctgttggttaa

SEQ ID NO: 465010 - DNA, 33 bp, Homo sapien
taaatcgccttctgaagattcgctgttggttaa

SEQ ID NO: 465011 - DNA, 33 bp, Homo sapien
aaaaccactgactttacggttttgtgcaaggac

SEQ ID NO: 465012 - DNA, 33 bp, Homo sapien
aaaaccactgactttatggttttgtgcaaggac

SEQ ID NO: 465013 - DNA, 33 bp, Homo sapien
aagtgattgatacatacgcctaaaatctggggg

SEQ ID NO: 465014 - DNA, 33 bp, Homo sapien
aagtgattgatacatatgcctaaaatctggggg

SEQ ID NO: 465015 - DNA, 33 bp, Homo sapien
ctggaccaagtggaccccaactaactactgcag

SEQ ID NO: 465016 - DNA, 33 bp, Homo sapien
ctggaccaagtggacctcaactaactactgcag

SEQ ID NO: 465017 - DNA, 33 bp, Homo sapien
atgatttgcctctacactcacctgcagtccttg

SEQ ID NO: 465018 - DNA, 33 bp, Homo sapien
atgatttgcctctacagtcacctgcagtccttg

SEQ ID NO: 465019 - DNA, 33 bp, Homo sapien
cacaaaaatgtcgccacgttaaaatttgaacag

SEQ ID NO: 465020 - DNA, 33 bp, Homo sapien
cacaaaaatgtcgccatgttaaaatttgaacag

SEQ ID NO: 465021 - DNA, 33 bp, Homo sapien
gatttctgggaatagcaaagagaatgccaactt

SEQ ID NO: 465022 - DNA, 33 bp, Homo sapien
gatttctgggaatagcgaagagaatgccaactt

SEQ ID NO: 465023 - DNA, 33 bp, Homo sapien
tagggagatacaaaacccaaagctgggaggctg

SEQ ID NO: 465024 - DNA, 33 bp, Homo sapien
tagggagatacaaaacgcaaagctgggaggctg

SEQ ID NO: 465025 - DNA, 33 bp, Homo sapien
tatgctgctggatataaaactgtcggagaatta

SEQ ID NO: 465026 - DNA, 33 bp, Homo sapien
tatgctgctggatatataactgtcggagaatta

SEQ ID NO: 465027 - DNA, 33 bp, Homo sapien
ttgcaaatgtgagtgggacacaaattgagggca

SEQ ID NO: 465028 - DNA, 33 bp, Homo sapien
ttgcaaatgtgagtggtacacaaattgagggca

SEQ ID NO: 465029 - DNA, 33 bp, Homo sapien
cactatagttgcttcccgccataggcatttcct

SEQ ID NO: 465030 - DNA, 33 bp, Homo sapien
cactatagttgcttcctgccataggcatttcct

SEQ ID NO: 465031 - DNA, 33 bp, Homo sapien
gtgctggtgaatgttacggtggggaaatggttg

SEQ ID NO: 465032 - DNA, 33 bp, Homo sapien
gtgctggtgaatgttatggtggggaaatggttg

SEQ ID NO: 465033 - DNA, 33 bp, Homo sapien
aaggtgctgtggaacaccatgaacaatgcacac

SEQ ID NO: 465034 - DNA, 33 bp, Homo sapien
aaggtgctgtggaacatcatgaacaatgcacac

SEQ ID NO: 465035 - DNA, 33 bp, Homo sapien
atagatgttagacagtaaaggtttaacaactgc

SEQ ID NO: 465036 - DNA, 33 bp, Homo sapien
atagatgttagacagtcaaggtttaacaactgc

SEQ ID NO: 465037 - DNA, 33 bp, Homo sapien
ggagcacaattttaacgggatcaaactgtggag

SEQ ID NO: 465038 - DNA, 33 bp, Homo sapien
ggagcacaattttaactggatcaaactgtggag

SEQ ID NO: 465039 - DNA, 33 bp, Homo sapien
agttttcctgagatgacaggtgttctgactgtc

SEQ ID NO: 465040 - DNA, 33 bp, Homo sapien
agttttcctgagatgataggtgttctgactgtc

SEQ ID NO: 465041 - DNA, 33 bp, Homo sapien
actacattttacttgcacttgtttttcagggct

SEQ ID NO: 465042 - DNA, 33 bp, Homo sapien
actacattttacttgctcttgtttttcagggct

SEQ ID NO: 465043 - DNA, 33 bp, Homo sapien
tgaacagcaaatgttaaattggtataaaaaaca

SEQ ID NO: 465044 - DNA, 33 bp, Homo sapien
tgaacagcaaatgttacattggtataaaaaaca

SEQ ID NO: 465045 - DNA, 33 bp, Homo sapien
aaatctgcacaacatacaatacagctttcaatc

SEQ ID NO: 465046 - DNA, 33 bp, Homo sapien
aaatctgcacaacatataatacagctttcaatc

SEQ ID NO: 465047 - DNA, 33 bp, Homo sapien
gagaaatctgctcagacgtcacaaatcagtctg

SEQ ID NO: 465048 - DNA, 33 bp, Homo sapien
gagaaatctgctcagatgtcacaaatcagtctg

SEQ ID NO: 465049 - DNA, 33 bp, Homo sapien
tcccctagaccataaaagcacagttcttaaacc

SEQ ID NO: 465050 - DNA, 33 bp, Homo sapien
tcccctagaccataaaggcacagttcttaaacc

SEQ ID NO: 465051 - DNA, 33 bp, Homo sapien
aaacctttgatagagacagtgaaatgtggtcag

SEQ ID NO: 465052 - DNA, 33 bp, Homo sapien
aaacctttgatagagagagtgaaatgtggtcag

SEQ ID NO: 465053 - DNA, 33 bp, Homo sapien
ttgctggtccatttgacgaagaagtccagagcg

SEQ ID NO: 465054 - DNA, 33 bp, Homo sapien
ttgctggtccatttgatgaagaagtccagagcg

SEQ ID NO: 465055 - DNA, 33 bp, Homo sapien
agcctccacaggagcacgggcatattggttcaa

SEQ ID NO: 465056 - DNA, 33 bp, Homo sapien
agcctccacaggagcatgggcatattggttcaa

SEQ ID NO: 465057 - DNA, 33 bp, Homo sapien
aaggaggaaatatttacgtttgactttataaaa

SEQ ID NO: 465058 - DNA, 33 bp, Homo sapien
aaggaggaaatatttaggtttgactttataaaa

SEQ ID NO: 465059 - DNA, 33 bp, Homo sapien
gctcatggggctgtgaagtccttcttgctgcat

SEQ ID NO: 465060 - DNA, 33 bp, Homo sapien
gctcatggggctgtgaggtccttcttgctgcat

SEQ ID NO: 465061 - DNA, 33 bp, Homo sapien
aattacatccagaaagaaggacacttgtatgct

SEQ ID NO: 465062 - DNA, 33 bp, Homo sapien
aattacatccagaaaggaggacacttgtatgct

SEQ ID NO: 465063 - DNA, 33 bp, Homo sapien
aaagtttgcaaacccactgagtcttgctcttgt

SEQ ID NO: 465064 - DNA, 33 bp, Homo sapien
aaagtttgcaaacccagtgagtcttgctcttgt

SEQ ID NO: 465065 - DNA, 33 bp, Homo sapien
atgagcttcagaacgcagcaaatggatttgctc

SEQ ID NO: 465066 - DNA, 33 bp, Homo sapien
atgagcttcagaacgcggcaaatggatttgctc

SEQ ID NO: 465067 - DNA, 33 bp, Homo sapien
gttgcatcctgctgtcgaaagtgactggattct

SEQ ID NO: 465068 - DNA, 33 bp, Homo sapien
gttgcatcctgctgtctaaagtgactggattct

SEQ ID NO: 465069 - DNA, 33 bp, Homo sapien
ataatctgaatttgcagggacaatgttggtcat

SEQ ID NO: 465070 - DNA, 33 bp, Homo sapien
ataatctgaatttgcatggacaatgttggtcat

SEQ ID NO: 465071 - DNA, 33 bp, Homo sapien
ccatagatcttcacccagaggacatattttccc

SEQ ID NO: 465072 - DNA, 33 bp, Homo sapien
ccatagatcttcaccctgaggacatattttccc

SEQ ID NO: 465073 - DNA, 33 bp, Homo sapien
gaacagcctcttgtccccttctctctcctacac

SEQ ID NO: 465074 - DNA, 33 bp, Homo sapien
gaacagcctcttgtcctcttctctctcctacac

SEQ ID NO: 465075 - DNA, 33 bp, Homo sapien
ggctgctgtcaataaaggtttgaacaatttctc

SEQ ID NO: 465076 - DNA, 33 bp, Homo sapien
ggctgctgtcaataaatgtttgaacaatttctc

SEQ ID NO: 465077 - DNA, 33 bp, Homo sapien
tctttgaatatttctacgtctgtacctcctctt

SEQ ID NO: 465078 - DNA, 33 bp, Homo sapien
tctttgaatatttctatgtctgtacctcctctt

SEQ ID NO: 465079 - DNA, 33 bp, Homo sapien
ggctacataagaacatcaggacaaagagatgtt

SEQ ID NO: 465080 - DNA, 33 bp, Homo sapien
ggctacataagaacattaggacaaagagatgtt

SEQ ID NO: 465081 - DNA, 33 bp, Homo sapien
gggcagagaagctcccaagggtgtcaagctgac

SEQ ID NO: 465082 - DNA, 33 bp, Homo sapien
gggcagagaagctcccgagggtgtcaagctgac

SEQ ID NO: 465083 - DNA, 33 bp, Homo sapien
tgcggaacagtccctcaaggtaacaggttggct

SEQ ID NO: 465084 - DNA, 33 bp, Homo sapien
tgcggaacagtccctcgaggtaacaggttggct

SEQ ID NO: 465085 - DNA, 33 bp, Homo sapien
ttatttaccaacatacaaaagtaaatactatat

SEQ ID NO: 465086 - DNA, 33 bp, Homo sapien
ttatttaccaacatacgaaagtaaatactatat

SEQ ID NO: 465087 - DNA, 33 bp, Homo sapien
ccccttctctgctgtcaaggaactggacacttc

SEQ ID NO: 465088 - DNA, 33 bp, Homo sapien
ccccttctctgctgtcgaggaactggacacttc

SEQ ID NO: 465089 - DNA, 33 bp, Homo sapien
aaacagagcagtctatcagaaacacagtaggtg

SEQ ID NO: 465090 - DNA, 33 bp, Homo sapien
aaacagagcagtctatgagaaacacagtaggtg

SEQ ID NO: 465091 - DNA, 33 bp, Homo sapien
ttcatttaatgcaacaacaattcaaggatgtag

SEQ ID NO: 465092 - DNA, 33 bp, Homo sapien
ttcatttaatgcaacatcaattcaaggatgtag

SEQ ID NO: 465093 - DNA, 33 bp, Homo sapien
gtgggcccttcctgaaaagtatcctctaaggga

SEQ ID NO: 465094 - DNA, 33 bp, Homo sapien
gtgggcccttcctgaacagtatcctctaaggga

SEQ ID NO: 465095 - DNA, 33 bp, Homo sapien
tttattttttattttcacaatgcacatagttta

SEQ ID NO: 465096 - DNA, 33 bp, Homo sapien
tttattttttattttctcaatgcacatagttta

SEQ ID NO: 465097 - DNA, 33 bp, Homo sapien
aagacaacaggcaaagaacgggcgactccccgg

SEQ ID NO: 465098 - DNA, 33 bp, Homo sapien
aagacaacaggcaaaggacgggcgactccccgg

SEQ ID NO: 465099 - DNA, 33 bp, Homo sapien
aggggcacttttgtcacggagagaatatatgca

SEQ ID NO: 465100 - DNA, 33 bp, Homo sapien
aggggcacttttgtcatggagagaatatatgca

SEQ ID NO: 465101 - DNA, 33 bp, Homo sapien
agtattttaagaccaaagatggacaaaatacgt

SEQ ID NO: 465102 - DNA, 33 bp, Homo sapien
agtattttaagaccaaggatggacaaaatacgt

SEQ ID NO: 465103 - DNA, 33 bp, Homo sapien
aaacaatatttaagcactgcaggaaaacagacg

SEQ ID NO: 465104 - DNA, 33 bp, Homo sapien
aaacaatatttaagcattgcaggaaaacagacg

SEQ ID NO: 465105 - DNA, 33 bp, Homo sapien
ctgcggggattcctcacgcagacctaggagatt

SEQ ID NO: 465106 - DNA, 33 bp, Homo sapien
ctgcggggattcctcatgcagacctaggagatt

SEQ ID NO: 465107 - DNA, 33 bp, Homo sapien
gatcaccagtgcttgacgacattcccacagaca

SEQ ID NO: 465108 - DNA, 33 bp, Homo sapien
gatcaccagtgcttgatgacattcccacagaca

SEQ ID NO: 465109 - DNA, 33 bp, Homo sapien
ctgaggttaatctaaccgaggaaatagtctcaa

SEQ ID NO: 465110 - DNA, 33 bp, Homo sapien
ctgaggttaatctaactgaggaaatagtctcaa

SEQ ID NO: 465111 - DNA, 33 bp, Homo sapien
tgttcccaggaccacacgctgctcggacaccag

SEQ ID NO: 465112 - DNA, 33 bp, Homo sapien
tgttcccaggaccacaggctgctcggacaccag

SEQ ID NO: 465113 - DNA, 33 bp, Homo sapien
cggagattcctgatagacgaggagcagcgaggg

SEQ ID NO: 465114 - DNA, 33 bp, Homo sapien
cggagattcctgataggcgaggagcagcgaggg

SEQ ID NO: 465115 - DNA, 33 bp, Homo sapien
ttacagccaaagttgaaaacattacactagaat

SEQ ID NO: 465116 - DNA, 33 bp, Homo sapien
ttacagccaaagttgagaacattacactagaat

SEQ ID NO: 465117 - DNA, 33 bp, Homo sapien
ctccatttgtgtagggaaaaaaatttgctttct

SEQ ID NO: 465118 - DNA, 33 bp, Homo sapien
ctccatttgtgtaggggaaaaaatttgctttct

SEQ ID NO: 465119 - DNA, 33 bp, Homo sapien
tcgcacatccttaaggaaactaaatgccatggg

SEQ ID NO: 465120 - DNA, 33 bp, Homo sapien
tcgcacatccttaagggaactaaatgccatggg

SEQ ID NO: 465121 - DNA, 33 bp, Homo sapien
caatactgtaaagctccaatttttcccagatgc

SEQ ID NO: 465122 - DNA, 33 bp, Homo sapien
caatactgtaaagctctaatttttcccagatgc

SEQ ID NO: 465123 - DNA, 33 bp, Homo sapien
cagatacagagcaaagaaaacaaggttaaccct

SEQ ID NO: 465124 - DNA, 33 bp, Homo sapien
cagatacagagcaaaggaaacaaggttaaccct

SEQ ID NO: 465125 - DNA, 33 bp, Homo sapien
gaagcttgtgagaatcaaaacagaacactgaga

SEQ ID NO: 465126 - DNA, 33 bp, Homo sapien
gaagcttgtgagaatcgaaacagaacactgaga

SEQ ID NO: 465127 - DNA, 33 bp, Homo sapien
gaggtgatttatatgaagatttccagttgttct

SEQ ID NO: 465128 - DNA, 33 bp, Homo sapien
gaggtgatttatatgaggatttccagttgttct

SEQ ID NO: 465129 - DNA, 33 bp, Homo sapien
tccctgcggataaagaagtggatttaactccag

SEQ ID NO: 465130 - DNA, 33 bp, Homo sapien
tccctgcggataaagacgtggatttaactccag

SEQ ID NO: 465131 - DNA, 33 bp, Homo sapien
tgaggattaaaggtgaaggaaagtccagcctgc

SEQ ID NO: 465132 - DNA, 33 bp, Homo sapien
tgaggattaaaggtgagggaaagtccagcctgc

SEQ ID NO: 465133 - DNA, 33 bp, Homo sapien
agacaaggaagcaaaacacatttttacagcagg

SEQ ID NO: 465134 - DNA, 33 bp, Homo sapien
agacaaggaagcaaaagacatttttacagcagg

SEQ ID NO: 465135 - DNA, 33 bp, Homo sapien
ctgtctgctcacaccactgccacattcagcacc

SEQ ID NO: 465136 - DNA, 33 bp, Homo sapien
ctgtctgctcacaccagtgccacattcagcacc

SEQ ID NO: 465137 - DNA, 33 bp, Homo sapien
atatgttgtagtcacacgagatactgttctgaa

SEQ ID NO: 465138 - DNA, 33 bp, Homo sapien
atatgttgtagtcacatgagatactgttctgaa

SEQ ID NO: 465139 - DNA, 33 bp, Homo sapien
aatgctgctttgaacaagacccatttcagagcc

SEQ ID NO: 465140 - DNA, 33 bp, Homo sapien
aatgctgctttgaacaggacccatttcagagcc

SEQ ID NO: 465141 - DNA, 33 bp, Homo sapien
ggtacctgaggcctcactaaatgctgaaaattt

SEQ ID NO: 465142 - DNA, 33 bp, Homo sapien
ggtacctgaggcctcagtaaatgctgaaaattt

SEQ ID NO: 465143 - DNA, 33 bp, Homo sapien
ttacaaagagataacaatgtaagtccagcaaac

SEQ ID NO: 465144 - DNA, 33 bp, Homo sapien
ttacaaagagataacagtgtaagtccagcaaac

SEQ ID NO: 465145 - DNA, 33 bp, Homo sapien
caccacacaaatcctcagagagaaaaaccttat

SEQ ID NO: 465146 - DNA, 33 bp, Homo sapien
caccacacaaatcctcggagagaaaaaccttat

SEQ ID NO: 465147 - DNA, 33 bp, Homo sapien
tgacatcagataagccaagtgtccccagcaagg

SEQ ID NO: 465148 - DNA, 33 bp, Homo sapien
tgacatcagataagccgagtgtccccagcaagg

SEQ ID NO: 465149 - DNA, 33 bp, Homo sapien
tgccttctgaccctgcacgtgaccccctgttca

SEQ ID NO: 465150 - DNA, 33 bp, Homo sapien
tgccttctgaccctgcgcgtgaccccctgttca

SEQ ID NO: 465151 - DNA, 33 bp, Homo sapien
ttttggttattccacaaatttatccaatggctc

SEQ ID NO: 465152 - DNA, 33 bp, Homo sapien
ttttggttattccacagatttatccaatggctc

SEQ ID NO: 465153 - DNA, 33 bp, Homo sapien
agccgcagcagtatcacaggaacttccctgaaa

SEQ ID NO: 465154 - DNA, 33 bp, Homo sapien
agccgcagcagtatcataggaacttccctgaaa

SEQ ID NO: 465155 - DNA, 33 bp, Homo sapien
tagtgcttgcttctaccctcggataaatgtatg

SEQ ID NO: 465156 - DNA, 33 bp, Homo sapien
tagtgcttgcttctactctcggataaatgtatg

SEQ ID NO: 465157 - DNA, 33 bp, Homo sapien
tgaaaacgttttgtcactgaagtaaggacaggg

SEQ ID NO: 465158 - DNA, 33 bp, Homo sapien
tgaaaacgttttgtcattgaagtaaggacaggg

SEQ ID NO: 465159 - DNA, 33 bp, Homo sapien
caaacataaaaaccgaacatcacaataattgcc

SEQ ID NO: 465160 - DNA, 33 bp, Homo sapien
caaacataaaaaccgatcatcacaataattgcc

SEQ ID NO: 465161 - DNA, 33 bp, Homo sapien
ctcctttctaccatgaggactttcacctgtaca

SEQ ID NO: 465162 - DNA, 33 bp, Homo sapien
ctcctttctaccatgatgactttcacctgtaca

SEQ ID NO: 465163 - DNA, 33 bp, Homo sapien
tggtaactgagtgcacaagttaaattcctaacc

SEQ ID NO: 465164 - DNA, 33 bp, Homo sapien
tggtaactgagtgcacgagttaaattcctaacc

SEQ ID NO: 465165 - DNA, 33 bp, Homo sapien
acacctatgtcgatgaccttaacaaaaatcacg

SEQ ID NO: 465166 - DNA, 33 bp, Homo sapien
acacctatgtcgatgatcttaacaaaaatcacg

SEQ ID NO: 465167 - DNA, 33 bp, Homo sapien
ctttcaattacgatgaagttgtccatagagcta

SEQ ID NO: 465168 - DNA, 33 bp, Homo sapien
ctttcaattacgatgatgttgtccatagagcta

SEQ ID NO: 465169 - DNA, 33 bp, Homo sapien
gttcttgcagtatttcacttgtcttttgatttt

SEQ ID NO: 465170 - DNA, 33 bp, Homo sapien
gttcttgcagtatttcgcttgtcttttgatttt

SEQ ID NO: 465171 - DNA, 33 bp, Homo sapien
tttacacgataaagcccgaaagacatggaaaag

SEQ ID NO: 465172 - DNA, 33 bp, Homo sapien
tttacacgataaagcctgaaagacatggaaaag

SEQ ID NO: 465173 - DNA, 33 bp, Homo sapien
tcactttcctgagcccacaaaatcagatggccc

SEQ ID NO: 465174 - DNA, 33 bp, Homo sapien
tcactttcctgagcccgcaaaatcagatggccc

SEQ ID NO: 465175 - DNA, 33 bp, Homo sapien
ccttctgggaaccgagacgcaaactctcagaga

SEQ ID NO: 465176 - DNA, 33 bp, Homo sapien
ccttctgggaaccgagtcgcaaactctcagaga

SEQ ID NO: 465177 - DNA, 33 bp, Homo sapien
tgcaggaatgcagtgaataactgggcttctcct

SEQ ID NO: 465178 - DNA, 33 bp, Homo sapien
tgcaggaatgcagtgagtaactgggcttctcct

SEQ ID NO: 465179 - DNA, 33 bp, Homo sapien
ctcatctctccacgccaagtttcagagcttatt

SEQ ID NO: 465180 - DNA, 33 bp, Homo sapien
ctcatctctccacgccgagtttcagagcttatt

SEQ ID NO: 465181 - DNA, 33 bp, Homo sapien
aaatggctacagctagaaattaggggaagcagg

SEQ ID NO: 465182 - DNA, 33 bp, Homo sapien
aaatggctacagctaggaattaggggaagcagg

SEQ ID NO: 465183 - DNA, 33 bp, Homo sapien
ctagggcacctaatgactagaaaggaatttact

SEQ ID NO: 465184 - DNA, 33 bp, Homo sapien
ctagggcacctaatgattagaaaggaatttact

SEQ ID NO: 465185 - DNA, 33 bp, Homo sapien
agtgaccagggacttaaaggaaaggccagtgag

SEQ ID NO: 465186 - DNA, 33 bp, Homo sapien
agtgaccagggacttacaggaaaggccagtgag

SEQ ID NO: 465187 - DNA, 33 bp, Homo sapien
cctgcctccgccaaaactgtcgagtgttctgtt

SEQ ID NO: 465188 - DNA, 33 bp, Homo sapien
cctgcctccgccaaaagtgtcgagtgttctgtt

SEQ ID NO: 465189 - DNA, 33 bp, Homo sapien
ccttacctatattgcactaaaacacaggtttcc

SEQ ID NO: 465190 - DNA, 33 bp, Homo sapien
ccttacctatattgcattaaaacacaggtttcc

SEQ ID NO: 465191 - DNA, 33 bp, Homo sapien
cttcaaaaccagagccacccccagtgcacccat

SEQ ID NO: 465192 - DNA, 33 bp, Homo sapien
cttcaaaaccagagccgcccccagtgcacccat

SEQ ID NO: 465193 - DNA, 33 bp, Homo sapien
ttgtgggatcctcttgaacaacagtgctcagga

SEQ ID NO: 465194 - DNA, 33 bp, Homo sapien
ttgtgggatcctcttggacaacagtgctcagga

SEQ ID NO: 465195 - DNA, 33 bp, Homo sapien
tctccagggtccagacacctccactgaaggaca

SEQ ID NO: 465196 - DNA, 33 bp, Homo sapien
tctccagggtccagacgcctccactgaaggaca

SEQ ID NO: 465197 - DNA, 33 bp, Homo sapien
tgtccgttcgataggcaaggtctttacaatgtg

SEQ ID NO: 465198 - DNA, 33 bp, Homo sapien
tgtccgttcgataggcgaggtctttacaatgtg

SEQ ID NO: 465199 - DNA, 33 bp, Homo sapien
ttccgtgtatcagaacaggacgtgtacatgaag

SEQ ID NO: 465200 - DNA, 33 bp, Homo sapien
ttccgtgtatcagaacgggacgtgtacatgaag

SEQ ID NO: 465201 - DNA, 33 bp, Homo sapien
acgcgggggcttgggaaactaaataacgtgacg

SEQ ID NO: 465202 - DNA, 33 bp, Homo sapien
acgcgggggcttgggagactaaataacgtgacg

SEQ ID NO: 465203 - DNA, 33 bp, Homo sapien
accaaaaatggctgacagtatttgctgcccata

SEQ ID NO: 465204 - DNA, 33 bp, Homo sapien
accaaaaatggctgacggtatttgctgcccata

SEQ ID NO: 465205 - DNA, 33 bp, Homo sapien
gaattttccataaagcaatagatatcaggtttg

SEQ ID NO: 465206 - DNA, 33 bp, Homo sapien
gaattttccataaagcgatagatatcaggtttg

SEQ ID NO: 465207 - DNA, 33 bp, Homo sapien
caatgttaaaaccacaatgtggaggaatcaatg

SEQ ID NO: 465208 - DNA, 33 bp, Homo sapien
caatgttaaaaccacagtgtggaggaatcaatg

SEQ ID NO: 465209 - DNA, 33 bp, Homo sapien
acgtattgtttagtaacgtagtgcggtgctaaa

SEQ ID NO: 465210 - DNA, 33 bp, Homo sapien
acgtattgtttagtaatgtagtgcggtgctaaa

SEQ ID NO: 465211 - DNA, 33 bp, Homo sapien
tgcaacttcataggtgcatctagccttgaactt

SEQ ID NO: 465212 - DNA, 33 bp, Homo sapien
tgcaacttcataggtgtatctagccttgaactt

SEQ ID NO: 465213 - DNA, 33 bp, Homo sapien
tgaaggtgttttgctcccagctatttagcggca

SEQ ID NO: 465214 - DNA, 33 bp, Homo sapien
tgaaggtgttttgctcgcagctatttagcggca

SEQ ID NO: 465215 - DNA, 33 bp, Homo sapien
aggcagtttcacctgacggtttccgatgatgct

SEQ ID NO: 465216 - DNA, 33 bp, Homo sapien
aggcagtttcacctgatggtttccgatgatgct

SEQ ID NO: 465217 - DNA, 33 bp, Homo sapien
catgctccagataaaaacaaactagaagtatgt

SEQ ID NO: 465218 - DNA, 33 bp, Homo sapien
catgctccagataaaagcaaactagaagtatgt

SEQ ID NO: 465219 - DNA, 33 bp, Homo sapien
aatgaaatcatcggtaaagaccctcacgcaggg

SEQ ID NO: 465220 - DNA, 33 bp, Homo sapien
aatgaaatcatcggtacagaccctcacgcaggg

SEQ ID NO: 465221 - DNA, 33 bp, Homo sapien
acaaggtaaaggaagacgatcttgtgttcccag

SEQ ID NO: 465222 - DNA, 33 bp, Homo sapien
acaaggtaaaggaagatgatcttgtgttcccag

SEQ ID NO: 465223 - DNA, 33 bp, Homo sapien
agcttttaatgaagcacagagctgaagcagtca

SEQ ID NO: 465224 - DNA, 33 bp, Homo sapien
agcttttaatgaagcatagagctgaagcagtca

SEQ ID NO: 465225 - DNA, 33 bp, Homo sapien
tctaggtgatgccacaatcaaccgaggtcacca

SEQ ID NO: 465226 - DNA, 33 bp, Homo sapien
tctaggtgatgccacagtcaaccgaggtcacca

SEQ ID NO: 465227 - DNA, 33 bp, Homo sapien
tggagcactgagtctgcaggcagaggagaaagg

SEQ ID NO: 465228 - DNA, 33 bp, Homo sapien
tggagcactgagtctgtaggcagaggagaaagg

SEQ ID NO: 465229 - DNA, 33 bp, Homo sapien
ccttaaactgatcagcaaggcctctccgttgtt

SEQ ID NO: 465230 - DNA, 33 bp, Homo sapien
ccttaaactgatcagcgaggcctctccgttgtt

SEQ ID NO: 465231 - DNA, 33 bp, Homo sapien
aggtcccttcatggaaacaggaaaacaaacatg

SEQ ID NO: 465232 - DNA, 33 bp, Homo sapien
aggtcccttcatggaagcaggaaaacaaacatg

SEQ ID NO: 465233 - DNA, 33 bp, Homo sapien
tattgcatgtaccctgcaaatatacagctatta

SEQ ID NO: 465234 - DNA, 33 bp, Homo sapien
tattgcatgtaccctggaaatatacagctatta

SEQ ID NO: 465235 - DNA, 33 bp, Homo sapien
acaatatgtaaagacaccaaattaagtgaaaat

SEQ ID NO: 465236 - DNA, 33 bp, Homo sapien
acaatatgtaaagacagcaaattaagtgaaaat

SEQ ID NO: 465237 - DNA, 33 bp, Homo sapien
caaatggaattgtacaaaagtggagagaacggg

SEQ ID NO: 465238 - DNA, 33 bp, Homo sapien
caaatggaattgtacacaagtggagagaacggg

SEQ ID NO: 465239 - DNA, 33 bp, Homo sapien
tgattagtcttcctgaccaacagtagaccttca

SEQ ID NO: 465240 - DNA, 33 bp, Homo sapien
tgattagtcttcctgatcaacagtagaccttca

SEQ ID NO: 465241 - DNA, 33 bp, Homo sapien
caaattgatgtcattacaaaaagttagtgtaag

SEQ ID NO: 465242 - DNA, 33 bp, Homo sapien
caaattgatgtcattataaaaagttagtgtaag

SEQ ID NO: 465243 - DNA, 33 bp, Homo sapien
cttttattcagagtgaaatgtagatttaattta

SEQ ID NO: 465244 - DNA, 33 bp, Homo sapien
cttttattcagagtgatatgtagatttaattta

SEQ ID NO: 465245 - DNA, 33 bp, Homo sapien
agcataagtcacccgaatccctgtgctcccagc

SEQ ID NO: 465246 - DNA, 33 bp, Homo sapien
agcataagtcacccgagtccctgtgctcccagc

SEQ ID NO: 465247 - DNA, 33 bp, Homo sapien
aaagataccgtcaataagaggattataaagctc

SEQ ID NO: 465248 - DNA, 33 bp, Homo sapien
aaagataccgtcaataggaggattataaagctc

SEQ ID NO: 465249 - DNA, 33 bp, Homo sapien
agggcctcgaaactcaagtgaagttcggtgtca

SEQ ID NO: 465250 - DNA, 33 bp, Homo sapien
agggcctcgaaactcaggtgaagttcggtgtca

SEQ ID NO: 465251 - DNA, 33 bp, Homo sapien
tttactgcacctcttccacgtgtagctatgttt

SEQ ID NO: 465252 - DNA, 33 bp, Homo sapien
tttactgcacctcttctacgtgtagctatgttt

SEQ ID NO: 465253 - DNA, 33 bp, Homo sapien
ttcagctctcagaaaccacacgcttgttacggc

SEQ ID NO: 465254 - DNA, 33 bp, Homo sapien
ttcagctctcagaaactacacgcttgttacggc

SEQ ID NO: 465255 - DNA, 33 bp, Homo sapien
tgcttggggctgacgacgagggtgaccaagacc

SEQ ID NO: 465256 - DNA, 33 bp, Homo sapien
tgcttggggctgacgaggagggtgaccaagacc

SEQ ID NO: 465257 - DNA, 33 bp, Homo sapien
tcctcagtccattccacgaccagtctcaggaga

SEQ ID NO: 465258 - DNA, 33 bp, Homo sapien
tcctcagtccattccatgaccagtctcaggaga

SEQ ID NO: 465259 - DNA, 33 bp, Homo sapien
actcggaaatctggagaagcaattttctggaat

SEQ ID NO: 465260 - DNA, 33 bp, Homo sapien
actcggaaatctggaggagcaattttctggaat

SEQ ID NO: 465261 - DNA, 33 bp, Homo sapien
cagttcctcactcaaaaacaaaaccgagccgag

SEQ ID NO: 465262 - DNA, 33 bp, Homo sapien
cagttcctcactcaaacacaaaaccgagccgag

SEQ ID NO: 465263 - DNA, 33 bp, Homo sapien
cgtccctgcatttagacgcgaatgaggtagaaa

SEQ ID NO: 465264 - DNA, 33 bp, Homo sapien
cgtccctgcatttagaggcgaatgaggtagaaa

SEQ ID NO: 465265 - DNA, 33 bp, Homo sapien
aggaagatagaataagacgctctggatgaaaat

SEQ ID NO: 465266 - DNA, 33 bp, Homo sapien
aggaagatagaataaggcgctctggatgaaaat

SEQ ID NO: 465267 - DNA, 33 bp, Homo sapien
gccagttacaacaaaaactacatcttcaagtca

SEQ ID NO: 465268 - DNA, 33 bp, Homo sapien
gccagttacaacaaaatctacatcttcaagtca

SEQ ID NO: 465269 - DNA, 33 bp, Homo sapien
tctcctgtgggccatcagatctaagttatgcaa

SEQ ID NO: 465270 - DNA, 33 bp, Homo sapien
tctcctgtgggccatcggatctaagttatgcaa

SEQ ID NO: 465271 - DNA, 33 bp, Homo sapien
gaagacagcagggtcaacatagctttggagcat

SEQ ID NO: 465272 - DNA, 33 bp, Homo sapien
gaagacagcagggtcatcatagctttggagcat

SEQ ID NO: 465273 - DNA, 33 bp, Homo sapien
tttatccactcactgaagttatttatccacaat

SEQ ID NO: 465274 - DNA, 33 bp, Homo sapien
tttatccactcactgaggttatttatccacaat

SEQ ID NO: 465275 - DNA, 33 bp, Homo sapien
ttaccaactgtcacataaaagttatatatgttg

SEQ ID NO: 465276 - DNA, 33 bp, Homo sapien
ttaccaactgtcacatgaaagttatatatgttg

SEQ ID NO: 465277 - DNA, 33 bp, Homo sapien
tcccttattgaacacccatttttaaatatctgg

SEQ ID NO: 465278 - DNA, 33 bp, Homo sapien
tcccttattgaacacctatttttaaatatctgg

SEQ ID NO: 465279 - DNA, 33 bp, Homo sapien
tctgtgatgcggctgacccaggcacacaggatt

SEQ ID NO: 465280 - DNA, 33 bp, Homo sapien
tctgtgatgcggctgatccaggcacacaggatt

SEQ ID NO: 465281 - DNA, 33 bp, Homo sapien
actctccacgacatgacatttgcaatgcccaac

SEQ ID NO: 465282 - DNA, 33 bp, Homo sapien
actctccacgacatgatatttgcaatgcccaac

SEQ ID NO: 465283 - DNA, 33 bp, Homo sapien
tgatttttgaaacaacagatgtgataaaccaag

SEQ ID NO: 465284 - DNA, 33 bp, Homo sapien
tgatttttgaaacaacggatgtgataaaccaag

SEQ ID NO: 465285 - DNA, 33 bp, Homo sapien
gggaaagacaggaagaatattttaagacattta

SEQ ID NO: 465286 - DNA, 33 bp, Homo sapien
gggaaagacaggaagagtattttaagacattta

SEQ ID NO: 465287 - DNA, 33 bp, Homo sapien
tttctttatagccaaagctgtttaatccaattt

SEQ ID NO: 465288 - DNA, 33 bp, Homo sapien
tttctttatagccaaatctgtttaatccaattt

SEQ ID NO: 465289 - DNA, 33 bp, Homo sapien
gccaggaaattccccaaacagatttatatttca

SEQ ID NO: 465290 - DNA, 33 bp, Homo sapien
gccaggaaattccccagacagatttatatttca

SEQ ID NO: 465291 - DNA, 33 bp, Homo sapien
ctgctggaatggacaaaaatgctttaaaacaaa

SEQ ID NO: 465292 - DNA, 33 bp, Homo sapien
ctgctggaatggacaagaatgctttaaaacaaa

SEQ ID NO: 465293 - DNA, 33 bp, Homo sapien
attccacttgaaccaaacagcttcactgagcat

SEQ ID NO: 465294 - DNA, 33 bp, Homo sapien
attccacttgaaccaagcagcttcactgagcat

SEQ ID NO: 465295 - DNA, 33 bp, Homo sapien
tgagagaaaaactgccacaatgccttccaacaa

SEQ ID NO: 465296 - DNA, 33 bp, Homo sapien
tgagagaaaaactgccgcaatgccttccaacaa

SEQ ID NO: 465297 - DNA, 33 bp, Homo sapien
gcctcacttcctatagccacagaattgagcctc

SEQ ID NO: 465298 - DNA, 33 bp, Homo sapien
gcctcacttcctatagtcacagaattgagcctc

SEQ ID NO: 465299 - DNA, 33 bp, Homo sapien
ctggtatcaggctctaaaatctctccataggct

SEQ ID NO: 465300 - DNA, 33 bp, Homo sapien
ctggtatcaggctctacaatctctccataggct

SEQ ID NO: 465301 - DNA, 33 bp, Homo sapien
cagtgagcaatggtgacaatcagcctcccgctg

SEQ ID NO: 465302 - DNA, 33 bp, Homo sapien
cagtgagcaatggtgagaatcagcctcccgctg

SEQ ID NO: 465303 - DNA, 33 bp, Homo sapien
gatatttgcccccacacgggttaatgaagtcaa

SEQ ID NO: 465304 - DNA, 33 bp, Homo sapien
gatatttgcccccacatgggttaatgaagtcaa

SEQ ID NO: 465305 - DNA, 33 bp, Homo sapien
gatctaaaatataaccagaagaaccacaggttt

SEQ ID NO: 465306 - DNA, 33 bp, Homo sapien
gatctaaaatataaccggaagaaccacaggttt

SEQ ID NO: 465307 - DNA, 33 bp, Homo sapien
ttgggccctcccaggaactgacagacttttaga

SEQ ID NO: 465308 - DNA, 33 bp, Homo sapien
ttgggccctcccaggacctgacagacttttaga

SEQ ID NO: 465309 - DNA, 33 bp, Homo sapien
tgtacctgttccttcacggagccgaactcctgc

SEQ ID NO: 465310 - DNA, 33 bp, Homo sapien
tgtacctgttccttcatggagccgaactcctgc

SEQ ID NO: 465311 - DNA, 33 bp, Homo sapien
acagggttcaaacaaccggctacgtctgagtgg

SEQ ID NO: 465312 - DNA, 33 bp, Homo sapien
acagggttcaaacaactggctacgtctgagtgg

SEQ ID NO: 465313 - DNA, 33 bp, Homo sapien
gacttcagtctggtgaatcaatattacgttgcg

SEQ ID NO: 465314 - DNA, 33 bp, Homo sapien
gacttcagtctggtgagtcaatattacgttgcg

SEQ ID NO: 465315 - DNA, 33 bp, Homo sapien
catgggcatcagtggcaaatcggatgctgtgat

SEQ ID NO: 465316 - DNA, 33 bp, Homo sapien
catgggcatcagtggcgaatcggatgctgtgat

SEQ ID NO: 465317 - DNA, 33 bp, Homo sapien
atcagtctgaattgcacggaaaaaaaaacctca

SEQ ID NO: 465318 - DNA, 33 bp, Homo sapien
atcagtctgaattgcatggaaaaaaaaacctca

SEQ ID NO: 465319 - DNA, 33 bp, Homo sapien
agactgcccatcagtgaaaagcaacagagttga

SEQ ID NO: 465320 - DNA, 33 bp, Homo sapien
agactgcccatcagtgtaaagcaacagagttga

SEQ ID NO: 465321 - DNA, 33 bp, Homo sapien
aatcaggggaaagggacgcaactgaaagcatgc

SEQ ID NO: 465322 - DNA, 33 bp, Homo sapien
aatcaggggaaagggatgcaactgaaagcatgc

SEQ ID NO: 465323 - DNA, 33 bp, Homo sapien
atgccaatggatacaactccaagtcaaaggtca

SEQ ID NO: 465324 - DNA, 33 bp, Homo sapien
atgccaatggatacaagtccaagtcaaaggtca

SEQ ID NO: 465325 - DNA, 33 bp, Homo sapien
aggcagctgcttgcacaactcgtcttccagctt

SEQ ID NO: 465326 - DNA, 33 bp, Homo sapien
aggcagctgcttgcacgactcgtcttccagctt

SEQ ID NO: 465327 - DNA, 33 bp, Homo sapien
ctggctatcttcggaacgtgtatttatcaagcc

SEQ ID NO: 465328 - DNA, 33 bp, Homo sapien
ctggctatcttcggaatgtgtatttatcaagcc

SEQ ID NO: 465329 - DNA, 33 bp, Homo sapien
ggtattctcagatatgaaggagtaggttcgtga

SEQ ID NO: 465330 - DNA, 33 bp, Homo sapien
ggtattctcagatatggaggagtaggttcgtga

SEQ ID NO: 465331 - DNA, 33 bp, Homo sapien
actctccctacaccaacgtgccctttgctcctc

SEQ ID NO: 465332 - DNA, 33 bp, Homo sapien
actctccctacaccaatgtgccctttgctcctc

SEQ ID NO: 465333 - DNA, 33 bp, Homo sapien
atgtatatgttttatgcagcagcagggcataga

SEQ ID NO: 465334 - DNA, 33 bp, Homo sapien
atgtatatgttttatgtagcagcagggcataga

SEQ ID NO: 465335 - DNA, 33 bp, Homo sapien
tgtattacctgtcccaatggatttgattagcta

SEQ ID NO: 465336 - DNA, 33 bp, Homo sapien
tgtattacctgtcccagtggatttgattagcta

SEQ ID NO: 465337 - DNA, 33 bp, Homo sapien
gagataatcatggagccgaaattccccagtgcc

SEQ ID NO: 465338 - DNA, 33 bp, Homo sapien
gagataatcatggagctgaaattccccagtgcc

SEQ ID NO: 465339 - DNA, 33 bp, Homo sapien
tctccacactgacaacacccattctgttcagga

SEQ ID NO: 465340 - DNA, 33 bp, Homo sapien
tctccacactgacaacgcccattctgttcagga

SEQ ID NO: 465341 - DNA, 33 bp, Homo sapien
cctcccaccatcagcaacgcgaatggtttgatt

SEQ ID NO: 465342 - DNA, 33 bp, Homo sapien
cctcccaccatcagcagcgcgaatggtttgatt

SEQ ID NO: 465343 - DNA, 33 bp, Homo sapien
aaagaacacaggagacactttcacatggggagt

SEQ ID NO: 465344 - DNA, 33 bp, Homo sapien
aaagaacacaggagacgctttcacatggggagt

SEQ ID NO: 465345 - DNA, 33 bp, Homo sapien
ggtttgaacaacacaaatgtattagctggcaat

SEQ ID NO: 465346 - DNA, 33 bp, Homo sapien
ggtttgaacaacacaactgtattagctggcaat

SEQ ID NO: 465347 - DNA, 33 bp, Homo sapien
tgttatgacagcagaaatagcctgatacactgt

SEQ ID NO: 465348 - DNA, 33 bp, Homo sapien
tgttatgacagcagaagtagcctgatacactgt

SEQ ID NO: 465349 - DNA, 33 bp, Homo sapien
cttcgaagaatatttacgagcaatcgcaggggt

SEQ ID NO: 465350 - DNA, 33 bp, Homo sapien
cttcgaagaatatttaggagcaatcgcaggggt

SEQ ID NO: 465351 - DNA, 33 bp, Homo sapien
gaccggggccttttccaagctgctgtagctcat

SEQ ID NO: 465352 - DNA, 33 bp, Homo sapien
gaccggggccttttccgagctgctgtagctcat

SEQ ID NO: 465353 - DNA, 33 bp, Homo sapien
gatttaaatgagaaacacagatgttcatccagg

SEQ ID NO: 465354 - DNA, 33 bp, Homo sapien
gatttaaatgagaaacgcagatgttcatccagg

SEQ ID NO: 465355 - DNA, 33 bp, Homo sapien
acatatttggtttctccgacaatattctcacaa

SEQ ID NO: 465356 - DNA, 33 bp, Homo sapien
acatatttggtttctctgacaatattctcacaa

SEQ ID NO: 465357 - DNA, 33 bp, Homo sapien
gtgcccctgatctaggaaatctgtgaaactttg

SEQ ID NO: 465358 - DNA, 33 bp, Homo sapien
gtgcccctgatctagggaatctgtgaaactttg

SEQ ID NO: 465359 - DNA, 33 bp, Homo sapien
tatccgctgcctctaacggtcagaagaaataag

SEQ ID NO: 465360 - DNA, 33 bp, Homo sapien
tatccgctgcctctaatggtcagaagaaataag

SEQ ID NO: 465361 - DNA, 33 bp, Homo sapien
gtgggaggataatgacacttattgaggtgtggc

SEQ ID NO: 465362 - DNA, 33 bp, Homo sapien
gtgggaggataatgacgcttattgaggtgtggc

SEQ ID NO: 465363 - DNA, 33 bp, Homo sapien
agacctggcttctgaacgcccctgcacagtgtt

SEQ ID NO: 465364 - DNA, 33 bp, Homo sapien
agacctggcttctgaatgcccctgcacagtgtt

SEQ ID NO: 465365 - DNA, 33 bp, Homo sapien
acacaaaaacagttacagaagaatgcagtgacc

SEQ ID NO: 465366 - DNA, 33 bp, Homo sapien
acacaaaaacagttacggaagaatgcagtgacc

SEQ ID NO: 465367 - DNA, 33 bp, Homo sapien
ttttttttgcacatacaatctcactctgttgcc

SEQ ID NO: 465368 - DNA, 33 bp, Homo sapien
ttttttttgcacatacgatctcactctgttgcc

SEQ ID NO: 465369 - DNA, 33 bp, Homo sapien
acttgtggaatagaaacgcaacagagctcagag

SEQ ID NO: 465370 - DNA, 33 bp, Homo sapien
acttgtggaatagaaatgcaacagagctcagag

SEQ ID NO: 465371 - DNA, 33 bp, Homo sapien
acacaaatttcatcctcactggttctgtagcta

SEQ ID NO: 465372 - DNA, 33 bp, Homo sapien
acacaaatttcatccttactggttctgtagcta

SEQ ID NO: 465373 - DNA, 33 bp, Homo sapien
gctgtgctactgagacagggactagacagatac

SEQ ID NO: 465374 - DNA, 33 bp, Homo sapien
gctgtgctactgagacggggactagacagatac

SEQ ID NO: 465375 - DNA, 33 bp, Homo sapien
gagcatctagacgcatcatcctgagagtgcccg

SEQ ID NO: 465376 - DNA, 33 bp, Homo sapien
gagcatctagacgcattatcctgagagtgcccg

SEQ ID NO: 465377 - DNA, 33 bp, Homo sapien
acgttttctttgttcacctctctatgcaaccct

SEQ ID NO: 465378 - DNA, 33 bp, Homo sapien
acgttttctttgttcatctctctatgcaaccct

SEQ ID NO: 465379 - DNA, 33 bp, Homo sapien
gagcagggcaagactacaggagggtatttccag

SEQ ID NO: 465380 - DNA, 33 bp, Homo sapien
gagcagggcaagactataggagggtatttccag

SEQ ID NO: 465381 - DNA, 33 bp, Homo sapien
agagaaataataagcactgagtaggaccaaagg

SEQ ID NO: 465382 - DNA, 33 bp, Homo sapien
agagaaataataagcagtgagtaggaccaaagg

SEQ ID NO: 465383 - DNA, 33 bp, Homo sapien
aggagtgggcttgtcacgaaaccaaaaaccaaa

SEQ ID NO: 465384 - DNA, 33 bp, Homo sapien
aggagtgggcttgtcatgaaaccaaaaaccaaa

SEQ ID NO: 465385 - DNA, 33 bp, Homo sapien
ctccttgatgaacatacatgcaaaagtcctcaa

SEQ ID NO: 465386 - DNA, 33 bp, Homo sapien
ctccttgatgaacatagatgcaaaagtcctcaa

SEQ ID NO: 465387 - DNA, 33 bp, Homo sapien
ctattccaaaacattgaagaagaaggattcctc

SEQ ID NO: 465388 - DNA, 33 bp, Homo sapien
ctattccaaaacattgcagaagaaggattcctc

SEQ ID NO: 465389 - DNA, 33 bp, Homo sapien
ttctaaggggatgacaacaacgaagatcaacca

SEQ ID NO: 465390 - DNA, 33 bp, Homo sapien
ttctaaggggatgacagcaacgaagatcaacca

SEQ ID NO: 465391 - DNA, 33 bp, Homo sapien
cctctgaatggagacaagattgaaagacttcac

SEQ ID NO: 465392 - DNA, 33 bp, Homo sapien
cctctgaatggagacaggattgaaagacttcac

SEQ ID NO: 465393 - DNA, 33 bp, Homo sapien
ggaatcagttaaatccagcgaactttcccacag

SEQ ID NO: 465394 - DNA, 33 bp, Homo sapien
ggaatcagttaaatccggcgaactttcccacag

SEQ ID NO: 465395 - DNA, 33 bp, Homo sapien
tgatttctacagagctcacattttactacctga

SEQ ID NO: 465396 - DNA, 33 bp, Homo sapien
tgatttctacagagcttacattttactacctga

SEQ ID NO: 465397 - DNA, 33 bp, Homo sapien
ggcattgcagaggtgaagctattgaatcacact

SEQ ID NO: 465398 - DNA, 33 bp, Homo sapien
ggcattgcagaggtgacgctattgaatcacact

SEQ ID NO: 465399 - DNA, 33 bp, Homo sapien
tactaattactatccaaatctactccaaaccag

SEQ ID NO: 465400 - DNA, 33 bp, Homo sapien
tactaattactatccagatctactccaaaccag

SEQ ID NO: 465401 - DNA, 33 bp, Homo sapien
gacagacagtccagcaagtggaaacctttaagg

SEQ ID NO: 465402 - DNA, 33 bp, Homo sapien
gacagacagtccagcaggtggaaacctttaagg

SEQ ID NO: 465403 - DNA, 33 bp, Homo sapien
acttggacatcatccacgtttactggccttaaa

SEQ ID NO: 465404 - DNA, 33 bp, Homo sapien
acttggacatcatccatgtttactggccttaaa

SEQ ID NO: 465405 - DNA, 33 bp, Homo sapien
taagttatctaatccacgtagagtgtatgtagc

SEQ ID NO: 465406 - DNA, 33 bp, Homo sapien
taagttatctaatccatgtagagtgtatgtagc

SEQ ID NO: 465407 - DNA, 33 bp, Homo sapien
gaaacacccccactcacactgccaaaatcaaac

SEQ ID NO: 465408 - DNA, 33 bp, Homo sapien
gaaacacccccactcatactgccaaaatcaaac

SEQ ID NO: 465409 - DNA, 33 bp, Homo sapien
gatgatgagtaatgcacggtctgagtagtgctt

SEQ ID NO: 465410 - DNA, 33 bp, Homo sapien
gatgatgagtaatgcagggtctgagtagtgctt

SEQ ID NO: 465411 - DNA, 33 bp, Homo sapien
actgatcaggacaacactgctgattagcggaaa

SEQ ID NO: 465412 - DNA, 33 bp, Homo sapien
actgatcaggacaacattgctgattagcggaaa

SEQ ID NO: 465413 - DNA, 33 bp, Homo sapien
cgccagaactatggagaactcatgtgtcaactg

SEQ ID NO: 465414 - DNA, 33 bp, Homo sapien
cgccagaactatggaggactcatgtgtcaactg

SEQ ID NO: 465415 - DNA, 33 bp, Homo sapien
atgatgcctaacagggaaaagccagagtacttg

SEQ ID NO: 465416 - DNA, 33 bp, Homo sapien
atgatgcctaacaggggaaagccagagtacttg

SEQ ID NO: 465417 - DNA, 33 bp, Homo sapien
taattgtagcttcctaagatgtgctttaattga

SEQ ID NO: 465418 - DNA, 33 bp, Homo sapien
taattgtagcttcctacgatgtgctttaattga

SEQ ID NO: 465419 - DNA, 33 bp, Homo sapien
agccaagcttaaagacaaccagaaagtccatcc

SEQ ID NO: 465420 - DNA, 33 bp, Homo sapien
agccaagcttaaagacgaccagaaagtccatcc

SEQ ID NO: 465421 - DNA, 33 bp, Homo sapien
cccagtggtatatgaaagttccctcacgtctga

SEQ ID NO: 465422 - DNA, 33 bp, Homo sapien
cccagtggtatatgaaggttccctcacgtctga

SEQ ID NO: 465423 - DNA, 33 bp, Homo sapien
cagaacagaggaccccaaatcagccccatcatt

SEQ ID NO: 465424 - DNA, 33 bp, Homo sapien
cagaacagaggaccccgaatcagccccatcatt

SEQ ID NO: 465425 - DNA, 33 bp, Homo sapien
gaaacactggcaaggacccaagtaggcaactga

SEQ ID NO: 465426 - DNA, 33 bp, Homo sapien
gaaacactggcaaggatccaagtaggcaactga

SEQ ID NO: 465427 - DNA, 33 bp, Homo sapien
ctatgagtcccgcagacatgaaaagcacacaag

SEQ ID NO: 465428 - DNA, 33 bp, Homo sapien
ctatgagtcccgcagatatgaaaagcacacaag

SEQ ID NO: 465429 - DNA, 33 bp, Homo sapien
gagaataaaggaaataagagcagaaatacatga

SEQ ID NO: 465430 - DNA, 33 bp, Homo sapien
gagaataaaggaaatacgagcagaaatacatga

SEQ ID NO: 465431 - DNA, 33 bp, Homo sapien
catggtaccttaggatcactggccatgtcgtcc

SEQ ID NO: 465432 - DNA, 33 bp, Homo sapien
catggtaccttaggattactggccatgtcgtcc

SEQ ID NO: 465433 - DNA, 33 bp, Homo sapien
gaatatgaaatacagccagaatagagataaaaa

SEQ ID NO: 465434 - DNA, 33 bp, Homo sapien
gaatatgaaatacagctagaatagagataaaaa

SEQ ID NO: 465435 - DNA, 33 bp, Homo sapien
gggtgcacagacttccaaggagttgcaaccaag

SEQ ID NO: 465436 - DNA, 33 bp, Homo sapien
gggtgcacagacttcccaggagttgcaaccaag

SEQ ID NO: 465437 - DNA, 33 bp, Homo sapien
gaaggtgtttattatcccgagtcataaacaaca

SEQ ID NO: 465438 - DNA, 33 bp, Homo sapien
gaaggtgtttattatctcgagtcataaacaaca

SEQ ID NO: 465439 - DNA, 33 bp, Homo sapien
ttgtcattgttcactgaaagaaaatgcatgctc

SEQ ID NO: 465440 - DNA, 33 bp, Homo sapien
ttgtcattgttcactggaagaaaatgcatgctc

SEQ ID NO: 465441 - DNA, 33 bp, Homo sapien
tgctgaggtcagcacaggaataaaagttttagc

SEQ ID NO: 465442 - DNA, 33 bp, Homo sapien
tgctgaggtcagcacatgaataaaagttttagc

SEQ ID NO: 465443 - DNA, 33 bp, Homo sapien
ctcaccattgcctcccacatttactctcacaca

SEQ ID NO: 465444 - DNA, 33 bp, Homo sapien
ctcaccattgcctcccgcatttactctcacaca

SEQ ID NO: 465445 - DNA, 33 bp, Homo sapien
atgaaacaggatgaaacgtaggtgcccgcagct

SEQ ID NO: 465446 - DNA, 33 bp, Homo sapien
atgaaacaggatgaaatgtaggtgcccgcagct

SEQ ID NO: 465447 - DNA, 33 bp, Homo sapien
gtttcaggagggttccaagtggtttcctctggc

SEQ ID NO: 465448 - DNA, 33 bp, Homo sapien
gtttcaggagggttccgagtggtttcctctggc

SEQ ID NO: 465449 - DNA, 33 bp, Homo sapien
gcaagcaagtacaagacgagagaaaatacattt

SEQ ID NO: 465450 - DNA, 33 bp, Homo sapien
gcaagcaagtacaagatgagagaaaatacattt

SEQ ID NO: 465451 - DNA, 33 bp, Homo sapien
gtgttgaggaggaaaacggtatgcctcccacat

SEQ ID NO: 465452 - DNA, 33 bp, Homo sapien
gtgttgaggaggaaaatggtatgcctcccacat

SEQ ID NO: 465453 - DNA, 33 bp, Homo sapien
ctttccagctcacctcacatcctgggtcccaca

SEQ ID NO: 465454 - DNA, 33 bp, Homo sapien
ctttccagctcacctcgcatcctgggtcccaca

SEQ ID NO: 465455 - DNA, 33 bp, Homo sapien
gcaaaacacacatcaaaattaaaacagctgaca

SEQ ID NO: 465456 - DNA, 33 bp, Homo sapien
gcaaaacacacatcaatattaaaacagctgaca

SEQ ID NO: 465457 - DNA, 33 bp, Homo sapien
ttcagtgagaaccatgaatttgcctttctctac

SEQ ID NO: 465458 - DNA, 33 bp, Homo sapien
ttcagtgagaaccatgcatttgcctttctctac

SEQ ID NO: 465459 - DNA, 33 bp, Homo sapien
tgattttggaagaaacaagccttaactgcacag

SEQ ID NO: 465460 - DNA, 33 bp, Homo sapien
tgattttggaagaaaccagccttaactgcacag

SEQ ID NO: 465461 - DNA, 33 bp, Homo sapien
tgggcatcgcgcttcaatctagggggaaagctg

SEQ ID NO: 465462 - DNA, 33 bp, Homo sapien
tgggcatcgcgcttcagtctagggggaaagctg

SEQ ID NO: 465463 - DNA, 33 bp, Homo sapien
gtccttaagatcaaaacgtgagatttctctgag

SEQ ID NO: 465464 - DNA, 33 bp, Homo sapien
gtccttaagatcaaaatgtgagatttctctgag

SEQ ID NO: 465465 - DNA, 33 bp, Homo sapien
aagttttcattcataagctcaatcttattcaac

SEQ ID NO: 465466 - DNA, 33 bp, Homo sapien
aagttttcattcataatctcaatcttattcaac

SEQ ID NO: 465467 - DNA, 33 bp, Homo sapien
cttgatatcatgccagaagtgtttatcatataa

SEQ ID NO: 465468 - DNA, 33 bp, Homo sapien
cttgatatcatgccaggagtgtttatcatataa

SEQ ID NO: 465469 - DNA, 33 bp, Homo sapien
atgtactttacatccactcacctcattctgaat

SEQ ID NO: 465470 - DNA, 33 bp, Homo sapien
atgtactttacatccattcacctcattctgaat

SEQ ID NO: 465471 - DNA, 33 bp, Homo sapien
atttgaactctgagctgaattttacagatattc

SEQ ID NO: 465472 - DNA, 33 bp, Homo sapien
atttgaactctgagcttaattttacagatattc

SEQ ID NO: 465473 - DNA, 33 bp, Homo sapien
atctaaatacacaaaaccaagtatctgtgtatc

SEQ ID NO: 465474 - DNA, 33 bp, Homo sapien
atctaaatacacaaaagcaagtatctgtgtatc

SEQ ID NO: 465475 - DNA, 33 bp, Homo sapien
ttagatctctacaaacacccagttctctggcat

SEQ ID NO: 465476 - DNA, 33 bp, Homo sapien
ttagatctctacaaacgcccagttctctggcat

SEQ ID NO: 465477 - DNA, 33 bp, Homo sapien
gctcgtccgctccgccacgaatccgtttcccca

SEQ ID NO: 465478 - DNA, 33 bp, Homo sapien
gctcgtccgctccgccgcgaatccgtttcccca

SEQ ID NO: 465479 - DNA, 33 bp, Homo sapien
cccaaatggtcactgacgtaggaatctatcaaa

SEQ ID NO: 465480 - DNA, 33 bp, Homo sapien
cccaaatggtcactgatgtaggaatctatcaaa

SEQ ID NO: 465481 - DNA, 33 bp, Homo sapien
catccttacctcggcaactacagactcagcttg

SEQ ID NO: 465482 - DNA, 33 bp, Homo sapien
catccttacctcggcagctacagactcagcttg

SEQ ID NO: 465483 - DNA, 33 bp, Homo sapien
tcccaaccaaaactcaggttgaaattcacaggc

SEQ ID NO: 465484 - DNA, 33 bp, Homo sapien
tcccaaccaaaactcatgttgaaattcacaggc

SEQ ID NO: 465485 - DNA, 33 bp, Homo sapien
agtgcacaaagtgtgccatgggcttccagggta

SEQ ID NO: 465486 - DNA, 33 bp, Homo sapien
agtgcacaaagtgtgctatgggcttccagggta

SEQ ID NO: 465487 - DNA, 33 bp, Homo sapien
cttccttttgtgcactcactaggagttaaaagg

SEQ ID NO: 465488 - DNA, 33 bp, Homo sapien
cttccttttgtgcacttactaggagttaaaagg

SEQ ID NO: 465489 - DNA, 33 bp, Homo sapien
aatcacatggtcctaacgtggaacgaggacaag

SEQ ID NO: 465490 - DNA, 33 bp, Homo sapien
aatcacatggtcctaatgtggaacgaggacaag

SEQ ID NO: 465491 - DNA, 33 bp, Homo sapien
ctttgaaaggattttccacagcacttcagagcg

SEQ ID NO: 465492 - DNA, 33 bp, Homo sapien
ctttgaaaggattttcgacagcacttcagagcg

SEQ ID NO: 465493 - DNA, 33 bp, Homo sapien
agtccgagagcagatcacaatgagtggtggctg

SEQ ID NO: 465494 - DNA, 33 bp, Homo sapien
agtccgagagcagatcgcaatgagtggtggctg

SEQ ID NO: 465495 - DNA, 33 bp, Homo sapien
tttgggtgagggatacacacgctgtcaagcaaa

SEQ ID NO: 465496 - DNA, 33 bp, Homo sapien
tttgggtgagggatacgcacgctgtcaagcaaa

SEQ ID NO: 465497 - DNA, 33 bp, Homo sapien
acttgtttttccattacggatggcatttctgca

SEQ ID NO: 465498 - DNA, 33 bp, Homo sapien
acttgtttttccattatggatggcatttctgca

SEQ ID NO: 465499 - DNA, 33 bp, Homo sapien
caatatcaatggaccaaaaagacaataatcata

SEQ ID NO: 465500 - DNA, 33 bp, Homo sapien
caatatcaatggaccataaagacaataatcata

SEQ ID NO: 465501 - DNA, 33 bp, Homo sapien
tctaggttttgggaaaattagaacttcatagga

SEQ ID NO: 465502 - DNA, 33 bp, Homo sapien
tctaggttttgggaaatttagaacttcatagga

SEQ ID NO: 465503 - DNA, 33 bp, Homo sapien
ccgagtgggtagatgacaacagaggactccgtt

SEQ ID NO: 465504 - DNA, 33 bp, Homo sapien
ccgagtgggtagatgagaacagaggactccgtt

SEQ ID NO: 465505 - DNA, 33 bp, Homo sapien
gagatggagtctctaaataagagagcagtgtct

SEQ ID NO: 465506 - DNA, 33 bp, Homo sapien
gagatggagtctctaagtaagagagcagtgtct

SEQ ID NO: 465507 - DNA, 33 bp, Homo sapien
ctgcataacgattccaatcacctgcgtgtccca

SEQ ID NO: 465508 - DNA, 33 bp, Homo sapien
ctgcataacgattccagtcacctgcgtgtccca

SEQ ID NO: 465509 - DNA, 33 bp, Homo sapien
tgactgagttgatggacgctagtggaatggaag

SEQ ID NO: 465510 - DNA, 33 bp, Homo sapien
tgactgagttgatggatgctagtggaatggaag

SEQ ID NO: 465511 - DNA, 33 bp, Homo sapien
catggaagtcaccaacactgagcatttcagtag

SEQ ID NO: 465512 - DNA, 33 bp, Homo sapien
catggaagtcaccaacgctgagcatttcagtag

SEQ ID NO: 465513 - DNA, 33 bp, Homo sapien
ttctatgaggacacaacctccccttgctattga

SEQ ID NO: 465514 - DNA, 33 bp, Homo sapien
ttctatgaggacacaagctccccttgctattga

SEQ ID NO: 465515 - DNA, 33 bp, Homo sapien
gtcagggaagtttgaaatcatttttgagatgtc

SEQ ID NO: 465516 - DNA, 33 bp, Homo sapien
gtcagggaagtttgaagtcatttttgagatgtc

SEQ ID NO: 465517 - DNA, 33 bp, Homo sapien
ttttggtgagatttagaaaataggatgtcaatc

SEQ ID NO: 465518 - DNA, 33 bp, Homo sapien
ttttggtgagatttagcaaataggatgtcaatc

SEQ ID NO: 465519 - DNA, 33 bp, Homo sapien
gaccttcttttctaccaatagaatgggggtggc

SEQ ID NO: 465520 - DNA, 33 bp, Homo sapien
gaccttcttttctaccgatagaatgggggtggc

SEQ ID NO: 465521 - DNA, 33 bp, Homo sapien
atgtggatcccgtcgcagcagacccctgtgctg

SEQ ID NO: 465522 - DNA, 33 bp, Homo sapien
atgtggatcccgtcgcggcagacccctgtgctg

SEQ ID NO: 465523 - DNA, 33 bp, Homo sapien
ggcggcatatgctgaaatacaaaattaacactt

SEQ ID NO: 465524 - DNA, 33 bp, Homo sapien
ggcggcatatgctgaagtacaaaattaacactt

SEQ ID NO: 465525 - DNA, 33 bp, Homo sapien
aattctgctaaggtggcaaaattactgtgcact

SEQ ID NO: 465526 - DNA, 33 bp, Homo sapien
aattctgctaaggtggtaaaattactgtgcact

SEQ ID NO: 465527 - DNA, 33 bp, Homo sapien
ataataatgaaatgtcacagaaaactcaaacac

SEQ ID NO: 465528 - DNA, 33 bp, Homo sapien
ataataatgaaatgtcccagaaaactcaaacac

SEQ ID NO: 465529 - DNA, 33 bp, Homo sapien
caacaagtatccgagacctggaaaggccgcgtg

SEQ ID NO: 465530 - DNA, 33 bp, Homo sapien
caacaagtatccgagagctggaaaggccgcgtg

SEQ ID NO: 465531 - DNA, 33 bp, Homo sapien
taaattactttgaccacgcattgcttagggctg

SEQ ID NO: 465532 - DNA, 33 bp, Homo sapien
taaattactttgaccatgcattgcttagggctg

SEQ ID NO: 465533 - DNA, 33 bp, Homo sapien
aggacgatgtagacacagtgaaggaaacacact

SEQ ID NO: 465534 - DNA, 33 bp, Homo sapien
aggacgatgtagacacggtgaaggaaacacact

SEQ ID NO: 465535 - DNA, 33 bp, Homo sapien
ccaggctgatcacgaggcaccttggaattcaga

SEQ ID NO: 465536 - DNA, 33 bp, Homo sapien
ccaggctgatcacgagtcaccttggaattcaga

SEQ ID NO: 465537 - DNA, 33 bp, Homo sapien
tacgcagatgtgcttcaataatctcgggccttc

SEQ ID NO: 465538 - DNA, 33 bp, Homo sapien
tacgcagatgtgcttcgataatctcgggccttc

SEQ ID NO: 465539 - DNA, 33 bp, Homo sapien
gacattcattgaacaaacaaatgtatttgcaac

SEQ ID NO: 465540 - DNA, 33 bp, Homo sapien
gacattcattgaacaagcaaatgtatttgcaac

SEQ ID NO: 465541 - DNA, 33 bp, Homo sapien
ccacctatctcctccaagtgacaattttcaata

SEQ ID NO: 465542 - DNA, 33 bp, Homo sapien
ccacctatctcctccatgtgacaattttcaata

SEQ ID NO: 465543 - DNA, 33 bp, Homo sapien
gcttttttgcaagctacgtgtgggcaaatgaat

SEQ ID NO: 465544 - DNA, 33 bp, Homo sapien
gcttttttgcaagctatgtgtgggcaaatgaat

SEQ ID NO: 465545 - DNA, 33 bp, Homo sapien
ctgggagagcaacaacaaggaccagagatgcag

SEQ ID NO: 465546 - DNA, 33 bp, Homo sapien
ctgggagagcaacaacgaggaccagagatgcag

SEQ ID NO: 465547 - DNA, 33 bp, Homo sapien
tgttgcacagacttcaggatgaaagggctgacg

SEQ ID NO: 465548 - DNA, 33 bp, Homo sapien
tgttgcacagacttcatgatgaaagggctgacg

SEQ ID NO: 465549 - DNA, 33 bp, Homo sapien
gtacattagattctccactccatgcataagttc

SEQ ID NO: 465550 - DNA, 33 bp, Homo sapien
gtacattagattctccgctccatgcataagttc

SEQ ID NO: 465551 - DNA, 33 bp, Homo sapien
caaggcattaaattgccgatggatgcttcattg

SEQ ID NO: 465552 - DNA, 33 bp, Homo sapien
caaggcattaaattgctgatggatgcttcattg

SEQ ID NO: 465553 - DNA, 33 bp, Homo sapien
aataatgcatcaagtaaaatggaagctgttaca

SEQ ID NO: 465554 - DNA, 33 bp, Homo sapien
aataatgcatcaagtacaatggaagctgttaca

SEQ ID NO: 465555 - DNA, 33 bp, Homo sapien
cgggctatccaagcgcagagtcagtttataagg

SEQ ID NO: 465556 - DNA, 33 bp, Homo sapien
cgggctatccaagcgcggagtcagtttataagg

SEQ ID NO: 465557 - DNA, 33 bp, Homo sapien
tctgaaatgggcgcctcaattgccttccaggga

SEQ ID NO: 465558 - DNA, 33 bp, Homo sapien
tctgaaatgggcgccttaattgccttccaggga

SEQ ID NO: 465559 - DNA, 33 bp, Homo sapien
tcgtgatgtgtcaaccaaaagtttaagcaaaac

SEQ ID NO: 465560 - DNA, 33 bp, Homo sapien
tcgtgatgtgtcaaccgaaagtttaagcaaaac

SEQ ID NO: 465561 - DNA, 33 bp, Homo sapien
actcacagcaaattgtaaatattggaaatggtc

SEQ ID NO: 465562 - DNA, 33 bp, Homo sapien
actcacagcaaattgtgaatattggaaatggtc

SEQ ID NO: 465563 - DNA, 33 bp, Homo sapien
tccagagaattcgtggaaacatacatttgatgc

SEQ ID NO: 465564 - DNA, 33 bp, Homo sapien
tccagagaattcgtgggaacatacatttgatgc

SEQ ID NO: 465565 - DNA, 33 bp, Homo sapien
agccatgggtcattccgaatgcagacagtttgc

SEQ ID NO: 465566 - DNA, 33 bp, Homo sapien
agccatgggtcattcctaatgcagacagtttgc

SEQ ID NO: 465567 - DNA, 33 bp, Homo sapien
agagtcctctgagctacacggcagttgcaggga

SEQ ID NO: 465568 - DNA, 33 bp, Homo sapien
agagtcctctgagctatacggcagttgcaggga

SEQ ID NO: 465569 - DNA, 33 bp, Homo sapien
ggctaataggaagaacaagaattctctggagat

SEQ ID NO: 465570 - DNA, 33 bp, Homo sapien
ggctaataggaagaacgagaattctctggagat

SEQ ID NO: 465571 - DNA, 33 bp, Homo sapien
ttctcataacaattgcagacaggccatcacatc

SEQ ID NO: 465572 - DNA, 33 bp, Homo sapien
ttctcataacaattgcggacaggccatcacatc

SEQ ID NO: 465573 - DNA, 33 bp, Homo sapien
ttatttgtctatggtagctttggtacttaatta

SEQ ID NO: 465574 - DNA, 33 bp, Homo sapien
ttatttgtctatggtatctttggtacttaatta

SEQ ID NO: 465575 - DNA, 33 bp, Homo sapien
aacaagtagtggaaaacaatgatttttctttca

SEQ ID NO: 465576 - DNA, 33 bp, Homo sapien
aacaagtagtggaaaagaatgatttttctttca

SEQ ID NO: 465577 - DNA, 33 bp, Homo sapien
gtaggcttaaagagaaatgtggctaattgttta

SEQ ID NO: 465578 - DNA, 33 bp, Homo sapien
gtaggcttaaagagaagtgtggctaattgttta

SEQ ID NO: 465579 - DNA, 33 bp, Homo sapien
tgctcctgtctcctcaaaagtattccactttgg

SEQ ID NO: 465580 - DNA, 33 bp, Homo sapien
tgctcctgtctcctcagaagtattccactttgg

SEQ ID NO: 465581 - DNA, 33 bp, Homo sapien
atttatttgctggacactcatagcctagtagaa

SEQ ID NO: 465582 - DNA, 33 bp, Homo sapien
atttatttgctggacattcatagcctagtagaa

SEQ ID NO: 465583 - DNA, 33 bp, Homo sapien
cacagagttcccctacaaaagccaacaacttta

SEQ ID NO: 465584 - DNA, 33 bp, Homo sapien
cacagagttcccctacgaaagccaacaacttta

SEQ ID NO: 465585 - DNA, 33 bp, Homo sapien
tcacggcttctgggaacaccaggtcctcttact

SEQ ID NO: 465586 - DNA, 33 bp, Homo sapien
tcacggcttctgggaataccaggtcctcttact

SEQ ID NO: 465587 - DNA, 33 bp, Homo sapien
tgtcctgggtctccacaagtgtccaatccagtc

SEQ ID NO: 465588 - DNA, 33 bp, Homo sapien
tgtcctgggtctccacgagtgtccaatccagtc

SEQ ID NO: 465589 - DNA, 33 bp, Homo sapien
gtcatctggcagtcagaccctcccccgaaggca

SEQ ID NO: 465590 - DNA, 33 bp, Homo sapien
gtcatctggcagtcagcccctcccccgaaggca

SEQ ID NO: 465591 - DNA, 33 bp, Homo sapien
tataaaacaaaatgtgaaagtctgtttctttgt

SEQ ID NO: 465592 - DNA, 33 bp, Homo sapien
tataaaacaaaatgtggaagtctgtttctttgt

SEQ ID NO: 465593 - DNA, 33 bp, Homo sapien
accagcagttacaaaactctgggcatctgcaga

SEQ ID NO: 465594 - DNA, 33 bp, Homo sapien
accagcagttacaaaattctgggcatctgcaga

SEQ ID NO: 465595 - DNA, 33 bp, Homo sapien
gccttgtaacttattagctgcgtgtatataggt

SEQ ID NO: 465596 - DNA, 33 bp, Homo sapien
gccttgtaacttattatctgcgtgtatataggt

SEQ ID NO: 465597 - DNA, 33 bp, Homo sapien
gattaattgttgctgaaaaataatcaattagaa

SEQ ID NO: 465598 - DNA, 33 bp, Homo sapien
gattaattgttgctgagaaataatcaattagaa

SEQ ID NO: 465599 - DNA, 33 bp, Homo sapien
aggctcactccttgtccacctttttcgcctttg

SEQ ID NO: 465600 - DNA, 33 bp, Homo sapien
aggctcactccttgtctacctttttcgcctttg

SEQ ID NO: 465601 - DNA, 33 bp, Homo sapien
ggccatgattaatcagaaaaattgcaatgtgaa

SEQ ID NO: 465602 - DNA, 33 bp, Homo sapien
ggccatgattaatcaggaaaattgcaatgtgaa

SEQ ID NO: 465603 - DNA, 33 bp, Homo sapien
ccgaggctctgctctccgactgcttcgccttga

SEQ ID NO: 465604 - DNA, 33 bp, Homo sapien
ccgaggctctgctctctgactgcttcgccttga

SEQ ID NO: 465605 - DNA, 33 bp, Homo sapien
tcattgcttacggactcacttacccgagcatcc

SEQ ID NO: 465606 - DNA, 33 bp, Homo sapien
tcattgcttacggacttacttacccgagcatcc

SEQ ID NO: 465607 - DNA, 33 bp, Homo sapien
tcctgtaaatgattagaaaggactgactggtac

SEQ ID NO: 465608 - DNA, 33 bp, Homo sapien
tcctgtaaatgattaggaaggactgactggtac

SEQ ID NO: 465609 - DNA, 33 bp, Homo sapien
gtcataggtagagggaaaatttacaacacagaa

SEQ ID NO: 465610 - DNA, 33 bp, Homo sapien
gtcataggtagagggagaatttacaacacagaa

SEQ ID NO: 465611 - DNA, 33 bp, Homo sapien
ccactgtaaatgcatgaaactcttgagacttca

SEQ ID NO: 465612 - DNA, 33 bp, Homo sapien
ccactgtaaatgcatggaactcttgagacttca

SEQ ID NO: 465613 - DNA, 33 bp, Homo sapien
ctgctataacaagtgaccacaatctgggtggct

SEQ ID NO: 465614 - DNA, 33 bp, Homo sapien
ctgctataacaagtgatcacaatctgggtggct

SEQ ID NO: 465615 - DNA, 33 bp, Homo sapien
aggagattaatcctcacagtgctagacgtgccc

SEQ ID NO: 465616 - DNA, 33 bp, Homo sapien
aggagattaatcctcatagtgctagacgtgccc

SEQ ID NO: 465617 - DNA, 33 bp, Homo sapien
tgcaattgcgattgtacatatgagtgaatgtgc

SEQ ID NO: 465618 - DNA, 33 bp, Homo sapien
tgcaattgcgattgtatatatgagtgaatgtgc

SEQ ID NO: 465619 - DNA, 33 bp, Homo sapien
catttcatctggatcccgaagaaaagaagaaga

SEQ ID NO: 465620 - DNA, 33 bp, Homo sapien
catttcatctggatcctgaagaaaagaagaaga

SEQ ID NO: 465621 - DNA, 33 bp, Homo sapien
tggtaggggttaggaaccgtttctctagccctc

SEQ ID NO: 465622 - DNA, 33 bp, Homo sapien
tggtaggggttaggaatcgtttctctagccctc

SEQ ID NO: 465623 - DNA, 33 bp, Homo sapien
cctaccatgccttgaactatcccaaaggaggtt

SEQ ID NO: 465624 - DNA, 33 bp, Homo sapien
cctaccatgccttgaattatcccaaaggaggtt

SEQ ID NO: 465625 - DNA, 33 bp, Homo sapien
cagaatcactgtcatacgtctgttggctcccgt

SEQ ID NO: 465626 - DNA, 33 bp, Homo sapien
cagaatcactgtcataggtctgttggctcccgt

SEQ ID NO: 465627 - DNA, 33 bp, Homo sapien
aatcttcctctgctcaagaccgggacaatgact

SEQ ID NO: 465628 - DNA, 33 bp, Homo sapien
aatcttcctctgctcatgaccgggacaatgact

SEQ ID NO: 465629 - DNA, 33 bp, Homo sapien
ttaactgtagtcctcacactgtacattgtatct

SEQ ID NO: 465630 - DNA, 33 bp, Homo sapien
ttaactgtagtcctcatactgtacattgtatct

SEQ ID NO: 465631 - DNA, 33 bp, Homo sapien
atgtattttcctcaaagcctggatactcttggg

SEQ ID NO: 465632 - DNA, 33 bp, Homo sapien
atgtattttcctcaaatcctggatactcttggg

SEQ ID NO: 465633 - DNA, 33 bp, Homo sapien
aaatggttttggaaacagaaagcattgtagaaa

SEQ ID NO: 465634 - DNA, 33 bp, Homo sapien
aaatggttttggaaactgaaagcattgtagaaa

SEQ ID NO: 465635 - DNA, 33 bp, Homo sapien
tttaaacttttatatacctgagaatctaggctc

SEQ ID NO: 465636 - DNA, 33 bp, Homo sapien
tttaaacttttatatagctgagaatctaggctc

SEQ ID NO: 465637 - DNA, 33 bp, Homo sapien
gaatccctttatacacaacatagcatgatctca

SEQ ID NO: 465638 - DNA, 33 bp, Homo sapien
gaatccctttatacacgacatagcatgatctca

SEQ ID NO: 465639 - DNA, 33 bp, Homo sapien
tcaaagtaaaaattggaaaatgactatggagga

SEQ ID NO: 465640 - DNA, 33 bp, Homo sapien
tcaaagtaaaaattgggaaatgactatggagga

SEQ ID NO: 465641 - DNA, 33 bp, Homo sapien
aaagcattggaagatcagaaatcaaggaaggta

SEQ ID NO: 465642 - DNA, 33 bp, Homo sapien
aaagcattggaagatcggaaatcaaggaaggta

SEQ ID NO: 465643 - DNA, 33 bp, Homo sapien
ttgtcttctcatcaacgctagcacctaccaggc

SEQ ID NO: 465644 - DNA, 33 bp, Homo sapien
ttgtcttctcatcaactctagcacctaccaggc

SEQ ID NO: 465645 - DNA, 33 bp, Homo sapien
tcctcttgagtctcaacgtacccaacttttaag

SEQ ID NO: 465646 - DNA, 33 bp, Homo sapien
tcctcttgagtctcaatgtacccaacttttaag

SEQ ID NO: 465647 - DNA, 33 bp, Homo sapien
catctcttcccttcacgcatcatctttctagat

SEQ ID NO: 465648 - DNA, 33 bp, Homo sapien
catctcttcccttcactcatcatctttctagat

SEQ ID NO: 465649 - DNA, 33 bp, Homo sapien
cttcttgtctgatgggaaaagccactgcttcct

SEQ ID NO: 465650 - DNA, 33 bp, Homo sapien
cttcttgtctgatggggaaagccactgcttcct

SEQ ID NO: 465651 - DNA, 33 bp, Homo sapien
gcggcggtggaatccccagctcttcccgcagca

SEQ ID NO: 465652 - DNA, 33 bp, Homo sapien
gcggcggtggaatccctagctcttcccgcagca

SEQ ID NO: 465653 - DNA, 33 bp, Homo sapien
ccgagtctgagtcctaaagtgatccccatgcag

SEQ ID NO: 465654 - DNA, 33 bp, Homo sapien
ccgagtctgagtcctacagtgatccccatgcag

SEQ ID NO: 465655 - DNA, 33 bp, Homo sapien
ctgccaataggacttacggtgctttgccatgat

SEQ ID NO: 465656 - DNA, 33 bp, Homo sapien
ctgccaataggacttatggtgctttgccatgat

SEQ ID NO: 465657 - DNA, 33 bp, Homo sapien
cagagtagctggtccaatacaaacaccagactg

SEQ ID NO: 465658 - DNA, 33 bp, Homo sapien
cagagtagctggtccagtacaaacaccagactg

SEQ ID NO: 465659 - DNA, 33 bp, Homo sapien
atccaatataaggagaataaatttggacacaga

SEQ ID NO: 465660 - DNA, 33 bp, Homo sapien
atccaatataaggagagtaaatttggacacaga

SEQ ID NO: 465661 - DNA, 33 bp, Homo sapien
gacaaaatcaactacaactgctctgatgaaaga

SEQ ID NO: 465662 - DNA, 33 bp, Homo sapien
gacaaaatcaactacatctgctctgatgaaaga

SEQ ID NO: 465663 - DNA, 33 bp, Homo sapien
cagcatttgacaccgcacctttgcccacattgt

SEQ ID NO: 465664 - DNA, 33 bp, Homo sapien
cagcatttgacaccgcgcctttgcccacattgt

SEQ ID NO: 465665 - DNA, 33 bp, Homo sapien
tcaaagaaattcagtgcagaagatgagaggaag

SEQ ID NO: 465666 - DNA, 33 bp, Homo sapien
tcaaagaaattcagtggagaagatgagaggaag

SEQ ID NO: 465667 - DNA, 33 bp, Homo sapien
attttgcttaactcaacgggcaatacagagcca

SEQ ID NO: 465668 - DNA, 33 bp, Homo sapien
attttgcttaactcaatgggcaatacagagcca

SEQ ID NO: 465669 - DNA, 33 bp, Homo sapien
ttctctagtgttgaccaagacagaagaaacatt

SEQ ID NO: 465670 - DNA, 33 bp, Homo sapien
ttctctagtgttgaccgagacagaagaaacatt

SEQ ID NO: 465671 - DNA, 33 bp, Homo sapien
tctaagtgctgaataaatggtcctgagcagatg

SEQ ID NO: 465672 - DNA, 33 bp, Homo sapien
tctaagtgctgaataagtggtcctgagcagatg

SEQ ID NO: 465673 - DNA, 33 bp, Homo sapien
agtcaagtccatatacaaggcttaatttaagct

SEQ ID NO: 465674 - DNA, 33 bp, Homo sapien
agtcaagtccatatacgaggcttaatttaagct

SEQ ID NO: 465675 - DNA, 33 bp, Homo sapien
gaataaacgcagcatacggcacaaaaggacagg

SEQ ID NO: 465676 - DNA, 33 bp, Homo sapien
gaataaacgcagcatatggcacaaaaggacagg

SEQ ID NO: 465677 - DNA, 33 bp, Homo sapien
acagattggagacttcaaagtgccctccaggtc

SEQ ID NO: 465678 - DNA, 33 bp, Homo sapien
acagattggagacttcgaagtgccctccaggtc

SEQ ID NO: 465679 - DNA, 33 bp, Homo sapien
cagtggcctagagcaaaccatatagattcattt

SEQ ID NO: 465680 - DNA, 33 bp, Homo sapien
cagtggcctagagcaagccatatagattcattt

SEQ ID NO: 465681 - DNA, 33 bp, Homo sapien
atagtgttcttgccaaaaatagttagcctgaat

SEQ ID NO: 465682 - DNA, 33 bp, Homo sapien
atagtgttcttgccaacaatagttagcctgaat

SEQ ID NO: 465683 - DNA, 33 bp, Homo sapien
aatctaagataatttcactacctttctttgcct

SEQ ID NO: 465684 - DNA, 33 bp, Homo sapien
aatctaagataatttcgctacctttctttgcct

SEQ ID NO: 465685 - DNA, 33 bp, Homo sapien
aggtgtcgtcttggacacagagactcggccctc

SEQ ID NO: 465686 - DNA, 33 bp, Homo sapien
aggtgtcgtcttggacgcagagactcggccctc

SEQ ID NO: 465687 - DNA, 33 bp, Homo sapien
gcaatggatcagcaacaaagacttttcaaaggg

SEQ ID NO: 465688 - DNA, 33 bp, Homo sapien
gcaatggatcagcaacgaagacttttcaaaggg

SEQ ID NO: 465689 - DNA, 33 bp, Homo sapien
ctgccaattcaatgtacaaaacagtgacaccct

SEQ ID NO: 465690 - DNA, 33 bp, Homo sapien
ctgccaattcaatgtataaaacagtgacaccct

SEQ ID NO: 465691 - DNA, 33 bp, Homo sapien
tactggagattagacacgttgagaaaaaaacat

SEQ ID NO: 465692 - DNA, 33 bp, Homo sapien
tactggagattagacatgttgagaaaaaaacat

SEQ ID NO: 465693 - DNA, 33 bp, Homo sapien
ggcgaggtaaatactgaagaattgactctggca

SEQ ID NO: 465694 - DNA, 33 bp, Homo sapien
ggcgaggtaaatactgcagaattgactctggca

SEQ ID NO: 465695 - DNA, 33 bp, Homo sapien
ttctcagtcctcatacccctgtcttgtagggta

SEQ ID NO: 465696 - DNA, 33 bp, Homo sapien
ttctcagtcctcatactcctgtcttgtagggta

SEQ ID NO: 465697 - DNA, 33 bp, Homo sapien
tgtcacagtctgataaaaggccccctggatggg

SEQ ID NO: 465698 - DNA, 33 bp, Homo sapien
tgtcacagtctgataagaggccccctggatggg

SEQ ID NO: 465699 - DNA, 33 bp, Homo sapien
gagcctgggcacgtgacgttctcgccaacggac

SEQ ID NO: 465700 - DNA, 33 bp, Homo sapien
gagcctgggcacgtgatgttctcgccaacggac

SEQ ID NO: 465701 - DNA, 33 bp, Homo sapien
ggcgaggcttctccaccctgtctctcttgaggc

SEQ ID NO: 465702 - DNA, 33 bp, Homo sapien
ggcgaggcttctccacgctgtctctcttgaggc

SEQ ID NO: 465703 - DNA, 33 bp, Homo sapien
tgctgtcacggtgaaactagcagcaatgggact

SEQ ID NO: 465704 - DNA, 33 bp, Homo sapien
tgctgtcacggtgaaagtagcagcaatgggact

SEQ ID NO: 465705 - DNA, 33 bp, Homo sapien
tggctcaggcatcgccaagtcccattgctgcta

SEQ ID NO: 465706 - DNA, 33 bp, Homo sapien
tggctcaggcatcgccgagtcccattgctgcta

SEQ ID NO: 465707 - DNA, 33 bp, Homo sapien
gcatctagttagagggaacagctagtaaagaga

SEQ ID NO: 465708 - DNA, 33 bp, Homo sapien
gcatctagttagagggcacagctagtaaagaga

SEQ ID NO: 465709 - DNA, 33 bp, Homo sapien
tgcagatcctcccccaaatacaagtttctgttc

SEQ ID NO: 465710 - DNA, 33 bp, Homo sapien
tgcagatcctcccccagatacaagtttctgttc

SEQ ID NO: 465711 - DNA, 33 bp, Homo sapien
catctgcgttagctaccagtgagaggcaatggg

SEQ ID NO: 465712 - DNA, 33 bp, Homo sapien
catctgcgttagctactagtgagaggcaatggg

SEQ ID NO: 465713 - DNA, 33 bp, Homo sapien
caaagtgctgcattcacgttagcgaaaaaggcg

SEQ ID NO: 465714 - DNA, 33 bp, Homo sapien
caaagtgctgcattcatgttagcgaaaaaggcg

SEQ ID NO: 465715 - DNA, 33 bp, Homo sapien
ttgtggagtaactaatgaatccgttggtgcagc

SEQ ID NO: 465716 - DNA, 33 bp, Homo sapien
ttgtggagtaactaattaatccgttggtgcagc

SEQ ID NO: 465717 - DNA, 33 bp, Homo sapien
ttcatcagatggtaacagcttcaccctgtcttg

SEQ ID NO: 465718 - DNA, 33 bp, Homo sapien
ttcatcagatggtaacggcttcaccctgtcttg

SEQ ID NO: 465719 - DNA, 33 bp, Homo sapien
cctttctgagcaggtacaatctttgcctctcaa

SEQ ID NO: 465720 - DNA, 33 bp, Homo sapien
cctttctgagcaggtagaatctttgcctctcaa

SEQ ID NO: 465721 - DNA, 33 bp, Homo sapien
atgtggattctgggggaatgcaagagtcggaat

SEQ ID NO: 465722 - DNA, 33 bp, Homo sapien
atgtggattctggggggatgcaagagtcggaat

SEQ ID NO: 465723 - DNA, 33 bp, Homo sapien
tcccatccatttgatcactatgtccttgtaatt

SEQ ID NO: 465724 - DNA, 33 bp, Homo sapien
tcccatccatttgatctctatgtccttgtaatt

SEQ ID NO: 465725 - DNA, 33 bp, Homo sapien
acagataaatgcatccagaacttcaccgatggt

SEQ ID NO: 465726 - DNA, 33 bp, Homo sapien
acagataaatgcatccggaacttcaccgatggt

SEQ ID NO: 465727 - DNA, 33 bp, Homo sapien
gtcacacctatcagacacatgacagagatgaag

SEQ ID NO: 465728 - DNA, 33 bp, Homo sapien
gtcacacctatcagacgcatgacagagatgaag

SEQ ID NO: 465729 - DNA, 33 bp, Homo sapien
ccaagtgtgggtccaacgtagagacatccatac

SEQ ID NO: 465730 - DNA, 33 bp, Homo sapien
ccaagtgtgggtccaatgtagagacatccatac

SEQ ID NO: 465731 - DNA, 33 bp, Homo sapien
gtcaaatatagtggctcacctggttgaaagctt

SEQ ID NO: 465732 - DNA, 33 bp, Homo sapien
gtcaaatatagtggcttacctggttgaaagctt

SEQ ID NO: 465733 - DNA, 33 bp, Homo sapien
gccctgagggctccaccgacaagaatgagacta

SEQ ID NO: 465734 - DNA, 33 bp, Homo sapien
gccctgagggctccactgacaagaatgagacta

SEQ ID NO: 465735 - DNA, 33 bp, Homo sapien
gcttacagggcactgaaaattgtaaatcaaatt

SEQ ID NO: 465736 - DNA, 33 bp, Homo sapien
gcttacagggcactgacaattgtaaatcaaatt

SEQ ID NO: 465737 - DNA, 33 bp, Homo sapien
ctgtggctctcagttccatgaccctggctcaga

SEQ ID NO: 465738 - DNA, 33 bp, Homo sapien
ctgtggctctcagttctatgaccctggctcaga

SEQ ID NO: 465739 - DNA, 33 bp, Homo sapien
tggcagcagtggctcaaacaggggtggctaagg

SEQ ID NO: 465740 - DNA, 33 bp, Homo sapien
tggcagcagtggctcagacaggggtggctaagg

SEQ ID NO: 465741 - DNA, 33 bp, Homo sapien
tccaaagggcatcaacaaccctggcctgtggaa

SEQ ID NO: 465742 - DNA, 33 bp, Homo sapien
tccaaagggcatcaacgaccctggcctgtggaa

SEQ ID NO: 465743 - DNA, 33 bp, Homo sapien
cctggcatatatgaagaccagatagaggtcagt

SEQ ID NO: 465744 - DNA, 33 bp, Homo sapien
cctggcatatatgaagcccagatagaggtcagt

SEQ ID NO: 465745 - DNA, 33 bp, Homo sapien
cctgcagaagatcccaagctatggttgacatga

SEQ ID NO: 465746 - DNA, 33 bp, Homo sapien
cctgcagaagatcccaggctatggttgacatga

SEQ ID NO: 465747 - DNA, 33 bp, Homo sapien
tctcagaaggaaatacagaacaggttattggac

SEQ ID NO: 465748 - DNA, 33 bp, Homo sapien
tctcagaaggaaatacggaacaggttattggac

SEQ ID NO: 465749 - DNA, 33 bp, Homo sapien
gtatcaagattactcacgggtttagtcagccat

SEQ ID NO: 465750 - DNA, 33 bp, Homo sapien
gtatcaagattactcatgggtttagtcagccat

SEQ ID NO: 465751 - DNA, 33 bp, Homo sapien
ttctctttaactcaaacgaacagtgtttctgct

SEQ ID NO: 465752 - DNA, 33 bp, Homo sapien
ttctctttaactcaaatgaacagtgtttctgct

SEQ ID NO: 465753 - DNA, 33 bp, Homo sapien
tttagcaattgagcaccgtatggacagggatcc

SEQ ID NO: 465754 - DNA, 33 bp, Homo sapien
tttagcaattgagcactgtatggacagggatcc

SEQ ID NO: 465755 - DNA, 33 bp, Homo sapien
tcttctctaacacatgcaacacaacaaaagtgg

SEQ ID NO: 465756 - DNA, 33 bp, Homo sapien
tcttctctaacacatggaacacaacaaaagtgg

SEQ ID NO: 465757 - DNA, 33 bp, Homo sapien
aggatgtgaatgccagcaacgtgcagcagcccc

SEQ ID NO: 465758 - DNA, 33 bp, Homo sapien
aggatgtgaatgccaggaacgtgcagcagcccc

SEQ ID NO: 465759 - DNA, 33 bp, Homo sapien
aaccctcgtcacctacactattcccatgttgag

SEQ ID NO: 465760 - DNA, 33 bp, Homo sapien
aaccctcgtcacctacgctattcccatgttgag

SEQ ID NO: 465761 - DNA, 33 bp, Homo sapien
ggaacctcccagaagcacagccgtgtggacact

SEQ ID NO: 465762 - DNA, 33 bp, Homo sapien
ggaacctcccagaagcgcagccgtgtggacact

SEQ ID NO: 465763 - DNA, 33 bp, Homo sapien
aggtgcctgacacacaatagatgctcagtaaat

SEQ ID NO: 465764 - DNA, 33 bp, Homo sapien
aggtgcctgacacacagtagatgctcagtaaat

SEQ ID NO: 465765 - DNA, 33 bp, Homo sapien
caggcgggaaaaggacaacagtggagcctcaga

SEQ ID NO: 465766 - DNA, 33 bp, Homo sapien
caggcgggaaaaggacgacagtggagcctcaga

SEQ ID NO: 465767 - DNA, 33 bp, Homo sapien
aacctgcactgagcataacaaaatgcaggtagc

SEQ ID NO: 465768 - DNA, 33 bp, Homo sapien
aacctgcactgagcatgacaaaatgcaggtagc

SEQ ID NO: 465769 - DNA, 33 bp, Homo sapien
taagatttacctgttacggatgcattcagatgc

SEQ ID NO: 465770 - DNA, 33 bp, Homo sapien
taagatttacctgttatggatgcattcagatgc

SEQ ID NO: 465771 - DNA, 33 bp, Homo sapien
gagagcacttccgccacgcctgaagtttgagca

SEQ ID NO: 465772 - DNA, 33 bp, Homo sapien
gagagcacttccgccatgcctgaagtttgagca

SEQ ID NO: 465773 - DNA, 33 bp, Homo sapien
cttgcaatggctcccccgcatctcctcctctgt

SEQ ID NO: 465774 - DNA, 33 bp, Homo sapien
cttgcaatggctccccggcatctcctcctctgt

SEQ ID NO: 465775 - DNA, 33 bp, Homo sapien
gtgtgtggaggggcacaggcttgtcagaagcag

SEQ ID NO: 465776 - DNA, 33 bp, Homo sapien
gtgtgtggaggggcacgggcttgtcagaagcag

SEQ ID NO: 465777 - DNA, 33 bp, Homo sapien
tattcatgatgttatcaaagattctgtttttcc

SEQ ID NO: 465778 - DNA, 33 bp, Homo sapien
tattcatgatgttatcgaagattctgtttttcc

SEQ ID NO: 465779 - DNA, 33 bp, Homo sapien
gatgggaacccccttaaacactggcaatatggc

SEQ ID NO: 465780 - DNA, 33 bp, Homo sapien
gatgggaacccccttacacactggcaatatggc

SEQ ID NO: 465781 - DNA, 33 bp, Homo sapien
gaaatgtttaaggacactgctacttctgtgtgc

SEQ ID NO: 465782 - DNA, 33 bp, Homo sapien
gaaatgtttaaggacagtgctacttctgtgtgc

SEQ ID NO: 465783 - DNA, 33 bp, Homo sapien
catgcccagatttgccaagaatgctgtgtgcac

SEQ ID NO: 465784 - DNA, 33 bp, Homo sapien
catgcccagatttgccgagaatgctgtgtgcac

SEQ ID NO: 465785 - DNA, 33 bp, Homo sapien
taagtgagctatcaataaactatgtgaaagtca

SEQ ID NO: 465786 - DNA, 33 bp, Homo sapien
taagtgagctatcaattaactatgtgaaagtca

SEQ ID NO: 465787 - DNA, 33 bp, Homo sapien
ttaaataagataatgccgataagaggatctacc

SEQ ID NO: 465788 - DNA, 33 bp, Homo sapien
ttaaataagataatgctgataagaggatctacc

SEQ ID NO: 465789 - DNA, 33 bp, Homo sapien
atgcacattgtcaggaacacctaagcctccaat

SEQ ID NO: 465790 - DNA, 33 bp, Homo sapien
atgcacattgtcaggagcacctaagcctccaat

SEQ ID NO: 465791 - DNA, 33 bp, Homo sapien
aggcggtgattacggacgaactcggatgatctc

SEQ ID NO: 465792 - DNA, 33 bp, Homo sapien
aggcggtgattacggatgaactcggatgatctc

SEQ ID NO: 465793 - DNA, 33 bp, Homo sapien
gctttctggtacaaaactcttcttggggaatac

SEQ ID NO: 465794 - DNA, 33 bp, Homo sapien
gctttctggtacaaaattcttcttggggaatac

SEQ ID NO: 465795 - DNA, 33 bp, Homo sapien
aggtcagatgaagaaactgacaactgaactgaa

SEQ ID NO: 465796 - DNA, 33 bp, Homo sapien
aggtcagatgaagaaattgacaactgaactgaa

SEQ ID NO: 465797 - DNA, 33 bp, Homo sapien
aggatttgagccaggaaaaagtcattaagacaa

SEQ ID NO: 465798 - DNA, 33 bp, Homo sapien
aggatttgagccaggagaaagtcattaagacaa

SEQ ID NO: 465799 - DNA, 33 bp, Homo sapien
cacgtctcctgcaagacagttttagacatgggg

SEQ ID NO: 465800 - DNA, 33 bp, Homo sapien
cacgtctcctgcaagagagttttagacatgggg

SEQ ID NO: 465801 - DNA, 33 bp, Homo sapien
actgaagaaagaccccaaaatgaggccctcttc

SEQ ID NO: 465802 - DNA, 33 bp, Homo sapien
actgaagaaagaccccgaaatgaggccctcttc

SEQ ID NO: 465803 - DNA, 33 bp, Homo sapien
agctttggaagggaaaagagcagatgtcgcctc

SEQ ID NO: 465804 - DNA, 33 bp, Homo sapien
agctttggaagggaaaggagcagatgtcgcctc

SEQ ID NO: 465805 - DNA, 33 bp, Homo sapien
agttctgatagaggtacagatcacatacatctg

SEQ ID NO: 465806 - DNA, 33 bp, Homo sapien
agttctgatagaggtatagatcacatacatctg

SEQ ID NO: 465807 - DNA, 33 bp, Homo sapien
agcaccaaaataataactcctctcactgttttc

SEQ ID NO: 465808 - DNA, 33 bp, Homo sapien
agcaccaaaataataattcctctcactgttttc

SEQ ID NO: 465809 - DNA, 33 bp, Homo sapien
aaggcatttgtatctaacctactcattacattc

SEQ ID NO: 465810 - DNA, 33 bp, Homo sapien
aaggcatttgtatctagcctactcattacattc

SEQ ID NO: 465811 - DNA, 33 bp, Homo sapien
gggacagtcttccccgaaaagtgagaactaaat

SEQ ID NO: 465812 - DNA, 33 bp, Homo sapien
gggacagtcttccccggaaagtgagaactaaat

SEQ ID NO: 465813 - DNA, 33 bp, Homo sapien
gactaacaagacagaacggatcatcttccaata

SEQ ID NO: 465814 - DNA, 33 bp, Homo sapien
gactaacaagacagaatggatcatcttccaata

SEQ ID NO: 465815 - DNA, 33 bp, Homo sapien
gctgcatctgtacggcagagataaaactgcagc

SEQ ID NO: 465816 - DNA, 33 bp, Homo sapien
gctgcatctgtacggcggagataaaactgcagc

SEQ ID NO: 465817 - DNA, 33 bp, Homo sapien
tggatgccgtgaggccactggagacggtgcgtt

SEQ ID NO: 465818 - DNA, 33 bp, Homo sapien
tggatgccgtgaggccgctggagacggtgcgtt

SEQ ID NO: 465819 - DNA, 33 bp, Homo sapien
aaaaaacggcaaataaattagcatatgaaaata

SEQ ID NO: 465820 - DNA, 33 bp, Homo sapien
aaaaaacggcaaataagttagcatatgaaaata

SEQ ID NO: 465821 - DNA, 33 bp, Homo sapien
tgggcccgttcaacacagagcaacaggcaggca

SEQ ID NO: 465822 - DNA, 33 bp, Homo sapien
tgggcccgttcaacacggagcaacaggcaggca

SEQ ID NO: 465823 - DNA, 33 bp, Homo sapien
gctcctttggagcccacgggggattctttacct

SEQ ID NO: 465824 - DNA, 33 bp, Homo sapien
gctcctttggagcccatgggggattctttacct

SEQ ID NO: 465825 - DNA, 33 bp, Homo sapien
aatctcctcaatccccaaattcttaatttaatc

SEQ ID NO: 465826 - DNA, 33 bp, Homo sapien
aatctcctcaatcccccaattcttaatttaatc

SEQ ID NO: 465827 - DNA, 33 bp, Homo sapien
aaatgtgctctgaaaaatcgtgttggcaattgt

SEQ ID NO: 465828 - DNA, 33 bp, Homo sapien
aaatgtgctctgaaaagtcgtgttggcaattgt

SEQ ID NO: 465829 - DNA, 33 bp, Homo sapien
aggagacaatttaaacaaagtccaactaaggca

SEQ ID NO: 465830 - DNA, 33 bp, Homo sapien
aggagacaatttaaacgaagtccaactaaggca

SEQ ID NO: 465831 - DNA, 33 bp, Homo sapien
atggggaatggtgaacagtccacgagggagacg

SEQ ID NO: 465832 - DNA, 33 bp, Homo sapien
atggggaatggtgaaccgtccacgagggagacg

SEQ ID NO: 465833 - DNA, 33 bp, Homo sapien
ttccgtttgggtagacacactctcttgttgaca

SEQ ID NO: 465834 - DNA, 33 bp, Homo sapien
ttccgtttgggtagacgcactctcttgttgaca

SEQ ID NO: 465835 - DNA, 33 bp, Homo sapien
gtccttttgagtctaacgtatgcactttttgga

SEQ ID NO: 465836 - DNA, 33 bp, Homo sapien
gtccttttgagtctaaggtatgcactttttgga

SEQ ID NO: 465837 - DNA, 33 bp, Homo sapien
ctgtctaaaatatgcaatgatgttttcaccatt

SEQ ID NO: 465838 - DNA, 33 bp, Homo sapien
ctgtctaaaatatgcagtgatgttttcaccatt

SEQ ID NO: 465839 - DNA, 33 bp, Homo sapien
acaagtcatccagttcaaccactttctagctgg

SEQ ID NO: 465840 - DNA, 33 bp, Homo sapien
acaagtcatccagttcgaccactttctagctgg

SEQ ID NO: 465841 - DNA, 33 bp, Homo sapien
cttgcttcctgtaaaaactgtggaactgaattg

SEQ ID NO: 465842 - DNA, 33 bp, Homo sapien
cttgcttcctgtaaaacctgtggaactgaattg

SEQ ID NO: 465843 - DNA, 33 bp, Homo sapien
tctggtattttgtgcacagaaagcttgtggcaa

SEQ ID NO: 465844 - DNA, 33 bp, Homo sapien
tctggtattttgtgcatagaaagcttgtggcaa

SEQ ID NO: 465845 - DNA, 33 bp, Homo sapien
gtttggggaaagatgaaggtcctatttgagttt

SEQ ID NO: 465846 - DNA, 33 bp, Homo sapien
gtttggggaaagatgagggtcctatttgagttt

SEQ ID NO: 465847 - DNA, 33 bp, Homo sapien
tggagaccctagcggaaaggggttcaacatgta

SEQ ID NO: 465848 - DNA, 33 bp, Homo sapien
tggagaccctagcggagaggggttcaacatgta

SEQ ID NO: 465849 - DNA, 33 bp, Homo sapien
acaggacggtttcaggcattatgggcacatttg

SEQ ID NO: 465850 - DNA, 33 bp, Homo sapien
acaggacggtttcaggtattatgggcacatttg

SEQ ID NO: 465851 - DNA, 33 bp, Homo sapien
cttgtctgacttggtgacaactcgagagaatct

SEQ ID NO: 465852 - DNA, 33 bp, Homo sapien
cttgtctgacttggtgccaactcgagagaatct

SEQ ID NO: 465853 - DNA, 33 bp, Homo sapien
aatttgtaaactgtatcaggaagtatataaaac

SEQ ID NO: 465854 - DNA, 33 bp, Homo sapien
aatttgtaaactgtattaggaagtatataaaac

SEQ ID NO: 465855 - DNA, 33 bp, Homo sapien
gagtaatggccctcaacgacgttcagctcctaa

SEQ ID NO: 465856 - DNA, 33 bp, Homo sapien
gagtaatggccctcaatgacgttcagctcctaa

SEQ ID NO: 465857 - DNA, 33 bp, Homo sapien
gacctttcagaaaagcgcttggagaccccacgc

SEQ ID NO: 465858 - DNA, 33 bp, Homo sapien
gacctttcagaaaagctcttggagaccccacgc

SEQ ID NO: 465859 - DNA, 33 bp, Homo sapien
ttccccatcatataaaacagccttctgaaatct

SEQ ID NO: 465860 - DNA, 33 bp, Homo sapien
ttccccatcatataaagcagccttctgaaatct

SEQ ID NO: 465861 - DNA, 33 bp, Homo sapien
ctttatgtatcaagcaactactgcacgcccagc

SEQ ID NO: 465862 - DNA, 33 bp, Homo sapien
ctttatgtatcaagcacctactgcacgcccagc

SEQ ID NO: 465863 - DNA, 33 bp, Homo sapien
gtggataaactggaggccattgtgctgagtgaa

SEQ ID NO: 465864 - DNA, 33 bp, Homo sapien
gtggataaactggaggtcattgtgctgagtgaa

SEQ ID NO: 465865 - DNA, 33 bp, Homo sapien
attttattaactttgtaaacagttctgatcctg

SEQ ID NO: 465866 - DNA, 33 bp, Homo sapien
attttattaactttgtgaacagttctgatcctg

SEQ ID NO: 465867 - DNA, 33 bp, Homo sapien
tgctgttagttagctagtagcagagatgagcaa

SEQ ID NO: 465868 - DNA, 33 bp, Homo sapien
tgctgttagttagctattagcagagatgagcaa

SEQ ID NO: 465869 - DNA, 33 bp, Homo sapien
ctacaagcatatggcaatactttgaatcatcct

SEQ ID NO: 465870 - DNA, 33 bp, Homo sapien
ctacaagcatatggcagtactttgaatcatcct

SEQ ID NO: 465871 - DNA, 33 bp, Homo sapien
agtgcaataatcaggaagcgaaagcccaagtag

SEQ ID NO: 465872 - DNA, 33 bp, Homo sapien
agtgcaataatcaggaggcgaaagcccaagtag

SEQ ID NO: 465873 - DNA, 33 bp, Homo sapien
tgaggatactgattagcagttcagacattcagg

SEQ ID NO: 465874 - DNA, 33 bp, Homo sapien
tgaggatactgattagtagttcagacattcagg

SEQ ID NO: 465875 - DNA, 33 bp, Homo sapien
ctcctcccggtggtgacattgtttacagagaag

SEQ ID NO: 465876 - DNA, 33 bp, Homo sapien
ctcctcccggtggtgatattgtttacagagaag

SEQ ID NO: 465877 - DNA, 33 bp, Homo sapien
ctgtccatacattgccacattatataagaattc

SEQ ID NO: 465878 - DNA, 33 bp, Homo sapien
ctgtccatacattgccgcattatataagaattc

SEQ ID NO: 465879 - DNA, 33 bp, Homo sapien
gaggagatctattgtacaacacggtgattatag

SEQ ID NO: 465880 - DNA, 33 bp, Homo sapien
gaggagatctattgtataacacggtgattatag

SEQ ID NO: 465881 - DNA, 33 bp, Homo sapien
agcataactcttatagaaaagccagataaataa

SEQ ID NO: 465882 - DNA, 33 bp, Homo sapien
agcataactcttatagcaaagccagataaataa

SEQ ID NO: 465883 - DNA, 33 bp, Homo sapien
tttcagagatcgagaaggcttgttattagtaac

SEQ ID NO: 465884 - DNA, 33 bp, Homo sapien
tttcagagatcgagaatgcttgttattagtaac

SEQ ID NO: 465885 - DNA, 33 bp, Homo sapien
caatcatgcacaaagacactgaatcaataatca

SEQ ID NO: 465886 - DNA, 33 bp, Homo sapien
caatcatgcacaaagatactgaatcaataatca

SEQ ID NO: 465887 - DNA, 33 bp, Homo sapien
aagactgaatcatgaaaaagtgaaaaatctgaa

SEQ ID NO: 465888 - DNA, 33 bp, Homo sapien
aagactgaatcatgaagaagtgaaaaatctgaa

SEQ ID NO: 465889 - DNA, 33 bp, Homo sapien
taacaagcaaggctcacgggaagagacaactag

SEQ ID NO: 465890 - DNA, 33 bp, Homo sapien
taacaagcaaggctcatgggaagagacaactag

SEQ ID NO: 465891 - DNA, 33 bp, Homo sapien
cttcaaaccataacaacagtgatgtccaaacag

SEQ ID NO: 465892 - DNA, 33 bp, Homo sapien
cttcaaaccataacaagagtgatgtccaaacag

SEQ ID NO: 465893 - DNA, 33 bp, Homo sapien
aagccgtgggtcagaaaagctggaaggggagca

SEQ ID NO: 465894 - DNA, 33 bp, Homo sapien
aagccgtgggtcagaagagctggaaggggagca

SEQ ID NO: 465895 - DNA, 33 bp, Homo sapien
gatctccctctgaacacggagctgcaaggagcc

SEQ ID NO: 465896 - DNA, 33 bp, Homo sapien
gatctccctctgaacatggagctgcaaggagcc

SEQ ID NO: 465897 - DNA, 33 bp, Homo sapien
gatgtcatggaagttccagcaactctggatccc

SEQ ID NO: 465898 - DNA, 33 bp, Homo sapien
gatgtcatggaagttctagcaactctggatccc

SEQ ID NO: 465899 - DNA, 33 bp, Homo sapien
tttgagagatcccttaaccatgaggcactgcca

SEQ ID NO: 465900 - DNA, 33 bp, Homo sapien
tttgagagatcccttagccatgaggcactgcca

SEQ ID NO: 465901 - DNA, 33 bp, Homo sapien
ggcaagaaacatgtccaggaaagtgaacaccaa

SEQ ID NO: 465902 - DNA, 33 bp, Homo sapien
ggcaagaaacatgtccgggaaagtgaacaccaa

SEQ ID NO: 465903 - DNA, 33 bp, Homo sapien
acactgcactgaaactaaaaaacacgatggttg

SEQ ID NO: 465904 - DNA, 33 bp, Homo sapien
acactgcactgaaactgaaaaacacgatggttg

SEQ ID NO: 465905 - DNA, 33 bp, Homo sapien
aaatcactcagaataactcctccactcccgaac

SEQ ID NO: 465906 - DNA, 33 bp, Homo sapien
aaatcactcagaataagtcctccactcccgaac

SEQ ID NO: 465907 - DNA, 33 bp, Homo sapien
tatgtaaagcataaaaaagagatagaccccaat

SEQ ID NO: 465908 - DNA, 33 bp, Homo sapien
tatgtaaagcataaaagagagatagaccccaat

SEQ ID NO: 465909 - DNA, 33 bp, Homo sapien
cccgcttggtgttctacgccactgtggctgagc

SEQ ID NO: 465910 - DNA, 33 bp, Homo sapien
cccgcttggtgttctatgccactgtggctgagc

SEQ ID NO: 465911 - DNA, 33 bp, Homo sapien
ggatgggcccagtacccaccgaaagctgtagcc

SEQ ID NO: 465912 - DNA, 33 bp, Homo sapien
ggatgggcccagtacctaccgaaagctgtagcc

SEQ ID NO: 465913 - DNA, 33 bp, Homo sapien
ttttattgggctgaaaatatagcataaattata

SEQ ID NO: 465914 - DNA, 33 bp, Homo sapien
ttttattgggctgaaagtatagcataaattata

SEQ ID NO: 465915 - DNA, 33 bp, Homo sapien
gattctcattgtttgaacaaccagaatagtcag

SEQ ID NO: 465916 - DNA, 33 bp, Homo sapien
gattctcattgtttgaccaaccagaatagtcag

SEQ ID NO: 465917 - DNA, 33 bp, Homo sapien
gtggactaagactcagacaagtgcatcagctgt

SEQ ID NO: 465918 - DNA, 33 bp, Homo sapien
gtggactaagactcaggcaagtgcatcagctgt

SEQ ID NO: 465919 - DNA, 33 bp, Homo sapien
cactgtgattaaaacgccccataaatgtcacag

SEQ ID NO: 465920 - DNA, 33 bp, Homo sapien
cactgtgattaaaacgtcccataaatgtcacag

SEQ ID NO: 465921 - DNA, 33 bp, Homo sapien
cacacataaacattcacgtaggaaccgcgcaga

SEQ ID NO: 465922 - DNA, 33 bp, Homo sapien
cacacataaacattcatgtaggaaccgcgcaga

SEQ ID NO: 465923 - DNA, 33 bp, Homo sapien
caaagaacctgcttccaaattagcaaattcggt

SEQ ID NO: 465924 - DNA, 33 bp, Homo sapien
caaagaacctgcttccgaattagcaaattcggt

SEQ ID NO: 465925 - DNA, 33 bp, Homo sapien
gggcgtccgctggacacgctcaatgcgttatga

SEQ ID NO: 465926 - DNA, 33 bp, Homo sapien
gggcgtccgctggacatgctcaatgcgttatga

SEQ ID NO: 465927 - DNA, 33 bp, Homo sapien
gagtgaataaagcactaaggggaagctactgtg

SEQ ID NO: 465928 - DNA, 33 bp, Homo sapien
gagtgaataaagcactgaggggaagctactgtg

SEQ ID NO: 465929 - DNA, 33 bp, Homo sapien
gttttgagattggcagcatgtggtcctgcgttg

SEQ ID NO: 465930 - DNA, 33 bp, Homo sapien
gttttgagattggcagtatgtggtcctgcgttg

SEQ ID NO: 465931 - DNA, 33 bp, Homo sapien
atgtgtaactcaaaataaacaccgcttctataa

SEQ ID NO: 465932 - DNA, 33 bp, Homo sapien
atgtgtaactcaaaatgaacaccgcttctataa

SEQ ID NO: 465933 - DNA, 33 bp, Homo sapien
agtagaaaagaaaagcgcattttccaggggagg

SEQ ID NO: 465934 - DNA, 33 bp, Homo sapien
agtagaaaagaaaagctcattttccaggggagg

SEQ ID NO: 465935 - DNA, 33 bp, Homo sapien
gagcagaacctgaggacagtgaacttttgtctc

SEQ ID NO: 465936 - DNA, 33 bp, Homo sapien
gagcagaacctgaggagagtgaacttttgtctc

SEQ ID NO: 465937 - DNA, 33 bp, Homo sapien
ctctggtgccatgttgaataaaggtcttttcct

SEQ ID NO: 465938 - DNA, 33 bp, Homo sapien
ctctggtgccatgttggataaaggtcttttcct

SEQ ID NO: 465939 - DNA, 33 bp, Homo sapien
aagggtgctaatggaacaaccacctgcccgtca

SEQ ID NO: 465940 - DNA, 33 bp, Homo sapien
aagggtgctaatggaagaaccacctgcccgtca

SEQ ID NO: 465941 - DNA, 33 bp, Homo sapien
ctaggatctagagcaacgcctcccaaagtgtgg

SEQ ID NO: 465942 - DNA, 33 bp, Homo sapien
ctaggatctagagcaatgcctcccaaagtgtgg

SEQ ID NO: 465943 - DNA, 33 bp, Homo sapien
aaatgtgcacgcaatccattgcaaattccctga

SEQ ID NO: 465944 - DNA, 33 bp, Homo sapien
aaatgtgcacgcaatctattgcaaattccctga

SEQ ID NO: 465945 - DNA, 33 bp, Homo sapien
tgacaaaagggaatacagtagatatttaaatga

SEQ ID NO: 465946 - DNA, 33 bp, Homo sapien
tgacaaaagggaataccgtagatatttaaatga

SEQ ID NO: 465947 - DNA, 33 bp, Homo sapien
cccacaaccaataatcacaagataagagaaagt

SEQ ID NO: 465948 - DNA, 33 bp, Homo sapien
cccacaaccaataatcccaagataagagaaagt

SEQ ID NO: 465949 - DNA, 33 bp, Homo sapien
cctcatcccaaccaaactattgatgacaaaggc

SEQ ID NO: 465950 - DNA, 33 bp, Homo sapien
cctcatcccaaccaaagtattgatgacaaaggc

SEQ ID NO: 465951 - DNA, 33 bp, Homo sapien
cgtatcagttgtaaacaccctgacgaggtagcg

SEQ ID NO: 465952 - DNA, 33 bp, Homo sapien
cgtatcagttgtaaacgccctgacgaggtagcg

SEQ ID NO: 465953 - DNA, 33 bp, Homo sapien
aacaatcgatgaaaaaataaggtttattggaag

SEQ ID NO: 465954 - DNA, 33 bp, Homo sapien
aacaatcgatgaaaaattaaggtttattggaag

SEQ ID NO: 465955 - DNA, 33 bp, Homo sapien
gcaggtggtggtgcacagtgattttctaagcca

SEQ ID NO: 465956 - DNA, 33 bp, Homo sapien
gcaggtggtggtgcacggtgattttctaagcca

SEQ ID NO: 465957 - DNA, 33 bp, Homo sapien
ataacagataagaagacggcccattgctgacct

SEQ ID NO: 465958 - DNA, 33 bp, Homo sapien
ataacagataagaagatggcccattgctgacct

SEQ ID NO: 465959 - DNA, 33 bp, Homo sapien
agaacacaaaggtgaaagtgtgtgtatagtgtg

SEQ ID NO: 465960 - DNA, 33 bp, Homo sapien
agaacacaaaggtgaaggtgtgtgtatagtgtg

SEQ ID NO: 465961 - DNA, 33 bp, Homo sapien
gataacatttagagtacgtgcagcagacagtcc

SEQ ID NO: 465962 - DNA, 33 bp, Homo sapien
gataacatttagagtatgtgcagcagacagtcc

SEQ ID NO: 465963 - DNA, 33 bp, Homo sapien
tagtgatagcacaaggccacataggtgggagca

SEQ ID NO: 465964 - DNA, 33 bp, Homo sapien
tagtgatagcacaaggtcacataggtgggagca

SEQ ID NO: 465965 - DNA, 33 bp, Homo sapien
cccagaaaacccactcaatttctgtatctcagt

SEQ ID NO: 465966 - DNA, 33 bp, Homo sapien
cccagaaaacccactcgatttctgtatctcagt

SEQ ID NO: 465967 - DNA, 33 bp, Homo sapien
tctagcaatcatggaccatctttctgaaggaaa

SEQ ID NO: 465968 - DNA, 33 bp, Homo sapien
tctagcaatcatggactatctttctgaaggaaa

SEQ ID NO: 465969 - DNA, 33 bp, Homo sapien
gtttgtttttacactacgtctaagcaaccctga

SEQ ID NO: 465970 - DNA, 33 bp, Homo sapien
gtttgtttttacactatgtctaagcaaccctga

SEQ ID NO: 465971 - DNA, 33 bp, Homo sapien
gcacagaatgtgcctaaatggtcaggttcattt

SEQ ID NO: 465972 - DNA, 33 bp, Homo sapien
gcacagaatgtgcctagatggtcaggttcattt

SEQ ID NO: 465973 - DNA, 33 bp, Homo sapien
ctcaagaaaggagcagcataatttaatcaaagg

SEQ ID NO: 465974 - DNA, 33 bp, Homo sapien
ctcaagaaaggagcagtataatttaatcaaagg

SEQ ID NO: 465975 - DNA, 33 bp, Homo sapien
ctattttcctattctggaagatgatttgactgc

SEQ ID NO: 465976 - DNA, 33 bp, Homo sapien
ctattttcctattctgtaagatgatttgactgc

SEQ ID NO: 465977 - DNA, 33 bp, Homo sapien
taaaggaaaaactggtaacactgagtcaactcc

SEQ ID NO: 465978 - DNA, 33 bp, Homo sapien
taaaggaaaaactggtgacactgagtcaactcc

SEQ ID NO: 465979 - DNA, 33 bp, Homo sapien
tgtcctcttcaaggcacactgtgtcctgtgtat

SEQ ID NO: 465980 - DNA, 33 bp, Homo sapien
tgtcctcttcaaggcagactgtgtcctgtgtat

SEQ ID NO: 465981 - DNA, 33 bp, Homo sapien
tgctgatgtcaaggtacgtgatgagacatcatc

SEQ ID NO: 465982 - DNA, 33 bp, Homo sapien
tgctgatgtcaaggtatgtgatgagacatcatc

SEQ ID NO: 465983 - DNA, 33 bp, Homo sapien
gttgagtctagatatcacaggaaagacaacagt

SEQ ID NO: 465984 - DNA, 33 bp, Homo sapien
gttgagtctagatatcgcaggaaagacaacagt

SEQ ID NO: 465985 - DNA, 33 bp, Homo sapien
aaatgtaggaagtggacaactcaacacaaatag

SEQ ID NO: 465986 - DNA, 33 bp, Homo sapien
aaatgtaggaagtggagaactcaacacaaatag

SEQ ID NO: 465987 - DNA, 33 bp, Homo sapien
attgctaagttgcaaaaataactagccattcac

SEQ ID NO: 465988 - DNA, 33 bp, Homo sapien
attgctaagttgcaaagataactagccattcac

SEQ ID NO: 465989 - DNA, 33 bp, Homo sapien
gacaaagcaagtacaccggttagcaggctattg

SEQ ID NO: 465990 - DNA, 33 bp, Homo sapien
gacaaagcaagtacactggttagcaggctattg

SEQ ID NO: 465991 - DNA, 33 bp, Homo sapien
ttgagacaatccggtaaagctgcaggtgactaa

SEQ ID NO: 465992 - DNA, 33 bp, Homo sapien
ttgagacaatccggtagagctgcaggtgactaa

SEQ ID NO: 465993 - DNA, 33 bp, Homo sapien
tctgacccgcactcgcccttcctgtctggaatc

SEQ ID NO: 465994 - DNA, 33 bp, Homo sapien
tctgacccgcactcgctcttcctgtctggaatc

SEQ ID NO: 465995 - DNA, 33 bp, Homo sapien
ttgtcactgaaaaatgaaaattgactatgggag

SEQ ID NO: 465996 - DNA, 33 bp, Homo sapien
ttgtcactgaaaaatggaaattgactatgggag

SEQ ID NO: 465997 - DNA, 33 bp, Homo sapien
ttttctttaactcacaagacacaaggcattaga

SEQ ID NO: 465998 - DNA, 33 bp, Homo sapien
ttttctttaactcacaggacacaaggcattaga

SEQ ID NO: 465999 - DNA, 33 bp, Homo sapien
acagtgatgatcagagaaaaatcccttggcttc

SEQ ID NO: 466000 - DNA, 33 bp, Homo sapien
acagtgatgatcagaggaaaatcccttggcttc

SEQ ID NO: 466001 - DNA, 33 bp, Homo sapien
atggcggacacccttccccccatcaagcttgag

SEQ ID NO: 466002 - DNA, 33 bp, Homo sapien
atggcggacacccttctccccatcaagcttgag

SEQ ID NO: 466003 - DNA, 33 bp, Homo sapien
ctgcttcttgttagtaccctgaaagtcacagag

SEQ ID NO: 466004 - DNA, 33 bp, Homo sapien
ctgcttcttgttagtatcctgaaagtcacagag

SEQ ID NO: 466005 - DNA, 33 bp, Homo sapien
tcttgactgcaccataacctgaactgctgcagt

SEQ ID NO: 466006 - DNA, 33 bp, Homo sapien
tcttgactgcaccatagcctgaactgctgcagt

SEQ ID NO: 466007 - DNA, 33 bp, Homo sapien
ctgcttcaaaaaacaaacaggtctgccaggtgg

SEQ ID NO: 466008 - DNA, 33 bp, Homo sapien
ctgcttcaaaaaacaaccaggtctgccaggtgg

SEQ ID NO: 466009 - DNA, 33 bp, Homo sapien
catgaggccaacgtcacattagcttattaaatt

SEQ ID NO: 466010 - DNA, 33 bp, Homo sapien
catgaggccaacgtcagattagcttattaaatt

SEQ ID NO: 466011 - DNA, 33 bp, Homo sapien
atcatcctgtctttaaaaactgctaatcattct

SEQ ID NO: 466012 - DNA, 33 bp, Homo sapien
atcatcctgtctttaagaactgctaatcattct

SEQ ID NO: 466013 - DNA, 33 bp, Homo sapien
acacatacatgaacccaagtaatgacagagatc

SEQ ID NO: 466014 - DNA, 33 bp, Homo sapien
acacatacatgaacccgagtaatgacagagatc

SEQ ID NO: 466015 - DNA, 33 bp, Homo sapien
acaagttgattccaaactggatatggccatgcg

SEQ ID NO: 466016 - DNA, 33 bp, Homo sapien
acaagttgattccaaagtggatatggccatgcg

SEQ ID NO: 466017 - DNA, 33 bp, Homo sapien
tagggttgcaagatcaatattgtaaataagtca

SEQ ID NO: 466018 - DNA, 33 bp, Homo sapien
tagggttgcaagatcattattgtaaataagtca

SEQ ID NO: 466019 - DNA, 33 bp, Homo sapien
ttacctgacatttcaccggtaacttccttctat

SEQ ID NO: 466020 - DNA, 33 bp, Homo sapien
ttacctgacatttcactggtaacttccttctat

SEQ ID NO: 466021 - DNA, 33 bp, Homo sapien
ctgatatattcttcagcatgccagttgcattct

SEQ ID NO: 466022 - DNA, 33 bp, Homo sapien
ctgatatattcttcagtatgccagttgcattct

SEQ ID NO: 466023 - DNA, 33 bp, Homo sapien
atgcgagaagaatgccaggatcttcttcagaga

SEQ ID NO: 466024 - DNA, 33 bp, Homo sapien
atgcgagaagaatgcctggatcttcttcagaga

SEQ ID NO: 466025 - DNA, 33 bp, Homo sapien
ctcccacacgctggtgaattactggcaatcctt

SEQ ID NO: 466026 - DNA, 33 bp, Homo sapien
ctcccacacgctggtggattactggcaatcctt

SEQ ID NO: 466027 - DNA, 33 bp, Homo sapien
aagcaggaaacaataggagatactcagataatt

SEQ ID NO: 466028 - DNA, 33 bp, Homo sapien
aagcaggaaacaatagtagatactcagataatt

SEQ ID NO: 466029 - DNA, 33 bp, Homo sapien
tctctagaattcttgacgtaccaattcatgcat

SEQ ID NO: 466030 - DNA, 33 bp, Homo sapien
tctctagaattcttgatgtaccaattcatgcat

SEQ ID NO: 466031 - DNA, 33 bp, Homo sapien
ttctttttataattcaatcgtggccgatcggga

SEQ ID NO: 466032 - DNA, 33 bp, Homo sapien
ttctttttataattcattcgtggccgatcggga

SEQ ID NO: 466033 - DNA, 33 bp, Homo sapien
atactgtaatttttaacacattgaatcaccttt

SEQ ID NO: 466034 - DNA, 33 bp, Homo sapien
atactgtaatttttaagacattgaatcaccttt

SEQ ID NO: 466035 - DNA, 33 bp, Homo sapien
gcagcactagcatatgacaataaccagcaaaga

SEQ ID NO: 466036 - DNA, 33 bp, Homo sapien
gcagcactagcatatggcaataaccagcaaaga

SEQ ID NO: 466037 - DNA, 33 bp, Homo sapien
aacagtgagcctgttaccaagaaccaactcaac

SEQ ID NO: 466038 - DNA, 33 bp, Homo sapien
aacagtgagcctgttatcaagaaccaactcaac

SEQ ID NO: 466039 - DNA, 33 bp, Homo sapien
atggctttattggcaccgatttttatcttttta

SEQ ID NO: 466040 - DNA, 33 bp, Homo sapien
atggctttattggcactgatttttatcttttta

SEQ ID NO: 466041 - DNA, 33 bp, Homo sapien
taaacaccttcaatcactgaacttctcataaag

SEQ ID NO: 466042 - DNA, 33 bp, Homo sapien
taaacaccttcaatcattgaacttctcataaag

SEQ ID NO: 466043 - DNA, 33 bp, Homo sapien
ttcatttaacacattgaataggactttctataa

SEQ ID NO: 466044 - DNA, 33 bp, Homo sapien
ttcatttaacacattggataggactttctataa

SEQ ID NO: 466045 - DNA, 33 bp, Homo sapien
tgtataatcatgagtcaattatccaagccggga

SEQ ID NO: 466046 - DNA, 33 bp, Homo sapien
tgtataatcatgagtccattatccaagccggga

SEQ ID NO: 466047 - DNA, 33 bp, Homo sapien
gtatgtggggcgttagaacaagaaaagggctgt

SEQ ID NO: 466048 - DNA, 33 bp, Homo sapien
gtatgtggggcgttaggacaagaaaagggctgt

SEQ ID NO: 466049 - DNA, 33 bp, Homo sapien
aaggaatctaagtagaacacaagttacaagatt

SEQ ID NO: 466050 - DNA, 33 bp, Homo sapien
aaggaatctaagtagagcacaagttacaagatt

SEQ ID NO: 466051 - DNA, 33 bp, Homo sapien
aggacatttatgttcacgatgttactgcaagat

SEQ ID NO: 466052 - DNA, 33 bp, Homo sapien
aggacatttatgttcatgatgttactgcaagat

SEQ ID NO: 466053 - DNA, 33 bp, Homo sapien
atttacagtcggcggaaaaaaaatgggagcata

SEQ ID NO: 466054 - DNA, 33 bp, Homo sapien
atttacagtcggcggagaaaaaatgggagcata

SEQ ID NO: 466055 - DNA, 33 bp, Homo sapien
tgggaagtggaacaaacgctctggtgaagacag

SEQ ID NO: 466056 - DNA, 33 bp, Homo sapien
tgggaagtggaacaaatgctctggtgaagacag

SEQ ID NO: 466057 - DNA, 33 bp, Homo sapien
tccactcttactaacccctaggatcagatactg

SEQ ID NO: 466058 - DNA, 33 bp, Homo sapien
tccactcttactaaccgctaggatcagatactg

SEQ ID NO: 466059 - DNA, 33 bp, Homo sapien
ctaagggcacggtcagaaggatgattacaaaat

SEQ ID NO: 466060 - DNA, 33 bp, Homo sapien
ctaagggcacggtcaggaggatgattacaaaat

SEQ ID NO: 466061 - DNA, 33 bp, Homo sapien
gatgttgtaaacatagacccactagaaaactca

SEQ ID NO: 466062 - DNA, 33 bp, Homo sapien
gatgttgtaaacatagccccactagaaaactca

SEQ ID NO: 466063 - DNA, 33 bp, Homo sapien
ctgtcacccacaaatccaggcttgtttccccaa

SEQ ID NO: 466064 - DNA, 33 bp, Homo sapien
ctgtcacccacaaatctaggcttgtttccccaa

SEQ ID NO: 466065 - DNA, 33 bp, Homo sapien
gagagccctggagctaccttcctgttattaaat

SEQ ID NO: 466066 - DNA, 33 bp, Homo sapien
gagagccctggagctatcttcctgttattaaat

SEQ ID NO: 466067 - DNA, 33 bp, Homo sapien
gacaatgcatgagaatgaagacacgaaccatgt

SEQ ID NO: 466068 - DNA, 33 bp, Homo sapien
gacaatgcatgagaattaagacacgaaccatgt

SEQ ID NO: 466069 - DNA, 33 bp, Homo sapien
ggaggctgatgtcaaacccaagctgacaatgca

SEQ ID NO: 466070 - DNA, 33 bp, Homo sapien
ggaggctgatgtcaaatccaagctgacaatgca

SEQ ID NO: 466071 - DNA, 33 bp, Homo sapien
cctatttccaaatatcaaggtaccctacataac

SEQ ID NO: 466072 - DNA, 33 bp, Homo sapien
cctatttccaaatatcgaggtaccctacataac

SEQ ID NO: 466073 - DNA, 33 bp, Homo sapien
ccttctcagaggacaacgtatgtaacgcgacat

SEQ ID NO: 466074 - DNA, 33 bp, Homo sapien
ccttctcagaggacaatgtatgtaacgcgacat

SEQ ID NO: 466075 - DNA, 33 bp, Homo sapien
catttattattgactcacaataggcaagtacac

SEQ ID NO: 466076 - DNA, 33 bp, Homo sapien
catttattattgactcgcaataggcaagtacac

SEQ ID NO: 466077 - DNA, 33 bp, Homo sapien
atgtaagtggtcaacaactgaggccaaaatgtg

SEQ ID NO: 466078 - DNA, 33 bp, Homo sapien
atgtaagtggtcaacagctgaggccaaaatgtg

SEQ ID NO: 466079 - DNA, 33 bp, Homo sapien
ggttcacagctttacgcattgttgatttgttgc

SEQ ID NO: 466080 - DNA, 33 bp, Homo sapien
ggttcacagctttacgtattgttgatttgttgc

SEQ ID NO: 466081 - DNA, 33 bp, Homo sapien
aatccatccaatgttacgagtgacagaaaagtc

SEQ ID NO: 466082 - DNA, 33 bp, Homo sapien
aatccatccaatgttatgagtgacagaaaagtc

SEQ ID NO: 466083 - DNA, 33 bp, Homo sapien
aaggtctttgtaaaccaccatgtccagagaagc

SEQ ID NO: 466084 - DNA, 33 bp, Homo sapien
aaggtctttgtaaaccgccatgtccagagaagc

SEQ ID NO: 466085 - DNA, 33 bp, Homo sapien
ttgctcaagatgttctcaccagtaagttataga

SEQ ID NO: 466086 - DNA, 33 bp, Homo sapien
ttgctcaagatgttctgaccagtaagttataga

SEQ ID NO: 466087 - DNA, 33 bp, Homo sapien
ttgtgtgtatcccaaacagtatatggtaccttt

SEQ ID NO: 466088 - DNA, 33 bp, Homo sapien
ttgtgtgtatcccaaagagtatatggtaccttt

SEQ ID NO: 466089 - DNA, 33 bp, Homo sapien
gaattctgtgagtaacaccacggccacggtgca

SEQ ID NO: 466090 - DNA, 33 bp, Homo sapien
gaattctgtgagtaacgccacggccacggtgca

SEQ ID NO: 466091 - DNA, 33 bp, Homo sapien
tggagcatttttcccaaactatgtaatcttttc

SEQ ID NO: 466092 - DNA, 33 bp, Homo sapien
tggagcatttttcccagactatgtaatcttttc

SEQ ID NO: 466093 - DNA, 33 bp, Homo sapien
cttaggcattgtgaatcaccttgtatataaaaa

SEQ ID NO: 466094 - DNA, 33 bp, Homo sapien
cttaggcattgtgaattaccttgtatataaaaa

SEQ ID NO: 466095 - DNA, 33 bp, Homo sapien
gtaggcactcaataagcctctgttgcttcgatt

SEQ ID NO: 466096 - DNA, 33 bp, Homo sapien
gtaggcactcaataagtctctgttgcttcgatt

SEQ ID NO: 466097 - DNA, 33 bp, Homo sapien
tcagtcaccctatggaagtatcgtgtcttgcca

SEQ ID NO: 466098 - DNA, 33 bp, Homo sapien
tcagtcaccctatggaggtatcgtgtcttgcca

SEQ ID NO: 466099 - DNA, 33 bp, Homo sapien
gtatatgcattatcaaataagagactaagtgag

SEQ ID NO: 466100 - DNA, 33 bp, Homo sapien
gtatatgcattatcaagtaagagactaagtgag

SEQ ID NO: 466101 - DNA, 33 bp, Homo sapien
gataaagaggccatgaaaggaaagtctattcaa

SEQ ID NO: 466102 - DNA, 33 bp, Homo sapien
gataaagaggccatgagaggaaagtctattcaa

SEQ ID NO: 466103 - DNA, 33 bp, Homo sapien
gaggcctgagcactcacctatttcaacatatga

SEQ ID NO: 466104 - DNA, 33 bp, Homo sapien
gaggcctgagcactcatctatttcaacatatga

SEQ ID NO: 466105 - DNA, 33 bp, Homo sapien
tgaagttgcatcccagcaaaaggaaactgtacc

SEQ ID NO: 466106 - DNA, 33 bp, Homo sapien
tgaagttgcatcccaggaaaaggaaactgtacc

SEQ ID NO: 466107 - DNA, 33 bp, Homo sapien
gtagtgaacatatttgaaccactatccccaaaa

SEQ ID NO: 466108 - DNA, 33 bp, Homo sapien
gtagtgaacatatttggaccactatccccaaaa

SEQ ID NO: 466109 - DNA, 33 bp, Homo sapien
agggctgagtgacaatcaaacaaaggtcccttc

SEQ ID NO: 466110 - DNA, 33 bp, Homo sapien
agggctgagtgacaatgaaacaaaggtcccttc

SEQ ID NO: 466111 - DNA, 33 bp, Homo sapien
ctttgctaggtaaacaaaaatctggtcctggtg

SEQ ID NO: 466112 - DNA, 33 bp, Homo sapien
ctttgctaggtaaacagaaatctggtcctggtg

SEQ ID NO: 466113 - DNA, 33 bp, Homo sapien
aagcaaagcatactaccagggtaaagaaggtca

SEQ ID NO: 466114 - DNA, 33 bp, Homo sapien
aagcaaagcatactacgagggtaaagaaggtca

SEQ ID NO: 466115 - DNA, 33 bp, Homo sapien
taagttgtatagacgggattagtactaattagt

SEQ ID NO: 466116 - DNA, 33 bp, Homo sapien
taagttgtatagacggtattagtactaattagt

SEQ ID NO: 466117 - DNA, 33 bp, Homo sapien
tccactcagtagttggcatggcaatgtattagg

SEQ ID NO: 466118 - DNA, 33 bp, Homo sapien
tccactcagtagttggtatggcaatgtattagg

SEQ ID NO: 466119 - DNA, 33 bp, Homo sapien
accggtgaatatgtcaccttacaggacacaggg

SEQ ID NO: 466120 - DNA, 33 bp, Homo sapien
accggtgaatatgtcatcttacaggacacaggg

SEQ ID NO: 466121 - DNA, 33 bp, Homo sapien
actaaaaatgcttaaagaaagtgattgcctatg

SEQ ID NO: 466122 - DNA, 33 bp, Homo sapien
actaaaaatgcttaaataaagtgattgcctatg

SEQ ID NO: 466123 - DNA, 33 bp, Homo sapien
taaaatggcctagaaaataagtcctgatctgtg

SEQ ID NO: 466124 - DNA, 33 bp, Homo sapien
taaaatggcctagaaagtaagtcctgatctgtg

SEQ ID NO: 466125 - DNA, 33 bp, Homo sapien
tgttcctctgaatgatcaatgaggtcatcctct

SEQ ID NO: 466126 - DNA, 33 bp, Homo sapien
tgttcctctgaatgatgaatgaggtcatcctct

SEQ ID NO: 466127 - DNA, 33 bp, Homo sapien
aaaagccattctaccaagtgtgtttcttgctgg

SEQ ID NO: 466128 - DNA, 33 bp, Homo sapien
aaaagccattctaccatgtgtgtttcttgctgg

SEQ ID NO: 466129 - DNA, 33 bp, Homo sapien
tgcaacaaaacgaatacgctaactctcattcaa

SEQ ID NO: 466130 - DNA, 33 bp, Homo sapien
tgcaacaaaacgaatatgctaactctcattcaa

SEQ ID NO: 466131 - DNA, 33 bp, Homo sapien
gcttgtgggtgctgcaagctttgagagctttat

SEQ ID NO: 466132 - DNA, 33 bp, Homo sapien
gcttgtgggtgctgcaggctttgagagctttat

SEQ ID NO: 466133 - DNA, 33 bp, Homo sapien
ggggactgtatgccacaagctcgataaaaaggt

SEQ ID NO: 466134 - DNA, 33 bp, Homo sapien
ggggactgtatgccaccagctcgataaaaaggt

SEQ ID NO: 466135 - DNA, 33 bp, Homo sapien
acacattctctcacataaccaatgcgtaatttc

SEQ ID NO: 466136 - DNA, 33 bp, Homo sapien
acacattctctcacatcaccaatgcgtaatttc

SEQ ID NO: 466137 - DNA, 33 bp, Homo sapien
aagggtccagtattcacggtctcttcggggtcc

SEQ ID NO: 466138 - DNA, 33 bp, Homo sapien
aagggtccagtattcatggtctcttcggggtcc

SEQ ID NO: 466139 - DNA, 33 bp, Homo sapien
cttattttgccgaacccattgtaacatggtcaa

SEQ ID NO: 466140 - DNA, 33 bp, Homo sapien
cttattttgccgaacctattgtaacatggtcaa

SEQ ID NO: 466141 - DNA, 33 bp, Homo sapien
tgttttctaataataacgatccagcttctatct

SEQ ID NO: 466142 - DNA, 33 bp, Homo sapien
tgttttctaataataatgatccagcttctatct

SEQ ID NO: 466143 - DNA, 33 bp, Homo sapien
accattagcctttggaaatatggttacagagat

SEQ ID NO: 466144 - DNA, 33 bp, Homo sapien
accattagcctttggacatatggttacagagat

SEQ ID NO: 466145 - DNA, 33 bp, Homo sapien
accatgttgtgcttatcaagataacctcagccc

SEQ ID NO: 466146 - DNA, 33 bp, Homo sapien
accatgttgtgcttatgaagataacctcagccc

SEQ ID NO: 466147 - DNA, 33 bp, Homo sapien
atctttgtggcataataaaacttggatccagat

SEQ ID NO: 466148 - DNA, 33 bp, Homo sapien
atctttgtggcataatgaaacttggatccagat

SEQ ID NO: 466149 - DNA, 33 bp, Homo sapien
gcagtcttaggaaaagcctctgtattgttgcct

SEQ ID NO: 466150 - DNA, 33 bp, Homo sapien
gcagtcttaggaaaagtctctgtattgttgcct

SEQ ID NO: 466151 - DNA, 33 bp, Homo sapien
cacacacaagatggaaatatttgtgccaaatag

SEQ ID NO: 466152 - DNA, 33 bp, Homo sapien
cacacacaagatggaattatttgtgccaaatag

SEQ ID NO: 466153 - DNA, 33 bp, Homo sapien
acatttcgttgttttaagttttgatgttgccca

SEQ ID NO: 466154 - DNA, 33 bp, Homo sapien
acatttcgttgttttaggttttgatgttgccca

SEQ ID NO: 466155 - DNA, 33 bp, Homo sapien
ggtgtgaattgctcagaaaaaacatgatagacg

SEQ ID NO: 466156 - DNA, 33 bp, Homo sapien
ggtgtgaattgctcaggaaaaacatgatagacg

SEQ ID NO: 466157 - DNA, 33 bp, Homo sapien
agtagatcgacagtcccatcattttgaaggtca

SEQ ID NO: 466158 - DNA, 33 bp, Homo sapien
agtagatcgacagtcctatcattttgaaggtca

SEQ ID NO: 466159 - DNA, 33 bp, Homo sapien
tgaagctgcaagtctgaaggctgactgtatgtt

SEQ ID NO: 466160 - DNA, 33 bp, Homo sapien
tgaagctgcaagtctggaggctgactgtatgtt

SEQ ID NO: 466161 - DNA, 33 bp, Homo sapien
ccctccgctggtctcaactacgtctctcattca

SEQ ID NO: 466162 - DNA, 33 bp, Homo sapien
ccctccgctggtctcatctacgtctctcattca

SEQ ID NO: 466163 - DNA, 33 bp, Homo sapien
gaactctctccaagccactcccttctttggctt

SEQ ID NO: 466164 - DNA, 33 bp, Homo sapien
gaactctctccaagccgctcccttctttggctt

SEQ ID NO: 466165 - DNA, 33 bp, Homo sapien
ggaacttaggagtccaaatcctgttaaaaatga

SEQ ID NO: 466166 - DNA, 33 bp, Homo sapien
ggaacttaggagtccacatcctgttaaaaatga

SEQ ID NO: 466167 - DNA, 33 bp, Homo sapien
gtgtcaggtgggaacacaactttcttttctaga

SEQ ID NO: 466168 - DNA, 33 bp, Homo sapien
gtgtcaggtgggaacataactttcttttctaga

SEQ ID NO: 466169 - DNA, 33 bp, Homo sapien
tagccgatgctgaggagatgcttggtgctttct

SEQ ID NO: 466170 - DNA, 33 bp, Homo sapien
tagccgatgctgaggatatgcttggtgctttct

SEQ ID NO: 466171 - DNA, 33 bp, Homo sapien
agatgtatttttaggaacccaaacttgctggag

SEQ ID NO: 466172 - DNA, 33 bp, Homo sapien
agatgtatttttaggagcccaaacttgctggag

SEQ ID NO: 466173 - DNA, 33 bp, Homo sapien
ctcaataactgcatatcaagcctctagatgcca

SEQ ID NO: 466174 - DNA, 33 bp, Homo sapien
ctcaataactgcatattaagcctctagatgcca

SEQ ID NO: 466175 - DNA, 33 bp, Homo sapien
actctactcaagacgacgggggagctaagaaga

SEQ ID NO: 466176 - DNA, 33 bp, Homo sapien
actctactcaagacgatgggggagctaagaaga

SEQ ID NO: 466177 - DNA, 33 bp, Homo sapien
gaatcacatacagccaagtttgaaatgatcaca

SEQ ID NO: 466178 - DNA, 33 bp, Homo sapien
gaatcacatacagccaggtttgaaatgatcaca

SEQ ID NO: 466179 - DNA, 33 bp, Homo sapien
ctggcatggatttgtgaacatgagatgttttct

SEQ ID NO: 466180 - DNA, 33 bp, Homo sapien
ctggcatggatttgtggacatgagatgttttct

SEQ ID NO: 466181 - DNA, 33 bp, Homo sapien
tcagtccgtggaaacaaaggtactgaacaccca

SEQ ID NO: 466182 - DNA, 33 bp, Homo sapien
tcagtccgtggaaacagaggtactgaacaccca

SEQ ID NO: 466183 - DNA, 33 bp, Homo sapien
cagttgaaacttcaaaaaagtcgtaaatatgat

SEQ ID NO: 466184 - DNA, 33 bp, Homo sapien
cagttgaaacttcaaagaagtcgtaaatatgat

SEQ ID NO: 466185 - DNA, 33 bp, Homo sapien
atacgactgtattcacactttacattaacaaat

SEQ ID NO: 466186 - DNA, 33 bp, Homo sapien
atacgactgtattcacgctttacattaacaaat

SEQ ID NO: 466187 - DNA, 33 bp, Homo sapien
tgtgcgatgttggccccatgaggtttagaggag

SEQ ID NO: 466188 - DNA, 33 bp, Homo sapien
tgtgcgatgttggccctatgaggtttagaggag

SEQ ID NO: 466189 - DNA, 33 bp, Homo sapien
acaaatgaaaatataaaaggaatcccagaaatc

SEQ ID NO: 466190 - DNA, 33 bp, Homo sapien
acaaatgaaaatataagaggaatcccagaaatc

SEQ ID NO: 466191 - DNA, 33 bp, Homo sapien
catcattcatccacgaagttgattggaccccgc

SEQ ID NO: 466192 - DNA, 33 bp, Homo sapien
catcattcatccacgaggttgattggaccccgc

SEQ ID NO: 466193 - DNA, 33 bp, Homo sapien
tgataaatcccataataaaaacgtgcagagggc

SEQ ID NO: 466194 - DNA, 33 bp, Homo sapien
tgataaatcccataatgaaaacgtgcagagggc

SEQ ID NO: 466195 - DNA, 33 bp, Homo sapien
gggagggggtcatggacgttaggttcagggtta

SEQ ID NO: 466196 - DNA, 33 bp, Homo sapien
gggagggggtcatggatgttaggttcagggtta

SEQ ID NO: 466197 - DNA, 33 bp, Homo sapien
tctttggagagggcaaggtagcacaaccctttt

SEQ ID NO: 466198 - DNA, 33 bp, Homo sapien
tctttggagagggcaatgtagcacaaccctttt

SEQ ID NO: 466199 - DNA, 33 bp, Homo sapien
tggttattctgaggaaacttctgtaatcacagc

SEQ ID NO: 466200 - DNA, 33 bp, Homo sapien
tggttattctgaggaagcttctgtaatcacagc

SEQ ID NO: 466201 - DNA, 33 bp, Homo sapien
ggaagcccatgaacaacggactcatggaaaaga

SEQ ID NO: 466202 - DNA, 33 bp, Homo sapien
ggaagcccatgaacaatggactcatggaaaaga

SEQ ID NO: 466203 - DNA, 33 bp, Homo sapien
ctttaactgtagactaccaccaacatcctttac

SEQ ID NO: 466204 - DNA, 33 bp, Homo sapien
ctttaactgtagactatcaccaacatcctttac

SEQ ID NO: 466205 - DNA, 33 bp, Homo sapien
acattctattcactacaaatcctgagtttcctc

SEQ ID NO: 466206 - DNA, 33 bp, Homo sapien
acattctattcactacgaatcctgagtttcctc

SEQ ID NO: 466207 - DNA, 33 bp, Homo sapien
cataacaacactgcaacgggcaaagcttcacct

SEQ ID NO: 466208 - DNA, 33 bp, Homo sapien
cataacaacactgcaatgggcaaagcttcacct

SEQ ID NO: 466209 - DNA, 33 bp, Homo sapien
gatttgtttatttttacggctcttcaggcttgt

SEQ ID NO: 466210 - DNA, 33 bp, Homo sapien
gatttgtttatttttatggctcttcaggcttgt

SEQ ID NO: 466211 - DNA, 33 bp, Homo sapien
caagttcactgaacccccaatcgacactgcagg

SEQ ID NO: 466212 - DNA, 33 bp, Homo sapien
caagttcactgaacccgcaatcgacactgcagg

SEQ ID NO: 466213 - DNA, 33 bp, Homo sapien
tcattcattgctcaggccaagaatgtttttacc

SEQ ID NO: 466214 - DNA, 33 bp, Homo sapien
tcattcattgctcaggtcaagaatgtttttacc

SEQ ID NO: 466215 - DNA, 33 bp, Homo sapien
acattcagagatgtgcaaagtatttcaccacaa

SEQ ID NO: 466216 - DNA, 33 bp, Homo sapien
acattcagagatgtgcgaagtatttcaccacaa

SEQ ID NO: 466217 - DNA, 33 bp, Homo sapien
taccccaaggcttctacgttccggcgcaggcgg

SEQ ID NO: 466218 - DNA, 33 bp, Homo sapien
taccccaaggcttctatgttccggcgcaggcgg

SEQ ID NO: 466219 - DNA, 33 bp, Homo sapien
tgtcagaagttcacgcaagcctgaaaatcccgt

SEQ ID NO: 466220 - DNA, 33 bp, Homo sapien
tgtcagaagttcacgcgagcctgaaaatcccgt

SEQ ID NO: 466221 - DNA, 33 bp, Homo sapien
tgatctacaagtctgaatatttttaaattgtac

SEQ ID NO: 466222 - DNA, 33 bp, Homo sapien
tgatctacaagtctgagtatttttaaattgtac

SEQ ID NO: 466223 - DNA, 33 bp, Homo sapien
ctcgcattgtacttgacgggtaactgatcaagg

SEQ ID NO: 466224 - DNA, 33 bp, Homo sapien
ctcgcattgtacttgatgggtaactgatcaagg

SEQ ID NO: 466225 - DNA, 33 bp, Homo sapien
tccacctaaatgccacaaatataggcaagtcta

SEQ ID NO: 466226 - DNA, 33 bp, Homo sapien
tccacctaaatgccactaatataggcaagtcta

SEQ ID NO: 466227 - DNA, 33 bp, Homo sapien
atttcctaaaattcacagaaaggcaattcttgt

SEQ ID NO: 466228 - DNA, 33 bp, Homo sapien
atttcctaaaattcacggaaaggcaattcttgt

SEQ ID NO: 466229 - DNA, 33 bp, Homo sapien
ggaaatctctttaagaaattggccagaagtgat

SEQ ID NO: 466230 - DNA, 33 bp, Homo sapien
ggaaatctctttaagacattggccagaagtgat

SEQ ID NO: 466231 - DNA, 33 bp, Homo sapien
aggaagtgaagcaatagagttagtttgcttttt

SEQ ID NO: 466232 - DNA, 33 bp, Homo sapien
aggaagtgaagcaatatagttagtttgcttttt

SEQ ID NO: 466233 - DNA, 33 bp, Homo sapien
atcgtaccaacctaacaaaattcaagggtttgg

SEQ ID NO: 466234 - DNA, 33 bp, Homo sapien
atcgtaccaacctaacgaaattcaagggtttgg

SEQ ID NO: 466235 - DNA, 33 bp, Homo sapien
ctacagctgggcagagacaacttacacaaggcc

SEQ ID NO: 466236 - DNA, 33 bp, Homo sapien
ctacagctgggcagagtcaacttacacaaggcc

SEQ ID NO: 466237 - DNA, 33 bp, Homo sapien
acttgtactgactcaacatcatagcttagccta

SEQ ID NO: 466238 - DNA, 33 bp, Homo sapien
acttgtactgactcaatatcatagcttagccta

SEQ ID NO: 466239 - DNA, 33 bp, Homo sapien
aaatattttcaagatacggtattttcaacttaa

SEQ ID NO: 466240 - DNA, 33 bp, Homo sapien
aaatattttcaagatatggtattttcaacttaa

SEQ ID NO: 466241 - DNA, 33 bp, Homo sapien
aactaaattaggaaacaaagacgggcctgaaga

SEQ ID NO: 466242 - DNA, 33 bp, Homo sapien
aactaaattaggaaacgaagacgggcctgaaga

SEQ ID NO: 466243 - DNA, 33 bp, Homo sapien
attcgctaatccatacagcgtagctcagaatga

SEQ ID NO: 466244 - DNA, 33 bp, Homo sapien
attcgctaatccatacggcgtagctcagaatga

SEQ ID NO: 466245 - DNA, 33 bp, Homo sapien
gagtaagagaaagtgacggatcagtgggattgg

SEQ ID NO: 466246 - DNA, 33 bp, Homo sapien
gagtaagagaaagtgatggatcagtgggattgg

SEQ ID NO: 466247 - DNA, 33 bp, Homo sapien
gcgagactctgggaagacctgaacacagcccct

SEQ ID NO: 466248 - DNA, 33 bp, Homo sapien
gcgagactctgggaaggcctgaacacagcccct

SEQ ID NO: 466249 - DNA, 33 bp, Homo sapien
acctctctcatcagccaagtcagtgagaataaa

SEQ ID NO: 466250 - DNA, 33 bp, Homo sapien
acctctctcatcagccgagtcagtgagaataaa

SEQ ID NO: 466251 - DNA, 33 bp, Homo sapien
ggcaggcaacacctgcaaagattcgtcacctga

SEQ ID NO: 466252 - DNA, 33 bp, Homo sapien
ggcaggcaacacctgcgaagattcgtcacctga

SEQ ID NO: 466253 - DNA, 33 bp, Homo sapien
agacaagagaaaaacaagacaaggccacatggc

SEQ ID NO: 466254 - DNA, 33 bp, Homo sapien
agacaagagaaaaacaggacaaggccacatggc

SEQ ID NO: 466255 - DNA, 33 bp, Homo sapien
tgtttgctgtgggacaaatcacaagactggggg

SEQ ID NO: 466256 - DNA, 33 bp, Homo sapien
tgtttgctgtgggacagatcacaagactggggg

SEQ ID NO: 466257 - DNA, 33 bp, Homo sapien
atccatttctatcttaaactttcaggggttttt

SEQ ID NO: 466258 - DNA, 33 bp, Homo sapien
atccatttctatcttacactttcaggggttttt

SEQ ID NO: 466259 - DNA, 33 bp, Homo sapien
tggggaattgtcttaacggaccagatggtctgt

SEQ ID NO: 466260 - DNA, 33 bp, Homo sapien
tggggaattgtcttaatggaccagatggtctgt

SEQ ID NO: 466261 - DNA, 33 bp, Homo sapien
cagggttcaaaattaaatctgtaaacagaacaa

SEQ ID NO: 466262 - DNA, 33 bp, Homo sapien
cagggttcaaaattaagtctgtaaacagaacaa

SEQ ID NO: 466263 - DNA, 33 bp, Homo sapien
atgggctcctcttaaacggtgattcttcttccc

SEQ ID NO: 466264 - DNA, 33 bp, Homo sapien
atgggctcctcttaaatggtgattcttcttccc

SEQ ID NO: 466265 - DNA, 33 bp, Homo sapien
ttagagcaaaaatcaactctgaccacatctgat

SEQ ID NO: 466266 - DNA, 33 bp, Homo sapien
ttagagcaaaaatcaattctgaccacatctgat

SEQ ID NO: 466267 - DNA, 33 bp, Homo sapien
cataggtaaggtcaggacattagggtatgataa

SEQ ID NO: 466268 - DNA, 33 bp, Homo sapien
cataggtaaggtcagggcattagggtatgataa

SEQ ID NO: 466269 - DNA, 33 bp, Homo sapien
aaattggaaaggtgacaaagtgtgtgtcgtgtg

SEQ ID NO: 466270 - DNA, 33 bp, Homo sapien
aaattggaaaggtgacgaagtgtgtgtcgtgtg

SEQ ID NO: 466271 - DNA, 33 bp, Homo sapien
cctgggtaagggctccaactctaccggcttctg

SEQ ID NO: 466272 - DNA, 33 bp, Homo sapien
cctgggtaagggctccgactctaccggcttctg

SEQ ID NO: 466273 - DNA, 33 bp, Homo sapien
caaaatgcagagagaacagccaacgctttataa

SEQ ID NO: 466274 - DNA, 33 bp, Homo sapien
caaaatgcagagagaagagccaacgctttataa

SEQ ID NO: 466275 - DNA, 33 bp, Homo sapien
gtctccacaggctgccaagcagggcatttcctg

SEQ ID NO: 466276 - DNA, 33 bp, Homo sapien
gtctccacaggctgccgagcagggcatttcctg

SEQ ID NO: 466277 - DNA, 33 bp, Homo sapien
acacgttggatgcgtcgatgtaggaggtgagct

SEQ ID NO: 466278 - DNA, 33 bp, Homo sapien
acacgttggatgcgtctatgtaggaggtgagct

SEQ ID NO: 466279 - DNA, 33 bp, Homo sapien
aagatgcatgaccatcagagaccatggggccag

SEQ ID NO: 466280 - DNA, 33 bp, Homo sapien
aagatgcatgaccatcggagaccatggggccag

SEQ ID NO: 466281 - DNA, 33 bp, Homo sapien
ctattcagggataaccacacgtaacatcataat

SEQ ID NO: 466282 - DNA, 33 bp, Homo sapien
ctattcagggataaccgcacgtaacatcataat

SEQ ID NO: 466283 - DNA, 33 bp, Homo sapien
agtctaaaatggaagcacaaagcagaatgtcag

SEQ ID NO: 466284 - DNA, 33 bp, Homo sapien
agtctaaaatggaagcgcaaagcagaatgtcag

SEQ ID NO: 466285 - DNA, 33 bp, Homo sapien
ttactcatgtcaattaaaacatcttctttgatc

SEQ ID NO: 466286 - DNA, 33 bp, Homo sapien
ttactcatgtcaattagaacatcttctttgatc

SEQ ID NO: 466287 - DNA, 33 bp, Homo sapien
gtttacttttccctcactcgtggagattgctgg

SEQ ID NO: 466288 - DNA, 33 bp, Homo sapien
gtttacttttccctcagtcgtggagattgctgg

SEQ ID NO: 466289 - DNA, 33 bp, Homo sapien
atatacaaacatactacggctgccacgtggatc

SEQ ID NO: 466290 - DNA, 33 bp, Homo sapien
atatacaaacatactatggctgccacgtggatc

SEQ ID NO: 466291 - DNA, 33 bp, Homo sapien
agccccaaatcggcaacggacctttgaccaagt

SEQ ID NO: 466292 - DNA, 33 bp, Homo sapien
agccccaaatcggcaatggacctttgaccaagt

SEQ ID NO: 466293 - DNA, 33 bp, Homo sapien
caggatgtcgtcacacaaccaactcggcaatgc

SEQ ID NO: 466294 - DNA, 33 bp, Homo sapien
caggatgtcgtcacaccaccaactcggcaatgc

SEQ ID NO: 466295 - DNA, 33 bp, Homo sapien
gcagcacagttcacaacggcaaagatgtggatc

SEQ ID NO: 466296 - DNA, 33 bp, Homo sapien
gcagcacagttcacaatggcaaagatgtggatc

SEQ ID NO: 466297 - DNA, 33 bp, Homo sapien
actaatttccattcccaacaacagtgtataagt

SEQ ID NO: 466298 - DNA, 33 bp, Homo sapien
actaatttccattcccgacaacagtgtataagt

SEQ ID NO: 466299 - DNA, 33 bp, Homo sapien
atctcatcctcaaaacaaaagccttttgcagtg

SEQ ID NO: 466300 - DNA, 33 bp, Homo sapien
atctcatcctcaaaacgaaagccttttgcagtg

SEQ ID NO: 466301 - DNA, 33 bp, Homo sapien
cttcttgtggctgaacaaagacgtgttggaacc

SEQ ID NO: 466302 - DNA, 33 bp, Homo sapien
cttcttgtggctgaacgaagacgtgttggaacc

SEQ ID NO: 466303 - DNA, 33 bp, Homo sapien
aaatatgagcagaaaaaaatcacacaaaaacgt

SEQ ID NO: 466304 - DNA, 33 bp, Homo sapien
aaatatgagcagaaaacaatcacacaaaaacgt

SEQ ID NO: 466305 - DNA, 33 bp, Homo sapien
aaaactgtaaaaacacaaattccacacacataa

SEQ ID NO: 466306 - DNA, 33 bp, Homo sapien
aaaactgtaaaaacacgaattccacacacataa

SEQ ID NO: 466307 - DNA, 33 bp, Homo sapien
cgcctggcccgtcagacgctgctcaggctcagg

SEQ ID NO: 466308 - DNA, 33 bp, Homo sapien
cgcctggcccgtcagaggctgctcaggctcagg

SEQ ID NO: 466309 - DNA, 33 bp, Homo sapien
ccttattgttctaatacccgcgtgagcacaggg

SEQ ID NO: 466310 - DNA, 33 bp, Homo sapien
ccttattgttctaatatccgcgtgagcacaggg

SEQ ID NO: 466311 - DNA, 33 bp, Homo sapien
gctcaaagaaacaaaacgtggctgacatttact

SEQ ID NO: 466312 - DNA, 33 bp, Homo sapien
gctcaaagaaacaaaatgtggctgacatttact

SEQ ID NO: 466313 - DNA, 33 bp, Homo sapien
gcgaagatttagtagccgcgatttcccagtgct

SEQ ID NO: 466314 - DNA, 33 bp, Homo sapien
gcgaagatttagtagctgcgatttcccagtgct

SEQ ID NO: 466315 - DNA, 33 bp, Homo sapien
tcctctctttccggaactgctgtcagagcgaca

SEQ ID NO: 466316 - DNA, 33 bp, Homo sapien
tcctctctttccggaattgctgtcagagcgaca

SEQ ID NO: 466317 - DNA, 33 bp, Homo sapien
gcctcttcatcctgggccaccggggactcgcct

SEQ ID NO: 466318 - DNA, 33 bp, Homo sapien
gcctcttcatcctgggtcaccggggactcgcct

SEQ ID NO: 466319 - DNA, 33 bp, Homo sapien
ggagaagcaagcaggcaaatcgtagtgaggcgt

SEQ ID NO: 466320 - DNA, 33 bp, Homo sapien
ggagaagcaagcaggcgaatcgtagtgaggcgt

SEQ ID NO: 466321 - DNA, 33 bp, Homo sapien
aaaaagtcaaaagagagtaagcattggagaaga

SEQ ID NO: 466322 - DNA, 33 bp, Homo sapien
aaaaagtcaaaagagattaagcattggagaaga

SEQ ID NO: 466323 - DNA, 33 bp, Homo sapien
gtttaagcctaggtgccgaccaactgtacaagc

SEQ ID NO: 466324 - DNA, 33 bp, Homo sapien
gtttaagcctaggtgctgaccaactgtacaagc

SEQ ID NO: 466325 - DNA, 33 bp, Homo sapien
actaataagtctttcccgaagatgggaggagcc

SEQ ID NO: 466326 - DNA, 33 bp, Homo sapien
actaataagtctttccggaagatgggaggagcc

SEQ ID NO: 466327 - DNA, 33 bp, Homo sapien
ccttttgcgcctttcaatctttccagcaagtgt

SEQ ID NO: 466328 - DNA, 33 bp, Homo sapien
ccttttgcgcctttcagtctttccagcaagtgt

SEQ ID NO: 466329 - DNA, 33 bp, Homo sapien
cccaattcagaatagacagaaaccagaggatgg

SEQ ID NO: 466330 - DNA, 33 bp, Homo sapien
cccaattcagaatagatagaaaccagaggatgg

SEQ ID NO: 466331 - DNA, 33 bp, Homo sapien
acgttacatctgcttcacaaaacaagactagga

SEQ ID NO: 466332 - DNA, 33 bp, Homo sapien
acgttacatctgcttcgcaaaacaagactagga

SEQ ID NO: 466333 - DNA, 33 bp, Homo sapien
gattcctgatctgggacgtaatcaatctttctt

SEQ ID NO: 466334 - DNA, 33 bp, Homo sapien
gattcctgatctgggaggtaatcaatctttctt

SEQ ID NO: 466335 - DNA, 33 bp, Homo sapien
aggcattctccagatacgttttaatcgtgtgtg

SEQ ID NO: 466336 - DNA, 33 bp, Homo sapien
aggcattctccagatatgttttaatcgtgtgtg

SEQ ID NO: 466337 - DNA, 33 bp, Homo sapien
gcatgggaattgccccaagacaggttgctgatg

SEQ ID NO: 466338 - DNA, 33 bp, Homo sapien
gcatgggaattgccccgagacaggttgctgatg

SEQ ID NO: 466339 - DNA, 33 bp, Homo sapien
tttcctgtgtgactggaagacgtgtcagggaga

SEQ ID NO: 466340 - DNA, 33 bp, Homo sapien
tttcctgtgtgactgggagacgtgtcagggaga

SEQ ID NO: 466341 - DNA, 33 bp, Homo sapien
cagtcacgtttcctgcacacctgagggttcact

SEQ ID NO: 466342 - DNA, 33 bp, Homo sapien
cagtcacgtttcctgcgcacctgagggttcact

SEQ ID NO: 466343 - DNA, 33 bp, Homo sapien
tccgagaacagcctcacgtctggctcaggccac

SEQ ID NO: 466344 - DNA, 33 bp, Homo sapien
tccgagaacagcctcatgtctggctcaggccac

SEQ ID NO: 466345 - DNA, 33 bp, Homo sapien
tttgtgttgcagtggcaaggggatatagacctg

SEQ ID NO: 466346 - DNA, 33 bp, Homo sapien
tttgtgttgcagtggcgaggggatatagacctg

SEQ ID NO: 466347 - DNA, 33 bp, Homo sapien
catcacactgggggtcacagcattgccaggccc

SEQ ID NO: 466348 - DNA, 33 bp, Homo sapien
catcacactgggggtcgcagcattgccaggccc

SEQ ID NO: 466349 - DNA, 33 bp, Homo sapien
tggccttttgtgcatacagtctttcatcttttc

SEQ ID NO: 466350 - DNA, 33 bp, Homo sapien
tggccttttgtgcatagagtctttcatcttttc

SEQ ID NO: 466351 - DNA, 33 bp, Homo sapien
ccgcgatgtatccaaacgtgactgatagcggaa

SEQ ID NO: 466352 - DNA, 33 bp, Homo sapien
ccgcgatgtatccaaatgtgactgatagcggaa

SEQ ID NO: 466353 - DNA, 33 bp, Homo sapien
tgcatagcaccttcccaacatgaatttccatct

SEQ ID NO: 466354 - DNA, 33 bp, Homo sapien
tgcatagcaccttcccgacatgaatttccatct

SEQ ID NO: 466355 - DNA, 33 bp, Homo sapien
ggatgatcttaggagcaatgactctggttgaca

SEQ ID NO: 466356 - DNA, 33 bp, Homo sapien
ggatgatcttaggagccatgactctggttgaca

SEQ ID NO: 466357 - DNA, 33 bp, Homo sapien
gttcttggttatttaccgccagatattaactca

SEQ ID NO: 466358 - DNA, 33 bp, Homo sapien
gttcttggttatttactgccagatattaactca

SEQ ID NO: 466359 - DNA, 33 bp, Homo sapien
gtaagtgcccattaacagaggaatagattttaa

SEQ ID NO: 466360 - DNA, 33 bp, Homo sapien
gtaagtgcccattaacggaggaatagattttaa

SEQ ID NO: 466361 - DNA, 33 bp, Homo sapien
catattttggctgtgacattgtaaacagtgtca

SEQ ID NO: 466362 - DNA, 33 bp, Homo sapien
catattttggctgtgatattgtaaacagtgtca

SEQ ID NO: 466363 - DNA, 33 bp, Homo sapien
ctatgaagctatataaccaaatcagaatggtta

SEQ ID NO: 466364 - DNA, 33 bp, Homo sapien
ctatgaagctatataagcaaatcagaatggtta

SEQ ID NO: 466365 - DNA, 33 bp, Homo sapien
tgctagggagtccctgccacactcactctccca

SEQ ID NO: 466366 - DNA, 33 bp, Homo sapien
tgctagggagtccctgtcacactcactctccca

SEQ ID NO: 466367 - DNA, 33 bp, Homo sapien
ggtgtcatatttgtcaagtttctccagatggca

SEQ ID NO: 466368 - DNA, 33 bp, Homo sapien
ggtgtcatatttgtcaggtttctccagatggca

SEQ ID NO: 466369 - DNA, 33 bp, Homo sapien
ttcactttcaacagacaaatatcttctatgcca

SEQ ID NO: 466370 - DNA, 33 bp, Homo sapien
ttcactttcaacagacgaatatcttctatgcca

SEQ ID NO: 466371 - DNA, 33 bp, Homo sapien
cttcctgagcaaaagcaaaggtatgaagtatgt

SEQ ID NO: 466372 - DNA, 33 bp, Homo sapien
cttcctgagcaaaagcgaaggtatgaagtatgt

SEQ ID NO: 466373 - DNA, 33 bp, Homo sapien
ccacctgcaggatggacgctctgagatattcca

SEQ ID NO: 466374 - DNA, 33 bp, Homo sapien
ccacctgcaggatggatgctctgagatattcca

SEQ ID NO: 466375 - DNA, 33 bp, Homo sapien
gagaacacagagctaaccagtcacaggaccgaa

SEQ ID NO: 466376 - DNA, 33 bp, Homo sapien
gagaacacagagctaatcagtcacaggaccgaa

SEQ ID NO: 466377 - DNA, 33 bp, Homo sapien
gccttcttttgcttgacatttagagaacctttt

SEQ ID NO: 466378 - DNA, 33 bp, Homo sapien
gccttcttttgcttgagatttagagaacctttt

SEQ ID NO: 466379 - DNA, 33 bp, Homo sapien
tctcctgaacaatgtcaagcttatgtatctgat

SEQ ID NO: 466380 - DNA, 33 bp, Homo sapien
tctcctgaacaatgtccagcttatgtatctgat

SEQ ID NO: 466381 - DNA, 33 bp, Homo sapien
ctgggccaggcatgaaaagttactaccactgtg

SEQ ID NO: 466382 - DNA, 33 bp, Homo sapien
ctgggccaggcatgaagagttactaccactgtg

SEQ ID NO: 466383 - DNA, 33 bp, Homo sapien
tctctataatttctaacgaaagatcacatttca

SEQ ID NO: 466384 - DNA, 33 bp, Homo sapien
tctctataatttctaatgaaagatcacatttca

SEQ ID NO: 466385 - DNA, 33 bp, Homo sapien
ttggtcacagaaaaaaacaatctctacagacca

SEQ ID NO: 466386 - DNA, 33 bp, Homo sapien
ttggtcacagaaaaaagcaatctctacagacca

SEQ ID NO: 466387 - DNA, 33 bp, Homo sapien
cctggcactcatttaaccaaagacttcaatcag

SEQ ID NO: 466388 - DNA, 33 bp, Homo sapien
cctggcactcatttaatcaaagacttcaatcag

SEQ ID NO: 466389 - DNA, 33 bp, Homo sapien
ccaggtggagggaagcagaagaacttaagcaag

SEQ ID NO: 466390 - DNA, 33 bp, Homo sapien
ccaggtggagggaagcggaagaacttaagcaag

SEQ ID NO: 466391 - DNA, 33 bp, Homo sapien
tcaacgagaaagtttaagattagagtgaactgt

SEQ ID NO: 466392 - DNA, 33 bp, Homo sapien
tcaacgagaaagtttaggattagagtgaactgt

SEQ ID NO: 466393 - DNA, 33 bp, Homo sapien
aatgttcagaattgtcaacctcaggcaacttgc

SEQ ID NO: 466394 - DNA, 33 bp, Homo sapien
aatgttcagaattgtcgacctcaggcaacttgc

SEQ ID NO: 466395 - DNA, 33 bp, Homo sapien
tcatcattagctcttaaaacatcgtaaaactct

SEQ ID NO: 466396 - DNA, 33 bp, Homo sapien
tcatcattagctcttagaacatcgtaaaactct

SEQ ID NO: 466397 - DNA, 33 bp, Homo sapien
tgatgttccgaacacccgctagtggataaggga

SEQ ID NO: 466398 - DNA, 33 bp, Homo sapien
tgatgttccgaacacctgctagtggataaggga

SEQ ID NO: 466399 - DNA, 33 bp, Homo sapien
tggcttcataacatacagaacctttctttattt

SEQ ID NO: 466400 - DNA, 33 bp, Homo sapien
tggcttcataacatactgaacctttctttattt

SEQ ID NO: 466401 - DNA, 33 bp, Homo sapien
cccgagtcttcatgccaagttcacggccacggt

SEQ ID NO: 466402 - DNA, 33 bp, Homo sapien
cccgagtcttcatgccgagttcacggccacggt

SEQ ID NO: 466403 - DNA, 33 bp, Homo sapien
cagattctgcaggccaatatctatattaagtac

SEQ ID NO: 466404 - DNA, 33 bp, Homo sapien
cagattctgcaggccagtatctatattaagtac

SEQ ID NO: 466405 - DNA, 33 bp, Homo sapien
aacagaaaatggtatacggtgcttgtattttgg

SEQ ID NO: 466406 - DNA, 33 bp, Homo sapien
aacagaaaatggtatatggtgcttgtattttgg

SEQ ID NO: 466407 - DNA, 33 bp, Homo sapien
taaataggtatttctcccgagctctctatgtca

SEQ ID NO: 466408 - DNA, 33 bp, Homo sapien
taaataggtatttctctcgagctctctatgtca

SEQ ID NO: 466409 - DNA, 33 bp, Homo sapien
agtttatgggatagaactgtaatggtgctaagg

SEQ ID NO: 466410 - DNA, 33 bp, Homo sapien
agtttatgggatagaagtgtaatggtgctaagg

SEQ ID NO: 466411 - DNA, 33 bp, Homo sapien
ccttgcctctgttgatcaagtgcatgggatttt

SEQ ID NO: 466412 - DNA, 33 bp, Homo sapien
ccttgcctctgttgattaagtgcatgggatttt

SEQ ID NO: 466413 - DNA, 33 bp, Homo sapien
aagggaacctcatgaacgcagagtcctccaaat

SEQ ID NO: 466414 - DNA, 33 bp, Homo sapien
aagggaacctcatgaatgcagagtcctccaaat

SEQ ID NO: 466415 - DNA, 33 bp, Homo sapien
actcatttgtcctgaactaagtggttgtgaata

SEQ ID NO: 466416 - DNA, 33 bp, Homo sapien
actcatttgtcctgaattaagtggttgtgaata

SEQ ID NO: 466417 - DNA, 33 bp, Homo sapien
gtgtctttagcttctcccatgcccgagtccttc

SEQ ID NO: 466418 - DNA, 33 bp, Homo sapien
gtgtctttagcttctctcatgcccgagtccttc

SEQ ID NO: 466419 - DNA, 33 bp, Homo sapien
gctggcatatgagcacactgaaatcactcttgt

SEQ ID NO: 466420 - DNA, 33 bp, Homo sapien
gctggcatatgagcacgctgaaatcactcttgt

SEQ ID NO: 466421 - DNA, 33 bp, Homo sapien
gacagaagcctgaagaaataaagaagaggggag

SEQ ID NO: 466422 - DNA, 33 bp, Homo sapien
gacagaagcctgaagagataaagaagaggggag

SEQ ID NO: 466423 - DNA, 33 bp, Homo sapien
gtcagaaggcctggatcatatcgctgttgaaat

SEQ ID NO: 466424 - DNA, 33 bp, Homo sapien
gtcagaaggcctggattatatcgctgttgaaat

SEQ ID NO: 466425 - DNA, 33 bp, Homo sapien
aaaatgtctttcttaacgtaagcactatcactg

SEQ ID NO: 466426 - DNA, 33 bp, Homo sapien
aaaatgtctttcttaatgtaagcactatcactg

SEQ ID NO: 466427 - DNA, 33 bp, Homo sapien
gcacctggaacttgtcactacggcatcctgtcg

SEQ ID NO: 466428 - DNA, 33 bp, Homo sapien
gcacctggaacttgtcgctacggcatcctgtcg

SEQ ID NO: 466429 - DNA, 33 bp, Homo sapien
ttttcttacaacaaaaagagagtcatgtctatt

SEQ ID NO: 466430 - DNA, 33 bp, Homo sapien
ttttcttacaacaaaaggagagtcatgtctatt

SEQ ID NO: 466431 - DNA, 33 bp, Homo sapien
tagcatgtcttaagcacgtcaaatcacttaaat

SEQ ID NO: 466432 - DNA, 33 bp, Homo sapien
tagcatgtcttaagcatgtcaaatcacttaaat

SEQ ID NO: 466433 - DNA, 33 bp, Homo sapien
tttctcaatcagtggaaggttttcatttaatta

SEQ ID NO: 466434 - DNA, 33 bp, Homo sapien
tttctcaatcagtggagggttttcatttaatta

SEQ ID NO: 466435 - DNA, 33 bp, Homo sapien
gcccggcctagaaccaaataattttctaaaagt

SEQ ID NO: 466436 - DNA, 33 bp, Homo sapien
gcccggcctagaaccacataattttctaaaagt

SEQ ID NO: 466437 - DNA, 33 bp, Homo sapien
tcattaatcaaacacaaggtattgcattagcgt

SEQ ID NO: 466438 - DNA, 33 bp, Homo sapien
tcattaatcaaacacacggtattgcattagcgt

SEQ ID NO: 466439 - DNA, 33 bp, Homo sapien
ggtgaaaactgacctgaatccgctgatctttgt

SEQ ID NO: 466440 - DNA, 33 bp, Homo sapien
ggtgaaaactgacctgcatccgctgatctttgt

SEQ ID NO: 466441 - DNA, 33 bp, Homo sapien
ttccaggaagggtcaacaaggacagctgaacct

SEQ ID NO: 466442 - DNA, 33 bp, Homo sapien
ttccaggaagggtcaagaaggacagctgaacct

SEQ ID NO: 466443 - DNA, 33 bp, Homo sapien
cttacagcaaccccagaattggctaaagataga

SEQ ID NO: 466444 - DNA, 33 bp, Homo sapien
cttacagcaaccccaggattggctaaagataga

SEQ ID NO: 466445 - DNA, 33 bp, Homo sapien
catctcagcccaaaaactccataaactgataag

SEQ ID NO: 466446 - DNA, 33 bp, Homo sapien
catctcagcccaaaaattccataaactgataag

SEQ ID NO: 466447 - DNA, 33 bp, Homo sapien
attctaggattggtacactaggtcccagtggca

SEQ ID NO: 466448 - DNA, 33 bp, Homo sapien
attctaggattggtacgctaggtcccagtggca

SEQ ID NO: 466449 - DNA, 33 bp, Homo sapien
tcagggcctgaaccaccaagcaaacattaacca

SEQ ID NO: 466450 - DNA, 33 bp, Homo sapien
tcagggcctgaaccactaagcaaacattaacca

SEQ ID NO: 466451 - DNA, 33 bp, Homo sapien
gtgatcctggaaataacgagtgcttttattgga

SEQ ID NO: 466452 - DNA, 33 bp, Homo sapien
gtgatcctggaaataatgagtgcttttattgga

SEQ ID NO: 466453 - DNA, 33 bp, Homo sapien
tgaagctactctgcacaacactataatggggaa

SEQ ID NO: 466454 - DNA, 33 bp, Homo sapien
tgaagctactctgcacgacactataatggggaa

SEQ ID NO: 466455 - DNA, 33 bp, Homo sapien
ctacctccatggtttcaccggttccagaatgtc

SEQ ID NO: 466456 - DNA, 33 bp, Homo sapien
ctacctccatggtttcgccggttccagaatgtc

SEQ ID NO: 466457 - DNA, 33 bp, Homo sapien
gttccctcatgtgcaacgcaagtgacctcccag

SEQ ID NO: 466458 - DNA, 33 bp, Homo sapien
gttccctcatgtgcaatgcaagtgacctcccag

SEQ ID NO: 466459 - DNA, 33 bp, Homo sapien
ttactgaaaacaagaaaaagaatcatatgacat

SEQ ID NO: 466460 - DNA, 33 bp, Homo sapien
ttactgaaaacaagaagaagaatcatatgacat

SEQ ID NO: 466461 - DNA, 33 bp, Homo sapien
cttcttgtcttagtgacgatttttcttgtgatt

SEQ ID NO: 466462 - DNA, 33 bp, Homo sapien
cttcttgtcttagtgatgatttttcttgtgatt

SEQ ID NO: 466463 - DNA, 33 bp, Homo sapien
actaagacaagaagaacaaacacctgaggaaca

SEQ ID NO: 466464 - DNA, 33 bp, Homo sapien
actaagacaagaagaataaacacctgaggaaca

SEQ ID NO: 466465 - DNA, 33 bp, Homo sapien
agccacctgagacgccagagttgcccatgtagc

SEQ ID NO: 466466 - DNA, 33 bp, Homo sapien
agccacctgagacgccggagttgcccatgtagc

SEQ ID NO: 466467 - DNA, 33 bp, Homo sapien
atatattctaaatccaactagtcttctataaaa

SEQ ID NO: 466468 - DNA, 33 bp, Homo sapien
atatattctaaatccagctagtcttctataaaa

SEQ ID NO: 466469 - DNA, 33 bp, Homo sapien
agatctcaagcacttgaaaatgctggaaggctt

SEQ ID NO: 466470 - DNA, 33 bp, Homo sapien
agatctcaagcacttgcaaatgctggaaggctt

SEQ ID NO: 466471 - DNA, 33 bp, Homo sapien
catcagtatcaagatcccattctgtcctgttca

SEQ ID NO: 466472 - DNA, 33 bp, Homo sapien
catcagtatcaagatctcattctgtcctgttca

SEQ ID NO: 466473 - DNA, 33 bp, Homo sapien
ttacattcactatgaaagcaaattcactgaacc

SEQ ID NO: 466474 - DNA, 33 bp, Homo sapien
ttacattcactatgaaggcaaattcactgaacc

SEQ ID NO: 466475 - DNA, 33 bp, Homo sapien
ggctcggagactctaaactggttgatgaagttc

SEQ ID NO: 466476 - DNA, 33 bp, Homo sapien
ggctcggagactctaagctggttgatgaagttc

SEQ ID NO: 466477 - DNA, 33 bp, Homo sapien
cagtcactcaacagacagagcttccttctaaat

SEQ ID NO: 466478 - DNA, 33 bp, Homo sapien
cagtcactcaacagaccgagcttccttctaaat

SEQ ID NO: 466479 - DNA, 33 bp, Homo sapien
actgaagaggctgaccaaggaaggccgtgaatg

SEQ ID NO: 466480 - DNA, 33 bp, Homo sapien
actgaagaggctgaccgaggaaggccgtgaatg

SEQ ID NO: 466481 - DNA, 33 bp, Homo sapien
cattctgcaaactgcgcatcatggcctcagtct

SEQ ID NO: 466482 - DNA, 33 bp, Homo sapien
cattctgcaaactgcgtatcatggcctcagtct

SEQ ID NO: 466483 - DNA, 33 bp, Homo sapien
ccctttccaacaggtgaactgcaaagacagaga

SEQ ID NO: 466484 - DNA, 33 bp, Homo sapien
ccctttccaacaggtgcactgcaaagacagaga

SEQ ID NO: 466485 - DNA, 33 bp, Homo sapien
acaggtttatctctgccgaatgtgaacgatttg

SEQ ID NO: 466486 - DNA, 33 bp, Homo sapien
acaggtttatctctgctgaatgtgaacgatttg

SEQ ID NO: 466487 - DNA, 33 bp, Homo sapien
atgtctttggcagatgaaacatcagtcttaaag

SEQ ID NO: 466488 - DNA, 33 bp, Homo sapien
atgtctttggcagatggaacatcagtcttaaag

SEQ ID NO: 466489 - DNA, 33 bp, Homo sapien
aattcaagagatcctcacaagggttctggacac

SEQ ID NO: 466490 - DNA, 33 bp, Homo sapien
aattcaagagatcctcgcaagggttctggacac

SEQ ID NO: 466491 - DNA, 33 bp, Homo sapien
ttccagcatcatttctaacagcgaaaatcttgg

SEQ ID NO: 466492 - DNA, 33 bp, Homo sapien
ttccagcatcatttcttacagcgaaaatcttgg

SEQ ID NO: 466493 - DNA, 33 bp, Homo sapien
tatatgggagtggaaaattcaaaaattcaacag

SEQ ID NO: 466494 - DNA, 33 bp, Homo sapien
tatatgggagtggaaagttcaaaaattcaacag

SEQ ID NO: 466495 - DNA, 33 bp, Homo sapien
aggacaaaaggagtaacattgtgagatcatgtc

SEQ ID NO: 466496 - DNA, 33 bp, Homo sapien
aggacaaaaggagtaagattgtgagatcatgtc

SEQ ID NO: 466497 - DNA, 33 bp, Homo sapien
aagaatcagagaaaaccattcatggatgatatt

SEQ ID NO: 466498 - DNA, 33 bp, Homo sapien
aagaatcagagaaaactattcatggatgatatt

SEQ ID NO: 466499 - DNA, 33 bp, Homo sapien
actttattgtggtaacactttcatccaaatata

SEQ ID NO: 466500 - DNA, 33 bp, Homo sapien
actttattgtggtaacgctttcatccaaatata

SEQ ID NO: 466501 - DNA, 33 bp, Homo sapien
cagacatttgaagaagaatcggtaccaatcata

SEQ ID NO: 466502 - DNA, 33 bp, Homo sapien
cagacatttgaagaaggatcggtaccaatcata

SEQ ID NO: 466503 - DNA, 33 bp, Homo sapien
agggaggtggctaagaatattccgagtggcaac

SEQ ID NO: 466504 - DNA, 33 bp, Homo sapien
agggaggtggctaagagtattccgagtggcaac

SEQ ID NO: 466505 - DNA, 33 bp, Homo sapien
aaattgtaccaaagcacattttgaaacatttgc

SEQ ID NO: 466506 - DNA, 33 bp, Homo sapien
aaattgtaccaaagcatattttgaaacatttgc

SEQ ID NO: 466507 - DNA, 33 bp, Homo sapien
ttggtacaatttccacaagtgtctaagaaaccc

SEQ ID NO: 466508 - DNA, 33 bp, Homo sapien
ttggtacaatttccacgagtgtctaagaaaccc

SEQ ID NO: 466509 - DNA, 33 bp, Homo sapien
tttatttccaaatgtaaatagttgtcaatatat

SEQ ID NO: 466510 - DNA, 33 bp, Homo sapien
tttatttccaaatgtacatagttgtcaatatat

SEQ ID NO: 466511 - DNA, 33 bp, Homo sapien
acacagtcgtgaaggaggtaagccatttcacat

SEQ ID NO: 466512 - DNA, 33 bp, Homo sapien
acacagtcgtgaaggatgtaagccatttcacat

SEQ ID NO: 466513 - DNA, 33 bp, Homo sapien
tctggtgcctgtaagaagatgatctaggtctca

SEQ ID NO: 466514 - DNA, 33 bp, Homo sapien
tctggtgcctgtaagacgatgatctaggtctca

SEQ ID NO: 466515 - DNA, 33 bp, Homo sapien
gacaatggcatgaccagctgtacaaatggaact

SEQ ID NO: 466516 - DNA, 33 bp, Homo sapien
gacaatggcatgaccatctgtacaaatggaact

SEQ ID NO: 466517 - DNA, 33 bp, Homo sapien
cactgtgcatcagcccaggacgtcacttgtttt

SEQ ID NO: 466518 - DNA, 33 bp, Homo sapien
cactgtgcatcagccccggacgtcacttgtttt

SEQ ID NO: 466519 - DNA, 33 bp, Homo sapien
tacagaaaacactgaactgcctgggagtgaaaa

SEQ ID NO: 466520 - DNA, 33 bp, Homo sapien
tacagaaaacactgaattgcctgggagtgaaaa

SEQ ID NO: 466521 - DNA, 33 bp, Homo sapien
gtagaaaagggagataaatcagtacagaaaaca

SEQ ID NO: 466522 - DNA, 33 bp, Homo sapien
gtagaaaagggagatagatcagtacagaaaaca

SEQ ID NO: 466523 - DNA, 33 bp, Homo sapien
tgaatgaagtcaacacagagcgaagcagagctg

SEQ ID NO: 466524 - DNA, 33 bp, Homo sapien
tgaatgaagtcaacacggagcgaagcagagctg

SEQ ID NO: 466525 - DNA, 33 bp, Homo sapien
cagagaggcaggtgacaaatgagaccaagcaca

SEQ ID NO: 466526 - DNA, 33 bp, Homo sapien
cagagaggcaggtgacgaatgagaccaagcaca

SEQ ID NO: 466527 - DNA, 33 bp, Homo sapien
ttatttcatggttacacattgtatggatttatc

SEQ ID NO: 466528 - DNA, 33 bp, Homo sapien
ttatttcatggttacatattgtatggatttatc

SEQ ID NO: 466529 - DNA, 33 bp, Homo sapien
atgccactccctcaaccacaggagtcattacac

SEQ ID NO: 466530 - DNA, 33 bp, Homo sapien
atgccactccctcaactacaggagtcattacac

SEQ ID NO: 466531 - DNA, 33 bp, Homo sapien
ataaaaacgtgtggaacgaatcaatcaacaaaa

SEQ ID NO: 466532 - DNA, 33 bp, Homo sapien
ataaaaacgtgtggaaggaatcaatcaacaaaa

SEQ ID NO: 466533 - DNA, 33 bp, Homo sapien
gagaggcatttggaaacgtgccagtatgaggaa

SEQ ID NO: 466534 - DNA, 33 bp, Homo sapien
gagaggcatttggaaatgtgccagtatgaggaa

SEQ ID NO: 466535 - DNA, 33 bp, Homo sapien
gtaagtaatataagaccaataatgctggcaaat

SEQ ID NO: 466536 - DNA, 33 bp, Homo sapien
gtaagtaatataagactaataatgctggcaaat

SEQ ID NO: 466537 - DNA, 33 bp, Homo sapien
tcttagtcctactccccgaggtgtagaagaagg

SEQ ID NO: 466538 - DNA, 33 bp, Homo sapien
tcttagtcctactccctgaggtgtagaagaagg

SEQ ID NO: 466539 - DNA, 33 bp, Homo sapien
atctatgataaacacactctctgtaatgtataa

SEQ ID NO: 466540 - DNA, 33 bp, Homo sapien
atctatgataaacacagtctctgtaatgtataa

SEQ ID NO: 466541 - DNA, 33 bp, Homo sapien
cctcctacagctgacactgaaattctatccctc

SEQ ID NO: 466542 - DNA, 33 bp, Homo sapien
cctcctacagctgacattgaaattctatccctc

SEQ ID NO: 466543 - DNA, 33 bp, Homo sapien
tcctccattcacaaggaccacttctgtctgtct

SEQ ID NO: 466544 - DNA, 33 bp, Homo sapien
tcctccattcacaagggccacttctgtctgtct

SEQ ID NO: 466545 - DNA, 33 bp, Homo sapien
ttgcagttagattccacaggtaattgctgaaga

SEQ ID NO: 466546 - DNA, 33 bp, Homo sapien
ttgcagttagattccataggtaattgctgaaga

SEQ ID NO: 466547 - DNA, 33 bp, Homo sapien
cttgtaacaagatccacggtagtttctgtgcgc

SEQ ID NO: 466548 - DNA, 33 bp, Homo sapien
cttgtaacaagatccagggtagtttctgtgcgc

SEQ ID NO: 466549 - DNA, 33 bp, Homo sapien
acccaaacccaccaaaacaaaagctgccttgta

SEQ ID NO: 466550 - DNA, 33 bp, Homo sapien
acccaaacccaccaaagcaaaagctgccttgta

SEQ ID NO: 466551 - DNA, 33 bp, Homo sapien
tgaagcaactgcaggaccaaggtactaccaggg

SEQ ID NO: 466552 - DNA, 33 bp, Homo sapien
tgaagcaactgcaggatcaaggtactaccaggg

SEQ ID NO: 466553 - DNA, 33 bp, Homo sapien
tcgaacagatacagaactaaaaagagcaatcac

SEQ ID NO: 466554 - DNA, 33 bp, Homo sapien
tcgaacagatacagaagtaaaaagagcaatcac

SEQ ID NO: 466555 - DNA, 33 bp, Homo sapien
cttttaaaaaggaccaatctgctgggaaggagg

SEQ ID NO: 466556 - DNA, 33 bp, Homo sapien
cttttaaaaaggaccagtctgctgggaaggagg

SEQ ID NO: 466557 - DNA, 33 bp, Homo sapien
ttctgtggaaaaacagaagggcttagaggaaag

SEQ ID NO: 466558 - DNA, 33 bp, Homo sapien
ttctgtggaaaaacaggagggcttagaggaaag

SEQ ID NO: 466559 - DNA, 33 bp, Homo sapien
atgctacaataacctcaatcacctcagaccata

SEQ ID NO: 466560 - DNA, 33 bp, Homo sapien
atgctacaataacctcgatcacctcagaccata

SEQ ID NO: 466561 - DNA, 33 bp, Homo sapien
tagaatggcttgactaccagctatacattacat

SEQ ID NO: 466562 - DNA, 33 bp, Homo sapien
tagaatggcttgactatcagctatacattacat

SEQ ID NO: 466563 - DNA, 33 bp, Homo sapien
gttcacatgagaatgacatactagccaacaaaa

SEQ ID NO: 466564 - DNA, 33 bp, Homo sapien
gttcacatgagaatgagatactagccaacaaaa

SEQ ID NO: 466565 - DNA, 33 bp, Homo sapien
cataccattagcaatgacagaaaagggatttga

SEQ ID NO: 466566 - DNA, 33 bp, Homo sapien
cataccattagcaatggcagaaaagggatttga

SEQ ID NO: 466567 - DNA, 33 bp, Homo sapien
cacacacacacgaaagaatttcctctataggtg

SEQ ID NO: 466568 - DNA, 33 bp, Homo sapien
cacacacacacgaaaggatttcctctataggtg

SEQ ID NO: 466569 - DNA, 33 bp, Homo sapien
aaactacattggtccacaaacttctagggaggg

SEQ ID NO: 466570 - DNA, 33 bp, Homo sapien
aaactacattggtccataaacttctagggaggg

SEQ ID NO: 466571 - DNA, 33 bp, Homo sapien
acattggtttgaagacagattaagagaataaat

SEQ ID NO: 466572 - DNA, 33 bp, Homo sapien
acattggtttgaagacggattaagagaataaat

SEQ ID NO: 466573 - DNA, 33 bp, Homo sapien
aaagggctgaagtcacaacatgtgatgcatgta

SEQ ID NO: 466574 - DNA, 33 bp, Homo sapien
aaagggctgaagtcacgacatgtgatgcatgta

SEQ ID NO: 466575 - DNA, 33 bp, Homo sapien
ccccagtggcagtgaacgcttctcaaggaggag

SEQ ID NO: 466576 - DNA, 33 bp, Homo sapien
ccccagtggcagtgaatgcttctcaaggaggag

SEQ ID NO: 466577 - DNA, 33 bp, Homo sapien
gctttctagttttgtaaaagatggagtgtaatc

SEQ ID NO: 466578 - DNA, 33 bp, Homo sapien
gctttctagttttgtacaagatggagtgtaatc

SEQ ID NO: 466579 - DNA, 33 bp, Homo sapien
tctcattacttagtgacaacaaacacctacaac

SEQ ID NO: 466580 - DNA, 33 bp, Homo sapien
tctcattacttagtgataacaaacacctacaac

SEQ ID NO: 466581 - DNA, 33 bp, Homo sapien
tccccagtcactattccacttgcagcttccggg

SEQ ID NO: 466582 - DNA, 33 bp, Homo sapien
tccccagtcactattctacttgcagcttccggg

SEQ ID NO: 466583 - DNA, 33 bp, Homo sapien
tccgacatactcctcaaaccctttccttacgcc

SEQ ID NO: 466584 - DNA, 33 bp, Homo sapien
tccgacatactcctcagaccctttccttacgcc

SEQ ID NO: 466585 - DNA, 33 bp, Homo sapien
tcgctacgataagaagaagcataacgtcccaca

SEQ ID NO: 466586 - DNA, 33 bp, Homo sapien
tcgctacgataagaagcagcataacgtcccaca

SEQ ID NO: 466587 - DNA, 33 bp, Homo sapien
attctatgtttctcacactgatgcaatacactc

SEQ ID NO: 466588 - DNA, 33 bp, Homo sapien
attctatgtttctcactctgatgcaatacactc

SEQ ID NO: 466589 - DNA, 33 bp, Homo sapien
atgaaatgggtctcaaagaaggtaggacatttc

SEQ ID NO: 466590 - DNA, 33 bp, Homo sapien
atgaaatgggtctcaaggaaggtaggacatttc

SEQ ID NO: 466591 - DNA, 33 bp, Homo sapien
ggaagagatttctgagaatggcacctaagacag

SEQ ID NO: 466592 - DNA, 33 bp, Homo sapien
ggaagagatttctgaggatggcacctaagacag

SEQ ID NO: 466593 - DNA, 33 bp, Homo sapien
ggcgtttcttaagaggaagtctaagagtataga

SEQ ID NO: 466594 - DNA, 33 bp, Homo sapien
ggcgtttcttaagagggagtctaagagtataga

SEQ ID NO: 466595 - DNA, 33 bp, Homo sapien
acatttatcaccttcccgctatggaccaggcgc

SEQ ID NO: 466596 - DNA, 33 bp, Homo sapien
acatttatcaccttcctgctatggaccaggcgc

SEQ ID NO: 466597 - DNA, 33 bp, Homo sapien
gctcgtggcctcagaacgtgtgatttctttgct

SEQ ID NO: 466598 - DNA, 33 bp, Homo sapien
gctcgtggcctcagaatgtgtgatttctttgct

SEQ ID NO: 466599 - DNA, 33 bp, Homo sapien
atatgcaaacttagccaggcatacttgagaggc

SEQ ID NO: 466600 - DNA, 33 bp, Homo sapien
atatgcaaacttagccgggcatacttgagaggc

SEQ ID NO: 466601 - DNA, 33 bp, Homo sapien
atgtacaatagtttgacagtcactttgtgcttc

SEQ ID NO: 466602 - DNA, 33 bp, Homo sapien
atgtacaatagtttgatagtcactttgtgcttc

SEQ ID NO: 466603 - DNA, 33 bp, Homo sapien
acacattggcgtaaaacagcacgtattgacaat

SEQ ID NO: 466604 - DNA, 33 bp, Homo sapien
acacattggcgtaaaatagcacgtattgacaat

SEQ ID NO: 466605 - DNA, 33 bp, Homo sapien
atgaaaactgataacaaaccaaatagaataaag

SEQ ID NO: 466606 - DNA, 33 bp, Homo sapien
atgaaaactgataacacaccaaatagaataaag

SEQ ID NO: 466607 - DNA, 33 bp, Homo sapien
tgagtttgggcccaggcatgacattccattctc

SEQ ID NO: 466608 - DNA, 33 bp, Homo sapien
tgagtttgggcccaggtatgacattccattctc

SEQ ID NO: 466609 - DNA, 33 bp, Homo sapien
tctccctagactcataagttgaaacctaatttc

SEQ ID NO: 466610 - DNA, 33 bp, Homo sapien
tctccctagactcatatgttgaaacctaatttc

SEQ ID NO: 466611 - DNA, 33 bp, Homo sapien
agtgttatttccagcaaacttccacacagtgcc

SEQ ID NO: 466612 - DNA, 33 bp, Homo sapien
agtgttatttccagcagacttccacacagtgcc

SEQ ID NO: 466613 - DNA, 33 bp, Homo sapien
tcagttattttccatacgtggcttagttgctaa

SEQ ID NO: 466614 - DNA, 33 bp, Homo sapien
tcagttattttccatatgtggcttagttgctaa

SEQ ID NO: 466615 - DNA, 33 bp, Homo sapien
atagcgtgtagttgaagcttgccttttaaacca

SEQ ID NO: 466616 - DNA, 33 bp, Homo sapien
atagcgtgtagttgaatcttgccttttaaacca

SEQ ID NO: 466617 - DNA, 33 bp, Homo sapien
caaagttagtaattagaagcgagtactgggaac

SEQ ID NO: 466618 - DNA, 33 bp, Homo sapien
caaagttagtaattaggagcgagtactgggaac

SEQ ID NO: 466619 - DNA, 33 bp, Homo sapien
tgtttagtgctgtaagaacctgttttccaaagt

SEQ ID NO: 466620 - DNA, 33 bp, Homo sapien
tgtttagtgctgtaaggacctgttttccaaagt

SEQ ID NO: 466621 - DNA, 33 bp, Homo sapien
taatagagaaaaataactcagttgattgagaat

SEQ ID NO: 466622 - DNA, 33 bp, Homo sapien
taatagagaaaaataattcagttgattgagaat

SEQ ID NO: 466623 - DNA, 33 bp, Homo sapien; identical to SEQ ID NO: 466621

SEQ ID NO: 466624 - DNA, 33 bp, Homo sapien; identical to SEQ ID NO: 466622

SEQ ID NO: 466625 - DNA, 33 bp, Homo sapien
gaggacaggggatatgacagtcgtggacaggaa

SEQ ID NO: 466626 - DNA, 33 bp, Homo sapien
gaggacaggggatatggcagtcgtggacaggaa

SEQ ID NO: 466627 - DNA, 33 bp, Homo sapien; identical to SEQ ID NO: 466625

SEQ ID NO: 466628 - DNA, 33 bp, Homo sapien; identical to SEQ ID NO: 466626

SEQ ID NO: 466629 - DNA, 33 bp, Homo sapien
atgtagcatttccccaataaattctctttcttc

SEQ ID NO: 466630 - DNA, 33 bp, Homo sapien
atgtagcatttccccagtaaattctctttcttc

SEQ ID NO: 466631 - DNA, 33 bp, Homo sapien
aatactgtatagttgacctttgagaacactttt

SEQ ID NO: 466632 - DNA, 33 bp, Homo sapien
aatactgtatagttgagctttgagaacactttt

SEQ ID NO: 466633 - DNA, 33 bp, Homo sapien
gagcagcacgaatccacgtttataaggtttaaa

SEQ ID NO: 466634 - DNA, 33 bp, Homo sapien
gagcagcacgaatccatgtttataaggtttaaa

SEQ ID NO: 466635 - DNA, 33 bp, Homo sapien
tgaaaactacaaatgactatcacttttctaaaa

SEQ ID NO: 466636 - DNA, 33 bp, Homo sapien
tgaaaactacaaatgattatcacttttctaaaa

SEQ ID NO: 466637 - DNA, 33 bp, Homo sapien
acgcaaacctgtagcgaagaggtgggtcagaca

SEQ ID NO: 466638 - DNA, 33 bp, Homo sapien
acgcaaacctgtagcgtagaggtgggtcagaca

SEQ ID NO: 466639 - DNA, 33 bp, Homo sapien
tctatagatttgtgcagaactatatgttcagtt

SEQ ID NO: 466640 - DNA, 33 bp, Homo sapien
tctatagatttgtgcataactatatgttcagtt

SEQ ID NO: 466641 - DNA, 33 bp, Homo sapien
ccttggtctttatctcactgctattgcttttgg

SEQ ID NO: 466642 - DNA, 33 bp, Homo sapien
ccttggtctttatctcgctgctattgcttttgg

SEQ ID NO: 466643 - DNA, 33 bp, Homo sapien
ttgtccttcagtaacaacagaatgtttcccata

SEQ ID NO: 466644 - DNA, 33 bp, Homo sapien
ttgtccttcagtaacaccagaatgtttcccata

SEQ ID NO: 466645 - DNA, 33 bp, Homo sapien
ttttcttttgactgtgcattcttttttgtgacg

SEQ ID NO: 466646 - DNA, 33 bp, Homo sapien
ttttcttttgactgtggattcttttttgtgacg

SEQ ID NO: 466647 - DNA, 33 bp, Homo sapien
gaatttacagagtaccaagccttctccagtgac

SEQ ID NO: 466648 - DNA, 33 bp, Homo sapien
gaatttacagagtaccgagccttctccagtgac

SEQ ID NO: 466649 - DNA, 33 bp, Homo sapien
gcatcctgtaaatataaatttgaagaagtggca

SEQ ID NO: 466650 - DNA, 33 bp, Homo sapien
gcatcctgtaaatatacatttgaagaagtggca

SEQ ID NO: 466651 - DNA, 33 bp, Homo sapien
aaaagtataatacataaacgttgaatgaaatct

SEQ ID NO: 466652 - DNA, 33 bp, Homo sapien
aaaagtataatacatacacgttgaatgaaatct

SEQ ID NO: 466653 - DNA, 33 bp, Homo sapien
atgggtttctttgagacggcaaaaatctaacac

SEQ ID NO: 466654 - DNA, 33 bp, Homo sapien
atgggtttctttgagatggcaaaaatctaacac

SEQ ID NO: 466655 - DNA, 33 bp, Homo sapien
agaaaaggcccaagatcaatctatgaggtcttc

SEQ ID NO: 466656 - DNA, 33 bp, Homo sapien
agaaaaggcccaagattaatctatgaggtcttc

SEQ ID NO: 466657 - DNA, 33 bp, Homo sapien
aagtgaatgacatttaagtaggattttcctgct

SEQ ID NO: 466658 - DNA, 33 bp, Homo sapien
aagtgaatgacatttaggtaggattttcctgct

SEQ ID NO: 466659 - DNA, 33 bp, Homo sapien
agcagacttttaggaccctgttgcatggtctcc

SEQ ID NO: 466660 - DNA, 33 bp, Homo sapien
agcagacttttaggacgctgttgcatggtctcc

SEQ ID NO: 466661 - DNA, 33 bp, Homo sapien
acaggcccatcatgaaacaatttctctccacat

SEQ ID NO: 466662 - DNA, 33 bp, Homo sapien
acaggcccatcatgaagcaatttctctccacat

SEQ ID NO: 466663 - DNA, 33 bp, Homo sapien
aaatagcaacatccaactcctgacaaactgcat

SEQ ID NO: 466664 - DNA, 33 bp, Homo sapien
aaatagcaacatccaattcctgacaaactgcat

SEQ ID NO: 466665 - DNA, 33 bp, Homo sapien
catttcttgaactcaaagatcatttcagtatac

SEQ ID NO: 466666 - DNA, 33 bp, Homo sapien
catttcttgaactcaatgatcatttcagtatac

SEQ ID NO: 466667 - DNA, 33 bp, Homo sapien
ccttcaaggcaactagaattatggattttaact

SEQ ID NO: 466668 - DNA, 33 bp, Homo sapien
ccttcaaggcaactagcattatggattttaact

SEQ ID NO: 466669 - DNA, 33 bp, Homo sapien
ataggagttcattaaaaataaccagcccaggag

SEQ ID NO: 466670 - DNA, 33 bp, Homo sapien
ataggagttcattaaacataaccagcccaggag

SEQ ID NO: 466671 - DNA, 33 bp, Homo sapien
cttctatttttgcctcacttctcttcaaattat

SEQ ID NO: 466672 - DNA, 33 bp, Homo sapien
cttctatttttgcctcgcttctcttcaaattat

SEQ ID NO: 466673 - DNA, 33 bp, Homo sapien
ctttttataaagtgtgcagaaagcaaacttggg

SEQ ID NO: 466674 - DNA, 33 bp, Homo sapien
ctttttataaagtgtggagaaagcaaacttggg

SEQ ID NO: 466675 - DNA, 33 bp, Homo sapien
aaccacaacattgttacgactcgatttctcaaa

SEQ ID NO: 466676 - DNA, 33 bp, Homo sapien
aaccacaacattgttatgactcgatttctcaaa

SEQ ID NO: 466677 - DNA, 33 bp, Homo sapien
gagactttaatgctgacggcttgctcaacttta

SEQ ID NO: 466678 - DNA, 33 bp, Homo sapien
gagactttaatgctgatggcttgctcaacttta

SEQ ID NO: 466679 - DNA, 33 bp, Homo sapien
ttttatcagagtactcacaatgttagacatttt

SEQ ID NO: 466680 - DNA, 33 bp, Homo sapien
ttttatcagagtactcccaatgttagacatttt

SEQ ID NO: 466681 - DNA, 33 bp, Homo sapien
tatctctagatggatacggttatagctttttat

SEQ ID NO: 466682 - DNA, 33 bp, Homo sapien
tatctctagatggatatggttatagctttttat

SEQ ID NO: 466683 - DNA, 33 bp, Homo sapien
tttataacttgagaaaatctgcttatttataaa

SEQ ID NO: 466684 - DNA, 33 bp, Homo sapien
tttataacttgagaaactctgcttatttataaa

SEQ ID NO: 466685 - DNA, 33 bp, Homo sapien
atgtttctgtaaaagcagatctaagcaatggtg

SEQ ID NO: 466686 - DNA, 33 bp, Homo sapien
atgtttctgtaaaagcggatctaagcaatggtg

SEQ ID NO: 466687 - DNA, 33 bp, Homo sapien
atacatcttcctactcgcttgcccaattttgac

SEQ ID NO: 466688 - DNA, 33 bp, Homo sapien
atacatcttcctactctcttgcccaattttgac

SEQ ID NO: 466689 - DNA, 33 bp, Homo sapien
tttcatgttctcctgaagaaaacacaaagcctt

SEQ ID NO: 466690 - DNA, 33 bp, Homo sapien
tttcatgttctcctgacgaaaacacaaagcctt

SEQ ID NO: 466691 - DNA, 33 bp, Homo sapien
agtcccaacacctagagattctgattctgtgga

SEQ ID NO: 466692 - DNA, 33 bp, Homo sapien
agtcccaacacctagatattctgattctgtgga

SEQ ID NO: 466693 - DNA, 33 bp, Homo sapien
gtaatgccatctgtagaccgtgcttgtcagcag

SEQ ID NO: 466694 - DNA, 33 bp, Homo sapien
gtaatgccatctgtagtccgtgcttgtcagcag

SEQ ID NO: 466695 - DNA, 33 bp, Homo sapien
atatttattttgcaccaactaggtaccagattc

SEQ ID NO: 466696 - DNA, 33 bp, Homo sapien
atatttattttgcaccgactaggtaccagattc

SEQ ID NO: 466697 - DNA, 33 bp, Homo sapien
gaaagaatatgctgaactatgtatgtatccagg

SEQ ID NO: 466698 - DNA, 33 bp, Homo sapien
gaaagaatatgctgaattatgtatgtatccagg

SEQ ID NO: 466699 - DNA, 33 bp, Homo sapien
tacaaaatcactgaccacaaaaataatacaatg

SEQ ID NO: 466700 - DNA, 33 bp, Homo sapien
tacaaaatcactgaccgcaaaaataatacaatg

SEQ ID NO: 466701 - DNA, 33 bp, Homo sapien
ttacgttttggttggaaatgaaaacaagtcttt

SEQ ID NO: 466702 - DNA, 33 bp, Homo sapien
ttacgttttggttggacatgaaaacaagtcttt

SEQ ID NO: 466703 - DNA, 33 bp, Homo sapien
agcacactggaaataaaatatcaaagacttgtt

SEQ ID NO: 466704 - DNA, 33 bp, Homo sapien
agcacactggaaataacatatcaaagacttgtt

SEQ ID NO: 466705 - DNA, 33 bp, Homo sapien
aggcaagcctttgggcacaggcaaatctgtaga

SEQ ID NO: 466706 - DNA, 33 bp, Homo sapien
aggcaagcctttgggcgcaggcaaatctgtaga

SEQ ID NO: 466707 - DNA, 33 bp, Homo sapien
aaataagtaatggtgaaaacactccctattcaa

SEQ ID NO: 466708 - DNA, 33 bp, Homo sapien
aaataagtaatggtgagaacactccctattcaa

SEQ ID NO: 466709 - DNA, 33 bp, Homo sapien
ttcttttttctgttacacaactccatattataa

SEQ ID NO: 466710 - DNA, 33 bp, Homo sapien
ttcttttttctgttacgcaactccatattataa

SEQ ID NO: 466711 - DNA, 33 bp, Homo sapien
aaatgggccaatagcaaggggcaataggcctca

SEQ ID NO: 466712 - DNA, 33 bp, Homo sapien
aaatgggccaatagcagggggcaataggcctca

SEQ ID NO: 466713 - DNA, 33 bp, Homo sapien
aatatcaaactgtgtcaaatactgtagattaaa

SEQ ID NO: 466714 - DNA, 33 bp, Homo sapien
aatatcaaactgtgtcgaatactgtagattaaa

SEQ ID NO: 466715 - DNA, 33 bp, Homo sapien
taggatgggatagaaaatgagaggtactattta

SEQ ID NO: 466716 - DNA, 33 bp, Homo sapien
taggatgggatagaaagtgagaggtactattta

SEQ ID NO: 466717 - DNA, 33 bp, Homo sapien
gatccgagcaggaaacactactcaataatgtgt

SEQ ID NO: 466718 - DNA, 33 bp, Homo sapien
gatccgagcaggaaacgctactcaataatgtgt

SEQ ID NO: 466719 - DNA, 33 bp, Homo sapien
acgtagagctggaacacacagtgctcctttaac

SEQ ID NO: 466720 - DNA, 33 bp, Homo sapien
acgtagagctggaacatacagtgctcctttaac

SEQ ID NO: 466721 - DNA, 33 bp, Homo sapien
catgggcgtgggagataaatgtctattactaaa

SEQ ID NO: 466722 - DNA, 33 bp, Homo sapien
catgggcgtgggagatgaatgtctattactaaa

SEQ ID NO: 466723 - DNA, 33 bp, Homo sapien
gtaacggctgttaagaaagtaaatgtgcctttt

SEQ ID NO: 466724 - DNA, 33 bp, Homo sapien
gtaacggctgttaagagagtaaatgtgcctttt

SEQ ID NO: 466725 - DNA, 33 bp, Homo sapien
ggaagtcttgttgaagaaagcctcataaggcca

SEQ ID NO: 466726 - DNA, 33 bp, Homo sapien
ggaagtcttgttgaaggaagcctcataaggcca

SEQ ID NO: 466727 - DNA, 33 bp, Homo sapien
gaggaagacagtgtgaacaccgtggacagtatc

SEQ ID NO: 466728 - DNA, 33 bp, Homo sapien
gaggaagacagtgtgaccaccgtggacagtatc

SEQ ID NO: 466729 - DNA, 33 bp, Homo sapien
ttgaagatcaagggcacggcataattttgtaat

SEQ ID NO: 466730 - DNA, 33 bp, Homo sapien
ttgaagatcaagggcatggcataattttgtaat

SEQ ID NO: 466731 - DNA, 33 bp, Homo sapien
ggaaggagcattcaaaagttccacgtaaccctc

SEQ ID NO: 466732 - DNA, 33 bp, Homo sapien
ggaaggagcattcaaaggttccacgtaaccctc

SEQ ID NO: 466733 - DNA, 33 bp, Homo sapien
catttggtaaaattcaatacagtctctcagaat

SEQ ID NO: 466734 - DNA, 33 bp, Homo sapien
catttggtaaaattcagtacagtctctcagaat

SEQ ID NO: 466735 - DNA, 33 bp, Homo sapien
cccactataccttttaacaactttatcacagta

SEQ ID NO: 466736 - DNA, 33 bp, Homo sapien
cccactataccttttagcaactttatcacagta

SEQ ID NO: 466737 - DNA, 33 bp, Homo sapien
tattgctcatggtggacgttgttggcattatgg

SEQ ID NO: 466738 - DNA, 33 bp, Homo sapien
tattgctcatggtggaggttgttggcattatgg

SEQ ID NO: 466739 - DNA, 33 bp, Homo sapien
agcctggactcgggacaagttacctacgtttta

SEQ ID NO: 466740 - DNA, 33 bp, Homo sapien
agcctggactcgggaccagttacctacgtttta

SEQ ID NO: 466741 - DNA, 33 bp, Homo sapien
aagaagcaatacactgaaaaagcacaaaattat

SEQ ID NO: 466742 - DNA, 33 bp, Homo sapien
aagaagcaatacactggaaaagcacaaaattat

SEQ ID NO: 466743 - DNA, 33 bp, Homo sapien
ttttaaaaagtgaggcactattagcaaaatata

SEQ ID NO: 466744 - DNA, 33 bp, Homo sapien
ttttaaaaagtgaggctctattagcaaaatata

SEQ ID NO: 466745 - DNA, 33 bp, Homo sapien
cttgctaggggagataataagagtcaatatgtt

SEQ ID NO: 466746 - DNA, 33 bp, Homo sapien
cttgctaggggagatagtaagagtcaatatgtt

SEQ ID NO: 466747 - DNA, 33 bp, Homo sapien
ccccttgatcaggtgacgaaagttaacctcctg

SEQ ID NO: 466748 - DNA, 33 bp, Homo sapien
ccccttgatcaggtgatgaaagttaacctcctg

SEQ ID NO: 466749 - DNA, 33 bp, Homo sapien
acctccagtcacttccaccaatccttccatgca

SEQ ID NO: 466750 - DNA, 33 bp, Homo sapien
acctccagtcacttccgccaatccttccatgca

SEQ ID NO: 466751 - DNA, 33 bp, Homo sapien
gatagaatttctatggcaagacaagatctctgc

SEQ ID NO: 466752 - DNA, 33 bp, Homo sapien
gatagaatttctatgggaagacaagatctctgc

SEQ ID NO: 466753 - DNA, 33 bp, Homo sapien
atcacaataagttcatcatcagggtagtgctgg

SEQ ID NO: 466754 - DNA, 33 bp, Homo sapien
atcacaataagttcatgatcagggtagtgctgg

SEQ ID NO: 466755 - DNA, 33 bp, Homo sapien
ctaggccgctgtaacaaagtaccacaagctgag

SEQ ID NO: 466756 - DNA, 33 bp, Homo sapien
ctaggccgctgtaacagagtaccacaagctgag

SEQ ID NO: 466757 - DNA, 33 bp, Homo sapien
actgaatagctgctgaataatagacaacaaatg

SEQ ID NO: 466758 - DNA, 33 bp, Homo sapien
actgaatagctgctgagtaatagacaacaaatg

SEQ ID NO: 466759 - DNA, 33 bp, Homo sapien
gaagccattattcacgcaattgatgaacttgga

SEQ ID NO: 466760 - DNA, 33 bp, Homo sapien
gaagccattattcacgtaattgatgaacttgga

SEQ ID NO: 466761 - DNA, 33 bp, Homo sapien; identical to SEQ ID NO: 466759

SEQ ID NO: 466762 - DNA, 33 bp, Homo sapien; identical to SEQ ID NO: 466760

SEQ ID NO: 466763 - DNA, 33 bp, Homo sapien
cagacaacctagcaaccccgacattcagatgtt

SEQ ID NO: 466764 - DNA, 33 bp, Homo sapien
cagacaacctagcaactccgacattcagatgtt

SEQ ID NO: 466765 - DNA, 33 bp, Homo sapien
tttactgcatttttccaacaataattctgctta

SEQ ID NO: 466766 - DNA, 33 bp, Homo sapien
tttactgcatttttcccacaataattctgctta

SEQ ID NO: 466767 - DNA, 33 bp, Homo sapien
tgtccctcataatcaaaaagatcttctccaaat

SEQ ID NO: 466768 - DNA, 33 bp, Homo sapien
tgtccctcataatcaagaagatcttctccaaat

SEQ ID NO: 466769 - DNA, 33 bp, Homo sapien
catctgcctctggcaaaaatttgtgaagtattc

SEQ ID NO: 466770 - DNA, 33 bp, Homo sapien
catctgcctctggcaagaatttgtgaagtattc

SEQ ID NO: 466771 - DNA, 33 bp, Homo sapien
tgtcagagtttattctcacgtgtgcagcatcct

SEQ ID NO: 466772 - DNA, 33 bp, Homo sapien
tgtcagagtttattctgacgtgtgcagcatcct

SEQ ID NO: 466773 - DNA, 33 bp, Homo sapien
ttccatctgtagacctaaaaatggcaccatcac

SEQ ID NO: 466774 - DNA, 33 bp, Homo sapien
ttccatctgtagacctgaaaatggcaccatcac

SEQ ID NO: 466775 - DNA, 33 bp, Homo sapien
tgtgttaaattctcaacgagttctactctagca

SEQ ID NO: 466776 - DNA, 33 bp, Homo sapien
tgtgttaaattctcaatgagttctactctagca

SEQ ID NO: 466777 - DNA, 33 bp, Homo sapien
ttagcaactgacttacaaaattcttaaaaactg

SEQ ID NO: 466778 - DNA, 33 bp, Homo sapien
ttagcaactgacttacgaaattcttaaaaactg

SEQ ID NO: 466779 - DNA, 33 bp, Homo sapien
atgatgcctcaagaaacgtctaactgaggccct

SEQ ID NO: 466780 - DNA, 33 bp, Homo sapien
atgatgcctcaagaaatgtctaactgaggccct

SEQ ID NO: 466781 - DNA, 33 bp, Homo sapien
aagcattaaaaggctacgcagccaaagtgcccc

SEQ ID NO: 466782 - DNA, 33 bp, Homo sapien
aagcattaaaaggctatgcagccaaagtgcccc

SEQ ID NO: 466783 - DNA, 33 bp, Homo sapien
cagcagcagctaaacacgagtcttgtgaaaaat

SEQ ID NO: 466784 - DNA, 33 bp, Homo sapien
cagcagcagctaaacatgagtcttgtgaaaaat

SEQ ID NO: 466785 - DNA, 33 bp, Homo sapien
tattactttcaaataaacaatacagttccttat

SEQ ID NO: 466786 - DNA, 33 bp, Homo sapien
tattactttcaaataagcaatacagttccttat

SEQ ID NO: 466787 - DNA, 33 bp, Homo sapien
ggcattgctcactcagaagagtaaagttttaag

SEQ ID NO: 466788 - DNA, 33 bp, Homo sapien
ggcattgctcactcaggagagtaaagttttaag

SEQ ID NO: 466789 - DNA, 33 bp, Homo sapien
gtgttgattgaatgtacgcttaggctaaggcat

SEQ ID NO: 466790 - DNA, 33 bp, Homo sapien
gtgttgattgaatgtatgcttaggctaaggcat

SEQ ID NO: 466791 - DNA, 33 bp, Homo sapien
gagtttaatgcccactaaccatttacgaggtgt

SEQ ID NO: 466792 - DNA, 33 bp, Homo sapien
gagtttaatgcccactgaccatttacgaggtgt

SEQ ID NO: 466793 - DNA, 33 bp, Homo sapien
aagcacacacctggaaagtctgttaatccttgg

SEQ ID NO: 466794 - DNA, 33 bp, Homo sapien
aagcacacacctggaatgtctgttaatccttgg

SEQ ID NO: 466795 - DNA, 33 bp, Homo sapien
gaaatatggagtcttaagtgttttaatgcatgg

SEQ ID NO: 466796 - DNA, 33 bp, Homo sapien
gaaatatggagtcttacgtgttttaatgcatgg

SEQ ID NO: 466797 - DNA, 33 bp, Homo sapien
gcagtttcaatttgcccacaccgcctctgtccc

SEQ ID NO: 466798 - DNA, 33 bp, Homo sapien
gcagtttcaatttgcctacaccgcctctgtccc

SEQ ID NO: 466799 - DNA, 33 bp, Homo sapien
gtcaataaacttcgtacggatggaacatatctc

SEQ ID NO: 466800 - DNA, 33 bp, Homo sapien
gtcaataaacttcgtatggatggaacatatctc

SEQ ID NO: 466801 - DNA, 33 bp, Homo sapien
cttgcaaaactagtgacaagaatgcaaaaacgc

SEQ ID NO: 466802 - DNA, 33 bp, Homo sapien
cttgcaaaactagtgagaagaatgcaaaaacgc

SEQ ID NO: 466803 - DNA, 33 bp, Homo sapien
agttttatgcatgggaataattgcatctgaagt

SEQ ID NO: 466804 - DNA, 33 bp, Homo sapien
agttttatgcatgggagtaattgcatctgaagt

SEQ ID NO: 466805 - DNA, 33 bp, Homo sapien
agctttctgatttggacaaaaatactaatctct

SEQ ID NO: 466806 - DNA, 33 bp, Homo sapien
agctttctgatttggagaaaaatactaatctct

SEQ ID NO: 466807 - DNA, 33 bp, Homo sapien
taaaataccctagatcaaagttgatacaaagat

SEQ ID NO: 466808 - DNA, 33 bp, Homo sapien
taaaataccctagatcgaagttgatacaaagat

SEQ ID NO: 466809 - DNA, 33 bp, Homo sapien
ttttgcagagttgaagaacaaaccttaaaaatt

SEQ ID NO: 466810 - DNA, 33 bp, Homo sapien
ttttgcagagttgaaggacaaaccttaaaaatt

SEQ ID NO: 466811 - DNA, 33 bp, Homo sapien
acttactataattttacgtttgcaggaaaatac

SEQ ID NO: 466812 - DNA, 33 bp, Homo sapien
acttactataattttatgtttgcaggaaaatac

SEQ ID NO: 466813 - DNA, 33 bp, Homo sapien
aaatttcagaatctaagtggggaagtagaaaag

SEQ ID NO: 466814 - DNA, 33 bp, Homo sapien
aaatttcagaatctaattggggaagtagaaaag

SEQ ID NO: 466815 - DNA, 33 bp, Homo sapien
acacacacactttcaactgagcagaaacatcag

SEQ ID NO: 466816 - DNA, 33 bp, Homo sapien
acacacacactttcaattgagcagaaacatcag

SEQ ID NO: 466817 - DNA, 33 bp, Homo sapien
acgagaagtccatgaacttaaatcaacaatatg

SEQ ID NO: 466818 - DNA, 33 bp, Homo sapien
acgagaagtccatgaatttaaatcaacaatatg

SEQ ID NO: 466819 - DNA, 33 bp, Homo sapien
ttctatataactggaaccatcaatatggaatta

SEQ ID NO: 466820 - DNA, 33 bp, Homo sapien
ttctatataactggaatcatcaatatggaatta

SEQ ID NO: 466821 - DNA, 33 bp, Homo sapien
aaccctcctcttactgaaactcaagctgatttc

SEQ ID NO: 466822 - DNA, 33 bp, Homo sapien
aaccctcctcttactgtaactcaagctgatttc

SEQ ID NO: 466823 - DNA, 33 bp, Homo sapien
tgagttgtgatccacaaagtcaatccaagtcta

SEQ ID NO: 466824 - DNA, 33 bp, Homo sapien
tgagttgtgatccacagagtcaatccaagtcta

SEQ ID NO: 466825 - DNA, 33 bp, Homo sapien
tcaaggaaaaaaagccaaatggtagctccctct

SEQ ID NO: 466826 - DNA, 33 bp, Homo sapien
tcaaggaaaaaaagccgaatggtagctccctct

SEQ ID NO: 466827 - DNA, 33 bp, Homo sapien
atgacaagagtctaaacttaggcagagcggtgt

SEQ ID NO: 466828 - DNA, 33 bp, Homo sapien
atgacaagagtctaaagttaggcagagcggtgt

SEQ ID NO: 466829 - DNA, 33 bp, Homo sapien
ctagatttaaaaaaacaaagtgagagagagaga

SEQ ID NO: 466830 - DNA, 33 bp, Homo sapien
ctagatttaaaaaaacgaagtgagagagagaga

SEQ ID NO: 466831 - DNA, 33 bp, Homo sapien
agcatggcagcgaggactacagaaaaccactga

SEQ ID NO: 466832 - DNA, 33 bp, Homo sapien
agcatggcagcgaggagtacagaaaaccactga

SEQ ID NO: 466833 - DNA, 33 bp, Homo sapien
acaacctctcattcaaatatgttcagtgcaggg

SEQ ID NO: 466834 - DNA, 33 bp, Homo sapien
acaacctctcattcaactatgttcagtgcaggg

SEQ ID NO: 466835 - DNA, 33 bp, Homo sapien
agggcttacgtttgaagtctgtctgctttgccc

SEQ ID NO: 466836 - DNA, 33 bp, Homo sapien
agggcttacgtttgaattctgtctgctttgccc

SEQ ID NO: 466837 - DNA, 33 bp, Homo sapien
gcccgcatctcctggcagattattcccaagcaa

SEQ ID NO: 466838 - DNA, 33 bp, Homo sapien
gcccgcatctcctggcggattattcccaagcaa

SEQ ID NO: 466839 - DNA, 33 bp, Homo sapien
tgttagctgttacttgcaggctttttgtaaatg

SEQ ID NO: 466840 - DNA, 33 bp, Homo sapien
tgttagctgttacttgtaggctttttgtaaatg

SEQ ID NO: 466841 - DNA, 33 bp, Homo sapien
ggcttgataaaccgacaaaaataatgaaaggca

SEQ ID NO: 466842 - DNA, 33 bp, Homo sapien
ggcttgataaaccgacgaaaataatgaaaggca

SEQ ID NO: 466843 - DNA, 33 bp, Homo sapien
cagctgaagcttaaaagcctgaagagagagctc

SEQ ID NO: 466844 - DNA, 33 bp, Homo sapien
cagctgaagcttaaaatcctgaagagagagctc

SEQ ID NO: 466845 - DNA, 33 bp, Homo sapien
cttccccaaatggttcgcacagctggctgagca

SEQ ID NO: 466846 - DNA, 33 bp, Homo sapien
cttccccaaatggttctcacagctggctgagca

SEQ ID NO: 466847 - DNA, 33 bp, Homo sapien
accctgctttgtgatacggagatgggccctgtg

SEQ ID NO: 466848 - DNA, 33 bp, Homo sapien
accctgctttgtgatatggagatgggccctgtg

SEQ ID NO: 466849 - DNA, 33 bp, Homo sapien
aaaggtttgaatctaccggtggcatccttctgc

SEQ ID NO: 466850 - DNA, 33 bp, Homo sapien
aaaggtttgaatctactggtggcatccttctgc

SEQ ID NO: 466851 - DNA, 33 bp, Homo sapien
tggattcctttcaccacatatgaaaattaaccc

SEQ ID NO: 466852 - DNA, 33 bp, Homo sapien
tggattcctttcaccatatatgaaaattaaccc

SEQ ID NO: 466853 - DNA, 33 bp, Homo sapien
ttctctaaattacagaacccttgatacctggaa

SEQ ID NO: 466854 - DNA, 33 bp, Homo sapien
ttctctaaattacagatcccttgatacctggaa

SEQ ID NO: 466855 - DNA, 33 bp, Homo sapien
acacgtttctctaatcaagctgtaacactcggc

SEQ ID NO: 466856 - DNA, 33 bp, Homo sapien
acacgtttctctaatcgagctgtaacactcggc

SEQ ID NO: 466857 - DNA, 33 bp, Homo sapien
gagagaaggactgtaaacatcgaactatgagtc

SEQ ID NO: 466858 - DNA, 33 bp, Homo sapien
gagagaaggactgtaaccatcgaactatgagtc

SEQ ID NO: 466859 - DNA, 33 bp, Homo sapien
atgggttatgataacacctcgagtttttctcaa

SEQ ID NO: 466860 - DNA, 33 bp, Homo sapien
atgggttatgataacatctcgagtttttctcaa

SEQ ID NO: 466861 - DNA, 33 bp, Homo sapien
ttatcaccttatcaccagaaattctccagctta

SEQ ID NO: 466862 - DNA, 33 bp, Homo sapien
ttatcaccttatcaccggaaattctccagctta

SEQ ID NO: 466863 - DNA, 33 bp, Homo sapien
attaaattgaaagagacgatcagtaatggagtt

SEQ ID NO: 466864 - DNA, 33 bp, Homo sapien
attaaattgaaagagaggatcagtaatggagtt

SEQ ID NO: 466865 - DNA, 33 bp, Homo sapien
tccactagctacctcactgaactattgcaggga

SEQ ID NO: 466866 - DNA, 33 bp, Homo sapien
tccactagctacctcattgaactattgcaggga

SEQ ID NO: 466867 - DNA, 33 bp, Homo sapien
cagcaattgatactgaagtaggcagtgagtaag

SEQ ID NO: 466868 - DNA, 33 bp, Homo sapien
cagcaattgatactgacgtaggcagtgagtaag

SEQ ID NO: 466869 - DNA, 33 bp, Homo sapien
tgtagatgtggactgccactcttacccttcgtt

SEQ ID NO: 466870 - DNA, 33 bp, Homo sapien
tgtagatgtggactgctactcttacccttcgtt

SEQ ID NO: 466871 - DNA, 33 bp, Homo sapien
catactattgaaagaaatacaaacacttaatta

SEQ ID NO: 466872 - DNA, 33 bp, Homo sapien
catactattgaaagaagtacaaacacttaatta

SEQ ID NO: 466873 - DNA, 33 bp, Homo sapien
tgcggtctgccggacacggaaagaaagtcactg

SEQ ID NO: 466874 - DNA, 33 bp, Homo sapien
tgcggtctgccggacatggaaagaaagtcactg

SEQ ID NO: 466875 - DNA, 33 bp, Homo sapien
ctactagtactaccagaaccaatactatggcag

SEQ ID NO: 466876 - DNA, 33 bp, Homo sapien
ctactagtactaccaggaccaatactatggcag

SEQ ID NO: 466877 - DNA, 33 bp, Homo sapien
ggccaggtttttgtcaactacaagatagaaaat

SEQ ID NO: 466878 - DNA, 33 bp, Homo sapien
ggccaggtttttgtcacctacaagatagaaaat

SEQ ID NO: 466879 - DNA, 33 bp, Homo sapien
catgttcacttgaaaaaagtttgtgttatcttt

SEQ ID NO: 466880 - DNA, 33 bp, Homo sapien
catgttcacttgaaaacagtttgtgttatcttt

SEQ ID NO: 466881 - DNA, 33 bp, Homo sapien
ctgtgtgtaacataaggacaggaaattaaacac

SEQ ID NO: 466882 - DNA, 33 bp, Homo sapien
ctgtgtgtaacataagtacaggaaattaaacac

SEQ ID NO: 466883 - DNA, 33 bp, Homo sapien
cacattattccagccacaatgtaagactgtctt

SEQ ID NO: 466884 - DNA, 33 bp, Homo sapien
cacattattccagccagaatgtaagactgtctt

SEQ ID NO: 466885 - DNA, 33 bp, Homo sapien
tgaagctaattatttacacagaaaggcaatatg

SEQ ID NO: 466886 - DNA, 33 bp, Homo sapien
tgaagctaattatttatacagaaaggcaatatg

SEQ ID NO: 466887 - DNA, 33 bp, Homo sapien
ttaacctacttactacgcatcagtcataatgag

SEQ ID NO: 466888 - DNA, 33 bp, Homo sapien
ttaacctacttactactcatcagtcataatgag

SEQ ID NO: 466889 - DNA, 33 bp, Homo sapien
gatgctattttggagaaaactaaacaatggatc

SEQ ID NO: 466890 - DNA, 33 bp, Homo sapien
gatgctattttggagataactaaacaatggatc

SEQ ID NO: 466891 - DNA, 33 bp, Homo sapien
ctgtgaaaaaccatgacctcaatttcttctcag

SEQ ID NO: 466892 - DNA, 33 bp, Homo sapien
ctgtgaaaaaccatgatctcaatttcttctcag

SEQ ID NO: 466893 - DNA, 33 bp, Homo sapien
aaacttttctctaagacgtctatactgaaaaga

SEQ ID NO: 466894 - DNA, 33 bp, Homo sapien
aaacttttctctaagatgtctatactgaaaaga

SEQ ID NO: 466895 - DNA, 33 bp, Homo sapien
cagaagatgaaaataactccttaggccagacat

SEQ ID NO: 466896 - DNA, 33 bp, Homo sapien
cagaagatgaaaataattccttaggccagacat

SEQ ID NO: 466897 - DNA, 33 bp, Homo sapien
agaaataaaatcctcccaatgaaaatagttctc

SEQ ID NO: 466898 - DNA, 33 bp, Homo sapien
agaaataaaatcctccgaatgaaaatagttctc

SEQ ID NO: 466899 - DNA, 33 bp, Homo sapien
aggtcaataaagcacaaaatcatggatattcta

SEQ ID NO: 466900 - DNA, 33 bp, Homo sapien
aggtcaataaagcacagaatcatggatattcta

SEQ ID NO: 466901 - DNA, 33 bp, Homo sapien
ggaaagcatgaaaagaagtaaggagatgacgtt

SEQ ID NO: 466902 - DNA, 33 bp, Homo sapien
ggaaagcatgaaaagaggtaaggagatgacgtt

SEQ ID NO: 466903 - DNA, 33 bp, Homo sapien
aactaaaagagcaaaaatgggctctatttaggg

SEQ ID NO: 466904 - DNA, 33 bp, Homo sapien
aactaaaagagcaaaagtgggctctatttaggg

SEQ ID NO: 466905 - DNA, 33 bp, Homo sapien
tttgtctattattagaaatcaagtataccaagt

SEQ ID NO: 466906 - DNA, 33 bp, Homo sapien
tttgtctattattagacatcaagtataccaagt

SEQ ID NO: 466907 - DNA, 33 bp, Homo sapien
acatcagttctgtcaacgtccatttgttcacat

SEQ ID NO: 466908 - DNA, 33 bp, Homo sapien
acatcagttctgtcaatgtccatttgttcacat

SEQ ID NO: 466909 - DNA, 33 bp, Homo sapien
tagacataattctcaaccctaatttattccatt

SEQ ID NO: 466910 - DNA, 33 bp, Homo sapien
tagacataattctcaagcctaatttattccatt

SEQ ID NO: 466911 - DNA, 33 bp, Homo sapien
tgcccgtttggacatccgaacattgttttaatg

SEQ ID NO: 466912 - DNA, 33 bp, Homo sapien
tgcccgtttggacatctgaacattgttttaatg

SEQ ID NO: 466913 - DNA, 33 bp, Homo sapien
gagactcacaaagactaaaatacttgttctggc

SEQ ID NO: 466914 - DNA, 33 bp, Homo sapien
gagactcacaaagactgaaatacttgttctggc

SEQ ID NO: 466915 - DNA, 33 bp, Homo sapien
cactatgaaaattcccacaaagtctgccctttg

SEQ ID NO: 466916 - DNA, 33 bp, Homo sapien
cactatgaaaattcccgcaaagtctgccctttg

SEQ ID NO: 466917 - DNA, 33 bp, Homo sapien
cacaaacatctgaaagcctgtttaaaaatcact

SEQ ID NO: 466918 - DNA, 33 bp, Homo sapien
cacaaacatctgaaagtctgtttaaaaatcact

SEQ ID NO: 466919 - DNA, 33 bp, Homo sapien
tttaaactttgttggcacttttactgtagatgc

SEQ ID NO: 466920 - DNA, 33 bp, Homo sapien
tttaaactttgttggcgcttttactgtagatgc

SEQ ID NO: 466921 - DNA, 33 bp, Homo sapien
ctaagtcttgggacccagaaccataaacctctc

SEQ ID NO: 466922 - DNA, 33 bp, Homo sapien
ctaagtcttgggacccggaaccataaacctctc

SEQ ID NO: 466923 - DNA, 33 bp, Homo sapien
ttactttggattgatccatttcattagtcataa

SEQ ID NO: 466924 - DNA, 33 bp, Homo sapien
ttactttggattgatctatttcattagtcataa

SEQ ID NO: 466925 - DNA, 33 bp, Homo sapien
tcataatttacagtacacatttttgacttacta

SEQ ID NO: 466926 - DNA, 33 bp, Homo sapien
tcataatttacagtacgcatttttgacttacta

SEQ ID NO: 466927 - DNA, 33 bp, Homo sapien
gtagctagactagcaactaggaggaacttacag

SEQ ID NO: 466928 - DNA, 33 bp, Homo sapien
gtagctagactagcaattaggaggaacttacag

SEQ ID NO: 466929 - DNA, 33 bp, Homo sapien
ttactaatatcaggaacgaaaagagtgacatct

SEQ ID NO: 466930 - DNA, 33 bp, Homo sapien
ttactaatatcaggaatgaaaagagtgacatct

SEQ ID NO: 466931 - DNA, 33 bp, Homo sapien
taatatgtacatttccaccaaattgacttatga

SEQ ID NO: 466932 - DNA, 33 bp, Homo sapien
taatatgtacatttcccccaaattgacttatga

SEQ ID NO: 466933 - DNA, 33 bp, Homo sapien
tatgaacaagtttttgaatatgtctctagctgc

SEQ ID NO: 466934 - DNA, 33 bp, Homo sapien
tatgaacaagtttttgcatatgtctctagctgc

SEQ ID NO: 466935 - DNA, 33 bp, Homo sapien
attctaaagatgagaaagaacaggctaacaaca

SEQ ID NO: 466936 - DNA, 33 bp, Homo sapien
attctaaagatgagaaggaacaggctaacaaca

SEQ ID NO: 466937 - DNA, 33 bp, Homo sapien
ttctctatgagcaagaaccacttcattcacatt

SEQ ID NO: 466938 - DNA, 33 bp, Homo sapien
ttctctatgagcaagagccacttcattcacatt

SEQ ID NO: 466939 - DNA, 33 bp, Homo sapien
cagcagacacataggaagtgattttatattgat

SEQ ID NO: 466940 - DNA, 33 bp, Homo sapien
cagcagacacataggaggtgattttatattgat

SEQ ID NO: 466941 - DNA, 33 bp, Homo sapien
gtcatagacactctacagcaggccatgaaagca

SEQ ID NO: 466942 - DNA, 33 bp, Homo sapien
gtcatagacactctacggcaggccatgaaagca

SEQ ID NO: 466943 - DNA, 33 bp, Homo sapien
cctcagacattacaaaacgaagacctagagagt

SEQ ID NO: 466944 - DNA, 33 bp, Homo sapien
cctcagacattacaaagcgaagacctagagagt

SEQ ID NO: 466945 - DNA, 33 bp, Homo sapien
gtaagaatagggagagaaaatgctgatacatga

SEQ ID NO: 466946 - DNA, 33 bp, Homo sapien
gtaagaatagggagaggaaatgctgatacatga

SEQ ID NO: 466947 - DNA, 33 bp, Homo sapien
cttctttatttgtctgaagttcctctcttgtgc

SEQ ID NO: 466948 - DNA, 33 bp, Homo sapien
cttctttatttgtctgcagttcctctcttgtgc

SEQ ID NO: 466949 - DNA, 33 bp, Homo sapien
ttgtctatgccgcatcagaagggtagaaaagaa

SEQ ID NO: 466950 - DNA, 33 bp, Homo sapien
ttgtctatgccgcatcggaagggtagaaaagaa

SEQ ID NO: 466951 - DNA, 33 bp, Homo sapien
tattaagaaaacagcaaatgctagtgacgttac

SEQ ID NO: 466952 - DNA, 33 bp, Homo sapien
tattaagaaaacagcagatgctagtgacgttac

SEQ ID NO: 466953 - DNA, 33 bp, Homo sapien
gaagttagacaggggcaataagagaacctgaga

SEQ ID NO: 466954 - DNA, 33 bp, Homo sapien
gaagttagacaggggcgataagagaacctgaga

SEQ ID NO: 466955 - DNA, 33 bp, Homo sapien
atttccaacttccctcccgtggtagtatctgtg

SEQ ID NO: 466956 - DNA, 33 bp, Homo sapien
atttccaacttccctctcgtggtagtatctgtg

SEQ ID NO: 466957 - DNA, 33 bp, Homo sapien
ggtttgaaatcacccacaggtgtcaagtggggg

SEQ ID NO: 466958 - DNA, 33 bp, Homo sapien
ggtttgaaatcacccataggtgtcaagtggggg

SEQ ID NO: 466959 - DNA, 33 bp, Homo sapien
cttgccccatatctggccaagtccataaaatag

SEQ ID NO: 466960 - DNA, 33 bp, Homo sapien
cttgccccatatctggtcaagtccataaaatag

SEQ ID NO: 466961 - DNA, 33 bp, Homo sapien
catttatttcatgctccacaattggttgataca

SEQ ID NO: 466962 - DNA, 33 bp, Homo sapien
catttatttcatgctctacaattggttgataca

SEQ ID NO: 466963 - DNA, 33 bp, Homo sapien
acttttgactaatttaacaagctccatttagaa

SEQ ID NO: 466964 - DNA, 33 bp, Homo sapien
acttttgactaatttatcaagctccatttagaa

SEQ ID NO: 466965 - DNA, 33 bp, Homo sapien
tcaactgatacttctcactgtccaacatttgag

SEQ ID NO: 466966 - DNA, 33 bp, Homo sapien
tcaactgatacttctcgctgtccaacatttgag

SEQ ID NO: 466967 - DNA, 33 bp, Homo sapien
agaattatcaaagtcacctctaacagtgccttg

SEQ ID NO: 466968 - DNA, 33 bp, Homo sapien
agaattatcaaagtcatctctaacagtgccttg

SEQ ID NO: 466969 - DNA, 33 bp, Homo sapien
tgatttactccttcatcaaccttagtgtttcaa

SEQ ID NO: 466970 - DNA, 33 bp, Homo sapien
tgatttactccttcattaaccttagtgtttcaa

SEQ ID NO: 466971 - DNA, 33 bp, Homo sapien
ggttcacctgagaggacgttcaatcaaagagct

SEQ ID NO: 466972 - DNA, 33 bp, Homo sapien
ggttcacctgagaggatgttcaatcaaagagct

SEQ ID NO: 466973 - DNA, 33 bp, Homo sapien
cacttgttcctataaaccaaggtggatccgaca

SEQ ID NO: 466974 - DNA, 33 bp, Homo sapien
cacttgttcctataaatcaaggtggatccgaca

SEQ ID NO: 466975 - DNA, 33 bp, Homo sapien
ggtaaagtagagaaaaccctgataattcagagg

SEQ ID NO: 466976 - DNA, 33 bp, Homo sapien
ggtaaagtagagaaaatcctgataattcagagg

SEQ ID NO: 466977 - DNA, 33 bp, Homo sapien
cactagtttgtaacacagtcaaggatgaagccc

SEQ ID NO: 466978 - DNA, 33 bp, Homo sapien
cactagtttgtaacactgtcaaggatgaagccc

SEQ ID NO: 466979 - DNA, 33 bp, Homo sapien
gatgccaggataccagcagttatgcacagtatt

SEQ ID NO: 466980 - DNA, 33 bp, Homo sapien
gatgccaggataccagtagttatgcacagtatt

SEQ ID NO: 466981 - DNA, 33 bp, Homo sapien
tctgtctttcttcctcccgttctctttttctct

SEQ ID NO: 466982 - DNA, 33 bp, Homo sapien
tctgtctttcttcctctcgttctctttttctct

SEQ ID NO: 466983 - DNA, 33 bp, Homo sapien
tttactgactcagcaactatttttttgacaacc

SEQ ID NO: 466984 - DNA, 33 bp, Homo sapien
tttactgactcagcaattatttttttgacaacc

SEQ ID NO: 466985 - DNA, 33 bp, Homo sapien
aacacaagaaaaagaaagccacaataatttatt

SEQ ID NO: 466986 - DNA, 33 bp, Homo sapien
aacacaagaaaaagaaggccacaataatttatt

SEQ ID NO: 466987 - DNA, 33 bp, Homo sapien
actgacccagttatcacgacaaggcttgactct

SEQ ID NO: 466988 - DNA, 33 bp, Homo sapien
actgacccagttatcatgacaaggcttgactct

SEQ ID NO: 466989 - DNA, 33 bp, Homo sapien
ttggtgaccgtcaaaggcttccttccctacctc

SEQ ID NO: 466990 - DNA, 33 bp, Homo sapien
ttggtgaccgtcaaagtcttccttccctacctc

SEQ ID NO: 466991 - DNA, 33 bp, Homo sapien
aagtacagatgccaaaagaggtgtttctttctc

SEQ ID NO: 466992 - DNA, 33 bp, Homo sapien
aagtacagatgccaaatgaggtgtttctttctc

SEQ ID NO: 466993 - DNA, 33 bp, Homo sapien
aaatgtttggattctacgccctggtctgatgga

SEQ ID NO: 466994 - DNA, 33 bp, Homo sapien
aaatgtttggattctatgccctggtctgatgga

SEQ ID NO: 466995 - DNA, 33 bp, Homo sapien
tggtgcataagtaaaacgaaacagtaagcagtc

SEQ ID NO: 466996 - DNA, 33 bp, Homo sapien
tggtgcataagtaaaatgaaacagtaagcagtc

SEQ ID NO: 466997 - DNA, 33 bp, Homo sapien
cctcactggctaagctcaactttcgggttcatc

SEQ ID NO: 466998 - DNA, 33 bp, Homo sapien
cctcactggctaagcttaactttcgggttcatc

SEQ ID NO: 466999 - DNA, 33 bp, Homo sapien
actgttcaattactgaagttttctccttatatt

SEQ ID NO: 467000 - DNA, 33 bp, Homo sapien
actgttcaattactgacgttttctccttatatt

SEQ ID NO: 467001 - DNA, 33 bp, Homo sapien
aggaacatacactaacactgggttttggggttt

SEQ ID NO: 467002 - DNA, 33 bp, Homo sapien
aggaacatacactaacgctgggttttggggttt

SEQ ID NO: 467003 - DNA, 33 bp, Homo sapien
tagatgacataaatgacccgttcgctactaacc

SEQ ID NO: 467004 - DNA, 33 bp, Homo sapien
tagatgacataaatgatccgttcgctactaacc

SEQ ID NO: 467005 - DNA, 33 bp, Homo sapien
cctggaggctcttaaaactttgagtcagaccat

SEQ ID NO: 467006 - DNA, 33 bp, Homo sapien
cctggaggctcttaaagctttgagtcagaccat

SEQ ID NO: 467007 - DNA, 33 bp, Homo sapien
ttgctcacatatattcaaagactggcctctggt

SEQ ID NO: 467008 - DNA, 33 bp, Homo sapien
ttgctcacatatattcgaagactggcctctggt

SEQ ID NO: 467009 - DNA, 33 bp, Homo sapien
ttagagtgaaaattaaaatatttggagttaagt

SEQ ID NO: 467010 - DNA, 33 bp, Homo sapien
ttagagtgaaaattaacatatttggagttaagt

SEQ ID NO: 467011 - DNA, 33 bp, Homo sapien
gtgctgaccaagcacactatctcctgctacagc

SEQ ID NO: 467012 - DNA, 33 bp, Homo sapien
gtgctgaccaagcacattatctcctgctacagc

SEQ ID NO: 467013 - DNA, 33 bp, Homo sapien
tgagtgttcgtgttcccccgtgttggtgccttg

SEQ ID NO: 467014 - DNA, 33 bp, Homo sapien
tgagtgttcgtgttcctccgtgttggtgccttg

SEQ ID NO: 467015 - DNA, 33 bp, Homo sapien
ggcgtggctgggaacaaattatgagttgagagt

SEQ ID NO: 467016 - DNA, 33 bp, Homo sapien
ggcgtggctgggaacagattatgagttgagagt

SEQ ID NO: 467017 - DNA, 33 bp, Homo sapien
cagtaagctattcgtaagttaatttggggtagt

SEQ ID NO: 467018 - DNA, 33 bp, Homo sapien
cagtaagctattcgtatgttaatttggggtagt

SEQ ID NO: 467019 - DNA, 33 bp, Homo sapien
tttcatcattaaagtacaaaccttcataattct

SEQ ID NO: 467020 - DNA, 33 bp, Homo sapien
tttcatcattaaagtagaaaccttcataattct

SEQ ID NO: 467021 - DNA, 33 bp, Homo sapien
gtgaccacaaatcagacggaaaattcttagctt

SEQ ID NO: 467022 - DNA, 33 bp, Homo sapien
gtgaccacaaatcagatggaaaattcttagctt

SEQ ID NO: 467023 - DNA, 33 bp, Homo sapien
tagtttctaagttaggcaagactttgtggagca

SEQ ID NO: 467024 - DNA, 33 bp, Homo sapien
tagtttctaagttaggtaagactttgtggagca

SEQ ID NO: 467025 - DNA, 33 bp, Homo sapien
agacctgatattaataagaggaccagtaatcaa

SEQ ID NO: 467026 - DNA, 33 bp, Homo sapien
agacctgatattaatatgaggaccagtaatcaa

SEQ ID NO: 467027 - DNA, 33 bp, Homo sapien
ctttttgtaggatgtacgtagatttgaaattgc

SEQ ID NO: 467028 - DNA, 33 bp, Homo sapien
ctttttgtaggatgtatgtagatttgaaattgc

SEQ ID NO: 467029 - DNA, 33 bp, Homo sapien
taatcagcaatagaaggattatcgaaagcttga

SEQ ID NO: 467030 - DNA, 33 bp, Homo sapien
taatcagcaatagaagtattatcgaaagcttga

SEQ ID NO: 467031 - DNA, 33 bp, Homo sapien
tggttatttgttctcagggacatagactcaata

SEQ ID NO: 467032 - DNA, 33 bp, Homo sapien
tggttatttgttctcatggacatagactcaata

SEQ ID NO: 467033 - DNA, 33 bp, Homo sapien
aatgatataaccagcaacatataatggaataag

SEQ ID NO: 467034 - DNA, 33 bp, Homo sapien
aatgatataaccagcagcatataatggaataag

SEQ ID NO: 467035 - DNA, 33 bp, Homo sapien
ccctaagtcctagacaactcttttcacagctga

SEQ ID NO: 467036 - DNA, 33 bp, Homo sapien
ccctaagtcctagacagctcttttcacagctga

SEQ ID NO: 467037 - DNA, 33 bp, Homo sapien
gctcgccaataggaccaagtgcttgaatttaac

SEQ ID NO: 467038 - DNA, 33 bp, Homo sapien
gctcgccaataggaccgagtgcttgaatttaac

SEQ ID NO: 467039 - DNA, 33 bp, Homo sapien
acaaagtcacagataactgacaaatcaagtagt

SEQ ID NO: 467040 - DNA, 33 bp, Homo sapien
acaaagtcacagataattgacaaatcaagtagt

SEQ ID NO: 467041 - DNA, 33 bp, Homo sapien
gctgagtggaaaaagcaaacctcaaaagtttac

SEQ ID NO: 467042 - DNA, 33 bp, Homo sapien
gctgagtggaaaaagcgaacctcaaaagtttac

SEQ ID NO: 467043 - DNA, 33 bp, Homo sapien
tgtttttgccagttcaatcactgctgtggtgga

SEQ ID NO: 467044 - DNA, 33 bp, Homo sapien
tgtttttgccagttcagtcactgctgtggtgga

SEQ ID NO: 467045 - DNA, 33 bp, Homo sapien
atattgtagaagtagacaaaggtggataatgca

SEQ ID NO: 467046 - DNA, 33 bp, Homo sapien
atattgtagaagtagataaaggtggataatgca

SEQ ID NO: 467047 - DNA, 33 bp, Homo sapien
ctctcaaagccaaacaatatcccagtcctgagt

SEQ ID NO: 467048 - DNA, 33 bp, Homo sapien
ctctcaaagccaaacagtatcccagtcctgagt

SEQ ID NO: 467049 - DNA, 33 bp, Homo sapien
catggatgaggagcgacatcgggaatgggggat

SEQ ID NO: 467050 - DNA, 33 bp, Homo sapien
catggatgaggagcgagatcgggaatgggggat

SEQ ID NO: 467051 - DNA, 33 bp, Homo sapien
aacagcagaaactaacaaatcagtgctgggaag

SEQ ID NO: 467052 - DNA, 33 bp, Homo sapien
aacagcagaaactaacgaatcagtgctgggaag

SEQ ID NO: 467053 - DNA, 33 bp, Homo sapien
ggatttggttctgctaacaagttactgttttta

SEQ ID NO: 467054 - DNA, 33 bp, Homo sapien
ggatttggttctgctatcaagttactgttttta

SEQ ID NO: 467055 - DNA, 33 bp, Homo sapien
tttatctgaaatcttgaaaaagaacaaagtttg

SEQ ID NO: 467056 - DNA, 33 bp, Homo sapien
tttatctgaaatcttgcaaaagaacaaagtttg

SEQ ID NO: 467057 - DNA, 33 bp, Homo sapien
taaatgttgtctagaaaaatgaaaagcaaaaaa

SEQ ID NO: 467058 - DNA, 33 bp, Homo sapien
taaatgttgtctagaagaatgaaaagcaaaaaa

SEQ ID NO: 467059 - DNA, 33 bp, Homo sapien
atactccaggagagacagtcagcaccctgggtc

SEQ ID NO: 467060 - DNA, 33 bp, Homo sapien
atactccaggagagacggtcagcaccctgggtc

SEQ ID NO: 467061 - DNA, 33 bp, Homo sapien
ctggacatattacgaccgaatccagtgcctttc

SEQ ID NO: 467062 - DNA, 33 bp, Homo sapien
ctggacatattacgactgaatccagtgcctttc

SEQ ID NO: 467063 - DNA, 33 bp, Homo sapien
aactctgctaacaatacatgaagcatggtgaag

SEQ ID NO: 467064 - DNA, 33 bp, Homo sapien
aactctgctaacaatatatgaagcatggtgaag

SEQ ID NO: 467065 - DNA, 33 bp, Homo sapien
agtggcctcattttgcccgtgttgtgtctgtgg

SEQ ID NO: 467066 - DNA, 33 bp, Homo sapien
agtggcctcattttgctcgtgttgtgtctgtgg

SEQ ID NO: 467067 - DNA, 33 bp, Homo sapien
gctcgtttctctgctcacctaggatttcatgca

SEQ ID NO: 467068 - DNA, 33 bp, Homo sapien
gctcgtttctctgctcgcctaggatttcatgca

SEQ ID NO: 467069 - DNA, 33 bp, Homo sapien
cacctggggcctcactaagagctgggagaagaa

SEQ ID NO: 467070 - DNA, 33 bp, Homo sapien
cacctggggcctcactgagagctgggagaagaa

SEQ ID NO: 467071 - DNA, 33 bp, Homo sapien
ctcggacgctggactcaaactagcgctagcaaa

SEQ ID NO: 467072 - DNA, 33 bp, Homo sapien
ctcggacgctggactcgaactagcgctagcaaa

SEQ ID NO: 467073 - DNA, 33 bp, Homo sapien
aggccctggtgttcccagcgcttttgcctcctg

SEQ ID NO: 467074 - DNA, 33 bp, Homo sapien
aggccctggtgttcccggcgcttttgcctcctg

SEQ ID NO: 467075 - DNA, 33 bp, Homo sapien
aactcacgcacgtgacaatattaaaggacccac

SEQ ID NO: 467076 - DNA, 33 bp, Homo sapien
aactcacgcacgtgacgatattaaaggacccac

SEQ ID NO: 467077 - DNA, 33 bp, Homo sapien
gggtcagctctgtgcagctcagacttcgtctcc

SEQ ID NO: 467078 - DNA, 33 bp, Homo sapien
gggtcagctctgtgcatctcagacttcgtctcc

SEQ ID NO: 467079 - DNA, 33 bp, Homo sapien
agagtctggccaggaaaccgggtgccggtggtg

SEQ ID NO: 467080 - DNA, 33 bp, Homo sapien
agagtctggccaggaacccgggtgccggtggtg

SEQ ID NO: 467081 - DNA, 33 bp, Homo sapien
gtttgtccacccgtcaagtgtgtactggctgct

SEQ ID NO: 467082 - DNA, 33 bp, Homo sapien
gtttgtccacccgtcacgtgtgtactggctgct

SEQ ID NO: 467083 - DNA, 33 bp, Homo sapien
tgacttaaaaaggtgacgccgacatggagccac

SEQ ID NO: 467084 - DNA, 33 bp, Homo sapien
tgacttaaaaaggtgatgccgacatggagccac

SEQ ID NO: 467085 - DNA, 33 bp, Homo sapien
ccagcagctcaggaccagagtcaccaacacggc

SEQ ID NO: 467086 - DNA, 33 bp, Homo sapien
ccagcagctcaggaccggagtcaccaacacggc

SEQ ID NO: 467087 - DNA, 33 bp, Homo sapien
tggctcccttcttaacacaatcttttccaaggc

SEQ ID NO: 467088 - DNA, 33 bp, Homo sapien
tggctcccttcttaacgcaatcttttccaaggc

SEQ ID NO: 467089 - DNA, 33 bp, Homo sapien
cccagagacttcatgccgagcttagatagtcct

SEQ ID NO: 467090 - DNA, 33 bp, Homo sapien
cccagagacttcatgctgagcttagatagtcct

SEQ ID NO: 467091 - DNA, 33 bp, Homo sapien
acggccaaggatgggacgcaacctggctctgcc

SEQ ID NO: 467092 - DNA, 33 bp, Homo sapien
acggccaaggatgggatgcaacctggctctgcc

SEQ ID NO: 467093 - DNA, 33 bp, Homo sapien
ggaggctcagtgtgccagcagttttgtcttcag

SEQ ID NO: 467094 - DNA, 33 bp, Homo sapien
ggaggctcagtgtgccggcagttttgtcttcag

SEQ ID NO: 467095 - DNA, 33 bp, Homo sapien
atactgccataatcacagacaattccctactct

SEQ ID NO: 467096 - DNA, 33 bp, Homo sapien
atactgccataatcacggacaattccctactct

SEQ ID NO: 467097 - DNA, 33 bp, Homo sapien
tccctactctccttaacagcagaatcatatcat

SEQ ID NO: 467098 - DNA, 33 bp, Homo sapien
tccctactctccttaatagcagaatcatatcat

SEQ ID NO: 467099 - DNA, 33 bp, Homo sapien
gggaaagcagggtgtacgtgttaagattattat

SEQ ID NO: 467100 - DNA, 33 bp, Homo sapien
gggaaagcagggtgtatgtgttaagattattat

SEQ ID NO: 467101 - DNA, 33 bp, Homo sapien
gctgagcaacgtcatcgccgtttcagggatgaa

SEQ ID NO: 467102 - DNA, 33 bp, Homo sapien
gctgagcaacgtcatctccgtttcagggatgaa

SEQ ID NO: 467103 - DNA, 33 bp, Homo sapien
tttccttgtttttggcaattatgactacagttg

SEQ ID NO: 467104 - DNA, 33 bp, Homo sapien
tttccttgtttttggcgattatgactacagttg

SEQ ID NO: 467105 - DNA, 33 bp, Homo sapien
ctataaatggaatcacacacagtgtaaccttta

SEQ ID NO: 467106 - DNA, 33 bp, Homo sapien
ctataaatggaatcacccacagtgtaaccttta

SEQ ID NO: 467107 - DNA, 33 bp, Homo sapien
gaaaatcctggttgaaatcttaatcttttaact

SEQ ID NO: 467108 - DNA, 33 bp, Homo sapien
gaaaatcctggttgaagtcttaatcttttaact

SEQ ID NO: 467109 - DNA, 33 bp, Homo sapien
tttctttcctactccaaattgccaactttccct

SEQ ID NO: 467110 - DNA, 33 bp, Homo sapien
tttctttcctactccagattgccaactttccct

SEQ ID NO: 467111 - DNA, 33 bp, Homo sapien
cagcaaagccacacccacttcatatccttgatt

SEQ ID NO: 467112 - DNA, 33 bp, Homo sapien
cagcaaagccacaccctcttcatatccttgatt

SEQ ID NO: 467113 - DNA, 33 bp, Homo sapien
gctttgctgaattcaccattggcttctgcagaa

SEQ ID NO: 467114 - DNA, 33 bp, Homo sapien
gctttgctgaattcactattggcttctgcagaa

SEQ ID NO: 467115 - DNA, 33 bp, Homo sapien
gtgtgtacacagaccgccaaatgcacgctgtcc

SEQ ID NO: 467116 - DNA, 33 bp, Homo sapien
gtgtgtacacagaccgtcaaatgcacgctgtcc

SEQ ID NO: 467117 - DNA, 33 bp, Homo sapien
ctcagagtttcagagccgatgagtatgtcccca

SEQ ID NO: 467118 - DNA, 33 bp, Homo sapien
ctcagagtttcagagctgatgagtatgtcccca

SEQ ID NO: 467119 - DNA, 33 bp, Homo sapien
gcaggccaagagaacaaagcattccaatgactt

SEQ ID NO: 467120 - DNA, 33 bp, Homo sapien
gcaggccaagagaacagagcattccaatgactt

SEQ ID NO: 467121 - DNA, 33 bp, Homo sapien
catgactgttgaaataaaagtctctgttggcaa

SEQ ID NO: 467122 - DNA, 33 bp, Homo sapien
catgactgttgaaatagaagtctctgttggcaa

SEQ ID NO: 467123 - DNA, 33 bp, Homo sapien
aagtccactacctccacgtcaactggttttgaa

SEQ ID NO: 467124 - DNA, 33 bp, Homo sapien
aagtccactacctccatgtcaactggttttgaa

SEQ ID NO: 467125 - DNA, 33 bp, Homo sapien
gtgaaataccacgttacagctgaacatgagtct

SEQ ID NO: 467126 - DNA, 33 bp, Homo sapien
gtgaaataccacgttatagctgaacatgagtct

SEQ ID NO: 467127 - DNA, 33 bp, Homo sapien
cccttgagccggcctgcagcactctaaccgggt

SEQ ID NO: 467128 - DNA, 33 bp, Homo sapien
cccttgagccggcctgtagcactctaaccgggt

SEQ ID NO: 467129 - DNA, 33 bp, Homo sapien
tttgtttttattcccacgtgttcctgatagaaa

SEQ ID NO: 467130 - DNA, 33 bp, Homo sapien
tttgtttttattcccatgtgttcctgatagaaa

SEQ ID NO: 467131 - DNA, 33 bp, Homo sapien
agatcactaatgaagacgtgaaataagacttgg

SEQ ID NO: 467132 - DNA, 33 bp, Homo sapien
agatcactaatgaagatgtgaaataagacttgg

SEQ ID NO: 467133 - DNA, 33 bp, Homo sapien
gagagatgatacaaacaggatctgaagagtcag

SEQ ID NO: 467134 - DNA, 33 bp, Homo sapien
gagagatgatacaaacgggatctgaagagtcag

SEQ ID NO: 467135 - DNA, 33 bp, Homo sapien
tgtctagagcaggaaacagaaaagggtcttagc

SEQ ID NO: 467136 - DNA, 33 bp, Homo sapien
tgtctagagcaggaaatagaaaagggtcttagc

SEQ ID NO: 467137 - DNA, 33 bp, Homo sapien
cccaccatgctctaataatctccgagtgccagc

SEQ ID NO: 467138 - DNA, 33 bp, Homo sapien
cccaccatgctctaatgatctccgagtgccagc

SEQ ID NO: 467139 - DNA, 33 bp, Homo sapien
ctaagaaccagagaaacgaacacagcacttgtt

SEQ ID NO: 467140 - DNA, 33 bp, Homo sapien
ctaagaaccagagaaatgaacacagcacttgtt

SEQ ID NO: 467141 - DNA, 33 bp, Homo sapien
acataacctaccttaacatgcagacaagattga

SEQ ID NO: 467142 - DNA, 33 bp, Homo sapien
acataacctaccttaatatgcagacaagattga

SEQ ID NO: 467143 - DNA, 33 bp, Homo sapien
gtcaatcacttaatcaatcaatgagatgggggg

SEQ ID NO: 467144 - DNA, 33 bp, Homo sapien
gtcaatcacttaatcattcaatgagatgggggg

SEQ ID NO: 467145 - DNA, 33 bp, Homo sapien
tatttactgtgaagaccgaaaaagcgtttattc

SEQ ID NO: 467146 - DNA, 33 bp, Homo sapien
tatttactgtgaagacggaaaaagcgtttattc

SEQ ID NO: 467147 - DNA, 33 bp, Homo sapien
actttaatgctgggtacatgttgttatttattt

SEQ ID NO: 467148 - DNA, 33 bp, Homo sapien
actttaatgctgggtatatgttgttatttattt

SEQ ID NO: 467149 - DNA, 33 bp, Homo sapien
ggtccacctattacaactgatgaatctacatgg

SEQ ID NO: 467150 - DNA, 33 bp, Homo sapien
ggtccacctattacaattgatgaatctacatgg

SEQ ID NO: 467151 - DNA, 33 bp, Homo sapien
tccagttgcctctgcacgggaccgtttctactc

SEQ ID NO: 467152 - DNA, 33 bp, Homo sapien
tccagttgcctctgcatgggaccgtttctactc

SEQ ID NO: 467153 - DNA, 33 bp, Homo sapien
gggaaggcaagatggcacggccacttaggaaga

SEQ ID NO: 467154 - DNA, 33 bp, Homo sapien
gggaaggcaagatggcgcggccacttaggaaga

SEQ ID NO: 467155 - DNA, 33 bp, Homo sapien
gaggccacatgtcagaaccccggaagacacaag

SEQ ID NO: 467156 - DNA, 33 bp, Homo sapien
gaggccacatgtcagagccccggaagacacaag

SEQ ID NO: 467157 - DNA, 33 bp, Homo sapien
aagatttcagcaagagacacgactaccaggcca

SEQ ID NO: 467158 - DNA, 33 bp, Homo sapien
aagatttcagcaagagccacgactaccaggcca

SEQ ID NO: 467159 - DNA, 33 bp, Homo sapien
atgaaattaatgctgcactgactattaaatatt

SEQ ID NO: 467160 - DNA, 33 bp, Homo sapien
atgaaattaatgctgcgctgactattaaatatt

SEQ ID NO: 467161 - DNA, 33 bp, Homo sapien
tgggagctgttcccgacgggttgaagctgggtc

SEQ ID NO: 467162 - DNA, 33 bp, Homo sapien
tgggagctgttcccgatgggttgaagctgggtc

SEQ ID NO: 467163 - DNA, 33 bp, Homo sapien
ttggatctgtgaggaacggaacaaacacaaccc

SEQ ID NO: 467164 - DNA, 33 bp, Homo sapien
ttggatctgtgaggaatggaacaaacacaaccc

SEQ ID NO: 467165 - DNA, 33 bp, Homo sapien
tggaggtgagccgcgcacattcagcttgtttct

SEQ ID NO: 467166 - DNA, 33 bp, Homo sapien
tggaggtgagccgcgcgcattcagcttgtttct

SEQ ID NO: 467167 - DNA, 33 bp, Homo sapien
agaacggccgctacgcaagcaatggtgaccttt

SEQ ID NO: 467168 - DNA, 33 bp, Homo sapien
agaacggccgctacgccagcaatggtgaccttt

SEQ ID NO: 467169 - DNA, 33 bp, Homo sapien
aatggggagggaatcaagtctgtgctctcatac

SEQ ID NO: 467170 - DNA, 33 bp, Homo sapien
aatggggagggaatcaggtctgtgctctcatac

SEQ ID NO: 467171 - DNA, 33 bp, Homo sapien
aggttccgagcagacaggaacttttagtggacg

SEQ ID NO: 467172 - DNA, 33 bp, Homo sapien
aggttccgagcagacatgaacttttagtggacg

SEQ ID NO: 467173 - DNA, 33 bp, Homo sapien
aggctggaaaatacgccgacgctagggcagatc

SEQ ID NO: 467174 - DNA, 33 bp, Homo sapien
aggctggaaaatacgcggacgctagggcagatc

SEQ ID NO: 467175 - DNA, 33 bp, Homo sapien
ccgtgctaactttacaagctccatttttacttt

SEQ ID NO: 467176 - DNA, 33 bp, Homo sapien
ccgtgctaactttacacgctccatttttacttt

SEQ ID NO: 467177 - DNA, 33 bp, Homo sapien
ttctcctttctgaaaactaaacgttcagatcag

SEQ ID NO: 467178 - DNA, 33 bp, Homo sapien
ttctcctttctgaaaattaaacgttcagatcag

SEQ ID NO: 467179 - DNA, 33 bp, Homo sapien
aacacctccatcaataaaaccagacgatctcct

SEQ ID NO: 467180 - DNA, 33 bp, Homo sapien
aacacctccatcaatagaaccagacgatctcct

SEQ ID NO: 467181 - DNA, 33 bp, Homo sapien
tagaggctggtggttacgaactgagggatgtaa

SEQ ID NO: 467182 - DNA, 33 bp, Homo sapien
tagaggctggtggttatgaactgagggatgtaa

SEQ ID NO: 467183 - DNA, 33 bp, Homo sapien
tccccagtgaacatcaagtagaaaaaagtaaaa

SEQ ID NO: 467184 - DNA, 33 bp, Homo sapien
tccccagtgaacatcatgtagaaaaaagtaaaa

SEQ ID NO: 467185 - DNA, 33 bp, Homo sapien
ttaactgtgagttcaacttctttactagatgta

SEQ ID NO: 467186 - DNA, 33 bp, Homo sapien
ttaactgtgagttcaatttctttactagatgta

SEQ ID NO: 467187 - DNA, 33 bp, Homo sapien
tgattgatttatcaccacaataactagtctcag

SEQ ID NO: 467188 - DNA, 33 bp, Homo sapien
tgattgatttatcaccgcaataactagtctcag

SEQ ID NO: 467189 - DNA, 33 bp, Homo sapien
atggccaatacataaacaaaagcagtctagatt

SEQ ID NO: 467190 - DNA, 33 bp, Homo sapien
atggccaatacataaataaaagcagtctagatt

SEQ ID NO: 467191 - DNA, 33 bp, Homo sapien
agcacagagtctacgacagatcttttactcttg

SEQ ID NO: 467192 - DNA, 33 bp, Homo sapien
agcacagagtctacgatagatcttttactcttg

SEQ ID NO: 467193 - DNA, 33 bp, Homo sapien
agcatccacttggtgaaaactgagctcttgctt

SEQ ID NO: 467194 - DNA, 33 bp, Homo sapien
agcatccacttggtgagaactgagctcttgctt

SEQ ID NO: 467195 - DNA, 33 bp, Homo sapien
ttcttctcccactagaagcaaatgctacaggaa

SEQ ID NO: 467196 - DNA, 33 bp, Homo sapien
ttcttctcccactagatgcaaatgctacaggaa

SEQ ID NO: 467197 - DNA, 33 bp, Homo sapien
tgttttcaagcctgaaatgcatcaagtacttaa

SEQ ID NO: 467198 - DNA, 33 bp, Homo sapien
tgttttcaagcctgaagtgcatcaagtacttaa

SEQ ID NO: 467199 - DNA, 33 bp, Homo sapien
attcataagatgtgagaatatttaaacgtaatc

SEQ ID NO: 467200 - DNA, 33 bp, Homo sapien
attcataagatgtgaggatatttaaacgtaatc

SEQ ID NO: 467201 - DNA, 33 bp, Homo sapien
agaacattaatctgacaatcctttatgttacct

SEQ ID NO: 467202 - DNA, 33 bp, Homo sapien
agaacattaatctgacgatcctttatgttacct

SEQ ID NO: 467203 - DNA, 33 bp, Homo sapien
aagctgagagataccacgtcactgagtgatatc

SEQ ID NO: 467204 - DNA, 33 bp, Homo sapien
aagctgagagataccatgtcactgagtgatatc

SEQ ID NO: 467205 - DNA, 33 bp, Homo sapien
tatattatgtgtttacaaactatgaaataaacg

SEQ ID NO: 467206 - DNA, 33 bp, Homo sapien
tatattatgtgtttaccaactatgaaataaacg

SEQ ID NO: 467207 - DNA, 33 bp, Homo sapien
ttgcagcaaactctaaaaagttgaacatgtgca

SEQ ID NO: 467208 - DNA, 33 bp, Homo sapien
ttgcagcaaactctaagaagttgaacatgtgca

SEQ ID NO: 467209 - DNA, 33 bp, Homo sapien
catggcggaaggccacaactggaaagggaagca

SEQ ID NO: 467210 - DNA, 33 bp, Homo sapien
catggcggaaggccacgactggaaagggaagca

SEQ ID NO: 467211 - DNA, 33 bp, Homo sapien
aagtggcctcacagataaagtacatattttgaa

SEQ ID NO: 467212 - DNA, 33 bp, Homo sapien
aagtggcctcacagattaagtacatattttgaa

SEQ ID NO: 467213 - DNA, 33 bp, Homo sapien
ggcacaggaaaaataagatctgtagtttaactg

SEQ ID NO: 467214 - DNA, 33 bp, Homo sapien
ggcacaggaaaaataatatctgtagtttaactg

SEQ ID NO: 467215 - DNA, 33 bp, Homo sapien
catccaagaagtcacaatctctaaagaagagac

SEQ ID NO: 467216 - DNA, 33 bp, Homo sapien
catccaagaagtcacagtctctaaagaagagac

SEQ ID NO: 467217 - DNA, 33 bp, Homo sapien
catcatagaaacgtaaatcaaaaccataatgaa

SEQ ID NO: 467218 - DNA, 33 bp, Homo sapien
catcatagaaacgtaagtcaaaaccataatgaa

SEQ ID NO: 467219 - DNA, 33 bp, Homo sapien
ataaaggttaaggagaagttaagatgtcaatat

SEQ ID NO: 467220 - DNA, 33 bp, Homo sapien
ataaaggttaaggagacgttaagatgtcaatat

SEQ ID NO: 467221 - DNA, 33 bp, Homo sapien
aaaaattgaccgaaaacggatcagacccaaatg

SEQ ID NO: 467222 - DNA, 33 bp, Homo sapien
aaaaattgaccgaaaatggatcagacccaaatg

SEQ ID NO: 467223 - DNA, 33 bp, Homo sapien
gaataataaaagtataaccactgttgacacttc

SEQ ID NO: 467224 - DNA, 33 bp, Homo sapien
gaataataaaagtatatccactgttgacacttc

SEQ ID NO: 467225 - DNA, 33 bp, Homo sapien
ttaatcttttccacaaatgccatttcagaaata

SEQ ID NO: 467226 - DNA, 33 bp, Homo sapien
ttaatcttttccacaagtgccatttcagaaata

SEQ ID NO: 467227 - DNA, 33 bp, Homo sapien
gttgttagctggataccattcatatttgtttat

SEQ ID NO: 467228 - DNA, 33 bp, Homo sapien
gttgttagctggatactattcatatttgtttat

SEQ ID NO: 467229 - DNA, 33 bp, Homo sapien
tagtgtcactggtttacatacttaagtggctcg

SEQ ID NO: 467230 - DNA, 33 bp, Homo sapien
tagtgtcactggtttatatacttaagtggctcg

SEQ ID NO: 467231 - DNA, 33 bp, Homo sapien
gatccaaattacatcaccttgcttcctatatgc

SEQ ID NO: 467232 - DNA, 33 bp, Homo sapien
gatccaaattacatcagcttgcttcctatatgc

SEQ ID NO: 467233 - DNA, 33 bp, Homo sapien
ctcctttgccctccataaggattgtaagtttcc

SEQ ID NO: 467234 - DNA, 33 bp, Homo sapien
ctcctttgccctccatcaggattgtaagtttcc

SEQ ID NO: 467235 - DNA, 33 bp, Homo sapien
aataatctaagagcccacctctttaagcctcca

SEQ ID NO: 467236 - DNA, 33 bp, Homo sapien
aataatctaagagcccgcctctttaagcctcca

SEQ ID NO: 467237 - DNA, 33 bp, Homo sapien
gctgctttaaagacacagcctttcatgaaattg

SEQ ID NO: 467238 - DNA, 33 bp, Homo sapien
gctgctttaaagacactgcctttcatgaaattg

SEQ ID NO: 467239 - DNA, 33 bp, Homo sapien
cagattcattctaggaacacctttactgtaatt

SEQ ID NO: 467240 - DNA, 33 bp, Homo sapien
cagattcattctaggatcacctttactgtaatt

SEQ ID NO: 467241 - DNA, 33 bp, Homo sapien
aaagggatcattcaaacgcagattgctgggcct

SEQ ID NO: 467242 - DNA, 33 bp, Homo sapien
aaagggatcattcaaatgcagattgctgggcct

SEQ ID NO: 467243 - DNA, 33 bp, Homo sapien
acggaagctcttctcaactcttgaattgttgtc

SEQ ID NO: 467244 - DNA, 33 bp, Homo sapien
acggaagctcttctcagctcttgaattgttgtc

SEQ ID NO: 467245 - DNA, 33 bp, Homo sapien
ccaaaattactcttgcaaccccttggccaagag

SEQ ID NO: 467246 - DNA, 33 bp, Homo sapien
ccaaaattactcttgcgaccccttggccaagag

SEQ ID NO: 467247 - DNA, 33 bp, Homo sapien
gaagaattagctggcacgattcagggacagctc

SEQ ID NO: 467248 - DNA, 33 bp, Homo sapien
gaagaattagctggcatgattcagggacagctc

SEQ ID NO: 467249 - DNA, 33 bp, Homo sapien
atttattctgctttacaagtttggttacattgc

SEQ ID NO: 467250 - DNA, 33 bp, Homo sapien
atttattctgctttaccagtttggttacattgc

SEQ ID NO: 467251 - DNA, 33 bp, Homo sapien
cacaaaagtgaataaaacatgttctttaaaacc

SEQ ID NO: 467252 - DNA, 33 bp, Homo sapien
cacaaaagtgaataaagcatgttctttaaaacc

SEQ ID NO: 467253 - DNA, 33 bp, Homo sapien
tattcaaaaacctcaactcaagtcagtgtggtt

SEQ ID NO: 467254 - DNA, 33 bp, Homo sapien
tattcaaaaacctcaattcaagtcagtgtggtt

SEQ ID NO: 467255 - DNA, 33 bp, Homo sapien
gcacaggctctgttagccagaaggtgtggtggc

SEQ ID NO: 467256 - DNA, 33 bp, Homo sapien
gcacaggctctgttagtcagaaggtgtggtggc

SEQ ID NO: 467257 - DNA, 33 bp, Homo sapien
aaaaaacgatgtgtgacaactcctaacttttgg

SEQ ID NO: 467258 - DNA, 33 bp, Homo sapien
aaaaaacgatgtgtgagaactcctaacttttgg

SEQ ID NO: 467259 - DNA, 33 bp, Homo sapien
aaataaagagttagtgaatctttcaaattgttg

SEQ ID NO: 467260 - DNA, 33 bp, Homo sapien
aaataaagagttagtgcatctttcaaattgttg

SEQ ID NO: 467261 - DNA, 33 bp, Homo sapien
gacttctgtaaaccggaagactcatcaccacat

SEQ ID NO: 467262 - DNA, 33 bp, Homo sapien
gacttctgtaaaccggcagactcatcaccacat

SEQ ID NO: 467263 - DNA, 33 bp, Homo sapien
tggttaactctccacacaatgaagaaagcataa

SEQ ID NO: 467264 - DNA, 33 bp, Homo sapien
tggttaactctccacagaatgaagaaagcataa

SEQ ID NO: 467265 - DNA, 33 bp, Homo sapien
ttaagggaagaagcaaatcataatgatgaaaat

SEQ ID NO: 467266 - DNA, 33 bp, Homo sapien
ttaagggaagaagcaattcataatgatgaaaat

SEQ ID NO: 467267 - DNA, 33 bp, Homo sapien
ataaacaggaaattacactattgattgcattgc

SEQ ID NO: 467268 - DNA, 33 bp, Homo sapien
ataaacaggaaattactctattgattgcattgc

SEQ ID NO: 467269 - DNA, 33 bp, Homo sapien
gaagatttttctgacaatgaaggaggaagtgag

SEQ ID NO: 467270 - DNA, 33 bp, Homo sapien
gaagatttttctgacagtgaaggaggaagtgag

SEQ ID NO: 467271 - DNA, 33 bp, Homo sapien
gcaacgtgtcttatcacaaaattcttacatttt

SEQ ID NO: 467272 - DNA, 33 bp, Homo sapien
gcaacgtgtcttatcataaaattcttacatttt

SEQ ID NO: 467273 - DNA, 33 bp, Homo sapien
atatatttttaagttcaaaatggaccaccaaat

SEQ ID NO: 467274 - DNA, 33 bp, Homo sapien
atatatttttaagttctaaatggaccaccaaat

SEQ ID NO: 467275 - DNA, 33 bp, Homo sapien
cagctccagtgtcattaaaataaataaataaat

SEQ ID NO: 467276 - DNA, 33 bp, Homo sapien
cagctccagtgtcatttaaataaataaataaat

SEQ ID NO: 467277 - DNA, 33 bp, Homo sapien
tcttttaactgatgcacgaggctctggtgtcca

SEQ ID NO: 467278 - DNA, 33 bp, Homo sapien
tcttttaactgatgcatgaggctctggtgtcca

SEQ ID NO: 467279 - DNA, 33 bp, Homo sapien
tttgttgaccttgaggcatagccatacaaactg

SEQ ID NO: 467280 - DNA, 33 bp, Homo sapien
tttgttgaccttgaggtatagccatacaaactg

SEQ ID NO: 467281 - DNA, 33 bp, Homo sapien
attaaacatttcaataaaagcactcttgtagct

SEQ ID NO: 467282 - DNA, 33 bp, Homo sapien
attaaacatttcaatagaagcactcttgtagct

SEQ ID NO: 467283 - DNA, 33 bp, Homo sapien
ataaaagtggcattaaatacaaaagagattgat

SEQ ID NO: 467284 - DNA, 33 bp, Homo sapien
ataaaagtggcattaagtacaaaagagattgat

SEQ ID NO: 467285 - DNA, 33 bp, Homo sapien
gataataaaagatgcaagacctggaagtgcagg

SEQ ID NO: 467286 - DNA, 33 bp, Homo sapien
gataataaaagatgcaggacctggaagtgcagg

SEQ ID NO: 467287 - DNA, 33 bp, Homo sapien
aaatggtgtggccagaagtgattacaactggat

SEQ ID NO: 467288 - DNA, 33 bp, Homo sapien
aaatggtgtggccagacgtgattacaactggat

SEQ ID NO: 467289 - DNA, 33 bp, Homo sapien
aaagccactaggagaacacacggatcacattta

SEQ ID NO: 467290 - DNA, 33 bp, Homo sapien
aaagccactaggagaagacacggatcacattta

SEQ ID NO: 467291 - DNA, 33 bp, Homo sapien
gatgaaataatttatacgacaattccccatgac

SEQ ID NO: 467292 - DNA, 33 bp, Homo sapien
gatgaaataatttatatgacaattccccatgac

SEQ ID NO: 467293 - DNA, 33 bp, Homo sapien
aagatgaataaataacagagcttgagtcattac

SEQ ID NO: 467294 - DNA, 33 bp, Homo sapien
aagatgaataaataacggagcttgagtcattac

SEQ ID NO: 467295 - DNA, 33 bp, Homo sapien
tttgtgtctttttagaagtaagataatatgcct

SEQ ID NO: 467296 - DNA, 33 bp, Homo sapien
tttgtgtctttttagaggtaagataatatgcct

SEQ ID NO: 467297 - DNA, 33 bp, Homo sapien
atcaaaggtgcagtgtaacaccagaaaaatagt

SEQ ID NO: 467298 - DNA, 33 bp, Homo sapien
atcaaaggtgcagtgtgacaccagaaaaatagt

SEQ ID NO: 467299 - DNA, 33 bp, Homo sapien
ctgtctctcaaatatgcatctttaggtttgaac

SEQ ID NO: 467300 - DNA, 33 bp, Homo sapien
ctgtctctcaaatatgtatctttaggtttgaac

SEQ ID NO: 467301 - DNA, 33 bp, Homo sapien
gggtggtgatgaaaaaaacccctcgtgtcaaag

SEQ ID NO: 467302 - DNA, 33 bp, Homo sapien
gggtggtgatgaaaaatacccctcgtgtcaaag

SEQ ID NO: 467303 - DNA, 33 bp, Homo sapien
ctcatgtttaaacacaaacgtttcccagtgttc

SEQ ID NO: 467304 - DNA, 33 bp, Homo sapien
ctcatgtttaaacacacacgtttcccagtgttc

SEQ ID NO: 467305 - DNA, 33 bp, Homo sapien
catgccatatgaacaacatagaactttgaggat

SEQ ID NO: 467306 - DNA, 33 bp, Homo sapien
catgccatatgaacaatatagaactttgaggat

SEQ ID NO: 467307 - DNA, 33 bp, Homo sapien
ggaccagcttttaagacctcttccaagcctgta

SEQ ID NO: 467308 - DNA, 33 bp, Homo sapien
ggaccagcttttaagatctcttccaagcctgta

SEQ ID NO: 467309 - DNA, 33 bp, Homo sapien
gcaaggctgatgggtaagtagaacagagacaag

SEQ ID NO: 467310 - DNA, 33 bp, Homo sapien
gcaaggctgatgggtaggtagaacagagacaag

SEQ ID NO: 467311 - DNA, 33 bp, Homo sapien
agtaatgctgactacacggcaaatgcttgctca

SEQ ID NO: 467312 - DNA, 33 bp, Homo sapien
agtaatgctgactacatggcaaatgcttgctca

SEQ ID NO: 467313 - DNA, 33 bp, Homo sapien
atgttgtgagtaataacaagatggttgatgttg

SEQ ID NO: 467314 - DNA, 33 bp, Homo sapien
atgttgtgagtaataataagatggttgatgttg

SEQ ID NO: 467315 - DNA, 33 bp, Homo sapien
catatgtgatgcaagacagtgatcaatgtacaa

SEQ ID NO: 467316 - DNA, 33 bp, Homo sapien
catatgtgatgcaagagagtgatcaatgtacaa

SEQ ID NO: 467317 - DNA, 33 bp, Homo sapien
catgacagtagactaacggaagtcagtgcatca

SEQ ID NO: 467318 - DNA, 33 bp, Homo sapien
catgacagtagactaagggaagtcagtgcatca

SEQ ID NO: 467319 - DNA, 33 bp, Homo sapien
aggaggtcatatgaaaactttttggaaggtgat

SEQ ID NO: 467320 - DNA, 33 bp, Homo sapien
aggaggtcatatgaaagctttttggaaggtgat

SEQ ID NO: 467321 - DNA, 33 bp, Homo sapien
acagccttaaaaagtagatcctctcattgctac

SEQ ID NO: 467322 - DNA, 33 bp, Homo sapien
acagccttaaaaagtatatcctctcattgctac

SEQ ID NO: 467323 - DNA, 33 bp, Homo sapien
tgtattaactcaatctcacattgctctttttga

SEQ ID NO: 467324 - DNA, 33 bp, Homo sapien
tgtattaactcaatcttacattgctctttttga

SEQ ID NO: 467325 - DNA, 33 bp, Homo sapien
ggatttgcaatcctcaccgtgaatttagcctac

SEQ ID NO: 467326 - DNA, 33 bp, Homo sapien
ggatttgcaatcctcatcgtgaatttagcctac

SEQ ID NO: 467327 - DNA, 33 bp, Homo sapien
ggcagtctttaataacagcagcaagatgagtca

SEQ ID NO: 467328 - DNA, 33 bp, Homo sapien
ggcagtctttaataacggcagcaagatgagtca

SEQ ID NO: 467329 - DNA, 33 bp, Homo sapien
caaacaggcttcattccagtaattcttctttta

SEQ ID NO: 467330 - DNA, 33 bp, Homo sapien
caaacaggcttcattcgagtaattcttctttta

SEQ ID NO: 467331 - DNA, 33 bp, Homo sapien
acagaagtaaatatgacagttatgagttaaatg

SEQ ID NO: 467332 - DNA, 33 bp, Homo sapien
acagaagtaaatatgatagttatgagttaaatg

SEQ ID NO: 467333 - DNA, 33 bp, Homo sapien
caccacgtgccgcagagggataaacttggtcac

SEQ ID NO: 467334 - DNA, 33 bp, Homo sapien
caccacgtgccgcagatggataaacttggtcac

SEQ ID NO: 467335 - DNA, 33 bp, Homo sapien
ggcaggcccacagtgaaattgaaaacctcctac

SEQ ID NO: 467336 - DNA, 33 bp, Homo sapien
ggcaggcccacagtgatattgaaaacctcctac

SEQ ID NO: 467337 - DNA, 33 bp, Homo sapien
gctccccaggtgagtacatgaaaacaaagaaac

SEQ ID NO: 467338 - DNA, 33 bp, Homo sapien
gctccccaggtgagtatatgaaaacaaagaaac

SEQ ID NO: 467339 - DNA, 33 bp, Homo sapien
acaattcatgttgtgacacaaatttcctaggat

SEQ ID NO: 467340 - DNA, 33 bp, Homo sapien
acaattcatgttgtgatacaaatttcctaggat

SEQ ID NO: 467341 - DNA, 33 bp, Homo sapien
gaagttgggacaataagtaccttcgaggattgt

SEQ ID NO: 467342 - DNA, 33 bp, Homo sapien
gaagttgggacaataattaccttcgaggattgt

SEQ ID NO: 467343 - DNA, 33 bp, Homo sapien
ttcctgcctgtgaacacagccgtatcttctgga

SEQ ID NO: 467344 - DNA, 33 bp, Homo sapien
ttcctgcctgtgaacatagccgtatcttctgga

SEQ ID NO: 467345 - DNA, 33 bp, Homo sapien
tgcttggcaatggggacgagagaaagagagtgt

SEQ ID NO: 467346 - DNA, 33 bp, Homo sapien
tgcttggcaatggggatgagagaaagagagtgt

SEQ ID NO: 467347 - DNA, 33 bp, Homo sapien
ggtcaattaactcatgaaaaccctcagctgtcc

SEQ ID NO: 467348 - DNA, 33 bp, Homo sapien
ggtcaattaactcatggaaaccctcagctgtcc

SEQ ID NO: 467349 - DNA, 33 bp, Homo sapien
tctcattcctctttagacactgagactctacaa

SEQ ID NO: 467350 - DNA, 33 bp, Homo sapien
tctcattcctctttaggcactgagactctacaa

SEQ ID NO: 467351 - DNA, 33 bp, Homo sapien
gtttatcgtgataacaaggattattaaatatgc

SEQ ID NO: 467352 - DNA, 33 bp, Homo sapien
gtttatcgtgataacagggattattaaatatgc

SEQ ID NO: 467353 - DNA, 33 bp, Homo sapien
tacctgccattcaccaagtgacttccaccagac

SEQ ID NO: 467354 - DNA, 33 bp, Homo sapien
tacctgccattcaccaggtgacttccaccagac

SEQ ID NO: 467355 - DNA, 33 bp, Homo sapien
aaaatgaatctacataacctgtataaatgtgac

SEQ ID NO: 467356 - DNA, 33 bp, Homo sapien
aaaatgaatctacatagcctgtataaatgtgac

SEQ ID NO: 467357 - DNA, 33 bp, Homo sapien
taatctacaaaaatgcacatgaatgtcccattc

SEQ ID NO: 467358 - DNA, 33 bp, Homo sapien
taatctacaaaaatgcgcatgaatgtcccattc

SEQ ID NO: 467359 - DNA, 33 bp, Homo sapien
gatgggcatagactaaagctcgttatacttcat

SEQ ID NO: 467360 - DNA, 33 bp, Homo sapien
gatgggcatagactaaggctcgttatacttcat

SEQ ID NO: 467361 - DNA, 33 bp, Homo sapien
atcgcaaaggcaaaggaaaggttgcacaagacc

SEQ ID NO: 467362 - DNA, 33 bp, Homo sapien
atcgcaaaggcaaaggtaaggttgcacaagacc

SEQ ID NO: 467363 - DNA, 33 bp, Homo sapien
tcctggttctcctccaactctctgaggacttct

SEQ ID NO: 467364 - DNA, 33 bp, Homo sapien
tcctggttctcctccagctctctgaggacttct

SEQ ID NO: 467365 - DNA, 33 bp, Homo sapien
tgtctggtgcagcataaaaagtccacatccagc

SEQ ID NO: 467366 - DNA, 33 bp, Homo sapien
tgtctggtgcagcatagaaagtccacatccagc

SEQ ID NO: 467367 - DNA, 33 bp, Homo sapien
tccttacagcgcaatcaaatccacatgggatga

SEQ ID NO: 467368 - DNA, 33 bp, Homo sapien
tccttacagcgcaatccaatccacatgggatga

SEQ ID NO: 467369 - DNA, 33 bp, Homo sapien
taagttactcttttctcacttgactcccgctcg

SEQ ID NO: 467370 - DNA, 33 bp, Homo sapien
taagttactcttttcttacttgactcccgctcg

SEQ ID NO: 467371 - DNA, 33 bp, Homo sapien
cttaggctgttgggcacaacaataacattgaag

SEQ ID NO: 467372 - DNA, 33 bp, Homo sapien
cttaggctgttgggcagaacaataacattgaag

SEQ ID NO: 467373 - DNA, 33 bp, Homo sapien
gggaaggcaaagtacacggtgaggacagagagg

SEQ ID NO: 467374 - DNA, 33 bp, Homo sapien
gggaaggcaaagtacatggtgaggacagagagg

SEQ ID NO: 467375 - DNA, 33 bp, Homo sapien
ctttacctgctaatgccgagtgcttcaagcaga

SEQ ID NO: 467376 - DNA, 33 bp, Homo sapien
ctttacctgctaatgctgagtgcttcaagcaga

SEQ ID NO: 467377 - DNA, 33 bp, Homo sapien
ctctccatatttacacggaggtcatagtcttct

SEQ ID NO: 467378 - DNA, 33 bp, Homo sapien
ctctccatatttacactgaggtcatagtcttct

SEQ ID NO: 467379 - DNA, 33 bp, Homo sapien
ggagatagtgctaaacagtgagaaaacgccccc

SEQ ID NO: 467380 - DNA, 33 bp, Homo sapien
ggagatagtgctaaaccgtgagaaaacgccccc

SEQ ID NO: 467381 - DNA, 33 bp, Homo sapien
taagaaggcacattgactataaatacacacatg

SEQ ID NO: 467382 - DNA, 33 bp, Homo sapien
taagaaggcacattgagtataaatacacacatg

SEQ ID NO: 467383 - DNA, 33 bp, Homo sapien
cttgtaggcagataggcaaagtgacccagtctg

SEQ ID NO: 467384 - DNA, 33 bp, Homo sapien
cttgtaggcagataggtaaagtgacccagtctg

SEQ ID NO: 467385 - DNA, 33 bp, Homo sapien
cgaaaaatcttcctcaccatgctcattagcaag

SEQ ID NO: 467386 - DNA, 33 bp, Homo sapien
cgaaaaatcttcctcatcatgctcattagcaag

SEQ ID NO: 467387 - DNA, 33 bp, Homo sapien
gctgaatttgttcacccgcaaaattgagataat

SEQ ID NO: 467388 - DNA, 33 bp, Homo sapien
gctgaatttgttcacctgcaaaattgagataat

SEQ ID NO: 467389 - DNA, 33 bp, Homo sapien
catgtatacattaagcagagtagcgttgtctgt

SEQ ID NO: 467390 - DNA, 33 bp, Homo sapien
catgtatacattaagcggagtagcgttgtctgt

SEQ ID NO: 467391 - DNA, 33 bp, Homo sapien
aaaagcaacagttcatcaggaatcgtatttttc

SEQ ID NO: 467392 - DNA, 33 bp, Homo sapien
aaaagcaacagttcattaggaatcgtatttttc

SEQ ID NO: 467393 - DNA, 33 bp, Homo sapien
gtgcaacacgccactcaaaagataagacaggtt

SEQ ID NO: 467394 - DNA, 33 bp, Homo sapien
gtgcaacacgccactcgaaagataagacaggtt

SEQ ID NO: 467395 - DNA, 33 bp, Homo sapien
tggaaataaatcaacccaatggcatttaaagtt

SEQ ID NO: 467396 - DNA, 33 bp, Homo sapien
tggaaataaatcaacctaatggcatttaaagtt

SEQ ID NO: 467397 - DNA, 33 bp, Homo sapien
agtgattctcaacctcaatcttgtattataatc

SEQ ID NO: 467398 - DNA, 33 bp, Homo sapien
agtgattctcaacctcgatcttgtattataatc

SEQ ID NO: 467399 - DNA, 33 bp, Homo sapien
ctctgtgaaactcatcaagagaaagcatttaaa

SEQ ID NO: 467400 - DNA, 33 bp, Homo sapien
ctctgtgaaactcatcgagagaaagcatttaaa

SEQ ID NO: 467401 - DNA, 33 bp, Homo sapien
gggaatgtctatcctaagcctgttttactattg

SEQ ID NO: 467402 - DNA, 33 bp, Homo sapien
gggaatgtctatcctacgcctgttttactattg

SEQ ID NO: 467403 - DNA, 33 bp, Homo sapien
gctcatgtgctttacccgaacctctcctttctg

SEQ ID NO: 467404 - DNA, 33 bp, Homo sapien
gctcatgtgctttacctgaacctctcctttctg

SEQ ID NO: 467405 - DNA, 33 bp, Homo sapien
ttctggggaagacttgaaagatatcctggattt

SEQ ID NO: 467406 - DNA, 33 bp, Homo sapien
ttctggggaagacttggaagatatcctggattt

SEQ ID NO: 467407 - DNA, 33 bp, Homo sapien
cataatctgagatgaaaagcagacaagagaatg

SEQ ID NO: 467408 - DNA, 33 bp, Homo sapien
cataatctgagatgaacagcagacaagagaatg

SEQ ID NO: 467409 - DNA, 33 bp, Homo sapien
ttttcaaacttatatcactgtattcatttcgat

SEQ ID NO: 467410 - DNA, 33 bp, Homo sapien
ttttcaaacttatatctctgtattcatttcgat

SEQ ID NO: 467411 - DNA, 33 bp, Homo sapien
ttgtacttgctactgaaaaagctgttgtgaatg

SEQ ID NO: 467412 - DNA, 33 bp, Homo sapien
ttgtacttgctactgagaaagctgttgtgaatg

SEQ ID NO: 467413 - DNA, 33 bp, Homo sapien
ttatagttagagccaggatgcagacgcctcact

SEQ ID NO: 467414 - DNA, 33 bp, Homo sapien
ttatagttagagccagtatgcagacgcctcact

SEQ ID NO: 467415 - DNA, 33 bp, Homo sapien
accatgacttttaagacaaggagcataaacagc

SEQ ID NO: 467416 - DNA, 33 bp, Homo sapien
accatgacttttaagataaggagcataaacagc

SEQ ID NO: 467417 - DNA, 33 bp, Homo sapien
atcttccaagactgtgaaaatgagtgatggata

SEQ ID NO: 467418 - DNA, 33 bp, Homo sapien
atcttccaagactgtggaaatgagtgatggata

SEQ ID NO: 467419 - DNA, 33 bp, Homo sapien
cattttaagcaccctacgtgcaccttttcattt

SEQ ID NO: 467420 - DNA, 33 bp, Homo sapien
cattttaagcaccctatgtgcaccttttcattt

SEQ ID NO: 467421 - DNA, 33 bp, Homo sapien
agtctacactcagacaatcactcctttttggag

SEQ ID NO: 467422 - DNA, 33 bp, Homo sapien
agtctacactcagacagtcactcctttttggag

SEQ ID NO: 467423 - DNA, 33 bp, Homo sapien
gttctctttcccaggaagcaaagacaattacct

SEQ ID NO: 467424 - DNA, 33 bp, Homo sapien
gttctctttcccaggaggcaaagacaattacct

SEQ ID NO: 467425 - DNA, 33 bp, Homo sapien
gtttctagcaattctgaaggacttaccactctg

SEQ ID NO: 467426 - DNA, 33 bp, Homo sapien
gtttctagcaattctggaggacttaccactctg

SEQ ID NO: 467427 - DNA, 33 bp, Homo sapien
actttggggcagactaaccgaagccattttact

SEQ ID NO: 467428 - DNA, 33 bp, Homo sapien
actttggggcagactagccgaagccattttact

SEQ ID NO: 467429 - DNA, 33 bp, Homo sapien
aaccacatggtgttcccccaaagttcatatgtt

SEQ ID NO: 467430 - DNA, 33 bp, Homo sapien
aaccacatggtgttcctccaaagttcatatgtt

SEQ ID NO: 467431 - DNA, 33 bp, Homo sapien
tttagttggactcaaacatgattaagcgattaa

SEQ ID NO: 467432 - DNA, 33 bp, Homo sapien
tttagttggactcaaatatgattaagcgattaa

SEQ ID NO: 467433 - DNA, 33 bp, Homo sapien
acacacactctagtataaaacgaaacaacatca

SEQ ID NO: 467434 - DNA, 33 bp, Homo sapien
acacacactctagtatgaaacgaaacaacatca

SEQ ID NO: 467435 - DNA, 33 bp, Homo sapien
ttaagcgatctaaaaacaactcttctcctggag

SEQ ID NO: 467436 - DNA, 33 bp, Homo sapien
ttaagcgatctaaaaataactcttctcctggag

SEQ ID NO: 467437 - DNA, 33 bp, Homo sapien
gttagttgtgttgaaacgaattgtgccatcgct

SEQ ID NO: 467438 - DNA, 33 bp, Homo sapien
gttagttgtgttgaaatgaattgtgccatcgct

SEQ ID NO: 467439 - DNA, 33 bp, Homo sapien
tccgaacacgattgtacgttacactgggcattt

SEQ ID NO: 467440 - DNA, 33 bp, Homo sapien
tccgaacacgattgtatgttacactgggcattt

SEQ ID NO: 467441 - DNA, 33 bp, Homo sapien
tttctatacttcacaacgaacttacaatttctt

SEQ ID NO: 467442 - DNA, 33 bp, Homo sapien
tttctatacttcacaatgaacttacaatttctt

SEQ ID NO: 467443 - DNA, 33 bp, Homo sapien
tttctagactatgtgacaaagaacagcttgtgc

SEQ ID NO: 467444 - DNA, 33 bp, Homo sapien
tttctagactatgtgataaagaacagcttgtgc

SEQ ID NO: 467445 - DNA, 33 bp, Homo sapien
aaaatatatctcctataagctttgttgacaatt

SEQ ID NO: 467446 - DNA, 33 bp, Homo sapien
aaaatatatctcctatgagctttgttgacaatt

SEQ ID NO: 467447 - DNA, 33 bp, Homo sapien
aaaaaggttcttaaagacattggcagctgtgtc

SEQ ID NO: 467448 - DNA, 33 bp, Homo sapien
aaaaaggttcttaaaggcattggcagctgtgtc

SEQ ID NO: 467449 - DNA, 33 bp, Homo sapien
actagaggaaatcacagtaaggacatgggtgaa

SEQ ID NO: 467450 - DNA, 33 bp, Homo sapien
actagaggaaatcacattaaggacatgggtgaa

SEQ ID NO: 467451 - DNA, 33 bp, Homo sapien
atattgaggaggaaaacggtgaaattgaaggag

SEQ ID NO: 467452 - DNA, 33 bp, Homo sapien
atattgaggaggaaaatggtgaaattgaaggag

SEQ ID NO: 467453 - DNA, 33 bp, Homo sapien
tcgtttctgtccaccaatgctgcaaatatggcc

SEQ ID NO: 467454 - DNA, 33 bp, Homo sapien
tcgtttctgtccaccagtgctgcaaatatggcc

SEQ ID NO: 467455 - DNA, 33 bp, Homo sapien
taactcatgccaaacactgacaggaagaaaaga

SEQ ID NO: 467456 - DNA, 33 bp, Homo sapien
taactcatgccaaacagtgacaggaagaaaaga

SEQ ID NO: 467457 - DNA, 33 bp, Homo sapien
ttatgatgctctgacaacataaacggttttgca

SEQ ID NO: 467458 - DNA, 33 bp, Homo sapien
ttatgatgctctgacaccataaacggttttgca

SEQ ID NO: 467459 - DNA, 33 bp, Homo sapien
cagccattctgaagccgacgttttctgcaggac

SEQ ID NO: 467460 - DNA, 33 bp, Homo sapien
cagccattctgaagcctacgttttctgcaggac

SEQ ID NO: 467461 - DNA, 33 bp, Homo sapien
gtccctataagaagagcaatagaccccagaatt

SEQ ID NO: 467462 - DNA, 33 bp, Homo sapien
gtccctataagaagaggaatagaccccagaatt

SEQ ID NO: 467463 - DNA, 33 bp, Homo sapien
atggccagaaccaatgacagtctggaagatttc

SEQ ID NO: 467464 - DNA, 33 bp, Homo sapien
atggccagaaccaatggcagtctggaagatttc

SEQ ID NO: 467465 - DNA, 33 bp, Homo sapien
tgaatagctgtagaggacatattttaaggtaaa

SEQ ID NO: 467466 - DNA, 33 bp, Homo sapien
tgaatagctgtagagggcatattttaaggtaaa

SEQ ID NO: 467467 - DNA, 33 bp, Homo sapien
aaacaagccaagtatcacattccttttgtctga

SEQ ID NO: 467468 - DNA, 33 bp, Homo sapien
aaacaagccaagtatcgcattccttttgtctga

SEQ ID NO: 467469 - DNA, 33 bp, Homo sapien
aatcacaactatggaaactacaattaaataaga

SEQ ID NO: 467470 - DNA, 33 bp, Homo sapien
aatcacaactatggaagctacaattaaataaga

SEQ ID NO: 467471 - DNA, 33 bp, Homo sapien
gtgtactcgagtccaccgtagatcacaaatagt

SEQ ID NO: 467472 - DNA, 33 bp, Homo sapien
gtgtactcgagtccactgtagatcacaaatagt

SEQ ID NO: 467473 - DNA, 33 bp, Homo sapien
gagacctggtgcaatcacttccctggatataat

SEQ ID NO: 467474 - DNA, 33 bp, Homo sapien
gagacctggtgcaatcgcttccctggatataat

SEQ ID NO: 467475 - DNA, 33 bp, Homo sapien
aaaatgcaggcaaatcagaaacaaatttcccag

SEQ ID NO: 467476 - DNA, 33 bp, Homo sapien
aaaatgcaggcaaatcggaaacaaatttcccag

SEQ ID NO: 467477 - DNA, 33 bp, Homo sapien
agggtcagctacaccagcagtcaatgagaaatg

SEQ ID NO: 467478 - DNA, 33 bp, Homo sapien
agggtcagctacaccatcagtcaatgagaaatg

SEQ ID NO: 467479 - DNA, 33 bp, Homo sapien
tttatctataaaaatcaaagacattggaaaata

SEQ ID NO: 467480 - DNA, 33 bp, Homo sapien
tttatctataaaaatcgaagacattggaaaata

SEQ ID NO: 467481 - DNA, 33 bp, Homo sapien
tttgaccgtgtagaaagtgtgagtcttatgtgc

SEQ ID NO: 467482 - DNA, 33 bp, Homo sapien
tttgaccgtgtagaaattgtgagtcttatgtgc

SEQ ID NO: 467483 - DNA, 33 bp, Homo sapien
tcacactcatttataacgtctaagagccgaata

SEQ ID NO: 467484 - DNA, 33 bp, Homo sapien
tcacactcatttataatgtctaagagccgaata

SEQ ID NO: 467485 - DNA, 33 bp, Homo sapien
ctgtcaggaggggcgcaatgggagattccagcc

SEQ ID NO: 467486 - DNA, 33 bp, Homo sapien
ctgtcaggaggggcgcgatgggagattccagcc

SEQ ID NO: 467487 - DNA, 33 bp, Homo sapien
tgatccttccttacagccctttctgtccatggg

SEQ ID NO: 467488 - DNA, 33 bp, Homo sapien
tgatccttccttacagtcctttctgtccatggg

SEQ ID NO: 467489 - DNA, 33 bp, Homo sapien
caagacttattgctaaacctcacaataatcctg

SEQ ID NO: 467490 - DNA, 33 bp, Homo sapien
caagacttattgctaagcctcacaataatcctg

SEQ ID NO: 467491 - DNA, 33 bp, Homo sapien
tattggcagcctttcaaagttatgttgacaatc

SEQ ID NO: 467492 - DNA, 33 bp, Homo sapien
tattggcagcctttcagagttatgttgacaatc

SEQ ID NO: 467493 - DNA, 33 bp, Homo sapien
catgccagggtatccacgagatacgaggaacat

SEQ ID NO: 467494 - DNA, 33 bp, Homo sapien
catgccagggtatccatgagatacgaggaacat

SEQ ID NO: 467495 - DNA, 33 bp, Homo sapien
gtagtggtctttctataacgctcgtaaggattg

SEQ ID NO: 467496 - DNA, 33 bp, Homo sapien
gtagtggtctttctattacgctcgtaaggattg

SEQ ID NO: 467497 - DNA, 33 bp, Homo sapien
aaggggaggggactgaaagagactttgaaatat

SEQ ID NO: 467498 - DNA, 33 bp, Homo sapien
aaggggaggggactgagagagactttgaaatat

SEQ ID NO: 467499 - DNA, 33 bp, Homo sapien
ttaataagaaatttgaggtcagtcttatttctg

SEQ ID NO: 467500 - DNA, 33 bp, Homo sapien
ttaataagaaatttgatgtcagtcttatttctg

SEQ ID NO: 467501 - DNA, 33 bp, Homo sapien
agttccaggacaagctaaagtgaaatgttgact

SEQ ID NO: 467502 - DNA, 33 bp, Homo sapien
agttccaggacaagctgaagtgaaatgttgact

SEQ ID NO: 467503 - DNA, 33 bp, Homo sapien
agaaacaacagttgtaaggagaaaggtctatag

SEQ ID NO: 467504 - DNA, 33 bp, Homo sapien
agaaacaacagttgtagggagaaaggtctatag

SEQ ID NO: 467505 - DNA, 33 bp, Homo sapien
tatcttgcacccaaaaaggatcaggagctcaaa

SEQ ID NO: 467506 - DNA, 33 bp, Homo sapien
tatcttgcacccaaaagggatcaggagctcaaa

SEQ ID NO: 467507 - DNA, 33 bp, Homo sapien
ccatctttagagtgagcatggttttggagacag

SEQ ID NO: 467508 - DNA, 33 bp, Homo sapien
ccatctttagagtgaggatggttttggagacag

SEQ ID NO: 467509 - DNA, 33 bp, Homo sapien
aaaactgacaccattaagagaaaaacgtgatta

SEQ ID NO: 467510 - DNA, 33 bp, Homo sapien
aaaactgacaccattaggagaaaaacgtgatta

SEQ ID NO: 467511 - DNA, 33 bp, Homo sapien
aggccattgctgtaaagaaatacttgacgatag

SEQ ID NO: 467512 - DNA, 33 bp, Homo sapien
aggccattgctgtaaataaatacttgacgatag

SEQ ID NO: 467513 - DNA, 33 bp, Homo sapien
gtataaatcaggctgcacagtctggaatcagtt

SEQ ID NO: 467514 - DNA, 33 bp, Homo sapien
gtataaatcaggctgcgcagtctggaatcagtt

SEQ ID NO: 467515 - DNA, 33 bp, Homo sapien
ttcatgctatttggtaaatgaaatgccccactc

SEQ ID NO: 467516 - DNA, 33 bp, Homo sapien
ttcatgctatttggtagatgaaatgccccactc

SEQ ID NO: 467517 - DNA, 33 bp, Homo sapien
tgcaattaccctctcaccccttgatcatttcac

SEQ ID NO: 467518 - DNA, 33 bp, Homo sapien
tgcaattaccctctcatcccttgatcatttcac

SEQ ID NO: 467519 - DNA, 33 bp, Homo sapien
ccttgcagatgagaaccaaactttttgaaaatg

SEQ ID NO: 467520 - DNA, 33 bp, Homo sapien
ccttgcagatgagaacgaaactttttgaaaatg

SEQ ID NO: 467521 - DNA, 33 bp, Homo sapien
ctaggacaaaatgaccacttttgcttaagagat

SEQ ID NO: 467522 - DNA, 33 bp, Homo sapien
ctaggacaaaatgaccgcttttgcttaagagat

SEQ ID NO: 467523 - DNA, 33 bp, Homo sapien
cttaaaaactgagaagaaattggaactattgcc

SEQ ID NO: 467524 - DNA, 33 bp, Homo sapien
cttaaaaactgagaagtaattggaactattgcc

SEQ ID NO: 467525 - DNA, 33 bp, Homo sapien
gaccctgatagtgggcaatttgaggacatctca

SEQ ID NO: 467526 - DNA, 33 bp, Homo sapien
gaccctgatagtgggcgatttgaggacatctca

SEQ ID NO: 467527 - DNA, 33 bp, Homo sapien
tttagttgttattttcccatgtaacgcagtgtg

SEQ ID NO: 467528 - DNA, 33 bp, Homo sapien
tttagttgttattttctcatgtaacgcagtgtg

SEQ ID NO: 467529 - DNA, 33 bp, Homo sapien
cttggctaaatgaacaaatggagtcatgaagac

SEQ ID NO: 467530 - DNA, 33 bp, Homo sapien
cttggctaaatgaacagatggagtcatgaagac

SEQ ID NO: 467531 - DNA, 33 bp, Homo sapien
ccaacttgaatataggaacaggcaaagattaca

SEQ ID NO: 467532 - DNA, 33 bp, Homo sapien
ccaacttgaatatagggacaggcaaagattaca

SEQ ID NO: 467533 - DNA, 33 bp, Homo sapien
ctaggcactgcattacaccttttggctttgggt

SEQ ID NO: 467534 - DNA, 33 bp, Homo sapien
ctaggcactgcattaccccttttggctttgggt

SEQ ID NO: 467535 - DNA, 33 bp, Homo sapien
aatcctggcatgtcaacgggcattcagcagcca

SEQ ID NO: 467536 - DNA, 33 bp, Homo sapien
aatcctggcatgtcaaggggcattcagcagcca

SEQ ID NO: 467537 - DNA, 33 bp, Homo sapien
agaaaccaaagcgtcaaaaatcagtatctctct

SEQ ID NO: 467538 - DNA, 33 bp, Homo sapien
agaaaccaaagcgtcacaaatcagtatctctct

SEQ ID NO: 467539 - DNA, 33 bp, Homo sapien
tctatgtattttgaaaacctgaaaacttggcat

SEQ ID NO: 467540 - DNA, 33 bp, Homo sapien
tctatgtattttgaaagcctgaaaacttggcat

SEQ ID NO: 467541 - DNA, 33 bp, Homo sapien
acacgagactgtcacccattgacttggagtaca

SEQ ID NO: 467542 - DNA, 33 bp, Homo sapien
acacgagactgtcacctattgacttggagtaca

SEQ ID NO: 467543 - DNA, 33 bp, Homo sapien
atgtaattaatctttcccctgttactaggcatg

SEQ ID NO: 467544 - DNA, 33 bp, Homo sapien
atgtaattaatctttctcctgttactaggcatg

SEQ ID NO: 467545 - DNA, 33 bp, Homo sapien
tagttaatttgaggaaaacaagtgttcattctg

SEQ ID NO: 467546 - DNA, 33 bp, Homo sapien
tagttaatttgaggaagacaagtgttcattctg

SEQ ID NO: 467547 - DNA, 33 bp, Homo sapien
gagcacaatggacaaagcccttcttttggaact

SEQ ID NO: 467548 - DNA, 33 bp, Homo sapien
gagcacaatggacaaatcccttcttttggaact

SEQ ID NO: 467549 - DNA, 33 bp, Homo sapien
ctcctttttctccaaaatccgacagaaatgaca

SEQ ID NO: 467550 - DNA, 33 bp, Homo sapien
ctcctttttctccaaattccgacagaaatgaca

SEQ ID NO: 467551 - DNA, 33 bp, Homo sapien
tttagtagctagtaaacggctgactagagattg

SEQ ID NO: 467552 - DNA, 33 bp, Homo sapien
tttagtagctagtaaatggctgactagagattg

SEQ ID NO: 467553 - DNA, 33 bp, Homo sapien
gccaaatcggaatggaaagagcttgggctgaag

SEQ ID NO: 467554 - DNA, 33 bp, Homo sapien
gccaaatcggaatggagagagcttgggctgaag

SEQ ID NO: 467555 - DNA, 33 bp, Homo sapien
aacgtgaggtgctaggaacactgagattaatga

SEQ ID NO: 467556 - DNA, 33 bp, Homo sapien
aacgtgaggtgctagggacactgagattaatga

SEQ ID NO: 467557 - DNA, 33 bp, Homo sapien
tctgacttaccggatacactacaccactttata

SEQ ID NO: 467558 - DNA, 33 bp, Homo sapien
tctgacttaccggatatactacaccactttata

SEQ ID NO: 467559 - DNA, 33 bp, Homo sapien
tctctgaatgctgatgaaggaaaaacgaaagga

SEQ ID NO: 467560 - DNA, 33 bp, Homo sapien
tctctgaatgctgatggaggaaaaacgaaagga

SEQ ID NO: 467561 - DNA, 33 bp, Homo sapien
aggcactcttaaccaacgcaatattagacgtca

SEQ ID NO: 467562 - DNA, 33 bp, Homo sapien
aggcactcttaaccaatgcaatattagacgtca

SEQ ID NO: 467563 - DNA, 33 bp, Homo sapien
aattaatttcaccacaatgtggataaagctgca

SEQ ID NO: 467564 - DNA, 33 bp, Homo sapien
aattaatttcaccacagtgtggataaagctgca

SEQ ID NO: 467565 - DNA, 33 bp, Homo sapien
aggttcttctgctcaacactaacttaccatttt

SEQ ID NO: 467566 - DNA, 33 bp, Homo sapien
aggttcttctgctcaatactaacttaccatttt

SEQ ID NO: 467567 - DNA, 33 bp, Homo sapien
ttctgtcaccttttggcaatggaataatgtcca

SEQ ID NO: 467568 - DNA, 33 bp, Homo sapien
ttctgtcaccttttggtaatggaataatgtcca

SEQ ID NO: 467569 - DNA, 33 bp, Homo sapien
cactcggcgctgaccacagtgtgagccaggtct

SEQ ID NO: 467570 - DNA, 33 bp, Homo sapien
cactcggcgctgaccagagtgtgagccaggtct

SEQ ID NO: 467571 - DNA, 33 bp, Homo sapien
gctcacttctgtaataccacacattagaaggca

SEQ ID NO: 467572 - DNA, 33 bp, Homo sapien
gctcacttctgtaatatcacacattagaaggca

SEQ ID NO: 467573 - DNA, 33 bp, Homo sapien
catttattaagcaccaactatgttcttagaaaa

SEQ ID NO: 467574 - DNA, 33 bp, Homo sapien
catttattaagcaccagctatgttcttagaaaa

SEQ ID NO: 467575 - DNA, 33 bp, Homo sapien
tactcaagtttcttccactgtttggatcccttc

SEQ ID NO: 467576 - DNA, 33 bp, Homo sapien
tactcaagtttcttccgctgtttggatcccttc

SEQ ID NO: 467577 - DNA, 33 bp, Homo sapien
ataggtgcccttgttaaatgtttcatgattcta

SEQ ID NO: 467578 - DNA, 33 bp, Homo sapien
ataggtgcccttgttagatgtttcatgattcta

SEQ ID NO: 467579 - DNA, 33 bp, Homo sapien
ccatttgggtagtagcaagaaagtaactaaata

SEQ ID NO: 467580 - DNA, 33 bp, Homo sapien
ccatttgggtagtagccagaaagtaactaaata

SEQ ID NO: 467581 - DNA, 33 bp, Homo sapien
tttgaaaaagttcccaataacaatgacattttt

SEQ ID NO: 467582 - DNA, 33 bp, Homo sapien
tttgaaaaagttcccagtaacaatgacattttt

SEQ ID NO: 467583 - DNA, 33 bp, Homo sapien
cctcactgcttatataaccccacattctcacct

SEQ ID NO: 467584 - DNA, 33 bp, Homo sapien
cctcactgcttatatacccccacattctcacct

SEQ ID NO: 467585 - DNA, 33 bp, Homo sapien
acagtactagcactccactatgaccaaagtttt

SEQ ID NO: 467586 - DNA, 33 bp, Homo sapien
acagtactagcactccgctatgaccaaagtttt

SEQ ID NO: 467587 - DNA, 33 bp, Homo sapien
agcttagagggattaaatgatttggccaagaac

SEQ ID NO: 467588 - DNA, 33 bp, Homo sapien
agcttagagggattaagtgatttggccaagaac

SEQ ID NO: 467589 - DNA, 33 bp, Homo sapien
catgtggcaactgtaaatattccaattagataa

SEQ ID NO: 467590 - DNA, 33 bp, Homo sapien
catgtggcaactgtaagtattccaattagataa

SEQ ID NO: 467591 - DNA, 33 bp, Homo sapien
acacagaaagatctgacgatactgaggcgcatc

SEQ ID NO: 467592 - DNA, 33 bp, Homo sapien
acacagaaagatctgatgatactgaggcgcatc

SEQ ID NO: 467593 - DNA, 33 bp, Homo sapien
ggaacctccaaagctccgaaaaacaagaaacgg

SEQ ID NO: 467594 - DNA, 33 bp, Homo sapien
ggaacctccaaagctctgaaaaacaagaaacgg

SEQ ID NO: 467595 - DNA, 33 bp, Homo sapien
acctgtgcacagtggaagaacacacaggagcaa

SEQ ID NO: 467596 - DNA, 33 bp, Homo sapien
acctgtgcacagtggaggaacacacaggagcaa

SEQ ID NO: 467597 - DNA, 33 bp, Homo sapien
ggccagccaaaacttcacggggagaggaagaag

SEQ ID NO: 467598 - DNA, 33 bp, Homo sapien
ggccagccaaaacttcgcggggagaggaagaag

SEQ ID NO: 467599 - DNA, 33 bp, Homo sapien
agcaacaatgtaaacagatggtaaaagttccac

SEQ ID NO: 467600 - DNA, 33 bp, Homo sapien
agcaacaatgtaaacatatggtaaaagttccac

SEQ ID NO: 467601 - DNA, 33 bp, Homo sapien
agaagaagaacactaaatctccagagtttgaga

SEQ ID NO: 467602 - DNA, 33 bp, Homo sapien
agaagaagaacactaagtctccagagtttgaga

SEQ ID NO: 467603 - DNA, 33 bp, Homo sapien
tctgggaaggactaaaccgtgagaactccacat

SEQ ID NO: 467604 - DNA, 33 bp, Homo sapien
tctgggaaggactaaatcgtgagaactccacat

SEQ ID NO: 467605 - DNA, 33 bp, Homo sapien
accgtcagccaccagcaaataagaaatggcaat

SEQ ID NO: 467606 - DNA, 33 bp, Homo sapien
accgtcagccaccagcgaataagaaatggcaat

SEQ ID NO: 467607 - DNA, 33 bp, Homo sapien
ggatttaataccatccccgtagatcacacagca

SEQ ID NO: 467608 - DNA, 33 bp, Homo sapien
ggatttaataccatccgcgtagatcacacagca

SEQ ID NO: 467609 - DNA, 33 bp, Homo sapien
ctacactgctttctgcactttgaggaatagttt

SEQ ID NO: 467610 - DNA, 33 bp, Homo sapien
ctacactgctttctgcgctttgaggaatagttt

SEQ ID NO: 467611 - DNA, 33 bp, Homo sapien
agccatgagcaaacacggaactccttcttactg

SEQ ID NO: 467612 - DNA, 33 bp, Homo sapien
agccatgagcaaacactgaactccttcttactg

SEQ ID NO: 467613 - DNA, 33 bp, Homo sapien
attttgcttcactcataactaccttccatcaat

SEQ ID NO: 467614 - DNA, 33 bp, Homo sapien
attttgcttcactcatgactaccttccatcaat

SEQ ID NO: 467615 - DNA, 33 bp, Homo sapien
gagtgtatattatttaaatggtcaccaaaatct

SEQ ID NO: 467616 - DNA, 33 bp, Homo sapien
gagtgtatattatttagatggtcaccaaaatct

SEQ ID NO: 467617 - DNA, 33 bp, Homo sapien
gcatctttgaaaattaccctagtggctgttctc

SEQ ID NO: 467618 - DNA, 33 bp, Homo sapien
gcatctttgaaaattatcctagtggctgttctc

SEQ ID NO: 467619 - DNA, 33 bp, Homo sapien
tatgttgaagttttgcaaagcaactagtcaaac

SEQ ID NO: 467620 - DNA, 33 bp, Homo sapien
tatgttgaagttttgccaagcaactagtcaaac

SEQ ID NO: 467621 - DNA, 33 bp, Homo sapien
caataatctaagaaaacttgccagaatattatc

SEQ ID NO: 467622 - DNA, 33 bp, Homo sapien
caataatctaagaaaatttgccagaatattatc

SEQ ID NO: 467623 - DNA, 33 bp, Homo sapien
gtacttaaggtctacaaatctctagcaacagtc

SEQ ID NO: 467624 - DNA, 33 bp, Homo sapien
gtacttaaggtctacacatctctagcaacagtc

SEQ ID NO: 467625 - DNA, 33 bp, Homo sapien
aggtctcttacttgaacgttggggcatctggta

SEQ ID NO: 467626 - DNA, 33 bp, Homo sapien
aggtctcttacttgaatgttggggcatctggta

SEQ ID NO: 467627 - DNA, 33 bp, Homo sapien
aaggatttacaagtctcaacgtttcattttctt

SEQ ID NO: 467628 - DNA, 33 bp, Homo sapien
aaggatttacaagtctgaacgtttcattttctt

SEQ ID NO: 467629 - DNA, 33 bp, Homo sapien
ggccagacgtaaggcaaaggaaccagtggcatc

SEQ ID NO: 467630 - DNA, 33 bp, Homo sapien
ggccagacgtaaggcagaggaaccagtggcatc

SEQ ID NO: 467631 - DNA, 33 bp, Homo sapien
gtgagttgtttgaagaaaaaggaagataaacgg

SEQ ID NO: 467632 - DNA, 33 bp, Homo sapien
gtgagttgtttgaagagaaaggaagataaacgg

SEQ ID NO: 467633 - DNA, 33 bp, Homo sapien
cttgagaatagcagagaatggaattccacccag

SEQ ID NO: 467634 - DNA, 33 bp, Homo sapien
cttgagaatagcagaggatggaattccacccag

SEQ ID NO: 467635 - DNA, 33 bp, Homo sapien
agacaactttgggtaacgattcttgcagcagag

SEQ ID NO: 467636 - DNA, 33 bp, Homo sapien
agacaactttgggtaaggattcttgcagcagag

SEQ ID NO: 467637 - DNA, 33 bp, Homo sapien
aggacagaaacaatgacgtaaaggttccttgca

SEQ ID NO: 467638 - DNA, 33 bp, Homo sapien
aggacagaaacaatgatgtaaaggttccttgca

SEQ ID NO: 467639 - DNA, 33 bp, Homo sapien
cccttcattaatggggccatacatttacggctg

SEQ ID NO: 467640 - DNA, 33 bp, Homo sapien
cccttcattaatggggtcatacatttacggctg

SEQ ID NO: 467641 - DNA, 33 bp, Homo sapien
cagtttacaagttgaagcacaataaaacgtagt

SEQ ID NO: 467642 - DNA, 33 bp, Homo sapien
cagtttacaagttgaatcacaataaaacgtagt

SEQ ID NO: 467643 - DNA, 33 bp, Homo sapien
ccattcatttgagagacacgctgtctaccatgc

SEQ ID NO: 467644 - DNA, 33 bp, Homo sapien
ccattcatttgagagatacgctgtctaccatgc

SEQ ID NO: 467645 - DNA, 33 bp, Homo sapien
agcaatgctctgctaaataataaatatcggaaa

SEQ ID NO: 467646 - DNA, 33 bp, Homo sapien
agcaatgctctgctaagtaataaatatcggaaa

SEQ ID NO: 467647 - DNA, 33 bp, Homo sapien
accactcaagtgcctacgggattgtattttata

SEQ ID NO: 467648 - DNA, 33 bp, Homo sapien
accactcaagtgcctatgggattgtattttata

SEQ ID NO: 467649 - DNA, 33 bp, Homo sapien
tctaattcaggaataagaattatggcattttca

SEQ ID NO: 467650 - DNA, 33 bp, Homo sapien
tctaattcaggaataataattatggcattttca

SEQ ID NO: 467651 - DNA, 33 bp, Homo sapien
tatctctaagtcaccacagtacatactaaaccc

SEQ ID NO: 467652 - DNA, 33 bp, Homo sapien
tatctctaagtcaccagagtacatactaaaccc

SEQ ID NO: 467653 - DNA, 33 bp, Homo sapien
catgacatagcacaaacagttctggactaaatg

SEQ ID NO: 467654 - DNA, 33 bp, Homo sapien
catgacatagcacaaatagttctggactaaatg

SEQ ID NO: 467655 - DNA, 33 bp, Homo sapien
gaagtttcctgtgcaaataactaccacttttta

SEQ ID NO: 467656 - DNA, 33 bp, Homo sapien
gaagtttcctgtgcaagtaactaccacttttta

SEQ ID NO: 467657 - DNA, 33 bp, Homo sapien
gctggggatggagcgacgaaaatgctggataaa

SEQ ID NO: 467658 - DNA, 33 bp, Homo sapien
gctggggatggagcgatgaaaatgctggataaa

SEQ ID NO: 467659 - DNA, 33 bp, Homo sapien
caaaacccagtgcctgcaaaaatacctggcata

SEQ ID NO: 467660 - DNA, 33 bp, Homo sapien
caaaacccagtgcctggaaaaatacctggcata

SEQ ID NO: 467661 - DNA, 33 bp, Homo sapien
aaacagtaaaaccaaactatgaacaagatgtac

SEQ ID NO: 467662 - DNA, 33 bp, Homo sapien
aaacagtaaaaccaaagtatgaacaagatgtac

SEQ ID NO: 467663 - DNA, 33 bp, Homo sapien
tggtgtccgactcaacacttgttcttctgtgag

SEQ ID NO: 467664 - DNA, 33 bp, Homo sapien
tggtgtccgactcaactcttgttcttctgtgag

SEQ ID NO: 467665 - DNA, 33 bp, Homo sapien
tagtgttagaaggcaacgccaggactctgactc

SEQ ID NO: 467666 - DNA, 33 bp, Homo sapien
tagtgttagaaggcaatgccaggactctgactc

SEQ ID NO: 467667 - DNA, 33 bp, Homo sapien
ttttctatgtgagggactaaaaaaacctgagta

SEQ ID NO: 467668 - DNA, 33 bp, Homo sapien
ttttctatgtgagggattaaaaaaacctgagta

SEQ ID NO: 467669 - DNA, 33 bp, Homo sapien
actgggttgtcttaaacattgcgctccctgcaa

SEQ ID NO: 467670 - DNA, 33 bp, Homo sapien
actgggttgtcttaaatattgcgctccctgcaa

SEQ ID NO: 467671 - DNA, 33 bp, Homo sapien
gtgatctggaaagctacagtttctcgtttctgt

SEQ ID NO: 467672 - DNA, 33 bp, Homo sapien
gtgatctggaaagctagagtttctcgtttctgt

SEQ ID NO: 467673 - DNA, 33 bp, Homo sapien
ctttacactaacttcaatcacgctatgggacct

SEQ ID NO: 467674 - DNA, 33 bp, Homo sapien
ctttacactaacttcagtcacgctatgggacct

SEQ ID NO: 467675 - DNA, 33 bp, Homo sapien
ccatctgcagtaggaaagcggaggacgccttct

SEQ ID NO: 467676 - DNA, 33 bp, Homo sapien
ccatctgcagtaggaatgcggaggacgccttct

SEQ ID NO: 467677 - DNA, 33 bp, Homo sapien
gttagcagacagcggaactatgaattagacttg

SEQ ID NO: 467678 - DNA, 33 bp, Homo sapien
gttagcagacagcggagctatgaattagacttg

SEQ ID NO: 467679 - DNA, 33 bp, Homo sapien
agttttattatagcaacgtgcatagtaccttgc

SEQ ID NO: 467680 - DNA, 33 bp, Homo sapien
agttttattatagcaatgtgcatagtaccttgc

SEQ ID NO: 467681 - DNA, 33 bp, Homo sapien
tcaggtccagtgaatcaaaatctgcatcttcac

SEQ ID NO: 467682 - DNA, 33 bp, Homo sapien
tcaggtccagtgaatcgaaatctgcatcttcac

SEQ ID NO: 467683 - DNA, 33 bp, Homo sapien
tggggaggtgtgtctcaaagccaagggatgaca

SEQ ID NO: 467684 - DNA, 33 bp, Homo sapien
tggggaggtgtgtctcgaagccaagggatgaca

SEQ ID NO: 467685 - DNA, 33 bp, Homo sapien
aaatatttactacacaactcctactcctacagg

SEQ ID NO: 467686 - DNA, 33 bp, Homo sapien
aaatatttactacacacctcctactcctacagg

SEQ ID NO: 467687 - DNA, 33 bp, Homo sapien
aaacttttgtgatctacgtagtgcatcacaaat

SEQ ID NO: 467688 - DNA, 33 bp, Homo sapien
aaacttttgtgatctatgtagtgcatcacaaat

SEQ ID NO: 467689 - DNA, 33 bp, Homo sapien
agagacactggcagagacattttcacaacttct

SEQ ID NO: 467690 - DNA, 33 bp, Homo sapien
agagacactggcagagccattttcacaacttct

SEQ ID NO: 467691 - DNA, 33 bp, Homo sapien
aaattgtaataaagacccccgtatcttacataa

SEQ ID NO: 467692 - DNA, 33 bp, Homo sapien
aaattgtaataaagactcccgtatcttacataa

SEQ ID NO: 467693 - DNA, 33 bp, Homo sapien
atggctgccagtacacacctctgattgtgccat

SEQ ID NO: 467694 - DNA, 33 bp, Homo sapien
atggctgccagtacacgcctctgattgtgccat

SEQ ID NO: 467695 - DNA, 33 bp, Homo sapien
gaattagcaaggcaaaattgaagcatgaaggtt

SEQ ID NO: 467696 - DNA, 33 bp, Homo sapien
gaattagcaaggcaaagttgaagcatgaaggtt

SEQ ID NO: 467697 - DNA, 33 bp, Homo sapien
agtctgagttttcaacactcctatgagaatgct

SEQ ID NO: 467698 - DNA, 33 bp, Homo sapien
agtctgagttttcaacgctcctatgagaatgct

SEQ ID NO: 467699 - DNA, 33 bp, Homo sapien
tggaggaagccttcaccgatacccttagccctg

SEQ ID NO: 467700 - DNA, 33 bp, Homo sapien
tggaggaagccttcactgatacccttagccctg

SEQ ID NO: 467701 - DNA, 33 bp, Homo sapien
agaaaagagcatatggaaagtagaaaagtacct

SEQ ID NO: 467702 - DNA, 33 bp, Homo sapien
agaaaagagcatatgggaagtagaaaagtacct

SEQ ID NO: 467703 - DNA, 33 bp, Homo sapien
tgcggatgacagcggaacaagtttgtgtgcggc

SEQ ID NO: 467704 - DNA, 33 bp, Homo sapien
tgcggatgacagcggagcaagtttgtgtgcggc

SEQ ID NO: 467705 - DNA, 33 bp, Homo sapien
cattttacaaacagcaacaataacaacaaattg

SEQ ID NO: 467706 - DNA, 33 bp, Homo sapien
cattttacaaacagcaccaataacaacaaattg

SEQ ID NO: 467707 - DNA, 33 bp, Homo sapien
gaaggtctcctggggcactcagcaaacagattt

SEQ ID NO: 467708 - DNA, 33 bp, Homo sapien
gaaggtctcctggggcgctcagcaaacagattt

SEQ ID NO: 467709 - DNA, 33 bp, Homo sapien
gatgggataaaaaagactcctgccaagccccac

SEQ ID NO: 467710 - DNA, 33 bp, Homo sapien
gatgggataaaaaagattcctgccaagccccac

SEQ ID NO: 467711 - DNA, 33 bp, Homo sapien
ctattgtctaaaactgaaaaagatgctaataat

SEQ ID NO: 467712 - DNA, 33 bp, Homo sapien
ctattgtctaaaactgcaaaagatgctaataat

SEQ ID NO: 467713 - DNA, 33 bp, Homo sapien
tagtattttttatctgcatctgacttcagatta

SEQ ID NO: 467714 - DNA, 33 bp, Homo sapien
tagtattttttatctgtatctgacttcagatta

SEQ ID NO: 467715 - DNA, 33 bp, Homo sapien
tggtgccgctaggacaagttctgaactagaact

SEQ ID NO: 467716 - DNA, 33 bp, Homo sapien
tggtgccgctaggacaggttctgaactagaact

SEQ ID NO: 467717 - DNA, 33 bp, Homo sapien
tcctccaatattaacacggtcaggcaaaggagg

SEQ ID NO: 467718 - DNA, 33 bp, Homo sapien
tcctccaatattaacatggtcaggcaaaggagg

SEQ ID NO: 467719 - DNA, 33 bp, Homo sapien
gtaatttgcacaaagacgtttttaaggccctga

SEQ ID NO: 467720 - DNA, 33 bp, Homo sapien
gtaatttgcacaaagaggtttttaaggccctga

SEQ ID NO: 467721 - DNA, 33 bp, Homo sapien
gcaatctctgctcaaaagatggtcacatccaac

SEQ ID NO: 467722 - DNA, 33 bp, Homo sapien
gcaatctctgctcaaaggatggtcacatccaac

SEQ ID NO: 467723 - DNA, 33 bp, Homo sapien
ggtttattaatttggaaaaggagtaatgccatg

SEQ ID NO: 467724 - DNA, 33 bp, Homo sapien
ggtttattaatttggagaaggagtaatgccatg

SEQ ID NO: 467725 - DNA, 33 bp, Homo sapien
atgaacccaggccagaaaatagcttccagggag

SEQ ID NO: 467726 - DNA, 33 bp, Homo sapien
atgaacccaggccagagaatagcttccagggag

SEQ ID NO: 467727 - DNA, 33 bp, Homo sapien
cattcacttatagagaaactgggctccagtcct

SEQ ID NO: 467728 - DNA, 33 bp, Homo sapien
cattcacttatagagatactgggctccagtcct

SEQ ID NO: 467729 - DNA, 33 bp, Homo sapien
attttgaggtaggcaacgacaaaaatgaggctt

SEQ ID NO: 467730 - DNA, 33 bp, Homo sapien
attttgaggtaggcaatgacaaaaatgaggctt

SEQ ID NO: 467731 - DNA, 33 bp, Homo sapien
cccctgaggaaggggacaggcatccaaaaacag

SEQ ID NO: 467732 - DNA, 33 bp, Homo sapien
cccctgaggaaggggagaggcatccaaaaacag

SEQ ID NO: 467733 - DNA, 33 bp, Homo sapien
caattaagttgttcaaatgcctgattaagtggc

SEQ ID NO: 467734 - DNA, 33 bp, Homo sapien
caattaagttgttcaattgcctgattaagtggc

SEQ ID NO: 467735 - DNA, 33 bp, Homo sapien
tatagaggaaatgttccaatgctcactccattt

SEQ ID NO: 467736 - DNA, 33 bp, Homo sapien
tatagaggaaatgttcgaatgctcactccattt

SEQ ID NO: 467737 - DNA, 33 bp, Homo sapien
gaccatgcctctcccaatctgatttcaaagctg

SEQ ID NO: 467738 - DNA, 33 bp, Homo sapien
gaccatgcctctcccagtctgatttcaaagctg

SEQ ID NO: 467739 - DNA, 33 bp, Homo sapien
gctgccaggtcccggcaatcgtgggatggggat

SEQ ID NO: 467740 - DNA, 33 bp, Homo sapien
gctgccaggtcccggcgatcgtgggatggggat

SEQ ID NO: 467741 - DNA, 33 bp, Homo sapien
attaaaaggcctacagactgcgatttatgaaga

SEQ ID NO: 467742 - DNA, 33 bp, Homo sapien
attaaaaggcctacaggctgcgatttatgaaga

SEQ ID NO: 467743 - DNA, 33 bp, Homo sapien
aatcattcccttctgaaaccagacagcctaagc

SEQ ID NO: 467744 - DNA, 33 bp, Homo sapien
aatcattcccttctgagaccagacagcctaagc

SEQ ID NO: 467745 - DNA, 33 bp, Homo sapien
ttatagatattcctaaacagtggtgatacggaa

SEQ ID NO: 467746 - DNA, 33 bp, Homo sapien
ttatagatattcctaaccagtggtgatacggaa

SEQ ID NO: 467747 - DNA, 33 bp, Homo sapien
cctgggccaacacaatgattcaggttacaaggt

SEQ ID NO: 467748 - DNA, 33 bp, Homo sapien
cctgggccaacacaattattcaggttacaaggt

SEQ ID NO: 467749 - DNA, 33 bp, Homo sapien
agagaacggtaccgccacttggagatccaactg

SEQ ID NO: 467750 - DNA, 33 bp, Homo sapien
agagaacggtaccgccgcttggagatccaactg

SEQ ID NO: 467751 - DNA, 33 bp, Homo sapien
agaagaaacacctacaagggaaagaggaaaggc

SEQ ID NO: 467752 - DNA, 33 bp, Homo sapien
agaagaaacacctacaggggaaagaggaaaggc

SEQ ID NO: 467753 - DNA, 33 bp, Homo sapien
tctgcaaaatttctaaagatacaaatacattaa

SEQ ID NO: 467754 - DNA, 33 bp, Homo sapien
tctgcaaaatttctaatgatacaaatacattaa

SEQ ID NO: 467755 - DNA, 33 bp, Homo sapien
attttactcaatccccactgacacccacgtaga

SEQ ID NO: 467756 - DNA, 33 bp, Homo sapien
attttactcaatccccgctgacacccacgtaga

SEQ ID NO: 467757 - DNA, 33 bp, Homo sapien
tagtgttttccacagacagtctcctgagagtag

SEQ ID NO: 467758 - DNA, 33 bp, Homo sapien
tagtgttttccacagagagtctcctgagagtag

SEQ ID NO: 467759 - DNA, 33 bp, Homo sapien
tctgtgtgtgccgagaagtactggagatttcat

SEQ ID NO: 467760 - DNA, 33 bp, Homo sapien
tctgtgtgtgccgagaggtactggagatttcat

SEQ ID NO: 467761 - DNA, 33 bp, Homo sapien
ctttattgtaagcatacgtggtgcttttgatat

SEQ ID NO: 467762 - DNA, 33 bp, Homo sapien
ctttattgtaagcatatgtggtgcttttgatat

SEQ ID NO: 467763 - DNA, 33 bp, Homo sapien
gaaaacactgagtatgccagttttggtatgagt

SEQ ID NO: 467764 - DNA, 33 bp, Homo sapien
gaaaacactgagtatggcagttttggtatgagt

SEQ ID NO: 467765 - DNA, 33 bp, Homo sapien
ggcactggccaaatgactataattgacccagac

SEQ ID NO: 467766 - DNA, 33 bp, Homo sapien
ggcactggccaaatgattataattgacccagac

SEQ ID NO: 467767 - DNA, 33 bp, Homo sapien
cttggagttccactaacagtagaatactgagta

SEQ ID NO: 467768 - DNA, 33 bp, Homo sapien
cttggagttccactaagagtagaatactgagta

SEQ ID NO: 467769 - DNA, 33 bp, Homo sapien
gagtgtgttcatcttccactctctcatatttcc

SEQ ID NO: 467770 - DNA, 33 bp, Homo sapien
gagtgtgttcatcttctactctctcatatttcc

SEQ ID NO: 467771 - DNA, 33 bp, Homo sapien
gccgtgtgtctcagtgaaagagtagaagtccgg

SEQ ID NO: 467772 - DNA, 33 bp, Homo sapien
gccgtgtgtctcagtggaagagtagaagtccgg

SEQ ID NO: 467773 - DNA, 33 bp, Homo sapien
agaagtccggggaaaactgcttgggttgagggg

SEQ ID NO: 467774 - DNA, 33 bp, Homo sapien
agaagtccggggaaaattgcttgggttgagggg

SEQ ID NO: 467775 - DNA, 33 bp, Homo sapien
atcagaaagttatgaaaaatcatcgtatccacc

SEQ ID NO: 467776 - DNA, 33 bp, Homo sapien
atcagaaagttatgaataatcatcgtatccacc

SEQ ID NO: 467777 - DNA, 33 bp, Homo sapien
acaaatccaaatcataccacagggagaacagga

SEQ ID NO: 467778 - DNA, 33 bp, Homo sapien
acaaatccaaatcatatcacagggagaacagga

SEQ ID NO: 467779 - DNA, 33 bp, Homo sapien
tcttttgctcagtgaccggtagtaataagtggc

SEQ ID NO: 467780 - DNA, 33 bp, Homo sapien
tcttttgctcagtgactggtagtaataagtggc

SEQ ID NO: 467781 - DNA, 33 bp, Homo sapien
taaattttgtgcccggcagctcttcaaacagac

SEQ ID NO: 467782 - DNA, 33 bp, Homo sapien
taaattttgtgcccggtagctcttcaaacagac

SEQ ID NO: 467783 - DNA, 33 bp, Homo sapien
aagagaggttgttacgaaactggcaactgccaa

SEQ ID NO: 467784 - DNA, 33 bp, Homo sapien
aagagaggttgttacggaactggcaactgccaa

SEQ ID NO: 467785 - DNA, 33 bp, Homo sapien
ccctagatttcagtccaaagccctggattgaca

SEQ ID NO: 467786 - DNA, 33 bp, Homo sapien
ccctagatttcagtccgaagccctggattgaca

SEQ ID NO: 467787 - DNA, 33 bp, Homo sapien
ttgcctgaaattacacactggccttgtttcttt

SEQ ID NO: 467788 - DNA, 33 bp, Homo sapien
ttgcctgaaattacacgctggccttgtttcttt

SEQ ID NO: 467789 - DNA, 33 bp, Homo sapien
ctaagggcagtcctcaataaagagttgcaggta

SEQ ID NO: 467790 - DNA, 33 bp, Homo sapien
ctaagggcagtcctcagtaaagagttgcaggta

SEQ ID NO: 467791 - DNA, 33 bp, Homo sapien
ctccaaaaatgaatcaaatttaccaaatgatga

SEQ ID NO: 467792 - DNA, 33 bp, Homo sapien
ctccaaaaatgaatcagatttaccaaatgatga

SEQ ID NO: 467793 - DNA, 33 bp, Homo sapien
atttatgcagtcctaacctgagccagacactgt

SEQ ID NO: 467794 - DNA, 33 bp, Homo sapien
atttatgcagtcctaagctgagccagacactgt

SEQ ID NO: 467795 - DNA, 33 bp, Homo sapien
agattcagttagttcaacccgttagaacacaga

SEQ ID NO: 467796 - DNA, 33 bp, Homo sapien
agattcagttagttcaccccgttagaacacaga

SEQ ID NO: 467797 - DNA, 33 bp, Homo sapien
actaactgaatctgtaaaaatagtaatcataag

SEQ ID NO: 467798 - DNA, 33 bp, Homo sapien
actaactgaatctgtataaatagtaatcataag

SEQ ID NO: 467799 - DNA, 33 bp, Homo sapien
aatgccaaaatctcaacggaatcattttatcct

SEQ ID NO: 467800 - DNA, 33 bp, Homo sapien
aatgccaaaatctcaatggaatcattttatcct

SEQ ID NO: 467801 - DNA, 33 bp, Homo sapien
tagctgggaagagcaaagtcgtgaatctatgcc

SEQ ID NO: 467802 - DNA, 33 bp, Homo sapien
tagctgggaagagcaaggtcgtgaatctatgcc

SEQ ID NO: 467803 - DNA, 33 bp, Homo sapien
gtaagtctcaggagagccaattgttttataaag

SEQ ID NO: 467804 - DNA, 33 bp, Homo sapien
gtaagtctcaggagagtcaattgttttataaag

SEQ ID NO: 467805 - DNA, 33 bp, Homo sapien
acaattctggaagttgaaaagtgaataaataag

SEQ ID NO: 467806 - DNA, 33 bp, Homo sapien
acaattctggaagttggaaagtgaataaataag

SEQ ID NO: 467807 - DNA, 33 bp, Homo sapien
ccattgccctcatggggaaaaaaatggcaaata

SEQ ID NO: 467808 - DNA, 33 bp, Homo sapien
ccattgccctcatgggtaaaaaaatggcaaata

SEQ ID NO: 467809 - DNA, 33 bp, Homo sapien
tgttgatcaggagctacgctggtaaatgaaaga

SEQ ID NO: 467810 - DNA, 33 bp, Homo sapien
tgttgatcaggagctatgctggtaaatgaaaga

SEQ ID NO: 467811 - DNA, 33 bp, Homo sapien
tccaccgcatctccagaattttactgatccact

SEQ ID NO: 467812 - DNA, 33 bp, Homo sapien
tccaccgcatctccaggattttactgatccact

SEQ ID NO: 467813 - DNA, 33 bp, Homo sapien
acacatagctattttgcataatgcccaaataaa

SEQ ID NO: 467814 - DNA, 33 bp, Homo sapien
acacatagctattttgtataatgcccaaataaa

SEQ ID NO: 467815 - DNA, 33 bp, Homo sapien
cattacttgacaacccaatggaaaggagcctcc

SEQ ID NO: 467816 - DNA, 33 bp, Homo sapien
cattacttgacaacccgatggaaaggagcctcc

SEQ ID NO: 467817 - DNA, 33 bp, Homo sapien
tatgcaccaggagagcaagttctccattagcca

SEQ ID NO: 467818 - DNA, 33 bp, Homo sapien
tatgcaccaggagagcgagttctccattagcca

SEQ ID NO: 467819 - DNA, 33 bp, Homo sapien
tatagcttcctgataacaggagtttcactttct

SEQ ID NO: 467820 - DNA, 33 bp, Homo sapien
tatagcttcctgataataggagtttcactttct

SEQ ID NO: 467821 - DNA, 33 bp, Homo sapien
aatttacaggttgggaactaatagaataggaca

SEQ ID NO: 467822 - DNA, 33 bp, Homo sapien
aatttacaggttgggagctaatagaataggaca

SEQ ID NO: 467823 - DNA, 33 bp, Homo sapien
tcgcagcatcacccaacaccaccatgtttacca

SEQ ID NO: 467824 - DNA, 33 bp, Homo sapien
tcgcagcatcacccaataccaccatgtttacca

SEQ ID NO: 467825 - DNA, 33 bp, Homo sapien
ttccactttggcgaccaggattgctttctctta

SEQ ID NO: 467826 - DNA, 33 bp, Homo sapien
ttccactttggcgaccgggattgctttctctta

SEQ ID NO: 467827 - DNA, 33 bp, Homo sapien
ctctttcagactaagaacatagattggttttag

SEQ ID NO: 467828 - DNA, 33 bp, Homo sapien
ctctttcagactaagagcatagattggttttag

SEQ ID NO: 467829 - DNA, 33 bp, Homo sapien
ctatttgaataagaaaagtgtcagctgatgcag

SEQ ID NO: 467830 - DNA, 33 bp, Homo sapien
ctatttgaataagaaacgtgtcagctgatgcag

SEQ ID NO: 467831 - DNA, 33 bp, Homo sapien
ctgcactgaccacaccaaactaagatgctataa

SEQ ID NO: 467832 - DNA, 33 bp, Homo sapien
ctgcactgaccacaccgaactaagatgctataa

SEQ ID NO: 467833 - DNA, 33 bp, Homo sapien
atggcatgtttgtgcacacatattaaaatatac

SEQ ID NO: 467834 - DNA, 33 bp, Homo sapien
atggcatgtttgtgcatacatattaaaatatac

SEQ ID NO: 467835 - DNA, 33 bp, Homo sapien
gacccactatctggacactgttcaatacattcc

SEQ ID NO: 467836 - DNA, 33 bp, Homo sapien
gacccactatctggacgctgttcaatacattcc

SEQ ID NO: 467837 - DNA, 33 bp, Homo sapien
aggatcaaataacataactaaggtctcacctag

SEQ ID NO: 467838 - DNA, 33 bp, Homo sapien
aggatcaaataacatatctaaggtctcacctag

SEQ ID NO: 467839 - DNA, 33 bp, Homo sapien
gcttccacatcaatggaataccaagagtaaaag

SEQ ID NO: 467840 - DNA, 33 bp, Homo sapien
gcttccacatcaatgggataccaagagtaaaag

SEQ ID NO: 467841 - DNA, 33 bp, Homo sapien
tttttaacttaagtcaactgtgaataatcttgc

SEQ ID NO: 467842 - DNA, 33 bp, Homo sapien
tttttaacttaagtcagctgtgaataatcttgc

SEQ ID NO: 467843 - DNA, 33 bp, Homo sapien
tgaaattatgcctgcaatccttacctcacaaga

SEQ ID NO: 467844 - DNA, 33 bp, Homo sapien
tgaaattatgcctgcagtccttacctcacaaga

SEQ ID NO: 467845 - DNA, 33 bp, Homo sapien
tgcaatctgtgataagaatgatttccttcctgc

SEQ ID NO: 467846 - DNA, 33 bp, Homo sapien
tgcaatctgtgataaggatgatttccttcctgc

SEQ ID NO: 467847 - DNA, 33 bp, Homo sapien
gagtttatagactggaagagagtcattaatcaa

SEQ ID NO: 467848 - DNA, 33 bp, Homo sapien
gagtttatagactggaggagagtcattaatcaa

SEQ ID NO: 467849 - DNA, 33 bp, Homo sapien
aaattacaagtctgtacagaataagccacatct

SEQ ID NO: 467850 - DNA, 33 bp, Homo sapien
aaattacaagtctgtatagaataagccacatct

SEQ ID NO: 467851 - DNA, 33 bp, Homo sapien
gtgtgagtggaacattaaaaaagctcaacattt

SEQ ID NO: 467852 - DNA, 33 bp, Homo sapien
gtgtgagtggaacattgaaaaagctcaacattt

SEQ ID NO: 467853 - DNA, 33 bp, Homo sapien
ggccgtgtgtgagtaccggaaactgttaacttc

SEQ ID NO: 467854 - DNA, 33 bp, Homo sapien
ggccgtgtgtgagtactggaaactgttaacttc

SEQ ID NO: 467855 - DNA, 33 bp, Homo sapien
tttcactctggatgagaccaagttgcgatactt

SEQ ID NO: 467856 - DNA, 33 bp, Homo sapien
tttcactctggatgaggccaagttgcgatactt

SEQ ID NO: 467857 - DNA, 33 bp, Homo sapien
aaaataaactagcaacaaaagtgaacagttttg

SEQ ID NO: 467858 - DNA, 33 bp, Homo sapien
aaaataaactagcaacgaaagtgaacagttttg

SEQ ID NO: 467859 - DNA, 33 bp, Homo sapien
gtatatttcaatcaccaaagaatactagaaaaa

SEQ ID NO: 467860 - DNA, 33 bp, Homo sapien
gtatatttcaatcaccgaagaatactagaaaaa

SEQ ID NO: 467861 - DNA, 33 bp, Homo sapien
tagtttccactctgcccaattgcccaattcaat

SEQ ID NO: 467862 - DNA, 33 bp, Homo sapien
tagtttccactctgcctaattgcccaattcaat

SEQ ID NO: 467863 - DNA, 33 bp, Homo sapien
ttctaccataggcagagatgcagtggctaaaat

SEQ ID NO: 467864 - DNA, 33 bp, Homo sapien
ttctaccataggcagatatgcagtggctaaaat

SEQ ID NO: 467865 - DNA, 33 bp, Homo sapien
aggagtggctttgagtaacagaatttaaaggac

SEQ ID NO: 467866 - DNA, 33 bp, Homo sapien
aggagtggctttgagtgacagaatttaaaggac

SEQ ID NO: 467867 - DNA, 33 bp, Homo sapien
atgtggcaaacctaaactgtcaggcagcagaaa

SEQ ID NO: 467868 - DNA, 33 bp, Homo sapien
atgtggcaaacctaaattgtcaggcagcagaaa

SEQ ID NO: 467869 - DNA, 33 bp, Homo sapien
ttcacagcagacagaaaggtaaggcattatttc

SEQ ID NO: 467870 - DNA, 33 bp, Homo sapien
ttcacagcagacagaagggtaaggcattatttc

SEQ ID NO: 467871 - DNA, 33 bp, Homo sapien
tctctgatggaacaacagaaaattatgcattct

SEQ ID NO: 467872 - DNA, 33 bp, Homo sapien
tctctgatggaacaacggaaaattatgcattct

SEQ ID NO: 467873 - DNA, 33 bp, Homo sapien
ttttaaaccacaataacgatagttttccataaa

SEQ ID NO: 467874 - DNA, 33 bp, Homo sapien
ttttaaaccacaataatgatagttttccataaa

SEQ ID NO: 467875 - DNA, 33 bp, Homo sapien
acaaaaagaatggacaaacaagttgcaaactgg

SEQ ID NO: 467876 - DNA, 33 bp, Homo sapien
acaaaaagaatggacagacaagttgcaaactgg

SEQ ID NO: 467877 - DNA, 33 bp, Homo sapien
aaacacacagttaggacggggctttacgcacag

SEQ ID NO: 467878 - DNA, 33 bp, Homo sapien
aaacacacagttaggatggggctttacgcacag

SEQ ID NO: 467879 - DNA, 33 bp, Homo sapien
gaaggttagtggttacaggttaagctcctggct

SEQ ID NO: 467880 - DNA, 33 bp, Homo sapien
gaaggttagtggttacgggttaagctcctggct

SEQ ID NO: 467881 - DNA, 33 bp, Homo sapien
gaggtgactgtgaaccagagggacgaggtacag

SEQ ID NO: 467882 - DNA, 33 bp, Homo sapien
gaggtgactgtgaacctgagggacgaggtacag

SEQ ID NO: 467883 - DNA, 33 bp, Homo sapien
tgattttatcgaaccgaatttatccagtggagc

SEQ ID NO: 467884 - DNA, 33 bp, Homo sapien
tgattttatcgaaccgcatttatccagtggagc

SEQ ID NO: 467885 - DNA, 33 bp, Homo sapien
gtcaaagcgaacaccacggtcaaagaaaccata

SEQ ID NO: 467886 - DNA, 33 bp, Homo sapien
gtcaaagcgaacaccatggtcaaagaaaccata

SEQ ID NO: 467887 - DNA, 33 bp, Homo sapien
gtattttcttgacaacactgaagttctttagac

SEQ ID NO: 467888 - DNA, 33 bp, Homo sapien
gtattttcttgacaactctgaagttctttagac

SEQ ID NO: 467889 - DNA, 33 bp, Homo sapien
attcttatttcaccaccgtctatttgtcctaca

SEQ ID NO: 467890 - DNA, 33 bp, Homo sapien
attcttatttcaccactgtctatttgtcctaca

SEQ ID NO: 467891 - DNA, 33 bp, Homo sapien
gtaaaatgtacagcaaaaaaatttcatgtggca

SEQ ID NO: 467892 - DNA, 33 bp, Homo sapien
gtaaaatgtacagcaagaaaatttcatgtggca

SEQ ID NO: 467893 - DNA, 33 bp, Homo sapien
agctggcagagcaaaggaatatatgtgtgtata

SEQ ID NO: 467894 - DNA, 33 bp, Homo sapien
agctggcagagcaaagtaatatatgtgtgtata

SEQ ID NO: 467895 - DNA, 33 bp, Homo sapien
ttctcaaaccactacaatactgcaaagaggaaa

SEQ ID NO: 467896 - DNA, 33 bp, Homo sapien
ttctcaaaccactacagtactgcaaagaggaaa

SEQ ID NO: 467897 - DNA, 33 bp, Homo sapien
ataatacaaagtgcacagaaggaagaatcagct

SEQ ID NO: 467898 - DNA, 33 bp, Homo sapien
ataatacaaagtgcacggaaggaagaatcagct

SEQ ID NO: 467899 - DNA, 33 bp, Homo sapien
tggctcccattcgtaaataagaacataagggta

SEQ ID NO: 467900 - DNA, 33 bp, Homo sapien
tggctcccattcgtaagtaagaacataagggta

SEQ ID NO: 467901 - DNA, 33 bp, Homo sapien
aaattcacaagagacacgaacagctaagaaaag

SEQ ID NO: 467902 - DNA, 33 bp, Homo sapien
aaattcacaagagacatgaacagctaagaaaag

SEQ ID NO: 467903 - DNA, 33 bp, Homo sapien
ctccctgtagctccaacctcttgagttcaagtg

SEQ ID NO: 467904 - DNA, 33 bp, Homo sapien
ctccctgtagctccaagctcttgagttcaagtg

SEQ ID NO: 467905 - DNA, 33 bp, Homo sapien
catcctccaacatggagattaaacgaaacgatg

SEQ ID NO: 467906 - DNA, 33 bp, Homo sapien
catcctccaacatggatattaaacgaaacgatg

SEQ ID NO: 467907 - DNA, 33 bp, Homo sapien
ctaaactagaatgattaaacacattaagaggca

SEQ ID NO: 467908 - DNA, 33 bp, Homo sapien
ctaaactagaatgattcaacacattaagaggca

SEQ ID NO: 467909 - DNA, 33 bp, Homo sapien
tcttctaagaggtagacgtatagcagtgaatga

SEQ ID NO: 467910 - DNA, 33 bp, Homo sapien
tcttctaagaggtagatgtatagcagtgaatga

SEQ ID NO: 467911 - DNA, 33 bp, Homo sapien
agaaatatttatagaaagagcagagaaaagtgg

SEQ ID NO: 467912 - DNA, 33 bp, Homo sapien
agaaatatttatagaaggagcagagaaaagtgg

SEQ ID NO: 467913 - DNA, 33 bp, Homo sapien
cattgataaaaattacagaaatcatatactagg

SEQ ID NO: 467914 - DNA, 33 bp, Homo sapien
cattgataaaaattacggaaatcatatactagg

SEQ ID NO: 467915 - DNA, 33 bp, Homo sapien
gcacatactgcaaagaactcaataaggtaaaga

SEQ ID NO: 467916 - DNA, 33 bp, Homo sapien
gcacatactgcaaagagctcaataaggtaaaga

SEQ ID NO: 467917 - DNA, 33 bp, Homo sapien
cttttctatcaagagacaagtccagaagaaaat

SEQ ID NO: 467918 - DNA, 33 bp, Homo sapien
cttttctatcaagagagaagtccagaagaaaat

SEQ ID NO: 467919 - DNA, 33 bp, Homo sapien
ttctgaatgttcactcaagagttgaagaagaaa

SEQ ID NO: 467920 - DNA, 33 bp, Homo sapien
ttctgaatgttcactcgagagttgaagaagaaa

SEQ ID NO: 467921 - DNA, 33 bp, Homo sapien
attatgtttttgtccgcatttctataatttgtt

SEQ ID NO: 467922 - DNA, 33 bp, Homo sapien
attatgtttttgtccgtatttctataatttgtt

SEQ ID NO: 467923 - DNA, 33 bp, Homo sapien
tgtatatagatgaaagaatttatgcatttcaga

SEQ ID NO: 467924 - DNA, 33 bp, Homo sapien
tgtatatagatgaaaggatttatgcatttcaga

SEQ ID NO: 467925 - DNA, 33 bp, Homo sapien
gtgcttggaaaggagacgacagattacagtggg

SEQ ID NO: 467926 - DNA, 33 bp, Homo sapien
gtgcttggaaaggagatgacagattacagtggg

SEQ ID NO: 467927 - DNA, 33 bp, Homo sapien
cagcttattgtgctggaaaattatagccatcag

SEQ ID NO: 467928 - DNA, 33 bp, Homo sapien
cagcttattgtgctgggaaattatagccatcag

SEQ ID NO: 467929 - DNA, 33 bp, Homo sapien
ttaaattttgacatgaaggagaattatataaag

SEQ ID NO: 467930 - DNA, 33 bp, Homo sapien
ttaaattttgacatgagggagaattatataaag

SEQ ID NO: 467931 - DNA, 33 bp, Homo sapien
acaagtgagaacataccatattaggttttccat

SEQ ID NO: 467932 - DNA, 33 bp, Homo sapien
acaagtgagaacatacgatattaggttttccat

SEQ ID NO: 467933 - DNA, 33 bp, Homo sapien
gaaagtgaagacagacaaaaaggtatggaaatg

SEQ ID NO: 467934 - DNA, 33 bp, Homo sapien
gaaagtgaagacagacgaaaaggtatggaaatg

SEQ ID NO: 467935 - DNA, 33 bp, Homo sapien
gtttgcttttgacttacggaatgaacacagtta

SEQ ID NO: 467936 - DNA, 33 bp, Homo sapien
gtttgcttttgacttatggaatgaacacagtta

SEQ ID NO: 467937 - DNA, 33 bp, Homo sapien
tataattccagcagtcacagagagcacagatat

SEQ ID NO: 467938 - DNA, 33 bp, Homo sapien
tataattccagcagtcgcagagagcacagatat

SEQ ID NO: 467939 - DNA, 33 bp, Homo sapien
tttgatggaagtggaaattcacagagacccccg

SEQ ID NO: 467940 - DNA, 33 bp, Homo sapien
tttgatggaagtggaagttcacagagacccccg

SEQ ID NO: 467941 - DNA, 33 bp, Homo sapien
attcagatttatggaaatgatggacctagtatg

SEQ ID NO: 467942 - DNA, 33 bp, Homo sapien
attcagatttatggaattgatggacctagtatg

SEQ ID NO: 467943 - DNA, 33 bp, Homo sapien
cctagaaacagtgccccgatgccttctttgtgt

SEQ ID NO: 467944 - DNA, 33 bp, Homo sapien
cctagaaacagtgccctgatgccttctttgtgt

SEQ ID NO: 467945 - DNA, 33 bp, Homo sapien
acgcctgtggaataagcaaacagataaatgcag

SEQ ID NO: 467946 - DNA, 33 bp, Homo sapien
acgcctgtggaataagtaaacagataaatgcag

SEQ ID NO: 467947 - DNA, 33 bp, Homo sapien
ttgctagcatggagtacatggaaggatgcttag

SEQ ID NO: 467948 - DNA, 33 bp, Homo sapien
ttgctagcatggagtatatggaaggatgcttag

SEQ ID NO: 467949 - DNA, 33 bp, Homo sapien
gatgagcaggaagagcaatgcaaggagattgtg

SEQ ID NO: 467950 - DNA, 33 bp, Homo sapien
gatgagcaggaagagcgatgcaaggagattgtg

SEQ ID NO: 467951 - DNA, 33 bp, Homo sapien
tttatgtgaaatctaaataagtcaaggaaggca

SEQ ID NO: 467952 - DNA, 33 bp, Homo sapien
tttatgtgaaatctaagtaagtcaaggaaggca

SEQ ID NO: 467953 - DNA, 33 bp, Homo sapien
acaagaagcagaaaaaatatggaagtagaaggg

SEQ ID NO: 467954 - DNA, 33 bp, Homo sapien
acaagaagcagaaaaactatggaagtagaaggg

SEQ ID NO: 467955 - DNA, 33 bp, Homo sapien
cactcacagggtggcaaggagactaattggttc

SEQ ID NO: 467956 - DNA, 33 bp, Homo sapien
cactcacagggtggcagggagactaattggttc

SEQ ID NO: 467957 - DNA, 33 bp, Homo sapien
aatttttcctaatctgaaaggtgttttatttgt

SEQ ID NO: 467958 - DNA, 33 bp, Homo sapien
aatttttcctaatctggaaggtgttttatttgt

SEQ ID NO: 467959 - DNA, 33 bp, Homo sapien
agggttggccagcagccctttagaaaccttacc

SEQ ID NO: 467960 - DNA, 33 bp, Homo sapien
agggttggccagcagctctttagaaaccttacc

SEQ ID NO: 467961 - DNA, 33 bp, Homo sapien
ggttcgttgaaaggtagatgcaagtctagtggg

SEQ ID NO: 467962 - DNA, 33 bp, Homo sapien
ggttcgttgaaaggtatatgcaagtctagtggg

SEQ ID NO: 467963 - DNA, 33 bp, Homo sapien
cttggcattggcaatcacctttgtgaggggcag

SEQ ID NO: 467964 - DNA, 33 bp, Homo sapien
cttggcattggcaatcgcctttgtgaggggcag

SEQ ID NO: 467965 - DNA, 33 bp, Homo sapien
atactaagccagcccacgttaagcttgcatgtg

SEQ ID NO: 467966 - DNA, 33 bp, Homo sapien
atactaagccagcccatgttaagcttgcatgtg

SEQ ID NO: 467967 - DNA, 33 bp, Homo sapien
cagatttggaaagaaacgtctcctgtgccttcc

SEQ ID NO: 467968 - DNA, 33 bp, Homo sapien
cagatttggaaagaaatgtctcctgtgccttcc

SEQ ID NO: 467969 - DNA, 33 bp, Homo sapien
cggtgcctggaacaaaccagatacatgcaggca

SEQ ID NO: 467970 - DNA, 33 bp, Homo sapien
cggtgcctggaacaaagcagatacatgcaggca

SEQ ID NO: 467971 - DNA, 33 bp, Homo sapien
tacagcagagtcatcccgagtactccactaaaa

SEQ ID NO: 467972 - DNA, 33 bp, Homo sapien
tacagcagagtcatcctgagtactccactaaaa

SEQ ID NO: 467973 - DNA, 33 bp, Homo sapien
tttcttatctggtttccatagtgtgagaataat

SEQ ID NO: 467974 - DNA, 33 bp, Homo sapien
tttcttatctggtttctatagtgtgagaataat

SEQ ID NO: 467975 - DNA, 33 bp, Homo sapien
ccatctccaaaggctgccaatattctgaagtcc

SEQ ID NO: 467976 - DNA, 33 bp, Homo sapien
ccatctccaaaggctgtcaatattctgaagtcc

SEQ ID NO: 467977 - DNA, 33 bp, Homo sapien
agttcatcgctaatcacggtaaaataacaataa

SEQ ID NO: 467978 - DNA, 33 bp, Homo sapien
agttcatcgctaatcatggtaaaataacaataa

SEQ ID NO: 467979 - DNA, 33 bp, Homo sapien
tttgaatcatggaaacaggtgagttatcttatg

SEQ ID NO: 467980 - DNA, 33 bp, Homo sapien
tttgaatcatggaaacgggtgagttatcttatg

SEQ ID NO: 467981 - DNA, 33 bp, Homo sapien
tgcgaaatggatgacacggtttggaagctgtgt

SEQ ID NO: 467982 - DNA, 33 bp, Homo sapien
tgcgaaatggatgacatggtttggaagctgtgt

SEQ ID NO: 467983 - DNA, 33 bp, Homo sapien
gaatatgataaattgacaggaagatctaatgag

SEQ ID NO: 467984 - DNA, 33 bp, Homo sapien
gaatatgataaattgataggaagatctaatgag

SEQ ID NO: 467985 - DNA, 33 bp, Homo sapien
tatatgtaattagcatcagtgttttaacttaaa

SEQ ID NO: 467986 - DNA, 33 bp, Homo sapien
tatatgtaattagcatgagtgttttaacttaaa

SEQ ID NO: 467987 - DNA, 33 bp, Homo sapien
atgcacaaaatcaaaactgggagtgggtgaaat

SEQ ID NO: 467988 - DNA, 33 bp, Homo sapien
atgcacaaaatcaaaattgggagtgggtgaaat

SEQ ID NO: 467989 - DNA, 33 bp, Homo sapien
ttttagcaaaattgtacacgagaaagatgaatc

SEQ ID NO: 467990 - DNA, 33 bp, Homo sapien
ttttagcaaaattgtatacgagaaagatgaatc

SEQ ID NO: 467991 - DNA, 33 bp, Homo sapien
agatcggtttcactgaagttcacactgcatgct

SEQ ID NO: 467992 - DNA, 33 bp, Homo sapien
agatcggtttcactgatgttcacactgcatgct

SEQ ID NO: 467993 - DNA, 33 bp, Homo sapien
aattgtggtgggcataaatgttaataaataaca

SEQ ID NO: 467994 - DNA, 33 bp, Homo sapien
aattgtggtgggcatacatgttaataaataaca

SEQ ID NO: 467995 - DNA, 33 bp, Homo sapien
acctactatgtgcagacgttatagtagggaaat

SEQ ID NO: 467996 - DNA, 33 bp, Homo sapien
acctactatgtgcagatgttatagtagggaaat

SEQ ID NO: 467997 - DNA, 33 bp, Homo sapien
tgctgactggagggaagtgcttcaccaggatag

SEQ ID NO: 467998 - DNA, 33 bp, Homo sapien
tgctgactggagggaattgcttcaccaggatag

SEQ ID NO: 467999 - DNA, 33 bp, Homo sapien
tcagggacacagactgaaagtcgacaggcaagg

SEQ ID NO: 468000 - DNA, 33 bp, Homo sapien
tcagggacacagactgcaagtcgacaggcaagg

SEQ ID NO: 468001 - DNA, 33 bp, Homo sapien
agaatggcaaaggcaaatgttccacgtcacaga

SEQ ID NO: 468002 - DNA, 33 bp, Homo sapien
agaatggcaaaggcaagtgttccacgtcacaga

SEQ ID NO: 468003 - DNA, 33 bp, Homo sapien
ggttataaaattgtcacaaggacatgggacatg

SEQ ID NO: 468004 - DNA, 33 bp, Homo sapien
ggttataaaattgtcataaggacatgggacatg

SEQ ID NO: 468005 - DNA, 33 bp, Homo sapien
tccaatgcttcatctacaccttcattcactact

SEQ ID NO: 468006 - DNA, 33 bp, Homo sapien
tccaatgcttcatctagaccttcattcactact

SEQ ID NO: 468007 - DNA, 33 bp, Homo sapien
aggtaattctataagcagaagcacgatgatttg

SEQ ID NO: 468008 - DNA, 33 bp, Homo sapien
aggtaattctataagcggaagcacgatgatttg

SEQ ID NO: 468009 - DNA, 33 bp, Homo sapien
agagttggttgtgaaaaggaagattttttaatt

SEQ ID NO: 468010 - DNA, 33 bp, Homo sapien
agagttggttgtgaaagggaagattttttaatt

SEQ ID NO: 468011 - DNA, 33 bp, Homo sapien
ataataagttggaaatcaagcctgaagatgtag

SEQ ID NO: 468012 - DNA, 33 bp, Homo sapien
ataataagttggaaatgaagcctgaagatgtag

SEQ ID NO: 468013 - DNA, 33 bp, Homo sapien
ttttttaacattttcacgcttccaaggagatcc

SEQ ID NO: 468014 - DNA, 33 bp, Homo sapien
ttttttaacattttcatgcttccaaggagatcc

SEQ ID NO: 468015 - DNA, 33 bp, Homo sapien
ttccaaggagatccctcaaacccatttcgagtt

SEQ ID NO: 468016 - DNA, 33 bp, Homo sapien
ttccaaggagatccctgaaacccatttcgagtt

SEQ ID NO: 468017 - DNA, 33 bp, Homo sapien
cacacacaaatacataccgtatgaatccattta

SEQ ID NO: 468018 - DNA, 33 bp, Homo sapien
cacacacaaatacatatcgtatgaatccattta

SEQ ID NO: 468019 - DNA, 33 bp, Homo sapien
gaaaatgtaaactaaaatgacaataagggacta

SEQ ID NO: 468020 - DNA, 33 bp, Homo sapien
gaaaatgtaaactaaagtgacaataagggacta

SEQ ID NO: 468021 - DNA, 33 bp, Homo sapien
caacatttcactcttgcaatttgctcatccagg

SEQ ID NO: 468022 - DNA, 33 bp, Homo sapien
caacatttcactcttggaatttgctcatccagg

SEQ ID NO: 468023 - DNA, 33 bp, Homo sapien
tatcaaagcaattaaaagtggtagatattatta

SEQ ID NO: 468024 - DNA, 33 bp, Homo sapien
tatcaaagcaattaaaggtggtagatattatta

SEQ ID NO: 468025 - DNA, 33 bp, Homo sapien
agaggaagatgtagcacgagtttgttttgtgtg

SEQ ID NO: 468026 - DNA, 33 bp, Homo sapien
agaggaagatgtagcatgagtttgttttgtgtg

SEQ ID NO: 468027 - DNA, 33 bp, Homo sapien
gagtgctgactgtatcaataaagataggctgtg

SEQ ID NO: 468028 - DNA, 33 bp, Homo sapien
gagtgctgactgtatccataaagataggctgtg

SEQ ID NO: 468029 - DNA, 33 bp, Homo sapien
gaaagaaaatccctgaactcctgcgtacctgac

SEQ ID NO: 468030 - DNA, 33 bp, Homo sapien
gaaagaaaatccctgagctcctgcgtacctgac

SEQ ID NO: 468031 - DNA, 33 bp, Homo sapien
ttacataattgctttaaataaatgttcaaatca

SEQ ID NO: 468032 - DNA, 33 bp, Homo sapien
ttacataattgctttagataaatgttcaaatca

SEQ ID NO: 468033 - DNA, 33 bp, Homo sapien
aagcaggaacagccagaagcctctcaccagcca

SEQ ID NO: 468034 - DNA, 33 bp, Homo sapien
aagcaggaacagccaggagcctctcaccagcca

SEQ ID NO: 468035 - DNA, 33 bp, Homo sapien
gaggagtgattctttacctgcactcttgggaaa

SEQ ID NO: 468036 - DNA, 33 bp, Homo sapien
gaggagtgattctttagctgcactcttgggaaa

SEQ ID NO: 468037 - DNA, 33 bp, Homo sapien
ataactagcacctttacgtagaagctctttgtt

SEQ ID NO: 468038 - DNA, 33 bp, Homo sapien
ataactagcacctttatgtagaagctctttgtt

SEQ ID NO: 468039 - DNA, 33 bp, Homo sapien
tctaattggttttgcacagaaagtgtcaaagtt

SEQ ID NO: 468040 - DNA, 33 bp, Homo sapien
tctaattggttttgcatagaaagtgtcaaagtt

SEQ ID NO: 468041 - DNA, 33 bp, Homo sapien
aaatgcaactgaaatacgaggctgatagtaata

SEQ ID NO: 468042 - DNA, 33 bp, Homo sapien
aaatgcaactgaaatatgaggctgatagtaata

SEQ ID NO: 468043 - DNA, 33 bp, Homo sapien
tctagacaagcgtgcacatggcgtatgggagga

SEQ ID NO: 468044 - DNA, 33 bp, Homo sapien
tctagacaagcgtgcatatggcgtatgggagga

SEQ ID NO: 468045 - DNA, 33 bp, Homo sapien
tctgctgttaagtagaagtgagaaaagaacagt

SEQ ID NO: 468046 - DNA, 33 bp, Homo sapien
tctgctgttaagtagaggtgagaaaagaacagt

SEQ ID NO: 468047 - DNA, 33 bp, Homo sapien
gttgtggtcccgatatgaaatctactcagcatc

SEQ ID NO: 468048 - DNA, 33 bp, Homo sapien
gttgtggtcccgatattaaatctactcagcatc

SEQ ID NO: 468049 - DNA, 33 bp, Homo sapien
cttttctcttatcccactctatgaagccttgtt

SEQ ID NO: 468050 - DNA, 33 bp, Homo sapien
cttttctcttatcccattctatgaagccttgtt

SEQ ID NO: 468051 - DNA, 33 bp, Homo sapien
gagagtagctcattaaacctgggacctcagaat

SEQ ID NO: 468052 - DNA, 33 bp, Homo sapien
gagagtagctcattaagcctgggacctcagaat

SEQ ID NO: 468053 - DNA, 33 bp, Homo sapien
acaggttcacaatgaaaatcacctgcttgccgg

SEQ ID NO: 468054 - DNA, 33 bp, Homo sapien
acaggttcacaatgaagatcacctgcttgccgg

SEQ ID NO: 468055 - DNA, 33 bp, Homo sapien
tggtcatttaaatgaactgtatgtgcggcctgt

SEQ ID NO: 468056 - DNA, 33 bp, Homo sapien
tggtcatttaaatgaattgtatgtgcggcctgt

SEQ ID NO: 468057 - DNA, 33 bp, Homo sapien
tctatctttcctggtaaatgattttttgtttgt

SEQ ID NO: 468058 - DNA, 33 bp, Homo sapien
tctatctttcctggtacatgattttttgtttgt

SEQ ID NO: 468059 - DNA, 33 bp, Homo sapien
gcccaagaagaacaagcatacgctggacattga

SEQ ID NO: 468060 - DNA, 33 bp, Homo sapien
gcccaagaagaacaaggatacgctggacattga

SEQ ID NO: 468061 - DNA, 33 bp, Homo sapien
aagagaccatgtcttacctctggatgccattga

SEQ ID NO: 468062 - DNA, 33 bp, Homo sapien
aagagaccatgtcttatctctggatgccattga

SEQ ID NO: 468063 - DNA, 33 bp, Homo sapien
gtccactaagataaccaaaaatcgacttcagtg

SEQ ID NO: 468064 - DNA, 33 bp, Homo sapien
gtccactaagataaccgaaaatcgacttcagtg

SEQ ID NO: 468065 - DNA, 33 bp, Homo sapien
cttcttcctttgtaaacgtgtgagtctggattt

SEQ ID NO: 468066 - DNA, 33 bp, Homo sapien
cttcttcctttgtaaatgtgtgagtctggattt

SEQ ID NO: 468067 - DNA, 33 bp, Homo sapien
cgacattgcataataacctaagctaacacttgg

SEQ ID NO: 468068 - DNA, 33 bp, Homo sapien
cgacattgcataataatctaagctaacacttgg

SEQ ID NO: 468069 - DNA, 33 bp, Homo sapien
aatatctatatccaaggcttgctcaggcaaaac

SEQ ID NO: 468070 - DNA, 33 bp, Homo sapien
aatatctatatccaagtcttgctcaggcaaaac

SEQ ID NO: 468071 - DNA, 33 bp, Homo sapien
tctagtgctgtgtttcaaagcaagtggcatagt

SEQ ID NO: 468072 - DNA, 33 bp, Homo sapien
tctagtgctgtgtttcgaagcaagtggcatagt

SEQ ID NO: 468073 - DNA, 33 bp, Homo sapien
agacttctgtatgccacgattttatgtttaaga

SEQ ID NO: 468074 - DNA, 33 bp, Homo sapien
agacttctgtatgccatgattttatgtttaaga

SEQ ID NO: 468075 - DNA, 33 bp, Homo sapien
gacattgaaaatgtggaaaatgatgacaaaagt

SEQ ID NO: 468076 - DNA, 33 bp, Homo sapien
gacattgaaaatgtggcaaatgatgacaaaagt

SEQ ID NO: 468077 - DNA, 33 bp, Homo sapien
gtggaatcaagaaagtcactgcaagtggccgga

SEQ ID NO: 468078 - DNA, 33 bp, Homo sapien
gtggaatcaagaaagttactgcaagtggccgga

SEQ ID NO: 468079 - DNA, 33 bp, Homo sapien
gacagagtcctgttcacggaggagaaagacctt

SEQ ID NO: 468080 - DNA, 33 bp, Homo sapien
gacagagtcctgttcatggaggagaaagacctt

SEQ ID NO: 468081 - DNA, 33 bp, Homo sapien
tcagggaatgaaaagcaatatattcaggggctt

SEQ ID NO: 468082 - DNA, 33 bp, Homo sapien
tcagggaatgaaaagcgatatattcaggggctt

SEQ ID NO: 468083 - DNA, 33 bp, Homo sapien
gccgactgcttatcacaaacaaaaccaatgact

SEQ ID NO: 468084 - DNA, 33 bp, Homo sapien
gccgactgcttatcactaacaaaaccaatgact

SEQ ID NO: 468085 - DNA, 33 bp, Homo sapien
ggataaggttggtatcactattcaggcaggaat

SEQ ID NO: 468086 - DNA, 33 bp, Homo sapien
ggataaggttggtatcgctattcaggcaggaat

SEQ ID NO: 468087 - DNA, 33 bp, Homo sapien
catagcaacttaacacaaacttaatgaaataaa

SEQ ID NO: 468088 - DNA, 33 bp, Homo sapien
catagcaacttaacacgaacttaatgaaataaa

SEQ ID NO: 468089 - DNA, 33 bp, Homo sapien
acttaagtgtggttagcacagcatggtgttatg

SEQ ID NO: 468090 - DNA, 33 bp, Homo sapien
acttaagtgtggttaggacagcatggtgttatg

SEQ ID NO: 468091 - DNA, 33 bp, Homo sapien
acaatggcgaacacaccagtataaggactaatc

SEQ ID NO: 468092 - DNA, 33 bp, Homo sapien
acaatggcgaacacactagtataaggactaatc

SEQ ID NO: 468093 - DNA, 33 bp, Homo sapien
tatcctggaacatacacccattggcctgagaac

SEQ ID NO: 468094 - DNA, 33 bp, Homo sapien
tatcctggaacatacagccattggcctgagaac

SEQ ID NO: 468095 - DNA, 33 bp, Homo sapien
aaaagtgcacatggtaggctctcaattcctgac

SEQ ID NO: 468096 - DNA, 33 bp, Homo sapien
aaaagtgcacatggtatgctctcaattcctgac

SEQ ID NO: 468097 - DNA, 33 bp, Homo sapien
gtcgctggaaagaagacaatattttggagaaga

SEQ ID NO: 468098 - DNA, 33 bp, Homo sapien
gtcgctggaaagaagataatattttggagaaga

SEQ ID NO: 468099 - DNA, 33 bp, Homo sapien
tgtgcagtggggattaagaacgtgctttgtagt

SEQ ID NO: 468100 - DNA, 33 bp, Homo sapien
tgtgcagtggggattaggaacgtgctttgtagt

SEQ ID NO: 468101 - DNA, 33 bp, Homo sapien
caggaagaaagccttcgctaacagcctggccac

SEQ ID NO: 468102 - DNA, 33 bp, Homo sapien
caggaagaaagccttctctaacagcctggccac

SEQ ID NO: 468103 - DNA, 33 bp, Homo sapien
tgttacagcagcctgaatatgctgggataacag

SEQ ID NO: 468104 - DNA, 33 bp, Homo sapien
tgttacagcagcctgagtatgctgggataacag

SEQ ID NO: 468105 - DNA, 33 bp, Homo sapien
gagaggaaaaagaaagaagattattgctgggag

SEQ ID NO: 468106 - DNA, 33 bp, Homo sapien
gagaggaaaaagaaagcagattattgctgggag

SEQ ID NO: 468107 - DNA, 33 bp, Homo sapien
gtctcaacgatccccaagatttcttttcttcaa

SEQ ID NO: 468108 - DNA, 33 bp, Homo sapien
gtctcaacgatccccacgatttcttttcttcaa

SEQ ID NO: 468109 - DNA, 33 bp, Homo sapien
cttcaatagtcacttacgtaaaatgtgcacatt

SEQ ID NO: 468110 - DNA, 33 bp, Homo sapien
cttcaatagtcacttatgtaaaatgtgcacatt

SEQ ID NO: 468111 - DNA, 33 bp, Homo sapien
caagggcaagctgagtaaaaccaggagacaggc

SEQ ID NO: 468112 - DNA, 33 bp, Homo sapien
caagggcaagctgagtgaaaccaggagacaggc

SEQ ID NO: 468113 - DNA, 33 bp, Homo sapien
gaaatgtgtccagataagaaaaaggtaaacact

SEQ ID NO: 468114 - DNA, 33 bp, Homo sapien
gaaatgtgtccagataggaaaaaggtaaacact

SEQ ID NO: 468115 - DNA, 33 bp, Homo sapien
actgtctaatgcaagacgaaggggtccagaaag

SEQ ID NO: 468116 - DNA, 33 bp, Homo sapien
actgtctaatgcaagatgaaggggtccagaaag

SEQ ID NO: 468117 - DNA, 33 bp, Homo sapien
aggaaacattctggaacacatcactggatcaaa

SEQ ID NO: 468118 - DNA, 33 bp, Homo sapien
aggaaacattctggaagacatcactggatcaaa

SEQ ID NO: 468119 - DNA, 33 bp, Homo sapien
gaataaacatgaagttaaaataaagtcagccac

SEQ ID NO: 468120 - DNA, 33 bp, Homo sapien
gaataaacatgaagttgaaataaagtcagccac

SEQ ID NO: 468121 - DNA, 33 bp, Homo sapien
gagtaccgatatacaccctaaccccacacacat

SEQ ID NO: 468122 - DNA, 33 bp, Homo sapien
gagtaccgatatacactctaaccccacacacat

SEQ ID NO: 468123 - DNA, 33 bp, Homo sapien
cagatgagaaaactgaactccttatttttgcac

SEQ ID NO: 468124 - DNA, 33 bp, Homo sapien
cagatgagaaaactgacctccttatttttgcac

SEQ ID NO: 468125 - DNA, 33 bp, Homo sapien
ctgtatcatttggccaatctttttctgtatgac

SEQ ID NO: 468126 - DNA, 33 bp, Homo sapien
ctgtatcatttggccagtctttttctgtatgac

SEQ ID NO: 468127 - DNA, 33 bp, Homo sapien
tcttagaaaggctctacggccatccagcaatcg

SEQ ID NO: 468128 - DNA, 33 bp, Homo sapien
tcttagaaaggctctatggccatccagcaatcg

SEQ ID NO: 468129 - DNA, 33 bp, Homo sapien
atagtgagaaatcatacatccgtcacagaaatc

SEQ ID NO: 468130 - DNA, 33 bp, Homo sapien
atagtgagaaatcatatatccgtcacagaaatc

SEQ ID NO: 468131 - DNA, 33 bp, Homo sapien
acctaatgggctgtcacataggagatggattgc

SEQ ID NO: 468132 - DNA, 33 bp, Homo sapien
acctaatgggctgtcatataggagatggattgc

SEQ ID NO: 468133 - DNA, 33 bp, Homo sapien
aaacatatctattaagccataattcctgaatag

SEQ ID NO: 468134 - DNA, 33 bp, Homo sapien
aaacatatctattaagtcataattcctgaatag

SEQ ID NO: 468135 - DNA, 33 bp, Homo sapien
acactgttcctcctgaaattcactagaggaatg

SEQ ID NO: 468136 - DNA, 33 bp, Homo sapien
acactgttcctcctgatattcactagaggaatg

SEQ ID NO: 468137 - DNA, 33 bp, Homo sapien
tctgtacgagtgctccaagatcaaatgttttct

SEQ ID NO: 468138 - DNA, 33 bp, Homo sapien
tctgtacgagtgctccgagatcaaatgttttct

SEQ ID NO: 468139 - DNA, 33 bp, Homo sapien
atggaaagaagtaactcagactccattcccttc

SEQ ID NO: 468140 - DNA, 33 bp, Homo sapien
atggaaagaagtaactgagactccattcccttc

SEQ ID NO: 468141 - DNA, 33 bp, Homo sapien
cagaccaagataacacagaaggaattaaatgca

SEQ ID NO: 468142 - DNA, 33 bp, Homo sapien
cagaccaagataacacggaaggaattaaatgca

SEQ ID NO: 468143 - DNA, 33 bp, Homo sapien
ttaaagagaccaaaagactatggtagcagcatt

SEQ ID NO: 468144 - DNA, 33 bp, Homo sapien
ttaaagagaccaaaagtctatggtagcagcatt

SEQ ID NO: 468145 - DNA, 33 bp, Homo sapien
tagcaaacaccagaaaagctgtgaccacacata

SEQ ID NO: 468146 - DNA, 33 bp, Homo sapien
tagcaaacaccagaaatgctgtgaccacacata

SEQ ID NO: 468147 - DNA, 33 bp, Homo sapien
agaaaactattggaataaacgacacgatgtcct

SEQ ID NO: 468148 - DNA, 33 bp, Homo sapien
agaaaactattggaatgaacgacacgatgtcct

SEQ ID NO: 468149 - DNA, 33 bp, Homo sapien
atcttcatgctttgacacattttacatagaaat

SEQ ID NO: 468150 - DNA, 33 bp, Homo sapien
atcttcatgctttgacgcattttacatagaaat

SEQ ID NO: 468151 - DNA, 33 bp, Homo sapien
gtattgatagaataaaagaggagcacaatacat

SEQ ID NO: 468152 - DNA, 33 bp, Homo sapien
gtattgatagaataaaggaggagcacaatacat

SEQ ID NO: 468153 - DNA, 33 bp, Homo sapien
ctgtctgaaaagcttcaagtatattggtccatt

SEQ ID NO: 468154 - DNA, 33 bp, Homo sapien
ctgtctgaaaagcttcgagtatattggtccatt

SEQ ID NO: 468155 - DNA, 33 bp, Homo sapien
acatcttgaacttccacgcctgtctccaaccca

SEQ ID NO: 468156 - DNA, 33 bp, Homo sapien
acatcttgaacttccatgcctgtctccaaccca

SEQ ID NO: 468157 - DNA, 33 bp, Homo sapien
cggttctgctgctagacgttttcttcctttctt

SEQ ID NO: 468158 - DNA, 33 bp, Homo sapien
cggttctgctgctagatgttttcttcctttctt

SEQ ID NO: 468159 - DNA, 33 bp, Homo sapien
aggctgcagaaagacactatctgtgcaagcggg

SEQ ID NO: 468160 - DNA, 33 bp, Homo sapien
aggctgcagaaagacagtatctgtgcaagcggg

SEQ ID NO: 468161 - DNA, 33 bp, Homo sapien
tagatccacaacgggaaagtgacttgtgcaggg

SEQ ID NO: 468162 - DNA, 33 bp, Homo sapien
tagatccacaacgggatagtgacttgtgcaggg

SEQ ID NO: 468163 - DNA, 33 bp, Homo sapien
aatgttcctcaaataccggctcaagtccttcct

SEQ ID NO: 468164 - DNA, 33 bp, Homo sapien
aatgttcctcaaatactggctcaagtccttcct

SEQ ID NO: 468165 - DNA, 33 bp, Homo sapien
gcaggctgttgtgtaaaggaaatgctgactttc

SEQ ID NO: 468166 - DNA, 33 bp, Homo sapien
gcaggctgttgtgtaatggaaatgctgactttc

SEQ ID NO: 468167 - DNA, 33 bp, Homo sapien
tgttaccgcggaaaggacactgtgattaggagc

SEQ ID NO: 468168 - DNA, 33 bp, Homo sapien
tgttaccgcggaaagggcactgtgattaggagc

SEQ ID NO: 468169 - DNA, 33 bp, Homo sapien
cctttctgacattaaaatgttctataatcacct

SEQ ID NO: 468170 - DNA, 33 bp, Homo sapien
cctttctgacattaaagtgttctataatcacct

SEQ ID NO: 468171 - DNA, 33 bp, Homo sapien
gttttaaagaacagacggagagccaatagatat

SEQ ID NO: 468172 - DNA, 33 bp, Homo sapien
gttttaaagaacagactgagagccaatagatat

SEQ ID NO: 468173 - DNA, 33 bp, Homo sapien
tggtatggttgcaaaacatatctccttgcttta

SEQ ID NO: 468174 - DNA, 33 bp, Homo sapien
tggtatggttgcaaaagatatctccttgcttta

SEQ ID NO: 468175 - DNA, 33 bp, Homo sapien
agaaaggtgtcaacaaggttataggagcagttg

SEQ ID NO: 468176 - DNA, 33 bp, Homo sapien
agaaaggtgtcaacaatgttataggagcagttg

SEQ ID NO: 468177 - DNA, 33 bp, Homo sapien
attcaaagtgtccaaaagtgtgtttattataac

SEQ ID NO: 468178 - DNA, 33 bp, Homo sapien
attcaaagtgtccaaacgtgtgtttattataac

SEQ ID NO: 468179 - DNA, 33 bp, Homo sapien
cattcagcttccattacatgctgccgggcctgt

SEQ ID NO: 468180 - DNA, 33 bp, Homo sapien
cattcagcttccattatatgctgccgggcctgt

SEQ ID NO: 468181 - DNA, 33 bp, Homo sapien
aggttccaggcaagcacggccccaggtattgca

SEQ ID NO: 468182 - DNA, 33 bp, Homo sapien
aggttccaggcaagcatggccccaggtattgca

SEQ ID NO: 468183 - DNA, 33 bp, Homo sapien
atactaagaaatatacaatgctgaaaaacttta

SEQ ID NO: 468184 - DNA, 33 bp, Homo sapien
atactaagaaatatacgatgctgaaaaacttta

SEQ ID NO: 468185 - DNA, 33 bp, Homo sapien
tgcaaaggcgaaaaatgactctgctaatcatgt

SEQ ID NO: 468186 - DNA, 33 bp, Homo sapien
tgcaaaggcgaaaaattactctgctaatcatgt

SEQ ID NO: 468187 - DNA, 33 bp, Homo sapien
aagacagcaaaggagaagtttacaaagctttta

SEQ ID NO: 468188 - DNA, 33 bp, Homo sapien
aagacagcaaaggagaggtttacaaagctttta

SEQ ID NO: 468189 - DNA, 33 bp, Homo sapien
agcttgaaagggtgtaagttaaaatctccagtg

SEQ ID NO: 468190 - DNA, 33 bp, Homo sapien
agcttgaaagggtgtaggttaaaatctccagtg

SEQ ID NO: 468191 - DNA, 33 bp, Homo sapien
agatttttatcattcaagtatcctgcttctgtg

SEQ ID NO: 468192 - DNA, 33 bp, Homo sapien
agatttttatcattcaggtatcctgcttctgtg

SEQ ID NO: 468193 - DNA, 33 bp, Homo sapien
gagcagcagcgcttcaatcccagatcttccctc

SEQ ID NO: 468194 - DNA, 33 bp, Homo sapien
gagcagcagcgcttcactcccagatcttccctc

SEQ ID NO: 468195 - DNA, 33 bp, Homo sapien; identical to SEQ ID NO: 468193

SEQ ID NO: 468196 - DNA, 33 bp, Homo sapien; identical to SEQ ID NO: 468194

SEQ ID NO: 468197 - DNA, 33 bp, Homo sapien
agtgcttaacagtaaaagatacgacaattaata

SEQ ID NO: 468198 - DNA, 33 bp, Homo sapien
agtgcttaacagtaaaggatacgacaattaata

SEQ ID NO: 468199 - DNA, 33 bp, Homo sapien
attgatttattatgaacgtaaagggtgtgtctg

SEQ ID NO: 468200 - DNA, 33 bp, Homo sapien
attgatttattatgaatgtaaagggtgtgtctg

SEQ ID NO: 468201 - DNA, 33 bp, Homo sapien
cagtgtggattggcaaacaggtcacctttgaca

SEQ ID NO: 468202 - DNA, 33 bp, Homo sapien
cagtgtggattggcaagcaggtcacctttgaca

SEQ ID NO: 468203 - DNA, 33 bp, Homo sapien
cactccacctaaacaacgctaatcctgaaatgc

SEQ ID NO: 468204 - DNA, 33 bp, Homo sapien
cactccacctaaacaatgctaatcctgaaatgc

SEQ ID NO: 468205 - DNA, 33 bp, Homo sapien
atatctgagatgtaggcaatgcttattggaaat

SEQ ID NO: 468206 - DNA, 33 bp, Homo sapien
atatctgagatgtaggtaatgcttattggaaat

SEQ ID NO: 468207 - DNA, 33 bp, Homo sapien
cacggtaaaactgcaactagcttagaggataat

SEQ ID NO: 468208 - DNA, 33 bp, Homo sapien
cacggtaaaactgcaagtagcttagaggataat

SEQ ID NO: 468209 - DNA, 33 bp, Homo sapien
gaatcctcacaatagaaccaataatggagactc

SEQ ID NO: 468210 - DNA, 33 bp, Homo sapien
gaatcctcacaatagatccaataatggagactc

SEQ ID NO: 468211 - DNA, 33 bp, Homo sapien
ttaccttccacagtgacaggtactgctcatagc

SEQ ID NO: 468212 - DNA, 33 bp, Homo sapien
ttaccttccacagtgagaggtactgctcatagc

SEQ ID NO: 468213 - DNA, 33 bp, Homo sapien
gtgattcaagggtaagcaatctccaaatcaatg

SEQ ID NO: 468214 - DNA, 33 bp, Homo sapien
gtgattcaagggtaagtaatctccaaatcaatg

SEQ ID NO: 468215 - DNA, 33 bp, Homo sapien
ccttactcaataagcacagagttcacttgctga

SEQ ID NO: 468216 - DNA, 33 bp, Homo sapien
ccttactcaataagcagagagttcacttgctga

SEQ ID NO: 468217 - DNA, 33 bp, Homo sapien
aagaggactattatgactcagagaagtgttgga

SEQ ID NO: 468218 - DNA, 33 bp, Homo sapien
aagaggactattatgattcagagaagtgttgga

SEQ ID NO: 468219 - DNA, 33 bp, Homo sapien
tcacagataattggaacgccatgtgataagtac

SEQ ID NO: 468220 - DNA, 33 bp, Homo sapien
tcacagataattggaatgccatgtgataagtac

SEQ ID NO: 468221 - DNA, 33 bp, Homo sapien
gtggtctgtattataaatgatcttttcacagat

SEQ ID NO: 468222 - DNA, 33 bp, Homo sapien
gtggtctgtattataagtgatcttttcacagat

SEQ ID NO: 468223 - DNA, 33 bp, Homo sapien
atcccactgccattggcaactcttctctgtgag

SEQ ID NO: 468224 - DNA, 33 bp, Homo sapien
atcccactgccattgggaactcttctctgtgag

SEQ ID NO: 468225 - DNA, 33 bp, Homo sapien
tccagcaaacccagagacacttttcaaatcctc

SEQ ID NO: 468226 - DNA, 33 bp, Homo sapien
tccagcaaacccagaggcacttttcaaatcctc

SEQ ID NO: 468227 - DNA, 33 bp, Homo sapien
ctgtaacaggagcggaatagaacagtcaaatga

SEQ ID NO: 468228 - DNA, 33 bp, Homo sapien
ctgtaacaggagcggagtagaacagtcaaatga

SEQ ID NO: 468229 - DNA, 33 bp, Homo sapien
tcctatcttggttcacagaaggcttcttggaag

SEQ ID NO: 468230 - DNA, 33 bp, Homo sapien
tcctatcttggttcacggaaggcttcttggaag

SEQ ID NO: 468231 - DNA, 33 bp, Homo sapien
caatttagcaggcacaatgtaagctgttgatgg

SEQ ID NO: 468232 - DNA, 33 bp, Homo sapien
caatttagcaggcacagtgtaagctgttgatgg

SEQ ID NO: 468233 - DNA, 33 bp, Homo sapien
acaaaaggttgagtgacgagttaatgtcacagt

SEQ ID NO: 468234 - DNA, 33 bp, Homo sapien
acaaaaggttgagtgatgagttaatgtcacagt

SEQ ID NO: 468235 - DNA, 33 bp, Homo sapien
ggtataaaatgtaaagacagctctacggtgtgg

SEQ ID NO: 468236 - DNA, 33 bp, Homo sapien
ggtataaaatgtaaaggcagctctacggtgtgg

SEQ ID NO: 468237 - DNA, 33 bp, Homo sapien
agaagagagaagacacaggaccgttttgtcgtt

SEQ ID NO: 468238 - DNA, 33 bp, Homo sapien
agaagagagaagacacgggaccgttttgtcgtt

SEQ ID NO: 468239 - DNA, 33 bp, Homo sapien
cagacaaatccaaacccacatgcctggtgttcc

SEQ ID NO: 468240 - DNA, 33 bp, Homo sapien
cagacaaatccaaacctacatgcctggtgttcc

SEQ ID NO: 468241 - DNA, 33 bp, Homo sapien
aaagcttgtaagctgccagtatttccaaaagaa

SEQ ID NO: 468242 - DNA, 33 bp, Homo sapien
aaagcttgtaagctgctagtatttccaaaagaa

SEQ ID NO: 468243 - DNA, 33 bp, Homo sapien
acaattttttctgggacctttgtgctttttctg

SEQ ID NO: 468244 - DNA, 33 bp, Homo sapien
acaattttttctgggatctttgtgctttttctg

SEQ ID NO: 468245 - DNA, 33 bp, Homo sapien
tccatccttattccaaccctctcatcttctatc

SEQ ID NO: 468246 - DNA, 33 bp, Homo sapien
tccatccttattccaatcctctcatcttctatc

SEQ ID NO: 468247 - DNA, 33 bp, Homo sapien
agggacaggaatccgacggcagcattctgagct

SEQ ID NO: 468248 - DNA, 33 bp, Homo sapien
agggacaggaatccgatggcagcattctgagct

SEQ ID NO: 468249 - DNA, 33 bp, Homo sapien
caaaacatttaattcaaaattctggacctatag

SEQ ID NO: 468250 - DNA, 33 bp, Homo sapien
caaaacatttaattcagaattctggacctatag

SEQ ID NO: 468251 - DNA, 33 bp, Homo sapien
attggtttgtagtattcaaagctcattatcatg

SEQ ID NO: 468252 - DNA, 33 bp, Homo sapien
attggtttgtagtatttaaagctcattatcatg

SEQ ID NO: 468253 - DNA, 33 bp, Homo sapien
ttccctggagtagtcaagattttcagctgcatg

SEQ ID NO: 468254 - DNA, 33 bp, Homo sapien
ttccctggagtagtcaggattttcagctgcatg

SEQ ID NO: 468255 - DNA, 33 bp, Homo sapien
actcattgaagacctacaggaaagcatccctcc

SEQ ID NO: 468256 - DNA, 33 bp, Homo sapien
actcattgaagacctagaggaaagcatccctcc

SEQ ID NO: 468257 - DNA, 33 bp, Homo sapien
ttcccattttctccatcataagcttggactcgt

SEQ ID NO: 468258 - DNA, 33 bp, Homo sapien
ttcccattttctccattataagcttggactcgt

SEQ ID NO: 468259 - DNA, 33 bp, Homo sapien
gatctcagatgtcagaactggaggcaccaggga

SEQ ID NO: 468260 - DNA, 33 bp, Homo sapien
gatctcagatgtcagagctggaggcaccaggga

SEQ ID NO: 468261 - DNA, 33 bp, Homo sapien
taattttttttcagtaggtcctgttgtaataac

SEQ ID NO: 468262 - DNA, 33 bp, Homo sapien
taattttttttcagtatgtcctgttgtaataac

SEQ ID NO: 468263 - DNA, 33 bp, Homo sapien
aagctattcatacctcaataaagctgctaaaga

SEQ ID NO: 468264 - DNA, 33 bp, Homo sapien
aagctattcatacctcgataaagctgctaaaga

SEQ ID NO: 468265 - DNA, 33 bp, Homo sapien
aaaagcccaagagcagcccataaattctctggc

SEQ ID NO: 468266 - DNA, 33 bp, Homo sapien
aaaagcccaagagcagtccataaattctctggc

SEQ ID NO: 468267 - DNA, 33 bp, Homo sapien
tgcaatagcatgcagaaaaagacttcctttagg

SEQ ID NO: 468268 - DNA, 33 bp, Homo sapien
tgcaatagcatgcagagaaagacttcctttagg

SEQ ID NO: 468269 - DNA, 33 bp, Homo sapien
gcagttatccatactgcaaagagtagagagatg

SEQ ID NO: 468270 - DNA, 33 bp, Homo sapien
gcagttatccatactgtaaagagtagagagatg

SEQ ID NO: 468271 - DNA, 33 bp, Homo sapien
acgtggttgaccttgcactcttaactgctccac

SEQ ID NO: 468272 - DNA, 33 bp, Homo sapien
acgtggttgaccttgcgctcttaactgctccac

SEQ ID NO: 468273 - DNA, 33 bp, Homo sapien
aatcacctattgaaagccttattttgaaataca

SEQ ID NO: 468274 - DNA, 33 bp, Homo sapien
aatcacctattgaaaggcttattttgaaataca

SEQ ID NO: 468275 - DNA, 33 bp, Homo sapien
aacccttctagatgaaatatatccttgagagta

SEQ ID NO: 468276 - DNA, 33 bp, Homo sapien
aacccttctagatgaattatatccttgagagta

SEQ ID NO: 468277 - DNA, 33 bp, Homo sapien
agaactcagcacgtgaccttcgaatgcaatatc

SEQ ID NO: 468278 - DNA, 33 bp, Homo sapien
agaactcagcacgtgatcttcgaatgcaatatc

SEQ ID NO: 468279 - DNA, 33 bp, Homo sapien
aaacctcctagttggcgctccactcatgcacta

SEQ ID NO: 468280 - DNA, 33 bp, Homo sapien
aaacctcctagttggctctccactcatgcacta

SEQ ID NO: 468281 - DNA, 33 bp, Homo sapien
ggcctcactacctctccaagtttggtaatttgc

SEQ ID NO: 468282 - DNA, 33 bp, Homo sapien
ggcctcactacctctctaagtttggtaatttgc

SEQ ID NO: 468283 - DNA, 33 bp, Homo sapien
catcccaggcctcataagttgtactttctctct

SEQ ID NO: 468284 - DNA, 33 bp, Homo sapien
catcccaggcctcataggttgtactttctctct

SEQ ID NO: 468285 - DNA, 33 bp, Homo sapien
gaaacatagggaagacaagagaggtgggtacag

SEQ ID NO: 468286 - DNA, 33 bp, Homo sapien
gaaacatagggaagacgagagaggtgggtacag

SEQ ID NO: 468287 - DNA, 33 bp, Homo sapien
ttgcagtcatgagtagacaccttccatgcactt

SEQ ID NO: 468288 - DNA, 33 bp, Homo sapien
ttgcagtcatgagtagtcaccttccatgcactt

SEQ ID NO: 468289 - DNA, 33 bp, Homo sapien
accagaaaagctgatgccagggctggaccagcc

SEQ ID NO: 468290 - DNA, 33 bp, Homo sapien
accagaaaagctgatgtcagggctggaccagcc

SEQ ID NO: 468291 - DNA, 33 bp, Homo sapien
agtaatgcagaaacaacggagaaaggaggctag

SEQ ID NO: 468292 - DNA, 33 bp, Homo sapien
agtaatgcagaaacaatggagaaaggaggctag

SEQ ID NO: 468293 - DNA, 33 bp, Homo sapien
caagttcaaacattcactgaaacggaaatgcgc

SEQ ID NO: 468294 - DNA, 33 bp, Homo sapien
caagttcaaacattcattgaaacggaaatgcgc

SEQ ID NO: 468295 - DNA, 33 bp, Homo sapien
atctcaacatacaatccatataacaattatgac

SEQ ID NO: 468296 - DNA, 33 bp, Homo sapien
atctcaacatacaatctatataacaattatgac

SEQ ID NO: 468297 - DNA, 33 bp, Homo sapien
atagtagaggcattaccacaggaaaaaaatagt

SEQ ID NO: 468298 - DNA, 33 bp, Homo sapien
atagtagaggcattactacaggaaaaaaatagt

SEQ ID NO: 468299 - DNA, 33 bp, Homo sapien
aatcaattgataaccaatgaaccaacaagtttg

SEQ ID NO: 468300 - DNA, 33 bp, Homo sapien
aatcaattgataaccagtgaaccaacaagtttg

SEQ ID NO: 468301 - DNA, 33 bp, Homo sapien
tgataagagctacaataaaatacaaccaggtaa

SEQ ID NO: 468302 - DNA, 33 bp, Homo sapien
tgataagagctacaattaaatacaaccaggtaa

SEQ ID NO: 468303 - DNA, 33 bp, Homo sapien
gtaaaggagcagtaacaagggaatatctaccaa

SEQ ID NO: 468304 - DNA, 33 bp, Homo sapien
gtaaaggagcagtaacgagggaatatctaccaa

SEQ ID NO: 468305 - DNA, 33 bp, Homo sapien
tgcaacaaggcctagacattgtagagaaaagaa

SEQ ID NO: 468306 - DNA, 33 bp, Homo sapien
tgcaacaaggcctagatattgtagagaaaagaa

SEQ ID NO: 468307 - DNA, 33 bp, Homo sapien
gttgtgataattcttccaacagtcagcatccat

SEQ ID NO: 468308 - DNA, 33 bp, Homo sapien
gttgtgataattcttctaacagtcagcatccat

SEQ ID NO: 468309 - DNA, 33 bp, Homo sapien
gtctgagagcaggcacaatatttctttaatgaa

SEQ ID NO: 468310 - DNA, 33 bp, Homo sapien
gtctgagagcaggcacgatatttctttaatgaa

SEQ ID NO: 468311 - DNA, 33 bp, Homo sapien
cccccagttgccatcaaaaaaattcaatagaac

SEQ ID NO: 468312 - DNA, 33 bp, Homo sapien
cccccagttgccatcagaaaaattcaatagaac

SEQ ID NO: 468313 - DNA, 33 bp, Homo sapien
ttttatgttctgttacacttacaatatattcca

SEQ ID NO: 468314 - DNA, 33 bp, Homo sapien
ttttatgttctgttacgcttacaatatattcca

SEQ ID NO: 468315 - DNA, 33 bp, Homo sapien
attattacttatctgcagcaaagttctgactgc

SEQ ID NO: 468316 - DNA, 33 bp, Homo sapien
attattacttatctgcggcaaagttctgactgc

SEQ ID NO: 468317 - DNA, 33 bp, Homo sapien
tttgcacaaatataacacaaaagggaattgttt

SEQ ID NO: 468318 - DNA, 33 bp, Homo sapien
tttgcacaaatataacgcaaaagggaattgttt

SEQ ID NO: 468319 - DNA, 33 bp, Homo sapien
cacacttttgcatagagctgaccctcaacaagt

SEQ ID NO: 468320 - DNA, 33 bp, Homo sapien
cacacttttgcatagatctgaccctcaacaagt

SEQ ID NO: 468321 - DNA, 33 bp, Homo sapien
tctcagcagaggcctacaaccagagggctcata

SEQ ID NO: 468322 - DNA, 33 bp, Homo sapien
tctcagcagaggcctagaaccagagggctcata

SEQ ID NO: 468323 - DNA, 33 bp, Homo sapien
ggactgtgggccatcactagctccccgcctctc

SEQ ID NO: 468324 - DNA, 33 bp, Homo sapien
ggactgtgggccatcagtagctccccgcctctc

SEQ ID NO: 468325 - DNA, 33 bp, Homo sapien
cttagtgttctcttgcccttgaaataaaatata

SEQ ID NO: 468326 - DNA, 33 bp, Homo sapien
cttagtgttctcttgctcttgaaataaaatata

SEQ ID NO: 468327 - DNA, 33 bp, Homo sapien
gggatgggtattcaaaatcatgtgccagacatg

SEQ ID NO: 468328 - DNA, 33 bp, Homo sapien
gggatgggtattcaaagtcatgtgccagacatg

SEQ ID NO: 468329 - DNA, 33 bp, Homo sapien
tcaccgaaataaggaaaacttctaacacttaga

SEQ ID NO: 468330 - DNA, 33 bp, Homo sapien
tcaccgaaataaggaacacttctaacacttaga

SEQ ID NO: 468331 - DNA, 33 bp, Homo sapien
gacgacaaacgaactacgtcttctgtagatgaa

SEQ ID NO: 468332 - DNA, 33 bp, Homo sapien
gacgacaaacgaactatgtcttctgtagatgaa

SEQ ID NO: 468333 - DNA, 33 bp, Homo sapien
tctgtgtctagaataactgattgccccatgtta

SEQ ID NO: 468334 - DNA, 33 bp, Homo sapien
tctgtgtctagaataattgattgccccatgtta

SEQ ID NO: 468335 - DNA, 33 bp, Homo sapien
gaatccatgccaaaaaaaaaatggtcagaacta

SEQ ID NO: 468336 - DNA, 33 bp, Homo sapien
gaatccatgccaaaaacaaaatggtcagaacta

SEQ ID NO: 468337 - DNA, 33 bp, Homo sapien
aaatgtcaagagcctaccttcaaacagagtcaa

SEQ ID NO: 468338 - DNA, 33 bp, Homo sapien
aaatgtcaagagcctagcttcaaacagagtcaa

SEQ ID NO: 468339 - DNA, 33 bp, Homo sapien
agtgagacttctggagaatctagatttttaggc

SEQ ID NO: 468340 - DNA, 33 bp, Homo sapien
agtgagacttctggaggatctagatttttaggc

SEQ ID NO: 468341 - DNA, 33 bp, Homo sapien
tcctggagagcaggtaagtctgtaacttccacc

SEQ ID NO: 468342 - DNA, 33 bp, Homo sapien
tcctggagagcaggtatgtctgtaacttccacc

SEQ ID NO: 468343 - DNA, 33 bp, Homo sapien
caatcatgcctactcactctatacatctatttg

SEQ ID NO: 468344 - DNA, 33 bp, Homo sapien
caatcatgcctactcattctatacatctatttg

SEQ ID NO: 468345 - DNA, 33 bp, Homo sapien
acttaacacattttgcagatctttccatttgaa

SEQ ID NO: 468346 - DNA, 33 bp, Homo sapien
acttaacacattttgcggatctttccatttgaa

SEQ ID NO: 468347 - DNA, 33 bp, Homo sapien
caaaagccaaccagggaagaatggccaccaagg

SEQ ID NO: 468348 - DNA, 33 bp, Homo sapien
caaaagccaaccagggcagaatggccaccaagg

SEQ ID NO: 468349 - DNA, 33 bp, Homo sapien
ttacgcttcatgctgaatagttgctctccccta

SEQ ID NO: 468350 - DNA, 33 bp, Homo sapien
ttacgcttcatgctgagtagttgctctccccta

SEQ ID NO: 468351 - DNA, 33 bp, Homo sapien
atctctctacagtggactattttctcttccagc

SEQ ID NO: 468352 - DNA, 33 bp, Homo sapien
atctctctacagtggagtattttctcttccagc

SEQ ID NO: 468353 - DNA, 33 bp, Homo sapien
attagcaattgctaggccagtccctttcacact

SEQ ID NO: 468354 - DNA, 33 bp, Homo sapien
attagcaattgctaggtcagtccctttcacact

SEQ ID NO: 468355 - DNA, 33 bp, Homo sapien
aacattctcagtgtaactgtcaaatgccacaag

SEQ ID NO: 468356 - DNA, 33 bp, Homo sapien
aacattctcagtgtaattgtcaaatgccacaag

SEQ ID NO: 468357 - DNA, 33 bp, Homo sapien
ctgcagcataccaggtcaatgatcttgcaaata

SEQ ID NO: 468358 - DNA, 33 bp, Homo sapien
ctgcagcataccaggtgaatgatcttgcaaata

SEQ ID NO: 468359 - DNA, 33 bp, Homo sapien
gtggtgtgggcagcgcagcccgtttgttctatc

SEQ ID NO: 468360 - DNA, 33 bp, Homo sapien
gtggtgtgggcagcgcggcccgtttgttctatc

SEQ ID NO: 468361 - DNA, 33 bp, Homo sapien
gggctcagtcttcagagcctatcactgcctctt

SEQ ID NO: 468362 - DNA, 33 bp, Homo sapien
gggctcagtcttcagatcctatcactgcctctt

SEQ ID NO: 468363 - DNA, 33 bp, Homo sapien
cagctgcttcaggtcacgatcggcgtgctgctc

SEQ ID NO: 468364 - DNA, 33 bp, Homo sapien
cagctgcttcaggtcatgatcggcgtgctgctc

SEQ ID NO: 468365 - DNA, 33 bp, Homo sapien
actagaggagaaacataaacagaccatggatta

SEQ ID NO: 468366 - DNA, 33 bp, Homo sapien
actagaggagaaacatgaacagaccatggatta

SEQ ID NO: 468367 - DNA, 33 bp, Homo sapien
aagcttggcagatagaaggacaatcactccaca

SEQ ID NO: 468368 - DNA, 33 bp, Homo sapien
aagcttggcagatagagggacaatcactccaca

SEQ ID NO: 468369 - DNA, 33 bp, Homo sapien
cgatttattaacacaaacattacacgcaggcag

SEQ ID NO: 468370 - DNA, 33 bp, Homo sapien
cgatttattaacacaagcattacacgcaggcag

SEQ ID NO: 468371 - DNA, 33 bp, Homo sapien
cgcctaaaactacagcaagtctgatttttgtct

SEQ ID NO: 468372 - DNA, 33 bp, Homo sapien
cgcctaaaactacagcgagtctgatttttgtct

SEQ ID NO: 468373 - DNA, 33 bp, Homo sapien
ctttgaaacctgatgacgagacagcactgctga

SEQ ID NO: 468374 - DNA, 33 bp, Homo sapien
ctttgaaacctgatgatgagacagcactgctga

SEQ ID NO: 468375 - DNA, 33 bp, Homo sapien
gggctgtgcgggtctcaatagcatttgcagcat

SEQ ID NO: 468376 - DNA, 33 bp, Homo sapien
gggctgtgcgggtctcgatagcatttgcagcat

SEQ ID NO: 468377 - DNA, 33 bp, Homo sapien
aagaacactttcaaaagcaatcattcaatacat

SEQ ID NO: 468378 - DNA, 33 bp, Homo sapien
aagaacactttcaaaatcaatcattcaatacat

SEQ ID NO: 468379 - DNA, 33 bp, Homo sapien
aaagtctactcacttaataacaatccctgatat

SEQ ID NO: 468380 - DNA, 33 bp, Homo sapien
aaagtctactcacttactaacaatccctgatat

SEQ ID NO: 468381 - DNA, 33 bp, Homo sapien
tatacaaaaaatgtacaacagacaaacataaaa

SEQ ID NO: 468382 - DNA, 33 bp, Homo sapien
tatacaaaaaatgtacgacagacaaacataaaa

SEQ ID NO: 468383 - DNA, 33 bp, Homo sapien
ggtctcggtctcttcaagcacgtgatttgtcat

SEQ ID NO: 468384 - DNA, 33 bp, Homo sapien
ggtctcggtctcttcatgcacgtgatttgtcat

SEQ ID NO: 468385 - DNA, 33 bp, Homo sapien
tgtgcactaaacaacacgctgcgcgggaagaga

SEQ ID NO: 468386 - DNA, 33 bp, Homo sapien
tgtgcactaaacaacatgctgcgcgggaagaga

SEQ ID NO: 468387 - DNA, 33 bp, Homo sapien
actgagtttcagagacaacttgaaaggcgatga

SEQ ID NO: 468388 - DNA, 33 bp, Homo sapien
actgagtttcagagacgacttgaaaggcgatga

SEQ ID NO: 468389 - DNA, 33 bp, Homo sapien
atgccgaattctcgatcagtggccaccccaggg

SEQ ID NO: 468390 - DNA, 33 bp, Homo sapien
atgccgaattctcgatgagtggccaccccaggg

SEQ ID NO: 468391 - DNA, 33 bp, Homo sapien
agccacgagttaactacggagtgaaaccaatcc

SEQ ID NO: 468392 - DNA, 33 bp, Homo sapien
agccacgagttaactatggagtgaaaccaatcc

SEQ ID NO: 468393 - DNA, 33 bp, Homo sapien
catccaggagttatgaatatttcagaccgcctc

SEQ ID NO: 468394 - DNA, 33 bp, Homo sapien
catccaggagttatgattatttcagaccgcctc

SEQ ID NO: 468395 - DNA, 33 bp, Homo sapien
taatattaaccaacacaagggtcctttatcaac

SEQ ID NO: 468396 - DNA, 33 bp, Homo sapien
taatattaaccaacacgagggtcctttatcaac

SEQ ID NO: 468397 - DNA, 33 bp, Homo sapien
tatctccagctcctacagcagtacccagcacac

SEQ ID NO: 468398 - DNA, 33 bp, Homo sapien
tatctccagctcctacggcagtacccagcacac

SEQ ID NO: 468399 - DNA, 33 bp, Homo sapien
gctctgtggactgccaagccctaaaagggtctg

SEQ ID NO: 468400 - DNA, 33 bp, Homo sapien
gctctgtggactgccaggccctaaaagggtctg

SEQ ID NO: 468401 - DNA, 33 bp, Homo sapien
gaaatgagtggcacctaaatcagaccataaaag

SEQ ID NO: 468402 - DNA, 33 bp, Homo sapien
gaaatgagtggcacctgaatcagaccataaaag

SEQ ID NO: 468403 - DNA, 33 bp, Homo sapien
atacgttgggtaacccagcttctcaaacagcag

SEQ ID NO: 468404 - DNA, 33 bp, Homo sapien
atacgttgggtaacccggcttctcaaacagcag

SEQ ID NO: 468405 - DNA, 33 bp, Homo sapien
cagagccagtaggtgccaatttgactgcccctg

SEQ ID NO: 468406 - DNA, 33 bp, Homo sapien
cagagccagtaggtgctaatttgactgcccctg

SEQ ID NO: 468407 - DNA, 33 bp, Homo sapien
aaacaagtcaagtttaaaataccttctagataa

SEQ ID NO: 468408 - DNA, 33 bp, Homo sapien
aaacaagtcaagtttagaataccttctagataa

SEQ ID NO: 468409 - DNA, 33 bp, Homo sapien
gcttcatccgaaaatgcacatcctgggtgactt

SEQ ID NO: 468410 - DNA, 33 bp, Homo sapien
gcttcatccgaaaatgtacatcctgggtgactt

SEQ ID NO: 468411 - DNA, 33 bp, Homo sapien
tgcaagactttttatcccaatgttcaaacagga

SEQ ID NO: 468412 - DNA, 33 bp, Homo sapien
tgcaagactttttatctcaatgttcaaacagga

SEQ ID NO: 468413 - DNA, 33 bp, Homo sapien
ctcaacttgaattgtacatctcagaattcccac

SEQ ID NO: 468414 - DNA, 33 bp, Homo sapien
ctcaacttgaattgtatatctcagaattcccac

SEQ ID NO: 468415 - DNA, 33 bp, Homo sapien
ctacaaaaaagccttacgcttgaactggaggtg

SEQ ID NO: 468416 - DNA, 33 bp, Homo sapien
ctacaaaaaagccttatgcttgaactggaggtg

SEQ ID NO: 468417 - DNA, 33 bp, Homo sapien
cttgctggcttgaaaacagacaggactgggttt

SEQ ID NO: 468418 - DNA, 33 bp, Homo sapien
cttgctggcttgaaaatagacaggactgggttt

SEQ ID NO: 468419 - DNA, 33 bp, Homo sapien
gcagtgtttgtcctgcaatgggcaccatctccc

SEQ ID NO: 468420 - DNA, 33 bp, Homo sapien
gcagtgtttgtcctgcgatgggcaccatctccc

SEQ ID NO: 468421 - DNA, 33 bp, Homo sapien
agactaatgcaggtccgcttcagtctctcgtgg

SEQ ID NO: 468422 - DNA, 33 bp, Homo sapien
agactaatgcaggtcctcttcagtctctcgtgg

SEQ ID NO: 468423 - DNA, 33 bp, Homo sapien
tcttgagtacttcagccacacaccaaccatccc

SEQ ID NO: 468424 - DNA, 33 bp, Homo sapien
tcttgagtacttcagcgacacaccaaccatccc

SEQ ID NO: 468425 - DNA, 33 bp, Homo sapien
ctaaacccataatcacccccatctaactcttcc

SEQ ID NO: 468426 - DNA, 33 bp, Homo sapien
ctaaacccataatcactcccatctaactcttcc

SEQ ID NO: 468427 - DNA, 33 bp, Homo sapien
aaggagtctcatggtacgtatgggacagagtga

SEQ ID NO: 468428 - DNA, 33 bp, Homo sapien
aaggagtctcatggtatgtatgggacagagtga

SEQ ID NO: 468429 - DNA, 33 bp, Homo sapien
tgggaggaagctcaaactggcccatgagaagag

SEQ ID NO: 468430 - DNA, 33 bp, Homo sapien
tgggaggaagctcaaattggcccatgagaagag

SEQ ID NO: 468431 - DNA, 33 bp, Homo sapien
taactcatatacaatacctggctttgaggtagt

SEQ ID NO: 468432 - DNA, 33 bp, Homo sapien
taactcatatacaatatctggctttgaggtagt

SEQ ID NO: 468433 - DNA, 33 bp, Homo sapien
tgtaaattaattgggaaatgacctggcacttat

SEQ ID NO: 468434 - DNA, 33 bp, Homo sapien
tgtaaattaattgggagatgacctggcacttat

SEQ ID NO: 468435 - DNA, 33 bp, Homo sapien
gagtgagaactctagacagtttactctgtggtc

SEQ ID NO: 468436 - DNA, 33 bp, Homo sapien
gagtgagaactctagatagtttactctgtggtc

SEQ ID NO: 468437 - DNA, 33 bp, Homo sapien
cttccaccagataaaacgagacggggacatagg

SEQ ID NO: 468438 - DNA, 33 bp, Homo sapien
cttccaccagataaaatgagacggggacatagg

SEQ ID NO: 468439 - DNA, 33 bp, Homo sapien
ctgatgaatcacacagaaagaaaaacgcataac

SEQ ID NO: 468440 - DNA, 33 bp, Homo sapien
ctgatgaatcacacaggaagaaaaacgcataac

SEQ ID NO: 468441 - DNA, 33 bp, Homo sapien
attaaccttctattgaggtagattagcattagt

SEQ ID NO: 468442 - DNA, 33 bp, Homo sapien
attaaccttctattgatgtagattagcattagt

SEQ ID NO: 468443 - DNA, 33 bp, Homo sapien
aggcacagactggggccaggttttgttagcagc

SEQ ID NO: 468444 - DNA, 33 bp, Homo sapien
aggcacagactggggcgaggttttgttagcagc

SEQ ID NO: 468445 - DNA, 33 bp, Homo sapien
ccccttagcctcggcgacctgcgcacttcagca

SEQ ID NO: 468446 - DNA, 33 bp, Homo sapien
ccccttagcctcggcgtcctgcgcacttcagca

SEQ ID NO: 468447 - DNA, 33 bp, Homo sapien
ttttcaaggtaagtaaaatggtcctatatggaa

SEQ ID NO: 468448 - DNA, 33 bp, Homo sapien
ttttcaaggtaagtaacatggtcctatatggaa

SEQ ID NO: 468449 - DNA, 33 bp, Homo sapien
gtgattactttcataacgtgggttcttttactc

SEQ ID NO: 468450 - DNA, 33 bp, Homo sapien
gtgattactttcataatgtgggttcttttactc

SEQ ID NO: 468451 - DNA, 33 bp, Homo sapien
caaaactgtgcaaaagcctgatatcccagaagg

SEQ ID NO: 468452 - DNA, 33 bp, Homo sapien
caaaactgtgcaaaaggctgatatcccagaagg

SEQ ID NO: 468453 - DNA, 33 bp, Homo sapien
aggggaggtctctcccactaaagcaaaactgtg

SEQ ID NO: 468454 - DNA, 33 bp, Homo sapien
aggggaggtctctcccgctaaagcaaaactgtg

SEQ ID NO: 468455 - DNA, 33 bp, Homo sapien
ccccaccctgaaatacaccaataatccttgttt

SEQ ID NO: 468456 - DNA, 33 bp, Homo sapien
ccccaccctgaaatacgccaataatccttgttt

SEQ ID NO: 468457 - DNA, 33 bp, Homo sapien
ataaagatgcattgatcacagtaaatatacaga

SEQ ID NO: 468458 - DNA, 33 bp, Homo sapien
ataaagatgcattgattacagtaaatatacaga

SEQ ID NO: 468459 - DNA, 33 bp, Homo sapien
atttttaaaacttttccaggtcagctattcatg

SEQ ID NO: 468460 - DNA, 33 bp, Homo sapien
atttttaaaacttttctaggtcagctattcatg

SEQ ID NO: 468461 - DNA, 33 bp, Homo sapien
tagctttctaggtgaaccatttaatcactggtg

SEQ ID NO: 468462 - DNA, 33 bp, Homo sapien
tagctttctaggtgaatcatttaatcactggtg

SEQ ID NO: 468463 - DNA, 33 bp, Homo sapien
caggccttgctttcttcaaacctatcagctgct

SEQ ID NO: 468464 - DNA, 33 bp, Homo sapien
caggccttgctttctttaaacctatcagctgct

SEQ ID NO: 468465 - DNA, 33 bp, Homo sapien
aagctgtgtccatctgaaagcaggaccaagtat

SEQ ID NO: 468466 - DNA, 33 bp, Homo sapien
aagctgtgtccatctggaagcaggaccaagtat

SEQ ID NO: 468467 - DNA, 33 bp, Homo sapien
ctccagctatttctacactattgtaacatatat

SEQ ID NO: 468468 - DNA, 33 bp, Homo sapien
ctccagctatttctacgctattgtaacatatat

SEQ ID NO: 468469 - DNA, 33 bp, Homo sapien
tcactgcatccagacaaaagctggtttaaagaa

SEQ ID NO: 468470 - DNA, 33 bp, Homo sapien
tcactgcatccagacagaagctggtttaaagaa

SEQ ID NO: 468471 - DNA, 33 bp, Homo sapien
agcagagttcagctaacagaatatgagaaatca

SEQ ID NO: 468472 - DNA, 33 bp, Homo sapien
agcagagttcagctaagagaatatgagaaatca

SEQ ID NO: 468473 - DNA, 33 bp, Homo sapien
taggagactaagcctccaaagtgtaaataattt

SEQ ID NO: 468474 - DNA, 33 bp, Homo sapien
taggagactaagcctctaaagtgtaaataattt

SEQ ID NO: 468475 - DNA, 33 bp, Homo sapien
tgcagttgagacagtacaaaacatgcaagatgc

SEQ ID NO: 468476 - DNA, 33 bp, Homo sapien
tgcagttgagacagtataaaacatgcaagatgc

SEQ ID NO: 468477 - DNA, 33 bp, Homo sapien
ctatagtcttaaagaaccaaacagccattctgt

SEQ ID NO: 468478 - DNA, 33 bp, Homo sapien
ctatagtcttaaagaagcaaacagccattctgt

SEQ ID NO: 468479 - DNA, 33 bp, Homo sapien
ctcccacactcagtataagtcccctttactagt

SEQ ID NO: 468480 - DNA, 33 bp, Homo sapien
ctcccacactcagtatgagtcccctttactagt

SEQ ID NO: 468481 - DNA, 33 bp, Homo sapien
atgatgagttgagttagaatcaaatcctctgaa

SEQ ID NO: 468482 - DNA, 33 bp, Homo sapien
atgatgagttgagttataatcaaatcctctgaa

SEQ ID NO: 468483 - DNA, 33 bp, Homo sapien
agaagaacagcacgaacaggatgaagtattagt

SEQ ID NO: 468484 - DNA, 33 bp, Homo sapien
agaagaacagcacgaataggatgaagtattagt

SEQ ID NO: 468485 - DNA, 33 bp, Homo sapien
tctgacattcaaggacactgtaaattcaaggca

SEQ ID NO: 468486 - DNA, 33 bp, Homo sapien
tctgacattcaaggacgctgtaaattcaaggca

SEQ ID NO: 468487 - DNA, 33 bp, Homo sapien
ccaatgcatctcctacaaatctaacatggtgaa

SEQ ID NO: 468488 - DNA, 33 bp, Homo sapien
ccaatgcatctcctacgaatctaacatggtgaa

SEQ ID NO: 468489 - DNA, 33 bp, Homo sapien
tatccaagtctggatgaattgattttgacatga

SEQ ID NO: 468490 - DNA, 33 bp, Homo sapien
tatccaagtctggatggattgattttgacatga

SEQ ID NO: 468491 - DNA, 33 bp, Homo sapien
aagatgtccttcatttaaaataaatcataacct

SEQ ID NO: 468492 - DNA, 33 bp, Homo sapien
aagatgtccttcatttgaaataaatcataacct

SEQ ID NO: 468493 - DNA, 33 bp, Homo sapien
atttcctagaaaaacaaagaagcatatgtatag

SEQ ID NO: 468494 - DNA, 33 bp, Homo sapien
atttcctagaaaaacatagaagcatatgtatag

SEQ ID NO: 468495 - DNA, 33 bp, Homo sapien
gtgctcttcatttcaaattcagatgtgtcacct

SEQ ID NO: 468496 - DNA, 33 bp, Homo sapien
gtgctcttcatttcaagttcagatgtgtcacct

SEQ ID NO: 468497 - DNA, 33 bp, Homo sapien
ccatagctggcggccaatgagcttcggtcccag

SEQ ID NO: 468498 - DNA, 33 bp, Homo sapien
ccatagctggcggccactgagcttcggtcccag

SEQ ID NO: 468499 - DNA, 33 bp, Homo sapien
tatctgcctgttttcacatacctcaccacaaac

SEQ ID NO: 468500 - DNA, 33 bp, Homo sapien
tatctgcctgttttcagatacctcaccacaaac

SEQ ID NO: 468501 - DNA, 33 bp, Homo sapien
cctctggcgagagaaggcctaaagagctgggtg

SEQ ID NO: 468502 - DNA, 33 bp, Homo sapien
cctctggcgagagaagtcctaaagagctgggtg

SEQ ID NO: 468503 - DNA, 33 bp, Homo sapien
agtggtcacacaataacaacgtcatagtaggca

SEQ ID NO: 468504 - DNA, 33 bp, Homo sapien
agtggtcacacaataataacgtcatagtaggca

SEQ ID NO: 468505 - DNA, 33 bp, Homo sapien
gggaagaacagtgaaacctttaggagagagtga

SEQ ID NO: 468506 - DNA, 33 bp, Homo sapien
gggaagaacagtgaaagctttaggagagagtga

SEQ ID NO: 468507 - DNA, 33 bp, Homo sapien
tttctcctcattggcacaatatgcagggctcag

SEQ ID NO: 468508 - DNA, 33 bp, Homo sapien
tttctcctcattggcagaatatgcagggctcag

SEQ ID NO: 468509 - DNA, 33 bp, Homo sapien
caatacacagagttataacacagagtgatcagg

SEQ ID NO: 468510 - DNA, 33 bp, Homo sapien
caatacacagagttattacacagagtgatcagg

SEQ ID NO: 468511 - DNA, 33 bp, Homo sapien
agagaaccatttgggactcagacaaccttgatt

SEQ ID NO: 468512 - DNA, 33 bp, Homo sapien
agagaaccatttgggattcagacaaccttgatt

SEQ ID NO: 468513 - DNA, 33 bp, Homo sapien
agtgcaagggaaggaactgaggtgatggaggtc

SEQ ID NO: 468514 - DNA, 33 bp, Homo sapien
agtgcaagggaaggaattgaggtgatggaggtc

SEQ ID NO: 468515 - DNA, 33 bp, Homo sapien
gatgtagtctttcctgaatgccttgtgtctgct

SEQ ID NO: 468516 - DNA, 33 bp, Homo sapien
gatgtagtctttcctgcatgccttgtgtctgct

SEQ ID NO: 468517 - DNA, 33 bp, Homo sapien
atgagtactatggtgtaatactagatccctgca

SEQ ID NO: 468518 - DNA, 33 bp, Homo sapien
atgagtactatggtgtgatactagatccctgca

SEQ ID NO: 468519 - DNA, 33 bp, Homo sapien
ctctaaataggtctgtatgtaaccacctgtatt

SEQ ID NO: 468520 - DNA, 33 bp, Homo sapien
ctctaaataggtctgtgtgtaaccacctgtatt

SEQ ID NO: 468521 - DNA, 33 bp, Homo sapien
cataccattatggaaaagagtgtggaagttcca

SEQ ID NO: 468522 - DNA, 33 bp, Homo sapien
cataccattatggaaaggagtgtggaagttcca

SEQ ID NO: 468523 - DNA, 33 bp, Homo sapien
atgagagactgacatagaagccaaacacaacaa

SEQ ID NO: 468524 - DNA, 33 bp, Homo sapien
atgagagactgacatataagccaaacacaacaa

SEQ ID NO: 468525 - DNA, 33 bp, Homo sapien
gcttggtaaaggttgccatggtccttatgcaat

SEQ ID NO: 468526 - DNA, 33 bp, Homo sapien
gcttggtaaaggttgctatggtccttatgcaat

SEQ ID NO: 468527 - DNA, 33 bp, Homo sapien
cagctggatggagccaaaagcaatgaagtttcc

SEQ ID NO: 468528 - DNA, 33 bp, Homo sapien
cagctggatggagccagaagcaatgaagtttcc

SEQ ID NO: 468529 - DNA, 33 bp, Homo sapien
tgtgtagctcttaccaaccattttgatgtaaag

SEQ ID NO: 468530 - DNA, 33 bp, Homo sapien
tgtgtagctcttaccatccattttgatgtaaag

SEQ ID NO: 468531 - DNA, 33 bp, Homo sapien
gttctacagtgctaaagaaatctcaagaatatg

SEQ ID NO: 468532 - DNA, 33 bp, Homo sapien
gttctacagtgctaaataaatctcaagaatatg

SEQ ID NO: 468533 - DNA, 33 bp, Homo sapien
tgtgatccagcaagcaaagaagggctcatgggg

SEQ ID NO: 468534 - DNA, 33 bp, Homo sapien
tgtgatccagcaagcagagaagggctcatgggg

SEQ ID NO: 468535 - DNA, 33 bp, Homo sapien
ctgtggcctaataccaatgacagaccatctcac

SEQ ID NO: 468536 - DNA, 33 bp, Homo sapien
ctgtggcctaataccactgacagaccatctcac

SEQ ID NO: 468537 - DNA, 33 bp, Homo sapien
ttcctccttaaacaacaagcacactgtgatttc

SEQ ID NO: 468538 - DNA, 33 bp, Homo sapien
ttcctccttaaacaaccagcacactgtgatttc

SEQ ID NO: 468539 - DNA, 33 bp, Homo sapien
ttttacagtcaggacaaccatttttcaacacag

SEQ ID NO: 468540 - DNA, 33 bp, Homo sapien
ttttacagtcaggacagccatttttcaacacag

SEQ ID NO: 468541 - DNA, 33 bp, Homo sapien
gcctcagagctaaaaggcttaacaactagtaat

SEQ ID NO: 468542 - DNA, 33 bp, Homo sapien
gcctcagagctaaaagtcttaacaactagtaat

SEQ ID NO: 468543 - DNA, 33 bp, Homo sapien
gtaaatccactttgtacgtcagaaaatcccatg

SEQ ID NO: 468544 - DNA, 33 bp, Homo sapien
gtaaatccactttgtaggtcagaaaatcccatg

SEQ ID NO: 468545 - DNA, 33 bp, Homo sapien
ctcaatacctggctaacgggaattcagagaaga

SEQ ID NO: 468546 - DNA, 33 bp, Homo sapien
ctcaatacctggctaatgggaattcagagaaga

SEQ ID NO: 468547 - DNA, 33 bp, Homo sapien
aacttgaaaagaagaaccaaatagaacatttac

SEQ ID NO: 468548 - DNA, 33 bp, Homo sapien
aacttgaaaagaagaatcaaatagaacatttac

SEQ ID NO: 468549 - DNA, 33 bp, Homo sapien
ttcctctagtatttcaacatgaatagtcttttc

SEQ ID NO: 468550 - DNA, 33 bp, Homo sapien
ttcctctagtatttcagcatgaatagtcttttc

SEQ ID NO: 468551 - DNA, 33 bp, Homo sapien
acgtgcatgtgaaatagtaagaacgcgctgatg

SEQ ID NO: 468552 - DNA, 33 bp, Homo sapien
acgtgcatgtgaaatattaagaacgcgctgatg

SEQ ID NO: 468553 - DNA, 33 bp, Homo sapien
tctgctgtcttcacctaagagaggcaggaagaa

SEQ ID NO: 468554 - DNA, 33 bp, Homo sapien
tctgctgtcttcacctgagagaggcaggaagaa

SEQ ID NO: 468555 - DNA, 33 bp, Homo sapien
taaccattggatagtacgtgtctgagtctagga

SEQ ID NO: 468556 - DNA, 33 bp, Homo sapien
taaccattggatagtatgtgtctgagtctagga

SEQ ID NO: 468557 - DNA, 33 bp, Homo sapien
ccaatctgagttagaaaaaatgataacagcctt

SEQ ID NO: 468558 - DNA, 33 bp, Homo sapien
ccaatctgagttagaacaaatgataacagcctt

SEQ ID NO: 468559 - DNA, 33 bp, Homo sapien
attcaaactgtataagaatgtaaacaataggta

SEQ ID NO: 468560 - DNA, 33 bp, Homo sapien
attcaaactgtataaggatgtaaacaataggta

SEQ ID NO: 468561 - DNA, 33 bp, Homo sapien
tttcggagaaacaaacaaggagatgccaagggt

SEQ ID NO: 468562 - DNA, 33 bp, Homo sapien
tttcggagaaacaaacgaggagatgccaagggt

SEQ ID NO: 468563 - DNA, 33 bp, Homo sapien
aatccttggctgtaatcagttgaggactcagtt

SEQ ID NO: 468564 - DNA, 33 bp, Homo sapien
aatccttggctgtaattagttgaggactcagtt

SEQ ID NO: 468565 - DNA, 33 bp, Homo sapien
ccagtaactgtgggaacgttatcaaagctctga

SEQ ID NO: 468566 - DNA, 33 bp, Homo sapien
ccagtaactgtgggaatgttatcaaagctctga

SEQ ID NO: 468567 - DNA, 33 bp, Homo sapien
cagaggatttctagtacagtagcaagcataaat

SEQ ID NO: 468568 - DNA, 33 bp, Homo sapien
cagaggatttctagtatagtagcaagcataaat

SEQ ID NO: 468569 - DNA, 33 bp, Homo sapien
tgatctccctcctttcactagtataagaacata

SEQ ID NO: 468570 - DNA, 33 bp, Homo sapien
tgatctccctcctttcgctagtataagaacata

SEQ ID NO: 468571 - DNA, 33 bp, Homo sapien
ttatttaagactaagggaaaagatctatgtttg

SEQ ID NO: 468572 - DNA, 33 bp, Homo sapien
ttatttaagactaaggtaaaagatctatgtttg

SEQ ID NO: 468573 - DNA, 33 bp, Homo sapien
ggaaggctatggagaaaaagagaggaccaatga

SEQ ID NO: 468574 - DNA, 33 bp, Homo sapien
ggaaggctatggagaacaagagaggaccaatga

SEQ ID NO: 468575 - DNA, 33 bp, Homo sapien
acatataccaagaacccagtagcttctgcaaat

SEQ ID NO: 468576 - DNA, 33 bp, Homo sapien
acatataccaagaacctagtagcttctgcaaat

SEQ ID NO: 468577 - DNA, 33 bp, Homo sapien
aatgacctggataatagctgggtgaaagaaaaa

SEQ ID NO: 468578 - DNA, 33 bp, Homo sapien
aatgacctggataatatctgggtgaaagaaaaa

SEQ ID NO: 468579 - DNA, 33 bp, Homo sapien
tccaggccaaacgatacggtatcaataacaaag

SEQ ID NO: 468580 - DNA, 33 bp, Homo sapien
tccaggccaaacgatatggtatcaataacaaag

SEQ ID NO: 468581 - DNA, 33 bp, Homo sapien
cttttattagtttatgaaggatatgttatgaag

SEQ ID NO: 468582 - DNA, 33 bp, Homo sapien
cttttattagtttatgcaggatatgttatgaag

SEQ ID NO: 468583 - DNA, 33 bp, Homo sapien
catcttctatgatgagaactcccttttattatg

SEQ ID NO: 468584 - DNA, 33 bp, Homo sapien
catcttctatgatgaggactcccttttattatg

SEQ ID NO: 468585 - DNA, 33 bp, Homo sapien
aatgaaatcacaactgaaggacatacaccatta

SEQ ID NO: 468586 - DNA, 33 bp, Homo sapien
aatgaaatcacaactgcaggacatacaccatta

SEQ ID NO: 468587 - DNA, 33 bp, Homo sapien
gcatgtgctttgccacactcttttccttcttcc

SEQ ID NO: 468588 - DNA, 33 bp, Homo sapien
gcatgtgctttgccacgctcttttccttcttcc

SEQ ID NO: 468589 - DNA, 33 bp, Homo sapien
gttcctaatgtgaagaccagtgaacaggttggc

SEQ ID NO: 468590 - DNA, 33 bp, Homo sapien
gttcctaatgtgaagatcagtgaacaggttggc

SEQ ID NO: 468591 - DNA, 33 bp, Homo sapien
gcaaattgcatttttacgccagtgagtatggcg

SEQ ID NO: 468592 - DNA, 33 bp, Homo sapien
gcaaattgcatttttatgccagtgagtatggcg

SEQ ID NO: 468593 - DNA, 33 bp, Homo sapien
tccctgttgattaaaaattcttgttcgtctact

SEQ ID NO: 468594 - DNA, 33 bp, Homo sapien
tccctgttgattaaaatttcttgttcgtctact

SEQ ID NO: 468595 - DNA, 33 bp, Homo sapien
acaaaattgcaatgaaagtttgcttcttgtaac

SEQ ID NO: 468596 - DNA, 33 bp, Homo sapien
acaaaattgcaatgaatgtttgcttcttgtaac

SEQ ID NO: 468597 - DNA, 33 bp, Homo sapien
tccaagtgggagggacaccaaatggtaagagtg

SEQ ID NO: 468598 - DNA, 33 bp, Homo sapien
tccaagtgggagggacgccaaatggtaagagtg

SEQ ID NO: 468599 - DNA, 33 bp, Homo sapien
actgagaaaagattaacggtgcttcagggtgtc

SEQ ID NO: 468600 - DNA, 33 bp, Homo sapien
actgagaaaagattaatggtgcttcagggtgtc

SEQ ID NO: 468601 - DNA, 33 bp, Homo sapien
acaaaatggaatgaaagaaacttcttggaatta

SEQ ID NO: 468602 - DNA, 33 bp, Homo sapien
acaaaatggaatgaaataaacttcttggaatta

SEQ ID NO: 468603 - DNA, 33 bp, Homo sapien
atgatctctggaatgaactgttcacatagtgtt

SEQ ID NO: 468604 - DNA, 33 bp, Homo sapien
atgatctctggaatgagctgttcacatagtgtt

SEQ ID NO: 468605 - DNA, 33 bp, Homo sapien
gcataattttgaaatacgggattgtgaagagag

SEQ ID NO: 468606 - DNA, 33 bp, Homo sapien
gcataattttgaaatatgggattgtgaagagag

SEQ ID NO: 468607 - DNA, 33 bp, Homo sapien
cccattatcacaacaacatttcaggctaggggt

SEQ ID NO: 468608 - DNA, 33 bp, Homo sapien
cccattatcacaacaatatttcaggctaggggt

SEQ ID NO: 468609 - DNA, 33 bp, Homo sapien
cctgccagtttcctcaccaagcccttgtcagtc

SEQ ID NO: 468610 - DNA, 33 bp, Homo sapien
cctgccagtttcctcatcaagcccttgtcagtc

SEQ ID NO: 468611 - DNA, 33 bp, Homo sapien
cttctatttccatttcactcagcacttgaagtt

SEQ ID NO: 468612 - DNA, 33 bp, Homo sapien
cttctatttccatttctctcagcacttgaagtt

SEQ ID NO: 468613 - DNA, 33 bp, Homo sapien
atggcagattagagccactgtaaacttactgcc

SEQ ID NO: 468614 - DNA, 33 bp, Homo sapien
atggcagattagagccgctgtaaacttactgcc

SEQ ID NO: 468615 - DNA, 33 bp, Homo sapien
tcattgttggaatgaaacaaagccaatcaactg

SEQ ID NO: 468616 - DNA, 33 bp, Homo sapien
tcattgttggaatgaatcaaagccaatcaactg

SEQ ID NO: 468617 - DNA, 33 bp, Homo sapien
taattttctttcccaaatgacctctacctttgc

SEQ ID NO: 468618 - DNA, 33 bp, Homo sapien
taattttctttcccaagtgacctctacctttgc

SEQ ID NO: 468619 - DNA, 33 bp, Homo sapien
acgttcacctttaaaacatgggtgtcctcatag

SEQ ID NO: 468620 - DNA, 33 bp, Homo sapien
acgttcacctttaaaatatgggtgtcctcatag

SEQ ID NO: 468621 - DNA, 33 bp, Homo sapien
ccacaaagaaccaataacacttctcgttaacct

SEQ ID NO: 468622 - DNA, 33 bp, Homo sapien
ccacaaagaaccaatagcacttctcgttaacct

SEQ ID NO: 468623 - DNA, 33 bp, Homo sapien
atgctgattctgatgacagtttttggtgatttt

SEQ ID NO: 468624 - DNA, 33 bp, Homo sapien
atgctgattctgatgatagtttttggtgatttt

SEQ ID NO: 468625 - DNA, 33 bp, Homo sapien
aggagttcagagtctacgacacctctatatgca

SEQ ID NO: 468626 - DNA, 33 bp, Homo sapien
aggagttcagagtctatgacacctctatatgca

SEQ ID NO: 468627 - DNA, 33 bp, Homo sapien
ttcatcaattttgataagagtcatccagatcca

SEQ ID NO: 468628 - DNA, 33 bp, Homo sapien
ttcatcaattttgatacgagtcatccagatcca

SEQ ID NO: 468629 - DNA, 33 bp, Homo sapien
caaacagaagcttcaacggccctctcgccttga

SEQ ID NO: 468630 - DNA, 33 bp, Homo sapien
caaacagaagcttcaatggccctctcgccttga

SEQ ID NO: 468631 - DNA, 33 bp, Homo sapien
gaggcctggatagatcaaaacagcagaagaaag

SEQ ID NO: 468632 - DNA, 33 bp, Homo sapien
gaggcctggatagatcgaaacagcagaagaaag

SEQ ID NO: 468633 - DNA, 33 bp, Homo sapien
tacttggtgaaatagacgtgcagggagcttctt

SEQ ID NO: 468634 - DNA, 33 bp, Homo sapien
tacttggtgaaatagatgtgcagggagcttctt

SEQ ID NO: 468635 - DNA, 33 bp, Homo sapien
gtcatctgcatcaggaaagctgaacatacaacc

SEQ ID NO: 468636 - DNA, 33 bp, Homo sapien
gtcatctgcatcaggagagctgaacatacaacc

SEQ ID NO: 468637 - DNA, 33 bp, Homo sapien
ctggaaggttaaaggtaaagaatggagagaaca

SEQ ID NO: 468638 - DNA, 33 bp, Homo sapien
ctggaaggttaaaggtgaagaatggagagaaca

SEQ ID NO: 468639 - DNA, 33 bp, Homo sapien
cattttatctgtccatcaagtgtttgttaagaa

SEQ ID NO: 468640 - DNA, 33 bp, Homo sapien
cattttatctgtccatgaagtgtttgttaagaa

SEQ ID NO: 468641 - DNA, 33 bp, Homo sapien
agcatgcgtagtcgtaggtacccgtggaagaaa

SEQ ID NO: 468642 - DNA, 33 bp, Homo sapien
agcatgcgtagtcgtatgtacccgtggaagaaa

SEQ ID NO: 468643 - DNA, 33 bp, Homo sapien
aggtagccacacatcaagtggttttctgtcgag

SEQ ID NO: 468644 - DNA, 33 bp, Homo sapien
aggtagccacacatcacgtggttttctgtcgag

SEQ ID NO: 468645 - DNA, 33 bp, Homo sapien
cacagcactagactaaaggtggtgccactgaac

SEQ ID NO: 468646 - DNA, 33 bp, Homo sapien
cacagcactagactaacggtggtgccactgaac

SEQ ID NO: 468647 - DNA, 33 bp, Homo sapien
ttcccagatccctaacaaaatggcctggtagaa

SEQ ID NO: 468648 - DNA, 33 bp, Homo sapien
ttcccagatccctaaccaaatggcctggtagaa

SEQ ID NO: 468649 - DNA, 33 bp, Homo sapien
ttggaaggaagacctacgcacgttgtctactgg

SEQ ID NO: 468650 - DNA, 33 bp, Homo sapien
ttggaaggaagacctatgcacgttgtctactgg

SEQ ID NO: 468651 - DNA, 33 bp, Homo sapien
gcaacaccttaattacagccacacaaaaatgca

SEQ ID NO: 468652 - DNA, 33 bp, Homo sapien
gcaacaccttaattaccgccacacaaaaatgca

SEQ ID NO: 468653 - DNA, 33 bp, Homo sapien
ccatcttactattataaagcccctcaaatatta

SEQ ID NO: 468654 - DNA, 33 bp, Homo sapien
ccatcttactattatagagcccctcaaatatta

SEQ ID NO: 468655 - DNA, 33 bp, Homo sapien
attcttctatcaaaacactatacaaaccctaag

SEQ ID NO: 468656 - DNA, 33 bp, Homo sapien
attcttctatcaaaacgctatacaaaccctaag

SEQ ID NO: 468657 - DNA, 33 bp, Homo sapien
ttcatctgaattttaaagaatgtttgcacgaat

SEQ ID NO: 468658 - DNA, 33 bp, Homo sapien
ttcatctgaattttaaggaatgtttgcacgaat

SEQ ID NO: 468659 - DNA, 33 bp, Homo sapien
ttgtttggataaaatacggacttcagaaatcta

SEQ ID NO: 468660 - DNA, 33 bp, Homo sapien
ttgtttggataaaatatggacttcagaaatcta

SEQ ID NO: 468661 - DNA, 33 bp, Homo sapien
gtaaaataggaaaataccaaatctgagacagaa

SEQ ID NO: 468662 - DNA, 33 bp, Homo sapien
gtaaaataggaaaatatcaaatctgagacagaa

SEQ ID NO: 468663 - DNA, 33 bp, Homo sapien
gtgatcctaaggcttgcattaaagaagagaaca

SEQ ID NO: 468664 - DNA, 33 bp, Homo sapien
gtgatcctaaggcttgtattaaagaagagaaca

SEQ ID NO: 468665 - DNA, 33 bp, Homo sapien
taagaggaggcccaccaacagacaagatttaaa

SEQ ID NO: 468666 - DNA, 33 bp, Homo sapien
taagaggaggcccaccgacagacaagatttaaa

SEQ ID NO: 468667 - DNA, 33 bp, Homo sapien
aagagtccggactttcaccgtcacccagaatta

SEQ ID NO: 468668 - DNA, 33 bp, Homo sapien
aagagtccggactttccccgtcacccagaatta

SEQ ID NO: 468669 - DNA, 33 bp, Homo sapien
ataatgaggatattagacacttctgaaataaaa

SEQ ID NO: 468670 - DNA, 33 bp, Homo sapien
ataatgaggatattagccacttctgaaataaaa

SEQ ID NO: 468671 - DNA, 33 bp, Homo sapien
gattaaaagacaaatgcaatccgcagaatggtt

SEQ ID NO: 468672 - DNA, 33 bp, Homo sapien
gattaaaagacaaatgtaatccgcagaatggtt

SEQ ID NO: 468673 - DNA, 33 bp, Homo sapien
agttgtggtctccaaactaaggcttccagaaga

SEQ ID NO: 468674 - DNA, 33 bp, Homo sapien
agttgtggtctccaaattaaggcttccagaaga

SEQ ID NO: 468675 - DNA, 33 bp, Homo sapien
tttttgcagtaggagccaataaacaaagtagtg

SEQ ID NO: 468676 - DNA, 33 bp, Homo sapien
tttttgcagtaggagctaataaacaaagtagtg

SEQ ID NO: 468677 - DNA, 33 bp, Homo sapien
ggcaatactgtatccactcctttcactttcctc

SEQ ID NO: 468678 - DNA, 33 bp, Homo sapien
ggcaatactgtatccattcctttcactttcctc

SEQ ID NO: 468679 - DNA, 33 bp, Homo sapien
ctttacaaatgcagagaaattttatggacttgt

SEQ ID NO: 468680 - DNA, 33 bp, Homo sapien
ctttacaaatgcagaggaattttatggacttgt

SEQ ID NO: 468681 - DNA, 33 bp, Homo sapien
ttttacagatagtctcaagtgaacaaatacact

SEQ ID NO: 468682 - DNA, 33 bp, Homo sapien
ttttacagatagtctcgagtgaacaaatacact

SEQ ID NO: 468683 - DNA, 33 bp, Homo sapien
aaagatggaaggaatcaaggtccctgaatgatc

SEQ ID NO: 468684 - DNA, 33 bp, Homo sapien
aaagatggaaggaatcgaggtccctgaatgatc

SEQ ID NO: 468685 - DNA, 33 bp, Homo sapien
ccacatggaacaatgcagaagaatggtgaaata

SEQ ID NO: 468686 - DNA, 33 bp, Homo sapien
ccacatggaacaatgcggaagaatggtgaaata

SEQ ID NO: 468687 - DNA, 33 bp, Homo sapien
cctcagtcctccagaagtaattgctttgttctc

SEQ ID NO: 468688 - DNA, 33 bp, Homo sapien
cctcagtcctccagaattaattgctttgttctc

SEQ ID NO: 468689 - DNA, 33 bp, Homo sapien
ttgggggataaaatgaaagagtagtttgtaagg

SEQ ID NO: 468690 - DNA, 33 bp, Homo sapien
ttgggggataaaatgacagagtagtttgtaagg

SEQ ID NO: 468691 - DNA, 33 bp, Homo sapien
agccacgccctagagaagatgagcaccctgcag

SEQ ID NO: 468692 - DNA, 33 bp, Homo sapien
agccacgccctagagaggatgagcaccctgcag

SEQ ID NO: 468693 - DNA, 33 bp, Homo sapien
caaggcattttcagaactgacatttcaacaaac

SEQ ID NO: 468694 - DNA, 33 bp, Homo sapien
caaggcattttcagaattgacatttcaacaaac

SEQ ID NO: 468695 - DNA, 33 bp, Homo sapien
ctcacacagctgatgcaattattaaaggaaata

SEQ ID NO: 468696 - DNA, 33 bp, Homo sapien
ctcacacagctgatgcgattattaaaggaaata

SEQ ID NO: 468697 - DNA, 33 bp, Homo sapien
tgttacaagttattccagagagccctcctcctc

SEQ ID NO: 468698 - DNA, 33 bp, Homo sapien
tgttacaagttattccggagagccctcctcctc

SEQ ID NO: 468699 - DNA, 33 bp, Homo sapien
gtgccataaccccagacattgcagtagggattc

SEQ ID NO: 468700 - DNA, 33 bp, Homo sapien
gtgccataaccccagatattgcagtagggattc

SEQ ID NO: 468701 - DNA, 33 bp, Homo sapien
gaaaaaggactgaatactatcaataagtgacat

SEQ ID NO: 468702 - DNA, 33 bp, Homo sapien
gaaaaaggactgaatagtatcaataagtgacat

SEQ ID NO: 468703 - DNA, 33 bp, Homo sapien
gaaagattcatttatcacattagaagccaggac

SEQ ID NO: 468704 - DNA, 33 bp, Homo sapien
gaaagattcatttatcgcattagaagccaggac

SEQ ID NO: 468705 - DNA, 33 bp, Homo sapien
tgagggttaccagatacggtgcagggtgcttag

SEQ ID NO: 468706 - DNA, 33 bp, Homo sapien
tgagggttaccagatatggtgcagggtgcttag

SEQ ID NO: 468707 - DNA, 33 bp, Homo sapien
ttatgcaaaatgccatcaatttaactcttgatt

SEQ ID NO: 468708 - DNA, 33 bp, Homo sapien
ttatgcaaaatgccattaatttaactcttgatt

SEQ ID NO: 468709 - DNA, 33 bp, Homo sapien
ttcacaattcagtgaccagcttcatgggaaaac

SEQ ID NO: 468710 - DNA, 33 bp, Homo sapien
ttcacaattcagtgacgagcttcatgggaaaac

SEQ ID NO: 468711 - DNA, 33 bp, Homo sapien
gaaaataatcatctcaagttaatcataaattta

SEQ ID NO: 468712 - DNA, 33 bp, Homo sapien
gaaaataatcatctcaggttaatcataaattta

SEQ ID NO: 468713 - DNA, 33 bp, Homo sapien
agagcttcagacaaagcaggtgaaaataagtca

SEQ ID NO: 468714 - DNA, 33 bp, Homo sapien
agagcttcagacaaagtaggtgaaaataagtca

SEQ ID NO: 468715 - DNA, 33 bp, Homo sapien
acgactatatcacataagcctctgtattgacaa

SEQ ID NO: 468716 - DNA, 33 bp, Homo sapien
acgactatatcacatatgcctctgtattgacaa

SEQ ID NO: 468717 - DNA, 33 bp, Homo sapien
aagagaaagacttttgaaatacatcgttctttg

SEQ ID NO: 468718 - DNA, 33 bp, Homo sapien
aagagaaagacttttggaatacatcgttctttg

SEQ ID NO: 468719 - DNA, 33 bp, Homo sapien
tcaacctggtgcttaacggaggtttaacaaatg

SEQ ID NO: 468720 - DNA, 33 bp, Homo sapien
tcaacctggtgcttaatggaggtttaacaaatg

SEQ ID NO: 468721 - DNA, 33 bp, Homo sapien
tgaccaaatggataaacaaggtgatgcccacga

SEQ ID NO: 468722 - DNA, 33 bp, Homo sapien
tgaccaaatggataaataaggtgatgcccacga

SEQ ID NO: 468723 - DNA, 33 bp, Homo sapien
caccctgagatggaagaacccactggcctggtc

SEQ ID NO: 468724 - DNA, 33 bp, Homo sapien
caccctgagatggaaggacccactggcctggtc

SEQ ID NO: 468725 - DNA, 33 bp, Homo sapien
ttacacatttcttgtaacagccaaaagtaaaac

SEQ ID NO: 468726 - DNA, 33 bp, Homo sapien
ttacacatttcttgtagcagccaaaagtaaaac

SEQ ID NO: 468727 - DNA, 33 bp, Homo sapien
aacatggcacagattggaagttgataaagttgg

SEQ ID NO: 468728 - DNA, 33 bp, Homo sapien
aacatggcacagattgtaagttgataaagttgg

SEQ ID NO: 468729 - DNA, 33 bp, Homo sapien
ctgtggagatgatatacggaggactgatttgca

SEQ ID NO: 468730 - DNA, 33 bp, Homo sapien
ctgtggagatgatatatggaggactgatttgca

SEQ ID NO: 468731 - DNA, 33 bp, Homo sapien
ccccttgacaatgctgaaagggacgcttggcct

SEQ ID NO: 468732 - DNA, 33 bp, Homo sapien
ccccttgacaatgctggaagggacgcttggcct

SEQ ID NO: 468733 - DNA, 33 bp, Homo sapien
gttaattccagaatacgcatggtgctcaagctc

SEQ ID NO: 468734 - DNA, 33 bp, Homo sapien
gttaattccagaatactcatggtgctcaagctc

SEQ ID NO: 468735 - DNA, 33 bp, Homo sapien
gagagtgaccaggaacagagctggcagcatggc

SEQ ID NO: 468736 - DNA, 33 bp, Homo sapien
gagagtgaccaggaacggagctggcagcatggc

SEQ ID NO: 468737 - DNA, 33 bp, Homo sapien
tgtggttagctgttcacggaaagcagattcaga

SEQ ID NO: 468738 - DNA, 33 bp, Homo sapien
tgtggttagctgttcatggaaagcagattcaga

SEQ ID NO: 468739 - DNA, 33 bp, Homo sapien
aggaacagttagaaacactttcttcttggcgat

SEQ ID NO: 468740 - DNA, 33 bp, Homo sapien
aggaacagttagaaacgctttcttcttggcgat

SEQ ID NO: 468741 - DNA, 33 bp, Homo sapien
agtaaagacgtcacaacgatgttcacagtgaac

SEQ ID NO: 468742 - DNA, 33 bp, Homo sapien
agtaaagacgtcacaatgatgttcacagtgaac

SEQ ID NO: 468743 - DNA, 33 bp, Homo sapien
aacagctctttcaaagaacatcctatgccagta

SEQ ID NO: 468744 - DNA, 33 bp, Homo sapien
aacagctctttcaaaggacatcctatgccagta

SEQ ID NO: 468745 - DNA, 33 bp, Homo sapien
acacaagggaacaaaaacgacacagctgctgcc

SEQ ID NO: 468746 - DNA, 33 bp, Homo sapien
acacaagggaacaaaagcgacacagctgctgcc

SEQ ID NO: 468747 - DNA, 33 bp, Homo sapien
cattgagaatcatgtcagacacgcagaatacac

SEQ ID NO: 468748 - DNA, 33 bp, Homo sapien
cattgagaatcatgtcggacacgcagaatacac

SEQ ID NO: 468749 - DNA, 33 bp, Homo sapien
ttccagttttgatcacacttgtgaacactgata

SEQ ID NO: 468750 - DNA, 33 bp, Homo sapien
ttccagttttgatcacgcttgtgaacactgata

SEQ ID NO: 468751 - DNA, 33 bp, Homo sapien
gtataaatctcttttacgtcctgcatcaaaaga

SEQ ID NO: 468752 - DNA, 33 bp, Homo sapien
gtataaatctcttttatgtcctgcatcaaaaga

SEQ ID NO: 468753 - DNA, 33 bp, Homo sapien
atttaacaaattccaaaatcaatttattataaa

SEQ ID NO: 468754 - DNA, 33 bp, Homo sapien
atttaacaaattccaacatcaatttattataaa

SEQ ID NO: 468755 - DNA, 33 bp, Homo sapien
catctagaatatttctcagaaaagcatcctcct

SEQ ID NO: 468756 - DNA, 33 bp, Homo sapien
catctagaatatttctgagaaaagcatcctcct

SEQ ID NO: 468757 - DNA, 33 bp, Homo sapien
gaagcactcactttgcaacaagtaacccttaag

SEQ ID NO: 468758 - DNA, 33 bp, Homo sapien
gaagcactcactttgcgacaagtaacccttaag

SEQ ID NO: 468759 - DNA, 33 bp, Homo sapien
cttgacaccttgacaccgccttactttctgcat

SEQ ID NO: 468760 - DNA, 33 bp, Homo sapien
cttgacaccttgacactgccttactttctgcat

SEQ ID NO: 468761 - DNA, 33 bp, Homo sapien
cgtcacaaagaacacacggtggcagacagcact

SEQ ID NO: 468762 - DNA, 33 bp, Homo sapien
cgtcacaaagaacacatggtggcagacagcact

SEQ ID NO: 468763 - DNA, 33 bp, Homo sapien
ttaacaattttaaaacagtgcagttctgcatca

SEQ ID NO: 468764 - DNA, 33 bp, Homo sapien
ttaacaattttaaaacggtgcagttctgcatca

SEQ ID NO: 468765 - DNA, 33 bp, Homo sapien
ttactctatatggtaaaacttctataatcttca

SEQ ID NO: 468766 - DNA, 33 bp, Homo sapien
ttactctatatggtaagacttctataatcttca

SEQ ID NO: 468767 - DNA, 33 bp, Homo sapien
attcttttgtatttgacagttacaattgcagat

SEQ ID NO: 468768 - DNA, 33 bp, Homo sapien
attcttttgtatttgagagttacaattgcagat

SEQ ID NO: 468769 - DNA, 33 bp, Homo sapien
caagggcactagacagcagctttggagagcaat

SEQ ID NO: 468770 - DNA, 33 bp, Homo sapien
caagggcactagacagtagctttggagagcaat

SEQ ID NO: 468771 - DNA, 33 bp, Homo sapien
tttggaaagtggaatcagaaaagagtaatataa

SEQ ID NO: 468772 - DNA, 33 bp, Homo sapien
tttggaaagtggaatcggaaaagagtaatataa

SEQ ID NO: 468773 - DNA, 33 bp, Homo sapien
catttctaccattccaatatagctttgtctttt

SEQ ID NO: 468774 - DNA, 33 bp, Homo sapien
catttctaccattccagtatagctttgtctttt

SEQ ID NO: 468775 - DNA, 33 bp, Homo sapien
cctaaaggagatatgcaatcacatcgattttaa

SEQ ID NO: 468776 - DNA, 33 bp, Homo sapien
cctaaaggagatatgcgatcacatcgattttaa

SEQ ID NO: 468777 - DNA, 33 bp, Homo sapien
tttccttatttttgacaaattagcaccacagca

SEQ ID NO: 468778 - DNA, 33 bp, Homo sapien
tttccttatttttgacgaattagcaccacagca

SEQ ID NO: 468779 - DNA, 33 bp, Homo sapien
tcgaagtcaaaatggcaccctcagctgaaaata

SEQ ID NO: 468780 - DNA, 33 bp, Homo sapien
tcgaagtcaaaatggcgccctcagctgaaaata

SEQ ID NO: 468781 - DNA, 33 bp, Homo sapien
actgtcctccactcaacgtacaggcattttagg

SEQ ID NO: 468782 - DNA, 33 bp, Homo sapien
actgtcctccactcaatgtacaggcattttagg

SEQ ID NO: 468783 - DNA, 33 bp, Homo sapien
tttttccccatcatacacacagtaagaggacat

SEQ ID NO: 468784 - DNA, 33 bp, Homo sapien
tttttccccatcatacgcacagtaagaggacat

SEQ ID NO: 468785 - DNA, 33 bp, Homo sapien
cccatcaagagagcccaaccctcgtgatgtcat

SEQ ID NO: 468786 - DNA, 33 bp, Homo sapien
cccatcaagagagccccaccctcgtgatgtcat

SEQ ID NO: 468787 - DNA, 33 bp, Homo sapien
ccaactgtctctcccaaagaaggtgatattcct

SEQ ID NO: 468788 - DNA, 33 bp, Homo sapien
ccaactgtctctcccacagaaggtgatattcct

SEQ ID NO: 468789 - DNA, 33 bp, Homo sapien
tttgactgataaagcaagcccaggaagatggtt

SEQ ID NO: 468790 - DNA, 33 bp, Homo sapien
tttgactgataaagcacgcccaggaagatggtt

SEQ ID NO: 468791 - DNA, 33 bp, Homo sapien
cttcataagatggggacgttaagcatgcagcaa

SEQ ID NO: 468792 - DNA, 33 bp, Homo sapien
cttcataagatggggaggttaagcatgcagcaa

SEQ ID NO: 468793 - DNA, 33 bp, Homo sapien
ccacttgggctgtctgcagtttcgtttatcttt

SEQ ID NO: 468794 - DNA, 33 bp, Homo sapien
ccacttgggctgtctgtagtttcgtttatcttt

SEQ ID NO: 468795 - DNA, 33 bp, Homo sapien
tactgtttgaacagcaataatacaaagttgaag

SEQ ID NO: 468796 - DNA, 33 bp, Homo sapien
tactgtttgaacagcagtaatacaaagttgaag

SEQ ID NO: 468797 - DNA, 33 bp, Homo sapien
atccattgcatcttgacaacaacaaatccataa

SEQ ID NO: 468798 - DNA, 33 bp, Homo sapien
atccattgcatcttgagaacaacaaatccataa

SEQ ID NO: 468799 - DNA, 33 bp, Homo sapien
tgaatctaccgccacaatcaaggtaatagtcat

SEQ ID NO: 468800 - DNA, 33 bp, Homo sapien
tgaatctaccgccacagtcaaggtaatagtcat

SEQ ID NO: 468801 - DNA, 33 bp, Homo sapien
aacaatggctcaagaaatagaacagaaacttaa

SEQ ID NO: 468802 - DNA, 33 bp, Homo sapien
aacaatggctcaagaagtagaacagaaacttaa

SEQ ID NO: 468803 - DNA, 33 bp, Homo sapien
attgcaaaatatttacaacatagcatttttaaa

SEQ ID NO: 468804 - DNA, 33 bp, Homo sapien
attgcaaaatatttacgacatagcatttttaaa

SEQ ID NO: 468805 - DNA, 33 bp, Homo sapien
ttaagtggacaaactacgacaaatctgaagcaa

SEQ ID NO: 468806 - DNA, 33 bp, Homo sapien
ttaagtggacaaactatgacaaatctgaagcaa

SEQ ID NO: 468807 - DNA, 33 bp, Homo sapien
ttgatcactcctcagaaaatatagtgattcaga

SEQ ID NO: 468808 - DNA, 33 bp, Homo sapien
ttgatcactcctcagagaatatagtgattcaga

SEQ ID NO: 468809 - DNA, 33 bp, Homo sapien
tggaataaaagaggtaaaaatcactcaaaaaat

SEQ ID NO: 468810 - DNA, 33 bp, Homo sapien
tggaataaaagaggtagaaatcactcaaaaaat

SEQ ID NO: 468811 - DNA, 33 bp, Homo sapien
tcatgagtatgttttccatatgaaggaacatgt

SEQ ID NO: 468812 - DNA, 33 bp, Homo sapien
tcatgagtatgttttctatatgaaggaacatgt

SEQ ID NO: 468813 - DNA, 33 bp, Homo sapien
gtcttgaaaatgcaacagatataattttgtttt

SEQ ID NO: 468814 - DNA, 33 bp, Homo sapien
gtcttgaaaatgcaactgatataattttgtttt

SEQ ID NO: 468815 - DNA, 33 bp, Homo sapien
tggacagagggaggacaatgtggccaggtgctg

SEQ ID NO: 468816 - DNA, 33 bp, Homo sapien
tggacagagggaggacgatgtggccaggtgctg

SEQ ID NO: 468817 - DNA, 33 bp, Homo sapien
cccatctaaaattcaacttcgagtatttattta

SEQ ID NO: 468818 - DNA, 33 bp, Homo sapien
cccatctaaaattcaatttcgagtatttattta

SEQ ID NO: 468819 - DNA, 33 bp, Homo sapien
gcatcctgggaaggaacgcactttggctggaac

SEQ ID NO: 468820 - DNA, 33 bp, Homo sapien
gcatcctgggaaggaatgcactttggctggaac

SEQ ID NO: 468821 - DNA, 33 bp, Homo sapien
cacaccttggggaatacctttatagcagtgtga

SEQ ID NO: 468822 - DNA, 33 bp, Homo sapien
cacaccttggggaatatctttatagcagtgtga

SEQ ID NO: 468823 - DNA, 33 bp, Homo sapien
gtggacactccagcctaacaccttgcaagtatg

SEQ ID NO: 468824 - DNA, 33 bp, Homo sapien
gtggacactccagccttacaccttgcaagtatg

SEQ ID NO: 468825 - DNA, 33 bp, Homo sapien
ttccactaacaacgcaaaactcaattagcataa

SEQ ID NO: 468826 - DNA, 33 bp, Homo sapien
ttccactaacaacgcagaactcaattagcataa

SEQ ID NO: 468827 - DNA, 33 bp, Homo sapien
caacaaggtgagtataaacagcaaccaggacga

SEQ ID NO: 468828 - DNA, 33 bp, Homo sapien
caacaaggtgagtatagacagcaaccaggacga

SEQ ID NO: 468829 - DNA, 33 bp, Homo sapien
aagatggccaaaatgcagatggggtgaagacca

SEQ ID NO: 468830 - DNA, 33 bp, Homo sapien
aagatggccaaaatgcggatggggtgaagacca

SEQ ID NO: 468831 - DNA, 33 bp, Homo sapien
tggttatcataccgtacggatgtcttcttctgt

SEQ ID NO: 468832 - DNA, 33 bp, Homo sapien
tggttatcataccgtatggatgtcttcttctgt

SEQ ID NO: 468833 - DNA, 33 bp, Homo sapien
gaggaccctctgaatcaccctcgaggacaggca

SEQ ID NO: 468834 - DNA, 33 bp, Homo sapien
gaggaccctctgaatcgccctcgaggacaggca

SEQ ID NO: 468835 - DNA, 33 bp, Homo sapien
aaaacttatctttgagccacttgttttaacagt

SEQ ID NO: 468836 - DNA, 33 bp, Homo sapien
aaaacttatctttgaggcacttgttttaacagt

SEQ ID NO: 468837 - DNA, 33 bp, Homo sapien
agttggggatgcacacaagaatttgcatcttca

SEQ ID NO: 468838 - DNA, 33 bp, Homo sapien
agttggggatgcacacgagaatttgcatcttca

SEQ ID NO: 468839 - DNA, 33 bp, Homo sapien
attcccgtcggacacactggctgctaagatctt

SEQ ID NO: 468840 - DNA, 33 bp, Homo sapien
attcccgtcggacacattggctgctaagatctt

SEQ ID NO: 468841 - DNA, 33 bp, Homo sapien
ccataacctctctatcaattttcatggaagtac

SEQ ID NO: 468842 - DNA, 33 bp, Homo sapien
ccataacctctctatcgattttcatggaagtac

SEQ ID NO: 468843 - DNA, 33 bp, Homo sapien
accttcttgtttagacccctcttgttgacctgt

SEQ ID NO: 468844 - DNA, 33 bp, Homo sapien
accttcttgtttagactcctcttgttgacctgt

SEQ ID NO: 468845 - DNA, 33 bp, Homo sapien
ctttgaattgaaccaaccagaggaagaaatact

SEQ ID NO: 468846 - DNA, 33 bp, Homo sapien
ctttgaattgaaccaagcagaggaagaaatact

SEQ ID NO: 468847 - DNA, 33 bp, Homo sapien
caatgttactggctccaagcacaaatagtagag

SEQ ID NO: 468848 - DNA, 33 bp, Homo sapien
caatgttactggctccgagcacaaatagtagag

SEQ ID NO: 468849 - DNA, 33 bp, Homo sapien
aagatatcaccttccagcttctgtaggccattg

SEQ ID NO: 468850 - DNA, 33 bp, Homo sapien
aagatatcaccttccatcttctgtaggccattg

SEQ ID NO: 468851 - DNA, 33 bp, Homo sapien
tatatcagcaaattagaccacagctcatcaata

SEQ ID NO: 468852 - DNA, 33 bp, Homo sapien
tatatcagcaaattaggccacagctcatcaata

SEQ ID NO: 468853 - DNA, 33 bp, Homo sapien
aaggaggccacttttcaacatcgtcttctgctc

SEQ ID NO: 468854 - DNA, 33 bp, Homo sapien
aaggaggccacttttccacatcgtcttctgctc

SEQ ID NO: 468855 - DNA, 33 bp, Homo sapien
ttcttcattactaacccggcattcagcatggta

SEQ ID NO: 468856 - DNA, 33 bp, Homo sapien
ttcttcattactaacctggcattcagcatggta

SEQ ID NO: 468857 - DNA, 33 bp, Homo sapien
tttcttctgaaatcacagagctccagtaactgc

SEQ ID NO: 468858 - DNA, 33 bp, Homo sapien
tttcttctgaaatcacggagctccagtaactgc

SEQ ID NO: 468859 - DNA, 33 bp, Homo sapien
tgacacattgagggtaagcagtaaatcaatcta

SEQ ID NO: 468860 - DNA, 33 bp, Homo sapien
tgacacattgagggtaggcagtaaatcaatcta

SEQ ID NO: 468861 - DNA, 33 bp, Homo sapien
tttaaatttaaattaacggtcttgtgcagcaag

SEQ ID NO: 468862 - DNA, 33 bp, Homo sapien
tttaaatttaaattaatggtcttgtgcagcaag

SEQ ID NO: 468863 - DNA, 33 bp, Homo sapien
ggcatgacaaatgaaactgatgaaataaagagc

SEQ ID NO: 468864 - DNA, 33 bp, Homo sapien
ggcatgacaaatgaaattgatgaaataaagagc

SEQ ID NO: 468865 - DNA, 33 bp, Homo sapien
aagacttttaaaatgcccaatcatatatgtttt

SEQ ID NO: 468866 - DNA, 33 bp, Homo sapien
aagacttttaaaatgctcaatcatatatgtttt

SEQ ID NO: 468867 - DNA, 33 bp, Homo sapien
cattaaaatcttcccacgacgaaagagtcatct

SEQ ID NO: 468868 - DNA, 33 bp, Homo sapien
cattaaaatcttcccatgacgaaagagtcatct

SEQ ID NO: 468869 - DNA, 33 bp, Homo sapien
tgtgtatctaactgacccagcaccatgcattaa

SEQ ID NO: 468870 - DNA, 33 bp, Homo sapien
tgtgtatctaactgactcagcaccatgcattaa

SEQ ID NO: 468871 - DNA, 33 bp, Homo sapien
cataaaaacaaaatccagacagttcagatctac

SEQ ID NO: 468872 - DNA, 33 bp, Homo sapien
cataaaaacaaaatccggacagttcagatctac

SEQ ID NO: 468873 - DNA, 33 bp, Homo sapien
gtaggcagaccttataaaagacacaaaaaattg

SEQ ID NO: 468874 - DNA, 33 bp, Homo sapien
gtaggcagaccttatacaagacacaaaaaattg

SEQ ID NO: 468875 - DNA, 33 bp, Homo sapien
acttgctctataccatcaggcggccgctctgga

SEQ ID NO: 468876 - DNA, 33 bp, Homo sapien
acttgctctataccattaggcggccgctctgga

SEQ ID NO: 468877 - DNA, 33 bp, Homo sapien
cctttttacctgaaaaatcctttgttgcttaga

SEQ ID NO: 468878 - DNA, 33 bp, Homo sapien
cctttttacctgaaaactcctttgttgcttaga

SEQ ID NO: 468879 - DNA, 33 bp, Homo sapien
gcgcctggccaaaaaaaatacataagtgtctta

SEQ ID NO: 468880 - DNA, 33 bp, Homo sapien
gcgcctggccaaaaaagatacataagtgtctta

SEQ ID NO: 468881 - DNA, 33 bp, Homo sapien
gttgagcctggtgcaaatctttctctaattttc

SEQ ID NO: 468882 - DNA, 33 bp, Homo sapien
gttgagcctggtgcaactctttctctaattttc

SEQ ID NO: 468883 - DNA, 33 bp, Homo sapien
gtttccctggtgcctaacaagttacctggctcg

SEQ ID NO: 468884 - DNA, 33 bp, Homo sapien
gtttccctggtgcctagcaagttacctggctcg

SEQ ID NO: 468885 - DNA, 33 bp, Homo sapien
atcctgtggaaccaatcataagtaagaaagaaa

SEQ ID NO: 468886 - DNA, 33 bp, Homo sapien
atcctgtggaaccaatgataagtaagaaagaaa

SEQ ID NO: 468887 - DNA, 33 bp, Homo sapien
actccagaagagacacaaaacctactgtgtttt

SEQ ID NO: 468888 - DNA, 33 bp, Homo sapien
actccagaagagacacgaaacctactgtgtttt

SEQ ID NO: 468889 - DNA, 33 bp, Homo sapien
tctgttaaagcagataggtagcatctggatcca

SEQ ID NO: 468890 - DNA, 33 bp, Homo sapien
tctgttaaagcagatatgtagcatctggatcca

SEQ ID NO: 468891 - DNA, 33 bp, Homo sapien
ctgagaaccaattctacgtattcctttccaaat

SEQ ID NO: 468892 - DNA, 33 bp, Homo sapien
ctgagaaccaattctatgtattcctttccaaat

SEQ ID NO: 468893 - DNA, 33 bp, Homo sapien
gtaaaagtatgcattcaaactaaaagaggctac

SEQ ID NO: 468894 - DNA, 33 bp, Homo sapien
gtaaaagtatgcattcgaactaaaagaggctac

SEQ ID NO: 468895 - DNA, 33 bp, Homo sapien
taacagacctgtgaaggacattttcttatctca

SEQ ID NO: 468896 - DNA, 33 bp, Homo sapien
taacagacctgtgaagtacattttcttatctca

SEQ ID NO: 468897 - DNA, 33 bp, Homo sapien
ggttgaaaggtatctacggtcaactccaacttg

SEQ ID NO: 468898 - DNA, 33 bp, Homo sapien
ggttgaaaggtatctatggtcaactccaacttg

SEQ ID NO: 468899 - DNA, 33 bp, Homo sapien
ggtcaaaataaatggacgctagtcttggctgtc

SEQ ID NO: 468900 - DNA, 33 bp, Homo sapien
ggtcaaaataaatggatgctagtcttggctgtc

SEQ ID NO: 468901 - DNA, 33 bp, Homo sapien
atgccagaaggaaaaagttaacaggcaggtgtt

SEQ ID NO: 468902 - DNA, 33 bp, Homo sapien
atgccagaaggaaaaatttaacaggcaggtgtt

SEQ ID NO: 468903 - DNA, 33 bp, Homo sapien
cccagagtggctctgaccaaggcttcctggaag

SEQ ID NO: 468904 - DNA, 33 bp, Homo sapien
cccagagtggctctgagcaaggcttcctggaag

SEQ ID NO: 468905 - DNA, 33 bp, Homo sapien
aaggttgggctttcgagtcctgctttctcaaag

SEQ ID NO: 468906 - DNA, 33 bp, Homo sapien
aaggttgggctttcgattcctgctttctcaaag

SEQ ID NO: 468907 - DNA, 33 bp, Homo sapien
ttaacgttctgcccaacctgctgttccttgtga

SEQ ID NO: 468908 - DNA, 33 bp, Homo sapien
ttaacgttctgcccaatctgctgttccttgtga

SEQ ID NO: 468909 - DNA, 33 bp, Homo sapien
gggatagaaacttcctcaatgtgaagaagtcca

SEQ ID NO: 468910 - DNA, 33 bp, Homo sapien
gggatagaaacttccttaatgtgaagaagtcca

SEQ ID NO: 468911 - DNA, 33 bp, Homo sapien
ggtttcctgatcccaaggctaacttccaactct

SEQ ID NO: 468912 - DNA, 33 bp, Homo sapien
ggtttcctgatcccaatgctaacttccaactct

SEQ ID NO: 468913 - DNA, 33 bp, Homo sapien
aggatcaacaaatccaataagaatgcttcttta

SEQ ID NO: 468914 - DNA, 33 bp, Homo sapien
aggatcaacaaatccagtaagaatgcttcttta

SEQ ID NO: 468915 - DNA, 33 bp, Homo sapien
ctactttttagccacaccaaatacaaaaactca

SEQ ID NO: 468916 - DNA, 33 bp, Homo sapien
ctactttttagccacatcaaatacaaaaactca

SEQ ID NO: 468917 - DNA, 33 bp, Homo sapien
aaatagccaaaccatgacataagggaagagcta

SEQ ID NO: 468918 - DNA, 33 bp, Homo sapien
aaatagccaaaccatggcataagggaagagcta

SEQ ID NO: 468919 - DNA, 33 bp, Homo sapien
tgatttataaactagaggccaatccatggctga

SEQ ID NO: 468920 - DNA, 33 bp, Homo sapien
tgatttataaactagatgccaatccatggctga

SEQ ID NO: 468921 - DNA, 33 bp, Homo sapien
gctacctcccatcaccaaaatttcagatgtcag

SEQ ID NO: 468922 - DNA, 33 bp, Homo sapien
gctacctcccatcaccgaaatttcagatgtcag

SEQ ID NO: 468923 - DNA, 33 bp, Homo sapien
tgcttacttctatgtgcatttctagttaagttc

SEQ ID NO: 468924 - DNA, 33 bp, Homo sapien
tgcttacttctatgtgtatttctagttaagttc

SEQ ID NO: 468925 - DNA, 33 bp, Homo sapien
gcacgtgcaaagctgcagagaaaaatttgggtg

SEQ ID NO: 468926 - DNA, 33 bp, Homo sapien
gcacgtgcaaagctgcggagaaaaatttgggtg

SEQ ID NO: 468927 - DNA, 33 bp, Homo sapien
cccagtttggacaacaatcgtgtactcatgtga

SEQ ID NO: 468928 - DNA, 33 bp, Homo sapien
cccagtttggacaacagtcgtgtactcatgtga

SEQ ID NO: 468929 - DNA, 33 bp, Homo sapien
gagttctttccactcaacttcatcacccttccg

SEQ ID NO: 468930 - DNA, 33 bp, Homo sapien
gagttctttccactcatcttcatcacccttccg

SEQ ID NO: 468931 - DNA, 33 bp, Homo sapien
atatttcttcaactccagcagtacttttattct

SEQ ID NO: 468932 - DNA, 33 bp, Homo sapien
atatttcttcaactccggcagtacttttattct

SEQ ID NO: 468933 - DNA, 33 bp, Homo sapien
ttcattgtcaccagcaaggccagtggcagaagc

SEQ ID NO: 468934 - DNA, 33 bp, Homo sapien
ttcattgtcaccagcagggccagtggcagaagc

SEQ ID NO: 468935 - DNA, 33 bp, Homo sapien
cttcctacaaaggaaacgcacttcatatggctt

SEQ ID NO: 468936 - DNA, 33 bp, Homo sapien
cttcctacaaaggaaatgcacttcatatggctt

SEQ ID NO: 468937 - DNA, 33 bp, Homo sapien
agcacatgttctaatacatgaataaatgatcaa

SEQ ID NO: 468938 - DNA, 33 bp, Homo sapien
agcacatgttctaatagatgaataaatgatcaa

SEQ ID NO: 468939 - DNA, 33 bp, Homo sapien
tcaactgggaagaggacaaaagtgtcttggcac

SEQ ID NO: 468940 - DNA, 33 bp, Homo sapien
tcaactgggaagaggataaaagtgtcttggcac

SEQ ID NO: 468941 - DNA, 33 bp, Homo sapien
tttatagggtaaggcacaataatgcagagatgg

SEQ ID NO: 468942 - DNA, 33 bp, Homo sapien
tttatagggtaaggcataataatgcagagatgg

SEQ ID NO: 468943 - DNA, 33 bp, Homo sapien
aactcatcacactttaacaattcactgctctct

SEQ ID NO: 468944 - DNA, 33 bp, Homo sapien
aactcatcacactttatcaattcactgctctct

SEQ ID NO: 468945 - DNA, 33 bp, Homo sapien
tagcttttggcgcaataagcaaaccacacacta

SEQ ID NO: 468946 - DNA, 33 bp, Homo sapien
tagcttttggcgcaatgagcaaaccacacacta

SEQ ID NO: 468947 - DNA, 33 bp, Homo sapien
aaactccttggactcacggtgactattccgctc

SEQ ID NO: 468948 - DNA, 33 bp, Homo sapien
aaactccttggactcatggtgactattccgctc

SEQ ID NO: 468949 - DNA, 33 bp, Homo sapien
ctcagaatcacagagacaattagcacattgatg

SEQ ID NO: 468950 - DNA, 33 bp, Homo sapien
ctcagaatcacagagataattagcacattgatg

SEQ ID NO: 468951 - DNA, 33 bp, Homo sapien
tgggatgaagaaatctaagatgacaaaagtgta

SEQ ID NO: 468952 - DNA, 33 bp, Homo sapien
tgggatgaagaaatctgagatgacaaaagtgta

SEQ ID NO: 468953 - DNA, 33 bp, Homo sapien
ccatcttcataccaaaccaacttttacaaaggc

SEQ ID NO: 468954 - DNA, 33 bp, Homo sapien
ccatcttcataccaaatcaacttttacaaaggc

SEQ ID NO: 468955 - DNA, 33 bp, Homo sapien
gcagggactatatctgaagttgctcacatatca

SEQ ID NO: 468956 - DNA, 33 bp, Homo sapien
gcagggactatatctgcagttgctcacatatca

SEQ ID NO: 468957 - DNA, 33 bp, Homo sapien
gttcactttgaatgaaaaccagagatcctcaat

SEQ ID NO: 468958 - DNA, 33 bp, Homo sapien
gttcactttgaatgaagaccagagatcctcaat

SEQ ID NO: 468959 - DNA, 33 bp, Homo sapien
atcctgctattaggggcaaagtagaaattcaga

SEQ ID NO: 468960 - DNA, 33 bp, Homo sapien
atcctgctattaggggtaaagtagaaattcaga

SEQ ID NO: 468961 - DNA, 33 bp, Homo sapien
ggctggggcaatcagacgttaagtaacaattac

SEQ ID NO: 468962 - DNA, 33 bp, Homo sapien
ggctggggcaatcagatgttaagtaacaattac

SEQ ID NO: 468963 - DNA, 33 bp, Homo sapien
tatcacctggagaaaccggcctcttttttgtct

SEQ ID NO: 468964 - DNA, 33 bp, Homo sapien
tatcacctggagaaactggcctcttttttgtct

SEQ ID NO: 468965 - DNA, 33 bp, Homo sapien
gagagtggtttagtaccatggaattacaattgc

SEQ ID NO: 468966 - DNA, 33 bp, Homo sapien
gagagtggtttagtacgatggaattacaattgc

SEQ ID NO: 468967 - DNA, 33 bp, Homo sapien
ctgttcatcattcacactaaacagagcataact

SEQ ID NO: 468968 - DNA, 33 bp, Homo sapien
ctgttcatcattcacattaaacagagcataact

SEQ ID NO: 468969 - DNA, 33 bp, Homo sapien
gcaggactcttgtgcacgggcctctcatttctg

SEQ ID NO: 468970 - DNA, 33 bp, Homo sapien
gcaggactcttgtgcatgggcctctcatttctg

SEQ ID NO: 468971 - DNA, 33 bp, Homo sapien
atcatttcagagttaaaccgcttggccccagtc

SEQ ID NO: 468972 - DNA, 33 bp, Homo sapien
atcatttcagagttaagccgcttggccccagtc

SEQ ID NO: 468973 - DNA, 33 bp, Homo sapien
ggcagttactgagaagactcacatttccttcct

SEQ ID NO: 468974 - DNA, 33 bp, Homo sapien
ggcagttactgagaagtctcacatttccttcct

SEQ ID NO: 468975 - DNA, 33 bp, Homo sapien
tggtccagctgtaaaacgaatctcacaatgtga

SEQ ID NO: 468976 - DNA, 33 bp, Homo sapien
tggtccagctgtaaaatgaatctcacaatgtga

SEQ ID NO: 468977 - DNA, 33 bp, Homo sapien
tctcatggataagtgcccatctgattgaagaga

SEQ ID NO: 468978 - DNA, 33 bp, Homo sapien
tctcatggataagtgctcatctgattgaagaga

SEQ ID NO: 468979 - DNA, 33 bp, Homo sapien
cttccacgcaaaattaacatcgctggcttctat

SEQ ID NO: 468980 - DNA, 33 bp, Homo sapien
cttccacgcaaaattagcatcgctggcttctat

SEQ ID NO: 468981 - DNA, 33 bp, Homo sapien
agggggagctgttcccaagaagagtgggctgtc

SEQ ID NO: 468982 - DNA, 33 bp, Homo sapien
agggggagctgttcccgagaagagtgggctgtc

SEQ ID NO: 468983 - DNA, 33 bp, Homo sapien
aaaaaaaatgagcctaaacatctggatgtggat

SEQ ID NO: 468984 - DNA, 33 bp, Homo sapien
aaaaaaaatgagcctacacatctggatgtggat

SEQ ID NO: 468985 - DNA, 33 bp, Homo sapien
atgtctatgtacttaaaaaaagcatttatagta

SEQ ID NO: 468986 - DNA, 33 bp, Homo sapien
atgtctatgtacttaagaaaagcatttatagta

SEQ ID NO: 468987 - DNA, 33 bp, Homo sapien
tacatcgcaattgtgacacttgctacaaaggag

SEQ ID NO: 468988 - DNA, 33 bp, Homo sapien
tacatcgcaattgtgatacttgctacaaaggag

SEQ ID NO: 468989 - DNA, 33 bp, Homo sapien
ggcattgcttgtggaccactgagctgccgcacg

SEQ ID NO: 468990 - DNA, 33 bp, Homo sapien
ggcattgcttgtggactactgagctgccgcacg

SEQ ID NO: 468991 - DNA, 33 bp, Homo sapien
atgaattattatttggaaaaactgaaaggctaa

SEQ ID NO: 468992 - DNA, 33 bp, Homo sapien
atgaattattatttgggaaaactgaaaggctaa

SEQ ID NO: 468993 - DNA, 33 bp, Homo sapien
aaaaaaaaattcaacacaacgattctatacaac

SEQ ID NO: 468994 - DNA, 33 bp, Homo sapien
aaaaaaaaattcaacagaacgattctatacaac

SEQ ID NO: 468995 - DNA, 33 bp, Homo sapien
aattgaatagaggaaactgcttgtgttcaagct

SEQ ID NO: 468996 - DNA, 33 bp, Homo sapien
aattgaatagaggaaattgcttgtgttcaagct

SEQ ID NO: 468997 - DNA, 33 bp, Homo sapien
tgtgcctcagatacaaaatgaccctgggccggg

SEQ ID NO: 468998 - DNA, 33 bp, Homo sapien
tgtgcctcagatacaagatgaccctgggccggg

SEQ ID NO: 468999 - DNA, 33 bp, Homo sapien
accaagatgatgcatcactcattcgcttaatag

SEQ ID NO: 469000 - DNA, 33 bp, Homo sapien
accaagatgatgcatcgctcattcgcttaatag

SEQ ID NO: 469001 - DNA, 33 bp, Homo sapien
aattccattgagtaaaatgtactcagtatctta

SEQ ID NO: 469002 - DNA, 33 bp, Homo sapien
aattccattgagtaaagtgtactcagtatctta

SEQ ID NO: 469003 - DNA, 33 bp, Homo sapien
gccggccatcctttgcactcccgtcttgcggct

SEQ ID NO: 469004 - DNA, 33 bp, Homo sapien
gccggccatcctttgcgctcccgtcttgcggct

SEQ ID NO: 469005 - DNA, 33 bp, Homo sapien
ggtcctcttgcattgaactttgtttgctctact

SEQ ID NO: 469006 - DNA, 33 bp, Homo sapien
ggtcctcttgcattgagctttgtttgctctact

SEQ ID NO: 469007 - DNA, 33 bp, Homo sapien
aaagtccattctctaacaccatcaaatagaaca

SEQ ID NO: 469008 - DNA, 33 bp, Homo sapien
aaagtccattctctaataccatcaaatagaaca

SEQ ID NO: 469009 - DNA, 33 bp, Homo sapien
gaatttttcagcagccagagaaacacagtgagt

SEQ ID NO: 469010 - DNA, 33 bp, Homo sapien
gaatttttcagcagccggagaaacacagtgagt

SEQ ID NO: 469011 - DNA, 33 bp, Homo sapien
aattgttgatttccaaatgggttattgtctttc

SEQ ID NO: 469012 - DNA, 33 bp, Homo sapien
aattgttgatttccaagtgggttattgtctttc

SEQ ID NO: 469013 - DNA, 33 bp, Homo sapien
tggcccggtttcccaacagcttatgagatggac

SEQ ID NO: 469014 - DNA, 33 bp, Homo sapien
tggcccggtttcccaagagcttatgagatggac

SEQ ID NO: 469015 - DNA, 33 bp, Homo sapien
gttcacttcctttcatcacaagtccctattttt

SEQ ID NO: 469016 - DNA, 33 bp, Homo sapien
gttcacttcctttcattacaagtccctattttt

SEQ ID NO: 469017 - DNA, 33 bp, Homo sapien
ctagcacaaaaaaagagtcctttgaaaatgtta

SEQ ID NO: 469018 - DNA, 33 bp, Homo sapien
ctagcacaaaaaaagattcctttgaaaatgtta

SEQ ID NO: 469019 - DNA, 33 bp, Homo sapien
caagacaagattccgaccctggggattttatgt

SEQ ID NO: 469020 - DNA, 33 bp, Homo sapien
caagacaagattccgatcctggggattttatgt

SEQ ID NO: 469021 - DNA, 33 bp, Homo sapien
tgcaattagaatgcagaaaatggcccacgcctt

SEQ ID NO: 469022 - DNA, 33 bp, Homo sapien
tgcaattagaatgcagcaaatggcccacgcctt

SEQ ID NO: 469023 - DNA, 33 bp, Homo sapien
agttacttatttcttaccaatcctccctagctc

SEQ ID NO: 469024 - DNA, 33 bp, Homo sapien
agttacttatttcttatcaatcctccctagctc

SEQ ID NO: 469025 - DNA, 33 bp, Homo sapien
ggagaaaagggtcgtacagtacagacatatcca

SEQ ID NO: 469026 - DNA, 33 bp, Homo sapien
ggagaaaagggtcgtatagtacagacatatcca

SEQ ID NO: 469027 - DNA, 33 bp, Homo sapien
cccagccccacctgcaacttttgcatagattga

SEQ ID NO: 469028 - DNA, 33 bp, Homo sapien
cccagccccacctgcagcttttgcatagattga

SEQ ID NO: 469029 - DNA, 33 bp, Homo sapien
ggctttgagaatttacaatgaaaaataggcttt

SEQ ID NO: 469030 - DNA, 33 bp, Homo sapien
ggctttgagaatttacgatgaaaaataggcttt

SEQ ID NO: 469031 - DNA, 33 bp, Homo sapien
tctggggaaagcatcacagatttggtcgtgaac

SEQ ID NO: 469032 - DNA, 33 bp, Homo sapien
tctggggaaagcatcagagatttggtcgtgaac

SEQ ID NO: 469033 - DNA, 33 bp, Homo sapien
catcctctgagcaacaatcaattctgccctggc

SEQ ID NO: 469034 - DNA, 33 bp, Homo sapien
catcctctgagcaacagtcaattctgccctggc

SEQ ID NO: 469035 - DNA, 33 bp, Homo sapien
tgggaggaggtatgaaatgcaatctctctttac

SEQ ID NO: 469036 - DNA, 33 bp, Homo sapien
tgggaggaggtatgaagtgcaatctctctttac

SEQ ID NO: 469037 - DNA, 33 bp, Homo sapien
gtgagctaggcttgaaaaaagattccatttatt

SEQ ID NO: 469038 - DNA, 33 bp, Homo sapien
gtgagctaggcttgaacaaagattccatttatt

SEQ ID NO: 469039 - DNA, 33 bp, Homo sapien
gcacactggggaaagacgaatgccttagctttt

SEQ ID NO: 469040 - DNA, 33 bp, Homo sapien
gcacactggggaaagatgaatgccttagctttt

SEQ ID NO: 469041 - DNA, 33 bp, Homo sapien
ttaccaggaggtacaaaagtcaggatcttttgc

SEQ ID NO: 469042 - DNA, 33 bp, Homo sapien
ttaccaggaggtacaatagtcaggatcttttgc

SEQ ID NO: 469043 - DNA, 33 bp, Homo sapien
gaggccatgatcacaacgagaggcaagatcagt

SEQ ID NO: 469044 - DNA, 33 bp, Homo sapien
gaggccatgatcacaatgagaggcaagatcagt

SEQ ID NO: 469045 - DNA, 33 bp, Homo sapien
ctctttcccattagagccctgtgtctgaaggac

SEQ ID NO: 469046 - DNA, 33 bp, Homo sapien
ctctttcccattagagtcctgtgtctgaaggac

SEQ ID NO: 469047 - DNA, 33 bp, Homo sapien
cagagggtgttctcggaagattctcctgtaaag

SEQ ID NO: 469048 - DNA, 33 bp, Homo sapien
cagagggtgttctcgggagattctcctgtaaag

SEQ ID NO: 469049 - DNA, 33 bp, Homo sapien
tcctcggtcagtttcacaacctgggggatatga

SEQ ID NO: 469050 - DNA, 33 bp, Homo sapien
tcctcggtcagtttcagaacctgggggatatga

SEQ ID NO: 469051 - DNA, 33 bp, Homo sapien
gggatatgacctgaaaagaggccattccctgca

SEQ ID NO: 469052 - DNA, 33 bp, Homo sapien
gggatatgacctgaaacgaggccattccctgca

SEQ ID NO: 469053 - DNA, 33 bp, Homo sapien
attaaataataattgtaaaaggtatcgctggaa

SEQ ID NO: 469054 - DNA, 33 bp, Homo sapien
attaaataataattgtcaaaggtatcgctggaa

SEQ ID NO: 469055 - DNA, 33 bp, Homo sapien
gagtcctcattttgccactcactagttgcttta

SEQ ID NO: 469056 - DNA, 33 bp, Homo sapien
gagtcctcattttgccgctcactagttgcttta

SEQ ID NO: 469057 - DNA, 33 bp, Homo sapien
tccttaataaaatcaaaagtctggatcaagtgt

SEQ ID NO: 469058 - DNA, 33 bp, Homo sapien
tccttaataaaatcaagagtctggatcaagtgt

SEQ ID NO: 469059 - DNA, 33 bp, Homo sapien
ctggctgttggggtaaagatgtgtcactgacag

SEQ ID NO: 469060 - DNA, 33 bp, Homo sapien
ctggctgttggggtaatgatgtgtcactgacag

SEQ ID NO: 469061 - DNA, 33 bp, Homo sapien
ataaagagaaagaccgcatgttgggccacagta

SEQ ID NO: 469062 - DNA, 33 bp, Homo sapien
ataaagagaaagaccggatgttgggccacagta

SEQ ID NO: 469063 - DNA, 33 bp, Homo sapien
cagcttccaactcaagacattcaccatccaggg

SEQ ID NO: 469064 - DNA, 33 bp, Homo sapien
cagcttccaactcaagtcattcaccatccaggg

SEQ ID NO: 469065 - DNA, 33 bp, Homo sapien
atttactctgctcaacaatcctatgacacaaac

SEQ ID NO: 469066 - DNA, 33 bp, Homo sapien
atttactctgctcaactatcctatgacacaaac

SEQ ID NO: 469067 - DNA, 33 bp, Homo sapien
gtggcttgggaagcaacgaccacgtgtttacac

SEQ ID NO: 469068 - DNA, 33 bp, Homo sapien
gtggcttgggaagcaatgaccacgtgtttacac

SEQ ID NO: 469069 - DNA, 33 bp, Homo sapien
gtgaaaacctctttcacgatgttagaagaagtt

SEQ ID NO: 469070 - DNA, 33 bp, Homo sapien
gtgaaaacctctttcatgatgttagaagaagtt

SEQ ID NO: 469071 - DNA, 33 bp, Homo sapien
cttttgttctgtcaaacggataaagaattgata

SEQ ID NO: 469072 - DNA, 33 bp, Homo sapien
cttttgttctgtcaaatggataaagaattgata

SEQ ID NO: 469073 - DNA, 33 bp, Homo sapien
caggtatgttcctgtacccccgttttcagttct

SEQ ID NO: 469074 - DNA, 33 bp, Homo sapien
caggtatgttcctgtatccccgttttcagttct

SEQ ID NO: 469075 - DNA, 33 bp, Homo sapien; identical to SEQ ID NO: 469073

SEQ ID NO: 469076 - DNA, 33 bp, Homo sapien; identical to SEQ ID NO: 469074

SEQ ID NO: 469077 - DNA, 33 bp, Homo sapien
ctaatagtagagaaaactgcatgtactgccatg

SEQ ID NO: 469078 - DNA, 33 bp, Homo sapien
ctaatagtagagaaaagtgcatgtactgccatg

SEQ ID NO: 469079 - DNA, 33 bp, Homo sapien
gagcacttcactaacaataattcatttaatgct

SEQ ID NO: 469080 - DNA, 33 bp, Homo sapien
gagcacttcactaacagtaattcatttaatgct

SEQ ID NO: 469081 - DNA, 33 bp, Homo sapien
ttgagaaactgactacaagttgatctggatggc

SEQ ID NO: 469082 - DNA, 33 bp, Homo sapien
ttgagaaactgactacgagttgatctggatggc

SEQ ID NO: 469083 - DNA, 33 bp, Homo sapien
gttttgggagggataacatagagcaagggataa

SEQ ID NO: 469084 - DNA, 33 bp, Homo sapien
gttttgggagggataagatagagcaagggataa

SEQ ID NO: 469085 - DNA, 33 bp, Homo sapien
ctctgctctatctccaagtaatctgtgtggcat

SEQ ID NO: 469086 - DNA, 33 bp, Homo sapien
ctctgctctatctccatgtaatctgtgtggcat

SEQ ID NO: 469087 - DNA, 33 bp, Homo sapien
ttctaggtcccaaacactgagtaaatctcagga

SEQ ID NO: 469088 - DNA, 33 bp, Homo sapien
ttctaggtcccaaacagtgagtaaatctcagga

SEQ ID NO: 469089 - DNA, 33 bp, Homo sapien
tgtattgtgtctttgaaagggccttgctgaatc

SEQ ID NO: 469090 - DNA, 33 bp, Homo sapien
tgtattgtgtctttgatagggccttgctgaatc

SEQ ID NO: 469091 - DNA, 33 bp, Homo sapien
caccttctcagagaaacgagctttggctttggg

SEQ ID NO: 469092 - DNA, 33 bp, Homo sapien
caccttctcagagaaatgagctttggctttggg

SEQ ID NO: 469093 - DNA, 33 bp, Homo sapien
tgtccatgcacagttcactttcactctgtgagt

SEQ ID NO: 469094 - DNA, 33 bp, Homo sapien
tgtccatgcacagttcgctttcactctgtgagt

SEQ ID NO: 469095 - DNA, 33 bp, Homo sapien
cagcatgacaaaaacaatccttcccagtaggtc

SEQ ID NO: 469096 - DNA, 33 bp, Homo sapien
cagcatgacaaaaacagtccttcccagtaggtc

SEQ ID NO: 469097 - DNA, 33 bp, Homo sapien
agtaggatttgacatcacattcaactctgaggt

SEQ ID NO: 469098 - DNA, 33 bp, Homo sapien
agtaggatttgacatcgcattcaactctgaggt

SEQ ID NO: 469099 - DNA, 33 bp, Homo sapien
atatgggccgattagaaccagagcatcaacctt

SEQ ID NO: 469100 - DNA, 33 bp, Homo sapien
atatgggccgattagagccagagcatcaacctt

SEQ ID NO: 469101 - DNA, 33 bp, Homo sapien
gatgaaactcacaggaaaatgattaaagcagat

SEQ ID NO: 469102 - DNA, 33 bp, Homo sapien
gatgaaactcacaggagaatgattaaagcagat

SEQ ID NO: 469103 - DNA, 33 bp, Homo sapien
tgggacaagtttctgaagaagacatttgaccca

SEQ ID NO: 469104 - DNA, 33 bp, Homo sapien
tgggacaagtttctgaggaagacatttgaccca

SEQ ID NO: 469105 - DNA, 33 bp, Homo sapien
tctcttgtatttctcaaaatgcctagcactttg

SEQ ID NO: 469106 - DNA, 33 bp, Homo sapien
tctcttgtatttctcagaatgcctagcactttg

SEQ ID NO: 469107 - DNA, 33 bp, Homo sapien
gtaggcagtgtcaggaaagaaaagggtgacaac

SEQ ID NO: 469108 - DNA, 33 bp, Homo sapien
gtaggcagtgtcaggagagaaaagggtgacaac

SEQ ID NO: 469109 - DNA, 33 bp, Homo sapien
gctgtgcgtattgtaccaggaacctttaacatc

SEQ ID NO: 469110 - DNA, 33 bp, Homo sapien
gctgtgcgtattgtactaggaacctttaacatc

SEQ ID NO: 469111 - DNA, 33 bp, Homo sapien
agtgctttcctaataaacatcaatcttccttga

SEQ ID NO: 469112 - DNA, 33 bp, Homo sapien
agtgctttcctaataatcatcaatcttccttga

SEQ ID NO: 469113 - DNA, 33 bp, Homo sapien
ggtgttggagtagtataaagggttctgaatctt

SEQ ID NO: 469114 - DNA, 33 bp, Homo sapien
ggtgttggagtagtatcaagggttctgaatctt

SEQ ID NO: 469115 - DNA, 33 bp, Homo sapien
aaggcagagagttagacagcacggtaggtagtt

SEQ ID NO: 469116 - DNA, 33 bp, Homo sapien
aaggcagagagttagatagcacggtaggtagtt

SEQ ID NO: 469117 - DNA, 33 bp, Homo sapien
aaagatatctgcaactaaagttttccataactt

SEQ ID NO: 469118 - DNA, 33 bp, Homo sapien
aaagatatctgcaactgaagttttccataactt

SEQ ID NO: 469119 - DNA, 33 bp, Homo sapien
aaaaagggcagaaactaaggttgaagtagctga

SEQ ID NO: 469120 - DNA, 33 bp, Homo sapien
aaaaagggcagaaactgaggttgaagtagctga

SEQ ID NO: 469121 - DNA, 33 bp, Homo sapien
gtaatccaaccatgaactagtcctgagcttgac

SEQ ID NO: 469122 - DNA, 33 bp, Homo sapien
gtaatccaaccatgaattagtcctgagcttgac

SEQ ID NO: 469123 - DNA, 33 bp, Homo sapien
gcaaatggaaagcagaagtcttcattcattcat

SEQ ID NO: 469124 - DNA, 33 bp, Homo sapien
gcaaatggaaagcagacgtcttcattcattcat

SEQ ID NO: 469125 - DNA, 33 bp, Homo sapien
ttaccccagtcaccgacgtgattctttgccact

SEQ ID NO: 469126 - DNA, 33 bp, Homo sapien
ttaccccagtcaccgatgtgattctttgccact

SEQ ID NO: 469127 - DNA, 33 bp, Homo sapien
caaaagtaagactggacctgaaccttagcctta

SEQ ID NO: 469128 - DNA, 33 bp, Homo sapien
caaaagtaagactggagctgaaccttagcctta

SEQ ID NO: 469129 - DNA, 33 bp, Homo sapien
agcacagaaagtccagaagctaaatgaatgtgt

SEQ ID NO: 469130 - DNA, 33 bp, Homo sapien
agcacagaaagtccagcagctaaatgaatgtgt

SEQ ID NO: 469131 - DNA, 33 bp, Homo sapien
gtatctctttgagatacggctccttgccctgca

SEQ ID NO: 469132 - DNA, 33 bp, Homo sapien
gtatctctttgagatatggctccttgccctgca

SEQ ID NO: 469133 - DNA, 33 bp, Homo sapien
tatgtgatttggactgaaactgcatcaggaaaa

SEQ ID NO: 469134 - DNA, 33 bp, Homo sapien
tatgtgatttggactgtaactgcatcaggaaaa

SEQ ID NO: 469135 - DNA, 33 bp, Homo sapien
ggagatgattacagacggatgcttgaagacggg

SEQ ID NO: 469136 - DNA, 33 bp, Homo sapien
ggagatgattacagactgatgcttgaagacggg

SEQ ID NO: 469137 - DNA, 33 bp, Homo sapien
attgactggaaaaacacattggtgagccgaagc

SEQ ID NO: 469138 - DNA, 33 bp, Homo sapien
attgactggaaaaacatattggtgagccgaagc

SEQ ID NO: 469139 - DNA, 33 bp, Homo sapien
aatgaattgtgtgaaacgatttactgggtgaac

SEQ ID NO: 469140 - DNA, 33 bp, Homo sapien
aatgaattgtgtgaaatgatttactgggtgaac

SEQ ID NO: 469141 - DNA, 33 bp, Homo sapien
cctgcatccattaaagcagaattccacggtgcc

SEQ ID NO: 469142 - DNA, 33 bp, Homo sapien
cctgcatccattaaaggagaattccacggtgcc

SEQ ID NO: 469143 - DNA, 33 bp, Homo sapien
taagaaagcagagccacgtaacctgtggtccca

SEQ ID NO: 469144 - DNA, 33 bp, Homo sapien
taagaaagcagagccatgtaacctgtggtccca

SEQ ID NO: 469145 - DNA, 33 bp, Homo sapien
tcatgattggtactcaacactgacacagtgtgg

SEQ ID NO: 469146 - DNA, 33 bp, Homo sapien
tcatgattggtactcagcactgacacagtgtgg

SEQ ID NO: 469147 - DNA, 33 bp, Homo sapien
tctcttctggactgtgaaggctcctaggtcttt

SEQ ID NO: 469148 - DNA, 33 bp, Homo sapien
tctcttctggactgtgtaggctcctaggtcttt

SEQ ID NO: 469149 - DNA, 33 bp, Homo sapien
tggcaggtggaataccagaggctcccatcaggc

SEQ ID NO: 469150 - DNA, 33 bp, Homo sapien
tggcaggtggaataccggaggctcccatcaggc

SEQ ID NO: 469151 - DNA, 33 bp, Homo sapien
gacaatgagaagacaaatcagtcttgggaaaaa

SEQ ID NO: 469152 - DNA, 33 bp, Homo sapien
gacaatgagaagacaagtcagtcttgggaaaaa

SEQ ID NO: 469153 - DNA, 33 bp, Homo sapien
agccaccgagccaggccgatccattattttctt

SEQ ID NO: 469154 - DNA, 33 bp, Homo sapien
agccaccgagccaggctgatccattattttctt

SEQ ID NO: 469155 - DNA, 33 bp, Homo sapien
gttatgatctcacaaaattggaactgtaaggga

SEQ ID NO: 469156 - DNA, 33 bp, Homo sapien
gttatgatctcacaaagttggaactgtaaggga

SEQ ID NO: 469157 - DNA, 33 bp, Homo sapien
ttctccccactttggacagcgaagcattcactg

SEQ ID NO: 469158 - DNA, 33 bp, Homo sapien
ttctccccactttggagagcgaagcattcactg

SEQ ID NO: 469159 - DNA, 33 bp, Homo sapien
agccagctaatggtacagcagcagcgtttcacc

SEQ ID NO: 469160 - DNA, 33 bp, Homo sapien
agccagctaatggtacggcagcagcgtttcacc

SEQ ID NO: 469161 - DNA, 33 bp, Homo sapien
tgtggagggccacaaaacacctcttgtcataca

SEQ ID NO: 469162 - DNA, 33 bp, Homo sapien
tgtggagggccacaaagcacctcttgtcataca

SEQ ID NO: 469163 - DNA, 33 bp, Homo sapien
gagtcccagctctgaaatgatgtcaggactcaa

SEQ ID NO: 469164 - DNA, 33 bp, Homo sapien
gagtcccagctctgaagtgatgtcaggactcaa

SEQ ID NO: 469165 - DNA, 33 bp, Homo sapien
atgtcccatgtagttacagtattgcacacaaca

SEQ ID NO: 469166 - DNA, 33 bp, Homo sapien
atgtcccatgtagttatagtattgcacacaaca

SEQ ID NO: 469167 - DNA, 33 bp, Homo sapien
tttgagggatgactgaaaatgtcttcaattttt

SEQ ID NO: 469168 - DNA, 33 bp, Homo sapien
tttgagggatgactgagaatgtcttcaattttt

SEQ ID NO: 469169 - DNA, 33 bp, Homo sapien
tatatttgaggtcacaggcattattttggaaag

SEQ ID NO: 469170 - DNA, 33 bp, Homo sapien
tatatttgaggtcacatgcattattttggaaag

SEQ ID NO: 469171 - DNA, 33 bp, Homo sapien
tccaattcacagacacaaaaagtagaatgatgg

SEQ ID NO: 469172 - DNA, 33 bp, Homo sapien
tccaattcacagacacgaaaagtagaatgatgg

SEQ ID NO: 469173 - DNA, 33 bp, Homo sapien
ttaaattagctctttacctcacaacaaataaat

SEQ ID NO: 469174 - DNA, 33 bp, Homo sapien
ttaaattagctctttatctcacaacaaataaat

SEQ ID NO: 469175 - DNA, 33 bp, Homo sapien
aagattcgctggtctaagacagaggcagagtta

SEQ ID NO: 469176 - DNA, 33 bp, Homo sapien
aagattcgctggtctaggacagaggcagagtta

SEQ ID NO: 469177 - DNA, 33 bp, Homo sapien
gcaaactccatgaacgccattgactttagagtt

SEQ ID NO: 469178 - DNA, 33 bp, Homo sapien
gcaaactccatgaacggcattgactttagagtt

SEQ ID NO: 469179 - DNA, 33 bp, Homo sapien
catggaagggaaggtaaaatatcatgaggattt

SEQ ID NO: 469180 - DNA, 33 bp, Homo sapien
catggaagggaaggtacaatatcatgaggattt

SEQ ID NO: 469181 - DNA, 33 bp, Homo sapien
aaggttgttgagcaaacttctgattatcatttg

SEQ ID NO: 469182 - DNA, 33 bp, Homo sapien
aaggttgttgagcaaagttctgattatcatttg

SEQ ID NO: 469183 - DNA, 33 bp, Homo sapien
ttacagggaacttaccaactttccactttccca

SEQ ID NO: 469184 - DNA, 33 bp, Homo sapien
ttacagggaacttaccgactttccactttccca

SEQ ID NO: 469185 - DNA, 33 bp, Homo sapien
tgaccatagaatctaacaccaaccttgtaattg

SEQ ID NO: 469186 - DNA, 33 bp, Homo sapien
tgaccatagaatctaataccaaccttgtaattg

SEQ ID NO: 469187 - DNA, 33 bp, Homo sapien
ccaagagccagatccactcctttaatccattga

SEQ ID NO: 469188 - DNA, 33 bp, Homo sapien
ccaagagccagatccattcctttaatccattga

SEQ ID NO: 469189 - DNA, 33 bp, Homo sapien
tccctaggagaaccgacagggctgtctcacctg

SEQ ID NO: 469190 - DNA, 33 bp, Homo sapien
tccctaggagaaccgatagggctgtctcacctg

SEQ ID NO: 469191 - DNA, 33 bp, Homo sapien
tcagaagtttcccagcagacttcctctctcagc

SEQ ID NO: 469192 - DNA, 33 bp, Homo sapien
tcagaagtttcccagcggacttcctctctcagc

SEQ ID NO: 469193 - DNA, 33 bp, Homo sapien
atatatcatcatctaactgtttttgcccctata

SEQ ID NO: 469194 - DNA, 33 bp, Homo sapien
atatatcatcatctaattgtttttgcccctata

SEQ ID NO: 469195 - DNA, 33 bp, Homo sapien
gaagtagaaacaagccaagtgaagtttgttagt

SEQ ID NO: 469196 - DNA, 33 bp, Homo sapien
gaagtagaaacaagccgagtgaagtttgttagt

SEQ ID NO: 469197 - DNA, 33 bp, Homo sapien
aatagtatcattgccccgatttcattgtttcaa

SEQ ID NO: 469198 - DNA, 33 bp, Homo sapien
aatagtatcattgccctgatttcattgtttcaa

SEQ ID NO: 469199 - DNA, 33 bp, Homo sapien
ttattttacaaaaacacattgcagagttcgctg

SEQ ID NO: 469200 - DNA, 33 bp, Homo sapien
ttattttacaaaaacagattgcagagttcgctg

SEQ ID NO: 469201 - DNA, 33 bp, Homo sapien
ctgaaacttgcccttgcagtgcctgtcaagcaa

SEQ ID NO: 469202 - DNA, 33 bp, Homo sapien
ctgaaacttgcccttgtagtgcctgtcaagcaa

SEQ ID NO: 469203 - DNA, 33 bp, Homo sapien
ggaacctcagtatcacgcaatataccaatgtaa

SEQ ID NO: 469204 - DNA, 33 bp, Homo sapien
ggaacctcagtatcactcaatataccaatgtaa

SEQ ID NO: 469205 - DNA, 33 bp, Homo sapien
aaagacactgccggccagagtatgcatggttga

SEQ ID NO: 469206 - DNA, 33 bp, Homo sapien
aaagacactgccggcccgagtatgcatggttga

SEQ ID NO: 469207 - DNA, 33 bp, Homo sapien
tgaactaccaatgagacactgataagtgcacat

SEQ ID NO: 469208 - DNA, 33 bp, Homo sapien
tgaactaccaatgagagactgataagtgcacat

SEQ ID NO: 469209 - DNA, 33 bp, Homo sapien
gtggatagtccgtatcaattttaccacggagga

SEQ ID NO: 469210 - DNA, 33 bp, Homo sapien
gtggatagtccgtatcgattttaccacggagga

SEQ ID NO: 469211 - DNA, 33 bp, Homo sapien
tgggctgaagggtttcactgccaaaatcaagtc

SEQ ID NO: 469212 - DNA, 33 bp, Homo sapien
tgggctgaagggtttcgctgccaaaatcaagtc

SEQ ID NO: 469213 - DNA, 33 bp, Homo sapien
agcaatgaggcttccaaaaatgttaagaaacat

SEQ ID NO: 469214 - DNA, 33 bp, Homo sapien
agcaatgaggcttccagaaatgttaagaaacat

SEQ ID NO: 469215 - DNA, 33 bp, Homo sapien
ttggctaaaaacttaccgagctagagttagcct

SEQ ID NO: 469216 - DNA, 33 bp, Homo sapien
ttggctaaaaacttactgagctagagttagcct

SEQ ID NO: 469217 - DNA, 33 bp, Homo sapien
agccaatcagaggaaaaggcatgcaaagggagg

SEQ ID NO: 469218 - DNA, 33 bp, Homo sapien
agccaatcagaggaaagggcatgcaaagggagg

SEQ ID NO: 469219 - DNA, 33 bp, Homo sapien
ctggacctgtaactccacagagaagcgcctccc

SEQ ID NO: 469220 - DNA, 33 bp, Homo sapien
ctggacctgtaactccgcagagaagcgcctccc

SEQ ID NO: 469221 - DNA, 33 bp, Homo sapien
tcagaatccctagtgaggagaaagtatcagcca

SEQ ID NO: 469222 - DNA, 33 bp, Homo sapien
tcagaatccctagtgatgagaaagtatcagcca

SEQ ID NO: 469223 - DNA, 33 bp, Homo sapien
acaccatcccaagcagcccagcaagggggaccc

SEQ ID NO: 469224 - DNA, 33 bp, Homo sapien
acaccatcccaagcagtccagcaagggggaccc

SEQ ID NO: 469225 - DNA, 33 bp, Homo sapien
gattactattgtctacccttgaaggccagccaa

SEQ ID NO: 469226 - DNA, 33 bp, Homo sapien
gattactattgtctacgcttgaaggccagccaa

SEQ ID NO: 469227 - DNA, 33 bp, Homo sapien
tctatccacgagaagcaagtcctgagatccagc

SEQ ID NO: 469228 - DNA, 33 bp, Homo sapien
tctatccacgagaagcgagtcctgagatccagc

SEQ ID NO: 469229 - DNA, 33 bp, Homo sapien
ggaacaggaggaagaaatctctcagactgggaa

SEQ ID NO: 469230 - DNA, 33 bp, Homo sapien
ggaacaggaggaagaactctctcagactgggaa

SEQ ID NO: 469231 - DNA, 33 bp, Homo sapien
aacctagtttaggttacagaagtccctctcagc

SEQ ID NO: 469232 - DNA, 33 bp, Homo sapien
aacctagtttaggttagagaagtccctctcagc

SEQ ID NO: 469233 - DNA, 33 bp, Homo sapien
acccctgaccattttacagggcaaagaagccca

SEQ ID NO: 469234 - DNA, 33 bp, Homo sapien
acccctgaccattttatagggcaaagaagccca

SEQ ID NO: 469235 - DNA, 33 bp, Homo sapien
attacaagatgtcagcacataatatcatgtgta

SEQ ID NO: 469236 - DNA, 33 bp, Homo sapien
attacaagatgtcagcgcataatatcatgtgta

SEQ ID NO: 469237 - DNA, 33 bp, Homo sapien
attgttataaaaataacgctacggttcagggtg

SEQ ID NO: 469238 - DNA, 33 bp, Homo sapien
attgttataaaaataatgctacggttcagggtg

SEQ ID NO: 469239 - DNA, 33 bp, Homo sapien
ctttcccatctgcgtcaagcccgcctttgtttt

SEQ ID NO: 469240 - DNA, 33 bp, Homo sapien
ctttcccatctgcgtcgagcccgcctttgtttt

SEQ ID NO: 469241 - DNA, 33 bp, Homo sapien
tgggttcagacctggcaagtcccggttctgccg

SEQ ID NO: 469242 - DNA, 33 bp, Homo sapien
tgggttcagacctggcgagtcccggttctgccg

SEQ ID NO: 469243 - DNA, 33 bp, Homo sapien
caccccaagttcctcaactctgacaagggggca

SEQ ID NO: 469244 - DNA, 33 bp, Homo sapien
caccccaagttcctcagctctgacaagggggca

SEQ ID NO: 469245 - DNA, 33 bp, Homo sapien
cattttattgatcaccaagggaatggtctcaat

SEQ ID NO: 469246 - DNA, 33 bp, Homo sapien
cattttattgatcaccgagggaatggtctcaat

SEQ ID NO: 469247 - DNA, 33 bp, Homo sapien
tgcaaagggacacatcgctttatcaacaccatt

SEQ ID NO: 469248 - DNA, 33 bp, Homo sapien
tgcaaagggacacatctctttatcaacaccatt

SEQ ID NO: 469249 - DNA, 33 bp, Homo sapien
tgagttgggacaagaactcagtggcctgctggg

SEQ ID NO: 469250 - DNA, 33 bp, Homo sapien
tgagttgggacaagaattcagtggcctgctggg

SEQ ID NO: 469251 - DNA, 33 bp, Homo sapien
ggaccagacttagagaggaatgaggctgcagaa

SEQ ID NO: 469252 - DNA, 33 bp, Homo sapien
ggaccagacttagagatgaatgaggctgcagaa

SEQ ID NO: 469253 - DNA, 33 bp, Homo sapien
tacaatatacaacgaacatacaatacacagtga

SEQ ID NO: 469254 - DNA, 33 bp, Homo sapien
tacaatatacaacgaatatacaatacacagtga

SEQ ID NO: 469255 - DNA, 33 bp, Homo sapien
attcctctgctgcaaactgtctccaactagaaa

SEQ ID NO: 469256 - DNA, 33 bp, Homo sapien
attcctctgctgcaaagtgtctccaactagaaa

SEQ ID NO: 469257 - DNA, 33 bp, Homo sapien
cccgccagtcactaaaacaggcacagttcttca

SEQ ID NO: 469258 - DNA, 33 bp, Homo sapien
cccgccagtcactaaagcaggcacagttcttca

SEQ ID NO: 469259 - DNA, 33 bp, Homo sapien
attactctaactcaaaatacttgcacagcacct

SEQ ID NO: 469260 - DNA, 33 bp, Homo sapien
attactctaactcaaagtacttgcacagcacct

SEQ ID NO: 469261 - DNA, 33 bp, Homo sapien
tcatctttgtaatcaacgtgtttgtaggatttt

SEQ ID NO: 469262 - DNA, 33 bp, Homo sapien
tcatctttgtaatcaatgtgtttgtaggatttt

SEQ ID NO: 469263 - DNA, 33 bp, Homo sapien
tctgatgcatgaacaacagcaaagtcacagggc

SEQ ID NO: 469264 - DNA, 33 bp, Homo sapien
tctgatgcatgaacaagagcaaagtcacagggc

SEQ ID NO: 469265 - DNA, 33 bp, Homo sapien
actgaggaaacttccaatccttcctgcaacaca

SEQ ID NO: 469266 - DNA, 33 bp, Homo sapien
actgaggaaacttccagtccttcctgcaacaca

SEQ ID NO: 469267 - DNA, 33 bp, Homo sapien
ggacagcggggatccaatcagcacagttcacag

SEQ ID NO: 469268 - DNA, 33 bp, Homo sapien
ggacagcggggatccagtcagcacagttcacag

SEQ ID NO: 469269 - DNA, 33 bp, Homo sapien
aagagggtgagataccacctgcccggagctcat

SEQ ID NO: 469270 - DNA, 33 bp, Homo sapien
aagagggtgagataccgcctgcccggagctcat

SEQ ID NO: 469271 - DNA, 33 bp, Homo sapien
aggccaggttccctgaagtcatctcttctaagc

SEQ ID NO: 469272 - DNA, 33 bp, Homo sapien
aggccaggttccctgaggtcatctcttctaagc

SEQ ID NO: 469273 - DNA, 33 bp, Homo sapien
ctagacaacacttgtccgaacgtcaaaatgtcc

SEQ ID NO: 469274 - DNA, 33 bp, Homo sapien
ctagacaacacttgtctgaacgtcaaaatgtcc

SEQ ID NO: 469275 - DNA, 33 bp, Homo sapien
cattgtgggggtgaaccaaccagtggtctgtga

SEQ ID NO: 469276 - DNA, 33 bp, Homo sapien
cattgtgggggtgaactaaccagtggtctgtga

SEQ ID NO: 469277 - DNA, 33 bp, Homo sapien
tcatgtcctgcacagcaaggcagtaggcctata

SEQ ID NO: 469278 - DNA, 33 bp, Homo sapien
tcatgtcctgcacagcgaggcagtaggcctata

SEQ ID NO: 469279 - DNA, 33 bp, Homo sapien
gctgtgcaccaacttccacttataggcctactg

SEQ ID NO: 469280 - DNA, 33 bp, Homo sapien
gctgtgcaccaacttctacttataggcctactg

SEQ ID NO: 469281 - DNA, 33 bp, Homo sapien
ctgctctcaaatcatcaccctgatcctggccct

SEQ ID NO: 469282 - DNA, 33 bp, Homo sapien
ctgctctcaaatcatcgccctgatcctggccct

SEQ ID NO: 469283 - DNA, 33 bp, Homo sapien
aaagacataaggatggaagaagaccacctggcc

SEQ ID NO: 469284 - DNA, 33 bp, Homo sapien
aaagacataaggatgggagaagaccacctggcc

SEQ ID NO: 469285 - DNA, 33 bp, Homo sapien
aattgttacgagaagcagactggcgcctgtagc

SEQ ID NO: 469286 - DNA, 33 bp, Homo sapien
aattgttacgagaagcggactggcgcctgtagc

SEQ ID NO: 469287 - DNA, 33 bp, Homo sapien
aacgaacaacatcaaaatgcttacatatagtta

SEQ ID NO: 469288 - DNA, 33 bp, Homo sapien
aacgaacaacatcaaagtgcttacatatagtta

SEQ ID NO: 469289 - DNA, 33 bp, Homo sapien
cacagcaaagggaccactattagtttttctttc

SEQ ID NO: 469290 - DNA, 33 bp, Homo sapien
cacagcaaagggaccattattagtttttctttc

SEQ ID NO: 469291 - DNA, 33 bp, Homo sapien
cctcctcttctatcaccattgtgttgcctcctc

SEQ ID NO: 469292 - DNA, 33 bp, Homo sapien
cctcctcttctatcactattgtgttgcctcctc

SEQ ID NO: 469293 - DNA, 33 bp, Homo sapien
agacaaatgcctcctacggactgattccctcgt

SEQ ID NO: 469294 - DNA, 33 bp, Homo sapien
agacaaatgcctcctatggactgattccctcgt

SEQ ID NO: 469295 - DNA, 33 bp, Homo sapien
tgtgatcgcccatattcaaaatacaagaaccat

SEQ ID NO: 469296 - DNA, 33 bp, Homo sapien
tgtgatcgcccatatttaaaatacaagaaccat

SEQ ID NO: 469297 - DNA, 33 bp, Homo sapien
ggtgagagggttcaacactactggctcagcagc

SEQ ID NO: 469298 - DNA, 33 bp, Homo sapien
ggtgagagggttcaacgctactggctcagcagc

SEQ ID NO: 469299 - DNA, 33 bp, Homo sapien
ggagaaatcataaggccgagcattcgttctggt

SEQ ID NO: 469300 - DNA, 33 bp, Homo sapien
ggagaaatcataaggctgagcattcgttctggt

SEQ ID NO: 469301 - DNA, 33 bp, Homo sapien
tatgcgaaaggcaactaactctttttcagcctt

SEQ ID NO: 469302 - DNA, 33 bp, Homo sapien
tatgcgaaaggcaactgactctttttcagcctt

SEQ ID NO: 469303 - DNA, 33 bp, Homo sapien
gtgttacctaaatttacatgaagacccagaggc

SEQ ID NO: 469304 - DNA, 33 bp, Homo sapien
gtgttacctaaatttatatgaagacccagaggc

SEQ ID NO: 469305 - DNA, 33 bp, Homo sapien
atagcagctcactaaccctgcgtttgtggtgtg

SEQ ID NO: 469306 - DNA, 33 bp, Homo sapien
atagcagctcactaactctgcgtttgtggtgtg

SEQ ID NO: 469307 - DNA, 33 bp, Homo sapien
atggtaagttatatgcacctctgaatttagtgc

SEQ ID NO: 469308 - DNA, 33 bp, Homo sapien
atggtaagttatatgcgcctctgaatttagtgc

SEQ ID NO: 469309 - DNA, 33 bp, Homo sapien
agttttctaacaccaacgaaagagactctaacc

SEQ ID NO: 469310 - DNA, 33 bp, Homo sapien
agttttctaacaccaatgaaagagactctaacc

SEQ ID NO: 469311 - DNA, 33 bp, Homo sapien
taaaatattctcttcaaaattgatcttcaaaat

SEQ ID NO: 469312 - DNA, 33 bp, Homo sapien
taaaatattctcttcacaattgatcttcaaaat

SEQ ID NO: 469313 - DNA, 33 bp, Homo sapien
tactgtgtggtcttgacgatgctactttaattg

SEQ ID NO: 469314 - DNA, 33 bp, Homo sapien
tactgtgtggtcttgatgatgctactttaattg

SEQ ID NO: 469315 - DNA, 33 bp, Homo sapien
gtgtcctggagatcagcgtggatgagaactgag

SEQ ID NO: 469316 - DNA, 33 bp, Homo sapien
gtgtcctggagatcagtgtggatgagaactgag

SEQ ID NO: 469317 - DNA, 33 bp, Homo sapien
tcaaaatggactcttacgctgtgtgtcatactg

SEQ ID NO: 469318 - DNA, 33 bp, Homo sapien
tcaaaatggactcttatgctgtgtgtcatactg

SEQ ID NO: 469319 - DNA, 33 bp, Homo sapien
ctctttaatatatcaacgttttggaacttctga

SEQ ID NO: 469320 - DNA, 33 bp, Homo sapien
ctctttaatatatcaatgttttggaacttctga

SEQ ID NO: 469321 - DNA, 33 bp, Homo sapien
gccttgctgccaataaatgtcaatcttgatttt

SEQ ID NO: 469322 - DNA, 33 bp, Homo sapien
gccttgctgccaataagtgtcaatcttgatttt

SEQ ID NO: 469323 - DNA, 33 bp, Homo sapien
atttttaaccccttcaactctatgagaactatg

SEQ ID NO: 469324 - DNA, 33 bp, Homo sapien
atttttaaccccttcagctctatgagaactatg

SEQ ID NO: 469325 - DNA, 33 bp, Homo sapien
tcgcttctagtggaaaagacaatactgaccacg

SEQ ID NO: 469326 - DNA, 33 bp, Homo sapien
tcgcttctagtggaaaggacaatactgaccacg

SEQ ID NO: 469327 - DNA, 33 bp, Homo sapien
tgtaaaaaggctgacaatgaaatcggccaagat

SEQ ID NO: 469328 - DNA, 33 bp, Homo sapien
tgtaaaaaggctgacagtgaaatcggccaagat

SEQ ID NO: 469329 - DNA, 33 bp, Homo sapien
tgaggagtgagtatgtaaatgtaagaactgact

SEQ ID NO: 469330 - DNA, 33 bp, Homo sapien
tgaggagtgagtatgttaatgtaagaactgact

SEQ ID NO: 469331 - DNA, 33 bp, Homo sapien
gacctggaactgatccacctgtgtcattgttgg

SEQ ID NO: 469332 - DNA, 33 bp, Homo sapien
gacctggaactgatccccctgtgtcattgttgg

SEQ ID NO: 469333 - DNA, 33 bp, Homo sapien
ctcagtcattaaaacaagtttctcttcccttta

SEQ ID NO: 469334 - DNA, 33 bp, Homo sapien
ctcagtcattaaaacacgtttctcttcccttta

SEQ ID NO: 469335 - DNA, 33 bp, Homo sapien
gtatgttctctttctcacatatcaaggagaaaa

SEQ ID NO: 469336 - DNA, 33 bp, Homo sapien
gtatgttctctttctcgcatatcaaggagaaaa

SEQ ID NO: 469337 - DNA, 33 bp, Homo sapien
gggcataattgaccaacagcatcatctgcagca

SEQ ID NO: 469338 - DNA, 33 bp, Homo sapien
gggcataattgaccaagagcatcatctgcagca

SEQ ID NO: 469339 - DNA, 33 bp, Homo sapien
ataatttctagaagaaaccatacatctcaagtc

SEQ ID NO: 469340 - DNA, 33 bp, Homo sapien
ataatttctagaagaatccatacatctcaagtc

SEQ ID NO: 469341 - DNA, 33 bp, Homo sapien
atttctttaatctatcggaagctcccacatatc

SEQ ID NO: 469342 - DNA, 33 bp, Homo sapien
atttctttaatctatctgaagctcccacatatc

SEQ ID NO: 469343 - DNA, 33 bp, Homo sapien
tttcaccattcacaacccaaataacatcttcca

SEQ ID NO: 469344 - DNA, 33 bp, Homo sapien
tttcaccattcacaactcaaataacatcttcca

SEQ ID NO: 469345 - DNA, 33 bp, Homo sapien
acagaaatctttgcaggccaccaagaaataata

SEQ ID NO: 469346 - DNA, 33 bp, Homo sapien
acagaaatctttgcagtccaccaagaaataata

SEQ ID NO: 469347 - DNA, 33 bp, Homo sapien
tgaatttataactcaccctgtccctttaaataa

SEQ ID NO: 469348 - DNA, 33 bp, Homo sapien
tgaatttataactcacgctgtccctttaaataa

SEQ ID NO: 469349 - DNA, 33 bp, Homo sapien
cttacaactcatacaactcataacaaaacacaa

SEQ ID NO: 469350 - DNA, 33 bp, Homo sapien
cttacaactcatacaattcataacaaaacacaa

SEQ ID NO: 469351 - DNA, 33 bp, Homo sapien
aaatatataagtggccaataagcacatgaaaag

SEQ ID NO: 469352 - DNA, 33 bp, Homo sapien
aaatatataagtggccgataagcacatgaaaag

SEQ ID NO: 469353 - DNA, 33 bp, Homo sapien
aaataaggtagcacgtaaagcaataagataatt

SEQ ID NO: 469354 - DNA, 33 bp, Homo sapien
aaataaggtagcacgtgaagcaataagataatt

SEQ ID NO: 469355 - DNA, 33 bp, Homo sapien
atcataaagctgaaaaaaaaaatggccagctga

SEQ ID NO: 469356 - DNA, 33 bp, Homo sapien
atcataaagctgaaaacaaaaatggccagctga

SEQ ID NO: 469357 - DNA, 33 bp, Homo sapien
gatgacctcattaccaacttcaaaggatggggt

SEQ ID NO: 469358 - DNA, 33 bp, Homo sapien
gatgacctcattaccaccttcaaaggatggggt

SEQ ID NO: 469359 - DNA, 33 bp, Homo sapien
ttgtacagcaagtcggcatgaataatgatatag

SEQ ID NO: 469360 - DNA, 33 bp, Homo sapien
ttgtacagcaagtcggtatgaataatgatatag

SEQ ID NO: 469361 - DNA, 33 bp, Homo sapien
tcctaacggtgccaagcacatagagaaatgcca

SEQ ID NO: 469362 - DNA, 33 bp, Homo sapien
tcctaacggtgccaagtacatagagaaatgcca

SEQ ID NO: 469363 - DNA, 33 bp, Homo sapien
aatctgtttcatttccagcactttttctccttg

SEQ ID NO: 469364 - DNA, 33 bp, Homo sapien
aatctgtttcatttccggcactttttctccttg

SEQ ID NO: 469365 - DNA, 33 bp, Homo sapien
tgggtggggcattcacacaggtcagctcaaacc

SEQ ID NO: 469366 - DNA, 33 bp, Homo sapien
tgggtggggcattcacgcaggtcagctcaaacc

SEQ ID NO: 469367 - DNA, 33 bp, Homo sapien
gtctttcatctctaagaacccaatcatgtttgg

SEQ ID NO: 469368 - DNA, 33 bp, Homo sapien
gtctttcatctctaaggacccaatcatgtttgg

SEQ ID NO: 469369 - DNA, 33 bp, Homo sapien
gtttcacagtcattacgatagggaattctcaca

SEQ ID NO: 469370 - DNA, 33 bp, Homo sapien
gtttcacagtcattactatagggaattctcaca

SEQ ID NO: 469371 - DNA, 33 bp, Homo sapien
ggtagcagaaaacatccaacagtgagtggcaac

SEQ ID NO: 469372 - DNA, 33 bp, Homo sapien
ggtagcagaaaacatcgaacagtgagtggcaac

SEQ ID NO: 469373 - DNA, 33 bp, Homo sapien
aacagacggcaggtacaaaactggtgaaattat

SEQ ID NO: 469374 - DNA, 33 bp, Homo sapien
aacagacggcaggtacgaaactggtgaaattat

SEQ ID NO: 469375 - DNA, 33 bp, Homo sapien
tcaaggaatgctctccgactggaaaaagcctaa

SEQ ID NO: 469376 - DNA, 33 bp, Homo sapien
tcaaggaatgctctcctactggaaaaagcctaa

SEQ ID NO: 469377 - DNA, 33 bp, Homo sapien
agatcttgaagcagtcacacaaaacagaatccc

SEQ ID NO: 469378 - DNA, 33 bp, Homo sapien
agatcttgaagcagtcgcacaaaacagaatccc

SEQ ID NO: 469379 - DNA, 33 bp, Homo sapien
tgagaggtttcccccactatctcatgttttaaa

SEQ ID NO: 469380 - DNA, 33 bp, Homo sapien
tgagaggtttcccccattatctcatgttttaaa

SEQ ID NO: 469381 - DNA, 33 bp, Homo sapien
atccattaatcaataactcccattcccccatct

SEQ ID NO: 469382 - DNA, 33 bp, Homo sapien
atccattaatcaataagtcccattcccccatct

SEQ ID NO: 469383 - DNA, 33 bp, Homo sapien
aggttttggaagtagaggtagtgatggttgtac

SEQ ID NO: 469384 - DNA, 33 bp, Homo sapien
aggttttggaagtagatgtagtgatggttgtac

SEQ ID NO: 469385 - DNA, 33 bp, Homo sapien
atgtattagacagttaagtacaaacaactgaag

SEQ ID NO: 469386 - DNA, 33 bp, Homo sapien
atgtattagacagttaggtacaaacaactgaag

SEQ ID NO: 469387 - DNA, 33 bp, Homo sapien
ctcttggcaccgccgccgatgttgacatctgca

SEQ ID NO: 469388 - DNA, 33 bp, Homo sapien
ctcttggcaccgccgctgatgttgacatctgca

SEQ ID NO: 469389 - DNA, 33 bp, Homo sapien
tcacagccccagacacgcgcccggtggaaaacg

SEQ ID NO: 469390 - DNA, 33 bp, Homo sapien
tcacagccccagacactcgcccggtggaaaacg

SEQ ID NO: 469391 - DNA, 33 bp, Homo sapien
gtatatttttgttcagacgtttgagcatgagtt

SEQ ID NO: 469392 - DNA, 33 bp, Homo sapien
gtatatttttgttcagtcgtttgagcatgagtt

SEQ ID NO: 469393 - DNA, 33 bp, Homo sapien
cccaggggttttgtccaatgatcgtcacctgct

SEQ ID NO: 469394 - DNA, 33 bp, Homo sapien
cccaggggttttgtccgatgatcgtcacctgct

SEQ ID NO: 469395 - DNA, 33 bp, Homo sapien
agagcagggttctgaacgacgtaggctccatga

SEQ ID NO: 469396 - DNA, 33 bp, Homo sapien
agagcagggttctgaatgacgtaggctccatga

SEQ ID NO: 469397 - DNA, 33 bp, Homo sapien
tgacatccttataaaacagtccaaacttctcca

SEQ ID NO: 469398 - DNA, 33 bp, Homo sapien
tgacatccttataaaatagtccaaacttctcca

SEQ ID NO: 469399 - DNA, 33 bp, Homo sapien
ggcaaagaatggaagacatacgaaggggaatat

SEQ ID NO: 469400 - DNA, 33 bp, Homo sapien
ggcaaagaatggaagatatacgaaggggaatat

SEQ ID NO: 469401 - DNA, 33 bp, Homo sapien
cccaggggccacgaatcaaggacgtgggacagt

SEQ ID NO: 469402 - DNA, 33 bp, Homo sapien
cccaggggccacgaatgaaggacgtgggacagt

SEQ ID NO: 469403 - DNA, 33 bp, Homo sapien
taagtggcagcgctgaagttcacatgcagatca

SEQ ID NO: 469404 - DNA, 33 bp, Homo sapien
taagtggcagcgctgaggttcacatgcagatca

SEQ ID NO: 469405 - DNA, 33 bp, Homo sapien
aagcagaaaatggataagaaggcaggcaattag

SEQ ID NO: 469406 - DNA, 33 bp, Homo sapien
aagcagaaaatggatatgaaggcaggcaattag

SEQ ID NO: 469407 - DNA, 33 bp, Homo sapien
atgcacacatttcctcacagctaggccagtttg

SEQ ID NO: 469408 - DNA, 33 bp, Homo sapien
atgcacacatttcctcgcagctaggccagtttg

SEQ ID NO: 469409 - DNA, 33 bp, Homo sapien
ctgttgcatggggccactagagtctgatttagc

SEQ ID NO: 469410 - DNA, 33 bp, Homo sapien
ctgttgcatggggccattagagtctgatttagc

SEQ ID NO: 469411 - DNA, 33 bp, Homo sapien
gcatgaaattagcacaccaacatccaggatcaa

SEQ ID NO: 469412 - DNA, 33 bp, Homo sapien
gcatgaaattagcacagcaacatccaggatcaa

SEQ ID NO: 469413 - DNA, 33 bp, Homo sapien
aaccactttctatcccaatgttatgcatgactt

SEQ ID NO: 469414 - DNA, 33 bp, Homo sapien
aaccactttctatccccatgttatgcatgactt

SEQ ID NO: 469415 - DNA, 33 bp, Homo sapien
ccaagtttatggaccccctggattcagacagag

SEQ ID NO: 469416 - DNA, 33 bp, Homo sapien
ccaagtttatggaccctctggattcagacagag

SEQ ID NO: 469417 - DNA, 33 bp, Homo sapien
gccctgcagtgcctgacgcatgagtgttgtgct

SEQ ID NO: 469418 - DNA, 33 bp, Homo sapien
gccctgcagtgcctgatgcatgagtgttgtgct

SEQ ID NO: 469419 - DNA, 33 bp, Homo sapien
gtttgccttcaatcacaacatgtctctgttcat

SEQ ID NO: 469420 - DNA, 33 bp, Homo sapien
gtttgccttcaatcacgacatgtctctgttcat

SEQ ID NO: 469421 - DNA, 33 bp, Homo sapien
tcatccagatacagtactaccctcttatccaca

SEQ ID NO: 469422 - DNA, 33 bp, Homo sapien
tcatccagatacagtattaccctcttatccaca

SEQ ID NO: 469423 - DNA, 33 bp, Homo sapien
ttagtaataattaccacgtgtgtaacattcctt

SEQ ID NO: 469424 - DNA, 33 bp, Homo sapien
ttagtaataattaccatgtgtgtaacattcctt

SEQ ID NO: 469425 - DNA, 33 bp, Homo sapien
acactttactaaaacgcattacctcatctgact

SEQ ID NO: 469426 - DNA, 33 bp, Homo sapien
acactttactaaaacgtattacctcatctgact

SEQ ID NO: 469427 - DNA, 33 bp, Homo sapien
gggttcagctaatgaaaagtctcaattgccttg

SEQ ID NO: 469428 - DNA, 33 bp, Homo sapien
gggttcagctaatgaagagtctcaattgccttg

SEQ ID NO: 469429 - DNA, 33 bp, Homo sapien
actgttcctcaagagacctaaagaagttgcaac

SEQ ID NO: 469430 - DNA, 33 bp, Homo sapien
actgttcctcaagagatctaaagaagttgcaac

SEQ ID NO: 469431 - DNA, 33 bp, Homo sapien
cccgcgtgaaagagaccgaggactttgattcct

SEQ ID NO: 469432 - DNA, 33 bp, Homo sapien
cccgcgtgaaagagactgaggactttgattcct

SEQ ID NO: 469433 - DNA, 33 bp, Homo sapien
aaagagaaaaaaaagacgacacaggaaggcttg

SEQ ID NO: 469434 - DNA, 33 bp, Homo sapien
aaagagaaaaaaaagatgacacaggaaggcttg

SEQ ID NO: 469435 - DNA, 33 bp, Homo sapien
tcacaggctatcctatcaaaactaaatgaagca

SEQ ID NO: 469436 - DNA, 33 bp, Homo sapien
tcacaggctatcctatgaaaactaaatgaagca

SEQ ID NO: 469437 - DNA, 33 bp, Homo sapien
tggagtaattcacttcactgcagagggctcacg

SEQ ID NO: 469438 - DNA, 33 bp, Homo sapien
tggagtaattcacttcgctgcagagggctcacg

SEQ ID NO: 469439 - DNA, 33 bp, Homo sapien
atggtcatcaatattacggtaccaggacttcaa

SEQ ID NO: 469440 - DNA, 33 bp, Homo sapien
atggtcatcaatattatggtaccaggacttcaa

SEQ ID NO: 469441 - DNA, 33 bp, Homo sapien
aattattatgcttcccaatggccccatctccag

SEQ ID NO: 469442 - DNA, 33 bp, Homo sapien
aattattatgcttcccgatggccccatctccag

SEQ ID NO: 469443 - DNA, 33 bp, Homo sapien
gcctgtgacattaggacgattattttacctttc

SEQ ID NO: 469444 - DNA, 33 bp, Homo sapien
gcctgtgacattaggatgattattttacctttc

SEQ ID NO: 469445 - DNA, 33 bp, Homo sapien
acaatgaatgaataaaagtaaatgcggatacat

SEQ ID NO: 469446 - DNA, 33 bp, Homo sapien
acaatgaatgaataaaggtaaatgcggatacat

SEQ ID NO: 469447 - DNA, 33 bp, Homo sapien
gagggtgaagagtggacactgggctactgcata

SEQ ID NO: 469448 - DNA, 33 bp, Homo sapien
gagggtgaagagtggagactgggctactgcata

SEQ ID NO: 469449 - DNA, 33 bp, Homo sapien
ggaggaaatggtctccactgtgcagagttgtgc

SEQ ID NO: 469450 - DNA, 33 bp, Homo sapien
ggaggaaatggtctccgctgtgcagagttgtgc

SEQ ID NO: 469451 - DNA, 33 bp, Homo sapien
gagatctttccagaaactttattcccaagctat

SEQ ID NO: 469452 - DNA, 33 bp, Homo sapien
gagatctttccagaaagtttattcccaagctat

SEQ ID NO: 469453 - DNA, 33 bp, Homo sapien
aaaaatccccaactagaccagtgcacaaagatt

SEQ ID NO: 469454 - DNA, 33 bp, Homo sapien
aaaaatccccaactaggccagtgcacaaagatt

SEQ ID NO: 469455 - DNA, 33 bp, Homo sapien
tgttgctctaagtgaacacccaaagggaaggga

SEQ ID NO: 469456 - DNA, 33 bp, Homo sapien
tgttgctctaagtgaatacccaaagggaaggga

SEQ ID NO: 469457 - DNA, 33 bp, Homo sapien
cctcctcttggtttgaaggacaccacgaggctg

SEQ ID NO: 469458 - DNA, 33 bp, Homo sapien
cctcctcttggtttgagggacaccacgaggctg

SEQ ID NO: 469459 - DNA, 33 bp, Homo sapien
taaactatctcaaaatcagcggtcaagacatgg

SEQ ID NO: 469460 - DNA, 33 bp, Homo sapien
taaactatctcaaaattagcggtcaagacatgg

SEQ ID NO: 469461 - DNA, 33 bp, Homo sapien
gttccctcgttttcccacattgtcaggcccagc

SEQ ID NO: 469462 - DNA, 33 bp, Homo sapien
gttccctcgttttccctcattgtcaggcccagc

SEQ ID NO: 469463 - DNA, 33 bp, Homo sapien
gttttcatcagttcaactggaaatataacacaa

SEQ ID NO: 469464 - DNA, 33 bp, Homo sapien
gttttcatcagttcaattggaaatataacacaa

SEQ ID NO: 469465 - DNA, 33 bp, Homo sapien
ggccaaggacacacaaaatttccacctctccga

SEQ ID NO: 469466 - DNA, 33 bp, Homo sapien
ggccaaggacacacaacatttccacctctccga

SEQ ID NO: 469467 - DNA, 33 bp, Homo sapien
gctgcaacagaatgacagaggtgctgtgagtct

SEQ ID NO: 469468 - DNA, 33 bp, Homo sapien
gctgcaacagaatgacggaggtgctgtgagtct

SEQ ID NO: 469469 - DNA, 33 bp, Homo sapien
tgctgagaagttcaccaccattctgattctgaa

SEQ ID NO: 469470 - DNA, 33 bp, Homo sapien
tgctgagaagttcaccgccattctgattctgaa

SEQ ID NO: 469471 - DNA, 33 bp, Homo sapien
taacactccaaacccaagttgttgtcattgtga

SEQ ID NO: 469472 - DNA, 33 bp, Homo sapien
taacactccaaacccatgttgttgtcattgtga

SEQ ID NO: 469473 - DNA, 33 bp, Homo sapien
attgtttgatcgagacaatgaacaaataaggct

SEQ ID NO: 469474 - DNA, 33 bp, Homo sapien
attgtttgatcgagacgatgaacaaataaggct

SEQ ID NO: 469475 - DNA, 33 bp, Homo sapien
gcacaaggtactgactaaaatggcctgaataaa

SEQ ID NO: 469476 - DNA, 33 bp, Homo sapien
gcacaaggtactgactgaaatggcctgaataaa

SEQ ID NO: 469477 - DNA, 33 bp, Homo sapien
ccgtatataaaattccagaaagtgcagtgttct

SEQ ID NO: 469478 - DNA, 33 bp, Homo sapien
ccgtatataaaattccggaaagtgcagtgttct

SEQ ID NO: 469479 - DNA, 33 bp, Homo sapien
cgtgtgcctttgcagcagacagaagactctgcc

SEQ ID NO: 469480 - DNA, 33 bp, Homo sapien
cgtgtgcctttgcagcggacagaagactctgcc

SEQ ID NO: 469481 - DNA, 33 bp, Homo sapien
atgaatagagggctaacgaaaagtctaggtctg

SEQ ID NO: 469482 - DNA, 33 bp, Homo sapien
atgaatagagggctaatgaaaagtctaggtctg

SEQ ID NO: 469483 - DNA, 33 bp, Homo sapien
agaatttgagtctcccaagaaggcagccacaat

SEQ ID NO: 469484 - DNA, 33 bp, Homo sapien
agaatttgagtctcccgagaaggcagccacaat

SEQ ID NO: 469485 - DNA, 33 bp, Homo sapien
ttttaagagaaagaaaagaaatgccaccactgg

SEQ ID NO: 469486 - DNA, 33 bp, Homo sapien
ttttaagagaaagaaaggaaatgccaccactgg

SEQ ID NO: 469487 - DNA, 33 bp, Homo sapien
gattcttggatgtgaactacggtttctacaaga

SEQ ID NO: 469488 - DNA, 33 bp, Homo sapien
gattcttggatgtgaattacggtttctacaaga

SEQ ID NO: 469489 - DNA, 33 bp, Homo sapien
tggcacacaaataaaggatgctgacggaccagg

SEQ ID NO: 469490 - DNA, 33 bp, Homo sapien
tggcacacaaataaagtatgctgacggaccagg

SEQ ID NO: 469491 - DNA, 33 bp, Homo sapien
aagagtacgtacgtgaagccagaaagaacattc

SEQ ID NO: 469492 - DNA, 33 bp, Homo sapien
aagagtacgtacgtgaggccagaaagaacattc

SEQ ID NO: 469493 - DNA, 33 bp, Homo sapien
gagccttacgtgaaataaggtcaaagcacttct

SEQ ID NO: 469494 - DNA, 33 bp, Homo sapien
gagccttacgtgaaatgaggtcaaagcacttct

SEQ ID NO: 469495 - DNA, 33 bp, Homo sapien
tggcagggttagagtccaggggaagaaagggcc

SEQ ID NO: 469496 - DNA, 33 bp, Homo sapien
tggcagggttagagtctaggggaagaaagggcc

SEQ ID NO: 469497 - DNA, 33 bp, Homo sapien
gaagacagatgctcctcaatcagccagaatcag

SEQ ID NO: 469498 - DNA, 33 bp, Homo sapien
gaagacagatgctcctgaatcagccagaatcag

SEQ ID NO: 469499 - DNA, 33 bp, Homo sapien
catgtagggaatttaacgtcaagagcaatagtc

SEQ ID NO: 469500 - DNA, 33 bp, Homo sapien
catgtagggaatttaatgtcaagagcaatagtc

SEQ ID NO: 469501 - DNA, 33 bp, Homo sapien
aacctaaatgccaccaatggacgaatggatttt

SEQ ID NO: 469502 - DNA, 33 bp, Homo sapien
aacctaaatgccaccagtggacgaatggatttt

SEQ ID NO: 469503 - DNA, 33 bp, Homo sapien
catatgtaagtaagtacatgctttggtgctcaa

SEQ ID NO: 469504 - DNA, 33 bp, Homo sapien
catatgtaagtaagtatatgctttggtgctcaa

SEQ ID NO: 469505 - DNA, 33 bp, Homo sapien
ctacaatctgaggacaaatgcggctgctcccct

SEQ ID NO: 469506 - DNA, 33 bp, Homo sapien
ctacaatctgaggacacatgcggctgctcccct

SEQ ID NO: 469507 - DNA, 33 bp, Homo sapien
ccctctcctgccccctaaaaatgtgcatggagg

SEQ ID NO: 469508 - DNA, 33 bp, Homo sapien
ccctctcctgccccctgaaaatgtgcatggagg

SEQ ID NO: 469509 - DNA, 33 bp, Homo sapien
tccaaactgtaactcactgaataaagcgattca

SEQ ID NO: 469510 - DNA, 33 bp, Homo sapien
tccaaactgtaactcattgaataaagcgattca

SEQ ID NO: 469511 - DNA, 33 bp, Homo sapien
caaaccaaagctctcaaaagttaagtaatttgt

SEQ ID NO: 469512 - DNA, 33 bp, Homo sapien
caaaccaaagctctcagaagttaagtaatttgt

SEQ ID NO: 469513 - DNA, 33 bp, Homo sapien
gggcaaaaatgaagcaacttaagacatcccatc

SEQ ID NO: 469514 - DNA, 33 bp, Homo sapien
gggcaaaaatgaagcagcttaagacatcccatc

SEQ ID NO: 469515 - DNA, 33 bp, Homo sapien
tcaggagagggaacaaaggttagtgtggctgca

SEQ ID NO: 469516 - DNA, 33 bp, Homo sapien
tcaggagagggaacaacggttagtgtggctgca

SEQ ID NO: 469517 - DNA, 33 bp, Homo sapien
catagtatgggttccactgacccaggcaggcat

SEQ ID NO: 469518 - DNA, 33 bp, Homo sapien
catagtatgggttccattgacccaggcaggcat

SEQ ID NO: 469519 - DNA, 33 bp, Homo sapien
agcactcgcttgtgccgggatttaaaaggtaaa

SEQ ID NO: 469520 - DNA, 33 bp, Homo sapien
agcactcgcttgtgcctggatttaaaaggtaaa

SEQ ID NO: 469521 - DNA, 33 bp, Homo sapien
ctctttccacaatgaaactttccaccattctac

SEQ ID NO: 469522 - DNA, 33 bp, Homo sapien
ctctttccacaatgaatctttccaccattctac

SEQ ID NO: 469523 - DNA, 33 bp, Homo sapien
agtgcactgaggtacacggtctaaaaccggaga

SEQ ID NO: 469524 - DNA, 33 bp, Homo sapien
agtgcactgaggtacatggtctaaaaccggaga

SEQ ID NO: 469525 - DNA, 33 bp, Homo sapien
acagcaagaaagtgaaactgcactacaaaaaga

SEQ ID NO: 469526 - DNA, 33 bp, Homo sapien
acagcaagaaagtgaagctgcactacaaaaaga

SEQ ID NO: 469527 - DNA, 33 bp, Homo sapien
ggttgtacaacactgtcaatataattaatgcca

SEQ ID NO: 469528 - DNA, 33 bp, Homo sapien
ggttgtacaacactgtgaatataattaatgcca

SEQ ID NO: 469529 - DNA, 33 bp, Homo sapien
gggtatgtatgtgatacgtcagcatggacagtt

SEQ ID NO: 469530 - DNA, 33 bp, Homo sapien
gggtatgtatgtgatatgtcagcatggacagtt

SEQ ID NO: 469531 - DNA, 33 bp, Homo sapien
aacccctcagagaataccagtcacataagaggg

SEQ ID NO: 469532 - DNA, 33 bp, Homo sapien
aacccctcagagaatatcagtcacataagaggg

SEQ ID NO: 469533 - DNA, 33 bp, Homo sapien
atcttcatgaaaagaccggaaagatatacatcc

SEQ ID NO: 469534 - DNA, 33 bp, Homo sapien
atcttcatgaaaagactggaaagatatacatcc

SEQ ID NO: 469535 - DNA, 33 bp, Homo sapien
gatcaattgtttataaaattcacctagattata

SEQ ID NO: 469536 - DNA, 33 bp, Homo sapien
gatcaattgtttataatattcacctagattata

SEQ ID NO: 469537 - DNA, 33 bp, Homo sapien
gtttgcaacctattgaagagaagaaatagaggt

SEQ ID NO: 469538 - DNA, 33 bp, Homo sapien
gtttgcaacctattgacgagaagaaatagaggt

SEQ ID NO: 469539 - DNA, 33 bp, Homo sapien
ttgttttcattggctaaagggatgactgtctta

SEQ ID NO: 469540 - DNA, 33 bp, Homo sapien
ttgttttcattggctatagggatgactgtctta

SEQ ID NO: 469541 - DNA, 33 bp, Homo sapien
actcatgtagtaagtaaccttcagagaccagct

SEQ ID NO: 469542 - DNA, 33 bp, Homo sapien
actcatgtagtaagtagccttcagagaccagct

SEQ ID NO: 469543 - DNA, 33 bp, Homo sapien
ccagcatagcaatgaaatagcctttaatgtgcc

SEQ ID NO: 469544 - DNA, 33 bp, Homo sapien
ccagcatagcaatgaagtagcctttaatgtgcc

SEQ ID NO: 469545 - DNA, 33 bp, Homo sapien
tgctatgctgggatccagagagaaagcttggac

SEQ ID NO: 469546 - DNA, 33 bp, Homo sapien
tgctatgctgggatccggagagaaagcttggac

SEQ ID NO: 469547 - DNA, 33 bp, Homo sapien
tagagcaaatatcaaacatcggcatttcagatg

SEQ ID NO: 469548 - DNA, 33 bp, Homo sapien
tagagcaaatatcaaatatcggcatttcagatg

SEQ ID NO: 469549 - DNA, 33 bp, Homo sapien
gagtaaagcccttattgaagagcattttcaggc

SEQ ID NO: 469550 - DNA, 33 bp, Homo sapien
gagtaaagcccttatttaagagcattttcaggc

SEQ ID NO: 469551 - DNA, 33 bp, Homo sapien
aacaattccaaacagtgaatgtcttgaccaagt

SEQ ID NO: 469552 - DNA, 33 bp, Homo sapien
aacaattccaaacagttaatgtcttgaccaagt

SEQ ID NO: 469553 - DNA, 33 bp, Homo sapien
atagtagatagcagaggataagttcctgataag

SEQ ID NO: 469554 - DNA, 33 bp, Homo sapien
atagtagatagcagagtataagttcctgataag

SEQ ID NO: 469555 - DNA, 33 bp, Homo sapien
tcaaacgctacagttacgttacagtgacctgaa

SEQ ID NO: 469556 - DNA, 33 bp, Homo sapien
tcaaacgctacagttatgttacagtgacctgaa

SEQ ID NO: 469557 - DNA, 33 bp, Homo sapien
ttctgcttgtccttaaatgggctttgactggga

SEQ ID NO: 469558 - DNA, 33 bp, Homo sapien
ttctgcttgtccttaagtgggctttgactggga

SEQ ID NO: 469559 - DNA, 33 bp, Homo sapien
caaaggtgcctgtaaccaccaaatcagacacca

SEQ ID NO: 469560 - DNA, 33 bp, Homo sapien
caaaggtgcctgtaactaccaaatcagacacca

SEQ ID NO: 469561 - DNA, 33 bp, Homo sapien
ttattcctgtttcttcaactggttccaaatgcc

SEQ ID NO: 469562 - DNA, 33 bp, Homo sapien
ttattcctgtttcttcgactggttccaaatgcc

SEQ ID NO: 469563 - DNA, 33 bp, Homo sapien
aaaaaggcttctgacaaagggtattgctttggg

SEQ ID NO: 469564 - DNA, 33 bp, Homo sapien
aaaaaggcttctgacatagggtattgctttggg

SEQ ID NO: 469565 - DNA, 33 bp, Homo sapien
atcactgcagacactacggtattcaaaatcctt

SEQ ID NO: 469566 - DNA, 33 bp, Homo sapien
atcactgcagacactatggtattcaaaatcctt

SEQ ID NO: 469567 - DNA, 33 bp, Homo sapien
ctgctgcatgaagtacaaaaagttcccccaaaa

SEQ ID NO: 469568 - DNA, 33 bp, Homo sapien
ctgctgcatgaagtacgaaaagttcccccaaaa

SEQ ID NO: 469569 - DNA, 33 bp, Homo sapien
cgtctagtcattagcaaaacactgtcaaatgaa

SEQ ID NO: 469570 - DNA, 33 bp, Homo sapien
cgtctagtcattagcagaacactgtcaaatgaa

SEQ ID NO: 469571 - DNA, 33 bp, Homo sapien
tggtctgtacatctgaagtataaaatatcttta

SEQ ID NO: 469572 - DNA, 33 bp, Homo sapien
tggtctgtacatctgaggtataaaatatcttta

SEQ ID NO: 469573 - DNA, 33 bp, Homo sapien
agttacaagccggacagtatggtgactggatgt

SEQ ID NO: 469574 - DNA, 33 bp, Homo sapien
agttacaagccggacattatggtgactggatgt

SEQ ID NO: 469575 - DNA, 33 bp, Homo sapien
ttacttcctttatcaactgcctatctaagaagc

SEQ ID NO: 469576 - DNA, 33 bp, Homo sapien
ttacttcctttatcaattgcctatctaagaagc

SEQ ID NO: 469577 - DNA, 33 bp, Homo sapien
gaatagtgtcacatgtgaagtactcagtaaatg

SEQ ID NO: 469578 - DNA, 33 bp, Homo sapien
gaatagtgtcacatgttaagtactcagtaaatg

SEQ ID NO: 469579 - DNA, 33 bp, Homo sapien
tactcagtacctttaacacctagtgctctgtta

SEQ ID NO: 469580 - DNA, 33 bp, Homo sapien
tactcagtacctttaagacctagtgctctgtta

SEQ ID NO: 469581 - DNA, 33 bp, Homo sapien
ctttttgagaatttgaaaactaagaggtcaatg

SEQ ID NO: 469582 - DNA, 33 bp, Homo sapien
ctttttgagaatttgagaactaagaggtcaatg

SEQ ID NO: 469583 - DNA, 33 bp, Homo sapien
caagattatagagctaacgatagtataaaagtt

SEQ ID NO: 469584 - DNA, 33 bp, Homo sapien
caagattatagagctagcgatagtataaaagtt

SEQ ID NO: 469585 - DNA, 33 bp, Homo sapien
tggtccatccagatgtcaatatatgtcggaggc

SEQ ID NO: 469586 - DNA, 33 bp, Homo sapien
tggtccatccagatgttaatatatgtcggaggc

SEQ ID NO: 469587 - DNA, 33 bp, Homo sapien
atgcacaaattcctcaaaacagaaattcacacc

SEQ ID NO: 469588 - DNA, 33 bp, Homo sapien
atgcacaaattcctcacaacagaaattcacacc

SEQ ID NO: 469589 - DNA, 33 bp, Homo sapien
ccttaattgagtagtacgcttgaatttagttgt

SEQ ID NO: 469590 - DNA, 33 bp, Homo sapien
ccttaattgagtagtatgcttgaatttagttgt

SEQ ID NO: 469591 - DNA, 33 bp, Homo sapien
actagtcttctataatcaccaagttagtctcac

SEQ ID NO: 469592 - DNA, 33 bp, Homo sapien
actagtcttctataattaccaagttagtctcac

SEQ ID NO: 469593 - DNA, 33 bp, Homo sapien
tattttgtggctcttacaaattctgctttttat

SEQ ID NO: 469594 - DNA, 33 bp, Homo sapien
tattttgtggctcttataaattctgctttttat

SEQ ID NO: 469595 - DNA, 33 bp, Homo sapien
tgttctctctcactaacaagggtgaatcacagc

SEQ ID NO: 469596 - DNA, 33 bp, Homo sapien
tgttctctctcactaataagggtgaatcacagc

SEQ ID NO: 469597 - DNA, 33 bp, Homo sapien
ggtagctaccaaacgacggaacttggaaacatc

SEQ ID NO: 469598 - DNA, 33 bp, Homo sapien
ggtagctaccaaacgatggaacttggaaacatc

SEQ ID NO: 469599 - DNA, 33 bp, Homo sapien
actgggaagaagtgcaaggaacagacagctagc

SEQ ID NO: 469600 - DNA, 33 bp, Homo sapien
actgggaagaagtgcagggaacagacagctagc

SEQ ID NO: 469601 - DNA, 33 bp, Homo sapien
tccactctccaaacaaaccttcactgaatgcct

SEQ ID NO: 469602 - DNA, 33 bp, Homo sapien
tccactctccaaacaagccttcactgaatgcct

SEQ ID NO: 469603 - DNA, 33 bp, Homo sapien
ccaggtagggacatcaatgacagcaaagctccc

SEQ ID NO: 469604 - DNA, 33 bp, Homo sapien
ccaggtagggacatcagtgacagcaaagctccc

SEQ ID NO: 469605 - DNA, 33 bp, Homo sapien
actgtttaatgaatacaagttttgtcctcatcc

SEQ ID NO: 469606 - DNA, 33 bp, Homo sapien
actgtttaatgaatacgagttttgtcctcatcc

SEQ ID NO: 469607 - DNA, 33 bp, Homo sapien
tcaccttcagatgccactgattccatcagcatt

SEQ ID NO: 469608 - DNA, 33 bp, Homo sapien
tcaccttcagatgccattgattccatcagcatt

SEQ ID NO: 469609 - DNA, 33 bp, Homo sapien
aagatgaagtgtgactcagctattcaaccacgc

SEQ ID NO: 469610 - DNA, 33 bp, Homo sapien
aagatgaagtgtgacttagctattcaaccacgc

SEQ ID NO: 469611 - DNA, 33 bp, Homo sapien
tgcgagtgtagatgaaataaaaatagcaaaatg

SEQ ID NO: 469612 - DNA, 33 bp, Homo sapien
tgcgagtgtagatgaactaaaaatagcaaaatg

SEQ ID NO: 469613 - DNA, 33 bp, Homo sapien
gatggaggagtgtgctcaatgtcaccgtgggga

SEQ ID NO: 469614 - DNA, 33 bp, Homo sapien
gatggaggagtgtgcttaatgtcaccgtgggga

SEQ ID NO: 469615 - DNA, 33 bp, Homo sapien
aagtgaagggttaacccggactgcagagccatg

SEQ ID NO: 469616 - DNA, 33 bp, Homo sapien
aagtgaagggttaacctggactgcagagccatg

SEQ ID NO: 469617 - DNA, 33 bp, Homo sapien
gatatcccagttgatcacgataggaaacggcag

SEQ ID NO: 469618 - DNA, 33 bp, Homo sapien
gatatcccagttgatcgcgataggaaacggcag

SEQ ID NO: 469619 - DNA, 33 bp, Homo sapien
atgtaacagacattcacagaggaagattttcag

SEQ ID NO: 469620 - DNA, 33 bp, Homo sapien
atgtaacagacattcatagaggaagattttcag

SEQ ID NO: 469621 - DNA, 33 bp, Homo sapien
atagatgtgccagagccgaaagcattgagacat

SEQ ID NO: 469622 - DNA, 33 bp, Homo sapien
atagatgtgccagagcggaaagcattgagacat

SEQ ID NO: 469623 - DNA, 33 bp, Homo sapien
tggttataaacacagacggaaattaagaaacaa

SEQ ID NO: 469624 - DNA, 33 bp, Homo sapien
tggttataaacacagatggaaattaagaaacaa

SEQ ID NO: 469625 - DNA, 33 bp, Homo sapien
gacactccctgaaaaacgctgctagttcagcct

SEQ ID NO: 469626 - DNA, 33 bp, Homo sapien
gacactccctgaaaaatgctgctagttcagcct

SEQ ID NO: 469627 - DNA, 33 bp, Homo sapien
ttccttgaagcaacagcctcctcggttgatttt

SEQ ID NO: 469628 - DNA, 33 bp, Homo sapien
ttccttgaagcaacaggctcctcggttgatttt

SEQ ID NO: 469629 - DNA, 33 bp, Homo sapien
ttcaggtccgtgtgtcccatttcactgcactgt

SEQ ID NO: 469630 - DNA, 33 bp, Homo sapien
ttcaggtccgtgtgtctcatttcactgcactgt

SEQ ID NO: 469631 - DNA, 33 bp, Homo sapien
tagctgattatcgggaagcctgtctatctctag

SEQ ID NO: 469632 - DNA, 33 bp, Homo sapien
tagctgattatcgggatgcctgtctatctctag

SEQ ID NO: 469633 - DNA, 33 bp, Homo sapien
cggcccctgcactgaggaacctgggccaagctg

SEQ ID NO: 469634 - DNA, 33 bp, Homo sapien
cggcccctgcactgagtaacctgggccaagctg

SEQ ID NO: 469635 - DNA, 33 bp, Homo sapien
agcaatttaaacaagacgcaagactttccctcc

SEQ ID NO: 469636 - DNA, 33 bp, Homo sapien
agcaatttaaacaagatgcaagactttccctcc

SEQ ID NO: 469637 - DNA, 33 bp, Homo sapien
cttgactgcaaagccaatgatgtatctatctcg

SEQ ID NO: 469638 - DNA, 33 bp, Homo sapien
cttgactgcaaagccagtgatgtatctatctcg

SEQ ID NO: 469639 - DNA, 33 bp, Homo sapien
tgaaaacacatcttcaagttagaatgcctccca

SEQ ID NO: 469640 - DNA, 33 bp, Homo sapien
tgaaaacacatcttcaggttagaatgcctccca

SEQ ID NO: 469641 - DNA, 33 bp, Homo sapien
atcttcctctttaaaccgcgtgctgcacaaggt

SEQ ID NO: 469642 - DNA, 33 bp, Homo sapien
atcttcctctttaaactgcgtgctgcacaaggt

SEQ ID NO: 469643 - DNA, 33 bp, Homo sapien
aggcacgtaccactaactgctctacagatgaag

SEQ ID NO: 469644 - DNA, 33 bp, Homo sapien
aggcacgtaccactaattgctctacagatgaag

SEQ ID NO: 469645 - DNA, 33 bp, Homo sapien
ctttcttctttgtgtcccatcccagaattacca

SEQ ID NO: 469646 - DNA, 33 bp, Homo sapien
ctttcttctttgtgtctcatcccagaattacca

SEQ ID NO: 469647 - DNA, 33 bp, Homo sapien
atccatacaggaaggaaaagagtagcacctgcc

SEQ ID NO: 469648 - DNA, 33 bp, Homo sapien
atccatacaggaaggagaagagtagcacctgcc

SEQ ID NO: 469649 - DNA, 33 bp, Homo sapien
agactcaggtggagccaaaccatgagttcccat

SEQ ID NO: 469650 - DNA, 33 bp, Homo sapien
agactcaggtggagccgaaccatgagttcccat

SEQ ID NO: 469651 - DNA, 33 bp, Homo sapien
taacatccttcgaagacgcttcgccgcaattcc

SEQ ID NO: 469652 - DNA, 33 bp, Homo sapien
taacatccttcgaagatgcttcgccgcaattcc

SEQ ID NO: 469653 - DNA, 33 bp, Homo sapien
actggcttcatggctccagtttgtggtcaaagc

SEQ ID NO: 469654 - DNA, 33 bp, Homo sapien
actggcttcatggctctagtttgtggtcaaagc

SEQ ID NO: 469655 - DNA, 33 bp, Homo sapien
gataagtgagttaaaacacagaatgctaatcgt

SEQ ID NO: 469656 - DNA, 33 bp, Homo sapien
gataagtgagttaaaatacagaatgctaatcgt

SEQ ID NO: 469657 - DNA, 33 bp, Homo sapien
taccctaaaaactcacaaaaaatgatttccttt

SEQ ID NO: 469658 - DNA, 33 bp, Homo sapien
taccctaaaaactcacgaaaaatgatttccttt

SEQ ID NO: 469659 - DNA, 33 bp, Homo sapien
agtttttattaactaacagcaaccagaaacgta

SEQ ID NO: 469660 - DNA, 33 bp, Homo sapien
agtttttattaactaagagcaaccagaaacgta

SEQ ID NO: 469661 - DNA, 33 bp, Homo sapien
gggacagagtgtggaccgagaagagccaaagag

SEQ ID NO: 469662 - DNA, 33 bp, Homo sapien
gggacagagtgtggacggagaagagccaaagag

SEQ ID NO: 469663 - DNA, 33 bp, Homo sapien
tttaagtgctccggaaagcatgctcctgggttt

SEQ ID NO: 469664 - DNA, 33 bp, Homo sapien
tttaagtgctccggaaggcatgctcctgggttt

SEQ ID NO: 469665 - DNA, 33 bp, Homo sapien
gaactaggctcaattcaaataaaattggtgagg

SEQ ID NO: 469666 - DNA, 33 bp, Homo sapien
gaactaggctcaattcgaataaaattggtgagg

SEQ ID NO: 469667 - DNA, 33 bp, Homo sapien
tcacctggcgaagaaccgggactaaagggctgt

SEQ ID NO: 469668 - DNA, 33 bp, Homo sapien
tcacctggcgaagaactgggactaaagggctgt

SEQ ID NO: 469669 - DNA, 33 bp, Homo sapien
ttttaaaagacaggtaacatgaactatatttag

SEQ ID NO: 469670 - DNA, 33 bp, Homo sapien
ttttaaaagacaggtatcatgaactatatttag

SEQ ID NO: 469671 - DNA, 33 bp, Homo sapien
gtccaactcactcacaaataccctctgcaatgt

SEQ ID NO: 469672 - DNA, 33 bp, Homo sapien
gtccaactcactcacagataccctctgcaatgt

SEQ ID NO: 469673 - DNA, 33 bp, Homo sapien
ctgagtatttagccaaccaccatttgatggact

SEQ ID NO: 469674 - DNA, 33 bp, Homo sapien
ctgagtatttagccaatcaccatttgatggact

SEQ ID NO: 469675 - DNA, 33 bp, Homo sapien
tgtttctcgctactctaacaacacttaacacat

SEQ ID NO: 469676 - DNA, 33 bp, Homo sapien
tgtttctcgctactctgacaacacttaacacat

SEQ ID NO: 469677 - DNA, 33 bp, Homo sapien
actgctgttgaaacacaaaagtgagcgaacatg

SEQ ID NO: 469678 - DNA, 33 bp, Homo sapien
actgctgttgaaacacgaaagtgagcgaacatg

SEQ ID NO: 469679 - DNA, 33 bp, Homo sapien
ctgggtgagcacggaaatcctgtttttagggca

SEQ ID NO: 469680 - DNA, 33 bp, Homo sapien
ctgggtgagcacggaagtcctgtttttagggca

SEQ ID NO: 469681 - DNA, 33 bp, Homo sapien
tcattccagagggccaatgaaaaaaatgtattt

SEQ ID NO: 469682 - DNA, 33 bp, Homo sapien
tcattccagagggccagtgaaaaaaatgtattt

SEQ ID NO: 469683 - DNA, 33 bp, Homo sapien
gagcagaagcctgatacaaaactgatcaccata

SEQ ID NO: 469684 - DNA, 33 bp, Homo sapien
gagcagaagcctgatataaaactgatcaccata

SEQ ID NO: 469685 - DNA, 33 bp, Homo sapien
aaagaactaaataaacagaaagacgtcctatgt

SEQ ID NO: 469686 - DNA, 33 bp, Homo sapien
aaagaactaaataaacggaaagacgtcctatgt

SEQ ID NO: 469687 - DNA, 33 bp, Homo sapien
aagccagtggtgctacggaaaagccctggagcc

SEQ ID NO: 469688 - DNA, 33 bp, Homo sapien
aagccagtggtgctactgaaaagccctggagcc

SEQ ID NO: 469689 - DNA, 33 bp, Homo sapien
agtgcaggacactctcacctcgaatattgcagc

SEQ ID NO: 469690 - DNA, 33 bp, Homo sapien
agtgcaggacactctcgcctcgaatattgcagc

SEQ ID NO: 469691 - DNA, 33 bp, Homo sapien
tgtgcgtctatgagcaagcgttgtgcatgcaaa

SEQ ID NO: 469692 - DNA, 33 bp, Homo sapien
tgtgcgtctatgagcaggcgttgtgcatgcaaa

SEQ ID NO: 469693 - DNA, 33 bp, Homo sapien
ccaggagtggggctcaataagccatgaagtgat

SEQ ID NO: 469694 - DNA, 33 bp, Homo sapien
ccaggagtggggctcagtaagccatgaagtgat

SEQ ID NO: 469695 - DNA, 33 bp, Homo sapien
tgaaagtgctaggttccaggcgtgagccactgt

SEQ ID NO: 469696 - DNA, 33 bp, Homo sapien
tgaaagtgctaggttctaggcgtgagccactgt

SEQ ID NO: 469697 - DNA, 33 bp, Homo sapien
attcacaaatcccttaacctatgtgtaagtacc

SEQ ID NO: 469698 - DNA, 33 bp, Homo sapien
attcacaaatcccttagcctatgtgtaagtacc

SEQ ID NO: 469699 - DNA, 33 bp, Homo sapien
gatgaaagctaaaatcaccagtaatctctacat

SEQ ID NO: 469700 - DNA, 33 bp, Homo sapien
gatgaaagctaaaatcgccagtaatctctacat

SEQ ID NO: 469701 - DNA, 33 bp, Homo sapien
tccagaaaatacctggaaaaatgcttaggggga

SEQ ID NO: 469702 - DNA, 33 bp, Homo sapien
tccagaaaatacctgggaaaatgcttaggggga

SEQ ID NO: 469703 - DNA, 33 bp, Homo sapien
caacaatggttaattacatgtactcactggatt

SEQ ID NO: 469704 - DNA, 33 bp, Homo sapien
caacaatggttaattatatgtactcactggatt

SEQ ID NO: 469705 - DNA, 33 bp, Homo sapien
acttagcagcttagcaacttgaatttttttgta

SEQ ID NO: 469706 - DNA, 33 bp, Homo sapien
acttagcagcttagcatcttgaatttttttgta

SEQ ID NO: 469707 - DNA, 33 bp, Homo sapien
aagaaggattttttcaccatttctcatgtacct

SEQ ID NO: 469708 - DNA, 33 bp, Homo sapien
aagaaggattttttcagcatttctcatgtacct

SEQ ID NO: 469709 - DNA, 33 bp, Homo sapien
tgcagggttgaaatcacggctttttgactgtga

SEQ ID NO: 469710 - DNA, 33 bp, Homo sapien
tgcagggttgaaatcatggctttttgactgtga

SEQ ID NO: 469711 - DNA, 33 bp, Homo sapien
ctcagcgtcttcaaagaaaagttgtagcagaaa

SEQ ID NO: 469712 - DNA, 33 bp, Homo sapien
ctcagcgtcttcaaaggaaagttgtagcagaaa

SEQ ID NO: 469713 - DNA, 33 bp, Homo sapien
gtgaaagagctaaaacagaattgaatagctaat

SEQ ID NO: 469714 - DNA, 33 bp, Homo sapien
gtgaaagagctaaaacggaattgaatagctaat

SEQ ID NO: 469715 - DNA, 33 bp, Homo sapien
atagaaattatcaaaacaaaacatagtaagcag

SEQ ID NO: 469716 - DNA, 33 bp, Homo sapien
atagaaattatcaaaagaaaacatagtaagcag

SEQ ID NO: 469717 - DNA, 33 bp, Homo sapien
aatttccaaagctcacagaaggcaaacagccaa

SEQ ID NO: 469718 - DNA, 33 bp, Homo sapien
aatttccaaagctcacggaaggcaaacagccaa

SEQ ID NO: 469719 - DNA, 33 bp, Homo sapien
tgctaacaacagttaaatctggatacaggatat

SEQ ID NO: 469720 - DNA, 33 bp, Homo sapien
tgctaacaacagttaactctggatacaggatat

SEQ ID NO: 469721 - DNA, 33 bp, Homo sapien
gagaaaaagctaatgcaaagtgcacctgttaaa

SEQ ID NO: 469722 - DNA, 33 bp, Homo sapien
gagaaaaagctaatgctaagtgcacctgttaaa

SEQ ID NO: 469723 - DNA, 33 bp, Homo sapien
taaacagtgttgtgtacgttcagtggaacttta

SEQ ID NO: 469724 - DNA, 33 bp, Homo sapien
taaacagtgttgtgtatgttcagtggaacttta

SEQ ID NO: 469725 - DNA, 33 bp, Homo sapien
acatttaagtaaaaaaattttgctgattaaaaa

SEQ ID NO: 469726 - DNA, 33 bp, Homo sapien
acatttaagtaaaaaagttttgctgattaaaaa

SEQ ID NO: 469727 - DNA, 33 bp, Homo sapien
gtctgttcttagaggaagtcactggtataacca

SEQ ID NO: 469728 - DNA, 33 bp, Homo sapien
gtctgttcttagaggaggtcactggtataacca

SEQ ID NO: 469729 - DNA, 33 bp, Homo sapien
attcccctgctctcataaactcactaaagcttt

SEQ ID NO: 469730 - DNA, 33 bp, Homo sapien
attcccctgctctcatgaactcactaaagcttt

SEQ ID NO: 469731 - DNA, 33 bp, Homo sapien
cactaaacatctagcaaaagtctgaacaagagt

SEQ ID NO: 469732 - DNA, 33 bp, Homo sapien
cactaaacatctagcagaagtctgaacaagagt

SEQ ID NO: 469733 - DNA, 33 bp, Homo sapien
atctaatagggacagaagtacttaggccattag

SEQ ID NO: 469734 - DNA, 33 bp, Homo sapien
atctaatagggacagacgtacttaggccattag

SEQ ID NO: 469735 - DNA, 33 bp, Homo sapien
ttcatttcaggtatctaaacacttaagagtatt

SEQ ID NO: 469736 - DNA, 33 bp, Homo sapien
ttcatttcaggtatctgaacacttaagagtatt

SEQ ID NO: 469737 - DNA, 33 bp, Homo sapien
aaggctaaaatatgccaaatatgctctaagaca

SEQ ID NO: 469738 - DNA, 33 bp, Homo sapien
aaggctaaaatatgccgaatatgctctaagaca

SEQ ID NO: 469739 - DNA, 33 bp, Homo sapien
gggagggagcgctaacagtagtgcctacctgcc

SEQ ID NO: 469740 - DNA, 33 bp, Homo sapien
gggagggagcgctaaccgtagtgcctacctgcc

SEQ ID NO: 469741 - DNA, 33 bp, Homo sapien
ccacaccagtttctccagagtggaaagactttc

SEQ ID NO: 469742 - DNA, 33 bp, Homo sapien
ccacaccagtttctccggagtggaaagactttc

SEQ ID NO: 469743 - DNA, 33 bp, Homo sapien
ctgttgtttgttcttaccactagtttcctgttt

SEQ ID NO: 469744 - DNA, 33 bp, Homo sapien
ctgttgtttgttcttatcactagtttcctgttt

SEQ ID NO: 469745 - DNA, 33 bp, Homo sapien
cttttctactgcaaggcatcataagctaccaat

SEQ ID NO: 469746 - DNA, 33 bp, Homo sapien
cttttctactgcaaggtatcataagctaccaat

SEQ ID NO: 469747 - DNA, 33 bp, Homo sapien
ttagcttcgaatcacaataagtcaaagtactca

SEQ ID NO: 469748 - DNA, 33 bp, Homo sapien
ttagcttcgaatcacagtaagtcaaagtactca

SEQ ID NO: 469749 - DNA, 33 bp, Homo sapien
aaatttacacctatcaaaagaagtctgacaagt

SEQ ID NO: 469750 - DNA, 33 bp, Homo sapien
aaatttacacctatcacaagaagtctgacaagt

SEQ ID NO: 469751 - DNA, 33 bp, Homo sapien
agctactgaaaacacaacggagctcttccaact

SEQ ID NO: 469752 - DNA, 33 bp, Homo sapien
agctactgaaaacacagcggagctcttccaact

SEQ ID NO: 469753 - DNA, 33 bp, Homo sapien
ctcagcctgaaatgaacggattaggaataaaag

SEQ ID NO: 469754 - DNA, 33 bp, Homo sapien
ctcagcctgaaatgaatggattaggaataaaag

SEQ ID NO: 469755 - DNA, 33 bp, Homo sapien
tttgacttcacataagacatgagtccagctggt

SEQ ID NO: 469756 - DNA, 33 bp, Homo sapien
tttgacttcacataagtcatgagtccagctggt

SEQ ID NO: 469757 - DNA, 33 bp, Homo sapien
ctcaaaaccacactgccacagtgacggatagag

SEQ ID NO: 469758 - DNA, 33 bp, Homo sapien
ctcaaaaccacactgcgacagtgacggatagag

SEQ ID NO: 469759 - DNA, 33 bp, Homo sapien
taaggttctcactccgccctccgtgtccttgat

SEQ ID NO: 469760 - DNA, 33 bp, Homo sapien
taaggttctcactccgtcctccgtgtccttgat

SEQ ID NO: 469761 - DNA, 33 bp, Homo sapien
tcacactgcagagaaccattgaaggctattagt

SEQ ID NO: 469762 - DNA, 33 bp, Homo sapien
tcacactgcagagaacgattgaaggctattagt

SEQ ID NO: 469763 - DNA, 33 bp, Homo sapien
ttcctcttaagtagcagcttccaatgtcatatt

SEQ ID NO: 469764 - DNA, 33 bp, Homo sapien
ttcctcttaagtagcatcttccaatgtcatatt

SEQ ID NO: 469765 - DNA, 33 bp, Homo sapien
tttaagtgatgatgcagatttctagttccatct

SEQ ID NO: 469766 - DNA, 33 bp, Homo sapien
tttaagtgatgatgcatatttctagttccatct

SEQ ID NO: 469767 - DNA, 33 bp, Homo sapien
tcagtgataaccttggccatataggagagtata

SEQ ID NO: 469768 - DNA, 33 bp, Homo sapien
tcagtgataaccttggtcatataggagagtata

SEQ ID NO: 469769 - DNA, 33 bp, Homo sapien
cgtaagtccatcttacaaggatctcagcacgag

SEQ ID NO: 469770 - DNA, 33 bp, Homo sapien
cgtaagtccatcttacgaggatctcagcacgag

SEQ ID NO: 469771 - DNA, 33 bp, Homo sapien
caaagtgtgtccataactgggctaaaagcatct

SEQ ID NO: 469772 - DNA, 33 bp, Homo sapien
caaagtgtgtccataattgggctaaaagcatct

SEQ ID NO: 469773 - DNA, 33 bp, Homo sapien
tcttacatgtcagaacacaaagtattatcatcc

SEQ ID NO: 469774 - DNA, 33 bp, Homo sapien
tcttacatgtcagaacgcaaagtattatcatcc

SEQ ID NO: 469775 - DNA, 33 bp, Homo sapien
gttggcaggatctgcacgtttgccacctgaggc

SEQ ID NO: 469776 - DNA, 33 bp, Homo sapien
gttggcaggatctgcaggtttgccacctgaggc

SEQ ID NO: 469777 - DNA, 33 bp, Homo sapien
cagacctagattgacccgttagctctcccactt

SEQ ID NO: 469778 - DNA, 33 bp, Homo sapien
cagacctagattgacctgttagctctcccactt

SEQ ID NO: 469779 - DNA, 33 bp, Homo sapien
gagcaggcccacgacactgtaggcacaaggcag

SEQ ID NO: 469780 - DNA, 33 bp, Homo sapien
gagcaggcccacgacattgtaggcacaaggcag

SEQ ID NO: 469781 - DNA, 33 bp, Homo sapien
attatgagaagaggaaactctcgctgaagaaag

SEQ ID NO: 469782 - DNA, 33 bp, Homo sapien
attatgagaagaggaagctctcgctgaagaaag

SEQ ID NO: 469783 - DNA, 33 bp, Homo sapien
ggaacccttatcttcacgatcatgtgaactgtg

SEQ ID NO: 469784 - DNA, 33 bp, Homo sapien
ggaacccttatcttcatgatcatgtgaactgtg

SEQ ID NO: 469785 - DNA, 33 bp, Homo sapien
atgttgttgacaccaccggtccaggaatcgcgg

SEQ ID NO: 469786 - DNA, 33 bp, Homo sapien
atgttgttgacaccactggtccaggaatcgcgg

SEQ ID NO: 469787 - DNA, 33 bp, Homo sapien
gcccattcagaaacagcctccccaacattctat

SEQ ID NO: 469788 - DNA, 33 bp, Homo sapien
gcccattcagaaacagtctccccaacattctat

SEQ ID NO: 469789 - DNA, 33 bp, Homo sapien
tatcttccttctttgaccctagtggtttattgt

SEQ ID NO: 469790 - DNA, 33 bp, Homo sapien
tatcttccttctttgatcctagtggtttattgt

SEQ ID NO: 469791 - DNA, 33 bp, Homo sapien
cattacaccagagcacagcttccaaatgttgga

SEQ ID NO: 469792 - DNA, 33 bp, Homo sapien
cattacaccagagcacggcttccaaatgttgga

SEQ ID NO: 469793 - DNA, 33 bp, Homo sapien
ggtccgattccaaaaagatctaaaaggccagat

SEQ ID NO: 469794 - DNA, 33 bp, Homo sapien
ggtccgattccaaaaatatctaaaaggccagat

SEQ ID NO: 469795 - DNA, 33 bp, Homo sapien
gaaggaaaagaaggaacagtgaagcctgtggct

SEQ ID NO: 469796 - DNA, 33 bp, Homo sapien
gaaggaaaagaaggaagagtgaagcctgtggct

SEQ ID NO: 469797 - DNA, 33 bp, Homo sapien
gaaaatgacttaaagaacgagcagtcaccatga

SEQ ID NO: 469798 - DNA, 33 bp, Homo sapien
gaaaatgacttaaagagcgagcagtcaccatga

SEQ ID NO: 469799 - DNA, 33 bp, Homo sapien
cactctattcctttgaactgattaattgactgg

SEQ ID NO: 469800 - DNA, 33 bp, Homo sapien
cactctattcctttgagctgattaattgactgg

SEQ ID NO: 469801 - DNA, 33 bp, Homo sapien
catttattctttcagccatccagtctgtggtat

SEQ ID NO: 469802 - DNA, 33 bp, Homo sapien
catttattctttcagctatccagtctgtggtat

SEQ ID NO: 469803 - DNA, 33 bp, Homo sapien
ttcactttcttcgaaacgcaggatgctttttgg

SEQ ID NO: 469804 - DNA, 33 bp, Homo sapien
ttcactttcttcgaaatgcaggatgctttttgg

SEQ ID NO: 469805 - DNA, 33 bp, Homo sapien
agaggagcaggatggcccggttaccatggcaac

SEQ ID NO: 469806 - DNA, 33 bp, Homo sapien
agaggagcaggatggctcggttaccatggcaac

SEQ ID NO: 469807 - DNA, 33 bp, Homo sapien
ggaaggatggcgtttacgctgcgccggctctgt

SEQ ID NO: 469808 - DNA, 33 bp, Homo sapien
ggaaggatggcgtttaggctgcgccggctctgt

SEQ ID NO: 469809 - DNA, 33 bp, Homo sapien
ctccaattgtatcctaagtccagtgaagttaca

SEQ ID NO: 469810 - DNA, 33 bp, Homo sapien
ctccaattgtatcctatgtccagtgaagttaca

SEQ ID NO: 469811 - DNA, 33 bp, Homo sapien
cacagagtgagccagaaagaatcacccacctca

SEQ ID NO: 469812 - DNA, 33 bp, Homo sapien
cacagagtgagccagagagaatcacccacctca

SEQ ID NO: 469813 - DNA, 33 bp, Homo sapien
ctttcctcgtcttgtacgtttttccatgctgag

SEQ ID NO: 469814 - DNA, 33 bp, Homo sapien
ctttcctcgtcttgtatgtttttccatgctgag

SEQ ID NO: 469815 - DNA, 33 bp, Homo sapien
ataaaatatcaaagaactgtgacaaattggatg

SEQ ID NO: 469816 - DNA, 33 bp, Homo sapien
ataaaatatcaaagaattgtgacaaattggatg

SEQ ID NO: 469817 - DNA, 33 bp, Homo sapien
aaataggatggtagaaataaaagcacagtagat

SEQ ID NO: 469818 - DNA, 33 bp, Homo sapien
aaataggatggtagaactaaaagcacagtagat

SEQ ID NO: 469819 - DNA, 33 bp, Homo sapien
aaattctagctataaacgattgccaaactaaac

SEQ ID NO: 469820 - DNA, 33 bp, Homo sapien
aaattctagctataaatgattgccaaactaaac

SEQ ID NO: 469821 - DNA, 33 bp, Homo sapien
tggtgccacctagctacgctcactgacacgcat

SEQ ID NO: 469822 - DNA, 33 bp, Homo sapien
tggtgccacctagctatgctcactgacacgcat

SEQ ID NO: 469823 - DNA, 33 bp, Homo sapien
ccaatgtggaaagacacgaactgattcaatcag

SEQ ID NO: 469824 - DNA, 33 bp, Homo sapien
ccaatgtggaaagacatgaactgattcaatcag

SEQ ID NO: 469825 - DNA, 33 bp, Homo sapien
tcagttgtatataacaatggttcattccttctt

SEQ ID NO: 469826 - DNA, 33 bp, Homo sapien
tcagttgtatataacagtggttcattccttctt

SEQ ID NO: 469827 - DNA, 33 bp, Homo sapien
aaaaaaaatctacatgcagactggcagcaactt

SEQ ID NO: 469828 - DNA, 33 bp, Homo sapien
aaaaaaaatctacatggagactggcagcaactt

SEQ ID NO: 469829 - DNA, 33 bp, Homo sapien
aaggccccatataggccgaggtttctgtttttt

SEQ ID NO: 469830 - DNA, 33 bp, Homo sapien
aaggccccatataggctgaggtttctgtttttt

SEQ ID NO: 469831 - DNA, 33 bp, Homo sapien
taatggatcagagatacgtacagtcttaaagaa

SEQ ID NO: 469832 - DNA, 33 bp, Homo sapien
taatggatcagagatatgtacagtcttaaagaa

SEQ ID NO: 469833 - DNA, 33 bp, Homo sapien
ggtgtgtcacgtggcaacctggaccagggatct

SEQ ID NO: 469834 - DNA, 33 bp, Homo sapien
ggtgtgtcacgtggcatcctggaccagggatct

SEQ ID NO: 469835 - DNA, 33 bp, Homo sapien
tttaaacaagctctggaagtgtaatgtgcccac

SEQ ID NO: 469836 - DNA, 33 bp, Homo sapien
tttaaacaagctctgggagtgtaatgtgcccac

SEQ ID NO: 469837 - DNA, 33 bp, Homo sapien
gcacttattccagtgaatcaaatgcagcttttc

SEQ ID NO: 469838 - DNA, 33 bp, Homo sapien
gcacttattccagtgagtcaaatgcagcttttc

SEQ ID NO: 469839 - DNA, 33 bp, Homo sapien
tgaaccaatcaaggaacgatgagccagtgaagg

SEQ ID NO: 469840 - DNA, 33 bp, Homo sapien
tgaaccaatcaaggaatgatgagccagtgaagg

SEQ ID NO: 469841 - DNA, 33 bp, Homo sapien
cctgagctaagacagcagcgcttggggagaagc

SEQ ID NO: 469842 - DNA, 33 bp, Homo sapien
cctgagctaagacagcggcgcttggggagaagc

SEQ ID NO: 469843 - DNA, 33 bp, Homo sapien
cctgtggcactttagaatattgataaccaccac

SEQ ID NO: 469844 - DNA, 33 bp, Homo sapien
cctgtggcactttagagtattgataaccaccac

SEQ ID NO: 469845 - DNA, 33 bp, Homo sapien
cttcaaaccactgatacgtagctgccggtcctc

SEQ ID NO: 469846 - DNA, 33 bp, Homo sapien
cttcaaaccactgatatgtagctgccggtcctc

SEQ ID NO: 469847 - DNA, 33 bp, Homo sapien
aaaagctgttgatagcgcaaaagaaaagcctct

SEQ ID NO: 469848 - DNA, 33 bp, Homo sapien
aaaagctgttgatagctcaaaagaaaagcctct

SEQ ID NO: 469849 - DNA, 33 bp, Homo sapien
cacagaccttccgtccaaaacctctttccttct

SEQ ID NO: 469850 - DNA, 33 bp, Homo sapien
cacagaccttccgtccgaaacctctttccttct

SEQ ID NO: 469851 - DNA, 33 bp, Homo sapien
ctgggagggagttggccgatcaatcgtgtctcc

SEQ ID NO: 469852 - DNA, 33 bp, Homo sapien
ctgggagggagttggctgatcaatcgtgtctcc

SEQ ID NO: 469853 - DNA, 33 bp, Homo sapien
ctccttcattgaaaaaagctgatctatgtccca

SEQ ID NO: 469854 - DNA, 33 bp, Homo sapien
ctccttcattgaaaaaggctgatctatgtccca

SEQ ID NO: 469855 - DNA, 33 bp, Homo sapien
gcaccttaataaacacagtgtatttgtgcttcc

SEQ ID NO: 469856 - DNA, 33 bp, Homo sapien
gcaccttaataaacacggtgtatttgtgcttcc

SEQ ID NO: 469857 - DNA, 33 bp, Homo sapien
aaaacacccgcatttaaacctggagacagatgc

SEQ ID NO: 469858 - DNA, 33 bp, Homo sapien
aaaacacccgcatttacacctggagacagatgc

SEQ ID NO: 469859 - DNA, 33 bp, Homo sapien
aatcgggacaggataccaaatgacctttcttct

SEQ ID NO: 469860 - DNA, 33 bp, Homo sapien
aatcgggacaggatactaaatgacctttcttct

SEQ ID NO: 469861 - DNA, 33 bp, Homo sapien
ggctcaggctgctaacagactagatcaggattt

SEQ ID NO: 469862 - DNA, 33 bp, Homo sapien
ggctcaggctgctaacggactagatcaggattt

SEQ ID NO: 469863 - DNA, 33 bp, Homo sapien
cccacagagcggatgaaccctccctgtaggaga

SEQ ID NO: 469864 - DNA, 33 bp, Homo sapien
cccacagagcggatgatccctccctgtaggaga

SEQ ID NO: 469865 - DNA, 33 bp, Homo sapien
gctgcaagctcttccccagatatccatttcctt

SEQ ID NO: 469866 - DNA, 33 bp, Homo sapien
gctgcaagctcttcccgagatatccatttcctt

SEQ ID NO: 469867 - DNA, 33 bp, Homo sapien
tgggcagtgcaacaacagcccaggtttatttct

SEQ ID NO: 469868 - DNA, 33 bp, Homo sapien
tgggcagtgcaacaacggcccaggtttatttct

SEQ ID NO: 469869 - DNA, 33 bp, Homo sapien
cctactctgtccaacaccccccgatctagaaca

SEQ ID NO: 469870 - DNA, 33 bp, Homo sapien
cctactctgtccaacatcccccgatctagaaca

SEQ ID NO: 469871 - DNA, 33 bp, Homo sapien
catgggggaatggttaaaaggaggcagagagcc

SEQ ID NO: 469872 - DNA, 33 bp, Homo sapien
catgggggaatggttagaaggaggcagagagcc

SEQ ID NO: 469873 - DNA, 33 bp, Homo sapien
gtgacttccacaacgccacacaggcagagcagg

SEQ ID NO: 469874 - DNA, 33 bp, Homo sapien
gtgacttccacaacgctacacaggcagagcagg

SEQ ID NO: 469875 - DNA, 33 bp, Homo sapien
ggggcatgccgggtccacactctctatgacccc

SEQ ID NO: 469876 - DNA, 33 bp, Homo sapien
ggggcatgccgggtccgcactctctatgacccc

SEQ ID NO: 469877 - DNA, 33 bp, Homo sapien
tctgcagaggtgatacaaagctgaggcccgagc

SEQ ID NO: 469878 - DNA, 33 bp, Homo sapien
tctgcagaggtgatacgaagctgaggcccgagc

SEQ ID NO: 469879 - DNA, 33 bp, Homo sapien
gttgggcagtaactaaagatgatgcttttagaa

SEQ ID NO: 469880 - DNA, 33 bp, Homo sapien
gttgggcagtaactaaggatgatgcttttagaa

SEQ ID NO: 469881 - DNA, 33 bp, Homo sapien
gcaggctccatagaacccggccaccaggacaga

SEQ ID NO: 469882 - DNA, 33 bp, Homo sapien
gcaggctccatagaactcggccaccaggacaga

SEQ ID NO: 469883 - DNA, 33 bp, Homo sapien
aggatgacagtagaaaaacatgtgtacagccag

SEQ ID NO: 469884 - DNA, 33 bp, Homo sapien
aggatgacagtagaaatacatgtgtacagccag

SEQ ID NO: 469885 - DNA, 33 bp, Homo sapien
gggcttctttttctaaaattcagttatggtctc

SEQ ID NO: 469886 - DNA, 33 bp, Homo sapien
gggcttctttttctaagattcagttatggtctc

SEQ ID NO: 469887 - DNA, 33 bp, Homo sapien
gctggcgtgagcttccagagtagggacagtgcc

SEQ ID NO: 469888 - DNA, 33 bp, Homo sapien
gctggcgtgagcttccggagtagggacagtgcc

SEQ ID NO: 469889 - DNA, 33 bp, Homo sapien
actggacagtcactgaaggtattggatagtcat

SEQ ID NO: 469890 - DNA, 33 bp, Homo sapien
actggacagtcactgacggtattggatagtcat

SEQ ID NO: 469891 - DNA, 33 bp, Homo sapien
tgcatccctggagaaactggggcaaagatgaaa

SEQ ID NO: 469892 - DNA, 33 bp, Homo sapien
tgcatccctggagaaattggggcaaagatgaaa

SEQ ID NO: 469893 - DNA, 33 bp, Homo sapien
ccagtggatgcctccgcagggcctgaggtcaga

SEQ ID NO: 469894 - DNA, 33 bp, Homo sapien
ccagtggatgcctccgtagggcctgaggtcaga

SEQ ID NO: 469895 - DNA, 33 bp, Homo sapien
gcctcccccaatcctggcactgccggaggcttt

SEQ ID NO: 469896 - DNA, 33 bp, Homo sapien
gcctcccccaatcctgtcactgccggaggcttt

SEQ ID NO: 469897 - DNA, 33 bp, Homo sapien
actatatcattattacaaagctacagtaatcaa

SEQ ID NO: 469898 - DNA, 33 bp, Homo sapien
actatatcattattacgaagctacagtaatcaa

SEQ ID NO: 469899 - DNA, 33 bp, Homo sapien
agaatgcctaaccgccagagaatgcagtccagc

SEQ ID NO: 469900 - DNA, 33 bp, Homo sapien
agaatgcctaaccgccggagaatgcagtccagc

SEQ ID NO: 469901 - DNA, 33 bp, Homo sapien
ataacattgttccagcgcacaaactcctgcccc

SEQ ID NO: 469902 - DNA, 33 bp, Homo sapien
ataacattgttccagctcacaaactcctgcccc

SEQ ID NO: 469903 - DNA, 33 bp, Homo sapien
tgaatttaactagagcaaagaagaaagcaaatt

SEQ ID NO: 469904 - DNA, 33 bp, Homo sapien
tgaatttaactagagcgaagaagaaagcaaatt

SEQ ID NO: 469905 - DNA, 33 bp, Homo sapien
ctcagacgtagatgggaacgcagatgtgagtac

SEQ ID NO: 469906 - DNA, 33 bp, Homo sapien
ctcagacgtagatggggacgcagatgtgagtac

SEQ ID NO: 469907 - DNA, 33 bp, Homo sapien
gaagtgagaacctctcaaaatcgatcacctatg

SEQ ID NO: 469908 - DNA, 33 bp, Homo sapien
gaagtgagaacctctcgaaatcgatcacctatg

SEQ ID NO: 469909 - DNA, 33 bp, Homo sapien
ccacacacagtaaatacggaaaactgcatgatg

SEQ ID NO: 469910 - DNA, 33 bp, Homo sapien
ccacacacagtaaatatggaaaactgcatgatg

SEQ ID NO: 469911 - DNA, 33 bp, Homo sapien
cgtagtatatattcaactaactgcatttgtgtt

SEQ ID NO: 469912 - DNA, 33 bp, Homo sapien
cgtagtatatattcaagtaactgcatttgtgtt

SEQ ID NO: 469913 - DNA, 33 bp, Homo sapien
cccacagatgactatgaaaaattggttcccaac

SEQ ID NO: 469914 - DNA, 33 bp, Homo sapien
cccacagatgactatggaaaattggttcccaac

SEQ ID NO: 469915 - DNA, 33 bp, Homo sapien
tatcagaagcttcatggataaaggcgcattaga

SEQ ID NO: 469916 - DNA, 33 bp, Homo sapien
tatcagaagcttcatgtataaaggcgcattaga

SEQ ID NO: 469917 - DNA, 33 bp, Homo sapien
aactctctgcaataggaaggtgatggccaggat

SEQ ID NO: 469918 - DNA, 33 bp, Homo sapien
aactctctgcaataggcaggtgatggccaggat

SEQ ID NO: 469919 - DNA, 33 bp, Homo sapien
gctcagtcaggctgacacatgatattaaccatc

SEQ ID NO: 469920 - DNA, 33 bp, Homo sapien
gctcagtcaggctgacgcatgatattaaccatc

SEQ ID NO: 469921 - DNA, 33 bp, Homo sapien
gttggctggacttaaccgacttgattctaacaa

SEQ ID NO: 469922 - DNA, 33 bp, Homo sapien
gttggctggacttaactgacttgattctaacaa

SEQ ID NO: 469923 - DNA, 33 bp, Homo sapien
tccacttgatagaggaaaaagcagagatggagg

SEQ ID NO: 469924 - DNA, 33 bp, Homo sapien
tccacttgatagaggagaaagcagagatggagg

SEQ ID NO: 469925 - DNA, 33 bp, Homo sapien
tgcacccttgggtctacgtcttccttccgcttt

SEQ ID NO: 469926 - DNA, 33 bp, Homo sapien
tgcacccttgggtctatgtcttccttccgcttt

SEQ ID NO: 469927 - DNA, 33 bp, Homo sapien
tttaagaaaaatcgcgaaggacagccaatttaa

SEQ ID NO: 469928 - DNA, 33 bp, Homo sapien
tttaagaaaaatcgcgcaggacagccaatttaa

SEQ ID NO: 469929 - DNA, 33 bp, Homo sapien
ttttcccaggagtgataatactgtactctgcgt

SEQ ID NO: 469930 - DNA, 33 bp, Homo sapien
ttttcccaggagtgatgatactgtactctgcgt

SEQ ID NO: 469931 - DNA, 33 bp, Homo sapien
cagctgcatatccacaactgtagagtgttttaa

SEQ ID NO: 469932 - DNA, 33 bp, Homo sapien
cagctgcatatccacatctgtagagtgttttaa

SEQ ID NO: 469933 - DNA, 33 bp, Homo sapien
cttcctaacacactccgcggaggaaacgctgtc

SEQ ID NO: 469934 - DNA, 33 bp, Homo sapien
cttcctaacacactcctcggaggaaacgctgtc

SEQ ID NO: 469935 - DNA, 33 bp, Homo sapien
ctccgattctattaacaaaaatggaagaagtgg

SEQ ID NO: 469936 - DNA, 33 bp, Homo sapien
ctccgattctattaacgaaaatggaagaagtgg

SEQ ID NO: 469937 - DNA, 33 bp, Homo sapien
ccatacaggtgtaccaacttttggaaaatccca

SEQ ID NO: 469938 - DNA, 33 bp, Homo sapien
ccatacaggtgtaccagcttttggaaaatccca

SEQ ID NO: 469939 - DNA, 33 bp, Homo sapien
tccagaggctctggtcacttgaaaagatgagct

SEQ ID NO: 469940 - DNA, 33 bp, Homo sapien
tccagaggctctggtcgcttgaaaagatgagct

SEQ ID NO: 469941 - DNA, 33 bp, Homo sapien
tgaataaagtcgctataaacacccatgtgcagg

SEQ ID NO: 469942 - DNA, 33 bp, Homo sapien
tgaataaagtcgctatgaacacccatgtgcagg

SEQ ID NO: 469943 - DNA, 33 bp, Homo sapien
caggtctttctgggtaaatcgcgtgaccttcgg

SEQ ID NO: 469944 - DNA, 33 bp, Homo sapien
caggtctttctgggtagatcgcgtgaccttcgg

SEQ ID NO: 469945 - DNA, 33 bp, Homo sapien
cgctggcaaccccgaccgctgaggaagacaggt

SEQ ID NO: 469946 - DNA, 33 bp, Homo sapien
cgctggcaaccccgactgctgaggaagacaggt

SEQ ID NO: 469947 - DNA, 33 bp, Homo sapien
taagaacataaatcaccgatccatcctgggata

SEQ ID NO: 469948 - DNA, 33 bp, Homo sapien
taagaacataaatcactgatccatcctgggata

SEQ ID NO: 469949 - DNA, 33 bp, Homo sapien
tgagcaataaagaaacacgaccttaagaagaga

SEQ ID NO: 469950 - DNA, 33 bp, Homo sapien
tgagcaataaagaaacgcgaccttaagaagaga

SEQ ID NO: 469951 - DNA, 33 bp, Homo sapien
cctcagcttgtcaggccgcacatgtgggacagg

SEQ ID NO: 469952 - DNA, 33 bp, Homo sapien
cctcagcttgtcaggctgcacatgtgggacagg

SEQ ID NO: 469953 - DNA, 33 bp, Homo sapien
ggcatcagcgtagacccgctgctcaggcttggg

SEQ ID NO: 469954 - DNA, 33 bp, Homo sapien
ggcatcagcgtagacctgctgctcaggcttggg

SEQ ID NO: 469955 - DNA, 33 bp, Homo sapien
gggtctgccttcccgtaaactgcaggaggcagg

SEQ ID NO: 469956 - DNA, 33 bp, Homo sapien
gggtctgccttcccgtgaactgcaggaggcagg

SEQ ID NO: 469957 - DNA, 33 bp, Homo sapien
agcacatttggggtgacgatgtgctacagtcag

SEQ ID NO: 469958 - DNA, 33 bp, Homo sapien
agcacatttggggtgatgatgtgctacagtcag

SEQ ID NO: 469959 - DNA, 33 bp, Homo sapien
tgtgaatcagctttcccagaagtcttggataat

SEQ ID NO: 469960 - DNA, 33 bp, Homo sapien
tgtgaatcagctttcctagaagtcttggataat

SEQ ID NO: 469961 - DNA, 33 bp, Homo sapien
cttcttggaaccatgaagagagctgggccaaca

SEQ ID NO: 469962 - DNA, 33 bp, Homo sapien
cttcttggaaccatgaggagagctgggccaaca

SEQ ID NO: 469963 - DNA, 33 bp, Homo sapien
acttggacactgtaaacttaggttcacatcttg

SEQ ID NO: 469964 - DNA, 33 bp, Homo sapien
acttggacactgtaaatttaggttcacatcttg

SEQ ID NO: 469965 - DNA, 33 bp, Homo sapien
acagttaataattccacagcatctgtgaaccta

SEQ ID NO: 469966 - DNA, 33 bp, Homo sapien
acagttaataattccatagcatctgtgaaccta

SEQ ID NO: 469967 - DNA, 33 bp, Homo sapien
gggacagagaacgtgcaattggaagtggctggt

SEQ ID NO: 469968 - DNA, 33 bp, Homo sapien
gggacagagaacgtgcgattggaagtggctggt

SEQ ID NO: 469969 - DNA, 33 bp, Homo sapien
gtattcttcaatatgacgcaatgttaaacactt

SEQ ID NO: 469970 - DNA, 33 bp, Homo sapien
gtattcttcaatatgatgcaatgttaaacactt

SEQ ID NO: 469971 - DNA, 33 bp, Homo sapien
ctattcagcattctaccggaagttctggactgt

SEQ ID NO: 469972 - DNA, 33 bp, Homo sapien
ctattcagcattctactggaagttctggactgt

SEQ ID NO: 469973 - DNA, 33 bp, Homo sapien
ctgaatggcccagaaaatttccaggaacaaatt

SEQ ID NO: 469974 - DNA, 33 bp, Homo sapien
ctgaatggcccagaaattttccaggaacaaatt

SEQ ID NO: 469975 - DNA, 33 bp, Homo sapien
ctgctggaataaagaccacgttcctcagaattc

SEQ ID NO: 469976 - DNA, 33 bp, Homo sapien
ctgctggaataaagacgacgttcctcagaattc

SEQ ID NO: 469977 - DNA, 33 bp, Homo sapien
ggcctgtagagaaggacgcagatggctttgctg

SEQ ID NO: 469978 - DNA, 33 bp, Homo sapien
ggcctgtagagaaggatgcagatggctttgctg

SEQ ID NO: 469979 - DNA, 33 bp, Homo sapien
tgctactgacaggcaccgagaggctgaatggag

SEQ ID NO: 469980 - DNA, 33 bp, Homo sapien
tgctactgacaggcactgagaggctgaatggag

SEQ ID NO: 469981 - DNA, 33 bp, Homo sapien
gagcatgctccttcccaaagctgattcgtggcc

SEQ ID NO: 469982 - DNA, 33 bp, Homo sapien
gagcatgctccttcccgaagctgattcgtggcc

SEQ ID NO: 469983 - DNA, 33 bp, Homo sapien
ttggctggagttgggccgaagaggaagcaggtt

SEQ ID NO: 469984 - DNA, 33 bp, Homo sapien
ttggctggagttgggctgaagaggaagcaggtt

SEQ ID NO: 469985 - DNA, 33 bp, Homo sapien
agcaagaatcttcccaagctgatgcaagcgggg

SEQ ID NO: 469986 - DNA, 33 bp, Homo sapien
agcaagaatcttcccaggctgatgcaagcgggg

SEQ ID NO: 469987 - DNA, 33 bp, Homo sapien
agaagggatcatattagctcaacaaaaaccctg

SEQ ID NO: 469988 - DNA, 33 bp, Homo sapien
agaagggatcatattatctcaacaaaaaccctg

SEQ ID NO: 469989 - DNA, 33 bp, Homo sapien
atgagcttaatccaaacgagaattgcattcgga

SEQ ID NO: 469990 - DNA, 33 bp, Homo sapien
atgagcttaatccaaatgagaattgcattcgga

SEQ ID NO: 469991 - DNA, 33 bp, Homo sapien
ctgagttcaagcaggacaccatacagaaagagc

SEQ ID NO: 469992 - DNA, 33 bp, Homo sapien
ctgagttcaagcaggataccatacagaaagagc

SEQ ID NO: 469993 - DNA, 33 bp, Homo sapien
tgttgtgaaaaagaaacgcaactgcgcctgtaa

SEQ ID NO: 469994 - DNA, 33 bp, Homo sapien
tgttgtgaaaaagaaatgcaactgcgcctgtaa

SEQ ID NO: 469995 - DNA, 33 bp, Homo sapien
agtcagagtccgagaaaggaagggcttccagga

SEQ ID NO: 469996 - DNA, 33 bp, Homo sapien
agtcagagtccgagaacggaagggcttccagga

SEQ ID NO: 469997 - DNA, 33 bp, Homo sapien
tggaaagatcagatctaagaggtgatgtcatcc

SEQ ID NO: 469998 - DNA, 33 bp, Homo sapien
tggaaagatcagatctgagaggtgatgtcatcc

SEQ ID NO: 469999 - DNA, 33 bp, Homo sapien
atcagatgtgccgtctcagaacccgggcacggt

SEQ ID NO: 470000 - DNA, 33 bp, Homo sapien
atcagatgtgccgtctgagaacccgggcacggt

SEQ ID NO: 470001 - DNA, 33 bp, Homo sapien
cttctggatatgtgtgcacagatggataaaaat

SEQ ID NO: 470002 - DNA, 33 bp, Homo sapien
cttctggatatgtgtgtacagatggataaaaat

SEQ ID NO: 470003 - DNA, 33 bp, Homo sapien
gtacgtactggcacaacgtttctgaaatgaatg

SEQ ID NO: 470004 - DNA, 33 bp, Homo sapien
gtacgtactggcacaatgtttctgaaatgaatg

SEQ ID NO: 470005 - DNA, 33 bp, Homo sapien
cttctgttgtcttcacccatcagaccgtcctgg

SEQ ID NO: 470006 - DNA, 33 bp, Homo sapien
cttctgttgtcttcactcatcagaccgtcctgg

SEQ ID NO: 470007 - DNA, 33 bp, Homo sapien
tggccctgcggaataccggctccccacagaacc

SEQ ID NO: 470008 - DNA, 33 bp, Homo sapien
tggccctgcggaatactggctccccacagaacc

SEQ ID NO: 470009 - DNA, 33 bp, Homo sapien
gtggaggagtttgggacgcacttcagaagaata

SEQ ID NO: 470010 - DNA, 33 bp, Homo sapien
gtggaggagtttgggatgcacttcagaagaata

SEQ ID NO: 470011 - DNA, 33 bp, Homo sapien
agtctgtcttctaaaaggatagtatctgggcaa

SEQ ID NO: 470012 - DNA, 33 bp, Homo sapien
agtctgtcttctaaaatgatagtatctgggcaa

SEQ ID NO: 470013 - DNA, 33 bp, Homo sapien
caaacactattgaaagcctatttttcttttgtg

SEQ ID NO: 470014 - DNA, 33 bp, Homo sapien
caaacactattgaaaggctatttttcttttgtg

SEQ ID NO: 470015 - DNA, 33 bp, Homo sapien
tgtatgccctatcatgaaggaagtaaggtcatt

SEQ ID NO: 470016 - DNA, 33 bp, Homo sapien
tgtatgccctatcatggaggaagtaaggtcatt

SEQ ID NO: 470017 - DNA, 33 bp, Homo sapien
atgctttccgtttccacgtgttgcttcaaaggc

SEQ ID NO: 470018 - DNA, 33 bp, Homo sapien
atgctttccgtttccatgtgttgcttcaaaggc

SEQ ID NO: 470019 - DNA, 33 bp, Homo sapien
agacttgctgctaaacaaaaagagcaagttaaa

SEQ ID NO: 470020 - DNA, 33 bp, Homo sapien
agacttgctgctaaacgaaaagagcaagttaaa

SEQ ID NO: 470021 - DNA, 33 bp, Homo sapien
agttgacccttgaacaactcgagggctaggagt

SEQ ID NO: 470022 - DNA, 33 bp, Homo sapien
agttgacccttgaacagctcgagggctaggagt

SEQ ID NO: 470023 - DNA, 33 bp, Homo sapien
tgtacttcaatagcgacgctcccctcaggcctc

SEQ ID NO: 470024 - DNA, 33 bp, Homo sapien
tgtacttcaatagcgatgctcccctcaggcctc

SEQ ID NO: 470025 - DNA, 33 bp, Homo sapien
ctcttgccagtttcttaaaatggcttcttagtc

SEQ ID NO: 470026 - DNA, 33 bp, Homo sapien
ctcttgccagtttctttaaatggcttcttagtc

SEQ ID NO: 470027 - DNA, 33 bp, Homo sapien
taagaaagaataattacgagatacagttctaaa

SEQ ID NO: 470028 - DNA, 33 bp, Homo sapien
taagaaagaataattatgagatacagttctaaa

SEQ ID NO: 470029 - DNA, 33 bp, Homo sapien
gtctacctgagtgggacgcctattattattttg

SEQ ID NO: 470030 - DNA, 33 bp, Homo sapien
gtctacctgagtgggatgcctattattattttg

SEQ ID NO: 470031 - DNA, 33 bp, Homo sapien
actatggatcatggcacgaaaaactaattgaaa

SEQ ID NO: 470032 - DNA, 33 bp, Homo sapien
actatggatcatggcaggaaaaactaattgaaa

SEQ ID NO: 470033 - DNA, 33 bp, Homo sapien
attattaacttcaaaggacacaaagattgaaca

SEQ ID NO: 470034 - DNA, 33 bp, Homo sapien
attattaacttcaaagtacacaaagattgaaca

SEQ ID NO: 470035 - DNA, 33 bp, Homo sapien
caccatgcctggcctacgtaagtgctatttcca

SEQ ID NO: 470036 - DNA, 33 bp, Homo sapien
caccatgcctggcctatgtaagtgctatttcca

SEQ ID NO: 470037 - DNA, 33 bp, Homo sapien
ttttccagacttcccaccttaagcatatactaa

SEQ ID NO: 470038 - DNA, 33 bp, Homo sapien
ttttccagacttcccatcttaagcatatactaa

SEQ ID NO: 470039 - DNA, 33 bp, Homo sapien
aaaattgtcacgaaagcagtgatttttttttca

SEQ ID NO: 470040 - DNA, 33 bp, Homo sapien
aaaattgtcacgaaaggagtgatttttttttca

SEQ ID NO: 470041 - DNA, 33 bp, Homo sapien
ctcataaacatgaaaaaaactcgagcatatata

SEQ ID NO: 470042 - DNA, 33 bp, Homo sapien
ctcataaacatgaaaataactcgagcatatata

SEQ ID NO: 470043 - DNA, 33 bp, Homo sapien
aactcacaggtcagtagtaataaaagtagaaaa

SEQ ID NO: 470044 - DNA, 33 bp, Homo sapien
aactcacaggtcagtattaataaaagtagaaaa

SEQ ID NO: 470045 - DNA, 33 bp, Homo sapien
gcagagacttcagtggccacacgttagaaagaa

SEQ ID NO: 470046 - DNA, 33 bp, Homo sapien
gcagagacttcagtggtcacacgttagaaagaa

SEQ ID NO: 470047 - DNA, 33 bp, Homo sapien
gaaaaagcaagcttgaaaaattattcttggcat

SEQ ID NO: 470048 - DNA, 33 bp, Homo sapien
gaaaaagcaagcttgataaattattcttggcat

SEQ ID NO: 470049 - DNA, 33 bp, Homo sapien
ctttaagactaggaatcaggttaagttcaacaa

SEQ ID NO: 470050 - DNA, 33 bp, Homo sapien
ctttaagactaggaatgaggttaagttcaacaa

SEQ ID NO: 470051 - DNA, 33 bp, Homo sapien
gtggtcacaatgtcagccagcagtttcatcaca

SEQ ID NO: 470052 - DNA, 33 bp, Homo sapien
gtggtcacaatgtcagtcagcagtttcatcaca

SEQ ID NO: 470053 - DNA, 33 bp, Homo sapien
gtgagtcgtgattaaacggattgctgtggtcac

SEQ ID NO: 470054 - DNA, 33 bp, Homo sapien
gtgagtcgtgattaaatggattgctgtggtcac

SEQ ID NO: 470055 - DNA, 33 bp, Homo sapien
ggggcttctggtcacactcagggctcatttttg

SEQ ID NO: 470056 - DNA, 33 bp, Homo sapien
ggggcttctggtcacattcagggctcatttttg

SEQ ID NO: 470057 - DNA, 33 bp, Homo sapien
ctctgcaccacagggaagtatgactggccttgt

SEQ ID NO: 470058 - DNA, 33 bp, Homo sapien
ctctgcaccacagggaggtatgactggccttgt

SEQ ID NO: 470059 - DNA, 33 bp, Homo sapien
agaagacgtcaaaatccactgtggcaagtgcca

SEQ ID NO: 470060 - DNA, 33 bp, Homo sapien
agaagacgtcaaaatctactgtggcaagtgcca

SEQ ID NO: 470061 - DNA, 33 bp, Homo sapien
tagataagatctctaacgggctgcccagctctt

SEQ ID NO: 470062 - DNA, 33 bp, Homo sapien
tagataagatctctaatgggctgcccagctctt

SEQ ID NO: 470063 - DNA, 33 bp, Homo sapien
gggctcaaatgatacccctgaccatggcctccc

SEQ ID NO: 470064 - DNA, 33 bp, Homo sapien
gggctcaaatgataccgctgaccatggcctccc

SEQ ID NO: 470065 - DNA, 33 bp, Homo sapien
aaagaactactaaaaacgtaccaggtccaaaca

SEQ ID NO: 470066 - DNA, 33 bp, Homo sapien
aaagaactactaaaaatgtaccaggtccaaaca

SEQ ID NO: 470067 - DNA, 33 bp, Homo sapien
gaagctcgtgaaaataaggaacgtccaaatggc

SEQ ID NO: 470068 - DNA, 33 bp, Homo sapien
gaagctcgtgaaaatatggaacgtccaaatggc

SEQ ID NO: 470069 - DNA, 33 bp, Homo sapien
tgtggtgtgtccatacaatgcggcactagtcag

SEQ ID NO: 470070 - DNA, 33 bp, Homo sapien
tgtggtgtgtccatacgatgcggcactagtcag

SEQ ID NO: 470071 - DNA, 33 bp, Homo sapien
ccaggataaagtgagacaaggcgtgaagcacct

SEQ ID NO: 470072 - DNA, 33 bp, Homo sapien
ccaggataaagtgagataaggcgtgaagcacct

SEQ ID NO: 470073 - DNA, 33 bp, Homo sapien
tatacttggtatatgcacttagtaaatcaatta

SEQ ID NO: 470074 - DNA, 33 bp, Homo sapien
tatacttggtatatgcgcttagtaaatcaatta

SEQ ID NO: 470075 - DNA, 33 bp, Homo sapien
gagctctatcgaggacagctcaacgcagcccta

SEQ ID NO: 470076 - DNA, 33 bp, Homo sapien
gagctctatcgaggacggctcaacgcagcccta

SEQ ID NO: 470077 - DNA, 33 bp, Homo sapien
tgagtagtttggtctgcaagaacatagaatcgt

SEQ ID NO: 470078 - DNA, 33 bp, Homo sapien
tgagtagtttggtctgtaagaacatagaatcgt

SEQ ID NO: 470079 - DNA, 33 bp, Homo sapien
atagaaggaacctgaccagaaacagtacattcc

SEQ ID NO: 470080 - DNA, 33 bp, Homo sapien
atagaaggaacctgacgagaaacagtacattcc

SEQ ID NO: 470081 - DNA, 33 bp, Homo sapien
taggaatcatgttttaaatggtgattggagtgc

SEQ ID NO: 470082 - DNA, 33 bp, Homo sapien
taggaatcatgttttacatggtgattggagtgc

SEQ ID NO: 470083 - DNA, 33 bp, Homo sapien
catctgaacagctgatgataggctttcttgaga

SEQ ID NO: 470084 - DNA, 33 bp, Homo sapien
catctgaacagctgattataggctttcttgaga

SEQ ID NO: 470085 - DNA, 33 bp, Homo sapien
attaaacatcaaacaactgggccaagaagaaca

SEQ ID NO: 470086 - DNA, 33 bp, Homo sapien
attaaacatcaaacaattgggccaagaagaaca

SEQ ID NO: 470087 - DNA, 33 bp, Homo sapien
aaattacagtgctgaggaatgtacccaatttga

SEQ ID NO: 470088 - DNA, 33 bp, Homo sapien
aaattacagtgctgagtaatgtacccaatttga

SEQ ID NO: 470089 - DNA, 33 bp, Homo sapien
tagacaaagtccctaccagtcaacagagctaaa

SEQ ID NO: 470090 - DNA, 33 bp, Homo sapien
tagacaaagtccctactagtcaacagagctaaa

SEQ ID NO: 470091 - DNA, 33 bp, Homo sapien
agcttcacatttcacacaagggcatctaaaaca

SEQ ID NO: 470092 - DNA, 33 bp, Homo sapien
agcttcacatttcacataagggcatctaaaaca

SEQ ID NO: 470093 - DNA, 33 bp, Homo sapien
tggttcagatgacggaaatacctgacatagata

SEQ ID NO: 470094 - DNA, 33 bp, Homo sapien
tggttcagatgacggagatacctgacatagata

SEQ ID NO: 470095 - DNA, 33 bp, Homo sapien
tcataatttcagcttcaaacaaattatgcccaa

SEQ ID NO: 470096 - DNA, 33 bp, Homo sapien
tcataatttcagcttcgaacaaattatgcccaa

SEQ ID NO: 470097 - DNA, 33 bp, Homo sapien
caatacttttactagcactatggatctggccca

SEQ ID NO: 470098 - DNA, 33 bp, Homo sapien
caatacttttactagccctatggatctggccca

SEQ ID NO: 470099 - DNA, 33 bp, Homo sapien
ctgaggcaactaaagaaagaattcaggtttcac

SEQ ID NO: 470100 - DNA, 33 bp, Homo sapien
ctgaggcaactaaagatagaattcaggtttcac

SEQ ID NO: 470101 - DNA, 33 bp, Homo sapien
tattgacagtttaggacactaagactctcaaat

SEQ ID NO: 470102 - DNA, 33 bp, Homo sapien
tattgacagtttaggagactaagactctcaaat

SEQ ID NO: 470103 - DNA, 33 bp, Homo sapien
tcattctgaagatgaaatatgtgtcacacaggt

SEQ ID NO: 470104 - DNA, 33 bp, Homo sapien
tcattctgaagatgaactatgtgtcacacaggt

SEQ ID NO: 470105 - DNA, 33 bp, Homo sapien
aatgactcggagggtacaggaatcactgtgtac

SEQ ID NO: 470106 - DNA, 33 bp, Homo sapien
aatgactcggagggtataggaatcactgtgtac

SEQ ID NO: 470107 - DNA, 33 bp, Homo sapien
ctcattatctgcttcacatagactcagaaaaag

SEQ ID NO: 470108 - DNA, 33 bp, Homo sapien
ctcattatctgcttcatatagactcagaaaaag

SEQ ID NO: 470109 - DNA, 33 bp, Homo sapien
ttgtgcgtcctgtccacctaatgcctttactgt

SEQ ID NO: 470110 - DNA, 33 bp, Homo sapien
ttgtgcgtcctgtccatctaatgcctttactgt

SEQ ID NO: 470111 - DNA, 33 bp, Homo sapien
ccagtgattaacttcactctgtttcttgaagag

SEQ ID NO: 470112 - DNA, 33 bp, Homo sapien
ccagtgattaacttcattctgtttcttgaagag

SEQ ID NO: 470113 - DNA, 33 bp, Homo sapien
ttccttcctcataaaagcagttttccttccaca

SEQ ID NO: 470114 - DNA, 33 bp, Homo sapien
ttccttcctcataaaatcagttttccttccaca

SEQ ID NO: 470115 - DNA, 33 bp, Homo sapien
ctgaaattggagaaaacgctgtataaaaatctg

SEQ ID NO: 470116 - DNA, 33 bp, Homo sapien
ctgaaattggagaaaatgctgtataaaaatctg

SEQ ID NO: 470117 - DNA, 33 bp, Homo sapien
accctgtggatgtgaccgtatatgtaaatttaa

SEQ ID NO: 470118 - DNA, 33 bp, Homo sapien
accctgtggatgtgactgtatatgtaaatttaa

SEQ ID NO: 470119 - DNA, 33 bp, Homo sapien
tacaaaatggggataagtcctactttctagtta

SEQ ID NO: 470120 - DNA, 33 bp, Homo sapien
tacaaaatggggataattcctactttctagtta

SEQ ID NO: 470121 - DNA, 33 bp, Homo sapien
agacagcatggtgtaacaggaaaagcttggaaa

SEQ ID NO: 470122 - DNA, 33 bp, Homo sapien
agacagcatggtgtaataggaaaagcttggaaa

SEQ ID NO: 470123 - DNA, 33 bp, Homo sapien
tgttcattcatacctacagcgtacagaaccact

SEQ ID NO: 470124 - DNA, 33 bp, Homo sapien
tgttcattcatacctatagcgtacagaaccact

SEQ ID NO: 470125 - DNA, 33 bp, Homo sapien
atgaaacctgcttaaagagttacctatattctc

SEQ ID NO: 470126 - DNA, 33 bp, Homo sapien
atgaaacctgcttaaatagttacctatattctc

SEQ ID NO: 470127 - DNA, 33 bp, Homo sapien
caaagcggggctgctccctcagtaacaggttat

SEQ ID NO: 470128 - DNA, 33 bp, Homo sapien
caaagcggggctgctctctcagtaacaggttat

SEQ ID NO: 470129 - DNA, 33 bp, Homo sapien
aggtggtctgaggccaaagccgaggttaaggac

SEQ ID NO: 470130 - DNA, 33 bp, Homo sapien
aggtggtctgaggccagagccgaggttaaggac

SEQ ID NO: 470131 - DNA, 33 bp, Homo sapien
acagccttggctctgacagtccttaacctcggc

SEQ ID NO: 470132 - DNA, 33 bp, Homo sapien
acagccttggctctgagagtccttaacctcggc

SEQ ID NO: 470133 - DNA, 33 bp, Homo sapien
agagactgcaagcaatcaaaatcaaagttgcag

SEQ ID NO: 470134 - DNA, 33 bp, Homo sapien
agagactgcaagcaatgaaaatcaaagttgcag

SEQ ID NO: 470135 - DNA, 33 bp, Homo sapien
agaggcgggcttctcgaatcactgcaacaagag

SEQ ID NO: 470136 - DNA, 33 bp, Homo sapien
agaggcgggcttctcggatcactgcaacaagag

SEQ ID NO: 470137 - DNA, 33 bp, Homo sapien
ccccagtattttattacaggtgtgttttcagtc

SEQ ID NO: 470138 - DNA, 33 bp, Homo sapien
ccccagtattttattataggtgtgttttcagtc

SEQ ID NO: 470139 - DNA, 33 bp, Homo sapien
ctctcccactttattcagaagttcatatgagcc

SEQ ID NO: 470140 - DNA, 33 bp, Homo sapien
ctctcccactttattcggaagttcatatgagcc

SEQ ID NO: 470141 - DNA, 33 bp, Homo sapien
catagatatgtgcaaccgtcctctcccaactcc

SEQ ID NO: 470142 - DNA, 33 bp, Homo sapien
catagatatgtgcaactgtcctctcccaactcc

SEQ ID NO: 470143 - DNA, 33 bp, Homo sapien
ctctgaccacctaaaaatggcataaatcaaacc

SEQ ID NO: 470144 - DNA, 33 bp, Homo sapien
ctctgaccacctaaaagtggcataaatcaaacc

SEQ ID NO: 470145 - DNA, 33 bp, Homo sapien
gtaggtaaccaatgaacggtgtcaaacgtccac

SEQ ID NO: 470146 - DNA, 33 bp, Homo sapien
gtaggtaaccaatgaatggtgtcaaacgtccac

SEQ ID NO: 470147 - DNA, 33 bp, Homo sapien
caaagaggtaaaagaacgtgttgaggggaaagt

SEQ ID NO: 470148 - DNA, 33 bp, Homo sapien
caaagaggtaaaagaatgtgttgaggggaaagt

SEQ ID NO: 470149 - DNA, 33 bp, Homo sapien
tttgaaggtagttgataacaagcatttattatg

SEQ ID NO: 470150 - DNA, 33 bp, Homo sapien
tttgaaggtagttgatgacaagcatttattatg

SEQ ID NO: 470151 - DNA, 33 bp, Homo sapien
aagtatccgagacagaactcaatcaatttagaa

SEQ ID NO: 470152 - DNA, 33 bp, Homo sapien
aagtatccgagacagatctcaatcaatttagaa

SEQ ID NO: 470153 - DNA, 33 bp, Homo sapien
ggtgcacagttacagcagcatataagccctcag

SEQ ID NO: 470154 - DNA, 33 bp, Homo sapien
ggtgcacagttacagcggcatataagccctcag

SEQ ID NO: 470155 - DNA, 33 bp, Homo sapien
gtctttttgtgtgataccaactattcgatggta

SEQ ID NO: 470156 - DNA, 33 bp, Homo sapien
gtctttttgtgtgatatcaactattcgatggta

SEQ ID NO: 470157 - DNA, 33 bp, Homo sapien
tttgactataagaacccaagctaaggaccttct

SEQ ID NO: 470158 - DNA, 33 bp, Homo sapien
tttgactataagaaccgaagctaaggaccttct

SEQ ID NO: 470159 - DNA, 33 bp, Homo sapien
ctgttctgcgaaaaagacctcatatcttctcag

SEQ ID NO: 470160 - DNA, 33 bp, Homo sapien
ctgttctgcgaaaaagccctcatatcttctcag

SEQ ID NO: 470161 - DNA, 33 bp, Homo sapien
actcaggtctccgtgaatcacagagccacttct

SEQ ID NO: 470162 - DNA, 33 bp, Homo sapien
actcaggtctccgtgagtcacagagccacttct

SEQ ID NO: 470163 - DNA, 33 bp, Homo sapien
agacataatagccttacgttctgtagcagagca

SEQ ID NO: 470164 - DNA, 33 bp, Homo sapien
agacataatagccttaggttctgtagcagagca

SEQ ID NO: 470165 - DNA, 33 bp, Homo sapien
cccccagttcctagagcctaacagcacctagag

SEQ ID NO: 470166 - DNA, 33 bp, Homo sapien
cccccagttcctagagtctaacagcacctagag

SEQ ID NO: 470167 - DNA, 33 bp, Homo sapien
aaaggcaaaaccattaaggacagaaatctaagc

SEQ ID NO: 470168 - DNA, 33 bp, Homo sapien
aaaggcaaaaccattacggacagaaatctaagc

SEQ ID NO: 470169 - DNA, 33 bp, Homo sapien
tctgaacatctatgcacaagtctttacatggac

SEQ ID NO: 470170 - DNA, 33 bp, Homo sapien
tctgaacatctatgcagaagtctttacatggac

SEQ ID NO: 470171 - DNA, 33 bp, Homo sapien
gagggcaggtatcacactgtacactttccacaa

SEQ ID NO: 470172 - DNA, 33 bp, Homo sapien
gagggcaggtatcacattgtacactttccacaa

SEQ ID NO: 470173 - DNA, 33 bp, Homo sapien
aatggaatcctttagaaaatcagctcagatgac

SEQ ID NO: 470174 - DNA, 33 bp, Homo sapien
aatggaatcctttagagaatcagctcagatgac

SEQ ID NO: 470175 - DNA, 33 bp, Homo sapien
tgactttcagtaaacgaatgagcccaaagaaca

SEQ ID NO: 470176 - DNA, 33 bp, Homo sapien
tgactttcagtaaacgcatgagcccaaagaaca

SEQ ID NO: 470177 - DNA, 33 bp, Homo sapien
tgttcctctgagtctaagtgagatggtcaaggc

SEQ ID NO: 470178 - DNA, 33 bp, Homo sapien
tgttcctctgagtctaggtgagatggtcaaggc

SEQ ID NO: 470179 - DNA, 33 bp, Homo sapien
aaggttgtggtcttaaaggacatagttgcacat

SEQ ID NO: 470180 - DNA, 33 bp, Homo sapien
aaggttgtggtcttaagggacatagttgcacat

SEQ ID NO: 470181 - DNA, 33 bp, Homo sapien
gccaagtcagtacttaacattcctaactctgag

SEQ ID NO: 470182 - DNA, 33 bp, Homo sapien
gccaagtcagtacttaccattcctaactctgag

SEQ ID NO: 470183 - DNA, 33 bp, Homo sapien
tgtgccagagggttatcaggggtagacaccggt

SEQ ID NO: 470184 - DNA, 33 bp, Homo sapien
tgtgccagagggttattaggggtagacaccggt

SEQ ID NO: 470185 - DNA, 33 bp, Homo sapien
ggcaccaggaaggctagccaggtaaggacttga

SEQ ID NO: 470186 - DNA, 33 bp, Homo sapien
ggcaccaggaaggctatccaggtaaggacttga

SEQ ID NO: 470187 - DNA, 33 bp, Homo sapien
actagcccatagagaaactttatacaaattagg

SEQ ID NO: 470188 - DNA, 33 bp, Homo sapien
actagcccatagagaagctttatacaaattagg

SEQ ID NO: 470189 - DNA, 33 bp, Homo sapien
acaaattaggagaaggaacctcctgtctgccca

SEQ ID NO: 470190 - DNA, 33 bp, Homo sapien
acaaattaggagaaggcacctcctgtctgccca

SEQ ID NO: 470191 - DNA, 33 bp, Homo sapien
gggcacagaatataaaattgtgcacacagcctt

SEQ ID NO: 470192 - DNA, 33 bp, Homo sapien
gggcacagaatataaagttgtgcacacagcctt

SEQ ID NO: 470193 - DNA, 33 bp, Homo sapien
acttacttcacagcgcactttcaaggatcagag

SEQ ID NO: 470194 - DNA, 33 bp, Homo sapien
acttacttcacagcgctctttcaaggatcagag

SEQ ID NO: 470195 - DNA, 33 bp, Homo sapien
ggcgtggctccacttccatggttctgggggcat

SEQ ID NO: 470196 - DNA, 33 bp, Homo sapien
ggcgtggctccacttcgatggttctgggggcat

SEQ ID NO: 470197 - DNA, 33 bp, Homo sapien
gttgacgaatacctcagagcttttgttgagatg

SEQ ID NO: 470198 - DNA, 33 bp, Homo sapien
gttgacgaatacctcatagcttttgttgagatg

SEQ ID NO: 470199 - DNA, 33 bp, Homo sapien
actggaacttttctcaaccttcctagatccttc

SEQ ID NO: 470200 - DNA, 33 bp, Homo sapien
actggaacttttctcatccttcctagatccttc

SEQ ID NO: 470201 - DNA, 33 bp, Homo sapien
attacaaagctgttcacgcccaataatgtattt

SEQ ID NO: 470202 - DNA, 33 bp, Homo sapien
attacaaagctgttcatgcccaataatgtattt

SEQ ID NO: 470203 - DNA, 33 bp, Homo sapien
attcgtacgtggacgccctaacccccaatgtga

SEQ ID NO: 470204 - DNA, 33 bp, Homo sapien
attcgtacgtggacgctctaacccccaatgtga

SEQ ID NO: 470205 - DNA, 33 bp, Homo sapien
tgtgcctattctaggaatatcatgtaaatgaaa

SEQ ID NO: 470206 - DNA, 33 bp, Homo sapien
tgtgcctattctaggactatcatgtaaatgaaa

SEQ ID NO: 470207 - DNA, 33 bp, Homo sapien
gagttggcctctctcaatgaccgactctgtgtc

SEQ ID NO: 470208 - DNA, 33 bp, Homo sapien
gagttggcctctctcagtgaccgactctgtgtc

SEQ ID NO: 470209 - DNA, 33 bp, Homo sapien
tgggactcacaccacaactcaggtcactgtccc

SEQ ID NO: 470210 - DNA, 33 bp, Homo sapien
tgggactcacaccacagctcaggtcactgtccc

SEQ ID NO: 470211 - DNA, 33 bp, Homo sapien
gcctggtctacgcaacacagaaggtgggcccca

SEQ ID NO: 470212 - DNA, 33 bp, Homo sapien
gcctggtctacgcaacgcagaaggtgggcccca

SEQ ID NO: 470213 - DNA, 33 bp, Homo sapien
aaattctacacaaaaaatcatgctagcagaagg

SEQ ID NO: 470214 - DNA, 33 bp, Homo sapien
aaattctacacaaaaattcatgctagcagaagg

SEQ ID NO: 470215 - DNA, 33 bp, Homo sapien
gggctgactgccaagagatggctttaaaccaga

SEQ ID NO: 470216 - DNA, 33 bp, Homo sapien
gggctgactgccaagatatggctttaaaccaga

SEQ ID NO: 470217 - DNA, 33 bp, Homo sapien
catcgcttcgtaacgacccagccacagagtaaa

SEQ ID NO: 470218 - DNA, 33 bp, Homo sapien
catcgcttcgtaacgagccagccacagagtaaa

SEQ ID NO: 470219 - DNA, 33 bp, Homo sapien
aattccagccccttcccgatctgagccctaact

SEQ ID NO: 470220 - DNA, 33 bp, Homo sapien
aattccagccccttccggatctgagccctaact

SEQ ID NO: 470221 - DNA, 33 bp, Homo sapien
tctatcccacgaaaggacacggggctggagcta

SEQ ID NO: 470222 - DNA, 33 bp, Homo sapien
tctatcccacgaaaggtcacggggctggagcta

SEQ ID NO: 470223 - DNA, 33 bp, Homo sapien
gaacagtgcctcaataaaagatttgattcaaaa

SEQ ID NO: 470224 - DNA, 33 bp, Homo sapien
gaacagtgcctcaatagaagatttgattcaaaa

SEQ ID NO: 470225 - DNA, 33 bp, Homo sapien
tgcaagatcaaacctcaaattgggcagaataag

SEQ ID NO: 470226 - DNA, 33 bp, Homo sapien
tgcaagatcaaacctctaattgggcagaataag

SEQ ID NO: 470227 - DNA, 33 bp, Homo sapien
aatggctgttaaacaccggttagtattcccagc

SEQ ID NO: 470228 - DNA, 33 bp, Homo sapien
aatggctgttaaacactggttagtattcccagc

SEQ ID NO: 470229 - DNA, 33 bp, Homo sapien
acaaggcaaatgttcacggactgatggaaggtt

SEQ ID NO: 470230 - DNA, 33 bp, Homo sapien
acaaggcaaatgttcatggactgatggaaggtt

SEQ ID NO: 470231 - DNA, 33 bp, Homo sapien
gctggtgggaatgtaaagcgtgcggctgctggg

SEQ ID NO: 470232 - DNA, 33 bp, Homo sapien
gctggtgggaatgtaacgcgtgcggctgctggg

SEQ ID NO: 470233 - DNA, 33 bp, Homo sapien
ttctgagggatggaacacttgcttcacgatgga

SEQ ID NO: 470234 - DNA, 33 bp, Homo sapien
ttctgagggatggaacgcttgcttcacgatgga

SEQ ID NO: 470235 - DNA, 33 bp, Homo sapien
attatttctaatagtggcaagttctaagaagaa

SEQ ID NO: 470236 - DNA, 33 bp, Homo sapien
attatttctaatagtgtcaagttctaagaagaa

SEQ ID NO: 470237 - DNA, 33 bp, Homo sapien
gttatgaaggaacaaccgggtgcctaattgtcc

SEQ ID NO: 470238 - DNA, 33 bp, Homo sapien
gttatgaaggaacaactgggtgcctaattgtcc

SEQ ID NO: 470239 - DNA, 33 bp, Homo sapien
cttggatgatggaacccgattcctccagggctg

SEQ ID NO: 470240 - DNA, 33 bp, Homo sapien
cttggatgatggaacctgattcctccagggctg

SEQ ID NO: 470241 - DNA, 33 bp, Homo sapien
ctcattgagaaaaacacggaagttcaaggaaaa

SEQ ID NO: 470242 - DNA, 33 bp, Homo sapien
ctcattgagaaaaacatggaagttcaaggaaaa

SEQ ID NO: 470243 - DNA, 33 bp, Homo sapien
gtgctgcagactgaccagagaaaggccccagaa

SEQ ID NO: 470244 - DNA, 33 bp, Homo sapien
gtgctgcagactgaccggagaaaggccccagaa

SEQ ID NO: 470245 - DNA, 33 bp, Homo sapien
gggctttaaacttgcaatctgcttactaaaccc

SEQ ID NO: 470246 - DNA, 33 bp, Homo sapien
gggctttaaacttgcactctgcttactaaaccc

SEQ ID NO: 470247 - DNA, 33 bp, Homo sapien
tgactctcagtatccgaaaggtaaaaataaact

SEQ ID NO: 470248 - DNA, 33 bp, Homo sapien
tgactctcagtatccgtaaggtaaaaataaact

SEQ ID NO: 470249 - DNA, 33 bp, Homo sapien
agaaagccagaccaaacatctgtgattctaggc

SEQ ID NO: 470250 - DNA, 33 bp, Homo sapien
agaaagccagaccaaatatctgtgattctaggc

SEQ ID NO: 470251 - DNA, 33 bp, Homo sapien
aatcagagtctgcaccaacacagtgtctcataa

SEQ ID NO: 470252 - DNA, 33 bp, Homo sapien
aatcagagtctgcaccgacacagtgtctcataa

SEQ ID NO: 470253 - DNA, 33 bp, Homo sapien
caaaggcgctttcagaaccacagaatgtccttg

SEQ ID NO: 470254 - DNA, 33 bp, Homo sapien
caaaggcgctttcagatccacagaatgtccttg

SEQ ID NO: 470255 - DNA, 33 bp, Homo sapien
attctggagcataatgaaaatgtgactctaaat

SEQ ID NO: 470256 - DNA, 33 bp, Homo sapien
attctggagcataatgtaaatgtgactctaaat

SEQ ID NO: 470257 - DNA, 33 bp, Homo sapien
caccagataccacctacgttctgtaacttctca

SEQ ID NO: 470258 - DNA, 33 bp, Homo sapien
caccagataccacctatgttctgtaacttctca

SEQ ID NO: 470259 - DNA, 33 bp, Homo sapien
cagtgaccatccctgacgacaaatgaacattgc

SEQ ID NO: 470260 - DNA, 33 bp, Homo sapien
cagtgaccatccctgatgacaaatgaacattgc

SEQ ID NO: 470261 - DNA, 33 bp, Homo sapien
tcctgctttcctaatgccatcatgctagtctag

SEQ ID NO: 470262 - DNA, 33 bp, Homo sapien
tcctgctttcctaatgtcatcatgctagtctag

SEQ ID NO: 470263 - DNA, 33 bp, Homo sapien
aagaatttcctgtctccaggggtgattcggaca

SEQ ID NO: 470264 - DNA, 33 bp, Homo sapien
aagaatttcctgtctctaggggtgattcggaca

SEQ ID NO: 470265 - DNA, 33 bp, Homo sapien
cttgtcttcaagtgcccgaagctggccttgggt

SEQ ID NO: 470266 - DNA, 33 bp, Homo sapien
cttgtcttcaagtgcctgaagctggccttgggt

SEQ ID NO: 470267 - DNA, 33 bp, Homo sapien
agagagttaggctaaacgaacatgcgctatgcc

SEQ ID NO: 470268 - DNA, 33 bp, Homo sapien
agagagttaggctaaatgaacatgcgctatgcc

SEQ ID NO: 470269 - DNA, 33 bp, Homo sapien
ccatattatcactgaacgctttccaaggagcgt

SEQ ID NO: 470270 - DNA, 33 bp, Homo sapien
ccatattatcactgaatgctttccaaggagcgt

SEQ ID NO: 470271 - DNA, 33 bp, Homo sapien
gcctactgatgagttaaggtcatggtctgttgt

SEQ ID NO: 470272 - DNA, 33 bp, Homo sapien
gcctactgatgagttacggtcatggtctgttgt

SEQ ID NO: 470273 - DNA, 33 bp, Homo sapien
tgaatgaaggaaaaaaaaatgaatgctggggaa

SEQ ID NO: 470274 - DNA, 33 bp, Homo sapien
tgaatgaaggaaaaaacaatgaatgctggggaa

SEQ ID NO: 470275 - DNA, 33 bp, Homo sapien
catgataacccattgcaaaagaaaaataaaatc

SEQ ID NO: 470276 - DNA, 33 bp, Homo sapien
catgataacccattgccaaagaaaaataaaatc

SEQ ID NO: 470277 - DNA, 33 bp, Homo sapien
tgcgggctgtacgagaagagtggcaatagcatc

SEQ ID NO: 470278 - DNA, 33 bp, Homo sapien
tgcgggctgtacgagaggagtggcaatagcatc

SEQ ID NO: 470279 - DNA, 33 bp, Homo sapien
tccaaaccatatcacagaggaagcagtttacaa

SEQ ID NO: 470280 - DNA, 33 bp, Homo sapien
tccaaaccatatcacataggaagcagtttacaa

SEQ ID NO: 470281 - DNA, 33 bp, Homo sapien
cagaatgtcccttaccaacaaagcatgctaaaa

SEQ ID NO: 470282 - DNA, 33 bp, Homo sapien
cagaatgtcccttaccgacaaagcatgctaaaa

SEQ ID NO: 470283 - DNA, 33 bp, Homo sapien
aacatcgccagaaagaagcatctttaaacacct

SEQ ID NO: 470284 - DNA, 33 bp, Homo sapien
aacatcgccagaaagaggcatctttaaacacct

SEQ ID NO: 470285 - DNA, 33 bp, Homo sapien
ctgatttcaaaagaacactcttccttcacattt

SEQ ID NO: 470286 - DNA, 33 bp, Homo sapien
ctgatttcaaaagaactctcttccttcacattt

SEQ ID NO: 470287 - DNA, 33 bp, Homo sapien
cagcaactgatattcccctgttttcacaatgct

SEQ ID NO: 470288 - DNA, 33 bp, Homo sapien
cagcaactgatattcctctgttttcacaatgct

SEQ ID NO: 470289 - DNA, 33 bp, Homo sapien
gcacaagcgtagggaacggtttcagagcatgtc

SEQ ID NO: 470290 - DNA, 33 bp, Homo sapien
gcacaagcgtagggaagggtttcagagcatgtc

SEQ ID NO: 470291 - DNA, 33 bp, Homo sapien
tcacttggaaacaaaccgttgcttgactatatt

SEQ ID NO: 470292 - DNA, 33 bp, Homo sapien
tcacttggaaacaaactgttgcttgactatatt

SEQ ID NO: 470293 - DNA, 33 bp, Homo sapien
ctttccacctcccctaaaacattcattgtctat

SEQ ID NO: 470294 - DNA, 33 bp, Homo sapien
ctttccacctcccctagaacattcattgtctat

SEQ ID NO: 470295 - DNA, 33 bp, Homo sapien
gccatttcagaaacccagggggtagagctgcca

SEQ ID NO: 470296 - DNA, 33 bp, Homo sapien
gccatttcagaaacccggggggtagagctgcca

SEQ ID NO: 470297 - DNA, 33 bp, Homo sapien
taatataagcatgaccaaaatattgcgtggata

SEQ ID NO: 470298 - DNA, 33 bp, Homo sapien
taatataagcatgacccaaatattgcgtggata

SEQ ID NO: 470299 - DNA, 33 bp, Homo sapien
cttgttctgtccaagacgcatgggcttgagtca

SEQ ID NO: 470300 - DNA, 33 bp, Homo sapien
cttgttctgtccaagatgcatgggcttgagtca

SEQ ID NO: 470301 - DNA, 33 bp, Homo sapien
aacaaacaaaaaacaacggacggatacagccag

SEQ ID NO: 470302 - DNA, 33 bp, Homo sapien
aacaaacaaaaaacaatggacggatacagccag

SEQ ID NO: 470303 - DNA, 33 bp, Homo sapien
ttgactaatacagacaaataagtgctattgttt

SEQ ID NO: 470304 - DNA, 33 bp, Homo sapien
ttgactaatacagacagataagtgctattgttt

SEQ ID NO: 470305 - DNA, 33 bp, Homo sapien
aaacccaggaaagccgacagctctggtctgagt

SEQ ID NO: 470306 - DNA, 33 bp, Homo sapien
aaacccaggaaagccggcagctctggtctgagt

SEQ ID NO: 470307 - DNA, 33 bp, Homo sapien
gatgaggactgactgcaaatggacacaggtgtt

SEQ ID NO: 470308 - DNA, 33 bp, Homo sapien
gatgaggactgactgcgaatggacacaggtgtt

SEQ ID NO: 470309 - DNA, 33 bp, Homo sapien
ccagttctgccgtttacggaaattagtctggtg

SEQ ID NO: 470310 - DNA, 33 bp, Homo sapien
ccagttctgccgtttagggaaattagtctggtg

SEQ ID NO: 470311 - DNA, 33 bp, Homo sapien
agtcaggttgctatcacgtagcccttagcaggg

SEQ ID NO: 470312 - DNA, 33 bp, Homo sapien
agtcaggttgctatcatgtagcccttagcaggg

SEQ ID NO: 470313 - DNA, 33 bp, Homo sapien
tgactcctctgaatctcacgtgtaaaaagtgtg

SEQ ID NO: 470314 - DNA, 33 bp, Homo sapien
tgactcctctgaatcttacgtgtaaaaagtgtg

SEQ ID NO: 470315 - DNA, 33 bp, Homo sapien
tgtgctcttttaggaggatctggggaagaatct

SEQ ID NO: 470316 - DNA, 33 bp, Homo sapien
tgtgctcttttaggagtatctggggaagaatct

SEQ ID NO: 470317 - DNA, 33 bp, Homo sapien
gcctggcagagcacccaggaagaagaggagaat

SEQ ID NO: 470318 - DNA, 33 bp, Homo sapien
gcctggcagagcacccgggaagaagaggagaat

SEQ ID NO: 470319 - DNA, 33 bp, Homo sapien
aacaagccaatacctgcagtgtctcatggacca

SEQ ID NO: 470320 - DNA, 33 bp, Homo sapien
aacaagccaatacctggagtgtctcatggacca

SEQ ID NO: 470321 - DNA, 33 bp, Homo sapien
ctgtattaaatgaatacgaaatccctgcctgtt

SEQ ID NO: 470322 - DNA, 33 bp, Homo sapien
ctgtattaaatgaatatgaaatccctgcctgtt

SEQ ID NO: 470323 - DNA, 33 bp, Homo sapien
ggtgaaataaaatcccaaacatacattaatgcc

SEQ ID NO: 470324 - DNA, 33 bp, Homo sapien
ggtgaaataaaatcccgaacatacattaatgcc

SEQ ID NO: 470325 - DNA, 33 bp, Homo sapien
tgggtgagatggggaaagttagaagcaggcgtc

SEQ ID NO: 470326 - DNA, 33 bp, Homo sapien
tgggtgagatggggaaggttagaagcaggcgtc

SEQ ID NO: 470327 - DNA, 33 bp, Homo sapien
tcttagtttctggcacaggaagttgctccaggc

SEQ ID NO: 470328 - DNA, 33 bp, Homo sapien
tcttagtttctggcacgggaagttgctccaggc

SEQ ID NO: 470329 - DNA, 33 bp, Homo sapien
acaatgcataccattcacaaataacatccccgt

SEQ ID NO: 470330 - DNA, 33 bp, Homo sapien
acaatgcataccattcgcaaataacatccccgt

SEQ ID NO: 470331 - DNA, 33 bp, Homo sapien
actgtacattaatttcaacagtaataccggcac

SEQ ID NO: 470332 - DNA, 33 bp, Homo sapien
actgtacattaatttcgacagtaataccggcac

SEQ ID NO: 470333 - DNA, 33 bp, Homo sapien
agggcctcaagaaaaacgagaaacgagcacaaa

SEQ ID NO: 470334 - DNA, 33 bp, Homo sapien
agggcctcaagaaaaatgagaaacgagcacaaa

SEQ ID NO: 470335 - DNA, 33 bp, Homo sapien
agtcgctcacactacaatgcacacaaggattga

SEQ ID NO: 470336 - DNA, 33 bp, Homo sapien
agtcgctcacactacagtgcacacaaggattga

SEQ ID NO: 470337 - DNA, 33 bp, Homo sapien
cacttgaagaaatgtgccaatcacactaattgg

SEQ ID NO: 470338 - DNA, 33 bp, Homo sapien
cacttgaagaaatgtggcaatcacactaattgg

SEQ ID NO: 470339 - DNA, 33 bp, Homo sapien
tttacctaggcttttcctgaacaatagtgaggt

SEQ ID NO: 470340 - DNA, 33 bp, Homo sapien
tttacctaggcttttcttgaacaatagtgaggt

SEQ ID NO: 470341 - DNA, 33 bp, Homo sapien
tcccaagtagctctgaatataggcgcacgcgac

SEQ ID NO: 470342 - DNA, 33 bp, Homo sapien
tcccaagtagctctgactataggcgcacgcgac

SEQ ID NO: 470343 - DNA, 33 bp, Homo sapien
caggcttaccataacactgtacaagcagccctc

SEQ ID NO: 470344 - DNA, 33 bp, Homo sapien
caggcttaccataacagtgtacaagcagccctc

SEQ ID NO: 470345 - DNA, 33 bp, Homo sapien
aggtcatactatgacaagaaacaaagcataaca

SEQ ID NO: 470346 - DNA, 33 bp, Homo sapien
aggtcatactatgacatgaaacaaagcataaca

SEQ ID NO: 470347 - DNA, 33 bp, Homo sapien
atttaccacagctcaaaaacaactttcaaagaa

SEQ ID NO: 470348 - DNA, 33 bp, Homo sapien
atttaccacagctcaacaacaactttcaaagaa

SEQ ID NO: 470349 - DNA, 33 bp, Homo sapien
tattgtaaggaggcaaagggtggagattagcca

SEQ ID NO: 470350 - DNA, 33 bp, Homo sapien
tattgtaaggaggcaaggggtggagattagcca

SEQ ID NO: 470351 - DNA, 33 bp, Homo sapien
tcaagtatttgctaaaactgtggtgaaagagaa

SEQ ID NO: 470352 - DNA, 33 bp, Homo sapien
tcaagtatttgctaaacctgtggtgaaagagaa

SEQ ID NO: 470353 - DNA, 33 bp, Homo sapien
gttacatcacattgcaagcaagctatcaaagat

SEQ ID NO: 470354 - DNA, 33 bp, Homo sapien
gttacatcacattgcaggcaagctatcaaagat

SEQ ID NO: 470355 - DNA, 33 bp, Homo sapien
gactctcagtatttgacagaacaagcaaacaaa

SEQ ID NO: 470356 - DNA, 33 bp, Homo sapien
gactctcagtatttgatagaacaagcaaacaaa

SEQ ID NO: 470357 - DNA, 33 bp, Homo sapien
tgatttcgaatctcctaaagtacctatctcctg

SEQ ID NO: 470358 - DNA, 33 bp, Homo sapien
tgatttcgaatctcctgaagtacctatctcctg

SEQ ID NO: 470359 - DNA, 33 bp, Homo sapien; identical to SEQ ID NO: 470357

SEQ ID NO: 470360 - DNA, 33 bp, Homo sapien; identical to SEQ ID NO: 470358

SEQ ID NO: 470361 - DNA, 33 bp, Homo sapien
cactctggaagctaccaattaagtgtaagtaat

SEQ ID NO: 470362 - DNA, 33 bp, Homo sapien
cactctggaagctaccgattaagtgtaagtaat

SEQ ID NO: 470363 - DNA, 33 bp, Homo sapien; identical to SEQ ID NO: 470361

SEQ ID NO: 470364 - DNA, 33 bp, Homo sapien; identical to SEQ ID NO: 470362

SEQ ID NO: 470365 - DNA, 33 bp, Homo sapien
aacttgatagctccggaatatcatttcaacaaa

SEQ ID NO: 470366 - DNA, 33 bp, Homo sapien
aacttgatagctccgggatatcatttcaacaaa

SEQ ID NO: 470367 - DNA, 33 bp, Homo sapien
attaaacttgggccaaatgtaatagaactatac

SEQ ID NO: 470368 - DNA, 33 bp, Homo sapien
attaaacttgggccaattgtaatagaactatac

SEQ ID NO: 470369 - DNA, 33 bp, Homo sapien; identical to SEQ ID NO: 470367

SEQ ID NO: 470370 - DNA, 33 bp, Homo sapien; identical to SEQ ID NO: 470368

SEQ ID NO: 470371 - DNA, 33 bp, Homo sapien
attcggaatttatctaagagtcaatgagttgtg

SEQ ID NO: 470372 - DNA, 33 bp, Homo sapien
attcggaatttatctacgagtcaatgagttgtg

SEQ ID NO: 470373 - DNA, 33 bp, Homo sapien
ctaaggcctatccatcacctcctcttccaccca

SEQ ID NO: 470374 - DNA, 33 bp, Homo sapien
ctaaggcctatccatcgcctcctcttccaccca

SEQ ID NO: 470375 - DNA, 33 bp, Homo sapien
atgctaggaaataatacggtaatcaactggtga

SEQ ID NO: 470376 - DNA, 33 bp, Homo sapien
atgctaggaaataatatggtaatcaactggtga

SEQ ID NO: 470377 - DNA, 33 bp, Homo sapien
gcaggagtacagatgaaaggaaagaaaaatgac

SEQ ID NO: 470378 - DNA, 33 bp, Homo sapien
gcaggagtacagatgagaggaaagaaaaatgac

SEQ ID NO: 470379 - DNA, 33 bp, Homo sapien
acattgcaagttagtacaggacctgggctttcc

SEQ ID NO: 470380 - DNA, 33 bp, Homo sapien
acattgcaagttagtataggacctgggctttcc

SEQ ID NO: 470381 - DNA, 33 bp, Homo sapien
cagaggaaacctcaagcctagttctgtgctagc

SEQ ID NO: 470382 - DNA, 33 bp, Homo sapien
cagaggaaacctcaagtctagttctgtgctagc

SEQ ID NO: 470383 - DNA, 33 bp, Homo sapien
ctcaggagttgaagagacagatcttgatcaact

SEQ ID NO: 470384 - DNA, 33 bp, Homo sapien
ctcaggagttgaagaggcagatcttgatcaact

SEQ ID NO: 470385 - DNA, 33 bp, Homo sapien
aaccaatgatgtattacgaaaaagcagacaaaa

SEQ ID NO: 470386 - DNA, 33 bp, Homo sapien
aaccaatgatgtattaggaaaaagcagacaaaa

SEQ ID NO: 470387 - DNA, 33 bp, Homo sapien
tggctgccttctgagaggatctagcaggtagtt

SEQ ID NO: 470388 - DNA, 33 bp, Homo sapien
tggctgccttctgagatgatctagcaggtagtt

SEQ ID NO: 470389 - DNA, 33 bp, Homo sapien
gatcgaagcatggctacaagaaggaaccagagt

SEQ ID NO: 470390 - DNA, 33 bp, Homo sapien
gatcgaagcatggctataagaaggaaccagagt

SEQ ID NO: 470391 - DNA, 33 bp, Homo sapien
gagtcatgaatcaccaagatctcatccctaatt

SEQ ID NO: 470392 - DNA, 33 bp, Homo sapien
gagtcatgaatcaccaggatctcatccctaatt

SEQ ID NO: 470393 - DNA, 33 bp, Homo sapien
caaccttcacatttacaacctcagtttcatcat

SEQ ID NO: 470394 - DNA, 33 bp, Homo sapien
caaccttcacatttacgacctcagtttcatcat

SEQ ID NO: 470395 - DNA, 33 bp, Homo sapien
tcaaagtatcagaccaaataaatccctgtctcc

SEQ ID NO: 470396 - DNA, 33 bp, Homo sapien
tcaaagtatcagaccagataaatccctgtctcc

SEQ ID NO: 470397 - DNA, 33 bp, Homo sapien
ctgccaaagggacagccgaacgaaaggctcaac

SEQ ID NO: 470398 - DNA, 33 bp, Homo sapien
ctgccaaagggacagctgaacgaaaggctcaac

SEQ ID NO: 470399 - DNA, 33 bp, Homo sapien
agtgccctgaggacgaaagcagggaggcctaag

SEQ ID NO: 470400 - DNA, 33 bp, Homo sapien
agtgccctgaggacgagagcagggaggcctaag

SEQ ID NO: 470401 - DNA, 33 bp, Homo sapien
acacagactcttgccacgacctcttctttgtct

SEQ ID NO: 470402 - DNA, 33 bp, Homo sapien
acacagactcttgccatgacctcttctttgtct

SEQ ID NO: 470403 - DNA, 33 bp, Homo sapien
tggtcttacccttccacgcccacagacacactt

SEQ ID NO: 470404 - DNA, 33 bp, Homo sapien
tggtcttacccttccatgcccacagacacactt

SEQ ID NO: 470405 - DNA, 33 bp, Homo sapien
ttattattatttaaacaaaagcctgaggagtag

SEQ ID NO: 470406 - DNA, 33 bp, Homo sapien
ttattattatttaaacgaaagcctgaggagtag

SEQ ID NO: 470407 - DNA, 33 bp, Homo sapien
aaggtgagctcaggaacgtgttgctgacgtcag

SEQ ID NO: 470408 - DNA, 33 bp, Homo sapien
aaggtgagctcaggaatgtgttgctgacgtcag

SEQ ID NO: 470409 - DNA, 33 bp, Homo sapien
cccaatgggggactaacgagaacggtgatgagc

SEQ ID NO: 470410 - DNA, 33 bp, Homo sapien
cccaatgggggactaatgagaacggtgatgagc

SEQ ID NO: 470411 - DNA, 33 bp, Homo sapien
ctaccacgtgttgaataacttctaacgtaccag

SEQ ID NO: 470412 - DNA, 33 bp, Homo sapien
ctaccacgtgttgaatgacttctaacgtaccag

SEQ ID NO: 470413 - DNA, 33 bp, Homo sapien
gccggtgactgacagaaggcttcacgtttcagt

SEQ ID NO: 470414 - DNA, 33 bp, Homo sapien
gccggtgactgacagagggcttcacgtttcagt

SEQ ID NO: 470415 - DNA, 33 bp, Homo sapien
aataaataaaaataagcccatcttggagatgag

SEQ ID NO: 470416 - DNA, 33 bp, Homo sapien
aataaataaaaataaggccatcttggagatgag

SEQ ID NO: 470417 - DNA, 33 bp, Homo sapien
ccaaggaaaccacagcgcctttgttgttgccat

SEQ ID NO: 470418 - DNA, 33 bp, Homo sapien
ccaaggaaaccacagctcctttgttgttgccat

SEQ ID NO: 470419 - DNA, 33 bp, Homo sapien
catgtcacttaccagacggtctggaatagcctt

SEQ ID NO: 470420 - DNA, 33 bp, Homo sapien
catgtcacttaccagatggtctggaatagcctt

SEQ ID NO: 470421 - DNA, 33 bp, Homo sapien
gaagtggcctgagaaaacaataaagagagggcg

SEQ ID NO: 470422 - DNA, 33 bp, Homo sapien
gaagtggcctgagaaagcaataaagagagggcg

SEQ ID NO: 470423 - DNA, 33 bp, Homo sapien
acaaaaccaaatccagaaagcagtccaggggtt

SEQ ID NO: 470424 - DNA, 33 bp, Homo sapien
acaaaaccaaatccaggaagcagtccaggggtt

SEQ ID NO: 470425 - DNA, 33 bp, Homo sapien
gacaaggtaacacaaacattaactgtttctcct

SEQ ID NO: 470426 - DNA, 33 bp, Homo sapien
gacaaggtaacacaaatattaactgtttctcct

SEQ ID NO: 470427 - DNA, 33 bp, Homo sapien
tgccatttattgagcccataccaggtgccggcc

SEQ ID NO: 470428 - DNA, 33 bp, Homo sapien
tgccatttattgagcctataccaggtgccggcc

SEQ ID NO: 470429 - DNA, 33 bp, Homo sapien
tacagattatattgacgaggacgttttgctttc

SEQ ID NO: 470430 - DNA, 33 bp, Homo sapien
tacagattatattgactaggacgttttgctttc

SEQ ID NO: 470431 - DNA, 33 bp, Homo sapien
cctcaagctaccttcaatcctagaagggacaaa

SEQ ID NO: 470432 - DNA, 33 bp, Homo sapien
cctcaagctaccttcagtcctagaagggacaaa

SEQ ID NO: 470433 - DNA, 33 bp, Homo sapien
tgagcctcaggcttaccgctaaaatgttaagtg

SEQ ID NO: 470434 - DNA, 33 bp, Homo sapien
tgagcctcaggcttacggctaaaatgttaagtg

SEQ ID NO: 470435 - DNA, 33 bp, Homo sapien
tagaagggcggacttggatctgagagagaataa

SEQ ID NO: 470436 - DNA, 33 bp, Homo sapien
tagaagggcggacttgtatctgagagagaataa

SEQ ID NO: 470437 - DNA, 33 bp, Homo sapien
ctaggaggcaatggtaagagagtggaaagcggg

SEQ ID NO: 470438 - DNA, 33 bp, Homo sapien
ctaggaggcaatggtaggagagtggaaagcggg

SEQ ID NO: 470439 - DNA, 33 bp, Homo sapien
cagaggaaagccaaagccaccaagcctttcatg

SEQ ID NO: 470440 - DNA, 33 bp, Homo sapien
cagaggaaagccaaagtcaccaagcctttcatg

SEQ ID NO: 470441 - DNA, 33 bp, Homo sapien
acctattaagacatgaccttacactctgacaac

SEQ ID NO: 470442 - DNA, 33 bp, Homo sapien
acctattaagacatgagcttacactctgacaac

SEQ ID NO: 470443 - DNA, 33 bp, Homo sapien
gtagctaatgcaaatactattgatctgctcttg

SEQ ID NO: 470444 - DNA, 33 bp, Homo sapien
gtagctaatgcaaatattattgatctgctcttg

SEQ ID NO: 470445 - DNA, 33 bp, Homo sapien
tgtggaatgatgattcaagctttgattgctgat

SEQ ID NO: 470446 - DNA, 33 bp, Homo sapien
tgtggaatgatgattcgagctttgattgctgat

SEQ ID NO: 470447 - DNA, 33 bp, Homo sapien
gtgtaggaatgaaaacaaaaagtaatgtcgaat

SEQ ID NO: 470448 - DNA, 33 bp, Homo sapien
gtgtaggaatgaaaaccaaaagtaatgtcgaat

SEQ ID NO: 470449 - DNA, 33 bp, Homo sapien
tggggaaatccacctccaattcctaaccaactc

SEQ ID NO: 470450 - DNA, 33 bp, Homo sapien
tggggaaatccacctctaattcctaaccaactc

SEQ ID NO: 470451 - DNA, 33 bp, Homo sapien
aaaacaaagtgtgatacccacagtacagtgcag

SEQ ID NO: 470452 - DNA, 33 bp, Homo sapien
aaaacaaagtgtgatatccacagtacagtgcag

SEQ ID NO: 470453 - DNA, 33 bp, Homo sapien
gtgaacatgcaaactgcattctgtgttttatta

SEQ ID NO: 470454 - DNA, 33 bp, Homo sapien
gtgaacatgcaaactgtattctgtgttttatta

SEQ ID NO: 470455 - DNA, 33 bp, Homo sapien
tttgaagcaaatcccaagtatatcctttcatcc

SEQ ID NO: 470456 - DNA, 33 bp, Homo sapien
tttgaagcaaatcccaggtatatcctttcatcc

SEQ ID NO: 470457 - DNA, 33 bp, Homo sapien
cacatctctgagagtgaatggggagtaagaata

SEQ ID NO: 470458 - DNA, 33 bp, Homo sapien
cacatctctgagagtggatggggagtaagaata

SEQ ID NO: 470459 - DNA, 33 bp, Homo sapien
tggtctaaacacacacaagtcatttttttctaa

SEQ ID NO: 470460 - DNA, 33 bp, Homo sapien
tggtctaaacacacacgagtcatttttttctaa

SEQ ID NO: 470461 - DNA, 33 bp, Homo sapien
cagagcatcacgtccaaaatgaacccagctttt

SEQ ID NO: 470462 - DNA, 33 bp, Homo sapien
cagagcatcacgtccagaatgaacccagctttt

SEQ ID NO: 470463 - DNA, 33 bp, Homo sapien
tctttcctcttcaccaagccttatcaataatgt

SEQ ID NO: 470464 - DNA, 33 bp, Homo sapien
tctttcctcttcaccaggccttatcaataatgt

SEQ ID NO: 470465 - DNA, 33 bp, Homo sapien
cctttcatctgttccacgttgtgcagcctacag

SEQ ID NO: 470466 - DNA, 33 bp, Homo sapien
cctttcatctgttccatgttgtgcagcctacag

SEQ ID NO: 470467 - DNA, 33 bp, Homo sapien
ctgatacaaattgaatcaaccaacaagaactag

SEQ ID NO: 470468 - DNA, 33 bp, Homo sapien
ctgatacaaattgaatgaaccaacaagaactag

SEQ ID NO: 470469 - DNA, 33 bp, Homo sapien
ctaatggcatcccttccatcttttcatcactgt

SEQ ID NO: 470470 - DNA, 33 bp, Homo sapien
ctaatggcatcccttctatcttttcatcactgt

SEQ ID NO: 470471 - DNA, 33 bp, Homo sapien
tttccctgtaaaatgcaaacactaccttgtaaa

SEQ ID NO: 470472 - DNA, 33 bp, Homo sapien
tttccctgtaaaatgcgaacactaccttgtaaa

SEQ ID NO: 470473 - DNA, 33 bp, Homo sapien
acaattcttaccaatacgaagcttgccacctgt

SEQ ID NO: 470474 - DNA, 33 bp, Homo sapien
acaattcttaccaatatgaagcttgccacctgt

SEQ ID NO: 470475 - DNA, 33 bp, Homo sapien
tccactggtcaaatgaaggattccagtgggtca

SEQ ID NO: 470476 - DNA, 33 bp, Homo sapien
tccactggtcaaatgacggattccagtgggtca

SEQ ID NO: 470477 - DNA, 33 bp, Homo sapien
gccttctgaagagctgaagggatgtaggccatg

SEQ ID NO: 470478 - DNA, 33 bp, Homo sapien
gccttctgaagagctggagggatgtaggccatg

SEQ ID NO: 470479 - DNA, 33 bp, Homo sapien
accatctttgggaccccaggcgcagcatgcagc

SEQ ID NO: 470480 - DNA, 33 bp, Homo sapien
accatctttgggacccgaggcgcagcatgcagc

SEQ ID NO: 470481 - DNA, 33 bp, Homo sapien
cctccatcctggagtccgaaacccacagcagcc

SEQ ID NO: 470482 - DNA, 33 bp, Homo sapien
cctccatcctggagtctgaaacccacagcagcc

SEQ ID NO: 470483 - DNA, 33 bp, Homo sapien
ctctgtttcctgagcaacgtggtcttcgggcct

SEQ ID NO: 470484 - DNA, 33 bp, Homo sapien
ctctgtttcctgagcaccgtggtcttcgggcct

SEQ ID NO: 470485 - DNA, 33 bp, Homo sapien
cctcttgcccactgcaatatttgtaaatggtgc

SEQ ID NO: 470486 - DNA, 33 bp, Homo sapien
cctcttgcccactgcagtatttgtaaatggtgc

SEQ ID NO: 470487 - DNA, 33 bp, Homo sapien
gaagtaacgttctatacgtcaagatgtgcattg

SEQ ID NO: 470488 - DNA, 33 bp, Homo sapien
gaagtaacgttctatatgtcaagatgtgcattg

SEQ ID NO: 470489 - DNA, 33 bp, Homo sapien
gtaactgcaaacatgcacactgggtttcattca

SEQ ID NO: 470490 - DNA, 33 bp, Homo sapien
gtaactgcaaacatgcgcactgggtttcattca

SEQ ID NO: 470491 - DNA, 33 bp, Homo sapien
ctcagaggattgcgagacactccaaaaaagtct

SEQ ID NO: 470492 - DNA, 33 bp, Homo sapien
ctcagaggattgcgaggcactccaaaaaagtct

SEQ ID NO: 470493 - DNA, 33 bp, Homo sapien
ttgactcaaccatgaaacaggatggtaatacta

SEQ ID NO: 470494 - DNA, 33 bp, Homo sapien
ttgactcaaccatgaagcaggatggtaatacta

SEQ ID NO: 470495 - DNA, 33 bp, Homo sapien
gtatcactacagcaaaagcctgatactgagaaa

SEQ ID NO: 470496 - DNA, 33 bp, Homo sapien
gtatcactacagcaaaggcctgatactgagaaa

SEQ ID NO: 470497 - DNA, 33 bp, Homo sapien
tgagagagcaggggaacggacaatgtgagccaa

SEQ ID NO: 470498 - DNA, 33 bp, Homo sapien
tgagagagcaggggaatggacaatgtgagccaa

SEQ ID NO: 470499 - DNA, 33 bp, Homo sapien
gggtacactcagccacaaaactcggagggcagg

SEQ ID NO: 470500 - DNA, 33 bp, Homo sapien
gggtacactcagccacgaaactcggagggcagg

SEQ ID NO: 470501 - DNA, 33 bp, Homo sapien
ggtcctgatggcactaaccactcctgacactga

SEQ ID NO: 470502 - DNA, 33 bp, Homo sapien
ggtcctgatggcactacccactcctgacactga

SEQ ID NO: 470503 - DNA, 33 bp, Homo sapien
gtggctttgaacctgaccagagccctgttctgg

SEQ ID NO: 470504 - DNA, 33 bp, Homo sapien
gtggctttgaacctgatcagagccctgttctgg

SEQ ID NO: 470505 - DNA, 33 bp, Homo sapien
ttgctggagttggtaacgggccctagggattca

SEQ ID NO: 470506 - DNA, 33 bp, Homo sapien
ttgctggagttggtaatgggccctagggattca

SEQ ID NO: 470507 - DNA, 33 bp, Homo sapien
tgtattgggagaatgaaccaaaaaggcaagaaa

SEQ ID NO: 470508 - DNA, 33 bp, Homo sapien
tgtattgggagaatgatccaaaaaggcaagaaa

SEQ ID NO: 470509 - DNA, 33 bp, Homo sapien
aagacagcaaacaccaaatcaatgaaatccaac

SEQ ID NO: 470510 - DNA, 33 bp, Homo sapien
aagacagcaaacaccacatcaatgaaatccaac

SEQ ID NO: 470511 - DNA, 33 bp, Homo sapien
agggcttcaaggaagagtcagaaaaagcaaaca

SEQ ID NO: 470512 - DNA, 33 bp, Homo sapien
agggcttcaaggaagattcagaaaaagcaaaca

SEQ ID NO: 470513 - DNA, 33 bp, Homo sapien
ctgagaactgaggagacagactagactgatatg

SEQ ID NO: 470514 - DNA, 33 bp, Homo sapien
ctgagaactgaggagagagactagactgatatg

SEQ ID NO: 470515 - DNA, 33 bp, Homo sapien
tccttctctgtttcaacgattgattgtgtcact

SEQ ID NO: 470516 - DNA, 33 bp, Homo sapien
tccttctctgtttcaatgattgattgtgtcact

SEQ ID NO: 470517 - DNA, 33 bp, Homo sapien
ccaactgttttgtgaaataaaatgctaattccc

SEQ ID NO: 470518 - DNA, 33 bp, Homo sapien
ccaactgttttgtgaagtaaaatgctaattccc

SEQ ID NO: 470519 - DNA, 33 bp, Homo sapien
gtctgtctccatttccacatcgttctacaagcc

SEQ ID NO: 470520 - DNA, 33 bp, Homo sapien
gtctgtctccatttccgcatcgttctacaagcc

SEQ ID NO: 470521 - DNA, 33 bp, Homo sapien
tctcagccttctgcacacgcctgttgaggggac

SEQ ID NO: 470522 - DNA, 33 bp, Homo sapien
tctcagccttctgcacgcgcctgttgaggggac

SEQ ID NO: 470523 - DNA, 33 bp, Homo sapien
ctggctcttgcttctacaatactcatcagagcc

SEQ ID NO: 470524 - DNA, 33 bp, Homo sapien
ctggctcttgcttctataatactcatcagagcc

SEQ ID NO: 470525 - DNA, 33 bp, Homo sapien
gtcaaatgggaatagcaatgctgtgctccccac

SEQ ID NO: 470526 - DNA, 33 bp, Homo sapien
gtcaaatgggaatagcgatgctgtgctccccac

SEQ ID NO: 470527 - DNA, 33 bp, Homo sapien
actgctgttggagcccggctatgtcatatttgc

SEQ ID NO: 470528 - DNA, 33 bp, Homo sapien
actgctgttggagccctgctatgtcatatttgc

SEQ ID NO: 470529 - DNA, 33 bp, Homo sapien
acagcaacccattttacagatgacgccacccaa

SEQ ID NO: 470530 - DNA, 33 bp, Homo sapien
acagcaacccattttatagatgacgccacccaa

SEQ ID NO: 470531 - DNA, 33 bp, Homo sapien
acaaggacagaaggtacaaggaaaccagcccag

SEQ ID NO: 470532 - DNA, 33 bp, Homo sapien
acaaggacagaaggtagaaggaaaccagcccag

SEQ ID NO: 470533 - DNA, 33 bp, Homo sapien
agacagagatgatagccaaatccttaaacaggc

SEQ ID NO: 470534 - DNA, 33 bp, Homo sapien
agacagagatgatagctaaatccttaaacaggc

SEQ ID NO: 470535 - DNA, 33 bp, Homo sapien
agactctgcgattcagaagaagagctgagaact

SEQ ID NO: 470536 - DNA, 33 bp, Homo sapien
agactctgcgattcaggagaagagctgagaact

SEQ ID NO: 470537 - DNA, 33 bp, Homo sapien
ctctctgtctctcctcactatggcacaagctac

SEQ ID NO: 470538 - DNA, 33 bp, Homo sapien
ctctctgtctctcctcgctatggcacaagctac

SEQ ID NO: 470539 - DNA, 33 bp, Homo sapien
gatgacttttccctagcagtttttcaatgcctt

SEQ ID NO: 470540 - DNA, 33 bp, Homo sapien
gatgacttttccctagtagtttttcaatgcctt

SEQ ID NO: 470541 - DNA, 33 bp, Homo sapien
attattttgccataaacatacacacaaacgggc

SEQ ID NO: 470542 - DNA, 33 bp, Homo sapien
attattttgccataaatatacacacaaacgggc

SEQ ID NO: 470543 - DNA, 33 bp, Homo sapien
tggtccatatcccagccatcctttgctagaata

SEQ ID NO: 470544 - DNA, 33 bp, Homo sapien
tggtccatatcccagcgatcctttgctagaata

SEQ ID NO: 470545 - DNA, 33 bp, Homo sapien
gctcaactactctggaatcatgaggggcaccgt

SEQ ID NO: 470546 - DNA, 33 bp, Homo sapien
gctcaactactctggagtcatgaggggcaccgt

SEQ ID NO: 470547 - DNA, 33 bp, Homo sapien
gccctccactagcttaagagtgacttacggaca

SEQ ID NO: 470548 - DNA, 33 bp, Homo sapien
gccctccactagcttatgagtgacttacggaca

SEQ ID NO: 470549 - DNA, 33 bp, Homo sapien
atccatactgatgtaaataataactgaataaaa

SEQ ID NO: 470550 - DNA, 33 bp, Homo sapien
atccatactgatgtaagtaataactgaataaaa

SEQ ID NO: 470551 - DNA, 33 bp, Homo sapien
cttttactttcacataggcagttaacatacaga

SEQ ID NO: 470552 - DNA, 33 bp, Homo sapien
cttttactttcacatatgcagttaacatacaga

SEQ ID NO: 470553 - DNA, 33 bp, Homo sapien
attctgtcctttagaaacatattagtaagccca

SEQ ID NO: 470554 - DNA, 33 bp, Homo sapien
attctgtcctttagaagcatattagtaagccca

SEQ ID NO: 470555 - DNA, 33 bp, Homo sapien
ttctacttttctcctcaatgtcctgaattttag

SEQ ID NO: 470556 - DNA, 33 bp, Homo sapien
ttctacttttctcctcgatgtcctgaattttag

SEQ ID NO: 470557 - DNA, 33 bp, Homo sapien
gccagcacaagcatcccgattctagaggctcag

SEQ ID NO: 470558 - DNA, 33 bp, Homo sapien
gccagcacaagcatcctgattctagaggctcag

SEQ ID NO: 470559 - DNA, 33 bp, Homo sapien
aaggtcacagaagaaactgtagtcttggctctg

SEQ ID NO: 470560 - DNA, 33 bp, Homo sapien
aaggtcacagaagaaattgtagtcttggctctg

SEQ ID NO: 470561 - DNA, 33 bp, Homo sapien
tcttagcaactgaagaagcatctttaataactg

SEQ ID NO: 470562 - DNA, 33 bp, Homo sapien
tcttagcaactgaagaggcatctttaataactg

SEQ ID NO: 470563 - DNA, 33 bp, Homo sapien
aggtcactcaggccaacgcgccccctttacaga

SEQ ID NO: 470564 - DNA, 33 bp, Homo sapien
aggtcactcaggccaatgcgccccctttacaga

SEQ ID NO: 470565 - DNA, 33 bp, Homo sapien
catgtctgatgctctccaaacctatttgaatga

SEQ ID NO: 470566 - DNA, 33 bp, Homo sapien
catgtctgatgctctctaaacctatttgaatga

SEQ ID NO: 470567 - DNA, 33 bp, Homo sapien
tcctgctaccctacacagtcatgttccaaaagc

SEQ ID NO: 470568 - DNA, 33 bp, Homo sapien
tcctgctaccctacacggtcatgttccaaaagc

SEQ ID NO: 470569 - DNA, 33 bp, Homo sapien
cctgctggactaacccacgacatcagtattggc

SEQ ID NO: 470570 - DNA, 33 bp, Homo sapien
cctgctggactaacccgcgacatcagtattggc

SEQ ID NO: 470571 - DNA, 33 bp, Homo sapien
ataaagacttggtatgaaaacagaaatgtgatg

SEQ ID NO: 470572 - DNA, 33 bp, Homo sapien
ataaagacttggtatgtaaacagaaatgtgatg

SEQ ID NO: 470573 - DNA, 33 bp, Homo sapien
ggggctggaaagcaacacagggcaaggagagag

SEQ ID NO: 470574 - DNA, 33 bp, Homo sapien
ggggctggaaagcaacgcagggcaaggagagag

SEQ ID NO: 470575 - DNA, 33 bp, Homo sapien
tcctaatacctctcatcacacttgaaacaaaat

SEQ ID NO: 470576 - DNA, 33 bp, Homo sapien
tcctaatacctctcattacacttgaaacaaaat

SEQ ID NO: 470577 - DNA, 33 bp, Homo sapien
agagaagtatttcagacggaaaactgataggac

SEQ ID NO: 470578 - DNA, 33 bp, Homo sapien
agagaagtatttcagatggaaaactgataggac

SEQ ID NO: 470579 - DNA, 33 bp, Homo sapien
aacaataaagaaatcacgtcatttcccacctgc

SEQ ID NO: 470580 - DNA, 33 bp, Homo sapien
aacaataaagaaatcaggtcatttcccacctgc

SEQ ID NO: 470581 - DNA, 33 bp, Homo sapien
tgattcctttcttaacccttccttgcggtttct

SEQ ID NO: 470582 - DNA, 33 bp, Homo sapien
tgattcctttcttaacgcttccttgcggtttct

SEQ ID NO: 470583 - DNA, 33 bp, Homo sapien
aagcagaaaggcagaaaacctactggcattttc

SEQ ID NO: 470584 - DNA, 33 bp, Homo sapien
aagcagaaaggcagaatacctactggcattttc

SEQ ID NO: 470585 - DNA, 33 bp, Homo sapien
tctccaggcacttcacaaatctggtcagacctc

SEQ ID NO: 470586 - DNA, 33 bp, Homo sapien
tctccaggcacttcacgaatctggtcagacctc

SEQ ID NO: 470587 - DNA, 33 bp, Homo sapien
aatcaggtattggaaaggaatttgcatatagat

SEQ ID NO: 470588 - DNA, 33 bp, Homo sapien
aatcaggtattggaaatgaatttgcatatagat

SEQ ID NO: 470589 - DNA, 33 bp, Homo sapien
gggatgctgtccaaccacagagtggagtctgca

SEQ ID NO: 470590 - DNA, 33 bp, Homo sapien
gggatgctgtccaaccgcagagtggagtctgca

SEQ ID NO: 470591 - DNA, 33 bp, Homo sapien
aacatcaatggggtacaatccaagcctagccat

SEQ ID NO: 470592 - DNA, 33 bp, Homo sapien
aacatcaatggggtacgatccaagcctagccat

SEQ ID NO: 470593 - DNA, 33 bp, Homo sapien
aatagtacctgagtcacagccatttataaaagc

SEQ ID NO: 470594 - DNA, 33 bp, Homo sapien
aatagtacctgagtcagagccatttataaaagc

SEQ ID NO: 470595 - DNA, 33 bp, Homo sapien
ccctttccagctggctcaattccttttcttttt

SEQ ID NO: 470596 - DNA, 33 bp, Homo sapien
ccctttccagctggctgaattccttttcttttt

SEQ ID NO: 470597 - DNA, 33 bp, Homo sapien
gtgtgcatgctgttgaagtaagtagtaagagtt

SEQ ID NO: 470598 - DNA, 33 bp, Homo sapien
gtgtgcatgctgttgatgtaagtagtaagagtt

SEQ ID NO: 470599 - DNA, 33 bp, Homo sapien
tgaacgggagtttgccagagggcgatgttcatc

SEQ ID NO: 470600 - DNA, 33 bp, Homo sapien
tgaacgggagtttgcccgagggcgatgttcatc

SEQ ID NO: 470601 - DNA, 33 bp, Homo sapien
catctgacaagattacaaactacttcaaagcct

SEQ ID NO: 470602 - DNA, 33 bp, Homo sapien
catctgacaagattacgaactacttcaaagcct

SEQ ID NO: 470603 - DNA, 33 bp, Homo sapien
tccagcctctgtgaatgagttcagaacaaggaa

SEQ ID NO: 470604 - DNA, 33 bp, Homo sapien
tccagcctctgtgaattagttcagaacaaggaa

SEQ ID NO: 470605 - DNA, 33 bp, Homo sapien
aattatttgaatgacacgtggaaatgttcaaaa

SEQ ID NO: 470606 - DNA, 33 bp, Homo sapien
aattatttgaatgacatgtggaaatgttcaaaa

SEQ ID NO: 470607 - DNA, 33 bp, Homo sapien
caacaatcattttggaaacataacagacactgt

SEQ ID NO: 470608 - DNA, 33 bp, Homo sapien
caacaatcattttggatacataacagacactgt

SEQ ID NO: 470609 - DNA, 33 bp, Homo sapien
gaagttgtcatcaaaaccagaagaaagtcatgg

SEQ ID NO: 470610 - DNA, 33 bp, Homo sapien
gaagttgtcatcaaaatcagaagaaagtcatgg

SEQ ID NO: 470611 - DNA, 33 bp, Homo sapien
caaattcaaagttcaaatcgtatttctggctaa

SEQ ID NO: 470612 - DNA, 33 bp, Homo sapien
caaattcaaagttcaagtcgtatttctggctaa

SEQ ID NO: 470613 - DNA, 33 bp, Homo sapien
acagatcagatttatcactttggttacatccct

SEQ ID NO: 470614 - DNA, 33 bp, Homo sapien
acagatcagatttatcgctttggttacatccct

SEQ ID NO: 470615 - DNA, 33 bp, Homo sapien
tcgaaaattatgataaaccccctgaatgtttta

SEQ ID NO: 470616 - DNA, 33 bp, Homo sapien
tcgaaaattatgataacccccctgaatgtttta

SEQ ID NO: 470617 - DNA, 33 bp, Homo sapien
caaaatctttcacaatcacaaaaccagcagctt

SEQ ID NO: 470618 - DNA, 33 bp, Homo sapien
caaaatctttcacaattacaaaaccagcagctt

SEQ ID NO: 470619 - DNA, 33 bp, Homo sapien
ccctgtgaccagtgccacgggagtcctgagggt

SEQ ID NO: 470620 - DNA, 33 bp, Homo sapien
ccctgtgaccagtgccgcgggagtcctgagggt

SEQ ID NO: 470621 - DNA, 33 bp, Homo sapien
aagcatggcaaagaaccagctgggcacgaagat

SEQ ID NO: 470622 - DNA, 33 bp, Homo sapien
aagcatggcaaagaacgagctgggcacgaagat

SEQ ID NO: 470623 - DNA, 33 bp, Homo sapien
tgttgggatgccagaacgattgcatgtctcaca

SEQ ID NO: 470624 - DNA, 33 bp, Homo sapien
tgttgggatgccagaatgattgcatgtctcaca

SEQ ID NO: 470625 - DNA, 33 bp, Homo sapien
tttgcatccaaacctgaagctcagacaacaggg

SEQ ID NO: 470626 - DNA, 33 bp, Homo sapien
tttgcatccaaacctgcagctcagacaacaggg

SEQ ID NO: 470627 - DNA, 33 bp, Homo sapien
ctgtgactagtttatacgtttctcttgcaaact

SEQ ID NO: 470628 - DNA, 33 bp, Homo sapien
ctgtgactagtttatatgtttctcttgcaaact

SEQ ID NO: 470629 - DNA, 33 bp, Homo sapien
tacttgatctgtatcacagtggagagaatccaa

SEQ ID NO: 470630 - DNA, 33 bp, Homo sapien
tacttgatctgtatcatagtggagagaatccaa

SEQ ID NO: 470631 - DNA, 33 bp, Homo sapien
gagggcaggcattataagtcctatctttgtgat

SEQ ID NO: 470632 - DNA, 33 bp, Homo sapien
gagggcaggcattataggtcctatctttgtgat

SEQ ID NO: 470633 - DNA, 33 bp, Homo sapien
ggagagcagctgagatgagaagtagccagacct

SEQ ID NO: 470634 - DNA, 33 bp, Homo sapien
ggagagcagctgagattagaagtagccagacct

SEQ ID NO: 470635 - DNA, 33 bp, Homo sapien
attacatatccagatgaaggtgctagaaatgta

SEQ ID NO: 470636 - DNA, 33 bp, Homo sapien
attacatatccagatgcaggtgctagaaatgta

SEQ ID NO: 470637 - DNA, 33 bp, Homo sapien
ggaccagctttctgagaatcacagggacaacct

SEQ ID NO: 470638 - DNA, 33 bp, Homo sapien
ggaccagctttctgaggatcacagggacaacct

SEQ ID NO: 470639 - DNA, 33 bp, Homo sapien
gcctgacacatagaaaaagctcgggaagcatta

SEQ ID NO: 470640 - DNA, 33 bp, Homo sapien
gcctgacacatagaaagagctcgggaagcatta

SEQ ID NO: 470641 - DNA, 33 bp, Homo sapien
ccaacactaaacatgacaaagagcagcctctca

SEQ ID NO: 470642 - DNA, 33 bp, Homo sapien
ccaacactaaacatgagaaagagcagcctctca

SEQ ID NO: 470643 - DNA, 33 bp, Homo sapien
tgaataaagcatctagaaacattcgtgtataaa

SEQ ID NO: 470644 - DNA, 33 bp, Homo sapien
tgaataaagcatctaggaacattcgtgtataaa

SEQ ID NO: 470645 - DNA, 33 bp, Homo sapien
caaggttccaagtagaaatctgagacttgtcga

SEQ ID NO: 470646 - DNA, 33 bp, Homo sapien
caaggttccaagtagagatctgagacttgtcga

SEQ ID NO: 470647 - DNA, 33 bp, Homo sapien
atgaacgaatgatagaagtacacctccagtggt

SEQ ID NO: 470648 - DNA, 33 bp, Homo sapien
atgaacgaatgatagatgtacacctccagtggt

SEQ ID NO: 470649 - DNA, 33 bp, Homo sapien
ttcatctctccaataacatcatcatccccatca

SEQ ID NO: 470650 - DNA, 33 bp, Homo sapien
ttcatctctccaataagatcatcatccccatca

SEQ ID NO: 470651 - DNA, 33 bp, Homo sapien
ctgcctccttgccaaactcctgtcggcacttgc

SEQ ID NO: 470652 - DNA, 33 bp, Homo sapien
ctgcctccttgccaaagtcctgtcggcacttgc

SEQ ID NO: 470653 - DNA, 33 bp, Homo sapien
ttgctttgactattcaacttcttttttggttct

SEQ ID NO: 470654 - DNA, 33 bp, Homo sapien
ttgctttgactattcagcttcttttttggttct

SEQ ID NO: 470655 - DNA, 33 bp, Homo sapien
gagagaaccccccatacactaacagcacacttc

SEQ ID NO: 470656 - DNA, 33 bp, Homo sapien
gagagaaccccccatatactaacagcacacttc

SEQ ID NO: 470657 - DNA, 33 bp, Homo sapien
ctagtggtcaaagagaaaaatagttcagtttca

SEQ ID NO: 470658 - DNA, 33 bp, Homo sapien
ctagtggtcaaagagagaaatagttcagtttca

SEQ ID NO: 470659 - DNA, 33 bp, Homo sapien
actagaaagctcaaagcaaagtctgtagctttt

SEQ ID NO: 470660 - DNA, 33 bp, Homo sapien
actagaaagctcaaagtaaagtctgtagctttt

SEQ ID NO: 470661 - DNA, 33 bp, Homo sapien
gaatccggagtcgagagcaagtggtttaatacc

SEQ ID NO: 470662 - DNA, 33 bp, Homo sapien
gaatccggagtcgagatcaagtggtttaatacc

SEQ ID NO: 470663 - DNA, 33 bp, Homo sapien
agacaaggatttcctcaaataaagtgaaagtct

SEQ ID NO: 470664 - DNA, 33 bp, Homo sapien
agacaaggatttcctcgaataaagtgaaagtct

SEQ ID NO: 470665 - DNA, 33 bp, Homo sapien
tccctgggctgggaccaattccttctcatctcc

SEQ ID NO: 470666 - DNA, 33 bp, Homo sapien
tccctgggctgggaccgattccttctcatctcc

SEQ ID NO: 470667 - DNA, 33 bp, Homo sapien
ggagtgtatccctcatcaatagcttcggccatc

SEQ ID NO: 470668 - DNA, 33 bp, Homo sapien
ggagtgtatccctcatgaatagcttcggccatc

SEQ ID NO: 470669 - DNA, 33 bp, Homo sapien
ttggtagaatgatgaacgttaagggtgcttctg

SEQ ID NO: 470670 - DNA, 33 bp, Homo sapien
ttggtagaatgatgaatgttaagggtgcttctg

SEQ ID NO: 470671 - DNA, 33 bp, Homo sapien
catagtcatctcaaacaactgagacacaaattt

SEQ ID NO: 470672 - DNA, 33 bp, Homo sapien
catagtcatctcaaaccactgagacacaaattt

SEQ ID NO: 470673 - DNA, 33 bp, Homo sapien
tctgtctataaactaacgtgtggtgtgtatttg

SEQ ID NO: 470674 - DNA, 33 bp, Homo sapien
tctgtctataaactaatgtgtggtgtgtatttg

SEQ ID NO: 470675 - DNA, 33 bp, Homo sapien
ggcctttttaagacaccgggcagctgggaccca

SEQ ID NO: 470676 - DNA, 33 bp, Homo sapien
ggcctttttaagacactgggcagctgggaccca

SEQ ID NO: 470677 - DNA, 33 bp, Homo sapien
tgtaagttgcactccaaaaataactgaatcaga

SEQ ID NO: 470678 - DNA, 33 bp, Homo sapien
tgtaagttgcactccagaaataactgaatcaga

SEQ ID NO: 470679 - DNA, 33 bp, Homo sapien
atattcctgtgccccaaaccaacaagttctttt

SEQ ID NO: 470680 - DNA, 33 bp, Homo sapien
atattcctgtgccccagaccaacaagttctttt

SEQ ID NO: 470681 - DNA, 33 bp, Homo sapien
aataggtaattgagaacggatcattatatttaa

SEQ ID NO: 470682 - DNA, 33 bp, Homo sapien
aataggtaattgagaatggatcattatatttaa

SEQ ID NO: 470683 - DNA, 33 bp, Homo sapien
tgcctctaatgagttacgtattaaagcccctct

SEQ ID NO: 470684 - DNA, 33 bp, Homo sapien
tgcctctaatgagttatgtattaaagcccctct

SEQ ID NO: 470685 - DNA, 33 bp, Homo sapien
ctacagttgcttggaacccaggcttcagttgga

SEQ ID NO: 470686 - DNA, 33 bp, Homo sapien
ctacagttgcttggaatccaggcttcagttgga

SEQ ID NO: 470687 - DNA, 33 bp, Homo sapien
gatggaatgtggacaccattgtgaggactttct

SEQ ID NO: 470688 - DNA, 33 bp, Homo sapien
gatggaatgtggacacgattgtgaggactttct

SEQ ID NO: 470689 - DNA, 33 bp, Homo sapien
ttctatttgttaagcccgattattgtagctctt

SEQ ID NO: 470690 - DNA, 33 bp, Homo sapien
ttctatttgttaagcctgattattgtagctctt

SEQ ID NO: 470691 - DNA, 33 bp, Homo sapien
aagcaatcaaagaaacaggtaaaaagtgatgtc

SEQ ID NO: 470692 - DNA, 33 bp, Homo sapien
aagcaatcaaagaaaccggtaaaaagtgatgtc

SEQ ID NO: 470693 - DNA, 33 bp, Homo sapien
cttctatttccttcatcagacctgcctatcaaa

SEQ ID NO: 470694 - DNA, 33 bp, Homo sapien
cttctatttccttcatgagacctgcctatcaaa

SEQ ID NO: 470695 - DNA, 33 bp, Homo sapien
gccttggctagcgagccactgttcttctgatat

SEQ ID NO: 470696 - DNA, 33 bp, Homo sapien
gccttggctagcgagcgactgttcttctgatat

SEQ ID NO: 470697 - DNA, 33 bp, Homo sapien
taccaactatgtcccaactgtgccggtcctgtg

SEQ ID NO: 470698 - DNA, 33 bp, Homo sapien
taccaactatgtcccacctgtgccggtcctgtg

SEQ ID NO: 470699 - DNA, 33 bp, Homo sapien
ttgcaaaacttacctcaacactaaaccaacttc

SEQ ID NO: 470700 - DNA, 33 bp, Homo sapien
ttgcaaaacttacctcgacactaaaccaacttc

SEQ ID NO: 470701 - DNA, 33 bp, Homo sapien
tttgcctcgcactaataacttttatttcactca

SEQ ID NO: 470702 - DNA, 33 bp, Homo sapien
tttgcctcgcactaatgacttttatttcactca

SEQ ID NO: 470703 - DNA, 33 bp, Homo sapien
aaaagtaagtttgataagatagacgtgatccct

SEQ ID NO: 470704 - DNA, 33 bp, Homo sapien
aaaagtaagtttgataggatagacgtgatccct

SEQ ID NO: 470705 - DNA, 33 bp, Homo sapien
tatagtgccatttccaagttcgctttgggcaga

SEQ ID NO: 470706 - DNA, 33 bp, Homo sapien
tatagtgccatttccaggttcgctttgggcaga

SEQ ID NO: 470707 - DNA, 33 bp, Homo sapien
tttttctcattaaaaacagtaagcacaaagtat

SEQ ID NO: 470708 - DNA, 33 bp, Homo sapien
tttttctcattaaaaatagtaagcacaaagtat

SEQ ID NO: 470709 - DNA, 33 bp, Homo sapien
ccctttcccatatgaagatctcgttctcactct

SEQ ID NO: 470710 - DNA, 33 bp, Homo sapien
ccctttcccatatgaatatctcgttctcactct

SEQ ID NO: 470711 - DNA, 33 bp, Homo sapien
ctcccttgtaaccaacgacactctctcgtctca

SEQ ID NO: 470712 - DNA, 33 bp, Homo sapien
ctcccttgtaaccaactacactctctcgtctca

SEQ ID NO: 470713 - DNA, 33 bp, Homo sapien
agccaggtaattgaaacgtttcagcacattggg

SEQ ID NO: 470714 - DNA, 33 bp, Homo sapien
agccaggtaattgaaatgtttcagcacattggg

SEQ ID NO: 470715 - DNA, 33 bp, Homo sapien
attaacattcaatgcactcatcattatgttcat

SEQ ID NO: 470716 - DNA, 33 bp, Homo sapien
attaacattcaatgcagtcatcattatgttcat

SEQ ID NO: 470717 - DNA, 33 bp, Homo sapien
attttttttttccagcacaactccaggtgcaaa

SEQ ID NO: 470718 - DNA, 33 bp, Homo sapien
attttttttttccagcgcaactccaggtgcaaa

SEQ ID NO: 470719 - DNA, 33 bp, Homo sapien
agggaacacaactaaccacagggggcaagggct

SEQ ID NO: 470720 - DNA, 33 bp, Homo sapien
agggaacacaactaacgacagggggcaagggct

SEQ ID NO: 470721 - DNA, 33 bp, Homo sapien
gcattcataccagatcacctcttgataatgctg

SEQ ID NO: 470722 - DNA, 33 bp, Homo sapien
gcattcataccagatcgcctcttgataatgctg

SEQ ID NO: 470723 - DNA, 33 bp, Homo sapien
caacaccaatagtttcaatctttcctggacata

SEQ ID NO: 470724 - DNA, 33 bp, Homo sapien
caacaccaatagtttcgatctttcctggacata

SEQ ID NO: 470725 - DNA, 33 bp, Homo sapien
gccaataaagatgttgcagagagagtcctctgg

SEQ ID NO: 470726 - DNA, 33 bp, Homo sapien
gccaataaagatgttggagagagagtcctctgg

SEQ ID NO: 470727 - DNA, 33 bp, Homo sapien
caaggttggaggtaagaaaggtgaatttaagac

SEQ ID NO: 470728 - DNA, 33 bp, Homo sapien
caaggttggaggtaaggaaggtgaatttaagac

SEQ ID NO: 470729 - DNA, 33 bp, Homo sapien
ctgaggttcagaaagaagttagacgactgttat

SEQ ID NO: 470730 - DNA, 33 bp, Homo sapien
ctgaggttcagaaagacgttagacgactgttat

SEQ ID NO: 470731 - DNA, 33 bp, Homo sapien
actacgatggtagttaaaagttctatgcagttt

SEQ ID NO: 470732 - DNA, 33 bp, Homo sapien
actacgatggtagttacaagttctatgcagttt

SEQ ID NO: 470733 - DNA, 33 bp, Homo sapien
ctttagtgtttttgaaaactgagtatgagttgt

SEQ ID NO: 470734 - DNA, 33 bp, Homo sapien
ctttagtgtttttgaatactgagtatgagttgt

SEQ ID NO: 470735 - DNA, 33 bp, Homo sapien
ctaagcagtgactgacaggggcaggcttaggaa

SEQ ID NO: 470736 - DNA, 33 bp, Homo sapien
ctaagcagtgactgactggggcaggcttaggaa

SEQ ID NO: 470737 - DNA, 33 bp, Homo sapien
cgtaggaaccgggtacaataatgatttcatttt

SEQ ID NO: 470738 - DNA, 33 bp, Homo sapien
cgtaggaaccgggtacgataatgatttcatttt

SEQ ID NO: 470739 - DNA, 33 bp, Homo sapien
ttgaagacgtcatcccaaaatcacatttcaatc

SEQ ID NO: 470740 - DNA, 33 bp, Homo sapien
ttgaagacgtcatccccaaatcacatttcaatc

SEQ ID NO: 470741 - DNA, 33 bp, Homo sapien
aaacatggtttaatagaacacaatttctaagat

SEQ ID NO: 470742 - DNA, 33 bp, Homo sapien
aaacatggtttaataggacacaatttctaagat

SEQ ID NO: 470743 - DNA, 33 bp, Homo sapien
tgtgtatctgggagcggatataacagagaaatg

SEQ ID NO: 470744 - DNA, 33 bp, Homo sapien
tgtgtatctgggagcgtatataacagagaaatg

SEQ ID NO: 470745 - DNA, 33 bp, Homo sapien
atgcttcatagttcaaaggaaaaggcacagaaa

SEQ ID NO: 470746 - DNA, 33 bp, Homo sapien
atgcttcatagttcaagggaaaaggcacagaaa

SEQ ID NO: 470747 - DNA, 33 bp, Homo sapien
gcaatctgctaaaatacgtaaattgcagatcag

SEQ ID NO: 470748 - DNA, 33 bp, Homo sapien
gcaatctgctaaaatatgtaaattgcagatcag

SEQ ID NO: 470749 - DNA, 33 bp, Homo sapien
ccagctgcggagcaagacatggctacccaagct

SEQ ID NO: 470750 - DNA, 33 bp, Homo sapien
ccagctgcggagcaaggcatggctacccaagct

SEQ ID NO: 470751 - DNA, 33 bp, Homo sapien
agatttgtctacttacacagagcaaactttttg

SEQ ID NO: 470752 - DNA, 33 bp, Homo sapien
agatttgtctacttacccagagcaaactttttg

SEQ ID NO: 470753 - DNA, 33 bp, Homo sapien
tctaatagtggataatcactgcatgaatttatc

SEQ ID NO: 470754 - DNA, 33 bp, Homo sapien
tctaatagtggataatgactgcatgaatttatc

SEQ ID NO: 470755 - DNA, 33 bp, Homo sapien
ctaaggtgacaagacacgtgggccagataagtt

SEQ ID NO: 470756 - DNA, 33 bp, Homo sapien
ctaaggtgacaagacatgtgggccagataagtt

SEQ ID NO: 470757 - DNA, 33 bp, Homo sapien
aacctgacttgccatacagaaatgctgtttctg

SEQ ID NO: 470758 - DNA, 33 bp, Homo sapien
aacctgacttgccatatagaaatgctgtttctg

SEQ ID NO: 470759 - DNA, 33 bp, Homo sapien
cattagagaacacgtgaatgacacctcaccctc

SEQ ID NO: 470760 - DNA, 33 bp, Homo sapien
cattagagaacacgtggatgacacctcaccctc

SEQ ID NO: 470761 - DNA, 33 bp, Homo sapien
gaacagagtgaagtaccctgggaaagatgcatg

SEQ ID NO: 470762 - DNA, 33 bp, Homo sapien
gaacagagtgaagtacgctgggaaagatgcatg

SEQ ID NO: 470763 - DNA, 33 bp, Homo sapien
cagaagccttttcagacgagacagcttttgaga

SEQ ID NO: 470764 - DNA, 33 bp, Homo sapien
cagaagccttttcagatgagacagcttttgaga

SEQ ID NO: 470765 - DNA, 33 bp, Homo sapien
acgagccttcaatgcccgataaagcctgaaagc

SEQ ID NO: 470766 - DNA, 33 bp, Homo sapien
acgagccttcaatgcctgataaagcctgaaagc

SEQ ID NO: 470767 - DNA, 33 bp, Homo sapien
gataaagcctgaaagccacaatctgccctggaa

SEQ ID NO: 470768 - DNA, 33 bp, Homo sapien
gataaagcctgaaagctacaatctgccctggaa

SEQ ID NO: 470769 - DNA, 33 bp, Homo sapien
tgaatgcagttttgaaactaccacctcctgatg

SEQ ID NO: 470770 - DNA, 33 bp, Homo sapien
tgaatgcagttttgaacctaccacctcctgatg

SEQ ID NO: 470771 - DNA, 33 bp, Homo sapien
tacttacatcattatccctgcctttgaggggct

SEQ ID NO: 470772 - DNA, 33 bp, Homo sapien
tacttacatcattatcgctgcctttgaggggct

SEQ ID NO: 470773 - DNA, 33 bp, Homo sapien
attagaaaaagcaagccaagaatttcatatggg

SEQ ID NO: 470774 - DNA, 33 bp, Homo sapien
attagaaaaagcaagcgaagaatttcatatggg

SEQ ID NO: 470775 - DNA, 33 bp, Homo sapien
caaagaattgaggaaaagtaaagtccacccatc

SEQ ID NO: 470776 - DNA, 33 bp, Homo sapien
caaagaattgaggaaaggtaaagtccacccatc

SEQ ID NO: 470777 - DNA, 33 bp, Homo sapien
aaggagttggcctaataatcttgaaatactcca

SEQ ID NO: 470778 - DNA, 33 bp, Homo sapien
aaggagttggcctaatgatcttgaaatactcca

SEQ ID NO: 470779 - DNA, 33 bp, Homo sapien
tctaatgtttttcaaaagtgcttcttgaatagt

SEQ ID NO: 470780 - DNA, 33 bp, Homo sapien
tctaatgtttttcaaatgtgcttcttgaatagt

SEQ ID NO: 470781 - DNA, 33 bp, Homo sapien
catatgtaatcacaaacggttgcagctttgagg

SEQ ID NO: 470782 - DNA, 33 bp, Homo sapien
catatgtaatcacaaatggttgcagctttgagg

SEQ ID NO: 470783 - DNA, 33 bp, Homo sapien
catatccctggagtgtaaacagtaggtttgagg

SEQ ID NO: 470784 - DNA, 33 bp, Homo sapien
catatccctggagtgtgaacagtaggtttgagg

SEQ ID NO: 470785 - DNA, 33 bp, Homo sapien
agctcaacttatagaaaggcccatcatttggtg

SEQ ID NO: 470786 - DNA, 33 bp, Homo sapien
agctcaacttatagaagggcccatcatttggtg

SEQ ID NO: 470787 - DNA, 33 bp, Homo sapien
aatgaggctgagagcaccttagaaacacattca

SEQ ID NO: 470788 - DNA, 33 bp, Homo sapien
aatgaggctgagagcatcttagaaacacattca

SEQ ID NO: 470789 - DNA, 33 bp, Homo sapien
ttaaagaagagaaaaaaagtcttggtaatgaaa

SEQ ID NO: 470790 - DNA, 33 bp, Homo sapien
ttaaagaagagaaaaacagtcttggtaatgaaa

SEQ ID NO: 470791 - DNA, 33 bp, Homo sapien
tcctgacaaaccttcaaccctttatttccacag

SEQ ID NO: 470792 - DNA, 33 bp, Homo sapien
tcctgacaaaccttcagccctttatttccacag

SEQ ID NO: 470793 - DNA, 33 bp, Homo sapien
tgatcatgaatttacaacaagaccagaatgttt

SEQ ID NO: 470794 - DNA, 33 bp, Homo sapien
tgatcatgaatttacagcaagaccagaatgttt

SEQ ID NO: 470795 - DNA, 33 bp, Homo sapien
agaggtgagaaaaaaaatagataccacactctg

SEQ ID NO: 470796 - DNA, 33 bp, Homo sapien
agaggtgagaaaaaaattagataccacactctg

SEQ ID NO: 470797 - DNA, 33 bp, Homo sapien
gaagaatatgagttataaactggacgtaaagtt

SEQ ID NO: 470798 - DNA, 33 bp, Homo sapien
gaagaatatgagttatgaactggacgtaaagtt

SEQ ID NO: 470799 - DNA, 33 bp, Homo sapien
ggccgtccagtcgtggaagagaatttcaaaaca

SEQ ID NO: 470800 - DNA, 33 bp, Homo sapien
ggccgtccagtcgtgggagagaatttcaaaaca

SEQ ID NO: 470801 - DNA, 33 bp, Homo sapien
ttataaatcattctacaatacacatgcagaagt

SEQ ID NO: 470802 - DNA, 33 bp, Homo sapien
ttataaatcattctacgatacacatgcagaagt

SEQ ID NO: 470803 - DNA, 33 bp, Homo sapien
agcagggctcaagcaaaaagaaggcctacctca

SEQ ID NO: 470804 - DNA, 33 bp, Homo sapien
agcagggctcaagcaagaagaaggcctacctca

SEQ ID NO: 470805 - DNA, 33 bp, Homo sapien
cataggaataactgtaccttggcaggagcccag

SEQ ID NO: 470806 - DNA, 33 bp, Homo sapien
cataggaataactgtagcttggcaggagcccag

SEQ ID NO: 470807 - DNA, 33 bp, Homo sapien
agacctcctgactcaacgatttacaaacggatt

SEQ ID NO: 470808 - DNA, 33 bp, Homo sapien
agacctcctgactcaatgatttacaaacggatt

SEQ ID NO: 470809 - DNA, 33 bp, Homo sapien
gaggaagccttcaacactggagatagtagatat

SEQ ID NO: 470810 - DNA, 33 bp, Homo sapien
gaggaagccttcaacattggagatagtagatat

SEQ ID NO: 470811 - DNA, 33 bp, Homo sapien
atccaaatgagttgaacgcttaggcccacacca

SEQ ID NO: 470812 - DNA, 33 bp, Homo sapien
atccaaatgagttgaatgcttaggcccacacca

SEQ ID NO: 470813 - DNA, 33 bp, Homo sapien
caagacactgagataaagaatgagatgcaaaga

SEQ ID NO: 470814 - DNA, 33 bp, Homo sapien
caagacactgagataaggaatgagatgcaaaga

SEQ ID NO: 470815 - DNA, 33 bp, Homo sapien
attgatcacaacattacagagagtttcctttca

SEQ ID NO: 470816 - DNA, 33 bp, Homo sapien
attgatcacaacattatagagagtttcctttca

SEQ ID NO: 470817 - DNA, 33 bp, Homo sapien
atgcaatgtctgtgaaagcattttatgaatagg

SEQ ID NO: 470818 - DNA, 33 bp, Homo sapien
atgcaatgtctgtgaaggcattttatgaatagg

SEQ ID NO: 470819 - DNA, 33 bp, Homo sapien
acagtccaagtctctcaatttttactgatgttt

SEQ ID NO: 470820 - DNA, 33 bp, Homo sapien
acagtccaagtctctcgatttttactgatgttt

SEQ ID NO: 470821 - DNA, 33 bp, Homo sapien
agaggtctgtgctcaggattaattgagttaata

SEQ ID NO: 470822 - DNA, 33 bp, Homo sapien
agaggtctgtgctcagtattaattgagttaata

SEQ ID NO: 470823 - DNA, 33 bp, Homo sapien
attagtcaaactgacacaccagcaggtggtaga

SEQ ID NO: 470824 - DNA, 33 bp, Homo sapien
attagtcaaactgacataccagcaggtggtaga

SEQ ID NO: 470825 - DNA, 33 bp, Homo sapien
cctgaagagggttaagaaagagtgatcagattt

SEQ ID NO: 470826 - DNA, 33 bp, Homo sapien
cctgaagagggttaaggaagagtgatcagattt

SEQ ID NO: 470827 - DNA, 33 bp, Homo sapien
ctgtgtgcctctaaccgcagtccctgccacact

SEQ ID NO: 470828 - DNA, 33 bp, Homo sapien
ctgtgtgcctctaacctcagtccctgccacact

SEQ ID NO: 470829 - DNA, 33 bp, Homo sapien
gcatttggtggaaagaatatggaatttgaaact

SEQ ID NO: 470830 - DNA, 33 bp, Homo sapien
gcatttggtggaaagagtatggaatttgaaact

SEQ ID NO: 470831 - DNA, 33 bp, Homo sapien
atgatcagtaagcagaagggctcagcatccaac

SEQ ID NO: 470832 - DNA, 33 bp, Homo sapien
atgatcagtaagcagaggggctcagcatccaac

SEQ ID NO: 470833 - DNA, 33 bp, Homo sapien
cctcattttttagaacagtcttctagccaaatt

SEQ ID NO: 470834 - DNA, 33 bp, Homo sapien
cctcattttttagaactgtcttctagccaaatt

SEQ ID NO: 470835 - DNA, 33 bp, Homo sapien
tttgcagagaacaatcagaattgcatttgagtt

SEQ ID NO: 470836 - DNA, 33 bp, Homo sapien
tttgcagagaacaatcggaattgcatttgagtt

SEQ ID NO: 470837 - DNA, 33 bp, Homo sapien
ccaagcacatagctcacgtataaccagttagct

SEQ ID NO: 470838 - DNA, 33 bp, Homo sapien
ccaagcacatagctcatgtataaccagttagct

SEQ ID NO: 470839 - DNA, 33 bp, Homo sapien
cctccattggttttaaatcactttggaaagatg

SEQ ID NO: 470840 - DNA, 33 bp, Homo sapien
cctccattggttttaattcactttggaaagatg

SEQ ID NO: 470841 - DNA, 33 bp, Homo sapien
atgattccggacctgcaactgtccatagccaag

SEQ ID NO: 470842 - DNA, 33 bp, Homo sapien
atgattccggacctgcgactgtccatagccaag

SEQ ID NO: 470843 - DNA, 33 bp, Homo sapien
cgttgagaggtctcataacattcagctagccca

SEQ ID NO: 470844 - DNA, 33 bp, Homo sapien
cgttgagaggtctcatgacattcagctagccca

SEQ ID NO: 470845 - DNA, 33 bp, Homo sapien
cagttctggaagaagacagaagacggaaatagc

SEQ ID NO: 470846 - DNA, 33 bp, Homo sapien
cagttctggaagaagagagaagacggaaatagc

SEQ ID NO: 470847 - DNA, 33 bp, Homo sapien
tcttctcctttgcctaccttcagtgcccggcca

SEQ ID NO: 470848 - DNA, 33 bp, Homo sapien
tcttctcctttgcctatcttcagtgcccggcca

SEQ ID NO: 470849 - DNA, 33 bp, Homo sapien
aggatagaagaggagcaaatggttttacatcgg

SEQ ID NO: 470850 - DNA, 33 bp, Homo sapien
aggatagaagaggagcgaatggttttacatcgg

SEQ ID NO: 470851 - DNA, 33 bp, Homo sapien
ccatctgtctggacaacgatctctctccgtcct

SEQ ID NO: 470852 - DNA, 33 bp, Homo sapien
ccatctgtctggacaatgatctctctccgtcct

SEQ ID NO: 470853 - DNA, 33 bp, Homo sapien
gttgggaggtgagcccaaaatggaaataggccg

SEQ ID NO: 470854 - DNA, 33 bp, Homo sapien
gttgggaggtgagcccgaaatggaaataggccg

SEQ ID NO: 470855 - DNA, 33 bp, Homo sapien
ggtgagtgagagtaaaactagggaggaagagtt

SEQ ID NO: 470856 - DNA, 33 bp, Homo sapien
ggtgagtgagagtaaagctagggaggaagagtt

SEQ ID NO: 470857 - DNA, 33 bp, Homo sapien
aagctccatgaggcaggcatttggtttatttta

SEQ ID NO: 470858 - DNA, 33 bp, Homo sapien
aagctccatgaggcagtcatttggtttatttta

SEQ ID NO: 470859 - DNA, 33 bp, Homo sapien
aacatctgtaaagtcacagaggtacatatgagg

SEQ ID NO: 470860 - DNA, 33 bp, Homo sapien
aacatctgtaaagtcatagaggtacatatgagg

SEQ ID NO: 470861 - DNA, 33 bp, Homo sapien
agaagctgaagccaaacgtttttgagtaaaatg

SEQ ID NO: 470862 - DNA, 33 bp, Homo sapien
agaagctgaagccaaatgtttttgagtaaaatg

SEQ ID NO: 470863 - DNA, 33 bp, Homo sapien
gtgagggaattggaggaattcagaatgacaatg

SEQ ID NO: 470864 - DNA, 33 bp, Homo sapien
gtgagggaattggaggtattcagaatgacaatg

SEQ ID NO: 470865 - DNA, 33 bp, Homo sapien
tgtgatagaaaacataaacagtacaaagagaga

SEQ ID NO: 470866 - DNA, 33 bp, Homo sapien
tgtgatagaaaacatacacagtacaaagagaga

SEQ ID NO: 470867 - DNA, 33 bp, Homo sapien
cacaaagagatggttcaaagttagaacttatat

SEQ ID NO: 470868 - DNA, 33 bp, Homo sapien
cacaaagagatggttcgaagttagaacttatat

SEQ ID NO: 470869 - DNA, 33 bp, Homo sapien
gttttcaaaggaatcacgaacctggcaagaaag

SEQ ID NO: 470870 - DNA, 33 bp, Homo sapien
gttttcaaaggaatcatgaacctggcaagaaag

SEQ ID NO: 470871 - DNA, 33 bp, Homo sapien
atgcaaaaataactcaaactgatgaaaacaatg

SEQ ID NO: 470872 - DNA, 33 bp, Homo sapien
atgcaaaaataactcagactgatgaaaacaatg

SEQ ID NO: 470873 - DNA, 33 bp, Homo sapien
actggacaatacagagacagttttatacagtga

SEQ ID NO: 470874 - DNA, 33 bp, Homo sapien
actggacaatacagaggcagttttatacagtga

SEQ ID NO: 470875 - DNA, 33 bp, Homo sapien
ttagtaaagaaagggaataatgcttttcattat

SEQ ID NO: 470876 - DNA, 33 bp, Homo sapien
ttagtaaagaaagggactaatgcttttcattat

SEQ ID NO: 470877 - DNA, 33 bp, Homo sapien
ttcctacctgtcagaacggcaaaggtcaaaata

SEQ ID NO: 470878 - DNA, 33 bp, Homo sapien
ttcctacctgtcagaatggcaaaggtcaaaata

SEQ ID NO: 470879 - DNA, 33 bp, Homo sapien
ccactgaagctctacaatcttacataatatttt

SEQ ID NO: 470880 - DNA, 33 bp, Homo sapien
ccactgaagctctacagtcttacataatatttt

SEQ ID NO: 470881 - DNA, 33 bp, Homo sapien
gggaataagaaatccaaaaatccttcatctcca

SEQ ID NO: 470882 - DNA, 33 bp, Homo sapien
gggaataagaaatccacaaatccttcatctcca

SEQ ID NO: 470883 - DNA, 33 bp, Homo sapien
ttgtcatggtactgcacgagcaaggaaggctgg

SEQ ID NO: 470884 - DNA, 33 bp, Homo sapien
ttgtcatggtactgcatgagcaaggaaggctgg

SEQ ID NO: 470885 - DNA, 33 bp, Homo sapien
ggattctaggttcgagcacctctcaaatgatag

SEQ ID NO: 470886 - DNA, 33 bp, Homo sapien
ggattctaggttcgagtacctctcaaatgatag

SEQ ID NO: 470887 - DNA, 33 bp, Homo sapien
acatcagtaggtttgccgagcctttaacacaaa

SEQ ID NO: 470888 - DNA, 33 bp, Homo sapien
acatcagtaggtttgctgagcctttaacacaaa

SEQ ID NO: 470889 - DNA, 33 bp, Homo sapien
aaatcatattctcaccccaatgcccaagtgcct

SEQ ID NO: 470890 - DNA, 33 bp, Homo sapien
aaatcatattctcacctcaatgcccaagtgcct

SEQ ID NO: 470891 - DNA, 33 bp, Homo sapien
taatttgtcaccagcacaaacccacttaaggaa

SEQ ID NO: 470892 - DNA, 33 bp, Homo sapien
taatttgtcaccagcagaaacccacttaaggaa

SEQ ID NO: 470893 - DNA, 33 bp, Homo sapien
agatcaagctggagcaccagataaggctgatcc

SEQ ID NO: 470894 - DNA, 33 bp, Homo sapien
agatcaagctggagcatcagataaggctgatcc

SEQ ID NO: 470895 - DNA, 33 bp, Homo sapien
actgctctagtgtcacagacttagcaatgataa

SEQ ID NO: 470896 - DNA, 33 bp, Homo sapien
actgctctagtgtcacggacttagcaatgataa

SEQ ID NO: 470897 - DNA, 33 bp, Homo sapien
atggccattattgccaccatggtattgaaggta

SEQ ID NO: 470898 - DNA, 33 bp, Homo sapien
atggccattattgccatcatggtattgaaggta

SEQ ID NO: 470899 - DNA, 33 bp, Homo sapien
gctaacggacactttacagttatcaaaggatca

SEQ ID NO: 470900 - DNA, 33 bp, Homo sapien
gctaacggacactttatagttatcaaaggatca

SEQ ID NO: 470901 - DNA, 33 bp, Homo sapien
ctgtgtgctgccaacactggtgactgccccatc

SEQ ID NO: 470902 - DNA, 33 bp, Homo sapien
ctgtgtgctgccaacattggtgactgccccatc

SEQ ID NO: 470903 - DNA, 33 bp, Homo sapien
tggaggagtgagttcaaatcacctataccagca

SEQ ID NO: 470904 - DNA, 33 bp, Homo sapien
tggaggagtgagttcagatcacctataccagca

SEQ ID NO: 470905 - DNA, 33 bp, Homo sapien
tgtatcttgctctcctgaagaaccagacatgag

SEQ ID NO: 470906 - DNA, 33 bp, Homo sapien
tgtatcttgctctccttaagaaccagacatgag

SEQ ID NO: 470907 - DNA, 33 bp, Homo sapien
gacaggatggcctggaatagagaagttggaagg

SEQ ID NO: 470908 - DNA, 33 bp, Homo sapien
gacaggatggcctggagtagagaagttggaagg

SEQ ID NO: 470909 - DNA, 33 bp, Homo sapien
acaattccttcactaagaattggcagatgggtg

SEQ ID NO: 470910 - DNA, 33 bp, Homo sapien
acaattccttcactaataattggcagatgggtg

SEQ ID NO: 470911 - DNA, 33 bp, Homo sapien
catacagagaattggaatcagaagaagaacgca

SEQ ID NO: 470912 - DNA, 33 bp, Homo sapien
catacagagaattggagtcagaagaagaacgca

SEQ ID NO: 470913 - DNA, 33 bp, Homo sapien
attgattttctgagacaactgtgctcatctcat

SEQ ID NO: 470914 - DNA, 33 bp, Homo sapien
attgattttctgagacgactgtgctcatctcat

SEQ ID NO: 470915 - DNA, 33 bp, Homo sapien
agcttttaggatcctgaaattatgagatatctt

SEQ ID NO: 470916 - DNA, 33 bp, Homo sapien
agcttttaggatcctgcaattatgagatatctt

SEQ ID NO: 470917 - DNA, 33 bp, Homo sapien
tatcttgatctgctgaacactgacttcacacat

SEQ ID NO: 470918 - DNA, 33 bp, Homo sapien
tatcttgatctgctgagcactgacttcacacat

SEQ ID NO: 470919 - DNA, 33 bp, Homo sapien
acgtgctcaatttccacgttcattcatttattc

SEQ ID NO: 470920 - DNA, 33 bp, Homo sapien
acgtgctcaatttccatgttcattcatttattc

SEQ ID NO: 470921 - DNA, 33 bp, Homo sapien
gaccctaagagcaatgcaaagtttaatcccttt

SEQ ID NO: 470922 - DNA, 33 bp, Homo sapien
gaccctaagagcaatggaaagtttaatcccttt

SEQ ID NO: 470923 - DNA, 33 bp, Homo sapien
gtattggtacattaaacagaaagaccaccaatc

SEQ ID NO: 470924 - DNA, 33 bp, Homo sapien
gtattggtacattaaatagaaagaccaccaatc

SEQ ID NO: 470925 - DNA, 33 bp, Homo sapien
agtaggctgaatactcaagggtaagcttccaag

SEQ ID NO: 470926 - DNA, 33 bp, Homo sapien
agtaggctgaatactcgagggtaagcttccaag

SEQ ID NO: 470927 - DNA, 33 bp, Homo sapien
acctgtgagcttttcacgggggactgccaaggt

SEQ ID NO: 470928 - DNA, 33 bp, Homo sapien
acctgtgagcttttcatgggggactgccaaggt

SEQ ID NO: 470929 - DNA, 33 bp, Homo sapien
taaaaccaacctataactcaactgccttgggca

SEQ ID NO: 470930 - DNA, 33 bp, Homo sapien
taaaaccaacctataattcaactgccttgggca

SEQ ID NO: 470931 - DNA, 33 bp, Homo sapien
actggtgatatgatctcacagagttgaataaga

SEQ ID NO: 470932 - DNA, 33 bp, Homo sapien
actggtgatatgatcttacagagttgaataaga

SEQ ID NO: 470933 - DNA, 33 bp, Homo sapien
tttgccatagtgttccaagtgttttgtcaaggg

SEQ ID NO: 470934 - DNA, 33 bp, Homo sapien
tttgccatagtgttcctagtgttttgtcaaggg

SEQ ID NO: 470935 - DNA, 33 bp, Homo sapien
ggaagaagcaactaaacagaaatgaagttatag

SEQ ID NO: 470936 - DNA, 33 bp, Homo sapien
ggaagaagcaactaaagagaaatgaagttatag

SEQ ID NO: 470937 - DNA, 33 bp, Homo sapien
ttcatgtttgtggtaaatgaaaacagtcaacta

SEQ ID NO: 470938 - DNA, 33 bp, Homo sapien
ttcatgtttgtggtaagtgaaaacagtcaacta

SEQ ID NO: 470939 - DNA, 33 bp, Homo sapien
tgctcagcactggtccagaatagcaaccaccag

SEQ ID NO: 470940 - DNA, 33 bp, Homo sapien
tgctcagcactggtccggaatagcaaccaccag

SEQ ID NO: 470941 - DNA, 33 bp, Homo sapien
tcagttaattccttaaagatgatgaagtggaag

SEQ ID NO: 470942 - DNA, 33 bp, Homo sapien
tcagttaattccttaaggatgatgaagtggaag

SEQ ID NO: 470943 - DNA, 33 bp, Homo sapien
atcacccttgatccacaatcctgggctttgcct

SEQ ID NO: 470944 - DNA, 33 bp, Homo sapien
atcacccttgatccacgatcctgggctttgcct

SEQ ID NO: 470945 - DNA, 33 bp, Homo sapien
catccgggaacgaacacgctgtcaggcgtgcct

SEQ ID NO: 470946 - DNA, 33 bp, Homo sapien
catccgggaacgaacatgctgtcaggcgtgcct

SEQ ID NO: 470947 - DNA, 33 bp, Homo sapien
cattgttccttgagtaaaaacgaattaaatttg

SEQ ID NO: 470948 - DNA, 33 bp, Homo sapien
cattgttccttgagtacaaacgaattaaatttg

SEQ ID NO: 470949 - DNA, 33 bp, Homo sapien
gagtggtctgccttccaaagtcaagaggatgct

SEQ ID NO: 470950 - DNA, 33 bp, Homo sapien
gagtggtctgccttccgaagtcaagaggatgct

SEQ ID NO: 470951 - DNA, 33 bp, Homo sapien
cttctatgccaagaaactccattaggaaacact

SEQ ID NO: 470952 - DNA, 33 bp, Homo sapien
cttctatgccaagaaagtccattaggaaacact

SEQ ID NO: 470953 - DNA, 33 bp, Homo sapien
tcagagccaagaaacaggattctgcctcacata

SEQ ID NO: 470954 - DNA, 33 bp, Homo sapien
tcagagccaagaaacatgattctgcctcacata

SEQ ID NO: 470955 - DNA, 33 bp, Homo sapien
cagtgagttttaggcgaacaaccaaaattgtta

SEQ ID NO: 470956 - DNA, 33 bp, Homo sapien
cagtgagttttaggcggacaaccaaaattgtta

SEQ ID NO: 470957 - DNA, 33 bp, Homo sapien
ccagggagtaaagaaccgccaacatctgcaccc

SEQ ID NO: 470958 - DNA, 33 bp, Homo sapien
ccagggagtaaagaactgccaacatctgcaccc

SEQ ID NO: 470959 - DNA, 33 bp, Homo sapien
gtgccaaagaaaagcacccctgtgaaaagaggc

SEQ ID NO: 470960 - DNA, 33 bp, Homo sapien
gtgccaaagaaaagcatccctgtgaaaagaggc

SEQ ID NO: 470961 - DNA, 33 bp, Homo sapien
ctgtattgccacatcccgaaatttgcactgggt

SEQ ID NO: 470962 - DNA, 33 bp, Homo sapien
ctgtattgccacatcctgaaatttgcactgggt

SEQ ID NO: 470963 - DNA, 33 bp, Homo sapien
ttcccaagtaaaaatcacatttcatcaccaaaa

SEQ ID NO: 470964 - DNA, 33 bp, Homo sapien
ttcccaagtaaaaatcgcatttcatcaccaaaa

SEQ ID NO: 470965 - DNA, 33 bp, Homo sapien
tagtaagtatttaaaacgatggtgaccttccaa

SEQ ID NO: 470966 - DNA, 33 bp, Homo sapien
tagtaagtatttaaaatgatggtgaccttccaa

SEQ ID NO: 470967 - DNA, 33 bp, Homo sapien
cactcaaccctgtctacctttggttcttgactg

SEQ ID NO: 470968 - DNA, 33 bp, Homo sapien
cactcaaccctgtctatctttggttcttgactg

SEQ ID NO: 470969 - DNA, 33 bp, Homo sapien
aactaaaacactcctacattgctggcaagaaag

SEQ ID NO: 470970 - DNA, 33 bp, Homo sapien
aactaaaacactcctatattgctggcaagaaag

SEQ ID NO: 470971 - DNA, 33 bp, Homo sapien
accttaaccagaatgaaaaccttttaggaagtc

SEQ ID NO: 470972 - DNA, 33 bp, Homo sapien
accttaaccagaatgagaaccttttaggaagtc

SEQ ID NO: 470973 - DNA, 33 bp, Homo sapien
ttccaagatttgagccaactttgaatctaaact

SEQ ID NO: 470974 - DNA, 33 bp, Homo sapien
ttccaagatttgagccgactttgaatctaaact

SEQ ID NO: 470975 - DNA, 33 bp, Homo sapien
ggctcaaatcttggaactgtccactggtgtagc

SEQ ID NO: 470976 - DNA, 33 bp, Homo sapien
ggctcaaatcttggaagtgtccactggtgtagc

SEQ ID NO: 470977 - DNA, 33 bp, Homo sapien
ttttctgacacatcaaaatttctcaagttcatc

SEQ ID NO: 470978 - DNA, 33 bp, Homo sapien
ttttctgacacatcaacatttctcaagttcatc

SEQ ID NO: 470979 - DNA, 33 bp, Homo sapien
caccactgcagtagaaaaaaatctcaatccctt

SEQ ID NO: 470980 - DNA, 33 bp, Homo sapien
caccactgcagtagaagaaaatctcaatccctt

SEQ ID NO: 470981 - DNA, 33 bp, Homo sapien
atcaaggctggatagaacaatgattaaactcat

SEQ ID NO: 470982 - DNA, 33 bp, Homo sapien
atcaaggctggatagagcaatgattaaactcat

SEQ ID NO: 470983 - DNA, 33 bp, Homo sapien
catgatggtcagtggcaatttcgagtgtttttt

SEQ ID NO: 470984 - DNA, 33 bp, Homo sapien
catgatggtcagtggcgatttcgagtgtttttt

SEQ ID NO: 470985 - DNA, 33 bp, Homo sapien
gcaggatgtacttgaccgctacgagagaccact

SEQ ID NO: 470986 - DNA, 33 bp, Homo sapien
gcaggatgtacttgactgctacgagagaccact

SEQ ID NO: 470987 - DNA, 33 bp, Homo sapien
agtatgtggaattcaaagttttttccagttaaa

SEQ ID NO: 470988 - DNA, 33 bp, Homo sapien
agtatgtggaattcaaggttttttccagttaaa

SEQ ID NO: 470989 - DNA, 33 bp, Homo sapien
tgtctccctccctaaccgagagttcccagggag

SEQ ID NO: 470990 - DNA, 33 bp, Homo sapien
tgtctccctccctaactgagagttcccagggag

SEQ ID NO: 470991 - DNA, 33 bp, Homo sapien
ggcccatgatagcactaaattctaactttccat

SEQ ID NO: 470992 - DNA, 33 bp, Homo sapien
ggcccatgatagcactcaattctaactttccat

SEQ ID NO: 470993 - DNA, 33 bp, Homo sapien
agattagaaaccacatgaatggacctcaatata

SEQ ID NO: 470994 - DNA, 33 bp, Homo sapien
agattagaaaccacattaatggacctcaatata

SEQ ID NO: 470995 - DNA, 33 bp, Homo sapien
ttggtaatcaatcacaacatctagaatttagag

SEQ ID NO: 470996 - DNA, 33 bp, Homo sapien
ttggtaatcaatcacagcatctagaatttagag

SEQ ID NO: 470997 - DNA, 33 bp, Homo sapien
aatcactttccatctacaatttccaatccttca

SEQ ID NO: 470998 - DNA, 33 bp, Homo sapien
aatcactttccatctataatttccaatccttca

SEQ ID NO: 470999 - DNA, 33 bp, Homo sapien
cccaagctctcagtaaacttttcccttctactg

SEQ ID NO: 471000 - DNA, 33 bp, Homo sapien
cccaagctctcagtaatcttttcccttctactg

SEQ ID NO: 471001 - DNA, 33 bp, Homo sapien
tattcttgaaaaaggaccacaatggttagtaac

SEQ ID NO: 471002 - DNA, 33 bp, Homo sapien
tattcttgaaaaaggagcacaatggttagtaac

SEQ ID NO: 471003 - DNA, 33 bp, Homo sapien
tgaccttgttacttcccctgtctggagtgacat

SEQ ID NO: 471004 - DNA, 33 bp, Homo sapien
tgaccttgttacttcctctgtctggagtgacat

SEQ ID NO: 471005 - DNA, 33 bp, Homo sapien
aaatgcaaagaagactgaaatttcttgagagag

SEQ ID NO: 471006 - DNA, 33 bp, Homo sapien
aaatgcaaagaagacttaaatttcttgagagag

SEQ ID NO: 471007 - DNA, 33 bp, Homo sapien
ccaaactctaccaaaccgctttgaattttaaga

SEQ ID NO: 471008 - DNA, 33 bp, Homo sapien
ccaaactctaccaaactgctttgaattttaaga

SEQ ID NO: 471009 - DNA, 33 bp, Homo sapien
aacttaatctcatcaactggggacttacactcc

SEQ ID NO: 471010 - DNA, 33 bp, Homo sapien
aacttaatctcatcaattggggacttacactcc

SEQ ID NO: 471011 - DNA, 33 bp, Homo sapien
agtacctttagttatgcagggtaacatgttctg

SEQ ID NO: 471012 - DNA, 33 bp, Homo sapien
agtacctttagttatgtagggtaacatgttctg

SEQ ID NO: 471013 - DNA, 33 bp, Homo sapien
tttctcttttatttgaacctcttggcatcccaa

SEQ ID NO: 471014 - DNA, 33 bp, Homo sapien
tttctcttttatttgaccctcttggcatcccaa

SEQ ID NO: 471015 - DNA, 33 bp, Homo sapien
gggattgttgataacacgatagtacaaaaggcc

SEQ ID NO: 471016 - DNA, 33 bp, Homo sapien
gggattgttgataacatgatagtacaaaaggcc

SEQ ID NO: 471017 - DNA, 33 bp, Homo sapien
actctatttaagacagaaaattcttatttgagc

SEQ ID NO: 471018 - DNA, 33 bp, Homo sapien
actctatttaagacaggaaattcttatttgagc

SEQ ID NO: 471019 - DNA, 33 bp, Homo sapien
catgtacaaaaacacacagtggaaccacattac

SEQ ID NO: 471020 - DNA, 33 bp, Homo sapien
catgtacaaaaacacatagtggaaccacattac

SEQ ID NO: 471021 - DNA, 33 bp, Homo sapien
cttggaaatcaccaacaatggtcataatcacgg

SEQ ID NO: 471022 - DNA, 33 bp, Homo sapien
cttggaaatcaccaacgatggtcataatcacgg

SEQ ID NO: 471023 - DNA, 33 bp, Homo sapien
cagaacatcctccagaaagccagtgcagtgatg

SEQ ID NO: 471024 - DNA, 33 bp, Homo sapien
cagaacatcctccagagagccagtgcagtgatg

SEQ ID NO: 471025 - DNA, 33 bp, Homo sapien
gttgtcttggactgcacggaaattctcctggct

SEQ ID NO: 471026 - DNA, 33 bp, Homo sapien
gttgtcttggactgcatggaaattctcctggct

SEQ ID NO: 471027 - DNA, 33 bp, Homo sapien
tccaaccttcatgatacgattttcaatttagta

SEQ ID NO: 471028 - DNA, 33 bp, Homo sapien
tccaaccttcatgatatgattttcaatttagta

SEQ ID NO: 471029 - DNA, 33 bp, Homo sapien
tataaacatttctatacatttaggtacaaacat

SEQ ID NO: 471030 - DNA, 33 bp, Homo sapien
tataaacatttctatagatttaggtacaaacat

SEQ ID NO: 471031 - DNA, 33 bp, Homo sapien
ttacttcctttatttcactgtctaagagtgtct

SEQ ID NO: 471032 - DNA, 33 bp, Homo sapien
ttacttcctttatttcgctgtctaagagtgtct

SEQ ID NO: 471033 - DNA, 33 bp, Homo sapien
ttttggtagattagaaatcaaaatgttcctcta

SEQ ID NO: 471034 - DNA, 33 bp, Homo sapien
ttttggtagattagaactcaaaatgttcctcta

SEQ ID NO: 471035 - DNA, 33 bp, Homo sapien
ggtgttgagcttgttgaatattctggatgcagg

SEQ ID NO: 471036 - DNA, 33 bp, Homo sapien
ggtgttgagcttgttggatattctggatgcagg

SEQ ID NO: 471037 - DNA, 33 bp, Homo sapien
tctctggaatcactgacgaaagtttcccctaaa

SEQ ID NO: 471038 - DNA, 33 bp, Homo sapien
tctctggaatcactgatgaaagtttcccctaaa

SEQ ID NO: 471039 - DNA, 33 bp, Homo sapien
tttgctacatgacatcagatcatttattcatca

SEQ ID NO: 471040 - DNA, 33 bp, Homo sapien
tttgctacatgacatcggatcatttattcatca

SEQ ID NO: 471041 - DNA, 33 bp, Homo sapien
cagccatttgtctatcccacactctacatttag

SEQ ID NO: 471042 - DNA, 33 bp, Homo sapien
cagccatttgtctatctcacactctacatttag

SEQ ID NO: 471043 - DNA, 33 bp, Homo sapien
atcttgtatgcaagaaaaccttctggcttaact

SEQ ID NO: 471044 - DNA, 33 bp, Homo sapien
atcttgtatgcaagaagaccttctggcttaact

SEQ ID NO: 471045 - DNA, 33 bp, Homo sapien
cagggaaggtgttataaagccagaaaaaaacag

SEQ ID NO: 471046 - DNA, 33 bp, Homo sapien
cagggaaggtgttatagagccagaaaaaaacag

SEQ ID NO: 471047 - DNA, 33 bp, Homo sapien
attagcttacagtgaaagggctatcaaaactaa

SEQ ID NO: 471048 - DNA, 33 bp, Homo sapien
attagcttacagtgaaggggctatcaaaactaa

SEQ ID NO: 471049 - DNA, 33 bp, Homo sapien
ctgtgtagcctgtgagcagacctggttggcttt

SEQ ID NO: 471050 - DNA, 33 bp, Homo sapien
ctgtgtagcctgtgagtagacctggttggcttt

SEQ ID NO: 471051 - DNA, 33 bp, Homo sapien
gcaacaataaccacgcaatcacactggcattta

SEQ ID NO: 471052 - DNA, 33 bp, Homo sapien
gcaacaataaccacgcgatcacactggcattta

SEQ ID NO: 471053 - DNA, 33 bp, Homo sapien
ttaaagctcattaaaaagctcccaaaaaatgag

SEQ ID NO: 471054 - DNA, 33 bp, Homo sapien
ttaaagctcattaaaaggctcccaaaaaatgag

SEQ ID NO: 471055 - DNA, 33 bp, Homo sapien
ttccttacctagttaacgttaaagtcagtgata

SEQ ID NO: 471056 - DNA, 33 bp, Homo sapien
ttccttacctagttaatgttaaagtcagtgata

SEQ ID NO: 471057 - DNA, 33 bp, Homo sapien
ggttttaatgagatgcactcgtaatcattctat

SEQ ID NO: 471058 - DNA, 33 bp, Homo sapien
ggttttaatgagatgctctcgtaatcattctat

SEQ ID NO: 471059 - DNA, 33 bp, Homo sapien
taaatttagatgcatccgaagcgagggagttct

SEQ ID NO: 471060 - DNA, 33 bp, Homo sapien
taaatttagatgcatctgaagcgagggagttct

SEQ ID NO: 471061 - DNA, 33 bp, Homo sapien
gtagtaggatatgctgaaacatttgtctcctac

SEQ ID NO: 471062 - DNA, 33 bp, Homo sapien
gtagtaggatatgctggaacatttgtctcctac

SEQ ID NO: 471063 - DNA, 33 bp, Homo sapien
tgcatgtgaacaaagacgctaaggtgaagtcct

SEQ ID NO: 471064 - DNA, 33 bp, Homo sapien
tgcatgtgaacaaagatgctaaggtgaagtcct

SEQ ID NO: 471065 - DNA, 33 bp, Homo sapien
agcctaagaagaagcaaggagccaaaatgaggc

SEQ ID NO: 471066 - DNA, 33 bp, Homo sapien
agcctaagaagaagcatggagccaaaatgaggc

SEQ ID NO: 471067 - DNA, 33 bp, Homo sapien
attggccatagaacacagtggctttactgagaa

SEQ ID NO: 471068 - DNA, 33 bp, Homo sapien
attggccatagaacacggtggctttactgagaa

SEQ ID NO: 471069 - DNA, 33 bp, Homo sapien
ttgaaagaatgaatcaatcaatcattcaaggtt

SEQ ID NO: 471070 - DNA, 33 bp, Homo sapien
ttgaaagaatgaatcagtcaatcattcaaggtt

SEQ ID NO: 471071 - DNA, 33 bp, Homo sapien
gccaatgaggtacaatgaagtacaacaggaagt

SEQ ID NO: 471072 - DNA, 33 bp, Homo sapien
gccaatgaggtacaattaagtacaacaggaagt

SEQ ID NO: 471073 - DNA, 33 bp, Homo sapien
cttggactctctgttgcagctctcaaaagtgca

SEQ ID NO: 471074 - DNA, 33 bp, Homo sapien
cttggactctctgttgtagctctcaaaagtgca

SEQ ID NO: 471075 - DNA, 33 bp, Homo sapien
tgccaaacagggaactaagtctgttacatacaa

SEQ ID NO: 471076 - DNA, 33 bp, Homo sapien
tgccaaacagggaactgagtctgttacatacaa

SEQ ID NO: 471077 - DNA, 33 bp, Homo sapien
tgacttgtgtgagttgaactcatctttctttca

SEQ ID NO: 471078 - DNA, 33 bp, Homo sapien
tgacttgtgtgagttggactcatctttctttca

SEQ ID NO: 471079 - DNA, 33 bp, Homo sapien
gaggcagcatttggacagaggactttcaaccat

SEQ ID NO: 471080 - DNA, 33 bp, Homo sapien
gaggcagcatttggaccgaggactttcaaccat

SEQ ID NO: 471081 - DNA, 33 bp, Homo sapien
aaacgttttggttgataacattggtaactctag

SEQ ID NO: 471082 - DNA, 33 bp, Homo sapien
aaacgttttggttgattacattggtaactctag

SEQ ID NO: 471083 - DNA, 33 bp, Homo sapien
tgtcaggctaactccccatactttatctaatat

SEQ ID NO: 471084 - DNA, 33 bp, Homo sapien
tgtcaggctaactccctatactttatctaatat

SEQ ID NO: 471085 - DNA, 33 bp, Homo sapien
cccgtctaaatgatgcaaagaggaaacaggatg

SEQ ID NO: 471086 - DNA, 33 bp, Homo sapien
cccgtctaaatgatgcgaagaggaaacaggatg

SEQ ID NO: 471087 - DNA, 33 bp, Homo sapien
ttgtgacacgagaaaaacacatgaggaatgtgt

SEQ ID NO: 471088 - DNA, 33 bp, Homo sapien
ttgtgacacgagaaaagcacatgaggaatgtgt

SEQ ID NO: 471089 - DNA, 33 bp, Homo sapien
ctctccacctccaacccacatatcagaaatacc

SEQ ID NO: 471090 - DNA, 33 bp, Homo sapien
ctctccacctccaacctacatatcagaaatacc

SEQ ID NO: 471091 - DNA, 33 bp, Homo sapien
agcacgtaatcacaaaaggcttaataaatggat

SEQ ID NO: 471092 - DNA, 33 bp, Homo sapien
agcacgtaatcacaaatggcttaataaatggat

SEQ ID NO: 471093 - DNA, 33 bp, Homo sapien
ctgggatgaacactaaactcattccagaagcct

SEQ ID NO: 471094 - DNA, 33 bp, Homo sapien
ctgggatgaacactaatctcattccagaagcct

SEQ ID NO: 471095 - DNA, 33 bp, Homo sapien
tgatgatgaacatctacggtctctctccccaac

SEQ ID NO: 471096 - DNA, 33 bp, Homo sapien
tgatgatgaacatctatggtctctctccccaac

SEQ ID NO: 471097 - DNA, 33 bp, Homo sapien
gcctgcaatggaaatacggctgtgaggagactg

SEQ ID NO: 471098 - DNA, 33 bp, Homo sapien
gcctgcaatggaaatatggctgtgaggagactg

SEQ ID NO: 471099 - DNA, 33 bp, Homo sapien
aaatttctcagataacaaaggttttaaatctta

SEQ ID NO: 471100 - DNA, 33 bp, Homo sapien
aaatttctcagataaccaaggttttaaatctta

SEQ ID NO: 471101 - DNA, 33 bp, Homo sapien
caaatacctatttacaactcatgctctattaag

SEQ ID NO: 471102 - DNA, 33 bp, Homo sapien
caaatacctatttacatctcatgctctattaag

SEQ ID NO: 471103 - DNA, 33 bp, Homo sapien
ccgcaggtgtgaatgacctctcggcctctcctc

SEQ ID NO: 471104 - DNA, 33 bp, Homo sapien
ccgcaggtgtgaatgatctctcggcctctcctc

SEQ ID NO: 471105 - DNA, 33 bp, Homo sapien
gaggctggtcacaaataaacgtttataaacatc

SEQ ID NO: 471106 - DNA, 33 bp, Homo sapien
gaggctggtcacaaatcaacgtttataaacatc

SEQ ID NO: 471107 - DNA, 33 bp, Homo sapien
tagacctcactggaagaagactacacaataaaa

SEQ ID NO: 471108 - DNA, 33 bp, Homo sapien
tagacctcactggaagtagactacacaataaaa

SEQ ID NO: 471109 - DNA, 33 bp, Homo sapien
tccttcctgttaaacacaataatctctacccca

SEQ ID NO: 471110 - DNA, 33 bp, Homo sapien
tccttcctgttaaacataataatctctacccca

SEQ ID NO: 471111 - DNA, 33 bp, Homo sapien
tggtgcccaaattggacggaatctcaatgcatc

SEQ ID NO: 471112 - DNA, 33 bp, Homo sapien
tggtgcccaaattggatggaatctcaatgcatc

SEQ ID NO: 471113 - DNA, 33 bp, Homo sapien
gtcactcaagtggaaaatcctgcaatttttgta

SEQ ID NO: 471114 - DNA, 33 bp, Homo sapien
gtcactcaagtggaaagtcctgcaatttttgta

SEQ ID NO: 471115 - DNA, 33 bp, Homo sapien
cttgaatgttctgctaacttatgaagaggttct

SEQ ID NO: 471116 - DNA, 33 bp, Homo sapien
cttgaatgttctgctatcttatgaagaggttct

SEQ ID NO: 471117 - DNA, 33 bp, Homo sapien
tcatctggaccacagacggcaaaaaaacgtcca

SEQ ID NO: 471118 - DNA, 33 bp, Homo sapien
tcatctggaccacagatggcaaaaaaacgtcca

SEQ ID NO: 471119 - DNA, 33 bp, Homo sapien
ggattttggcgtgtgacgacacactcataaagg

SEQ ID NO: 471120 - DNA, 33 bp, Homo sapien
ggattttggcgtgtgatgacacactcataaagg

SEQ ID NO: 471121 - DNA, 33 bp, Homo sapien
aataggctgcccaggcaagcgacttaattcttc

SEQ ID NO: 471122 - DNA, 33 bp, Homo sapien
aataggctgcccaggcgagcgacttaattcttc

SEQ ID NO: 471123 - DNA, 33 bp, Homo sapien
gccaccctgctggttacggctcagaatctgata

SEQ ID NO: 471124 - DNA, 33 bp, Homo sapien
gccaccctgctggttatggctcagaatctgata

SEQ ID NO: 471125 - DNA, 33 bp, Homo sapien
cacttgttgcccccaactcttcaatcccactgc

SEQ ID NO: 471126 - DNA, 33 bp, Homo sapien
cacttgttgcccccaattcttcaatcccactgc

SEQ ID NO: 471127 - DNA, 33 bp, Homo sapien
gaatgtattttggaaaagacaatggcgttagag

SEQ ID NO: 471128 - DNA, 33 bp, Homo sapien
gaatgtattttggaaaggacaatggcgttagag

SEQ ID NO: 471129 - DNA, 33 bp, Homo sapien
attacaaagtaccaaacggcagatgtcatctat

SEQ ID NO: 471130 - DNA, 33 bp, Homo sapien
attacaaagtaccaaatggcagatgtcatctat

SEQ ID NO: 471131 - DNA, 33 bp, Homo sapien
tctatcccatcatcacacccctggaggcttgca

SEQ ID NO: 471132 - DNA, 33 bp, Homo sapien
tctatcccatcatcacgcccctggaggcttgca

SEQ ID NO: 471133 - DNA, 33 bp, Homo sapien
tccttgggtctcaaaaactcagttaatctatcc

SEQ ID NO: 471134 - DNA, 33 bp, Homo sapien
tccttgggtctcaaaagctcagttaatctatcc

SEQ ID NO: 471135 - DNA, 33 bp, Homo sapien
tgttatagtttttaaaggataagcatgatttta

SEQ ID NO: 471136 - DNA, 33 bp, Homo sapien
tgttatagtttttaaatgataagcatgatttta

SEQ ID NO: 471137 - DNA, 33 bp, Homo sapien
tagaggtctcagctaagggtggaaaagaggctg

SEQ ID NO: 471138 - DNA, 33 bp, Homo sapien
tagaggtctcagctaatggtggaaaagaggctg

SEQ ID NO: 471139 - DNA, 33 bp, Homo sapien
agttgaaaatatcataagtcaaaaatgtatcta

SEQ ID NO: 471140 - DNA, 33 bp, Homo sapien
agttgaaaatatcataggtcaaaaatgtatcta

SEQ ID NO: 471141 - DNA, 33 bp, Homo sapien
actctgggtttcttggcatcagtgtcagtccta

SEQ ID NO: 471142 - DNA, 33 bp, Homo sapien
actctgggtttcttggtatcagtgtcagtccta

SEQ ID NO: 471143 - DNA, 33 bp, Homo sapien
ttttagaaagagaaaaaccgtgtctcatatttc

SEQ ID NO: 471144 - DNA, 33 bp, Homo sapien
ttttagaaagagaaaagccgtgtctcatatttc

SEQ ID NO: 471145 - DNA, 33 bp, Homo sapien
gaagctgtgtccaataataaagatacaattttc

SEQ ID NO: 471146 - DNA, 33 bp, Homo sapien
gaagctgtgtccaatattaaagatacaattttc

SEQ ID NO: 471147 - DNA, 33 bp, Homo sapien
atattgtagagcaccccaaaaggctagccccaa

SEQ ID NO: 471148 - DNA, 33 bp, Homo sapien
atattgtagagcaccctaaaaggctagccccaa

SEQ ID NO: 471149 - DNA, 33 bp, Homo sapien
cacttgggccatgttccccctggatcccaggtc

SEQ ID NO: 471150 - DNA, 33 bp, Homo sapien
cacttgggccatgttctccctggatcccaggtc

SEQ ID NO: 471151 - DNA, 33 bp, Homo sapien
agcatcatacttctcacagtgtgatcctcagac

SEQ ID NO: 471152 - DNA, 33 bp, Homo sapien
agcatcatacttctcatagtgtgatcctcagac

SEQ ID NO: 471153 - DNA, 33 bp, Homo sapien
ttatagataataaaaccaaggctcagaaagaca

SEQ ID NO: 471154 - DNA, 33 bp, Homo sapien
ttatagataataaaactaaggctcagaaagaca

SEQ ID NO: 471155 - DNA, 33 bp, Homo sapien
gttgactctgctgcagaaaactctgaactatga

SEQ ID NO: 471156 - DNA, 33 bp, Homo sapien
gttgactctgctgcaggaaactctgaactatga

SEQ ID NO: 471157 - DNA, 33 bp, Homo sapien
tccacctctggaatataagagctccaaaagaca

SEQ ID NO: 471158 - DNA, 33 bp, Homo sapien
tccacctctggaatatgagagctccaaaagaca

SEQ ID NO: 471159 - DNA, 33 bp, Homo sapien
agcctcacaaactccaaatgtgttttacctgga

SEQ ID NO: 471160 - DNA, 33 bp, Homo sapien
agcctcacaaactccagatgtgttttacctgga

SEQ ID NO: 471161 - DNA, 33 bp, Homo sapien
gtggctcatttattcacggagtaattactgact

SEQ ID NO: 471162 - DNA, 33 bp, Homo sapien
gtggctcatttattcatggagtaattactgact

SEQ ID NO: 471163 - DNA, 33 bp, Homo sapien
ggtgagtggagttatccgaaatggccagtggca

SEQ ID NO: 471164 - DNA, 33 bp, Homo sapien
ggtgagtggagttatctgaaatggccagtggca

SEQ ID NO: 471165 - DNA, 33 bp, Homo sapien
atgagtcaatcaacacagcccctctggagaagg

SEQ ID NO: 471166 - DNA, 33 bp, Homo sapien
atgagtcaatcaacacggcccctctggagaagg

SEQ ID NO: 471167 - DNA, 33 bp, Homo sapien
attttgtctagctcaaatggacactacagagag

SEQ ID NO: 471168 - DNA, 33 bp, Homo sapien
attttgtctagctcaagtggacactacagagag

SEQ ID NO: 471169 - DNA, 33 bp, Homo sapien
attcctcaagccagccagaatctccaagttcat

SEQ ID NO: 471170 - DNA, 33 bp, Homo sapien
attcctcaagccagccggaatctccaagttcat

SEQ ID NO: 471171 - DNA, 33 bp, Homo sapien
tcctgggagaaagatacagtcagaatgtcaaat

SEQ ID NO: 471172 - DNA, 33 bp, Homo sapien
tcctgggagaaagatagagtcagaatgtcaaat

SEQ ID NO: 471173 - DNA, 33 bp, Homo sapien
atgctacattaagtgcaatcacagaggcaaatg

SEQ ID NO: 471174 - DNA, 33 bp, Homo sapien
atgctacattaagtgccatcacagaggcaaatg

SEQ ID NO: 471175 - DNA, 33 bp, Homo sapien
aatgattctgaccatcgctaacctgtattacag

SEQ ID NO: 471176 - DNA, 33 bp, Homo sapien
aatgattctgaccatctctaacctgtattacag

SEQ ID NO: 471177 - DNA, 33 bp, Homo sapien
tgtagtcagacagatacgacaggaatcacacac

SEQ ID NO: 471178 - DNA, 33 bp, Homo sapien
tgtagtcagacagataggacaggaatcacacac

SEQ ID NO: 471179 - DNA, 33 bp, Homo sapien
aggtcaaagtttgcgaagatctctcccttttta

SEQ ID NO: 471180 - DNA, 33 bp, Homo sapien
aggtcaaagtttgcgaggatctctcccttttta

SEQ ID NO: 471181 - DNA, 33 bp, Homo sapien
gcataagaggtaggcaacattaatagtgaaact

SEQ ID NO: 471182 - DNA, 33 bp, Homo sapien
gcataagaggtaggcaccattaatagtgaaact

SEQ ID NO: 471183 - DNA, 33 bp, Homo sapien
cacaaggttagaaactgaagtgtcactgtaatg

SEQ ID NO: 471184 - DNA, 33 bp, Homo sapien
cacaaggttagaaacttaagtgtcactgtaatg

SEQ ID NO: 471185 - DNA, 33 bp, Homo sapien
gggtatgcttgctttcaattgccttaatttctg

SEQ ID NO: 471186 - DNA, 33 bp, Homo sapien
gggtatgcttgctttccattgccttaatttctg

SEQ ID NO: 471187 - DNA, 33 bp, Homo sapien
gcacatttggaagcacaaagctgattagagatg

SEQ ID NO: 471188 - DNA, 33 bp, Homo sapien
gcacatttggaagcacgaagctgattagagatg

SEQ ID NO: 471189 - DNA, 33 bp, Homo sapien
atggttctcatcatcaaggatatagaagcccat

SEQ ID NO: 471190 - DNA, 33 bp, Homo sapien
atggttctcatcatcagggatatagaagcccat

SEQ ID NO: 471191 - DNA, 33 bp, Homo sapien
gaacaggcagttgtataagaactttgctctcag

SEQ ID NO: 471192 - DNA, 33 bp, Homo sapien
gaacaggcagttgtatgagaactttgctctcag

SEQ ID NO: 471193 - DNA, 33 bp, Homo sapien
aaagcatccaagaaccactagggcaaccaggtt

SEQ ID NO: 471194 - DNA, 33 bp, Homo sapien
aaagcatccaagaaccgctagggcaaccaggtt

SEQ ID NO: 471195 - DNA, 33 bp, Homo sapien
cacatggagcatgggaaaatccaagaaatcaag

SEQ ID NO: 471196 - DNA, 33 bp, Homo sapien
cacatggagcatgggagaatccaagaaatcaag

SEQ ID NO: 471197 - DNA, 33 bp, Homo sapien
ccaatgtaaggttgaaatcaacaccctccatat

SEQ ID NO: 471198 - DNA, 33 bp, Homo sapien
ccaatgtaaggttgaagtcaacaccctccatat

SEQ ID NO: 471199 - DNA, 33 bp, Homo sapien
ccatctttcatttaaccggatgaatcatactgg

SEQ ID NO: 471200 - DNA, 33 bp, Homo sapien
ccatctttcatttaactggatgaatcatactgg

SEQ ID NO: 471201 - DNA, 33 bp, Homo sapien
atttgcaggcaaatagaaagacaaggagattat

SEQ ID NO: 471202 - DNA, 33 bp, Homo sapien
atttgcaggcaaataggaagacaaggagattat

SEQ ID NO: 471203 - DNA, 33 bp, Homo sapien
ctctggagaactcacacaggaagctagcaccaa

SEQ ID NO: 471204 - DNA, 33 bp, Homo sapien
ctctggagaactcacataggaagctagcaccaa

SEQ ID NO: 471205 - DNA, 33 bp, Homo sapien
aaaatctgtagtaatacgtaacagcaaagttaa

SEQ ID NO: 471206 - DNA, 33 bp, Homo sapien
aaaatctgtagtaatatgtaacagcaaagttaa

SEQ ID NO: 471207 - DNA, 33 bp, Homo sapien
ttacacataaactacaccttcagaaaaatgttc

SEQ ID NO: 471208 - DNA, 33 bp, Homo sapien
ttacacataaactacatcttcagaaaaatgttc

SEQ ID NO: 471209 - DNA, 33 bp, Homo sapien
tttgtcaatgtttggaaagttttatgcagtagt

SEQ ID NO: 471210 - DNA, 33 bp, Homo sapien
tttgtcaatgtttggacagttttatgcagtagt

SEQ ID NO: 471211 - DNA, 33 bp, Homo sapien
tgagattctgaagggcaaaattcaggcctttac

SEQ ID NO: 471212 - DNA, 33 bp, Homo sapien
tgagattctgaagggcgaaattcaggcctttac

SEQ ID NO: 471213 - DNA, 33 bp, Homo sapien
gagttacaagtgaagaataattagagtgatagc

SEQ ID NO: 471214 - DNA, 33 bp, Homo sapien
gagttacaagtgaagagtaattagagtgatagc

SEQ ID NO: 471215 - DNA, 33 bp, Homo sapien
tcaaggctgtggtcaccctatttacattcagcg

SEQ ID NO: 471216 - DNA, 33 bp, Homo sapien
tcaaggctgtggtcactctatttacattcagcg

SEQ ID NO: 471217 - DNA, 33 bp, Homo sapien
tcaagtgaggagaagaaatgactgttccgcttg

SEQ ID NO: 471218 - DNA, 33 bp, Homo sapien
tcaagtgaggagaagacatgactgttccgcttg

SEQ ID NO: 471219 - DNA, 33 bp, Homo sapien
cagagaggaaatggaaaataaatatatcatgct

SEQ ID NO: 471220 - DNA, 33 bp, Homo sapien
cagagaggaaatggaagataaatatatcatgct

SEQ ID NO: 471221 - DNA, 33 bp, Homo sapien
agagacttttgcataagaggaaatgtgaacttg

SEQ ID NO: 471222 - DNA, 33 bp, Homo sapien
agagacttttgcataataggaaatgtgaacttg

SEQ ID NO: 471223 - DNA, 33 bp, Homo sapien
tgtgtagggttataaaggattaagcaaaagtgt

SEQ ID NO: 471224 - DNA, 33 bp, Homo sapien
tgtgtagggttataaatgattaagcaaaagtgt

SEQ ID NO: 471225 - DNA, 33 bp, Homo sapien
aaagtgtaaactgcaacatatgctggaagttgt

SEQ ID NO: 471226 - DNA, 33 bp, Homo sapien
aaagtgtaaactgcaatatatgctggaagttgt

SEQ ID NO: 471227 - DNA, 33 bp, Homo sapien
agaggactttgggagcaataaataagacaatgt

SEQ ID NO: 471228 - DNA, 33 bp, Homo sapien
agaggactttgggagcgataaataagacaatgt

SEQ ID NO: 471229 - DNA, 33 bp, Homo sapien
gaaagcaggctgagcaagtaggtggacatttac

SEQ ID NO: 471230 - DNA, 33 bp, Homo sapien
gaaagcaggctgagcaggtaggtggacatttac

SEQ ID NO: 471231 - DNA, 33 bp, Homo sapien
attattgaaaactatccctaaagctgcccacca

SEQ ID NO: 471232 - DNA, 33 bp, Homo sapien
attattgaaaactatctctaaagctgcccacca

SEQ ID NO: 471233 - DNA, 33 bp, Homo sapien
aagattgttattcctaactccttaaaataatac

SEQ ID NO: 471234 - DNA, 33 bp, Homo sapien
aagattgttattcctatctccttaaaataatac

SEQ ID NO: 471235 - DNA, 33 bp, Homo sapien
ctaataaccacactgacgatttattacagaaat

SEQ ID NO: 471236 - DNA, 33 bp, Homo sapien
ctaataaccacactgatgatttattacagaaat

SEQ ID NO: 471237 - DNA, 33 bp, Homo sapien
aataatcaaaggagaactgctgctcagcagaat

SEQ ID NO: 471238 - DNA, 33 bp, Homo sapien
aataatcaaaggagaagtgctgctcagcagaat

SEQ ID NO: 471239 - DNA, 33 bp, Homo sapien
gatgtccatttcttgccctttacatttgatcaa

SEQ ID NO: 471240 - DNA, 33 bp, Homo sapien
gatgtccatttcttgctctttacatttgatcaa

SEQ ID NO: 471241 - DNA, 33 bp, Homo sapien
ttgtgtttagaaaaagcattattctggccacaa

SEQ ID NO: 471242 - DNA, 33 bp, Homo sapien
ttgtgtttagaaaaagtattattctggccacaa

SEQ ID NO: 471243 - DNA, 33 bp, Homo sapien
gttggttgaaacatggaaaaaatggaataaaaa

SEQ ID NO: 471244 - DNA, 33 bp, Homo sapien
gttggttgaaacatgggaaaaatggaataaaaa

SEQ ID NO: 471245 - DNA, 33 bp, Homo sapien
gtgtctatctgtataacagttgagggtaacata

SEQ ID NO: 471246 - DNA, 33 bp, Homo sapien
gtgtctatctgtataatagttgagggtaacata

SEQ ID NO: 471247 - DNA, 33 bp, Homo sapien
ggctgtgaacctgataagctatagattataagg

SEQ ID NO: 471248 - DNA, 33 bp, Homo sapien
ggctgtgaacctgatatgctatagattataagg

SEQ ID NO: 471249 - DNA, 33 bp, Homo sapien
aagtctgaagcatctcagaagcatttattgaca

SEQ ID NO: 471250 - DNA, 33 bp, Homo sapien
aagtctgaagcatctcggaagcatttattgaca

SEQ ID NO: 471251 - DNA, 33 bp, Homo sapien
ggtagatagtgattgacggcttttcagcagaga

SEQ ID NO: 471252 - DNA, 33 bp, Homo sapien
ggtagatagtgattgatggcttttcagcagaga

SEQ ID NO: 471253 - DNA, 33 bp, Homo sapien
cggcaatagcttgcaactgataataaaggaagg

SEQ ID NO: 471254 - DNA, 33 bp, Homo sapien
cggcaatagcttgcaagtgataataaaggaagg

SEQ ID NO: 471255 - DNA, 33 bp, Homo sapien
ctggcattcgtaaggacagtctgtgatgaaaag

SEQ ID NO: 471256 - DNA, 33 bp, Homo sapien
ctggcattcgtaaggagagtctgtgatgaaaag

SEQ ID NO: 471257 - DNA, 33 bp, Homo sapien
ggatttgtggaactacaccgtcatgctattaca

SEQ ID NO: 471258 - DNA, 33 bp, Homo sapien
ggatttgtggaactacgccgtcatgctattaca

SEQ ID NO: 471259 - DNA, 33 bp, Homo sapien
aattatgcagtttcaagtattgtgttatagcag

SEQ ID NO: 471260 - DNA, 33 bp, Homo sapien
aattatgcagtttcaattattgtgttatagcag

SEQ ID NO: 471261 - DNA, 33 bp, Homo sapien
aatacaattcaaatacaattttcagaattctct

SEQ ID NO: 471262 - DNA, 33 bp, Homo sapien
aatacaattcaaatacgattttcagaattctct

SEQ ID NO: 471263 - DNA, 33 bp, Homo sapien
gttagcctcaggctcacggatagaagctcctcc

SEQ ID NO: 471264 - DNA, 33 bp, Homo sapien
gttagcctcaggctcatggatagaagctcctcc

SEQ ID NO: 471265 - DNA, 33 bp, Homo sapien
ctgccagattatactgcagagttaggagggtaa

SEQ ID NO: 471266 - DNA, 33 bp, Homo sapien
ctgccagattatactgtagagttaggagggtaa

SEQ ID NO: 471267 - DNA, 33 bp, Homo sapien
aaggatgtgcaggttagaggtgcaagaaggccc

SEQ ID NO: 471268 - DNA, 33 bp, Homo sapien
aaggatgtgcaggttataggtgcaagaaggccc

SEQ ID NO: 471269 - DNA, 33 bp, Homo sapien
aaactcttagaactcaagaagaaattcagtaag

SEQ ID NO: 471270 - DNA, 33 bp, Homo sapien
aaactcttagaactcatgaagaaattcagtaag

SEQ ID NO: 471271 - DNA, 33 bp, Homo sapien
taagaccagatagatactaatcttaccattcag

SEQ ID NO: 471272 - DNA, 33 bp, Homo sapien
taagaccagatagatattaatcttaccattcag

SEQ ID NO: 471273 - DNA, 33 bp, Homo sapien
actctttccttcataaacaacccagtcttgggt

SEQ ID NO: 471274 - DNA, 33 bp, Homo sapien
actctttccttcataagcaacccagtcttgggt

SEQ ID NO: 471275 - DNA, 33 bp, Homo sapien
tgagaacagactaatacaattaccatttggtga

SEQ ID NO: 471276 - DNA, 33 bp, Homo sapien
tgagaacagactaatataattaccatttggtga

SEQ ID NO: 471277 - DNA, 33 bp, Homo sapien
atttgtacaatttaacagcttcttatcagatct

SEQ ID NO: 471278 - DNA, 33 bp, Homo sapien
atttgtacaatttaacggcttcttatcagatct

SEQ ID NO: 471279 - DNA, 33 bp, Homo sapien
taaacaaggtaattcacgcaaacaaactaatat

SEQ ID NO: 471280 - DNA, 33 bp, Homo sapien
taaacaaggtaattcatgcaaacaaactaatat

SEQ ID NO: 471281 - DNA, 33 bp, Homo sapien
aactctgaaagactgacgtggagttcctcccct

SEQ ID NO: 471282 - DNA, 33 bp, Homo sapien
aactctgaaagactgatgtggagttcctcccct

SEQ ID NO: 471283 - DNA, 33 bp, Homo sapien
gttacccaaaaagatacgttgaagccctgacgc

SEQ ID NO: 471284 - DNA, 33 bp, Homo sapien
gttacccaaaaagatatgttgaagccctgacgc

SEQ ID NO: 471285 - DNA, 33 bp, Homo sapien
tcataaactctataaaatgcaatcaggggagct

SEQ ID NO: 471286 - DNA, 33 bp, Homo sapien
tcataaactctataaagtgcaatcaggggagct

SEQ ID NO: 471287 - DNA, 33 bp, Homo sapien
attaacagagaaaggacgccatggaagatcatc

SEQ ID NO: 471288 - DNA, 33 bp, Homo sapien
attaacagagaaaggatgccatggaagatcatc

SEQ ID NO: 471289 - DNA, 33 bp, Homo sapien
cctatgagggcagtgcaacagtaaggacttttt

SEQ ID NO: 471290 - DNA, 33 bp, Homo sapien
cctatgagggcagtgccacagtaaggacttttt

SEQ ID NO: 471291 - DNA, 33 bp, Homo sapien
cgttcataaagcagtacggttatgtttaacagc

SEQ ID NO: 471292 - DNA, 33 bp, Homo sapien
cgttcataaagcagtatggttatgtttaacagc

SEQ ID NO: 471293 - DNA, 33 bp, Homo sapien
ttttctaaatgttttcactctgcttccttttta

SEQ ID NO: 471294 - DNA, 33 bp, Homo sapien
ttttctaaatgttttctctctgcttccttttta

SEQ ID NO: 471295 - DNA, 33 bp, Homo sapien
ctgagtctggaaatcacgtgtttagcaagaatc

SEQ ID NO: 471296 - DNA, 33 bp, Homo sapien
ctgagtctggaaatcatgtgtttagcaagaatc

SEQ ID NO: 471297 - DNA, 33 bp, Homo sapien
taccaatgcaacaggaggtactaagtttctaga

SEQ ID NO: 471298 - DNA, 33 bp, Homo sapien
taccaatgcaacaggatgtactaagtttctaga

SEQ ID NO: 471299 - DNA, 33 bp, Homo sapien
acgtttattgagcacacacttcataggcattat

SEQ ID NO: 471300 - DNA, 33 bp, Homo sapien
acgtttattgagcacatacttcataggcattat

SEQ ID NO: 471301 - DNA, 33 bp, Homo sapien
atagctatagcaccgcaaattgccacatctgta

SEQ ID NO: 471302 - DNA, 33 bp, Homo sapien
atagctatagcaccgcgaattgccacatctgta

SEQ ID NO: 471303 - DNA, 33 bp, Homo sapien
tctaaattagctgtgagattgccttaaatccca

SEQ ID NO: 471304 - DNA, 33 bp, Homo sapien
tctaaattagctgtgatattgccttaaatccca

SEQ ID NO: 471305 - DNA, 33 bp, Homo sapien
atgacctggagagagacatttcccccattgtct

SEQ ID NO: 471306 - DNA, 33 bp, Homo sapien
atgacctggagagagatatttcccccattgtct

SEQ ID NO: 471307 - DNA, 33 bp, Homo sapien
taataaaagaacttcaccaccatatattcatat

SEQ ID NO: 471308 - DNA, 33 bp, Homo sapien
taataaaagaacttcatcaccatatattcatat

SEQ ID NO: 471309 - DNA, 33 bp, Homo sapien
tctcctcctttgagtacgaagaggaccagtaaa

SEQ ID NO: 471310 - DNA, 33 bp, Homo sapien
tctcctcctttgagtatgaagaggaccagtaaa

SEQ ID NO: 471311 - DNA, 33 bp, Homo sapien
tgtgaatgtaatcagaacaagtatttaaactga

SEQ ID NO: 471312 - DNA, 33 bp, Homo sapien
tgtgaatgtaatcagagcaagtatttaaactga

SEQ ID NO: 471313 - DNA, 33 bp, Homo sapien
gttttgagctgttaaacgtgagcatagtgtgtt

SEQ ID NO: 471314 - DNA, 33 bp, Homo sapien
gttttgagctgttaaatgtgagcatagtgtgtt

SEQ ID NO: 471315 - DNA, 33 bp, Homo sapien
gacagcaaacgctgtgcacctgtaaacacccag

SEQ ID NO: 471316 - DNA, 33 bp, Homo sapien
gacagcaaacgctgtgtacctgtaaacacccag

SEQ ID NO: 471317 - DNA, 33 bp, Homo sapien
aaaattaatttgtgaacgtgactggcctatcat

SEQ ID NO: 471318 - DNA, 33 bp, Homo sapien
aaaattaatttgtgaatgtgactggcctatcat

SEQ ID NO: 471319 - DNA, 33 bp, Homo sapien
atatgcactgagaaacaagaaaatgtatgtgaa

SEQ ID NO: 471320 - DNA, 33 bp, Homo sapien
atatgcactgagaaaccagaaaatgtatgtgaa

SEQ ID NO: 471321 - DNA, 33 bp, Homo sapien
ttccatctttagatcaaaaaccgaagtcatgga

SEQ ID NO: 471322 - DNA, 33 bp, Homo sapien
ttccatctttagatcagaaaccgaagtcatgga

SEQ ID NO: 471323 - DNA, 33 bp, Homo sapien
tggcatttagagttcaactgcacttcttcagaa

SEQ ID NO: 471324 - DNA, 33 bp, Homo sapien
tggcatttagagttcatctgcacttcttcagaa

SEQ ID NO: 471325 - DNA, 33 bp, Homo sapien
tagaactttgataacacagaacaaagaaaagag

SEQ ID NO: 471326 - DNA, 33 bp, Homo sapien
tagaactttgataacagagaacaaagaaaagag

SEQ ID NO: 471327 - DNA, 33 bp, Homo sapien
ccaactgcatttctaccgacaattgctgtatct

SEQ ID NO: 471328 - DNA, 33 bp, Homo sapien
ccaactgcatttctactgacaattgctgtatct

SEQ ID NO: 471329 - DNA, 33 bp, Homo sapien
cccaacttaaaccagcaaatagaggaatagcaa

SEQ ID NO: 471330 - DNA, 33 bp, Homo sapien
cccaacttaaaccagcgaatagaggaatagcaa

SEQ ID NO: 471331 - DNA, 33 bp, Homo sapien
ttcatatcaacccagccatagaaaacaccaact

SEQ ID NO: 471332 - DNA, 33 bp, Homo sapien
ttcatatcaacccagctatagaaaacaccaact

SEQ ID NO: 471333 - DNA, 33 bp, Homo sapien
gcactcaaagaggtaaaagagtgaagtggttaa

SEQ ID NO: 471334 - DNA, 33 bp, Homo sapien
gcactcaaagaggtaacagagtgaagtggttaa

SEQ ID NO: 471335 - DNA, 33 bp, Homo sapien
taattttaaagtttgcaagtgattctgaatata

SEQ ID NO: 471336 - DNA, 33 bp, Homo sapien
taattttaaagtttgccagtgattctgaatata

SEQ ID NO: 471337 - DNA, 33 bp, Homo sapien
aagaggagatactgaaggcaaggtctgaagaat

SEQ ID NO: 471338 - DNA, 33 bp, Homo sapien
aagaggagatactgaatgcaaggtctgaagaat

SEQ ID NO: 471339 - DNA, 33 bp, Homo sapien
gtcaacaaaattaatcggataatgtcactcctc

SEQ ID NO: 471340 - DNA, 33 bp, Homo sapien
gtcaacaaaattaatctgataatgtcactcctc

SEQ ID NO: 471341 - DNA, 33 bp, Homo sapien
gttataatcaaaatgacgcagttttaaagttat

SEQ ID NO: 471342 - DNA, 33 bp, Homo sapien
gttataatcaaaatgaggcagttttaaagttat

SEQ ID NO: 471343 - DNA, 33 bp, Homo sapien
aataacaaaagatcaacggaggtttcaagcatt

SEQ ID NO: 471344 - DNA, 33 bp, Homo sapien
aataacaaaagatcaatggaggtttcaagcatt

SEQ ID NO: 471345 - DNA, 33 bp, Homo sapien
tcaggacacaagcagaagtaacaacattccatg

SEQ ID NO: 471346 - DNA, 33 bp, Homo sapien
tcaggacacaagcagatgtaacaacattccatg

SEQ ID NO: 471347 - DNA, 33 bp, Homo sapien
tagaatctttgagtcaatatcctaatttgagtc

SEQ ID NO: 471348 - DNA, 33 bp, Homo sapien
tagaatctttgagtcagtatcctaatttgagtc

SEQ ID NO: 471349 - DNA, 33 bp, Homo sapien
ctgattctgtttctcacggaactcagacttcaa

SEQ ID NO: 471350 - DNA, 33 bp, Homo sapien
ctgattctgtttctcagggaactcagacttcaa

SEQ ID NO: 471351 - DNA, 33 bp, Homo sapien
ttaaacttttaacatacaggtagcacactgatt

SEQ ID NO: 471352 - DNA, 33 bp, Homo sapien
ttaaacttttaacatagaggtagcacactgatt

SEQ ID NO: 471353 - DNA, 33 bp, Homo sapien
caatccagaccatgtaaccaaagattctgcaat

SEQ ID NO: 471354 - DNA, 33 bp, Homo sapien
caatccagaccatgtatccaaagattctgcaat

SEQ ID NO: 471355 - DNA, 33 bp, Homo sapien
gcccacagtggagtaacactagatatcaacaac

SEQ ID NO: 471356 - DNA, 33 bp, Homo sapien
gcccacagtggagtaatactagatatcaacaac

SEQ ID NO: 471357 - DNA, 33 bp, Homo sapien
gagaaaggctgccatcactccttcaactttctt

SEQ ID NO: 471358 - DNA, 33 bp, Homo sapien
gagaaaggctgccatctctccttcaactttctt

SEQ ID NO: 471359 - DNA, 33 bp, Homo sapien
aattacagaagcatcacccttttacagtcaatt

SEQ ID NO: 471360 - DNA, 33 bp, Homo sapien
aattacagaagcatcatccttttacagtcaatt

SEQ ID NO: 471361 - DNA, 33 bp, Homo sapien
gcaaactcttgaaccacggtgaaataaaaatag

SEQ ID NO: 471362 - DNA, 33 bp, Homo sapien
gcaaactcttgaaccatggtgaaataaaaatag

SEQ ID NO: 471363 - DNA, 33 bp, Homo sapien; identical to SEQ ID NO: 471361

SEQ ID NO: 471364 - DNA, 33 bp, Homo sapien; identical to SEQ ID NO: 471362

SEQ ID NO: 471365 - DNA, 33 bp, Homo sapien
tttatgatatgtgcccaccattaaggtaccatg

SEQ ID NO: 471366 - DNA, 33 bp, Homo sapien
tttatgatatgtgcccgccattaaggtaccatg

SEQ ID NO: 471367 - DNA, 33 bp, Homo sapien
acattgtaagtgaccaaaactatttgtctcatt

SEQ ID NO: 471368 - DNA, 33 bp, Homo sapien
acattgtaagtgaccacaactatttgtctcatt

SEQ ID NO: 471369 - DNA, 33 bp, Homo sapien; identical to SEQ ID NO: 471367

SEQ ID NO: 471370 - DNA, 33 bp, Homo sapien; identical to SEQ ID NO: 471368

SEQ ID NO: 471371 - DNA, 33 bp, Homo sapien
tttttggttctcactcaccatcaaagattagtt

SEQ ID NO: 471372 - DNA, 33 bp, Homo sapien
tttttggttctcactctccatcaaagattagtt

SEQ ID NO: 471373 - DNA, 33 bp, Homo sapien
ttgtcccaattagaaacgaggttgtcatggttg

SEQ ID NO: 471374 - DNA, 33 bp, Homo sapien
ttgtcccaattagaaatgaggttgtcatggttg

SEQ ID NO: 471375 - DNA, 33 bp, Homo sapien
ttgcctggttccacaaattccagaggttggcag

SEQ ID NO: 471376 - DNA, 33 bp, Homo sapien
ttgcctggttccacaacttccagaggttggcag

SEQ ID NO: 471377 - DNA, 33 bp, Homo sapien
cacttttagttgaaagccttgagaataaggcat

SEQ ID NO: 471378 - DNA, 33 bp, Homo sapien
cacttttagttgaaaggcttgagaataaggcat

SEQ ID NO: 471379 - DNA, 33 bp, Homo sapien
ctgccctgttgaaaaccaggacatcggccaggc

SEQ ID NO: 471380 - DNA, 33 bp, Homo sapien
ctgccctgttgaaaacgaggacatcggccaggc

SEQ ID NO: 471381 - DNA, 33 bp, Homo sapien; identical to SEQ ID NO: 471379

SEQ ID NO: 471382 - DNA, 33 bp, Homo sapien; identical to SEQ ID NO: 471380

SEQ ID NO: 471383 - DNA, 33 bp, Homo sapien
aatcactgttaaatgacaaagatactgagttct

SEQ ID NO: 471384 - DNA, 33 bp, Homo sapien
aatcactgttaaatgataaagatactgagttct

SEQ ID NO: 471385 - DNA, 33 bp, Homo sapien
ctgcagtttgaatacaatatgtctaagtgtaga

SEQ ID NO: 471386 - DNA, 33 bp, Homo sapien
ctgcagtttgaatacagtatgtctaagtgtaga

SEQ ID NO: 471387 - DNA, 33 bp, Homo sapien
aataacatggatcagaatacagaaaataagaac

SEQ ID NO: 471388 - DNA, 33 bp, Homo sapien
aataacatggatcagagtacagaaaataagaac

SEQ ID NO: 471389 - DNA, 33 bp, Homo sapien
tagattgcagtgcctacgtataatttcttttgc

SEQ ID NO: 471390 - DNA, 33 bp, Homo sapien
tagattgcagtgcctatgtataatttcttttgc

SEQ ID NO: 471391 - DNA, 33 bp, Homo sapien
cagatttctagacacaagtattaagctacgtcc

SEQ ID NO: 471392 - DNA, 33 bp, Homo sapien
cagatttctagacacaggtattaagctacgtcc

SEQ ID NO: 471393 - DNA, 33 bp, Homo sapien
acaactggtgagttccagaaagtgaatacaaat

SEQ ID NO: 471394 - DNA, 33 bp, Homo sapien
acaactggtgagttccggaaagtgaatacaaat

SEQ ID NO: 471395 - DNA, 33 bp, Homo sapien
gattatgtgatgttaaataaagcaacaaccaca

SEQ ID NO: 471396 - DNA, 33 bp, Homo sapien
gattatgtgatgttaagtaaagcaacaaccaca

SEQ ID NO: 471397 - DNA, 33 bp, Homo sapien
agttctagcaggcccacgctaaacagatagtag

SEQ ID NO: 471398 - DNA, 33 bp, Homo sapien
agttctagcaggcccaggctaaacagatagtag

SEQ ID NO: 471399 - DNA, 33 bp, Homo sapien
tattaaatggtgtaaacggggctatactctttt

SEQ ID NO: 471400 - DNA, 33 bp, Homo sapien
tattaaatggtgtaaatggggctatactctttt

SEQ ID NO: 471401 - DNA, 33 bp, Homo sapien
ctagatgagaacttgccgaagaactcgacatca

SEQ ID NO: 471402 - DNA, 33 bp, Homo sapien
ctagatgagaacttgctgaagaactcgacatca

SEQ ID NO: 471403 - DNA, 33 bp, Homo sapien
agtgctggcgcaattaacaactgtatatttggg

SEQ ID NO: 471404 - DNA, 33 bp, Homo sapien
agtgctggcgcaattagcaactgtatatttggg

SEQ ID NO: 471405 - DNA, 33 bp, Homo sapien
cattttgcagatgagaacatatacgaccagaaa

SEQ ID NO: 471406 - DNA, 33 bp, Homo sapien
cattttgcagatgagagcatatacgaccagaaa

SEQ ID NO: 471407 - DNA, 33 bp, Homo sapien
acagtgagaaatccatcagagtggagataaaaa

SEQ ID NO: 471408 - DNA, 33 bp, Homo sapien
acagtgagaaatccattagagtggagataaaaa

SEQ ID NO: 471409 - DNA, 33 bp, Homo sapien
tgtggtccaagttataagtagatgagtgggtgt

SEQ ID NO: 471410 - DNA, 33 bp, Homo sapien
tgtggtccaagttatatgtagatgagtgggtgt

SEQ ID NO: 471411 - DNA, 33 bp, Homo sapien
acctaccggtctcaagaaaatttctgttcaata

SEQ ID NO: 471412 - DNA, 33 bp, Homo sapien
acctaccggtctcaaggaaatttctgttcaata

SEQ ID NO: 471413 - DNA, 33 bp, Homo sapien
tggaaaaaatatactcacaccagggattaacta

SEQ ID NO: 471414 - DNA, 33 bp, Homo sapien
tggaaaaaatatactcgcaccagggattaacta

SEQ ID NO: 471415 - DNA, 33 bp, Homo sapien
tactttatgtgctaaacgcctacttcatagtcc

SEQ ID NO: 471416 - DNA, 33 bp, Homo sapien
tactttatgtgctaaatgcctacttcatagtcc

SEQ ID NO: 471417 - DNA, 33 bp, Homo sapien
tgaatgacctgctctacaaatggcctgcaagag

SEQ ID NO: 471418 - DNA, 33 bp, Homo sapien
tgaatgacctgctctataaatggcctgcaagag

SEQ ID NO: 471419 - DNA, 33 bp, Homo sapien
actcagttcgaccacccgctttatcctttggat

SEQ ID NO: 471420 - DNA, 33 bp, Homo sapien
actcagttcgaccacctgctttatcctttggat

SEQ ID NO: 471421 - DNA, 33 bp, Homo sapien
tatccttttatttgagaccaattcctgttagtt

SEQ ID NO: 471422 - DNA, 33 bp, Homo sapien
tatccttttatttgaggccaattcctgttagtt

SEQ ID NO: 471423 - DNA, 33 bp, Homo sapien
cacactgctctggcgaagcgtccaaccggggca

SEQ ID NO: 471424 - DNA, 33 bp, Homo sapien
cacactgctctggcgaggcgtccaaccggggca

SEQ ID NO: 471425 - DNA, 33 bp, Homo sapien
tatcctgctttgttccaatctaattaccagtgc

SEQ ID NO: 471426 - DNA, 33 bp, Homo sapien
tatcctgctttgttccgatctaattaccagtgc

SEQ ID NO: 471427 - DNA, 33 bp, Homo sapien
ataacaaatggcctcaaatgggatggattaaaa

SEQ ID NO: 471428 - DNA, 33 bp, Homo sapien
ataacaaatggcctcacatgggatggattaaaa

SEQ ID NO: 471429 - DNA, 33 bp, Homo sapien
atctcagtggttattaagttgccagacacatgg

SEQ ID NO: 471430 - DNA, 33 bp, Homo sapien
atctcagtggttattaggttgccagacacatgg

SEQ ID NO: 471431 - DNA, 33 bp, Homo sapien
atccactgagaggaacaagggaagagaaaacaa

SEQ ID NO: 471432 - DNA, 33 bp, Homo sapien
atccactgagaggaacgagggaagagaaaacaa

SEQ ID NO: 471433 - DNA, 33 bp, Homo sapien
atagactgaatacacacccactaagtcatctct

SEQ ID NO: 471434 - DNA, 33 bp, Homo sapien
atagactgaatacacatccactaagtcatctct

SEQ ID NO: 471435 - DNA, 33 bp, Homo sapien
cacccatgtagtgaacaacagaggcagagtata

SEQ ID NO: 471436 - DNA, 33 bp, Homo sapien
cacccatgtagtgaacgacagaggcagagtata

SEQ ID NO: 471437 - DNA, 33 bp, Homo sapien
atacataacggacagaaggatgtgaaggaatgg

SEQ ID NO: 471438 - DNA, 33 bp, Homo sapien
atacataacggacagatggatgtgaaggaatgg

SEQ ID NO: 471439 - DNA, 33 bp, Homo sapien
tcattaatttgcctctcagacattaattgcttt

SEQ ID NO: 471440 - DNA, 33 bp, Homo sapien
tcattaatttgcctcttagacattaattgcttt

SEQ ID NO: 471441 - DNA, 33 bp, Homo sapien
atggtattgttcccagaaataaaaagtgtgtaa

SEQ ID NO: 471442 - DNA, 33 bp, Homo sapien
atggtattgttcccagcaataaaaagtgtgtaa

SEQ ID NO: 471443 - DNA, 33 bp, Homo sapien
atttagggcctgaataaaacaagagacagggaa

SEQ ID NO: 471444 - DNA, 33 bp, Homo sapien
atttagggcctgaatagaacaagagacagggaa

SEQ ID NO: 471445 - DNA, 33 bp, Homo sapien
aactgtgaggaataacaatctttctgtcactgt

SEQ ID NO: 471446 - DNA, 33 bp, Homo sapien
aactgtgaggaataacgatctttctgtcactgt

SEQ ID NO: 471447 - DNA, 33 bp, Homo sapien
ttctctaaagtcaggaacaagtcaaggatgtcc

SEQ ID NO: 471448 - DNA, 33 bp, Homo sapien
ttctctaaagtcaggatcaagtcaaggatgtcc

SEQ ID NO: 471449 - DNA, 33 bp, Homo sapien
ctgtggtacatgcatacgatggaattttttttg

SEQ ID NO: 471450 - DNA, 33 bp, Homo sapien
ctgtggtacatgcatatgatggaattttttttg

SEQ ID NO: 471451 - DNA, 33 bp, Homo sapien
gaccccaaataatttaactacatgctctagaag

SEQ ID NO: 471452 - DNA, 33 bp, Homo sapien
gaccccaaataatttagctacatgctctagaag

SEQ ID NO: 471453 - DNA, 33 bp, Homo sapien
agtaagtacaatggtacggaataagggatgttt

SEQ ID NO: 471454 - DNA, 33 bp, Homo sapien
agtaagtacaatggtagggaataagggatgttt

SEQ ID NO: 471455 - DNA, 33 bp, Homo sapien
cttcccatttcttgcaaggttaagtccaaaaac

SEQ ID NO: 471456 - DNA, 33 bp, Homo sapien
cttcccatttcttgcagggttaagtccaaaaac

SEQ ID NO: 471457 - DNA, 33 bp, Homo sapien
tggaggctaagggcacagtatatcagatgatcg

SEQ ID NO: 471458 - DNA, 33 bp, Homo sapien
tggaggctaagggcacggtatatcagatgatcg

SEQ ID NO: 471459 - DNA, 33 bp, Homo sapien
taacatgatattttaacggaagcagaaagtcct

SEQ ID NO: 471460 - DNA, 33 bp, Homo sapien
taacatgatattttaatggaagcagaaagtcct

SEQ ID NO: 471461 - DNA, 33 bp, Homo sapien
ttcagattaggcaagcgcttcagtgtctagact

SEQ ID NO: 471462 - DNA, 33 bp, Homo sapien
ttcagattaggcaagctcttcagtgtctagact

SEQ ID NO: 471463 - DNA, 33 bp, Homo sapien
atctatgtctttaggcccctagcaatagcattt

SEQ ID NO: 471464 - DNA, 33 bp, Homo sapien
atctatgtctttaggctcctagcaatagcattt

SEQ ID NO: 471465 - DNA, 33 bp, Homo sapien
ccagcatccataatcaaaaaggacaattcctta

SEQ ID NO: 471466 - DNA, 33 bp, Homo sapien
ccagcatccataatcagaaaggacaattcctta

SEQ ID NO: 471467 - DNA, 33 bp, Homo sapien
ccttctcccatgtctacgtctaactcatttatt

SEQ ID NO: 471468 - DNA, 33 bp, Homo sapien
ccttctcccatgtctatgtctaactcatttatt

SEQ ID NO: 471469 - DNA, 33 bp, Homo sapien
aggccatttctgagtacggttttgttgactgct

SEQ ID NO: 471470 - DNA, 33 bp, Homo sapien
aggccatttctgagtatggttttgttgactgct

SEQ ID NO: 471471 - DNA, 33 bp, Homo sapien
gcaaaacacatcaccaaatatttttaaatgagg

SEQ ID NO: 471472 - DNA, 33 bp, Homo sapien
gcaaaacacatcaccagatatttttaaatgagg

SEQ ID NO: 471473 - DNA, 33 bp, Homo sapien
ttgcttaacagataaacacattgatgctcactg

SEQ ID NO: 471474 - DNA, 33 bp, Homo sapien
ttgcttaacagataaagacattgatgctcactg

SEQ ID NO: 471475 - DNA, 33 bp, Homo sapien
aaattgtttctagagaccgtgttggaaattgtt

SEQ ID NO: 471476 - DNA, 33 bp, Homo sapien
aaattgtttctagagatcgtgttggaaattgtt

SEQ ID NO: 471477 - DNA, 33 bp, Homo sapien
gcactgctgagagaatgaaatgacaaatcccat

SEQ ID NO: 471478 - DNA, 33 bp, Homo sapien
gcactgctgagagaattaaatgacaaatcccat

SEQ ID NO: 471479 - DNA, 33 bp, Homo sapien
aatatgtacaagcaacccttaaaactaaacaat

SEQ ID NO: 471480 - DNA, 33 bp, Homo sapien
aatatgtacaagcaactcttaaaactaaacaat

SEQ ID NO: 471481 - DNA, 33 bp, Homo sapien
gtttgtcttttccagaatattatacagtttgaa

SEQ ID NO: 471482 - DNA, 33 bp, Homo sapien
gtttgtcttttccagagtattatacagtttgaa

SEQ ID NO: 471483 - DNA, 33 bp, Homo sapien
caataagcgttaactacggttatgacttaactg

SEQ ID NO: 471484 - DNA, 33 bp, Homo sapien
caataagcgttaactatggttatgacttaactg

SEQ ID NO: 471485 - DNA, 33 bp, Homo sapien
gcatggctgaccattaaaccctcttatgaagtg

SEQ ID NO: 471486 - DNA, 33 bp, Homo sapien
gcatggctgaccattagaccctcttatgaagtg

SEQ ID NO: 471487 - DNA, 33 bp, Homo sapien
tgatggactttgaaaaatagatgttaaccagtg

SEQ ID NO: 471488 - DNA, 33 bp, Homo sapien
tgatggactttgaaaagtagatgttaaccagtg

SEQ ID NO: 471489 - DNA, 33 bp, Homo sapien
aaatgtgtgggaaaataaattgcaatagcaaaa

SEQ ID NO: 471490 - DNA, 33 bp, Homo sapien
aaatgtgtgggaaaatgaattgcaatagcaaaa

SEQ ID NO: 471491 - DNA, 33 bp, Homo sapien
ttgttacacacaaaatcaaggagtaatatttat

SEQ ID NO: 471492 - DNA, 33 bp, Homo sapien
ttgttacacacaaaatgaaggagtaatatttat

SEQ ID NO: 471493 - DNA, 33 bp, Homo sapien
cctgttagaaaccctacgccaaatgataagtaa

SEQ ID NO: 471494 - DNA, 33 bp, Homo sapien
cctgttagaaaccctaggccaaatgataagtaa

SEQ ID NO: 471495 - DNA, 33 bp, Homo sapien
cctggcaaatgtatgaaccttgataggcattaa

SEQ ID NO: 471496 - DNA, 33 bp, Homo sapien
cctggcaaatgtatgacccttgataggcattaa

SEQ ID NO: 471497 - DNA, 33 bp, Homo sapien
tgcctccaagaacatgaaaagaagcactacctt

SEQ ID NO: 471498 - DNA, 33 bp, Homo sapien
tgcctccaagaacatggaaagaagcactacctt

SEQ ID NO: 471499 - DNA, 33 bp, Homo sapien
acaaattctaatccaccgagcttaaaacaagat

SEQ ID NO: 471500 - DNA, 33 bp, Homo sapien
acaaattctaatccactgagcttaaaacaagat

SEQ ID NO: 471501 - DNA, 33 bp, Homo sapien
atcattctgaacctcactatccttctctaagta

SEQ ID NO: 471502 - DNA, 33 bp, Homo sapien
atcattctgaacctcattatccttctctaagta

SEQ ID NO: 471503 - DNA, 33 bp, Homo sapien
gttatcacaacaatcagtcttcttcacttattt

SEQ ID NO: 471504 - DNA, 33 bp, Homo sapien
gttatcacaacaatcattcttcttcacttattt

SEQ ID NO: 471505 - DNA, 33 bp, Homo sapien
gaataggacgaacaaactgtatatggcatcggt

SEQ ID NO: 471506 - DNA, 33 bp, Homo sapien
gaataggacgaacaaattgtatatggcatcggt

SEQ ID NO: 471507 - DNA, 33 bp, Homo sapien
ctgctgtcctacatgacctggccattgaccatt

SEQ ID NO: 471508 - DNA, 33 bp, Homo sapien
ctgctgtcctacatgatctggccattgaccatt

SEQ ID NO: 471509 - DNA, 33 bp, Homo sapien
acaattgtcaaggaaagttgttaactctgtggc

SEQ ID NO: 471510 - DNA, 33 bp, Homo sapien
acaattgtcaaggaaatttgttaactctgtggc

SEQ ID NO: 471511 - DNA, 33 bp, Homo sapien
attgattgtgtatgagaaaaggataataggagg

SEQ ID NO: 471512 - DNA, 33 bp, Homo sapien
attgattgtgtatgaggaaaggataataggagg

SEQ ID NO: 471513 - DNA, 33 bp, Homo sapien
atcatagttatgtacaaaacctacaaactctaa

SEQ ID NO: 471514 - DNA, 33 bp, Homo sapien
atcatagttatgtacagaacctacaaactctaa

SEQ ID NO: 471515 - DNA, 33 bp, Homo sapien
acactctaacatgatagattttgaccaacctat

SEQ ID NO: 471516 - DNA, 33 bp, Homo sapien
acactctaacatgatatattttgaccaacctat

SEQ ID NO: 471517 - DNA, 33 bp, Homo sapien
tatttaatttcctcaacttattccaaaacttgc

SEQ ID NO: 471518 - DNA, 33 bp, Homo sapien
tatttaatttcctcaatttattccaaaacttgc

SEQ ID NO: 471519 - DNA, 33 bp, Homo sapien
cactctgcacccagaacctttggtgatgtgaaa

SEQ ID NO: 471520 - DNA, 33 bp, Homo sapien
cactctgcacccagaatctttggtgatgtgaaa

SEQ ID NO: 471521 - DNA, 33 bp, Homo sapien
agaaaataatctttgccgataaaataaacatga

SEQ ID NO: 471522 - DNA, 33 bp, Homo sapien
agaaaataatctttgctgataaaataaacatga

SEQ ID NO: 471523 - DNA, 33 bp, Homo sapien
ataatagctagacttacgacaccataaaatatt

SEQ ID NO: 471524 - DNA, 33 bp, Homo sapien
ataatagctagacttatgacaccataaaatatt

SEQ ID NO: 471525 - DNA, 33 bp, Homo sapien
catattacacataaaaataattcttagcagttt

SEQ ID NO: 471526 - DNA, 33 bp, Homo sapien
catattacacataaaactaattcttagcagttt

SEQ ID NO: 471527 - DNA, 33 bp, Homo sapien
tgctgaggaaaacaatgaatattctgcagccat

SEQ ID NO: 471528 - DNA, 33 bp, Homo sapien
tgctgaggaaaacaattaatattctgcagccat

SEQ ID NO: 471529 - DNA, 33 bp, Homo sapien
acaaggcatagctatacaaggtccagaagttca

SEQ ID NO: 471530 - DNA, 33 bp, Homo sapien
acaaggcatagctatagaaggtccagaagttca

SEQ ID NO: 471531 - DNA, 33 bp, Homo sapien
aaaaagtatatgcaaacgaaccttccctatcaa

SEQ ID NO: 471532 - DNA, 33 bp, Homo sapien
aaaaagtatatgcaaatgaaccttccctatcaa

SEQ ID NO: 471533 - DNA, 33 bp, Homo sapien
aaatggcataatgatacgagtcttagagttgtg

SEQ ID NO: 471534 - DNA, 33 bp, Homo sapien
aaatggcataatgatatgagtcttagagttgtg

SEQ ID NO: 471535 - DNA, 33 bp, Homo sapien
tgtgtaaatccacaacagcaatatccacatatg

SEQ ID NO: 471536 - DNA, 33 bp, Homo sapien
tgtgtaaatccacaacggcaatatccacatatg

SEQ ID NO: 471537 - DNA, 33 bp, Homo sapien
ctcagaattggagtagaatcccagagagtcagc

SEQ ID NO: 471538 - DNA, 33 bp, Homo sapien
ctcagaattggagtagtatcccagagagtcagc

SEQ ID NO: 471539 - DNA, 33 bp, Homo sapien
agacattgtgaattcacgcacccagctgtttac

SEQ ID NO: 471540 - DNA, 33 bp, Homo sapien
agacattgtgaattcatgcacccagctgtttac

SEQ ID NO: 471541 - DNA, 33 bp, Homo sapien
tttactataaattcaaggcactaaatgccatct

SEQ ID NO: 471542 - DNA, 33 bp, Homo sapien
tttactataaattcaatgcactaaatgccatct

SEQ ID NO: 471543 - DNA, 33 bp, Homo sapien
cagaccataccaataaaatagtggataactctc

SEQ ID NO: 471544 - DNA, 33 bp, Homo sapien
cagaccataccaataacatagtggataactctc

SEQ ID NO: 471545 - DNA, 33 bp, Homo sapien
ttgttgaataatggccaagcatacttatcttcc

SEQ ID NO: 471546 - DNA, 33 bp, Homo sapien
ttgttgaataatggccgagcatacttatcttcc

SEQ ID NO: 471547 - DNA, 33 bp, Homo sapien
gatttgtattgattaacggatttagtgatacta

SEQ ID NO: 471548 - DNA, 33 bp, Homo sapien
gatttgtattgattaatggatttagtgatacta

SEQ ID NO: 471549 - DNA, 33 bp, Homo sapien
tgaatcatgaaaatgcaattaaaacacactatg

SEQ ID NO: 471550 - DNA, 33 bp, Homo sapien
tgaatcatgaaaatgcgattaaaacacactatg

SEQ ID NO: 471551 - DNA, 33 bp, Homo sapien
ttgggtgggaccatacactgaattagtaaatga

SEQ ID NO: 471552 - DNA, 33 bp, Homo sapien
ttgggtgggaccatacgctgaattagtaaatga

SEQ ID NO: 471553 - DNA, 33 bp, Homo sapien
ccacaacaagcaattccacttgtgtttcttatt

SEQ ID NO: 471554 - DNA, 33 bp, Homo sapien
ccacaacaagcaattcgacttgtgtttcttatt

SEQ ID NO: 471555 - DNA, 33 bp, Homo sapien
ttaattgagaagcataatataacacactataca

SEQ ID NO: 471556 - DNA, 33 bp, Homo sapien
ttaattgagaagcatactataacacactataca

SEQ ID NO: 471557 - DNA, 33 bp, Homo sapien
tctactatagccaaaaaaagtttactctgtcaa

SEQ ID NO: 471558 - DNA, 33 bp, Homo sapien
tctactatagccaaaagaagtttactctgtcaa

SEQ ID NO: 471559 - DNA, 33 bp, Homo sapien
ttctctatctctggcaatatggaacatgactga

SEQ ID NO: 471560 - DNA, 33 bp, Homo sapien
ttctctatctctggcagtatggaacatgactga

SEQ ID NO: 471561 - DNA, 33 bp, Homo sapien
cttctgaatttcaggcaatataaccttcaggca

SEQ ID NO: 471562 - DNA, 33 bp, Homo sapien
cttctgaatttcaggcgatataaccttcaggca

SEQ ID NO: 471563 - DNA, 33 bp, Homo sapien
ttgggtacgccagatacccataaccaattaata

SEQ ID NO: 471564 - DNA, 33 bp, Homo sapien
ttgggtacgccagatatccataaccaattaata

SEQ ID NO: 471565 - DNA, 33 bp, Homo sapien
ttaactttgaattaaaagtctgtatgttattaa

SEQ ID NO: 471566 - DNA, 33 bp, Homo sapien
ttaactttgaattaaatgtctgtatgttattaa

SEQ ID NO: 471567 - DNA, 33 bp, Homo sapien
aatgaaataaggcacacggaaaatgaaatgtca

SEQ ID NO: 471568 - DNA, 33 bp, Homo sapien
aatgaaataaggcacagggaaaatgaaatgtca

SEQ ID NO: 471569 - DNA, 33 bp, Homo sapien
gtcacaaagctattcacagacccagtactcaat

SEQ ID NO: 471570 - DNA, 33 bp, Homo sapien
gtcacaaagctattcatagacccagtactcaat

SEQ ID NO: 471571 - DNA, 33 bp, Homo sapien
aagatttgtggcaagacgtgatgaaccattgac

SEQ ID NO: 471572 - DNA, 33 bp, Homo sapien
aagatttgtggcaagatgtgatgaaccattgac

SEQ ID NO: 471573 - DNA, 33 bp, Homo sapien
gttcaaataaggcatacgacaagctgtaaccaa

SEQ ID NO: 471574 - DNA, 33 bp, Homo sapien
gttcaaataaggcatatgacaagctgtaaccaa

SEQ ID NO: 471575 - DNA, 33 bp, Homo sapien
gcacattgtacagttaagagtcacagtggcatt

SEQ ID NO: 471576 - DNA, 33 bp, Homo sapien
gcacattgtacagttaggagtcacagtggcatt

SEQ ID NO: 471577 - DNA, 33 bp, Homo sapien
aatgctaacttttagcaacttttggtgaaaacc

SEQ ID NO: 471578 - DNA, 33 bp, Homo sapien
aatgctaacttttagcgacttttggtgaaaacc

SEQ ID NO: 471579 - DNA, 33 bp, Homo sapien
atcgcaaatgtacttacatggtcttgaaaccca

SEQ ID NO: 471580 - DNA, 33 bp, Homo sapien
atcgcaaatgtacttatatggtcttgaaaccca

SEQ ID NO: 471581 - DNA, 33 bp, Homo sapien
ggataaccatatacaaatactgctttacattat

SEQ ID NO: 471582 - DNA, 33 bp, Homo sapien
ggataaccatatacaactactgctttacattat

SEQ ID NO: 471583 - DNA, 33 bp, Homo sapien
tgagtgcatttccataccgtacattcagaaaaa

SEQ ID NO: 471584 - DNA, 33 bp, Homo sapien
tgagtgcatttccatatcgtacattcagaaaaa

SEQ ID NO: 471585 - DNA, 33 bp, Homo sapien
agtggaagttatacaactgaacaaggggaagtt

SEQ ID NO: 471586 - DNA, 33 bp, Homo sapien
agtggaagttatacaattgaacaaggggaagtt

SEQ ID NO: 471587 - DNA, 33 bp, Homo sapien
gaagagcttggaaactcagatttcagttcccag

SEQ ID NO: 471588 - DNA, 33 bp, Homo sapien
gaagagcttggaaacttagatttcagttcccag

SEQ ID NO: 471589 - DNA, 33 bp, Homo sapien
tgtcatgttgttttcactcagtttttatcttca

SEQ ID NO: 471590 - DNA, 33 bp, Homo sapien
tgtcatgttgttttcattcagtttttatcttca

SEQ ID NO: 471591 - DNA, 33 bp, Homo sapien
ctcaaaagatacaaaaatattcattgctttgtt

SEQ ID NO: 471592 - DNA, 33 bp, Homo sapien
ctcaaaagatacaaaactattcattgctttgtt

SEQ ID NO: 471593 - DNA, 33 bp, Homo sapien
ttagttctgttccaaacattgtttcttagcttt

SEQ ID NO: 471594 - DNA, 33 bp, Homo sapien
ttagttctgttccaaatattgtttcttagcttt

SEQ ID NO: 471595 - DNA, 33 bp, Homo sapien
tgtaggatcttaatccagaccaatctctcctct

SEQ ID NO: 471596 - DNA, 33 bp, Homo sapien
tgtaggatcttaatccggaccaatctctcctct

SEQ ID NO: 471597 - DNA, 33 bp, Homo sapien
tgtgagaatatggtacccaaactgagatctggt

SEQ ID NO: 471598 - DNA, 33 bp, Homo sapien
tgtgagaatatggtactcaaactgagatctggt

SEQ ID NO: 471599 - DNA, 33 bp, Homo sapien
tcctcagatatttcaacagatgttaagcaagga

SEQ ID NO: 471600 - DNA, 33 bp, Homo sapien
tcctcagatatttcaatagatgttaagcaagga

SEQ ID NO: 471601 - DNA, 33 bp, Homo sapien
ctttctcatcaaattacgttttatgctaaatgt

SEQ ID NO: 471602 - DNA, 33 bp, Homo sapien
ctttctcatcaaattatgttttatgctaaatgt

SEQ ID NO: 471603 - DNA, 33 bp, Homo sapien
gcattcaaaacaaatcaaggcattttagttgag

SEQ ID NO: 471604 - DNA, 33 bp, Homo sapien
gcattcaaaacaaatcgaggcattttagttgag

SEQ ID NO: 471605 - DNA, 33 bp, Homo sapien
gcaaatggacttgaaacaaaccttagcacatac

SEQ ID NO: 471606 - DNA, 33 bp, Homo sapien
gcaaatggacttgaaagaaaccttagcacatac

SEQ ID NO: 471607 - DNA, 33 bp, Homo sapien
tgacaaacccatttacccctcaagctccagttc

SEQ ID NO: 471608 - DNA, 33 bp, Homo sapien
tgacaaacccatttactcctcaagctccagttc

SEQ ID NO: 471609 - DNA, 33 bp, Homo sapien
tctgacactgttctgacggatactgtctgattg

SEQ ID NO: 471610 - DNA, 33 bp, Homo sapien
tctgacactgttctgatggatactgtctgattg

SEQ ID NO: 471611 - DNA, 33 bp, Homo sapien
aaactggggccaaagcaaaggctcgaaaatcaa

SEQ ID NO: 471612 - DNA, 33 bp, Homo sapien
aaactggggccaaagcgaaggctcgaaaatcaa

SEQ ID NO: 471613 - DNA, 33 bp, Homo sapien
gcttacccaagccaaagcaacgttgcacggatt

SEQ ID NO: 471614 - DNA, 33 bp, Homo sapien
gcttacccaagccaaatcaacgttgcacggatt

SEQ ID NO: 471615 - DNA, 33 bp, Homo sapien
tcatatcacacaatctcaaaagaaaagatacat

SEQ ID NO: 471616 - DNA, 33 bp, Homo sapien
tcatatcacacaatctgaaaagaaaagatacat

SEQ ID NO: 471617 - DNA, 33 bp, Homo sapien
gtatacacagtggttaagaaaataggcagaaaa

SEQ ID NO: 471618 - DNA, 33 bp, Homo sapien
gtatacacagtggttaggaaaataggcagaaaa

SEQ ID NO: 471619 - DNA, 33 bp, Homo sapien
atcataaaatgggaacaaacagagatggataaa

SEQ ID NO: 471620 - DNA, 33 bp, Homo sapien
atcataaaatgggaaccaacagagatggataaa

SEQ ID NO: 471621 - DNA, 33 bp, Homo sapien
aaagtatttctgctcacaagaggactctgtgtc

SEQ ID NO: 471622 - DNA, 33 bp, Homo sapien
aaagtatttctgctcataagaggactctgtgtc

SEQ ID NO: 471623 - DNA, 33 bp, Homo sapien
tggaggccgaggttacaatgagcaaacttaaca

SEQ ID NO: 471624 - DNA, 33 bp, Homo sapien
tggaggccgaggttacgatgagcaaacttaaca

SEQ ID NO: 471625 - DNA, 33 bp, Homo sapien
ccaaatcactcactaactggcaagtagtaatag

SEQ ID NO: 471626 - DNA, 33 bp, Homo sapien
ccaaatcactcactaattggcaagtagtaatag

SEQ ID NO: 471627 - DNA, 33 bp, Homo sapien
gatggaaatctgctccaaaaatgagtaagatgt

SEQ ID NO: 471628 - DNA, 33 bp, Homo sapien
gatggaaatctgctccgaaaatgagtaagatgt

SEQ ID NO: 471629 - DNA, 33 bp, Homo sapien
tttttatatctcaaaaagctagcaaagttccta

SEQ ID NO: 471630 - DNA, 33 bp, Homo sapien
tttttatatctcaaaaggctagcaaagttccta

SEQ ID NO: 471631 - DNA, 33 bp, Homo sapien
tgtccacctggatccacggctagaagctaacct

SEQ ID NO: 471632 - DNA, 33 bp, Homo sapien
tgtccacctggatccatggctagaagctaacct

SEQ ID NO: 471633 - DNA, 33 bp, Homo sapien
agtctaagtattatgacgtagaagaaaaccatg

SEQ ID NO: 471634 - DNA, 33 bp, Homo sapien
agtctaagtattatgatgtagaagaaaaccatg

SEQ ID NO: 471635 - DNA, 33 bp, Homo sapien
acatccatatatccaactgaagtaaaaaaccag

SEQ ID NO: 471636 - DNA, 33 bp, Homo sapien
acatccatatatccaattgaagtaaaaaaccag

SEQ ID NO: 471637 - DNA, 33 bp, Homo sapien
ttttctgcctttgcaacagtaatgactctatgc

SEQ ID NO: 471638 - DNA, 33 bp, Homo sapien
ttttctgcctttgcaatagtaatgactctatgc

SEQ ID NO: 471639 - DNA, 33 bp, Homo sapien
gatgaagaagccaggacgaattttgaatctttc

SEQ ID NO: 471640 - DNA, 33 bp, Homo sapien
gatgaagaagccaggatgaattttgaatctttc

SEQ ID NO: 471641 - DNA, 33 bp, Homo sapien
caggattagtagctacagcacatttaataaaga

SEQ ID NO: 471642 - DNA, 33 bp, Homo sapien
caggattagtagctacggcacatttaataaaga

SEQ ID NO: 471643 - DNA, 33 bp, Homo sapien
aagcttcttggccaacacatgacagaaatagac

SEQ ID NO: 471644 - DNA, 33 bp, Homo sapien
aagcttcttggccaacgcatgacagaaatagac

SEQ ID NO: 471645 - DNA, 33 bp, Homo sapien
cctaaaggctgattctaaactttctgtcttccg

SEQ ID NO: 471646 - DNA, 33 bp, Homo sapien
cctaaaggctgattcttaactttctgtcttccg

SEQ ID NO: 471647 - DNA, 33 bp, Homo sapien
aagagacaaagagagacaaagtagtcaaatgac

SEQ ID NO: 471648 - DNA, 33 bp, Homo sapien
aagagacaaagagagataaagtagtcaaatgac

SEQ ID NO: 471649 - DNA, 33 bp, Homo sapien
tagttataaaccaatacggcaagtgcttcatag

SEQ ID NO: 471650 - DNA, 33 bp, Homo sapien
tagttataaaccaatatggcaagtgcttcatag

SEQ ID NO: 471651 - DNA, 33 bp, Homo sapien
tacttccacaatggaaatgggacagagataaat

SEQ ID NO: 471652 - DNA, 33 bp, Homo sapien
tacttccacaatggaagtgggacagagataaat

SEQ ID NO: 471653 - DNA, 33 bp, Homo sapien
tctgtttccaagtataccagcagagaatataaa

SEQ ID NO: 471654 - DNA, 33 bp, Homo sapien
tctgtttccaagtatagcagcagagaatataaa

SEQ ID NO: 471655 - DNA, 33 bp, Homo sapien
aaaatctactcctcataataatttatccctaga

SEQ ID NO: 471656 - DNA, 33 bp, Homo sapien
aaaatctactcctcattataatttatccctaga

SEQ ID NO: 471657 - DNA, 33 bp, Homo sapien
cacattttaaccgaaaataagaatatgtaatct

SEQ ID NO: 471658 - DNA, 33 bp, Homo sapien
cacattttaaccgaaagtaagaatatgtaatct

SEQ ID NO: 471659 - DNA, 33 bp, Homo sapien
tgtagagcttaaactcaaaaagccctcagaact

SEQ ID NO: 471660 - DNA, 33 bp, Homo sapien
tgtagagcttaaactcgaaaagccctcagaact

SEQ ID NO: 471661 - DNA, 33 bp, Homo sapien
gaagaggtgttttgcaagcctatcaagagggct

SEQ ID NO: 471662 - DNA, 33 bp, Homo sapien
gaagaggtgttttgcaggcctatcaagagggct

SEQ ID NO: 471663 - DNA, 33 bp, Homo sapien
ctctttaaaattcccacggccttactggttgac

SEQ ID NO: 471664 - DNA, 33 bp, Homo sapien
ctctttaaaattcccatggccttactggttgac

SEQ ID NO: 471665 - DNA, 33 bp, Homo sapien
tagatcatagggccaactgaagagaaaatgaga

SEQ ID NO: 471666 - DNA, 33 bp, Homo sapien
tagatcatagggccaattgaagagaaaatgaga

SEQ ID NO: 471667 - DNA, 33 bp, Homo sapien
tccattcttctgtacaaagtccatcttttcggc

SEQ ID NO: 471668 - DNA, 33 bp, Homo sapien
tccattcttctgtacacagtccatcttttcggc

SEQ ID NO: 471669 - DNA, 33 bp, Homo sapien
gctaaatttttagttaagaactataccattata

SEQ ID NO: 471670 - DNA, 33 bp, Homo sapien
gctaaatttttagttaggaactataccattata

SEQ ID NO: 471671 - DNA, 33 bp, Homo sapien
ggctttgttgcatgccgaagtttaatatgaata

SEQ ID NO: 471672 - DNA, 33 bp, Homo sapien
ggctttgttgcatgcctaagtttaatatgaata

SEQ ID NO: 471673 - DNA, 33 bp, Homo sapien
taagttgacattactacaaaccaactagacccc

SEQ ID NO: 471674 - DNA, 33 bp, Homo sapien
taagttgacattactataaaccaactagacccc

SEQ ID NO: 471675 - DNA, 33 bp, Homo sapien
tggtgggagtttaagaaaggctgtcaaagcatt

SEQ ID NO: 471676 - DNA, 33 bp, Homo sapien
tggtgggagtttaagagaggctgtcaaagcatt

SEQ ID NO: 471677 - DNA, 33 bp, Homo sapien
acagtgtctttcataggatcaatattcaataat

SEQ ID NO: 471678 - DNA, 33 bp, Homo sapien
acagtgtctttcatagtatcaatattcaataat

SEQ ID NO: 471679 - DNA, 33 bp, Homo sapien
tcttgaaagcctttcccaacatttttgtatgac

SEQ ID NO: 471680 - DNA, 33 bp, Homo sapien
tcttgaaagcctttcctaacatttttgtatgac

SEQ ID NO: 471681 - DNA, 33 bp, Homo sapien
attacgttaacaaaacaattcatacactaacaa

SEQ ID NO: 471682 - DNA, 33 bp, Homo sapien
attacgttaacaaaactattcatacactaacaa

SEQ ID NO: 471683 - DNA, 33 bp, Homo sapien
ataatatggatcaagaacttgaagcatgattct

SEQ ID NO: 471684 - DNA, 33 bp, Homo sapien
ataatatggatcaagagcttgaagcatgattct

SEQ ID NO: 471685 - DNA, 33 bp, Homo sapien
ctgataaacaaccccacagcgtaatcataacaa

SEQ ID NO: 471686 - DNA, 33 bp, Homo sapien
ctgataaacaaccccatagcgtaatcataacaa

SEQ ID NO: 471687 - DNA, 33 bp, Homo sapien
aattccttggcttaagaaactgttctgccagtt

SEQ ID NO: 471688 - DNA, 33 bp, Homo sapien
aattccttggcttaagtaactgttctgccagtt

SEQ ID NO: 471689 - DNA, 33 bp, Homo sapien
aatcattttcttcaacacctaggaaagaaatcc

SEQ ID NO: 471690 - DNA, 33 bp, Homo sapien
aatcattttcttcaactcctaggaaagaaatcc

SEQ ID NO: 471691 - DNA, 33 bp, Homo sapien
gtggcataaaggttcagattattttagtctaca

SEQ ID NO: 471692 - DNA, 33 bp, Homo sapien
gtggcataaaggttcatattattttagtctaca

SEQ ID NO: 471693 - DNA, 33 bp, Homo sapien
ccctaactaaactagaacctgagtatacagata

SEQ ID NO: 471694 - DNA, 33 bp, Homo sapien
ccctaactaaactagaccctgagtatacagata

SEQ ID NO: 471695 - DNA, 33 bp, Homo sapien
taactgtcaggtactacgcttggttctttatgt

SEQ ID NO: 471696 - DNA, 33 bp, Homo sapien
taactgtcaggtactatgcttggttctttatgt

SEQ ID NO: 471697 - DNA, 33 bp, Homo sapien
gtaaactgagacttacagaaagccagcttaaat

SEQ ID NO: 471698 - DNA, 33 bp, Homo sapien
gtaaactgagacttaccgaaagccagcttaaat

SEQ ID NO: 471699 - DNA, 33 bp, Homo sapien
tcttgcataagtaagaaggttaaacagataaag

SEQ ID NO: 471700 - DNA, 33 bp, Homo sapien
tcttgcataagtaagagggttaaacagataaag

SEQ ID NO: 471701 - DNA, 33 bp, Homo sapien
aatcagaccaatacaacgtacaggggacaaaat

SEQ ID NO: 471702 - DNA, 33 bp, Homo sapien
aatcagaccaatacaatgtacaggggacaaaat

SEQ ID NO: 471703 - DNA, 33 bp, Homo sapien
cagacaaattcagatacggcaaaaggatattgg

SEQ ID NO: 471704 - DNA, 33 bp, Homo sapien
cagacaaattcagatatggcaaaaggatattgg

SEQ ID NO: 471705 - DNA, 33 bp, Homo sapien
gcacctaacttccagggagtatgttttgtctct

SEQ ID NO: 471706 - DNA, 33 bp, Homo sapien
gcacctaacttccaggtagtatgttttgtctct

SEQ ID NO: 471707 - DNA, 33 bp, Homo sapien
cttctctcactagaaacaattgctaaaagttct

SEQ ID NO: 471708 - DNA, 33 bp, Homo sapien
cttctctcactagaaataattgctaaaagttct

SEQ ID NO: 471709 - DNA, 33 bp, Homo sapien
gaatcctgtagcagtaacagaatgtaacaaaaa

SEQ ID NO: 471710 - DNA, 33 bp, Homo sapien
gaatcctgtagcagtatcagaatgtaacaaaaa

SEQ ID NO: 471711 - DNA, 33 bp, Homo sapien
acttctgctttttccacacaacatgcacagata

SEQ ID NO: 471712 - DNA, 33 bp, Homo sapien
acttctgctttttccatacaacatgcacagata

SEQ ID NO: 471713 - DNA, 33 bp, Homo sapien
tatacacgtgtccagaccttcagaattaccagc

SEQ ID NO: 471714 - DNA, 33 bp, Homo sapien
tatacacgtgtccagatcttcagaattaccagc

SEQ ID NO: 471715 - DNA, 33 bp, Homo sapien
gtgttcttacttgctacgcccagcaatcttatg

SEQ ID NO: 471716 - DNA, 33 bp, Homo sapien
gtgttcttacttgctatgcccagcaatcttatg

SEQ ID NO: 471717 - DNA, 33 bp, Homo sapien
ataaatatagtactcagtcagaagataatcttg

SEQ ID NO: 471718 - DNA, 33 bp, Homo sapien
ataaatatagtactcattcagaagataatcttg

SEQ ID NO: 471719 - DNA, 33 bp, Homo sapien
agtaagtggttagcagaaataacatctaatcca

SEQ ID NO: 471720 - DNA, 33 bp, Homo sapien
agtaagtggttagcaggaataacatctaatcca

SEQ ID NO: 471721 - DNA, 33 bp, Homo sapien
tctatgaatctctcaaattatgtgacacggtga

SEQ ID NO: 471722 - DNA, 33 bp, Homo sapien
tctatgaatctctcaagttatgtgacacggtga

SEQ ID NO: 471723 - DNA, 33 bp, Homo sapien
gggagagaagagatgcacgtaaattacttgaat

SEQ ID NO: 471724 - DNA, 33 bp, Homo sapien
gggagagaagagatgcgcgtaaattacttgaat

SEQ ID NO: 471725 - DNA, 33 bp, Homo sapien
gttgtttggtaatgcacggatttttaattttta

SEQ ID NO: 471726 - DNA, 33 bp, Homo sapien
gttgtttggtaatgcatggatttttaattttta

SEQ ID NO: 471727 - DNA, 33 bp, Homo sapien
ccaaaggacataagaaatgcacatcagttgttt

SEQ ID NO: 471728 - DNA, 33 bp, Homo sapien
ccaaaggacataagaagtgcacatcagttgttt

SEQ ID NO: 471729 - DNA, 33 bp, Homo sapien
atgttcagataaagccaaaggatgcatatttca

SEQ ID NO: 471730 - DNA, 33 bp, Homo sapien
atgttcagataaagcctaaggatgcatatttca

SEQ ID NO: 471731 - DNA, 33 bp, Homo sapien
tgcctgctctaaaaacccacactaatgagaaaa

SEQ ID NO: 471732 - DNA, 33 bp, Homo sapien
tgcctgctctaaaaactcacactaatgagaaaa

SEQ ID NO: 471733 - DNA, 33 bp, Homo sapien
cagctttgcttctggaaaaagtatatgctttgt

SEQ ID NO: 471734 - DNA, 33 bp, Homo sapien
cagctttgcttctggagaaagtatatgctttgt

SEQ ID NO: 471735 - DNA, 33 bp, Homo sapien
acattccttccaataaacagctataattccaat

SEQ ID NO: 471736 - DNA, 33 bp, Homo sapien
acattccttccaataagcagctataattccaat

SEQ ID NO: 471737 - DNA, 33 bp, Homo sapien
accgcagtaaagctacccatatttgtttctgct

SEQ ID NO: 471738 - DNA, 33 bp, Homo sapien
accgcagtaaagctactcatatttgtttctgct

SEQ ID NO: 471739 - DNA, 33 bp, Homo sapien
gcaagctaagcattccagaacccgctgcaatct

SEQ ID NO: 471740 - DNA, 33 bp, Homo sapien
gcaagctaagcattccggaacccgctgcaatct

SEQ ID NO: 471741 - DNA, 33 bp, Homo sapien
agttgagagtaagaatcagtgcaatgtatgtac

SEQ ID NO: 471742 - DNA, 33 bp, Homo sapien
agttgagagtaagaatgagtgcaatgtatgtac

SEQ ID NO: 471743 - DNA, 33 bp, Homo sapien
cctcttttatacgagacatgaaacaaatatgag

SEQ ID NO: 471744 - DNA, 33 bp, Homo sapien
cctcttttatacgagagatgaaacaaatatgag

SEQ ID NO: 471745 - DNA, 33 bp, Homo sapien
aatgttttcactcaacagtattgaattttaaga

SEQ ID NO: 471746 - DNA, 33 bp, Homo sapien
aatgttttcactcaaccgtattgaattttaaga

SEQ ID NO: 471747 - DNA, 33 bp, Homo sapien
gttcctaaagtctcaagatcattaagagagggc

SEQ ID NO: 471748 - DNA, 33 bp, Homo sapien
gttcctaaagtctcaatatcattaagagagggc

SEQ ID NO: 471749 - DNA, 33 bp, Homo sapien
ctgtctctatttcaggcaagactggtcaatcct

SEQ ID NO: 471750 - DNA, 33 bp, Homo sapien
ctgtctctatttcagggaagactggtcaatcct

SEQ ID NO: 471751 - DNA, 33 bp, Homo sapien
gattttggcatatgaacttagattccctcatct

SEQ ID NO: 471752 - DNA, 33 bp, Homo sapien
gattttggcatatgaatttagattccctcatct

SEQ ID NO: 471753 - DNA, 33 bp, Homo sapien
tgatcagctttggcccagagtaattcagggaat

SEQ ID NO: 471754 - DNA, 33 bp, Homo sapien
tgatcagctttggcccggagtaattcagggaat

SEQ ID NO: 471755 - DNA, 33 bp, Homo sapien
ctgacttaggtgatacagaaacactgtggtgat

SEQ ID NO: 471756 - DNA, 33 bp, Homo sapien
ctgacttaggtgatacggaaacactgtggtgat

SEQ ID NO: 471757 - DNA, 33 bp, Homo sapien
cattttcacgtagctacaggtagaaagtccctt

SEQ ID NO: 471758 - DNA, 33 bp, Homo sapien
cattttcacgtagctataggtagaaagtccctt

SEQ ID NO: 471759 - DNA, 33 bp, Homo sapien
atccaaattcagttgccgaaggctcattatgca

SEQ ID NO: 471760 - DNA, 33 bp, Homo sapien
atccaaattcagttgctgaaggctcattatgca

SEQ ID NO: 471761 - DNA, 33 bp, Homo sapien
ccactctctccttacactcaggtcatggaagga

SEQ ID NO: 471762 - DNA, 33 bp, Homo sapien
ccactctctccttacattcaggtcatggaagga

SEQ ID NO: 471763 - DNA, 33 bp, Homo sapien
gtgggatagtatcagacaggaagtaaaggttac

SEQ ID NO: 471764 - DNA, 33 bp, Homo sapien
gtgggatagtatcagagaggaagtaaaggttac

SEQ ID NO: 471765 - DNA, 33 bp, Homo sapien
tgaggttcaccttctagacggtcttcagtcatt

SEQ ID NO: 471766 - DNA, 33 bp, Homo sapien
tgaggttcaccttctatacggtcttcagtcatt

SEQ ID NO: 471767 - DNA, 33 bp, Homo sapien
ccttgatattttgagtcaaaaagtaacttcggt

SEQ ID NO: 471768 - DNA, 33 bp, Homo sapien
ccttgatattttgagtgaaaaagtaacttcggt

SEQ ID NO: 471769 - DNA, 33 bp, Homo sapien
tccatggaaacagacactcttcatagcaaattg

SEQ ID NO: 471770 - DNA, 33 bp, Homo sapien
tccatggaaacagacattcttcatagcaaattg

SEQ ID NO: 471771 - DNA, 33 bp, Homo sapien
aaaaacaggaccagagaaagttacacagaaggg

SEQ ID NO: 471772 - DNA, 33 bp, Homo sapien
aaaaacaggaccagaggaagttacacagaaggg

SEQ ID NO: 471773 - DNA, 33 bp, Homo sapien
aacacaagtcagtgccaacatatggatttatat

SEQ ID NO: 471774 - DNA, 33 bp, Homo sapien
aacacaagtcagtgccgacatatggatttatat

SEQ ID NO: 471775 - DNA, 33 bp, Homo sapien
aacattccagatgaacggtcacttttgcttcat

SEQ ID NO: 471776 - DNA, 33 bp, Homo sapien
aacattccagatgaactgtcacttttgcttcat

SEQ ID NO: 471777 - DNA, 33 bp, Homo sapien
tacaaggaagaccctacgtgtccatgaagaaat

SEQ ID NO: 471778 - DNA, 33 bp, Homo sapien
tacaaggaagaccctatgtgtccatgaagaaat

SEQ ID NO: 471779 - DNA, 33 bp, Homo sapien
gaaagctgttacctctcactttatataggagca

SEQ ID NO: 471780 - DNA, 33 bp, Homo sapien
gaaagctgttacctcttactttatataggagca

SEQ ID NO: 471781 - DNA, 33 bp, Homo sapien
agcctcttaagaatcactgaggtccgataactt

SEQ ID NO: 471782 - DNA, 33 bp, Homo sapien
agcctcttaagaatcattgaggtccgataactt

SEQ ID NO: 471783 - DNA, 33 bp, Homo sapien
gtaccctgtgtattccagaacatttattttact

SEQ ID NO: 471784 - DNA, 33 bp, Homo sapien
gtaccctgtgtattccggaacatttattttact

SEQ ID NO: 471785 - DNA, 33 bp, Homo sapien
acacaagtactggataggagtcttttattacta

SEQ ID NO: 471786 - DNA, 33 bp, Homo sapien
acacaagtactggatatgagtcttttattacta

SEQ ID NO: 471787 - DNA, 33 bp, Homo sapien
taggaggaaagattgacgtattgtttttccctg

SEQ ID NO: 471788 - DNA, 33 bp, Homo sapien
taggaggaaagattgaggtattgtttttccctg

SEQ ID NO: 471789 - DNA, 33 bp, Homo sapien
agaactcaagacagaaggagctaggttttatgg

SEQ ID NO: 471790 - DNA, 33 bp, Homo sapien
agaactcaagacagaatgagctaggttttatgg

SEQ ID NO: 471791 - DNA, 33 bp, Homo sapien
gaaattcccaaaggtcgcaagatggtagatggg

SEQ ID NO: 471792 - DNA, 33 bp, Homo sapien
gaaattcccaaaggtctcaagatggtagatggg

SEQ ID NO: 471793 - DNA, 33 bp, Homo sapien
tagaactgctctgacactaggatgaatagagac

SEQ ID NO: 471794 - DNA, 33 bp, Homo sapien
tagaactgctctgacagtaggatgaatagagac

SEQ ID NO: 471795 - DNA, 33 bp, Homo sapien
tgtcttgtggcaatgagaataatctatattctg

SEQ ID NO: 471796 - DNA, 33 bp, Homo sapien
tgtcttgtggcaatgataataatctatattctg

SEQ ID NO: 471797 - DNA, 33 bp, Homo sapien
aatgaagggacagctacgaagaggacatgaaag

SEQ ID NO: 471798 - DNA, 33 bp, Homo sapien
aatgaagggacagctatgaagaggacatgaaag

SEQ ID NO: 471799 - DNA, 33 bp, Homo sapien
atcttttcacccaataacctcatggaatagtga

SEQ ID NO: 471800 - DNA, 33 bp, Homo sapien
atcttttcacccaatagcctcatggaatagtga

SEQ ID NO: 471801 - DNA, 33 bp, Homo sapien
ttcaccatcatattccaattttcctcttaagcc

SEQ ID NO: 471802 - DNA, 33 bp, Homo sapien
ttcaccatcatattccgattttcctcttaagcc

SEQ ID NO: 471803 - DNA, 33 bp, Homo sapien
tccccttgctcttcaccgcatggattcctccca

SEQ ID NO: 471804 - DNA, 33 bp, Homo sapien
tccccttgctcttcactgcatggattcctccca

SEQ ID NO: 471805 - DNA, 33 bp, Homo sapien
acaccctattgggcaaataaaagatggcttgat

SEQ ID NO: 471806 - DNA, 33 bp, Homo sapien
acaccctattgggcaactaaaagatggcttgat

SEQ ID NO: 471807 - DNA, 33 bp, Homo sapien
ttagcaccccagagaacgctcagagagtttaag

SEQ ID NO: 471808 - DNA, 33 bp, Homo sapien
ttagcaccccagagaatgctcagagagtttaag

SEQ ID NO: 471809 - DNA, 33 bp, Homo sapien
tgaccatctactcaagactaaccacttttcata

SEQ ID NO: 471810 - DNA, 33 bp, Homo sapien
tgaccatctactcaaggctaaccacttttcata

SEQ ID NO: 471811 - DNA, 33 bp, Homo sapien
aataagataaaagagaagcaaggaattaataag

SEQ ID NO: 471812 - DNA, 33 bp, Homo sapien
aataagataaaagagaggcaaggaattaataag

SEQ ID NO: 471813 - DNA, 33 bp, Homo sapien
atctgtctttcaatgcactggttcattttttat

SEQ ID NO: 471814 - DNA, 33 bp, Homo sapien
atctgtctttcaatgcgctggttcattttttat

SEQ ID NO: 471815 - DNA, 33 bp, Homo sapien
aaccagggaactgaccccaactatgtctagtcc

SEQ ID NO: 471816 - DNA, 33 bp, Homo sapien
aaccagggaactgacctcaactatgtctagtcc

SEQ ID NO: 471817 - DNA, 33 bp, Homo sapien
agacaattctagcatacgacttccaactcatcc

SEQ ID NO: 471818 - DNA, 33 bp, Homo sapien
agacaattctagcatatgacttccaactcatcc

SEQ ID NO: 471819 - DNA, 33 bp, Homo sapien
ctatcaaccttgttcaatatgttctctgctggc

SEQ ID NO: 471820 - DNA, 33 bp, Homo sapien
ctatcaaccttgttcactatgttctctgctggc

SEQ ID NO: 471821 - DNA, 33 bp, Homo sapien
caaacaagcaaacaaacgcagtatcaagatcac

SEQ ID NO: 471822 - DNA, 33 bp, Homo sapien
caaacaagcaaacaaatgcagtatcaagatcac

SEQ ID NO: 471823 - DNA, 33 bp, Homo sapien
gacacatataactacacgactgcaatgtttatt

SEQ ID NO: 471824 - DNA, 33 bp, Homo sapien
gacacatataactacaggactgcaatgtttatt

SEQ ID NO: 471825 - DNA, 33 bp, Homo sapien
aagatgaagaactaaaacttggacaagtatgat

SEQ ID NO: 471826 - DNA, 33 bp, Homo sapien
aagatgaagaactaaaccttggacaagtatgat

SEQ ID NO: 471827 - DNA, 33 bp, Homo sapien
cccattcttcccataaaaagccataacttcatc

SEQ ID NO: 471828 - DNA, 33 bp, Homo sapien
cccattcttcccataagaagccataacttcatc

SEQ ID NO: 471829 - DNA, 33 bp, Homo sapien
agatcaaaaatgtgacagcccctaacactttcc

SEQ ID NO: 471830 - DNA, 33 bp, Homo sapien
agatcaaaaatgtgacggcccctaacactttcc

SEQ ID NO: 471831 - DNA, 33 bp, Homo sapien
agttaaatgacacaggaatgtgaattgctgatt

SEQ ID NO: 471832 - DNA, 33 bp, Homo sapien
agttaaatgacacagggatgtgaattgctgatt

SEQ ID NO: 471833 - DNA, 33 bp, Homo sapien
acggaacagaatgtaccccaagctaattggtgt

SEQ ID NO: 471834 - DNA, 33 bp, Homo sapien
acggaacagaatgtactccaagctaattggtgt

SEQ ID NO: 471835 - DNA, 33 bp, Homo sapien
accaccagaatttcctgacagtgggaaaagacc

SEQ ID NO: 471836 - DNA, 33 bp, Homo sapien
accaccagaatttccttacagtgggaaaagacc

SEQ ID NO: 471837 - DNA, 33 bp, Homo sapien
tcttttaggctatgcaacaatggcttatataaa

SEQ ID NO: 471838 - DNA, 33 bp, Homo sapien
tcttttaggctatgcagcaatggcttatataaa

SEQ ID NO: 471839 - DNA, 33 bp, Homo sapien
gtgctgtcatctttaaaagttctatcgtattaa

SEQ ID NO: 471840 - DNA, 33 bp, Homo sapien
gtgctgtcatctttaacagttctatcgtattaa

SEQ ID NO: 471841 - DNA, 33 bp, Homo sapien
ggagttccaggtagcccgacacatctgcatgac

SEQ ID NO: 471842 - DNA, 33 bp, Homo sapien
ggagttccaggtagcctgacacatctgcatgac

SEQ ID NO: 471843 - DNA, 33 bp, Homo sapien
gcttatctgaacttctcacttttcaaggtggca

SEQ ID NO: 471844 - DNA, 33 bp, Homo sapien
gcttatctgaacttcttacttttcaaggtggca

SEQ ID NO: 471845 - DNA, 33 bp, Homo sapien
tcaaccagcaaggacgacaaggacaggctctta

SEQ ID NO: 471846 - DNA, 33 bp, Homo sapien
tcaaccagcaaggacggcaaggacaggctctta

SEQ ID NO: 471847 - DNA, 33 bp, Homo sapien
gaggaaaaagctggaagtacagagataaacaca

SEQ ID NO: 471848 - DNA, 33 bp, Homo sapien
gaggaaaaagctggaattacagagataaacaca

SEQ ID NO: 471849 - DNA, 33 bp, Homo sapien
caagtagagagaagagcacgtgtggcagtacag

SEQ ID NO: 471850 - DNA, 33 bp, Homo sapien
caagtagagagaagagtacgtgtggcagtacag

SEQ ID NO: 471851 - DNA, 33 bp, Homo sapien
ggtagaaaaagcagtgaagagcatggcaaaagt

SEQ ID NO: 471852 - DNA, 33 bp, Homo sapien
ggtagaaaaagcagtggagagcatggcaaaagt

SEQ ID NO: 471853 - DNA, 33 bp, Homo sapien
cttcccactgagttaaacttgttctaatctatc

SEQ ID NO: 471854 - DNA, 33 bp, Homo sapien
cttcccactgagttaagcttgttctaatctatc

SEQ ID NO: 471855 - DNA, 33 bp, Homo sapien
acaagagtaaagaatgacatgtaattaagatat

SEQ ID NO: 471856 - DNA, 33 bp, Homo sapien
acaagagtaaagaatggcatgtaattaagatat

SEQ ID NO: 471857 - DNA, 33 bp, Homo sapien
gctctattactttcctcagcaaaaagaagttat

SEQ ID NO: 471858 - DNA, 33 bp, Homo sapien
gctctattactttccttagcaaaaagaagttat

SEQ ID NO: 471859 - DNA, 33 bp, Homo sapien
tgaccgaataactccaatctgaggtagaatcta

SEQ ID NO: 471860 - DNA, 33 bp, Homo sapien
tgaccgaataactccagtctgaggtagaatcta

SEQ ID NO: 471861 - DNA, 33 bp, Homo sapien
aaacatgactaagagaaaagagagcaagtgagg

SEQ ID NO: 471862 - DNA, 33 bp, Homo sapien
aaacatgactaagagacaagagagcaagtgagg

SEQ ID NO: 471863 - DNA, 33 bp, Homo sapien
agaaaggaatgaacatcaaagagagaggtcaga

SEQ ID NO: 471864 - DNA, 33 bp, Homo sapien
agaaaggaatgaacatgaaagagagaggtcaga

SEQ ID NO: 471865 - DNA, 33 bp, Homo sapien
tttaatagagccgtgagagagtcaattcttgcc

SEQ ID NO: 471866 - DNA, 33 bp, Homo sapien
tttaatagagccgtgatagagtcaattcttgcc

SEQ ID NO: 471867 - DNA, 33 bp, Homo sapien
ttatacaagacagagggcatttcatggtagaag

SEQ ID NO: 471868 - DNA, 33 bp, Homo sapien
ttatacaagacagaggtcatttcatggtagaag

SEQ ID NO: 471869 - DNA, 33 bp, Homo sapien
ggctagaaggatatgccccgtgggtaagaatgg

SEQ ID NO: 471870 - DNA, 33 bp, Homo sapien
ggctagaaggatatgctccgtgggtaagaatgg

SEQ ID NO: 471871 - DNA, 33 bp, Homo sapien
cttgggttggttggaaacatctgacggtggcta

SEQ ID NO: 471872 - DNA, 33 bp, Homo sapien
cttgggttggttggaagcatctgacggtggcta

SEQ ID NO: 471873 - DNA, 33 bp, Homo sapien
ttctgggatataaaaccgtgcttttcacatggt

SEQ ID NO: 471874 - DNA, 33 bp, Homo sapien
ttctgggatataaaactgtgcttttcacatggt

SEQ ID NO: 471875 - DNA, 33 bp, Homo sapien
cttgggtctccgctaacaggggatcaaatccat

SEQ ID NO: 471876 - DNA, 33 bp, Homo sapien
cttgggtctccgctaagaggggatcaaatccat

SEQ ID NO: 471877 - DNA, 33 bp, Homo sapien
agagaatctatgtacaccagagaacaatcttta

SEQ ID NO: 471878 - DNA, 33 bp, Homo sapien
agagaatctatgtacagcagagaacaatcttta

SEQ ID NO: 471879 - DNA, 33 bp, Homo sapien
agagcattttaacaagactcaggtagtggtact

SEQ ID NO: 471880 - DNA, 33 bp, Homo sapien
agagcattttaacaagtctcaggtagtggtact

SEQ ID NO: 471881 - DNA, 33 bp, Homo sapien
cctcttcagccgtttccacctgagtggctttga

SEQ ID NO: 471882 - DNA, 33 bp, Homo sapien
cctcttcagccgtttctacctgagtggctttga

SEQ ID NO: 471883 - DNA, 33 bp, Homo sapien
agcactggctgttgtaacctacattttgttgta

SEQ ID NO: 471884 - DNA, 33 bp, Homo sapien
agcactggctgttgtatcctacattttgttgta

SEQ ID NO: 471885 - DNA, 33 bp, Homo sapien
actctgtggacaatgacgaatggtgggggtaac

SEQ ID NO: 471886 - DNA, 33 bp, Homo sapien
actctgtggacaatgatgaatggtgggggtaac

SEQ ID NO: 471887 - DNA, 33 bp, Homo sapien
agcatgtggcaaataacagtgaggattcaaaac

SEQ ID NO: 471888 - DNA, 33 bp, Homo sapien
agcatgtggcaaataagagtgaggattcaaaac

SEQ ID NO: 471889 - DNA, 33 bp, Homo sapien
tacaacaagttgacaacagagccaagtctcttg

SEQ ID NO: 471890 - DNA, 33 bp, Homo sapien
tacaacaagttgacaatagagccaagtctcttg

SEQ ID NO: 471891 - DNA, 33 bp, Homo sapien
acgtcaacccatgatgccagctcaatttgataa

SEQ ID NO: 471892 - DNA, 33 bp, Homo sapien
acgtcaacccatgatgtcagctcaatttgataa

SEQ ID NO: 471893 - DNA, 33 bp, Homo sapien
gcaggtaagatgttcagagagctgggtaagtta

SEQ ID NO: 471894 - DNA, 33 bp, Homo sapien
gcaggtaagatgttcatagagctgggtaagtta

SEQ ID NO: 471895 - DNA, 33 bp, Homo sapien
tgctaaaatattgctgaaaaaaatggttttaaa

SEQ ID NO: 471896 - DNA, 33 bp, Homo sapien
tgctaaaatattgctggaaaaaatggttttaaa

SEQ ID NO: 471897 - DNA, 33 bp, Homo sapien
atatcctgttgagaaaaaaagtgtcaaaattct

SEQ ID NO: 471898 - DNA, 33 bp, Homo sapien
atatcctgttgagaaagaaagtgtcaaaattct

SEQ ID NO: 471899 - DNA, 33 bp, Homo sapien
taactagtatctggtccatagtaggtcctcgat

SEQ ID NO: 471900 - DNA, 33 bp, Homo sapien
taactagtatctggtctatagtaggtcctcgat

SEQ ID NO: 471901 - DNA, 33 bp, Homo sapien
ggtttaagagttgtctaaaccagtttcttgtta

SEQ ID NO: 471902 - DNA, 33 bp, Homo sapien
ggtttaagagttgtctgaaccagtttcttgtta

SEQ ID NO: 471903 - DNA, 33 bp, Homo sapien
tgtcaaatatcttccacgtgacactcactgggg

SEQ ID NO: 471904 - DNA, 33 bp, Homo sapien
tgtcaaatatcttccatgtgacactcactgggg

SEQ ID NO: 471905 - DNA, 33 bp, Homo sapien
gaaggtagagaacgggaccaaagctatacgaac

SEQ ID NO: 471906 - DNA, 33 bp, Homo sapien
gaaggtagagaacggggccaaagctatacgaac

SEQ ID NO: 471907 - DNA, 33 bp, Homo sapien
caattattggctgaataagtaaatatctgaaag

SEQ ID NO: 471908 - DNA, 33 bp, Homo sapien
caattattggctgaatgagtaaatatctgaaag

SEQ ID NO: 471909 - DNA, 33 bp, Homo sapien
acctacctgattaacaaaatttggggacagtgc

SEQ ID NO: 471910 - DNA, 33 bp, Homo sapien
acctacctgattaacagaatttggggacagtgc

SEQ ID NO: 471911 - DNA, 33 bp, Homo sapien
aactcaactcattacactctgaaagtctctttt

SEQ ID NO: 471912 - DNA, 33 bp, Homo sapien
aactcaactcattacattctgaaagtctctttt

SEQ ID NO: 471913 - DNA, 33 bp, Homo sapien
acttggttaagaatcagaaaattagcttcaaaa

SEQ ID NO: 471914 - DNA, 33 bp, Homo sapien
acttggttaagaatcataaaattagcttcaaaa

SEQ ID NO: 471915 - DNA, 33 bp, Homo sapien
agcttctgcaataaacagcactatgccccatgt

SEQ ID NO: 471916 - DNA, 33 bp, Homo sapien
agcttctgcaataaacggcactatgccccatgt

SEQ ID NO: 471917 - DNA, 33 bp, Homo sapien
tagctctgatttatcacaagaagtgcaactgat

SEQ ID NO: 471918 - DNA, 33 bp, Homo sapien
tagctctgatttatcataagaagtgcaactgat

SEQ ID NO: 471919 - DNA, 33 bp, Homo sapien
tccagcagtcacatcaatctgacctctgcctcc

SEQ ID NO: 471920 - DNA, 33 bp, Homo sapien
tccagcagtcacatcagtctgacctctgcctcc

SEQ ID NO: 471921 - DNA, 33 bp, Homo sapien
ttatgaatagagcaaacagttcccaggccaggc

SEQ ID NO: 471922 - DNA, 33 bp, Homo sapien
ttatgaatagagcaaagagttcccaggccaggc

SEQ ID NO: 471923 - DNA, 33 bp, Homo sapien
tcatctcactatttataactcaggtgtttattt

SEQ ID NO: 471924 - DNA, 33 bp, Homo sapien
tcatctcactatttatgactcaggtgtttattt

SEQ ID NO: 471925 - DNA, 33 bp, Homo sapien
ttcttcttcacagtcacgcagggtgtcagttca

SEQ ID NO: 471926 - DNA, 33 bp, Homo sapien
ttcttcttcacagtcatgcagggtgtcagttca

SEQ ID NO: 471927 - DNA, 33 bp, Homo sapien
cttgcagtgacatcaaaaaactgttctgcacaa

SEQ ID NO: 471928 - DNA, 33 bp, Homo sapien
cttgcagtgacatcaacaaactgttctgcacaa

SEQ ID NO: 471929 - DNA, 33 bp, Homo sapien
ggagtgtcaacctcaaatctgtctcccggtgct

SEQ ID NO: 471930 - DNA, 33 bp, Homo sapien
ggagtgtcaacctcaagtctgtctcccggtgct

SEQ ID NO: 471931 - DNA, 33 bp, Homo sapien
ttcaacagtctggagacgtgttttatttctgca

SEQ ID NO: 471932 - DNA, 33 bp, Homo sapien
ttcaacagtctggagatgtgttttatttctgca

SEQ ID NO: 471933 - DNA, 33 bp, Homo sapien
ggagagcaaagagccaaactcagaagtcaaacc

SEQ ID NO: 471934 - DNA, 33 bp, Homo sapien
ggagagcaaagagccagactcagaagtcaaacc

SEQ ID NO: 471935 - DNA, 33 bp, Homo sapien
gaggcagcattatgagcaaaagcattgaagtgc

SEQ ID NO: 471936 - DNA, 33 bp, Homo sapien
gaggcagcattatgagtaaaagcattgaagtgc

SEQ ID NO: 471937 - DNA, 33 bp, Homo sapien
cacatgagtagctgtcaaaagtagatgatgttt

SEQ ID NO: 471938 - DNA, 33 bp, Homo sapien
cacatgagtagctgtcgaaagtagatgatgttt

SEQ ID NO: 471939 - DNA, 33 bp, Homo sapien
tgattgcctcttaaaacttgctgctaggaaaaa

SEQ ID NO: 471940 - DNA, 33 bp, Homo sapien
tgattgcctcttaaaagttgctgctaggaaaaa

SEQ ID NO: 471941 - DNA, 33 bp, Homo sapien
ttctataaaaatgctacgaagagagtattcctt

SEQ ID NO: 471942 - DNA, 33 bp, Homo sapien
ttctataaaaatgctatgaagagagtattcctt

SEQ ID NO: 471943 - DNA, 33 bp, Homo sapien
gttcagtctcagctccaaatcatctctatttag

SEQ ID NO: 471944 - DNA, 33 bp, Homo sapien
gttcagtctcagctccgaatcatctctatttag

SEQ ID NO: 471945 - DNA, 33 bp, Homo sapien
gccatgagctaaggaacgtggacagcctctagg

SEQ ID NO: 471946 - DNA, 33 bp, Homo sapien
gccatgagctaaggaatgtggacagcctctagg

SEQ ID NO: 471947 - DNA, 33 bp, Homo sapien
gaaaaatagcccatgacgctaggctcagacaac

SEQ ID NO: 471948 - DNA, 33 bp, Homo sapien
gaaaaatagcccatgatgctaggctcagacaac

SEQ ID NO: 471949 - DNA, 33 bp, Homo sapien
cacacaccgaagctgaaaattcttaaaaagcca

SEQ ID NO: 471950 - DNA, 33 bp, Homo sapien
cacacaccgaagctgagaattcttaaaaagcca

SEQ ID NO: 471951 - DNA, 33 bp, Homo sapien
aagggaacagagatgaatcaggaccagagtttg

SEQ ID NO: 471952 - DNA, 33 bp, Homo sapien
aagggaacagagatgactcaggaccagagtttg

SEQ ID NO: 471953 - DNA, 33 bp, Homo sapien
tggctgtggccttcaccggtagcttttgagata

SEQ ID NO: 471954 - DNA, 33 bp, Homo sapien
tggctgtggccttcactggtagcttttgagata

SEQ ID NO: 471955 - DNA, 33 bp, Homo sapien
tagagcaaaatcacaacggtcttgccagtaaca

SEQ ID NO: 471956 - DNA, 33 bp, Homo sapien
tagagcaaaatcacaatggtcttgccagtaaca

SEQ ID NO: 471957 - DNA, 33 bp, Homo sapien
tccgtgtaatgtcaacaggtggtgtcagagggt

SEQ ID NO: 471958 - DNA, 33 bp, Homo sapien
tccgtgtaatgtcaacgggtggtgtcagagggt

SEQ ID NO: 471959 - DNA, 33 bp, Homo sapien
gctgggattccaatacaggtcctctttttgcca

SEQ ID NO: 471960 - DNA, 33 bp, Homo sapien
gctgggattccaatacgggtcctctttttgcca

SEQ ID NO: 471961 - DNA, 33 bp, Homo sapien
ccaggagcatcctttcaatttatagttttacct

SEQ ID NO: 471962 - DNA, 33 bp, Homo sapien
ccaggagcatcctttcgatttatagttttacct

SEQ ID NO: 471963 - DNA, 33 bp, Homo sapien
gtctcatgtggataaaacttggactgaacccac

SEQ ID NO: 471964 - DNA, 33 bp, Homo sapien
gtctcatgtggataaaccttggactgaacccac

SEQ ID NO: 471965 - DNA, 33 bp, Homo sapien
atcaaatgactaatccaagacgctttgatcttt

SEQ ID NO: 471966 - DNA, 33 bp, Homo sapien
atcaaatgactaatccgagacgctttgatcttt

SEQ ID NO: 471967 - DNA, 33 bp, Homo sapien
ggtgctaaaggactggcaccaatgtagctttct

SEQ ID NO: 471968 - DNA, 33 bp, Homo sapien
ggtgctaaaggactggtaccaatgtagctttct

SEQ ID NO: 471969 - DNA, 33 bp, Homo sapien
agctggtctggtttcaaatctggactctggcct

SEQ ID NO: 471970 - DNA, 33 bp, Homo sapien
agctggtctggtttcagatctggactctggcct

SEQ ID NO: 471971 - DNA, 33 bp, Homo sapien
cttgacaacatgcaataacacatgataacatta

SEQ ID NO: 471972 - DNA, 33 bp, Homo sapien
cttgacaacatgcaatgacacatgataacatta

SEQ ID NO: 471973 - DNA, 33 bp, Homo sapien
gctcagcaggaacagacaggtgtttctaactct

SEQ ID NO: 471974 - DNA, 33 bp, Homo sapien
gctcagcaggaacagataggtgtttctaactct

SEQ ID NO: 471975 - DNA, 33 bp, Homo sapien
tacgtctctggaaataataatactgacaagcat

SEQ ID NO: 471976 - DNA, 33 bp, Homo sapien
tacgtctctggaaatagtaatactgacaagcat

SEQ ID NO: 471977 - DNA, 33 bp, Homo sapien
gatcttggacaatgtgcataaatttctctgaga

SEQ ID NO: 471978 - DNA, 33 bp, Homo sapien
gatcttggacaatgtgtataaatttctctgaga

SEQ ID NO: 471979 - DNA, 33 bp, Homo sapien
cttatataaggaataaagagacagtatcctact

SEQ ID NO: 471980 - DNA, 33 bp, Homo sapien
cttatataaggaataaggagacagtatcctact

SEQ ID NO: 471981 - DNA, 33 bp, Homo sapien
ttaagaattgtaatacacacataaatgattcag

SEQ ID NO: 471982 - DNA, 33 bp, Homo sapien
ttaagaattgtaatacgcacataaatgattcag

SEQ ID NO: 471983 - DNA, 33 bp, Homo sapien
gattcatgataaccacaatggaaaaacgtatca

SEQ ID NO: 471984 - DNA, 33 bp, Homo sapien
gattcatgataaccacgatggaaaaacgtatca

SEQ ID NO: 471985 - DNA, 33 bp, Homo sapien
ttgcttttctcacatacaaggatatctcctcat

SEQ ID NO: 471986 - DNA, 33 bp, Homo sapien
ttgcttttctcacatagaaggatatctcctcat

SEQ ID NO: 471987 - DNA, 33 bp, Homo sapien
gccagcttgtagtgaacgctgcctggtctgggc

SEQ ID NO: 471988 - DNA, 33 bp, Homo sapien
gccagcttgtagtgaatgctgcctggtctgggc

SEQ ID NO: 471989 - DNA, 33 bp, Homo sapien
aaatggtaactctgaaaccaaatggggtccagc

SEQ ID NO: 471990 - DNA, 33 bp, Homo sapien
aaatggtaactctgaacccaaatggggtccagc

SEQ ID NO: 471991 - DNA, 33 bp, Homo sapien
agatcaggacacaactcaagaagggaatcagtg

SEQ ID NO: 471992 - DNA, 33 bp, Homo sapien
agatcaggacacaactgaagaagggaatcagtg

SEQ ID NO: 471993 - DNA, 33 bp, Homo sapien
gaatggttgaaaacaacgtcaatgatctccagc

SEQ ID NO: 471994 - DNA, 33 bp, Homo sapien
gaatggttgaaaacaatgtcaatgatctccagc

SEQ ID NO: 471995 - DNA, 33 bp, Homo sapien
ttgcattggctgaatccagggaacaccagtaac

SEQ ID NO: 471996 - DNA, 33 bp, Homo sapien
ttgcattggctgaatcgagggaacaccagtaac

SEQ ID NO: 471997 - DNA, 33 bp, Homo sapien
tctacaaatggcaagactaacactccaacagga

SEQ ID NO: 471998 - DNA, 33 bp, Homo sapien
tctacaaatggcaagattaacactccaacagga

SEQ ID NO: 471999 - DNA, 33 bp, Homo sapien
tttgaaccacaaaaaacagattatctgaaatgg

SEQ ID NO: 472000 - DNA, 33 bp, Homo sapien
tttgaaccacaaaaaatagattatctgaaatgg

SEQ ID NO: 472001 - DNA, 33 bp, Homo sapien
tttgattccaatcccactaattcatcctatctg
